United States Patent Application Publication US 2008/0318210 A1 - sequence listing, part 3

SEQ ID NO: 80247 - RNA, 22 nt, Homo sapiens
ugccugauacccucugucucuc

SEQ ID NO: 80248 - RNA, 22 nt, Homo sapiens
uggaacacaucuaaggaagcag

SEQ ID NO: 80249 - RNA, 22 nt, Homo sapiens
uggaagacauuuuggaccuugg

SEQ ID NO: 80250 - RNA, 22 nt, Homo sapiens
uggaagacucaagguggugaau

SEQ ID NO: 80251 - RNA, 20 nt, Homo sapiens
uggaacuuaauugauggaca

SEQ ID NO: 80252 - RNA, 22 nt, Homo sapiens
uggaagacaaguguuagcaugg

SEQ ID NO: 80253 - RNA, 22 nt, Homo sapiens
ugcccguaauuccagcacuuug

SEQ ID NO: 80254 - RNA, 20 nt, Homo sapiens
ugccagugugucaauuuaua

SEQ ID NO: 80255 - RNA, 22 nt, Homo sapiens
ugccauagcaaugguaagcuga

SEQ ID NO: 80256 - RNA, 22 nt, Homo sapiens
ugccauugcacuccagccuggg

SEQ ID NO: 80257 - RNA, 22 nt, Homo sapiens
ugccaggaugaggucaauguuu

SEQ ID NO: 80258 - RNA, 22 nt, Homo sapiens
ugccaguguugccuuucacuag

SEQ ID NO: 80259 - RNA, 22 nt, Homo sapiens
ugccaguauuuuguugaagauu

SEQ ID NO: 80260 - RNA, 22 nt, Homo sapiens
ugcauggauguuugaacacacu

SEQ ID NO: 80261 - RNA, 22 nt, Homo sapiens
ugcauggaggagcuccccgcag

SEQ ID NO: 80262 - RNA, 22 nt, Homo sapiens
uggcaaagugugacgugggggu

SEQ ID NO: 80263 - RNA, 22 nt, Homo sapiens
uggcaagaacgaaauguagggu

SEQ ID NO: 80264 - RNA, 21 nt, Homo sapiens
uggcaacgaggugugcauuau

SEQ ID NO: 80265 - RNA, 22 nt, Homo sapiens
uggauguauacaugcaggucac

SEQ ID NO: 80266 - RNA, 21 nt, Homo sapiens
uggaccccuuccagucaucau

SEQ ID NO: 80267 - RNA, 22 nt, Homo sapiens
uggacacuggagauucgucagu

SEQ ID NO: 80268 - RNA, 22 nt, Homo sapiens
uggacaagauagguucuauauu

SEQ ID NO: 80269 - RNA, 22 nt, Homo sapiens
uggaagcaugcaaucugugggg

SEQ ID NO: 80270 - RNA, 22 nt, Homo sapiens
uggacuguaauagagaacagaa

SEQ ID NO: 80271 - RNA, 22 nt, Homo sapiens
uggacuguaaauuggggacucu

SEQ ID NO: 80272 - RNA, 22 nt, Homo sapiens
uggagcccuaaacuucuaauau

SEQ ID NO: 80273 - RNA, 22 nt, Homo sapiens
uggagcccuaguuccucauaac

SEQ ID NO: 80274 - RNA, 22 nt, Homo sapiens
ugguccacuaacccucaguauc

SEQ ID NO: 80275 - RNA, 22 nt, Homo sapiens
uggucaaaugccaaucuguagu

SEQ ID NO: 80276 - RNA, 22 nt, Homo sapiens
ugggcggagacgugcagccgcc

SEQ ID NO: 80277 - RNA, 22 nt, Homo sapiens
uggcaguuucacauggcucaac

SEQ ID NO: 80278 - RNA, 22 nt, Homo sapiens
uggcauguagucugggaccugg

SEQ ID NO: 80279 - RNA, 22 nt, Homo sapiens
uggccagugucggaggccagga

SEQ ID NO: 80280 - RNA, 22 nt, Homo sapiens
uggcuugauggcacaagguuuc

SEQ ID NO: 80281 - RNA, 22 nt, Homo sapiens
ugagcaagaucuuuauaauuag

SEQ ID NO: 80282 - RNA, 19 nt, Homo sapiens
ugagauuguaugaggagau

SEQ ID NO: 80283 - RNA, 22 nt, Homo sapiens
ugagcacuguacuuuaucaggu

SEQ ID NO: 80284 - RNA, 22 nt, Homo sapiens
ugagcacaggugcgcgguuacu

SEQ ID NO: 80285 - RNA, 22 nt, Homo sapiens
ugagcagaaguuuugauuggcg

SEQ ID NO: 80286 - RNA, 22 nt, Homo sapiens
ugagcgaugggaggaagugaua

SEQ ID NO: 80287 - RNA, 22 nt, Homo sapiens
ugagcuagagaguuuaguguca

SEQ ID NO: 80288 - RNA, 22 nt, Homo sapiens
ugagcuaggucuugcucuguca

SEQ ID NO: 80289 - RNA, 22 nt, Homo sapiens
ugagcacagagccugggguggc

SEQ ID NO: 80290 - RNA, 22 nt, Homo sapiens
ugagcaucucuaaaaggagcaa

SEQ ID NO: 80291 - RNA, 22 nt, Homo sapiens
ugagcagaguuguuucuccuga

SEQ ID NO: 80292 - RNA, 22 nt, Homo sapiens
ugagcagagaucacggcauugu

SEQ ID NO: 80293 - RNA, 22 nt, Homo sapiens
ugagaagugauauagaaguuaa

SEQ ID NO: 80294 - RNA, 22 nt, Homo sapiens
ugagaacauuccucuuccuggc

SEQ ID NO: 80295 - RNA, 22 nt, Homo sapiens
ugagacacuucccagaucccuu

SEQ ID NO: 80296 - RNA, 22 nt, Homo sapiens
ugagacacugaauccggccuga

SEQ ID NO: 80297 - RNA, 22 nt, Homo sapiens
ugagacggagucucgcucuguc

SEQ ID NO: 80298 - RNA, 22 nt, Homo sapiens
ugagacgaagucuugcucuguu

SEQ ID NO: 80299 - RNA, 22 nt, Homo sapiens
ugagacggagucuggcacuguc

SEQ ID NO: 80300 - RNA, 22 nt, Homo sapiens
ugagacggagucucgcucuguu

SEQ ID NO: 80301 - RNA, 22 nt, Homo sapiens
ugagacggagucucgcuguguc

SEQ ID NO: 80302 - RNA, 22 nt, Homo sapiens
ugaguuguagcuauaguuucuu

SEQ ID NO: 80303 - RNA, 22 nt, Homo sapiens
ugaggucuuuauuuagugcuca

SEQ ID NO: 80304 - RNA, 20 nt, Homo sapiens
ugaggucaggaguuacagac

SEQ ID NO: 80305 - RNA, 20 nt, Homo sapiens
ugagcuuguaaacacuguuu

SEQ ID NO: 80306 - RNA, 22 nt, Homo sapiens
ugaggcuagucagaucagauga

SEQ ID NO: 80307 - RNA, 17 nt, Homo sapiens
ugagggaugccugguuc

SEQ ID NO: 80308 - RNA, 22 nt, Homo sapiens
ugagggaugcguacccuaugcc

SEQ ID NO: 80309 - RNA, 22 nt, Homo sapiens
ugcacacucuguaugagaaucu

SEQ ID NO: 80310 - RNA, 22 nt, Homo sapiens
ugcaccacugcacuccaggcug

SEQ ID NO: 80311 - RNA, 22 nt, Homo sapiens
ugcaccacacuccauccugggc

SEQ ID NO: 80312 - RNA, 22 nt, Homo sapiens
ugcaccacuguacuccagucug

SEQ ID NO: 80313 - RNA, 22 nt, Homo sapiens
ugcagcacaguagguuugcaau

SEQ ID NO: 80314 - RNA, 23 nt, Homo sapiens
ugcagcacacugaugggucuuga

SEQ ID NO: 80315 - RNA, 22 nt, Homo sapiens
ugcagagaaacauuuuguauuu

SEQ ID NO: 80316 - RNA, 22 nt, Homo sapiens
ugauguccaguucauagaaacu

SEQ ID NO: 80317 - RNA, 20 nt, Homo sapiens
ugauguccaggcagagguuu

SEQ ID NO: 80318 - RNA, 22 nt, Homo sapiens
ugcaguacugucagacuucuua

SEQ ID NO: 80319 - RNA, 22 nt, Homo sapiens
ugcaguaggcccagcgggaggc

SEQ ID NO: 80320 - RNA, 22 nt, Homo sapiens
ugcaguagugugaucuuggcuc

SEQ ID NO: 80321 - RNA, 21 nt, Homo sapiens
ugcagugugguugcccugcug

SEQ ID NO: 80322 - RNA, 22 nt, Homo sapiens
ugcaguguggcucacgccugua

SEQ ID NO: 80323 - RNA, 22 nt, Homo sapiens
ugcagcacuguucacaauagcc

SEQ ID NO: 80324 - RNA, 18 nt, Homo sapiens
ugcagcaucaguacccag

SEQ ID NO: 80325 - RNA, 22 nt, Homo sapiens
ugcagcauguaggcacguuauu

SEQ ID NO: 80326 - RNA, 23 nt, Homo sapiens
ugcagcuacauguggccaugugc

SEQ ID NO: 80327 - RNA, 18 nt, Homo sapiens
ugcagcuuugugauuggc

SEQ ID NO: 80328 - RNA, 22 nt, Homo sapiens
ugcaggauguucaguaauuucc

SEQ ID NO: 80329 - RNA, 22 nt, Homo sapiens
augucugguagccaccuggagg

SEQ ID NO: 80330 - RNA, 22 nt, Homo sapiens
auguccaugagcacauguauca

SEQ ID NO: 80331 - RNA, 22 nt, Homo sapiens
augguguccuguuuccccagga

SEQ ID NO: 80332 - RNA, 22 nt, Homo sapiens
augggucuccugaauacagcac

SEQ ID NO: 80333 - RNA, 22 nt, Homo sapiens
auggcuuugggcugcucugccc

SEQ ID NO: 80334 - RNA, 22 nt, Homo sapiens
auggcuuuugcccuaaauggau

SEQ ID NO: 80335 - RNA, 22 nt, Homo sapiens
auggcuuucaggacguggcgag

SEQ ID NO: 80336 - RNA, 22 nt, Homo sapiens
auggacagacacuggccuucug

SEQ ID NO: 80337 - RNA, 22 nt, Homo sapiens
auggacauuaaagcgauguaga

SEQ ID NO: 80338 - RNA, 22 nt, Homo sapiens
augccagggagaauuguucaag

SEQ ID NO: 80339 - RNA, 22 nt, Homo sapiens
augagcaaagagaugagacccu

SEQ ID NO: 80340 - RNA, 22 nt, Homo sapiens
augagcagaugcuccugccucu

SEQ ID NO: 80341 - RNA, 22 nt, Homo sapiens
augagcuccucaaggucagaga

SEQ ID NO: 80342 - RNA, 22 nt, Homo sapiens
augagcucauugggugacuggg

SEQ ID NO: 80343 - RNA, 22 nt, Homo sapiens
augaggauagguuucuauuagg

SEQ ID NO: 80344 - RNA, 22 nt, Homo sapiens
augcagagucccagccccuagc

SEQ ID NO: 80345 - RNA, 19 nt, Homo sapiens
augcacgugaaaugcauuu

SEQ ID NO: 80346 - RNA, 22 nt, Homo sapiens
augaaauguaugagucuggguu

SEQ ID NO: 80347 - RNA, 18 nt, Homo sapiens
augaacucaucaguucuu

SEQ ID NO: 80348 - RNA, 19 nt, Homo sapiens
augaacucaucauuucuca

SEQ ID NO: 80349 - RNA, 22 nt, Homo sapiens
augaacucaucaucuagguuuu

SEQ ID NO: 80350 - RNA, 22 nt, Homo sapiens
augaauccauuccugccacaga

SEQ ID NO: 80351 - RNA, 22 nt, Homo sapiens
augagagcuaacuguggguaca

SEQ ID NO: 80352 - RNA, 22 nt, Homo sapiens
augagaacugucaaugagagcu

SEQ ID NO: 80353 - RNA, 22 nt, Homo sapiens
aucagcacugaucauacagcuu

SEQ ID NO: 80354 - RNA, 22 nt, Homo sapiens
auagcagcaccccacuaccuca

SEQ ID NO: 80355 - RNA, 22 nt, Homo sapiens
auagcagcaccucacucuacug

SEQ ID NO: 80356 - RNA, 22 nt, Homo sapiens
auagugcuuuugaaucuuguug

SEQ ID NO: 80357 - RNA, 22 nt, Homo sapiens
auaaaccuacauuuucacuucu

SEQ ID NO: 80358 - RNA, 22 nt, Homo sapiens
auacaagcaguccaacuccaua

SEQ ID NO: 80359 - RNA, 22 nt, Homo sapiens
aguugcaagucuugaguaaaga

SEQ ID NO: 80360 - RNA, 22 nt, Homo sapiens
aguaagucucaagguaggguag

SEQ ID NO: 80361 - RNA, 22 nt, Homo sapiens
agguuguugcaugcuccuuagg

SEQ ID NO: 80362 - RNA, 22 nt, Homo sapiens
aggugguuuuaggcagagacau

SEQ ID NO: 80363 - RNA, 22 nt, Homo sapiens
aggugcugacaggauagguuuc

SEQ ID NO: 80364 - RNA, 22 nt, Homo sapiens
agguaguguuauuugcagcuga

SEQ ID NO: 80365 - RNA, 21 nt, Homo sapiens
aggucaguaagaaugcagcac

SEQ ID NO: 80366 - RNA, 20 nt, Homo sapiens
aggcauguugguuugcgugu

SEQ ID NO: 80367 - RNA, 22 nt, Homo sapiens
aggcauguugcuucgggcuuug

SEQ ID NO: 80368 - RNA, 22 nt, Homo sapiens
aggcauguggcucuguucugac

SEQ ID NO: 80369 - RNA, 22 nt, Homo sapiens
aggcaugguggcacauacaugu

SEQ ID NO: 80370 - RNA, 22 nt, Homo sapiens
agggccuuuguagauguacuca

SEQ ID NO: 80371 - RNA, 22 nt, Homo sapiens
aggcuuuuguuuuggucucagg

SEQ ID NO: 80372 - RNA, 20 nt, Homo sapiens
agguacacugacaugccuuc

SEQ ID NO: 80373 - RNA, 22 nt, Homo sapiens
aggauaguaaugauagagaggc

SEQ ID NO: 80374 - RNA, 22 nt, Homo sapiens
aggcaagcaucuugcucccuuc

SEQ ID NO: 80375 - RNA, 22 nt, Homo sapiens
aggcaacgugcauuucuggugu

SEQ ID NO: 80376 - RNA, 22 nt, Homo sapiens
aggcacacaacccuggaccuga

SEQ ID NO: 80377 - RNA, 22 nt, Homo sapiens
aggagcacaauggucaugugga

SEQ ID NO: 80378 - RNA, 22 nt, Homo sapiens
aggagaucagccucccugcaac

SEQ ID NO: 80379 - RNA, 21 nt, Homo sapiens
aggagcauuguugugguggag

SEQ ID NO: 80380 - RNA, 22 nt, Homo sapiens
aggagcacuggccuuggaguca

SEQ ID NO: 80381 - RNA, 22 nt, Homo sapiens
agcugcacgugguaaauguaaa

SEQ ID NO: 80382 - RNA, 22 nt, Homo sapiens
agcugcacaaauggaugugagg

SEQ ID NO: 80383 - RNA, 22 nt, Homo sapiens
agcugauggucuuguaugaugu

SEQ ID NO: 80384 - RNA, 22 nt, Homo sapiens
agcuggaauuuaagguagauag

SEQ ID NO: 80385 - RNA, 21 nt, Homo sapiens
agcugcguuuaggcauuuucc

SEQ ID NO: 80386 - RNA, 22 nt, Homo sapiens
agcuggacuugauaaaugaaua

SEQ ID NO: 80387 - RNA, 18 nt, Homo sapiens
agcucaguguuugcuuac

SEQ ID NO: 80388 - RNA, 20 nt, Homo sapiens
agcuccauuccugaaggcug

SEQ ID NO: 80389 - RNA, 22 nt, Homo sapiens
agcuaguggucauucaauccuu

SEQ ID NO: 80390 - RNA, 22 nt, Homo sapiens
agcuagcauucauaguuugagg

SEQ ID NO: 80391 - RNA, 22 nt, Homo sapiens
agcuacguuggggaaguucuca

SEQ ID NO: 80392 - RNA, 21 nt, Homo sapiens
aggaagacuaugaucaauugg

SEQ ID NO: 80393 - RNA, 22 nt, Homo sapiens
aggaagguaaacuaacuugccu

SEQ ID NO: 80394 - RNA, 16 nt, Homo sapiens
aggaagacuuagagau

SEQ ID NO: 80395 - RNA, 23 nt, Homo sapiens
agcugguacuagaggcuugcgcc

SEQ ID NO: 80396 - RNA, 22 nt, Homo sapiens
agcugguauuuguuagggaguu

SEQ ID NO: 80397 - RNA, 22 nt, Homo sapiens
agcuuguuuucccauaacuaga

SEQ ID NO: 80398 - RNA, 22 nt, Homo sapiens
agcuggucucaggugcccugcu

SEQ ID NO: 80399 - RNA, 22 nt, Homo sapiens
agagcuaguauuuacggagcau

SEQ ID NO: 80400 - RNA, 22 nt, Homo sapiens
agagcuguguuuuaacuuuuua

SEQ ID NO: 80401 - RNA, 22 nt, Homo sapiens
agagcaccauuuagcaagguga

SEQ ID NO: 80402 - RNA, 18 nt, Homo sapiens
agagcacugaguuuuaga

SEQ ID NO: 80403 - RNA, 22 nt, Homo sapiens
agagcacugcugcaggguucug

SEQ ID NO: 80404 - RNA, 22 nt, Homo sapiens
agaggucuuaucaaacaugcuu

SEQ ID NO: 80405 - RNA, 22 nt, Homo sapiens
agagguuuugcacugguucuuu

SEQ ID NO: 80406 - RNA, 22 nt, Homo sapiens
acuuuguguuacccagcaagga

SEQ ID NO: 80407 - RNA, 22 nt, Homo sapiens
agagaugauuaacauuuuggua

SEQ ID NO: 80408 - RNA, 22 nt, Homo sapiens
acugguguaugggaggucccaa

SEQ ID NO: 80409 - RNA, 22 nt, Homo sapiens
acuguacucuacccugggcaac

SEQ ID NO: 80410 - RNA, 22 nt, Homo sapiens
acugcacuccagccuucgugac

SEQ ID NO: 80411 - RNA, 20 nt, Homo sapiens
acuggcacugguaggugugg

SEQ ID NO: 80412 - RNA, 22 nt, Homo sapiens
acuggcuguuaggaauuaccuc

SEQ ID NO: 80413 - RNA, 22 nt, Homo sapiens
agcaccacauacuacagagaua

SEQ ID NO: 80414 - RNA, 22 nt, Homo sapiens
agcaccacaauuuccugccuaa

SEQ ID NO: 80415 - RNA, 22 nt, Homo sapiens
agcaccaccguugcucuauccc

SEQ ID NO: 80416 - RNA, 22 nt, Homo sapiens
agcaccagaaucugaguuauuc

SEQ ID NO: 80417 - RNA, 23 nt, Homo sapiens
agcaccaccccaggucacaagug

SEQ ID NO: 80418 - RNA, 22 nt, Homo sapiens
agcagcaccaaacagacuaaga

SEQ ID NO: 80419 - RNA, 22 nt, Homo sapiens
agcagauguuuagugagcgccu

SEQ ID NO: 80420 - RNA, 22 nt, Homo sapiens
agcacgaaaccaaauucuguga

SEQ ID NO: 80421 - RNA, 22 nt, Homo sapiens
agcacgauggggucacgaugag

SEQ ID NO: 80422 - RNA, 22 nt, Homo sapiens
agcagagcaguggauuuuguga

SEQ ID NO: 80423 - RNA, 22 nt, Homo sapiens
agcagagcauauucauucgggg

SEQ ID NO: 80424 - RNA, 19 nt, Homo sapiens
agcagaacaaauguguggg

SEQ ID NO: 80425 - RNA, 23 nt, Homo sapiens
agccuguugccuaggcagcucau

SEQ ID NO: 80426 - RNA, 22 nt, Homo sapiens
agcgccacugcacuccagccug

SEQ ID NO: 80427 - RNA, 22 nt, Homo sapiens
agcggcuguuccccuggucuau

SEQ ID NO: 80428 - RNA, 22 nt, Homo sapiens
agcggguuuuagauuucuccug

SEQ ID NO: 80429 - RNA, 22 nt, Homo sapiens
agcccugugauuacuuuuauaa

SEQ ID NO: 80430 - RNA, 22 nt, Homo sapiens
agccgauguugacaccagggga

SEQ ID NO: 80431 - RNA, 21 nt, Homo sapiens
agccaguguuccuuguggcuc

SEQ ID NO: 80432 - RNA, 22 nt, Homo sapiens
agcauggucacuuugggcccca

SEQ ID NO: 80433 - RNA, 22 nt, Homo sapiens
agcagcaugcaaauggacuaau

SEQ ID NO: 80434 - RNA, 22 nt, Homo sapiens
aaugcacauauauuuccuuauu

SEQ ID NO: 80435 - RNA, 22 nt, Homo sapiens
aaugcacuccagccugggcgac

SEQ ID NO: 80436 - RNA, 22 nt, Homo sapiens
aaucucagagauaucugugucc

SEQ ID NO: 80437 - RNA, 22 nt, Homo sapiens
aaucucagcauuuugggcugag

SEQ ID NO: 80438 - RNA, 22 nt, Homo sapiens
aaggaguguggugaucuugggc

SEQ ID NO: 80439 - RNA, 22 nt, Homo sapiens
aagcugguguugcugcucuguu

SEQ ID NO: 80440 - RNA, 22 nt, Homo sapiens
aagcugugucuugucagcuacc

SEQ ID NO: 80441 - RNA, 22 nt, Homo sapiens
aaggcaguggcagaagauguca

SEQ ID NO: 80442 - RNA, 22 nt, Homo sapiens
aaggcaagguggauaaugaagc

SEQ ID NO: 80443 - RNA, 22 nt, Homo sapiens
aagggaaugcgcugccuguguu

SEQ ID NO: 80444 - RNA, 21 nt, Homo sapiens
acaaagcuggagggagacugc

SEQ ID NO: 80445 - RNA, 22 nt, Homo sapiens
aauugugcuuguaggccaggca

SEQ ID NO: 80446 - RNA, 22 nt, Homo sapiens
acaagcacaaaugcauagaugg

SEQ ID NO: 80447 - RNA, 22 nt, Homo sapiens
acaagcacaaauuuaauccugu

SEQ ID NO: 80448 - RNA, 22 nt, Homo sapiens
acaagugaauacaggauucucu

SEQ ID NO: 80449 - RNA, 22 nt, Homo sapiens
acagcacugccaagugacccau

SEQ ID NO: 80450 - RNA, 22 nt, Homo sapiens
acacuguuggugggaguguaaa

SEQ ID NO: 80451 - RNA, 22 nt, Homo sapiens
acacuuucuggagcugcacaua

SEQ ID NO: 80452 - RNA, 22 nt, Homo sapiens
acacuugcuugcaauagccucc

SEQ ID NO: 80453 - RNA, 22 nt, Homo sapiens
acguaguagguuuauaauauua

SEQ ID NO: 80454 - RNA, 22 nt, Homo sapiens
accgaguguucucccgcagcgg

SEQ ID NO: 80455 - RNA, 22 nt, Homo sapiens
accgggauguacuuggcggguu

SEQ ID NO: 80456 - RNA, 22 nt, Homo sapiens
accgggcugagcgcaggccccg

SEQ ID NO: 80457 - RNA, 22 nt, Homo sapiens
acccuguugguggaucagauug

SEQ ID NO: 80458 - RNA, 22 nt, Homo sapiens
accugagauuacaggugcuggc

SEQ ID NO: 80459 - RNA, 22 nt, Homo sapiens
acugcacuccagccugcuggca

SEQ ID NO: 80460 - RNA, 22 nt, Homo sapiens
acugcacuccagccugcugaca

SEQ ID NO: 80461 - RNA, 22 nt, Homo sapiens
acugcacuccagccuggaccac

SEQ ID NO: 80462 - RNA, 22 nt, Homo sapiens
acugcacuccagccuggacgaa

SEQ ID NO: 80463 - RNA, 22 nt, Homo sapiens
acugcacuccagccugugcgua

SEQ ID NO: 80464 - RNA, 22 nt, Homo sapiens
acugcacuccagccuggcggac

SEQ ID NO: 80465 - RNA, 22 nt, Homo sapiens
acugcacuccagccugugagac

SEQ ID NO: 80466 - RNA, 22 nt, Homo sapiens
acuagaugauuauguuccauug

SEQ ID NO: 80467 - RNA, 22 nt, Homo sapiens
acugcacuccagccucgcaaca

SEQ ID NO: 80468 - RNA, 22 nt, Homo sapiens
acugcacuccagccucggggac

SEQ ID NO: 80469 - RNA, 22 nt, Homo sapiens
acugcacuccagccucggcaau

SEQ ID NO: 80470 - RNA, 22 nt, Homo sapiens
acugcacuccagccucggugac

SEQ ID NO: 80471 - RNA, 22 nt, Homo sapiens
acugcacuccagccugccgaca

SEQ ID NO: 80472 - RNA, 22 nt, Homo sapiens
acauggcacugcgggcuucuug

SEQ ID NO: 80473 - RNA, 22 nt, Homo sapiens
acauggcuuaugaauuuggaga

SEQ ID NO: 80474 - RNA, 21 nt, Homo sapiens
acauguacacauguaugcaca

SEQ ID NO: 80475 - RNA, 22 nt, Homo sapiens
acccgugcugaauauguaggug

SEQ ID NO: 80476 - RNA, 22 nt, Homo sapiens
cccagcguucggcauggcugag

SEQ ID NO: 80477 - RNA, 22 nt, Homo sapiens
cccaguguuacgugacagccug

SEQ ID NO: 80478 - RNA, 22 nt, Homo sapiens
ccuggcacugggccccguggcu

SEQ ID NO: 80479 - RNA, 22 nt, Homo sapiens
ccugguguuuugauggucgggu

SEQ ID NO: 80480 - RNA, 22 nt, Homo sapiens
ccuguagcauccaagaagcugc

SEQ ID NO: 80481 - RNA, 22 nt, Homo sapiens
ccuugcacuucccaagugaggc

SEQ ID NO: 80482 - RNA, 22 nt, Homo sapiens
cuagcagcaugagaauggacca

SEQ ID NO: 80483 - RNA, 22 nt, Homo sapiens
cuagcagacaugggcugaacca

SEQ ID NO: 80484 - RNA, 22 nt, Homo sapiens
cuagcagcauaagaaucaccaa

SEQ ID NO: 80485 - RNA, 22 nt, Homo sapiens
cuaggcacugauaguuguauuu

SEQ ID NO: 80486 - RNA, 22 nt, Homo sapiens
cuaggcacgccugggucuccag

SEQ ID NO: 80487 - RNA, 22 nt, Homo sapiens
cucauuggucagacgcgucggu

SEQ ID NO: 80488 - RNA, 22 nt, Homo sapiens
cuccacugagcaggugggaggc

SEQ ID NO: 80489 - RNA, 22 nt, Homo sapiens
cucauuggcuacugaggcuugu

SEQ ID NO: 80490 - RNA, 22 nt, Homo sapiens
cucauggagaacaucugcuagg

SEQ ID NO: 80491 - RNA, 22 nt, Homo sapiens
cuccaggugagguuaagggacu

SEQ ID NO: 80492 - RNA, 22 nt, Homo sapiens
cuccauagucuucgaagaauga

SEQ ID NO: 80493 - RNA, 22 nt, Homo sapiens
cuccuggugauuggagugugaa

SEQ ID NO: 80494 - RNA, 22 nt, Homo sapiens
cuccuugauuagaguauagagu

SEQ ID NO: 80495 - RNA, 22 nt, Homo sapiens
cuccgggugcgucggcgcccug

SEQ ID NO: 80496 - RNA, 22 nt, Homo sapiens
cucgcuccauuucggugaucaa

SEQ ID NO: 80497 - RNA, 22 nt, Homo sapiens
cuauggauuuacuguauagggu

SEQ ID NO: 80498 - RNA, 22 nt, Homo sapiens
cucaguguucccauucuaccuu

SEQ ID NO: 80499 - RNA, 22 nt, Homo sapiens
cucaugcugucuucugggguaa

SEQ ID NO: 80500 - RNA, 22 nt, Homo sapiens
cucauggauggucuggcagcca

SEQ ID NO: 80501 - RNA, 22 nt, Homo sapiens
cucauggagaaccucugcuagg

SEQ ID NO: 80502 - RNA, 22 nt, Homo sapiens
cucaguguuaaggccaccucug

SEQ ID NO: 80503 - RNA, 22 nt, Homo sapiens
cucagugucuggggccccaggg

SEQ ID NO: 80504 - RNA, 20 nt, Homo sapiens
cucagugcacccccauaaaa

SEQ ID NO: 80505 - RNA, 22 nt, Homo sapiens
cauggucaccuuccaaguuauu

SEQ ID NO: 80506 - RNA, 23 nt, Homo sapiens
cauggcuguuaacacuguuugag

SEQ ID NO: 80507 - RNA, 22 nt, Homo sapiens
cagcucauugcagucucgaccu

SEQ ID NO: 80508 - RNA, 22 nt, Homo sapiens
cauggcucuuguuuacucccag

SEQ ID NO: 80509 - RNA, 22 nt, Homo sapiens
cauggcucuuugcugcuaaagu

SEQ ID NO: 80510 - RNA, 20 nt, Homo sapiens
cagcacgcacaugagacugu

SEQ ID NO: 80511 - RNA, 20 nt, Homo sapiens
cagcaaccugcucucuuccu

SEQ ID NO: 80512 - RNA, 22 nt, Homo sapiens
cagcaagucucuaagaguucau

SEQ ID NO: 80513 - RNA, 22 nt, Homo sapiens
cagcagguuuuuaucaguuaag

SEQ ID NO: 80514 - RNA, 22 nt, Homo sapiens
cagccgggugagguggcuuguu

SEQ ID NO: 80515 - RNA, 22 nt, Homo sapiens
cagcgaggucugcgucacauug

SEQ ID NO: 80516 - RNA, 22 nt, Homo sapiens
cauuccacauguaggacaauuu

SEQ ID NO: 80517 - RNA, 22 nt, Homo sapiens
ccagcaccauuuguugaauagg

SEQ ID NO: 80518 - RNA, 22 nt, Homo sapiens
ccaggguuccacgccuggcugu

SEQ ID NO: 80519 - RNA, 22 nt, Homo sapiens
cauugcucuuacagagugagua

SEQ ID NO: 80520 - RNA, 22 nt, Homo sapiens
cauugcaguaagagugggcucu

SEQ ID NO: 80521 - RNA, 22 nt, Homo sapiens
ccaguguuuuugaauuccagga

SEQ ID NO: 80522 - RNA, 22 nt, Homo sapiens
ccaucacgugcaguggccccac

SEQ ID NO: 80523 - RNA, 22 nt, Homo sapiens
ccauggcuauucuguaaggguu

SEQ ID NO: 80524 - RNA, 22 nt, Homo sapiens
cccagaguucuuaaauacugag

SEQ ID NO: 80525 - RNA, 17 nt, Homo sapiens
ccaguuuucccucagug

SEQ ID NO: 80526 - RNA, 22 nt, Homo sapiens
ccagugcugugcaguguaugag

SEQ ID NO: 80527 - RNA, 22 nt, Homo sapiens
ccagugucugacagacacggcg

SEQ ID NO: 80528 - RNA, 22 nt, Homo sapiens
auugcacuccagccuaggcaac

SEQ ID NO: 80529 - RNA, 22 nt, Homo sapiens
auugcacuccacccugggcaac

SEQ ID NO: 80530 - RNA, 22 nt, Homo sapiens
auugcuucugauuuuaaaugag

SEQ ID NO: 80531 - RNA, 22 nt, Homo sapiens
auuggccaaugggacgucagca

SEQ ID NO: 80532 - RNA, 22 nt, Homo sapiens
auuuggguuuuacaucaggcua

SEQ ID NO: 80533 - RNA, 22 nt, Homo sapiens
augugcagauguuacaaauugu

SEQ ID NO: 80534 - RNA, 22 nt, Homo sapiens
augugcacaugcuuacauguga

SEQ ID NO: 80535 - RNA, 22 nt, Homo sapiens
augucuguuugcugagcccggc

SEQ ID NO: 80536 - RNA, 22 nt, Homo sapiens
auucagaggggcagcugucuug

SEQ ID NO: 80537 - RNA, 22 nt, Homo sapiens
caagugcuacagagaaaucuuu

SEQ ID NO: 80538 - RNA, 22 nt, Homo sapiens
auuuugcauugcuguaaaggaa

SEQ ID NO: 80539 - RNA, 22 nt, Homo sapiens
caccgagugacaguagccauca

SEQ ID NO: 80540 - RNA, 22 nt, Homo sapiens
cacccuuagaguuggaaguggg

SEQ ID NO: 80541 - RNA, 22 nt, Homo sapiens
caccgagugugccaucuucuca

SEQ ID NO: 80542 - RNA, 20 nt, Homo sapiens
cagagcaaagcaguccuggc

SEQ ID NO: 80543 - RNA, 22 nt, Homo sapiens
cagauaguuguagguguguggc

SEQ ID NO: 80544 - RNA, 22 nt, Homo sapiens
cacugugcaaccuccaccuccc

SEQ ID NO: 80545 - RNA, 22 nt, Homo sapiens
cacugcauucuccaccucccag

SEQ ID NO: 80546 - RNA, 23 nt, Homo sapiens
cacugggcagcagguguucccag

SEQ ID NO: 80547 - RNA, 17 nt, Homo sapiens
cacugggugcaagagga

SEQ ID NO: 80548 - RNA, 22 nt, Homo sapiens
cagagaacugaguuauuuucuu

SEQ ID NO: 80549 - RNA, 18 nt, Homo sapiens
cacuuggcuuugccccuc

SEQ ID NO: 80550 - RNA, 22 nt, Homo sapiens
cacugcauuacucaugagcaug

SEQ ID NO: 80551 - RNA, 22 nt, Homo sapiens
cacugcgaccucugccuaccgg

SEQ ID NO: 80552 - RNA, 22 nt, Homo sapiens
cacuggacauguugaagcuuuu

SEQ ID NO: 80553 - RNA, 21 nt, Homo sapiens
cacugcacuugccuucugggu

SEQ ID NO: 80554 - RNA, 22 nt, Homo sapiens
cacugcaguaaauugcgucggu

SEQ ID NO: 80555 - RNA, 22 nt, Homo sapiens
cacugcauccuccaccugccag

SEQ ID NO: 80556 - RNA, 22 nt, Homo sapiens
caccugagcgggaugcucgccu

SEQ ID NO: 80557 - RNA, 22 nt, Homo sapiens
cacugcacuccagccuaagagg

SEQ ID NO: 80558 - RNA, 22 nt, Homo sapiens
cacugcacuccagucuggcgac

SEQ ID NO: 80559 - RNA, 22 nt, Homo sapiens
cacugcacuccagucugacgac

SEQ ID NO: 80560 - RNA, 22 nt, Homo sapiens
cacugcacuccagucccgucuc

SEQ ID NO: 80561 - RNA, 18 nt, Homo sapiens
cuggaugucgaguguguu

SEQ ID NO: 80562 - RNA, 22 nt, Homo sapiens
cuggcaccauacacuguuguug

SEQ ID NO: 80563 - RNA, 22 nt, Homo sapiens
cuggcgagacagcuccaucacu

SEQ ID NO: 80564 - RNA, 22 nt, Homo sapiens
cuggcucauuucauuuagcaua

SEQ ID NO: 80565 - RNA, 22 nt, Homo sapiens
cucuuugaggugagcugcccau

SEQ ID NO: 80566 - RNA, 22 nt, Homo sapiens
cugaauguucuauagaagccgc

SEQ ID NO: 80567 - RNA, 22 nt, Homo sapiens
cugaaauguccaucgacugaug

SEQ ID NO: 80568 - RNA, 22 nt, Homo sapiens
cucuuuuguuuagcugagaggg

SEQ ID NO: 80569 - RNA, 22 nt, Homo sapiens
cucuuugcuucuggcaucauug

SEQ ID NO: 80570 - RNA, 19 nt, Homo sapiens
cucuuuggugucucuucuu

SEQ ID NO: 80571 - RNA, 22 nt, Homo sapiens
cuuccugaguccugggcucaca

SEQ ID NO: 80572 - RNA, 22 nt, Homo sapiens
cugugcuugagagaugacacag

SEQ ID NO: 80573 - RNA, 22 nt, Homo sapiens
cuucuugagacuuaggcuuugg

SEQ ID NO: 80574 - RNA, 21 nt, Homo sapiens
cuucuuggggcagggcagggu

SEQ ID NO: 80575 - RNA, 22 nt, Homo sapiens
cuugagcauauucuauauuaaa

SEQ ID NO: 80576 - RNA, 22 nt, Homo sapiens
cugugaacaugggagaaauggc

SEQ ID NO: 80577 - RNA, 22 nt, Homo sapiens
cugugcauucuuaaaucaggaa

SEQ ID NO: 80578 - RNA, 22 nt, Homo sapiens
cugugcaugcgcggagcugaaa

SEQ ID NO: 80579 - RNA, 22 nt, Homo sapiens
gaaacugcauuucuaacaagcu

SEQ ID NO: 80580 - RNA, 22 nt, Homo sapiens
gaaagugcugcaaggccaugca

SEQ ID NO: 80581 - RNA, 22 nt, Homo sapiens
gaaaugcucagggguuuuccag

SEQ ID NO: 80582 - RNA, 18 nt, Homo sapiens
gaagaaguaggcauggca

SEQ ID NO: 80583 - RNA, 22 nt, Homo sapiens
gaacugggguuggguugcgaua

SEQ ID NO: 80584 - RNA, 22 nt, Homo sapiens
gaacccuggaggcggagguugc

SEQ ID NO: 80585 - RNA, 22 nt, Homo sapiens
gaaccagcagacuuugacaggu

SEQ ID NO: 80586 - RNA, 22 nt, Homo sapiens
gaaauguuuuucaugugggcaa

SEQ ID NO: 80587 - RNA, 22 nt, Homo sapiens
cuuggacaccucaugcccaccu

SEQ ID NO: 80588 - RNA, 22 nt, Homo sapiens
cuuggcacugcucacccuccuu

SEQ ID NO: 80589 - RNA, 22 nt, Homo sapiens
gaaggugcuuggugaaugcauu

SEQ ID NO: 80590 - RNA, 22 nt, Homo sapiens
gaagugcaguggcacagucaug

SEQ ID NO: 80591 - RNA, 22 nt, Homo sapiens
gacauguuucucucuguuuacu

SEQ ID NO: 80592 - RNA, 22 nt, Homo sapiens
gacauguuuucaagauuuauaa

SEQ ID NO: 80593 - RNA, 22 nt, Homo sapiens
gacauguuuucauguauuugga

SEQ ID NO: 80594 - RNA, 22 nt, Homo sapiens
gacauguuuacaguguugagag

SEQ ID NO: 80595 - RNA, 20 nt, Homo sapiens
gacauguuuuguggccuaac

SEQ ID NO: 80596 - RNA, 21 nt, Homo sapiens
gaccacagcagggaaugucag

SEQ ID NO: 80597 - RNA, 22 nt, Homo sapiens
gacccucuagauggaagcacug

SEQ ID NO: 80598 - RNA, 19 nt, Homo sapiens
gccaccuggugcguguucu

SEQ ID NO: 80599 - RNA, 22 nt, Homo sapiens
gccauugcacuccagcuugggc

SEQ ID NO: 80600 - RNA, 22 nt, Homo sapiens
gccauugcacuccgcccugggc

SEQ ID NO: 80601 - RNA, 22 nt, Homo sapiens
gccauugcacuccagccucggg

SEQ ID NO: 80602 - RNA, 22 nt, Homo sapiens
gccagugugaugugaucauggc

SEQ ID NO: 80603 - RNA, 22 nt, Homo sapiens
gccaguguguguuguucuccgc

SEQ ID NO: 80604 - RNA, 22 nt, Homo sapiens
gcaggcaugacauuucacucuu

SEQ ID NO: 80605 - RNA, 22 nt, Homo sapiens
gcagugcuggagcccccgugug

SEQ ID NO: 80606 - RNA, 22 nt, Homo sapiens
gcaguguucaaaucaugcccau

SEQ ID NO: 80607 - RNA, 22 nt, Homo sapiens
gaugauguugaauguucucacc

SEQ ID NO: 80608 - RNA, 22 nt, Homo sapiens
gaugccuuuuuguccucaguua

SEQ ID NO: 80609 - RNA, 22 nt, Homo sapiens
gaugauguuggaaacuuggugc

SEQ ID NO: 80610 - RNA, 20 nt, Homo sapiens
gcagcaccauauuucuaaga

SEQ ID NO: 80611 - RNA, 19 nt, Homo sapiens
gcagagaugugguagcuug

SEQ ID NO: 80612 - RNA, 22 nt, Homo sapiens
gcagaguauagagggcugggcc

SEQ ID NO: 80613 - RNA, 22 nt, Homo sapiens
gcaaagaaugcagauuugccuc

SEQ ID NO: 80614 - RNA, 21 nt, Homo sapiens
gcaaaguggcuaccuugcucc

SEQ ID NO: 80615 - RNA, 22 nt, Homo sapiens
gagcacauguggagagucuggg

SEQ ID NO: 80616 - RNA, 22 nt, Homo sapiens
gacugacgaccgcucuaccugc

SEQ ID NO: 80617 - RNA, 22 nt, Homo sapiens
gacucgugagguccccaggagg

SEQ ID NO: 80618 - RNA, 19 nt, Homo sapiens
gacuccagaguugugugcu

SEQ ID NO: 80619 - RNA, 22 nt, Homo sapiens
gagcuacauggauagucugcau

SEQ ID NO: 80620 - RNA, 22 nt, Homo sapiens
gagcuagggucaugcuacugca

SEQ ID NO: 80621 - RNA, 22 nt, Homo sapiens
gagccuguaggaggagaggugg

SEQ ID NO: 80622 - RNA, 22 nt, Homo sapiens
gagcuacacugauucauuuguu

SEQ ID NO: 80623 - RNA, 22 nt, Homo sapiens
gagcaguugagagugcuggcca

SEQ ID NO: 80624 - RNA, 22 nt, Homo sapiens
gaggcagucugacccuuagcag

SEQ ID NO: 80625 - RNA, 22 nt, Homo sapiens
gaggagucagacugugcaaggu

SEQ ID NO: 80626 - RNA, 22 nt, Homo sapiens
gaggaaguuuacaaagcaucug

SEQ ID NO: 80627 - RNA, 22 nt, Homo sapiens
gagcuuguggucuucguguuau

SEQ ID NO: 80628 - RNA, 22 nt, Homo sapiens
gagcuuguagugugaaugguau

SEQ ID NO: 80629 - RNA, 22 nt, Homo sapiens
gagcucguuuuugcugacucuu

SEQ ID NO: 80630 - RNA, 22 nt, Homo sapiens
gagcucaccuuaccucuggagc

SEQ ID NO: 80631 - RNA, 22 nt, Homo sapiens
gagguagaauguuuuucagcug

SEQ ID NO: 80632 - RNA, 22 nt, Homo sapiens
gagguaguuaaugcauucacua

SEQ ID NO: 80633 - RNA, 22 nt, Homo sapiens
uugugucccugcggcugaggag

SEQ ID NO: 80634 - RNA, 22 nt, Homo sapiens
uuuaacauuggaugagaucguc

SEQ ID NO: 80635 - RNA, 23 nt, Homo sapiens
uuucaguaguuguauccuguugc

SEQ ID NO: 80636 - RNA, 22 nt, Homo sapiens
uuuagcagcaaagagcuguguu

SEQ ID NO: 80637 - RNA, 22 nt, Homo sapiens
uugugcacauguacccuagaac

SEQ ID NO: 80638 - RNA, 22 nt, Homo sapiens
uugugacacagcugggccuaua

SEQ ID NO: 80639 - RNA, 22 nt, Homo sapiens
uugugauggugcauacugagcu

SEQ ID NO: 80640 - RNA, 22 nt, Homo sapiens
uugugaguggugccgcaauaaa

SEQ ID NO: 80641 - RNA, 22 nt, Homo sapiens
uugugcuugauuugccuagcug

SEQ ID NO: 80642 - RNA, 22 nt, Homo sapiens
uugugcuucaucaccuagcaga

SEQ ID NO: 80643 - RNA, 22 nt, Homo sapiens
uugugcuccuaugagaaucuaa

SEQ ID NO: 80644 - RNA, 22 nt, Homo sapiens
uugugcuccugugagaaucuag

SEQ ID NO: 80645 - RNA, 21 nt, Homo sapiens
uugugccaaacccuggaggga

SEQ ID NO: 80646 - RNA, 22 nt, Homo sapiens
uugugccccuucucagucgggc

SEQ ID NO: 80647 - RNA, 21 nt, Homo sapiens
uugucuagagaaauauaucuc

SEQ ID NO: 80648 - RNA, 22 nt, Homo sapiens
uuguccuugagauaguuugcug

SEQ ID NO: 80649 - RNA, 22 nt, Homo sapiens
uuguccacugcuagccucugca

SEQ ID NO: 80650 - RNA, 22 nt, Homo sapiens
uuguccuugagauaguuugcag

SEQ ID NO: 80651 - RNA, 22 nt, Homo sapiens
uugaucacuguacuaugacuau

SEQ ID NO: 80652 - RNA, 22 nt, Homo sapiens
uugauaguuuaauuaaugcuag

SEQ ID NO: 80653 - RNA, 22 nt, Homo sapiens
uuggauuauaaacugagauuug

SEQ ID NO: 80654 - RNA, 22 nt, Homo sapiens
uuggacugugagguuucguggg

SEQ ID NO: 80655 - RNA, 22 nt, Homo sapiens
uuggcuguguuuauaugcugga

SEQ ID NO: 80656 - RNA, 22 nt, Homo sapiens
uuggcuguguuccucaaggagu

SEQ ID NO: 80657 - RNA, 22 nt, Homo sapiens
uugggagugucucuggacugca

SEQ ID NO: 80658 - RNA, 22 nt, Homo sapiens
uuguacucucaccguaucccag

SEQ ID NO: 80659 - RNA, 22 nt, Homo sapiens
uuguaccacagggcaugaagug

SEQ ID NO: 80660 - RNA, 22 nt, Homo sapiens
uugguaaaaugaccacagacau

SEQ ID NO: 80661 - RNA, 22 nt, Homo sapiens
aagauagcuaagcuucuucuaa

SEQ ID NO: 80662 - RNA, 22 nt, Homo sapiens
aagagugucuuugugcuggccc

SEQ ID NO: 80663 - RNA, 22 nt, Homo sapiens
aagaucauucagggaaggcuga

SEQ ID NO: 80664 - RNA, 22 nt, Homo sapiens
aagagugcucgugggacucagc

SEQ ID NO: 80665 - RNA, 22 nt, Homo sapiens
aagcaacacaucugccccgguu

SEQ ID NO: 80666 - RNA, 22 nt, Homo sapiens
aagaugcagaagcccagauguu

SEQ ID NO: 80667 - RNA, 18 nt, Homo sapiens
aagagcucagcacagguu

SEQ ID NO: 80668 - RNA, 22 nt, Homo sapiens
aagcuccauuucugccaugaga

SEQ ID NO: 80669 - RNA, 21 nt, Homo sapiens
aagcaugguguaucuuuccau

SEQ ID NO: 80670 - RNA, 20 nt, Homo sapiens
aagcauggguuuuaggguca

SEQ ID NO: 80671 - RNA, 22 nt, Homo sapiens
aagcuggcuuucauugagugcu

SEQ ID NO: 80672 - RNA, 22 nt, Homo sapiens
aagcugccaggcaugguggcug

SEQ ID NO: 80673 - RNA, 20 nt, Homo sapiens
aagcaagcauuugcaaucau

SEQ ID NO: 80674 - RNA, 21 nt, Homo sapiens
aagcacauugaguguguguga

SEQ ID NO: 80675 - RNA, 22 nt, Homo sapiens
aagcacccuuugucuggacaug

SEQ ID NO: 80676 - RNA, 22 nt, Homo sapiens
aagcaccguugccuccccugca

SEQ ID NO: 80677 - RNA, 22 nt, Homo sapiens
aagcaguguggacuaaugggaa

SEQ ID NO: 80678 - RNA, 22 nt, Homo sapiens
aagagcgcugauaacauguuug

SEQ ID NO: 80679 - RNA, 22 nt, Homo sapiens
uuuugguuuuauccagggucuc

SEQ ID NO: 80680 - RNA, 22 nt, Homo sapiens
aagagaacugacaguaccuggg

SEQ ID NO: 80681 - RNA, 21 nt, Homo sapiens
aagaaagcuggacuugccgcu

SEQ ID NO: 80682 - RNA, 19 nt, Homo sapiens
aacuggugugagaugguau

SEQ ID NO: 80683 - RNA, 22 nt, Homo sapiens
aacugcacauauuuguaugggu

SEQ ID NO: 80684 - RNA, 22 nt, Homo sapiens
aacugcucuaauguggugggag

SEQ ID NO: 80685 - RNA, 22 nt, Homo sapiens
aacugcucuuaccagauggguc

SEQ ID NO: 80686 - RNA, 22 nt, Homo sapiens
uuucaucaagcacagaguagau

SEQ ID NO: 80687 - RNA, 22 nt, Homo sapiens
uuucccagugguacaguuuaua

SEQ ID NO: 80688 - RNA, 22 nt, Homo sapiens
uuuugcaguuacagagagugag

SEQ ID NO: 80689 - RNA, 22 nt, Homo sapiens
uuuguagcucacucugagcuga

SEQ ID NO: 80690 - RNA, 22 nt, Homo sapiens
uuuuggucuccaguuucugcug

SEQ ID NO: 80691 - RNA, 22 nt, Homo sapiens
uuuugguuaggauggguggcau

SEQ ID NO: 80692 - RNA, 22 nt, Homo sapiens
uguucuugaguugggaguacaa

SEQ ID NO: 80693 - RNA, 22 nt, Homo sapiens
uguucuggagaggcaggccaca

SEQ ID NO: 80694 - RNA, 19 nt, Homo sapiens
ugugacugguugucucgcu

SEQ ID NO: 80695 - RNA, 22 nt, Homo sapiens
ugugagaaaugcagaaucucag

SEQ ID NO: 80696 - RNA, 19 nt, Homo sapiens
ugugagcauuagcauuuag

SEQ ID NO: 80697 - RNA, 23 nt, Homo sapiens
ugugacacuuccgucaguucauu

SEQ ID NO: 80698 - RNA, 22 nt, Homo sapiens
ugugacacugaauggcagaacu

SEQ ID NO: 80699 - RNA, 22 nt, Homo sapiens
ugugacucugcauuuuggguuc

SEQ ID NO: 80700 - RNA, 19 nt, Homo sapiens
ugugaagaaaugcugcaag

SEQ ID NO: 80701 - RNA, 22 nt, Homo sapiens
ugugaacagcuccaaaugugga

SEQ ID NO: 80702 - RNA, 21 nt, Homo sapiens
ugugaacauguuggguggcau

SEQ ID NO: 80703 - RNA, 22 nt, Homo sapiens
ugugaacugagcauuaacuaca

SEQ ID NO: 80704 - RNA, 22 nt, Homo sapiens
uguugcacucuagccugggcaa

SEQ ID NO: 80705 - RNA, 20 nt, Homo sapiens
uguugcacucuagccugggu

SEQ ID NO: 80706 - RNA, 22 nt, Homo sapiens
uguuggcauugcugcugacccu

SEQ ID NO: 80707 - RNA, 22 nt, Homo sapiens
uguuugcuguguggaguagcag

SEQ ID NO: 80708 - RNA, 22 nt, Homo sapiens
uuagguagucucugucagaggg

SEQ ID NO: 80709 - RNA, 22 nt, Homo sapiens
uuaugugccuuuuugccauuca

SEQ ID NO: 80710 - RNA, 22 nt, Homo sapiens
uuagaaaguagaaaagcugguu

SEQ ID NO: 80711 - RNA, 22 nt, Homo sapiens
uuagagcacugaucugcucuuu

SEQ ID NO: 80712 - RNA, 22 nt, Homo sapiens
uuagcagcucuggugacaaggu

SEQ ID NO: 80713 - RNA, 22 nt, Homo sapiens
uuagcagcucuaauaacugcua

SEQ ID NO: 80714 - RNA, 22 nt, Homo sapiens
uuagcagugugaaaaaagacua

SEQ ID NO: 80715 - RNA, 22 nt, Homo sapiens
uuagcaguggauggguggagaa

SEQ ID NO: 80716 - RNA, 22 nt, Homo sapiens
uuagcagugucccacuccuugg

SEQ ID NO: 80717 - RNA, 22 nt, Homo sapiens
uugagauggagucuugcgcugu

SEQ ID NO: 80718 - RNA, 22 nt, Homo sapiens
uugagauggagucucacugugu

SEQ ID NO: 80719 - RNA, 22 nt, Homo sapiens
uugagacugaacauuuguguac

SEQ ID NO: 80720 - RNA, 22 nt, Homo sapiens
uugacauaguuucugaaauaga

SEQ ID NO: 80721 - RNA, 22 nt, Homo sapiens
uugacagagaaaagugugacuu

SEQ ID NO: 80722 - RNA, 20 nt, Homo sapiens
uugaguauugccagggaggc

SEQ ID NO: 80723 - RNA, 20 nt, Homo sapiens
uugaggucaggaguuuggga

SEQ ID NO: 80724 - RNA, 22 nt, Homo sapiens
uugaggucuucaggaucaggcu

SEQ ID NO: 80725 - RNA, 22 nt, Homo sapiens
uugagguauaaagguagguugu

SEQ ID NO: 80726 - RNA, 22 nt, Homo sapiens
uugagguguauuguacagcaca

SEQ ID NO: 80727 - RNA, 22 nt, Homo sapiens
uugaggugggaggaucacuuga

SEQ ID NO: 80728 - RNA, 22 nt, Homo sapiens
uugagguagcuuugauggaggu

SEQ ID NO: 80729 - RNA, 22 nt, Homo sapiens
uugaggacuggaacacaggucu

SEQ ID NO: 80730 - RNA, 22 nt, Homo sapiens
uugagcacaggaguuuugagac

SEQ ID NO: 80731 - RNA, 22 nt, Homo sapiens
uugagcaacauagugagacugu

SEQ ID NO: 80732 - RNA, 22 nt, Homo sapiens
uugagcuuuuuacuuguccaau

SEQ ID NO: 80733 - RNA, 22 nt, Homo sapiens
uugagcucuucuagcaauucua

SEQ ID NO: 80734 - RNA, 22 nt, Homo sapiens
uuccacgugaaguauucuaaag

SEQ ID NO: 80735 - RNA, 22 nt, Homo sapiens
uuccacagggauuugcauugau

SEQ ID NO: 80736 - RNA, 22 nt, Homo sapiens
uuccacaggguugaacuaguuu

SEQ ID NO: 80737 - RNA, 22 nt, Homo sapiens
uuccaguguuugacucaccuuu

SEQ ID NO: 80738 - RNA, 22 nt, Homo sapiens
uuccaguauuugggcaagcgca

SEQ ID NO: 80739 - RNA, 20 nt, Homo sapiens
uuccagcacauuagggaagc

SEQ ID NO: 80740 - RNA, 22 nt, Homo sapiens
uucagauugcauaccgaaagua

SEQ ID NO: 80741 - RNA, 21 nt, Homo sapiens
uucacuggucuauuucccuuu

SEQ ID NO: 80742 - RNA, 22 nt, Homo sapiens
uucacgguguucacgggggucc

SEQ ID NO: 80743 - RNA, 23 nt, Homo sapiens
uucaccguguuggccaggcuggu

SEQ ID NO: 80744 - RNA, 22 nt, Homo sapiens
uucaccggggaccccuggcugu

SEQ ID NO: 80745 - RNA, 19 nt, Homo sapiens
uucuuuguugugggggcug

SEQ ID NO: 80746 - RNA, 22 nt, Homo sapiens
uucuuugguacaagggccgacc

SEQ ID NO: 80747 - RNA, 21 nt, Homo sapiens
uucuuugcucaguguuagagu

SEQ ID NO: 80748 - RNA, 22 nt, Homo sapiens
uugaagacuaauuuagauaaug

SEQ ID NO: 80749 - RNA, 22 nt, Homo sapiens
uucuauggucacagaugcuuga

SEQ ID NO: 80750 - RNA, 22 nt, Homo sapiens
uucgucaugagacagaugcuga

SEQ ID NO: 80751 - RNA, 22 nt, Homo sapiens
uuccuugugacuaguagugacc

SEQ ID NO: 80752 - RNA, 22 nt, Homo sapiens
uuccuugagaaaggcacaaguu

SEQ ID NO: 80753 - RNA, 22 nt, Homo sapiens
uuccuuguuuauuuacaggagg

SEQ ID NO: 80754 - RNA, 22 nt, Homo sapiens
uuccuuguagcaaaugcgauga

SEQ ID NO: 80755 - RNA, 22 nt, Homo sapiens
uuccugugacuguguggcaccc

SEQ ID NO: 80756 - RNA, 22 nt, Homo sapiens
uuccugagagggcugggugcag

SEQ ID NO: 80757 - RNA, 20 nt, Homo sapiens
ugacuggauacccuuuggcu

SEQ ID NO: 80758 - RNA, 22 nt, Homo sapiens
ugacuccagagacugugcuguc

SEQ ID NO: 80759 - RNA, 20 nt, Homo sapiens
ugagaacauguggcauuugg

SEQ ID NO: 80760 - RNA, 19 nt, Homo sapiens
ugagaacaugugguauuug

SEQ ID NO: 80761 - RNA, 20 nt, Homo sapiens
ugagaacaugugguauuugg

SEQ ID NO: 80762 - RNA, 21 nt, Homo sapiens
ugagaacaacaggucaagcag

SEQ ID NO: 80763 - RNA, 22 nt, Homo sapiens
ugagaacagcagcuugggacac

SEQ ID NO: 80764 - RNA, 22 nt, Homo sapiens
ugagaacaugugauauuuggug

SEQ ID NO: 80765 - RNA, 16 nt, Homo sapiens
ugagaacaugcagcau

SEQ ID NO: 80766 - RNA, 16 nt, Homo sapiens
ugagaacaugugacau

SEQ ID NO: 80767 - RNA, 22 nt, Homo sapiens
ugacuacacacaauuugucaag

SEQ ID NO: 80768 - RNA, 22 nt, Homo sapiens
ugacagucaccaggacccacag

SEQ ID NO: 80769 - RNA, 23 nt, Homo sapiens
ugacagucucccgauggcuaggc

SEQ ID NO: 80770 - RNA, 23 nt, Homo sapiens
ugacagugcuugaaauugcucuu

SEQ ID NO: 80771 - RNA, 22 nt, Homo sapiens
ugacagugugagacuuugucuc

SEQ ID NO: 80772 - RNA, 22 nt, Homo sapiens
ucuuuguucaggagccaacucc

SEQ ID NO: 80773 - RNA, 22 nt, Homo sapiens
ucuuuguuggaguccaaggaua

SEQ ID NO: 80774 - RNA, 22 nt, Homo sapiens
ucuuuuguaaaaugaggaggug

SEQ ID NO: 80775 - RNA, 20 nt, Homo sapiens
ugaaacacauggacuggggu

SEQ ID NO: 80776 - RNA, 22 nt, Homo sapiens
ucuuuugguuucuagaggccgc

SEQ ID NO: 80777 - RNA, 20 nt, Homo sapiens
ugacaagugagaauuauggg

SEQ ID NO: 80778 - RNA, 22 nt, Homo sapiens
ugacaagcucccucugcaccuu

SEQ ID NO: 80779 - RNA, 22 nt, Homo sapiens
ugacaagggaaaugcaaaaugu

SEQ ID NO: 80780 - RNA, 22 nt, Homo sapiens
ugaaaugguuaugugaggagau

SEQ ID NO: 80781 - RNA, 22 nt, Homo sapiens
ugaaaugcagaacuuuaggucu

SEQ ID NO: 80782 - RNA, 22 nt, Homo sapiens
ugagaacggauacuaagggcug

SEQ ID NO: 80783 - RNA, 22 nt, Homo sapiens
ugagaacuagagaacaagguga

SEQ ID NO: 80784 - RNA, 22 nt, Homo sapiens
ugagaacucaugggucugcugg

SEQ ID NO: 80785 - RNA, 22 nt, Homo sapiens
ugagaacugcagggagcugcau

SEQ ID NO: 80786 - RNA, 22 nt, Homo sapiens
ugagaagaugaacuccuugguc

SEQ ID NO: 80787 - RNA, 22 nt, Homo sapiens
ugagaagacaucuuugcuuugu

SEQ ID NO: 80788 - RNA, 22 nt, Homo sapiens
ugagaagacaucagcuuucgga

SEQ ID NO: 80789 - RNA, 22 nt, Homo sapiens
ugagaccugaucuugguacugc

SEQ ID NO: 80790 - RNA, 22 nt, Homo sapiens
ugagaccuuucauuucucagug

SEQ ID NO: 80791 - RNA, 22 nt, Homo sapiens
ugagacgaagucucguucugua

SEQ ID NO: 80792 - RNA, 22 nt, Homo sapiens
ugagacugagucuugcucuugu

SEQ ID NO: 80793 - RNA, 22 nt, Homo sapiens
ugagacggaguuuugcucuugu

SEQ ID NO: 80794 - RNA, 22 nt, Homo sapiens
ugagacugaguuuugccuuugu

SEQ ID NO: 80795 - RNA, 22 nt, Homo sapiens
ugagagacaguuuguuaaaauu

SEQ ID NO: 80796 - RNA, 22 nt, Homo sapiens
ugagagcuuuuuugccugguga

SEQ ID NO: 80797 - RNA, 19 nt, Homo sapiens
ugagagcacaacugaacaa

SEQ ID NO: 80798 - RNA, 22 nt, Homo sapiens
ugagaucacgccacugcacucc

SEQ ID NO: 80799 - RNA, 22 nt, Homo sapiens
ugagauaggaucuugcucuguu

SEQ ID NO: 80800 - RNA, 22 nt, Homo sapiens
ugagaugaggucucgcucuguc

SEQ ID NO: 80801 - RNA, 22 nt, Homo sapiens
ugagggaugccugguuuguuuu

SEQ ID NO: 80802 - RNA, 22 nt, Homo sapiens
ugagggcguauccuucauuaag

SEQ ID NO: 80803 - RNA, 22 nt, Homo sapiens
ucacugaaaccuccgccuucug

SEQ ID NO: 80804 - RNA, 20 nt, Homo sapiens
ucacuauggagcucuuucuu

SEQ ID NO: 80805 - RNA, 22 nt, Homo sapiens
ucacugcgaccuccgccucccg

SEQ ID NO: 80806 - RNA, 22 nt, Homo sapiens
ucacugcgaccucugccucccg

SEQ ID NO: 80807 - RNA, 22 nt, Homo sapiens
ucacugcacucuccgccuugcg

SEQ ID NO: 80808 - RNA, 22 nt, Homo sapiens
ucacugaaacuguccuggguua

SEQ ID NO: 80809 - RNA, 22 nt, Homo sapiens
ucagaugaugucccuguucuaa

SEQ ID NO: 80810 - RNA, 22 nt, Homo sapiens
ucagaucacuggcgcuggcgga

SEQ ID NO: 80811 - RNA, 22 nt, Homo sapiens
ucgcagugcacucuuuuagcuu

SEQ ID NO: 80812 - RNA, 22 nt, Homo sapiens
ucgcagcucacuggagccucga

SEQ ID NO: 80813 - RNA, 22 nt, Homo sapiens
uccucugaacuccagacccaua

SEQ ID NO: 80814 - RNA, 22 nt, Homo sapiens
ucgugcugugucaucuuguggc

SEQ ID NO: 80815 - RNA, 22 nt, Homo sapiens
ucgugccacugcacuccagccu

SEQ ID NO: 80816 - RNA, 22 nt, Homo sapiens
ucggcucagugcaagcucugcc

SEQ ID NO: 80817 - RNA, 22 nt, Homo sapiens
ucgguacuugagagagacacag

SEQ ID NO: 80818 - RNA, 20 nt, Homo sapiens
ucuaccuguagguaauuggu

SEQ ID NO: 80819 - RNA, 22 nt, Homo sapiens
ucuauggauaaaaugcccucau

SEQ ID NO: 80820 - RNA, 22 nt, Homo sapiens
ucucugagaccacuccaaacuc

SEQ ID NO: 80821 - RNA, 21 nt, Homo sapiens
ucucucaaccaggaagugggc

SEQ ID NO: 80822 - RNA, 22 nt, Homo sapiens
ucuggcacugaugugggaugcu

SEQ ID NO: 80823 - RNA, 23 nt, Homo sapiens
ucuggaucauucguagugccagc

SEQ ID NO: 80824 - RNA, 20 nt, Homo sapiens
ucuggccccucuaaaucuca

SEQ ID NO: 80825 - RNA, 22 nt, Homo sapiens
ucugacacuucugcagaauuga

SEQ ID NO: 80826 - RNA, 22 nt, Homo sapiens
ucugacucuggagucucagguu

SEQ ID NO: 80827 - RNA, 19 nt, Homo sapiens
ucugacagccccagucaac

SEQ ID NO: 80828 - RNA, 22 nt, Homo sapiens
ucugagguuacugcuuuguaga

SEQ ID NO: 80829 - RNA, 22 nt, Homo sapiens
ucuguggucagaguccuuggcc

SEQ ID NO: 80830 - RNA, 19 nt, Homo sapiens
ucugugcuugucccccugu

SEQ ID NO: 80831 - RNA, 22 nt, Homo sapiens
ucuguguugaucacacugggag

SEQ ID NO: 80832 - RNA, 22 nt, Homo sapiens
ucuggcuuuagcaugugggaag

SEQ ID NO: 80833 - RNA, 22 nt, Homo sapiens
ucuggcuccacacuuuauuaac

SEQ ID NO: 80834 - RNA, 15 nt, Homo sapiens
ucuggcucugucacu

SEQ ID NO: 80835 - RNA, 22 nt, Homo sapiens
aacauguuuagcagauaccugu

SEQ ID NO: 80836 - RNA, 22 nt, Homo sapiens
ucuucagucauauuggccugga

SEQ ID NO: 80837 - RNA, 22 nt, Homo sapiens
ucuugggugaguuugugaauaa

SEQ ID NO: 80838 - RNA, 20 nt, Homo sapiens
ucuugggaauguagccuagg

SEQ ID NO: 80839 - RNA, 22 nt, Homo sapiens
ucuugccacuucauccccuuuc

SEQ ID NO: 80840 - RNA, 22 nt, Homo sapiens
ucuuugguaugugcaugugcuu

SEQ ID NO: 80841 - RNA, 22 nt, Homo sapiens
ucuuggguuugccuugcugcug

SEQ ID NO: 80842 - RNA, 21 nt, Homo sapiens
ucuugguauguauuuaggagg

SEQ ID NO: 80843 - RNA, 22 nt, Homo sapiens
ucuuugguucugugcagccuau

SEQ ID NO: 80844 - RNA, 22 nt, Homo sapiens
ucuuuggugaauggucauccag

SEQ ID NO: 80845 - RNA, 22 nt, Homo sapiens
ucuuugguuucugucucuguaa

SEQ ID NO: 80846 - RNA, 22 nt, Homo sapiens
ugguuguuuuaaaugucgucug

SEQ ID NO: 80847 - RNA, 22 nt, Homo sapiens
uguaaagaaagcuguuguugua

SEQ ID NO: 80848 - RNA, 22 nt, Homo sapiens
ugggccgcugcaggaugguccc

SEQ ID NO: 80849 - RNA, 22 nt, Homo sapiens
ugguugaucccaucacccaggu

SEQ ID NO: 80850 - RNA, 20 nt, Homo sapiens
uggugucuuggaaagagcuc

SEQ ID NO: 80851 - RNA, 22 nt, Homo sapiens
uggcggagacauggacuucaga

SEQ ID NO: 80852 - RNA, 22 nt, Homo sapiens
uggcccccucccaaaucucaua

SEQ ID NO: 80853 - RNA, 23 nt, Homo sapiens
uggcgagacagaaaacuuuuaga

SEQ ID NO: 80854 - RNA, 22 nt, Homo sapiens
uggcgagcugaaauuauaaaag

SEQ ID NO: 80855 - RNA, 22 nt, Homo sapiens
uggcaugggguaguagcgcugg

SEQ ID NO: 80856 - RNA, 22 nt, Homo sapiens
uggcaugauauauauucguuug

SEQ ID NO: 80857 - RNA, 22 nt, Homo sapiens
uggagugucaguuuccagaguu

SEQ ID NO: 80858 - RNA, 22 nt, Homo sapiens
uggaguguguugcagaugaagg

SEQ ID NO: 80859 - RNA, 22 nt, Homo sapiens
uggaugacauccuuguaugcag

SEQ ID NO: 80860 - RNA, 22 nt, Homo sapiens
uguccuguaggaggcagaacaa

SEQ ID NO: 80861 - RNA, 22 nt, Homo sapiens
ugucuugagagaggacaugacu

SEQ ID NO: 80862 - RNA, 22 nt, Homo sapiens
ugugaacaaaauuuguugcaua

SEQ ID NO: 80863 - RNA, 22 nt, Homo sapiens
ugugaacacagaggcuauggca

SEQ ID NO: 80864 - RNA, 22 nt, Homo sapiens
ugucuuugguucaggcaaggag

SEQ ID NO: 80865 - RNA, 22 nt, Homo sapiens
ugucuuuguuaguuguccuagu

SEQ ID NO: 80866 - RNA, 22 nt, Homo sapiens
ugucuuggagaauccuggguuu

SEQ ID NO: 80867 - RNA, 22 nt, Homo sapiens
ugucauguuucuacugaccaaa

SEQ ID NO: 80868 - RNA, 22 nt, Homo sapiens
ugucauguugguguacugcacc

SEQ ID NO: 80869 - RNA, 22 nt, Homo sapiens
uguccaaaucagagguaccaaa

SEQ ID NO: 80870 - RNA, 21 nt, Homo sapiens
uguccagcuuuuggaauauaa

SEQ ID NO: 80871 - RNA, 22 nt, Homo sapiens
ugucccguuuucgaggcugcag

SEQ ID NO: 80872 - RNA, 22 nt, Homo sapiens
ugucauggauucugagucuggg

SEQ ID NO: 80873 - RNA, 22 nt, Homo sapiens
ugucaugguguuaauuuuccug

SEQ ID NO: 80874 - RNA, 22 nt, Homo sapiens
ugucacugugcagucaugcauu

SEQ ID NO: 80875 - RNA, 22 nt, Homo sapiens
ugucagcacaacucagguuccu

SEQ ID NO: 80876 - RNA, 18 nt, Homo sapiens
ugucagaguggauuguaa

SEQ ID NO: 80877 - RNA, 19 nt, Homo sapiens
ugucaucaucuuuucuugc

SEQ ID NO: 80878 - RNA, 22 nt, Homo sapiens
ugucaaacauuaugaugcucua

SEQ ID NO: 80879 - RNA, 20 nt, Homo sapiens
ugccaagaugacuauagcuc

SEQ ID NO: 80880 - RNA, 22 nt, Homo sapiens
ugccaacaugccuggcuguuuu

SEQ ID NO: 80881 - RNA, 22 nt, Homo sapiens
ugccaguauuuuauugaagauu

SEQ ID NO: 80882 - RNA, 21 nt, Homo sapiens
ugcuacugucacuuccuuugu

SEQ ID NO: 80883 - RNA, 22 nt, Homo sapiens
ugcgguagugcaaucauggcuc

SEQ ID NO: 80884 - RNA, 22 nt, Homo sapiens
ugcuaugucagccaggcugguc

SEQ ID NO: 80885 - RNA, 23 nt, Homo sapiens
ugcuauguaagcauuuauuaaau

SEQ ID NO: 80886 - RNA, 22 nt, Homo sapiens
ugccaguguuuuguugaagauu

SEQ ID NO: 80887 - RNA, 22 nt, Homo sapiens
ugcgccauugaacuccaggcug

SEQ ID NO: 80888 - RNA, 22 nt, Homo sapiens
ugcgccauugcacuccagccug

SEQ ID NO: 80889 - RNA, 22 nt, Homo sapiens
ugcgccauugcauuccagccug

SEQ ID NO: 80890 - RNA, 22 nt, Homo sapiens
ugcugcuguuguuguuacuagc

SEQ ID NO: 80891 - RNA, 22 nt, Homo sapiens
ugcugcuguuaucauuuuacca

SEQ ID NO: 80892 - RNA, 22 nt, Homo sapiens
ugcuggcguuacucuccaucag

SEQ ID NO: 80893 - RNA, 22 nt, Homo sapiens
ugcuggugauuaaauccugaag

SEQ ID NO: 80894 - RNA, 22 nt, Homo sapiens
ugcugguauuuggaccagccug

SEQ ID NO: 80895 - RNA, 22 nt, Homo sapiens
ugcuggugucaucaaggcuuug

SEQ ID NO: 80896 - RNA, 22 nt, Homo sapiens
ugcugcaaucucggcacuuugg

SEQ ID NO: 80897 - RNA, 22 nt, Homo sapiens
ugcugcaaacaugagaggaagu

SEQ ID NO: 80898 - RNA, 21 nt, Homo sapiens
ugcuccauuuucuagccugaa

SEQ ID NO: 80899 - RNA, 23 nt, Homo sapiens
ugcucgguguugacagucacauc

SEQ ID NO: 80900 - RNA, 22 nt, Homo sapiens
uggacaagugcccuccaccuca

SEQ ID NO: 80901 - RNA, 22 nt, Homo sapiens
uggaguguaaauuaguucagcc

SEQ ID NO: 80902 - RNA, 22 nt, Homo sapiens
uggaauguagcguugacacgag

SEQ ID NO: 80903 - RNA, 22 nt, Homo sapiens
ugcugguggucccauaugauua

SEQ ID NO: 80904 - RNA, 22 nt, Homo sapiens
ugcugguguuuaggaauaagaa

SEQ ID NO: 80905 - RNA, 21 nt, Homo sapiens
ugcuuuggucauacuucuucc

SEQ ID NO: 80906 - RNA, 22 nt, Homo sapiens
uggaagugucugugcccagcuc

SEQ ID NO: 80907 - RNA, 22 nt, Homo sapiens
uggaagucaugcugcaagaaca

SEQ ID NO: 80908 - RNA, 22 nt, Homo sapiens
ugagugccuggagggcagggac

SEQ ID NO: 80909 - RNA, 22 nt, Homo sapiens
ugagguaggugaagaaugcacg

SEQ ID NO: 80910 - RNA, 22 nt, Homo sapiens
ugaggugcagcaauccucaugu

SEQ ID NO: 80911 - RNA, 22 nt, Homo sapiens
ugaguuguugcauucuuggugu

SEQ ID NO: 80912 - RNA, 22 nt, Homo sapiens
ugcaagaaucuuucaggcuagc

SEQ ID NO: 80913 - RNA, 21 nt, Homo sapiens
ugcaagaaucaggaagcugcc

SEQ ID NO: 80914 - RNA, 22 nt, Homo sapiens
ugcaaguaauuggcgaggaguu

SEQ ID NO: 80915 - RNA, 22 nt, Homo sapiens
ugcaagcacacccagggauugu

SEQ ID NO: 80916 - RNA, 22 nt, Homo sapiens
ugcaagaggagacuguacucag

SEQ ID NO: 80917 - RNA, 22 nt, Homo sapiens
ugcaagacacuguccugggcau

SEQ ID NO: 80918 - RNA, 22 nt, Homo sapiens
ugcaagacaucguauuuugguc

SEQ ID NO: 80919 - RNA, 22 nt, Homo sapiens
ugcaauagcuucaggagaaggg

SEQ ID NO: 80920 - RNA, 22 nt, Homo sapiens
ugcagagucuguccugccugcc

SEQ ID NO: 80921 - RNA, 17 nt, Homo sapiens
ugcagcacacugauggg

SEQ ID NO: 80922 - RNA, 20 nt, Homo sapiens
ugcagcacgggcccuuucca

SEQ ID NO: 80923 - RNA, 22 nt, Homo sapiens
ugcagugugcuggggucuccau

SEQ ID NO: 80924 - RNA, 22 nt, Homo sapiens
ugcauggagcucucuuuggacu

SEQ ID NO: 80925 - RNA, 22 nt, Homo sapiens
ugcauggucauacauggcaccc

SEQ ID NO: 80926 - RNA, 22 nt, Homo sapiens
ugcagcauugcacuccagccug

SEQ ID NO: 80927 - RNA, 20 nt, Homo sapiens
ugcagcacugggaaugcagu

SEQ ID NO: 80928 - RNA, 22 nt, Homo sapiens
ugcagcucagcugcggaguuuu

SEQ ID NO: 80929 - RNA, 20 nt, Homo sapiens
ugcaguguccucacuuguca

SEQ ID NO: 80930 - RNA, 22 nt, Homo sapiens
ugcagugugaaagagccugaca

SEQ ID NO: 80931 - RNA, 22 nt, Homo sapiens
ugcagguacuugacaacuuggg

SEQ ID NO: 80932 - RNA, 22 nt, Homo sapiens
ugcagugcaugacuguguuaug

SEQ ID NO: 80933 - RNA, 22 nt, Homo sapiens
ucaacacaguuaaauggggaaa

SEQ ID NO: 80934 - RNA, 20 nt, Homo sapiens
ucaaagacauggcugucaga

SEQ ID NO: 80935 - RNA, 22 nt, Homo sapiens
uaugggucuuaaaucacuuagu

SEQ ID NO: 80936 - RNA, 22 nt, Homo sapiens
uaucguaguguuggaaaacaag

SEQ ID NO: 80937 - RNA, 21 nt, Homo sapiens
uaucucaguuuuccuuugugg

SEQ ID NO: 80938 - RNA, 22 nt, Homo sapiens
uaugucuggaguuacugagcug

SEQ ID NO: 80939 - RNA, 22 nt, Homo sapiens
uaucacaaacuuagcaguuuaa

SEQ ID NO: 80940 - RNA, 22 nt, Homo sapiens
uaucucagaguguacaagauua

SEQ ID NO: 80941 - RNA, 22 nt, Homo sapiens
uaucucagaugagacuuguaac

SEQ ID NO: 80942 - RNA, 22 nt, Homo sapiens
ucaccuagacucgaucauguag

SEQ ID NO: 80943 - RNA, 22 nt, Homo sapiens
ucaccucgugaucugcccacuu

SEQ ID NO: 80944 - RNA, 22 nt, Homo sapiens
ucaccggcagacguggccugau

SEQ ID NO: 80945 - RNA, 19 nt, Homo sapiens
ucaccuugcccugcacaca

SEQ ID NO: 80946 - RNA, 18 nt, Homo sapiens
ucaccuugugagagagag

SEQ ID NO: 80947 - RNA, 22 nt, Homo sapiens
ucaccuggggcacagcugaaga

SEQ ID NO: 80948 - RNA, 18 nt, Homo sapiens
ucaccuugcuuuuagaac

SEQ ID NO: 80949 - RNA, 23 nt, Homo sapiens
ucacggagaccugcaagaccaau

SEQ ID NO: 80950 - RNA, 18 nt, Homo sapiens
ucacggggagcagcagcc

SEQ ID NO: 80951 - RNA, 22 nt, Homo sapiens
ucacuagggagaaacugaggcu

SEQ ID NO: 80952 - RNA, 22 nt, Homo sapiens
ucacgugguucauaaggcagaa

SEQ ID NO: 80953 - RNA, 19 nt, Homo sapiens
ucacgugcagcagccacac

SEQ ID NO: 80954 - RNA, 22 nt, Homo sapiens
ucacgugcucuuguguguucug

SEQ ID NO: 80955 - RNA, 22 nt, Homo sapiens
ucacauagcauaaugucugcaa

SEQ ID NO: 80956 - RNA, 22 nt, Homo sapiens
ucacaugcacaucucuggaacc

SEQ ID NO: 80957 - RNA, 21 nt, Homo sapiens
ucacaucguuuagcugugccu

SEQ ID NO: 80958 - RNA, 22 nt, Homo sapiens
ucacauggcagagaagaagcuc

SEQ ID NO: 80959 - RNA, 21 nt, Homo sapiens
ucacauggccagaguaggaac

SEQ ID NO: 80960 - RNA, 19 nt, Homo sapiens
ucaauucugucaauggcuu

SEQ ID NO: 80961 - RNA, 22 nt, Homo sapiens
ucacaaagcuuggccugcuucu

SEQ ID NO: 80962 - RNA, 22 nt, Homo sapiens
ucaagcaauucuccucucagcc

SEQ ID NO: 80963 - RNA, 22 nt, Homo sapiens
ucaagcaauucuccugccucag

SEQ ID NO: 80964 - RNA, 22 nt, Homo sapiens
ucaagcaauucugcugccucag

SEQ ID NO: 80965 - RNA, 22 nt, Homo sapiens
ucacacugucuugguuacucuu

SEQ ID NO: 80966 - RNA, 22 nt, Homo sapiens
ucacacgugaacucaucacaga

SEQ ID NO: 80967 - RNA, 22 nt, Homo sapiens
ucacacucucaccaacauuugg

SEQ ID NO: 80968 - RNA, 22 nt, Homo sapiens
uaggagugugaacccuaugaac

SEQ ID NO: 80969 - RNA, 22 nt, Homo sapiens
uaggagcacaaaccccauugug

SEQ ID NO: 80970 - RNA, 22 nt, Homo sapiens
uaggagcacaaacccuacugug

SEQ ID NO: 80971 - RNA, 22 nt, Homo sapiens
uagcuucuccauagcuccaugu

SEQ ID NO: 80972 - RNA, 22 nt, Homo sapiens
uagcugguauuaggaguugugu

SEQ ID NO: 80973 - RNA, 22 nt, Homo sapiens
uagcauggaggcggccauagug

SEQ ID NO: 80974 - RNA, 22 nt, Homo sapiens
uagcaugucagucgccacacgu

SEQ ID NO: 80975 - RNA, 18 nt, Homo sapiens
uagcaugaugcugagugc

SEQ ID NO: 80976 - RNA, 22 nt, Homo sapiens
uagcagugugaaaacggacuaa

SEQ ID NO: 80977 - RNA, 22 nt, Homo sapiens
uagcuccagugggguuacugcu

SEQ ID NO: 80978 - RNA, 19 nt, Homo sapiens
uagcacuacagaguuuagc

SEQ ID NO: 80979 - RNA, 22 nt, Homo sapiens
uagcagugugaaaacagacuaa

SEQ ID NO: 80980 - RNA, 22 nt, Homo sapiens
uagcagugucuagguaggccau

SEQ ID NO: 80981 - RNA, 22 nt, Homo sapiens
uaguugcauuggcugcuaugcu

SEQ ID NO: 80982 - RNA, 22 nt, Homo sapiens
uagguacuuuacauguuaucuc

SEQ ID NO: 80983 - RNA, 22 nt, Homo sapiens
uagggcuuuuccaagcugccac

SEQ ID NO: 80984 - RNA, 21 nt, Homo sapiens
uagugcagugggguaugacuu

SEQ ID NO: 80985 - RNA, 19 nt, Homo sapiens
uagcacagggucccagacu

SEQ ID NO: 80986 - RNA, 22 nt, Homo sapiens
uacuuuguagagugugagaauu

SEQ ID NO: 80987 - RNA, 22 nt, Homo sapiens
uacuuuguagauuguuuccuuu

SEQ ID NO: 80988 - RNA, 18 nt, Homo sapiens
uacugcacucuccagccu

SEQ ID NO: 80989 - RNA, 22 nt, Homo sapiens
uacugcacuggaggccucagau

SEQ ID NO: 80990 - RNA, 22 nt, Homo sapiens
uacugcagucagacuccugggc

SEQ ID NO: 80991 - RNA, 22 nt, Homo sapiens
uacugcaguugcagcuugagga

SEQ ID NO: 80992 - RNA, 22 nt, Homo sapiens
uacugcuuaaaagucaauuacu

SEQ ID NO: 80993 - RNA, 22 nt, Homo sapiens
uacugcauucuccgccuccggg

SEQ ID NO: 80994 - RNA, 22 nt, Homo sapiens
uacugcauuccaaucugggcga

SEQ ID NO: 80995 - RNA, 19 nt, Homo sapiens
uaccagcacaguguuugag

SEQ ID NO: 80996 - RNA, 22 nt, Homo sapiens
uacccucuggauacccuuguuc

SEQ ID NO: 80997 - RNA, 22 nt, Homo sapiens
uaccgcagugacauuccuugau

SEQ ID NO: 80998 - RNA, 22 nt, Homo sapiens
uacaugcaugggcaugugugca

SEQ ID NO: 80999 - RNA, 18 nt, Homo sapiens
uaaggcacuauaggcauu

SEQ ID NO: 81000 - RNA, 22 nt, Homo sapiens
gucacuggcugucuuguaugau

SEQ ID NO: 81001 - RNA, 22 nt, Homo sapiens
gucagcuuguccagagacucug

SEQ ID NO: 81002 - RNA, 22 nt, Homo sapiens
gucagagcacugaguugugggc

SEQ ID NO: 81003 - RNA, 22 nt, Homo sapiens
gucacagcacuuuuaguaagug

SEQ ID NO: 81004 - RNA, 22 nt, Homo sapiens
gucacagaggcuaagaccccac

SEQ ID NO: 81005 - RNA, 22 nt, Homo sapiens
gucugagcauggggccggcagg

SEQ ID NO: 81006 - RNA, 22 nt, Homo sapiens
gucuggguuuguuuguacuugc

SEQ ID NO: 81007 - RNA, 22 nt, Homo sapiens
gucugugcauuaauacgugcug

SEQ ID NO: 81008 - RNA, 22 nt, Homo sapiens
gucagggagggauagaugauua

SEQ ID NO: 81009 - RNA, 22 nt, Homo sapiens
gucagugccugucccaggcuuu

SEQ ID NO: 81010 - RNA, 22 nt, Homo sapiens
gucuccggauguuguuuuuggg

SEQ ID NO: 81011 - RNA, 22 nt, Homo sapiens
gucuccggcuguccuuugaggu

SEQ ID NO: 81012 - RNA, 22 nt, Homo sapiens
gucuuuguuauuaugaaucaac

SEQ ID NO: 81013 - RNA, 22 nt, Homo sapiens
gugaaagacauauaugguuuga

SEQ ID NO: 81014 - RNA, 22 nt, Homo sapiens
gucuuuugcuagccagagagcu

SEQ ID NO: 81015 - RNA, 22 nt, Homo sapiens
gucuuuguuuggucuguaucag

SEQ ID NO: 81016 - RNA, 22 nt, Homo sapiens
gugaaacuggguggugagagac

SEQ ID NO: 81017 - RNA, 22 nt, Homo sapiens
gucuuugcuuuuaaccagaggu

SEQ ID NO: 81018 - RNA, 22 nt, Homo sapiens
gucuuugaugucuaugugcuuc

SEQ ID NO: 81019 - RNA, 22 nt, Homo sapiens
gucuugaaggcugaguaccugu

SEQ ID NO: 81020 - RNA, 22 nt, Homo sapiens
gugaacagaaccugggaucgaa

SEQ ID NO: 81021 - RNA, 22 nt, Homo sapiens
gugacgucauuguuccuggcuc

SEQ ID NO: 81022 - RNA, 22 nt, Homo sapiens
gugacugcauauaaguguaugu

SEQ ID NO: 81023 - RNA, 22 nt, Homo sapiens
gugacugggaguggugaagaua

SEQ ID NO: 81024 - RNA, 22 nt, Homo sapiens
gugacacagcaagacuccgucu

SEQ ID NO: 81025 - RNA, 22 nt, Homo sapiens
gugacagaguaagacccuguau

SEQ ID NO: 81026 - RNA, 22 nt, Homo sapiens
gugacaucagcuccagguauaa

SEQ ID NO: 81027 - RNA, 23 nt, Homo sapiens
ggcacggaauucaaagaggcauu

SEQ ID NO: 81028 - RNA, 22 nt, Homo sapiens
ggcaagugucagcagcaacacc

SEQ ID NO: 81029 - RNA, 22 nt, Homo sapiens
ggcaaggauuagauucuccccu

SEQ ID NO: 81030 - RNA, 22 nt, Homo sapiens
ggcaaggauguuuuucuggcaa

SEQ ID NO: 81031 - RNA, 23 nt, Homo sapiens
ggcaagaucucagcucacugcaa

SEQ ID NO: 81032 - RNA, 22 nt, Homo sapiens
ggcaagaucuuggcucacugaa

SEQ ID NO: 81033 - RNA, 22 nt, Homo sapiens
ggcaagcucaggccucaggugu

SEQ ID NO: 81034 - RNA, 19 nt, Homo sapiens
ggcaagaguuguucugugu

SEQ ID NO: 81035 - RNA, 22 nt, Homo sapiens
ggcaagaggagauucugcuccc

SEQ ID NO: 81036 - RNA, 21 nt, Homo sapiens
ggcaagagaauacaacauaaa

SEQ ID NO: 81037 - RNA, 22 nt, Homo sapiens
ggcaugcauuguacuaguaugc

SEQ ID NO: 81038 - RNA, 22 nt, Homo sapiens
ggcaugaaguagcccacaggca

SEQ ID NO: 81039 - RNA, 17 nt, Homo sapiens
ggcaggaauuaauguca

SEQ ID NO: 81040 - RNA, 22 nt, Homo sapiens
ggcagcgugcacuuucgccacu

SEQ ID NO: 81041 - RNA, 22 nt, Homo sapiens
ggcagcuguguccuucguaagg

SEQ ID NO: 81042 - RNA, 22 nt, Homo sapiens
ggcagcucaggccccgcgcuga

SEQ ID NO: 81043 - RNA, 22 nt, Homo sapiens
ggcagacuguggaguucuuucu

SEQ ID NO: 81044 - RNA, 22 nt, Homo sapiens
ggcagaucauuggccucaguuu

SEQ ID NO: 81045 - RNA, 22 nt, Homo sapiens
guagcagcuacuaaguugcugu

SEQ ID NO: 81046 - RNA, 22 nt, Homo sapiens
guagcagcaauuuacuccauac

SEQ ID NO: 81047 - RNA, 22 nt, Homo sapiens
guaguggcaugaucuuggcuca

SEQ ID NO: 81048 - RNA, 22 nt, Homo sapiens
guaggcacuggcucagcuuauc

SEQ ID NO: 81049 - RNA, 22 nt, Homo sapiens
guagggcaggcugagaaauaua

SEQ ID NO: 81050 - RNA, 22 nt, Homo sapiens
guagcaugcaauauuauagaga

SEQ ID NO: 81051 - RNA, 22 nt, Homo sapiens
guaguagcacgagcucugucuc

SEQ ID NO: 81052 - RNA, 22 nt, Homo sapiens
guaaucucagcuacgcgggagg

SEQ ID NO: 81053 - RNA, 22 nt, Homo sapiens
guaauaccuuccccugcuggag

SEQ ID NO: 81054 - RNA, 22 nt, Homo sapiens
guaagagaauggguuacuuucc

SEQ ID NO: 81055 - RNA, 22 nt, Homo sapiens
guggaagaccagacuuuccaac

SEQ ID NO: 81056 - RNA, 22 nt, Homo sapiens
guggaaguguaaaagcucuugg

SEQ ID NO: 81057 - RNA, 22 nt, Homo sapiens
gugcuuguguuaauauguagcu

SEQ ID NO: 81058 - RNA, 22 nt, Homo sapiens
guggacaugaauuuuggaggca

SEQ ID NO: 81059 - RNA, 22 nt, Homo sapiens
guggaggagaaagaagcauuuc

SEQ ID NO: 81060 - RNA, 22 nt, Homo sapiens
guggaaguuaagugacuuucug

SEQ ID NO: 81061 - RNA, 22 nt, Homo sapiens
guggaaucuagagaggcaguag

SEQ ID NO: 81062 - RNA, 22 nt, Homo sapiens
gugaucucagcucacuggaacc

SEQ ID NO: 81063 - RNA, 22 nt, Homo sapiens
gugaucucauuuggaauuagag

SEQ ID NO: 81064 - RNA, 22 nt, Homo sapiens
gugaucuucauggaaggugaaa

SEQ ID NO: 81065 - RNA, 22 nt, Homo sapiens
gugacugcauccauccaggcuu

SEQ ID NO: 81066 - RNA, 21 nt, Homo sapiens
gugaggucauugggcuuucug

SEQ ID NO: 81067 - RNA, 22 nt, Homo sapiens
gugguagaaaguaccaaacuag

SEQ ID NO: 81068 - RNA, 18 nt, Homo sapiens
guggagugucuuccugga

SEQ ID NO: 81069 - RNA, 22 nt, Homo sapiens
guggaguacugagggucacuua

SEQ ID NO: 81070 - RNA, 22 nt, Homo sapiens
guggaguaugaaaacugacuuu

SEQ ID NO: 81071 - RNA, 22 nt, Homo sapiens
gugguguccugcaccuauaguc

SEQ ID NO: 81072 - RNA, 22 nt, Homo sapiens
gugguaguagaauuucggaaau

SEQ ID NO: 81073 - RNA, 22 nt, Homo sapiens
gugguuguuggaguggcaauuu

SEQ ID NO: 81074 - RNA, 22 nt, Homo sapiens
gugugucuugaccaggaucgga

SEQ ID NO: 81075 - RNA, 21 nt, Homo sapiens
gugugcuugaauucagcuguc

SEQ ID NO: 81076 - RNA, 21 nt, Homo sapiens
gugugcuugagugaugggauu

SEQ ID NO: 81077 - RNA, 22 nt, Homo sapiens
gugugcauaugucuuuauagua

SEQ ID NO: 81078 - RNA, 22 nt, Homo sapiens
gugugauggcgcacacagggug

SEQ ID NO: 81079 - RNA, 22 nt, Homo sapiens
gugugcaauuuugugggaggca

SEQ ID NO: 81080 - RNA, 22 nt, Homo sapiens
gugugcauggagggggcaguga

SEQ ID NO: 81081 - RNA, 17 nt, Homo sapiens
guuuggguacuggguaa

SEQ ID NO: 81082 - RNA, 22 nt, Homo sapiens
guuugugcuccuaugagaaucu

SEQ ID NO: 81083 - RNA, 22 nt, Homo sapiens
guugcagcacacaggcugucag

SEQ ID NO: 81084 - RNA, 22 nt, Homo sapiens
guugcccuuagcacuucagccu

SEQ ID NO: 81085 - RNA, 22 nt, Homo sapiens
guugcacagucuuuccuggacu

SEQ ID NO: 81086 - RNA, 22 nt, Homo sapiens
guugcaaaguaauugugguuuu

SEQ ID NO: 81087 - RNA, 22 nt, Homo sapiens
guucaucagggauacuggccuu

SEQ ID NO: 81088 - RNA, 22 nt, Homo sapiens
guucaucagggauacuggccug

SEQ ID NO: 81089 - RNA, 22 nt, Homo sapiens
guugaucuauguugcuggcagu

SEQ ID NO: 81090 - RNA, 22 nt, Homo sapiens
guugagcaagcuuuggagccua

SEQ ID NO: 81091 - RNA, 21 nt, Homo sapiens
uaaagcuuagcuauaguggcu

SEQ ID NO: 81092 - RNA, 22 nt, Homo sapiens
uaaagcuuagauccaugguggc

SEQ ID NO: 81093 - RNA, 22 nt, Homo sapiens
uaaagagcuuuugaggugucau

SEQ ID NO: 81094 - RNA, 22 nt, Homo sapiens
uaacaggcuacucuugcauugc

SEQ ID NO: 81095 - RNA, 22 nt, Homo sapiens
uaacagcauuugugucuaguag

SEQ ID NO: 81096 - RNA, 22 nt, Homo sapiens
uaacacagagcuccuaaucccu

SEQ ID NO: 81097 - RNA, 16 nt, Homo sapiens
uaacacaguucccacc

SEQ ID NO: 81098 - RNA, 22 nt, Homo sapiens
gcaagaugagagcccgggcagu

SEQ ID NO: 81099 - RNA, 22 nt, Homo sapiens
gcaauacugacagcauuaguuu

SEQ ID NO: 81100 - RNA, 22 nt, Homo sapiens
gcaaggaugagugcccaugaga

SEQ ID NO: 81101 - RNA, 22 nt, Homo sapiens
gaguuuguacuaauuuguugua

SEQ ID NO: 81102 - RNA, 22 nt, Homo sapiens
gauggcacuaagccauguagga

SEQ ID NO: 81103 - RNA, 22 nt, Homo sapiens
gauggaguaauguaaucuugag

SEQ ID NO: 81104 - RNA, 22 nt, Homo sapiens
gauggaguugucgccugggcug

SEQ ID NO: 81105 - RNA, 22 nt, Homo sapiens
gcaccacugcacucucagcuug

SEQ ID NO: 81106 - RNA, 22 nt, Homo sapiens
gcaccguggaguauggggagga

SEQ ID NO: 81107 - RNA, 22 nt, Homo sapiens
gcaauguuacugaauguguuuu

SEQ ID NO: 81108 - RNA, 22 nt, Homo sapiens
gcacacuuacacgaaccuagau

SEQ ID NO: 81109 - RNA, 22 nt, Homo sapiens
gcacaguggcucccgucuauaa

SEQ ID NO: 81110 - RNA, 22 nt, Homo sapiens
gcacagaugaggagaggucuca

SEQ ID NO: 81111 - RNA, 22 nt, Homo sapiens
gcacgugcacccacaugcacgu

SEQ ID NO: 81112 - RNA, 17 nt, Homo sapiens
gcacuggcguaucccac

SEQ ID NO: 81113 - RNA, 22 nt, Homo sapiens
gcaugguacuggaugguaguau

SEQ ID NO: 81114 - RNA, 22 nt, Homo sapiens
gcuauggccugaauguuugugu

SEQ ID NO: 81115 - RNA, 22 nt, Homo sapiens
gcuaggagauccacugcucucu

SEQ ID NO: 81116 - RNA, 22 nt, Homo sapiens
gcauggaguggaaauucuuggg

SEQ ID NO: 81117 - RNA, 22 nt, Homo sapiens
gcaugcauuuuccuaacuagaa

SEQ ID NO: 81118 - RNA, 22 nt, Homo sapiens
gccaagaagugucuaagcagga

SEQ ID NO: 81119 - RNA, 22 nt, Homo sapiens
ggagucuugcuauguugccaag

SEQ ID NO: 81120 - RNA, 22 nt, Homo sapiens
ggagugugauuguucucuguua

SEQ ID NO: 81121 - RNA, 22 nt, Homo sapiens
ggaguguguaggagaaagguaa

SEQ ID NO: 81122 - RNA, 22 nt, Homo sapiens
ggaguguguuuuccaacuuggu

SEQ ID NO: 81123 - RNA, 22 nt, Homo sapiens
ggaugcauucaacuuccaguuc

SEQ ID NO: 81124 - RNA, 22 nt, Homo sapiens
ggcaacaugccgaaaccacguc

SEQ ID NO: 81125 - RNA, 22 nt, Homo sapiens
ggagucugauguucuaaggcag

SEQ ID NO: 81126 - RNA, 22 nt, Homo sapiens
ggagaugugccugcucugcucu

SEQ ID NO: 81127 - RNA, 22 nt, Homo sapiens
ggacuagggacauggggagcug

SEQ ID NO: 81128 - RNA, 19 nt, Homo sapiens
gcugauguuacauucuugc

SEQ ID NO: 81129 - RNA, 22 nt, Homo sapiens
gcugcacuuuaaggcauccccu

SEQ ID NO: 81130 - RNA, 17 nt, Homo sapiens
gcugauguuugcauuuu

SEQ ID NO: 81131 - RNA, 22 nt, Homo sapiens
gcuguguucucgaggcggggga

SEQ ID NO: 81132 - RNA, 18 nt, Homo sapiens
gcuguugucagagcacau

SEQ ID NO: 81133 - RNA, 22 nt, Homo sapiens
gcugagaucucuugccugaacu

SEQ ID NO: 81134 - RNA, 16 nt, Homo sapiens
gcucuuguucucuguu

SEQ ID NO: 81135 - RNA, 22 nt, Homo sapiens
gcucuuuugggguaauucugag

SEQ ID NO: 81136 - RNA, 22 nt, Homo sapiens
gcuuuguuaaaacacagccaca

SEQ ID NO: 81137 - RNA, 22 nt, Homo sapiens
gcuuuguuguugaugggaaauc

SEQ ID NO: 81138 - RNA, 22 nt, Homo sapiens
gcuucauggaggcugggcgcag

SEQ ID NO: 81139 - RNA, 19 nt, Homo sapiens
gcuucuugaggacgaugac

SEQ ID NO: 81140 - RNA, 22 nt, Homo sapiens
gcuguuugccgccaucgcagac

SEQ ID NO: 81141 - RNA, 22 nt, Homo sapiens
gcuuguguauuaaaccuugcag

SEQ ID NO: 81142 - RNA, 22 nt, Homo sapiens
gcuuguguucaaggaacaccua

SEQ ID NO: 81143 - RNA, 22 nt, Homo sapiens
gagcucauuaaaguaggaccua

SEQ ID NO: 81144 - RNA, 22 nt, Homo sapiens
gagcugccuugccuaugcaaga

SEQ ID NO: 81145 - RNA, 22 nt, Homo sapiens
gagcuggacuucuuaccuuuuc

SEQ ID NO: 81146 - RNA, 20 nt, Homo sapiens
gagcugguguacugccgggc

SEQ ID NO: 81147 - RNA, 22 nt, Homo sapiens
gaggaaguaauuuuaggccugu

SEQ ID NO: 81148 - RNA, 22 nt, Homo sapiens
gaggcaaguggccaccgagucu

SEQ ID NO: 81149 - RNA, 22 nt, Homo sapiens
gaggaucucuugagcccagaag

SEQ ID NO: 81150 - RNA, 22 nt, Homo sapiens
gagugcaauggcaugaucuggg

SEQ ID NO: 81151 - RNA, 22 nt, Homo sapiens
gagcuaguagagugcacccggc

SEQ ID NO: 81152 - RNA, 22 nt, Homo sapiens
gagcuaguguuuacuugccacu

SEQ ID NO: 81153 - RNA, 22 nt, Homo sapiens
gagcuagcauuuagacaucugg

SEQ ID NO: 81154 - RNA, 22 nt, Homo sapiens
gagcacugaauacugugguggu

SEQ ID NO: 81155 - RNA, 22 nt, Homo sapiens
gagcagacaugaggaccgcugg

SEQ ID NO: 81156 - RNA, 20 nt, Homo sapiens
gagcaucacaggccucugcu

SEQ ID NO: 81157 - RNA, 22 nt, Homo sapiens
gagcaucaauggcaugugggaa

SEQ ID NO: 81158 - RNA, 22 nt, Homo sapiens
gagcacauaugacauuuucuuc

SEQ ID NO: 81159 - RNA, 22 nt, Homo sapiens
gagcaaugagcugccugcugag

SEQ ID NO: 81160 - RNA, 22 nt, Homo sapiens
gagcaccagucccugucagugc

SEQ ID NO: 81161 - RNA, 22 nt, Homo sapiens
gacccucuagagggaagcgcuu

SEQ ID NO: 81162 - RNA, 22 nt, Homo sapiens
gacccuguugggguuuagggcu

SEQ ID NO: 81163 - RNA, 17 nt, Homo sapiens
gacgaucaucaggaggc

SEQ ID NO: 81164 - RNA, 22 nt, Homo sapiens
gaccuuguagaaucucaugauu

SEQ ID NO: 81165 - RNA, 22 nt, Homo sapiens
gacauguuuuuuaagguuuaug

SEQ ID NO: 81166 - RNA, 22 nt, Homo sapiens
gacugcagugcagcuguuaggc

SEQ ID NO: 81167 - RNA, 22 nt, Homo sapiens
gacuggagcuguaugugguuac

SEQ ID NO: 81168 - RNA, 22 nt, Homo sapiens
gagaugucuauuucagagaugu

SEQ ID NO: 81169 - RNA, 22 nt, Homo sapiens
gagaaccauuuggagaaaaagu

SEQ ID NO: 81170 - RNA, 22 nt, Homo sapiens
cugugcuugauuauaugagugu

SEQ ID NO: 81171 - RNA, 22 nt, Homo sapiens
cuuuguccuucaagguguguca

SEQ ID NO: 81172 - RNA, 22 nt, Homo sapiens
cuuugugcccuucugcccauca

SEQ ID NO: 81173 - RNA, 22 nt, Homo sapiens
cugucuggaggccugcaaauaa

SEQ ID NO: 81174 - RNA, 22 nt, Homo sapiens
cugucacugggaggggcagcag

SEQ ID NO: 81175 - RNA, 22 nt, Homo sapiens
cugugcauuggaugucucccug

SEQ ID NO: 81176 - RNA, 22 nt, Homo sapiens
cugugcacaucuggcggcccga

SEQ ID NO: 81177 - RNA, 22 nt, Homo sapiens
cugugcaaguuauaggccaggu

SEQ ID NO: 81178 - RNA, 18 nt, Homo sapiens
gacaguguggugauuccu

SEQ ID NO: 81179 - RNA, 22 nt, Homo sapiens
gaaagcugguauagauacauua

SEQ ID NO: 81180 - RNA, 22 nt, Homo sapiens
gaaagugcugcuugacugggau

SEQ ID NO: 81181 - RNA, 18 nt, Homo sapiens
gaaaugccucuugcuuac

SEQ ID NO: 81182 - RNA, 22 nt, Homo sapiens
gaaaugucugagauguggcuca

SEQ ID NO: 81183 - RNA, 22 nt, Homo sapiens
cuuuugugauucuucaguugcu

SEQ ID NO: 81184 - RNA, 22 nt, Homo sapiens
cuuuuguggaucuucuguugcu

SEQ ID NO: 81185 - RNA, 22 nt, Homo sapiens
cuuuuugcuagagucuaggguc

SEQ ID NO: 81186 - RNA, 22 nt, Homo sapiens
cuuuuugguagagcaggugugc

SEQ ID NO: 81187 - RNA, 20 nt, Homo sapiens
cuuuuugcugugcugggagc

SEQ ID NO: 81188 - RNA, 22 nt, Homo sapiens
gaaagacuuucugcuguggaua

SEQ ID NO: 81189 - RNA, 22 nt, Homo sapiens
cauggcccugggcugggcgaac

SEQ ID NO: 81190 - RNA, 22 nt, Homo sapiens
cauggcaucuguguggccucca

SEQ ID NO: 81191 - RNA, 22 nt, Homo sapiens
cauggcauuucaagauuuacca

SEQ ID NO: 81192 - RNA, 22 nt, Homo sapiens
caugguguuaggcacugggaau

SEQ ID NO: 81193 - RNA, 20 nt, Homo sapiens
cauugcccuccagccugggc

SEQ ID NO: 81194 - RNA, 20 nt, Homo sapiens
cauuccacuuuccugucagu

SEQ ID NO: 81195 - RNA, 22 nt, Homo sapiens
cagguaguguguagcacagcag

SEQ ID NO: 81196 - RNA, 22 nt, Homo sapiens
cagguacauuuuaaagggcuca

SEQ ID NO: 81197 - RNA, 21 nt, Homo sapiens
cagguagugucugaagccaga

SEQ ID NO: 81198 - RNA, 22 nt, Homo sapiens
cagcuugugguauugcugguug

SEQ ID NO: 81199 - RNA, 22 nt, Homo sapiens
caggcacgcuugggagacacac

SEQ ID NO: 81200 - RNA, 22 nt, Homo sapiens
caggcagucuggcucccaagug

SEQ ID NO: 81201 - RNA, 22 nt, Homo sapiens
caugcacugagagggucucggc

SEQ ID NO: 81202 - RNA, 22 nt, Homo sapiens
caucgcacuccagcuugggcaa

SEQ ID NO: 81203 - RNA, 22 nt, Homo sapiens
caugaaagugagaaacuccugg

SEQ ID NO: 81204 - RNA, 22 nt, Homo sapiens
caucgcacuccagccugggcaa

SEQ ID NO: 81205 - RNA, 22 nt, Homo sapiens
cagagagcuugcccuuguauau

SEQ ID NO: 81206 - RNA, 22 nt, Homo sapiens
cagagaacauucagagcuguag

SEQ ID NO: 81207 - RNA, 22 nt, Homo sapiens
cagagaucaugcaacugcucgc

SEQ ID NO: 81208 - RNA, 22 nt, Homo sapiens
cagaaguauugguaugcucugu

SEQ ID NO: 81209 - RNA, 22 nt, Homo sapiens
cagacagugucccgagucccug

SEQ ID NO: 81210 - RNA, 22 nt, Homo sapiens
cacuggguuagaacaugcuccu

SEQ ID NO: 81211 - RNA, 21 nt, Homo sapiens
cacuggguucaggcuugugga

SEQ ID NO: 81212 - RNA, 22 nt, Homo sapiens
cagagcaaugcuuuugcuuuga

SEQ ID NO: 81213 - RNA, 22 nt, Homo sapiens
cagagcacugauacuggguucu

SEQ ID NO: 81214 - RNA, 22 nt, Homo sapiens
cagagcacuaaagguaaaaggc

SEQ ID NO: 81215 - RNA, 22 nt, Homo sapiens
cagauacuggccuggagcugug

SEQ ID NO: 81216 - RNA, 21 nt, Homo sapiens
cacugcaucacaggacagcau

SEQ ID NO: 81217 - RNA, 22 nt, Homo sapiens
cacugcauccuccaccuccugg

SEQ ID NO: 81218 - RNA, 22 nt, Homo sapiens
cacugcauccuccauauccugg

SEQ ID NO: 81219 - RNA, 22 nt, Homo sapiens
cacugcgacguccgccucccgg

SEQ ID NO: 81220 - RNA, 22 nt, Homo sapiens
cacugcauccucugccuggcgg

SEQ ID NO: 81221 - RNA, 22 nt, Homo sapiens
cacauguuuuagcauggcuguu

SEQ ID NO: 81222 - RNA, 22 nt, Homo sapiens
cacauguuugcuacauuuuucu

SEQ ID NO: 81223 - RNA, 21 nt, Homo sapiens
cacauggaggcagagagugua

SEQ ID NO: 81224 - RNA, 22 nt, Homo sapiens
cacagucuugcaauauugagau

SEQ ID NO: 81225 - RNA, 22 nt, Homo sapiens
cacagucugggcuuguuuguac

SEQ ID NO: 81226 - RNA, 22 nt, Homo sapiens
cacaggccugucucuuucuaac

SEQ ID NO: 81227 - RNA, 22 nt, Homo sapiens
cacaaugucuaagauguuucua

SEQ ID NO: 81228 - RNA, 22 nt, Homo sapiens
cacacugucuucauuacuguag

SEQ ID NO: 81229 - RNA, 22 nt, Homo sapiens
caaugugcuuggggcacaugag

SEQ ID NO: 81230 - RNA, 22 nt, Homo sapiens
caauacuguuaccugaaauagg

SEQ ID NO: 81231 - RNA, 22 nt, Homo sapiens
caaggugcugagacaggagccc

SEQ ID NO: 81232 - RNA, 22 nt, Homo sapiens
caagugaauaguugcucucaga

SEQ ID NO: 81233 - RNA, 22 nt, Homo sapiens
auugcacuccagucugggcaac

SEQ ID NO: 81234 - RNA, 22 nt, Homo sapiens
auugcacucugaucugcacucc

SEQ ID NO: 81235 - RNA, 22 nt, Homo sapiens
auugcacugcagccugggcaac

SEQ ID NO: 81236 - RNA, 22 nt, Homo sapiens
caaggcacagccccuacuuccu

SEQ ID NO: 81237 - RNA, 22 nt, Homo sapiens
caagggguggaaaugguagugu

SEQ ID NO: 81238 - RNA, 22 nt, Homo sapiens
cuggucguuauuuaucuucuca

SEQ ID NO: 81239 - RNA, 22 nt, Homo sapiens
cuggugagaugucuuuccucuu

SEQ ID NO: 81240 - RNA, 22 nt, Homo sapiens
cuggugauugguuucauucagu

SEQ ID NO: 81241 - RNA, 23 nt, Homo sapiens
cuguacacauauacaucuaagua

SEQ ID NO: 81242 - RNA, 22 nt, Homo sapiens
cugguuguuacaaagagccugg

SEQ ID NO: 81243 - RNA, 22 nt, Homo sapiens
cuggcagucugccucuucacug

SEQ ID NO: 81244 - RNA, 22 nt, Homo sapiens
cuggcacagugucagaaacaca

SEQ ID NO: 81245 - RNA, 22 nt, Homo sapiens
cugcuggucuuuaaggucuagg

SEQ ID NO: 81246 - RNA, 20 nt, Homo sapiens
cugcuccccuacaaaucuca

SEQ ID NO: 81247 - RNA, 22 nt, Homo sapiens
cuggaaagcaaagggugcauug

SEQ ID NO: 81248 - RNA, 22 nt, Homo sapiens
cuggaagaaaaucacgccaucu

SEQ ID NO: 81249 - RNA, 20 nt, Homo sapiens
cuggaugucgaggcagaggu

SEQ ID NO: 81250 - RNA, 22 nt, Homo sapiens
cuggcaagagugaaccagcugu

SEQ ID NO: 81251 - RNA, 22 nt, Homo sapiens
cuggcaaauaguagagccagga

SEQ ID NO: 81252 - RNA, 22 nt, Homo sapiens
cuggaggccugaacauaaaugg

SEQ ID NO: 81253 - RNA, 22 nt, Homo sapiens
cuggaguuugaggcugcaguga

SEQ ID NO: 81254 - RNA, 22 nt, Homo sapiens
cugacuaguuuuaaugcagauu

SEQ ID NO: 81255 - RNA, 22 nt, Homo sapiens
cugacaagugaucacagcagca

SEQ ID NO: 81256 - RNA, 22 nt, Homo sapiens
cucgagagaaaaugcuucacug

SEQ ID NO: 81257 - RNA, 22 nt, Homo sapiens
cucgaagacuaagcaucucuga

SEQ ID NO: 81258 - RNA, 22 nt, Homo sapiens
cugccuagauguuguagggggu

SEQ ID NO: 81259 - RNA, 19 nt, Homo sapiens
cugcaugagacaguugguu

SEQ ID NO: 81260 - RNA, 21 nt, Homo sapiens
cugcauccauuucugagugau

SEQ ID NO: 81261 - RNA, 22 nt, Homo sapiens
cugagagaugagaccucucacu

SEQ ID NO: 81262 - RNA, 22 nt, Homo sapiens
cugagaguugaugaaauauggu

SEQ ID NO: 81263 - RNA, 22 nt, Homo sapiens
cugagcacugagauccucuagc

SEQ ID NO: 81264 - RNA, 22 nt, Homo sapiens
cuagcugcacuuccugcuacug

SEQ ID NO: 81265 - RNA, 22 nt, Homo sapiens
cuagcccagugcuccuggauca

SEQ ID NO: 81266 - RNA, 22 nt, Homo sapiens
cuagcaggcaagauaagauuca

SEQ ID NO: 81267 - RNA, 22 nt, Homo sapiens
cuagcacauuuaucuuuauaca

SEQ ID NO: 81268 - RNA, 22 nt, Homo sapiens
cuagcaacauuucagugaguuu

SEQ ID NO: 81269 - RNA, 23 nt, Homo sapiens
cuccaugagccguccagggccug

SEQ ID NO: 81270 - RNA, 22 nt, Homo sapiens
cuccacgugaaugccaaguauu

SEQ ID NO: 81271 - RNA, 22 nt, Homo sapiens
cuccaggugucauccaccuccu

SEQ ID NO: 81272 - RNA, 22 nt, Homo sapiens
cuagacacugacguuccuccga

SEQ ID NO: 81273 - RNA, 22 nt, Homo sapiens
cuacagcacugagcugugugca

SEQ ID NO: 81274 - RNA, 22 nt, Homo sapiens
cuacagcagcccaguccccgaa

SEQ ID NO: 81275 - RNA, 22 nt, Homo sapiens
cuaagggaggaagcugugcagg

SEQ ID NO: 81276 - RNA, 22 nt, Homo sapiens
ccagugcauggaucccaggggg

SEQ ID NO: 81277 - RNA, 22 nt, Homo sapiens
ccagucuuggugucuguagcac

SEQ ID NO: 81278 - RNA, 19 nt, Homo sapiens
ccaguguugccagagcuga

SEQ ID NO: 81279 - RNA, 22 nt, Homo sapiens
ccaguguucuggaaggcugagu

SEQ ID NO: 81280 - RNA, 22 nt, Homo sapiens
ccagccgggugcaguggcucac

SEQ ID NO: 81281 - RNA, 22 nt, Homo sapiens
ccagcaccauuuauuaaauagg

SEQ ID NO: 81282 - RNA, 22 nt, Homo sapiens
cauugucccucaaugacuauga

SEQ ID NO: 81283 - RNA, 22 nt, Homo sapiens
cauugcagauccuucaaaugac

SEQ ID NO: 81284 - RNA, 22 nt, Homo sapiens
cgugaggaaaacagaggguguu

SEQ ID NO: 81285 - RNA, 20 nt, Homo sapiens
cguugcacuccagccugggc

SEQ ID NO: 81286 - RNA, 22 nt, Homo sapiens
cgccugagcugaggaagcugca

SEQ ID NO: 81287 - RNA, 22 nt, Homo sapiens
cgaguagcacaaugugugugau

SEQ ID NO: 81288 - RNA, 22 nt, Homo sapiens
cgcccuguagcuagcuagaggu

SEQ ID NO: 81289 - RNA, 22 nt, Homo sapiens
cgacuggccuagacuaguguuu

SEQ ID NO: 81290 - RNA, 22 nt, Homo sapiens
auugagcacugacucugugcca

SEQ ID NO: 81291 - RNA, 22 nt, Homo sapiens
auugagcaaggucuccuaguau

SEQ ID NO: 81292 - RNA, 22 nt, Homo sapiens
auugagcaauuccuaugugcuu

SEQ ID NO: 81293 - RNA, 21 nt, Homo sapiens
auugagcacaugaaacauggc

SEQ ID NO: 81294 - RNA, 22 nt, Homo sapiens
auugcacuccagccucggugac

SEQ ID NO: 81295 - RNA, 22 nt, Homo sapiens
auugcacuccagccugggcgac

SEQ ID NO: 81296 - RNA, 22 nt, Homo sapiens
auugcacuccagccugggcaac

SEQ ID NO: 81297 - RNA, 22 nt, Homo sapiens
auugcacuccagccuggcaaua

SEQ ID NO: 81298 - RNA, 22 nt, Homo sapiens
auugcacuccagccuggccaac

SEQ ID NO: 81299 - RNA, 22 nt, Homo sapiens
auugacaguuggccaguaagug

SEQ ID NO: 81300 - RNA, 22 nt, Homo sapiens
auugaacaugccauauguacca

SEQ ID NO: 81301 - RNA, 22 nt, Homo sapiens
auucacagcuuuaaaaggcgug

SEQ ID NO: 81302 - RNA, 22 nt, Homo sapiens
augugggaggacuuggcuguug

SEQ ID NO: 81303 - RNA, 22 nt, Homo sapiens
augugugcuugugacacagccu

SEQ ID NO: 81304 - RNA, 20 nt, Homo sapiens
auguucuggaggacagaagc

SEQ ID NO: 81305 - RNA, 22 nt, Homo sapiens
auggcuguuuaagaguuucauu

SEQ ID NO: 81306 - RNA, 22 nt, Homo sapiens
auggcucuguuccaugugucuu

SEQ ID NO: 81307 - RNA, 22 nt, Homo sapiens
auggcucuggauagaaugcagg

SEQ ID NO: 81308 - RNA, 22 nt, Homo sapiens
auggcuugugacccaugcuuca

SEQ ID NO: 81309 - RNA, 22 nt, Homo sapiens
auggcuucuuacucuucugcau

SEQ ID NO: 81310 - RNA, 21 nt, Homo sapiens
auggugagaaaguagugucaa

SEQ ID NO: 81311 - RNA, 22 nt, Homo sapiens
auggcuagauuguaugguaguu

SEQ ID NO: 81312 - RNA, 22 nt, Homo sapiens
auggccgggugcgguggcucac

SEQ ID NO: 81313 - RNA, 22 nt, Homo sapiens
auggccuuucuggcacauuucc

SEQ ID NO: 81314 - RNA, 22 nt, Homo sapiens
auggcagcccucuuuauccaug

SEQ ID NO: 81315 - RNA, 22 nt, Homo sapiens
augagaucaaauuuaagcuguu

SEQ ID NO: 81316 - RNA, 22 nt, Homo sapiens
augauggaggccgugauggacg

SEQ ID NO: 81317 - RNA, 22 nt, Homo sapiens
augaucacaccacugcacucca

SEQ ID NO: 81318 - RNA, 22 nt, Homo sapiens
auggcagcaccccacucuacug

SEQ ID NO: 81319 - RNA, 22 nt, Homo sapiens
auaacagcugcaaggcaaaagc

SEQ ID NO: 81320 - RNA, 22 nt, Homo sapiens
auaggagcagaaaccguauuuu

SEQ ID NO: 81321 - RNA, 22 nt, Homo sapiens
auagcagugugaggacagacua

SEQ ID NO: 81322 - RNA, 22 nt, Homo sapiens
auagcagugugaaaauugacug

SEQ ID NO: 81323 - RNA, 21 nt, Homo sapiens
auagugcuagagaguagcagg

SEQ ID NO: 81324 - RNA, 22 nt, Homo sapiens
auaugcauacauguaugcagga

SEQ ID NO: 81325 - RNA, 22 nt, Homo sapiens
auaugcauacccucaccaacua

SEQ ID NO: 81326 - RNA, 22 nt, Homo sapiens
auaugucuuaguuaccuugggc

SEQ ID NO: 81327 - RNA, 22 nt, Homo sapiens
aucaucacaguuguguguaaug

SEQ ID NO: 81328 - RNA, 22 nt, Homo sapiens
aucauggaguauuugcaagucu

SEQ ID NO: 81329 - RNA, 22 nt, Homo sapiens
aucuuuggcgggaauaucacag

SEQ ID NO: 81330 - RNA, 17 nt, Homo sapiens
augaacucaucguucuu

SEQ ID NO: 81331 - RNA, 22 nt, Homo sapiens
augaagcuagcugauugcugau

SEQ ID NO: 81332 - RNA, 22 nt, Homo sapiens
augacugucuugcagaggcuau

SEQ ID NO: 81333 - RNA, 22 nt, Homo sapiens
augagacauuaaaguguguuug

SEQ ID NO: 81334 - RNA, 22 nt, Homo sapiens
augacuauugcacuuuccuggu

SEQ ID NO: 81335 - RNA, 22 nt, Homo sapiens
augaccuuguccucagugucau

SEQ ID NO: 81336 - RNA, 22 nt, Homo sapiens
agcuugugauuuagagugagag

SEQ ID NO: 81337 - RNA, 22 nt, Homo sapiens
agcuugugauucuccaucaugu

SEQ ID NO: 81338 - RNA, 22 nt, Homo sapiens
agcuuguccuccacccacacug

SEQ ID NO: 81339 - RNA, 22 nt, Homo sapiens
agcuguuuuugugggcauguga

SEQ ID NO: 81340 - RNA, 22 nt, Homo sapiens
agcuuguggugaauacugcuag

SEQ ID NO: 81341 - RNA, 21 nt, Homo sapiens
agcuuguguguaucacagugu

SEQ ID NO: 81342 - RNA, 22 nt, Homo sapiens
agcuugugcuguaugaagggcc

SEQ ID NO: 81343 - RNA, 22 nt, Homo sapiens
agcuuguguuugucugccuggg

SEQ ID NO: 81344 - RNA, 22 nt, Homo sapiens
aggcaguuucagugagagguga

SEQ ID NO: 81345 - RNA, 22 nt, Homo sapiens
aggcagucucugccggcugagg

SEQ ID NO: 81346 - RNA, 22 nt, Homo sapiens
aggcaugugugcagacugucug

SEQ ID NO: 81347 - RNA, 22 nt, Homo sapiens
aggcagcuguuauauacugagu

SEQ ID NO: 81348 - RNA, 22 nt, Homo sapiens
aggcacggugucucaugccugu

SEQ ID NO: 81349 - RNA, 22 nt, Homo sapiens
aggcaagugggagacagcauuu

SEQ ID NO: 81350 - RNA, 22 nt, Homo sapiens
aggcaaguugcucaaaugcaaa

SEQ ID NO: 81351 - RNA, 22 nt, Homo sapiens
aggcaagugauagcugcguaau

SEQ ID NO: 81352 - RNA, 22 nt, Homo sapiens
agcaccaugggcugaguaagug

SEQ ID NO: 81353 - RNA, 22 nt, Homo sapiens
agccauacaacguaugcaugua

SEQ ID NO: 81354 - RNA, 22 nt, Homo sapiens
agcccauuuugcacugagaugc

SEQ ID NO: 81355 - RNA, 22 nt, Homo sapiens
agccaguuuggcuaauuuuggc

SEQ ID NO: 81356 - RNA, 19 nt, Homo sapiens
agccaguuuucccagcacc

SEQ ID NO: 81357 - RNA, 22 nt, Homo sapiens
agcacagugaaugguuuacuca

SEQ ID NO: 81358 - RNA, 17 nt, Homo sapiens
agcaccacacucucuug

SEQ ID NO: 81359 - RNA, 22 nt, Homo sapiens
agcaagaugaaguugagcuagg

SEQ ID NO: 81360 - RNA, 22 nt, Homo sapiens
agcaagaaugaacucucccaga

SEQ ID NO: 81361 - RNA, 22 nt, Homo sapiens
agccuauccaauaucagugaga

SEQ ID NO: 81362 - RNA, 23 nt, Homo sapiens
agccugguuucccugcuucuccc

SEQ ID NO: 81363 - RNA, 22 nt, Homo sapiens
agccgguguccacgaagaagag

SEQ ID NO: 81364 - RNA, 22 nt, Homo sapiens
agcgccauugcacuccagccuu

SEQ ID NO: 81365 - RNA, 22 nt, Homo sapiens
agcuccaucuucagggguucag

SEQ ID NO: 81366 - RNA, 22 nt, Homo sapiens
agcucauugcaaccuccgccuc

SEQ ID NO: 81367 - RNA, 22 nt, Homo sapiens
agcuguguugucugaagucaga

SEQ ID NO: 81368 - RNA, 22 nt, Homo sapiens
aggcuuguuuuacuaacuggua

SEQ ID NO: 81369 - RNA, 22 nt, Homo sapiens
aggcuuuuggagaacacugcac

SEQ ID NO: 81370 - RNA, 22 nt, Homo sapiens
aggcuguguggauaauauuggg

SEQ ID NO: 81371 - RNA, 23 nt, Homo sapiens
agggcacuauagauguuauucua

SEQ ID NO: 81372 - RNA, 22 nt, Homo sapiens
agggcacuguagguccugccuc

SEQ ID NO: 81373 - RNA, 22 nt, Homo sapiens
agggcuuguuuaacuaucauua

SEQ ID NO: 81374 - RNA, 22 nt, Homo sapiens
agguagugugaugcuccuguuu

SEQ ID NO: 81375 - RNA, 22 nt, Homo sapiens
agguagguugagaugggcauca

SEQ ID NO: 81376 - RNA, 21 nt, Homo sapiens
agugagucauuuggaaagcaa

SEQ ID NO: 81377 - RNA, 22 nt, Homo sapiens
agugcauaugucuuuuuggaag

SEQ ID NO: 81378 - RNA, 22 nt, Homo sapiens
agugcagugguuaggagccagg

SEQ ID NO: 81379 - RNA, 22 nt, Homo sapiens
aguuccuacuggcuguaaagaa

SEQ ID NO: 81380 - RNA, 22 nt, Homo sapiens
aguuggccccuacugggaggug

SEQ ID NO: 81381 - RNA, 22 nt, Homo sapiens
aguggcacuauucucagaguca

SEQ ID NO: 81382 - RNA, 22 nt, Homo sapiens
aguggcuuuuuaguggcagaug

SEQ ID NO: 81383 - RNA, 22 nt, Homo sapiens
aguggauguuguggccugggag

SEQ ID NO: 81384 - RNA, 22 nt, Homo sapiens
acccgugcucacugccucugcc

SEQ ID NO: 81385 - RNA, 22 nt, Homo sapiens
acccggcaguaauccugcgcgc

SEQ ID NO: 81386 - RNA, 22 nt, Homo sapiens
acccggagagcaggcgagaagg

SEQ ID NO: 81387 - RNA, 22 nt, Homo sapiens
acccuguugagcaacuggccau

SEQ ID NO: 81388 - RNA, 22 nt, Homo sapiens
accacagugcuuccugcucacg

SEQ ID NO: 81389 - RNA, 22 nt, Homo sapiens
accaguguuuaccaaguagcau

SEQ ID NO: 81390 - RNA, 22 nt, Homo sapiens
accacguagaugagagaguuaa

SEQ ID NO: 81391 - RNA, 22 nt, Homo sapiens
acaucaggcuugugaugauuac

SEQ ID NO: 81392 - RNA, 22 nt, Homo sapiens
aaugugcuucuggcugugguca

SEQ ID NO: 81393 - RNA, 22 nt, Homo sapiens
acauacacuagggauguggugu

SEQ ID NO: 81394 - RNA, 22 nt, Homo sapiens
aaugugcuuugaaaagagcuga

SEQ ID NO: 81395 - RNA, 22 nt, Homo sapiens
aauggcucugauguuguuguga

SEQ ID NO: 81396 - RNA, 22 nt, Homo sapiens
aauggcagaugaaauugucauu

SEQ ID NO: 81397 - RNA, 22 nt, Homo sapiens
aauggcacaagacaugaagaag

SEQ ID NO: 81398 - RNA, 17 nt, Homo sapiens
acuuuuugaggaggcau

SEQ ID NO: 81399 - RNA, 21 nt, Homo sapiens
acuuuguugggggcugaggca

SEQ ID NO: 81400 - RNA, 22 nt, Homo sapiens
agaaacacagguggaauugcuu

SEQ ID NO: 81401 - RNA, 22 nt, Homo sapiens
agaaacauucucuugccuccuu

SEQ ID NO: 81402 - RNA, 20 nt, Homo sapiens
agaagcauugcucucuucag

SEQ ID NO: 81403 - RNA, 19 nt, Homo sapiens
agaagugcauggucuagag

SEQ ID NO: 81404 - RNA, 22 nt, Homo sapiens
agaaagcgcuucccuuugcugg

SEQ ID NO: 81405 - RNA, 22 nt, Homo sapiens
agaacacugaguucagggucag

SEQ ID NO: 81406 - RNA, 22 nt, Homo sapiens
agagaugaagauggggcucccg

SEQ ID NO: 81407 - RNA, 22 nt, Homo sapiens
acugcacuccagccuucggaca

SEQ ID NO: 81408 - RNA, 22 nt, Homo sapiens
acugcacuccagccuuagugac

SEQ ID NO: 81409 - RNA, 22 nt, Homo sapiens
acugcacuccagccuucaggac

SEQ ID NO: 81410 - RNA, 22 nt, Homo sapiens
acugcacuccagccuggacgac

SEQ ID NO: 81411 - RNA, 22 nt, Homo sapiens
acugcacuccagccuguugaca

SEQ ID NO: 81412 - RNA, 22 nt, Homo sapiens
acugcacuccagccugcuggau

SEQ ID NO: 81413 - RNA, 22 nt, Homo sapiens
acugcacuccagccugcugggu

SEQ ID NO: 81414 - RNA, 22 nt, Homo sapiens
acugcacuccagccucguggac

SEQ ID NO: 81415 - RNA, 22 nt, Homo sapiens
acugcacuccagccucgugaca

SEQ ID NO: 81416 - RNA, 22 nt, Homo sapiens
acugcacuccagccugagccug

SEQ ID NO: 81417 - RNA, 22 nt, Homo sapiens
acugcacuccagccugaugaaa

SEQ ID NO: 81418 - RNA, 22 nt, Homo sapiens
acugcacuccagccugcccaac

SEQ ID NO: 81419 - RNA, 23 nt, Homo sapiens
agagugcaauggugccaucucgg

SEQ ID NO: 81420 - RNA, 22 nt, Homo sapiens
agagcaaugacaugcuaugugg

SEQ ID NO: 81421 - RNA, 20 nt, Homo sapiens
agagcaaagccgcaccccua

SEQ ID NO: 81422 - RNA, 22 nt, Homo sapiens
agagcacuguggguccaaauau

SEQ ID NO: 81423 - RNA, 22 nt, Homo sapiens
agauguuguucaucugauuguu

SEQ ID NO: 81424 - RNA, 22 nt, Homo sapiens
agaugguguuuucucaccagau

SEQ ID NO: 81425 - RNA, 22 nt, Homo sapiens
agcaaccagaggagaugaggcu

SEQ ID NO: 81426 - RNA, 22 nt, Homo sapiens
agaugauguuucuggcacauga

SEQ ID NO: 81427 - RNA, 22 nt, Homo sapiens
agauggauuuuguagccccagc

SEQ ID NO: 81428 - RNA, 20 nt, Homo sapiens
agagugcugucuguccugag

SEQ ID NO: 81429 - RNA, 22 nt, Homo sapiens
aagcuuucaacuguuugccauu

SEQ ID NO: 81430 - RNA, 22 nt, Homo sapiens
aagcuguguguaagcucucaca

SEQ ID NO: 81431 - RNA, 22 nt, Homo sapiens
aagcuggcauucaugagauuac

SEQ ID NO: 81432 - RNA, 22 nt, Homo sapiens
aagcuguugguggauguaccau

SEQ ID NO: 81433 - RNA, 22 nt, Homo sapiens
aagcugcauuuucuagaugcuu

SEQ ID NO: 81434 - RNA, 22 nt, Homo sapiens
aagcugccuugcugaggagaaa

SEQ ID NO: 81435 - RNA, 22 nt, Homo sapiens
aagcugguguguauuauucacu

SEQ ID NO: 81436 - RNA, 22 nt, Homo sapiens
aagcugguuuuauaucugugag

SEQ ID NO: 81437 - RNA, 22 nt, Homo sapiens
aagcuggcauucauucguucuu

SEQ ID NO: 81438 - RNA, 22 nt, Homo sapiens
aaguagcagaggcaagacuuga

SEQ ID NO: 81439 - RNA, 22 nt, Homo sapiens
aagucaaggagagaggcgucag

SEQ ID NO: 81440 - RNA, 22 nt, Homo sapiens
aagugcaaauucccaggcucug

SEQ ID NO: 81441 - RNA, 22 nt, Homo sapiens
aagugcaaaucuguggcugaaa

SEQ ID NO: 81442 - RNA, 21 nt, Homo sapiens
aaucacaguuguucugccuuc

SEQ ID NO: 81443 - RNA, 22 nt, Homo sapiens
aaucagauuccagugguuggaa

SEQ ID NO: 81444 - RNA, 22 nt, Homo sapiens
aaugcacauaaaauccuccagg

SEQ ID NO: 81445 - RNA, 22 nt, Homo sapiens
aaaugcuuucuuggaccauuug

SEQ ID NO: 81446 - RNA, 22 nt, Homo sapiens
aaaugcugucugugagccucau

SEQ ID NO: 81447 - RNA, 22 nt, Homo sapiens
aacacuggcugcucgaguucuc

SEQ ID NO: 81448 - RNA, 22 nt, Homo sapiens
aacacggcccgcagagcaagcu

SEQ ID NO: 81449 - RNA, 22 nt, Homo sapiens
aagagagcuaugugcauaauua

SEQ ID NO: 81450 - RNA, 22 nt, Homo sapiens
aagagcauuggauggggagauu

SEQ ID NO: 81451 - RNA, 22 nt, Homo sapiens
aagagcucucuguagcauguga

SEQ ID NO: 81452 - RNA, 22 nt, Homo sapiens
aagagagccagcugguauauuu

SEQ ID NO: 81453 - RNA, 22 nt, Homo sapiens
aacugcuguuuggguacuggug

SEQ ID NO: 81454 - RNA, 22 nt, Homo sapiens
aacugcacuaggacagguuuuu

SEQ ID NO: 81455 - RNA, 22 nt, Homo sapiens
aaaugcauggacagcuggucuu

SEQ ID NO: 81456 - RNA, 22 nt, Homo sapiens
aaaugcaugaauaagcucgugu

SEQ ID NO: 81457 - RNA, 20 nt, Homo sapiens
aaaggcugugagaacgagau

SEQ ID NO: 81458 - RNA, 22 nt, Homo sapiens
aaagcagcaggugguuuucaau

SEQ ID NO: 81459 - RNA, 22 nt, Homo sapiens
aaagagcugagaccugguggag

SEQ ID NO: 81460 - RNA, 23 nt, Homo sapiens
aaagacuagucaggugcaguggu

SEQ ID NO: 81461 - RNA, 22 nt, Homo sapiens
aaaagagcugagagguauucuu

SEQ ID NO: 81462 - RNA, 22 nt, Homo sapiens
aaagcuacaggaccugcucauu

SEQ ID NO: 81463 - RNA, 22 nt, Homo sapiens
aaagcgcuguuaagaagacuga

SEQ ID NO: 81464 - RNA, 22 nt, Homo sapiens
uggagagcaaagaauuuguuag

SEQ ID NO: 81465 - RNA, 22 nt, Homo sapiens
uggagggcuagucauuucuuuu

SEQ ID NO: 81466 - RNA, 22 nt, Homo sapiens
uggacaugaagggcacaggagg

SEQ ID NO: 81467 - RNA, 20 nt, Homo sapiens
uggaccagagagguggggac

SEQ ID NO: 81468 - RNA, 22 nt, Homo sapiens
uggacagacaagguuauagauc

SEQ ID NO: 81469 - RNA, 22 nt, Homo sapiens
uggacagaaacauguuuucagu

SEQ ID NO: 81470 - RNA, 22 nt, Homo sapiens
uggacuguaauuuuauaggcau

SEQ ID NO: 81471 - RNA, 22 nt, Homo sapiens
uggacuguaagugccuugagua

SEQ ID NO: 81472 - RNA, 22 nt, Homo sapiens
uggacuagagggugggcgaggu

SEQ ID NO: 81473 - RNA, 22 nt, Homo sapiens
uggaagcauagcagcgugugug

SEQ ID NO: 81474 - RNA, 23 nt, Homo sapiens
uggaagacuccucucuuggcugc

SEQ ID NO: 81475 - RNA, 22 nt, Homo sapiens
uggaagacuuuagaggcuuaua

SEQ ID NO: 81476 - RNA, 22 nt, Homo sapiens
uggaagacucuagucucuugag

SEQ ID NO: 81477 - RNA, 22 nt, Homo sapiens
uggaagacauugggugaagggu

SEQ ID NO: 81478 - RNA, 21 nt, Homo sapiens
ugccuuuguaguaggugucuu

SEQ ID NO: 81479 - RNA, 22 nt, Homo sapiens
ugccuuauuccaacugagcucu

SEQ ID NO: 81480 - RNA, 22 nt, Homo sapiens
ugccuucuguuaaacgaggaug

SEQ ID NO: 81481 - RNA, 22 nt, Homo sapiens
uggaaaauuaggggagguuaua

SEQ ID NO: 81482 - RNA, 22 nt, Homo sapiens
uggaacacauaaauagcauagu

SEQ ID NO: 81483 - RNA, 21 nt, Homo sapiens
uggaacgcaaaugagaugaau

SEQ ID NO: 81484 - RNA, 22 nt, Homo sapiens
ugccaguuuuuacauuuccugu

SEQ ID NO: 81485 - RNA, 22 nt, Homo sapiens
ugcauggaagggagggaaagag

SEQ ID NO: 81486 - RNA, 22 nt, Homo sapiens
ugcauggagauauacaguuuuu

SEQ ID NO: 81487 - RNA, 21 nt, Homo sapiens
ugcauggagaacacugagggu

SEQ ID NO: 81488 - RNA, 22 nt, Homo sapiens
ugcaucacaguacuccagccug

SEQ ID NO: 81489 - RNA, 23 nt, Homo sapiens
ugggucaguuuuucugacaucau

SEQ ID NO: 81490 - RNA, 22 nt, Homo sapiens
uggguaguguaaagcacuccag

SEQ ID NO: 81491 - RNA, 22 nt, Homo sapiens
uggcuuuguaagguuucauuuu

SEQ ID NO: 81492 - RNA, 22 nt, Homo sapiens
uggcuuucuggggcuucuguuc

SEQ ID NO: 81493 - RNA, 21 nt, Homo sapiens
uggcuguuuucaugcuagaac

SEQ ID NO: 81494 - RNA, 22 nt, Homo sapiens
ugguaccuuuuaaugacuaauu

SEQ ID NO: 81495 - RNA, 22 nt, Homo sapiens
uggguucccugucuguccuuga

SEQ ID NO: 81496 - RNA, 22 nt, Homo sapiens
uggucaaaucugaugugagaaa

SEQ ID NO: 81497 - RNA, 22 nt, Homo sapiens
uggcaaaaaucacaaguaccuu

SEQ ID NO: 81498 - RNA, 22 nt, Homo sapiens
uggcaagaagagcaugagacca

SEQ ID NO: 81499 - RNA, 23 nt, Homo sapiens
uggcaagauuuguauugccugga

SEQ ID NO: 81500 - RNA, 22 nt, Homo sapiens
uggcaagagggaugcaagguuu

SEQ ID NO: 81501 - RNA, 18 nt, Homo sapiens
uggcaaguuuaguagcac

SEQ ID NO: 81502 - RNA, 20 nt, Homo sapiens
uggcaagugggaauuguggg

SEQ ID NO: 81503 - RNA, 19 nt, Homo sapiens
uggcaaugucagcagagau

SEQ ID NO: 81504 - RNA, 22 nt, Homo sapiens
uggcaguuucauaugguucaac

SEQ ID NO: 81505 - RNA, 22 nt, Homo sapiens
uggcagcugcuucaugggaugc

SEQ ID NO: 81506 - RNA, 22 nt, Homo sapiens
uggcagcgugaauguggcugaa

SEQ ID NO: 81507 - RNA, 22 nt, Homo sapiens
uggcagcgcaguugaaaaagaa

SEQ ID NO: 81508 - RNA, 22 nt, Homo sapiens
uggcaccugacuccgagaugca

SEQ ID NO: 81509 - RNA, 22 nt, Homo sapiens
uggcaguuuugauguggagaga

SEQ ID NO: 81510 - RNA, 22 nt, Homo sapiens
uggcaguuuuaugugguucaac

SEQ ID NO: 81511 - RNA, 19 nt, Homo sapiens
uggcuagagcagauauccu

SEQ ID NO: 81512 - RNA, 22 nt, Homo sapiens
uggcuagauauccagaguucug

SEQ ID NO: 81513 - RNA, 22 nt, Homo sapiens
ugagauguaaucucgcucuguc

SEQ ID NO: 81514 - RNA, 22 nt, Homo sapiens
ugagauguuccaaugacuauua

SEQ ID NO: 81515 - RNA, 22 nt, Homo sapiens
ugagauguuuguuucagugccu

SEQ ID NO: 81516 - RNA, 22 nt, Homo sapiens
ugagcaagaaauagaaacagau

SEQ ID NO: 81517 - RNA, 22 nt, Homo sapiens
ugagcagagggagaaguaaauu

SEQ ID NO: 81518 - RNA, 22 nt, Homo sapiens
ugagcagagaagugcccugcgc

SEQ ID NO: 81519 - RNA, 22 nt, Homo sapiens
ugagcagaaagcugcaaggucg

SEQ ID NO: 81520 - RNA, 22 nt, Homo sapiens
ugagcuagggccuggaauaggg

SEQ ID NO: 81521 - RNA, 20 nt, Homo sapiens
ugagccccuggacucaagcg

SEQ ID NO: 81522 - RNA, 22 nt, Homo sapiens
ugagcuacuacacccagcuugg

SEQ ID NO: 81523 - RNA, 22 nt, Homo sapiens
ugagcauauuuaagguaugcua

SEQ ID NO: 81524 - RNA, 22 nt, Homo sapiens
ugagcaucauucacaccuuggu

SEQ ID NO: 81525 - RNA, 22 nt, Homo sapiens
ugagcagugagugugcugcagg

SEQ ID NO: 81526 - RNA, 22 nt, Homo sapiens
ugagguguuugugcaccaucug

SEQ ID NO: 81527 - RNA, 22 nt, Homo sapiens
ugagguugucagugucauucuu

SEQ ID NO: 81528 - RNA, 22 nt, Homo sapiens
ugagcuguuugaagaagcauuu

SEQ ID NO: 81529 - RNA, 22 nt, Homo sapiens
ugauguugaauuguucagcguc

SEQ ID NO: 81530 - RNA, 23 nt, Homo sapiens
ugauguccacuuagggucuaggu

SEQ ID NO: 81531 - RNA, 22 nt, Homo sapiens
ugaugacccugcaguucucaag

SEQ ID NO: 81532 - RNA, 22 nt, Homo sapiens
ugaugcugaguggcuauuugaa

SEQ ID NO: 81533 - RNA, 22 nt, Homo sapiens
ugaugcugaugccugccagaag

SEQ ID NO: 81534 - RNA, 21 nt, Homo sapiens
ugaucacaugaaaaccaugca

SEQ ID NO: 81535 - RNA, 22 nt, Homo sapiens
ugaugaaguauaggaagggcuu

SEQ ID NO: 81536 - RNA, 22 nt, Homo sapiens
ugaucuuuuuaauguccauggg

SEQ ID NO: 81537 - RNA, 22 nt, Homo sapiens
ugcaaacuuccuugggcagcau

SEQ ID NO: 81538 - RNA, 22 nt, Homo sapiens
ugcaaugugaaauaagcacauc

SEQ ID NO: 81539 - RNA, 22 nt, Homo sapiens
ugcaaagaaauuuuggugacca

SEQ ID NO: 81540 - RNA, 22 nt, Homo sapiens
ugcaaugucuucugaggggagc

SEQ ID NO: 81541 - RNA, 22 nt, Homo sapiens
ugauuuccaugagaacaugccu

SEQ ID NO: 81542 - RNA, 23 nt, Homo sapiens
ugcaccacuacacacucuugggu

SEQ ID NO: 81543 - RNA, 22 nt, Homo sapiens
ugcaccacuacacuccaggcug

SEQ ID NO: 81544 - RNA, 22 nt, Homo sapiens
ugcaccacugcaccccagucug

SEQ ID NO: 81545 - RNA, 22 nt, Homo sapiens
ugcaccacugcacuccacccug

SEQ ID NO: 81546 - RNA, 22 nt, Homo sapiens
ugcaccacugcacuccagcuug

SEQ ID NO: 81547 - RNA, 22 nt, Homo sapiens
ugcaccacugcacuucagccug

SEQ ID NO: 81548 - RNA, 22 nt, Homo sapiens
ugcaccacugcuagccugggua

SEQ ID NO: 81549 - RNA, 22 nt, Homo sapiens
ugcaccacugcacugccugggu

SEQ ID NO: 81550 - RNA, 22 nt, Homo sapiens
ugcaguguucuuuagaggaaau

SEQ ID NO: 81551 - RNA, 22 nt, Homo sapiens
ucucaagaugguagaugggaau

SEQ ID NO: 81552 - RNA, 22 nt, Homo sapiens
ucgcaccauugcacuccagcca

SEQ ID NO: 81553 - RNA, 22 nt, Homo sapiens
uccuugagaggacagagccaua

SEQ ID NO: 81554 - RNA, 23 nt, Homo sapiens
uccuugguuggcgcccuaugugu

SEQ ID NO: 81555 - RNA, 22 nt, Homo sapiens
ucuguaguuaacagcuucagcu

SEQ ID NO: 81556 - RNA, 22 nt, Homo sapiens
ucugucacugaaucccugucac

SEQ ID NO: 81557 - RNA, 22 nt, Homo sapiens
ucugguggugaugagagacagu

SEQ ID NO: 81558 - RNA, 23 nt, Homo sapiens
ucugguguugucaaaugcugguu

SEQ ID NO: 81559 - RNA, 22 nt, Homo sapiens
aacagugcuucauucacacauu

SEQ ID NO: 81560 - RNA, 21 nt, Homo sapiens
aacagugcuuaguagauguuc

SEQ ID NO: 81561 - RNA, 22 nt, Homo sapiens
aacaggguggugccugguccau

SEQ ID NO: 81562 - RNA, 22 nt, Homo sapiens
aacaggguguuugcaguuucuu

SEQ ID NO: 81563 - RNA, 22 nt, Homo sapiens
aacagugcauucagggauauau

SEQ ID NO: 81564 - RNA, 21 nt, Homo sapiens
aacagugcugaacagacaccu

SEQ ID NO: 81565 - RNA, 22 nt, Homo sapiens
aacagugcuguuauaaauguac

SEQ ID NO: 81566 - RNA, 22 nt, Homo sapiens
ucuuugaguggagcgaggcaga

SEQ ID NO: 81567 - RNA, 22 nt, Homo sapiens
aacaggcuccuaggggugcacc

SEQ ID NO: 81568 - RNA, 20 nt, Homo sapiens
aacagcacugucugaagcuu

SEQ ID NO: 81569 - RNA, 21 nt, Homo sapiens
aacacggugaaaucccgucuc

SEQ ID NO: 81570 - RNA, 22 nt, Homo sapiens
aacaccuugcgugggcgucaau

SEQ ID NO: 81571 - RNA, 18 nt, Homo sapiens
ugacaucauuuagaaagg

SEQ ID NO: 81572 - RNA, 22 nt, Homo sapiens
ugacaagaguagagagggugcc

SEQ ID NO: 81573 - RNA, 21 nt, Homo sapiens
ugacauguugguuugcugcac

SEQ ID NO: 81574 - RNA, 21 nt, Homo sapiens
ugacauguuggugugcugcac

SEQ ID NO: 81575 - RNA, 22 nt, Homo sapiens
ugacauguccaggugguccugu

SEQ ID NO: 81576 - RNA, 22 nt, Homo sapiens
ugacauguagagaacuucucau

SEQ ID NO: 81577 - RNA, 23 nt, Homo sapiens
ugacauguaauucaguccagcag

SEQ ID NO: 81578 - RNA, 20 nt, Homo sapiens
ugaaggaggucauuuauacc

SEQ ID NO: 81579 - RNA, 22 nt, Homo sapiens
ugaaggaguauggauaagucgu

SEQ ID NO: 81580 - RNA, 22 nt, Homo sapiens
ugaagaucuuaggagcugaggg

SEQ ID NO: 81581 - RNA, 22 nt, Homo sapiens
ugaacuguugggggaaauucag

SEQ ID NO: 81582 - RNA, 22 nt, Homo sapiens
ugaaguguuuuuucaggcaugu

SEQ ID NO: 81583 - RNA, 22 nt, Homo sapiens
ucuuuggguagauauguagcug

SEQ ID NO: 81584 - RNA, 22 nt, Homo sapiens
ugaacacaucuccugguaccug

SEQ ID NO: 81585 - RNA, 21 nt, Homo sapiens
ugaacacuggacugagugucc

SEQ ID NO: 81586 - RNA, 22 nt, Homo sapiens
ugaacacagccugccucugcca

SEQ ID NO: 81587 - RNA, 22 nt, Homo sapiens
ugaacuguaagguauaggugau

SEQ ID NO: 81588 - RNA, 19 nt, Homo sapiens
uccuugauugcaccacugc

SEQ ID NO: 81589 - RNA, 22 nt, Homo sapiens
uccuuggugacauuucuugucu

SEQ ID NO: 81590 - RNA, 22 nt, Homo sapiens
uccugcauucauccugguguug

SEQ ID NO: 81591 - RNA, 22 nt, Homo sapiens
uccugagacucacaggcucccc

SEQ ID NO: 81592 - RNA, 22 nt, Homo sapiens
uccaguagaauuuuauucaaca

SEQ ID NO: 81593 - RNA, 22 nt, Homo sapiens
uccagugcauucagacacuugg

SEQ ID NO: 81594 - RNA, 22 nt, Homo sapiens
uccaguggacagacauaccaug

SEQ ID NO: 81595 - RNA, 22 nt, Homo sapiens
uccagugugcaggcaaguuuga

SEQ ID NO: 81596 - RNA, 22 nt, Homo sapiens
uccaguguuauaauaugcgucu

SEQ ID NO: 81597 - RNA, 22 nt, Homo sapiens
uccauagugagcagucaaugua

SEQ ID NO: 81598 - RNA, 22 nt, Homo sapiens
uccauguagaagacaggggaga

SEQ ID NO: 81599 - RNA, 22 nt, Homo sapiens
uccauguaguugagcggcuuug

SEQ ID NO: 81600 - RNA, 22 nt, Homo sapiens
ucauucuuucuguggaggggcu

SEQ ID NO: 81601 - RNA, 19 nt, Homo sapiens
ucauggcuuuuucagcugu

SEQ ID NO: 81602 - RNA, 22 nt, Homo sapiens
ucauggcuuuuauuauguugag

SEQ ID NO: 81603 - RNA, 19 nt, Homo sapiens
uccaccgcgugcaccucua

SEQ ID NO: 81604 - RNA, 22 nt, Homo sapiens
ucaucagguaugucagcggagu

SEQ ID NO: 81605 - RNA, 22 nt, Homo sapiens
ucauauugguuaaaauaguggg

SEQ ID NO: 81606 - RNA, 22 nt, Homo sapiens
ucauacgucuccuugugccacc

SEQ ID NO: 81607 - RNA, 22 nt, Homo sapiens
ucagugucaucuggguuguuug

SEQ ID NO: 81608 - RNA, 22 nt, Homo sapiens
ucaguggauuuaaccugaauca

SEQ ID NO: 81609 - RNA, 23 nt, Homo sapiens
ucagugucuggauccugcucagu

SEQ ID NO: 81610 - RNA, 22 nt, Homo sapiens
ucagugucugugauggagaggu

SEQ ID NO: 81611 - RNA, 22 nt, Homo sapiens
ucagugucugugcaccgcugga

SEQ ID NO: 81612 - RNA, 22 nt, Homo sapiens
ucagucuuuuuuuggcaagcau

SEQ ID NO: 81613 - RNA, 17 nt, Homo sapiens
ucagugcauuuaagaga

SEQ ID NO: 81614 - RNA, 22 nt, Homo sapiens
ucaggugccuuggcuaauuguu

SEQ ID NO: 81615 - RNA, 22 nt, Homo sapiens
ucaguggagcuacaauucuggg

SEQ ID NO: 81616 - RNA, 22 nt, Homo sapiens
ucagugcuuggcacagagagcu

SEQ ID NO: 81617 - RNA, 22 nt, Homo sapiens
ucagugcuguuugcccucguuu

SEQ ID NO: 81618 - RNA, 22 nt, Homo sapiens
ucaguaccugagagugggcaga

SEQ ID NO: 81619 - RNA, 22 nt, Homo sapiens
ucagguauuucuuuuagcugug

SEQ ID NO: 81620 - RNA, 23 nt, Homo sapiens
ucagguaggccuagaguauucuu

SEQ ID NO: 81621 - RNA, 20 nt, Homo sapiens
ucagguagggcuucaacauu

SEQ ID NO: 81622 - RNA, 23 nt, Homo sapiens
ucagguaguuucagaggaccuug

SEQ ID NO: 81623 - RNA, 22 nt, Homo sapiens
ucagcagugagagaccucaccc

SEQ ID NO: 81624 - RNA, 22 nt, Homo sapiens
ucagcaguggacagaaugguag

SEQ ID NO: 81625 - RNA, 22 nt, Homo sapiens
ucagcagucacuccuaugacaa

SEQ ID NO: 81626 - RNA, 19 nt, Homo sapiens
ucagcaguaaucaacuuca

SEQ ID NO: 81627 - RNA, 22 nt, Homo sapiens
ucagcguguggacggccaucuu

SEQ ID NO: 81628 - RNA, 22 nt, Homo sapiens
ucagcgcauggucgugcggcau

SEQ ID NO: 81629 - RNA, 22 nt, Homo sapiens
ucagcgggaguggaaagucaga

SEQ ID NO: 81630 - RNA, 22 nt, Homo sapiens
ucagcaucacaggcagugagug

SEQ ID NO: 81631 - RNA, 22 nt, Homo sapiens
ucagcaucacgugggcucccgu

SEQ ID NO: 81632 - RNA, 16 nt, Homo sapiens
ucagcgagggagccag

SEQ ID NO: 81633 - RNA, 22 nt, Homo sapiens
ucagauguuugagaaguauacu

SEQ ID NO: 81634 - RNA, 22 nt, Homo sapiens
ucagauguuuuguuuaucugcu

SEQ ID NO: 81635 - RNA, 22 nt, Homo sapiens
ucagcacauucaaggccugccu

SEQ ID NO: 81636 - RNA, 22 nt, Homo sapiens
uguguacaucucuacacacaug

SEQ ID NO: 81637 - RNA, 22 nt, Homo sapiens
ugugucacugcacuccagcgug

SEQ ID NO: 81638 - RNA, 22 nt, Homo sapiens
ugugucuccugaaaauucacau

SEQ ID NO: 81639 - RNA, 22 nt, Homo sapiens
uguguuugauaaguccauaguu

SEQ ID NO: 81640 - RNA, 22 nt, Homo sapiens
ugugucuuguuuuuucccaggc

SEQ ID NO: 81641 - RNA, 18 nt, Homo sapiens
uguuugguucugcgccuc

SEQ ID NO: 81642 - RNA, 22 nt, Homo sapiens
uguuaacauggucucagucugu

SEQ ID NO: 81643 - RNA, 22 nt, Homo sapiens
uguuuuggagguccucacuaga

SEQ ID NO: 81644 - RNA, 22 nt, Homo sapiens
uguuuuguuagcacucugggaa

SEQ ID NO: 81645 - RNA, 22 nt, Homo sapiens
uguuuuggaggccagaagucca

SEQ ID NO: 81646 - RNA, 22 nt, Homo sapiens
uuaaggcuuguacuuguuuucu

SEQ ID NO: 81647 - RNA, 22 nt, Homo sapiens
ugugccuacugauagagccaag

SEQ ID NO: 81648 - RNA, 22 nt, Homo sapiens
ugugccugagguuaacauuguu

SEQ ID NO: 81649 - RNA, 22 nt, Homo sapiens
ugugccacugcacuucagccug

SEQ ID NO: 81650 - RNA, 22 nt, Homo sapiens
ugugccacuccaggaggcuguu

SEQ ID NO: 81651 - RNA, 22 nt, Homo sapiens
ugugccuucuaagaaggagucu

SEQ ID NO: 81652 - RNA, 22 nt, Homo sapiens
ugugcgugugccuguaagaauu

SEQ ID NO: 81653 - RNA, 22 nt, Homo sapiens
ugugcucaucucagucaacugu

SEQ ID NO: 81654 - RNA, 22 nt, Homo sapiens
ugugcugaucgggcacgguguc

SEQ ID NO: 81655 - RNA, 22 nt, Homo sapiens
ugugccacuccaaccuggguga

SEQ ID NO: 81656 - RNA, 22 nt, Homo sapiens
ugugccaaucauagggcuuggu

SEQ ID NO: 81657 - RNA, 22 nt, Homo sapiens
ugugcacauugugcagguugau

SEQ ID NO: 81658 - RNA, 22 nt, Homo sapiens
ugugcacaaugugcagguuuga

SEQ ID NO: 81659 - RNA, 22 nt, Homo sapiens
uguggcagugcuuuaugaaacc

SEQ ID NO: 81660 - RNA, 22 nt, Homo sapiens
uguggaaauggugcuacgaaca

SEQ ID NO: 81661 - RNA, 22 nt, Homo sapiens
uguggcucuucuguucuccacu

SEQ ID NO: 81662 - RNA, 21 nt, Homo sapiens
uguggcaauggccucacagau

SEQ ID NO: 81663 - RNA, 22 nt, Homo sapiens
uguggcuuuuucuuggcugagg

SEQ ID NO: 81664 - RNA, 22 nt, Homo sapiens
uguacaugggacaggaggagag

SEQ ID NO: 81665 - RNA, 22 nt, Homo sapiens
uggucuucuggccuccagaacc

SEQ ID NO: 81666 - RNA, 22 nt, Homo sapiens
ugguccuuuccauuggagacac

SEQ ID NO: 81667 - RNA, 20 nt, Homo sapiens
ugguccccugagucuggcuu

SEQ ID NO: 81668 - RNA, 19 nt, Homo sapiens
uggucccccgcaaucucau

SEQ ID NO: 81669 - RNA, 22 nt, Homo sapiens
uggugcccuguccuucuguggc

SEQ ID NO: 81670 - RNA, 22 nt, Homo sapiens
uggugccgugguccuggggcca

SEQ ID NO: 81671 - RNA, 21 nt, Homo sapiens
uguaacugcaaaccucagauu

SEQ ID NO: 81672 - RNA, 22 nt, Homo sapiens
uguaagcauugggcaugcaguc

SEQ ID NO: 81673 - RNA, 22 nt, Homo sapiens
uucagguucauuugcugcuauu

SEQ ID NO: 81674 - RNA, 22 nt, Homo sapiens
uucagcaguggccaguggaaau

SEQ ID NO: 81675 - RNA, 23 nt, Homo sapiens
uuacaguggcaugaucucugcuc

SEQ ID NO: 81676 - RNA, 22 nt, Homo sapiens
uuacagucucaagagugcugca

SEQ ID NO: 81677 - RNA, 22 nt, Homo sapiens
uuaugccuauugugccuuggau

SEQ ID NO: 81678 - RNA, 22 nt, Homo sapiens
uuaugcaucuuccacacucauu

SEQ ID NO: 81679 - RNA, 22 nt, Homo sapiens
uucugugcuuguggaugaagug

SEQ ID NO: 81680 - RNA, 22 nt, Homo sapiens
uucuggaaaucagcagagggug

SEQ ID NO: 81681 - RNA, 22 nt, Homo sapiens
uucugccaaucaacccacaucc

SEQ ID NO: 81682 - RNA, 23 nt, Homo sapiens
uucugccacugaaaaugccucag

SEQ ID NO: 81683 - RNA, 22 nt, Homo sapiens
uucuugcacuuaacugacauuc

SEQ ID NO: 81684 - RNA, 22 nt, Homo sapiens
uucuguguuuaggucacggcua

SEQ ID NO: 81685 - RNA, 22 nt, Homo sapiens
uucuuagguuaaggcugagaga

SEQ ID NO: 81686 - RNA, 22 nt, Homo sapiens
uucuaugguuuuuaugguguua

SEQ ID NO: 81687 - RNA, 22 nt, Homo sapiens
uucucaaggagccuucguaacu

SEQ ID NO: 81688 - RNA, 22 nt, Homo sapiens
uucucugggacauaggucgggu

SEQ ID NO: 81689 - RNA, 22 nt, Homo sapiens
uucucuguggauugggugagag

SEQ ID NO: 81690 - RNA, 22 nt, Homo sapiens
uuccauuuguucggugucgcca

SEQ ID NO: 81691 - RNA, 22 nt, Homo sapiens
uuccaugugggcuugucaagua

SEQ ID NO: 81692 - RNA, 22 nt, Homo sapiens
uucccagucaaacgaaggacuu

SEQ ID NO: 81693 - RNA, 22 nt, Homo sapiens
uucccagugccaggcacuggga

SEQ ID NO: 81694 - RNA, 22 nt, Homo sapiens
uucccaguuggggaaagcgacc

SEQ ID NO: 81695 - RNA, 22 nt, Homo sapiens
uucccgggguggaaugcaguga

SEQ ID NO: 81696 - RNA, 22 nt, Homo sapiens
uucaucagcuguagaugucaug

SEQ ID NO: 81697 - RNA, 22 nt, Homo sapiens
uuggccccuccaaaucucaugu

SEQ ID NO: 81698 - RNA, 22 nt, Homo sapiens
uuggccccuuucauccacagcu

SEQ ID NO: 81699 - RNA, 22 nt, Homo sapiens
uugguccauuacauugaugaca

SEQ ID NO: 81700 - RNA, 22 nt, Homo sapiens
uuggcacgugguggggcucgga

SEQ ID NO: 81701 - RNA, 22 nt, Homo sapiens
uuggaaggcuccuaaugaaugg

SEQ ID NO: 81702 - RNA, 22 nt, Homo sapiens
uuggaaggcugaauggccucuc

SEQ ID NO: 81703 - RNA, 22 nt, Homo sapiens
uugcugguuuucauaugagcag

SEQ ID NO: 81704 - RNA, 20 nt, Homo sapiens
uugcugguguuagaggaggc

SEQ ID NO: 81705 - RNA, 22 nt, Homo sapiens
uugccuuuguuggaaacaagug

SEQ ID NO: 81706 - RNA, 22 nt, Homo sapiens
uugcggcaguacagcccaggua

SEQ ID NO: 81707 - RNA, 22 nt, Homo sapiens
uugccaucaucucuuacucagu

SEQ ID NO: 81708 - RNA, 22 nt, Homo sapiens
uugccgggugcaguggcucaug

SEQ ID NO: 81709 - RNA, 22 nt, Homo sapiens
uugccuaggcuggagugcagug

SEQ ID NO: 81710 - RNA, 22 nt, Homo sapiens
uugccuaggcuggauugcagug

SEQ ID NO: 81711 - RNA, 22 nt, Homo sapiens
uugcagcaaagagggaggggca

SEQ ID NO: 81712 - RNA, 22 nt, Homo sapiens
uugcaggcaugagccaccgugc

SEQ ID NO: 81713 - RNA, 20 nt, Homo sapiens
uugcagagcccaacccugga

SEQ ID NO: 81714 - RNA, 22 nt, Homo sapiens
uugcaaggugcagcuuaugcaa

SEQ ID NO: 81715 - RNA, 22 nt, Homo sapiens
uugaagacuauaugauucuuca

SEQ ID NO: 81716 - RNA, 22 nt, Homo sapiens
uucuugcacuuggcccucauua

SEQ ID NO: 81717 - RNA, 22 nt, Homo sapiens
uucuugcugaauugugcccuuc

SEQ ID NO: 81718 - RNA, 22 nt, Homo sapiens
uucuugcuguauccucacaugg

SEQ ID NO: 81719 - RNA, 22 nt, Homo sapiens
uugaauaguggugaaaguuuga

SEQ ID NO: 81720 - RNA, 22 nt, Homo sapiens
uuugacuuuuagaauaugaguu

SEQ ID NO: 81721 - RNA, 22 nt, Homo sapiens
uuugagcaggcuaaucaauaua

SEQ ID NO: 81722 - RNA, 22 nt, Homo sapiens
uuugagcaagaggugacauuau

SEQ ID NO: 81723 - RNA, 22 nt, Homo sapiens
uuugagcauggaaauggcauga

SEQ ID NO: 81724 - RNA, 22 nt, Homo sapiens
uuugacaaugugugcuuguauu

SEQ ID NO: 81725 - RNA, 23 nt, Homo sapiens
uuucuugggcaugcuaugucagu

SEQ ID NO: 81726 - RNA, 22 nt, Homo sapiens
uuugcagugucagcuucugugu

SEQ ID NO: 81727 - RNA, 22 nt, Homo sapiens
uuugaguuugaggugcugauga

SEQ ID NO: 81728 - RNA, 19 nt, Homo sapiens
uuuguccugcccuuucuca

SEQ ID NO: 81729 - RNA, 22 nt, Homo sapiens
uuugugacucauggucuagugc

SEQ ID NO: 81730 - RNA, 23 nt, Homo sapiens
uuugugacacucuccaucuccag

SEQ ID NO: 81731 - RNA, 22 nt, Homo sapiens
uuugugcuccugugagaaucua

SEQ ID NO: 81732 - RNA, 22 nt, Homo sapiens
uuugugcuccucucaguaugug

SEQ ID NO: 81733 - RNA, 23 nt, Homo sapiens
uuugccacuuauuagcugggagg

SEQ ID NO: 81734 - RNA, 22 nt, Homo sapiens
uuugccuguagacacuuacccu

SEQ ID NO: 81735 - RNA, 22 nt, Homo sapiens
uugguccguugugaaaaggccu

SEQ ID NO: 81736 - RNA, 22 nt, Homo sapiens
uuggucucaucaagagcagcuu

SEQ ID NO: 81737 - RNA, 20 nt, Homo sapiens
uuggugaccuacagaugugg

SEQ ID NO: 81738 - RNA, 22 nt, Homo sapiens
uugguuccuuagccuaggacua

SEQ ID NO: 81739 - RNA, 22 nt, Homo sapiens
uugugguaaucugugacagcag

SEQ ID NO: 81740 - RNA, 22 nt, Homo sapiens
uuguggcuuaucucauuuagcg

SEQ ID NO: 81741 - RNA, 22 nt, Homo sapiens
uugucacauggggcggcugccc

SEQ ID NO: 81742 - RNA, 22 nt, Homo sapiens
uugucacugcacuccagucugg

SEQ ID NO: 81743 - RNA, 22 nt, Homo sapiens
uuuaucaggccuuuggaaaaau

SEQ ID NO: 81744 - RNA, 22 nt, Homo sapiens
uuguguacuacaguaugccaca

SEQ ID NO: 81745 - RNA, 21 nt, Homo sapiens
uuucacugugaguuuuucugu

SEQ ID NO: 81746 - RNA, 21 nt, Homo sapiens
uuuccuggagcguauggcuuc

SEQ ID NO: 81747 - RNA, 20 nt, Homo sapiens
uuucaguacuuucuacuggc

SEQ ID NO: 81748 - RNA, 18 nt, Homo sapiens
uuucaggguggacaugag

SEQ ID NO: 81749 - RNA, 17 nt, Homo sapiens
uuucucagcccucuucu

SEQ ID NO: 81750 - RNA, 22 nt, Homo sapiens
uuucgugucuggucugugaugg

SEQ ID NO: 81751 - RNA, 22 nt, Homo sapiens
uuucugggggugcugauggaaa

SEQ ID NO: 81752 - RNA, 21 nt, Homo sapiens
uuucugggggagcauggcagg

SEQ ID NO: 81753 - RNA, 22 nt, Homo sapiens
cugaugguuuuacacaagggca

SEQ ID NO: 81754 - RNA, 22 nt, Homo sapiens
cugcagucaucugaagauuuug

SEQ ID NO: 81755 - RNA, 22 nt, Homo sapiens
cugcacugagacccucuuugcu

SEQ ID NO: 81756 - RNA, 19 nt, Homo sapiens
cugcaagguaauaggucag

SEQ ID NO: 81757 - RNA, 22 nt, Homo sapiens
cugaggucugaauccagguauc

SEQ ID NO: 81758 - RNA, 22 nt, Homo sapiens
cugaggugggaggauuggcuug

SEQ ID NO: 81759 - RNA, 22 nt, Homo sapiens
cuuccauauucuaggacaggcu

SEQ ID NO: 81760 - RNA, 22 nt, Homo sapiens
cuuccaguggcagccgggcaug

SEQ ID NO: 81761 - RNA, 22 nt, Homo sapiens
cuuccaaguggggcacgugcca

SEQ ID NO: 81762 - RNA, 22 nt, Homo sapiens
cuuccagcuggguucagucagu

SEQ ID NO: 81763 - RNA, 22 nt, Homo sapiens
cuugacaaugcuucaggcugaa

SEQ ID NO: 81764 - RNA, 22 nt, Homo sapiens
cuugaccaauauggugaaaccc

SEQ ID NO: 81765 - RNA, 23 nt, Homo sapiens
cuugagacaaaugcgugugugca

SEQ ID NO: 81766 - RNA, 22 nt, Homo sapiens
cuugagcaaacaaaggugguag

SEQ ID NO: 81767 - RNA, 20 nt, Homo sapiens
cuugaagacuaugcugcuga

SEQ ID NO: 81768 - RNA, 22 nt, Homo sapiens
cuucuugagggccugcugggaa

SEQ ID NO: 81769 - RNA, 22 nt, Homo sapiens
cuugaucaaugugguacuugau

SEQ ID NO: 81770 - RNA, 22 nt, Homo sapiens
cuugcacuccacuguucuccug

SEQ ID NO: 81771 - RNA, 22 nt, Homo sapiens
cuugcagaggcccuggggagag

SEQ ID NO: 81772 - RNA, 22 nt, Homo sapiens
cuugcacuagugcagaggcgcu

SEQ ID NO: 81773 - RNA, 22 nt, Homo sapiens
cuuggcacgugauagguguuga

SEQ ID NO: 81774 - RNA, 22 nt, Homo sapiens
cuuguggugcuuuuacgugggc

SEQ ID NO: 81775 - RNA, 22 nt, Homo sapiens
cuugugccugaucuuagggggc

SEQ ID NO: 81776 - RNA, 21 nt, Homo sapiens
cuugucuugcuuagaauagac

SEQ ID NO: 81777 - RNA, 22 nt, Homo sapiens
cuuggcuuguuguccccugcuc

SEQ ID NO: 81778 - RNA, 20 nt, Homo sapiens
cuuggcuuucuugguguuaa

SEQ ID NO: 81779 - RNA, 22 nt, Homo sapiens
cuugggauauguguuacucugu

SEQ ID NO: 81780 - RNA, 18 nt, Homo sapiens
cuuggcgaugccaacaua

SEQ ID NO: 81781 - RNA, 22 nt, Homo sapiens
cuuggcuccgacuccccuccaa

SEQ ID NO: 81782 - RNA, 22 nt, Homo sapiens
gagacauguuugcuuaucugag

SEQ ID NO: 81783 - RNA, 21 nt, Homo sapiens
gagaaucaucauggcugcaua

SEQ ID NO: 81784 - RNA, 22 nt, Homo sapiens
gagaacugagugugcuggcgga

SEQ ID NO: 81785 - RNA, 22 nt, Homo sapiens
gagacggagucacgcccuguca

SEQ ID NO: 81786 - RNA, 23 nt, Homo sapiens
gagaccagcuucagaaagcacga

SEQ ID NO: 81787 - RNA, 22 nt, Homo sapiens
gacagagcaagacccuauuuaa

SEQ ID NO: 81788 - RNA, 22 nt, Homo sapiens
gaaugucuuauugcucguugua

SEQ ID NO: 81789 - RNA, 22 nt, Homo sapiens
gaaugugcuguuggcugggcgu

SEQ ID NO: 81790 - RNA, 22 nt, Homo sapiens
gaagagacagguucccacaaaa

SEQ ID NO: 81791 - RNA, 22 nt, Homo sapiens
gaagaucacacuguagaucuau

SEQ ID NO: 81792 - RNA, 22 nt, Homo sapiens
gaagacauuugcugcacguccu

SEQ ID NO: 81793 - RNA, 22 nt, Homo sapiens
gaagcgaggugauuagcagaca

SEQ ID NO: 81794 - RNA, 22 nt, Homo sapiens
gaagcagcauucugguuuuugg

SEQ ID NO: 81795 - RNA, 22 nt, Homo sapiens
cuuucucagugagacccgagau

SEQ ID NO: 81796 - RNA, 22 nt, Homo sapiens
cuuguuguggaggggagugcag

SEQ ID NO: 81797 - RNA, 17 nt, Homo sapiens
cuuguugugguaguuug

SEQ ID NO: 81798 - RNA, 21 nt, Homo sapiens
cuuugcacugcuccucagcuc

SEQ ID NO: 81799 - RNA, 19 nt, Homo sapiens
gcugguuguccacucucuc

SEQ ID NO: 81800 - RNA, 22 nt, Homo sapiens
gcugguguucaggcccucaguc

SEQ ID NO: 81801 - RNA, 22 nt, Homo sapiens
gcugguguagagugcagaaagg

SEQ ID NO: 81802 - RNA, 22 nt, Homo sapiens
gcugguguugugaaucaggccg

SEQ ID NO: 81803 - RNA, 22 nt, Homo sapiens
gcugcuguaccagaugugguua

SEQ ID NO: 81804 - RNA, 22 nt, Homo sapiens
gcugcuguggcagauuggauuc

SEQ ID NO: 81805 - RNA, 22 nt, Homo sapiens
gcuagcacauugucaccucuca

SEQ ID NO: 81806 - RNA, 22 nt, Homo sapiens
gcuagcauucaaaugugcagcc

SEQ ID NO: 81807 - RNA, 22 nt, Homo sapiens
gcuggcaagaugcugaugcaac

SEQ ID NO: 81808 - RNA, 22 nt, Homo sapiens
gcugcuguuuaguuucuccugg

SEQ ID NO: 81809 - RNA, 22 nt, Homo sapiens
gccauugcacuccagccucggc

SEQ ID NO: 81810 - RNA, 22 nt, Homo sapiens
gcaguguuggggccggaggcug

SEQ ID NO: 81811 - RNA, 22 nt, Homo sapiens
gcccugauacauucuucugccu

SEQ ID NO: 81812 - RNA, 22 nt, Homo sapiens
gccuaguguuaauguguguuca

SEQ ID NO: 81813 - RNA, 22 nt, Homo sapiens
gcgcagugggcugugccaucca

SEQ ID NO: 81814 - RNA, 22 nt, Homo sapiens
gcgagcauuguaggaaguucag

SEQ ID NO: 81815 - RNA, 19 nt, Homo sapiens
gcggcacuggagacacagc

SEQ ID NO: 81816 - RNA, 22 nt, Homo sapiens
gauuccacuuucugucucuaug

SEQ ID NO: 81817 - RNA, 20 nt, Homo sapiens
gcaacauggccagagugaau

SEQ ID NO: 81818 - RNA, 22 nt, Homo sapiens
gcagucacagggagauggugac

SEQ ID NO: 81819 - RNA, 22 nt, Homo sapiens
gcaguagugcgaucucagcuca

SEQ ID NO: 81820 - RNA, 22 nt, Homo sapiens
gcaggaauuucucugcagaccc

SEQ ID NO: 81821 - RNA, 22 nt, Homo sapiens
gcagguaguuucugacuuuuac

SEQ ID NO: 81822 - RNA, 17 nt, Homo sapiens
gcauaugucgaaccagc

SEQ ID NO: 81823 - RNA, 22 nt, Homo sapiens
gcagugugaucacagcuuacug

SEQ ID NO: 81824 - RNA, 22 nt, Homo sapiens
gcagugugauguuuuaaucuau

SEQ ID NO: 81825 - RNA, 23 nt, Homo sapiens
gcagucauuuggaaaagguugaa

SEQ ID NO: 81826 - RNA, 22 nt, Homo sapiens
gcaagaaucugggaguaaaauu

SEQ ID NO: 81827 - RNA, 22 nt, Homo sapiens
gcagcauuaccaagacauggca

SEQ ID NO: 81828 - RNA, 22 nt, Homo sapiens
gcaggaaucuugagaaggauuc

SEQ ID NO: 81829 - RNA, 22 nt, Homo sapiens
gcagcagugugggcugaaccua

SEQ ID NO: 81830 - RNA, 22 nt, Homo sapiens
gcagcaucaaaucacacaagau

SEQ ID NO: 81831 - RNA, 22 nt, Homo sapiens
gcagcagugcccuggauggaaa

SEQ ID NO: 81832 - RNA, 22 nt, Homo sapiens
gagaucuuggccaaguuucuua

SEQ ID NO: 81833 - RNA, 22 nt, Homo sapiens
gagauggaguuucacuucgcuc

SEQ ID NO: 81834 - RNA, 22 nt, Homo sapiens
gagaugcaccuugucacguuuc

SEQ ID NO: 81835 - RNA, 22 nt, Homo sapiens
gagaucaaguauucuccacuaa

SEQ ID NO: 81836 - RNA, 22 nt, Homo sapiens
gagauaggauucacuuucaugu

SEQ ID NO: 81837 - RNA, 22 nt, Homo sapiens
gaguaaauguccuagcuucuug

SEQ ID NO: 81838 - RNA, 22 nt, Homo sapiens
gaggucaugucgggccccagga

SEQ ID NO: 81839 - RNA, 22 nt, Homo sapiens
gaggucuuacauuuuaauauuu

SEQ ID NO: 81840 - RNA, 22 nt, Homo sapiens
gaggcagucuguccauucucag

SEQ ID NO: 81841 - RNA, 22 nt, Homo sapiens
gaggcagucugucccuuagcag

SEQ ID NO: 81842 - RNA, 22 nt, Homo sapiens
gaggcggugugaugucacaugc

SEQ ID NO: 81843 - RNA, 22 nt, Homo sapiens
gagggcacugcuuuccuuucaa

SEQ ID NO: 81844 - RNA, 22 nt, Homo sapiens
gagguagugagcagcugaacua

SEQ ID NO: 81845 - RNA, 22 nt, Homo sapiens
gagguaggggccuuaaagaugc

SEQ ID NO: 81846 - RNA, 22 nt, Homo sapiens
gagguaggaggauugcuuaagg

SEQ ID NO: 81847 - RNA, 22 nt, Homo sapiens
gaucacauuguuucauacauau

SEQ ID NO: 81848 - RNA, 22 nt, Homo sapiens
gaucacaugggagaaugagagu

SEQ ID NO: 81849 - RNA, 22 nt, Homo sapiens
gaucacaguuccucacgggcau

SEQ ID NO: 81850 - RNA, 22 nt, Homo sapiens
gauacuggcuuuauagaaugau

SEQ ID NO: 81851 - RNA, 22 nt, Homo sapiens
gauaucuuuuguauggugagcu

SEQ ID NO: 81852 - RNA, 22 nt, Homo sapiens
gaucucaguggauacugugaug

SEQ ID NO: 81853 - RNA, 22 nt, Homo sapiens
gaugaugcuagguguuagggcu

SEQ ID NO: 81854 - RNA, 22 nt, Homo sapiens
gaugaggcuagagacaugugua

SEQ ID NO: 81855 - RNA, 22 nt, Homo sapiens
gaugagcuaaguucucacagca

SEQ ID NO: 81856 - RNA, 22 nt, Homo sapiens
gaugagguagaagacucagcaa

SEQ ID NO: 81857 - RNA, 22 nt, Homo sapiens
ccacugcacuccagcccggcaa

SEQ ID NO: 81858 - RNA, 22 nt, Homo sapiens
ccaagugcuuaaaauuucauuu

SEQ ID NO: 81859 - RNA, 22 nt, Homo sapiens
ccaaguguucucauuguucaau

SEQ ID NO: 81860 - RNA, 22 nt, Homo sapiens
ccaaguguuuucauuguuccau

SEQ ID NO: 81861 - RNA, 22 nt, Homo sapiens
ccaaggaauacccucccuuuuu

SEQ ID NO: 81862 - RNA, 19 nt, Homo sapiens
ccacaaugguugaacuaga

SEQ ID NO: 81863 - RNA, 22 nt, Homo sapiens
ccacaaccuccauauccugggu

SEQ ID NO: 81864 - RNA, 22 nt, Homo sapiens
caucagcaauguaugaggguuc

SEQ ID NO: 81865 - RNA, 22 nt, Homo sapiens
cauuuugcaguuucugucucca

SEQ ID NO: 81866 - RNA, 21 nt, Homo sapiens
ccccugauacuuagucaagag

SEQ ID NO: 81867 - RNA, 22 nt, Homo sapiens
cccucgagaaaccaucugcuga

SEQ ID NO: 81868 - RNA, 22 nt, Homo sapiens
cccgugucuuggucuagggccu

SEQ ID NO: 81869 - RNA, 22 nt, Homo sapiens
ccccuguaaacuggcuucccug

SEQ ID NO: 81870 - RNA, 22 nt, Homo sapiens
ccucuuuguugagacuucacca

SEQ ID NO: 81871 - RNA, 22 nt, Homo sapiens
cccauuguuaaguugaguaucu

SEQ ID NO: 81872 - RNA, 22 nt, Homo sapiens
cccaguguuuauuuugagccaa

SEQ ID NO: 81873 - RNA, 22 nt, Homo sapiens
ccauggcuucugcauucuguca

SEQ ID NO: 81874 - RNA, 22 nt, Homo sapiens
cucuuggguagauuuugcagag

SEQ ID NO: 81875 - RNA, 22 nt, Homo sapiens
cucagucuaugauacuuugcua

SEQ ID NO: 81876 - RNA, 20 nt, Homo sapiens
cucagguauuugaggcugca

SEQ ID NO: 81877 - RNA, 22 nt, Homo sapiens
cucaguguuucagcugcucaga

SEQ ID NO: 81878 - RNA, 22 nt, Homo sapiens
cucagagcacaguuuaugacag

SEQ ID NO: 81879 - RNA, 22 nt, Homo sapiens
cucacugggaccacucugaagu

SEQ ID NO: 81880 - RNA, 22 nt, Homo sapiens
cucaaguacaugggauuacagg

SEQ ID NO: 81881 - RNA, 20 nt, Homo sapiens
cucaccagguguaggcugag

SEQ ID NO: 81882 - RNA, 22 nt, Homo sapiens
ccuguguuaugguuucuaaugu

SEQ ID NO: 81883 - RNA, 22 nt, Homo sapiens
ccugugguuaaccagcuagaug

SEQ ID NO: 81884 - RNA, 19 nt, Homo sapiens
ccugcuguucuuuugcacc

SEQ ID NO: 81885 - RNA, 21 nt, Homo sapiens
ccugauguucacuuggccuuc

SEQ ID NO: 81886 - RNA, 22 nt, Homo sapiens
ccugagacugauugacucacaa

SEQ ID NO: 81887 - RNA, 22 nt, Homo sapiens
ccuggcaagagacugaagauag

SEQ ID NO: 81888 - RNA, 22 nt, Homo sapiens
ccuugguaauguguuuuauucu

SEQ ID NO: 81889 - RNA, 22 nt, Homo sapiens
ccuuggcacuacugacauugua

SEQ ID NO: 81890 - RNA, 22 nt, Homo sapiens
ccuuuguggggcgguggguaau

SEQ ID NO: 81891 - RNA, 22 nt, Homo sapiens
ccuuggcaauggcuggggcuga

SEQ ID NO: 81892 - RNA, 22 nt, Homo sapiens
ccuuuguuaguuugcugagaau

SEQ ID NO: 81893 - RNA, 22 nt, Homo sapiens
cuauggcagccacggccuggag

SEQ ID NO: 81894 - RNA, 22 nt, Homo sapiens
cuaucugcacaggguggaaauu

SEQ ID NO: 81895 - RNA, 21 nt, Homo sapiens
cucaaaguacugauauuacag

SEQ ID NO: 81896 - RNA, 22 nt, Homo sapiens
caguguuuuuaacaggugcccg

SEQ ID NO: 81897 - RNA, 22 nt, Homo sapiens
caguucaugguaggcaccauag

SEQ ID NO: 81898 - RNA, 22 nt, Homo sapiens
cagugacacugaaaaguucggg

SEQ ID NO: 81899 - RNA, 22 nt, Homo sapiens
cagugcuuuaucaaguccucca

SEQ ID NO: 81900 - RNA, 23 nt, Homo sapiens
cagugcaugacuguauaugcaaa

SEQ ID NO: 81901 - RNA, 20 nt, Homo sapiens
cagcuagugguaggagucgg

SEQ ID NO: 81902 - RNA, 22 nt, Homo sapiens
cagcaguuguuucggauuggga

SEQ ID NO: 81903 - RNA, 22 nt, Homo sapiens
cagcccuacacagacugacuca

SEQ ID NO: 81904 - RNA, 22 nt, Homo sapiens
cagcccguaaucccagcacuuu

SEQ ID NO: 81905 - RNA, 22 nt, Homo sapiens
cagcugguggcaagaagacaga

SEQ ID NO: 81906 - RNA, 23 nt, Homo sapiens
cagcuggugauuuuaaguugaag

SEQ ID NO: 81907 - RNA, 23 nt, Homo sapiens
cagcucauuuggguccccuuguc

SEQ ID NO: 81908 - RNA, 22 nt, Homo sapiens
cagcuggugggagcuggguucc

SEQ ID NO: 81909 - RNA, 22 nt, Homo sapiens
cagcugguguuacaaaccagag

SEQ ID NO: 81910 - RNA, 22 nt, Homo sapiens
cagcuguguuauaaacuaccau

SEQ ID NO: 81911 - RNA, 19 nt, Homo sapiens
caccgccugcccccugcug

SEQ ID NO: 81912 - RNA, 22 nt, Homo sapiens
cacuaggcuggagugcaguggc

SEQ ID NO: 81913 - RNA, 22 nt, Homo sapiens
cagcacauagcaguugcucagu

SEQ ID NO: 81914 - RNA, 22 nt, Homo sapiens
cagcacauuacaaguacuuggu

SEQ ID NO: 81915 - RNA, 22 nt, Homo sapiens
cacccgugcucccuccagcugc

SEQ ID NO: 81916 - RNA, 22 nt, Homo sapiens
caccacagccauuauugucccc

SEQ ID NO: 81917 - RNA, 22 nt, Homo sapiens
caccagguuggagugcaguggu

SEQ ID NO: 81918 - RNA, 22 nt, Homo sapiens
caccaggugcccagcacggcca

SEQ ID NO: 81919 - RNA, 22 nt, Homo sapiens
cacauugaauuucugaugacaa

SEQ ID NO: 81920 - RNA, 22 nt, Homo sapiens
caaaggugcuuuccagguccaa

SEQ ID NO: 81921 - RNA, 22 nt, Homo sapiens
caaagugcugaaagaggccagg

SEQ ID NO: 81922 - RNA, 22 nt, Homo sapiens
caaagugcuggaauuggccggg

SEQ ID NO: 81923 - RNA, 22 nt, Homo sapiens
auuuccuguaggggcuugcgaa

SEQ ID NO: 81924 - RNA, 19 nt, Homo sapiens
auuuccuggagcuggucuc

SEQ ID NO: 81925 - RNA, 22 nt, Homo sapiens
auuuggguaaugagugcaaggg

SEQ ID NO: 81926 - RNA, 22 nt, Homo sapiens
auuggcuuuugaaagucugcga

SEQ ID NO: 81927 - RNA, 22 nt, Homo sapiens
auuggcuuuauacauaagaaua

SEQ ID NO: 81928 - RNA, 22 nt, Homo sapiens
auuggccccguuuuaaauguca

SEQ ID NO: 81929 - RNA, 22 nt, Homo sapiens
auuguuccccggucauuuuugu

SEQ ID NO: 81930 - RNA, 22 nt, Homo sapiens
auuggaguuguacgcacgcuca

SEQ ID NO: 81931 - RNA, 21 nt, Homo sapiens
auugcgcuccagccuccuggg

SEQ ID NO: 81932 - RNA, 23 nt, Homo sapiens
auugcccuugaaggcuaaacucu

SEQ ID NO: 81933 - RNA, 23 nt, Homo sapiens
auugcagucuugaacuccugggc

SEQ ID NO: 81934 - RNA, 22 nt, Homo sapiens
guagaucucaacacuggaagua

SEQ ID NO: 81935 - RNA, 22 nt, Homo sapiens
guagaagcacagggccuguauu

SEQ ID NO: 81936 - RNA, 22 nt, Homo sapiens
guauggcacuauccucucugau

SEQ ID NO: 81937 - RNA, 22 nt, Homo sapiens
gucaguggagaaaaggacaugu

SEQ ID NO: 81938 - RNA, 22 nt, Homo sapiens
gucagugcuuuaguucaggaug

SEQ ID NO: 81939 - RNA, 22 nt, Homo sapiens
guauugccugugugccagccac

SEQ ID NO: 81940 - RNA, 22 nt, Homo sapiens
guauugcuugagcccaggaguu

SEQ ID NO: 81941 - RNA, 22 nt, Homo sapiens
ggugagcacagaaugcccugag

SEQ ID NO: 81942 - RNA, 22 nt, Homo sapiens
ggugagguaggaaaaguuagga

SEQ ID NO: 81943 - RNA, 22 nt, Homo sapiens
ggugagguaguaagguacaaua

SEQ ID NO: 81944 - RNA, 22 nt, Homo sapiens
gguggcuuuuugugauggcuga

SEQ ID NO: 81945 - RNA, 22 nt, Homo sapiens
ggugcagcacaccaacauggca

SEQ ID NO: 81946 - RNA, 22 nt, Homo sapiens
ggucuuggagaauuguccuggg

SEQ ID NO: 81947 - RNA, 22 nt, Homo sapiens
gguccgccugccuuggccuccc

SEQ ID NO: 81948 - RNA, 22 nt, Homo sapiens
ggucaguguuaucaccgaagga

SEQ ID NO: 81949 - RNA, 22 nt, Homo sapiens
guacaugcauaguuuauuucug

SEQ ID NO: 81950 - RNA, 22 nt, Homo sapiens
guaccugauacaggcgcacggu

SEQ ID NO: 81951 - RNA, 22 nt, Homo sapiens
guagaaaguuugcugucacaug

SEQ ID NO: 81952 - RNA, 22 nt, Homo sapiens
guacaggugcaggaugggcagg

SEQ ID NO: 81953 - RNA, 18 nt, Homo sapiens
ggcugguguuuuaguaua

SEQ ID NO: 81954 - RNA, 22 nt, Homo sapiens
ggcucagugaucuguuucugua

SEQ ID NO: 81955 - RNA, 22 nt, Homo sapiens
ggcucagugggguccugguucu

SEQ ID NO: 81956 - RNA, 22 nt, Homo sapiens
ggcucaguugcaaaucaguuca

SEQ ID NO: 81957 - RNA, 22 nt, Homo sapiens
ggcucaguuuccuccgucugcu

SEQ ID NO: 81958 - RNA, 22 nt, Homo sapiens
ggcuagagacaaguugcugaga

SEQ ID NO: 81959 - RNA, 22 nt, Homo sapiens
ggcuagauauucacauauggcu

SEQ ID NO: 81960 - RNA, 22 nt, Homo sapiens
ggcgccauugcacuccagccug

SEQ ID NO: 81961 - RNA, 18 nt, Homo sapiens
ggcggguguuuuauucac

SEQ ID NO: 81962 - RNA, 22 nt, Homo sapiens
ggccagaugcgguggcucacac

SEQ ID NO: 81963 - RNA, 22 nt, Homo sapiens
ggcauguuuaguagaauguggu

SEQ ID NO: 81964 - RNA, 22 nt, Homo sapiens
ggacaagaucuuccaccauuca

SEQ ID NO: 81965 - RNA, 22 nt, Homo sapiens
ggacaagagacugggacacuga

SEQ ID NO: 81966 - RNA, 22 nt, Homo sapiens
ggacacguagaugccgacuagc

SEQ ID NO: 81967 - RNA, 22 nt, Homo sapiens
ggcccugagacaggaaaaagcu

SEQ ID NO: 81968 - RNA, 23 nt, Homo sapiens
ggcauuguggcucacaucuguaa

SEQ ID NO: 81969 - RNA, 22 nt, Homo sapiens
ggaacaccauuuuuccugccuu

SEQ ID NO: 81970 - RNA, 22 nt, Homo sapiens
ggaaauguuggugucaugaguu

SEQ ID NO: 81971 - RNA, 22 nt, Homo sapiens
ggaaaucaucauucucgguaua

SEQ ID NO: 81972 - RNA, 22 nt, Homo sapiens
ggaaugcuaaaauaggaugcug

SEQ ID NO: 81973 - RNA, 22 nt, Homo sapiens
ggaauauaaaacuuuugacagg

SEQ ID NO: 81974 - RNA, 19 nt, Homo sapiens
ggucagcaaagucuagcug

SEQ ID NO: 81975 - RNA, 22 nt, Homo sapiens
ggggcaaaaugccacgagucuc

SEQ ID NO: 81976 - RNA, 22 nt, Homo sapiens
gggcaugugugugcacacacau

SEQ ID NO: 81977 - RNA, 22 nt, Homo sapiens
gggcauguggacuuguauguuu

SEQ ID NO: 81978 - RNA, 16 nt, Homo sapiens
gggcaugugaagccua

SEQ ID NO: 81979 - RNA, 22 nt, Homo sapiens
gggaacauggaaauucugcucu

SEQ ID NO: 81980 - RNA, 22 nt, Homo sapiens
gggaacaugagaaugugaauga

SEQ ID NO: 81981 - RNA, 18 nt, Homo sapiens
gggcaaguugccuggcuu

SEQ ID NO: 81982 - RNA, 22 nt, Homo sapiens
guggcuagaaugaagguagcug

SEQ ID NO: 81983 - RNA, 22 nt, Homo sapiens
guggcuuguaggggucaaggga

SEQ ID NO: 81984 - RNA, 22 nt, Homo sapiens
guggcgagaucauagcucauug

SEQ ID NO: 81985 - RNA, 22 nt, Homo sapiens
guguaugguaggaugacggagu

SEQ ID NO: 81986 - RNA, 21 nt, Homo sapiens
gugcuuguagccucacuucug

SEQ ID NO: 81987 - RNA, 22 nt, Homo sapiens
guggcagcacauauagguuguu

SEQ ID NO: 81988 - RNA, 22 nt, Homo sapiens
guggcagugugaggauccugcu

SEQ ID NO: 81989 - RNA, 22 nt, Homo sapiens
guggcacgaugaucugggcuca

SEQ ID NO: 81990 - RNA, 18 nt, Homo sapiens
gugcauagccauggcagc

SEQ ID NO: 81991 - RNA, 19 nt, Homo sapiens
gugcauaguuauuaaagag

SEQ ID NO: 81992 - RNA, 22 nt, Homo sapiens
gugcuauguuauccagcaagau

SEQ ID NO: 81993 - RNA, 22 nt, Homo sapiens
gugccuucuagcuaugguuggc

SEQ ID NO: 81994 - RNA, 23 nt, Homo sapiens
gugccuucugagccuagucucca

SEQ ID NO: 81995 - RNA, 22 nt, Homo sapiens
guguccucgaguacacaucagg

SEQ ID NO: 81996 - RNA, 22 nt, Homo sapiens
gugucuccugccuucaugcagc

SEQ ID NO: 81997 - RNA, 22 nt, Homo sapiens
gugucaugagggggacaggaag

SEQ ID NO: 81998 - RNA, 21 nt, Homo sapiens
gugucacagacaugacagaug

SEQ ID NO: 81999 - RNA, 22 nt, Homo sapiens
gugucaaggaugccugucaggc

SEQ ID NO: 82000 - RNA, 22 nt, Homo sapiens
guuaagggaagccuggguaaga

SEQ ID NO: 82001 - RNA, 22 nt, Homo sapiens
guuauccugucuuuacauacaa

SEQ ID NO: 82002 - RNA, 22 nt, Homo sapiens
guucacagugguugccuuccag

SEQ ID NO: 82003 - RNA, 22 nt, Homo sapiens
guucacaguuaggacaacugcu

SEQ ID NO: 82004 - RNA, 22 nt, Homo sapiens
guucaaggaauguuggcuucuc

SEQ ID NO: 82005 - RNA, 22 nt, Homo sapiens
guugccuaggcuggagugcagu

SEQ ID NO: 82006 - RNA, 22 nt, Homo sapiens
guugcucaggcuggagugcagu

SEQ ID NO: 82007 - RNA, 22 nt, Homo sapiens
guccaagacuaggaguuggcag

SEQ ID NO: 82008 - RNA, 22 nt, Homo sapiens
guccaguacucuuuccugaaaa

SEQ ID NO: 82009 - RNA, 20 nt, Homo sapiens
guccauuugcugccauugcu

SEQ ID NO: 82010 - RNA, 22 nt, Homo sapiens
gucauggacaaggugugagcca

SEQ ID NO: 82011 - RNA, 22 nt, Homo sapiens
gucauggaaaucuacauuguua

SEQ ID NO: 82012 - RNA, 22 nt, Homo sapiens
gucauugguucuguuuauguga

SEQ ID NO: 82013 - RNA, 22 nt, Homo sapiens
gucauugcacuccagccuggac

SEQ ID NO: 82014 - RNA, 22 nt, Homo sapiens
gugagcaguguccuugggggca

SEQ ID NO: 82015 - RNA, 22 nt, Homo sapiens
gugagcagagaucgcgugauug

SEQ ID NO: 82016 - RNA, 22 nt, Homo sapiens
gugagaccaauguacuaccuuc

SEQ ID NO: 82017 - RNA, 22 nt, Homo sapiens
gugagacugaguuucgcucuug

SEQ ID NO: 82018 - RNA, 16 nt, Homo sapiens
gugagagaugacaaac

SEQ ID NO: 82019 - RNA, 22 nt, Homo sapiens
guccauuuguuuccagagcacu

SEQ ID NO: 82020 - RNA, 22 nt, Homo sapiens
guccuggagaagcguggaccgg

SEQ ID NO: 82021 - RNA, 22 nt, Homo sapiens
gugaggucagggcuguggacag

SEQ ID NO: 82022 - RNA, 22 nt, Homo sapiens
gugcaagcaucauggaguguac

SEQ ID NO: 82023 - RNA, 22 nt, Homo sapiens
gugcaaguguaauacagcuagg

SEQ ID NO: 82024 - RNA, 18 nt, Homo sapiens
gugcaaugaauagcagag

SEQ ID NO: 82025 - RNA, 22 nt, Homo sapiens
gugagcuaagcaaauaugagcc

SEQ ID NO: 82026 - RNA, 22 nt, Homo sapiens
gugagcuagaccacuuggcucc

SEQ ID NO: 82027 - RNA, 22 nt, Homo sapiens
gugagcauaggaggcuucuguu

SEQ ID NO: 82028 - RNA, 22 nt, Homo sapiens
gugagcauucaaggaaggagcu

SEQ ID NO: 82029 - RNA, 22 nt, Homo sapiens
gugagcgaggaaacgacggcgc

SEQ ID NO: 82030 - RNA, 21 nt, Homo sapiens
gugaggaguuacuggcuuuga

SEQ ID NO: 82031 - RNA, 22 nt, Homo sapiens
gugcacgucuuaggaggucacg

SEQ ID NO: 82032 - RNA, 21 nt, Homo sapiens
gugcagaugccacagucacuc

SEQ ID NO: 82033 - RNA, 22 nt, Homo sapiens
gugcaguuuugagugaguuucu

SEQ ID NO: 82034 - RNA, 22 nt, Homo sapiens
gugcaguguuugcauggaauca

SEQ ID NO: 82035 - RNA, 22 nt, Homo sapiens
gugcaguuuacaguuacccagu

SEQ ID NO: 82036 - RNA, 22 nt, Homo sapiens
gugcacaaaucuuaaauguaca

SEQ ID NO: 82037 - RNA, 22 nt, Homo sapiens
gugcacaacgugcaggcuuguu

SEQ ID NO: 82038 - RNA, 22 nt, Homo sapiens
gugcacauauggugcauaagug

SEQ ID NO: 82039 - RNA, 22 nt, Homo sapiens
gugcacaucuguguuccagcua

SEQ ID NO: 82040 - RNA, 21 nt, Homo sapiens
gugcacaguaguguuuaauag

SEQ ID NO: 82041 - RNA, 22 nt, Homo sapiens
gugcacaugcgugcgcacauau

SEQ ID NO: 82042 - RNA, 22 nt, Homo sapiens
uauugcuuuugauucaaggcag

SEQ ID NO: 82043 - RNA, 22 nt, Homo sapiens
uauuccacuggcacugcauuug

SEQ ID NO: 82044 - RNA, 22 nt, Homo sapiens
uauuccacucuguuggagguaa

SEQ ID NO: 82045 - RNA, 22 nt, Homo sapiens
uauuccacaauaugauuuuuaa

SEQ ID NO: 82046 - RNA, 22 nt, Homo sapiens
uauuccacuuacaugagguauc

SEQ ID NO: 82047 - RNA, 22 nt, Homo sapiens
uaugcacacacguguuuaugug

SEQ ID NO: 82048 - RNA, 22 nt, Homo sapiens
uaugcacaugcaugcuugaaua

SEQ ID NO: 82049 - RNA, 22 nt, Homo sapiens
uaugcacacguguccaugugca

SEQ ID NO: 82050 - RNA, 22 nt, Homo sapiens
uaugcacacucucccaggaggg

SEQ ID NO: 82051 - RNA, 22 nt, Homo sapiens
uaugagcacauauguaucuaug

SEQ ID NO: 82052 - RNA, 22 nt, Homo sapiens
uaucagugaaucuuauuuugcc

SEQ ID NO: 82053 - RNA, 22 nt, Homo sapiens
uagcagguggugaccacauuuu

SEQ ID NO: 82054 - RNA, 22 nt, Homo sapiens
uagcagcauaaauggacuaaga

SEQ ID NO: 82055 - RNA, 22 nt, Homo sapiens
uagcagcaaagcaggaucugcu

SEQ ID NO: 82056 - RNA, 22 nt, Homo sapiens
uagcagcagugguguauuuaga

SEQ ID NO: 82057 - RNA, 22 nt, Homo sapiens
uagcagcuuuauugagguaaau

SEQ ID NO: 82058 - RNA, 22 nt, Homo sapiens
uagcaggaaaccuguguugagg

SEQ ID NO: 82059 - RNA, 21 nt, Homo sapiens
uagcagcguuguugcaaaugu

SEQ ID NO: 82060 - RNA, 22 nt, Homo sapiens
uagcagcauuuuuguagaguau

SEQ ID NO: 82061 - RNA, 22 nt, Homo sapiens
uagcaggaaaggggucagaucu

SEQ ID NO: 82062 - RNA, 22 nt, Homo sapiens
uaguagcaccucucaugagcuu

SEQ ID NO: 82063 - RNA, 22 nt, Homo sapiens
uacagguauagauguguguucu

SEQ ID NO: 82064 - RNA, 22 nt, Homo sapiens
uacagucuagaggagaaucagg

SEQ ID NO: 82065 - RNA, 22 nt, Homo sapiens
uacagucuggaggccuguguug

SEQ ID NO: 82066 - RNA, 22 nt, Homo sapiens
uacagugcuugguaucuaguaa

SEQ ID NO: 82067 - RNA, 22 nt, Homo sapiens
uacagugcuuuuugguggagaa

SEQ ID NO: 82068 - RNA, 22 nt, Homo sapiens
uacaguggcaugucaggugcuu

SEQ ID NO: 82069 - RNA, 21 nt, Homo sapiens
uacaaugcacaggagagccuc

SEQ ID NO: 82070 - RNA, 21 nt, Homo sapiens
uacaagcuguagcacaugcca

SEQ ID NO: 82071 - RNA, 22 nt, Homo sapiens
uacacagucaaaaauuuccagg

SEQ ID NO: 82072 - RNA, 22 nt, Homo sapiens
uacagcacaggugcagguguug

SEQ ID NO: 82073 - RNA, 22 nt, Homo sapiens
uacagcuaugugcaugcaugcu

SEQ ID NO: 82074 - RNA, 23 nt, Homo sapiens
uacagcugcagaaucaggcuaag

SEQ ID NO: 82075 - RNA, 22 nt, Homo sapiens
uacacgugcacaacgugcacgu

SEQ ID NO: 82076 - RNA, 20 nt, Homo sapiens
uacacguaugagcacaugug

SEQ ID NO: 82077 - RNA, 22 nt, Homo sapiens
uagacaacugaaacacugugca

SEQ ID NO: 82078 - RNA, 19 nt, Homo sapiens
uacugcacuccagucuggg

SEQ ID NO: 82079 - RNA, 22 nt, Homo sapiens
uaccuguagcucuucuaggcug

SEQ ID NO: 82080 - RNA, 22 nt, Homo sapiens
uacucagugacugguggaucaa

SEQ ID NO: 82081 - RNA, 22 nt, Homo sapiens
uagagcacagugauuagaccua

SEQ ID NO: 82082 - RNA, 22 nt, Homo sapiens
uagagcacauuaucauuuccaa

SEQ ID NO: 82083 - RNA, 22 nt, Homo sapiens
uagagcuagggacucgcaaugu

SEQ ID NO: 82084 - RNA, 22 nt, Homo sapiens
uagagcuaguuuuuaaucuaac

SEQ ID NO: 82085 - RNA, 22 nt, Homo sapiens
uagagagcuguuugaaagcagg

SEQ ID NO: 82086 - RNA, 22 nt, Homo sapiens
uacugcacuccagcuuaggaga

SEQ ID NO: 82087 - RNA, 22 nt, Homo sapiens
uacaagcacaggcagcaggcug

SEQ ID NO: 82088 - RNA, 22 nt, Homo sapiens
guuugcauagugcugggagggg

SEQ ID NO: 82089 - RNA, 22 nt, Homo sapiens
guugugcuuaagccuauugauu

SEQ ID NO: 82090 - RNA, 22 nt, Homo sapiens
guuguggcuugugauuaagcac

SEQ ID NO: 82091 - RNA, 22 nt, Homo sapiens
uaagugaaggaaguguguuuac

SEQ ID NO: 82092 - RNA, 22 nt, Homo sapiens
uaagugcaacauaaguguuaaa

SEQ ID NO: 82093 - RNA, 22 nt, Homo sapiens
uaagugaauuucacuacugagu

SEQ ID NO: 82094 - RNA, 22 nt, Homo sapiens
uaagugcaugauuacaugcaua

SEQ ID NO: 82095 - RNA, 22 nt, Homo sapiens
aaggcgguguggauccuacagc

SEQ ID NO: 82096 - RNA, 22 nt, Homo sapiens
aagggaaugcuuccaguuugug

SEQ ID NO: 82097 - RNA, 22 nt, Homo sapiens
aaggcuguucauuuagcacagu

SEQ ID NO: 82098 - RNA, 20 nt, Homo sapiens
aaggcuuucgaguuccaggg

SEQ ID NO: 82099 - RNA, 22 nt, Homo sapiens
aaggcuuuuugcugacguccuu

SEQ ID NO: 82100 - RNA, 22 nt, Homo sapiens
aaggcagucacuaaauagugag

SEQ ID NO: 82101 - RNA, 22 nt, Homo sapiens
aaggcaagagaaaauuucgagu

SEQ ID NO: 82102 - RNA, 22 nt, Homo sapiens
aaggcaagauacugguugcuga

SEQ ID NO: 82103 - RNA, 22 nt, Homo sapiens
aagugcuuuuuagauaugguuu

SEQ ID NO: 82104 - RNA, 22 nt, Homo sapiens
aagugcuggccuacucaaucga

SEQ ID NO: 82105 - RNA, 17 nt, Homo sapiens
aaggugcuucgaccucc

SEQ ID NO: 82106 - RNA, 22 nt, Homo sapiens
aagugcucuugaaacugccuua

SEQ ID NO: 82107 - RNA, 22 nt, Homo sapiens
aagugcucuugaaacugucuua

SEQ ID NO: 82108 - RNA, 22 nt, Homo sapiens
aagugcucuugugggaagagag

SEQ ID NO: 82109 - RNA, 22 nt, Homo sapiens
aaggcaagaagagaaccaucgg

SEQ ID NO: 82110 - RNA, 22 nt, Homo sapiens
aaggaauucaaauuuucucugg

SEQ ID NO: 82111 - RNA, 22 nt, Homo sapiens
aaggagcagagagcccuguuuc

SEQ ID NO: 82112 - RNA, 22 nt, Homo sapiens
aaggagcaguggacggguccua

SEQ ID NO: 82113 - RNA, 22 nt, Homo sapiens
aaggagcuaagagaucauacau

SEQ ID NO: 82114 - RNA, 22 nt, Homo sapiens
aagccacuguaccugucucuua

SEQ ID NO: 82115 - RNA, 22 nt, Homo sapiens
aagaugcagucauacuggagga

SEQ ID NO: 82116 - RNA, 22 nt, Homo sapiens
aagaugcagucauacuggagua

SEQ ID NO: 82117 - RNA, 20 nt, Homo sapiens
aagcagacauuuggaugaaa

SEQ ID NO: 82118 - RNA, 22 nt, Homo sapiens
aagcaggugucugugucuguaa

SEQ ID NO: 82119 - RNA, 22 nt, Homo sapiens
aagcacaauuucaccuucuugu

SEQ ID NO: 82120 - RNA, 22 nt, Homo sapiens
aaaugccucccauucuacugac

SEQ ID NO: 82121 - RNA, 23 nt, Homo sapiens
aaaugcucucaggugccaguaga

SEQ ID NO: 82122 - RNA, 22 nt, Homo sapiens
aaaugcucucuacacguuucug

SEQ ID NO: 82123 - RNA, 22 nt, Homo sapiens
aacagauugcugagccccaccc

SEQ ID NO: 82124 - RNA, 22 nt, Homo sapiens
aacagcacacccgcugcuucca

SEQ ID NO: 82125 - RNA, 22 nt, Homo sapiens
aacagcauaguacccgugauaa

SEQ ID NO: 82126 - RNA, 22 nt, Homo sapiens
aaauccauuuguucagcuaugc

SEQ ID NO: 82127 - RNA, 19 nt, Homo sapiens
aaccgggagugcacauguu

SEQ ID NO: 82128 - RNA, 22 nt, Homo sapiens
aagaucaucauagagggcauga

SEQ ID NO: 82129 - RNA, 22 nt, Homo sapiens
aacagucuccaguuguauccau

SEQ ID NO: 82130 - RNA, 22 nt, Homo sapiens
aaaguguguuuccaaccugugg

SEQ ID NO: 82131 - RNA, 22 nt, Homo sapiens
aaagugcuucucuuuggugggu

SEQ ID NO: 82132 - RNA, 22 nt, Homo sapiens
aaagugcaguacuucguauauu

SEQ ID NO: 82133 - RNA, 22 nt, Homo sapiens
aaagugcaguauuugggcagaa

SEQ ID NO: 82134 - RNA, 22 nt, Homo sapiens
aaagugacuuagugccccauuu

SEQ ID NO: 82135 - RNA, 22 nt, Homo sapiens
aaagugcugggauuggcugggc

SEQ ID NO: 82136 - RNA, 22 nt, Homo sapiens
aaagugcugggauuaggccagg

SEQ ID NO: 82137 - RNA, 22 nt, Homo sapiens
aaaggcaucugcucggcucccu

SEQ ID NO: 82138 - RNA, 22 nt, Homo sapiens
aaagugcacuuggaagagggcc

SEQ ID NO: 82139 - RNA, 22 nt, Homo sapiens
aaagugcaguauuugggcagga

SEQ ID NO: 82140 - RNA, 22 nt, Homo sapiens
aaagugcugggaucacacugaa

SEQ ID NO: 82141 - RNA, 22 nt, Homo sapiens
aaagugcugagauuguaggcau

SEQ ID NO: 82142 - RNA, 22 nt, Homo sapiens
aaaagcuuagaugggcuuguau

SEQ ID NO: 82143 - RNA, 22 nt, Homo sapiens
aaagugaauguaucccguaagu

SEQ ID NO: 82144 - RNA, 18 nt, Homo sapiens
accuucauuccuuugccu

SEQ ID NO: 82145 - RNA, 22 nt, Homo sapiens
accugcacagccgaacauagac

SEQ ID NO: 82146 - RNA, 22 nt, Homo sapiens
acagugucugacacguaggaag

SEQ ID NO: 82147 - RNA, 17 nt, Homo sapiens
acagugucuaugaaaug

SEQ ID NO: 82148 - RNA, 22 nt, Homo sapiens
acagugcuuuuguuccucuccu

SEQ ID NO: 82149 - RNA, 22 nt, Homo sapiens
acagugcuuggcacacaguaau

SEQ ID NO: 82150 - RNA, 22 nt, Homo sapiens
acagugcuguggucaugggucu

SEQ ID NO: 82151 - RNA, 18 nt, Homo sapiens
acagugcugucacugcuu

SEQ ID NO: 82152 - RNA, 23 nt, Homo sapiens
acugagcaauguuuacauacuug

SEQ ID NO: 82153 - RNA, 22 nt, Homo sapiens
acucuguugucuggccuuccug

SEQ ID NO: 82154 - RNA, 22 nt, Homo sapiens
acuacuucuaaguuuuggaaga

SEQ ID NO: 82155 - RNA, 22 nt, Homo sapiens
acucacagcaaccuccgccucc

SEQ ID NO: 82156 - RNA, 22 nt, Homo sapiens
acgaagacuauucaaaagguua

SEQ ID NO: 82157 - RNA, 22 nt, Homo sapiens
acgcagcacauucacagcuaug

SEQ ID NO: 82158 - RNA, 22 nt, Homo sapiens
acugcacuucagccuugugaca

SEQ ID NO: 82159 - RNA, 22 nt, Homo sapiens
acugcacuccggccucgugaca

SEQ ID NO: 82160 - RNA, 22 nt, Homo sapiens
acugcacucuagccccugcgac

SEQ ID NO: 82161 - RNA, 22 nt, Homo sapiens
acugcacugcagccuggccaac

SEQ ID NO: 82162 - RNA, 20 nt, Homo sapiens
acugcacuccaggcugccca

SEQ ID NO: 82163 - RNA, 21 nt, Homo sapiens
acugcacuccaaccucaacag

SEQ ID NO: 82164 - RNA, 21 nt, Homo sapiens
acugauguuugaaauucgcug

SEQ ID NO: 82165 - RNA, 20 nt, Homo sapiens
acugcacuccaaccuuugug

SEQ ID NO: 82166 - RNA, 22 nt, Homo sapiens
acugcacuccagacucugucuc

SEQ ID NO: 82167 - RNA, 22 nt, Homo sapiens
acugcacuccagccuugcgaca

SEQ ID NO: 82168 - RNA, 22 nt, Homo sapiens
acugcacuccagccuuggcggc

SEQ ID NO: 82169 - RNA, 22 nt, Homo sapiens
acugcacuccagccuugugaca

SEQ ID NO: 82170 - RNA, 22 nt, Homo sapiens
acugcacuccagccuaggcgac

SEQ ID NO: 82171 - RNA, 22 nt, Homo sapiens
acugcacuccagccuccugaca

SEQ ID NO: 82172 - RNA, 22 nt, Homo sapiens
acugcacuccagccucaugaca

SEQ ID NO: 82173 - RNA, 22 nt, Homo sapiens
acugcacuccagccuugagagc

SEQ ID NO: 82174 - RNA, 19 nt, Homo sapiens
acaguaccuggcaugaggu

SEQ ID NO: 82175 - RNA, 22 nt, Homo sapiens
acagguauagaaagcuaaaggg

SEQ ID NO: 82176 - RNA, 22 nt, Homo sapiens
acagguacacagaauauccaga

SEQ ID NO: 82177 - RNA, 20 nt, Homo sapiens
acagcacugguuucaagcaa

SEQ ID NO: 82178 - RNA, 22 nt, Homo sapiens
acagccauuccagccaaauacu

SEQ ID NO: 82179 - RNA, 22 nt, Homo sapiens
acagagcaaugagcuacggucu

SEQ ID NO: 82180 - RNA, 22 nt, Homo sapiens
acacagucaaauccacuuggcu

SEQ ID NO: 82181 - RNA, 22 nt, Homo sapiens
acaccaugucuguuucugguuu

SEQ ID NO: 82182 - RNA, 23 nt, Homo sapiens
acacuugcugaguaaaucaaaua

SEQ ID NO: 82183 - RNA, 22 nt, Homo sapiens
acacguguugaaauuuaauugc

SEQ ID NO: 82184 - RNA, 22 nt, Homo sapiens
acacgugcguauauguacguau

SEQ ID NO: 82185 - RNA, 22 nt, Homo sapiens
acacuggaguuaaaggugauuu

SEQ ID NO: 82186 - RNA, 22 nt, Homo sapiens
acaagugcuuuuccuggagaca

SEQ ID NO: 82187 - RNA, 22 nt, Homo sapiens
acacacgugcauguaugcguau

SEQ ID NO: 82188 - RNA, 22 nt, Homo sapiens
acaacaguuuuaucaccccaga

SEQ ID NO: 82189 - RNA, 22 nt, Homo sapiens
aagugucuuaccgggagggagu

SEQ ID NO: 82190 - RNA, 22 nt, Homo sapiens
aauaaagcuuugagcuuugcug

SEQ ID NO: 82191 - RNA, 21 nt, Homo sapiens
aggugucuuggguucccuggc

SEQ ID NO: 82192 - RNA, 22 nt, Homo sapiens
aggugguuuugaugagcaggua

SEQ ID NO: 82193 - RNA, 23 nt, Homo sapiens
agguuaugauuauagagcgagga

SEQ ID NO: 82194 - RNA, 22 nt, Homo sapiens
aggugcucuuccuguaggucac

SEQ ID NO: 82195 - RNA, 22 nt, Homo sapiens
aggugcuauauuucgaggauag

SEQ ID NO: 82196 - RNA, 22 nt, Homo sapiens
aggugcugagcagagaauccug

SEQ ID NO: 82197 - RNA, 22 nt, Homo sapiens
aggugcaugcuucacuggauau

SEQ ID NO: 82198 - RNA, 22 nt, Homo sapiens
aggugcacucagaaaacagaua

SEQ ID NO: 82199 - RNA, 22 nt, Homo sapiens
aggaagcuagcauuuguucagu

SEQ ID NO: 82200 - RNA, 22 nt, Homo sapiens
aggaagacugaaauugcuguuc

SEQ ID NO: 82201 - RNA, 22 nt, Homo sapiens
aggaagacauauagaacuaaaa

SEQ ID NO: 82202 - RNA, 20 nt, Homo sapiens
aggacuacagaggguaggau

SEQ ID NO: 82203 - RNA, 22 nt, Homo sapiens
aggagaauugguucuucuugau

SEQ ID NO: 82204 - RNA, 21 nt, Homo sapiens
aggagcauucaugacgagguu

SEQ ID NO: 82205 - RNA, 22 nt, Homo sapiens
aggagcacaggacuuugauuau

SEQ ID NO: 82206 - RNA, 22 nt, Homo sapiens
agcuggucuuggggaagaguag

SEQ ID NO: 82207 - RNA, 22 nt, Homo sapiens
agcuuguguuuuucuaaguauc

SEQ ID NO: 82208 - RNA, 22 nt, Homo sapiens
agcuuguuuuauagaaagucaa

SEQ ID NO: 82209 - RNA, 22 nt, Homo sapiens
agcuuguuuuccugcaacuaga

SEQ ID NO: 82210 - RNA, 20 nt, Homo sapiens
agcugcagauauaaauccgc

SEQ ID NO: 82211 - RNA, 22 nt, Homo sapiens
agcugcacugguauaggagaaa

SEQ ID NO: 82212 - RNA, 22 nt, Homo sapiens
agcugccagucuuguaaggccu

SEQ ID NO: 82213 - RNA, 22 nt, Homo sapiens
agcuggcuguagcugcaagucu

SEQ ID NO: 82214 - RNA, 22 nt, Homo sapiens
agcuggucugauacuuaccucc

SEQ ID NO: 82215 - RNA, 22 nt, Homo sapiens
agcugguauuuugucgaggacu

SEQ ID NO: 82216 - RNA, 22 nt, Homo sapiens
agcugguccugugacuugcuuc

SEQ ID NO: 82217 - RNA, 22 nt, Homo sapiens
agcugguaugaaaaucucccca

SEQ ID NO: 82218 - RNA, 22 nt, Homo sapiens
agcugguauuuugucaaggaua

SEQ ID NO: 82219 - RNA, 22 nt, Homo sapiens
acuggcucugcuuuacaaacag

SEQ ID NO: 82220 - RNA, 22 nt, Homo sapiens
acuggcuuuugagaaaaacacu

SEQ ID NO: 82221 - RNA, 22 nt, Homo sapiens
acuggcauagggcgggcacagu

SEQ ID NO: 82222 - RNA, 22 nt, Homo sapiens
acuguacuccagccugggcaac

SEQ ID NO: 82223 - RNA, 22 nt, Homo sapiens
agaagugcuggguucaggcugg

SEQ ID NO: 82224 - RNA, 22 nt, Homo sapiens
acugugcuguuuuaauuauuga

SEQ ID NO: 82225 - RNA, 22 nt, Homo sapiens
agacaguguguguauauauggu

SEQ ID NO: 82226 - RNA, 22 nt, Homo sapiens
agacagcugggaaauggagugu

SEQ ID NO: 82227 - RNA, 20 nt, Homo sapiens
agacaguguggagauuccuu

SEQ ID NO: 82228 - RNA, 22 nt, Homo sapiens
agacuagagggaaaugaguugg

SEQ ID NO: 82229 - RNA, 19 nt, Homo sapiens
agacuggcccaggcgggug

SEQ ID NO: 82230 - RNA, 22 nt, Homo sapiens
agagagcuuuugguugcccuaa

SEQ ID NO: 82231 - RNA, 22 nt, Homo sapiens
agcacuacugcacuccagccug

SEQ ID NO: 82232 - RNA, 22 nt, Homo sapiens
agcaccguucaaacccagguua

SEQ ID NO: 82233 - RNA, 22 nt, Homo sapiens
agcucuauuagaagccgugggu

SEQ ID NO: 82234 - RNA, 22 nt, Homo sapiens
agcucuuguuaguauuagcagu

SEQ ID NO: 82235 - RNA, 18 nt, Homo sapiens
agcaucacugaucauccu

SEQ ID NO: 82236 - RNA, 22 nt, Homo sapiens
agcaucauguuuucgagguuca

SEQ ID NO: 82237 - RNA, 22 nt, Homo sapiens
agcaguagugaaaguagacuua

SEQ ID NO: 82238 - RNA, 22 nt, Homo sapiens
agcagugucauuuucuggugag

SEQ ID NO: 82239 - RNA, 22 nt, Homo sapiens
agcagcaauuuuguaugguuua

SEQ ID NO: 82240 - RNA, 21 nt, Homo sapiens
agcagaguggcagcucuuuug

SEQ ID NO: 82241 - RNA, 22 nt, Homo sapiens
agcagcacaucccuuucuggcc

SEQ ID NO: 82242 - RNA, 22 nt, Homo sapiens
agcagcucaugccuuugggagg

SEQ ID NO: 82243 - RNA, 17 nt, Homo sapiens
agcagcccauaucccca

SEQ ID NO: 82244 - RNA, 22 nt, Homo sapiens
agcagcaugaggggacuucugc

SEQ ID NO: 82245 - RNA, 22 nt, Homo sapiens
agcagcaucgggaaguuggcca

SEQ ID NO: 82246 - RNA, 21 nt, Homo sapiens
agcagcuuugguugaagcaga

SEQ ID NO: 82247 - RNA, 22 nt, Homo sapiens
agcagcuuugcauggccuguga

SEQ ID NO: 82248 - RNA, 22 nt, Homo sapiens
agcagguauucgggucaugggg

SEQ ID NO: 82249 - RNA, 22 nt, Homo sapiens
agcaggacaauaugggaucagg

SEQ ID NO: 82250 - RNA, 22 nt, Homo sapiens
agcagcuuugcauggccugugg

SEQ ID NO: 82251 - RNA, 22 nt, Homo sapiens
agcaggucuuaacuugugaggu

SEQ ID NO: 82252 - RNA, 22 nt, Homo sapiens
agcagguguggcuuauccugaa

SEQ ID NO: 82253 - RNA, 22 nt, Homo sapiens
auggaggccuacagaauuuugg

SEQ ID NO: 82254 - RNA, 22 nt, Homo sapiens
auggagcuugacaguuguagag

SEQ ID NO: 82255 - RNA, 22 nt, Homo sapiens
auggaaggagaggaaugaauga

SEQ ID NO: 82256 - RNA, 22 nt, Homo sapiens
auggacguagauucucaaggau

SEQ ID NO: 82257 - RNA, 21 nt, Homo sapiens
auggacugugugacccugcac

SEQ ID NO: 82258 - RNA, 22 nt, Homo sapiens
auggaagacuccucuuugggua

SEQ ID NO: 82259 - RNA, 22 nt, Homo sapiens
augguacucucuugucugcaaa

SEQ ID NO: 82260 - RNA, 22 nt, Homo sapiens
augguacuccagagaagcagaa

SEQ ID NO: 82261 - RNA, 22 nt, Homo sapiens
augggcacugauguauucugug

SEQ ID NO: 82262 - RNA, 22 nt, Homo sapiens
augggcuaguaaagacaaacuu

SEQ ID NO: 82263 - RNA, 22 nt, Homo sapiens
auggcuuuuccugucuugcaug

SEQ ID NO: 82264 - RNA, 22 nt, Homo sapiens
augugcuuuuggugagagauuu

SEQ ID NO: 82265 - RNA, 20 nt, Homo sapiens
augugcaguguggcaaccaa

SEQ ID NO: 82266 - RNA, 22 nt, Homo sapiens
augugcacaacgugcagguuug

SEQ ID NO: 82267 - RNA, 22 nt, Homo sapiens
augugcaagaucauuaaagcuc

SEQ ID NO: 82268 - RNA, 21 nt, Homo sapiens
augugcacuaugucauuuaau

SEQ ID NO: 82269 - RNA, 22 nt, Homo sapiens
auguccuagagagauggugguc

SEQ ID NO: 82270 - RNA, 22 nt, Homo sapiens
augugacagcaacccccagccc

SEQ ID NO: 82271 - RNA, 22 nt, Homo sapiens
augucacagguccuagccaagu

SEQ ID NO: 82272 - RNA, 21 nt, Homo sapiens
augucauggaugacuaauuca

SEQ ID NO: 82273 - RNA, 22 nt, Homo sapiens
aucuucucuugaagggugggga

SEQ ID NO: 82274 - RNA, 22 nt, Homo sapiens
augagcaucaccagaaucaaua

SEQ ID NO: 82275 - RNA, 22 nt, Homo sapiens
augagcagaagagauacacugu

SEQ ID NO: 82276 - RNA, 20 nt, Homo sapiens
augagcucaucuugaaaacc

SEQ ID NO: 82277 - RNA, 22 nt, Homo sapiens
augagcuauggagacagggcca

SEQ ID NO: 82278 - RNA, 22 nt, Homo sapiens
augagcacuuguuuugggcaca

SEQ ID NO: 82279 - RNA, 22 nt, Homo sapiens
aucugguguccucgugggaguc

SEQ ID NO: 82280 - RNA, 22 nt, Homo sapiens
augauuguucucacucaagaga

SEQ ID NO: 82281 - RNA, 20 nt, Homo sapiens
augagguguaugacacugaa

SEQ ID NO: 82282 - RNA, 22 nt, Homo sapiens
augagcuauggagcucccaccu

SEQ ID NO: 82283 - RNA, 22 nt, Homo sapiens
augcagcugaggguaguggagc

SEQ ID NO: 82284 - RNA, 22 nt, Homo sapiens
augcagguguuuugcacugagu

SEQ ID NO: 82285 - RNA, 22 nt, Homo sapiens
augccaagaugagcacgcgucu

SEQ ID NO: 82286 - RNA, 22 nt, Homo sapiens
augcuuguugcagccugagccu

SEQ ID NO: 82287 - RNA, 22 nt, Homo sapiens
augcuuguguuggggcagugga

SEQ ID NO: 82288 - RNA, 22 nt, Homo sapiens
augcuggugguucacaugcgca

SEQ ID NO: 82289 - RNA, 22 nt, Homo sapiens
augcuacugauaagcaaucauu

SEQ ID NO: 82290 - RNA, 22 nt, Homo sapiens
aguauuuguuggaauaccuguu

SEQ ID NO: 82291 - RNA, 22 nt, Homo sapiens
auacacuagggcuccugcagaa

SEQ ID NO: 82292 - RNA, 22 nt, Homo sapiens
auacagacacagucagaggggu

SEQ ID NO: 82293 - RNA, 22 nt, Homo sapiens
auacaugugccauguugguuug

SEQ ID NO: 82294 - RNA, 22 nt, Homo sapiens
auacaugugucauguugguuug

SEQ ID NO: 82295 - RNA, 22 nt, Homo sapiens
auacaguguucugggaagaagu

SEQ ID NO: 82296 - RNA, 22 nt, Homo sapiens
auacaugugccaugcuggugug

SEQ ID NO: 82297 - RNA, 22 nt, Homo sapiens
auacaugugccauguucgugug

SEQ ID NO: 82298 - RNA, 22 nt, Homo sapiens
auagcagugucccacuccuugg

SEQ ID NO: 82299 - RNA, 22 nt, Homo sapiens
auagcagcuugucagggcagac

SEQ ID NO: 82300 - RNA, 22 nt, Homo sapiens
auagcaggagaauggucauggg

SEQ ID NO: 82301 - RNA, 22 nt, Homo sapiens
auagcagcagcuaguagugaua

SEQ ID NO: 82302 - RNA, 22 nt, Homo sapiens
auagcagcauauguaauguuga

SEQ ID NO: 82303 - RNA, 22 nt, Homo sapiens
auagcagacauuucaaggcagg

SEQ ID NO: 82304 - RNA, 22 nt, Homo sapiens
auacuguuuuacaucauugccu

SEQ ID NO: 82305 - RNA, 22 nt, Homo sapiens
aucucaguucaggcuggccaca

SEQ ID NO: 82306 - RNA, 22 nt, Homo sapiens
aucugcacaucuguguuuuugu

SEQ ID NO: 82307 - RNA, 22 nt, Homo sapiens
aucgcaccauugcacuccagca

SEQ ID NO: 82308 - RNA, 22 nt, Homo sapiens
aucgcacuccauccugggcaac

SEQ ID NO: 82309 - RNA, 19 nt, Homo sapiens
aucagcacaagugugcuuu

SEQ ID NO: 82310 - RNA, 22 nt, Homo sapiens
aucagcaugcagaagucggggg

SEQ ID NO: 82311 - RNA, 22 nt, Homo sapiens
aucccuguaacuagcagccccu

SEQ ID NO: 82312 - RNA, 20 nt, Homo sapiens
aucaaagacuuagaggggga

SEQ ID NO: 82313 - RNA, 22 nt, Homo sapiens
auaugcacaguggaguacuauu

SEQ ID NO: 82314 - RNA, 20 nt, Homo sapiens
aucagagacuaggauugcca

SEQ ID NO: 82315 - RNA, 20 nt, Homo sapiens
aucagagccggugaaagggc

SEQ ID NO: 82316 - RNA, 22 nt, Homo sapiens
gcugauguuuucagguaauucu

SEQ ID NO: 82317 - RNA, 22 nt, Homo sapiens
gcugcguguagaguucucacug

SEQ ID NO: 82318 - RNA, 22 nt, Homo sapiens
gcugagacauugguuuucuccu

SEQ ID NO: 82319 - RNA, 22 nt, Homo sapiens
gcugagcuaugccauauaugcc

SEQ ID NO: 82320 - RNA, 22 nt, Homo sapiens
gcuccuuugaguagcuucugug

SEQ ID NO: 82321 - RNA, 22 nt, Homo sapiens
gcucguccccuccugacucugc

SEQ ID NO: 82322 - RNA, 22 nt, Homo sapiens
gcuaggagaucugcugcucucu

SEQ ID NO: 82323 - RNA, 22 nt, Homo sapiens
gcuaguguuugccagcguagcc

SEQ ID NO: 82324 - RNA, 22 nt, Homo sapiens
gcucaugagacaagcaggagua

SEQ ID NO: 82325 - RNA, 22 nt, Homo sapiens
gcucaugggcagugugauuguu

SEQ ID NO: 82326 - RNA, 22 nt, Homo sapiens
gcaagugucugagguuuuguau

SEQ ID NO: 82327 - RNA, 22 nt, Homo sapiens
gcaaggacucccugggucauuc

SEQ ID NO: 82328 - RNA, 22 nt, Homo sapiens
gcaaugcugucugugcacagau

SEQ ID NO: 82329 - RNA, 22 nt, Homo sapiens
gcacaaugccugacgaguccug

SEQ ID NO: 82330 - RNA, 22 nt, Homo sapiens
gcacaguguuacuugauauauu

SEQ ID NO: 82331 - RNA, 22 nt, Homo sapiens
gcacauggccccaucgugccga

SEQ ID NO: 82332 - RNA, 22 nt, Homo sapiens
gcgugguguuagaaugagaagu

SEQ ID NO: 82333 - RNA, 22 nt, Homo sapiens
gcguugcacuccagccugggua

SEQ ID NO: 82334 - RNA, 22 nt, Homo sapiens
gcuaaggcaggagcauugcuug

SEQ ID NO: 82335 - RNA, 22 nt, Homo sapiens
gcacgugcucauuugaggucuu

SEQ ID NO: 82336 - RNA, 22 nt, Homo sapiens
gcgguagcauagacugcaggac

SEQ ID NO: 82337 - RNA, 20 nt, Homo sapiens
gcugugcuuaauacacuuuc

SEQ ID NO: 82338 - RNA, 22 nt, Homo sapiens
gcugucuggagucuguucaaug

SEQ ID NO: 82339 - RNA, 22 nt, Homo sapiens
gcuugguccccacccaaaucgc

SEQ ID NO: 82340 - RNA, 22 nt, Homo sapiens
gcugcuguuauucaucagaacu

SEQ ID NO: 82341 - RNA, 22 nt, Homo sapiens
gcugcuuuugaugacaaaaaca

SEQ ID NO: 82342 - RNA, 22 nt, Homo sapiens
gcugguauuacaggcaugagcc

SEQ ID NO: 82343 - RNA, 19 nt, Homo sapiens
gcuuguccacgugagauaa

SEQ ID NO: 82344 - RNA, 21 nt, Homo sapiens
gcuuuuucggaagucuuuggc

SEQ ID NO: 82345 - RNA, 22 nt, Homo sapiens
gcuuuguugauggugagucugu

SEQ ID NO: 82346 - RNA, 19 nt, Homo sapiens
gcuuuguggggaaggagcc

SEQ ID NO: 82347 - RNA, 22 nt, Homo sapiens
ggagcugugauuugaguccaga

SEQ ID NO: 82348 - RNA, 20 nt, Homo sapiens
ggagagugacauaauucugg

SEQ ID NO: 82349 - RNA, 22 nt, Homo sapiens
ggaguaggcuguccggcaccca

SEQ ID NO: 82350 - RNA, 22 nt, Homo sapiens
ggagguagguuugugauuugua

SEQ ID NO: 82351 - RNA, 22 nt, Homo sapiens
ggagguagucuuucccuuauca

SEQ ID NO: 82352 - RNA, 20 nt, Homo sapiens
ggagguuguauaaguacauc

SEQ ID NO: 82353 - RNA, 21 nt, Homo sapiens
ggcaagugugagguuuggggu

SEQ ID NO: 82354 - RNA, 22 nt, Homo sapiens
ggcaagugggagggaguguuuc

SEQ ID NO: 82355 - RNA, 20 nt, Homo sapiens
ggcaagacccaaagugugug

SEQ ID NO: 82356 - RNA, 22 nt, Homo sapiens
ggcaaggaggggcacuuucacu

SEQ ID NO: 82357 - RNA, 22 nt, Homo sapiens
ggcacaguuaagugcuaccuaa

SEQ ID NO: 82358 - RNA, 22 nt, Homo sapiens
ggcaccacagacgccaggcgug

SEQ ID NO: 82359 - RNA, 22 nt, Homo sapiens
ggcaaugaggcggaccagcagg

SEQ ID NO: 82360 - RNA, 22 nt, Homo sapiens
ggcacuguugccggccugaauu

SEQ ID NO: 82361 - RNA, 19 nt, Homo sapiens
ggcacugugugagugagga

SEQ ID NO: 82362 - RNA, 22 nt, Homo sapiens
ggcacuguggcucaagccugua

SEQ ID NO: 82363 - RNA, 22 nt, Homo sapiens
ggcagcacaauuuucugaugga

SEQ ID NO: 82364 - RNA, 22 nt, Homo sapiens
ggcagcauugccuuugcaguga

SEQ ID NO: 82365 - RNA, 19 nt, Homo sapiens
ggcucagucaacugacugu

SEQ ID NO: 82366 - RNA, 22 nt, Homo sapiens
gggauguaaaagugggcacauu

SEQ ID NO: 82367 - RNA, 20 nt, Homo sapiens
gggcaaguaugugggaaguc

SEQ ID NO: 82368 - RNA, 22 nt, Homo sapiens
gggcacgugugugcugugcuca

SEQ ID NO: 82369 - RNA, 22 nt, Homo sapiens
gggcaagaagucuuguaguuuu

SEQ ID NO: 82370 - RNA, 22 nt, Homo sapiens
ggcuuggaggaaugugagggcu

SEQ ID NO: 82371 - RNA, 22 nt, Homo sapiens
gggaauguagcaaaucugcaau

SEQ ID NO: 82372 - RNA, 22 nt, Homo sapiens
gggagcacaagaaauguuucau

SEQ ID NO: 82373 - RNA, 22 nt, Homo sapiens
ggcuguguguuaaaauaggcuu

SEQ ID NO: 82374 - RNA, 22 nt, Homo sapiens
ggcucguguuuucuguccaguu

SEQ ID NO: 82375 - RNA, 22 nt, Homo sapiens
ggugccuacugugugucaggca

SEQ ID NO: 82376 - RNA, 19 nt, Homo sapiens
ggugcuugaauauuccucc

SEQ ID NO: 82377 - RNA, 22 nt, Homo sapiens
ggugcuugaggaacggaggcug

SEQ ID NO: 82378 - RNA, 22 nt, Homo sapiens
gguggcaaaucugaguggcgcu

SEQ ID NO: 82379 - RNA, 22 nt, Homo sapiens
ggucaggagaaugguaacugag

SEQ ID NO: 82380 - RNA, 22 nt, Homo sapiens
gugccuuuucugagcaaugagc

SEQ ID NO: 82381 - RNA, 22 nt, Homo sapiens
gugcccacugucuguccuguag

SEQ ID NO: 82382 - RNA, 22 nt, Homo sapiens
gugcgguauuagcaagccaaca

SEQ ID NO: 82383 - RNA, 22 nt, Homo sapiens
gugcgggaggcgcgccuaggug

SEQ ID NO: 82384 - RNA, 22 nt, Homo sapiens
guggaaaacauaugcuuguuga

SEQ ID NO: 82385 - RNA, 22 nt, Homo sapiens
gugcuuguauuuaaaucaugug

SEQ ID NO: 82386 - RNA, 22 nt, Homo sapiens
gugcuuuguuguggcaguggca

SEQ ID NO: 82387 - RNA, 22 nt, Homo sapiens
gugcauguccacuaguccauau

SEQ ID NO: 82388 - RNA, 22 nt, Homo sapiens
gugcaugucuaugcgagucuaa

SEQ ID NO: 82389 - RNA, 22 nt, Homo sapiens
gugcaugucugugacgacccug

SEQ ID NO: 82390 - RNA, 22 nt, Homo sapiens
gugcaguuuuaagugaguuucu

SEQ ID NO: 82391 - RNA, 23 nt, Homo sapiens
gugcaguggcgagauuucggcuc

SEQ ID NO: 82392 - RNA, 22 nt, Homo sapiens
gugcagugugauccuuccguau

SEQ ID NO: 82393 - RNA, 22 nt, Homo sapiens
gugcaguuugaaaguagaaaca

SEQ ID NO: 82394 - RNA, 22 nt, Homo sapiens
guggcaugaaagcaucugugau

SEQ ID NO: 82395 - RNA, 22 nt, Homo sapiens
guggaaaaguaguugcgguuuu

SEQ ID NO: 82396 - RNA, 22 nt, Homo sapiens
guggaagaaaucagguuauuug

SEQ ID NO: 82397 - RNA, 21 nt, Homo sapiens
guggccuuuggagcaugucag

SEQ ID NO: 82398 - RNA, 22 nt, Homo sapiens
gugcaaaucucugaguaucuuu

SEQ ID NO: 82399 - RNA, 22 nt, Homo sapiens
gugcacaugguagguauugagu

SEQ ID NO: 82400 - RNA, 22 nt, Homo sapiens
gugagacugguccugaacccag

SEQ ID NO: 82401 - RNA, 22 nt, Homo sapiens
gugagacugguucugaacccag

SEQ ID NO: 82402 - RNA, 22 nt, Homo sapiens
gucauugucaauugacaauugu

SEQ ID NO: 82403 - RNA, 22 nt, Homo sapiens
guaccucaguuggaaaugcaga

SEQ ID NO: 82404 - RNA, 22 nt, Homo sapiens
gucauguuuaacuucuugagga

SEQ ID NO: 82405 - RNA, 22 nt, Homo sapiens
gucaggugcuuacgcggagauc

SEQ ID NO: 82406 - RNA, 22 nt, Homo sapiens
guagagagaaauacaaagcugu

SEQ ID NO: 82407 - RNA, 22 nt, Homo sapiens
gucagguauguuccaaaggcgg

SEQ ID NO: 82408 - RNA, 22 nt, Homo sapiens
gguggugguauuucagaaaaug

SEQ ID NO: 82409 - RNA, 22 nt, Homo sapiens
guacauguaugcaugcaugcau

SEQ ID NO: 82410 - RNA, 22 nt, Homo sapiens
guacaugugcacagugugcagg

SEQ ID NO: 82411 - RNA, 22 nt, Homo sapiens
guagaagcacaggugaguuggu

SEQ ID NO: 82412 - RNA, 22 nt, Homo sapiens
gugaaagauuaaaccagugugu

SEQ ID NO: 82413 - RNA, 22 nt, Homo sapiens
gugaacuguuugaggaagagaa

SEQ ID NO: 82414 - RNA, 22 nt, Homo sapiens
gucuuuggaaaaaaugucuguu

SEQ ID NO: 82415 - RNA, 22 nt, Homo sapiens
gucuuuguuuugauuuaccaga

SEQ ID NO: 82416 - RNA, 22 nt, Homo sapiens
gucuuggagacauugccauuga

SEQ ID NO: 82417 - RNA, 22 nt, Homo sapiens
gucuuugcauguauguucauga

SEQ ID NO: 82418 - RNA, 22 nt, Homo sapiens
gucuuuaguugaaacauguggu

SEQ ID NO: 82419 - RNA, 22 nt, Homo sapiens
gucuuggcaugugcagcuggga

SEQ ID NO: 82420 - RNA, 22 nt, Homo sapiens
gucuugcacuuaccuaagaacu

SEQ ID NO: 82421 - RNA, 22 nt, Homo sapiens
gucuuggagaacucagcuuggc

SEQ ID NO: 82422 - RNA, 20 nt, Homo sapiens
gucuugcuccguugcccagg

SEQ ID NO: 82423 - RNA, 22 nt, Homo sapiens
gucucuugguuuagagcauuua

SEQ ID NO: 82424 - RNA, 22 nt, Homo sapiens
gucuccgagccguguggagccg

SEQ ID NO: 82425 - RNA, 22 nt, Homo sapiens
uagguugucuucccagaguuuu

SEQ ID NO: 82426 - RNA, 18 nt, Homo sapiens
uagugcuguucucaugau

SEQ ID NO: 82427 - RNA, 22 nt, Homo sapiens
uaguucauuauguguugcucag

SEQ ID NO: 82428 - RNA, 22 nt, Homo sapiens
uagguagcuuuggcguuucuug

SEQ ID NO: 82429 - RNA, 22 nt, Homo sapiens
uaggcgagauguguguuucaug

SEQ ID NO: 82430 - RNA, 22 nt, Homo sapiens
uagguacuuaagaucucagcua

SEQ ID NO: 82431 - RNA, 19 nt, Homo sapiens
uagggcacgaggcagaguc

SEQ ID NO: 82432 - RNA, 22 nt, Homo sapiens
uaggagcacagcagcauguggg

SEQ ID NO: 82433 - RNA, 22 nt, Homo sapiens
uaggacaaugguacagcagaaa

SEQ ID NO: 82434 - RNA, 22 nt, Homo sapiens
uaggcaaguugcccaaucucuc

SEQ ID NO: 82435 - RNA, 22 nt, Homo sapiens
uagcugguucuccaggagcuag

SEQ ID NO: 82436 - RNA, 17 nt, Homo sapiens
uagcuucacauuaggaa

SEQ ID NO: 82437 - RNA, 23 nt, Homo sapiens
uagcuucucccagaccugcuccc

SEQ ID NO: 82438 - RNA, 22 nt, Homo sapiens
uagcugcaaaauauagacuucu

SEQ ID NO: 82439 - RNA, 22 nt, Homo sapiens
uagcugcauccugugcacucaa

SEQ ID NO: 82440 - RNA, 22 nt, Homo sapiens
uagcugcacuuacaagugagaa

SEQ ID NO: 82441 - RNA, 22 nt, Homo sapiens
uagcugcccagcacgaaguugg

SEQ ID NO: 82442 - RNA, 22 nt, Homo sapiens
uagcugcugcuaggcuaaggau

SEQ ID NO: 82443 - RNA, 22 nt, Homo sapiens
uagcauccuucucuaaacagga

SEQ ID NO: 82444 - RNA, 22 nt, Homo sapiens
uagcaugacacuuguugaaugc

SEQ ID NO: 82445 - RNA, 22 nt, Homo sapiens
uagaagcugagaauguccucag

SEQ ID NO: 82446 - RNA, 22 nt, Homo sapiens
uagcauggagucaugcacggcu

SEQ ID NO: 82447 - RNA, 22 nt, Homo sapiens
uagaagcuacucuucuuguggc

SEQ ID NO: 82448 - RNA, 22 nt, Homo sapiens
uaucugcacauacacuuauagc

SEQ ID NO: 82449 - RNA, 22 nt, Homo sapiens
uaucucaguguacaggaugaua

SEQ ID NO: 82450 - RNA, 20 nt, Homo sapiens
uaucucaguuuguccuaaac

SEQ ID NO: 82451 - RNA, 22 nt, Homo sapiens
uaucucagagaaucagauuuac

SEQ ID NO: 82452 - RNA, 20 nt, Homo sapiens
uaucacauggggagaaaccu

SEQ ID NO: 82453 - RNA, 22 nt, Homo sapiens
uauuccacacuguuggugggau

SEQ ID NO: 82454 - RNA, 22 nt, Homo sapiens
uauuccacuauuaguccagaug

SEQ ID NO: 82455 - RNA, 22 nt, Homo sapiens
uauuccagcccuggugagccag

SEQ ID NO: 82456 - RNA, 22 nt, Homo sapiens
uauggauuuuggaauauguggg

SEQ ID NO: 82457 - RNA, 22 nt, Homo sapiens
guugcucaggccggagugcagu

SEQ ID NO: 82458 - RNA, 22 nt, Homo sapiens
guugccuaggcuggucuugaac

SEQ ID NO: 82459 - RNA, 22 nt, Homo sapiens
guuggcuuuuuaaggaaauugc

SEQ ID NO: 82460 - RNA, 22 nt, Homo sapiens
guugcucaggcugaagugcagu

SEQ ID NO: 82461 - RNA, 22 nt, Homo sapiens
guuugccuuuuagauaggaaug

SEQ ID NO: 82462 - RNA, 22 nt, Homo sapiens
guuguacuaccucucguauuag

SEQ ID NO: 82463 - RNA, 22 nt, Homo sapiens
guuugcagaucaugaagaaccc

SEQ ID NO: 82464 - RNA, 22 nt, Homo sapiens
guuguggagucuucuguucugg

SEQ ID NO: 82465 - RNA, 22 nt, Homo sapiens
gugguaaaauggcauagagcua

SEQ ID NO: 82466 - RNA, 22 nt, Homo sapiens
gugguacuaucuuugguuucag

SEQ ID NO: 82467 - RNA, 22 nt, Homo sapiens
guggugucuuguuuaauauaua

SEQ ID NO: 82468 - RNA, 22 nt, Homo sapiens
gugguguuugagcugccaggga

SEQ ID NO: 82469 - RNA, 22 nt, Homo sapiens
guggugucuuuuuugauuagga

SEQ ID NO: 82470 - RNA, 20 nt, Homo sapiens
guguaagagcaagcuuccua

SEQ ID NO: 82471 - RNA, 22 nt, Homo sapiens
uaacuguggaaaugacuuuaaa

SEQ ID NO: 82472 - RNA, 20 nt, Homo sapiens
uaacuguggcuucuuuuggc

SEQ ID NO: 82473 - RNA, 20 nt, Homo sapiens
uaaagcugcucagggggcuc

SEQ ID NO: 82474 - RNA, 22 nt, Homo sapiens
uaacccacgcagaauggacaag

SEQ ID NO: 82475 - RNA, 22 nt, Homo sapiens
guuuugguuauauggaucaguu

SEQ ID NO: 82476 - RNA, 22 nt, Homo sapiens
guuugugguuaaagccuuucau

SEQ ID NO: 82477 - RNA, 22 nt, Homo sapiens
guuugugcuccuaugagaaccu

SEQ ID NO: 82478 - RNA, 19 nt, Homo sapiens
uacaugcagcaggcacgca

SEQ ID NO: 82479 - RNA, 22 nt, Homo sapiens
uacugcuuaagggcaugggccc

SEQ ID NO: 82480 - RNA, 22 nt, Homo sapiens
uacugguuuuggugggcaggug

SEQ ID NO: 82481 - RNA, 22 nt, Homo sapiens
uaccugagaaagaaagcccucg

SEQ ID NO: 82482 - RNA, 22 nt, Homo sapiens
uaccuguagacuacagcuucag

SEQ ID NO: 82483 - RNA, 22 nt, Homo sapiens
uacugcugucagugccaaguag

SEQ ID NO: 82484 - RNA, 22 nt, Homo sapiens
uaagccaccgugccuggccuaa

SEQ ID NO: 82485 - RNA, 20 nt, Homo sapiens
uaagugcauaggauauuucu

SEQ ID NO: 82486 - RNA, 22 nt, Homo sapiens
uaagugaauguuggcuacugaa

SEQ ID NO: 82487 - RNA, 22 nt, Homo sapiens
uaagugaauauggacaguuagc

SEQ ID NO: 82488 - RNA, 22 nt, Homo sapiens
uaagugaauuugacagguaaug

SEQ ID NO: 82489 - RNA, 20 nt, Homo sapiens
uacaggacugagaaucugug

SEQ ID NO: 82490 - RNA, 22 nt, Homo sapiens
uacaguaggauuuucagggucu

SEQ ID NO: 82491 - RNA, 22 nt, Homo sapiens
uacagugcauagaggcaugaua

SEQ ID NO: 82492 - RNA, 22 nt, Homo sapiens
uggauaguuuacugaagagugg

SEQ ID NO: 82493 - RNA, 22 nt, Homo sapiens
uggauagugauaagguagauga

SEQ ID NO: 82494 - RNA, 22 nt, Homo sapiens
uggauggugauuggaucaugga

SEQ ID NO: 82495 - RNA, 22 nt, Homo sapiens
uggcaagcuuuaauugacucuu

SEQ ID NO: 82496 - RNA, 19 nt, Homo sapiens
uggcacuugacguccggau

SEQ ID NO: 82497 - RNA, 20 nt, Homo sapiens
uggcaccugacagauagcca

SEQ ID NO: 82498 - RNA, 22 nt, Homo sapiens
uggcacuaugugacaagguuuu

SEQ ID NO: 82499 - RNA, 22 nt, Homo sapiens
uggccuguaacgcugucucagc

SEQ ID NO: 82500 - RNA, 22 nt, Homo sapiens
uggcgagaaaccauaugcuuuc

SEQ ID NO: 82501 - RNA, 22 nt, Homo sapiens
uggcaguuuacaaaugccauga

SEQ ID NO: 82502 - RNA, 22 nt, Homo sapiens
uggcacaaugacccuugugggc

SEQ ID NO: 82503 - RNA, 22 nt, Homo sapiens
uggcagcgugaaagacuuuuuc

SEQ ID NO: 82504 - RNA, 22 nt, Homo sapiens
uggcagaugagccgcgcuccaa

SEQ ID NO: 82505 - RNA, 22 nt, Homo sapiens
ugcuuugguagaaaucuuuggu

SEQ ID NO: 82506 - RNA, 22 nt, Homo sapiens
ugcuuguguucagguaaccuuu

SEQ ID NO: 82507 - RNA, 22 nt, Homo sapiens
ugcuugagacacauaugaauuu

SEQ ID NO: 82508 - RNA, 22 nt, Homo sapiens
ugcuucauuggccaccaggaag

SEQ ID NO: 82509 - RNA, 22 nt, Homo sapiens
ugcuggugauucagauucaaau

SEQ ID NO: 82510 - RNA, 21 nt, Homo sapiens
uggagugcaacacuagguaua

SEQ ID NO: 82511 - RNA, 22 nt, Homo sapiens
uggaagugaacaaccaaggcag

SEQ ID NO: 82512 - RNA, 22 nt, Homo sapiens
uggaauacaugucgcugagcug

SEQ ID NO: 82513 - RNA, 22 nt, Homo sapiens
uggaaugcucuccccacggacu

SEQ ID NO: 82514 - RNA, 22 nt, Homo sapiens
ugcgauaguuugcugguaaauu

SEQ ID NO: 82515 - RNA, 19 nt, Homo sapiens
ugccaagaaagucagcuua

SEQ ID NO: 82516 - RNA, 22 nt, Homo sapiens
ugcauuguauuguugacucgcc

SEQ ID NO: 82517 - RNA, 22 nt, Homo sapiens
ugcauugcacuugcaugagaua

SEQ ID NO: 82518 - RNA, 22 nt, Homo sapiens
ugcauugccgugauuacugucu

SEQ ID NO: 82519 - RNA, 22 nt, Homo sapiens
ugcugcaaacaggcaucugugg

SEQ ID NO: 82520 - RNA, 18 nt, Homo sapiens
ugcuccccugggugagca

SEQ ID NO: 82521 - RNA, 21 nt, Homo sapiens
ugcugcacuucuuuugcugug

SEQ ID NO: 82522 - RNA, 22 nt, Homo sapiens
ugcugcacuuauggcucugagg

SEQ ID NO: 82523 - RNA, 20 nt, Homo sapiens
ugcugcacuuaagcaugggc

SEQ ID NO: 82524 - RNA, 19 nt, Homo sapiens
ugcugcauugugaccuugc

SEQ ID NO: 82525 - RNA, 22 nt, Homo sapiens
ugcuaugucuucucucacagag

SEQ ID NO: 82526 - RNA, 21 nt, Homo sapiens
ugcuauguuguccaggcuggc

SEQ ID NO: 82527 - RNA, 22 nt, Homo sapiens
ugcguucauuuggccaguggcg

SEQ ID NO: 82528 - RNA, 22 nt, Homo sapiens
ugcgccauugcacucuagccug

SEQ ID NO: 82529 - RNA, 22 nt, Homo sapiens
ugcaaguggauuuuuccccaga

SEQ ID NO: 82530 - RNA, 21 nt, Homo sapiens
ugcaugguagucacaugauuc

SEQ ID NO: 82531 - RNA, 20 nt, Homo sapiens
ugcauguccucacuuacuug

SEQ ID NO: 82532 - RNA, 22 nt, Homo sapiens
ugcaagacugcaguuacuuuug

SEQ ID NO: 82533 - RNA, 22 nt, Homo sapiens
ugcaagacuaaaccuuccccuc

SEQ ID NO: 82534 - RNA, 22 nt, Homo sapiens
ugcaaccauuguuaagugugca

SEQ ID NO: 82535 - RNA, 22 nt, Homo sapiens
ugcaacacauugccccugcucu

SEQ ID NO: 82536 - RNA, 22 nt, Homo sapiens
ugaucucagcucacugguugaa

SEQ ID NO: 82537 - RNA, 22 nt, Homo sapiens
ugauugacauacauaggugugg

SEQ ID NO: 82538 - RNA, 23 nt, Homo sapiens
ugagguguuaagcagacuugucu

SEQ ID NO: 82539 - RNA, 22 nt, Homo sapiens
ugagguuggggucagggcuagc

SEQ ID NO: 82540 - RNA, 22 nt, Homo sapiens
ugagguguuauccagaguucuu

SEQ ID NO: 82541 - RNA, 22 nt, Homo sapiens
ugagauuaucguaauguaucuc

SEQ ID NO: 82542 - RNA, 22 nt, Homo sapiens
ugaguuaaucucuacgauagaa

SEQ ID NO: 82543 - RNA, 22 nt, Homo sapiens
ugaguguguaugugcauacaca

SEQ ID NO: 82544 - RNA, 22 nt, Homo sapiens
ugaguguccaccccuuucacag

SEQ ID NO: 82545 - RNA, 22 nt, Homo sapiens
ugagugugacuuagcagaagga

SEQ ID NO: 82546 - RNA, 22 nt, Homo sapiens
ugagugugaggaagaauuagaa

SEQ ID NO: 82547 - RNA, 22 nt, Homo sapiens
ugagucuguuccaaagaaauaa

SEQ ID NO: 82548 - RNA, 22 nt, Homo sapiens
ugauguugacuguaggcagaga

SEQ ID NO: 82549 - RNA, 22 nt, Homo sapiens
ugaucacagcuugacuaaagga

SEQ ID NO: 82550 - RNA, 22 nt, Homo sapiens
ugacaagugauuaaggcauauu

SEQ ID NO: 82551 - RNA, 22 nt, Homo sapiens
ugacagcugaggcccagaguac

SEQ ID NO: 82552 - RNA, 22 nt, Homo sapiens
ugagacggagucuugcccuguc

SEQ ID NO: 82553 - RNA, 22 nt, Homo sapiens
ugacagguugauaggugcagca

SEQ ID NO: 82554 - RNA, 22 nt, Homo sapiens
ugagacggagucuugcucuguc

SEQ ID NO: 82555 - RNA, 22 nt, Homo sapiens
ugagacggagucuugcuaaguu

SEQ ID NO: 82556 - RNA, 22 nt, Homo sapiens
ugagacugagucucgcucuauu

SEQ ID NO: 82557 - RNA, 22 nt, Homo sapiens
ugagacugaguuuugcucguug

SEQ ID NO: 82558 - RNA, 22 nt, Homo sapiens
ugagacugaguuuugcucuugu

SEQ ID NO: 82559 - RNA, 22 nt, Homo sapiens
ugagacugguaauguguagggc

SEQ ID NO: 82560 - RNA, 22 nt, Homo sapiens
ugagacugagucuugcucuauu

SEQ ID NO: 82561 - RNA, 22 nt, Homo sapiens
ugagacugaguuucacuuuugu

SEQ ID NO: 82562 - RNA, 22 nt, Homo sapiens
ugagagucacugaccugguaua

SEQ ID NO: 82563 - RNA, 22 nt, Homo sapiens
ugagagcuuugaugcacuguuu

SEQ ID NO: 82564 - RNA, 22 nt, Homo sapiens
ugagagacagacauuaucuuau

SEQ ID NO: 82565 - RNA, 22 nt, Homo sapiens
ugagagacaguuucgucggagg

SEQ ID NO: 82566 - RNA, 22 nt, Homo sapiens
ugagagacauuuguuguagagu

SEQ ID NO: 82567 - RNA, 20 nt, Homo sapiens
ugagauaguaauccccuaca

SEQ ID NO: 82568 - RNA, 22 nt, Homo sapiens
ugagaucaugccacugcacuuc

SEQ ID NO: 82569 - RNA, 22 nt, Homo sapiens
ugagaucuguaaagucugacau

SEQ ID NO: 82570 - RNA, 22 nt, Homo sapiens
ugagaugauuuaauggagccca

SEQ ID NO: 82571 - RNA, 21 nt, Homo sapiens
ugagaugcaaucaccagggag

SEQ ID NO: 82572 - RNA, 22 nt, Homo sapiens
ugagauguagauauggauuaga

SEQ ID NO: 82573 - RNA, 22 nt, Homo sapiens
ugagaugaguucucgcucuguc

SEQ ID NO: 82574 - RNA, 22 nt, Homo sapiens
ucucuuggcggaaguugcagug

SEQ ID NO: 82575 - RNA, 22 nt, Homo sapiens
ucucugguuaugucauuaagca

SEQ ID NO: 82576 - RNA, 22 nt, Homo sapiens
ucucuugguugaacaguuugga

SEQ ID NO: 82577 - RNA, 22 nt, Homo sapiens
ucugagcaauagauguggauau

SEQ ID NO: 82578 - RNA, 22 nt, Homo sapiens
ucucugagaaaaguuucuccca

SEQ ID NO: 82579 - RNA, 22 nt, Homo sapiens
ucuccggguggcggcgaaggga

SEQ ID NO: 82580 - RNA, 19 nt, Homo sapiens
ucccaauguuuccaggcag

SEQ ID NO: 82581 - RNA, 22 nt, Homo sapiens
ucucaguguuaucuaucugccu

SEQ ID NO: 82582 - RNA, 22 nt, Homo sapiens
ucucaguggugcuggcagggga

SEQ ID NO: 82583 - RNA, 22 nt, Homo sapiens
ucuggcuccaaagucuauuuuu

SEQ ID NO: 82584 - RNA, 16 nt, Homo sapiens
ucuggcucuacaguuc

SEQ ID NO: 82585 - RNA, 20 nt, Homo sapiens
ucuggccccuccaaaucuca

SEQ ID NO: 82586 - RNA, 23 nt, Homo sapiens
ucugcggguguggacccuagugc

SEQ ID NO: 82587 - RNA, 23 nt, Homo sapiens
ucugauguuauaaaauucuuugg

SEQ ID NO: 82588 - RNA, 22 nt, Homo sapiens
ucugguguuauucauguaguuu

SEQ ID NO: 82589 - RNA, 22 nt, Homo sapiens
ucugguuccuuggcuucggguc

SEQ ID NO: 82590 - RNA, 22 nt, Homo sapiens
ucuggugugcucuggacuugca

SEQ ID NO: 82591 - RNA, 22 nt, Homo sapiens
ucugugcauggcagaggaauga

SEQ ID NO: 82592 - RNA, 22 nt, Homo sapiens
ucugucacugguggacgaucac

SEQ ID NO: 82593 - RNA, 19 nt, Homo sapiens
ucugucacuggggguauuc

SEQ ID NO: 82594 - RNA, 19 nt, Homo sapiens
ucuguaguuagggcuacag

SEQ ID NO: 82595 - RNA, 22 nt, Homo sapiens
ugaauagagcugcaguggacau

SEQ ID NO: 82596 - RNA, 22 nt, Homo sapiens
ugaaaugaucaguuugguuacu

SEQ ID NO: 82597 - RNA, 22 nt, Homo sapiens
ugaaauacuuuggcucuuuguu

SEQ ID NO: 82598 - RNA, 22 nt, Homo sapiens
ugaaauguguuaucugggccug

SEQ ID NO: 82599 - RNA, 22 nt, Homo sapiens
ugaaauggugcggucugcagca

SEQ ID NO: 82600 - RNA, 22 nt, Homo sapiens
ugacaagagaccccuccgcagg

SEQ ID NO: 82601 - RNA, 22 nt, Homo sapiens
ugaauuguuuacgagaugugag

SEQ ID NO: 82602 - RNA, 22 nt, Homo sapiens
ucuugguaaugucacauuuccu

SEQ ID NO: 82603 - RNA, 22 nt, Homo sapiens
ucuugcuuuugcagagcuucuc

SEQ ID NO: 82604 - RNA, 22 nt, Homo sapiens
ucuugcaguucccaaauucaca

SEQ ID NO: 82605 - RNA, 22 nt, Homo sapiens
ucuuggccaugaauggcaaggc

SEQ ID NO: 82606 - RNA, 22 nt, Homo sapiens
ucugugcauuguaacaacuaaa

SEQ ID NO: 82607 - RNA, 22 nt, Homo sapiens
ucugugcauuguaggauguuua

SEQ ID NO: 82608 - RNA, 22 nt, Homo sapiens
ucugugcuugucauaugcuuug

SEQ ID NO: 82609 - RNA, 22 nt, Homo sapiens
ucugugcugagaguugaaaguu

SEQ ID NO: 82610 - RNA, 22 nt, Homo sapiens
ucaggugcaguggcucugaccu

SEQ ID NO: 82611 - RNA, 22 nt, Homo sapiens
ucaggugcaguggcucaugcuu

SEQ ID NO: 82612 - RNA, 22 nt, Homo sapiens
ucagguccuuacugugcucccu

SEQ ID NO: 82613 - RNA, 22 nt, Homo sapiens
ucaggugcagagaagaaauggg

SEQ ID NO: 82614 - RNA, 22 nt, Homo sapiens
ucagguaguuugugggagauga

SEQ ID NO: 82615 - RNA, 22 nt, Homo sapiens
ucagguagugccaugauugauu

SEQ ID NO: 82616 - RNA, 22 nt, Homo sapiens
ucagguagcuagauuaugugag

SEQ ID NO: 82617 - RNA, 22 nt, Homo sapiens
ucagguagcauuuuggaaacag

SEQ ID NO: 82618 - RNA, 20 nt, Homo sapiens
ucagguagaucuuugagguc

SEQ ID NO: 82619 - RNA, 21 nt, Homo sapiens
ucagaagcucccagggaggac

SEQ ID NO: 82620 - RNA, 22 nt, Homo sapiens
ucaggcacuaguaagaaaaagg

SEQ ID NO: 82621 - RNA, 23 nt, Homo sapiens
ucaguacucuauaagugccagcu

SEQ ID NO: 82622 - RNA, 21 nt, Homo sapiens
ucaucaagcuguagacaugau

SEQ ID NO: 82623 - RNA, 22 nt, Homo sapiens
ucauguacuuguagucccggcu

SEQ ID NO: 82624 - RNA, 22 nt, Homo sapiens
uccaguguuccucagucacccc

SEQ ID NO: 82625 - RNA, 22 nt, Homo sapiens
uccagguacucagggggcugag

SEQ ID NO: 82626 - RNA, 18 nt, Homo sapiens
uccauugcagcauuauuu

SEQ ID NO: 82627 - RNA, 22 nt, Homo sapiens
ucaaacacuccauaucgcgauu

SEQ ID NO: 82628 - RNA, 22 nt, Homo sapiens
uauuucacaucuaugaagugag

SEQ ID NO: 82629 - RNA, 23 nt, Homo sapiens
ucacacuuaagagaaaugcagcu

SEQ ID NO: 82630 - RNA, 22 nt, Homo sapiens
ucacacugaauuugaagcaaug

SEQ ID NO: 82631 - RNA, 22 nt, Homo sapiens
ucacuggaggagaggaagugga

SEQ ID NO: 82632 - RNA, 22 nt, Homo sapiens
ucacugcgcuucagccugggug

SEQ ID NO: 82633 - RNA, 22 nt, Homo sapiens
ucacugcacuagguaaugccac

SEQ ID NO: 82634 - RNA, 22 nt, Homo sapiens
ucacugcacuccagccuuuaug

SEQ ID NO: 82635 - RNA, 22 nt, Homo sapiens
ucacugcgaccuccaccucccg

SEQ ID NO: 82636 - RNA, 22 nt, Homo sapiens
ucacugcgaccuccaccuccug

SEQ ID NO: 82637 - RNA, 22 nt, Homo sapiens
ucacauuguguagccugcucac

SEQ ID NO: 82638 - RNA, 22 nt, Homo sapiens
ucacagucacugucacguugaa

SEQ ID NO: 82639 - RNA, 22 nt, Homo sapiens
ucacagucggugacuucuugcu

SEQ ID NO: 82640 - RNA, 22 nt, Homo sapiens
ucacaguuggccuggccuuuua

SEQ ID NO: 82641 - RNA, 18 nt, Homo sapiens
ucacauggccgagagaga

SEQ ID NO: 82642 - RNA, 22 nt, Homo sapiens
aucaccuuucccuuucugaauc

SEQ ID NO: 82643 - RNA, 22 nt, Homo sapiens
aucagagccugugugcccugaa

SEQ ID NO: 82644 - RNA, 22 nt, Homo sapiens
aucuugcauuugcuaaaaugca

SEQ ID NO: 82645 - RNA, 22 nt, Homo sapiens
aucuuguguugaauggugcaga

SEQ ID NO: 82646 - RNA, 22 nt, Homo sapiens
aucugguguggcugugauccuc

SEQ ID NO: 82647 - RNA, 22 nt, Homo sapiens
aucuuggauuaccugggugggu

SEQ ID NO: 82648 - RNA, 22 nt, Homo sapiens
aucuguguuuaaggucccagaa

SEQ ID NO: 82649 - RNA, 22 nt, Homo sapiens
aucugguguauuggugcugggu

SEQ ID NO: 82650 - RNA, 22 nt, Homo sapiens
aucgcgccauuguacuccagcc

SEQ ID NO: 82651 - RNA, 22 nt, Homo sapiens
aucgugucuggcccugaaugcu

SEQ ID NO: 82652 - RNA, 22 nt, Homo sapiens
aucuccaggugccagcugcgcc

SEQ ID NO: 82653 - RNA, 22 nt, Homo sapiens
auggaagaaaguuggguucuug

SEQ ID NO: 82654 - RNA, 20 nt, Homo sapiens
auggaacugugagccaauua

SEQ ID NO: 82655 - RNA, 22 nt, Homo sapiens
auggcagcugacacuuccgucu

SEQ ID NO: 82656 - RNA, 22 nt, Homo sapiens
auggcagaaucaagccgacagc

SEQ ID NO: 82657 - RNA, 22 nt, Homo sapiens
augccucugacaauuggauucu

SEQ ID NO: 82658 - RNA, 22 nt, Homo sapiens
augcuguuuuguagcucccucu

SEQ ID NO: 82659 - RNA, 22 nt, Homo sapiens
augcuguuuugaauucucuaga

SEQ ID NO: 82660 - RNA, 19 nt, Homo sapiens
augcugguguugcucaaac

SEQ ID NO: 82661 - RNA, 22 nt, Homo sapiens
augaccagagagugcgcagggu

SEQ ID NO: 82662 - RNA, 22 nt, Homo sapiens
augaccuuggggaaccaugucu

SEQ ID NO: 82663 - RNA, 22 nt, Homo sapiens
augaaacuggcuaauuuuugua

SEQ ID NO: 82664 - RNA, 22 nt, Homo sapiens
augaucauggaagugcacccau

SEQ ID NO: 82665 - RNA, 18 nt, Homo sapiens
augacucuggguguuccu

SEQ ID NO: 82666 - RNA, 22 nt, Homo sapiens
agcaucacaugggcugcuuggg

SEQ ID NO: 82667 - RNA, 20 nt, Homo sapiens
agcaucacagagccgggugu

SEQ ID NO: 82668 - RNA, 20 nt, Homo sapiens
agcaucguuguguuauagcc

SEQ ID NO: 82669 - RNA, 22 nt, Homo sapiens
agcaucaugcaguugcuauuca

SEQ ID NO: 82670 - RNA, 22 nt, Homo sapiens
agcugguuuaauaugcugucug

SEQ ID NO: 82671 - RNA, 21 nt, Homo sapiens
agcugguuuccacagugugcu

SEQ ID NO: 82672 - RNA, 22 nt, Homo sapiens
agcuguaguuugguggauguaa

SEQ ID NO: 82673 - RNA, 19 nt, Homo sapiens
agcuguguugccugugaga

SEQ ID NO: 82674 - RNA, 20 nt, Homo sapiens
agcuguuguuaugagguuua

SEQ ID NO: 82675 - RNA, 22 nt, Homo sapiens
agcuguuguucucagaggcuuu

SEQ ID NO: 82676 - RNA, 22 nt, Homo sapiens
aguaucaucuuguuggccaggc

SEQ ID NO: 82677 - RNA, 22 nt, Homo sapiens
agcuugucuuauacuacuucau

SEQ ID NO: 82678 - RNA, 22 nt, Homo sapiens
agcuuguauuuguagccuguug

SEQ ID NO: 82679 - RNA, 20 nt, Homo sapiens
agcuugguuuggaugaucac

SEQ ID NO: 82680 - RNA, 22 nt, Homo sapiens
agugcaauggcgugaucuuggc

SEQ ID NO: 82681 - RNA, 22 nt, Homo sapiens
agugauguggaguuuggaugga

SEQ ID NO: 82682 - RNA, 22 nt, Homo sapiens
aguggcacaauuuugacucccc

SEQ ID NO: 82683 - RNA, 22 nt, Homo sapiens
agugcauuuguucugugucagg

SEQ ID NO: 82684 - RNA, 22 nt, Homo sapiens
agugcuuguacaaaccccgagg

SEQ ID NO: 82685 - RNA, 19 nt, Homo sapiens
aguggguguuuucuguuug

SEQ ID NO: 82686 - RNA, 22 nt, Homo sapiens
agucauggcagaaggcaccucu

SEQ ID NO: 82687 - RNA, 22 nt, Homo sapiens
agucacggugguuugcacuugu

SEQ ID NO: 82688 - RNA, 22 nt, Homo sapiens
agucaagugguuucugaguugg

SEQ ID NO: 82689 - RNA, 22 nt, Homo sapiens
agucaaguuuuuucagagaaua

SEQ ID NO: 82690 - RNA, 22 nt, Homo sapiens
aguggugucugaguggccaggg

SEQ ID NO: 82691 - RNA, 22 nt, Homo sapiens
auaacaggaaauacagggcuuu

SEQ ID NO: 82692 - RNA, 20 nt, Homo sapiens
auagaagacuagugcagcag

SEQ ID NO: 82693 - RNA, 22 nt, Homo sapiens
auagcagugugagaaugaacua

SEQ ID NO: 82694 - RNA, 22 nt, Homo sapiens
auagccaguagagagcuguuag

SEQ ID NO: 82695 - RNA, 22 nt, Homo sapiens
auagcagugugaaaauguacua

SEQ ID NO: 82696 - RNA, 22 nt, Homo sapiens
auagcagugccccaaacuccug

SEQ ID NO: 82697 - RNA, 22 nt, Homo sapiens
auagcagugugaaaauggacua

SEQ ID NO: 82698 - RNA, 22 nt, Homo sapiens
auagcagugugaaaacagacug

SEQ ID NO: 82699 - RNA, 20 nt, Homo sapiens
auaugcauguguuuucacuu

SEQ ID NO: 82700 - RNA, 22 nt, Homo sapiens
auaugcauguacccacacaggc

SEQ ID NO: 82701 - RNA, 22 nt, Homo sapiens
acacgugcagauuuauauaaau

SEQ ID NO: 82702 - RNA, 22 nt, Homo sapiens
acacuacuggguauauguguuu

SEQ ID NO: 82703 - RNA, 22 nt, Homo sapiens
aauuaguuggcugggugcggug

SEQ ID NO: 82704 - RNA, 22 nt, Homo sapiens
acaguagcgcaaucucggcuca

SEQ ID NO: 82705 - RNA, 22 nt, Homo sapiens
acacuggaggagagcuguugcu

SEQ ID NO: 82706 - RNA, 20 nt, Homo sapiens
acacuggaguaucaaggccc

SEQ ID NO: 82707 - RNA, 22 nt, Homo sapiens
acagucuggagaaugggugcuc

SEQ ID NO: 82708 - RNA, 18 nt, Homo sapiens
acagugcuggcaugagau

SEQ ID NO: 82709 - RNA, 22 nt, Homo sapiens
acagugcuucugauaugaugcc

SEQ ID NO: 82710 - RNA, 22 nt, Homo sapiens
acagugcuuucaauguucagua

SEQ ID NO: 82711 - RNA, 19 nt, Homo sapiens
acagugcuuugucagaagc

SEQ ID NO: 82712 - RNA, 22 nt, Homo sapiens
aaucacaggucuuggcugcaug

SEQ ID NO: 82713 - RNA, 22 nt, Homo sapiens
aaucacaguguucuugugaggg

SEQ ID NO: 82714 - RNA, 22 nt, Homo sapiens
aauggcucuguuggcccaagac

SEQ ID NO: 82715 - RNA, 22 nt, Homo sapiens
aaugguuuuaucagcguccaaa

SEQ ID NO: 82716 - RNA, 22 nt, Homo sapiens
aaugugcuguucagaggagucc

SEQ ID NO: 82717 - RNA, 19 nt, Homo sapiens
aauggcuuuuccuguuccc

SEQ ID NO: 82718 - RNA, 21 nt, Homo sapiens
aagguuuuuagugcuugacuu

SEQ ID NO: 82719 - RNA, 22 nt, Homo sapiens
aaguagcuggaugcaguggcac

SEQ ID NO: 82720 - RNA, 22 nt, Homo sapiens
aaguagugcuugugcucaucuc

SEQ ID NO: 82721 - RNA, 22 nt, Homo sapiens
aaguaagcauccaauaaauguu

SEQ ID NO: 82722 - RNA, 22 nt, Homo sapiens
aagguagcugagugaagugguu

SEQ ID NO: 82723 - RNA, 22 nt, Homo sapiens
uuuguggaaugcccuuauuuau

SEQ ID NO: 82724 - RNA, 22 nt, Homo sapiens
uuuguguccccacccacaucuc

SEQ ID NO: 82725 - RNA, 22 nt, Homo sapiens
uuuguguggccuuggccuggca

SEQ ID NO: 82726 - RNA, 22 nt, Homo sapiens
aaguggaauguuuguggcacaa

SEQ ID NO: 82727 - RNA, 20 nt, Homo sapiens
aauaacagccccagggaggu

SEQ ID NO: 82728 - RNA, 21 nt, Homo sapiens
aagugcucugggacucuaaau

SEQ ID NO: 82729 - RNA, 22 nt, Homo sapiens
aagugcacuguaagugcaggau

SEQ ID NO: 82730 - RNA, 22 nt, Homo sapiens
aagugcuuuacacaugcaugau

SEQ ID NO: 82731 - RNA, 22 nt, Homo sapiens
aagugcugggauuggccgggca

SEQ ID NO: 82732 - RNA, 22 nt, Homo sapiens
aagugcuguaugggagccuagg

SEQ ID NO: 82733 - RNA, 19 nt, Homo sapiens
acugagcuaccugggggca

SEQ ID NO: 82734 - RNA, 22 nt, Homo sapiens
acugcacuccaaccuguugggc

SEQ ID NO: 82735 - RNA, 22 nt, Homo sapiens
accccgagacugccaagaaucc

SEQ ID NO: 82736 - RNA, 22 nt, Homo sapiens
accagucucagguaugucuuua

SEQ ID NO: 82737 - RNA, 17 nt, Homo sapiens
accagugcaugugcuuu

SEQ ID NO: 82738 - RNA, 22 nt, Homo sapiens
accaccacucccgcauucuaaa

SEQ ID NO: 82739 - RNA, 19 nt, Homo sapiens
acagugucucuauaaugau

SEQ ID NO: 82740 - RNA, 22 nt, Homo sapiens
acagugucaugucguguucccc

SEQ ID NO: 82741 - RNA, 18 nt, Homo sapiens
acagugucauggcucaau

SEQ ID NO: 82742 - RNA, 18 nt, Homo sapiens
acagugucuuacaccugu

SEQ ID NO: 82743 - RNA, 22 nt, Homo sapiens
acugcacuccggccuggcaaca

SEQ ID NO: 82744 - RNA, 22 nt, Homo sapiens
acugcacuccagcuccagggug

SEQ ID NO: 82745 - RNA, 22 nt, Homo sapiens
acugcacuccagccuuugcgau

SEQ ID NO: 82746 - RNA, 20 nt, Homo sapiens
acugcacuccagucucuggg

SEQ ID NO: 82747 - RNA, 22 nt, Homo sapiens
acugcacuccagccuuggagac

SEQ ID NO: 82748 - RNA, 20 nt, Homo sapiens
agaaccuguaguguagaggg

SEQ ID NO: 82749 - RNA, 22 nt, Homo sapiens
acuuuguuauggcaacccuaag

SEQ ID NO: 82750 - RNA, 20 nt, Homo sapiens
acugcacuucagccugcugg

SEQ ID NO: 82751 - RNA, 22 nt, Homo sapiens
acugcacuucaaccucauugac

SEQ ID NO: 82752 - RNA, 22 nt, Homo sapiens
acugcacuucagccuguugaca

SEQ ID NO: 82753 - RNA, 22 nt, Homo sapiens
agacuagaaaucauuuguugag

SEQ ID NO: 82754 - RNA, 22 nt, Homo sapiens
agaacuguccauucagcaugaa

SEQ ID NO: 82755 - RNA, 22 nt, Homo sapiens
agaagaacauagggugacugaa

SEQ ID NO: 82756 - RNA, 22 nt, Homo sapiens
agaaugugaacaucuugaaagu

SEQ ID NO: 82757 - RNA, 22 nt, Homo sapiens
agagaccuguaaaguucaggca

SEQ ID NO: 82758 - RNA, 22 nt, Homo sapiens
agagucacaugaggcccuucau

SEQ ID NO: 82759 - RNA, 22 nt, Homo sapiens
agauggguuuucacauguuggc

SEQ ID NO: 82760 - RNA, 22 nt, Homo sapiens
agaugcuguuaucaacuguagc

SEQ ID NO: 82761 - RNA, 22 nt, Homo sapiens
agauggugugcuaggaaaugua

SEQ ID NO: 82762 - RNA, 22 nt, Homo sapiens
agcaacaucagcagcaggaaaa

SEQ ID NO: 82763 - RNA, 22 nt, Homo sapiens
agcaagacauggcuuccaaaug

SEQ ID NO: 82764 - RNA, 22 nt, Homo sapiens
agcacacuggguggcuuaaaca

SEQ ID NO: 82765 - RNA, 22 nt, Homo sapiens
agcaagauugauggccugcagg

SEQ ID NO: 82766 - RNA, 22 nt, Homo sapiens
agcacagugguuaaguuucuua

SEQ ID NO: 82767 - RNA, 22 nt, Homo sapiens
agcacagccuuguguuuucuug

SEQ ID NO: 82768 - RNA, 22 nt, Homo sapiens
agcacaguuaaaugaggcuucu

SEQ ID NO: 82769 - RNA, 22 nt, Homo sapiens
agcagcuuugaucugaaugauu

SEQ ID NO: 82770 - RNA, 22 nt, Homo sapiens
agcaggauuguuacaauaguaa

SEQ ID NO: 82771 - RNA, 22 nt, Homo sapiens
agcagguguccacaauguuugc

SEQ ID NO: 82772 - RNA, 22 nt, Homo sapiens
agcagcgacacccuguggugag

SEQ ID NO: 82773 - RNA, 19 nt, Homo sapiens
agcaguguggagauuucuc

SEQ ID NO: 82774 - RNA, 22 nt, Homo sapiens
agcaucacacacuacagggaaa

SEQ ID NO: 82775 - RNA, 22 nt, Homo sapiens
agcauagugccuugaaaacaau

SEQ ID NO: 82776 - RNA, 22 nt, Homo sapiens
agcaguagaauuccugcaucac

SEQ ID NO: 82777 - RNA, 16 nt, Homo sapiens
agcagguguuagguga

SEQ ID NO: 82778 - RNA, 22 nt, Homo sapiens
agcaguacauaaaaagcauccu

SEQ ID NO: 82779 - RNA, 22 nt, Homo sapiens
cacauguucaggagcacuuaga

SEQ ID NO: 82780 - RNA, 22 nt, Homo sapiens
cacaguguucauagccaucagg

SEQ ID NO: 82781 - RNA, 22 nt, Homo sapiens
cacauagcuagucaguagugaa

SEQ ID NO: 82782 - RNA, 22 nt, Homo sapiens
cacaggucauccuggaucaagg

SEQ ID NO: 82783 - RNA, 22 nt, Homo sapiens
caacacagugaaacccgucucu

SEQ ID NO: 82784 - RNA, 22 nt, Homo sapiens
cacagcacaggcaugaguguca

SEQ ID NO: 82785 - RNA, 20 nt, Homo sapiens
auuguccuugauuacacaga

SEQ ID NO: 82786 - RNA, 22 nt, Homo sapiens
auuguucuuguguccuuuuccu

SEQ ID NO: 82787 - RNA, 22 nt, Homo sapiens
auuucacugagacaugugccca

SEQ ID NO: 82788 - RNA, 22 nt, Homo sapiens
caaagugcuggccgggcgcagu

SEQ ID NO: 82789 - RNA, 22 nt, Homo sapiens
caaagugcugggacuggccggg

SEQ ID NO: 82790 - RNA, 22 nt, Homo sapiens
auugcacuccagccugcggaac

SEQ ID NO: 82791 - RNA, 22 nt, Homo sapiens
auugcacuccagccuggcagca

SEQ ID NO: 82792 - RNA, 22 nt, Homo sapiens
auugcacuccagccuggccgag

SEQ ID NO: 82793 - RNA, 22 nt, Homo sapiens
auugcacuccagccugagcaaa

SEQ ID NO: 82794 - RNA, 22 nt, Homo sapiens
auugcacuccagccugggcagc

SEQ ID NO: 82795 - RNA, 21 nt, Homo sapiens
auugcacuccagccugggcga

SEQ ID NO: 82796 - RNA, 22 nt, Homo sapiens
auugcacucuagccuuggcgac

SEQ ID NO: 82797 - RNA, 22 nt, Homo sapiens
auugcacuccauccugggcaau

SEQ ID NO: 82798 - RNA, 18 nt, Homo sapiens
auugcacuccugccuggg

SEQ ID NO: 82799 - RNA, 22 nt, Homo sapiens
auugcacuccagccuugggcaa

SEQ ID NO: 82800 - RNA, 22 nt, Homo sapiens
auugcacuccagccugggcuag

SEQ ID NO: 82801 - RNA, 22 nt, Homo sapiens
auugcacuccagccugggggac

SEQ ID NO: 82802 - RNA, 22 nt, Homo sapiens
auuguaccccaauguacaauau

SEQ ID NO: 82803 - RNA, 22 nt, Homo sapiens
auugcaguuucaacuccagggc

SEQ ID NO: 82804 - RNA, 22 nt, Homo sapiens
auugcagcccacccugggugau

SEQ ID NO: 82805 - RNA, 20 nt, Homo sapiens
auugcagcaugauuuauaau

SEQ ID NO: 82806 - RNA, 23 nt, Homo sapiens
augugugcuuggagagcaggaug

SEQ ID NO: 82807 - RNA, 22 nt, Homo sapiens
auggcuguuuuuuauguuacag

SEQ ID NO: 82808 - RNA, 22 nt, Homo sapiens
auggcugugaaaugguaggugg

SEQ ID NO: 82809 - RNA, 22 nt, Homo sapiens
auggcuguuccugggaguucua

SEQ ID NO: 82810 - RNA, 22 nt, Homo sapiens
auggcucuuauuauuuugaggu

SEQ ID NO: 82811 - RNA, 22 nt, Homo sapiens
auggcuguuucugcaaugucua

SEQ ID NO: 82812 - RNA, 22 nt, Homo sapiens
augugcuuaaaaaugcagagaa

SEQ ID NO: 82813 - RNA, 22 nt, Homo sapiens
augugcuuauagguguauguuu

SEQ ID NO: 82814 - RNA, 22 nt, Homo sapiens
auguggaaagcagcaugauaug

SEQ ID NO: 82815 - RNA, 22 nt, Homo sapiens
augugcuugagggaaaucaguu

SEQ ID NO: 82816 - RNA, 22 nt, Homo sapiens
auggcaguuuggucucugugcu

SEQ ID NO: 82817 - RNA, 22 nt, Homo sapiens
auggcccuguguggagcugcug

SEQ ID NO: 82818 - RNA, 23 nt, Homo sapiens
auggcccuggugggagugucuuu

SEQ ID NO: 82819 - RNA, 22 nt, Homo sapiens
auggcggugugaucuuggcuca

SEQ ID NO: 82820 - RNA, 22 nt, Homo sapiens
auggcguguggcuuggaggcug

SEQ ID NO: 82821 - RNA, 22 nt, Homo sapiens
auggcggugugggcggugcagc

SEQ ID NO: 82822 - RNA, 22 nt, Homo sapiens
auggcuauucuucuuuugucag

SEQ ID NO: 82823 - RNA, 22 nt, Homo sapiens
auggcucuguuuuuuaugcucu

SEQ ID NO: 82824 - RNA, 22 nt, Homo sapiens
cagugcaaccuccaucucucgg

SEQ ID NO: 82825 - RNA, 20 nt, Homo sapiens
cagugcaccuggcguguuga

SEQ ID NO: 82826 - RNA, 22 nt, Homo sapiens
cagugcauccauguucagcagu

SEQ ID NO: 82827 - RNA, 22 nt, Homo sapiens
cagugguuuucaacccugguug

SEQ ID NO: 82828 - RNA, 22 nt, Homo sapiens
cagugguuuucucaguucagca

SEQ ID NO: 82829 - RNA, 22 nt, Homo sapiens
caucacuuugccuccgucucua

SEQ ID NO: 82830 - RNA, 22 nt, Homo sapiens
caucacaguacuaaucgucaua

SEQ ID NO: 82831 - RNA, 22 nt, Homo sapiens
caccagcuggcauugaauaccu

SEQ ID NO: 82832 - RNA, 22 nt, Homo sapiens
cagcuguuguuaugucugcagg

SEQ ID NO: 82833 - RNA, 22 nt, Homo sapiens
caggaccucuugccuggaagcc

SEQ ID NO: 82834 - RNA, 22 nt, Homo sapiens
cagcuggugcugcaccaguggg

SEQ ID NO: 82835 - RNA, 22 nt, Homo sapiens
caggugcuuacuuaauagccau

SEQ ID NO: 82836 - RNA, 22 nt, Homo sapiens
cagugcaaagccucugcccaga

SEQ ID NO: 82837 - RNA, 22 nt, Homo sapiens
cagguacuucugggcugagcag

SEQ ID NO: 82838 - RNA, 22 nt, Homo sapiens
caggcauuguccaugcugaagg

SEQ ID NO: 82839 - RNA, 19 nt, Homo sapiens
cagguagugugcugacaug

SEQ ID NO: 82840 - RNA, 22 nt, Homo sapiens
caggugguauuugguuuucugu

SEQ ID NO: 82841 - RNA, 22 nt, Homo sapiens
cgcuggugaucuagacccccaa

SEQ ID NO: 82842 - RNA, 22 nt, Homo sapiens
cgcuggugucuaagcgacagcu

SEQ ID NO: 82843 - RNA, 22 nt, Homo sapiens
cggugcaauucuccugucucag

SEQ ID NO: 82844 - RNA, 22 nt, Homo sapiens
cggcaguggguaagccaagcuu

SEQ ID NO: 82845 - RNA, 22 nt, Homo sapiens
cguugcacuccagccugggcaa

SEQ ID NO: 82846 - RNA, 22 nt, Homo sapiens
ccuuuguuuaguugaauuguau

SEQ ID NO: 82847 - RNA, 22 nt, Homo sapiens
ccuuuuuguaguggaaguagga

SEQ ID NO: 82848 - RNA, 22 nt, Homo sapiens
cgaggaguaucuuugugguguu

SEQ ID NO: 82849 - RNA, 22 nt, Homo sapiens
cgccgggggaugggcaccagcg

SEQ ID NO: 82850 - RNA, 22 nt, Homo sapiens
cgcaguguuugugucccugggu

SEQ ID NO: 82851 - RNA, 22 nt, Homo sapiens
ccuaggcacugggguccagccc

SEQ ID NO: 82852 - RNA, 22 nt, Homo sapiens
ccgugcacggaaaggcauauuu

SEQ ID NO: 82853 - RNA, 22 nt, Homo sapiens
ccggcuguguggagaggccccu

SEQ ID NO: 82854 - RNA, 22 nt, Homo sapiens
ccggcugugugacugugggcag

SEQ ID NO: 82855 - RNA, 22 nt, Homo sapiens
cccugagagcagggucuuucuc

SEQ ID NO: 82856 - RNA, 22 nt, Homo sapiens
ccacacugucuuggugggaaac

SEQ ID NO: 82857 - RNA, 22 nt, Homo sapiens
ccaccgggucccagcucugcuc

SEQ ID NO: 82858 - RNA, 22 nt, Homo sapiens
ccagauguuuucauucagcaag

SEQ ID NO: 82859 - RNA, 20 nt, Homo sapiens
ccccuggaguggggcugcuu

SEQ ID NO: 82860 - RNA, 22 nt, Homo sapiens
cccugaagaaagccuaggacau

SEQ ID NO: 82861 - RNA, 17 nt, Homo sapiens
ccccugagcgaugcagu

SEQ ID NO: 82862 - RNA, 22 nt, Homo sapiens
cauggauuuuuuugaauggcag

SEQ ID NO: 82863 - RNA, 22 nt, Homo sapiens
caugcagcacacaugucugugc

SEQ ID NO: 82864 - RNA, 22 nt, Homo sapiens
caugacacuggcauguuucuuu

SEQ ID NO: 82865 - RNA, 22 nt, Homo sapiens
cauggagcuaggcuugaucccu

SEQ ID NO: 82866 - RNA, 22 nt, Homo sapiens
cauggcacugagcagguaugca

SEQ ID NO: 82867 - RNA, 22 nt, Homo sapiens
cauggcacuggugggagugucu

SEQ ID NO: 82868 - RNA, 22 nt, Homo sapiens
gaucugugugauuggaugcauu

SEQ ID NO: 82869 - RNA, 22 nt, Homo sapiens
gaugguggucuacccuuucccu

SEQ ID NO: 82870 - RNA, 22 nt, Homo sapiens
gauggugucccaggcucaggcu

SEQ ID NO: 82871 - RNA, 22 nt, Homo sapiens
gaugguguuuugauaggaauug

SEQ ID NO: 82872 - RNA, 22 nt, Homo sapiens
gaucacauguguacucaaugug

SEQ ID NO: 82873 - RNA, 17 nt, Homo sapiens
gaucacagucgucuccu

SEQ ID NO: 82874 - RNA, 22 nt, Homo sapiens
gauauugacuuauucuauguuu

SEQ ID NO: 82875 - RNA, 22 nt, Homo sapiens
gcaagaguauuucaaggaagau

SEQ ID NO: 82876 - RNA, 22 nt, Homo sapiens
gcaagaaugagaaggauuaauu

SEQ ID NO: 82877 - RNA, 22 nt, Homo sapiens
gcaagaauggaacaggagagcc

SEQ ID NO: 82878 - RNA, 22 nt, Homo sapiens
gcaagauguuaccauuagggaa

SEQ ID NO: 82879 - RNA, 22 nt, Homo sapiens
gauuauagaaguaauggguuua

SEQ ID NO: 82880 - RNA, 22 nt, Homo sapiens
gauuccacuuucaaauucaaau

SEQ ID NO: 82881 - RNA, 22 nt, Homo sapiens
gauuccacuuacuuagcauucc

SEQ ID NO: 82882 - RNA, 22 nt, Homo sapiens
gauguaggugcauuugcacgug

SEQ ID NO: 82883 - RNA, 22 nt, Homo sapiens
gaugguuuuucuccgauuuaua

SEQ ID NO: 82884 - RNA, 22 nt, Homo sapiens
gauguagaaagagugggcugga

SEQ ID NO: 82885 - RNA, 22 nt, Homo sapiens
gauuagagaaauacugcugcua

SEQ ID NO: 82886 - RNA, 22 nt, Homo sapiens
gauguuguuuagccuuugaugu

SEQ ID NO: 82887 - RNA, 22 nt, Homo sapiens
gagguauggauaucuggagagg

SEQ ID NO: 82888 - RNA, 22 nt, Homo sapiens
gagcaaugauugagccacugua

SEQ ID NO: 82889 - RNA, 22 nt, Homo sapiens
gagcaacaguggcagugguggg

SEQ ID NO: 82890 - RNA, 22 nt, Homo sapiens
gagaugugguucaaggguguuu

SEQ ID NO: 82891 - RNA, 22 nt, Homo sapiens
gagauguuuguuucacugucac

SEQ ID NO: 82892 - RNA, 20 nt, Homo sapiens
gagauguugaucagggcuau

SEQ ID NO: 82893 - RNA, 18 nt, Homo sapiens
gaguggugcuucccuugu

SEQ ID NO: 82894 - RNA, 22 nt, Homo sapiens
gagugcuguuagcccuggguuu

SEQ ID NO: 82895 - RNA, 22 nt, Homo sapiens
gagacggagucucgcucuguca

SEQ ID NO: 82896 - RNA, 22 nt, Homo sapiens
gagacggagucucgcucugucg

SEQ ID NO: 82897 - RNA, 22 nt, Homo sapiens
gagacggagucuugcucuguug

SEQ ID NO: 82898 - RNA, 22 nt, Homo sapiens
gagagcuaggccacuggggcuu

SEQ ID NO: 82899 - RNA, 21 nt, Homo sapiens
gagaggauucgccagccucuu

SEQ ID NO: 82900 - RNA, 22 nt, Homo sapiens
gagagcauuaagccaucaucau

SEQ ID NO: 82901 - RNA, 22 nt, Homo sapiens
gagacugagucucgcucugccg

SEQ ID NO: 82902 - RNA, 22 nt, Homo sapiens
gagaaccuccagcaagguagua

SEQ ID NO: 82903 - RNA, 22 nt, Homo sapiens
gagaacauuuaagccacucagg

SEQ ID NO: 82904 - RNA, 22 nt, Homo sapiens
gagaagugcgucguuugaugau

SEQ ID NO: 82905 - RNA, 22 nt, Homo sapiens
gagagugcuuuggguguaggcc

SEQ ID NO: 82906 - RNA, 22 nt, Homo sapiens
gagagugugucagaggcugcga

SEQ ID NO: 82907 - RNA, 22 nt, Homo sapiens
gacagugagaugucaugugaaa

SEQ ID NO: 82908 - RNA, 18 nt, Homo sapiens
gacaguguggcgauuccu

SEQ ID NO: 82909 - RNA, 22 nt, Homo sapiens
gagaacagaagcauuccuaauu

SEQ ID NO: 82910 - RNA, 20 nt, Homo sapiens
gacuugagagugggagagua

SEQ ID NO: 82911 - RNA, 18 nt, Homo sapiens
gacuuggaguuuacagug

SEQ ID NO: 82912 - RNA, 22 nt, Homo sapiens
gacugcauuugccccaucgaau

SEQ ID NO: 82913 - RNA, 20 nt, Homo sapiens
gacauguugguuugcugcac

SEQ ID NO: 82914 - RNA, 21 nt, Homo sapiens
gacauggcgauacuccgucuc

SEQ ID NO: 82915 - RNA, 23 nt, Homo sapiens
cuuuguccccacccaaaucucau

SEQ ID NO: 82916 - RNA, 20 nt, Homo sapiens
cuuuguccuccugcugugcu

SEQ ID NO: 82917 - RNA, 22 nt, Homo sapiens
cuuuguggggucuuuccucaaa

SEQ ID NO: 82918 - RNA, 22 nt, Homo sapiens
cuuuggguauucucccuugggg

SEQ ID NO: 82919 - RNA, 22 nt, Homo sapiens
cuuuggucaauugcugcgggga

SEQ ID NO: 82920 - RNA, 22 nt, Homo sapiens
cuuugcacaucucugcuuuccc

SEQ ID NO: 82921 - RNA, 20 nt, Homo sapiens
cuuuggcaaugagaacaggg

SEQ ID NO: 82922 - RNA, 22 nt, Homo sapiens
cuuugcguugaacaaagccaua

SEQ ID NO: 82923 - RNA, 20 nt, Homo sapiens
cuucacagaaguggaaucau

SEQ ID NO: 82924 - RNA, 22 nt, Homo sapiens
cuucacggugccuacuuguguc

SEQ ID NO: 82925 - RNA, 22 nt, Homo sapiens
cuuggcuucuuuauguggcuau

SEQ ID NO: 82926 - RNA, 22 nt, Homo sapiens
cuuggcuugguaucaaauaacc

SEQ ID NO: 82927 - RNA, 22 nt, Homo sapiens
cuugggccccacccaaaucuua

SEQ ID NO: 82928 - RNA, 22 nt, Homo sapiens
cuugugcaugaccccagguggg

SEQ ID NO: 82929 - RNA, 19 nt, Homo sapiens
cuugugccugaagcuuggg

SEQ ID NO: 82930 - RNA, 22 nt, Homo sapiens
cugguuguuacaugcuugccag

SEQ ID NO: 82931 - RNA, 22 nt, Homo sapiens
cugguuguucuggaugggcagg

SEQ ID NO: 82932 - RNA, 22 nt, Homo sapiens
cuggaguaugauguuagcguug

SEQ ID NO: 82933 - RNA, 22 nt, Homo sapiens
cuguagacauuaggccugcacu

SEQ ID NO: 82934 - RNA, 22 nt, Homo sapiens
cuggagcauugguggauuuguu

SEQ ID NO: 82935 - RNA, 22 nt, Homo sapiens
cuggagcaaaggugacucuugu

SEQ ID NO: 82936 - RNA, 22 nt, Homo sapiens
cuggacaaaucuggaaagaacc

SEQ ID NO: 82937 - RNA, 22 nt, Homo sapiens
cuggacguugaggcugcaguga

SEQ ID NO: 82938 - RNA, 22 nt, Homo sapiens
cuguugcaguuauggcugcagg

SEQ ID NO: 82939 - RNA, 22 nt, Homo sapiens
cugucacaguuuuggaggccag

SEQ ID NO: 82940 - RNA, 22 nt, Homo sapiens
cugcaguaaccacuguaggugu

SEQ ID NO: 82941 - RNA, 22 nt, Homo sapiens
cugcagaucuuggggcuugcca

SEQ ID NO: 82942 - RNA, 22 nt, Homo sapiens
cugcccguaauccucuccccag

SEQ ID NO: 82943 - RNA, 22 nt, Homo sapiens
cugcuaagagaaugagacuuag

SEQ ID NO: 82944 - RNA, 22 nt, Homo sapiens
cugcuguuguuaacuuuuggag

SEQ ID NO: 82945 - RNA, 20 nt, Homo sapiens
cugcacauccacucuacuuc

SEQ ID NO: 82946 - RNA, 22 nt, Homo sapiens
cugauuguucuugcugggccuu

SEQ ID NO: 82947 - RNA, 20 nt, Homo sapiens
cugcaaaugcugcugcugau

SEQ ID NO: 82948 - RNA, 22 nt, Homo sapiens
cugcaagaugcauaggaauuuu

SEQ ID NO: 82949 - RNA, 22 nt, Homo sapiens
cugagaucugaaccaggagugu

SEQ ID NO: 82950 - RNA, 22 nt, Homo sapiens
cugagcaugacaucaugugacu

SEQ ID NO: 82951 - RNA, 22 nt, Homo sapiens
cugagcccauucuggggagaag

SEQ ID NO: 82952 - RNA, 22 nt, Homo sapiens
cugagguacugggggccaggau

SEQ ID NO: 82953 - RNA, 22 nt, Homo sapiens
cugaggugggagaaucacauaa

SEQ ID NO: 82954 - RNA, 21 nt, Homo sapiens
cugaucacaggugagcugccu

SEQ ID NO: 82955 - RNA, 22 nt, Homo sapiens
cuagaagcauauucagaacaga

SEQ ID NO: 82956 - RNA, 22 nt, Homo sapiens
cuacagugggucuguaguccuu

SEQ ID NO: 82957 - RNA, 22 nt, Homo sapiens
cuauuugcauucagaggcaugu

SEQ ID NO: 82958 - RNA, 22 nt, Homo sapiens
cuagaguagaguuuccuuagga

SEQ ID NO: 82959 - RNA, 22 nt, Homo sapiens
cuagaggcacagccuaggcacu

SEQ ID NO: 82960 - RNA, 20 nt, Homo sapiens
cucagauuauucugaagcaa

SEQ ID NO: 82961 - RNA, 22 nt, Homo sapiens
cucacugucaacauguauuugg

SEQ ID NO: 82962 - RNA, 22 nt, Homo sapiens
cucaaguagugguuuucauuga

SEQ ID NO: 82963 - RNA, 22 nt, Homo sapiens
cucacaugcucaccugguguuc

SEQ ID NO: 82964 - RNA, 22 nt, Homo sapiens
cucacggcccugcgcacuggca

SEQ ID NO: 82965 - RNA, 22 nt, Homo sapiens
uuugcuucacuguuuggcaaaa

SEQ ID NO: 82966 - RNA, 22 nt, Homo sapiens
uuuugcaggucaggggcagaga

SEQ ID NO: 82967 - RNA, 18 nt, Homo sapiens
uuugccacuucccagaaa

SEQ ID NO: 82968 - RNA, 22 nt, Homo sapiens
uuugcuauagugaauagugcug

SEQ ID NO: 82969 - RNA, 22 nt, Homo sapiens
uuuugcauuggcugaggagugu

SEQ ID NO: 82970 - RNA, 22 nt, Homo sapiens
uuugcacuucugagugugacau

SEQ ID NO: 82971 - RNA, 22 nt, Homo sapiens
uuugcagagucuuucgcugggc

SEQ ID NO: 82972 - RNA, 22 nt, Homo sapiens
uuucuugguuguauuuagacuu

SEQ ID NO: 82973 - RNA, 22 nt, Homo sapiens
uuucuuggagcucuuagggucg

SEQ ID NO: 82974 - RNA, 22 nt, Homo sapiens
uuuuugguugguaggcuauuaa

SEQ ID NO: 82975 - RNA, 22 nt, Homo sapiens
uuuuuggauaaugguacaugua

SEQ ID NO: 82976 - RNA, 21 nt, Homo sapiens
uuuuugguggucauggauaga

SEQ ID NO: 82977 - RNA, 18 nt, Homo sapiens
uuuuugaggcacagggga

SEQ ID NO: 82978 - RNA, 21 nt, Homo sapiens
uuuugugcaugugcagccugc

SEQ ID NO: 82979 - RNA, 22 nt, Homo sapiens
uuuuggugguuaugugucaaug

SEQ ID NO: 82980 - RNA, 22 nt, Homo sapiens
uuuugucccaugggcuguuccc

SEQ ID NO: 82981 - RNA, 22 nt, Homo sapiens
uuuugugcauggcccaguggua

SEQ ID NO: 82982 - RNA, 20 nt, Homo sapiens
uuuuggcuuaaagcagucug

SEQ ID NO: 82983 - RNA, 22 nt, Homo sapiens
uggugccguccugcaauccugg

SEQ ID NO: 82984 - RNA, 19 nt, Homo sapiens
uggugccuuguucuuggau

SEQ ID NO: 82985 - RNA, 22 nt, Homo sapiens
uggcuguguccucucccaaauc

SEQ ID NO: 82986 - RNA, 22 nt, Homo sapiens
uggcuccguuguacaggcugga

SEQ ID NO: 82987 - RNA, 22 nt, Homo sapiens
uggcuacuguacuugagcuauu

SEQ ID NO: 82988 - RNA, 22 nt, Homo sapiens
ugguguccugucucugcgcuug

SEQ ID NO: 82989 - RNA, 21 nt, Homo sapiens
ugguugauccuccuagugccu

SEQ ID NO: 82990 - RNA, 22 nt, Homo sapiens
uguagacaccaaagacagcaua

SEQ ID NO: 82991 - RNA, 22 nt, Homo sapiens
uguauauguuuguacauauguc

SEQ ID NO: 82992 - RNA, 22 nt, Homo sapiens
uguccaguguuccucagaagaa

SEQ ID NO: 82993 - RNA, 22 nt, Homo sapiens
ugucaguggacugugaaaggca

SEQ ID NO: 82994 - RNA, 22 nt, Homo sapiens
ugucaguggucuggaugcagcc

SEQ ID NO: 82995 - RNA, 22 nt, Homo sapiens
ugucacguugcuuuucuguugu

SEQ ID NO: 82996 - RNA, 22 nt, Homo sapiens
ugucagaaucugagacgacaac

SEQ ID NO: 82997 - RNA, 22 nt, Homo sapiens
ugucagaaucuagaggcugcua

SEQ ID NO: 82998 - RNA, 20 nt, Homo sapiens
ugucaaggaauucccaaauc

SEQ ID NO: 82999 - RNA, 21 nt, Homo sapiens
ugucaagaugacugcugcggc

SEQ ID NO: 83000 - RNA, 21 nt, Homo sapiens
ugucugagagaggagaucuac

SEQ ID NO: 83001 - RNA, 18 nt, Homo sapiens
ugugacauugagcauguc

SEQ ID NO: 83002 - RNA, 22 nt, Homo sapiens
uguccguuuuguuucaggcuca

SEQ ID NO: 83003 - RNA, 21 nt, Homo sapiens
ugucgugcaggaucuguggga

SEQ ID NO: 83004 - RNA, 22 nt, Homo sapiens
ugugacucuggcacauggugag

SEQ ID NO: 83005 - RNA, 22 nt, Homo sapiens
ugugaugcagggccugggccuc

SEQ ID NO: 83006 - RNA, 22 nt, Homo sapiens
ugugucacugaggguuagugua

SEQ ID NO: 83007 - RNA, 22 nt, Homo sapiens
ugugucacugcacuccagccug

SEQ ID NO: 83008 - RNA, 22 nt, Homo sapiens
ugugcaaauuagcacaacccga

SEQ ID NO: 83009 - RNA, 22 nt, Homo sapiens
ugugcaaggcucucaaccugug

SEQ ID NO: 83010 - RNA, 22 nt, Homo sapiens
ugugcaaaaacaauugcgguuu

SEQ ID NO: 83011 - RNA, 22 nt, Homo sapiens
ugugcaaaaguaauugcgguuu

SEQ ID NO: 83012 - RNA, 22 nt, Homo sapiens
ugugcacaauguacagguuagu

SEQ ID NO: 83013 - RNA, 22 nt, Homo sapiens
ugugcacaaugugcagguuugu

SEQ ID NO: 83014 - RNA, 22 nt, Homo sapiens
ugugcacaugauauaucacaua

SEQ ID NO: 83015 - RNA, 22 nt, Homo sapiens
ugugcacaacaugcagguuugu

SEQ ID NO: 83016 - RNA, 22 nt, Homo sapiens
ugugcacaaccugcagguuugu

SEQ ID NO: 83017 - RNA, 22 nt, Homo sapiens
ugugcacaacgugcagguuugu

SEQ ID NO: 83018 - RNA, 22 nt, Homo sapiens
ugugcaugacagcauacaaacg

SEQ ID NO: 83019 - RNA, 22 nt, Homo sapiens
ugugccacugcacuccugccug

SEQ ID NO: 83020 - RNA, 22 nt, Homo sapiens
ugugccacugcacucccgccug

SEQ ID NO: 83021 - RNA, 22 nt, Homo sapiens
ugugccacuccagcucuagcuu

SEQ ID NO: 83022 - RNA, 22 nt, Homo sapiens
uuagagguaggauuucaccaug

SEQ ID NO: 83023 - RNA, 22 nt, Homo sapiens
uuagaacagugcucaccacaaa

SEQ ID NO: 83024 - RNA, 20 nt, Homo sapiens
uuauugcggcaucauucaug

SEQ ID NO: 83025 - RNA, 20 nt, Homo sapiens
uucacggaggccgcgccccc

SEQ ID NO: 83026 - RNA, 20 nt, Homo sapiens
uucacaggcagcuucuuucu

SEQ ID NO: 83027 - RNA, 22 nt, Homo sapiens
uucacaugguugccuuuugauc

SEQ ID NO: 83028 - RNA, 22 nt, Homo sapiens
uuaugacaggcucaggagcccc

SEQ ID NO: 83029 - RNA, 22 nt, Homo sapiens
uuaugcagcaaagugcuugaaa

SEQ ID NO: 83030 - RNA, 22 nt, Homo sapiens
uuagcagugugagcacagacua

SEQ ID NO: 83031 - RNA, 22 nt, Homo sapiens
uuagcgccuuucuuccucuccu

SEQ ID NO: 83032 - RNA, 22 nt, Homo sapiens
uuaggcaggauaguuacauauu

SEQ ID NO: 83033 - RNA, 22 nt, Homo sapiens
uuagcagcaccccacucuacug

SEQ ID NO: 83034 - RNA, 22 nt, Homo sapiens
uugcagagccccacacugggcu

SEQ ID NO: 83035 - RNA, 22 nt, Homo sapiens
uugcacuugcugaggagugauu

SEQ ID NO: 83036 - RNA, 22 nt, Homo sapiens
uugcagcauucugguuccuggu

SEQ ID NO: 83037 - RNA, 22 nt, Homo sapiens
uugcagcaacauggaugaaacu

SEQ ID NO: 83038 - RNA, 22 nt, Homo sapiens
uugcagcaaauaggaaugagga

SEQ ID NO: 83039 - RNA, 22 nt, Homo sapiens
uugcacaguguguacagcacca

SEQ ID NO: 83040 - RNA, 22 nt, Homo sapiens
uugcaagaaaugcagauucuca

SEQ ID NO: 83041 - RNA, 22 nt, Homo sapiens
uugcaagaaaucagagccuucc

SEQ ID NO: 83042 - RNA, 22 nt, Homo sapiens
uugcaagauguucaugggcugu

SEQ ID NO: 83043 - RNA, 22 nt, Homo sapiens
uugaggucagagguucgagacc

SEQ ID NO: 83044 - RNA, 22 nt, Homo sapiens
uugaggcuuuugaccucaugug

SEQ ID NO: 83045 - RNA, 22 nt, Homo sapiens
uugaggcaaugaggagaagcug

SEQ ID NO: 83046 - RNA, 22 nt, Homo sapiens
uugaggaggcagucuguccguu

SEQ ID NO: 83047 - RNA, 22 nt, Homo sapiens
uugaggacugagacagaccaag

SEQ ID NO: 83048 - RNA, 22 nt, Homo sapiens
uugagauggagucucgcugugu

SEQ ID NO: 83049 - RNA, 22 nt, Homo sapiens
uugagcaccaugccuggccaug

SEQ ID NO: 83050 - RNA, 22 nt, Homo sapiens
uugagcaaugucacugaggcuu

SEQ ID NO: 83051 - RNA, 22 nt, Homo sapiens
uugagcucuuccagccuggagc

SEQ ID NO: 83052 - RNA, 22 nt, Homo sapiens
uugagcccuggagguggaggcu

SEQ ID NO: 83053 - RNA, 22 nt, Homo sapiens
uugagcccuggaggcagaggcu

SEQ ID NO: 83054 - RNA, 22 nt, Homo sapiens
uugagcacugucugugugcagu

SEQ ID NO: 83055 - RNA, 22 nt, Homo sapiens
uugagcaucauguuagcacuca

SEQ ID NO: 83056 - RNA, 22 nt, Homo sapiens
uugaauggaauguuggaacuau

SEQ ID NO: 83057 - RNA, 22 nt, Homo sapiens
uugacaaggagccauugcaucu

SEQ ID NO: 83058 - RNA, 22 nt, Homo sapiens
uugaauaggcucaugcuuauca

SEQ ID NO: 83059 - RNA, 22 nt, Homo sapiens
uugaacugguaguuggaaaucu

SEQ ID NO: 83060 - RNA, 22 nt, Homo sapiens
uugaacuguaagggucugugug

SEQ ID NO: 83061 - RNA, 22 nt, Homo sapiens
uugagacggagucuugcucuuu

SEQ ID NO: 83062 - RNA, 22 nt, Homo sapiens
uugacuccagagugaguaaaug

SEQ ID NO: 83063 - RNA, 22 nt, Homo sapiens
uugacaggaugcucagggccca

SEQ ID NO: 83064 - RNA, 22 nt, Homo sapiens
uugacaaguuguccaguaugag

SEQ ID NO: 83065 - RNA, 22 nt, Homo sapiens
uugacagaccuuggucauaucc

SEQ ID NO: 83066 - RNA, 22 nt, Homo sapiens
uugaccuaugggaguuugacua

SEQ ID NO: 83067 - RNA, 22 nt, Homo sapiens
uucaucaguugagcugguugcu

SEQ ID NO: 83068 - RNA, 19 nt, Homo sapiens
uucauacagugagagcagc

SEQ ID NO: 83069 - RNA, 22 nt, Homo sapiens
uucauggaguugagaaggcuaa

SEQ ID NO: 83070 - RNA, 22 nt, Homo sapiens
uucauggaugcauuugaggggu

SEQ ID NO: 83071 - RNA, 22 nt, Homo sapiens
uucaugcaucuguagugguuaa

SEQ ID NO: 83072 - RNA, 20 nt, Homo sapiens
uucuugaguuaacaaguuac

SEQ ID NO: 83073 - RNA, 22 nt, Homo sapiens
uuggucaucucccuccuuuuag

SEQ ID NO: 83074 - RNA, 21 nt, Homo sapiens
uugguccacaugucauaguua

SEQ ID NO: 83075 - RNA, 22 nt, Homo sapiens
uugguaguuucugucuuuagau

SEQ ID NO: 83076 - RNA, 22 nt, Homo sapiens
uuggucaaaucugaugggagaa

SEQ ID NO: 83077 - RNA, 21 nt, Homo sapiens
uugguucccucugacaggucu

SEQ ID NO: 83078 - RNA, 22 nt, Homo sapiens
uuguccuccacauuugaucagu

SEQ ID NO: 83079 - RNA, 22 nt, Homo sapiens
uugucccauggggucuuccuuu

SEQ ID NO: 83080 - RNA, 22 nt, Homo sapiens
uuguccauggacagcaccacag

SEQ ID NO: 83081 - RNA, 22 nt, Homo sapiens
uugcaggugguuuaugcaagac

SEQ ID NO: 83082 - RNA, 22 nt, Homo sapiens
uugcuucauucaacauugaggg

SEQ ID NO: 83083 - RNA, 22 nt, Homo sapiens
uugcuucuuucgucuggcccca

SEQ ID NO: 83084 - RNA, 22 nt, Homo sapiens
uuggaaaccucugcagguguuu

SEQ ID NO: 83085 - RNA, 22 nt, Homo sapiens
uugcuggugguucgagcaacac

SEQ ID NO: 83086 - RNA, 22 nt, Homo sapiens
uugcuccucugccaggaccugu

SEQ ID NO: 83087 - RNA, 22 nt, Homo sapiens
uugcucaccugagaagaauaga

SEQ ID NO: 83088 - RNA, 22 nt, Homo sapiens
uugggcuugagggugcccaguc

SEQ ID NO: 83089 - RNA, 22 nt, Homo sapiens
uuggaagguaaucaaaaguucu

SEQ ID NO: 83090 - RNA, 22 nt, Homo sapiens
uuggaagacauucugucugcua

SEQ ID NO: 83091 - RNA, 22 nt, Homo sapiens
uugugcuuguaacuacauucag

SEQ ID NO: 83092 - RNA, 22 nt, Homo sapiens
uugugcuugcuguguucuaugc

SEQ ID NO: 83093 - RNA, 22 nt, Homo sapiens
uugugcuuuugagcugagauga

SEQ ID NO: 83094 - RNA, 22 nt, Homo sapiens
uugugcuuuuuaaauagcuucc

SEQ ID NO: 83095 - RNA, 22 nt, Homo sapiens
uugucucacuggaguuuaguaa

SEQ ID NO: 83096 - RNA, 22 nt, Homo sapiens
uugucuccuagacgaccaggcg

SEQ ID NO: 83097 - RNA, 22 nt, Homo sapiens
uugucuugcagcuuaggcauca

SEQ ID NO: 83098 - RNA, 22 nt, Homo sapiens
uugugguagugaaugagucuca

SEQ ID NO: 83099 - RNA, 22 nt, Homo sapiens
uugugguuauagagucucccug

SEQ ID NO: 83100 - RNA, 22 nt, Homo sapiens
uuuagcagcaaagagccaugcu

SEQ ID NO: 83101 - RNA, 22 nt, Homo sapiens
uuuccuggagaaucuuaacaaa

SEQ ID NO: 83102 - RNA, 22 nt, Homo sapiens
uuuccuguagggggcaaggccu

SEQ ID NO: 83103 - RNA, 19 nt, Molluscum contagiosum virus
uggaagaaucggacucgga

SEQ ID NO: 83104 - RNA, 22 nt, Molluscum contagiosum virus
uggccgugcccgccgacugccg

SEQ ID NO: 83105 - RNA, 22 nt, Molluscum contagiosum virus
ugcgcgcguggugugcuaccag

SEQ ID NO: 83106 - RNA, 22 nt, Molluscum contagiosum virus
ugccggcguccucuucccgcgg

SEQ ID NO: 83107 - RNA, 22 nt, Molluscum contagiosum virus
ugccuccugcacgcgguccauc

SEQ ID NO: 83108 - RNA, 22 nt, Molluscum contagiosum virus
ugcuggccgcccuggcgcuguu

SEQ ID NO: 83109 - RNA, 22 nt, Molluscum contagiosum virus
ugcuggcguucguucgcgccag

SEQ ID NO: 83110 - RNA, 21 nt, Molluscum contagiosum virus
ugcggcuugggcaccgcgcgg

SEQ ID NO: 83111 - RNA, 21 nt, Molluscum contagiosum virus
ugaucguguccaaguucaaga

SEQ ID NO: 83112 - RNA, 23 nt, Molluscum contagiosum virus
ugauggacauguacacgcgcgcg

SEQ ID NO: 83113 - RNA, 22 nt, Molluscum contagiosum virus
guccugcgagcucgacaugucc

SEQ ID NO: 83114 - RNA, 22 nt, Molluscum contagiosum virus
ucgcggcgccgcuguccuguga

SEQ ID NO: 83115 - RNA, 22 nt, Molluscum contagiosum virus
gucgugcuccacgcgcagcuuc

SEQ ID NO: 83116 - RNA, 22 nt, Molluscum contagiosum virus
ucucgacggggccguaguaggg

SEQ ID NO: 83117 - RNA, 19 nt, Molluscum contagiosum virus
ucuagcagcugcgccagcg

SEQ ID NO: 83118 - RNA, 22 nt, Molluscum contagiosum virus
ucgugcucuaggugugagggug

SEQ ID NO: 83119 - RNA, 22 nt, Molluscum contagiosum virus
ucgcguggaacuugacgccgua

SEQ ID NO: 83120 - RNA, 21 nt, Molluscum contagiosum virus
ucggagggucggagccugagc

SEQ ID NO: 83121 - RNA, 22 nt, Molluscum contagiosum virus
gugagcacaguguagcgcgcgc

SEQ ID NO: 83122 - RNA, 22 nt, Molluscum contagiosum virus
ggugcucguacuccucaugaau

SEQ ID NO: 83123 - RNA, 22 nt, Molluscum contagiosum virus
ggucuaagcgcaagccagagcu

SEQ ID NO: 83124 - RNA, 22 nt, Molluscum contagiosum virus
gggcuugucggaauuucugucu

SEQ ID NO: 83125 - RNA, 22 nt, Molluscum contagiosum virus
ggucgagucguucucgcgguac

SEQ ID NO: 83126 - RNA, 22 nt, Molluscum contagiosum virus
ggcaacgcaugcagucgacggc

SEQ ID NO: 83127 - RNA, 22 nt, Molluscum contagiosum virus
ggcacgcuggcacuugcgggug

SEQ ID NO: 83128 - RNA, 22 nt, Molluscum contagiosum virus
ggaagcgcucuagguugggugu

SEQ ID NO: 83129 - RNA, 21 nt, Molluscum contagiosum virus
ggaagcgggcgagaucguggc

SEQ ID NO: 83130 - RNA, 22 nt, Molluscum contagiosum virus
ggaaggccacuggcgagcguac

SEQ ID NO: 83131 - RNA, 22 nt, Molluscum contagiosum virus
gcgucccggcucugcucgucca

SEQ ID NO: 83132 - RNA, 22 nt, Molluscum contagiosum virus
gcugagcgcggagcuggcguug

SEQ ID NO: 83133 - RNA, 22 nt, Molluscum contagiosum virus
cgucaggcugggcgcgcgagcu

SEQ ID NO: 83134 - RNA, 18 nt, Molluscum contagiosum virus
gcguucucggcaaugccc

SEQ ID NO: 83135 - RNA, 22 nt, Molluscum contagiosum virus
gcucacggccuucgcguuccgg

SEQ ID NO: 83136 - RNA, 22 nt, Molluscum contagiosum virus
gcucauccaggcgccgcgcucg

SEQ ID NO: 83137 - RNA, 22 nt, Molluscum contagiosum virus
gcuccgcguggcagugcgcggg

SEQ ID NO: 83138 - RNA, 22 nt, Molluscum contagiosum virus
ggcgacaucuucaugguuacgg

SEQ ID NO: 83139 - RNA, 22 nt, Molluscum contagiosum virus
ggccugugcugugcagaacuuc

SEQ ID NO: 83140 - RNA, 22 nt, Molluscum contagiosum virus
ggcgccucgagcgcgcuggacu

SEQ ID NO: 83141 - RNA, 22 nt, Molluscum contagiosum virus
gggcgcugaacuuagcgcgcag

SEQ ID NO: 83142 - RNA, 23 nt, Molluscum contagiosum virus
gggaagcgugucacuuuccgaug

SEQ ID NO: 83143 - RNA, 22 nt, Molluscum contagiosum virus
gggaccggcaccugcuacuccc

SEQ ID NO: 83144 - RNA, 18 nt, Molluscum contagiosum virus
gggccugccagccggcgc

SEQ ID NO: 83145 - RNA, 22 nt, Molluscum contagiosum virus
gggcagcguguagcggcacacc

SEQ ID NO: 83146 - RNA, 23 nt, Molluscum contagiosum virus
auuucccugccggugcguuggca

SEQ ID NO: 83147 - RNA, 22 nt, Molluscum contagiosum virus
auguuggccagguagguguucu

SEQ ID NO: 83148 - RNA, 22 nt, Molluscum contagiosum virus
auggccaccgggaugcgcaugg

SEQ ID NO: 83149 - RNA, 22 nt, Molluscum contagiosum virus
agcgguguugcugacgacugcg

SEQ ID NO: 83150 - RNA, 22 nt, Molluscum contagiosum virus
agcgccuucuugaccagcacca

SEQ ID NO: 83151 - RNA, 22 nt, Molluscum contagiosum virus
agugaaggucgcguuccaggug

SEQ ID NO: 83152 - RNA, 22 nt, Molluscum contagiosum virus
cgcgacauggacaucgccagug

SEQ ID NO: 83153 - RNA, 22 nt, Molluscum contagiosum virus
cgccggcuggcaauguagcgua

SEQ ID NO: 83154 - RNA, 22 nt, Molluscum contagiosum virus
ccuugcgcuugugcguacgcgc

SEQ ID NO: 83155 - RNA, 22 nt, Molluscum contagiosum virus
ccugcacguucacgcgcuccag

SEQ ID NO: 83156 - RNA, 22 nt, Molluscum contagiosum virus
gcggucgacgggaacgagguca

SEQ ID NO: 83157 - RNA, 22 nt, Molluscum contagiosum virus
gcggugcagcugccgcagagcc

SEQ ID NO: 83158 - RNA, 22 nt, Molluscum contagiosum virus
cgcuggugucgcuuccaugggc

SEQ ID NO: 83159 - RNA, 22 nt, Molluscum contagiosum virus
cgcgggagcggccuccggagaa

SEQ ID NO: 83160 - RNA, 22 nt, Molluscum contagiosum virus
cgcgcccgaugaucugcuugag

SEQ ID NO: 83161 - RNA, 21 nt, Molluscum contagiosum virus
cgcgcagguccagcugcgaga

SEQ ID NO: 83162 - RNA, 22 nt, Molluscum contagiosum virus
uuccaugcgcaacgugcugcgu

SEQ ID NO: 83163 - RNA, 22 nt, Molluscum contagiosum virus
uuccuggacacgcgcaucgugu

SEQ ID NO: 83164 - RNA, 22 nt, Molluscum contagiosum virus
uuguaguugcgguggugcaucc

SEQ ID NO: 83165 - RNA, 22 nt, Molluscum contagiosum virus
uuacggacgcccuccucgaccu

SEQ ID NO: 83166 - RNA, 22 nt, Molluscum contagiosum virus
ugugugugcgcucacacggaac

SEQ ID NO: 83167 - RNA, 22 nt, Molluscum contagiosum virus
uguccacguaccugucgagugc

SEQ ID NO: 83168 - RNA, 22 nt, Molluscum contagiosum virus
uguccgagcgaaccgcggcagc

SEQ ID NO: 83169 - RNA, 22 nt, Molluscum contagiosum virus
ugucggucucgagcgccgccau

SEQ ID NO: 83170 - RNA, 21 nt, Molluscum contagiosum virus
ugugcgaggacguggcgcugc

SEQ ID NO: 83171 - RNA, 22 nt, Molluscum contagiosum virus
uggcuucucgacuggagggggc

SEQ ID NO: 83172 - RNA, 22 nt, Molluscum contagiosum virus
ucgcccguguucgcggagcugu

SEQ ID NO: 83173 - RNA, 22 nt, Molluscum contagiosum virus
ugucaagcacggaaaggaagug

SEQ ID NO: 83174 - RNA, 22 nt, Molluscum contagiosum virus
ugguguagaggaagcgcaggug

SEQ ID NO: 83175 - RNA, 22 nt, Molluscum contagiosum virus
guuccagcuagaagaggccguc

SEQ ID NO: 83176 - RNA, 22 nt, Molluscum contagiosum virus
gugggcggcagagagccggcgc

SEQ ID NO: 83177 - RNA, 18 nt, Molluscum contagiosum virus
gugcgcagcccgcugccc

SEQ ID NO: 83178 - RNA, 22 nt, Molluscum contagiosum virus
gugcgcuuugaggaacuagugc

SEQ ID NO: 83179 - RNA, 22 nt, Molluscum contagiosum virus
gcggcgcuaccugcacaaggag

SEQ ID NO: 83180 - RNA, 22 nt, Molluscum contagiosum virus
gugcgucgcugcgcgugguggg

SEQ ID NO: 83181 - RNA, 22 nt, Molluscum contagiosum virus
gugccgucagcacccaccaaga

SEQ ID NO: 83182 - RNA, 22 nt, Molluscum contagiosum virus
uccggcgaaaagccgcucgcgu

SEQ ID NO: 83183 - RNA, 23 nt, Molluscum contagiosum virus
uccaggccacgucguugcggcac

SEQ ID NO: 83184 - RNA, 22 nt, Molluscum contagiosum virus
uagcucugcucgcucugcgaga

SEQ ID NO: 83185 - RNA, 22 nt, Molluscum contagiosum virus
uagugcucuuuguggaccgcgg

SEQ ID NO: 83186 - RNA, 18 nt, Molluscum contagiosum virus
uccagcagcaguguugcc

SEQ ID NO: 83187 - RNA, 22 nt, Molluscum contagiosum virus
gcacagcucgcgcugcgucugc

SEQ ID NO: 83188 - RNA, 22 nt, Molluscum contagiosum virus
gcacgagcgaaaacgcgugucu

SEQ ID NO: 83189 - RNA, 22 nt, Molluscum contagiosum virus
gcacgcgcgcgugucuuccagc

SEQ ID NO: 83190 - RNA, 22 nt, Molluscum contagiosum virus
gaugcgugcacgucgagcacgg

SEQ ID NO: 83191 - RNA, 22 nt, Molluscum contagiosum virus
gaugcucauggacgcgcucggg

SEQ ID NO: 83192 - RNA, 20 nt, Molluscum contagiosum virus
gcagucguacgugagcaugc

SEQ ID NO: 83193 - RNA, 22 nt, Molluscum contagiosum virus
gaggauccgcauccucuaggcg

SEQ ID NO: 83194 - RNA, 22 nt, Molluscum contagiosum virus
gagugucgcgaccguagaagau

SEQ ID NO: 83195 - RNA, 19 nt, Molluscum contagiosum virus
gccgucgaugcgcaccagc

SEQ ID NO: 83196 - RNA, 22 nt, Molluscum contagiosum virus
gccgcgacaucuuccgcuuccu

SEQ ID NO: 83197 - RNA, 23 nt, Molluscum contagiosum virus
gcgcgcagacguggugcucgugg

SEQ ID NO: 83198 - RNA, 22 nt, Molluscum contagiosum virus
gcgcccugcgccgcacguaugg

SEQ ID NO: 83199 - RNA, 22 nt, Molluscum contagiosum virus
gcgccgcgccuguguccgucuc

SEQ ID NO: 83200 - RNA, 22 nt, Molluscum contagiosum virus
gcggcccuucguguucgcggac

SEQ ID NO: 83201 - RNA, 22 nt, Molluscum contagiosum virus
gcgcugcuccgcucguucagca

SEQ ID NO: 83202 - RNA, 19 nt, Molluscum contagiosum virus
gcgagcauguucugcgcga

SEQ ID NO: 83203 - RNA, 22 nt, Molluscum contagiosum virus
gcgcaagacgaguagugcgcga

SEQ ID NO: 83204 - RNA, 22 nt, Molluscum contagiosum virus
gcgcacacgggcucgagcucgg

SEQ ID NO: 83205 - RNA, 22 nt, Molluscum contagiosum virus
gcgccacgagcuugucccgcca

SEQ ID NO: 83206 - RNA, 22 nt, Molluscum contagiosum virus
gcgccacuugagacucgcaugu

SEQ ID NO: 83207 - RNA, 22 nt, Molluscum contagiosum virus
ccagcgccgccaggacagcauu

SEQ ID NO: 83208 - RNA, 20 nt, Molluscum contagiosum virus
ccagcgccuguccgugggcg

SEQ ID NO: 83209 - RNA, 22 nt, Molluscum contagiosum virus
caugcacagccgcuuucugggc

SEQ ID NO: 83210 - RNA, 22 nt, Molluscum contagiosum virus
caugggcucguccuguacuggc

SEQ ID NO: 83211 - RNA, 22 nt, Molluscum contagiosum virus
cagacgcgacaccuuccgagcc

SEQ ID NO: 83212 - RNA, 19 nt, Molluscum contagiosum virus
cagcagugccagcgcuguc

SEQ ID NO: 83213 - RNA, 22 nt, Molluscum contagiosum virus
agcgacucggacucgagcgacu

SEQ ID NO: 83214 - RNA, 22 nt, Molluscum contagiosum virus
cacgggcgcggagaacugcacc

SEQ ID NO: 83215 - RNA, 22 nt, Molluscum contagiosum virus
agagaaacauguagaaggccag

SEQ ID NO: 83216 - RNA, 22 nt, Molluscum contagiosum virus
acguguucgaacugcucgcguu

SEQ ID NO: 83217 - RNA, 22 nt, Molluscum contagiosum virus
acguaaagacggcgauucgugc

SEQ ID NO: 83218 - RNA, 22 nt, Molluscum contagiosum virus
cuggcgggcagcucugcuggca

SEQ ID NO: 83219 - RNA, 22 nt, Molluscum contagiosum virus
cuggacgacgugcagcaugcca

SEQ ID NO: 83220 - RNA, 22 nt, Molluscum contagiosum virus
cucgggcggguuguuggcgugg

SEQ ID NO: 83221 - RNA, 22 nt, Molluscum contagiosum virus
cuccgcacacgugcucguugcc

SEQ ID NO: 83222 - RNA, 22 nt, Molluscum contagiosum virus
cugcaugcugugcuucguggag

SEQ ID NO: 83223 - RNA, 22 nt, Molluscum contagiosum virus
cugccgcggggcuagcgcugca

SEQ ID NO: 83224 - RNA, 22 nt, Molluscum contagiosum virus
gacccaguggcguuugccguga

SEQ ID NO: 83225 - RNA, 17 nt, Molluscum contagiosum virus
gacggaaugcgagcgcc

SEQ ID NO: 83226 - RNA, 22 nt, Molluscum contagiosum virus
cugugcgcgcaggccacggggu

SEQ ID NO: 83227 - RNA, 22 nt, Molluscum contagiosum virus
cugggagcaccgcguggcgcgc

SEQ ID NO: 83228 - RNA, 22 nt, Molluscum contagiosum virus
cuacgugcuggaacaggugcac

SEQ ID NO: 83229 - RNA, 22 nt, Molluscum contagiosum virus
cguggcgccgcugcuggaacag

SEQ ID NO: 83230 - RNA, 22 nt, Molluscum contagiosum virus
cgugcgcaccugcgcaagaugu

SEQ ID NO: 83231 - RNA, 22 nt, Molluscum contagiosum virus
acauguccaagcugcaggaacg

SEQ ID NO: 83232 - RNA, 22 nt, Molluscum contagiosum virus
accuugucacugucgcgacaac

SEQ ID NO: 83233 - RNA, 22 nt, Molluscum contagiosum virus
aaggcgucgggagcaccgucag

SEQ ID NO: 83234 - RNA, 22 nt, Molluscum contagiosum virus
aaagcggaaaaaugcacgcccg

SEQ ID NO: 83235 - RNA, 18 nt, Homo sapiens
aaacugcuuccuuggccu

SEQ ID NO: 83236 - RNA, 22 nt, Homo sapiens
aaacugcuuuccaugguggcug

SEQ ID NO: 83237 - RNA, 22 nt, Homo sapiens
aauccugucuugccauccaaua

SEQ ID NO: 83238 - RNA, 22 nt, Homo sapiens
agaagacuauucuggguugggc

SEQ ID NO: 83239 - RNA, 22 nt, Homo sapiens
acaguuaugugagggccaccag

SEQ ID NO: 83240 - RNA, 22 nt, Homo sapiens
acaucuguacaguggguguggu

SEQ ID NO: 83241 - RNA, 22 nt, Homo sapiens
acccuguugguggaucagauug

SEQ ID NO: 83242 - RNA, 23 nt, Homo sapiens
agccuguugccuaggcagcucau

SEQ ID NO: 83243 - RNA, 22 nt, Homo sapiens
augaccuuguccucagugucau

SEQ ID NO: 83244 - RNA, 22 nt, Homo sapiens
auccacagugucaauguuguga

SEQ ID NO: 83245 - RNA, 22 nt, Homo sapiens
aucacuguccacucaucuuucu

SEQ ID NO: 83246 - RNA, 22 nt, Homo sapiens
augguauuuugugauaccuugu

SEQ ID NO: 83247 - RNA, 22 nt, Homo sapiens
auguuugguaagaauauuguua

SEQ ID NO: 83248 - RNA, 22 nt, Homo sapiens
cacagcuaacaacuguuucuuc

SEQ ID NO: 83249 - RNA, 22 nt, Homo sapiens
cauggcccugggcugggcgaac

SEQ ID NO: 83250 - RNA, 22 nt, Homo sapiens
gaaacugcauuucuaacaagcu

SEQ ID NO: 83251 - RNA, 22 nt, Homo sapiens
cuuuuugguagagcaggugugc

SEQ ID NO: 83252 - RNA, 22 nt, Homo sapiens
gaccacagacuggaaagagggc

SEQ ID NO: 83253 - RNA, 22 nt, Homo sapiens
gcuguuugccgccaucgcagac

SEQ ID NO: 83254 - RNA, 22 nt, Homo sapiens
gcacagaugaggagaggucuca

SEQ ID NO: 83255 - RNA, 22 nt, Homo sapiens
guuccuuguagaugcuggauau

SEQ ID NO: 83256 - RNA, 17 nt, Homo sapiens
ggcaggaauuaauguca

SEQ ID NO: 83257 - RNA, 22 nt, Homo sapiens
ggcaugaaguagcccacaggca

SEQ ID NO: 83258 - RNA, 22 nt, Homo sapiens
ggcaagaacuucacucacuuuu

SEQ ID NO: 83259 - RNA, 22 nt, Homo sapiens
gucuuggcaugugcagcuggga

SEQ ID NO: 83260 - RNA, 22 nt, Homo sapiens
guauccugaaguucucagcacu

SEQ ID NO: 83261 - RNA, 23 nt, Homo sapiens
uaccacauuccuucuuuccuguu

SEQ ID NO: 83262 - RNA, 22 nt, Homo sapiens
uaccacagucauuacacuugua

SEQ ID NO: 83263 - RNA, 22 nt, Homo sapiens
uaccacaggcuggguaaucuau

SEQ ID NO: 83264 - RNA, 22 nt, Homo sapiens
uaccgcagugacauuccuugau

SEQ ID NO: 83265 - RNA, 19 nt, Homo sapiens
uaccagcacaguguuugag

SEQ ID NO: 83266 - RNA, 22 nt, Homo sapiens
uaccaccauuguaguuuggaaa

SEQ ID NO: 83267 - RNA, 20 nt, Homo sapiens
uagccggguguugugucaug

SEQ ID NO: 83268 - RNA, 22 nt, Homo sapiens
ucacagaugcuugacccauuuc

SEQ ID NO: 83269 - RNA, 22 nt, Homo sapiens
ucacagaugaggcgagaggcag

SEQ ID NO: 83270 - RNA, 22 nt, Homo sapiens
uauccuguagcucauccaccgc

SEQ ID NO: 83271 - RNA, 22 nt, Homo sapiens
ugucuuggagaauccuggguuu

SEQ ID NO: 83272 - RNA, 21 nt, Homo sapiens
ugucuuggagccagacgccag

SEQ ID NO: 83273 - RNA, 22 nt, Homo sapiens
ucuuuggucuacuuucauaugu

SEQ ID NO: 83274 - RNA, 22 nt, Homo sapiens
ucacucagaccuggugauaugc

SEQ ID NO: 83275 - RNA, 20 nt, Homo sapiens
uucuauggugaugaguccug

SEQ ID NO: 83276 - RNA, 22 nt, Homo sapiens
uucuuugcuuggaagcggggga

SEQ ID NO: 83277 - RNA, 22 nt, Homo sapiens
uucuuugguacaagggccgacc

SEQ ID NO: 83278 - RNA, 22 nt, Homo sapiens
uuccacagggauuugcauugau

SEQ ID NO: 83279 - RNA, 22 nt, Homo sapiens
uugagcccuggagguggaggcu

SEQ ID NO: 83280 - RNA, 22 nt, Homo sapiens
uugagcccuggaggcagaggcu

SEQ ID NO: 83281 - RNA, 22 nt, Homo sapiens
uuagcacaguucauucauguua

SEQ ID NO: 83282 - RNA, 22 nt, Homo sapiens
uguuugguggucucuucacaug

SEQ ID NO: 83283 - RNA, 22 nt, Homo sapiens
uuaccucagaccugcucugugu

SEQ ID NO: 83284 - RNA, 22 nt, Homo sapiens
uguucuugaguugggaguacaa

SEQ ID NO: 83285 - RNA, 22 nt, Homo sapiens
uguucuugagccuuuagaccua

SEQ ID NO: 83286 - RNA, 22 nt, Homo sapiens
uguucuggagaguuuagucugg

SEQ ID NO: 83287 - RNA, 22 nt, Homo sapiens
uuguuugguugaguauggaagu

SEQ ID NO: 83288 - RNA, 22 nt, Homo sapiens
gaucuguuuuccuauuguuugu

SEQ ID NO: 83289 - RNA, 21 nt, Homo sapiens
gaccacagcagggaaugucag

SEQ ID NO: 83290 - RNA, 22 nt, Homo sapiens
gaaaugcucauuuuggauccuu

SEQ ID NO: 83291 - RNA, 21 nt, Homo sapiens
cuucuuggggcagggcagggu

SEQ ID NO: 83292 - RNA, 19 nt, Homo sapiens
cucuuuggugucucuucuu

SEQ ID NO: 83293 - RNA, 22 nt, Homo sapiens
cuggcaaauguuuucuguaaag

SEQ ID NO: 83294 - RNA, 21 nt, Homo sapiens
cagagaucaucucuguuuuaa

SEQ ID NO: 83295 - RNA, 22 nt, Homo sapiens
cagauaguuguagguguguggc

SEQ ID NO: 83296 - RNA, 22 nt, Homo sapiens
cagaucaucuugagcuuaggaa

SEQ ID NO: 83297 - RNA, 22 nt, Homo sapiens
auuggccccguuuuaaauguca

SEQ ID NO: 83298 - RNA, 20 nt, Homo sapiens
ccaucaguccucucuuguuc

SEQ ID NO: 83299 - RNA, 22 nt, Homo sapiens
ccaucccuuucugagcaguucc

SEQ ID NO: 83300 - RNA, 22 nt, Homo sapiens
cagccgggugagguggcuuguu

SEQ ID NO: 83301 - RNA, 22 nt, Homo sapiens
ccucuuuguugagacuucacca

SEQ ID NO: 83302 - RNA, 22 nt, Homo sapiens
acagaucagagauauuuagguu

SEQ ID NO: 83303 - RNA, 19 nt, Homo sapiens
acagauagaauguucuaca

SEQ ID NO: 83304 - RNA, 22 nt, Homo sapiens
augguauuuaacagucuuucua

SEQ ID NO: 83305 - RNA, 22 nt, Homo sapiens
uggaccccugcucgggagcccu

SEQ ID NO: 83306 - RNA, 22 nt, Homo sapiens
uggaagacucaagguggugaau

SEQ ID NO: 83307 - RNA, 22 nt, Homo sapiens
ucagauguuuuguuuaucugcu

SEQ ID NO: 83308 - RNA, 22 nt, Homo sapiens
ucuuugguaauggaugucugau

SEQ ID NO: 83309 - RNA, 19 nt, Homo sapiens
uaacacaguuguguuugag

SEQ ID NO: 83310 - RNA, 22 nt, Homo sapiens
uaacacagagcuccuaaucccu

SEQ ID NO: 83311 - RNA, 22 nt, Homo sapiens
uagcacagugucauucuaggua

SEQ ID NO: 83312 - RNA, 17 nt, Homo sapiens
uagcacagugccuggua

SEQ ID NO: 83313 - RNA, 22 nt, Homo sapiens
uagcacagggaauugguucucu

SEQ ID NO: 83314 - RNA, 22 nt, Homo sapiens
uacucacauucuguuucuugcu

SEQ ID NO: 83315 - RNA, 22 nt, Homo sapiens
gggcaugauggugcacacaugu

SEQ ID NO: 83316 - RNA, 22 nt, Homo sapiens
guguuugguugauagagccacu

SEQ ID NO: 83317 - RNA, 22 nt, Homo sapiens
guuauguuaguuacaaggcuag

SEQ ID NO: 83318 - RNA, 22 nt, Homo sapiens
guccuguuuuuaagguucauag

SEQ ID NO: 83319 - RNA, 22 nt, Homo sapiens
uucuugaggcaugccgcuggga

SEQ ID NO: 83320 - RNA, 22 nt, Homo sapiens
uuggccccuccaaaucucaugu

SEQ ID NO: 83321 - RNA, 22 nt, Homo sapiens
uuguuugguuagaugggcaagu

SEQ ID NO: 83322 - RNA, 22 nt, Homo sapiens
uugugccccuucucagucgggc

SEQ ID NO: 83323 - RNA, 22 nt, Homo sapiens
uuuguccccgcccagaucucau

SEQ ID NO: 83324 - RNA, 22 nt, Homo sapiens
uuuggcccugagggauggcaua

SEQ ID NO: 83325 - RNA, 22 nt, Homo sapiens
uguuuugguugucccuggccag

SEQ ID NO: 83326 - RNA, 22 nt, Homo sapiens
uuacacaguaggucccuaguaa

SEQ ID NO: 83327 - RNA, 22 nt, Homo sapiens
uucucugggacauaggucgggu

SEQ ID NO: 83328 - RNA, 20 nt, Homo sapiens
uuaguucauuuagaagguuu

SEQ ID NO: 83329 - RNA, 20 nt, Homo sapiens
auaccacagacuggguaguu

SEQ ID NO: 83330 - RNA, 22 nt, Homo sapiens
augcuguuuuguagcucccucu

SEQ ID NO: 83331 - RNA, 20 nt, Homo sapiens
augcaaacccugcuuugugg

SEQ ID NO: 83332 - RNA, 22 nt, Homo sapiens
augcaaacaucugaagagacau

SEQ ID NO: 83333 - RNA, 20 nt, Homo sapiens
acugauauguuccuguucuc

SEQ ID NO: 83334 - RNA, 22 nt, Homo sapiens
uauaccacugauuuuauucuga

SEQ ID NO: 83335 - RNA, 22 nt, Homo sapiens
uaucacagaggguauccuagag

SEQ ID NO: 83336 - RNA, 22 nt, Homo sapiens
uaucacaguaaaucugggugca

SEQ ID NO: 83337 - RNA, 22 nt, Homo sapiens
uaucacaguagaacucuuucca

SEQ ID NO: 83338 - RNA, 22 nt, Homo sapiens
guuagguagaaguuuacuuuga

SEQ ID NO: 83339 - RNA, 22 nt, Homo sapiens
guauugaguaaauguuuauugg

SEQ ID NO: 83340 - RNA, 22 nt, Homo sapiens
cagcuggugggagcuggguucc

SEQ ID NO: 83341 - RNA, 22 nt, Homo sapiens
cagccggguggcuccuagggua

SEQ ID NO: 83342 - RNA, 22 nt, Homo sapiens
caguguaugcuucuauuuuugg

SEQ ID NO: 83343 - RNA, 22 nt, Homo sapiens
cucagucuaugauacuuugcua

SEQ ID NO: 83344 - RNA, 17 nt, Homo sapiens
ccccugagcgaugcagu

SEQ ID NO: 83345 - RNA, 22 nt, Homo sapiens
gaucuguuucaauugucuuagu

SEQ ID NO: 83346 - RNA, 19 nt, Homo sapiens
gaucuguugaucaaugugu

SEQ ID NO: 83347 - RNA, 22 nt, Homo sapiens
gccccugagacuugccucgggc

SEQ ID NO: 83348 - RNA, 22 nt, Homo sapiens
cugaucuguuauacuuuucuau

SEQ ID NO: 83349 - RNA, 22 nt, Homo sapiens
cuguuugguaaggaugccucag

SEQ ID NO: 83350 - RNA, 22 nt, Homo sapiens
cuguuugguuaucuuuuccugu

SEQ ID NO: 83351 - RNA, 22 nt, Homo sapiens
cuguuuguuuaggguacucaga

SEQ ID NO: 83352 - RNA, 22 nt, Homo sapiens
uuuggcccccagcucaggacau

SEQ ID NO: 83353 - RNA, 23 nt, Homo sapiens
uuucuugggcaugcuaugucagu

SEQ ID NO: 83354 - RNA, 22 nt, Homo sapiens
uuucuuggagcucuuagggucg

SEQ ID NO: 83355 - RNA, 22 nt, Homo sapiens
uugcaaagaccucuucacuucc

SEQ ID NO: 83356 - RNA, 22 nt, Homo sapiens
uuggccccuuucauccacagcu

SEQ ID NO: 83357 - RNA, 21 nt, Homo sapiens
uucaucuggccguauuccagg

SEQ ID NO: 83358 - RNA, 22 nt, Homo sapiens
uucuuagucaaguuguauuuca

SEQ ID NO: 83359 - RNA, 22 nt, Homo sapiens
uuaucacauugacugauuugca

SEQ ID NO: 83360 - RNA, 22 nt, Homo sapiens
uucagcuaccugggaugcugaa

SEQ ID NO: 83361 - RNA, 22 nt, Homo sapiens
ugugcuuguaaaggccagagca

SEQ ID NO: 83362 - RNA, 16 nt, Homo sapiens
ugugucuugggcccug

SEQ ID NO: 83363 - RNA, 22 nt, Homo sapiens
ugaucucagcucacugguugaa

SEQ ID NO: 83364 - RNA, 22 nt, Homo sapiens
uggaagacucuagucucuugag

SEQ ID NO: 83365 - RNA, 22 nt, Homo sapiens
uuuaguucauuaaggaaucucc

SEQ ID NO: 83366 - RNA, 22 nt, Homo sapiens
uugagggcugaauaccaaucag

SEQ ID NO: 83367 - RNA, 22 nt, Homo sapiens
uuaccacagugccugucuaaug

SEQ ID NO: 83368 - RNA, 22 nt, Homo sapiens
ugucuuggacuugaaucucauu

SEQ ID NO: 83369 - RNA, 22 nt, Homo sapiens
uuuuugaguagcuggagagcag

SEQ ID NO: 83370 - RNA, 22 nt, Homo sapiens
uuucuugguuguauuuagacuu

SEQ ID NO: 83371 - RNA, 20 nt, Homo sapiens
cucacagacagcuucuuucu

SEQ ID NO: 83372 - RNA, 22 nt, Homo sapiens
cugauugucuauuuaguucacu

SEQ ID NO: 83373 - RNA, 22 nt, Homo sapiens
cuggaaacaucuuaggaaugca

SEQ ID NO: 83374 - RNA, 22 nt, Homo sapiens
gaucuguuguuuggaaguauca

SEQ ID NO: 83375 - RNA, 22 nt, Homo sapiens
cgccgggggaugggcaccagcg

SEQ ID NO: 83376 - RNA, 22 nt, Homo sapiens
cagcuguuguuccagucuuuua

SEQ ID NO: 83377 - RNA, 22 nt, Homo sapiens
caccacagccauuauugucccc

SEQ ID NO: 83378 - RNA, 22 nt, Homo sapiens
auguuugguagugaauauggua

SEQ ID NO: 83379 - RNA, 22 nt, Homo sapiens
cacagagugagacccugucucu

SEQ ID NO: 83380 - RNA, 22 nt, Homo sapiens
uuuguucuucguuccugagcca

SEQ ID NO: 83381 - RNA, 22 nt, Homo sapiens
aauccuguagauucuaauuccu

SEQ ID NO: 83382 - RNA, 22 nt, Homo sapiens
auauccuggagcauuuuugcaa

SEQ ID NO: 83383 - RNA, 22 nt, Homo sapiens
auacuguuuuacaucauugccu

SEQ ID NO: 83384 - RNA, 16 nt, Homo sapiens
auaccacagugacaca

SEQ ID NO: 83385 - RNA, 22 nt, Homo sapiens
aucuguguuuaaggucccagaa

SEQ ID NO: 83386 - RNA, 22 nt, Homo sapiens
aucccugugauccaaucacuuc

SEQ ID NO: 83387 - RNA, 22 nt, Homo sapiens
ucacuguugaugggcaugcagg

SEQ ID NO: 83388 - RNA, 22 nt, Homo sapiens
ucacagauaaauaaagaugauu

SEQ ID NO: 83389 - RNA, 22 nt, Homo sapiens
ucuuggccaugaauggcaaggc

SEQ ID NO: 83390 - RNA, 22 nt, Homo sapiens
ucugucuuugucaggaccagag

SEQ ID NO: 83391 - RNA, 22 nt, Homo sapiens
ucucuguuuauuuuugguguau

SEQ ID NO: 83392 - RNA, 22 nt, Homo sapiens
uagccgggugugguggaacucc

SEQ ID NO: 83393 - RNA, 22 nt, Homo sapiens
gggaacauggaaauucugcucu

SEQ ID NO: 83394 - RNA, 22 nt, Homo sapiens
ggcaagaaccucaauuaccuuu

SEQ ID NO: 83395 - RNA, 22 nt, Homo sapiens
ggagaucuuuguuaucuuuuga

SEQ ID NO: 83396 - RNA, 22 nt, Homo sapiens
gguggcuuuuugugauggcuga

SEQ ID NO: 83397 - RNA, 19 nt, Homo sapiens
gcuuagagacaaaacauug

SEQ ID NO: 83398 - RNA, 22 nt, Homo sapiens
uaggcauuuuucugauaaacua

SEQ ID NO: 83399 - RNA, 22 nt, Homo sapiens
ucauggguuuugguccaagcaa

SEQ ID NO: 83400 - RNA, 22 nt, Homo sapiens
uggaauguagcguugacacgag

SEQ ID NO: 83401 - RNA, 22 nt, Homo sapiens
uggauaguuuacugaagagugg

SEQ ID NO: 83402 - RNA, 22 nt, Homo sapiens
aguacugucugguuaccugaca

SEQ ID NO: 83403 - RNA, 18 nt, Homo sapiens
gagguuagguucugacag

SEQ ID NO: 83404 - RNA, 22 nt, Homo sapiens
cuggauagucaggagauauaua

SEQ ID NO: 83405 - RNA, 22 nt, Homo sapiens
ugucaggaugcuccuuuuggcu

SEQ ID NO: 83406 - RNA, 21 nt, Homo sapiens
uuagcauccauguucaucaac

SEQ ID NO: 83407 - RNA, 20 nt, Homo sapiens
uuagcagcaugauuuauaau

SEQ ID NO: 83408 - RNA, 19 nt, Homo sapiens
uuuagaucuuuuaugcagc

SEQ ID NO: 83409 - RNA, 20 nt, Homo sapiens
uggcaagugggaauuguggg

SEQ ID NO: 83410 - RNA, 22 nt, Homo sapiens
ucugugaaugaacacuugaaaa

SEQ ID NO: 83411 - RNA, 22 nt, Homo sapiens
uucuggcucgauucucugaccg

SEQ ID NO: 83412 - RNA, 22 nt, Homo sapiens
ccaccgggucccagcucugcuc

SEQ ID NO: 83413 - RNA, 22 nt, Homo sapiens
guuaggcagugugguauagcag

SEQ ID NO: 83414 - RNA, 22 nt, Homo sapiens
gugagcgaggaaacgacggcgc

SEQ ID NO: 83415 - RNA, 22 nt, Homo sapiens
uagagcaugugccauacguaca

SEQ ID NO: 83416 - RNA, 22 nt, Homo sapiens
aggugguuuugaugagcaggua

SEQ ID NO: 83417 - RNA, 22 nt, Homo sapiens
aucugcuccuggugaggguuuc

SEQ ID NO: 83418 - RNA, 22 nt, Homo sapiens
uuaguaucauccuucugcauuc

SEQ ID NO: 83419 - RNA, 22 nt, Homo sapiens
uucuggcuuauaaacgugacuu

SEQ ID NO: 83420 - RNA, 22 nt, Homo sapiens
uuugagcauguaguuuaacccu

SEQ ID NO: 83421 - RNA, 22 nt, Homo sapiens
uagaucauauucagugcuuacu

SEQ ID NO: 83422 - RNA, 22 nt, Homo sapiens
uaguaucacauggucuuaauua

SEQ ID NO: 83423 - RNA, 22 nt, Homo sapiens
uaguaucacaagguguacaccc

SEQ ID NO: 83424 - RNA, 22 nt, Homo sapiens
ugagcauuguuuggacuuggau

SEQ ID NO: 83425 - RNA, 22 nt, Homo sapiens
aggugguuuuaggcagagacau

SEQ ID NO: 83426 - RNA, 22 nt, Homo sapiens
aagccagugugacaggaaacuu

SEQ ID NO: 83427 - RNA, 22 nt, Homo sapiens
ugugaccaaaaucaacauaccu

SEQ ID NO: 83428 - RNA, 22 nt, Homo sapiens
uuagcacuugggaguauuuauu

SEQ ID NO: 83429 - RNA, 22 nt, Homo sapiens
uuauacucgucugaaugauucu

SEQ ID NO: 83430 - RNA, 22 nt, Homo sapiens
cuggauagagauugaugaugcu

SEQ ID NO: 83431 - RNA, 22 nt, Homo sapiens
agugaauguuggaaaguuauuu

SEQ ID NO: 83432 - RNA, 22 nt, Homo sapiens
aagugaauguuugguagcagug

SEQ ID NO: 83433 - RNA, 22 nt, Homo sapiens
aagugaaugaugugaaguguaa

SEQ ID NO: 83434 - RNA, 18 nt, Homo sapiens
aaacugcuuccuuggccu

SEQ ID NO: 83435 - RNA, 22 nt, Homo sapiens
aaacugcuuuccaugguggcug

SEQ ID NO: 83436 - RNA, 22 nt, Homo sapiens
acaucuguacaguggguguggu

SEQ ID NO: 83437 - RNA, 22 nt, Homo sapiens
gaaacugcauuucuaacaagcu

SEQ ID NO: 83438 - RNA, 22 nt, Homo sapiens
gaaaugcucauuuuggauccuu

SEQ ID NO: 83439 - RNA, 22 nt, Homo sapiens
uauugcagugagauccaucugg

SEQ ID NO: 83440 - RNA, 22 nt, Homo sapiens
ucacagaugaggcgagaggcag

SEQ ID NO: 83441 - RNA, 22 nt, Homo sapiens
ucacagauaaauaaagaugauu

SEQ ID NO: 83442 - RNA, 22 nt, Homo sapiens
uguucuugagccuuuagaccua

SEQ ID NO: 83443 - RNA, 22 nt, Homo sapiens
uugagcccuggaggcagaggcu

SEQ ID NO: 83444 - RNA, 22 nt, Homo sapiens
uugugccccuucucagucgggc

SEQ ID NO: 83445 - RNA, 22 nt, Homo sapiens
ugacucaguuucucagguagua

SEQ ID NO: 83446 - RNA, 22 nt, Homo sapiens
ugcaaaugucaaggguuagugu

SEQ ID NO: 83447 - RNA, 22 nt, Homo sapiens
acaguuaugugagggccaccag

SEQ ID NO: 83448 - RNA, 22 nt, Homo sapiens
cucagucuaugauacuuugcua

SEQ ID NO: 83449 - RNA, 22 nt, Homo sapiens
cugaaagagcauuugaaugggu

SEQ ID NO: 83450 - RNA, 21 nt, Homo sapiens
gaccacagcagggaaugucag

SEQ ID NO: 83451 - RNA, 22 nt, Homo sapiens
gaucuguuucaauugucuuagu

SEQ ID NO: 83452 - RNA, 21 nt, Homo sapiens
gauaaguuggcagccagcacc

SEQ ID NO: 83453 - RNA, 22 nt, Homo sapiens
ucagaucaugcuuaugauggga

SEQ ID NO: 83454 - RNA, 22 nt, Homo sapiens
uuuggcccugagggauggcaua

SEQ ID NO: 83455 - RNA, 22 nt, Homo sapiens
uuuggcccccagcucaggacau

SEQ ID NO: 83456 - RNA, 22 nt, Homo sapiens
uuuguucuucguuccugagcca

SEQ ID NO: 83457 - RNA, 22 nt, Homo sapiens
uuggcccugcugaccauucccu

SEQ ID NO: 83458 - RNA, 22 nt, Homo sapiens
uuacagcugcuccccaucacuc

SEQ ID NO: 83459 - RNA, 19 nt, Homo sapiens
aucuggaguuccuggggcu

SEQ ID NO: 83460 - RNA, 22 nt, Homo sapiens
augcuguuuuguagcucccucu

SEQ ID NO: 83461 - RNA, 22 nt, Homo sapiens
aggaacuguaacuaugucucug

SEQ ID NO: 83462 - RNA, 22 nt, Homo sapiens
guuguggcuugugauuaagcac

SEQ ID NO: 83463 - RNA, 20 nt, Homo sapiens
ccaucaguccucucuuguuc

SEQ ID NO: 83464 - RNA, 21 nt, Homo sapiens
cucauauugcuuuuccauggu

SEQ ID NO: 83465 - RNA, 22 nt, Homo sapiens
caguguaugcuucuauuuuugg

SEQ ID NO: 83466 - RNA, 22 nt, Homo sapiens
auuggccccguuuuaaauguca

SEQ ID NO: 83467 - RNA, 22 nt, Homo sapiens
cugauuuguccccagccucaug

SEQ ID NO: 83468 - RNA, 22 nt, Homo sapiens
gagaacugagauaagugauauu

SEQ ID NO: 83469 - RNA, 22 nt, Homo sapiens
gcaacugguuucaguuuuucag

SEQ ID NO: 83470 - RNA, 22 nt, Homo sapiens
gaucuguuuuccuauuguuugu

SEQ ID NO: 83471 - RNA, 22 nt, Homo sapiens
uucuuagucaaguuguauuuca

SEQ ID NO: 83472 - RNA, 19 nt, Homo sapiens
uuggucccuuuggguucuu

SEQ ID NO: 83473 - RNA, 22 nt, Homo sapiens
uugguccccuucaaccagcugu

SEQ ID NO: 83474 - RNA, 22 nt, Homo sapiens
uuggaaacauuuaugguaacag

SEQ ID NO: 83475 - RNA, 22 nt, Homo sapiens
ucagucauucacucacucggac

SEQ ID NO: 83476 - RNA, 22 nt, Homo sapiens
ugauccuguccuuaugauguua

SEQ ID NO: 83477 - RNA, 22 nt, Homo sapiens
ugcaaagaaauuuuggugacca

SEQ ID NO: 83478 - RNA, 22 nt, Homo sapiens
ugaggacugagaggcacugugg

SEQ ID NO: 83479 - RNA, 22 nt, Homo sapiens
uuggaaaccucugcagguguuu

SEQ ID NO: 83480 - RNA, 22 nt, Homo sapiens
uugcaagaaaucagagccuucc

SEQ ID NO: 83481 - RNA, 22 nt, Homo sapiens
uugagcccuggagguggaggcu

SEQ ID NO: 83482 - RNA, 21 nt, Homo sapiens
uucaucuggccguauuccagg

SEQ ID NO: 83483 - RNA, 22 nt, Homo sapiens
uuaccucagaccugcucugugu

SEQ ID NO: 83484 - RNA, 22 nt, Homo sapiens
cugauugucuauuuaguucacu

SEQ ID NO: 83485 - RNA, 22 nt, Homo sapiens
gaucuguuguuuggaaguauca

SEQ ID NO: 83486 - RNA, 22 nt, Homo sapiens
gaugguuuucaccugcaugcuu

SEQ ID NO: 83487 - RNA, 19 nt, Homo sapiens
gaucuguugaucaaugugu

SEQ ID NO: 83488 - RNA, 22 nt, Homo sapiens
gagaacuggcgugaacugcacg

SEQ ID NO: 83489 - RNA, 22 nt, Homo sapiens
cacagcuaacaacuguuucuuc

SEQ ID NO: 83490 - RNA, 20 nt, Homo sapiens
cagucauagacaucagaguc

SEQ ID NO: 83491 - RNA, 22 nt, Homo sapiens
cccugagcagccugaguuuccc

SEQ ID NO: 83492 - RNA, 22 nt, Homo sapiens
agucaaguuuuuucagagaaua

SEQ ID NO: 83493 - RNA, 22 nt, Homo sapiens
ucaggucauuccaggagggcca

SEQ ID NO: 83494 - RNA, 22 nt, Homo sapiens
ucacagaugcuugacccauuuc

SEQ ID NO: 83495 - RNA, 22 nt, Homo sapiens
ugaaacauacacucugaugggg

SEQ ID NO: 83496 - RNA, 20 nt, Homo sapiens
uagccggguguugugucaug

SEQ ID NO: 83497 - RNA, 22 nt, Homo sapiens
gcacagaugaggagaggucuca

SEQ ID NO: 83498 - RNA, 22 nt, Homo sapiens
ggagaucuuuguuaucuuuuga

SEQ ID NO: 83499 - RNA, 22 nt, Homo sapiens
gucuuggcaugugcagcuggga

SEQ ID NO: 83500 - RNA, 22 nt, Homo sapiens
ucuuggccaugaauggcaaggc

SEQ ID NO: 83501 - RNA, 23 nt, Homo sapiens
ugacaaccucaugcuuugucaug

SEQ ID NO: 83502 - RNA, 22 nt, Homo sapiens
uuuguucuucguuccugagcca

SEQ ID NO: 83503 - RNA, 22 nt, Homo sapiens
auggcccugggaaaggaggcau

SEQ ID NO: 83504 - RNA, 20 nt, Homo sapiens
auggcccugcugggaguguc

SEQ ID NO: 83505 - RNA, 22 nt, Homo sapiens
auggcccugaguucaauauauu

SEQ ID NO: 83506 - RNA, 22 nt, Homo sapiens
ugucuuggagaauccuggguuu

SEQ ID NO: 83507 - RNA, 22 nt, Homo sapiens
uugcuucuuucgucuggcccca

SEQ ID NO: 83508 - RNA, 23 nt, Homo sapiens
uuguccccuccaaagcucauguu

SEQ ID NO: 83509 - RNA, 21 nt, Homo sapiens
uuucugggggagcauggcagg

SEQ ID NO: 83510 - RNA, 22 nt, Homo sapiens
uuucugagaccaaaacuuguaa

SEQ ID NO: 83511 - RNA, 23 nt, Homo sapiens
ugcaccacuacacacucuugggu

SEQ ID NO: 83512 - RNA, 22 nt, Homo sapiens
ugguacuucaugcucacagaua

SEQ ID NO: 83513 - RNA, 22 nt, Homo sapiens
ucugugaaaucauuuccuguaa

SEQ ID NO: 83514 - RNA, 22 nt, Homo sapiens
uuggccccuuucauccacagcu

SEQ ID NO: 83515 - RNA, 22 nt, Homo sapiens
uuucuugguuguauuuagacuu

SEQ ID NO: 83516 - RNA, 22 nt, Homo sapiens
uuuggcccccagcucaggacau

SEQ ID NO: 83517 - RNA, 22 nt, Homo sapiens
uuucugggggugcugauggaaa

SEQ ID NO: 83518 - RNA, 21 nt, Homo sapiens
uuuagguagcuuuucugggag

SEQ ID NO: 83519 - RNA, 22 nt, Homo sapiens
uugugcuuuugagcugagauga

SEQ ID NO: 83520 - RNA, 22 nt, Homo sapiens
uucugagguuauauucucucaa

SEQ ID NO: 83521 - RNA, 22 nt, Homo sapiens
gagaccauuuacugccuacuua

SEQ ID NO: 83522 - RNA, 22 nt, Homo sapiens
auuguucuuguguccuuuuccu

SEQ ID NO: 83523 - RNA, 22 nt, Homo sapiens
uauuccacaauaugauuuuuaa

SEQ ID NO: 83524 - RNA, 22 nt, Homo sapiens
gggaacauggaaauucugcucu

SEQ ID NO: 83525 - RNA, 17 nt, Homo sapiens
augggguuguagcccca

SEQ ID NO: 83526 - RNA, 22 nt, Homo sapiens
auggaaggagaauggucuuuga

SEQ ID NO: 83527 - RNA, 22 nt, Homo sapiens
uguuuugguugucccuggccag

SEQ ID NO: 83528 - RNA, 22 nt, Homo sapiens
uguucuugaguugggaguacaa

SEQ ID NO: 83529 - RNA, 22 nt, Homo sapiens
uguucuggagaguuuagucugg

SEQ ID NO: 83530 - RNA, 22 nt, Homo sapiens
ugugcuuguaaaggccagagca

SEQ ID NO: 83531 - RNA, 22 nt, Homo sapiens
uuggcccugcugaccauucccu

SEQ ID NO: 83532 - RNA, 19 nt, Homo sapiens
uuggcccugguucucuucu

SEQ ID NO: 83533 - RNA, 22 nt, Homo sapiens
uuggccauggagcacuuuucua

SEQ ID NO: 83534 - RNA, 22 nt, Homo sapiens
uucuugaggcaugccgcuggga

SEQ ID NO: 83535 - RNA, 22 nt, Homo sapiens
uuuggcccugagggauggcaua

SEQ ID NO: 83536 - RNA, 22 nt, Homo sapiens
uuugggccaugcuucccgguca

SEQ ID NO: 83537 - RNA, 22 nt, Homo sapiens
uuucauggagaaucuucuuacu

SEQ ID NO: 83538 - RNA, 22 nt, Homo sapiens
uuuuccagugggacucccauua

SEQ ID NO: 83539 - RNA, 17 nt, Homo sapiens
ugagaacaugugguauu

SEQ ID NO: 83540 - RNA, 19 nt, Homo sapiens
ugagaacaugugguauuug

SEQ ID NO: 83541 - RNA, 22 nt, Homo sapiens
ggcccaguugcgggugguaccg

SEQ ID NO: 83542 - RNA, 22 nt, Homo sapiens
gagcugaucuuuauguaaauuc

SEQ ID NO: 83543 - RNA, 21 nt, Homo sapiens
cuucuuggggcagggcagggu

SEQ ID NO: 83544 - RNA, 22 nt, Homo sapiens
cuugaccuauggaucuguuuuu

SEQ ID NO: 83545 - RNA, 22 nt, Homo sapiens
auuggccccguuuuaaauguca

SEQ ID NO: 83546 - RNA, 19 nt, Homo sapiens
auuuccuggagcuggucuc

SEQ ID NO: 83547 - RNA, 22 nt, Homo sapiens
acccuggaggucuacagugcag

SEQ ID NO: 83548 - RNA, 22 nt, Homo sapiens
aggcauugugcaucgaugauuu

SEQ ID NO: 83549 - RNA, 22 nt, Homo sapiens
ugcaaagucgaaacugcaguuu

SEQ ID NO: 83550 - RNA, 23 nt, Homo sapiens
uggcauuuuuggcaaugccuucu

SEQ ID NO: 83551 - RNA, 20 nt, Homo sapiens
ugagaacaugugguauuugg

SEQ ID NO: 83552 - RNA, 20 nt, Homo sapiens
ugagaacauguggcauuugg

SEQ ID NO: 83553 - RNA, 22 nt, Homo sapiens
uugugcuucaucaccuagcaga

SEQ ID NO: 83554 - RNA, 23 nt, Homo sapiens
uuucauggggauuuacucauucc

SEQ ID NO: 83555 - RNA, 22 nt, Homo sapiens
uugaccacugggcacaguaagu

SEQ ID NO: 83556 - RNA, 22 nt, Homo sapiens
uucaccggggaccccuggcugu

SEQ ID NO: 83557 - RNA, 22 nt, Homo sapiens
uguucuugagccuuuagaccua

SEQ ID NO: 83558 - RNA, 21 nt, Homo sapiens
uaggccgggugcaggaugcuu

SEQ ID NO: 83559 - RNA, 22 nt, Homo sapiens
gucucuuguuaucauuucugag

SEQ ID NO: 83560 - RNA, 20 nt, Homo sapiens
gugagaacaugugguauuug

SEQ ID NO: 83561 - RNA, 20 nt, Homo sapiens
cuuuguccuccugcugugcu

SEQ ID NO: 83562 - RNA, 22 nt, Homo sapiens
acccuggauucguggccuugaa

SEQ ID NO: 83563 - RNA, 21 nt, Homo sapiens
acuuucuguggcaguccauuc

SEQ ID NO: 83564 - RNA, 22 nt, Homo sapiens
auggcccugcuaccacuuuucu

SEQ ID NO: 83565 - RNA, 23 nt, Homo sapiens
auggcccuggugggagugucuuu

SEQ ID NO: 83566 - RNA, 22 nt, Homo sapiens
auggcccuguguggagcugcug

SEQ ID NO: 83567 - RNA, 22 nt, Homo sapiens
ucaccuggggcacagcugaaga

SEQ ID NO: 83568 - RNA, 22 nt, Homo sapiens
ugaucuguccaccucagcuucc

SEQ ID NO: 83569 - RNA, 21 nt, Homo sapiens
gagcacauuguccucuaacgc

SEQ ID NO: 83570 - RNA, 22 nt, Homo sapiens
uaugugcacaugcccuggugac

SEQ ID NO: 83571 - RNA, 22 nt, Homo sapiens
gucucccaaccccugugcccag

SEQ ID NO: 83572 - RNA, 16 nt, Homo sapiens
ugagaacaugcagcau

SEQ ID NO: 83573 - RNA, 22 nt, Homo sapiens
uuccuuguagcaaaugcgauga

SEQ ID NO: 83574 - RNA, 22 nt, Homo sapiens
acagugacagaaagcugauuau

SEQ ID NO: 83575 - RNA, 22 nt, Homo sapiens
cccugagaugugaauuucagag

SEQ ID NO: 83576 - RNA, 22 nt, Homo sapiens
ucacacuguuuugauuauuaua

SEQ ID NO: 83577 - RNA, 22 nt, Homo sapiens
uuaauccugccuuauuucagua

SEQ ID NO: 83578 - RNA, 22 nt, Homo sapiens
uucucauggugauggcaaaauc

SEQ ID NO: 83579 - RNA, 22 nt, Homo sapiens
uaugcacacacguguuuaugug

SEQ ID NO: 83580 - RNA, 20 nt, Homo sapiens
gaaugguuucgggguucuug

SEQ ID NO: 83581 - RNA, 22 nt, Homo sapiens
cugggcaaugcggcuggauaga

SEQ ID NO: 83582 - RNA, 22 nt, Homo sapiens
cacugcacuccaguuuggauga

SEQ ID NO: 83583 - RNA, 22 nt, Homo sapiens
ucaguguugauggcugcugacu

SEQ ID NO: 83584 - RNA, 22 nt, Homo sapiens
cacugcauggucuagcuggguu

SEQ ID NO: 83585 - RNA, 22 nt, Homo sapiens
ccaaguguucucauuguucaau

SEQ ID NO: 83586 - RNA, 22 nt, Homo sapiens
gugugcauaugucuuuauagua

SEQ ID NO: 83587 - RNA, 22 nt, Homo sapiens
cucauugcaaucucugccuccc

SEQ ID NO: 83588 - RNA, 22 nt, Homo sapiens
acaugacauugggguggggaua

SEQ ID NO: 83589 - RNA, 21 nt, Homo sapiens
ggcaagagaauacaacauaaa

SEQ ID NO: 83590 - RNA, 22 nt, Homo sapiens
aacaguguuuuggguuuucugg

SEQ ID NO: 83591 - RNA, 22 nt, Homo sapiens
agcuucacaaugcagagggcag

SEQ ID NO: 83592 - RNA, 22 nt, Homo sapiens
uccuacaugcaguacauucaaa

SEQ ID NO: 83593 - RNA, 22 nt, Homo sapiens
uuguagcaaauauauuuuggaa

SEQ ID NO: 83594 - RNA, 19 nt, Homo sapiens
agcuuuggcuaacuuucuc

SEQ ID NO: 83595 - RNA, 22 nt, Homo sapiens
caaaugcuucuauggacugucu

SEQ ID NO: 83596 - RNA, 22 nt, Homo sapiens
agcaucaugcaguugcuauuca

SEQ ID NO: 83597 - RNA, 22 nt, Homo sapiens
uaaugcuaucugggccaggggu

SEQ ID NO: 83598 - RNA, 18 nt, Homo sapiens
cucacacccuaaucagga

SEQ ID NO: 83599 - RNA, 22 nt, Homo sapiens
uagucccauaugauuuagugaa

SEQ ID NO: 83600 - RNA, 22 nt, Homo sapiens
gcuggugacuuuaaguugaagc

SEQ ID NO: 83601 - RNA, 17 nt, Homo sapiens
ggaaugaauuccagccc

SEQ ID NO: 83602 - RNA, 22 nt, Homo sapiens
uugugaucauugucaaauagug

SEQ ID NO: 83603 - RNA, 22 nt, Homo sapiens
uguggcuuuacagcaugguuca

SEQ ID NO: 83604 - RNA, 22 nt, Homo sapiens
aggcauguggcucuguucugac

SEQ ID NO: 83605 - RNA, 22 nt, Homo sapiens
ucacacugcaucuguuggaauu

SEQ ID NO: 83606 - RNA, 20 nt, Homo sapiens
acacuggcuuugagauuuag

SEQ ID NO: 83607 - RNA, 22 nt, Homo sapiens
cugagaucguggggcugcuguc

SEQ ID NO: 83608 - RNA, 22 nt, Homo sapiens
auuacaugucuauccaugaaca

SEQ ID NO: 83609 - RNA, 22 nt, Homo sapiens
ugccugagccagguuuuaggag

SEQ ID NO: 83610 - RNA, 22 nt, Homo sapiens
ucacugcacuccagccuuuaug

SEQ ID NO: 83611 - RNA, 22 nt, Homo sapiens
gugggauggaaaugggcuucag

SEQ ID NO: 83612 - RNA, 22 nt, Homo sapiens
ugauaacauuucuucugguaca

SEQ ID NO: 83613 - RNA, 22 nt, Homo sapiens
gagcaucaguggccucaucuca

SEQ ID NO: 83614 - RNA, 22 nt, Homo sapiens
caaaugacaucauuucauucaa

SEQ ID NO: 83615 - RNA, 22 nt, Homo sapiens
uacacaugugaguucuuuucua

SEQ ID NO: 83616 - RNA, 22 nt, Homo sapiens
ucccugaguaucuaauguguuu

SEQ ID NO: 83617 - RNA, 22 nt, Homo sapiens
uaucccaguggauguaccccau

SEQ ID NO: 83618 - RNA, 22 nt, Homo sapiens
uaagacuuuuugggaauauaga

SEQ ID NO: 83619 - RNA, 22 nt, Homo sapiens
guggcagagucagagggaaaug

SEQ ID NO: 83620 - RNA, 22 nt, Homo sapiens
gggagcaaaaaugaugcccaag

SEQ ID NO: 83621 - RNA, 22 nt, Homo sapiens
cacauagcuagucaguagugaa

SEQ ID NO: 83622 - RNA, 22 nt, Homo sapiens
ugagcuguuugaagaagcauuu

SEQ ID NO: 83623 - RNA, 22 nt, Homo sapiens
uugcagagccccacacugggcu

SEQ ID NO: 83624 - RNA, 22 nt, Homo sapiens
cucaaguaauccucccgccuug

SEQ ID NO: 83625 - RNA, 22 nt, Homo sapiens
gauguaggugcauuugcacgug

SEQ ID NO: 83626 - RNA, 22 nt, Homo sapiens
cacaguguuccagcuauuugaa

SEQ ID NO: 83627 - RNA, 22 nt, Homo sapiens
ugacaucugcuugugcccagga

SEQ ID NO: 83628 - RNA, 22 nt, Homo sapiens
uccugagaauagaguugcaugu

SEQ ID NO: 83629 - RNA, 22 nt, Homo sapiens
aacagacugucacauaaaauug

SEQ ID NO: 83630 - RNA, 22 nt, Homo sapiens
uaugcacacguguccaugugca

SEQ ID NO: 83631 - RNA, 22 nt, Homo sapiens
uucucuggucagaggggagguu

SEQ ID NO: 83632 - RNA, 22 nt, Homo sapiens
uggaggacugcagaacugaggc

SEQ ID NO: 83633 - RNA, 22 nt, Homo sapiens
augauagguuuagguuuagaca

SEQ ID NO: 83634 - RNA, 19 nt, Homo sapiens
uggucccccgcaaucucau

SEQ ID NO: 83635 - RNA, 22 nt, Homo sapiens
auagaggacugaggugaucuuu

SEQ ID NO: 83636 - RNA, 22 nt, Homo sapiens
uugcaaggugcucgaagggcuc

SEQ ID NO: 83637 - RNA, 22 nt, Homo sapiens
auggagacaaauaaaggagagu

SEQ ID NO: 83638 - RNA, 22 nt, Homo sapiens
acaccuguggucccaguaacuu

SEQ ID NO: 83639 - RNA, 22 nt, Homo sapiens
uugauaguuuaauuaaugcuag

SEQ ID NO: 83640 - RNA, 22 nt, Homo sapiens
uacaguguuuugguauuccaca

SEQ ID NO: 83641 - RNA, 22 nt, Homo sapiens
ucuuggccaugaauggcaaggc

SEQ ID NO: 83642 - RNA, 23 nt, Homo sapiens
uuggucucccaaaguguugagau

SEQ ID NO: 83643 - RNA, 22 nt, Homo sapiens
uuggaaauguguuugcauucag

SEQ ID NO: 83644 - RNA, 22 nt, Homo sapiens
uugcauguacguacagagagag

SEQ ID NO: 83645 - RNA, 20 nt, Homo sapiens
cccuaagccagaugcugggg

SEQ ID NO: 83646 - RNA, 21 nt, Homo sapiens
aggugucuuggguucccuggc

SEQ ID NO: 83647 - RNA, 22 nt, Homo sapiens
ugguaucauuuuaucugcucua

SEQ ID NO: 83648 - RNA, 22 nt, Homo sapiens
ucuuugauuuuguuacuaagac

SEQ ID NO: 83649 - RNA, 22 nt, Homo sapiens
gcuuguguuuacuguaguuacu

SEQ ID NO: 83650 - RNA, 22 nt, Homo sapiens
agugcacucuuuccucucuuac

SEQ ID NO: 83651 - RNA, 22 nt, Homo sapiens
aacacuggcugcucgaguucuc

SEQ ID NO: 83652 - RNA, 22 nt, Homo sapiens
cuuuugcugggucagcgguggu

SEQ ID NO: 83653 - RNA, 22 nt, Homo sapiens
cacuggucagugaaacaguauu

SEQ ID NO: 83654 - RNA, 22 nt, Homo sapiens
cucauuaguuguuuuaagauga

SEQ ID NO: 83655 - RNA, 22 nt, Homo sapiens
uuauggcuauugaugacaauug

SEQ ID NO: 83656 - RNA, 22 nt, Homo sapiens
ugaguucaauguuaaugaagca

SEQ ID NO: 83657 - RNA, 21 nt, Homo sapiens
augguacugucucuggagaua

SEQ ID NO: 83658 - RNA, 22 nt, Homo sapiens
ucucaguggcuuccucacuuuu

SEQ ID NO: 83659 - RNA, 22 nt, Homo sapiens
aaagaagucagccuguccuuug

SEQ ID NO: 83660 - RNA, 22 nt, Homo sapiens
ucucccauccaugaacuucugu

SEQ ID NO: 83661 - RNA, 18 nt, Homo sapiens
ugagaucagcaucaaggg

SEQ ID NO: 83662 - RNA, 20 nt, Homo sapiens
ucucauggagggaaagagca

SEQ ID NO: 83663 - RNA, 22 nt, Homo sapiens
ugagaggugaauggcaggcuca

SEQ ID NO: 83664 - RNA, 22 nt, Homo sapiens
uuacaccuguaauccagcacuu

SEQ ID NO: 83665 - RNA, 22 nt, Homo sapiens
ugcuguuguuugaugaaguaau

SEQ ID NO: 83666 - RNA, 22 nt, Homo sapiens
cacacugucuucaauggguggu

SEQ ID NO: 83667 - RNA, 23 nt, Homo sapiens
uggguucauucuugaagucagug

SEQ ID NO: 83668 - RNA, 22 nt, Homo sapiens
uggagugcaauggcaccaucuu

SEQ ID NO: 83669 - RNA, 22 nt, Homo sapiens
uaucacacgccuugcuucauuu

SEQ ID NO: 83670 - RNA, 22 nt, Homo sapiens
uccauuuguucagcuucaggaa

SEQ ID NO: 83671 - RNA, 22 nt, Homo sapiens
uuuaaugcaucccaaaauguag

SEQ ID NO: 83672 - RNA, 17 nt, Homo sapiens
cacugggugcaagagga

SEQ ID NO: 83673 - RNA, 22 nt, Homo sapiens
ucaaaugauucuccugccucag

SEQ ID NO: 83674 - RNA, 22 nt, Homo sapiens
augugcacaugcuuacauguga

SEQ ID NO: 83675 - RNA, 22 nt, Homo sapiens
cacugcacuccagcuuugguga

SEQ ID NO: 83676 - RNA, 22 nt, Homo sapiens
ugggaucauuaugcauagugua

SEQ ID NO: 83677 - RNA, 22 nt, Homo sapiens
uuccauguaguugagcaguuuu

SEQ ID NO: 83678 - RNA, 22 nt, Homo sapiens
aauacugugauaucgagcgauu

SEQ ID NO: 83679 - RNA, 22 nt, Homo sapiens
guagcagaauaucagauaauuu

SEQ ID NO: 83680 - RNA, 22 nt, Homo sapiens
gcacugagagaagccccaagua

SEQ ID NO: 83681 - RNA, 22 nt, Homo sapiens
ggucacccugaugcuggugguc

SEQ ID NO: 83682 - RNA, 22 nt, Homo sapiens
uuuugcucuugguaaugaaaga

SEQ ID NO: 83683 - RNA, 19 nt, Homo sapiens
cccuggcacauggaaaaug

SEQ ID NO: 83684 - RNA, 22 nt, Homo sapiens
gagcugaauugcugccauuugc

SEQ ID NO: 83685 - RNA, 22 nt, Homo sapiens
agaauguaaacagaauagagga

SEQ ID NO: 83686 - RNA, 22 nt, Homo sapiens
guguauguuguccauggaugcg

SEQ ID NO: 83687 - RNA, 22 nt, Homo sapiens
agucacagccuuuuacuuuaga

SEQ ID NO: 83688 - RNA, 19 nt, Homo sapiens
caguaucauugcacauagu

SEQ ID NO: 83689 - RNA, 22 nt, Homo sapiens
agcagcauuaugauauaucuua

SEQ ID NO: 83690 - RNA, 20 nt, Homo sapiens
gcauaugucuuuauagcaga

SEQ ID NO: 83691 - RNA, 22 nt, Homo sapiens
gagaacaguguuguauuuuuuc

SEQ ID NO: 83692 - RNA, 22 nt, Homo sapiens
ggucaacaucaucaugguaagu

SEQ ID NO: 83693 - RNA, 22 nt, Homo sapiens
uaugcacaugugccugggugug

SEQ ID NO: 83694 - RNA, 18 nt, Homo sapiens
ucacauggccgagagaga

SEQ ID NO: 83695 - RNA, 22 nt, Homo sapiens
cugagauggagucucgcauugu

SEQ ID NO: 83696 - RNA, 22 nt, Homo sapiens
uugaaagacagaggggcaaguu

SEQ ID NO: 83697 - RNA, 20 nt, Homo sapiens
ugaaggaggucauuuauacc

SEQ ID NO: 83698 - RNA, 22 nt, Homo sapiens
ucagcagugugaaaacaaacua

SEQ ID NO: 83699 - RNA, 22 nt, Homo sapiens
gugaaagacauauaugguuuga

SEQ ID NO: 83700 - RNA, 22 nt, Homo sapiens
aagcugccuugugaaggcauuc

SEQ ID NO: 83701 - RNA, 22 nt, Homo sapiens
uagagaucuuauauuuuaugac

SEQ ID NO: 83702 - RNA, 21 nt, Homo sapiens
uggcaacauggauggauucug

SEQ ID NO: 83703 - RNA, 22 nt, Homo sapiens
caauggcaaugaaauagugaga

SEQ ID NO: 83704 - RNA, 20 nt, Homo sapiens
ucaaggcacgaauaaaaguu

SEQ ID NO: 83705 - RNA, 22 nt, Homo sapiens
gugcacaaugugcagguuuguu

SEQ ID NO: 83706 - RNA, 22 nt, Homo sapiens
gugcacaacgugcaggcuuguu

SEQ ID NO: 83707 - RNA, 22 nt, Homo sapiens
uggcauauaaagauguguucaa

SEQ ID NO: 83708 - RNA, 22 nt, Homo sapiens
uaucucauccuccuugauccca

SEQ ID NO: 83709 - RNA, 22 nt, Homo sapiens
gaucacuuugaugccaggaacu

SEQ ID NO: 83710 - RNA, 22 nt, Homo sapiens
cuggcucugggcuaaagaaaua

SEQ ID NO: 83711 - RNA, 22 nt, Homo sapiens
uucucauggaacaucuguacug

SEQ ID NO: 83712 - RNA, 21 nt, Homo sapiens
ugagaguaguguauuauucuc

SEQ ID NO: 83713 - RNA, 22 nt, Homo sapiens
acccuggagagugcuguaguaa

SEQ ID NO: 83714 - RNA, 22 nt, Homo sapiens
uuuuugugguauauugcaacaa

SEQ ID NO: 83715 - RNA, 20 nt, Homo sapiens
uuuggcacugagugguauaa

SEQ ID NO: 83716 - RNA, 22 nt, Homo sapiens
ucuguaacauccaccuucuggg

SEQ ID NO: 83717 - RNA, 22 nt, Homo sapiens
gagcugccuugccuaugcaaga

SEQ ID NO: 83718 - RNA, 22 nt, Homo sapiens
augugcuuauagguguauguuu

SEQ ID NO: 83719 - RNA, 21 nt, Homo sapiens
auggaaagacugccucuucaa

SEQ ID NO: 83720 - RNA, 22 nt, Homo sapiens
cuacaguagagaggauguagaa

SEQ ID NO: 83721 - RNA, 22 nt, Homo sapiens
agcugccagucuuguaaggccu

SEQ ID NO: 83722 - RNA, 22 nt, Homo sapiens
gugcuuguguuaauauguagcu

SEQ ID NO: 83723 - RNA, 21 nt, Homo sapiens
auagcacuucacuugguuaga

SEQ ID NO: 83724 - RNA, 22 nt, Homo sapiens
agcagguguccacaauguuugc

SEQ ID NO: 83725 - RNA, 22 nt, Homo sapiens
gugugacagcuauagacaugau

SEQ ID NO: 83726 - RNA, 22 nt, Homo sapiens
cuggauagagauugaugaugcu

SEQ ID NO: 83727 - RNA, 22 nt, Homo sapiens
gcucuuuugggguaauucugag

SEQ ID NO: 83728 - RNA, 22 nt, Homo sapiens
uuggaaggcuccuaaugaaugg

SEQ ID NO: 83729 - RNA, 22 nt, Homo sapiens
uucccuagaacacauggaggga

SEQ ID NO: 83730 - RNA, 22 nt, Homo sapiens
auauucaagugaggauggcuaa

SEQ ID NO: 83731 - RNA, 17 nt, Homo sapiens
auaaacucaucauuuuu

SEQ ID NO: 83732 - RNA, 22 nt, Homo sapiens
uaauugcaguucuguguuauau

SEQ ID NO: 83733 - RNA, 21 nt, Homo sapiens
ucaucaagcuguagacaugau

SEQ ID NO: 83734 - RNA, 21 nt, Homo sapiens
gugucacagacaugacagaug

SEQ ID NO: 83735 - RNA, 21 nt, Homo sapiens
acccccacaccuccuuaguuc

SEQ ID NO: 83736 - RNA, 22 nt, Homo sapiens
uauaacaaugcaagaauggccu

SEQ ID NO: 83737 - RNA, 22 nt, Homo sapiens
cuuuggccauagcuaaaugauu

SEQ ID NO: 83738 - RNA, 22 nt, Homo sapiens
aaugcacauaaaauccuccagg

SEQ ID NO: 83739 - RNA, 22 nt, Homo sapiens
cuuuguggggucuuuccucaaa

SEQ ID NO: 83740 - RNA, 22 nt, Homo sapiens
guugcacagucuuuccuggacu

SEQ ID NO: 83741 - RNA, 22 nt, Homo sapiens
aguccauuugaugaugauucca

SEQ ID NO: 83742 - RNA, 22 nt, Homo sapiens
ugaggucauguucugucagguu

SEQ ID NO: 83743 - RNA, 22 nt, Homo sapiens
cuuuuggugguucugaugcagg

SEQ ID NO: 83744 - RNA, 22 nt, Homo sapiens
uuuuugaguaaauauaaauugu

SEQ ID NO: 83745 - RNA, 22 nt, Homo sapiens
uaaggcacuacuuuaggcuuuc

SEQ ID NO: 83746 - RNA, 22 nt, Homo sapiens
uaggggcacacuucgguuagca

SEQ ID NO: 83747 - RNA, 22 nt, Homo sapiens
ugauggcaauggcauucauuuu

SEQ ID NO: 83748 - RNA, 22 nt, Homo sapiens
ugugccacuguucuguaaagug

SEQ ID NO: 83749 - RNA, 22 nt, Homo sapiens
uggaaguaaccaugaauggaau

SEQ ID NO: 83750 - RNA, 22 nt, Homo sapiens
gugcacaaucgugcauuccuug

SEQ ID NO: 83751 - RNA, 22 nt, Homo sapiens
ggagugucccaaucucagcuca

SEQ ID NO: 83752 - RNA, 22 nt, Homo sapiens
uggucaccuucuugcucugucu

SEQ ID NO: 83753 - RNA, 22 nt, Homo sapiens
ucccuugguaauucuguuccuu

SEQ ID NO: 83754 - RNA, 22 nt, Homo sapiens
auguaguauuaaugagagauaa

SEQ ID NO: 83755 - RNA, 22 nt, Homo sapiens
auaggacuauugugaggauuaa

SEQ ID NO: 83756 - RNA, 22 nt, Homo sapiens
aaugccuagugugugacaggug

SEQ ID NO: 83757 - RNA, 22 nt, Homo sapiens
augaggugggagaaucacuuga

SEQ ID NO: 83758 - RNA, 22 nt, Homo sapiens
uuugauguugagacuauaaagc

SEQ ID NO: 83759 - RNA, 22 nt, Homo sapiens
uauggcugcuuucacacuacaa

SEQ ID NO: 83760 - RNA, 22 nt, Homo sapiens
cucagcuacuugggaagcugag

SEQ ID NO: 83761 - RNA, 22 nt, Homo sapiens
uggguaguguaaagcacuccag

SEQ ID NO: 83762 - RNA, 22 nt, Homo sapiens
gugggcaaagcuaguguguaga

SEQ ID NO: 83763 - RNA, 21 nt, Homo sapiens
uugugccaaacccuggaggga

SEQ ID NO: 83764 - RNA, 22 nt, Homo sapiens
uaauagagucauuauuauuguu

SEQ ID NO: 83765 - RNA, 22 nt, Homo sapiens
aagcuguguguaagcucucaca

SEQ ID NO: 83766 - RNA, 22 nt, Homo sapiens
uucaagucaaggaaagaggucu

SEQ ID NO: 83767 - RNA, 22 nt, Homo sapiens
ucuggccuagaacaauuaauua

SEQ ID NO: 83768 - RNA, 21 nt, Homo sapiens
gugaucaugucacugcacucc

SEQ ID NO: 83769 - RNA, 22 nt, Homo sapiens
ucacauuguacaaacagguaag

SEQ ID NO: 83770 - RNA, 22 nt, Homo sapiens
cacugcacuccagccuaagagg

SEQ ID NO: 83771 - RNA, 20 nt, Homo sapiens
ugcagcacugggaaugcagu

SEQ ID NO: 83772 - RNA, 22 nt, Homo sapiens
aaagguaguacuucuagaaggg

SEQ ID NO: 83773 - RNA, 18 nt, Homo sapiens
ucccucagaauuauagaa

SEQ ID NO: 83774 - RNA, 22 nt, Homo sapiens
uuugucuccuaagacucugugg

SEQ ID NO: 83775 - RNA, 22 nt, Homo sapiens
uguauguagugaccagggccag

SEQ ID NO: 83776 - RNA, 22 nt, Homo sapiens
gugcauaugcaugugcaugcac

SEQ ID NO: 83777 - RNA, 22 nt, Homo sapiens
uguauguugauguuauauucug

SEQ ID NO: 83778 - RNA, 22 nt, Homo sapiens
caccuguagucccagcugaggc

SEQ ID NO: 83779 - RNA, 22 nt, Homo sapiens
uuuuaguggacaaagguauuua

SEQ ID NO: 83780 - RNA, 22 nt, Homo sapiens
uuaaguuguagcuacaaauaca

SEQ ID NO: 83781 - RNA, 17 nt, Homo sapiens
uggcaugaggguguggg

SEQ ID NO: 83782 - RNA, 21 nt, Homo sapiens
ugggccccuuccuuacaucau

SEQ ID NO: 83783 - RNA, 23 nt, Homo sapiens
uaucacacuuucucugugccaca

SEQ ID NO: 83784 - RNA, 22 nt, Homo sapiens
auaugcacgugcauacacacuu

SEQ ID NO: 83785 - RNA, 17 nt, Homo sapiens
gggucaccuugcaggua

SEQ ID NO: 83786 - RNA, 22 nt, Homo sapiens
uuguauguaaccauuuggcaaa

SEQ ID NO: 83787 - RNA, 23 nt, Homo sapiens
ugagguguuaagcagacuugucu

SEQ ID NO: 83788 - RNA, 22 nt, Homo sapiens
aagccagugugacaggaaacuu

SEQ ID NO: 83789 - RNA, 22 nt, Homo sapiens
caauggcacuauuggaaaaggu

SEQ ID NO: 83790 - RNA, 22 nt, Homo sapiens
cauggcauuugcagaguugaaa

SEQ ID NO: 83791 - RNA, 22 nt, Homo sapiens
gugaccucuguugcugucacua

SEQ ID NO: 83792 - RNA, 20 nt, Homo sapiens
agagugcugucuguccugag

SEQ ID NO: 83793 - RNA, 22 nt, Homo sapiens
gcauggaguggaaauucuuggg

SEQ ID NO: 83794 - RNA, 22 nt, Homo sapiens
ucucaaccuccacacuacaaua

SEQ ID NO: 83795 - RNA, 22 nt, Homo sapiens
aagcugcauuuucuagaugcuu

SEQ ID NO: 83796 - RNA, 20 nt, Homo sapiens
uccugagauucccaguucuc

SEQ ID NO: 83797 - RNA, 22 nt, Homo sapiens
uuggggcacggccucuguugcc

SEQ ID NO: 83798 - RNA, 22 nt, Homo sapiens
ucacugcacucuccgccuugcg

SEQ ID NO: 83799 - RNA, 22 nt, Homo sapiens
ggacagugaaugccacuccucc

SEQ ID NO: 83800 - RNA, 22 nt, Homo sapiens
uaccuuugucaguuacucaccu

SEQ ID NO: 83801 - RNA, 20 nt, Homo sapiens
gcaguguucacuguauuccu

SEQ ID NO: 83802 - RNA, 22 nt, Homo sapiens
ugaaggaguauggauaagucgu

SEQ ID NO: 83803 - RNA, 22 nt, Homo sapiens
cuccauguggcuaacuuuuaaa

SEQ ID NO: 83804 - RNA, 22 nt, Homo sapiens
uagaucauauacuugccaugac

SEQ ID NO: 83805 - RNA, 18 nt, Homo sapiens
acagugcugucacugcuu

SEQ ID NO: 83806 - RNA, 22 nt, Homo sapiens
cacugcaguaaauugcgucggu

SEQ ID NO: 83807 - RNA, 22 nt, Homo sapiens
gugggaugaucacaguucacug

SEQ ID NO: 83808 - RNA, 22 nt, Homo sapiens
uccauguagaagacaggggaga

SEQ ID NO: 83809 - RNA, 22 nt, Homo sapiens
acgugcaugcacacacaugcgc

SEQ ID NO: 83810 - RNA, 22 nt, Homo sapiens
aagugguuuuaaucuggugagu

SEQ ID NO: 83811 - RNA, 22 nt, Homo sapiens
ugugagaaaugcagaaucucag

SEQ ID NO: 83812 - RNA, 22 nt, Homo sapiens
gcaaaguguuuuuaggaagucu

SEQ ID NO: 83813 - RNA, 20 nt, Homo sapiens
augucagaguguggguacgg

SEQ ID NO: 83814 - RNA, 22 nt, Homo sapiens
cagccgggugagguggcuuguu

SEQ ID NO: 83815 - RNA, 22 nt, Homo sapiens
cacauugcaggaaaguucauua

SEQ ID NO: 83816 - RNA, 22 nt, Homo sapiens
cugacauuguugaucacagcca

SEQ ID NO: 83817 - RNA, 22 nt, Homo sapiens
caaauugcuuguggaggauaau

SEQ ID NO: 83818 - RNA, 22 nt, Homo sapiens
gagaacuaaugguuugauaagg

SEQ ID NO: 83819 - RNA, 22 nt, Homo sapiens
agagcuguguuuuaacuuuuua

SEQ ID NO: 83820 - RNA, 19 nt, Homo sapiens
cucauggagaaggagaaua

SEQ ID NO: 83821 - RNA, 22 nt, Homo sapiens
acagugcuuuuguuccucuccu

SEQ ID NO: 83822 - RNA, 22 nt, Homo sapiens
ugagguuggggucagggcuagc

SEQ ID NO: 83823 - RNA, 22 nt, Homo sapiens
uugugguuuuagcacuguggau

SEQ ID NO: 83824 - RNA, 22 nt, Homo sapiens
auagcacaguguguguacacca

SEQ ID NO: 83825 - RNA, 22 nt, Homo sapiens
auaucaaggccauuuucuaaau

SEQ ID NO: 83826 - RNA, 22 nt, Homo sapiens
auuuaugguuaauauaggaagu

SEQ ID NO: 83827 - RNA, 22 nt, Homo sapiens
uucuuccagccuugaggggccc

SEQ ID NO: 83828 - RNA, 22 nt, Homo sapiens
caugugcaugcuuucuuaugug

SEQ ID NO: 83829 - RNA, 22 nt, Homo sapiens
auagcagcagcuaguagugaua

SEQ ID NO: 83830 - RNA, 22 nt, Homo sapiens
aaggaguguggugaucuugggc

SEQ ID NO: 83831 - RNA, 21 nt, Homo sapiens
gagaggauucgccagccucuu

SEQ ID NO: 83832 - RNA, 22 nt, Homo sapiens
aacaggguguuugcaguuucuu

SEQ ID NO: 83833 - RNA, 21 nt, Homo sapiens
gucugguguuuuaaugaggac

SEQ ID NO: 83834 - RNA, 22 nt, Homo sapiens
uaagggacauguguugccuaag

SEQ ID NO: 83835 - RNA, 22 nt, Homo sapiens
auaguacuauugcaguguuaua

SEQ ID NO: 83836 - RNA, 22 nt, Homo sapiens
guucacacuugcaaccccagca

SEQ ID NO: 83837 - RNA, 22 nt, Homo sapiens
uaaaguuauugccccucaguua

SEQ ID NO: 83838 - RNA, 22 nt, Homo sapiens
uuccauguaguugaacgguuuu

SEQ ID NO: 83839 - RNA, 22 nt, Homo sapiens
ggugaguggugcuuaaguucag

SEQ ID NO: 83840 - RNA, 22 nt, Homo sapiens
acccugcuaaacagcccccugc

SEQ ID NO: 83841 - RNA, 22 nt, Homo sapiens
auggcacugaagcguauugaca

SEQ ID NO: 83842 - RNA, 22 nt, Homo sapiens
auugucacccgggcaguaagca

SEQ ID NO: 83843 - RNA, 22 nt, Homo sapiens
gaacuguaaagaaauucuaagg

SEQ ID NO: 83844 - RNA, 22 nt, Homo sapiens
caugucacuuccucucugaugg

SEQ ID NO: 83845 - RNA, 22 nt, Homo sapiens
uucccuguaucuucugccaugu

SEQ ID NO: 83846 - RNA, 21 nt, Homo sapiens
uaucacauuggugauuaaguu

SEQ ID NO: 83847 - RNA, 19 nt, Homo sapiens
ggucacagggguuacaagg

SEQ ID NO: 83848 - RNA, 22 nt, Homo sapiens
acaguggugcgaucucggcuca

SEQ ID NO: 83849 - RNA, 22 nt, Homo sapiens
agcuguguugucugaagucaga

SEQ ID NO: 83850 - RNA, 22 nt, Homo sapiens
uguucuugaguugggaguacaa

SEQ ID NO: 83851 - RNA, 21 nt, Homo sapiens
agcuuguguguaucacagugu

SEQ ID NO: 83852 - RNA, 22 nt, Homo sapiens
gucagggagggauagaugauua

SEQ ID NO: 83853 - RNA, 22 nt, Homo sapiens
ucacugaaaccuccgccuucug

SEQ ID NO: 83854 - RNA, 22 nt, Homo sapiens
uggaaauaaaugugccaagauc

SEQ ID NO: 83855 - RNA, 17 nt, Homo sapiens
ugagggaugccugguuc

SEQ ID NO: 83856 - RNA, 19 nt, Homo sapiens
uuuguauguuuccaguaau

SEQ ID NO: 83857 - RNA, 23 nt, Homo sapiens
agagugcaauggugccaucucgg

SEQ ID NO: 83858 - RNA, 22 nt, Homo sapiens
auacguacauaugcacauaugg

SEQ ID NO: 83859 - RNA, 22 nt, Homo sapiens
uuacaguaugaguaagaguucu

SEQ ID NO: 83860 - RNA, 22 nt, Homo sapiens
ucaccuggagacaugaagacug

SEQ ID NO: 83861 - RNA, 22 nt, Homo sapiens
acugcacuccaguuugggcagc

SEQ ID NO: 83862 - RNA, 22 nt, Homo sapiens
uucaccuugcccacagcagucu

SEQ ID NO: 83863 - RNA, 20 nt, Homo sapiens
cagagcaaagcaguccuggc

SEQ ID NO: 83864 - RNA, 22 nt, Homo sapiens
ggcaguggaagugccaguuucu

SEQ ID NO: 83865 - RNA, 22 nt, Homo sapiens
cucaguuuugccuuguuuaagg

SEQ ID NO: 83866 - RNA, 22 nt, Homo sapiens
aaaugcacaaagauuuugcacu

SEQ ID NO: 83867 - RNA, 22 nt, Homo sapiens
ucaccuggagaagauggaucau

SEQ ID NO: 83868 - RNA, 22 nt, Homo sapiens
cacagggcuaacauuuuugccc

SEQ ID NO: 83869 - RNA, 21 nt, Homo sapiens
uagcaaauugcuauuaaggca

SEQ ID NO: 83870 - RNA, 22 nt, Homo sapiens
uuacaguauugcaaggacuagg

SEQ ID NO: 83871 - RNA, 22 nt, Homo sapiens
cacugcacucuucuucugggca

SEQ ID NO: 83872 - RNA, 22 nt, Homo sapiens
aaaugcacagaaaggaugugga

SEQ ID NO: 83873 - RNA, 22 nt, Homo sapiens
cugucuguuucaaaagugguua

SEQ ID NO: 83874 - RNA, 19 nt, Homo sapiens
uuccuagugguugggaagu

SEQ ID NO: 83875 - RNA, 22 nt, Homo sapiens
gugguuuucaacuccaccugca

SEQ ID NO: 83876 - RNA, 22 nt, Homo sapiens
gagcucaccuuaccucuggagc

SEQ ID NO: 83877 - RNA, 22 nt, Homo sapiens
cacagagugagacccugucucu

SEQ ID NO: 83878 - RNA, 20 nt, Homo sapiens
augagguguaugacacugaa

SEQ ID NO: 83879 - RNA, 22 nt, Homo sapiens
ggaucacuugagaccaggaguu

SEQ ID NO: 83880 - RNA, 22 nt, Homo sapiens
cucacuggguguaaaacaugua

SEQ ID NO: 83881 - RNA, 22 nt, Homo sapiens
uuuugcaguuacagagagugag

SEQ ID NO: 83882 - RNA, 22 nt, Homo sapiens
ugugucacugcacuccagcgug

SEQ ID NO: 83883 - RNA, 22 nt, Homo sapiens
uugcucaccugagaagaauaga

SEQ ID NO: 83884 - RNA, 22 nt, Homo sapiens
cucaaguacaugggauuacagg

SEQ ID NO: 83885 - RNA, 22 nt, Homo sapiens
uuacaugagacugucgcuaguu

SEQ ID NO: 83886 - RNA, 19 nt, Homo sapiens
ucacaggguugacuugagg

SEQ ID NO: 83887 - RNA, 19 nt, Homo sapiens
uuguguccccacaaaauuc

SEQ ID NO: 83888 - RNA, 19 nt, Homo sapiens
accuguagaaaguacaaca

SEQ ID NO: 83889 - RNA, 22 nt, Homo sapiens
uggaaaacaugcacauuggauu

SEQ ID NO: 83890 - RNA, 22 nt, Homo sapiens
uuugguuuuuguuaucacucau

SEQ ID NO: 83891 - RNA, 22 nt, Homo sapiens
auggucccuguuccaugcuccu

SEQ ID NO: 83892 - RNA, 22 nt, Homo sapiens
guauuugauuauagcaugcuua

SEQ ID NO: 83893 - RNA, 22 nt, Homo sapiens
auuggcaauggcaaagcagagu

SEQ ID NO: 83894 - RNA, 21 nt, Homo sapiens
ccucuuugagggaagaaaggg

SEQ ID NO: 83895 - RNA, 22 nt, Homo sapiens
ggcagcacaauuuucugaugga

SEQ ID NO: 83896 - RNA, 22 nt, Homo sapiens
ucacugggagaccaaagccauc

SEQ ID NO: 83897 - RNA, 22 nt, Homo sapiens
uucaagauggcaccagugagug

SEQ ID NO: 83898 - RNA, 22 nt, Homo sapiens
uuuuuggguaaugauuaucaau

SEQ ID NO: 83899 - RNA, 22 nt, Homo sapiens
cucuuuuguuuagcugagaggg

SEQ ID NO: 83900 - RNA, 22 nt, Homo sapiens
ggguaaaucucuuuucauggcu

SEQ ID NO: 83901 - RNA, 22 nt, Homo sapiens
cugagauacacuaauagucucu

SEQ ID NO: 83902 - RNA, 22 nt, Homo sapiens
acaguacuguuguuugcugcca

SEQ ID NO: 83903 - RNA, 22 nt, Homo sapiens
caaaggugcuuuccagguccaa

SEQ ID NO: 83904 - RNA, 22 nt, Homo sapiens
uuggcagcauuccagccaagca

SEQ ID NO: 83905 - RNA, 22 nt, Homo sapiens
uucaagaauuaaaguggcuuuu

SEQ ID NO: 83906 - RNA, 22 nt, Homo sapiens
gugcagugugauccuuccguau

SEQ ID NO: 83907 - RNA, 22 nt, Homo sapiens
uugcagagaaauuucugguuua

SEQ ID NO: 83908 - RNA, 22 nt, Homo sapiens
gcuaaaugcaugaggcgaugug

SEQ ID NO: 83909 - RNA, 22 nt, Homo sapiens
acccugucauccacauggugcu

SEQ ID NO: 83910 - RNA, 19 nt, Homo sapiens
caugugcacuacuggcuuc

SEQ ID NO: 83911 - RNA, 19 nt, Homo sapiens
agaguauuguuacuucucu

SEQ ID NO: 83912 - RNA, 22 nt, Homo sapiens
ugccaacaugccuggcuguuuu

SEQ ID NO: 83913 - RNA, 22 nt, Homo sapiens
gugugacugcucuauuagggcg

SEQ ID NO: 83914 - RNA, 22 nt, Homo sapiens
aagcaggugucugugucuguaa

SEQ ID NO: 83915 - RNA, 22 nt, Homo sapiens
ugucagcacaacucagguuccu

SEQ ID NO: 83916 - RNA, 22 nt, Homo sapiens
auuuuugguugucagcacuagg

SEQ ID NO: 83917 - RNA, 22 nt, Homo sapiens
agcugugucuucuuaaagauuu

SEQ ID NO: 83918 - RNA, 22 nt, Homo sapiens
uuucccuuugcuuugucagcca

SEQ ID NO: 83919 - RNA, 22 nt, Homo sapiens
caccuguacauggcaguguccu

SEQ ID NO: 83920 - RNA, 22 nt, Homo sapiens
uuugcugagucugacuucaugg

SEQ ID NO: 83921 - RNA, 22 nt, Homo sapiens
agccauacaacguaugcaugua

SEQ ID NO: 83922 - RNA, 22 nt, Homo sapiens
ccauggcaauggucagucuauu

SEQ ID NO: 83923 - RNA, 20 nt, Homo sapiens
aagcaagcauuugcaaucau

SEQ ID NO: 83924 - RNA, 22 nt, Homo sapiens
cauuugguggcuacagaguaac

SEQ ID NO: 83925 - RNA, 22 nt, Homo sapiens
cuacaguguauuuauggagggu

SEQ ID NO: 83926 - RNA, 22 nt, Homo sapiens
uaucucagagaaucagauuuac

SEQ ID NO: 83927 - RNA, 22 nt, Homo sapiens
ucacaugugcguuuuggcaugu

SEQ ID NO: 83928 - RNA, 22 nt, Homo sapiens
ucacauguguaaauugguguaa

SEQ ID NO: 83929 - RNA, 22 nt, Homo sapiens
gugacaguggagacuuacuuca

SEQ ID NO: 83930 - RNA, 22 nt, Homo sapiens
ggcaagugucagcagcaacacc

SEQ ID NO: 83931 - RNA, 22 nt, Homo sapiens
uucaucaggaauauugaccugu

SEQ ID NO: 83932 - RNA, 22 nt, Homo sapiens
uuacccuuuaacccuuuaaagu

SEQ ID NO: 83933 - RNA, 22 nt, Homo sapiens
uccaugaggcuacaguaaucuc

SEQ ID NO: 83934 - RNA, 22 nt, Homo sapiens
ucacauagcugaguaaaaugga

SEQ ID NO: 83935 - RNA, 22 nt, Homo sapiens
augaagcuagcugauugcugau

SEQ ID NO: 83936 - RNA, 22 nt, Homo sapiens
gucugcaugucauaugauagua

SEQ ID NO: 83937 - RNA, 21 nt, Homo sapiens
ggcaagaaacacaaucaagua

SEQ ID NO: 83938 - RNA, 21 nt, Homo sapiens
uagauaguugguucugaaucu

SEQ ID NO: 83939 - RNA, 22 nt, Homo sapiens
uccacugagcuagaccacuugg

SEQ ID NO: 83940 - RNA, 22 nt, Homo sapiens
cuccauuuggaacagauguccu

SEQ ID NO: 83941 - RNA, 20 nt, Homo sapiens
agcuguuguuaaaaaggagg

SEQ ID NO: 83942 - RNA, 22 nt, Homo sapiens
ggagguagguuugugauuugua

SEQ ID NO: 83943 - RNA, 22 nt, Homo sapiens
cugcaguaaccacuguaggugu

SEQ ID NO: 83944 - RNA, 22 nt, Homo sapiens
guucaucagggauauuggcuua

SEQ ID NO: 83945 - RNA, 22 nt, Homo sapiens
ugugcauaugucuuuauaguag

SEQ ID NO: 83946 - RNA, 22 nt, Homo sapiens
cuccagugcaaagucaugauca

SEQ ID NO: 83947 - RNA, 22 nt, Homo sapiens
agucaguguguauugauggcac

SEQ ID NO: 83948 - RNA, 22 nt, Homo sapiens
uuauccucuagacauagguuua

SEQ ID NO: 83949 - RNA, 22 nt, Homo sapiens
auacaguauggagggcccagcu

SEQ ID NO: 83950 - RNA, 22 nt, Homo sapiens
agugcauugcaucucugcuuca

SEQ ID NO: 83951 - RNA, 22 nt, Homo sapiens
aggucaccucaggaaauacuga

SEQ ID NO: 83952 - RNA, 22 nt, Homo sapiens
caaguguuggcuuguauacaaa

SEQ ID NO: 83953 - RNA, 22 nt, Homo sapiens
augguuuuacugcaaaauggga

SEQ ID NO: 83954 - RNA, 22 nt, Homo sapiens
ucagaguaguuccuggcagaaa

SEQ ID NO: 83955 - RNA, 20 nt, Homo sapiens
agcuguuguuaugagguuua

SEQ ID NO: 83956 - RNA, 22 nt, Homo sapiens
ugccuggagagcuccuacauau

SEQ ID NO: 83957 - RNA, 22 nt, Homo sapiens
uucucacaguacagggagcucu

SEQ ID NO: 83958 - RNA, 20 nt, Homo sapiens
acaaaugcauucugugacau

SEQ ID NO: 83959 - RNA, 22 nt, Homo sapiens
gagaucauucugauccagaguc

SEQ ID NO: 83960 - RNA, 19 nt, Homo sapiens
agcaguguggagauuucuc

SEQ ID NO: 83961 - RNA, 18 nt, Homo sapiens
acuggaauuaaacuuuuu

SEQ ID NO: 83962 - RNA, 22 nt, Homo sapiens
gaugcaguaagaaugcauagcg

SEQ ID NO: 83963 - RNA, 22 nt, Homo sapiens
gagaaugcaugaaagacuuaca

SEQ ID NO: 83964 - RNA, 22 nt, Homo sapiens
ugagucccuaagacccucaggu

SEQ ID NO: 83965 - RNA, 22 nt, Homo sapiens
uuggaaggcugaauggccucuc

SEQ ID NO: 83966 - RNA, 22 nt, Homo sapiens
aaaugguguuaguagaucuuua

SEQ ID NO: 83967 - RNA, 22 nt, Homo sapiens
uggaugaagagaugguaguugc

SEQ ID NO: 83968 - RNA, 22 nt, Homo sapiens
uugcauaagugcauucugugau

SEQ ID NO: 83969 - RNA, 22 nt, Homo sapiens
aucucuugccagucagaauggu

SEQ ID NO: 83970 - RNA, 22 nt, Homo sapiens
cugagauuuuuagauccuggcg

SEQ ID NO: 83971 - RNA, 22 nt, Homo sapiens
agcuggcuguggagaaaccccu

SEQ ID NO: 83972 - RNA, 21 nt, Homo sapiens
ugcuauguuguccaggcuggc

SEQ ID NO: 83973 - RNA, 22 nt, Homo sapiens
uuuauagucaggaacuugagga

SEQ ID NO: 83974 - RNA, 22 nt, Homo sapiens
ugagacaucugagauuuuaagc

SEQ ID NO: 83975 - RNA, 22 nt, Homo sapiens
ugcauauguugagaugcauauu

SEQ ID NO: 83976 - RNA, 22 nt, Homo sapiens
guacaguaguaaaagugaauga

SEQ ID NO: 83977 - RNA, 22 nt, Homo sapiens
uaagucuuuuuggaguuuauaa

SEQ ID NO: 83978 - RNA, 21 nt, Homo sapiens
auguaacugggaaugugagag

SEQ ID NO: 83979 - RNA, 21 nt, Homo sapiens
gucuuacagccagaugccucu

SEQ ID NO: 83980 - RNA, 22 nt, Homo sapiens
auacauguucaagggcauauau

SEQ ID NO: 83981 - RNA, 22 nt, Homo sapiens
aguaaacuucagaguucuuccu

SEQ ID NO: 83982 - RNA, 22 nt, Homo sapiens
uucaagauggccccagugagcc

SEQ ID NO: 83983 - RNA, 22 nt, Homo sapiens
cugugcauggauuuuaagauug

SEQ ID NO: 83984 - RNA, 22 nt, Homo sapiens
uucuugcugaauugugcccuuc

SEQ ID NO: 83985 - RNA, 21 nt, Homo sapiens
gugaggucauugggcuuucug

SEQ ID NO: 83986 - RNA, 22 nt, Homo sapiens
gcuguauugacuuuguaucaua

SEQ ID NO: 83987 - RNA, 22 nt, Homo sapiens
ucuggccuccuaugagaaucga

SEQ ID NO: 83988 - RNA, 22 nt, Homo sapiens
ucauucauuugcucacuccaca

SEQ ID NO: 83989 - RNA, 22 nt, Homo sapiens
gugcauguccacuaguccauau

SEQ ID NO: 83990 - RNA, 22 nt, Homo sapiens
augagagugagagcagccccuu

SEQ ID NO: 83991 - RNA, 22 nt, Homo sapiens
ugagaugaaagcagaaagacuu

SEQ ID NO: 83992 - RNA, 21 nt, Homo sapiens
ugcccaguggcuuggggucag

SEQ ID NO: 83993 - RNA, 22 nt, Homo sapiens
uagcaccucuuuggccuuucgu

SEQ ID NO: 83994 - RNA, 22 nt, Homo sapiens
ugugagacugacagggcagggu

SEQ ID NO: 83995 - RNA, 20 nt, Homo sapiens
ugguccccugagucuggcuu

SEQ ID NO: 83996 - RNA, 22 nt, Homo sapiens
ggccuguaaacuagagacccug

SEQ ID NO: 83997 - RNA, 22 nt, Homo sapiens
gggcaacauugaguacccugaa

SEQ ID NO: 83998 - RNA, 20 nt, Homo sapiens
gaaacaucuauccucuccuu

SEQ ID NO: 83999 - RNA, 22 nt, Homo sapiens
ucaaaugcuguauuguaguaau

SEQ ID NO: 84000 - RNA, 22 nt, Homo sapiens
gucaugcaggguucgccagccc

SEQ ID NO: 84001 - RNA, 22 nt, Homo sapiens
acaguguuacuugauaguguau

SEQ ID NO: 84002 - RNA, 22 nt, Homo sapiens
uaaugcacuuuccuccaaggcu

SEQ ID NO: 84003 - RNA, 22 nt, Homo sapiens
uaaggcuagcaagaugagaaua

SEQ ID NO: 84004 - RNA, 22 nt, Homo sapiens
cucauggauggucuggcagcca

SEQ ID NO: 84005 - RNA, 22 nt, Homo sapiens
gucugguugacagcauguggcc

SEQ ID NO: 84006 - RNA, 22 nt, Homo sapiens
ugaguucaugcuuguaguucua

SEQ ID NO: 84007 - RNA, 23 nt, Homo sapiens
ugacagucucccgauggcuaggc

SEQ ID NO: 84008 - RNA, 22 nt, Homo sapiens
gagaaugagaggggaaggccac

SEQ ID NO: 84009 - RNA, 22 nt, Homo sapiens
gucauucauucagcaagcacug

SEQ ID NO: 84010 - RNA, 18 nt, Homo sapiens
uuugugcuccacaaagga

SEQ ID NO: 84011 - RNA, 21 nt, Homo sapiens
augugcacuaugucauuuaau

SEQ ID NO: 84012 - RNA, 22 nt, Homo sapiens
ucacugaaaccacugccuccug

SEQ ID NO: 84013 - RNA, 22 nt, Homo sapiens
acugcacuccaccuugggcaac

SEQ ID NO: 84014 - RNA, 22 nt, Homo sapiens
augggagugugguuagagaccu

SEQ ID NO: 84015 - RNA, 22 nt, Homo sapiens
cugagguuaggaguuugagacc

SEQ ID NO: 84016 - RNA, 22 nt, Homo sapiens
ugaggagugaacuauuucugau

SEQ ID NO: 84017 - RNA, 22 nt, Homo sapiens
ugucaccuugcucauccucgga

SEQ ID NO: 84018 - RNA, 22 nt, Homo sapiens
uaguccauuuucaugcugcuau

SEQ ID NO: 84019 - RNA, 22 nt, Homo sapiens
ugagaacucaugaaucuuucca

SEQ ID NO: 84020 - RNA, 22 nt, Homo sapiens
cucacugugguguccuuaggua

SEQ ID NO: 84021 - RNA, 22 nt, Homo sapiens
gcacaggguuacauucuaaggu

SEQ ID NO: 84022 - RNA, 22 nt, Homo sapiens
acuguguguuugucuagcacag

SEQ ID NO: 84023 - RNA, 22 nt, Homo sapiens
uccucaguggauuggauggugc

SEQ ID NO: 84024 - RNA, 22 nt, Homo sapiens
ugagauaucauuucacacccag

SEQ ID NO: 84025 - RNA, 22 nt, Homo sapiens
ugauggcauuuggaguugggac

SEQ ID NO: 84026 - RNA, 22 nt, Homo sapiens
cacuuugguucaccugaguuuc

SEQ ID NO: 84027 - RNA, 22 nt, Homo sapiens
aaugcacauauauuuccuuauu

SEQ ID NO: 84028 - RNA, 22 nt, Homo sapiens
uccuucaguccaguggguuuug

SEQ ID NO: 84029 - RNA, 22 nt, Homo sapiens
uuaacagugucaaucuguagua

SEQ ID NO: 84030 - RNA, 22 nt, Homo sapiens
uugagauggagucucacugugu

SEQ ID NO: 84031 - RNA, 22 nt, Homo sapiens
caucaaaguggagggaaggacc

SEQ ID NO: 84032 - RNA, 22 nt, Homo sapiens
uagaaucuaacucgcaugaaaa

SEQ ID NO: 84033 - RNA, 22 nt, Homo sapiens
cuauucacaauagccaagauuu

SEQ ID NO: 84034 - RNA, 22 nt, Homo sapiens
guucaucagggauauuggccug

SEQ ID NO: 84035 - RNA, 22 nt, Homo sapiens
ugcauauguauacaugugccau

SEQ ID NO: 84036 - RNA, 22 nt, Homo sapiens
agugccacugcacucuagccug

SEQ ID NO: 84037 - RNA, 22 nt, Homo sapiens
ugcaagaaucagccuaucauua

SEQ ID NO: 84038 - RNA, 22 nt, Homo sapiens
aagcucauugagaucuauggcu

SEQ ID NO: 84039 - RNA, 22 nt, Homo sapiens
cuuuccauuguuggagcauaaa

SEQ ID NO: 84040 - RNA, 22 nt, Homo sapiens
uuuggaagaugccacuguauca

SEQ ID NO: 84041 - RNA, 22 nt, Homo sapiens
uagccucacaaagugcuuaaga

SEQ ID NO: 84042 - RNA, 22 nt, Homo sapiens
guaaaguaaagcacaucaaggu

SEQ ID NO: 84043 - RNA, 22 nt, Homo sapiens
uuugugcuauguuauauauucu

SEQ ID NO: 84044 - RNA, 22 nt, Homo sapiens
agcagcauggguauaaaucucc

SEQ ID NO: 84045 - RNA, 22 nt, Homo sapiens
aagaugauguuguguuuucacu

SEQ ID NO: 84046 - RNA, 22 nt, Homo sapiens
agugcagugguuaggagccagg

SEQ ID NO: 84047 - RNA, 22 nt, Homo sapiens
uauuagugucuuuugguuagaa

SEQ ID NO: 84048 - RNA, 22 nt, Homo sapiens
uugagacgaagucucacucuug

SEQ ID NO: 84049 - RNA, 22 nt, Homo sapiens
cugaggugggaggauuggcuug

SEQ ID NO: 84050 - RNA, 22 nt, Homo sapiens
aaaccaccauuacuuuugcacc

SEQ ID NO: 84051 - RNA, 22 nt, Homo sapiens
ucagugcuuuuuguugucauca

SEQ ID NO: 84052 - RNA, 20 nt, Homo sapiens
gucuuguagcucaaguuauu

SEQ ID NO: 84053 - RNA, 22 nt, Homo sapiens
caguaguagccccuuagaugga

SEQ ID NO: 84054 - RNA, 23 nt, Homo sapiens
gugcaguggcgagauuucggcuc

SEQ ID NO: 84055 - RNA, 22 nt, Homo sapiens
uugucccauggggucuuccuuu

SEQ ID NO: 84056 - RNA, 22 nt, Homo sapiens
gagguaagagaauaaacaguuu

SEQ ID NO: 84057 - RNA, 22 nt, Homo sapiens
ugagaugauaucuuauuguaau

SEQ ID NO: 84058 - RNA, 20 nt, Homo sapiens
uggcuucuuaauugcaggca

SEQ ID NO: 84059 - RNA, 22 nt, Homo sapiens
agcuugugcuguaugaagggcc

SEQ ID NO: 84060 - RNA, 22 nt, Homo sapiens
ucaagugauucuugugccuuag

SEQ ID NO: 84061 - RNA, 22 nt, Homo sapiens
ucugucacugaaucccugucac

SEQ ID NO: 84062 - RNA, 18 nt, Homo sapiens
ugugacauugagcauguc

SEQ ID NO: 84063 - RNA, 21 nt, Homo sapiens
gcuuuuucggaagucuuuggc

SEQ ID NO: 84064 - RNA, 22 nt, Homo sapiens
uuccuugguucagggaaggucc

SEQ ID NO: 84065 - RNA, 22 nt, Homo sapiens
aguauuuguuggaauaccuguu

SEQ ID NO: 84066 - RNA, 22 nt, Homo sapiens
auaagucaauggaacagauuaa

SEQ ID NO: 84067 - RNA, 22 nt, Homo sapiens
ucugucuugugguuugagugcc

SEQ ID NO: 84068 - RNA, 22 nt, Homo sapiens
ugucuuguagacaauguauagu

SEQ ID NO: 84069 - RNA, 19 nt, Homo sapiens
ugugagcauuagcauuuag

SEQ ID NO: 84070 - RNA, 22 nt, Homo sapiens
agaaagugcuucccuuugguga

SEQ ID NO: 84071 - RNA, 22 nt, Homo sapiens
uccccgucacacgcaggcuuac

SEQ ID NO: 84072 - RNA, 22 nt, Homo sapiens
ucacuaggcuggagugcagugg

SEQ ID NO: 84073 - RNA, 22 nt, Homo sapiens
uacuagaggaaaacuugaagac

SEQ ID NO: 84074 - RNA, 22 nt, Homo sapiens
uaagggacgcccccuucucucu

SEQ ID NO: 84075 - RNA, 22 nt, Homo sapiens
ucuugguuuauugugguaugaa

SEQ ID NO: 84076 - RNA, 22 nt, Homo sapiens
gggaugaagaagaauaguucgu

SEQ ID NO: 84077 - RNA, 22 nt, Homo sapiens
gcagagaaacaggucuaaggag

SEQ ID NO: 84078 - RNA, 22 nt, Homo sapiens
uuaagucacacuagacaacuga

SEQ ID NO: 84079 - RNA, 22 nt, Homo sapiens
uguccuguaggaggcagaacaa

SEQ ID NO: 84080 - RNA, 22 nt, Homo sapiens
accugagacuaggcauuuuaua

SEQ ID NO: 84081 - RNA, 22 nt, Homo sapiens
gugucacagcuuccaucucggu

SEQ ID NO: 84082 - RNA, 22 nt, Homo sapiens
gucaagauuuguaggacagaga

SEQ ID NO: 84083 - RNA, 22 nt, Homo sapiens
ucaguguuuggaaucucaauuu

SEQ ID NO: 84084 - RNA, 22 nt, Homo sapiens
gcuguauuguugaaggaaaugu

SEQ ID NO: 84085 - RNA, 22 nt, Homo sapiens
ugagcacagagccugggguggc

SEQ ID NO: 84086 - RNA, 22 nt, Homo sapiens
ucuuuugugagucagccucucc

SEQ ID NO: 84087 - RNA, 17 nt, Homo sapiens
augugaauguucaaaua

SEQ ID NO: 84088 - RNA, 22 nt, Homo sapiens
cacuggucucauggcaugagag

SEQ ID NO: 84089 - RNA, 22 nt, Homo sapiens
uagcugcacuuacaagugagaa

SEQ ID NO: 84090 - RNA, 22 nt, Homo sapiens
cuaagauugucuuaguguguug

SEQ ID NO: 84091 - RNA, 22 nt, Homo sapiens
gagcucauuguugcuaaagaga

SEQ ID NO: 84092 - RNA, 22 nt, Homo sapiens
gggaugaagcccuaggguuggu

SEQ ID NO: 84093 - RNA, 22 nt, Homo sapiens
aaucacuuuggcaccaaccuaa

SEQ ID NO: 84094 - RNA, 20 nt, Homo sapiens
ucucccaaacagcaggcccu

SEQ ID NO: 84095 - RNA, 22 nt, Homo sapiens
auguccauggaaucuguagcaa

SEQ ID NO: 84096 - RNA, 22 nt, Homo sapiens
guauaguaguacaaaaguuuuu

SEQ ID NO: 84097 - RNA, 22 nt, Homo sapiens
agagagguggguggagccccca

SEQ ID NO: 84098 - RNA, 21 nt, Homo sapiens
uaucauggccauccucuucuc

SEQ ID NO: 84099 - RNA, 22 nt, Homo sapiens
gcaucacagggagacaggccuc

SEQ ID NO: 84100 - RNA, 22 nt, Homo sapiens
uggaagacacauaccugauaac

SEQ ID NO: 84101 - RNA, 22 nt, Homo sapiens
uaucaucauguuuuugcugugu

SEQ ID NO: 84102 - RNA, 22 nt, Homo sapiens
gauaaaguauuggguacuaugc

SEQ ID NO: 84103 - RNA, 22 nt, Homo sapiens
guauggaagucaguuuguuggc

SEQ ID NO: 84104 - RNA, 22 nt, Homo sapiens
agcuugugauuuagagugagag

SEQ ID NO: 84105 - RNA, 22 nt, Homo sapiens
auuaaguuaggauuuugagaua

SEQ ID NO: 84106 - RNA, 22 nt, Homo sapiens
ugcauguucuuacucauacaug

SEQ ID NO: 84107 - RNA, 22 nt, Homo sapiens
uacuauugcaucggugauuagg

SEQ ID NO: 84108 - RNA, 22 nt, Homo sapiens
gcaagaauggaacaggagagcc

SEQ ID NO: 84109 - RNA, 22 nt, Homo sapiens
agcuaguguucaccagagguca

SEQ ID NO: 84110 - RNA, 22 nt, Homo sapiens
uugacaguggcuuaaauugguu

SEQ ID NO: 84111 - RNA, 22 nt, Homo sapiens
gucucacagcuagcugcuuuau

SEQ ID NO: 84112 - RNA, 22 nt, Homo sapiens
agcuuaugcuuggaagagauga

SEQ ID NO: 84113 - RNA, 22 nt, Homo sapiens
uccauguagaugcuauguuguc

SEQ ID NO: 84114 - RNA, 22 nt, Homo sapiens
uccagguuuugugaguuuaaau

SEQ ID NO: 84115 - RNA, 22 nt, Homo sapiens
gugugguauuauaacuagguau

SEQ ID NO: 84116 - RNA, 22 nt, Homo sapiens
auccccugcacggggugucauu

SEQ ID NO: 84117 - RNA, 22 nt, Homo sapiens
auaaaugccuguuguuuuaagc

SEQ ID NO: 84118 - RNA, 22 nt, Homo sapiens
uugugauugagugauccuuguu

SEQ ID NO: 84119 - RNA, 20 nt, Homo sapiens
aacaguguguaaguuuccuu

SEQ ID NO: 84120 - RNA, 22 nt, Homo sapiens
uucacacugggccuacucugug

SEQ ID NO: 84121 - RNA, 22 nt, Homo sapiens
agacaucauuugauggugggag

SEQ ID NO: 84122 - RNA, 22 nt, Homo sapiens
aucauaucauuggugaacagug

SEQ ID NO: 84123 - RNA, 22 nt, Homo sapiens
agagugcaauggcaccaucucg

SEQ ID NO: 84124 - RNA, 22 nt, Homo sapiens
augugugaaucccagaaccugu

SEQ ID NO: 84125 - RNA, 22 nt, Homo sapiens
uuggaagacaaugcugauucuc

SEQ ID NO: 84126 - RNA, 22 nt, Homo sapiens
ggcaugaaguagcccacaggca

SEQ ID NO: 84127 - RNA, 22 nt, Homo sapiens
ccaagccucaguuucccucugu

SEQ ID NO: 84128 - RNA, 22 nt, Homo sapiens
ugaagugaaugguaaguaugcc

SEQ ID NO: 84129 - RNA, 22 nt, Homo sapiens
uuuccuguaggaaggaaauaga

SEQ ID NO: 84130 - RNA, 19 nt, Homo sapiens
gcuucuugaggacgaugac

SEQ ID NO: 84131 - RNA, 21 nt, Homo sapiens
uugagaagaauuagcucuucc

SEQ ID NO: 84132 - RNA, 22 nt, Homo sapiens
aacuggcauaugaacuuguucu

SEQ ID NO: 84133 - RNA, 22 nt, Homo sapiens
gucuuuguuuggucuguaucag

SEQ ID NO: 84134 - RNA, 22 nt, Homo sapiens
aauugcauugaauuuguagcuu

SEQ ID NO: 84135 - RNA, 22 nt, Homo sapiens
gucacaguggccagugauguuc

SEQ ID NO: 84136 - RNA, 22 nt, Homo sapiens
agcagguguggcuuauccugaa

SEQ ID NO: 84137 - RNA, 22 nt, Homo sapiens
ucugucacugguggacgaucac

SEQ ID NO: 84138 - RNA, 22 nt, Homo sapiens
cuagcccagugcuccuggauca

SEQ ID NO: 84139 - RNA, 22 nt, Homo sapiens
gugggauggagagaagguauga

SEQ ID NO: 84140 - RNA, 22 nt, Homo sapiens
cagccggguggcuccuagggua

SEQ ID NO: 84141 - RNA, 22 nt, Homo sapiens
ccaucacaggccucagugggaa

SEQ ID NO: 84142 - RNA, 21 nt, Homo sapiens
agguaguuuuccuuuuggagu

SEQ ID NO: 84143 - RNA, 20 nt, Homo sapiens
cucacagacagcuucuuucu

SEQ ID NO: 84144 - RNA, 22 nt, Homo sapiens
gcucaugggcagugugauuguu

SEQ ID NO: 84145 - RNA, 22 nt, Homo sapiens
ugcuaugucagccaggcugguc

SEQ ID NO: 84146 - RNA, 22 nt, Homo sapiens
ugugguuuuaguaaaacuaugu

SEQ ID NO: 84147 - RNA, 22 nt, Homo sapiens
uuggcuguguuccucaaggagu

SEQ ID NO: 84148 - RNA, 22 nt, Homo sapiens
ugcugcacaguucuuaagauua

SEQ ID NO: 84149 - RNA, 22 nt, Homo sapiens
uugaggugggaggaucacuuga

SEQ ID NO: 84150 - RNA, 22 nt, Homo sapiens
cugaggugggaggauuacuuga

SEQ ID NO: 84151 - RNA, 21 nt, Homo sapiens
ugacagaaaauugaguuugcu

SEQ ID NO: 84152 - RNA, 22 nt, Homo sapiens
ugucaaaugcagugauauuuga

SEQ ID NO: 84153 - RNA, 22 nt, Homo sapiens
cugaggugauauauacauauuu

SEQ ID NO: 84154 - RNA, 22 nt, Homo sapiens
uagcaagaugaauuugugcaaa

SEQ ID NO: 84155 - RNA, 22 nt, Homo sapiens
ucuuuguuggaguccaaggaua

SEQ ID NO: 84156 - RNA, 22 nt, Homo sapiens
ugcaagacacuguccugggcau

SEQ ID NO: 84157 - RNA, 22 nt, Homo sapiens
aagagguuauagaguguauacu

SEQ ID NO: 84158 - RNA, 22 nt, Homo sapiens
uaaugugaauagugcuguaaug

SEQ ID NO: 84159 - RNA, 22 nt, Homo sapiens
ugaggcuaggauaggcugauuc

SEQ ID NO: 84160 - RNA, 15 nt, Homo sapiens
aaacccugucucaag

SEQ ID NO: 84161 - RNA, 22 nt, Homo sapiens
gagacugagucucgcucugccg

SEQ ID NO: 84162 - RNA, 22 nt, Homo sapiens
cugugguguaacucuuggggcg

SEQ ID NO: 84163 - RNA, 22 nt, Homo sapiens
uacuacuuucugacaucuuuaa

SEQ ID NO: 84164 - RNA, 21 nt, Homo sapiens
uccagcuuugagaguuguggu

SEQ ID NO: 84165 - RNA, 22 nt, Homo sapiens
uuagaacagugcucaccacaaa

SEQ ID NO: 84166 - RNA, 22 nt, Homo sapiens
ugagaacugccuguauuuaucu

SEQ ID NO: 84167 - RNA, 22 nt, Homo sapiens
gagagugcuuggcaucugcuga

SEQ ID NO: 84168 - RNA, 22 nt, Homo sapiens
guaguaccauuaggauauuucu

SEQ ID NO: 84169 - RNA, 22 nt, Homo sapiens
aagagcauuggauggggagauu

SEQ ID NO: 84170 - RNA, 22 nt, Homo sapiens
gugcacuguagaacccuuuguu

SEQ ID NO: 84171 - RNA, 19 nt, Homo sapiens
aaguacuugucuuuugaag

SEQ ID NO: 84172 - RNA, 22 nt, Homo sapiens
cucaccuugugauccacccacc

SEQ ID NO: 84173 - RNA, 20 nt, Homo sapiens
uagccggguguugugucaug

SEQ ID NO: 84174 - RNA, 21 nt, Homo sapiens
acaaagcuggagggagacugc

SEQ ID NO: 84175 - RNA, 22 nt, Homo sapiens
agggcuuuugagcugagauggu

SEQ ID NO: 84176 - RNA, 22 nt, Homo sapiens
ugucucaguucccuucucugga

SEQ ID NO: 84177 - RNA, 18 nt, Homo sapiens
aguuguuuuauccugccc

SEQ ID NO: 84178 - RNA, 22 nt, Homo sapiens
uguuauuuuguguuagggcaca

SEQ ID NO: 84179 - RNA, 22 nt, Homo sapiens
ccuggaagaaaggugcuaaaua

SEQ ID NO: 84180 - RNA, 22 nt, Homo sapiens
uagcaaaucaauggaauugaag

SEQ ID NO: 84181 - RNA, 22 nt, Homo sapiens
ugcuggugucaucaaggcuuug

SEQ ID NO: 84182 - RNA, 22 nt, Homo sapiens
cucucugagccauggcugcccu

SEQ ID NO: 84183 - RNA, 22 nt, Homo sapiens
gugcacaacaugcaguuuuguu

SEQ ID NO: 84184 - RNA, 22 nt, Homo sapiens
ugcauuguuccgaauguguccu

SEQ ID NO: 84185 - RNA, 22 nt, Homo sapiens
augaagaucucugccuuguguc

SEQ ID NO: 84186 - RNA, 23 nt, Homo sapiens
uuggccuccuugugucuagggcu

SEQ ID NO: 84187 - RNA, 22 nt, Homo sapiens
guccaagacuaggaguuggcag

SEQ ID NO: 84188 - RNA, 22 nt, Homo sapiens
auuccuuaggcccuuugguuag

SEQ ID NO: 84189 - RNA, 22 nt, Homo sapiens
uucaaauguucuuucaccaccc

SEQ ID NO: 84190 - RNA, 22 nt, Homo sapiens
cugucacugggaggggcagcag

SEQ ID NO: 84191 - RNA, 22 nt, Homo sapiens
uucuugguguaguaguugaaaa

SEQ ID NO: 84192 - RNA, 19 nt, Homo sapiens
ugagaucuuuacuggguuu

SEQ ID NO: 84193 - RNA, 22 nt, Homo sapiens
cugugcacaucuggcggcccga

SEQ ID NO: 84194 - RNA, 19 nt, Homo sapiens
ucaccaguacacaauacaa

SEQ ID NO: 84195 - RNA, 22 nt, Homo sapiens
uuugugcuccucucaguaugug

SEQ ID NO: 84196 - RNA, 22 nt, Homo sapiens
gagauuaauacacaucaaaugc

SEQ ID NO: 84197 - RNA, 22 nt, Homo sapiens
cuuuuugcaaauacaacucuga

SEQ ID NO: 84198 - RNA, 22 nt, Homo sapiens
ugaauguauuuauuaccauuca

SEQ ID NO: 84199 - RNA, 19 nt, Homo sapiens
augcugguguugcucaaac

SEQ ID NO: 84200 - RNA, 22 nt, Homo sapiens
cuggcagucugccucuucacug

SEQ ID NO: 84201 - RNA, 22 nt, Homo sapiens
ggaaagaucagcuaaauguaag

SEQ ID NO: 84202 - RNA, 22 nt, Homo sapiens
ugcuugagacacauaugaauuu

SEQ ID NO: 84203 - RNA, 22 nt, Homo sapiens
uguuauugagguuacuuauaag

SEQ ID NO: 84204 - RNA, 22 nt, Homo sapiens
ucaaaugcacguagagaaaaua

SEQ ID NO: 84205 - RNA, 19 nt, Homo sapiens
ucacacuguggcuucuuua

SEQ ID NO: 84206 - RNA, 22 nt, Homo sapiens
ugagauagggucucacucuguc

SEQ ID NO: 84207 - RNA, 20 nt, Homo sapiens
uaaggcacugugcuuuuagg

SEQ ID NO: 84208 - RNA, 22 nt, Homo sapiens
gcugagguucaagaagguuaaa

SEQ ID NO: 84209 - RNA, 22 nt, Homo sapiens
ugagaguagggguugggauugg

SEQ ID NO: 84210 - RNA, 22 nt, Homo sapiens
aggcuagacuuugagaauuuuu

SEQ ID NO: 84211 - RNA, 22 nt, Homo sapiens
agucaaaugcuuauguauaaag

SEQ ID NO: 84212 - RNA, 22 nt, Homo sapiens
ccuucauugcaucuuuaagaga

SEQ ID NO: 84213 - RNA, 22 nt, Homo sapiens
aucauuaguuguggaauucuug

SEQ ID NO: 84214 - RNA, 22 nt, Homo sapiens
uaacaguguauuccuuuggaca

SEQ ID NO: 84215 - RNA, 22 nt, Homo sapiens
ucaggcacucagcuuagagucu

SEQ ID NO: 84216 - RNA, 17 nt, Homo sapiens
uuucucagcccucuucu

SEQ ID NO: 84217 - RNA, 22 nt, Homo sapiens
ugagucauuuccuuaugcuacu

SEQ ID NO: 84218 - RNA, 22 nt, Homo sapiens
agcagagcauauucauucgggg

SEQ ID NO: 84219 - RNA, 22 nt, Homo sapiens
ggaaagauguaauauuaucuaa

SEQ ID NO: 84220 - RNA, 22 nt, Homo sapiens
caaugugcuuggggcacaugag

SEQ ID NO: 84221 - RNA, 22 nt, Homo sapiens
uaucauggaaagauguugaaau

SEQ ID NO: 84222 - RNA, 22 nt, Homo sapiens
acuagagaugcauuuguaguuu

SEQ ID NO: 84223 - RNA, 22 nt, Homo sapiens
cacugcgaccuccaccucccgg

SEQ ID NO: 84224 - RNA, 22 nt, Homo sapiens
gcugucaugagcaacacaugaa

SEQ ID NO: 84225 - RNA, 22 nt, Homo sapiens
aaagcacuggagucaucaucua

SEQ ID NO: 84226 - RNA, 22 nt, Homo sapiens
cuucaccaguuuggcagucuca

SEQ ID NO: 84227 - RNA, 19 nt, Homo sapiens
agcagaacaaauguguggg

SEQ ID NO: 84228 - RNA, 19 nt, Homo sapiens
agugggcuagaaaucaggg

SEQ ID NO: 84229 - RNA, 19 nt, Homo sapiens
agcaucauuauuguuuugg

SEQ ID NO: 84230 - RNA, 22 nt, Homo sapiens
aucagcaugcagaagucggggg

SEQ ID NO: 84231 - RNA, 22 nt, Homo sapiens
agcucauugcuguccuggagga

SEQ ID NO: 84232 - RNA, 22 nt, Homo sapiens
uuuugcuuuuccucggucccac

SEQ ID NO: 84233 - RNA, 22 nt, Homo sapiens
auggcacuacugggaaugucuu

SEQ ID NO: 84234 - RNA, 22 nt, Homo sapiens
ugugcuugaaauucaguuuuga

SEQ ID NO: 84235 - RNA, 22 nt, Homo sapiens
cagcucauugcagucucgaccu

SEQ ID NO: 84236 - RNA, 22 nt, Homo sapiens
guguccucgaguacacaucagg

SEQ ID NO: 84237 - RNA, 21 nt, Homo sapiens
agacacuuggaagguuuuaga

SEQ ID NO: 84238 - RNA, 22 nt, Homo sapiens
aucgcaccauugcacuccagca

SEQ ID NO: 84239 - RNA, 22 nt, Homo sapiens
cauguaacaucccgcuguagga

SEQ ID NO: 84240 - RNA, 22 nt, Homo sapiens
guccaaagugggagaggugggg

SEQ ID NO: 84241 - RNA, 22 nt, Homo sapiens
ugaacacagccugccucugcca

SEQ ID NO: 84242 - RNA, 22 nt, Homo sapiens
ucagcacauucaaggccugccu

SEQ ID NO: 84243 - RNA, 20 nt, Homo sapiens
ugguguuugaacagugaaug

SEQ ID NO: 84244 - RNA, 23 nt, Homo sapiens
gcagcaaugucacagggguccgg

SEQ ID NO: 84245 - RNA, 23 nt, Homo sapiens
uacagcugcagaaucaggcuaag

SEQ ID NO: 84246 - RNA, 22 nt, Homo sapiens
caacagucagcccauccacaga

SEQ ID NO: 84247 - RNA, 22 nt, Homo sapiens
caccagcuggcauugaauaccu

SEQ ID NO: 84248 - RNA, 22 nt, Homo sapiens
uuuagguuacauauaauccaaa

SEQ ID NO: 84249 - RNA, 22 nt, Homo sapiens
cuggaaggaaaaacaaccacag

SEQ ID NO: 84250 - RNA, 22 nt, Homo sapiens
uggacuguaauuuuauaggcau

SEQ ID NO: 84251 - RNA, 22 nt, Homo sapiens
aaaagucuguagugaaagguga

SEQ ID NO: 84252 - RNA, 22 nt, Homo sapiens
cucccacccucauuuuuaggca

SEQ ID NO: 84253 - RNA, 22 nt, Homo sapiens
uacaguggaaguuaaccccauu

SEQ ID NO: 84254 - RNA, 22 nt, Homo sapiens
ugugccacugcacucuggccug

SEQ ID NO: 84255 - RNA, 22 nt, Homo sapiens
ucccuuucuggaguuucccaag

SEQ ID NO: 84256 - RNA, 22 nt, Homo sapiens
gugagggaugugaaaaagguca

SEQ ID NO: 84257 - RNA, 22 nt, Homo sapiens
uucaauuaauauuauacucuca

SEQ ID NO: 84258 - RNA, 22 nt, Homo sapiens
gaguaacagcauaaauuuguga

SEQ ID NO: 84259 - RNA, 22 nt, Homo sapiens
uucaaguaagaaagacaucagg

SEQ ID NO: 84260 - RNA, 22 nt, Homo sapiens
uugauguguuuccaggauuugu

SEQ ID NO: 84261 - RNA, 22 nt, Homo sapiens
uugauguugaggacauaaaccu

SEQ ID NO: 84262 - RNA, 22 nt, Homo sapiens
ggucagaaagacaggcauucag

SEQ ID NO: 84263 - RNA, 20 nt, Homo sapiens
gcugugcuuaauacacuuuc

SEQ ID NO: 84264 - RNA, 22 nt, Homo sapiens
ugagcuauguucuucuuguuuu

SEQ ID NO: 84265 - RNA, 22 nt, Homo sapiens
ugagcagagaucuauuacugug

SEQ ID NO: 84266 - RNA, 22 nt, Homo sapiens
aaugguguuuccguuaagcuga

SEQ ID NO: 84267 - RNA, 22 nt, Homo sapiens
ggagcucaucuagcauagaggu

SEQ ID NO: 84268 - RNA, 22 nt, Homo sapiens
uuauucagcaccugcuguguuc

SEQ ID NO: 84269 - RNA, 22 nt, Homo sapiens
guucacaguuucuaaucccagc

SEQ ID NO: 84270 - RNA, 22 nt, Homo sapiens
ucagugacuggguauuaaauca

SEQ ID NO: 84271 - RNA, 20 nt, Homo sapiens
uggcaugaaauuuuccaagc

SEQ ID NO: 84272 - RNA, 22 nt, Homo sapiens
aucacagguacuauggcugaca

SEQ ID NO: 84273 - RNA, 22 nt, Homo sapiens
uagaccaauuggcauauaguaa

SEQ ID NO: 84274 - RNA, 22 nt, Homo sapiens
gucauuguguggacauggagaa

SEQ ID NO: 84275 - RNA, 22 nt, Homo sapiens
guggcagaaaagagaagcaaug

SEQ ID NO: 84276 - RNA, 22 nt, Homo sapiens
cacugcacuccaguuucgguaa

SEQ ID NO: 84277 - RNA, 22 nt, Homo sapiens
ucacuuuguuuuuggauaaguu

SEQ ID NO: 84278 - RNA, 22 nt, Homo sapiens
aucacuuucuauuucugugcca

SEQ ID NO: 84279 - RNA, 22 nt, Homo sapiens
uugugcaugaugcauacauggu

SEQ ID NO: 84280 - RNA, 22 nt, Homo sapiens
agauauguuauugauguuaaug

SEQ ID NO: 84281 - RNA, 22 nt, Homo sapiens
gugucccagugugcauacaggu

SEQ ID NO: 84282 - RNA, 22 nt, Homo sapiens
auauucacuauaugcagaacca

SEQ ID NO: 84283 - RNA, 17 nt, Homo sapiens
ugagaacaugugguauu

SEQ ID NO: 84284 - RNA, 22 nt, Homo sapiens
guauacaugucaaaacucacau

SEQ ID NO: 84285 - RNA, 22 nt, Homo sapiens
cacugcacuccagucugacgac

SEQ ID NO: 84286 - RNA, 22 nt, Homo sapiens
uggccaguugaagacaaugcuc

SEQ ID NO: 84287 - RNA, 22 nt, Homo sapiens
ugagguguuauccagaguucuu

SEQ ID NO: 84288 - RNA, 22 nt, Homo sapiens
gacaguguggcgauuccucaag

SEQ ID NO: 84289 - RNA, 22 nt, Homo sapiens
auuccacaguuaacacagaccg

SEQ ID NO: 84290 - RNA, 22 nt, Homo sapiens
ucaauguaucuccaagaauuga

SEQ ID NO: 84291 - RNA, 22 nt, Homo sapiens
ugaucucauuagcaccuuuagc

SEQ ID NO: 84292 - RNA, 20 nt, Homo sapiens
gucuugcuccguugcccagg

SEQ ID NO: 84293 - RNA, 22 nt, Homo sapiens
cagggcaugugggucuauuggc

SEQ ID NO: 84294 - RNA, 22 nt, Homo sapiens
uuguguccccacucaaauuaca

SEQ ID NO: 84295 - RNA, 22 nt, Homo sapiens
cccagaguucuuaaauacugag

SEQ ID NO: 84296 - RNA, 22 nt, Homo sapiens
gugguuuuuuucugccuuauag

SEQ ID NO: 84297 - RNA, 22 nt, Homo sapiens
ugagaacuuauggugauuuuuu

SEQ ID NO: 84298 - RNA, 22 nt, Homo sapiens
augucauagaagccugugaacc

SEQ ID NO: 84299 - RNA, 22 nt, Homo sapiens
uaucaagaugacaaacuuugcu

SEQ ID NO: 84300 - RNA, 22 nt, Homo sapiens
aauacuuccaaaucuagucauu

SEQ ID NO: 84301 - RNA, 22 nt, Homo sapiens
uuggcuguguuucccuacaaau

SEQ ID NO: 84302 - RNA, 22 nt, Homo sapiens
agcagcuuugaucugaaugauu

SEQ ID NO: 84303 - RNA, 22 nt, Homo sapiens
uuccauugugucaucuuggugg

SEQ ID NO: 84304 - RNA, 22 nt, Homo sapiens
ucacugaaacuguccuggguua

SEQ ID NO: 84305 - RNA, 22 nt, Homo sapiens
aaggugcuguaagcauccaugu

SEQ ID NO: 84306 - RNA, 22 nt, Homo sapiens
ugucaaggaaugucauugguuu

SEQ ID NO: 84307 - RNA, 22 nt, Homo sapiens
ucugagcaauagauguggauau

SEQ ID NO: 84308 - RNA, 22 nt, Homo sapiens
uucauacaguggcugcacucca

SEQ ID NO: 84309 - RNA, 22 nt, Homo sapiens
gagguugggaugagggauacag

SEQ ID NO: 84310 - RNA, 22 nt, Homo sapiens
cuggaaagcaaagggugcauug

SEQ ID NO: 84311 - RNA, 22 nt, Homo sapiens
cuuugggaccgcgguuuauacu

SEQ ID NO: 84312 - RNA, 20 nt, Homo sapiens
uggucaccuucaggagguuc

SEQ ID NO: 84313 - RNA, 22 nt, Homo sapiens
augugcacaacgugcagguuug

SEQ ID NO: 84314 - RNA, 22 nt, Homo sapiens
ugaauucaucucacagaguuaa

SEQ ID NO: 84315 - RNA, 22 nt, Homo sapiens
uacaaaguaacaguuccuguau

SEQ ID NO: 84316 - RNA, 22 nt, Homo sapiens
ucagguauuuauagcaaugcaa

SEQ ID NO: 84317 - RNA, 22 nt, Homo sapiens
caugacacuggcauguuucuuu

SEQ ID NO: 84318 - RNA, 22 nt, Homo sapiens
uggcagaugagccgcgcuccaa

SEQ ID NO: 84319 - RNA, 22 nt, Homo sapiens
ucuuuguguaggucaaucuggc

SEQ ID NO: 84320 - RNA, 22 nt, Homo sapiens
ucuggccuacaucauuuuuccg

SEQ ID NO: 84321 - RNA, 22 nt, Homo sapiens
acauagaguagcuaccuguaga

SEQ ID NO: 84322 - RNA, 22 nt, Homo sapiens
cuugacaaugcuucaggcugaa

SEQ ID NO: 84323 - RNA, 22 nt, Homo sapiens
ugggaucauucaaugacgaaau

SEQ ID NO: 84324 - RNA, 22 nt, Homo sapiens
uggucagaugcugaguggaucu

SEQ ID NO: 84325 - RNA, 22 nt, Homo sapiens
uaaugcacauuuauuuuaccuu

SEQ ID NO: 84326 - RNA, 22 nt, Homo sapiens
uucccugugggcuggugcucca

SEQ ID NO: 84327 - RNA, 22 nt, Homo sapiens
ucauggggugcuuugcuagauu

SEQ ID NO: 84328 - RNA, 22 nt, Homo sapiens
agauggugauaaaugugguacc

SEQ ID NO: 84329 - RNA, 22 nt, Homo sapiens
gucucuuguuaucauuucugag

SEQ ID NO: 84330 - RNA, 22 nt, Homo sapiens
ucuuuguuuucugauccugaag

SEQ ID NO: 84331 - RNA, 22 nt, Homo sapiens
cacaaugucuaagauguuucua

SEQ ID NO: 84332 - RNA, 22 nt, Homo sapiens
ucugugcauuacacuuuucuca

SEQ ID NO: 84333 - RNA, 22 nt, Homo sapiens
uuguccuggagguucuugcaag

SEQ ID NO: 84334 - RNA, 22 nt, Homo sapiens
acuggaguuuguucaagaaaua

SEQ ID NO: 84335 - RNA, 22 nt, Homo sapiens
cuagguuauacucugaaauggu

SEQ ID NO: 84336 - RNA, 22 nt, Homo sapiens
agcagcauuaguggaaucuugu

SEQ ID NO: 84337 - RNA, 18 nt, Homo sapiens
uuagaugguuuuaaaacu

SEQ ID NO: 84338 - RNA, 22 nt, Homo sapiens
uguggcagugcuuuaugaaacc

SEQ ID NO: 84339 - RNA, 22 nt, Homo sapiens
cuguagcuuuuauaugcuuagc

SEQ ID NO: 84340 - RNA, 22 nt, Homo sapiens
agcagcuuugcauggccugugg

SEQ ID NO: 84341 - RNA, 22 nt, Homo sapiens
uccauugucuagauguaacaca

SEQ ID NO: 84342 - RNA, 22 nt, Homo sapiens
gaaagguaggaacagggugcag

SEQ ID NO: 84343 - RNA, 22 nt, Homo sapiens
cuagcagaacaauacaauucgg

SEQ ID NO: 84344 - RNA, 22 nt, Homo sapiens
uugagacggagucucacucugu

SEQ ID NO: 84345 - RNA, 22 nt, Homo sapiens
ccacccuggagaauuugagguc

SEQ ID NO: 84346 - RNA, 22 nt, Homo sapiens
ucuguggucagaguccuuggcc

SEQ ID NO: 84347 - RNA, 22 nt, Homo sapiens
uccuuuguuacaguuggcucug

SEQ ID NO: 84348 - RNA, 22 nt, Homo sapiens
caugguguuaggcacugggaau

SEQ ID NO: 84349 - RNA, 22 nt, Homo sapiens
gggguauguaagugagugagug

SEQ ID NO: 84350 - RNA, 18 nt, Homo sapiens
gagguuagguucugacag

SEQ ID NO: 84351 - RNA, 22 nt, Homo sapiens
aguaaaucacuaauggcuuccg

SEQ ID NO: 84352 - RNA, 22 nt, Homo sapiens
uuaucucaguguuuguaaacaa

SEQ ID NO: 84353 - RNA, 22 nt, Homo sapiens
agaguaguaggaugaauggacu

SEQ ID NO: 84354 - RNA, 17 nt, Homo sapiens
uuucagaguggaagugu

SEQ ID NO: 84355 - RNA, 21 nt, Homo sapiens
uagugcagugggguaugacuu

SEQ ID NO: 84356 - RNA, 22 nt, Homo sapiens
uuugugacuugcuucucagaau

SEQ ID NO: 84357 - RNA, 22 nt, Homo sapiens
agcuugugauucuccaucaugu

SEQ ID NO: 84358 - RNA, 19 nt, Homo sapiens
uuuugcucuuuauaccuau

SEQ ID NO: 84359 - RNA, 22 nt, Homo sapiens
uuugcuucacuguuuggcaaaa

SEQ ID NO: 84360 - RNA, 18 nt, Homo sapiens
ugacagcacaugugggga

SEQ ID NO: 84361 - RNA, 22 nt, Homo sapiens
gugugacuagucaugccugaau

SEQ ID NO: 84362 - RNA, 21 nt, Homo sapiens
uguuaacaugcagauuacugg

SEQ ID NO: 84363 - RNA, 22 nt, Homo sapiens
guacaguacugaaugaauguau

SEQ ID NO: 84364 - RNA, 22 nt, Homo sapiens
agaaacauucucuugccuccuu

SEQ ID NO: 84365 - RNA, 22 nt, Homo sapiens
ugcauuguuuagaaacacuggg

SEQ ID NO: 84366 - RNA, 22 nt, Homo sapiens
ucccuguguuccuuuugaauug

SEQ ID NO: 84367 - RNA, 22 nt, Homo sapiens
ugcauuaguaaguaauuuuaau

SEQ ID NO: 84368 - RNA, 22 nt, Homo sapiens
ugugguuuuuuucuccaauagg

SEQ ID NO: 84369 - RNA, 22 nt, Homo sapiens
gugagggagcuggaauauuuau

SEQ ID NO: 84370 - RNA, 20 nt, Homo sapiens
ucuuuuuguggccccagagu

SEQ ID NO: 84371 - RNA, 21 nt, Homo sapiens
uuggccuggaggccugaaugu

SEQ ID NO: 84372 - RNA, 21 nt, Homo sapiens
uaucccagucacaucuaccca

SEQ ID NO: 84373 - RNA, 22 nt, Homo sapiens
aauaaagucugaagugugcuua

SEQ ID NO: 84374 - RNA, 23 nt, Homo sapiens
acacuugcugaguaaaucaaaua

SEQ ID NO: 84375 - RNA, 22 nt, Homo sapiens
auggagagaauuauucucucag

SEQ ID NO: 84376 - RNA, 22 nt, Homo sapiens
ugagguaucauugcccaggcug

SEQ ID NO: 84377 - RNA, 17 nt, Homo sapiens
uagcuucacauuaggaa

SEQ ID NO: 84378 - RNA, 22 nt, Homo sapiens
cugugcauaugacuuuauugga

SEQ ID NO: 84379 - RNA, 22 nt, Homo sapiens
gccaagauuuaauucaucaguu

SEQ ID NO: 84380 - RNA, 23 nt, Homo sapiens
ccacacuguuuagaauggcauca

SEQ ID NO: 84381 - RNA, 22 nt, Homo sapiens
ugaucucagcucacugguugaa

SEQ ID NO: 84382 - RNA, 21 nt, Homo sapiens
uugguccacaugucauaguua

SEQ ID NO: 84383 - RNA, 22 nt, Homo sapiens
aucaaaugcuggcagagugccu

SEQ ID NO: 84384 - RNA, 23 nt, Homo sapiens
caugaacuaguuugcagccauga

SEQ ID NO: 84385 - RNA, 22 nt, Homo sapiens
gggaugaaguugauguagaaag

SEQ ID NO: 84386 - RNA, 22 nt, Homo sapiens
uugugcuuaaugaguguaaggu

SEQ ID NO: 84387 - RNA, 22 nt, Homo sapiens
guaacacaugcugcucucuggu

SEQ ID NO: 84388 - RNA, 22 nt, Homo sapiens
auugcucaaaucaguacuugag

SEQ ID NO: 84389 - RNA, 22 nt, Homo sapiens
gugguuuuuaaaguaccugugg

SEQ ID NO: 84390 - RNA, 22 nt, Homo sapiens
uuuggcccugagggauggcaua

SEQ ID NO: 84391 - RNA, 22 nt, Homo sapiens
cugagauaggacucugcuggcu

SEQ ID NO: 84392 - RNA, 19 nt, Homo sapiens
acccuguccccaccuuuac

SEQ ID NO: 84393 - RNA, 20 nt, Homo sapiens
aucacuggagaaggaaaccu

SEQ ID NO: 84394 - RNA, 22 nt, Homo sapiens
aagcucuuguugaaucuuguca

SEQ ID NO: 84395 - RNA, 22 nt, Homo sapiens
uucauguagucaucauccugcu

SEQ ID NO: 84396 - RNA, 18 nt, Homo sapiens
ugcuccccugggugagca

SEQ ID NO: 84397 - RNA, 23 nt, Homo sapiens
cagcuucauugaacauaacuccu

SEQ ID NO: 84398 - RNA, 21 nt, Homo sapiens
uugagacggagucucacucug

SEQ ID NO: 84399 - RNA, 22 nt, Homo sapiens
ugccugauacccucugucucuc

SEQ ID NO: 84400 - RNA, 22 nt, Homo sapiens
gagagcaugugcuggcaucagu

SEQ ID NO: 84401 - RNA, 22 nt, Homo sapiens
uuggcagcuguggaaucugggc

SEQ ID NO: 84402 - RNA, 22 nt, Homo sapiens
aagucaaggagagaagcuucag

SEQ ID NO: 84403 - RNA, 22 nt, Homo sapiens
uuuguuugaagucgagacaacu

SEQ ID NO: 84404 - RNA, 22 nt, Homo sapiens
cugaggugggagaaucacauaa

SEQ ID NO: 84405 - RNA, 22 nt, Homo sapiens
ugccugagcccagcccuguagu

SEQ ID NO: 84406 - RNA, 22 nt, Homo sapiens
uuugcugagucauuccaugcug

SEQ ID NO: 84407 - RNA, 22 nt, Homo sapiens
aaguugcuuuagguaagucaau

SEQ ID NO: 84408 - RNA, 22 nt, Homo sapiens
aguuggccccuacugggaggug

SEQ ID NO: 84409 - RNA, 22 nt, Homo sapiens
auuguguuugaaugaggcucca

SEQ ID NO: 84410 - RNA, 22 nt, Homo sapiens
uugcacauuuuuucuggcagaa

SEQ ID NO: 84411 - RNA, 22 nt, Homo sapiens
ucacagugcaggaucaguuaau

SEQ ID NO: 84412 - RNA, 22 nt, Homo sapiens
accauugcacuccagccugggc

SEQ ID NO: 84413 - RNA, 22 nt, Homo sapiens
augugacuggaucauggggacg

SEQ ID NO: 84414 - RNA, 22 nt, Homo sapiens
agaugguguuuucucaccagau

SEQ ID NO: 84415 - RNA, 22 nt, Homo sapiens
uggcaaaauggaauauguuggg

SEQ ID NO: 84416 - RNA, 21 nt, Homo sapiens
cuucuuggggcagggcagggu

SEQ ID NO: 84417 - RNA, 22 nt, Homo sapiens
cacugcaauuacuuuugcacca

SEQ ID NO: 84418 - RNA, 22 nt, Homo sapiens
gugcccacugucuguccuguag

SEQ ID NO: 84419 - RNA, 22 nt, Homo sapiens
auagaucuauuuauguaucccu

SEQ ID NO: 84420 - RNA, 22 nt, Homo sapiens
uguguacaucucuacacacaug

SEQ ID NO: 84421 - RNA, 22 nt, Homo sapiens
gcagugcaugacgguauauaua

SEQ ID NO: 84422 - RNA, 22 nt, Homo sapiens
ugaagcuaacuugauugugaug

SEQ ID NO: 84423 - RNA, 22 nt, Homo sapiens
cugcaagaaucguaguauuuga

SEQ ID NO: 84424 - RNA, 22 nt, Homo sapiens
uagcagcuuuauugagguaaau

SEQ ID NO: 84425 - RNA, 20 nt, Homo sapiens
uugcugguguuagaggaggc

SEQ ID NO: 84426 - RNA, 22 nt, Homo sapiens
gugagcauauuaguauugcacu

SEQ ID NO: 84427 - RNA, 22 nt, Homo sapiens
uuaggaucacagaaaauccucu

SEQ ID NO: 84428 - RNA, 22 nt, Homo sapiens
gcaguagugugaucuuggcuca

SEQ ID NO: 84429 - RNA, 22 nt, Homo sapiens
uuggaagguaaucaaaaguucu

SEQ ID NO: 84430 - RNA, 17 nt, Homo sapiens
augaacucaucauuuuu

SEQ ID NO: 84431 - RNA, 22 nt, Homo sapiens
ucacauuguuauguaaauguuu

SEQ ID NO: 84432 - RNA, 22 nt, Homo sapiens
ccugucuugauuaaauuacuua

SEQ ID NO: 84433 - RNA, 22 nt, Homo sapiens
gaauagugcugcaagaaacaua

SEQ ID NO: 84434 - RNA, 22 nt, Homo sapiens
uuuggucuuuuguaaguuaucu

SEQ ID NO: 84435 - RNA, 22 nt, Homo sapiens
uuguauguuguuugucagagaa

SEQ ID NO: 84436 - RNA, 18 nt, Homo sapiens
uguugguguucacucacu

SEQ ID NO: 84437 - RNA, 22 nt, Homo sapiens
cuugccuaaucugcaugauuuu

SEQ ID NO: 84438 - RNA, 22 nt, Homo sapiens
uagucaaaucugaaggaaauuu

SEQ ID NO: 84439 - RNA, 20 nt, Homo sapiens
agcaucauugcaauuuguca

SEQ ID NO: 84440 - RNA, 19 nt, Homo sapiens
ccugcuguucuuuugcacc

SEQ ID NO: 84441 - RNA, 22 nt, Homo sapiens
uuccauuuguucggugucgcca

SEQ ID NO: 84442 - RNA, 22 nt, Homo sapiens
gucagauaauuugcauccaucu

SEQ ID NO: 84443 - RNA, 22 nt, Homo sapiens
guucacucuggagaauauugac

SEQ ID NO: 84444 - RNA, 22 nt, Homo sapiens
cuguccugcagagucagaauga

SEQ ID NO: 84445 - RNA, 22 nt, Homo sapiens
auaaaguucugcuggcauauau

SEQ ID NO: 84446 - RNA, 19 nt, Homo sapiens
ugugaagaaaugcugcaag

SEQ ID NO: 84447 - RNA, 22 nt, Homo sapiens
uuuggccauguuggucaggcug

SEQ ID NO: 84448 - RNA, 19 nt, Homo sapiens
auuugaucaucaggcacag

SEQ ID NO: 84449 - RNA, 17 nt, Homo sapiens
agccccauuagcuaguu

SEQ ID NO: 84450 - RNA, 22 nt, Homo sapiens
caaagucuucucauuaugucuu

SEQ ID NO: 84451 - RNA, 22 nt, Homo sapiens
cagugguuuucaacccugguug

SEQ ID NO: 84452 - RNA, 22 nt, Homo sapiens
augaagucguuacuaccaauug

SEQ ID NO: 84453 - RNA, 22 nt, Homo sapiens
ucaucagaaucccuuagggaug

SEQ ID NO: 84454 - RNA, 20 nt, Homo sapiens
agagugcuggacugaggagc

SEQ ID NO: 84455 - RNA, 22 nt, Homo sapiens
ugguccccaauacuucuauaga

SEQ ID NO: 84456 - RNA, 22 nt, Homo sapiens
ugugcaguuuugagugaauuuc

SEQ ID NO: 84457 - RNA, 22 nt, Homo sapiens
guggcagugugaggauccugcu

SEQ ID NO: 84458 - RNA, 22 nt, Homo sapiens
gugcacaacguguagguuuguu

SEQ ID NO: 84459 - RNA, 22 nt, Homo sapiens
ccuuggcacuuugccacagugc

SEQ ID NO: 84460 - RNA, 22 nt, Homo sapiens
ucaucuggcgaaugugaagagu

SEQ ID NO: 84461 - RNA, 22 nt, Homo sapiens
gucucccagccuacauauuucu

SEQ ID NO: 84462 - RNA, 22 nt, Homo sapiens
gcugguguagagugcagaaagg

SEQ ID NO: 84463 - RNA, 22 nt, Homo sapiens
cucccuuugcugaauguuuuuc

SEQ ID NO: 84464 - RNA, 22 nt, Homo sapiens
agcucauugcaaccuccgccuc

SEQ ID NO: 84465 - RNA, 21 nt, Homo sapiens
aaaugcacauuacugcuggug

SEQ ID NO: 84466 - RNA, 22 nt, Homo sapiens
ggcaagaaaaugcaauuacugu

SEQ ID NO: 84467 - RNA, 22 nt, Homo sapiens
ugugauggaguuucauggacug

SEQ ID NO: 84468 - RNA, 22 nt, Homo sapiens
aggcaugaguucagaggguaug

SEQ ID NO: 84469 - RNA, 22 nt, Homo sapiens
ugggaugaugcuugagaauauc

SEQ ID NO: 84470 - RNA, 22 nt, Homo sapiens
acugcacuccagcccaggugac

SEQ ID NO: 84471 - RNA, 22 nt, Homo sapiens
ugagaugaucaaaguauaggcu

SEQ ID NO: 84472 - RNA, 22 nt, Homo sapiens
cacauguuuuagcauggcuguu

SEQ ID NO: 84473 - RNA, 22 nt, Homo sapiens
ucucagugaauugguuuugucu

SEQ ID NO: 84474 - RNA, 22 nt, Homo sapiens
auacccucugggugguuaguug

SEQ ID NO: 84475 - RNA, 22 nt, Homo sapiens
agaauguauauucuguaguugu

SEQ ID NO: 84476 - RNA, 23 nt, Homo sapiens
uugcauagacauccucauagauu

SEQ ID NO: 84477 - RNA, 22 nt, Homo sapiens
auguccaugagcacauguauca

SEQ ID NO: 84478 - RNA, 22 nt, Homo sapiens
aaaugcuuucuuggaccauuug

SEQ ID NO: 84479 - RNA, 19 nt, Homo sapiens
uacaggacugagcugaggu

SEQ ID NO: 84480 - RNA, 22 nt, Homo sapiens
gaguuguuuuaaggcacugacu

SEQ ID NO: 84481 - RNA, 22 nt, Homo sapiens
ugugcauauaaguguguauaua

SEQ ID NO: 84482 - RNA, 22 nt, Homo sapiens
ugagcugagauuaagcugcugc

SEQ ID NO: 84483 - RNA, 22 nt, Homo sapiens
ugagugugacuuagcagaagga

SEQ ID NO: 84484 - RNA, 22 nt, Homo sapiens
uuuuacacaucaccgcucgugu

SEQ ID NO: 84485 - RNA, 22 nt, Homo sapiens
ucugucuuugccuaaguuuguc

SEQ ID NO: 84486 - RNA, 22 nt, Homo sapiens
ugugucuugaauuuuguaugua

SEQ ID NO: 84487 - RNA, 22 nt, Homo sapiens
ugaugaaguauaggaagggcuu

SEQ ID NO: 84488 - RNA, 22 nt, Homo sapiens
caaagugcugggaugggccagg

SEQ ID NO: 84489 - RNA, 22 nt, Homo sapiens
gcacccugucaaaauggaccaa

SEQ ID NO: 84490 - RNA, 22 nt, Homo sapiens
ucacauuguguagccugcucac

SEQ ID NO: 84491 - RNA, 22 nt, Homo sapiens
uugcacaauccugugagugagu

SEQ ID NO: 84492 - RNA, 22 nt, Homo sapiens
uucuugcuguauccucacaugg

SEQ ID NO: 84493 - RNA, 22 nt, Homo sapiens
auuccaguuguaagguuuuuca

SEQ ID NO: 84494 - RNA, 22 nt, Homo sapiens
aagcuggauuucgcauccuguu

SEQ ID NO: 84495 - RNA, 22 nt, Homo sapiens
uaugaaucuggcuacuccaggg

SEQ ID NO: 84496 - RNA, 18 nt, Homo sapiens
ggcugguguuuuaguaua

SEQ ID NO: 84497 - RNA, 22 nt, Homo sapiens
uagaucauauucagugcuuacu

SEQ ID NO: 84498 - RNA, 22 nt, Homo sapiens
cagcaucauucaucugggguaa

SEQ ID NO: 84499 - RNA, 20 nt, Homo sapiens
uuucuccccuauaaaucuca

SEQ ID NO: 84500 - RNA, 20 nt, Homo sapiens
uguaacacauggagaacucu

SEQ ID NO: 84501 - RNA, 22 nt, Homo sapiens
ucccuggacagccuugccuggg

SEQ ID NO: 84502 - RNA, 22 nt, Homo sapiens
uagagcaugugccauacguaca

SEQ ID NO: 84503 - RNA, 22 nt, Homo sapiens
auagugcugcaauaaccauggg

SEQ ID NO: 84504 - RNA, 22 nt, Homo sapiens
aacaucaaccaugaggguugga

SEQ ID NO: 84505 - RNA, 22 nt, Homo sapiens
ugcaaauguuaguaacaccacu

SEQ ID NO: 84506 - RNA, 22 nt, Homo sapiens
uugagauggagucucgcugugu

SEQ ID NO: 84507 - RNA, 20 nt, Homo sapiens
ggagguuguauaaguacauc

SEQ ID NO: 84508 - RNA, 22 nt, Homo sapiens
auggcacugccuggcuucaugg

SEQ ID NO: 84509 - RNA, 22 nt, Homo sapiens
uuggagcccuaacucucaguac

SEQ ID NO: 84510 - RNA, 19 nt, Homo sapiens
agugagccaagauccuacc

SEQ ID NO: 84511 - RNA, 22 nt, Homo sapiens
cauggucaccuuccaaguuauu

SEQ ID NO: 84512 - RNA, 22 nt, Homo sapiens
gugauuauuaugcacugcaugc

SEQ ID NO: 84513 - RNA, 22 nt, Homo sapiens
cacacugucuuucagaaugguu

SEQ ID NO: 84514 - RNA, 22 nt, Homo sapiens
agcagcauauuuuuauaaugua

SEQ ID NO: 84515 - RNA, 22 nt, Homo sapiens
uaacuguggaaaugacuuuaaa

SEQ ID NO: 84516 - RNA, 20 nt, Homo sapiens
gagcucaucuucuuuaccac

SEQ ID NO: 84517 - RNA, 22 nt, Homo sapiens
uuucaucagccagggucagucu

SEQ ID NO: 84518 - RNA, 22 nt, Homo sapiens
caccgagguuggagugcagugg

SEQ ID NO: 84519 - RNA, 19 nt, Homo sapiens
agcuguguugccugugaga

SEQ ID NO: 84520 - RNA, 22 nt, Homo sapiens
gaaguaguaaaauuuauugcag

SEQ ID NO: 84521 - RNA, 22 nt, Homo sapiens
auagugcuuuugaaucuuguug

SEQ ID NO: 84522 - RNA, 22 nt, Homo sapiens
acacugucugaugaaaguaguu

SEQ ID NO: 84523 - RNA, 20 nt, Homo sapiens
agguuauuauaauuagaaga

SEQ ID NO: 84524 - RNA, 22 nt, Homo sapiens
uguaagcagcagagacuauccu

SEQ ID NO: 84525 - RNA, 22 nt, Homo sapiens
gugugcacaaucuggcaugugc

SEQ ID NO: 84526 - RNA, 22 nt, Homo sapiens
ugccauugcacuccagccuggg

SEQ ID NO: 84527 - RNA, 18 nt, Homo sapiens
ugcagcuuugugauuggc

SEQ ID NO: 84528 - RNA, 22 nt, Homo sapiens
auggcuucuuacucuucugcau

SEQ ID NO: 84529 - RNA, 22 nt, Homo sapiens
ucacaggguguuauuagaauua

SEQ ID NO: 84530 - RNA, 22 nt, Homo sapiens
acaaagcgcuucucuuuagagu

SEQ ID NO: 84531 - RNA, 22 nt, Homo sapiens
ugaaaguuauauugugaaauuc

SEQ ID NO: 84532 - RNA, 22 nt, Homo sapiens
uccugagacugaggagcuuugg

SEQ ID NO: 84533 - RNA, 19 nt, Homo sapiens
caugccacugcacuugagu

SEQ ID NO: 84534 - RNA, 21 nt, Homo sapiens
uagagcuuggcacagaguaga

SEQ ID NO: 84535 - RNA, 22 nt, Homo sapiens
caaaguaauugugguuuugcca

SEQ ID NO: 84536 - RNA, 22 nt, Homo sapiens
cccagcguucggcauggcugag

SEQ ID NO: 84537 - RNA, 22 nt, Homo sapiens
uugagcaccaugccuggccaug

SEQ ID NO: 84538 - RNA, 22 nt, Homo sapiens
aucaaaguaggcauauguuuuu

SEQ ID NO: 84539 - RNA, 22 nt, Homo sapiens
ucucuagagagccugguguuca

SEQ ID NO: 84540 - RNA, 22 nt, Homo sapiens
ccugugguuaaccagcuagaug

SEQ ID NO: 84541 - RNA, 22 nt, Homo sapiens
agccuucauucugacaguagga

SEQ ID NO: 84542 - RNA, 22 nt, Homo sapiens
uaugcacacucucccaggaggg

SEQ ID NO: 84543 - RNA, 22 nt, Homo sapiens
guacagugcucacaaugagagc

SEQ ID NO: 84544 - RNA, 22 nt, Homo sapiens
ucauccauacaguuagcaaagg

SEQ ID NO: 84545 - RNA, 22 nt, Homo sapiens
cacuaggcuggagugcaguggc

SEQ ID NO: 84546 - RNA, 22 nt, Homo sapiens
guaugucuugucuauggcugcu

SEQ ID NO: 84547 - RNA, 22 nt, Homo sapiens
cuuuguguggacauuucaggca

SEQ ID NO: 84548 - RNA, 22 nt, Homo sapiens
gggaagaaggagugguuuacuc

SEQ ID NO: 84549 - RNA, 22 nt, Homo sapiens
aaggugcucucuuauguagaaa

SEQ ID NO: 84550 - RNA, 22 nt, Homo sapiens
ugugucacugcacuccagccug

SEQ ID NO: 84551 - RNA, 22 nt, Homo sapiens
cuucaaguguggccaccugacc

SEQ ID NO: 84552 - RNA, 21 nt, Homo sapiens
aguucacauggcuccuguguu

SEQ ID NO: 84553 - RNA, 22 nt, Homo sapiens
ugggcaaaacuaagagcugugg

SEQ ID NO: 84554 - RNA, 22 nt, Homo sapiens
uguaugaguuguuuauaaauuu

SEQ ID NO: 84555 - RNA, 22 nt, Homo sapiens
uacuguguaguuagaccucaga

SEQ ID NO: 84556 - RNA, 22 nt, Homo sapiens
aaagucuguuuugucagagacu

SEQ ID NO: 84557 - RNA, 22 nt, Homo sapiens
gggugguuuuauuaucagugac

SEQ ID NO: 84558 - RNA, 22 nt, Homo sapiens
auucccuuagcugccucagccu

SEQ ID NO: 84559 - RNA, 22 nt, Homo sapiens
uucauggaacaaguggguucaa

SEQ ID NO: 84560 - RNA, 22 nt, Homo sapiens
cuaacacagggcaagucaggcu

SEQ ID NO: 84561 - RNA, 22 nt, Homo sapiens
cuacaguaugaaaccuuuacuc

SEQ ID NO: 84562 - RNA, 19 nt, Homo sapiens
ucucugguguuggagggga

SEQ ID NO: 84563 - RNA, 22 nt, Homo sapiens
uaaaugcucuuuaaaagugcuu

SEQ ID NO: 84564 - RNA, 22 nt, Homo sapiens
accagucucagguaugucuuua

SEQ ID NO: 84565 - RNA, 22 nt, Homo sapiens
aacagagcuggugacuccaggu

SEQ ID NO: 84566 - RNA, 22 nt, Homo sapiens
aguacugucugguuaccugaca

SEQ ID NO: 84567 - RNA, 22 nt, Homo sapiens
acugcacuccagccuucaggac

SEQ ID NO: 84568 - RNA, 20 nt, Homo sapiens
cuuuggcaaugagaacaggg

SEQ ID NO: 84569 - RNA, 22 nt, Homo sapiens
ccacugcacuccagcccggcaa

SEQ ID NO: 84570 - RNA, 22 nt, Homo sapiens
aguguuuuuaucaugaaagggu

SEQ ID NO: 84571 - RNA, 22 nt, Homo sapiens
ucacugaggucugagcuuuaug

SEQ ID NO: 84572 - RNA, 22 nt, Homo sapiens
gccugagaggauaugauccccu

SEQ ID NO: 84573 - RNA, 22 nt, Homo sapiens
acucauugcucauaccuuaucu

SEQ ID NO: 84574 - RNA, 22 nt, Homo sapiens
ucacugaaaccuccaccucucg

SEQ ID NO: 84575 - RNA, 22 nt, Homo sapiens
uguauguuguaagacuuagacc

SEQ ID NO: 84576 - RNA, 22 nt, Homo sapiens
gccaagaagugucuaagcagga

SEQ ID NO: 84577 - RNA, 22 nt, Homo sapiens
auuucuacuccuguguccagaa

SEQ ID NO: 84578 - RNA, 23 nt, Homo sapiens
cagcucauuuggguccccuuguc

SEQ ID NO: 84579 - RNA, 22 nt, Homo sapiens
cauugcauuuucuuuguaccuu

SEQ ID NO: 84580 - RNA, 22 nt, Homo sapiens
caaagucuucaguugauucuga

SEQ ID NO: 84581 - RNA, 22 nt, Homo sapiens
auuaaauguuggacguauacau

SEQ ID NO: 84582 - RNA, 22 nt, Homo sapiens
aucaggaaccuuuuuggugugu

SEQ ID NO: 84583 - RNA, 17 nt, Homo sapiens
cugugaugaucuugucu

SEQ ID NO: 84584 - RNA, 22 nt, Homo sapiens
cccugagaugcuguuaaucugu

SEQ ID NO: 84585 - RNA, 22 nt, Homo sapiens
gaaagauuuccugagcuagaaa

SEQ ID NO: 84586 - RNA, 22 nt, Homo sapiens
uggagggcuagucauuucuuuu

SEQ ID NO: 84587 - RNA, 22 nt, Homo sapiens
uagccgggugugguggaacucc

SEQ ID NO: 84588 - RNA, 22 nt, Homo sapiens
gugaaaagaugagcaccauaca

SEQ ID NO: 84589 - RNA, 22 nt, Homo sapiens
uggacuguaaauuggggacucu

SEQ ID NO: 84590 - RNA, 18 nt, Homo sapiens
gagcaccuuuuuugcaga

SEQ ID NO: 84591 - RNA, 22 nt, Homo sapiens
uuauaacagagacuccugugcu

SEQ ID NO: 84592 - RNA, 22 nt, Homo sapiens
gagcucauuaaaaauguagaau

SEQ ID NO: 84593 - RNA, 22 nt, Homo sapiens
ucacugaaaccgccuccaccuc

SEQ ID NO: 84594 - RNA, 22 nt, Homo sapiens
auuuuugguuucaccugcacgc

SEQ ID NO: 84595 - RNA, 22 nt, Homo sapiens
gugaacagaaccugggaucgaa

SEQ ID NO: 84596 - RNA, 20 nt, Homo sapiens
ugcaguguccucacuuguca

SEQ ID NO: 84597 - RNA, 22 nt, Homo sapiens
aucaaaguuucccagaaguugu

SEQ ID NO: 84598 - RNA, 22 nt, Homo sapiens
ugcauugcacuugcaugagaua

SEQ ID NO: 84599 - RNA, 22 nt, Homo sapiens
uuaaggcagugucuaugccagu

SEQ ID NO: 84600 - RNA, 22 nt, Homo sapiens
uugagauaggaacucacuaugc

SEQ ID NO: 84601 - RNA, 22 nt, Homo sapiens
acccugucagcuggccugggca

SEQ ID NO: 84602 - RNA, 22 nt, Homo sapiens
uugaaaucuuccacagcccaag

SEQ ID NO: 84603 - RNA, 22 nt, Homo sapiens
uuuguucuucguuccugagcca

SEQ ID NO: 84604 - RNA, 18 nt, Homo sapiens
auguuauguuuguagaag

SEQ ID NO: 84605 - RNA, 22 nt, Homo sapiens
gugaaugcauuaagaaggggga

SEQ ID NO: 84606 - RNA, 17 nt, Homo sapiens
cuuguugugguaguuug

SEQ ID NO: 84607 - RNA, 22 nt, Homo sapiens
auugcaguuagaacagaagucu

SEQ ID NO: 84608 - RNA, 22 nt, Homo sapiens
auugcuauuauuugaccauugu

SEQ ID NO: 84609 - RNA, 22 nt, Homo sapiens
ccagccgggugcaguggcucac

SEQ ID NO: 84610 - RNA, 22 nt, Homo sapiens
uaagcagugcaagaauggaaua

SEQ ID NO: 84611 - RNA, 19 nt, Homo sapiens
ccauggcaaugaucugaug

SEQ ID NO: 84612 - RNA, 22 nt, Homo sapiens
gagugcaauggcaagaucuugg

SEQ ID NO: 84613 - RNA, 22 nt, Homo sapiens
ucaccuggagccuucacauucu

SEQ ID NO: 84614 - RNA, 22 nt, Homo sapiens
cuuguuguggaggggagugcag

SEQ ID NO: 84615 - RNA, 23 nt, Homo sapiens
ugacagaccuucuggaagaaguc

SEQ ID NO: 84616 - RNA, 22 nt, Homo sapiens
uuuugcuugugaauagccacau

SEQ ID NO: 84617 - RNA, 22 nt, Homo sapiens
gacauagcuagauaaccucaug

SEQ ID NO: 84618 - RNA, 22 nt, Homo sapiens
ugauguugacuguaggcagaga

SEQ ID NO: 84619 - RNA, 22 nt, Homo sapiens
ccugucuugaagagauccuccu

SEQ ID NO: 84620 - RNA, 22 nt, Homo sapiens
gaaggugcuuggugaaugcauu

SEQ ID NO: 84621 - RNA, 22 nt, Homo sapiens
aaaagcauucagagugcugggc

SEQ ID NO: 84622 - RNA, 22 nt, Homo sapiens
uggguagagaaucaggaucuua

SEQ ID NO: 84623 - RNA, 22 nt, Homo sapiens
uccuucacucuacaucuuuguu

SEQ ID NO: 84624 - RNA, 22 nt, Homo sapiens
ggugagauguucagacgaacug

SEQ ID NO: 84625 - RNA, 22 nt, Homo sapiens
caaaguaauugcuguuuugcca

SEQ ID NO: 84626 - RNA, 22 nt, Homo sapiens
aaguauuaugaguccuuguuuu

SEQ ID NO: 84627 - RNA, 22 nt, Homo sapiens
gagcacauaugacauuuucuuc

SEQ ID NO: 84628 - RNA, 18 nt, Homo sapiens
cuucauugcuguuuugcu

SEQ ID NO: 84629 - RNA, 22 nt, Homo sapiens
gugaaguuuuugugaggccuaa

SEQ ID NO: 84630 - RNA, 22 nt, Homo sapiens
agucugguguucucacacuagu

SEQ ID NO: 84631 - RNA, 22 nt, Homo sapiens
uugaggugaagggcagagcagc

SEQ ID NO: 84632 - RNA, 22 nt, Homo sapiens
ugcaguaggcccagcgggaggc

SEQ ID NO: 84633 - RNA, 22 nt, Homo sapiens
auuuggccuuuguaugcaguau

SEQ ID NO: 84634 - RNA, 21 nt, Homo sapiens
uucuacuccggcguuguuuuu

SEQ ID NO: 84635 - RNA, 18 nt, Homo sapiens
cagugcaauacaggagag

SEQ ID NO: 84636 - RNA, 22 nt, Homo sapiens
aucauccugucaggagcuguga

SEQ ID NO: 84637 - RNA, 23 nt, Homo sapiens
aagagguaugacuaugaagugga

SEQ ID NO: 84638 - RNA, 22 nt, Homo sapiens
uuggaccacuugauuucugguc

SEQ ID NO: 84639 - RNA, 22 nt, Homo sapiens
guaagagcauguaguggcucua

SEQ ID NO: 84640 - RNA, 22 nt, Homo sapiens
cagugcuuuaucaaguccucca

SEQ ID NO: 84641 - RNA, 20 nt, Homo sapiens
cucaccagguguaggcugag

SEQ ID NO: 84642 - RNA, 22 nt, Homo sapiens
uucuugcacuuaacugacauuc

SEQ ID NO: 84643 - RNA, 22 nt, Homo sapiens
uugcagugugacgacuauauuu

SEQ ID NO: 84644 - RNA, 22 nt, Homo sapiens
caugcagcacacaugucugugc

SEQ ID NO: 84645 - RNA, 22 nt, Homo sapiens
uggacuguaauagagaacagaa

SEQ ID NO: 84646 - RNA, 22 nt, Homo sapiens
ucacacugaauuugaagcaaug

SEQ ID NO: 84647 - RNA, 21 nt, Homo sapiens
ggugagaaaggagacauagac

SEQ ID NO: 84648 - RNA, 22 nt, Homo sapiens
uuauguaaaucaaucuggaauc

SEQ ID NO: 84649 - RNA, 22 nt, Homo sapiens
uuggccuccuggucauauccag

SEQ ID NO: 84650 - RNA, 22 nt, Homo sapiens
uuccuggaggggaaguguccaa

SEQ ID NO: 84651 - RNA, 22 nt, Homo sapiens
uuugugcuaaugcuagauuacu

SEQ ID NO: 84652 - RNA, 22 nt, Homo sapiens
cgccugagcugaggaagcugca

SEQ ID NO: 84653 - RNA, 18 nt, Homo sapiens
uaaggcacuauaggcauu

SEQ ID NO: 84654 - RNA, 22 nt, Homo sapiens
uaucacaaacuuagcaguuuaa

SEQ ID NO: 84655 - RNA, 22 nt, Homo sapiens
ucuuugauguucugaaagaugg

SEQ ID NO: 84656 - RNA, 22 nt, Homo sapiens
gcaccacugcacucucagcuug

SEQ ID NO: 84657 - RNA, 22 nt, Homo sapiens
uaaucacagagguuuggccuca

SEQ ID NO: 84658 - RNA, 22 nt, Homo sapiens
ccuuggcaauggcuggggcuga

SEQ ID NO: 84659 - RNA, 22 nt, Homo sapiens
agugguuuuggaauggaauuca

SEQ ID NO: 84660 - RNA, 22 nt, Homo sapiens
uugugcuugauuugccuagcug

SEQ ID NO: 84661 - RNA, 22 nt, Homo sapiens
augaauccauuccugccacaga

SEQ ID NO: 84662 - RNA, 22 nt, Homo sapiens
cucaugcugucuucugggguaa

SEQ ID NO: 84663 - RNA, 22 nt, Homo sapiens
aggcaggugaaagauaguuuua

SEQ ID NO: 84664 - RNA, 19 nt, Homo sapiens
uuucacacucgccuacuuc

SEQ ID NO: 84665 - RNA, 22 nt, Homo sapiens
gaugauguugaauguucucacc

SEQ ID NO: 84666 - RNA, 23 nt, Homo sapiens
cuguggugaggcccuagaaucug

SEQ ID NO: 84667 - RNA, 22 nt, Homo sapiens
cagugcauaggaucuaaaauuu

SEQ ID NO: 84668 - RNA, 21 nt, Homo sapiens
agcagcuuugguugaagcaga

SEQ ID NO: 84669 - RNA, 22 nt, Homo sapiens
uccagguuuggcuuuauaacuu

SEQ ID NO: 84670 - RNA, 22 nt, Homo sapiens
ugugaacagcuccaaaugugga

SEQ ID NO: 84671 - RNA, 22 nt, Homo sapiens
acucugucuaguuguaaaauuu

SEQ ID NO: 84672 - RNA, 22 nt, Homo sapiens
ccugagacuugagggggcuucu

SEQ ID NO: 84673 - RNA, 22 nt, Homo sapiens
ugaagagucuaaaucugucuuc

SEQ ID NO: 84674 - RNA, 22 nt, Homo sapiens
cccugagagcagggucuuucuc

SEQ ID NO: 84675 - RNA, 22 nt, Homo sapiens
ugaugucuugcaggcacgagau

SEQ ID NO: 84676 - RNA, 22 nt, Homo sapiens
aagcugugucuugucagcuacc

SEQ ID NO: 84677 - RNA, 22 nt, Homo sapiens
auuggaguuguacgcacgcuca

SEQ ID NO: 84678 - RNA, 22 nt, Homo sapiens
acacaugugcguagacucuuua

SEQ ID NO: 84679 - RNA, 22 nt, Homo sapiens
ugucagaaucuagaggcugcua

SEQ ID NO: 84680 - RNA, 22 nt, Homo sapiens
gugucaguggggagugaucuuc

SEQ ID NO: 84681 - RNA, 22 nt, Homo sapiens
augguacuggguaaaagugggg

SEQ ID NO: 84682 - RNA, 22 nt, Homo sapiens
uguaugucugcucuuuggaacu

SEQ ID NO: 84683 - RNA, 22 nt, Homo sapiens
gugacuacaggccacaguuugg

SEQ ID NO: 84684 - RNA, 22 nt, Homo sapiens
aucaaauugucauuuuaaggau

SEQ ID NO: 84685 - RNA, 22 nt, Homo sapiens
ugcucaguuuaaaacuuuugag

SEQ ID NO: 84686 - RNA, 22 nt, Homo sapiens
auugcagaaaugacagagcgcc

SEQ ID NO: 84687 - RNA, 22 nt, Homo sapiens
guggguaaaucucuguuugagg

SEQ ID NO: 84688 - RNA, 22 nt, Homo sapiens
auccucugagagaguuucauaa

SEQ ID NO: 84689 - RNA, 22 nt, Homo sapiens
aggcagcuguuauauacugagu

SEQ ID NO: 84690 - RNA, 22 nt, Homo sapiens
gccuguagaagaguagaugacc

SEQ ID NO: 84691 - RNA, 20 nt, Homo sapiens
gacuugagagugggagagua

SEQ ID NO: 84692 - RNA, 22 nt, Homo sapiens
auugcugagacauugcuaaucu

SEQ ID NO: 84693 - RNA, 22 nt, Homo sapiens
uggagagugauaaguaaaugga

SEQ ID NO: 84694 - RNA, 22 nt, Homo sapiens
uuaaaccugucuucucacuaau

SEQ ID NO: 84695 - RNA, 22 nt, Homo sapiens
ugaggaucucuaggaauuuauc

SEQ ID NO: 84696 - RNA, 22 nt, Homo sapiens
ugagaugcaaaaugagaauugu

SEQ ID NO: 84697 - RNA, 22 nt, Homo sapiens
cuaaaugcacugucaaaggaag

SEQ ID NO: 84698 - RNA, 21 nt, Homo sapiens
cucucugcuuaugaauaguga

SEQ ID NO: 84699 - RNA, 22 nt, Homo sapiens
auggaaggagaggaaugaauga

SEQ ID NO: 84700 - RNA, 22 nt, Homo sapiens
gugaaguuuuuugcugagaguc

SEQ ID NO: 84701 - RNA, 22 nt, Homo sapiens
gcaaaugcuaugccauuuuaua

SEQ ID NO: 84702 - RNA, 22 nt, Homo sapiens
auggaaggagaauggucuuuga

SEQ ID NO: 84703 - RNA, 22 nt, Homo sapiens
ucacauguguaugagcuuugau

SEQ ID NO: 84704 - RNA, 22 nt, Homo sapiens
gugcaugucuaugcgagucuaa

SEQ ID NO: 84705 - RNA, 22 nt, Homo sapiens
uugucucacuggaguuuaguaa

SEQ ID NO: 84706 - RNA, 22 nt, Homo sapiens
uaguaaacauaguucuuuugcu

SEQ ID NO: 84707 - RNA, 22 nt, Homo sapiens
cucgagagaaaaugcuucacug

SEQ ID NO: 84708 - RNA, 22 nt, Homo sapiens
ucuuuguuagaacccucuccuu

SEQ ID NO: 84709 - RNA, 22 nt, Homo sapiens
cacugcauucuccaccucccag

SEQ ID NO: 84710 - RNA, 22 nt, Homo sapiens
auuguucuuacaugcugucauc

SEQ ID NO: 84711 - RNA, 22 nt, Homo sapiens
cuggaauucaaaaucugaauuu

SEQ ID NO: 84712 - RNA, 20 nt, Homo sapiens
ugguccccaccaaaucucau

SEQ ID NO: 84713 - RNA, 18 nt, Homo sapiens
ucagucacugccuggcuu

SEQ ID NO: 84714 - RNA, 22 nt, Homo sapiens
ccucuguaguccugcaagagga

SEQ ID NO: 84715 - RNA, 21 nt, Homo sapiens
ucacauggccagaguaggaac

SEQ ID NO: 84716 - RNA, 22 nt, Homo sapiens
caccugagcgggaugcucgccu

SEQ ID NO: 84717 - RNA, 22 nt, Homo sapiens
auggcacagaguagaugcucaa

SEQ ID NO: 84718 - RNA, 20 nt, Homo sapiens
aagugcaucguugugucugc

SEQ ID NO: 84719 - RNA, 22 nt, Homo sapiens
uucccuuugaauuggaaaggug

SEQ ID NO: 84720 - RNA, 22 nt, Homo sapiens
uuccaugugggcuugucaagua

SEQ ID NO: 84721 - RNA, 22 nt, Homo sapiens
cucacugggaccacucugaagu

SEQ ID NO: 84722 - RNA, 22 nt, Homo sapiens
uugcaggugguuuaugcaagac

SEQ ID NO: 84723 - RNA, 22 nt, Homo sapiens
ucacaccauucuucuacuucag

SEQ ID NO: 84724 - RNA, 22 nt, Homo sapiens
auggccugaugcaccuguccca

SEQ ID NO: 84725 - RNA, 22 nt, Homo sapiens
ccacacugucuuggugggaaac

SEQ ID NO: 84726 - RNA, 22 nt, Homo sapiens
uggcaugauccuagauucaaca

SEQ ID NO: 84727 - RNA, 22 nt, Homo sapiens
gugagguugaaaauaauggaaa

SEQ ID NO: 84728 - RNA, 18 nt, Homo sapiens
uaauaacugugaccuuga

SEQ ID NO: 84729 - RNA, 22 nt, Homo sapiens
aacugggcaagcauuacauggu

SEQ ID NO: 84730 - RNA, 22 nt, Homo sapiens
aagagguaauaacaaagcuucu

SEQ ID NO: 84731 - RNA, 23 nt, Homo sapiens
aguggucuccugggcccagcugu

SEQ ID NO: 84732 - RNA, 22 nt, Homo sapiens
cuguaugugagaaauaauaagu

SEQ ID NO: 84733 - RNA, 21 nt, Homo sapiens
ucauugggugcagcccacccu

SEQ ID NO: 84734 - RNA, 22 nt, Homo sapiens
auugugcuaaaguaauaaguca

SEQ ID NO: 84735 - RNA, 22 nt, Homo sapiens
cuggaguaugaaccauguauca

SEQ ID NO: 84736 - RNA, 22 nt, Homo sapiens
cuauucacaggcaauauguaca

SEQ ID NO: 84737 - RNA, 22 nt, Homo sapiens
uggcaagaccccaucucuacaa

SEQ ID NO: 84738 - RNA, 22 nt, Homo sapiens
agucacaugccagcacacccag

SEQ ID NO: 84739 - RNA, 22 nt, Homo sapiens
gggcaaaacuguacugccaagg

SEQ ID NO: 84740 - RNA, 22 nt, Homo sapiens
augcacuuggcaggaugauucc

SEQ ID NO: 84741 - RNA, 21 nt, Homo sapiens
cacugcacuugccuucugggu

SEQ ID NO: 84742 - RNA, 22 nt, Homo sapiens
aagcuggagugcaguggugcga

SEQ ID NO: 84743 - RNA, 22 nt, Homo sapiens
augugcauaugaagcacagaca

SEQ ID NO: 84744 - RNA, 22 nt, Homo sapiens
uucccuuugugcauaggauuug

SEQ ID NO: 84745 - RNA, 22 nt, Homo sapiens
guggaagguaaugcagcuuacu

SEQ ID NO: 84746 - RNA, 20 nt, Homo sapiens
uucagcaaaggaaugggagu

SEQ ID NO: 84747 - RNA, 22 nt, Homo sapiens
gugagcuccucuucugcugcag

SEQ ID NO: 84748 - RNA, 22 nt, Homo sapiens
uauuguccacuuugcacugugu

SEQ ID NO: 84749 - RNA, 22 nt, Homo sapiens
ugcaagaaucuuucaggcuagc

SEQ ID NO: 84750 - RNA, 22 nt, Homo sapiens
auugagcaaggucuccuaguau

SEQ ID NO: 84751 - RNA, 22 nt, Homo sapiens
ugcaaucauuuggaggagaaga

SEQ ID NO: 84752 - RNA, 22 nt, Homo sapiens
ugguuguuuuaaaugucgucug

SEQ ID NO: 84753 - RNA, 22 nt, Homo sapiens
cugugcuuggagucccccuagg

SEQ ID NO: 84754 - RNA, 22 nt, Homo sapiens
gcacugggccacauuuauuuuc

SEQ ID NO: 84755 - RNA, 22 nt, Homo sapiens
auugcucagucagggagcucgg

SEQ ID NO: 84756 - RNA, 22 nt, Homo sapiens
ggggucauuaaauuccgcuggu

SEQ ID NO: 84757 - RNA, 22 nt, Homo sapiens
gcagguguuaugcaaacaacug

SEQ ID NO: 84758 - RNA, 22 nt, Homo sapiens
agcagcuuugcauggccuguga

SEQ ID NO: 84759 - RNA, 22 nt, Homo sapiens
aacucugucuccuucaaguuca

SEQ ID NO: 84760 - RNA, 22 nt, Homo sapiens
agcagagcaguggauuuuguga

SEQ ID NO: 84761 - RNA, 22 nt, Homo sapiens
uaacccagugucugugaugggu

SEQ ID NO: 84762 - RNA, 22 nt, Homo sapiens
uacauacuucacagacuuuaaa

SEQ ID NO: 84763 - RNA, 22 nt, Homo sapiens
augggaaaaucagaaggccugg

SEQ ID NO: 84764 - RNA, 22 nt, Homo sapiens
ugcuagaagaucacacacauca

SEQ ID NO: 84765 - RNA, 22 nt, Homo sapiens
uucagcacaguguggaucauuc

SEQ ID NO: 84766 - RNA, 22 nt, Homo sapiens
ccaucacacugugauuauuauc

SEQ ID NO: 84767 - RNA, 22 nt, Homo sapiens
uugugcuuguaacuacauucag

SEQ ID NO: 84768 - RNA, 22 nt, Homo sapiens
uccuuuggucaguauucuuuug

SEQ ID NO: 84769 - RNA, 23 nt, Homo sapiens
ucuuuggcucuaauauaccuugu

SEQ ID NO: 84770 - RNA, 22 nt, Homo sapiens
ucugucuuguccucacccuaga

SEQ ID NO: 84771 - RNA, 22 nt, Homo sapiens
aagcuggagugcaguggugcaa

SEQ ID NO: 84772 - RNA, 17 nt, Homo sapiens
aaggugcuucgaccucc

SEQ ID NO: 84773 - RNA, 22 nt, Homo sapiens
acagugcuguuguguuuucacg

SEQ ID NO: 84774 - RNA, 22 nt, Homo sapiens
guagcagccacacuugauaacu

SEQ ID NO: 84775 - RNA, 22 nt, Homo sapiens
ucugagguuaaauuuuauaguu

SEQ ID NO: 84776 - RNA, 21 nt, Homo sapiens
uccugagagaggaguaacucu

SEQ ID NO: 84777 - RNA, 22 nt, Homo sapiens
uuccguguaguugagcaguuuu

SEQ ID NO: 84778 - RNA, 22 nt, Homo sapiens
ugucauguauauaccacuucca

SEQ ID NO: 84779 - RNA, 22 nt, Homo sapiens
caucacaucugcaugguaagua

SEQ ID NO: 84780 - RNA, 22 nt, Homo sapiens
ugcuuuguugaaaaucauuugg

SEQ ID NO: 84781 - RNA, 22 nt, Homo sapiens
ucaaagucuucucaaguaacau

SEQ ID NO: 84782 - RNA, 22 nt, Homo sapiens
ugagacggagucucacucuguu

SEQ ID NO: 84783 - RNA, 22 nt, Homo sapiens
gcccugagauucuuggauucug

SEQ ID NO: 84784 - RNA, 20 nt, Homo sapiens
uuccuuaggcauuggaagaa

SEQ ID NO: 84785 - RNA, 22 nt, Homo sapiens
uagcugcugcuaggcuaaggau

SEQ ID NO: 84786 - RNA, 16 nt, Homo sapiens
agcagguguuagguga

SEQ ID NO: 84787 - RNA, 22 nt, Homo sapiens
aucugguguauuggugcugggu

SEQ ID NO: 84788 - RNA, 22 nt, Homo sapiens
aagcuggcauucauucguucuu

SEQ ID NO: 84789 - RNA, 23 nt, Homo sapiens
agccugguuucccugcuucuccc

SEQ ID NO: 84790 - RNA, 22 nt, Homo sapiens
ucuggccuacaaguaauuuuau

SEQ ID NO: 84791 - RNA, 22 nt, Homo sapiens
gagcugaaguuuccauuuguac

SEQ ID NO: 84792 - RNA, 22 nt, Homo sapiens
guagcagcuacuaaguugcugu

SEQ ID NO: 84793 - RNA, 22 nt, Homo sapiens
gcaacugguuucaguuuuucag

SEQ ID NO: 84794 - RNA, 22 nt, Homo sapiens
uuaaggcagugcaucuggaguu

SEQ ID NO: 84795 - RNA, 22 nt, Homo sapiens
aagagcauuauuuaguaauuuc

SEQ ID NO: 84796 - RNA, 22 nt, Homo sapiens
uuuuggcuuuuccucagcaagc

SEQ ID NO: 84797 - RNA, 22 nt, Homo sapiens
auccuguacuaagguuuuccca

SEQ ID NO: 84798 - RNA, 22 nt, Homo sapiens
gugagcauaggaggcuucuguu

SEQ ID NO: 84799 - RNA, 22 nt, Homo sapiens
caguagcaugccucagaaugag

SEQ ID NO: 84800 - RNA, 22 nt, Homo sapiens
ugauggcauuucauguuuguaa

SEQ ID NO: 84801 - RNA, 22 nt, Homo sapiens
gacagugugauacuuagucuca

SEQ ID NO: 84802 - RNA, 22 nt, Homo sapiens
ggcuagaauagggauagaccuu

SEQ ID NO: 84803 - RNA, 22 nt, Homo sapiens
gucacaguguuuguucauccca

SEQ ID NO: 84804 - RNA, 20 nt, Homo sapiens
cugaggugggagaaucgcuu

SEQ ID NO: 84805 - RNA, 22 nt, Homo sapiens
uuggaaguguguauguauagcu

SEQ ID NO: 84806 - RNA, 22 nt, Homo sapiens
uccccugagaacuugcuagaaa

SEQ ID NO: 84807 - RNA, 22 nt, Homo sapiens
cugccuagauguuguagggggu

SEQ ID NO: 84808 - RNA, 22 nt, Homo sapiens
uccaaaucucuggcacugggau

SEQ ID NO: 84809 - RNA, 22 nt, Homo sapiens
ucauucacucccuugaaguuag

SEQ ID NO: 84810 - RNA, 22 nt, Homo sapiens
cugaggacaucagggaagcauc

SEQ ID NO: 84811 - RNA, 22 nt, Homo sapiens
ucagcaaugaccuaagcaaaua

SEQ ID NO: 84812 - RNA, 23 nt, Homo sapiens
acaguggugugaucuuggcucag

SEQ ID NO: 84813 - RNA, 22 nt, Homo sapiens
auggcagcaccccacucuacug

SEQ ID NO: 84814 - RNA, 20 nt, Homo sapiens
ucucauggagguagagaaua

SEQ ID NO: 84815 - RNA, 22 nt, Homo sapiens
cauggcacugagcagguaugca

SEQ ID NO: 84816 - RNA, 22 nt, Homo sapiens
gagguaaguggauuaugagguc

SEQ ID NO: 84817 - RNA, 22 nt, Homo sapiens
cacugcacuccagucuggcgac

SEQ ID NO: 84818 - RNA, 22 nt, Homo sapiens
ucgcaccauugcacuccagcca

SEQ ID NO: 84819 - RNA, 20 nt, Homo sapiens
agacuagggagcagaaagcc

SEQ ID NO: 84820 - RNA, 22 nt, Homo sapiens
guaugcacauauguguauguau

SEQ ID NO: 84821 - RNA, 22 nt, Homo sapiens
ugugagacugguucugaaccca

SEQ ID NO: 84822 - RNA, 18 nt, Homo sapiens
uagcucuuguugguccau

SEQ ID NO: 84823 - RNA, 22 nt, Homo sapiens
auugcacaucugcacuacagcc

SEQ ID NO: 84824 - RNA, 22 nt, Homo sapiens
uaagaauucuguccgguauacu

SEQ ID NO: 84825 - RNA, 22 nt, Homo sapiens
auguugcuugaaggcauuuugu

SEQ ID NO: 84826 - RNA, 22 nt, Homo sapiens
caccaggugcccagcacggcca

SEQ ID NO: 84827 - RNA, 21 nt, Homo sapiens
uuauaguggcaugauuuauaa

SEQ ID NO: 84828 - RNA, 19 nt, Homo sapiens
caccgccugcccccugcug

SEQ ID NO: 84829 - RNA, 22 nt, Homo sapiens
acccugucacucccaucaauuu

SEQ ID NO: 84830 - RNA, 22 nt, Homo sapiens
aaacauugaccucauccuggca

SEQ ID NO: 84831 - RNA, 22 nt, Homo sapiens
ugugcacaauguacagguuagu

SEQ ID NO: 84832 - RNA, 22 nt, Homo sapiens
uucucugggacauaggucgggu

SEQ ID NO: 84833 - RNA, 22 nt, Homo sapiens
uuuggcauuuaaauaugcaugg

SEQ ID NO: 84834 - RNA, 22 nt, Homo sapiens
ucaugggagcccccaucaugag

SEQ ID NO: 84835 - RNA, 22 nt, Homo sapiens
agcuggaauuuaagguagauag

SEQ ID NO: 84836 - RNA, 22 nt, Homo sapiens
uugaagacuaccuaccauacuu

SEQ ID NO: 84837 - RNA, 22 nt, Homo sapiens
gugaugguaguuuguauuucug

SEQ ID NO: 84838 - RNA, 22 nt, Homo sapiens
aguaccauuugacaugggaccc

SEQ ID NO: 84839 - RNA, 21 nt, Homo sapiens
ugcugcacuucuuuugcugug

SEQ ID NO: 84840 - RNA, 22 nt, Homo sapiens
gugguuuuacaaagagaaagau

SEQ ID NO: 84841 - RNA, 22 nt, Homo sapiens
ugcauggauguuugaacacacu

SEQ ID NO: 84842 - RNA, 22 nt, Homo sapiens
aguaacauuucuaguagagagu

SEQ ID NO: 84843 - RNA, 22 nt, Homo sapiens
auccauguggauaaauguguau

SEQ ID NO: 84844 - RNA, 17 nt, Homo sapiens
ccccugagcgaugcagu

SEQ ID NO: 84845 - RNA, 22 nt, Homo sapiens
uguggcuuuuucuuggcugagg

SEQ ID NO: 84846 - RNA, 22 nt, Homo sapiens
gcuguguguuaucagaaauugc

SEQ ID NO: 84847 - RNA, 22 nt, Homo sapiens
agugcauuuguucugugucagg

SEQ ID NO: 84848 - RNA, 22 nt, Homo sapiens
uggggugugagggagaaagaaa

SEQ ID NO: 84849 - RNA, 22 nt, Homo sapiens
cagcuguuguuaugucugcagg

SEQ ID NO: 84850 - RNA, 22 nt, Homo sapiens
acacucuaguguucuuaaucag

SEQ ID NO: 84851 - RNA, 22 nt, Homo sapiens
uaagcaguaaaugaagucuugc

SEQ ID NO: 84852 - RNA, 22 nt, Homo sapiens
uuggcagcacgcaguccagagg

SEQ ID NO: 84853 - RNA, 22 nt, Homo sapiens
ugucaguggucuggaugcagcc

SEQ ID NO: 84854 - RNA, 22 nt, Homo sapiens
gcaaaugcuacaccauuuugua

SEQ ID NO: 84855 - RNA, 22 nt, Homo sapiens
uuccaagugggaaacaaaaaug

SEQ ID NO: 84856 - RNA, 22 nt, Homo sapiens
uaucucaguguacaggaugaua

SEQ ID NO: 84857 - RNA, 22 nt, Homo sapiens
gugcacaacaugcagguuuguu

SEQ ID NO: 84858 - RNA, 22 nt, Homo sapiens
gugucucagcccagaccuauuu

SEQ ID NO: 84859 - RNA, 22 nt, Homo sapiens
uucauggacucaauaguuucgc

SEQ ID NO: 84860 - RNA, 22 nt, Homo sapiens
uacagugggcacuggcgcccug

SEQ ID NO: 84861 - RNA, 21 nt, Homo sapiens
aggagcauucaugacgagguu

SEQ ID NO: 84862 - RNA, 22 nt, Homo sapiens
ucuuuagugacaguugugcaag

SEQ ID NO: 84863 - RNA, 22 nt, Homo sapiens
ugacuucauuuuuggccaugag

SEQ ID NO: 84864 - RNA, 22 nt, Homo sapiens
ucaggcaccuuccucuuaucug

SEQ ID NO: 84865 - RNA, 22 nt, Homo sapiens
uauagcuaugggauguauuugc

SEQ ID NO: 84866 - RNA, 20 nt, Homo sapiens
ucucauagagguagagaaua

SEQ ID NO: 84867 - RNA, 18 nt, Homo sapiens
auuguaagauguauggga

SEQ ID NO: 84868 - RNA, 22 nt, Homo sapiens
ucucugguuuucaaagcaguau

SEQ ID NO: 84869 - RNA, 22 nt, Homo sapiens
aaucacaguguucuugugaggg

SEQ ID NO: 84870 - RNA, 22 nt, Homo sapiens
uuguauguuuguucuuucagau

SEQ ID NO: 84871 - RNA, 22 nt, Homo sapiens
ucacauaguuuucgggaccuug

SEQ ID NO: 84872 - RNA, 23 nt, Homo sapiens
uuuugcaauaagucacuggaaua

SEQ ID NO: 84873 - RNA, 22 nt, Homo sapiens
gugcacaaaucuuaaauguaca

SEQ ID NO: 84874 - RNA, 22 nt, Homo sapiens
ucacagccuaguuuuauacauu

SEQ ID NO: 84875 - RNA, 20 nt, Homo sapiens
uuuugaacuuggcaaccugu

SEQ ID NO: 84876 - RNA, 22 nt, Homo sapiens
uaugaaucugagagaucuggaa

SEQ ID NO: 84877 - RNA, 22 nt, Homo sapiens
uugucaguguucacucaaagcu

SEQ ID NO: 84878 - RNA, 22 nt, Homo sapiens
ugucauguggcuaacgauucau

SEQ ID NO: 84879 - RNA, 22 nt, Homo sapiens
ccuguguuaugguuucuaaugu

SEQ ID NO: 84880 - RNA, 22 nt, Homo sapiens
ucacacugaaacuaggguguga

SEQ ID NO: 84881 - RNA, 22 nt, Homo sapiens
gcaagaguauuucaaggaagau

SEQ ID NO: 84882 - RNA, 19 nt, Homo sapiens
aaaguguuuuaaagaggau

SEQ ID NO: 84883 - RNA, 22 nt, Homo sapiens
gucagugucuuaacagagauua

SEQ ID NO: 84884 - RNA, 22 nt, Homo sapiens
acagugucaugucguguucccc

SEQ ID NO: 84885 - RNA, 22 nt, Homo sapiens
cacugaaugugagguuggggag

SEQ ID NO: 84886 - RNA, 22 nt, Homo sapiens
uacauugucauauucucucucu

SEQ ID NO: 84887 - RNA, 22 nt, Homo sapiens
uucagcaguggccaguggaaau

SEQ ID NO: 84888 - RNA, 22 nt, Homo sapiens
aucugcaaauaaugaagauugg

SEQ ID NO: 84889 - RNA, 22 nt, Homo sapiens
cugagaacaucauucagauauu

SEQ ID NO: 84890 - RNA, 19 nt, Homo sapiens
ugugacugggccagccuag

SEQ ID NO: 84891 - RNA, 22 nt, Homo sapiens
cuuugguugugcucuccacuuu

SEQ ID NO: 84892 - RNA, 22 nt, Homo sapiens
gugagaccaauguacuaccuuc

SEQ ID NO: 84893 - RNA, 22 nt, Homo sapiens
uccugagagcagacccucuaua

SEQ ID NO: 84894 - RNA, 21 nt, Homo sapiens
cccagguucucugaggguaga

SEQ ID NO: 84895 - RNA, 22 nt, Homo sapiens
cuggcccaguucugcguuuugc

SEQ ID NO: 84896 - RNA, 22 nt, Homo sapiens
ugagguugaaggacauuuuuau

SEQ ID NO: 84897 - RNA, 22 nt, Homo sapiens
cacugcacuccagcuugugggc

SEQ ID NO: 84898 - RNA, 22 nt, Homo sapiens
auuggcaagauagcauaugagg

SEQ ID NO: 84899 - RNA, 22 nt, Homo sapiens
ucauuguccaacuucuuucagu

SEQ ID NO: 84900 - RNA, 22 nt, Homo sapiens
ccucauggagaacuucugcuag

SEQ ID NO: 84901 - RNA, 22 nt, Homo sapiens
ucacacugucuugguuacucuu

SEQ ID NO: 84902 - RNA, 22 nt, Homo sapiens
auccucugagaucuaggcagag

SEQ ID NO: 84903 - RNA, 22 nt, Homo sapiens
uggaguaggccuaagaaugaca

SEQ ID NO: 84904 - RNA, 21 nt, Homo sapiens
auggugagaaaguagugucaa

SEQ ID NO: 84905 - RNA, 21 nt, Homo sapiens
caucaaauugucauggugggu

SEQ ID NO: 84906 - RNA, 22 nt, Homo sapiens
uguauguaauugaaguuaaguu

SEQ ID NO: 84907 - RNA, 22 nt, Homo sapiens
gaucaguuucuggagauacgua

SEQ ID NO: 84908 - RNA, 23 nt, Homo sapiens
uaugacagaggaagggggagcug

SEQ ID NO: 84909 - RNA, 22 nt, Homo sapiens
uaacuagaaaggagacaguugc

SEQ ID NO: 84910 - RNA, 22 nt, Homo sapiens
auggcaaaaaaugcaauuacuu

SEQ ID NO: 84911 - RNA, 23 nt, Homo sapiens
ucacacuuaagagaaaugcagcu

SEQ ID NO: 84912 - RNA, 22 nt, Homo sapiens
uguacuucaagauuaugguuua

SEQ ID NO: 84913 - RNA, 22 nt, Homo sapiens
uccauguaguugagcggcuuug

SEQ ID NO: 84914 - RNA, 22 nt, Homo sapiens
ucaaaugguccacgugaacauu

SEQ ID NO: 84915 - RNA, 22 nt, Homo sapiens
caccuagacuggagugcagugg

SEQ ID NO: 84916 - RNA, 22 nt, Homo sapiens
uggaaauaaaauagaguuugcc

SEQ ID NO: 84917 - RNA, 22 nt, Homo sapiens
uguucuugagccuuuagaccua

SEQ ID NO: 84918 - RNA, 22 nt, Homo sapiens
ggggcauugugucuggguuccu

SEQ ID NO: 84919 - RNA, 22 nt, Homo sapiens
ugcaccaucuugcuucuguggu

SEQ ID NO: 84920 - RNA, 22 nt, Homo sapiens
augugugcuugugacacagccu

SEQ ID NO: 84921 - RNA, 22 nt, Homo sapiens
augaaaucuuuggcagaucuua

SEQ ID NO: 84922 - RNA, 22 nt, Homo sapiens
gucuaugguucaggguggagug

SEQ ID NO: 84923 - RNA, 22 nt, Homo sapiens
auuggauagucuuuaucuguug

SEQ ID NO: 84924 - RNA, 22 nt, Homo sapiens
ggcaacaaagacauuucaacau

SEQ ID NO: 84925 - RNA, 16 nt, Homo sapiens
gacugggcugaggaau

SEQ ID NO: 84926 - RNA, 22 nt, Homo sapiens
ggcaacauggugaaacucuguc

SEQ ID NO: 84927 - RNA, 22 nt, Homo sapiens
auggcagcccucuuuauccaug

SEQ ID NO: 84928 - RNA, 22 nt, Homo sapiens
guacaguauaguaauaggauuu

SEQ ID NO: 84929 - RNA, 22 nt, Homo sapiens
caacucuguaggauccaggugg

SEQ ID NO: 84930 - RNA, 22 nt, Homo sapiens
acauggcacugcgggcuucuug

SEQ ID NO: 84931 - RNA, 22 nt, Homo sapiens
uggauuuuaauuauucugucau

SEQ ID NO: 84932 - RNA, 19 nt, Homo sapiens
ucugucacuggggguauuc

SEQ ID NO: 84933 - RNA, 22 nt, Homo sapiens
guugcugagucccaucaccaga

SEQ ID NO: 84934 - RNA, 22 nt, Homo sapiens
ggcaugguggugugugccuaua

SEQ ID NO: 84935 - RNA, 22 nt, Homo sapiens
cuguauguuucuaugaauguga

SEQ ID NO: 84936 - RNA, 22 nt, Homo sapiens
ugucauguaaagaguaaauggu

SEQ ID NO: 84937 - RNA, 22 nt, Homo sapiens
ggugaucauugucucuaguaug

SEQ ID NO: 84938 - RNA, 22 nt, Homo sapiens
agagguaagcaguggcaagugc

SEQ ID NO: 84939 - RNA, 22 nt, Homo sapiens
uggagcccuaaacuucuaauau

SEQ ID NO: 84940 - RNA, 22 nt, Homo sapiens
ccagugcauggaucccaggggg

SEQ ID NO: 84941 - RNA, 19 nt, Homo sapiens
aagugguuuaaacuuguau

SEQ ID NO: 84942 - RNA, 22 nt, Homo sapiens
uuacuguauagaaucaucuuga

SEQ ID NO: 84943 - RNA, 22 nt, Homo sapiens
uuucauggaauauagucauuuu

SEQ ID NO: 84944 - RNA, 20 nt, Homo sapiens
gugagucauuaguaaccaaa

SEQ ID NO: 84945 - RNA, 22 nt, Homo sapiens
ucucauggcucacccugcauag

SEQ ID NO: 84946 - RNA, 22 nt, Homo sapiens
ucugucuuugucaggaccagag

SEQ ID NO: 84947 - RNA, 22 nt, Homo sapiens
ugugguuuuucacauuuagaga

SEQ ID NO: 84948 - RNA, 22 nt, Homo sapiens
uaccuguagacuacagcuucag

SEQ ID NO: 84949 - RNA, 22 nt, Homo sapiens
ugagaacuuugucuuuuacucu

SEQ ID NO: 84950 - RNA, 22 nt, Homo sapiens
cauggcacauauauaucuaggu

SEQ ID NO: 84951 - RNA, 22 nt, Homo sapiens
gagaacuggcugauucaaggac

SEQ ID NO: 84952 - RNA, 22 nt, Homo sapiens
uccccugagucaccugcuucuc

SEQ ID NO: 84953 - RNA, 22 nt, Homo sapiens
accugcacagccgaacauagac

SEQ ID NO: 84954 - RNA, 22 nt, Homo sapiens
ucaaaguagaaaaggggcaauu

SEQ ID NO: 84955 - RNA, 22 nt, Homo sapiens
uggaagugaacaaccaaggcag

SEQ ID NO: 84956 - RNA, 22 nt, Homo sapiens
aaaugcacgcuacccagcuaga

SEQ ID NO: 84957 - RNA, 22 nt, Homo sapiens
ucagggacuuacaaaccagaag

SEQ ID NO: 84958 - RNA, 22 nt, Homo sapiens
ugaaaaguuguugaaggcuuca

SEQ ID NO: 84959 - RNA, 20 nt, Homo sapiens
gcaaauggaucccacaagcc

SEQ ID NO: 84960 - RNA, 22 nt, Homo sapiens
cuguaguuagcagaugaugaau

SEQ ID NO: 84961 - RNA, 22 nt, Homo sapiens
ucacauuguauauguaccuauc

SEQ ID NO: 84962 - RNA, 22 nt, Homo sapiens
ccuuuuuguaguggaaguagga

SEQ ID NO: 84963 - RNA, 22 nt, Homo sapiens
ucagaguagcugucugaggugc

SEQ ID NO: 84964 - RNA, 23 nt, Homo sapiens
ggacuguaagggauauaaagguu

SEQ ID NO: 84965 - RNA, 23 nt, Homo sapiens
uuacaguggcaugaucucugcuc

SEQ ID NO: 84966 - RNA, 22 nt, Homo sapiens
uuuuaguggaauauuuacaguu

SEQ ID NO: 84967 - RNA, 22 nt, Homo sapiens
ugcucaccugcugcucaccucc

SEQ ID NO: 84968 - RNA, 22 nt, Homo sapiens
ccugagaucauacuguuaguaa

SEQ ID NO: 84969 - RNA, 20 nt, Homo sapiens
gagauguugaucagggcuau

SEQ ID NO: 84970 - RNA, 22 nt, Homo sapiens
guggaggacuggauaaagaaaa

SEQ ID NO: 84971 - RNA, 22 nt, Homo sapiens
ucgcaguuaauaaugaugugcg

SEQ ID NO: 84972 - RNA, 22 nt, Homo sapiens
ugugcaugacagcauacaaacg

SEQ ID NO: 84973 - RNA, 22 nt, Homo sapiens
uacaguagagaucagcaaacua

SEQ ID NO: 84974 - RNA, 22 nt, Homo sapiens
agucacaugcauuuucuucaau

SEQ ID NO: 84975 - RNA, 22 nt, Homo sapiens
uuggcauagaggcucucaagcu

SEQ ID NO: 84976 - RNA, 22 nt, Homo sapiens
agagugcaaagguuggggcugg

SEQ ID NO: 84977 - RNA, 22 nt, Homo sapiens
cuuucacacuguuggugggaau

SEQ ID NO: 84978 - RNA, 19 nt, Homo sapiens
gugagcacagacaauacaa

SEQ ID NO: 84979 - RNA, 22 nt, Homo sapiens
cugagacacucuuaucugcaua

SEQ ID NO: 84980 - RNA, 22 nt, Homo sapiens
ucucacauuucacagggauggg

SEQ ID NO: 84981 - RNA, 22 nt, Homo sapiens
gugagucaugucccaucugauu

SEQ ID NO: 84982 - RNA, 22 nt, Homo sapiens
acaguacuuuuggauuugugaa

SEQ ID NO: 84983 - RNA, 20 nt, Homo sapiens
ugugagacugguuuugaacu

SEQ ID NO: 84984 - RNA, 22 nt, Homo sapiens
cacugcauccuccauauccugg

SEQ ID NO: 84985 - RNA, 21 nt, Homo sapiens
acugagagaucuggggcacau

SEQ ID NO: 84986 - RNA, 23 nt, Homo sapiens
cauggcuguuaacacuguuugag

SEQ ID NO: 84987 - RNA, 21 nt, Homo sapiens
uuuguccaccuguguucacca

SEQ ID NO: 84988 - RNA, 22 nt, Homo sapiens
uagaagcuacucuucuuguggc

SEQ ID NO: 84989 - RNA, 22 nt, Homo sapiens
aaagagaucuaugggcacuaug

SEQ ID NO: 84990 - RNA, 22 nt, Homo sapiens
ucagugggcuauguaauuaacu

SEQ ID NO: 84991 - RNA, 22 nt, Homo sapiens
ucagcaaugcugcacucuacug

SEQ ID NO: 84992 - RNA, 22 nt, Homo sapiens
uucaagcugggcaaauaagggg

SEQ ID NO: 84993 - RNA, 22 nt, Homo sapiens
uguaagcauugggcaugcaguc

SEQ ID NO: 84994 - RNA, 20 nt, Homo sapiens
uucuugaguuaacaaguuac

SEQ ID NO: 84995 - RNA, 22 nt, Homo sapiens
gcuguugugaacuauacaucua

SEQ ID NO: 84996 - RNA, 22 nt, Homo sapiens
cagaaguauugguaugcucugu

SEQ ID NO: 84997 - RNA, 22 nt, Homo sapiens
ugugacacugaauggcagaacu

SEQ ID NO: 84998 - RNA, 22 nt, Homo sapiens
ggaaugagaaauauuacacaau

SEQ ID NO: 84999 - RNA, 22 nt, Homo sapiens
acccuggauucguggccuugaa

SEQ ID NO: 85000 - RNA, 22 nt, Homo sapiens
gugguuuuuagauuucuacagu

SEQ ID NO: 85001 - RNA, 22 nt, Homo sapiens
cgcuggugucuaagcgacagcu

SEQ ID NO: 85002 - RNA, 22 nt, Homo sapiens
gagugcaucguggccauuuuaa

SEQ ID NO: 85003 - RNA, 22 nt, Homo sapiens
auucuugcuugaacuuggugca

SEQ ID NO: 85004 - RNA, 22 nt, Homo sapiens
cauuuugcaguuucugucucca

SEQ ID NO: 85005 - RNA, 22 nt, Homo sapiens
auguggugguagccaggacagg

SEQ ID NO: 85006 - RNA, 22 nt, Homo sapiens
aaacugaucugaaggccaggcu

SEQ ID NO: 85007 - RNA, 22 nt, Homo sapiens
ucauguguugcacugaggaccu

SEQ ID NO: 85008 - RNA, 22 nt, Homo sapiens
aaaguggacuaagugaauauga

SEQ ID NO: 85009 - RNA, 21 nt, Homo sapiens
uugaguugaagcaaggaggga

SEQ ID NO: 85010 - RNA, 22 nt, Homo sapiens
guggcagcacauauagguuguu

SEQ ID NO: 85011 - RNA, 19 nt, Homo sapiens
guauuugacuuucuuguuu

SEQ ID NO: 85012 - RNA, 22 nt, Homo sapiens
acugcaaugucgaauagagaug

SEQ ID NO: 85013 - RNA, 22 nt, Homo sapiens
gucagugugauaucugcagggg

SEQ ID NO: 85014 - RNA, 22 nt, Homo sapiens
cugaggugggaguuuuucucau

SEQ ID NO: 85015 - RNA, 23 nt, Homo sapiens
ucuggcuuugggaugcucaaggg

SEQ ID NO: 85016 - RNA, 22 nt, Homo sapiens
agccccauuuguugaaaagacg

SEQ ID NO: 85017 - RNA, 19 nt, Homo sapiens
uacuggcucgggaauuuuc

SEQ ID NO: 85018 - RNA, 22 nt, Homo sapiens
aggugcucuuccuguaggucac

SEQ ID NO: 85019 - RNA, 22 nt, Homo sapiens
uuuagcaaugcuguggggaagu

SEQ ID NO: 85020 - RNA, 22 nt, Homo sapiens
aagcuggauuuaguguggagca

SEQ ID NO: 85021 - RNA, 22 nt, Homo sapiens
uggcaguuucacauggcucaac

SEQ ID NO: 85022 - RNA, 22 nt, Homo sapiens
gagagugugucagaggcugcga

SEQ ID NO: 85023 - RNA, 22 nt, Homo sapiens
aaagugcacuuggaagagggcc

SEQ ID NO: 85024 - RNA, 22 nt, Homo sapiens
uucuaaacaucuuacaaugcau

SEQ ID NO: 85025 - RNA, 22 nt, Homo sapiens
uuguaugucuucauuugaaaaa

SEQ ID NO: 85026 - RNA, 22 nt, Homo sapiens
agguagaguguuuuguucuucu

SEQ ID NO: 85027 - RNA, 22 nt, Homo sapiens
cacugcacuccagucccgucuc

SEQ ID NO: 85028 - RNA, 22 nt, Homo sapiens
gugcacaacgugcagguuuguu

SEQ ID NO: 85029 - RNA, 22 nt, Homo sapiens
ucucccauccguacacggauug

SEQ ID NO: 85030 - RNA, 20 nt, Homo sapiens
auucauggaggagcaauugg

SEQ ID NO: 85031 - RNA, 22 nt, Homo sapiens
acaucauugggggcuacaggug

SEQ ID NO: 85032 - RNA, 22 nt, Homo sapiens
gucuuuggaaagacaaaguuca

SEQ ID NO: 85033 - RNA, 21 nt, Homo sapiens
ucaacccuugcgucaccaagc

SEQ ID NO: 85034 - RNA, 22 nt, Homo sapiens
uugagcaaugucacugaggcuu

SEQ ID NO: 85035 - RNA, 22 nt, Homo sapiens
ggagcugugauuugaguccaga

SEQ ID NO: 85036 - RNA, 22 nt, Homo sapiens
uaucauaguuuggacuuucauu

SEQ ID NO: 85037 - RNA, 22 nt, Homo sapiens
auggcacagacucuuggucaag

SEQ ID NO: 85038 - RNA, 22 nt, Homo sapiens
uuagcaccacacacuuuagagg

SEQ ID NO: 85039 - RNA, 22 nt, Homo sapiens
aucugcaaagcugggcugagac

SEQ ID NO: 85040 - RNA, 22 nt, Homo sapiens
agugcaguggcacaaucuuggc

SEQ ID NO: 85041 - RNA, 23 nt, Homo sapiens
cccaguuaauccuuaaucuccac

SEQ ID NO: 85042 - RNA, 22 nt, Homo sapiens
auaugucuguuuagucuguaau

SEQ ID NO: 85043 - RNA, 22 nt, Homo sapiens
uggggcuuuuucuuguauucuc

SEQ ID NO: 85044 - RNA, 22 nt, Homo sapiens
augaccuuguccucagugucau

SEQ ID NO: 85045 - RNA, 22 nt, Homo sapiens
uugugaagaaaccagaaaaguu

SEQ ID NO: 85046 - RNA, 22 nt, Homo sapiens
uccaguacaggucucucauuuc

SEQ ID NO: 85047 - RNA, 18 nt, Homo sapiens
ucacaaccacagugcugu

SEQ ID NO: 85048 - RNA, 22 nt, Homo sapiens
aucaccugagcaguauacacug

SEQ ID NO: 85049 - RNA, 19 nt, Homo sapiens
uccuugauugcaccacugc

SEQ ID NO: 85050 - RNA, 22 nt, Homo sapiens
aaagcuacaggaccugcucauu

SEQ ID NO: 85051 - RNA, 22 nt, Homo sapiens
uaaugcacucgaaucauggaau

SEQ ID NO: 85052 - RNA, 22 nt, Homo sapiens
aaggagugugauucuucaguuu

SEQ ID NO: 85053 - RNA, 23 nt, Homo sapiens
cagugguguuagagaaaucuuuu

SEQ ID NO: 85054 - RNA, 22 nt, Homo sapiens
caaagucuauucuacccuuacc

SEQ ID NO: 85055 - RNA, 22 nt, Homo sapiens
augguacuccagagaagcagaa

SEQ ID NO: 85056 - RNA, 17 nt, Homo sapiens
uuuuggauuagaaaucc

SEQ ID NO: 85057 - RNA, 22 nt, Homo sapiens
cugagauaauuucuagguguca

SEQ ID NO: 85058 - RNA, 22 nt, Homo sapiens
guacaguuuucaguguucacug

SEQ ID NO: 85059 - RNA, 22 nt, Homo sapiens
uacugguuuuauauauuucucc

SEQ ID NO: 85060 - RNA, 22 nt, Homo sapiens
uguuacacugugcacuaaauuu

SEQ ID NO: 85061 - RNA, 22 nt, Homo sapiens
gagauucaucuagguccagaga

SEQ ID NO: 85062 - RNA, 22 nt, Homo sapiens
uggacugagauuucagcugcca

SEQ ID NO: 85063 - RNA, 22 nt, Homo sapiens
cucugcuuaaugucccacuuga

SEQ ID NO: 85064 - RNA, 22 nt, Homo sapiens
gaaucacagauuaugaguaucu

SEQ ID NO: 85065 - RNA, 22 nt, Homo sapiens
agaguaguuucuauauucuuca

SEQ ID NO: 85066 - RNA, 22 nt, Homo sapiens
augcagugugcaacagauuaag

SEQ ID NO: 85067 - RNA, 22 nt, Homo sapiens
ucucauggagucaggagcagaa

SEQ ID NO: 85068 - RNA, 22 nt, Homo sapiens
uugcacaauggaauuuaucuuu

SEQ ID NO: 85069 - RNA, 22 nt, Homo sapiens
gcauugcacuuggcauagacug

SEQ ID NO: 85070 - RNA, 22 nt, Homo sapiens
gcaagaaucugggaguaaaauu

SEQ ID NO: 85071 - RNA, 22 nt, Homo sapiens
cuugucacuguuggcuuuagaa

SEQ ID NO: 85072 - RNA, 22 nt, Homo sapiens
cucugacagugguuagcacugu

SEQ ID NO: 85073 - RNA, 22 nt, Homo sapiens
cacagcacaggcaugaguguca

SEQ ID NO: 85074 - RNA, 22 nt, Homo sapiens
aagugagaugcaguggaguucc

SEQ ID NO: 85075 - RNA, 22 nt, Homo sapiens
guggguaaaucucuggggcucu

SEQ ID NO: 85076 - RNA, 22 nt, Homo sapiens
uuucugugguccucuugaaggu

SEQ ID NO: 85077 - RNA, 22 nt, Homo sapiens
uuuuggcuuaaagagaauguau

SEQ ID NO: 85078 - RNA, 22 nt, Homo sapiens
uuggcaacauagugagaccccc

SEQ ID NO: 85079 - RNA, 20 nt, Homo sapiens
uuuaagacaugcugaauuga

SEQ ID NO: 85080 - RNA, 22 nt, Homo sapiens
uuagaaaguagaaaagcugguu

SEQ ID NO: 85081 - RNA, 22 nt, Homo sapiens
cuagccuggagugcaguggugc

SEQ ID NO: 85082 - RNA, 22 nt, Homo sapiens
uuggaagauuacuuaguuuucu

SEQ ID NO: 85083 - RNA, 22 nt, Homo sapiens
uguggcuuuguaaccauggguc

SEQ ID NO: 85084 - RNA, 22 nt, Homo sapiens
ugugccacugcacuccugccug

SEQ ID NO: 85085 - RNA, 22 nt, Homo sapiens
uggagcccuaguuccucauaac

SEQ ID NO: 85086 - RNA, 22 nt, Homo sapiens
cugaggguagaaggaucacuug

SEQ ID NO: 85087 - RNA, 22 nt, Homo sapiens
cuuuaugagguuggauggaucu

SEQ ID NO: 85088 - RNA, 22 nt, Homo sapiens
aaaugcagcacucaagugggaa

SEQ ID NO: 85089 - RNA, 22 nt, Homo sapiens
auagcagcaccucacucuacug

SEQ ID NO: 85090 - RNA, 22 nt, Homo sapiens
uugcuauguugcccagucugga

SEQ ID NO: 85091 - RNA, 20 nt, Homo sapiens
agcugcagauauaaauccgc

SEQ ID NO: 85092 - RNA, 22 nt, Homo sapiens
gcagugugugaggaauuugggu

SEQ ID NO: 85093 - RNA, 19 nt, Homo sapiens
uuuuccccuuucuuaagac

SEQ ID NO: 85094 - RNA, 22 nt, Homo sapiens
accugagauuacaggugcuggc

SEQ ID NO: 85095 - RNA, 22 nt, Homo sapiens
gugacagaguaagacccuguau

SEQ ID NO: 85096 - RNA, 22 nt, Homo sapiens
gugacacagcaagacuccgucu

SEQ ID NO: 85097 - RNA, 22 nt, Homo sapiens
uauuugauuaacaagagccuaa

SEQ ID NO: 85098 - RNA, 22 nt, Homo sapiens
uggccuguaacgcugucucagc

SEQ ID NO: 85099 - RNA, 22 nt, Homo sapiens
uccugagacucacaggcucccc

SEQ ID NO: 85100 - RNA, 22 nt, Homo sapiens
auacaugugugagcgaagaugu

SEQ ID NO: 85101 - RNA, 21 nt, Homo sapiens
ugagaugcaaucaccagggag

SEQ ID NO: 85102 - RNA, 22 nt, Homo sapiens
ggaaaguaacccauucucuuac

SEQ ID NO: 85103 - RNA, 22 nt, Homo sapiens
gagcacauguggagagucuggg

SEQ ID NO: 85104 - RNA, 22 nt, Homo sapiens
ugcagcauguaggcacguuauu

SEQ ID NO: 85105 - RNA, 22 nt, Homo sapiens
ucagauacuggugacaugaaug

SEQ ID NO: 85106 - RNA, 22 nt, Homo sapiens
acaguauaaugcuguagggaga

SEQ ID NO: 85107 - RNA, 22 nt, Homo sapiens
uuccuugagagcuugauaucac

SEQ ID NO: 85108 - RNA, 19 nt, Homo sapiens
acugagcuaccugggggca

SEQ ID NO: 85109 - RNA, 22 nt, Homo sapiens
uuucgugucuggucugugaugg

SEQ ID NO: 85110 - RNA, 22 nt, Homo sapiens
uuacaguagaugaggguauaau

SEQ ID NO: 85111 - RNA, 22 nt, Homo sapiens
guccauuuguuuccagagcacu

SEQ ID NO: 85112 - RNA, 22 nt, Homo sapiens
ccuuggcacuacugacauugua

SEQ ID NO: 85113 - RNA, 22 nt, Homo sapiens
ucaaaugcucuuugcagagagg

SEQ ID NO: 85114 - RNA, 22 nt, Homo sapiens
uugaaagacaucaccuacugcu

SEQ ID NO: 85115 - RNA, 22 nt, Homo sapiens
uuucacaguguucucccccaga

SEQ ID NO: 85116 - RNA, 22 nt, Homo sapiens
acaguagcgcaaucucggcuca

SEQ ID NO: 85117 - RNA, 22 nt, Homo sapiens
cacaaaguagauuagucuucca

SEQ ID NO: 85118 - RNA, 22 nt, Homo sapiens
uccuuuggguagcuguucagau

SEQ ID NO: 85119 - RNA, 22 nt, Homo sapiens
gagggcacugcuuuccuuucaa

SEQ ID NO: 85120 - RNA, 22 nt, Homo sapiens
cccucgagaaaccaucugcuga

SEQ ID NO: 85121 - RNA, 17 nt, Homo sapiens
ucucccaucccuuucuc

SEQ ID NO: 85122 - RNA, 22 nt, Homo sapiens
uuuuccagugggacucccauua

SEQ ID NO: 85123 - RNA, 19 nt, Homo sapiens
cugugcauuucuguggaag

SEQ ID NO: 85124 - RNA, 22 nt, Homo sapiens
aggguaguaggcuugggauugg

SEQ ID NO: 85125 - RNA, 22 nt, Homo sapiens
ucagggacgcuugacacaagcc

SEQ ID NO: 85126 - RNA, 22 nt, Homo sapiens
gcuuuggcauguagauguaugg

SEQ ID NO: 85127 - RNA, 22 nt, Homo sapiens
uugcagugguuucacuggcaaa

SEQ ID NO: 85128 - RNA, 22 nt, Homo sapiens
gagagcauuaagccaucaucau

SEQ ID NO: 85129 - RNA, 22 nt, Homo sapiens
uuugugcaugaagagggggugc

SEQ ID NO: 85130 - RNA, 22 nt, Homo sapiens
ucacagaugcuugacccauuuc

SEQ ID NO: 85131 - RNA, 22 nt, Homo sapiens
gucuuccagccuccaucuuucu

SEQ ID NO: 85132 - RNA, 22 nt, Homo sapiens
aauccugucuugccauccaaua

SEQ ID NO: 85133 - RNA, 22 nt, Homo sapiens
uugugaucuucagaaaguggcu

SEQ ID NO: 85134 - RNA, 22 nt, Homo sapiens
ggugagguaguaagguacaaua

SEQ ID NO: 85135 - RNA, 22 nt, Homo sapiens
gaaucacaguuauuagagcagc

SEQ ID NO: 85136 - RNA, 22 nt, Homo sapiens
agaucacagucuuugguuuuag

SEQ ID NO: 85137 - RNA, 22 nt, Homo sapiens
auacaguaaugucuuaggcugu

SEQ ID NO: 85138 - RNA, 22 nt, Homo sapiens
gucaccagcuguguuagccccu

SEQ ID NO: 85139 - RNA, 22 nt, Homo sapiens
ugauuuccaugagaacaugccu

SEQ ID NO: 85140 - RNA, 22 nt, Homo sapiens
acccuggaguaguaggaaucug

SEQ ID NO: 85141 - RNA, 22 nt, Homo sapiens
ugggaugaauacaaugggauca

SEQ ID NO: 85142 - RNA, 22 nt, Homo sapiens
gggguaguuacuguuguucuuu

SEQ ID NO: 85143 - RNA, 22 nt, Homo sapiens
ugugucacugaggguuagugua

SEQ ID NO: 85144 - RNA, 22 nt, Homo sapiens
ucuaagaauucauuuauaagcc

SEQ ID NO: 85145 - RNA, 21 nt, Homo sapiens
ggcaagugugagguuuggggu

SEQ ID NO: 85146 - RNA, 22 nt, Homo sapiens
caaaguaauuacgguuuuggcc

SEQ ID NO: 85147 - RNA, 22 nt, Homo sapiens
gauuggcauugcugcaccugag

SEQ ID NO: 85148 - RNA, 22 nt, Homo sapiens
aauacuggcacugaagaccaug

SEQ ID NO: 85149 - RNA, 20 nt, Homo sapiens
guggaaguagaaacauaugu

SEQ ID NO: 85150 - RNA, 22 nt, Homo sapiens
uuuccuguagggggcaaggccu

SEQ ID NO: 85151 - RNA, 21 nt, Homo sapiens
uagagagcaauaccuccagag

SEQ ID NO: 85152 - RNA, 22 nt, Homo sapiens
agcuucauuguuaugaauguca

SEQ ID NO: 85153 - RNA, 22 nt, Homo sapiens
uuuuugagaauuggugaaacac

SEQ ID NO: 85154 - RNA, 22 nt, Homo sapiens
uucuagcaauggcagagugucu

SEQ ID NO: 85155 - RNA, 22 nt, Homo sapiens
uggcuuuuauuauguugaggua

SEQ ID NO: 85156 - RNA, 22 nt, Homo sapiens
ugacuaaaacugaguuucauua

SEQ ID NO: 85157 - RNA, 22 nt, Homo sapiens
guuauguaucuugauugggugg

SEQ ID NO: 85158 - RNA, 22 nt, Homo sapiens
ucacauagcauaaugucugcaa

SEQ ID NO: 85159 - RNA, 22 nt, Homo sapiens
cucauggagauagagaauagaa

SEQ ID NO: 85160 - RNA, 22 nt, Homo sapiens
ugcauuagucuguucucacacu

SEQ ID NO: 85161 - RNA, 22 nt, Homo sapiens
uggcagcugcuucaugggaugc

SEQ ID NO: 85162 - RNA, 22 nt, Homo sapiens
uacaguagaaugucuuucaaaa

SEQ ID NO: 85163 - RNA, 22 nt, Homo sapiens
guggaucacuugaggucaagag

SEQ ID NO: 85164 - RNA, 17 nt, Homo sapiens
ucaaaugcucccaguga

SEQ ID NO: 85165 - RNA, 22 nt, Homo sapiens
ccucauggagaacaucugcuag

SEQ ID NO: 85166 - RNA, 22 nt, Homo sapiens
ggagaugauuaugaaucacuua

SEQ ID NO: 85167 - RNA, 22 nt, Homo sapiens
uaucauagucacuuccaguuug

SEQ ID NO: 85168 - RNA, 22 nt, Homo sapiens
gagauacacccagugcagaggc

SEQ ID NO: 85169 - RNA, 22 nt, Homo sapiens
auugcuuaagucccuguauuag

SEQ ID NO: 85170 - RNA, 22 nt, Homo sapiens
gugauaucacuguaucacucca

SEQ ID NO: 85171 - RNA, 22 nt, Homo sapiens
uugaggugaauuugcaggaugc

SEQ ID NO: 85172 - RNA, 22 nt, Homo sapiens
ugucuggaaggguggccuccug

SEQ ID NO: 85173 - RNA, 22 nt, Homo sapiens
augucuguuugcugagcccggc

SEQ ID NO: 85174 - RNA, 22 nt, Homo sapiens
gcaggcaugacauuucacucuu

SEQ ID NO: 85175 - RNA, 22 nt, Homo sapiens
uugaauggaauguuggaacuau

SEQ ID NO: 85176 - RNA, 22 nt, Homo sapiens
uugcuccccaggaaaggaagca

SEQ ID NO: 85177 - RNA, 22 nt, Homo sapiens
gagacugagucucacucuguca

SEQ ID NO: 85178 - RNA, 22 nt, Homo sapiens
cuuccauaguuacacccaggga

SEQ ID NO: 85179 - RNA, 22 nt, Homo sapiens
uuucuacagugaacgauuucua

SEQ ID NO: 85180 - RNA, 22 nt, Homo sapiens
uggugcuuaaauaaggcuuuca

SEQ ID NO: 85181 - RNA, 22 nt, Homo sapiens
auggcuguuucugcaaugucua

SEQ ID NO: 85182 - RNA, 22 nt, Homo sapiens
ccucuuuguugagacuucacca

SEQ ID NO: 85183 - RNA, 22 nt, Homo sapiens
cagauacuggaguccugaaguu

SEQ ID NO: 85184 - RNA, 22 nt, Homo sapiens
cccugagaaaacuuuguccuua

SEQ ID NO: 85185 - RNA, 22 nt, Homo sapiens
gacaccugguguggaacuggag

SEQ ID NO: 85186 - RNA, 22 nt, Homo sapiens
aacagugccugucauuuaguag

SEQ ID NO: 85187 - RNA, 22 nt, Homo sapiens
uucagcaaugacagccuauaua

SEQ ID NO: 85188 - RNA, 22 nt, Homo sapiens
uggcaggugcacuggcuuugaa

SEQ ID NO: 85189 - RNA, 22 nt, Homo sapiens
aucacauuuauaguggcacgca

SEQ ID NO: 85190 - RNA, 22 nt, Homo sapiens
cuacucuggagagugacaauca

SEQ ID NO: 85191 - RNA, 22 nt, Homo sapiens
uucuggccccucccaaucucau

SEQ ID NO: 85192 - RNA, 22 nt, Homo sapiens
cagugguuuuuagcuugcuggg

SEQ ID NO: 85193 - RNA, 22 nt, Homo sapiens
ggucugguguugaaauucuuca

SEQ ID NO: 85194 - RNA, 22 nt, Homo sapiens
ucugcauaucaugcagaacuau

SEQ ID NO: 85195 - RNA, 22 nt, Homo sapiens
cacuguggauggaacuauguga

SEQ ID NO: 85196 - RNA, 22 nt, Homo sapiens
cuguaaggcacuaagcauaugu

SEQ ID NO: 85197 - RNA, 23 nt, Homo sapiens
aaauuugccuauuauuccuaugg

SEQ ID NO: 85198 - RNA, 22 nt, Homo sapiens
uccaguuguuauuuuuauaaag

SEQ ID NO: 85199 - RNA, 22 nt, Homo sapiens
ugaugcugaugccugccagaag

SEQ ID NO: 85200 - RNA, 22 nt, Homo sapiens
gugcacaacgugcagguuaguu

SEQ ID NO: 85201 - RNA, 22 nt, Homo sapiens
gacucuguagacaaucacaucu

SEQ ID NO: 85202 - RNA, 22 nt, Homo sapiens
cauggcacaucuuuucugacua

SEQ ID NO: 85203 - RNA, 22 nt, Homo sapiens
ucugguggugaugagagacagu

SEQ ID NO: 85204 - RNA, 22 nt, Homo sapiens
aaucuguagaaggugcacauuc

SEQ ID NO: 85205 - RNA, 22 nt, Homo sapiens
ucauggggugagcuacaggcac

SEQ ID NO: 85206 - RNA, 22 nt, Homo sapiens
cucauugcaaucuccaccuccc

SEQ ID NO: 85207 - RNA, 22 nt, Homo sapiens
cuucuugcuguguccucacaug

SEQ ID NO: 85208 - RNA, 22 nt, Homo sapiens
uugguucucuuagccaucuuaa

SEQ ID NO: 85209 - RNA, 22 nt, Homo sapiens
aauccaugugcuuuaccauuuu

SEQ ID NO: 85210 - RNA, 18 nt, Homo sapiens
acagugucauggcucaau

SEQ ID NO: 85211 - RNA, 19 nt, Homo sapiens
ugcaaagucuuuuccuauu

SEQ ID NO: 85212 - RNA, 22 nt, Homo sapiens
augaaaacaugauuugccuguu

SEQ ID NO: 85213 - RNA, 22 nt, Homo sapiens
agagugcuauagauuagauuuc

SEQ ID NO: 85214 - RNA, 22 nt, Homo sapiens
cugaauagucaacgauggacug

SEQ ID NO: 85215 - RNA, 22 nt, Homo sapiens
ucuauggaguuugaaugagaaa

SEQ ID NO: 85216 - RNA, 22 nt, Homo sapiens
ugauggcacagugaguuccagg

SEQ ID NO: 85217 - RNA, 22 nt, Homo sapiens
ucacaugaauugucuuguucca

SEQ ID NO: 85218 - RNA, 22 nt, Homo sapiens
uggacuguaagugccuugagua

SEQ ID NO: 85219 - RNA, 22 nt, Homo sapiens
agaauucugucauguuuauauu

SEQ ID NO: 85220 - RNA, 22 nt, Homo sapiens
gcagugugauguuuuaaucuau

SEQ ID NO: 85221 - RNA, 22 nt, Homo sapiens
ugcagugugauuuucuggcuga

SEQ ID NO: 85222 - RNA, 22 nt, Homo sapiens
augugcacauucugguaaauau

SEQ ID NO: 85223 - RNA, 18 nt, Homo sapiens
acaucccaugcuggggug

SEQ ID NO: 85224 - RNA, 22 nt, Homo sapiens
guggguaaaucucuguucgagg

SEQ ID NO: 85225 - RNA, 22 nt, Homo sapiens
guagaagcacagggccuguauu

SEQ ID NO: 85226 - RNA, 22 nt, Homo sapiens
ugagagucauacaaauaaaaau

SEQ ID NO: 85227 - RNA, 22 nt, Homo sapiens
guacaguucucuuuguugucag

SEQ ID NO: 85228 - RNA, 23 nt, Homo sapiens
ggugaggaguacagagucuucau

SEQ ID NO: 85229 - RNA, 22 nt, Homo sapiens
ucaaguacugccuugcucuggc

SEQ ID NO: 85230 - RNA, 22 nt, Homo sapiens
augaagugcaugauaguugguu

SEQ ID NO: 85231 - RNA, 22 nt, Homo sapiens
uagaaguaggcuacgugucugg

SEQ ID NO: 85232 - RNA, 22 nt, Homo sapiens
uugugguugauacacguaggaa

SEQ ID NO: 85233 - RNA, 22 nt, Homo sapiens
gguggcuuuuugugauggcuga

SEQ ID NO: 85234 - RNA, 22 nt, Homo sapiens
ucacauggauuaacucauuuau

SEQ ID NO: 85235 - RNA, 18 nt, Homo sapiens
gugucugguuaugggagu

SEQ ID NO: 85236 - RNA, 22 nt, Homo sapiens
uggcagauaggauacaggacua

SEQ ID NO: 85237 - RNA, 22 nt, Homo sapiens
aucacagaacuuugagcagaga

SEQ ID NO: 85238 - RNA, 22 nt, Homo sapiens
gugaauugagagaacuguguua

SEQ ID NO: 85239 - RNA, 22 nt, Homo sapiens
aaaguggugugaguauguaucu

SEQ ID NO: 85240 - RNA, 22 nt, Homo sapiens
augucaaggugggugauaguuu

SEQ ID NO: 85241 - RNA, 22 nt, Homo sapiens
gugcacaacgugcaaguuuguu

SEQ ID NO: 85242 - RNA, 22 nt, Homo sapiens
ugaguuguugcauucuuggugu

SEQ ID NO: 85243 - RNA, 22 nt, Homo sapiens
gggcaugauggugcacacaugu

SEQ ID NO: 85244 - RNA, 22 nt, Homo sapiens
auuaaguugugccugaaaacuu

SEQ ID NO: 85245 - RNA, 22 nt, Homo sapiens
uuaaguaaucagagaagagaac

SEQ ID NO: 85246 - RNA, 18 nt, Homo sapiens
uuuuugaggcacagggga

SEQ ID NO: 85247 - RNA, 22 nt, Homo sapiens
auucaccauggaccaggggccu

SEQ ID NO: 85248 - RNA, 23 nt, Homo sapiens
ucaguacuccacuuucaauagug

SEQ ID NO: 85249 - RNA, 22 nt, Homo sapiens
uaacaccuuugauagcacuuuu

SEQ ID NO: 85250 - RNA, 22 nt, Homo sapiens
uggucaccugaauuaugcaugu

SEQ ID NO: 85251 - RNA, 22 nt, Homo sapiens
ugagcacagcgugugggagagc

SEQ ID NO: 85252 - RNA, 22 nt, Homo sapiens
aaaugcaccacucuggugcagg

SEQ ID NO: 85253 - RNA, 22 nt, Homo sapiens
cugaauguccaggcagagguuu

SEQ ID NO: 85254 - RNA, 18 nt, Homo sapiens
cuggaaggcuacuacagu

SEQ ID NO: 85255 - RNA, 22 nt, Homo sapiens
cuagcagacaugggcugaacca

SEQ ID NO: 85256 - RNA, 21 nt, Homo sapiens
uuaaguaauuacccaacucuc

SEQ ID NO: 85257 - RNA, 22 nt, Homo sapiens
auaacauggaguuugucauuua

SEQ ID NO: 85258 - RNA, 22 nt, Homo sapiens
uaucaaguuggaagagaaguaa

SEQ ID NO: 85259 - RNA, 22 nt, Homo sapiens
cauccccugcaccaaccuuuac

SEQ ID NO: 85260 - RNA, 22 nt, Homo sapiens
caaagugcuggccgggcgcagu

SEQ ID NO: 85261 - RNA, 22 nt, Homo sapiens
agaugguguuggcugaguguau

SEQ ID NO: 85262 - RNA, 22 nt, Homo sapiens
ugagugaggcugggcagucccu

SEQ ID NO: 85263 - RNA, 20 nt, Homo sapiens
cuuccaguggccccaucuuu

SEQ ID NO: 85264 - RNA, 22 nt, Homo sapiens
uggugcccuguccuucuguggc

SEQ ID NO: 85265 - RNA, 22 nt, Homo sapiens
uugaguauuggacugguaucuu

SEQ ID NO: 85266 - RNA, 22 nt, Homo sapiens
ugugcuauguuauucacauggg

SEQ ID NO: 85267 - RNA, 22 nt, Homo sapiens
auuuuuggauauagggaaggau

SEQ ID NO: 85268 - RNA, 19 nt, Homo sapiens
ggucauggagguuguguga

SEQ ID NO: 85269 - RNA, 22 nt, Homo sapiens
gggaugaauuagguauguuuau

SEQ ID NO: 85270 - RNA, 22 nt, Homo sapiens
uauaguguuuucaaaaguaugu

SEQ ID NO: 85271 - RNA, 22 nt, Homo sapiens
auggcagcugguuuuacccuag

SEQ ID NO: 85272 - RNA, 22 nt, Homo sapiens
gcaagaaugagaaggauuaauu

SEQ ID NO: 85273 - RNA, 22 nt, Homo sapiens
gucacauugaugcccauggugg

SEQ ID NO: 85274 - RNA, 19 nt, Homo sapiens
aguggguguuuucuguuug

SEQ ID NO: 85275 - RNA, 22 nt, Homo sapiens
ugggaagauucuguguuuuucc

SEQ ID NO: 85276 - RNA, 22 nt, Homo sapiens
uguuuuggagguccucacuaga

SEQ ID NO: 85277 - RNA, 22 nt, Homo sapiens
aucuacagccagucugguuugu

SEQ ID NO: 85278 - RNA, 22 nt, Homo sapiens
ggccggguggccauggcugccc

SEQ ID NO: 85279 - RNA, 22 nt, Homo sapiens
guggaaggucaugaauguucuu

SEQ ID NO: 85280 - RNA, 22 nt, Homo sapiens
ccucauggagaaccucugcuag

SEQ ID NO: 85281 - RNA, 22 nt, Homo sapiens
agugaauuguucaacaggagga

SEQ ID NO: 85282 - RNA, 19 nt, Homo sapiens
gugugcauaucacagagca

SEQ ID NO: 85283 - RNA, 22 nt, Homo sapiens
gugguuuuaauauucagucuag

SEQ ID NO: 85284 - RNA, 22 nt, Homo sapiens
gucucccagccuacaucuuucu

SEQ ID NO: 85285 - RNA, 22 nt, Homo sapiens
ugagucaugcuggagucauggc

SEQ ID NO: 85286 - RNA, 22 nt, Homo sapiens
auaaaguguuuaguauaggcaa

SEQ ID NO: 85287 - RNA, 20 nt, Homo sapiens
gaucaguuuggaguaagugc

SEQ ID NO: 85288 - RNA, 22 nt, Homo sapiens
uucagcaggccaggcccugacu

SEQ ID NO: 85289 - RNA, 22 nt, Homo sapiens
uggcaacaucuggggacauguu

SEQ ID NO: 85290 - RNA, 21 nt, Homo sapiens
ugcagccauucagcccuaugc

SEQ ID NO: 85291 - RNA, 20 nt, Homo sapiens
acacuggaguaucaaggccc

SEQ ID NO: 85292 - RNA, 22 nt, Homo sapiens
guuauuguccauuuauuuagca

SEQ ID NO: 85293 - RNA, 22 nt, Homo sapiens
gagguagugagcagcugaacua

SEQ ID NO: 85294 - RNA, 22 nt, Homo sapiens
ugacacauguagacaucuggug

SEQ ID NO: 85295 - RNA, 20 nt, Homo sapiens
aaacucugucuucuuuauca

SEQ ID NO: 85296 - RNA, 22 nt, Homo sapiens
ccaaguguuuucauuguuccau

SEQ ID NO: 85297 - RNA, 22 nt, Homo sapiens
ucuuuguucaggagccaacucc

SEQ ID NO: 85298 - RNA, 22 nt, Homo sapiens
gagugcuguuagcccuggguuu

SEQ ID NO: 85299 - RNA, 22 nt, Homo sapiens
aaugacuaagaugguacauuuu

SEQ ID NO: 85300 - RNA, 22 nt, Homo sapiens
uuccauguugauacgugaaguu

SEQ ID NO: 85301 - RNA, 22 nt, Homo sapiens
caugucuuuuauucugugugau

SEQ ID NO: 85302 - RNA, 22 nt, Homo sapiens
aagcucauugcucugguuuuaa

SEQ ID NO: 85303 - RNA, 22 nt, Homo sapiens
cauggguuuucucaaguaguca

SEQ ID NO: 85304 - RNA, 22 nt, Homo sapiens
aaagggcacugugcuuuggcaa

SEQ ID NO: 85305 - RNA, 22 nt, Homo sapiens
cagagaacugaguuauuuucuu

SEQ ID NO: 85306 - RNA, 22 nt, Homo sapiens
gauuccauuuguggcuauuuac

SEQ ID NO: 85307 - RNA, 22 nt, Homo sapiens
cucugagccugagguuccuacu

SEQ ID NO: 85308 - RNA, 22 nt, Homo sapiens
auacaguaucuucuggcaagca

SEQ ID NO: 85309 - RNA, 18 nt, Homo sapiens
ucaagcaauugucaugcc

SEQ ID NO: 85310 - RNA, 22 nt, Homo sapiens
gugguuuuaucccagaaauuaa

SEQ ID NO: 85311 - RNA, 22 nt, Homo sapiens
agacuagacagaugaacagcac

SEQ ID NO: 85312 - RNA, 22 nt, Homo sapiens
gcugagcuaugccauauaugcc

SEQ ID NO: 85313 - RNA, 22 nt, Homo sapiens
ugagcagugagugugcugcagg

SEQ ID NO: 85314 - RNA, 22 nt, Homo sapiens
ugugcaguuuuagcguauuuua

SEQ ID NO: 85315 - RNA, 22 nt, Homo sapiens
gugugaacaucauagaguguau

SEQ ID NO: 85316 - RNA, 22 nt, Homo sapiens
uagagguucuaagauucucaga

SEQ ID NO: 85317 - RNA, 22 nt, Homo sapiens
guagaagcacaggugaguuggu

SEQ ID NO: 85318 - RNA, 22 nt, Homo sapiens
ucacacgugaacucaucacaga

SEQ ID NO: 85319 - RNA, 22 nt, Homo sapiens
guucaucaggaauauuggccua

SEQ ID NO: 85320 - RNA, 22 nt, Homo sapiens
acacugucaugucucacaggca

SEQ ID NO: 85321 - RNA, 22 nt, Homo sapiens
uaugcacaugcaugcuugaaua

SEQ ID NO: 85322 - RNA, 19 nt, Homo sapiens
cuugccccauucauccucu

SEQ ID NO: 85323 - RNA, 22 nt, Homo sapiens
augaguaugagaauacauuaag

SEQ ID NO: 85324 - RNA, 22 nt, Homo sapiens
acacuggaggagagcuguugcu

SEQ ID NO: 85325 - RNA, 22 nt, Homo sapiens
ugacugucuagauagagcuugg

SEQ ID NO: 85326 - RNA, 22 nt, Homo sapiens
gugcaguguuugcauggaauca

SEQ ID NO: 85327 - RNA, 22 nt, Homo sapiens
guguguaaauggcagugagcuc

SEQ ID NO: 85328 - RNA, 22 nt, Homo sapiens
agacccuguauguguuuaguuu

SEQ ID NO: 85329 - RNA, 22 nt, Homo sapiens
cagagguauugcaaaagccuag

SEQ ID NO: 85330 - RNA, 22 nt, Homo sapiens
uugugcacauguacccuagaac

SEQ ID NO: 85331 - RNA, 22 nt, Homo sapiens
agaguaguuuauuaugcuaagg

SEQ ID NO: 85332 - RNA, 17 nt, Homo sapiens
ugacagaaacuuguugu

SEQ ID NO: 85333 - RNA, 22 nt, Homo sapiens
uaauacuguaauggugguuccg

SEQ ID NO: 85334 - RNA, 22 nt, Homo sapiens
augaccaugauccuugccgacc

SEQ ID NO: 85335 - RNA, 22 nt, Homo sapiens
cugagguaggcccugagaauau

SEQ ID NO: 85336 - RNA, 22 nt, Homo sapiens
gccuagagaguuaucaggcugu

SEQ ID NO: 85337 - RNA, 21 nt, Homo sapiens
agagucaucucuaucuguacc

SEQ ID NO: 85338 - RNA, 22 nt, Homo sapiens
cugaauagagcacacugauggg

SEQ ID NO: 85339 - RNA, 17 nt, Homo sapiens
gagguaguuuacuuuca

SEQ ID NO: 85340 - RNA, 22 nt, Homo sapiens
uguauguaaagacaggauaaca

SEQ ID NO: 85341 - RNA, 22 nt, Homo sapiens
agcagugucauuuucuggugag

SEQ ID NO: 85342 - RNA, 22 nt, Homo sapiens
ucucauggagguagagaguaaa

SEQ ID NO: 85343 - RNA, 22 nt, Homo sapiens
auggcagcugacacuuccgucu

SEQ ID NO: 85344 - RNA, 18 nt, Homo sapiens
uuagguaggucuuugugu

SEQ ID NO: 85345 - RNA, 22 nt, Homo sapiens
uugcacucuccagccucggcaa

SEQ ID NO: 85346 - RNA, 22 nt, Homo sapiens
auugcacucuagccuuggcgac

SEQ ID NO: 85347 - RNA, 22 nt, Homo sapiens
auugcacuccagccugggcgac

SEQ ID NO: 85348 - RNA, 22 nt, Homo sapiens
cuuugguugugcucuccacuuu

SEQ ID NO: 85349 - RNA, 22 nt, Homo sapiens
ugagacggaguuucacucuugu

SEQ ID NO: 85350 - RNA, 22 nt, Homo sapiens
cacccagucaucuuggguuuuu

SEQ ID NO: 85351 - RNA, 22 nt, Homo sapiens
cacccaguaagcaugaggcccu

SEQ ID NO: 85352 - RNA, 19 nt, Homo sapiens
ccuuugguuuccaugacau

SEQ ID NO: 85353 - RNA, 22 nt, Homo sapiens
uuugcacuugaaaacacucuca

SEQ ID NO: 85354 - RNA, 22 nt, Homo sapiens
uugcacucugaagaccuacugu

SEQ ID NO: 85355 - RNA, 18 nt, Homo sapiens
uugcacuccugccugggu

SEQ ID NO: 85356 - RNA, 22 nt, Homo sapiens
ucucaaccucccaaguagcugg

SEQ ID NO: 85357 - RNA, 22 nt, Homo sapiens
ucccagucuagagccggauugg

SEQ ID NO: 85358 - RNA, 22 nt, Homo sapiens
cauugcacucuagccucggcaa

SEQ ID NO: 85359 - RNA, 22 nt, Homo sapiens
ugacuauaguuuucuugacaca

SEQ ID NO: 85360 - RNA, 22 nt, Homo sapiens
ucaccggcagacguggccugau

SEQ ID NO: 85361 - RNA, 22 nt, Homo sapiens
auggcagcaccccacucuacug

SEQ ID NO: 85362 - RNA, 22 nt, Homo sapiens
acccugucauccacauggugcu

SEQ ID NO: 85363 - RNA, 22 nt, Homo sapiens
acccaguaacauaugggaggga

SEQ ID NO: 85364 - RNA, 22 nt, Homo sapiens
cuuuguguaggugccucuggcu

SEQ ID NO: 85365 - RNA, 22 nt, Homo sapiens
uaggcuuuuggacccugucucu

SEQ ID NO: 85366 - RNA, 22 nt, Homo sapiens
uacccaguaacaaguauuuugg

SEQ ID NO: 85367 - RNA, 22 nt, Homo sapiens
ugacuauaguaaucacuucaca

SEQ ID NO: 85368 - RNA, 22 nt, Murray Valley encephalitis virus
acagcuuggaugguguugcgag

SEQ ID NO: 85369 - RNA, 22 nt, Homo sapiens
aaccuauaguauugaaaucaag

SEQ ID NO: 85370 - RNA, 22 nt, Homo sapiens
aagcaucacauaauggaucaug

SEQ ID NO: 85371 - RNA, 19 nt, Homo sapiens
augccucaguuuuguacuu

SEQ ID NO: 85372 - RNA, 22 nt, Homo sapiens
augcaaaucuuaaguaugugug

SEQ ID NO: 85373 - RNA, 22 nt, Homo sapiens
augcaagaaauaucucuuuuuc

SEQ ID NO: 85374 - RNA, 22 nt, Homo sapiens
auaugacuuuccucuacuuccu

SEQ ID NO: 85375 - RNA, 22 nt, Homo sapiens
auaugacugccagggcccaguc

SEQ ID NO: 85376 - RNA, 22 nt, Homo sapiens
aucucaaugcuuuuguaggcca

SEQ ID NO: 85377 - RNA, 22 nt, Homo sapiens
agcagagcauauucauucgggg

SEQ ID NO: 85378 - RNA, 22 nt, Homo sapiens
aauuaguaaccuaauuccaucu

SEQ ID NO: 85379 - RNA, 22 nt, Homo sapiens
uccauuuguagguagugagaca

SEQ ID NO: 85380 - RNA, 22 nt, Homo sapiens
uccaguuguuauuuuuauaaag

SEQ ID NO: 85381 - RNA, 18 nt, Homo sapiens
ugaauaguguccccauga

SEQ ID NO: 85382 - RNA, 22 nt, Homo sapiens
ugacauguagagaacuucucau

SEQ ID NO: 85383 - RNA, 22 nt, Homo sapiens
uggagagcaaaaucaauccaaa

SEQ ID NO: 85384 - RNA, 22 nt, Homo sapiens
ugauccagugcucaguuggagu

SEQ ID NO: 85385 - RNA, 22 nt, Homo sapiens
ugauggccuguucuccauaugu

SEQ ID NO: 85386 - RNA, 22 nt, Homo sapiens
uugcacaauggaauuuaucuuu

SEQ ID NO: 85387 - RNA, 22 nt, Homo sapiens
uugauuagugacuggcuacacg

SEQ ID NO: 85388 - RNA, 22 nt, Homo sapiens
uugauugacaugucucuguuca

SEQ ID NO: 85389 - RNA, 22 nt, Homo sapiens
uuuggcuuuuguaauaacugcc

SEQ ID NO: 85390 - RNA, 22 nt, Homo sapiens
ugugguagugcuuaccugcagu

SEQ ID NO: 85391 - RNA, 18 nt, Homo sapiens
cucaaccucaugcagggc

SEQ ID NO: 85392 - RNA, 22 nt, Homo sapiens
cccacaguggccucauauccuu

SEQ ID NO: 85393 - RNA, 22 nt, Homo sapiens
gaauacugacuauuucaucugg

SEQ ID NO: 85394 - RNA, 22 nt, Homo sapiens
gggucauggaugugaagcuaga

SEQ ID NO: 85395 - RNA, 22 nt, Homo sapiens
ggaaaguaacccauucucuuac

SEQ ID NO: 85396 - RNA, 22 nt, Homo sapiens
uaugaagccaggauuuauuauu

SEQ ID NO: 85397 - RNA, 22 nt, Homo sapiens
uaugacuguuugcucauucagg

SEQ ID NO: 85398 - RNA, 22 nt, Homo sapiens
uaugaugcuguuuagaaucucu

SEQ ID NO: 85399 - RNA, 22 nt, Homo sapiens
uaagugaauauggacaguuagc

SEQ ID NO: 85400 - RNA, 22 nt, Homo sapiens
ugauccccucacauuauuauau

SEQ ID NO: 85401 - RNA, 22 nt, Homo sapiens
ugcaagaaacauauuccacaag

SEQ ID NO: 85402 - RNA, 20 nt, Homo sapiens
ugccaagaugacuauagcuc

SEQ ID NO: 85403 - RNA, 22 nt, Homo sapiens
ugaaucauuucuugucuucagu

SEQ ID NO: 85404 - RNA, 22 nt, Homo sapiens
ugaauauguuaauuagcaucau

SEQ ID NO: 85405 - RNA, 22 nt, Homo sapiens
ucaguaaaugcuguucucuuuu

SEQ ID NO: 85406 - RNA, 22 nt, Homo sapiens
uaaaccuagcauuuugcauaug

SEQ ID NO: 85407 - RNA, 22 nt, Homo sapiens
cugcaauggagaaagugagacu

SEQ ID NO: 85408 - RNA, 22 nt, Homo sapiens
cuagauuauccaacuuauuagc

SEQ ID NO: 85409 - RNA, 22 nt, Homo sapiens
cuggagcaaaggugacucuugu

SEQ ID NO: 85410 - RNA, 22 nt, Homo sapiens
cacagcacaggcaugaguguca

SEQ ID NO: 85411 - RNA, 22 nt, Homo sapiens
caaaggauucauuuccaggagu

SEQ ID NO: 85412 - RNA, 22 nt, Homo sapiens
auguggaaagcagcaugauaug

SEQ ID NO: 85413 - RNA, 21 nt, Homo sapiens
caucaaauugucauggugggu

SEQ ID NO: 85414 - RNA, 22 nt, Homo sapiens
caucagauugagaucaucuaag

SEQ ID NO: 85415 - RNA, 22 nt, Homo sapiens
aaguaaacauuuuguacaauaa

SEQ ID NO: 85416 - RNA, 23 nt, Homo sapiens
agcaaaugcucuagcacuccaac

SEQ ID NO: 85417 - RNA, 22 nt, Homo sapiens
auaugguguuugcuauucagcu

SEQ ID NO: 85418 - RNA, 22 nt, Homo sapiens
aucugcaaagcugggcugagac

SEQ ID NO: 85419 - RNA, 22 nt, Homo sapiens
augacauagaagcaauccccua

SEQ ID NO: 85420 - RNA, 22 nt, Homo sapiens
augcuggugguucacaugcgca

SEQ ID NO: 85421 - RNA, 22 nt, Homo sapiens
ugucaaaugcagugauauuuga

SEQ ID NO: 85422 - RNA, 22 nt, Homo sapiens
uguauauguuuguacauauguc

SEQ ID NO: 85423 - RNA, 22 nt, Homo sapiens
uuaagugaauuaucuaacaugu

SEQ ID NO: 85424 - RNA, 20 nt, Homo sapiens
uuuuggcuuaaagcagucug

SEQ ID NO: 85425 - RNA, 22 nt, Homo sapiens
uuuuggcuuaaagagaauguau

SEQ ID NO: 85426 - RNA, 22 nt, Homo sapiens
uguaaaccauauauguauguag

SEQ ID NO: 85427 - RNA, 21 nt, Homo sapiens
uguauauguuuauacacacac

SEQ ID NO: 85428 - RNA, 22 nt, Homo sapiens
ugucagaaucugagacgacaac

SEQ ID NO: 85429 - RNA, 22 nt, Homo sapiens
ugcaaauguuauuuugguuucu

SEQ ID NO: 85430 - RNA, 22 nt, Homo sapiens
uugaaauguuuagaaguuugga

SEQ ID NO: 85431 - RNA, 22 nt, Homo sapiens
uugaaauguguaagcuccgaaa

SEQ ID NO: 85432 - RNA, 22 nt, Homo sapiens
uuuuggcucuugguaggucaga

SEQ ID NO: 85433 - RNA, 22 nt, Homo sapiens
aagaugauguuguguuuucacu

SEQ ID NO: 85434 - RNA, 22 nt, Homo sapiens
aagaugauguucuuuuucuuag

SEQ ID NO: 85435 - RNA, 22 nt, Homo sapiens
uagauuauccggcugggacaau

SEQ ID NO: 85436 - RNA, 19 nt, Homo sapiens
ucaccuugcccugcacaca

SEQ ID NO: 85437 - RNA, 22 nt, Homo sapiens
ucaaauuccaagucuagguagg

SEQ ID NO: 85438 - RNA, 22 nt, Homo sapiens
uaacaccuugcucugucaauaa

SEQ ID NO: 85439 - RNA, 22 nt, Homo sapiens
uaaaugacugucaguagaugaa

SEQ ID NO: 85440 - RNA, 22 nt, Homo sapiens
gagcacugaauacugugguggu

SEQ ID NO: 85441 - RNA, 22 nt, Homo sapiens
gagugcaauggcaugaucuggg

SEQ ID NO: 85442 - RNA, 22 nt, Homo sapiens
cagcaaaucauccuauuugagc

SEQ ID NO: 85443 - RNA, 22 nt, Homo sapiens
caguaaauaucugagcgagguc

SEQ ID NO: 85444 - RNA, 22 nt, Homo sapiens
auuaaauguuggacguauacau

SEQ ID NO: 85445 - RNA, 22 nt, Homo sapiens
auugcacuccagccuugggcaa

SEQ ID NO: 85446 - RNA, 22 nt, Homo sapiens
aucacaggucaaaucauuauuu

SEQ ID NO: 85447 - RNA, 20 nt, Homo sapiens
augaauguccuugauggcau

SEQ ID NO: 85448 - RNA, 22 nt, Homo sapiens
aaauucauuucagcucugggua

SEQ ID NO: 85449 - RNA, 22 nt, Homo sapiens
aaucucaacacuuugggaggcu

SEQ ID NO: 85450 - RNA, 22 nt, Homo sapiens
aaugacuaagaugguacauuuu

SEQ ID NO: 85451 - RNA, 22 nt, Homo sapiens
ugcauauguucaaaguauucug

SEQ ID NO: 85452 - RNA, 22 nt, Homo sapiens
ugcauauguugaaccagccuug

SEQ ID NO: 85453 - RNA, 18 nt, Homo sapiens
ugcauauguugaaccagc

SEQ ID NO: 85454 - RNA, 22 nt, Homo sapiens
uggaagcaugcaaucugugggg

SEQ ID NO: 85455 - RNA, 22 nt, Homo sapiens
uggcaaauauuuuguuuuguaa

SEQ ID NO: 85456 - RNA, 22 nt, Homo sapiens
ggcaaauucuuguaugccuacu

SEQ ID NO: 85457 - RNA, 22 nt, Homo sapiens
uagcagcauaaauggacuaaga

SEQ ID NO: 85458 - RNA, 22 nt, Homo sapiens
uaugcccauuuaaauugaacaa

SEQ ID NO: 85459 - RNA, 22 nt, Homo sapiens
uaugaugcugagguuuggagug

SEQ ID NO: 85460 - RNA, 22 nt, Homo sapiens
uaaauggauaaaugaauaccua

SEQ ID NO: 85461 - RNA, 22 nt, Homo sapiens
cauugcaaugaggucuugcagu

SEQ ID NO: 85462 - RNA, 20 nt, Homo sapiens
auugaagacuccggggcaga

SEQ ID NO: 85463 - RNA, 22 nt, Homo sapiens
gaauagugcugcaaugaacaua

SEQ ID NO: 85464 - RNA, 22 nt, Homo sapiens
gaauagugcugcagcaaacaua

SEQ ID NO: 85465 - RNA, 22 nt, Homo sapiens
gaugaugcuagguguuagggcu

SEQ ID NO: 85466 - RNA, 22 nt, Homo sapiens
agcagcauggguauaaaucucc

SEQ ID NO: 85467 - RNA, 22 nt, Homo sapiens
acauaugaguacaugugccaug

SEQ ID NO: 85468 - RNA, 20 nt, Homo sapiens
acagcacugguuucaagcaa

SEQ ID NO: 85469 - RNA, 22 nt, Homo sapiens
auaaaccuacauuuucacuucu

SEQ ID NO: 85470 - RNA, 22 nt, Homo sapiens
auauaugcacacgugugcauau

SEQ ID NO: 85471 - RNA, 22 nt, Homo sapiens
aucaaaugcuggcagagugccu

SEQ ID NO: 85472 - RNA, 22 nt, Homo sapiens
aucaaagugaauuaaugagaau

SEQ ID NO: 85473 - RNA, 22 nt, Homo sapiens
auggaagcauaguauucuauug

SEQ ID NO: 85474 - RNA, 22 nt, Homo sapiens
auggaucauauucuugaggagg

SEQ ID NO: 85475 - RNA, 22 nt, Homo sapiens
augaaguauuaggacacauuua

SEQ ID NO: 85476 - RNA, 22 nt, Homo sapiens
augcauauuccugggccucacu

SEQ ID NO: 85477 - RNA, 22 nt, Homo sapiens
augaguaugagaauacauuaag

SEQ ID NO: 85478 - RNA, 22 nt, Homo sapiens
uuuggcuuugagaagcagugga

SEQ ID NO: 85479 - RNA, 22 nt, Homo sapiens
uuaaaccugucuucucacuaau

SEQ ID NO: 85480 - RNA, 22 nt, Homo sapiens
uuaaagccauaccugagagagu

SEQ ID NO: 85481 - RNA, 22 nt, Homo sapiens
uuaaagcuggcguuacaguuug

SEQ ID NO: 85482 - RNA, 21 nt, Homo sapiens
uguuuuugcuguguaucucuc

SEQ ID NO: 85483 - RNA, 18 nt, Homo sapiens
uguugguguucacucacu

SEQ ID NO: 85484 - RNA, 22 nt, Homo sapiens
uguuucuacugucucuguagua

SEQ ID NO: 85485 - RNA, 21 nt, Homo sapiens
augaauguaaagaauguggga

SEQ ID NO: 85486 - RNA, 22 nt, Homo sapiens
augaauguaaagaaugugggaa

SEQ ID NO: 85487 - RNA, 22 nt, Homo sapiens
auauaccuaggcuacaugguuu

SEQ ID NO: 85488 - RNA, 22 nt, Homo sapiens
auaauguuuauccagaggaguu

SEQ ID NO: 85489 - RNA, 22 nt, Homo sapiens
accugguuuuaacauuguauua

SEQ ID NO: 85490 - RNA, 22 nt, Homo sapiens
cucugagguuauucguaauauu

SEQ ID NO: 85491 - RNA, 22 nt, Homo sapiens
cccauuguuaaguugaguaucu

SEQ ID NO: 85492 - RNA, 22 nt, Homo sapiens
uagcaguagacagacuuuggcu

SEQ ID NO: 85493 - RNA, 22 nt, Homo sapiens
guauacuucugaaaauagcuau

SEQ ID NO: 85494 - RNA, 22 nt, Homo sapiens
guguccucgaguacacaucagg

SEQ ID NO: 85495 - RNA, 20 nt, Homo sapiens
augaccuauggugguauaag

SEQ ID NO: 85496 - RNA, 22 nt, Homo sapiens
aucaccugagcaguauacacug

SEQ ID NO: 85497 - RNA, 20 nt, Homo sapiens
agcugguuuuaugaaucuuu

SEQ ID NO: 85498 - RNA, 22 nt, Homo sapiens
cuuuguaugucaugacaacugu

SEQ ID NO: 85499 - RNA, 22 nt, Homo sapiens
uaccuaguguugacuucucuuc

SEQ ID NO: 85500 - RNA, 22 nt, Homo sapiens
uuaccuguguuuugggcccaga

SEQ ID NO: 85501 - RNA, 22 nt, Homo sapiens
uuaaugugaaucaggaugcauu

SEQ ID NO: 85502 - RNA, 22 nt, Homo sapiens
uuugcacuuuaauauaauguga

SEQ ID NO: 85503 - RNA, 17 nt, Homo sapiens
uuuuggauuagaaaucc

SEQ ID NO: 85504 - RNA, 22 nt, Homo sapiens
uuaccucuguggcucucggacu

SEQ ID NO: 85505 - RNA, 22 nt, Homo sapiens
uuauuacuccuauuuuguagau

SEQ ID NO: 85506 - RNA, 22 nt, Homo sapiens
auacccauacauauuggugacu

SEQ ID NO: 85507 - RNA, 22 nt, Homo sapiens
auaccugguagucuugcuacac

SEQ ID NO: 85508 - RNA, 22 nt, Homo sapiens
auacaguauggagggcccagcu

SEQ ID NO: 85509 - RNA, 22 nt, Homo sapiens
acccauacacacauauuuaugu

SEQ ID NO: 85510 - RNA, 22 nt, Homo sapiens
aauaaugucacaggggguuagc

SEQ ID NO: 85511 - RNA, 22 nt, Homo sapiens
cuguaaggcacuaagcauaugu

SEQ ID NO: 85512 - RNA, 22 nt, Homo sapiens
cugauugugcagagguguaauu

SEQ ID NO: 85513 - RNA, 18 nt, Homo sapiens
uaacuggugugagauggu

SEQ ID NO: 85514 - RNA, 22 nt, Homo sapiens
gugaccucauuacggggccugc

SEQ ID NO: 85515 - RNA, 22 nt, Homo sapiens
uggauaguaauaaacauauagg

SEQ ID NO: 85516 - RNA, 22 nt, Homo sapiens
uaaugugaauagugcuguaaug

SEQ ID NO: 85517 - RNA, 22 nt, Homo sapiens
uacaguauuaugagugauugaa

SEQ ID NO: 85518 - RNA, 22 nt, Homo sapiens
uaucaccuugcaguggaugcua

SEQ ID NO: 85519 - RNA, 21 nt, Homo sapiens
uauaccuagaagagggauugc

SEQ ID NO: 85520 - RNA, 22 nt, Homo sapiens
gggagcacaagaaauguuucau

SEQ ID NO: 85521 - RNA, 22 nt, Homo sapiens
guaccuguauguucauuucaca

SEQ ID NO: 85522 - RNA, 22 nt, Homo sapiens
gauauuacuuccaauauugcaa

SEQ ID NO: 85523 - RNA, 22 nt, Homo sapiens
ccuguguuaugguuucuaaugu

SEQ ID NO: 85524 - RNA, 22 nt, Homo sapiens
cucugguucugcagugcacccu

SEQ ID NO: 85525 - RNA, 20 nt, Homo sapiens
cucugguugugaauugucuu

SEQ ID NO: 85526 - RNA, 22 nt, Homo sapiens
ugccuacugagacuggguggcc

SEQ ID NO: 85527 - RNA, 22 nt, Homo sapiens
auaccuuguagugcuauuugau

SEQ ID NO: 85528 - RNA, 19 nt, Homo sapiens
auaccucugugaaccccug

SEQ ID NO: 85529 - RNA, 22 nt, Homo sapiens
auacaugugccauguugguaug

SEQ ID NO: 85530 - RNA, 22 nt, Homo sapiens
auaaugcuggaacuagagggca

SEQ ID NO: 85531 - RNA, 22 nt, Homo sapiens
augugccauucucauggcgcuu

SEQ ID NO: 85532 - RNA, 22 nt, Homo sapiens
aucccugaggaauuucugcacu

SEQ ID NO: 85533 - RNA, 22 nt, Homo sapiens
acacuugcuugcaauagccucc

SEQ ID NO: 85534 - RNA, 22 nt, Homo sapiens
ugugucuuguuuauagcuuucu

SEQ ID NO: 85535 - RNA, 22 nt, Homo sapiens
uucugcuugaucuaguguguug

SEQ ID NO: 85536 - RNA, 18 nt, Homo sapiens
uuuggcuguucaugacuc

SEQ ID NO: 85537 - RNA, 22 nt, Homo sapiens
cucugcuuaaugucccacuuga

SEQ ID NO: 85538 - RNA, 22 nt, Homo sapiens
gcugcuuuugaugacaaaaaca

SEQ ID NO: 85539 - RNA, 22 nt, Homo sapiens
cuuucugaggagaauagagaac

SEQ ID NO: 85540 - RNA, 22 nt, Homo sapiens
ggcuguguguuaaaauaggcuu

SEQ ID NO: 85541 - RNA, 22 nt, Homo sapiens
gugucuccuguggagcuaugua

SEQ ID NO: 85542 - RNA, 22 nt, Homo sapiens
gugucuccugccuucaugcagc

SEQ ID NO: 85543 - RNA, 16 nt, Homo sapiens
gugcuguguuguuagg

SEQ ID NO: 85544 - RNA, 22 nt, Homo sapiens
uacucugcagagaugcauaaca

SEQ ID NO: 85545 - RNA, 22 nt, Homo sapiens
uacucugcaguaauuccagccc

SEQ ID NO: 85546 - RNA, 22 nt, Homo sapiens
ucugacucugugaugggcccaa

SEQ ID NO: 85547 - RNA, 16 nt, Homo sapiens
uacauuuguuacaugg

SEQ ID NO: 85548 - RNA, 22 nt, Homo sapiens
cugaucuguuauacuuuucuau

SEQ ID NO: 85549 - RNA, 22 nt, Homo sapiens
cugucaucauuucuaugugcca

SEQ ID NO: 85550 - RNA, 22 nt, Homo sapiens
augugucaaaucuaggccaaag

SEQ ID NO: 85551 - RNA, 19 nt, Homo sapiens
agcuguguugccugugaga

SEQ ID NO: 85552 - RNA, 22 nt, Homo sapiens
agcuguguugucugaagucaga

SEQ ID NO: 85553 - RNA, 18 nt, Homo sapiens
augacucuggguguuccu

SEQ ID NO: 85554 - RNA, 22 nt, Homo sapiens
aucucugagauguucugauuuu

SEQ ID NO: 85555 - RNA, 22 nt, Homo sapiens
aucgcugagaaagggacuuuca

SEQ ID NO: 85556 - RNA, 22 nt, Homo sapiens
uguguaauaccuuugacuauau

SEQ ID NO: 85557 - RNA, 22 nt, Homo sapiens
uugugucaaauggcaauuagca

SEQ ID NO: 85558 - RNA, 22 nt, Homo sapiens
uugauaacauucugcauccuau

SEQ ID NO: 85559 - RNA, 22 nt, Homo sapiens
ugcuguguugcuggcuuaaaga

SEQ ID NO: 85560 - RNA, 22 nt, Homo sapiens
ugcuggugauuaaauccugaag

SEQ ID NO: 85561 - RNA, 22 nt, Homo sapiens
ucugacucuggagucucagguu

SEQ ID NO: 85562 - RNA, 22 nt, Homo sapiens
uauccugaagcuuuauuuaagu

SEQ ID NO: 85563 - RNA, 22 nt, Homo sapiens
ggcagguaaggagugggagccu

SEQ ID NO: 85564 - RNA, 22 nt, Homo sapiens
cuagcuuuugauguaaagugag

SEQ ID NO: 85565 - RNA, 22 nt, Homo sapiens
agcugugucuucuuaaagauuu

SEQ ID NO: 85566 - RNA, 23 nt, Homo sapiens
aguggucuccugggcccagcugu

SEQ ID NO: 85567 - RNA, 21 nt, Homo sapiens
gugaucaugucacugcacucc

SEQ ID NO: 85568 - RNA, 22 nt, Homo sapiens
uaacaaugucuuaugggcuuaa

SEQ ID NO: 85569 - RNA, 22 nt, Homo sapiens
uacucugcagccauaaaacaga

SEQ ID NO: 85570 - RNA, 20 nt, Homo sapiens
ugccugacacucuuugcuuc

SEQ ID NO: 85571 - RNA, 22 nt, Homo sapiens
ugcagugugaaagagccugaca

SEQ ID NO: 85572 - RNA, 22 nt, Homo sapiens
ugcagugugauuuucuggcuga

SEQ ID NO: 85573 - RNA, 22 nt, Homo sapiens
ucacccuguguuuugcguuugc

SEQ ID NO: 85574 - RNA, 22 nt, Homo sapiens
gaacuuguguugcuucacaugu

SEQ ID NO: 85575 - RNA, 21 nt, Homo sapiens
acuuucuguggcaguccauuc

SEQ ID NO: 85576 - RNA, 19 nt, Homo sapiens
agugucauggucauuauuu

SEQ ID NO: 85577 - RNA, 22 nt, Homo sapiens
aucauccugucaggagcuguga

SEQ ID NO: 85578 - RNA, 22 nt, Homo sapiens
augauaacagccaggcacggug

SEQ ID NO: 85579 - RNA, 22 nt, Homo sapiens
uuguauccaucuuucaggcaac

SEQ ID NO: 85580 - RNA, 22 nt, Homo sapiens
auagcacaugugcaaauggcug

SEQ ID NO: 85581 - RNA, 22 nt, Homo sapiens
uggcagaugcucuuggugccca

SEQ ID NO: 85582 - RNA, 19 nt, Homo sapiens
caccgccugcccccugcug

SEQ ID NO: 85583 - RNA, 16 nt, Homo sapiens
gugcuguguuguuagg

SEQ ID NO: 85584 - RNA, 22 nt, Homo sapiens
aggcauguugcuucgggcuuug

SEQ ID NO: 85585 - RNA, 22 nt, Homo sapiens
uuggcagaaaaggucggggguu

SEQ ID NO: 85586 - RNA, 22 nt, Homo sapiens
uugucccauggggucuuccuuu

SEQ ID NO: 85587 - RNA, 22 nt, Homo sapiens
ugcaccacugcacuccaggcug

SEQ ID NO: 85588 - RNA, 22 nt, Homo sapiens
cagcugcuuuggaaaauauuuu

SEQ ID NO: 85589 - RNA, 22 nt, Homo sapiens
ugcucaccugcugcucaccucc

SEQ ID NO: 85590 - RNA, 22 nt, Homo sapiens
gaccaaagaggcaggcauuaga

SEQ ID NO: 85591 - RNA, 22 nt, Homo sapiens
ccacauuaccuugcuugcucca

SEQ ID NO: 85592 - RNA, 20 nt, Homo sapiens
ugggaacaugugguauaugg

SEQ ID NO: 85593 - RNA, 20 nt, Homo sapiens
cugcaaaugcugcugcugau

SEQ ID NO: 85594 - RNA, 22 nt, Homo sapiens
gguauugguugagauuaacuuu

SEQ ID NO: 85595 - RNA, 22 nt, Homo sapiens
ucuuugccuaacccaaggucau

SEQ ID NO: 85596 - RNA, 22 nt, Homo sapiens
uuggcuguguuuauaugcugga

SEQ ID NO: 85597 - RNA, 22 nt, Homo sapiens
ggcagcuguguccuucguaagg

SEQ ID NO: 85598 - RNA, 22 nt, Homo sapiens
ucugagcaugcaucuugccugg

SEQ ID NO: 85599 - RNA, 22 nt, Homo sapiens
ugcaccacugcacuccagcuug

SEQ ID NO: 85600 - RNA, 22 nt, Homo sapiens
gucuuggagaacucagcuuggc

SEQ ID NO: 85601 - RNA, 22 nt, Homo sapiens
auaagaagugaaccagacgucu

SEQ ID NO: 85602 - RNA, 22 nt, Homo sapiens
uccugcauucugacuugcuuuc

SEQ ID NO: 85603 - RNA, 18 nt, Homo sapiens
uuuuugaggcacagggga

SEQ ID NO: 85604 - RNA, 22 nt, Homo sapiens
auggcuuuguguucagagcuga

SEQ ID NO: 85605 - RNA, 19 nt, Homo sapiens
auuuccuggagcuggucuc

SEQ ID NO: 85606 - RNA, 20 nt, Homo sapiens
uugaggucaggaguuuggga

SEQ ID NO: 85607 - RNA, 21 nt, Homo sapiens
ggcaagaaacacaaucaagua

SEQ ID NO: 85608 - RNA, 22 nt, Homo sapiens
uggucuggagagucccgcccag

SEQ ID NO: 85609 - RNA, 22 nt, Homo sapiens
agcuggucuacguguguaugag

SEQ ID NO: 85610 - RNA, 21 nt, Homo sapiens
gagaaucaucauggcugcaua

SEQ ID NO: 85611 - RNA, 22 nt, Homo sapiens
ucucugguuuucaaagcaguau

SEQ ID NO: 85612 - RNA, 22 nt, Homo sapiens
agcuggcuguggagaaaccccu

SEQ ID NO: 85613 - RNA, 21 nt, Homo sapiens
gugcagaugccacagucacuc

SEQ ID NO: 85614 - RNA, 22 nt, Homo sapiens
guggcagaacagguaggguucu

SEQ ID NO: 85615 - RNA, 22 nt, Homo sapiens
gagguggugguggaggcauagc

SEQ ID NO: 85616 - RNA, 22 nt, Homo sapiens
auccucugagagaguuucauaa

SEQ ID NO: 85617 - RNA, 22 nt, Homo sapiens
cugaggugggaggauuacuuga

SEQ ID NO: 85618 - RNA, 18 nt, Homo sapiens
cugagucauuccuggguc

SEQ ID NO: 85619 - RNA, 22 nt, Homo sapiens
cucuuugcuucuggcaucauug

SEQ ID NO: 85620 - RNA, 22 nt, Homo sapiens
ugacauggaaguagguauacau

SEQ ID NO: 85621 - RNA, 22 nt, Homo sapiens
cuggcaccauacacuguuguug

SEQ ID NO: 85622 - RNA, 22 nt, Homo sapiens
ugagaugcauauucuggcuccu

SEQ ID NO: 85623 - RNA, 22 nt, Homo sapiens
gucuuggagacauugccauuga

SEQ ID NO: 85624 - RNA, 22 nt, Homo sapiens
ugucagaaucuagaggcugcua

SEQ ID NO: 85625 - RNA, 22 nt, Homo sapiens
uguugcaccugccuugcuuuag

SEQ ID NO: 85626 - RNA, 22 nt, Homo sapiens
uucccaguuggggaaagcgacc

SEQ ID NO: 85627 - RNA, 22 nt, Homo sapiens
auguaacuaucugagccauggg

SEQ ID NO: 85628 - RNA, 22 nt, Homo sapiens
uggcuagaugagauguacugca

SEQ ID NO: 85629 - RNA, 22 nt, Homo sapiens
caaugcagcuuuuggagagaaa

SEQ ID NO: 85630 - RNA, 22 nt, Homo sapiens
uuugggccauggcuuuuccacg

SEQ ID NO: 85631 - RNA, 22 nt, Homo sapiens
ucuggcaagagccgagggcagu

SEQ ID NO: 85632 - RNA, 22 nt, Homo sapiens
ugucuuggaugaggauuaacag

SEQ ID NO: 85633 - RNA, 22 nt, Homo sapiens
ugacauggaagauguucaugau

SEQ ID NO: 85634 - RNA, 22 nt, Homo sapiens
caccaaccucaguagcaucugu

SEQ ID NO: 85635 - RNA, 22 nt, Homo sapiens
gucuuggcaugugcagcuggga

SEQ ID NO: 85636 - RNA, 22 nt, Homo sapiens
ucaaaaccucagagaguagagc

SEQ ID NO: 85637 - RNA, 22 nt, Homo sapiens
uugcugagucuuucuagguugc

SEQ ID NO: 85638 - RNA, 22 nt, Homo sapiens
cugagcuagaccacuuggcucc

SEQ ID NO: 85639 - RNA, 22 nt, Homo sapiens
acagagcaaugagcuacggucu

SEQ ID NO: 85640 - RNA, 22 nt, Homo sapiens
auugcagcccacccugggugau

SEQ ID NO: 85641 - RNA, 22 nt, Homo sapiens
auccuagguuagagaacaaaac

SEQ ID NO: 85642 - RNA, 22 nt, Homo sapiens
ugagaacugguagcacuuguga

SEQ ID NO: 85643 - RNA, 22 nt, Homo sapiens
caacucuguaggauccaggugg

SEQ ID NO: 85644 - RNA, 22 nt, Homo sapiens
uggccagagggcaauuagcugu

SEQ ID NO: 85645 - RNA, 22 nt, Homo sapiens
ggagucuugcuauguugccaag

SEQ ID NO: 85646 - RNA, 22 nt, Homo sapiens
ugaugcugaugccugccagaag

SEQ ID NO: 85647 - RNA, 22 nt, Homo sapiens
uucuugcacuuaacugacauuc

SEQ ID NO: 85648 - RNA, 22 nt, Homo sapiens
uugugcuuguaacuacauucag

SEQ ID NO: 85649 - RNA, 20 nt, Homo sapiens
ucccucaaacuuuuccacug

SEQ ID NO: 85650 - RNA, 22 nt, Homo sapiens
augcauggucugaagucaaccu

SEQ ID NO: 85651 - RNA, 22 nt, Homo sapiens
augagggaagcucacgugucca

SEQ ID NO: 85652 - RNA, 22 nt, Homo sapiens
agcaccacaauuuccugccuaa

SEQ ID NO: 85653 - RNA, 22 nt, Homo sapiens
ggagggugagaucaauuuggga

SEQ ID NO: 85654 - RNA, 22 nt, Homo sapiens
agcagcaauuuuguaugguuua

SEQ ID NO: 85655 - RNA, 22 nt, Homo sapiens
uuaagccaggugugguggcaca

SEQ ID NO: 85656 - RNA, 20 nt, Homo sapiens
guucacaggcuuccuuucag

SEQ ID NO: 85657 - RNA, 22 nt, Homo sapiens
gagguagagacuauguauuaga

SEQ ID NO: 85658 - RNA, 22 nt, Homo sapiens
ugugccacugcacucuggccug

SEQ ID NO: 85659 - RNA, 22 nt, Homo sapiens
agcccugugauuacuuuuauaa

SEQ ID NO: 85660 - RNA, 22 nt, Homo sapiens
aaaugcagcacucaagugggaa

SEQ ID NO: 85661 - RNA, 22 nt, Homo sapiens
uugcaaagaccucuucacuucc

SEQ ID NO: 85662 - RNA, 22 nt, Homo sapiens
ugcaccacugcaccccagucug

SEQ ID NO: 85663 - RNA, 22 nt, Homo sapiens
uuggaaauguguuugcauucag

SEQ ID NO: 85664 - RNA, 22 nt, Homo sapiens
gagguugggaugagggauacag

SEQ ID NO: 85665 - RNA, 22 nt, Homo sapiens
augaggugauuucuguucgggu

SEQ ID NO: 85666 - RNA, 22 nt, Homo sapiens
uaagaauucuguccgguauacu

SEQ ID NO: 85667 - RNA, 22 nt, Homo sapiens
ucucuggauaucuacuuauguu

SEQ ID NO: 85668 - RNA, 22 nt, Homo sapiens
ugagacaaaguuguuggauguu

SEQ ID NO: 85669 - RNA, 20 nt, Homo sapiens
cagagcaaagcaguccuggc

SEQ ID NO: 85670 - RNA, 22 nt, Homo sapiens
ugaugcugaguggcuauuugaa

SEQ ID NO: 85671 - RNA, 22 nt, Homo sapiens
auaagcuaagaguuucugggcu

SEQ ID NO: 85672 - RNA, 22 nt, Homo sapiens
ugagaugcucgccggccagcau

SEQ ID NO: 85673 - RNA, 22 nt, Homo sapiens
uuugggccaugcuucccgguca

SEQ ID NO: 85674 - RNA, 22 nt, Homo sapiens
uggcaguuuacagcuuuaggag

SEQ ID NO: 85675 - RNA, 20 nt, Homo sapiens
ucagguagggcuucaacauu

SEQ ID NO: 85676 - RNA, 22 nt, Homo sapiens
agauggugugcuaggaaaugua

SEQ ID NO: 85677 - RNA, 22 nt, Homo sapiens
uucuugguuggcaaccaacagu

SEQ ID NO: 85678 - RNA, 22 nt, Homo sapiens
uggaggucauuggaucaugggg

SEQ ID NO: 85679 - RNA, 22 nt, Homo sapiens
guugggcccauagacugccagu

SEQ ID NO: 85680 - RNA, 22 nt, Homo sapiens
ugcaccacuacacuccaggcug

SEQ ID NO: 85681 - RNA, 22 nt, Homo sapiens
cuuuccauuguuggagcauaaa

SEQ ID NO: 85682 - RNA, 22 nt, Homo sapiens
ugacauggagagagaagccuuu

SEQ ID NO: 85683 - RNA, 22 nt, Homo sapiens
cucucuguuugucuguuauugg

SEQ ID NO: 85684 - RNA, 22 nt, Homo sapiens
cucuuggguagauuuugcagag

SEQ ID NO: 85685 - RNA, 22 nt, Homo sapiens
uagcugcugcuaggcuaaggau

SEQ ID NO: 85686 - RNA, 22 nt, Homo sapiens
ugaggucuuuauuuagugcuca

SEQ ID NO: 85687 - RNA, 22 nt, Homo sapiens
gcugcuguaccagaugugguua

SEQ ID NO: 85688 - RNA, 17 nt, Homo sapiens
aaguggcuuguucacca

SEQ ID NO: 85689 - RNA, 22 nt, Homo sapiens
cuugcagagcccauggauguca

SEQ ID NO: 85690 - RNA, 22 nt, Homo sapiens
ugacauggugcucuuucaggca

SEQ ID NO: 85691 - RNA, 20 nt, Homo sapiens
cuuuguccuccugcugugcu

SEQ ID NO: 85692 - RNA, 22 nt, Homo sapiens
ugagaccuuucauuucucagug

SEQ ID NO: 85693 - RNA, 17 nt, Homo sapiens
uugggcaagguagguga

SEQ ID NO: 85694 - RNA, 22 nt, Homo sapiens
ucaccaccuuccaggaccacug

SEQ ID NO: 85695 - RNA, 22 nt, Homo sapiens
aagcaguguggacuaaugggaa

SEQ ID NO: 85696 - RNA, 22 nt, Homo sapiens
uauggcuaugggaacugggagu

SEQ ID NO: 85697 - RNA, 23 nt, Homo sapiens
agcaccuuuccuccacuaucugc

SEQ ID NO: 85698 - RNA, 22 nt, Homo sapiens
ggacaagagacugggacacuga

SEQ ID NO: 85699 - RNA, 22 nt, Homo sapiens
augcuggugcuagaaacuggaa

SEQ ID NO: 85700 - RNA, 22 nt, Homo sapiens
ucuuggguggauucauucuuuc

SEQ ID NO: 85701 - RNA, 22 nt, Homo sapiens
uggcagaugagccgcgcuccaa

SEQ ID NO: 85702 - RNA, 22 nt, Homo sapiens
ucugagcaauagauguggauau

SEQ ID NO: 85703 - RNA, 22 nt, Homo sapiens
ugcaccacugcacuccacccug

SEQ ID NO: 85704 - RNA, 18 nt, Homo sapiens
cucaaccucaugcagggc

SEQ ID NO: 85705 - RNA, 22 nt, Homo sapiens
augcagaucacauuuuucuguc

SEQ ID NO: 85706 - RNA, 21 nt, Homo sapiens
ugcugcacuucuuuugcugug

SEQ ID NO: 85707 - RNA, 23 nt, Homo sapiens
acugagcaauguuuacauacuug

SEQ ID NO: 85708 - RNA, 22 nt, Homo sapiens
uuagcagcaucccuggccugua

SEQ ID NO: 85709 - RNA, 22 nt, Homo sapiens
auguuaagauggaacaugggaa

SEQ ID NO: 85710 - RNA, 22 nt, Homo sapiens
uagcugcuguauguacacggau

SEQ ID NO: 85711 - RNA, 21 nt, Homo sapiens
ugacagaaaauugaguuugcu

SEQ ID NO: 85712 - RNA, 17 nt, Homo sapiens
gcccuuugugccucuuc

SEQ ID NO: 85713 - RNA, 22 nt, Homo sapiens
aucugguguccucgugggaguc

SEQ ID NO: 85714 - RNA, 22 nt, Homo sapiens
aaaugcaguugguggggauaug

SEQ ID NO: 85715 - RNA, 22 nt, Homo sapiens
aagugauguuauugggugacuc

SEQ ID NO: 85716 - RNA, 22 nt, Homo sapiens
ugcagcacaguagguuugcaau

SEQ ID NO: 85717 - RNA, 22 nt, Homo sapiens
gugcagaugucuuuauaguagc

SEQ ID NO: 85718 - RNA, 22 nt, Homo sapiens
cugcaauguuugaaauggcaaa

SEQ ID NO: 85719 - RNA, 17 nt, Homo sapiens
ucuucuguuacuguggc

SEQ ID NO: 85720 - RNA, 22 nt, Homo sapiens
ugugccacugcacucugggcaa

SEQ ID NO: 85721 - RNA, 22 nt, Homo sapiens
gaccacagacuggaaagagggc

SEQ ID NO: 85722 - RNA, 22 nt, Homo sapiens
gcagaucuucgcgguaaguguu

SEQ ID NO: 85723 - RNA, 22 nt, Homo sapiens
gcucugguuacaaaggcaaauu

SEQ ID NO: 85724 - RNA, 22 nt, Homo sapiens
augcagauauuuuugugguugc

SEQ ID NO: 85725 - RNA, 22 nt, Homo sapiens
cagagcaaugcuuuugcuuuga

SEQ ID NO: 85726 - RNA, 22 nt, Homo sapiens
uguagacaccaaagacagcaua

SEQ ID NO: 85727 - RNA, 22 nt, Homo sapiens
cugcaauggagaaagugagacu

SEQ ID NO: 85728 - RNA, 18 nt, Homo sapiens
uguggcuguuuuccaaua

SEQ ID NO: 85729 - RNA, 22 nt, Homo sapiens
gugagcauaggaggcuucuguu

SEQ ID NO: 85730 - RNA, 22 nt, Homo sapiens
aaagugcuuacuaaguugccaa

SEQ ID NO: 85731 - RNA, 22 nt, Homo sapiens
uggcagaugggugagcuggaga

SEQ ID NO: 85732 - RNA, 20 nt, Homo sapiens
uaguggcaugcaccuguagc

SEQ ID NO: 85733 - RNA, 22 nt, Homo sapiens
ggcaguguauuacuuaggguuc

SEQ ID NO: 85734 - RNA, 22 nt, Homo sapiens
ggucuuggagaauuguccuggg

SEQ ID NO: 85735 - RNA, 22 nt, Homo sapiens
ucucuguuuagagccagcaauu

SEQ ID NO: 85736 - RNA, 22 nt, Homo sapiens
ugguccuuuccauuggagacac

SEQ ID NO: 85737 - RNA, 22 nt, Homo sapiens
gucuggcaauggcagacuggca

SEQ ID NO: 85738 - RNA, 22 nt, Homo sapiens
cuguccugcagagucagaauga

SEQ ID NO: 85739 - RNA, 22 nt, Homo sapiens
ucugugguucaaaccagcaacu

SEQ ID NO: 85740 - RNA, 22 nt, Homo sapiens
uggagacaaagauagaaaagca

SEQ ID NO: 85741 - RNA, 22 nt, Homo sapiens
aucuugggugggaacugagaau

SEQ ID NO: 85742 - RNA, 19 nt, Homo sapiens
ucucugguguuggagggga

SEQ ID NO: 85743 - RNA, 19 nt, Homo sapiens
uuggcagaguugcccccua

SEQ ID NO: 85744 - RNA, 22 nt, Homo sapiens
gaguucaaaucucagcucuguu

SEQ ID NO: 85745 - RNA, 22 nt, Homo sapiens
ucagaugcauccauaccccacu

SEQ ID NO: 85746 - RNA, 22 nt, Homo sapiens
ugcaaaguccucauucuuaccc

SEQ ID NO: 85747 - RNA, 20 nt, Homo sapiens
uuggcagagucuuuagggua

SEQ ID NO: 85748 - RNA, 22 nt, Homo sapiens
uuguucccuucuggcuuuuaug

SEQ ID NO: 85749 - RNA, 22 nt, Homo sapiens
uaccaaaguuucggccucuguu

SEQ ID NO: 85750 - RNA, 22 nt, Homo sapiens
guggcagagucagagggaaaug

SEQ ID NO: 85751 - RNA, 17 nt, Homo sapiens
ucuugugguucuugaau

SEQ ID NO: 85752 - RNA, 22 nt, Homo sapiens
ccacccuuccacacccugggua

SEQ ID NO: 85753 - RNA, 22 nt, Homo sapiens
agauauuuguuaggucugucag

SEQ ID NO: 85754 - RNA, 18 nt, Homo sapiens
auggcagaacaauuuaca

SEQ ID NO: 85755 - RNA, 22 nt, Homo sapiens
gcccuuugugucuggcuggggu

SEQ ID NO: 85756 - RNA, 22 nt, Homo sapiens
cugcagaucuuggggcuugcca

SEQ ID NO: 85757 - RNA, 22 nt, Homo sapiens
aaacucuguagcagagacagau

SEQ ID NO: 85758 - RNA, 22 nt, Homo sapiens
uuccacaggguugaacuaguuu

SEQ ID NO: 85759 - RNA, 22 nt, Homo sapiens
uagaaaguagggaagguaggau

SEQ ID NO: 85760 - RNA, 22 nt, Homo sapiens
uuggggcacggccucuguugcc

SEQ ID NO: 85761 - RNA, 22 nt, Homo sapiens
agaugcuguuaucaacuguagc

SEQ ID NO: 85762 - RNA, 22 nt, Homo sapiens
gcuguuugccgccaucgcagac

SEQ ID NO: 85763 - RNA, 22 nt, Homo sapiens
uuguacuagaaaauuauucuuu

SEQ ID NO: 85764 - RNA, 22 nt, Homo sapiens
aucugguguggcugugauccuc

SEQ ID NO: 85765 - RNA, 19 nt, Homo sapiens
ucagaugcauuagggguua

SEQ ID NO: 85766 - RNA, 22 nt, Homo sapiens
auggcagagucagaaagucagg

SEQ ID NO: 85767 - RNA, 22 nt, Homo sapiens
cuugcagaggcccuggggagag

SEQ ID NO: 85768 - RNA, 22 nt, Homo sapiens
uccuggcuccacuguuuauucc

SEQ ID NO: 85769 - RNA, 22 nt, Homo sapiens
cagaugcaugaccugggcuugg

SEQ ID NO: 85770 - RNA, 22 nt, Homo sapiens
ugacauggagggugcggcugca

SEQ ID NO: 85771 - RNA, 20 nt, Homo sapiens
cuuccaguggccccaucuuu

SEQ ID NO: 85772 - RNA, 22 nt, Homo sapiens
ugggagacuacauuuuuaacaa

SEQ ID NO: 85773 - RNA, 22 nt, Homo sapiens
augugacagugguuuuaagcgu

SEQ ID NO: 85774 - RNA, 22 nt, Homo sapiens
ugcauuaucagauguuugcuuu

SEQ ID NO: 85775 - RNA, 22 nt, Homo sapiens
cagauggucuuaaggcagccuu

SEQ ID NO: 85776 - RNA, 22 nt, Homo sapiens
cuugggcagugugcauguguau

SEQ ID NO: 85777 - RNA, 22 nt, Homo sapiens
ucauggggugagcuacaggcac

SEQ ID NO: 85778 - RNA, 22 nt, Homo sapiens
uggcagacaaauuugagcauau

SEQ ID NO: 85779 - RNA, 21 nt, Homo sapiens
ugagacaauccuggucaauau

SEQ ID NO: 85780 - RNA, 22 nt, Homo sapiens
ugucuuggacuugaaucucauu

SEQ ID NO: 85781 - RNA, 22 nt, Homo sapiens
caaugguccccauuggcaggaa

SEQ ID NO: 85782 - RNA, 22 nt, Homo sapiens
uugcagaucccacacucacccu

SEQ ID NO: 85783 - RNA, 22 nt, Homo sapiens
ucugagguaggugcauggauac

SEQ ID NO: 85784 - RNA, 22 nt, Homo sapiens
uggugcccuguccuucuguggc

SEQ ID NO: 85785 - RNA, 19 nt, Homo sapiens
uaagaugaagcugucuggg

SEQ ID NO: 85786 - RNA, 22 nt, Homo sapiens
ugcaagacacuguccugggcau

SEQ ID NO: 85787 - RNA, 22 nt, Homo sapiens
ucagagcaaagacacuuuauca

SEQ ID NO: 85788 - RNA, 22 nt, Homo sapiens
gagguagaauguuuuucagcug

SEQ ID NO: 85789 - RNA, 17 nt, Homo sapiens
ggcaagaaguggaacuc

SEQ ID NO: 85790 - RNA, 22 nt, Homo sapiens
aucugguguuuuucucccucgu

SEQ ID NO: 85791 - RNA, 22 nt, Homo sapiens
gucguggagcucacagugugcc

SEQ ID NO: 85792 - RNA, 22 nt, Homo sapiens
gugaggucguagucauaggcaa

SEQ ID NO: 85793 - RNA, 22 nt, Homo sapiens
ucucugguuaugucauuaagca

SEQ ID NO: 85794 - RNA, 23 nt, Homo sapiens
ucugguguugucaaaugcugguu

SEQ ID NO: 85795 - RNA, 20 nt, Homo sapiens
ucuugguuggaggucuuuua

SEQ ID NO: 85796 - RNA, 22 nt, Homo sapiens
acccucaagggacugacagaau

SEQ ID NO: 85797 - RNA, 22 nt, Homo sapiens
ucugagcaauaaacaacauauu

SEQ ID NO: 85798 - RNA, 22 nt, Homo sapiens
auggcaaaauguuccuaguggu

SEQ ID NO: 85799 - RNA, 22 nt, Homo sapiens
gcuggcaagaugcugaugcaac

SEQ ID NO: 85800 - RNA, 22 nt, Homo sapiens
uuuguacuugaagaaucuuuau

SEQ ID NO: 85801 - RNA, 22 nt, Homo sapiens
ugagcagagaagugcccugcgc

SEQ ID NO: 85802 - RNA, 22 nt, Homo sapiens
ucucugguuuguggaaucuuag

SEQ ID NO: 85803 - RNA, 22 nt, Homo sapiens
uucuugguugcucacacccauc

SEQ ID NO: 85804 - RNA, 22 nt, Homo sapiens
ugggccgcugcaggaugguccc

SEQ ID NO: 85805 - RNA, 22 nt, Homo sapiens
uuugggccucugauuucuuugg

SEQ ID NO: 85806 - RNA, 22 nt, Homo sapiens
aucugguguuuccuucacauug

SEQ ID NO: 85807 - RNA, 22 nt, Homo sapiens
uuugucuccuaagacucugugg

SEQ ID NO: 85808 - RNA, 22 nt, Homo sapiens
uguuggcauugcugcugacccu

SEQ ID NO: 85809 - RNA, 22 nt, Homo sapiens
ugagaacugcagggagcugcau

SEQ ID NO: 85810 - RNA, 19 nt, Homo sapiens
acuguacuccagucugggc

SEQ ID NO: 85811 - RNA, 22 nt, Homo sapiens
agcaaccagaggagaugaggcu

SEQ ID NO: 85812 - RNA, 22 nt, Homo sapiens
ucuuggguuugccuugcugcug

SEQ ID NO: 85813 - RNA, 22 nt, Homo sapiens
uuggcagaguuaauuuguugag

SEQ ID NO: 85814 - RNA, 20 nt, Homo sapiens
aaacucugucuucuuuauca

SEQ ID NO: 85815 - RNA, 22 nt, Homo sapiens
acccugucaaaauagaccaauc

SEQ ID NO: 85816 - RNA, 22 nt, Homo sapiens
ugagacaaucucaucucaguga

SEQ ID NO: 85817 - RNA, 22 nt, Homo sapiens
gcuccuuugaguagcuucugug

SEQ ID NO: 85818 - RNA, 22 nt, Homo sapiens
ugggaacaugaagguuaaagag

SEQ ID NO: 85819 - RNA, 22 nt, Homo sapiens
uuaaucucaggaguuugggacc

SEQ ID NO: 85820 - RNA, 22 nt, Homo sapiens
uaacucugccuagugacauggu

SEQ ID NO: 85821 - RNA, 22 nt, Homo sapiens
auggcagaaucaagccgacagc

SEQ ID NO: 85822 - RNA, 22 nt, Homo sapiens
cuugggccccacccaaaucuua

SEQ ID NO: 85823 - RNA, 22 nt, Homo sapiens
ugccugauacccucugucucuc

SEQ ID NO: 85824 - RNA, 22 nt, Homo sapiens
ugucuuggagaauccuggguuu

SEQ ID NO: 85825 - RNA, 22 nt, Homo sapiens
uuguccuggagguucuugcaag

SEQ ID NO: 85826 - RNA, 22 nt, Homo sapiens
acuguguguuugucuagcacag

SEQ ID NO: 85827 - RNA, 22 nt, Homo sapiens
ucauggggugcuuugcuagauu

SEQ ID NO: 85828 - RNA, 22 nt, Homo sapiens
cucugguggaagcagggggcaa

SEQ ID NO: 85829 - RNA, 22 nt, Homo sapiens
cuucuugcuguguccucacaug

SEQ ID NO: 85830 - RNA, 22 nt, Homo sapiens
auuuccuguaggggcuugcgaa

SEQ ID NO: 85831 - RNA, 22 nt, Homo sapiens
gagaugugguucaaggguguuu

SEQ ID NO: 85832 - RNA, 22 nt, Homo sapiens
ucuuugguucugugcagccuau

SEQ ID NO: 85833 - RNA, 22 nt, Homo sapiens
uuugugcuccuguugagaaucu

SEQ ID NO: 85834 - RNA, 22 nt, Homo sapiens
uugcacauuuuuucuggcagaa

SEQ ID NO: 85835 - RNA, 22 nt, Homo sapiens
gucuggcacagggaaaguacaa

SEQ ID NO: 85836 - RNA, 22 nt, Homo sapiens
ugacauggagguggaggaagau

SEQ ID NO: 85837 - RNA, 22 nt, Homo sapiens
aaaagugguguuguuucuaaau

SEQ ID NO: 85838 - RNA, 22 nt, Homo sapiens
ccugucuugaagagauccuccu

SEQ ID NO: 85839 - RNA, 22 nt, Homo sapiens
aaguagcuggaugcaguggcac

SEQ ID NO: 85840 - RNA, 22 nt, Homo sapiens
augagcugauuuccuuaccaua

SEQ ID NO: 85841 - RNA, 22 nt, Homo sapiens
ugcaccacugcacuucagccug

SEQ ID NO: 85842 - RNA, 22 nt, Homo sapiens
uuugggccaugguuuguguaua

SEQ ID NO: 85843 - RNA, 22 nt, Homo sapiens
ugagaucuuuuguggcugagaa

SEQ ID NO: 85844 - RNA, 22 nt, Homo sapiens
aguggcuuuuuaguggcagaug

SEQ ID NO: 85845 - RNA, 22 nt, Homo sapiens
uuaaggaaggagucuuaaaugg

SEQ ID NO: 85846 - RNA, 22 nt, Homo sapiens
uguuuguuugugauacgguaca

SEQ ID NO: 85847 - RNA, 23 nt, Homo sapiens
uuuuuguguuucauggaaauagg

SEQ ID NO: 85848 - RNA, 22 nt, Homo sapiens
cacuuugguucaccugaguuuc

SEQ ID NO: 85849 - RNA, 22 nt, Homo sapiens
uggcgagaugcucgugugcaga

SEQ ID NO: 85850 - RNA, 22 nt, Homo sapiens
cugaucuggaggugucugggga

SEQ ID NO: 85851 - RNA, 22 nt, Homo sapiens
ccauggcuauucuguaaggguu

SEQ ID NO: 85852 - RNA, 22 nt, Homo sapiens
gcugcacuuuaaggcauccccu

SEQ ID NO: 85853 - RNA, 22 nt, Homo sapiens
aaggugguuuucucuuggaguc

SEQ ID NO: 85854 - RNA, 19 nt, Homo sapiens
gccaccuggugcguguucu

SEQ ID NO: 85855 - RNA, 22 nt, Homo sapiens
uugggccacuuuaguuuccuua

SEQ ID NO: 85856 - RNA, 22 nt, Homo sapiens
gacugcagugcagcuguuaggc

SEQ ID NO: 85857 - RNA, 21 nt, Homo sapiens
cugcaaaugcugcugccugau

SEQ ID NO: 85858 - RNA, 19 nt, Homo sapiens
cuugccccauucauccucu

SEQ ID NO: 85859 - RNA, 22 nt, Homo sapiens
auauuggccuaaaauucucuuu

SEQ ID NO: 85860 - RNA, 22 nt, Homo sapiens
gagguagagaguuuugauucug

SEQ ID NO: 85861 - RNA, 22 nt, Homo sapiens
uagcuaguauuuugcugaggau

SEQ ID NO: 85862 - RNA, 19 nt, Homo sapiens
ugagaucuuuacuggguuu

SEQ ID NO: 85863 - RNA, 22 nt, Homo sapiens
uggcaaaauauuuugguuucug

SEQ ID NO: 85864 - RNA, 22 nt, Homo sapiens
uggucagaugcugaguggaucu

SEQ ID NO: 85865 - RNA, 20 nt, Homo sapiens
uggaggucaucugucacuac

SEQ ID NO: 85866 - RNA, 22 nt, Homo sapiens
caguggacuaaauggggaauau

SEQ ID NO: 85867 - RNA, 21 nt, Homo sapiens
augagguguacuguggugaaa

SEQ ID NO: 85868 - RNA, 22 nt, Homo sapiens
gguggucuuccccuggaguucg

SEQ ID NO: 85869 - RNA, 22 nt, Homo sapiens
auggcccuguguggagcugcug

SEQ ID NO: 85870 - RNA, 22 nt, Homo sapiens
uaacagcauuugugucuaguag

SEQ ID NO: 85871 - RNA, 19 nt, Homo sapiens
uugugggaggacagagggg

SEQ ID NO: 85872 - RNA, 22 nt, Homo sapiens
gugagcauaacaacagaguuua

SEQ ID NO: 85873 - RNA, 22 nt, Homo sapiens
cuagcagacaugggcugaacca

SEQ ID NO: 85874 - RNA, 22 nt, Homo sapiens
ucugucacugaaucccugucac

SEQ ID NO: 85875 - RNA, 22 nt, Homo sapiens
acccgggaggcaggagucauag

SEQ ID NO: 85876 - RNA, 22 nt, Homo sapiens
gugagacugaguuucgcucuug

SEQ ID NO: 85877 - RNA, 21 nt, Homo sapiens
gaguggcuuuuguuucaccag

SEQ ID NO: 85878 - RNA, 22 nt, Homo sapiens
agcagauguuuagugagcgccu

SEQ ID NO: 85879 - RNA, 22 nt, Homo sapiens
ucugugguucaggcuggagugc

SEQ ID NO: 85880 - RNA, 22 nt, Homo sapiens
ggcaguggaagugccaguuucu

SEQ ID NO: 85881 - RNA, 22 nt, Homo sapiens
uguacaugggacaggaggagag

SEQ ID NO: 85882 - RNA, 22 nt, Homo sapiens
uagugacauugcugggaaugcu

SEQ ID NO: 85883 - RNA, 22 nt, Homo sapiens
cuggagauauuggaagaaagaa

SEQ ID NO: 85884 - RNA, 22 nt, Homo sapiens
cuccccuuuaguuucuuaauaa

SEQ ID NO: 85885 - RNA, 22 nt, Homo sapiens
uggcagauagaaaugugguuaa

SEQ ID NO: 85886 - RNA, 22 nt, Homo sapiens
uugugcuugcuguguucuaugc

SEQ ID NO: 85887 - RNA, 22 nt, Homo sapiens
guggcagaaaagagaagcaaug

SEQ ID NO: 85888 - RNA, 22 nt, Homo sapiens
uaucccaguggauguaccccau

SEQ ID NO: 85889 - RNA, 19 nt, Homo sapiens
ugcaaagucuuuuccuauu

SEQ ID NO: 85890 - RNA, 22 nt, Homo sapiens
uguggcugguggcaccuuuucc

SEQ ID NO: 85891 - RNA, 22 nt, Homo sapiens
caaagugguuuauacaugauug

SEQ ID NO: 85892 - RNA, 22 nt, Homo sapiens
cacauguuugcuacauuuuucu

SEQ ID NO: 85893 - RNA, 22 nt, Homo sapiens
auugcugagacauugcuaaucu

SEQ ID NO: 85894 - RNA, 22 nt, Homo sapiens
gucuugcacuuaccuaagaacu

SEQ ID NO: 85895 - RNA, 22 nt, Homo sapiens
gugagcagagaucgcgugauug

SEQ ID NO: 85896 - RNA, 22 nt, Homo sapiens
auuauguuguauuuccuugcag

SEQ ID NO: 85897 - RNA, 22 nt, Homo sapiens
ccacccuuccauucuuccucuu

SEQ ID NO: 85898 - RNA, 22 nt, Homo sapiens
uuggguccucugguccuugguu

SEQ ID NO: 85899 - RNA, 22 nt, Homo sapiens
gugagcuccucuucugcugcag

SEQ ID NO: 85900 - RNA, 22 nt, Homo sapiens
uuggcagaauguuagaaacuua

SEQ ID NO: 85901 - RNA, 20 nt, Homo sapiens
agcugcagauauaaauccgc

SEQ ID NO: 85902 - RNA, 21 nt, Homo sapiens
ugucuuggagccagacgccag

SEQ ID NO: 85903 - RNA, 22 nt, Homo sapiens
uuacccuuugcauuaccaacaa

SEQ ID NO: 85904 - RNA, 22 nt, Homo sapiens
aucucaaugcuuuuguaggcca

SEQ ID NO: 85905 - RNA, 22 nt, Homo sapiens
auccagaugggcuuaauguaau

SEQ ID NO: 85906 - RNA, 22 nt, Homo sapiens
auacaguauggagggcccagcu

SEQ ID NO: 85907 - RNA, 20 nt, Homo sapiens
acaguauguuuggaugcaua

SEQ ID NO: 85908 - RNA, 22 nt, Homo sapiens
acacaguaaauauugucuccuc

SEQ ID NO: 85909 - RNA, 22 nt, Homo sapiens
agaaacauucucuugccuccuu

SEQ ID NO: 85910 - RNA, 20 nt, Homo sapiens
auuccacuuauaugaggucc

SEQ ID NO: 85911 - RNA, 22 nt, Homo sapiens
caacagucagcccauccacaga

SEQ ID NO: 85912 - RNA, 22 nt, Homo sapiens
auuguaccccaauguacaauau

SEQ ID NO: 85913 - RNA, 22 nt, Homo sapiens
cccugacauucggagauguagu

SEQ ID NO: 85914 - RNA, 22 nt, Homo sapiens
uacccuuauguaaucauuauac

SEQ ID NO: 85915 - RNA, 22 nt, Homo sapiens
uacaguauuaugagugauugaa

SEQ ID NO: 85916 - RNA, 16 nt, Homo sapiens
uacaacagugaguaug

SEQ ID NO: 85917 - RNA, 22 nt, Homo sapiens
guuaaagacauccacauaggag

SEQ ID NO: 85918 - RNA, 22 nt, Homo sapiens
caccccuaccugagucaggagu

SEQ ID NO: 85919 - RNA, 22 nt, Homo sapiens
aacagcuaguaccaauccacua

SEQ ID NO: 85920 - RNA, 22 nt, Homo sapiens
uccaaaucucuggcacugggau

SEQ ID NO: 85921 - RNA, 22 nt, Homo sapiens
acacaguauaugacaaugcuuu

SEQ ID NO: 85922 - RNA, 22 nt, Homo sapiens
acaguaaugggccccuuuuccu

SEQ ID NO: 85923 - RNA, 17 nt, Homo sapiens
accccuaccucagaagc

SEQ ID NO: 85924 - RNA, 22 nt, Homo sapiens
accccugagaucgaaucaugcu

SEQ ID NO: 85925 - RNA, 22 nt, Homo sapiens
aaucucaacacuuugggaggcu

SEQ ID NO: 85926 - RNA, 22 nt, Homo sapiens
gaccccuagagauaggaggaac

SEQ ID NO: 85927 - RNA, 21 nt, Homo sapiens
gaccccuagaucuuuuuccag

SEQ ID NO: 85928 - RNA, 22 nt, Homo sapiens
uacacagucaaaaauuuccagg

SEQ ID NO: 85929 - RNA, 22 nt, Homo sapiens
uaugcccauuuaaauugaacaa

SEQ ID NO: 85930 - RNA, 22 nt, Homo sapiens
ucaacagugggcacuguaaaug

SEQ ID NO: 85931 - RNA, 21 nt, Homo sapiens
acccucuaguuuucaacaggc

SEQ ID NO: 85932 - RNA, 22 nt, Homo sapiens
acccuacauaguagauccuaca

SEQ ID NO: 85933 - RNA, 22 nt, Homo sapiens
augacccugaccuaagccaauc

SEQ ID NO: 85934 - RNA, 20 nt, Homo sapiens
auuccacuuguuugagguac

SEQ ID NO: 85935 - RNA, 22 nt, Homo sapiens
cagacagugucccgagucccug

SEQ ID NO: 85936 - RNA, 22 nt, Homo sapiens
gagauuaauacacaucaaaugc

SEQ ID NO: 85937 - RNA, 22 nt, Homo sapiens
ucaaauuccaagucuagguagg

SEQ ID NO: 85938 - RNA, 22 nt, Homo sapiens
ucaacagugauggaaaguuaua

SEQ ID NO: 85939 - RNA, 22 nt, Homo sapiens
uugaaagacaucaccuacugcu

SEQ ID NO: 85940 - RNA, 23 nt, Homo sapiens
uuaguaaacucaaugacaccaca

SEQ ID NO: 85941 - RNA, 22 nt, Homo sapiens
uugauaguuuaauuaaugcuag

SEQ ID NO: 85942 - RNA, 21 nt, Homo sapiens
aagcacauugaguguguguga

SEQ ID NO: 85943 - RNA, 22 nt, Homo sapiens
aacccugacacaagcagaauuu

SEQ ID NO: 85944 - RNA, 22 nt, Homo sapiens
aagagagccagcugguauauuu

SEQ ID NO: 85945 - RNA, 22 nt, Homo sapiens
aacauguuuagcagauaccugu

SEQ ID NO: 85946 - RNA, 22 nt, Homo sapiens
ucacugcacuagguaaugccac

SEQ ID NO: 85947 - RNA, 22 nt, Homo sapiens
ucccugaaaauuagcauuuuaa

SEQ ID NO: 85948 - RNA, 22 nt, Homo sapiens
ucccugaaagcugagauuggaa

SEQ ID NO: 85949 - RNA, 22 nt, Homo sapiens
uccuacaugcaguacauucaaa

SEQ ID NO: 85950 - RNA, 22 nt, Homo sapiens
ugacuauaguuuucuugacaca

SEQ ID NO: 85951 - RNA, 23 nt, Homo sapiens
ugacuuaggccucaacuaugacu

SEQ ID NO: 85952 - RNA, 22 nt, Homo sapiens
ugaguuagguaauaauaaauau

SEQ ID NO: 85953 - RNA, 18 nt, Homo sapiens
uggauaugaaauucugga

SEQ ID NO: 85954 - RNA, 17 nt, Homo sapiens
uauguaguacuuauaaa

SEQ ID NO: 85955 - RNA, 20 nt, Homo sapiens
uagcacacauguagaauagu

SEQ ID NO: 85956 - RNA, 22 nt, Homo sapiens
uagugguaguagcaguaauauu

SEQ ID NO: 85957 - RNA, 22 nt, Homo sapiens
uauaugucuucuuguaauuggc

SEQ ID NO: 85958 - RNA, 22 nt, Homo sapiens
uaacaccuugcucugucaauaa

SEQ ID NO: 85959 - RNA, 22 nt, Homo sapiens
gugauauguuaggaucuaaguc

SEQ ID NO: 85960 - RNA, 22 nt, Homo sapiens
cagagcaaugcuuuugcuuuga

SEQ ID NO: 85961 - RNA, 22 nt, Homo sapiens
cacauguucaggagcacuuaga

SEQ ID NO: 85962 - RNA, 22 nt, Homo sapiens
cacauguuuuagcauggcuguu

SEQ ID NO: 85963 - RNA, 22 nt, Homo sapiens
caucccugucgucaagucucug

SEQ ID NO: 85964 - RNA, 22 nt, Homo sapiens
auucccuguagaauaaggaugg

SEQ ID NO: 85965 - RNA, 22 nt, Homo sapiens
auggauauuuuuugaacauaga

SEQ ID NO: 85966 - RNA, 22 nt, Homo sapiens
aucaugucuucccagugauucu

SEQ ID NO: 85967 - RNA, 22 nt, Homo sapiens
auaauagcugaucauuuagaag

SEQ ID NO: 85968 - RNA, 22 nt, Homo sapiens
auaagugcuuguugaauaauag

SEQ ID NO: 85969 - RNA, 22 nt, Homo sapiens
accccugagaucgaaucaugcu

SEQ ID NO: 85970 - RNA, 22 nt, Homo sapiens
acccuguaggacuauucuaauc

SEQ ID NO: 85971 - RNA, 22 nt, Homo sapiens
agauauguuuaguuucaaaaug

SEQ ID NO: 85972 - RNA, 18 nt, Homo sapiens
agagcacugaguuuuaga

SEQ ID NO: 85973 - RNA, 22 nt, Homo sapiens
agcacauuaguaucuaagaaca

SEQ ID NO: 85974 - RNA, 22 nt, Homo sapiens
aaucccugagcuagacacaaag

SEQ ID NO: 85975 - RNA, 22 nt, Homo sapiens
aaguagcagaggcaagacuuga

SEQ ID NO: 85976 - RNA, 22 nt, Homo sapiens
uauugcuaaaacucaugguugc

SEQ ID NO: 85977 - RNA, 22 nt, Homo sapiens
uauuaguuuucuguggauuaca

SEQ ID NO: 85978 - RNA, 22 nt, Homo sapiens
uaucccuguggacuucccaaca

SEQ ID NO: 85979 - RNA, 22 nt, Homo sapiens
guaucccuugcuaucugaaucu

SEQ ID NO: 85980 - RNA, 22 nt, Homo sapiens
gcccugauacauucuucugccu

SEQ ID NO: 85981 - RNA, 19 nt, Homo sapiens
ucaguagugcacauaagcc

SEQ ID NO: 85982 - RNA, 21 nt, Homo sapiens
uccugagagaggaguaacucu

SEQ ID NO: 85983 - RNA, 22 nt, Homo sapiens
uccugagacugaggagcuuugg

SEQ ID NO: 85984 - RNA, 21 nt, Homo sapiens
ugacauguugguuugcugcac

SEQ ID NO: 85985 - RNA, 22 nt, Homo sapiens
ugacauguagagaacuucucau

SEQ ID NO: 85986 - RNA, 22 nt, Homo sapiens
ugcauaugucuuuauaguagca

SEQ ID NO: 85987 - RNA, 22 nt, Homo sapiens
ugcacacucuguaugagaaucu

SEQ ID NO: 85988 - RNA, 22 nt, Homo sapiens
ugauaagugagauagcaaguga

SEQ ID NO: 85989 - RNA, 22 nt, Homo sapiens
ugccuaguggccuuaugaguau

SEQ ID NO: 85990 - RNA, 20 nt, Homo sapiens
gacauguuuuguggccuaac

SEQ ID NO: 85991 - RNA, 22 nt, Homo sapiens
gacauguuuuuuaagguuuaug

SEQ ID NO: 85992 - RNA, 22 nt, Homo sapiens
gaaugcuaaguuuccucccuau

SEQ ID NO: 85993 - RNA, 22 nt, Homo sapiens
gacauguuucucucuguuuacu

SEQ ID NO: 85994 - RNA, 22 nt, Homo sapiens
gauaaagauagcaauagggaca

SEQ ID NO: 85995 - RNA, 22 nt, Homo sapiens
gauugguugaaaguagaauacu

SEQ ID NO: 85996 - RNA, 22 nt, Homo sapiens
caugucuuuuaaacauucaacu

SEQ ID NO: 85997 - RNA, 20 nt, Homo sapiens
cagagcaaagcaguccuggc

SEQ ID NO: 85998 - RNA, 22 nt, Homo sapiens
acccuguaguuagaaacuuuca

SEQ ID NO: 85999 - RNA, 22 nt, Homo sapiens
acccuguaggugcuggcagaga

SEQ ID NO: 86000 - RNA, 22 nt, Homo sapiens
acauaaagaagcaggacauugu

SEQ ID NO: 86001 - RNA, 22 nt, Homo sapiens
agagcaaugggugaauauuaaa

SEQ ID NO: 86002 - RNA, 18 nt, Homo sapiens
agagcuaugaacauaugc

SEQ ID NO: 86003 - RNA, 22 nt, Homo sapiens
agguaagucucuaauuaugaau

SEQ ID NO: 86004 - RNA, 22 nt, Homo sapiens
augagguaauaaguccuuggaa

SEQ ID NO: 86005 - RNA, 22 nt, Homo sapiens
auguaguaugaagaagaugcuu

SEQ ID NO: 86006 - RNA, 20 nt, Homo sapiens
auguaauguaugauauguac

SEQ ID NO: 86007 - RNA, 22 nt, Homo sapiens
agguauguaugucuguacagcg

SEQ ID NO: 86008 - RNA, 19 nt, Homo sapiens
auaauuagcagugaggaca

SEQ ID NO: 86009 - RNA, 22 nt, Homo sapiens
auauguauuuuaacguguaagg

SEQ ID NO: 86010 - RNA, 22 nt, Homo sapiens
uugauauguggaauauuuaucu

SEQ ID NO: 86011 - RNA, 22 nt, Homo sapiens
uguuuguuugauaugggauaaa

SEQ ID NO: 86012 - RNA, 22 nt, Homo sapiens
uuaguaguuugauaggaauagc

SEQ ID NO: 86013 - RNA, 22 nt, Homo sapiens
uuagugcaaacucuucaaugcu

SEQ ID NO: 86014 - RNA, 22 nt, Homo sapiens
aauuaguaaccuaauuccaucu

SEQ ID NO: 86015 - RNA, 22 nt, Homo sapiens
acugcaaugucgaauagagaug

SEQ ID NO: 86016 - RNA, 22 nt, Homo sapiens
agacccuguauguguuuaguuu

SEQ ID NO: 86017 - RNA, 22 nt, Homo sapiens
aggugcuaucugguuuuauagu

SEQ ID NO: 86018 - RNA, 22 nt, Homo sapiens
auaugacuuuccucuacuuccu

SEQ ID NO: 86019 - RNA, 23 nt, Homo sapiens
auaaugcaaguggugguaaucug

SEQ ID NO: 86020 - RNA, 22 nt, Homo sapiens
auauagcaaugaaagagaugaa

SEQ ID NO: 86021 - RNA, 22 nt, Homo sapiens
aacagacugucacauaaaauug

SEQ ID NO: 86022 - RNA, 22 nt, Homo sapiens
aaagugcacuuggaagagggcc

SEQ ID NO: 86023 - RNA, 22 nt, Homo sapiens
ugacaacugauuaacuccuuua

SEQ ID NO: 86024 - RNA, 20 nt, Homo sapiens
ugaauguaauuacagaugua

SEQ ID NO: 86025 - RNA, 22 nt, Homo sapiens
ugauaagugaaagugcucuauc

SEQ ID NO: 86026 - RNA, 22 nt, Homo sapiens
ugaguauguuuaaugugacaau

SEQ ID NO: 86027 - RNA, 22 nt, Homo sapiens
ugaguaugaguucaggaaaggc

SEQ ID NO: 86028 - RNA, 22 nt, Homo sapiens
ugaguauguuuagaaguaaagg

SEQ ID NO: 86029 - RNA, 22 nt, Homo sapiens
ugagcaauaaaguuacacaguu

SEQ ID NO: 86030 - RNA, 22 nt, Homo sapiens
uuugguuauuugaaacuagcau

SEQ ID NO: 86031 - RNA, 22 nt, Homo sapiens
uugauuagugacuggcuacacg

SEQ ID NO: 86032 - RNA, 22 nt, Homo sapiens
uuacauguuguggguuguggcc

SEQ ID NO: 86033 - RNA, 22 nt, Homo sapiens
uguuuguuugugauacgguaca

SEQ ID NO: 86034 - RNA, 20 nt, Homo sapiens
ugugauuauuuaguugcaug

SEQ ID NO: 86035 - RNA, 22 nt, Homo sapiens
gaaugcuaaguuuccucccugu

SEQ ID NO: 86036 - RNA, 22 nt, Homo sapiens
cugauugugcagagguguaauu

SEQ ID NO: 86037 - RNA, 22 nt, Homo sapiens
gguagacucuguaagugaucau

SEQ ID NO: 86038 - RNA, 22 nt, Homo sapiens
uaauagcaguguuacuaggacu

SEQ ID NO: 86039 - RNA, 22 nt, Homo sapiens
uaagucuuuuuggaguuuauaa

SEQ ID NO: 86040 - RNA, 22 nt, Homo sapiens
uaaguaguguugagacaaguuu

SEQ ID NO: 86041 - RNA, 22 nt, Homo sapiens
uaguagcauaccuaaguauacu

SEQ ID NO: 86042 - RNA, 22 nt, Homo sapiens
uaggugauccauuuguauuuua

SEQ ID NO: 86043 - RNA, 22 nt, Homo sapiens
uaugagguagguaugacuauca

SEQ ID NO: 86044 - RNA, 22 nt, Homo sapiens
uaugccucuucauaaaguauga

SEQ ID NO: 86045 - RNA, 22 nt, Homo sapiens
uaugcacaugcaugcuugaaua

SEQ ID NO: 86046 - RNA, 22 nt, Homo sapiens
uauuaguuguaugauucccaag

SEQ ID NO: 86047 - RNA, 22 nt, Homo sapiens
uauuagugccuaagucuuaggg

SEQ ID NO: 86048 - RNA, 22 nt, Homo sapiens
uauugauuaauugugauuaggc

SEQ ID NO: 86049 - RNA, 22 nt, Homo sapiens
uauuugauugacuuuagcagga

SEQ ID NO: 86050 - RNA, 22 nt, Homo sapiens
uauuguuaaagauguuaaugau

SEQ ID NO: 86051 - RNA, 22 nt, Homo sapiens
uacuucauucuugaccuugcau

SEQ ID NO: 86052 - RNA, 22 nt, Homo sapiens
uaacugcaaccucugccugcug

SEQ ID NO: 86053 - RNA, 21 nt, Homo sapiens
uaaagcuagaaccuuagcuuu

SEQ ID NO: 86054 - RNA, 22 nt, Homo sapiens
uagcaguauugaaagaugaggg

SEQ ID NO: 86055 - RNA, 22 nt, Homo sapiens
uagguaguuacacagcaaugua

SEQ ID NO: 86056 - RNA, 22 nt, Homo sapiens
uaguuguugcagguaggaugua

SEQ ID NO: 86057 - RNA, 22 nt, Homo sapiens
uauggguauuuuauacauaacc

SEQ ID NO: 86058 - RNA, 22 nt, Homo sapiens
gugaaaagaugagcaccauaca

SEQ ID NO: 86059 - RNA, 22 nt, Homo sapiens
ugaauagugucacaauaaacau

SEQ ID NO: 86060 - RNA, 23 nt, Homo sapiens
ucaguagucauugggaaagugug

SEQ ID NO: 86061 - RNA, 21 nt, Homo sapiens
ucauaagcucaacaucuguag

SEQ ID NO: 86062 - RNA, 22 nt, Homo sapiens
ugcuagaugaaguuugaguuuu

SEQ ID NO: 86063 - RNA, 22 nt, Homo sapiens
ugauccccucacauuauuauau

SEQ ID NO: 86064 - RNA, 22 nt, Homo sapiens
ugauccuguccuuaugauguua

SEQ ID NO: 86065 - RNA, 22 nt, Homo sapiens
ugauaugucacuugaucauggu

SEQ ID NO: 86066 - RNA, 19 nt, Homo sapiens
ugaguauauuguauucauu

SEQ ID NO: 86067 - RNA, 22 nt, Homo sapiens
caucccugaaccccagaaaucu

SEQ ID NO: 86068 - RNA, 20 nt, Homo sapiens
cagucauagacaucagaguc

SEQ ID NO: 86069 - RNA, 22 nt, Homo sapiens
caguaguagccccuuagaugga

SEQ ID NO: 86070 - RNA, 22 nt, Homo sapiens
cugauugucuauuuaguucacu

SEQ ID NO: 86071 - RNA, 22 nt, Homo sapiens
cugauugucaucaauauuauua

SEQ ID NO: 86072 - RNA, 22 nt, Homo sapiens
cuagauuauccaacuuauuagc

SEQ ID NO: 86073 - RNA, 20 nt, Homo sapiens
gacauguugguuugcugcac

SEQ ID NO: 86074 - RNA, 22 nt, Homo sapiens
gagauaauagcuauaggaucuu

SEQ ID NO: 86075 - RNA, 22 nt, Homo sapiens
gauuagugacguugagcacugu

SEQ ID NO: 86076 - RNA, 22 nt, Homo sapiens
aauuaguuggcugggugcggug

SEQ ID NO: 86077 - RNA, 22 nt, Homo sapiens
aauuaguugucgugagaguggu

SEQ ID NO: 86078 - RNA, 19 nt, Homo sapiens
aauaaugccagaugucugu

SEQ ID NO: 86079 - RNA, 22 nt, Homo sapiens
auagcauaucccacaugucaga

SEQ ID NO: 86080 - RNA, 22 nt, Homo sapiens
auaugcuaauuuuuagucgagc

SEQ ID NO: 86081 - RNA, 22 nt, Homo sapiens
aguagcauuggggggcauccuc

SEQ ID NO: 86082 - RNA, 22 nt, Homo sapiens
aucccugagaacuuuuaauguu

SEQ ID NO: 86083 - RNA, 22 nt, Homo sapiens
augcuacuggauuuguauaaau

SEQ ID NO: 86084 - RNA, 22 nt, Homo sapiens
augcuacuggacaauggugacu

SEQ ID NO: 86085 - RNA, 22 nt, Homo sapiens
uuaaugcuuuugggauauuucu

SEQ ID NO: 86086 - RNA, 22 nt, Homo sapiens
uuagcacaucuuucuauguaag

SEQ ID NO: 86087 - RNA, 22 nt, Homo sapiens
uguaugcuuuugagagauauuu

SEQ ID NO: 86088 - RNA, 22 nt, Homo sapiens
uugauuagauccaguugauuga

SEQ ID NO: 86089 - RNA, 22 nt, Puumala virus
ugagauaagugauguauuggau

SEQ ID NO: 86090 - RNA, 22 nt, Homo sapiens
auaaucacacccagguuaaaug

SEQ ID NO: 86091 - RNA, 22 nt, Homo sapiens
auaucacaaacaagucuguacu

SEQ ID NO: 86092 - RNA, 22 nt, Homo sapiens
auaucacaggaaaggaagauac

SEQ ID NO: 86093 - RNA, 22 nt, Homo sapiens
uacaauagugacaaaucagcau

SEQ ID NO: 86094 - RNA, 22 nt, Homo sapiens
cuuuacaguuggacucacgagg

SEQ ID NO: 86095 - RNA, 22 nt, Homo sapiens
auuacuuugcaccaaccuaaua

SEQ ID NO: 86096 - RNA, 22 nt, Homo sapiens
ccaaaguauuuucacugauauc

SEQ ID NO: 86097 - RNA, 22 nt, Homo sapiens
uuaaaugcauagaauguguagu

SEQ ID NO: 86098 - RNA, 22 nt, Homo sapiens
uuaaaggcauguacacuagagu

SEQ ID NO: 86099 - RNA, 22 nt, Homo sapiens
uuaagcaaagguaacaugagaa

SEQ ID NO: 86100 - RNA, 22 nt, Homo sapiens
uuuaaagcuaaaauauguuuau

SEQ ID NO: 86101 - RNA, 22 nt, Homo sapiens
uuuaaagcuccaagcaugucug

SEQ ID NO: 86102 - RNA, 22 nt, Homo sapiens
uuaccacagugccugucuaaug

SEQ ID NO: 86103 - RNA, 22 nt, Homo sapiens
aguaucacaggcaaaacagaau

SEQ ID NO: 86104 - RNA, 22 nt, Homo sapiens
aauagugcugcaaaaacauacg

SEQ ID NO: 86105 - RNA, 22 nt, Homo sapiens
aaucaacauuguuuuaagucaa

SEQ ID NO: 86106 - RNA, 22 nt, Homo sapiens
cuuaaagcgaauauugguggua

SEQ ID NO: 86107 - RNA, 22 nt, Homo sapiens
cauacaagcuacaaucacaaag

SEQ ID NO: 86108 - RNA, 21 nt, Homo sapiens
ugaucacaugaaaaccaugca

SEQ ID NO: 86109 - RNA, 23 nt, Homo sapiens
uauaacuuuuaauuuacuggccu

SEQ ID NO: 86110 - RNA, 22 nt, Homo sapiens
uaaagcuacaguauaugguauu

SEQ ID NO: 86111 - RNA, 22 nt, Homo sapiens
uaaagcgaggucuccuacaaga

SEQ ID NO: 86112 - RNA, 22 nt, Homo sapiens
ugacuuuagaauuuuauccaga

SEQ ID NO: 86113 - RNA, 22 nt, Homo sapiens
agcaauaugacauugcuacauc

SEQ ID NO: 86114 - RNA, 22 nt, Homo sapiens
uaaagcauguaauuagguuaga

SEQ ID NO: 86115 - RNA, 22 nt, Homo sapiens
uaaagccagugauuaugucucu

SEQ ID NO: 86116 - RNA, 22 nt, Homo sapiens
uaucacaaacuuagcaguuuaa

SEQ ID NO: 86117 - RNA, 22 nt, Homo sapiens
uaucacacuguuggauuugauu

SEQ ID NO: 86118 - RNA, 22 nt, Homo sapiens
uaucacacaucaugguaaaucu

SEQ ID NO: 86119 - RNA, 22 nt, Homo sapiens
uuuaaagcacggaguuuguggc

SEQ ID NO: 86120 - RNA, 22 nt, Homo sapiens
uuuaaagcaugacgagaagaag

SEQ ID NO: 86121 - RNA, 22 nt, Homo sapiens
caaaggcuguuauaggccagga

SEQ ID NO: 86122 - RNA, 22 nt, Homo sapiens
uuagcagcacaaaagcagacua

SEQ ID NO: 86123 - RNA, 22 nt, Homo sapiens
uuguaaagaucauaugcuguuc

SEQ ID NO: 86124 - RNA, 21 nt, Homo sapiens
ugcuuuggucauacuucuucc

SEQ ID NO: 86125 - RNA, 22 nt, Homo sapiens
ugugacagguagguaauuuuug

SEQ ID NO: 86126 - RNA, 22 nt, Homo sapiens
cagagagcuugcccuuguauau

SEQ ID NO: 86127 - RNA, 22 nt, Homo sapiens
uuugguguauaaaaaugcuagu

SEQ ID NO: 86128 - RNA, 22 nt, Homo sapiens
gucauggguuaaagguggauac

SEQ ID NO: 86129 - RNA, 22 nt, Homo sapiens
ggaagacaguguggugauuccu

SEQ ID NO: 86130 - RNA, 22 nt, Homo sapiens
aucauuaguuguggaauucuug

SEQ ID NO: 86131 - RNA, 22 nt, Homo sapiens
uaagugaaggaaguguguuuac

SEQ ID NO: 86132 - RNA, 22 nt, Homo sapiens
ucauggggugcuuugcuagauu

SEQ ID NO: 86133 - RNA, 23 nt, Homo sapiens
ucccaagauggaccagaccaagg

SEQ ID NO: 86134 - RNA, 22 nt, Homo sapiens
ucaggugcagagaagaaauggg

SEQ ID NO: 86135 - RNA, 22 nt, Homo sapiens
cuggauagagauugaugaugcu

SEQ ID NO: 86136 - RNA, 18 nt, Homo sapiens
acucuguauguggagugg

SEQ ID NO: 86137 - RNA, 22 nt, Homo sapiens
auguaacuaucugagccauggg

SEQ ID NO: 86138 - RNA, 22 nt, Homo sapiens
ucugguggugaugagagacagu

SEQ ID NO: 86139 - RNA, 22 nt, Homo sapiens
ggaaagauguaauauuaucuaa

SEQ ID NO: 86140 - RNA, 22 nt, Homo sapiens
augacuauugcacuuuccuggu

SEQ ID NO: 86141 - RNA, 22 nt, Homo sapiens
uugagcucaucuucagggguga

SEQ ID NO: 86142 - RNA, 19 nt, Homo sapiens
ggcacugugugagugagga

SEQ ID NO: 86143 - RNA, 22 nt, Homo sapiens
ugcaccacugcaccccagucug

SEQ ID NO: 86144 - RNA, 22 nt, Homo sapiens
uaaacugcuugaggguaaguac

SEQ ID NO: 86145 - RNA, 22 nt, Homo sapiens
uucagagagggagggauaccua

SEQ ID NO: 86146 - RNA, 22 nt, Homo sapiens
uuaaaugcuagaauuuucuuug

SEQ ID NO: 86147 - RNA, 22 nt, Homo sapiens
auagugcuauggcagaccuuga

SEQ ID NO: 86148 - RNA, 22 nt, Homo sapiens
ucugucaaaucuuauguuguag

SEQ ID NO: 86149 - RNA, 22 nt, Homo sapiens
caggcauuguccaugcugaagg

SEQ ID NO: 86150 - RNA, 21 nt, Homo sapiens
auagugcuagagaguagcagg

SEQ ID NO: 86151 - RNA, 22 nt, Homo sapiens
gcugcuguuuaguuucuccugg

SEQ ID NO: 86152 - RNA, 22 nt, Homo sapiens
ugugaauguaagaaaauccaac

SEQ ID NO: 86153 - RNA, 22 nt, Homo sapiens
ugugauaguuggcuaaagcagu

SEQ ID NO: 86154 - RNA, 23 nt, Homo sapiens
ucaugaggccauucaaauccauu

SEQ ID NO: 86155 - RNA, 22 nt, Homo sapiens
uaagugaauuucacuacugagu

SEQ ID NO: 86156 - RNA, 22 nt, Homo sapiens
uuccacaggguugaacuaguuu

SEQ ID NO: 86157 - RNA, 22 nt, Homo sapiens
ugugcuugaauuuaguagcuua

SEQ ID NO: 86158 - RNA, 22 nt, Homo sapiens
acccugucaaaauggaccaauc

SEQ ID NO: 86159 - RNA, 22 nt, Homo sapiens
cugaauguccaggcagagguuu

SEQ ID NO: 86160 - RNA, 22 nt, Homo sapiens
agcaccacauacuacagagaua

SEQ ID NO: 86161 - RNA, 22 nt, Homo sapiens
aagugcuggccuacucaaucga

SEQ ID NO: 86162 - RNA, 22 nt, Homo sapiens
aagugcuguaugggagccuagg

SEQ ID NO: 86163 - RNA, 22 nt, Homo sapiens
ugcaccacuguacuccagucug

SEQ ID NO: 86164 - RNA, 20 nt, Homo sapiens
cucacagacagcuucuuucu

SEQ ID NO: 86165 - RNA, 22 nt, Homo sapiens
agcaguguggccuuagacccgg

SEQ ID NO: 86166 - RNA, 22 nt, Homo sapiens
ccugguguuuugauggucgggu

SEQ ID NO: 86167 - RNA, 22 nt, Homo sapiens
cugagcccauucuggggagaag

SEQ ID NO: 86168 - RNA, 22 nt, Homo sapiens
guguucaaacccaggucugucu

SEQ ID NO: 86169 - RNA, 22 nt, Homo sapiens
ggagugucugugcuggucaaag

SEQ ID NO: 86170 - RNA, 22 nt, Homo sapiens
aucacagaguuaaaacuuucuu

SEQ ID NO: 86171 - RNA, 22 nt, Homo sapiens
uucugguuaauacuugcaaaaa

SEQ ID NO: 86172 - RNA, 17 nt, Homo sapiens
augugaauguucaaaua

SEQ ID NO: 86173 - RNA, 19 nt, Homo sapiens
ucuguaguuagggcuacag

SEQ ID NO: 86174 - RNA, 16 nt, Homo sapiens
ucccaccauugcuugu

SEQ ID NO: 86175 - RNA, 22 nt, Homo sapiens
uaaaugacugucaguagaugaa

SEQ ID NO: 86176 - RNA, 22 nt, Homo sapiens
acacuguugacauuuuguagug

SEQ ID NO: 86177 - RNA, 22 nt, Homo sapiens
uaugacuuguuuucuggucugc

SEQ ID NO: 86178 - RNA, 22 nt, Homo sapiens
ugaguguccaaguaaggugaaa

SEQ ID NO: 86179 - RNA, 22 nt, Homo sapiens
ugucaaggaaugucauugguuu

SEQ ID NO: 86180 - RNA, 22 nt, Homo sapiens
gagacggagucucgcucuguca

SEQ ID NO: 86181 - RNA, 22 nt, Homo sapiens
uguguaauacucuaaugaugca

SEQ ID NO: 86182 - RNA, 22 nt, Homo sapiens
uagccucacaaagugcuuaaga

SEQ ID NO: 86183 - RNA, 22 nt, Homo sapiens
uuggcagcauuccagccaagca

SEQ ID NO: 86184 - RNA, 22 nt, Homo sapiens
uucugagguuauauucucucaa

SEQ ID NO: 86185 - RNA, 22 nt, Homo sapiens
uugugguuuuuaaaacuaggug

SEQ ID NO: 86186 - RNA, 22 nt, Homo sapiens
auaugcauacauguaugcagga

SEQ ID NO: 86187 - RNA, 22 nt, Homo sapiens
agugacaugggaucaaaucuga

SEQ ID NO: 86188 - RNA, 20 nt, Homo sapiens
acacugugcuaaggauuuuc

SEQ ID NO: 86189 - RNA, 22 nt, Homo sapiens
auuggcagaaaucuuuauagua

SEQ ID NO: 86190 - RNA, 22 nt, Homo sapiens
uggagugagaacuucaaugaug

SEQ ID NO: 86191 - RNA, 22 nt, Homo sapiens
uaagugcuugacuuugauguuu

SEQ ID NO: 86192 - RNA, 22 nt, Homo sapiens
gucuggcuuaucucacuuacca

SEQ ID NO: 86193 - RNA, 22 nt, Homo sapiens
uccccaguaggcaauuaacacc

SEQ ID NO: 86194 - RNA, 22 nt, Homo sapiens
caugacacuggcauguuucuuu

SEQ ID NO: 86195 - RNA, 22 nt, Homo sapiens
agagaccuguaaaguucaggca

SEQ ID NO: 86196 - RNA, 22 nt, Homo sapiens
cauggcacaucuuuucugacua

SEQ ID NO: 86197 - RNA, 22 nt, Homo sapiens
uuggauccauccugucuucucu

SEQ ID NO: 86198 - RNA, 22 nt, Homo sapiens
uuagcagcaugagaauggacua

SEQ ID NO: 86199 - RNA, 22 nt, Homo sapiens
gagaacugagugugcuggcgga

SEQ ID NO: 86200 - RNA, 22 nt, Homo sapiens
acccaguguugggcagaacugu

SEQ ID NO: 86201 - RNA, 22 nt, Homo sapiens
ucacacgugaacucaucacaga

SEQ ID NO: 86202 - RNA, 22 nt, Homo sapiens
ggcagguaaggagugggagccu

SEQ ID NO: 86203 - RNA, 22 nt, Homo sapiens
ucugugcauuacacuuuucuca

SEQ ID NO: 86204 - RNA, 22 nt, Homo sapiens
ucaggugcaguggcucugaccu

SEQ ID NO: 86205 - RNA, 22 nt, Homo sapiens
cucugagguuauucguaauauu

SEQ ID NO: 86206 - RNA, 22 nt, Homo sapiens
uggcuagaccugcauaacagcu

SEQ ID NO: 86207 - RNA, 22 nt, Homo sapiens
gcaugguaguaaccuacauuug

SEQ ID NO: 86208 - RNA, 22 nt, Homo sapiens
cuaggcuguagagaaguucagu

SEQ ID NO: 86209 - RNA, 22 nt, Homo sapiens
auggcacugaagcguauugaca

SEQ ID NO: 86210 - RNA, 22 nt, Homo sapiens
ucacagacauugaggggaccuu

SEQ ID NO: 86211 - RNA, 22 nt, Homo sapiens
gugucaaggaugccugucaggc

SEQ ID NO: 86212 - RNA, 22 nt, Homo sapiens
aagcuggagugcaguggugcga

SEQ ID NO: 86213 - RNA, 22 nt, Homo sapiens
ucacagucacugucacguugaa

SEQ ID NO: 86214 - RNA, 22 nt, Homo sapiens
uguagcagccauaaacacagug

SEQ ID NO: 86215 - RNA, 22 nt, Homo sapiens
ugacauagcuauuaagugaugc

SEQ ID NO: 86216 - RNA, 22 nt, Homo sapiens
uuagcagcaugaaaauggacug

SEQ ID NO: 86217 - RNA, 22 nt, Homo sapiens
aucagaaucucuagugggacca

SEQ ID NO: 86218 - RNA, 23 nt, Homo sapiens
auaagccuuuucuuucugcccca

SEQ ID NO: 86219 - RNA, 21 nt, Homo sapiens
uaucagagacauugagaggca

SEQ ID NO: 86220 - RNA, 22 nt, Homo sapiens
uugggguaggaauauggaauga

SEQ ID NO: 86221 - RNA, 22 nt, Homo sapiens
cucccagugacccaggaacagg

SEQ ID NO: 86222 - RNA, 22 nt, Homo sapiens
ugugaauggugcuuccuagaug

SEQ ID NO: 86223 - RNA, 22 nt, Homo sapiens
cugacuuuagaacccaaaaagu

SEQ ID NO: 86224 - RNA, 18 nt, Homo sapiens
ucauagaucaugacagug

SEQ ID NO: 86225 - RNA, 22 nt, Homo sapiens
cugggucaguuucugauuauug

SEQ ID NO: 86226 - RNA, 22 nt, Homo sapiens
aucacagaacuuugagcagaga

SEQ ID NO: 86227 - RNA, 22 nt, Homo sapiens
ugucaguuuuaacuagggaaua

SEQ ID NO: 86228 - RNA, 22 nt, Homo sapiens
aagcuggauuuaguguggagca

SEQ ID NO: 86229 - RNA, 22 nt, Homo sapiens
uguucaauucccaccuaugagu

SEQ ID NO: 86230 - RNA, 23 nt, Homo sapiens
cacugggcagcagguguucccag

SEQ ID NO: 86231 - RNA, 22 nt, Homo sapiens
ugaauagugucacaauaaacau

SEQ ID NO: 86232 - RNA, 22 nt, Homo sapiens
uuggcagcuguggaaucugggc

SEQ ID NO: 86233 - RNA, 22 nt, Homo sapiens
ugcaccacacuccauccugggc

SEQ ID NO: 86234 - RNA, 22 nt, Homo sapiens
augacauugaaaagcaagugga

SEQ ID NO: 86235 - RNA, 22 nt, Homo sapiens
auacuguuuuacaucauugccu

SEQ ID NO: 86236 - RNA, 22 nt, Homo sapiens
gagaacugacauuaucguguau

SEQ ID NO: 86237 - RNA, 22 nt, Homo sapiens
caccacagccauuauugucccc

SEQ ID NO: 86238 - RNA, 22 nt, Homo sapiens
uucuagcacuuugggagacuga

SEQ ID NO: 86239 - RNA, 22 nt, Homo sapiens
uuggucagcucaauggagaggg

SEQ ID NO: 86240 - RNA, 22 nt, Homo sapiens
uggacaugaagggcacaggagg

SEQ ID NO: 86241 - RNA, 21 nt, Homo sapiens
aucagagacccaggcuuccuc

SEQ ID NO: 86242 - RNA, 20 nt, Homo sapiens
acagcacugguuucaagcaa

SEQ ID NO: 86243 - RNA, 22 nt, Homo sapiens
caaugcauuauucucccacuuc

SEQ ID NO: 86244 - RNA, 22 nt, Homo sapiens
cucacugugguguccuuaggua

SEQ ID NO: 86245 - RNA, 22 nt, Homo sapiens
agucagugcauaagaaugaagu

SEQ ID NO: 86246 - RNA, 22 nt, Homo sapiens
gucacagaggcuaagaccccac

SEQ ID NO: 86247 - RNA, 22 nt, Homo sapiens
guagguaaguacuucuggugag

SEQ ID NO: 86248 - RNA, 22 nt, Homo sapiens
auauggguauuaagaaucaaaa

SEQ ID NO: 86249 - RNA, 22 nt, Homo sapiens
ugacuuuagaauuuuauccaga

SEQ ID NO: 86250 - RNA, 22 nt, Homo sapiens
agagagcuuuaacuacccauuu

SEQ ID NO: 86251 - RNA, 22 nt, Homo sapiens
uuuugcucuucggaagagcuug

SEQ ID NO: 86252 - RNA, 22 nt, Homo sapiens
agaaccaaucccacauggauac

SEQ ID NO: 86253 - RNA, 22 nt, Homo sapiens
gcugguguucaggcccucaguc

SEQ ID NO: 86254 - RNA, 22 nt, Homo sapiens
ugccuaggcuggagugcagugg

SEQ ID NO: 86255 - RNA, 22 nt, Homo sapiens
gugugguaggauugguuacuca

SEQ ID NO: 86256 - RNA, 22 nt, Homo sapiens
cauggcacagagaauguguucu

SEQ ID NO: 86257 - RNA, 22 nt, Homo sapiens
gaaaacugcuucucuggguuuc

SEQ ID NO: 86258 - RNA, 22 nt, Homo sapiens
ugugaauggugcugcaaugaac

SEQ ID NO: 86259 - RNA, 22 nt, Homo sapiens
uggcaccauccaggugucucua

SEQ ID NO: 86260 - RNA, 22 nt, Homo sapiens
acuauacuguaacuguauucag

SEQ ID NO: 86261 - RNA, 22 nt, Homo sapiens
augcacauggcuaacuuuuuuc

SEQ ID NO: 86262 - RNA, 22 nt, Homo sapiens
cugagagugguauguuuaagug

SEQ ID NO: 86263 - RNA, 22 nt, Homo sapiens
ucugagguuacugcuuuguaga

SEQ ID NO: 86264 - RNA, 22 nt, Homo sapiens
gagcucauuguugcuaaagaga

SEQ ID NO: 86265 - RNA, 22 nt, Homo sapiens
gcugagguucaagaagguuaaa

SEQ ID NO: 86266 - RNA, 21 nt, Homo sapiens
uggagugaagaguuuauugac

SEQ ID NO: 86267 - RNA, 22 nt, Homo sapiens
gcuaggagaucugcugcucucu

SEQ ID NO: 86268 - RNA, 22 nt, Homo sapiens
cacuuugguucaccugaguuuc

SEQ ID NO: 86269 - RNA, 22 nt, Homo sapiens
uagucacacacucaacuuuuca

SEQ ID NO: 86270 - RNA, 22 nt, Homo sapiens
cugaaaguuauucaggggcaag

SEQ ID NO: 86271 - RNA, 22 nt, Homo sapiens
guggcuagaaugaagguagcug

SEQ ID NO: 86272 - RNA, 22 nt, Homo sapiens
agaugguuuuguucacagcucu

SEQ ID NO: 86273 - RNA, 22 nt, Homo sapiens
cugugaagaaagucauugguag

SEQ ID NO: 86274 - RNA, 22 nt, Homo sapiens
uugaaggaggugcucacucucg

SEQ ID NO: 86275 - RNA, 22 nt, Homo sapiens
agguccacuuacuacuccuguu

SEQ ID NO: 86276 - RNA, 22 nt, Homo sapiens
uuacugcuagcugugugcucuu

SEQ ID NO: 86277 - RNA, 22 nt, Homo sapiens
ucacagacugagccaaauagag

SEQ ID NO: 86278 - RNA, 20 nt, Homo sapiens
ugaacugguuacuuucuguc

SEQ ID NO: 86279 - RNA, 22 nt, Homo sapiens
accgggcugagcgcaggccccg

SEQ ID NO: 86280 - RNA, 17 nt, Homo sapiens
agcaccacacucucuug

SEQ ID NO: 86281 - RNA, 22 nt, Homo sapiens
ugagacugagucucccucuguc

SEQ ID NO: 86282 - RNA, 17 nt, Homo sapiens
ugauaagugugagguga

SEQ ID NO: 86283 - RNA, 22 nt, Homo sapiens
agagaugauuaacauuuuggua

SEQ ID NO: 86284 - RNA, 22 nt, Homo sapiens
acugcacuccagccucgcaaca

SEQ ID NO: 86285 - RNA, 22 nt, Homo sapiens
augagguccuagccaacuuuuu

SEQ ID NO: 86286 - RNA, 22 nt, Homo sapiens
ugacagugugagacuuugucuc

SEQ ID NO: 86287 - RNA, 19 nt, Homo sapiens
acugcacuccaaccuccug

SEQ ID NO: 86288 - RNA, 19 nt, Homo sapiens
ugaccagggacagaaacca

SEQ ID NO: 86289 - RNA, 22 nt, Homo sapiens
auauuggccuaaaauucucuuu

SEQ ID NO: 86290 - RNA, 22 nt, Homo sapiens
ucauggggugagcuacaggcac

SEQ ID NO: 86291 - RNA, 22 nt, Homo sapiens
auacaguguucugggaagaagu

SEQ ID NO: 86292 - RNA, 22 nt, Homo sapiens
uaacucugccuagugacauggu

SEQ ID NO: 86293 - RNA, 22 nt, Homo sapiens
auaaucaugucugaaaccuuug

SEQ ID NO: 86294 - RNA, 22 nt, Homo sapiens
ggcuagagaauagugccacuaa

SEQ ID NO: 86295 - RNA, 22 nt, Homo sapiens
uuauuagguugguggaaaagua

SEQ ID NO: 86296 - RNA, 22 nt, Homo sapiens
ucaggucauuccaggagggcca

SEQ ID NO: 86297 - RNA, 20 nt, Homo sapiens
acugcacuucagccugcugg

SEQ ID NO: 86298 - RNA, 22 nt, Homo sapiens
gugggguaggguaggacucaac

SEQ ID NO: 86299 - RNA, 22 nt, Homo sapiens
auuagguauuuguccuaaauau

SEQ ID NO: 86300 - RNA, 22 nt, Homo sapiens
ucaguguuuggaaucucaauuu

SEQ ID NO: 86301 - RNA, 22 nt, Homo sapiens
cacugggccaucacuuaauauu

SEQ ID NO: 86302 - RNA, 22 nt, Homo sapiens
cugaggaaguucuuuaacaguu

SEQ ID NO: 86303 - RNA, 22 nt, Homo sapiens
uagugaaugucacuggcuguug

SEQ ID NO: 86304 - RNA, 22 nt, Homo sapiens
augugcacaugcuuacauguga

SEQ ID NO: 86305 - RNA, 22 nt, Homo sapiens
uccaguuuuguuaacauauggu

SEQ ID NO: 86306 - RNA, 22 nt, Homo sapiens
cugaggucugaauccagguauc

SEQ ID NO: 86307 - RNA, 22 nt, Homo sapiens
uaaacugcuugaaaugguguca

SEQ ID NO: 86308 - RNA, 21 nt, Homo sapiens
uuuguccaccuguguucacca

SEQ ID NO: 86309 - RNA, 22 nt, Homo sapiens
gagaacugagauaagugauauu

SEQ ID NO: 86310 - RNA, 22 nt, Homo sapiens
ucagcagugccccacucuacug

SEQ ID NO: 86311 - RNA, 22 nt, Homo sapiens
gugaggucguagucauaggcaa

SEQ ID NO: 86312 - RNA, 22 nt, Homo sapiens
ugagguuauuuguucaagaagu

SEQ ID NO: 86313 - RNA, 22 nt, Homo sapiens
caagugcuuucuuggggauuua

SEQ ID NO: 86314 - RNA, 22 nt, Homo sapiens
uugauauucugagaagcugaag

SEQ ID NO: 86315 - RNA, 22 nt, Homo sapiens
accucagcccggggaaguugag

SEQ ID NO: 86316 - RNA, 22 nt, Homo sapiens
aaacugaucugaaggccaggcu

SEQ ID NO: 86317 - RNA, 22 nt, Homo sapiens
gaaagauuuuaacugggagacu

SEQ ID NO: 86318 - RNA, 22 nt, Homo sapiens
uugugguaggaugaagagauga

SEQ ID NO: 86319 - RNA, 22 nt, Homo sapiens
aaugcacauauauuuccuuauu

SEQ ID NO: 86320 - RNA, 22 nt, Homo sapiens
gcuacugucuaucugugcuucu

SEQ ID NO: 86321 - RNA, 22 nt, Homo sapiens
agcaccacaauuuccugccuaa

SEQ ID NO: 86322 - RNA, 22 nt, Homo sapiens
gucaagauuuguaggacagaga

SEQ ID NO: 86323 - RNA, 22 nt, Homo sapiens
uuaauacucuucuaaguagucc

SEQ ID NO: 86324 - RNA, 22 nt, Homo sapiens
aaucacuaugccaugaaguaca

SEQ ID NO: 86325 - RNA, 22 nt, Homo sapiens
aaaguggugggauuccaggcau

SEQ ID NO: 86326 - RNA, 22 nt, Homo sapiens
ucugagguaggugcauggauac

SEQ ID NO: 86327 - RNA, 22 nt, Homo sapiens
uucacacugggccuacucugug

SEQ ID NO: 86328 - RNA, 23 nt, Homo sapiens
ccacacuguuuagaauggcauca

SEQ ID NO: 86329 - RNA, 22 nt, Homo sapiens
caagugaauaguugcucucaga

SEQ ID NO: 86330 - RNA, 22 nt, Homo sapiens
ucagugggcuauguaauuaacu

SEQ ID NO: 86331 - RNA, 20 nt, Homo sapiens
ugucaaggaauucccaaauc

SEQ ID NO: 86332 - RNA, 22 nt, Homo sapiens
uggagugcaauggugagaucuu

SEQ ID NO: 86333 - RNA, 22 nt, Homo sapiens
gugugguauuauaacuagguau

SEQ ID NO: 86334 - RNA, 18 nt, Homo sapiens
ucccucagaauuauagaa

SEQ ID NO: 86335 - RNA, 22 nt, Homo sapiens
acagucuggagaaugggugcuc

SEQ ID NO: 86336 - RNA, 22 nt, Homo sapiens
acugagaucuuuaaauaaauaa

SEQ ID NO: 86337 - RNA, 22 nt, Homo sapiens
auggcacuuuggacugcuagau

SEQ ID NO: 86338 - RNA, 22 nt, Homo sapiens
cgugaauguuuuggucuuucac

SEQ ID NO: 86339 - RNA, 22 nt, Homo sapiens
augcccauuuguuuucugaaag

SEQ ID NO: 86340 - RNA, 22 nt, Homo sapiens
ugagacugagucuugcucuauu

SEQ ID NO: 86341 - RNA, 22 nt, Homo sapiens
ugcugcuguuguuguuacuagc

SEQ ID NO: 86342 - RNA, 22 nt, Homo sapiens
aucagaaucucuagaggacugu

SEQ ID NO: 86343 - RNA, 22 nt, Homo sapiens
uaccacagucauuacacuugua

SEQ ID NO: 86344 - RNA, 22 nt, Homo sapiens
aagcuggauuucgcauccuguu

SEQ ID NO: 86345 - RNA, 22 nt, Homo sapiens
ugaguucuuccuaucucugccu

SEQ ID NO: 86346 - RNA, 22 nt, Homo sapiens
gacagugugauacuuagucuca

SEQ ID NO: 86347 - RNA, 22 nt, Homo sapiens
ugagacugaguuuugcucuugu

SEQ ID NO: 86348 - RNA, 22 nt, Homo sapiens
uuccacaaugguugaacuagcu

SEQ ID NO: 86349 - RNA, 22 nt, Homo sapiens
acccugucauccacauggugcu

SEQ ID NO: 86350 - RNA, 22 nt, Homo sapiens
guaacucugucacuuacuaguu

SEQ ID NO: 86351 - RNA, 22 nt, Homo sapiens
uuccacaaugguugaacuaguu

SEQ ID NO: 86352 - RNA, 22 nt, Homo sapiens
cagguacuucugggcugagcag

SEQ ID NO: 86353 - RNA, 22 nt, Homo sapiens
aagaguuaguaaaauuuccucu

SEQ ID NO: 86354 - RNA, 22 nt, Homo sapiens
aacugguauugaauuuaggaag

SEQ ID NO: 86355 - RNA, 22 nt, Homo sapiens
cugugcauguaugcgugaguuc

SEQ ID NO: 86356 - RNA, 22 nt, Homo sapiens
gugcaauguuaauuacuugacu

SEQ ID NO: 86357 - RNA, 20 nt, Homo sapiens
auuagagcuacauggcuaca

SEQ ID NO: 86358 - RNA, 21 nt, Homo sapiens
uagagagcaauaccuccagag

SEQ ID NO: 86359 - RNA, 18 nt, Homo sapiens
ugagauacuagaauaggu

SEQ ID NO: 86360 - RNA, 22 nt, Homo sapiens
aagcaggugucugugucuguaa

SEQ ID NO: 86361 - RNA, 22 nt, Homo sapiens
uccaguguuucuuccacuauuu

SEQ ID NO: 86362 - RNA, 22 nt, Homo sapiens
gucacaguguuuguucauccca

SEQ ID NO: 86363 - RNA, 22 nt, Homo sapiens
uugcagugugacgacuauauuu

SEQ ID NO: 86364 - RNA, 22 nt, Homo sapiens
aucugcacaucuguguuuuugu

SEQ ID NO: 86365 - RNA, 22 nt, Homo sapiens
augguaagcugaaaauaucgaa

SEQ ID NO: 86366 - RNA, 22 nt, Homo sapiens
uuggccuuucucuaaauacuuu

SEQ ID NO: 86367 - RNA, 22 nt, Homo sapiens
ugcaccacugcacugccugggu

SEQ ID NO: 86368 - RNA, 19 nt, Homo sapiens
uggcacauguauacuuaug

SEQ ID NO: 86369 - RNA, 22 nt, Homo sapiens
uggcauggaacuacuuugaaac

SEQ ID NO: 86370 - RNA, 22 nt, Homo sapiens
ggcuagaauagggauagaccuu

SEQ ID NO: 86371 - RNA, 22 nt, Homo sapiens
ucccuagacuccugccuuucag

SEQ ID NO: 86372 - RNA, 23 nt, Homo sapiens
ucugcggguguggacccuagugc

SEQ ID NO: 86373 - RNA, 22 nt, Homo sapiens
auggcccugggaaaggaggcau

SEQ ID NO: 86374 - RNA, 22 nt, Homo sapiens
cuuugugugggccaagggcugg

SEQ ID NO: 86375 - RNA, 22 nt, Homo sapiens
uggcuacagaaaguacuaguga

SEQ ID NO: 86376 - RNA, 22 nt, Homo sapiens
uuggcagcacgcaguccagagg

SEQ ID NO: 86377 - RNA, 22 nt, Homo sapiens
ucacagauaaauaaagaugauu

SEQ ID NO: 86378 - RNA, 22 nt, Homo sapiens
agcggcuguuccccuggucuau

SEQ ID NO: 86379 - RNA, 22 nt, Homo sapiens
gugcaagagugacugcaguuuu

SEQ ID NO: 86380 - RNA, 22 nt, Homo sapiens
aucugcaaauaaugaagauugg

SEQ ID NO: 86381 - RNA, 22 nt, Homo sapiens
augagagcaacaccuucacuug

SEQ ID NO: 86382 - RNA, 22 nt, Homo sapiens
ugagaucugucuuuauaguauu

SEQ ID NO: 86383 - RNA, 22 nt, Homo sapiens
aagugguagggucaggauugga

SEQ ID NO: 86384 - RNA, 22 nt, Homo sapiens
uuagcagcucuggugacaaggu

SEQ ID NO: 86385 - RNA, 22 nt, Homo sapiens
uugaaagcuaucagagauucca

SEQ ID NO: 86386 - RNA, 22 nt, Homo sapiens
acugcacuccagccugccgaca

SEQ ID NO: 86387 - RNA, 22 nt, Homo sapiens
gaagcauugauccacaggcgug

SEQ ID NO: 86388 - RNA, 22 nt, Homo sapiens
gugagauacuagagauauagug

SEQ ID NO: 86389 - RNA, 22 nt, Homo sapiens
uggagugaaaacacacuaaucu

SEQ ID NO: 86390 - RNA, 22 nt, Homo sapiens
uuggguccucugguccuugguu

SEQ ID NO: 86391 - RNA, 22 nt, Homo sapiens
cugagaucguggggcugcuguc

SEQ ID NO: 86392 - RNA, 22 nt, Homo sapiens
auuuugguuacauaguugagcu

SEQ ID NO: 86393 - RNA, 22 nt, Homo sapiens
uuccaguaauagcacagcauug

SEQ ID NO: 86394 - RNA, 22 nt, Homo sapiens
ugugguuuuuuucuccaauagg

SEQ ID NO: 86395 - RNA, 22 nt, Homo sapiens
cagagaacauucagagcuguag

SEQ ID NO: 86396 - RNA, 22 nt, Homo sapiens
agagcacuguggguccaaauau

SEQ ID NO: 86397 - RNA, 21 nt, Homo sapiens
aagcacauugaguguguguga

SEQ ID NO: 86398 - RNA, 22 nt, Homo sapiens
gugauuauuaugcacugcaugc

SEQ ID NO: 86399 - RNA, 22 nt, Homo sapiens
uagcacaucccuaaaaugcugu

SEQ ID NO: 86400 - RNA, 22 nt, Homo sapiens
augagacauuaaaguguguuug

SEQ ID NO: 86401 - RNA, 22 nt, Homo sapiens
uuugugcuccucucaguaugug

SEQ ID NO: 86402 - RNA, 22 nt, Homo sapiens
uaccacaggcuggguaaucuau

SEQ ID NO: 86403 - RNA, 21 nt, Homo sapiens
augggguagaagagaaggcuu

SEQ ID NO: 86404 - RNA, 22 nt, Homo sapiens
augggguagguagcucggggaa

SEQ ID NO: 86405 - RNA, 22 nt, Homo sapiens
cuuuggugauagauaccccaua

SEQ ID NO: 86406 - RNA, 18 nt, Homo sapiens
uaacuggugugagauggu

SEQ ID NO: 86407 - RNA, 22 nt, Homo sapiens
caugugcaugagcacauacgug

SEQ ID NO: 86408 - RNA, 18 nt, Homo sapiens
auauugccuucagacuag

SEQ ID NO: 86409 - RNA, 22 nt, Homo sapiens
aagcuggagugcaguggugcaa

SEQ ID NO: 86410 - RNA, 22 nt, Homo sapiens
ugcaccacugcuagccugggua

SEQ ID NO: 86411 - RNA, 22 nt, Homo sapiens
guaacugguuuucuucccucuc

SEQ ID NO: 86412 - RNA, 22 nt, Homo sapiens
cugaggugggaggauuacuuga

SEQ ID NO: 86413 - RNA, 22 nt, Homo sapiens
uugggacuggaaggaguaaggg

SEQ ID NO: 86414 - RNA, 22 nt, Homo sapiens
gugaaugcauuaagaaggggga

SEQ ID NO: 86415 - RNA, 20 nt, Homo sapiens
uggaccagagagguggggac

SEQ ID NO: 86416 - RNA, 22 nt, Homo sapiens
acugcacuccagccuccugaca

SEQ ID NO: 86417 - RNA, 22 nt, Homo sapiens
uaugacuuuggaaaaauuacuu

SEQ ID NO: 86418 - RNA, 22 nt, Homo sapiens
gaaagauuuccugagcuagaaa

SEQ ID NO: 86419 - RNA, 22 nt, Homo sapiens
aagugaaugaugugaaguguaa

SEQ ID NO: 86420 - RNA, 22 nt, Homo sapiens
aaggaguguggugaucuugggc

SEQ ID NO: 86421 - RNA, 19 nt, Homo sapiens
ucucacagcucuacuaugu

SEQ ID NO: 86422 - RNA, 22 nt, Homo sapiens
guggcaaggaaaugcugcucac

SEQ ID NO: 86423 - RNA, 22 nt, Homo sapiens
uaaguauuaugugcugcauuuu

SEQ ID NO: 86424 - RNA, 22 nt, Homo sapiens
gaggcagucuguccauucucag

SEQ ID NO: 86425 - RNA, 22 nt, Homo sapiens
cugugcauaucuuggacugugu

SEQ ID NO: 86426 - RNA, 22 nt, Homo sapiens
uguuacagugacuaauguuuua

SEQ ID NO: 86427 - RNA, 22 nt, Homo sapiens
cuuuggcauuagccuguauaga

SEQ ID NO: 86428 - RNA, 22 nt, Homo sapiens
uuggauuuuaacaaacuaggug

SEQ ID NO: 86429 - RNA, 20 nt, Homo sapiens
ugacaucagcaauguaauaa

SEQ ID NO: 86430 - RNA, 22 nt, Homo sapiens
ugugaauguaaccuuauuugga

SEQ ID NO: 86431 - RNA, 22 nt, Homo sapiens
cuguccugcagagucagaauga

SEQ ID NO: 86432 - RNA, 22 nt, Homo sapiens
acagugcuuggcacacaguaau

SEQ ID NO: 86433 - RNA, 22 nt, Homo sapiens
cucaugcugucuucugggguaa

SEQ ID NO: 86434 - RNA, 17 nt, Homo sapiens
guacacuucuucuguga

SEQ ID NO: 86435 - RNA, 22 nt, Homo sapiens
gaggaguagggcacaaagccuu

SEQ ID NO: 86436 - RNA, 22 nt, Homo sapiens
gugcacaaucgugcauuccuug

SEQ ID NO: 86437 - RNA, 22 nt, Homo sapiens
cugaagugugaaagucuuuuuu

SEQ ID NO: 86438 - RNA, 22 nt, Homo sapiens
ccccagugguugcaacagcaga

SEQ ID NO: 86439 - RNA, 22 nt, Homo sapiens
cccagugugcugggugacagcu

SEQ ID NO: 86440 - RNA, 22 nt, Homo sapiens
guacagugcucacaaugagagc

SEQ ID NO: 86441 - RNA, 22 nt, Homo sapiens
uugacuucagagcugauucaag

SEQ ID NO: 86442 - RNA, 22 nt, Homo sapiens
ucagugcuguuugcccucguuu

SEQ ID NO: 86443 - RNA, 22 nt, Homo sapiens
ugugcaaggcucucaaccugug

SEQ ID NO: 86444 - RNA, 22 nt, Homo sapiens
ucacagucggugacuucuugcu

SEQ ID NO: 86445 - RNA, 22 nt, Homo sapiens
ggaaagaucagcuaaauguaag

SEQ ID NO: 86446 - RNA, 22 nt, Homo sapiens
augucaaggugggugauaguuu

SEQ ID NO: 86447 - RNA, 22 nt, Homo sapiens
agcaccaccguugcucuauccc

SEQ ID NO: 86448 - RNA, 22 nt, Homo sapiens
auugugcuaaaguaauaaguca

SEQ ID NO: 86449 - RNA, 22 nt, Homo sapiens
uugcuagaugaaaaugguaccu

SEQ ID NO: 86450 - RNA, 22 nt, Homo sapiens
cagugaauuucaggucaagagu

SEQ ID NO: 86451 - RNA, 22 nt, Homo sapiens
gucccugcgauugugggauccu

SEQ ID NO: 86452 - RNA, 22 nt, Homo sapiens
aaggagugugauucuucaguuu

SEQ ID NO: 86453 - RNA, 22 nt, Homo sapiens
cagacaugucuuguggccgugg

SEQ ID NO: 86454 - RNA, 23 nt, Homo sapiens
uuguaacuggagaguaacauucc

SEQ ID NO: 86455 - RNA, 22 nt, Homo sapiens
uguuacagcagaauugaaagag

SEQ ID NO: 86456 - RNA, 22 nt, Homo sapiens
ccccaguguguaaaggccuugc

SEQ ID NO: 86457 - RNA, 18 nt, Homo sapiens
augagagccgauuccugg

SEQ ID NO: 86458 - RNA, 22 nt, Homo sapiens
augagucacuuauuauuggggu

SEQ ID NO: 86459 - RNA, 20 nt, Homo sapiens
gacuucagaagcuucagagu

SEQ ID NO: 86460 - RNA, 22 nt, Homo sapiens
aagcugugucuugucagcuacc

SEQ ID NO: 86461 - RNA, 22 nt, Homo sapiens
uaaaugcucuuuaaaagugcuu

SEQ ID NO: 86462 - RNA, 22 nt, Homo sapiens
ucacaguagccccucccaucau

SEQ ID NO: 86463 - RNA, 22 nt, Homo sapiens
gacugcagugcagcuguuaggc

SEQ ID NO: 86464 - RNA, 22 nt, Homo sapiens
ggcagcaugggugccuuuguga

SEQ ID NO: 86465 - RNA, 22 nt, Homo sapiens
acugcacuucagccuuggcuac

SEQ ID NO: 86466 - RNA, 22 nt, Homo sapiens
ugagaccaacagauuccaguuc

SEQ ID NO: 86467 - RNA, 22 nt, Homo sapiens
guguucaaagcugauugagauu

SEQ ID NO: 86468 - RNA, 22 nt, Homo sapiens
acugcacuccagccuccugggu

SEQ ID NO: 86469 - RNA, 22 nt, Homo sapiens
guguaauaaucguggacuaugu

SEQ ID NO: 86470 - RNA, 22 nt, Homo sapiens
acccugucaaaacggaccaauc

SEQ ID NO: 86471 - RNA, 22 nt, Homo sapiens
cuagcagacaggcugggagcag

SEQ ID NO: 86472 - RNA, 23 nt, Homo sapiens
ugaauguaucgaaugugggaaag

SEQ ID NO: 86473 - RNA, 22 nt, Homo sapiens
ugugaccaaaaucaacauaccu

SEQ ID NO: 86474 - RNA, 22 nt, Homo sapiens
ugagacugaguuuccaucuugu

SEQ ID NO: 86475 - RNA, 22 nt, Homo sapiens
cugggguaggacuggcuuuuga

SEQ ID NO: 86476 - RNA, 22 nt, Homo sapiens
gugggguagcaggcuccuaucu

SEQ ID NO: 86477 - RNA, 22 nt, Homo sapiens
ugccaguauuuuauuaagaauu

SEQ ID NO: 86478 - RNA, 22 nt, Homo sapiens
uuauuagguuaaccuauagcua

SEQ ID NO: 86479 - RNA, 20 nt, Homo sapiens
cugaaugucaaggcagaggu

SEQ ID NO: 86480 - RNA, 22 nt, Homo sapiens
uaacccuuacaacuacacucgu

SEQ ID NO: 86481 - RNA, 22 nt, Homo sapiens
cacugugcaaccuccaccuccc

SEQ ID NO: 86482 - RNA, 22 nt, Homo sapiens
acugcacugucaaccuccuggg

SEQ ID NO: 86483 - RNA, 22 nt, Homo sapiens
gcacaguaggugguaggacuuu

SEQ ID NO: 86484 - RNA, 22 nt, Homo sapiens
uuuguguggccuuggccuggca

SEQ ID NO: 86485 - RNA, 22 nt, Homo sapiens
gagacggagucuugcucuguug

SEQ ID NO: 86486 - RNA, 22 nt, Homo sapiens
gagacggagucucgcucugucg

SEQ ID NO: 86487 - RNA, 21 nt, Homo sapiens
gaguggcuuuuguuucaccag

SEQ ID NO: 86488 - RNA, 22 nt, Homo sapiens
gucagcaucaccaugucuauga

SEQ ID NO: 86489 - RNA, 19 nt, Homo sapiens
ugcauugucugggaaaugg

SEQ ID NO: 86490 - RNA, 19 nt, Homo sapiens
augccacagugaggucaga

SEQ ID NO: 86491 - RNA, 22 nt, Homo sapiens
auggcaauguaagucagaaaaa

SEQ ID NO: 86492 - RNA, 22 nt, Homo sapiens
ugugaauggugcugccgugaag

SEQ ID NO: 86493 - RNA, 22 nt, Homo sapiens
aaauugcacaaguggugauuug

SEQ ID NO: 86494 - RNA, 22 nt, Homo sapiens
agagaacuguuuacacguuaau

SEQ ID NO: 86495 - RNA, 23 nt, Homo sapiens
ugugcacauuuacauauauacac

SEQ ID NO: 86496 - RNA, 22 nt, Homo sapiens
augggguaggcuugcuguagua

SEQ ID NO: 86497 - RNA, 22 nt, Homo sapiens
gggcaugaugucuuaugccuau

SEQ ID NO: 86498 - RNA, 22 nt, Homo sapiens
auugaguaaaaaauagugaugu

SEQ ID NO: 86499 - RNA, 22 nt, Homo sapiens
aucccuguaacuagcagccccu

SEQ ID NO: 86500 - RNA, 22 nt, Homo sapiens
aacuacaucucuuugaggcagg

SEQ ID NO: 86501 - RNA, 22 nt, Homo sapiens
agagaacugauuggaguugggc

SEQ ID NO: 86502 - RNA, 22 nt, Homo sapiens
ugagacugagucuugcucuugu

SEQ ID NO: 86503 - RNA, 20 nt, Homo sapiens
ugucauuaagcacugugcca

SEQ ID NO: 86504 - RNA, 22 nt, Homo sapiens
gugcacaacaugcaguuuuguu

SEQ ID NO: 86505 - RNA, 22 nt, Homo sapiens
uggucauggggcagcugacacu

SEQ ID NO: 86506 - RNA, 22 nt, Homo sapiens
augcacuuggcaggaugauucc

SEQ ID NO: 86507 - RNA, 22 nt, Homo sapiens
ucuggcaagagccgagggcagu

SEQ ID NO: 86508 - RNA, 19 nt, Homo sapiens
ucccaagaugcucauacau

SEQ ID NO: 86509 - RNA, 22 nt, Homo sapiens
uggcuguuuauuucacaugggu

SEQ ID NO: 86510 - RNA, 22 nt, Homo sapiens
auacaguugccauuucuugugc

SEQ ID NO: 86511 - RNA, 22 nt, Homo sapiens
ucuuaguuuagauuagcaauuc

SEQ ID NO: 86512 - RNA, 18 nt, Homo sapiens
ucucacagcaaucuguca

SEQ ID NO: 86513 - RNA, 22 nt, Homo sapiens
agcagugucauuuucuggugag

SEQ ID NO: 86514 - RNA, 22 nt, Homo sapiens
gcagugugauguuuuaaucuau

SEQ ID NO: 86515 - RNA, 20 nt, Homo sapiens
aucccauuccugaagauacu

SEQ ID NO: 86516 - RNA, 22 nt, Homo sapiens
agugaauuguucaacaggagga

SEQ ID NO: 86517 - RNA, 22 nt, Homo sapiens
gugggguaggcaauuccuagug

SEQ ID NO: 86518 - RNA, 22 nt, Homo sapiens
gugcccacugucuguccuguag

SEQ ID NO: 86519 - RNA, 22 nt, Homo sapiens
gugcacaugguagguauugagu

SEQ ID NO: 86520 - RNA, 22 nt, Homo sapiens
uguuacaguguaggccuugggu

SEQ ID NO: 86521 - RNA, 22 nt, Homo sapiens
acugcacuccagccugcccaac

SEQ ID NO: 86522 - RNA, 22 nt, Homo sapiens
cuguucaaauuguuugugaagu

SEQ ID NO: 86523 - RNA, 22 nt, Homo sapiens
agucagugucuguaaggagaac

SEQ ID NO: 86524 - RNA, 20 nt, Homo sapiens
uggagugaagguucuggacc

SEQ ID NO: 86525 - RNA, 21 nt, Homo sapiens
ucagugcaauucuauggggaa

SEQ ID NO: 86526 - RNA, 22 nt, Homo sapiens
gauuuugguuagggaaggauac

SEQ ID NO: 86527 - RNA, 22 nt, Homo sapiens
ggucaaguaauccuggguguca

SEQ ID NO: 86528 - RNA, 23 nt, Homo sapiens
cccucagaagugcagggagagaa

SEQ ID NO: 86529 - RNA, 22 nt, Homo sapiens
uuggaaaaauccaccuugaucu

SEQ ID NO: 86530 - RNA, 22 nt, Homo sapiens
ucucacaggguuauugaggggg

SEQ ID NO: 86531 - RNA, 22 nt, Homo sapiens
cccuguguuuagcugaagguuu

SEQ ID NO: 86532 - RNA, 22 nt, Homo sapiens
ugaguucuuccaccgggaccag

SEQ ID NO: 86533 - RNA, 22 nt, Homo sapiens
ugguauguaugauuaacaugga

SEQ ID NO: 86534 - RNA, 22 nt, Homo sapiens
acacugucaugucucacaggca

SEQ ID NO: 86535 - RNA, 22 nt, Homo sapiens
ugguauguugucucuuuguucu

SEQ ID NO: 86536 - RNA, 22 nt, Homo sapiens
cugucuggaguccuucgugugc

SEQ ID NO: 86537 - RNA, 22 nt, Homo sapiens
gaggcacucuguacaaaucugc

SEQ ID NO: 86538 - RNA, 22 nt, Homo sapiens
ucacaggguguuauuagaauua

SEQ ID NO: 86539 - RNA, 22 nt, Homo sapiens
agagaacugauuggaugugggc

SEQ ID NO: 86540 - RNA, 22 nt, Homo sapiens
agguaauagcacaugauaccuu

SEQ ID NO: 86541 - RNA, 22 nt, Homo sapiens
agugguguugccuguugaccua

SEQ ID NO: 86542 - RNA, 22 nt, Homo sapiens
cugaggguagaaggaucacuug

SEQ ID NO: 86543 - RNA, 22 nt, Homo sapiens
uuuccagguggccaacauuuua

SEQ ID NO: 86544 - RNA, 22 nt, Homo sapiens
ucagugcuguaccaucuaagga

SEQ ID NO: 86545 - RNA, 22 nt, Homo sapiens
ugucacccuuuauccauuuccu

SEQ ID NO: 86546 - RNA, 22 nt, Homo sapiens
ugguccaguucugugauauugc

SEQ ID NO: 86547 - RNA, 20 nt, Homo sapiens
cuaaucaucccagaagaaau

SEQ ID NO: 86548 - RNA, 22 nt, Homo sapiens
gugaagugugaccucagcaucu

SEQ ID NO: 86549 - RNA, 22 nt, Homo sapiens
uuaugccagugauuauaagggc

SEQ ID NO: 86550 - RNA, 22 nt, Homo sapiens
cagugucugcauuuggaacuca

SEQ ID NO: 86551 - RNA, 22 nt, Homo sapiens
uuuguucaccucaaggauggga

SEQ ID NO: 86552 - RNA, 22 nt, Homo sapiens
gucaguggagaaaaggacaugu

SEQ ID NO: 86553 - RNA, 21 nt, Homo sapiens
uuaucccagugucucugcagg

SEQ ID NO: 86554 - RNA, 22 nt, Homo sapiens
ucccacugucuucucgugcucg

SEQ ID NO: 86555 - RNA, 22 nt, Homo sapiens
uacuagaguagugcagagggga

SEQ ID NO: 86556 - RNA, 22 nt, Homo sapiens
aagggaauguuguggcugguuu

SEQ ID NO: 86557 - RNA, 22 nt, Homo sapiens
gccccaguacaggcuccuuaga

SEQ ID NO: 86558 - RNA, 22 nt, Homo sapiens
agcuccaucuucagggguucag

SEQ ID NO: 86559 - RNA, 22 nt, Homo sapiens
ucaccaccuuccaggaccacug

SEQ ID NO: 86560 - RNA, 21 nt, Homo sapiens
cccugguguuuggaguuugag

SEQ ID NO: 86561 - RNA, 22 nt, Homo sapiens
guuaagaaguguaacuuaaguu

SEQ ID NO: 86562 - RNA, 22 nt, Homo sapiens
uucuggccccucccaaucucau

SEQ ID NO: 86563 - RNA, 22 nt, Homo sapiens
aucauacuguuuugauuacugu

SEQ ID NO: 86564 - RNA, 22 nt, Homo sapiens
uguguaaauagcuacggaucug

SEQ ID NO: 86565 - RNA, 22 nt, Homo sapiens
uagagccauugcagauguuuga

SEQ ID NO: 86566 - RNA, 22 nt, Homo sapiens
uuccacaauggcugaacuaguu

SEQ ID NO: 86567 - RNA, 22 nt, Homo sapiens
gugaagaucccuguccuguucc

SEQ ID NO: 86568 - RNA, 22 nt, Homo sapiens
ucauguguugcacugaggaccu

SEQ ID NO: 86569 - RNA, 22 nt, Homo sapiens
ucccaguguguagcuugucucu

SEQ ID NO: 86570 - RNA, 22 nt, Homo sapiens
uuauuagguuagugcaaaaguu

SEQ ID NO: 86571 - RNA, 22 nt, Homo sapiens
uugacaaggagccauugcaucu

SEQ ID NO: 86572 - RNA, 22 nt, Homo sapiens
uggagugauaugguuauauggg

SEQ ID NO: 86573 - RNA, 22 nt, Homo sapiens
cuacagaguaucuaaagaggua

SEQ ID NO: 86574 - RNA, 22 nt, Homo sapiens
ugagaugcauauucuggcuccu

SEQ ID NO: 86575 - RNA, 22 nt, Homo sapiens
aauacugagaugugagguacua

SEQ ID NO: 86576 - RNA, 22 nt, Homo sapiens
uaccaaguauuuucacaugaac

SEQ ID NO: 86577 - RNA, 22 nt, Homo sapiens
cuagcagacaugggcugaacca

SEQ ID NO: 86578 - RNA, 22 nt, Homo sapiens
agaaagugcuucccuuugguga

SEQ ID NO: 86579 - RNA, 22 nt, Homo sapiens
gucagggagggauagaugauua

SEQ ID NO: 86580 - RNA, 22 nt, Homo sapiens
ucucacagaguugaacuuucuu

SEQ ID NO: 86581 - RNA, 22 nt, Homo sapiens
caacugguuuuauacaguuuag

SEQ ID NO: 86582 - RNA, 22 nt, Homo sapiens
cugucaucauuucuaugugcca

SEQ ID NO: 86583 - RNA, 22 nt, Homo sapiens
gucacaggaaacuaauaugcgc

SEQ ID NO: 86584 - RNA, 22 nt, Homo sapiens
agcuacaucuugcucugggaug

SEQ ID NO: 86585 - RNA, 22 nt, Homo sapiens
ugaguagugcugcaauaaacau

SEQ ID NO: 86586 - RNA, 22 nt, Homo sapiens
auggcacuaaugggaguuuacu

SEQ ID NO: 86587 - RNA, 22 nt, Homo sapiens
ugugaaugaagaaugcuaaccu

SEQ ID NO: 86588 - RNA, 20 nt, Homo sapiens
uuagcagcaugauuuauaau

SEQ ID NO: 86589 - RNA, 22 nt, Homo sapiens
aguggauuuuauuugacaacua

SEQ ID NO: 86590 - RNA, 22 nt, Homo sapiens
gugggguaggugacuugaugag

SEQ ID NO: 86591 - RNA, 19 nt, Homo sapiens
uccccaguuuuccguucag

SEQ ID NO: 86592 - RNA, 22 nt, Homo sapiens
aauacugaaaguauuuucaaau

SEQ ID NO: 86593 - RNA, 22 nt, Homo sapiens
cuggguacccuuuaaacaggaa

SEQ ID NO: 86594 - RNA, 22 nt, Homo sapiens
gagcugaauugcugccauuugc

SEQ ID NO: 86595 - RNA, 22 nt, Homo sapiens
aaaugcacaaagauuuugcacu

SEQ ID NO: 86596 - RNA, 22 nt, Homo sapiens
ccugagguagaguuuauauuga

SEQ ID NO: 86597 - RNA, 18 nt, Homo sapiens
acugcacuccauccuagg

SEQ ID NO: 86598 - RNA, 22 nt, Homo sapiens
gcucaugggcagugugauuguu

SEQ ID NO: 86599 - RNA, 22 nt, Homo sapiens
auuguguagucuuacugcuugc

SEQ ID NO: 86600 - RNA, 22 nt, Homo sapiens
auggcacuguguccugggguca

SEQ ID NO: 86601 - RNA, 20 nt, Homo sapiens
gccacaguuaagcuucugcc

SEQ ID NO: 86602 - RNA, 22 nt, Homo sapiens
ucucacagaguugaauguuucu

SEQ ID NO: 86603 - RNA, 22 nt, Homo sapiens
acccaguguucaacauucacau

SEQ ID NO: 86604 - RNA, 22 nt, Homo sapiens
ugugguuuuaguaaaacuaugu

SEQ ID NO: 86605 - RNA, 17 nt, Homo sapiens
aaguggcuuguucacca

SEQ ID NO: 86606 - RNA, 22 nt, Homo sapiens
gauacuggcuuuauagaaugau

SEQ ID NO: 86607 - RNA, 22 nt, Homo sapiens
acacuuucuggagcugcacaua

SEQ ID NO: 86608 - RNA, 22 nt, Homo sapiens
agagucacaugaggcccuucau

SEQ ID NO: 86609 - RNA, 22 nt, Homo sapiens
ugcugcuguuaucauuuuacca

SEQ ID NO: 86610 - RNA, 22 nt, Homo sapiens
cacacugucuucaauggguggu

SEQ ID NO: 86611 - RNA, 22 nt, Homo sapiens
gaauacuguccaagagugaugg

SEQ ID NO: 86612 - RNA, 22 nt, Homo sapiens
gagugcuguuagcccuggguuu

SEQ ID NO: 86613 - RNA, 22 nt, Homo sapiens
ccaccgggucccagcucugcuc

SEQ ID NO: 86614 - RNA, 22 nt, Homo sapiens
ucuuugauguucugaaagaugg

SEQ ID NO: 86615 - RNA, 22 nt, Homo sapiens
uugaggucuuugagcaaacgca

SEQ ID NO: 86616 - RNA, 22 nt, Homo sapiens
guagaaagcauuucagauuugc

SEQ ID NO: 86617 - RNA, 22 nt, Homo sapiens
aagggaauguuguggcugguug

SEQ ID NO: 86618 - RNA, 22 nt, Homo sapiens
uggauaguucuucuacuagagu

SEQ ID NO: 86619 - RNA, 21 nt, Homo sapiens
uggcuguuuucaugcuagaac

SEQ ID NO: 86620 - RNA, 22 nt, Homo sapiens
ucacucagaccuggugauaugc

SEQ ID NO: 86621 - RNA, 22 nt, Homo sapiens
auugcacaucugcacuacagcc

SEQ ID NO: 86622 - RNA, 21 nt, Homo sapiens
aggcaagguguuauuauugaa

SEQ ID NO: 86623 - RNA, 22 nt, Homo sapiens
caccagcuggcauugaauaccu

SEQ ID NO: 86624 - RNA, 22 nt, Homo sapiens
uggacauguacauauguguaug

SEQ ID NO: 86625 - RNA, 22 nt, Homo sapiens
gagaacuggcugauucaaggac

SEQ ID NO: 86626 - RNA, 22 nt, Homo sapiens
uggucaccugaauuaugcaugu

SEQ ID NO: 86627 - RNA, 22 nt, Homo sapiens
acacuguuuuaguuauuauagc

SEQ ID NO: 86628 - RNA, 22 nt, Homo sapiens
cugaggugauauauacauauuu

SEQ ID NO: 86629 - RNA, 22 nt, Homo sapiens
aaggcagugugcacauaacacu

SEQ ID NO: 86630 - RNA, 22 nt, Homo sapiens
ucacaugaauugucuuguucca

SEQ ID NO: 86631 - RNA, 22 nt, Homo sapiens
agagaugaagauggggcucccg

SEQ ID NO: 86632 - RNA, 20 nt, Homo sapiens
uauucacucuccagucuugc

SEQ ID NO: 86633 - RNA, 22 nt, Homo sapiens
uguaaugaucaaaucagaguaa

SEQ ID NO: 86634 - RNA, 20 nt, Homo sapiens
cucagguauuugaggcugca

SEQ ID NO: 86635 - RNA, 22 nt, Homo sapiens
uagcacaugucagguaauuugc

SEQ ID NO: 86636 - RNA, 22 nt, Homo sapiens
uaacagcauuugugucuaguag

SEQ ID NO: 86637 - RNA, 22 nt, Homo sapiens
uucaagucaacaagcacuugag

SEQ ID NO: 86638 - RNA, 22 nt, Homo sapiens
aagugaaugugcuggaauagcu

SEQ ID NO: 86639 - RNA, 22 nt, Homo sapiens
acugaucaauguuaaggcuuau

SEQ ID NO: 86640 - RNA, 22 nt, Homo sapiens
aucugcaaagcugggcugagac

SEQ ID NO: 86641 - RNA, 22 nt, Homo sapiens
cuuggcacugcucacccuccuu

SEQ ID NO: 86642 - RNA, 21 nt, Homo sapiens
cacuggguucaggcuugugga

SEQ ID NO: 86643 - RNA, 22 nt, Homo sapiens
agaugguguuuucucaccagau

SEQ ID NO: 86644 - RNA, 22 nt, Homo sapiens
ggcagcauugccuuugcaguga

SEQ ID NO: 86645 - RNA, 22 nt, Homo sapiens
uugaggucuucaggaucaggcu

SEQ ID NO: 86646 - RNA, 22 nt, Homo sapiens
auaugcacuauacacacguaua

SEQ ID NO: 86647 - RNA, 22 nt, Homo sapiens
uggacaagugcccuccaccuca

SEQ ID NO: 86648 - RNA, 22 nt, Homo sapiens
auagugcugcaauaaacacacg

SEQ ID NO: 86649 - RNA, 20 nt, Homo sapiens
uaagugcuugagacuucuga

SEQ ID NO: 86650 - RNA, 22 nt, Homo sapiens
gugucaguggggagugaucuuc

SEQ ID NO: 86651 - RNA, 22 nt, Homo sapiens
cugcagaucuuggggcuugcca

SEQ ID NO: 86652 - RNA, 23 nt, Homo sapiens
agacugaaguaucugagacucag

SEQ ID NO: 86653 - RNA, 22 nt, Homo sapiens
uaugcacaugcaugcuugaaua

SEQ ID NO: 86654 - RNA, 19 nt, Homo sapiens
ggcaauacuuucuuguugg

SEQ ID NO: 86655 - RNA, 22 nt, Homo sapiens
gucagugugauaucugcagggg

SEQ ID NO: 86656 - RNA, 22 nt, Homo sapiens
ugcauccauucuagacucaucu

SEQ ID NO: 86657 - RNA, 22 nt, Homo sapiens
agacaguauuggcaaagugugu

SEQ ID NO: 86658 - RNA, 20 nt, Homo sapiens
acugcacuccagccuuccag

SEQ ID NO: 86659 - RNA, 22 nt, Homo sapiens
ucagugcuuggcacagagagcu

SEQ ID NO: 86660 - RNA, 22 nt, Homo sapiens
uauggauuuuuuugacaagagc

SEQ ID NO: 86661 - RNA, 20 nt, Homo sapiens
acugcacuccaggcugccca

SEQ ID NO: 86662 - RNA, 22 nt, Homo sapiens
ugacaguguccuccuccugaga

SEQ ID NO: 86663 - RNA, 22 nt, Homo sapiens
gucaggugcuuacgcggagauc

SEQ ID NO: 86664 - RNA, 22 nt, Homo sapiens
acugcacuccagccugcugaca

SEQ ID NO: 86665 - RNA, 22 nt, Homo sapiens
ucacaguaaauccagaagaaau

SEQ ID NO: 86666 - RNA, 22 nt, Homo sapiens
aaacugccuuccuuguaggugc

SEQ ID NO: 86667 - RNA, 22 nt, Homo sapiens
gucaggaugauuuggggaggug

SEQ ID NO: 86668 - RNA, 22 nt, Homo sapiens
agugagcugcagucuggggucc

SEQ ID NO: 86669 - RNA, 22 nt, Homo sapiens
ugaagugggaaaugaguauuaa

SEQ ID NO: 86670 - RNA, 22 nt, Homo sapiens
gugaagaugugcaucagaucca

SEQ ID NO: 86671 - RNA, 22 nt, Homo sapiens
caaauacuuucauguugucuug

SEQ ID NO: 86672 - RNA, 22 nt, Homo sapiens
cugguaugcuucauaugcaaac

SEQ ID NO: 86673 - RNA, 22 nt, Homo sapiens
uccuucauuugucaacucuagu

SEQ ID NO: 86674 - RNA, 21 nt, Homo sapiens
ggaauuuagggaaugauuuag

SEQ ID NO: 86675 - RNA, 21 nt, Homo sapiens
uggucaguuuucucacuagga

SEQ ID NO: 86676 - RNA, 22 nt, Homo sapiens
gaaacugcauuucuaacaagcu

SEQ ID NO: 86677 - RNA, 22 nt, Homo sapiens
uauuccagcccuggugagccag

SEQ ID NO: 86678 - RNA, 22 nt, Homo sapiens
ugagacugaguuucgcucuugu

SEQ ID NO: 86679 - RNA, 22 nt, Homo sapiens
cagagguaagcaagucagcauu

SEQ ID NO: 86680 - RNA, 22 nt, Homo sapiens
uguagauaucuaucaggucaau

SEQ ID NO: 86681 - RNA, 22 nt, Homo sapiens
acugcacuccagccucccgucu

SEQ ID NO: 86682 - RNA, 22 nt, Homo sapiens
ucccagugcuaugcaaaagccu

SEQ ID NO: 86683 - RNA, 22 nt, Homo sapiens
agcauuaguugugaagccuuua

SEQ ID NO: 86684 - RNA, 22 nt, Homo sapiens
ugucagggaggcucggccgcac

SEQ ID NO: 86685 - RNA, 22 nt, Homo sapiens
auguaacugggacacaagccuc

SEQ ID NO: 86686 - RNA, 22 nt, Homo sapiens
uaguaguuuuguguauaauaau

SEQ ID NO: 86687 - RNA, 22 nt, Homo sapiens
gugcacaaaucuuaaauguaca

SEQ ID NO: 86688 - RNA, 22 nt, Homo sapiens
aauucacuucuuuuaggcaggg

SEQ ID NO: 86689 - RNA, 22 nt, Homo sapiens
uggucaccuucuugcucugucu

SEQ ID NO: 86690 - RNA, 20 nt, Homo sapiens
agguagauagaugauagaua

SEQ ID NO: 86691 - RNA, 22 nt, Homo sapiens
gagguauagaacaccuuucaag

SEQ ID NO: 86692 - RNA, 22 nt, Homo sapiens
uggagugcgagggugaaacuuu

SEQ ID NO: 86693 - RNA, 21 nt, Homo sapiens
agaggacugaccacagcccua

SEQ ID NO: 86694 - RNA, 22 nt, Homo sapiens
gcaguguggguagagggcaaga

SEQ ID NO: 86695 - RNA, 22 nt, Homo sapiens
ggcuagagagcucagggauaug

SEQ ID NO: 86696 - RNA, 22 nt, Homo sapiens
auaagugagugauucaguguua

SEQ ID NO: 86697 - RNA, 22 nt, Homo sapiens
ccauuucacucuuccugaagga

SEQ ID NO: 86698 - RNA, 22 nt, Homo sapiens
augggaaaaucagaaggccugg

SEQ ID NO: 86699 - RNA, 20 nt, Homo sapiens
ugaggucugagaaagaauga

SEQ ID NO: 86700 - RNA, 22 nt, Homo sapiens
acccugucacucccaucaauuu

SEQ ID NO: 86701 - RNA, 22 nt, Homo sapiens
augauguaggccauggguuucu

SEQ ID NO: 86702 - RNA, 22 nt, Homo sapiens
agugcauuuguucugugucagg

SEQ ID NO: 86703 - RNA, 19 nt, Homo sapiens
gggucaguuugaaugauua

SEQ ID NO: 86704 - RNA, 22 nt, Homo sapiens
guauuaguuaucuacugcugug

SEQ ID NO: 86705 - RNA, 22 nt, Homo sapiens
uacacagucaaaaauuuccagg

SEQ ID NO: 86706 - RNA, 22 nt, Homo sapiens
ugacagugaauaagucucuuaa

SEQ ID NO: 86707 - RNA, 22 nt, Homo sapiens
uacauacuucacagacuuuaaa

SEQ ID NO: 86708 - RNA, 22 nt, Homo sapiens
acccaguguucagacuaccugu

SEQ ID NO: 86709 - RNA, 22 nt, Homo sapiens
aaguaguuaggaacauucucuc

SEQ ID NO: 86710 - RNA, 22 nt, Homo sapiens
cugcuaagagaaugagacuuag

SEQ ID NO: 86711 - RNA, 22 nt, Homo sapiens
ucacugggagcauuugagccuu

SEQ ID NO: 86712 - RNA, 22 nt, Homo sapiens
uuaauguaucuaucacaucaca

SEQ ID NO: 86713 - RNA, 22 nt, Homo sapiens
auacagguauacaaugcauaau

SEQ ID NO: 86714 - RNA, 22 nt, Homo sapiens
gugugcacaaucuggcaugugc

SEQ ID NO: 86715 - RNA, 22 nt, Homo sapiens
aaagaguucagguagauuucaa

SEQ ID NO: 86716 - RNA, 23 nt, Homo sapiens
auuccaguggcaauuggagaaac

SEQ ID NO: 86717 - RNA, 22 nt, Homo sapiens
uuuaaugcgucucugaguuuug

SEQ ID NO: 86718 - RNA, 22 nt, Homo sapiens
aaagggcuugaauacucuuuuu

SEQ ID NO: 86719 - RNA, 21 nt, Homo sapiens
ucagugcugugggcaaggugc

SEQ ID NO: 86720 - RNA, 22 nt, Homo sapiens
acuguguguuugucuagcacag

SEQ ID NO: 86721 - RNA, 20 nt, Homo sapiens
gagaacugagaugcguuuga

SEQ ID NO: 86722 - RNA, 22 nt, Homo sapiens
auuauaguguauacuugaaauu

SEQ ID NO: 86723 - RNA, 22 nt, Homo sapiens
augcagaucacauuuuucuguc

SEQ ID NO: 86724 - RNA, 20 nt, Homo sapiens
gaacugguguauguuuaacu

SEQ ID NO: 86725 - RNA, 22 nt, Homo sapiens
auaguggcaugaucauagcuca

SEQ ID NO: 86726 - RNA, 22 nt, Homo sapiens
ugagacugaguuuugccuuugu

SEQ ID NO: 86727 - RNA, 21 nt, Homo sapiens
augugcacuaugucauuuaau

SEQ ID NO: 86728 - RNA, 22 nt, Homo sapiens
uggagacaaagauagaaaagca

SEQ ID NO: 86729 - RNA, 22 nt, Homo sapiens
ucccaguggucuugaaacaggg

SEQ ID NO: 86730 - RNA, 19 nt, Homo sapiens
ucagugcuauguaauguag

SEQ ID NO: 86731 - RNA, 22 nt, Homo sapiens
ggggaauguuaaagaauuugca

SEQ ID NO: 86732 - RNA, 22 nt, Homo sapiens
cugugauagguuagucaugaau

SEQ ID NO: 86733 - RNA, 22 nt, Homo sapiens
ggacugagaggacuacagugua

SEQ ID NO: 86734 - RNA, 22 nt, Homo sapiens
uaacugccuacugugcaaauau

SEQ ID NO: 86735 - RNA, 22 nt, Homo sapiens
gagcacugaauacugugguggu

SEQ ID NO: 86736 - RNA, 18 nt, Homo sapiens
gucucacaugguggaagc

SEQ ID NO: 86737 - RNA, 22 nt, Homo sapiens
uccugagucagcauccguuugu

SEQ ID NO: 86738 - RNA, 22 nt, Homo sapiens
uucuagcaauggcagagugucu

SEQ ID NO: 86739 - RNA, 22 nt, Homo sapiens
ucgcugggaagacugaaguguc

SEQ ID NO: 86740 - RNA, 22 nt, Homo sapiens
ugucaguggucuggaugcagcc

SEQ ID NO: 86741 - RNA, 22 nt, Homo sapiens
ucugccacugucauugugugau

SEQ ID NO: 86742 - RNA, 22 nt, Homo sapiens
auaugccacugaacuguaccca

SEQ ID NO: 86743 - RNA, 22 nt, Homo sapiens
ucucacagccauuucucccucu

SEQ ID NO: 86744 - RNA, 22 nt, Homo sapiens
uuuggcuuuuguaauaacugcc

SEQ ID NO: 86745 - RNA, 19 nt, Homo sapiens
uggcacauguauacauaug

SEQ ID NO: 86746 - RNA, 22 nt, Homo sapiens
ucagugucaucuggguuguuug

SEQ ID NO: 86747 - RNA, 22 nt, Homo sapiens
uucuuagguuaaggcugagaga

SEQ ID NO: 86748 - RNA, 22 nt, Homo sapiens
uaucacagguggacugcacacc

SEQ ID NO: 86749 - RNA, 22 nt, Homo sapiens
uugaggaguacugauuagguau

SEQ ID NO: 86750 - RNA, 18 nt, Homo sapiens
gauaacaguggacuaugc

SEQ ID NO: 86751 - RNA, 22 nt, Homo sapiens
cuggugugugacuuuucauuau

SEQ ID NO: 86752 - RNA, 22 nt, Homo sapiens
ccaccuguacuuaagucacuuu

SEQ ID NO: 86753 - RNA, 22 nt, Homo sapiens
uucuggccuccauuuuucuccu

SEQ ID NO: 86754 - RNA, 22 nt, Homo sapiens
cuagcagacacuuccagagagu

SEQ ID NO: 86755 - RNA, 22 nt, Homo sapiens
auggccgggugcgguggcucac

SEQ ID NO: 86756 - RNA, 22 nt, Homo sapiens
aacaggcuccuaggggugcacc

SEQ ID NO: 86757 - RNA, 22 nt, Homo sapiens
agacaagauggcuugagguuca

SEQ ID NO: 86758 - RNA, 22 nt, Homo sapiens
gugacugcauauaaguguaugu

SEQ ID NO: 86759 - RNA, 22 nt, Homo sapiens
uugcuagagaugagggaugugu

SEQ ID NO: 86760 - RNA, 22 nt, Homo sapiens
ugaggauaguguugaaggcagg

SEQ ID NO: 86761 - RNA, 22 nt, Homo sapiens
uuauaaacaugaagauuugggg

SEQ ID NO: 86762 - RNA, 22 nt, Homo sapiens
gucacagaaaaagauaugccaa

SEQ ID NO: 86763 - RNA, 22 nt, Homo sapiens
ucccaagaugagaugggggcug

SEQ ID NO: 86764 - RNA, 22 nt, Homo sapiens
uuucugaggccucaccagaagc

SEQ ID NO: 86765 - RNA, 22 nt, Homo sapiens
cuccuggugauuggagugugaa

SEQ ID NO: 86766 - RNA, 22 nt, Homo sapiens
uagcaagaugaauuugugcaaa

SEQ ID NO: 86767 - RNA, 19 nt, Homo sapiens
uggugccuuguucuuggau

SEQ ID NO: 86768 - RNA, 22 nt, Homo sapiens
gugggguaggaggaguacuucc

SEQ ID NO: 86769 - RNA, 22 nt, Homo sapiens
gcugagaucucuugccugaacu

SEQ ID NO: 86770 - RNA, 22 nt, Homo sapiens
aucccuguguccagcaccugug

SEQ ID NO: 86771 - RNA, 22 nt, Homo sapiens
cauggcccugggcugggcgaac

SEQ ID NO: 86772 - RNA, 21 nt, Homo sapiens
uaaaacuguaacuuuguccug

SEQ ID NO: 86773 - RNA, 22 nt, Homo sapiens
ugauauauugaaugaugaaaca

SEQ ID NO: 86774 - RNA, 22 nt, Homo sapiens
ugaggucuuuauuuagugcuca

SEQ ID NO: 86775 - RNA, 22 nt, Homo sapiens
aucccaguaaaaauggcuucua

SEQ ID NO: 86776 - RNA, 22 nt, Homo sapiens
auggaggccuacagaauuuugg

SEQ ID NO: 86777 - RNA, 22 nt, Homo sapiens
aacacggcccgcagagcaagcu

SEQ ID NO: 86778 - RNA, 22 nt, Homo sapiens
uuggagagagaggacucccggc

SEQ ID NO: 86779 - RNA, 22 nt, Homo sapiens
augggguaggcuuugcugcagu

SEQ ID NO: 86780 - RNA, 22 nt, Homo sapiens
uaacaguauaugugguaucuau

SEQ ID NO: 86781 - RNA, 22 nt, Homo sapiens
uaugcacacacguguuuaugug

SEQ ID NO: 86782 - RNA, 22 nt, Homo sapiens
aucccaguucagccucugacac

SEQ ID NO: 86783 - RNA, 20 nt, Homo sapiens
ucacuggguucuugaagucu

SEQ ID NO: 86784 - RNA, 22 nt, Homo sapiens
uugccaucaucucuuacucagu

SEQ ID NO: 86785 - RNA, 22 nt, Homo sapiens
gauuguguucauaggcauguua

SEQ ID NO: 86786 - RNA, 22 nt, Homo sapiens
gcagugugaucacagcuuacug

SEQ ID NO: 86787 - RNA, 22 nt, Homo sapiens
auagcacugguuuuucuugguu

SEQ ID NO: 86788 - RNA, 22 nt, Homo sapiens
cacagucuugcaauauugagau

SEQ ID NO: 86789 - RNA, 20 nt, Homo sapiens
cugcacauccacucuacuuc

SEQ ID NO: 86790 - RNA, 22 nt, Homo sapiens
uguguaauaccuuugacuauau

SEQ ID NO: 86791 - RNA, 22 nt, Homo sapiens
gagauuauuuaaaaggugauuu

SEQ ID NO: 86792 - RNA, 20 nt, Homo sapiens
cagucaugaagaacugugag

SEQ ID NO: 86793 - RNA, 22 nt, Homo sapiens
gugcaagagugauugcaguuuu

SEQ ID NO: 86794 - RNA, 23 nt, Homo sapiens
caugaacuaguuugcagccauga

SEQ ID NO: 86795 - RNA, 22 nt, Homo sapiens
ugugaaugauggagugucgaau

SEQ ID NO: 86796 - RNA, 20 nt, Homo sapiens
ugagcucaauuguugcaagu

SEQ ID NO: 86797 - RNA, 22 nt, Homo sapiens
ugccaguauuuuguugaggauu

SEQ ID NO: 86798 - RNA, 23 nt, Homo sapiens
ggauggaaaguuuugagggccac

SEQ ID NO: 86799 - RNA, 17 nt, Homo sapiens
guuuggguacuggguaa

SEQ ID NO: 86800 - RNA, 22 nt, Homo sapiens
gucucacaggcaugaugccagc

SEQ ID NO: 86801 - RNA, 22 nt, Homo sapiens
gucugagcauggggccggcagg

SEQ ID NO: 86802 - RNA, 22 nt, Homo sapiens
uguuacagcagcacaaaaugga

SEQ ID NO: 86803 - RNA, 22 nt, Homo sapiens
ugacagguugauaggugcagca

SEQ ID NO: 86804 - RNA, 22 nt, Homo sapiens
gugggaugcaaguaaaauuguc

SEQ ID NO: 86805 - RNA, 22 nt, Homo sapiens
auaaagccaugagcuugagaug

SEQ ID NO: 86806 - RNA, 22 nt, Homo sapiens
aaacucuguagcagagacagau

SEQ ID NO: 86807 - RNA, 22 nt, Homo sapiens
ucccagugaaaccccaccuuca

SEQ ID NO: 86808 - RNA, 22 nt, Homo sapiens
cagagugcauguuuagaugagu

SEQ ID NO: 86809 - RNA, 21 nt, Homo sapiens
uuagcauccauguucaucaac

SEQ ID NO: 86810 - RNA, 18 nt, Homo sapiens
cuaugccacuuuauauca

SEQ ID NO: 86811 - RNA, 22 nt, Homo sapiens
aacugguauuucccaugaauuu

SEQ ID NO: 86812 - RNA, 22 nt, Homo sapiens
cugagguacugggggccaggau

SEQ ID NO: 86813 - RNA, 22 nt, Homo sapiens
cagaugcaugaccugggcuugg

SEQ ID NO: 86814 - RNA, 22 nt, Homo sapiens
ugugaugguuuagcauuuucuu

SEQ ID NO: 86815 - RNA, 22 nt, Homo sapiens
ugagacugagucucgcucuugu

SEQ ID NO: 86816 - RNA, 22 nt, Homo sapiens
ucacacucucaccaacauuugg

SEQ ID NO: 86817 - RNA, 22 nt, Homo sapiens
uaucucacauauucaguagguu

SEQ ID NO: 86818 - RNA, 22 nt, Homo sapiens
gugcacaucgugcagguuuguu

SEQ ID NO: 86819 - RNA, 23 nt, Homo sapiens
uggguucccuaagcgcaugcugc

SEQ ID NO: 86820 - RNA, 22 nt, Homo sapiens
ugcuagaagaucacacacauca

SEQ ID NO: 86821 - RNA, 22 nt, Homo sapiens
uuuuagcagccaugacaaagau

SEQ ID NO: 86822 - RNA, 22 nt, Homo sapiens
gugcagugugauccuuccguau

SEQ ID NO: 86823 - RNA, 22 nt, Homo sapiens
gugaacagaaccugggaucgaa

SEQ ID NO: 86824 - RNA, 22 nt, Homo sapiens
ugccuacuuugcaucugucagg

SEQ ID NO: 86825 - RNA, 22 nt, Homo sapiens
uucacagacaacuggucccuua

SEQ ID NO: 86826 - RNA, 22 nt, Homo sapiens
ugacuauaggauaacaugcauu

SEQ ID NO: 86827 - RNA, 22 nt, Homo sapiens
cagugcuuuaucaaguccucca

SEQ ID NO: 86828 - RNA, 22 nt, Homo sapiens
uuccacaaugguugaacuaauu

SEQ ID NO: 86829 - RNA, 22 nt, Homo sapiens
caugugcaugcuuucuuaugug

SEQ ID NO: 86830 - RNA, 22 nt, Homo sapiens
cuggauagucaggagauauaua

SEQ ID NO: 86831 - RNA, 22 nt, Homo sapiens
uccacagugguggaauuguuca

SEQ ID NO: 86832 - RNA, 17 nt, Homo sapiens
uggcaugaggguguggg

SEQ ID NO: 86833 - RNA, 17 nt, Homo sapiens
ucuaauaauaugcauuu

SEQ ID NO: 86834 - RNA, 22 nt, Homo sapiens
augaggcaggaaaggcguaucu

SEQ ID NO: 86835 - RNA, 22 nt, Homo sapiens
uucucacaguacagggagcucu

SEQ ID NO: 86836 - RNA, 22 nt, Homo sapiens
ugagauaacuaaaaacauuuug

SEQ ID NO: 86837 - RNA, 22 nt, Homo sapiens
cugugcauggauuuuaagauug

SEQ ID NO: 86838 - RNA, 22 nt, Homo sapiens
ugagacugaguuucucucuugu

SEQ ID NO: 86839 - RNA, 22 nt, Homo sapiens
cugggauggaggagaauuagag

SEQ ID NO: 86840 - RNA, 22 nt, Homo sapiens
agugucaggagacagguagcug

SEQ ID NO: 86841 - RNA, 18 nt, Homo sapiens
acagugucauggcucaau

SEQ ID NO: 86842 - RNA, 22 nt, Homo sapiens
aauacagcacacagaugggucu

SEQ ID NO: 86843 - RNA, 22 nt, Homo sapiens
ugagacugaguuuugcucguug

SEQ ID NO: 86844 - RNA, 22 nt, Homo sapiens
uucccuguaucuucugccaugu

SEQ ID NO: 86845 - RNA, 22 nt, Homo sapiens
uacuacuuucucuucugggaaa

SEQ ID NO: 86846 - RNA, 22 nt, Homo sapiens
ugucauguugguguacugcacc

SEQ ID NO: 86847 - RNA, 22 nt, Homo sapiens
ugccaguauuuuauugaggauu

SEQ ID NO: 86848 - RNA, 22 nt, Homo sapiens
ugagacugagucucgcucuauu

SEQ ID NO: 86849 - RNA, 22 nt, Homo sapiens
uugaggucagagguucgagacc

SEQ ID NO: 86850 - RNA, 20 nt, Homo sapiens
uugaggucaggaguuuggga

SEQ ID NO: 86851 - RNA, 22 nt, Homo sapiens
cugcaagaugcauaggaauuuu

SEQ ID NO: 86852 - RNA, 21 nt, Homo sapiens
gugaggucauugggcuuucug

SEQ ID NO: 86853 - RNA, 22 nt, Homo sapiens
uucccagucaaacgaaggacuu

SEQ ID NO: 86854 - RNA, 22 nt, Homo sapiens
gugaauguaaagucaugugacu

SEQ ID NO: 86855 - RNA, 22 nt, Homo sapiens
aagugaauguuugguagcagug

SEQ ID NO: 86856 - RNA, 22 nt, Homo sapiens
agugaauguuggaaaguuauuu

SEQ ID NO: 86857 - RNA, 19 nt, Homo sapiens
aaguaguugugacagaugc

SEQ ID NO: 86858 - RNA, 23 nt, Homo sapiens
agaugcaucuggcugcgaggcaa

SEQ ID NO: 86859 - RNA, 22 nt, Homo sapiens
ugagacugguaauguguagggc

SEQ ID NO: 86860 - RNA, 22 nt, Homo sapiens
uucagggacuuuagacaagaga

SEQ ID NO: 86861 - RNA, 22 nt, Homo sapiens
aacagaccuagauaguauaguc

SEQ ID NO: 86862 - RNA, 22 nt, Homo sapiens
ugaauguacuuaacacuggauu

SEQ ID NO: 86863 - RNA, 22 nt, Homo sapiens
gcuaggagauccacugcucucu

SEQ ID NO: 86864 - RNA, 22 nt, Homo sapiens
cuuuggccauagcuaaaugauu

SEQ ID NO: 86865 - RNA, 22 nt, Homo sapiens
uaaaccacguuuacauuugaga

SEQ ID NO: 86866 - RNA, 22 nt, Homo sapiens
ggucuuggagaauuguccuggg

SEQ ID NO: 86867 - RNA, 22 nt, Homo sapiens
ucugagguuaaauuuuauaguu

SEQ ID NO: 86868 - RNA, 22 nt, Homo sapiens
ucagugucugugauggagaggu

SEQ ID NO: 86869 - RNA, 22 nt, Homo sapiens
aguggauguuguggccugggag

SEQ ID NO: 86870 - RNA, 20 nt, Homo sapiens
uggucaccuucaggagguuc

SEQ ID NO: 86871 - RNA, 22 nt, Homo sapiens
uccagguacucagggggcugag

SEQ ID NO: 86872 - RNA, 22 nt, Homo sapiens
agacagcugguagcacuuccug

SEQ ID NO: 86873 - RNA, 22 nt, Homo sapiens
gagaacuggcgugaacugcacg

SEQ ID NO: 86874 - RNA, 22 nt, Homo sapiens
gugaggucagggcuguggacag

SEQ ID NO: 86875 - RNA, 21 nt, Homo sapiens
gaaauacugccuuaggagcug

SEQ ID NO: 86876 - RNA, 22 nt, Homo sapiens
uugggguagaauugcaacauau

SEQ ID NO: 86877 - RNA, 22 nt, Homo sapiens
uuuuuggaggagguuagaucau

SEQ ID NO: 86878 - RNA, 17 nt, Homo sapiens
uuuuggauuagaaaucc

SEQ ID NO: 86879 - RNA, 22 nt, Homo sapiens
uuugcuauagugaauagugcug

SEQ ID NO: 86880 - RNA, 19 nt, Homo sapiens
uuugcauagugagaauaua

SEQ ID NO: 86881 - RNA, 22 nt, Homo sapiens
uuugauuguacuaaaauuguac

SEQ ID NO: 86882 - RNA, 22 nt, Homo sapiens
uuaauguaauugauugauugac

SEQ ID NO: 86883 - RNA, 22 nt, Homo sapiens
uuaaucuguucucuguauucua

SEQ ID NO: 86884 - RNA, 22 nt, Homo sapiens
uuaagugaauuaucuaacaugu

SEQ ID NO: 86885 - RNA, 22 nt, Homo sapiens
uuaaguaaucagagaagagaac

SEQ ID NO: 86886 - RNA, 22 nt, Homo sapiens
ugugguuuuucacauuuagaga

SEQ ID NO: 86887 - RNA, 22 nt, Homo sapiens
ugugucuccugaaaauucacau

SEQ ID NO: 86888 - RNA, 22 nt, Homo sapiens
ugugcaaucagcuucauuacau

SEQ ID NO: 86889 - RNA, 22 nt, Homo sapiens
uuagaugguucaccaugaguag

SEQ ID NO: 86890 - RNA, 22 nt, Homo sapiens
uuauauguuacucccucuagca

SEQ ID NO: 86891 - RNA, 22 nt, Homo sapiens
uuauggauuuauauucuguagu

SEQ ID NO: 86892 - RNA, 22 nt, Homo sapiens
uuaugcuugugugaauuuuccc

SEQ ID NO: 86893 - RNA, 22 nt, Homo sapiens
uuaugguuuuuagcagaguaau

SEQ ID NO: 86894 - RNA, 22 nt, Homo sapiens
uguagcaaaucgauacuauugg

SEQ ID NO: 86895 - RNA, 22 nt, Homo sapiens
uguaagugugcaauucagugau

SEQ ID NO: 86896 - RNA, 22 nt, Homo sapiens
uguaauuuaaaugauccuugga

SEQ ID NO: 86897 - RNA, 23 nt, Homo sapiens
ugguuuguaagagauggacugga

SEQ ID NO: 86898 - RNA, 21 nt, Homo sapiens
ugucaagugggaaaacaugua

SEQ ID NO: 86899 - RNA, 19 nt, Homo sapiens
ugugacugguugucucgcu

SEQ ID NO: 86900 - RNA, 22 nt, Homo sapiens
uugugguuuuuaaaacuaggug

SEQ ID NO: 86901 - RNA, 22 nt, Homo sapiens
uuuagcaaagcaauuuacacca

SEQ ID NO: 86902 - RNA, 22 nt, Homo sapiens
uugugguuauagagucucccug

SEQ ID NO: 86903 - RNA, 22 nt, Homo sapiens
uugugguugauacacguaggaa

SEQ ID NO: 86904 - RNA, 22 nt, Homo sapiens
uugugguuuucagcuuauauau

SEQ ID NO: 86905 - RNA, 22 nt, Homo sapiens
uugucucacuggaguuuaguaa

SEQ ID NO: 86906 - RNA, 22 nt, Homo sapiens
uuuagguuacauauaauccaaa

SEQ ID NO: 86907 - RNA, 22 nt, Homo sapiens
uugucaugguuaauuuuaugua

SEQ ID NO: 86908 - RNA, 22 nt, Homo sapiens
uuguaacucugaauacauccua

SEQ ID NO: 86909 - RNA, 22 nt, Homo sapiens
uuguaaucaacacaucauuggg

SEQ ID NO: 86910 - RNA, 22 nt, Homo sapiens
uugguucucuuuauaugcugga

SEQ ID NO: 86911 - RNA, 22 nt, Homo sapiens
uugguauguaauuuauauugua

SEQ ID NO: 86912 - RNA, 22 nt, Homo sapiens
uugcugguuuucauaugagcag

SEQ ID NO: 86913 - RNA, 22 nt, Homo sapiens
uugauuagauccaguugauuga

SEQ ID NO: 86914 - RNA, 22 nt, Homo sapiens
uugauuuguagaaugccccaac

SEQ ID NO: 86915 - RNA, 22 nt, Homo sapiens
uugauuagugacuggcuacacg

SEQ ID NO: 86916 - RNA, 22 nt, Homo sapiens
uugcagagucaguuauuuugcc

SEQ ID NO: 86917 - RNA, 21 nt, Homo sapiens
uugagcuuuuaguacagacag

SEQ ID NO: 86918 - RNA, 22 nt, Homo sapiens
uugagauuauuguguuccuuua

SEQ ID NO: 86919 - RNA, 22 nt, Homo sapiens
uugagauggaguuuugcucuug

SEQ ID NO: 86920 - RNA, 22 nt, Homo sapiens
uugagauggaguuucacucuug

SEQ ID NO: 86921 - RNA, 22 nt, Homo sapiens
uugagauggagucucguucugu

SEQ ID NO: 86922 - RNA, 22 nt, Homo sapiens
uugagauggagucuugcucugu

SEQ ID NO: 86923 - RNA, 22 nt, Homo sapiens
uugagagagaacauuuguuaca

SEQ ID NO: 86924 - RNA, 22 nt, Homo sapiens
uugagaugauggauaugcuaau

SEQ ID NO: 86925 - RNA, 22 nt, Homo sapiens
uucaucaggaauauugaccugu

SEQ ID NO: 86926 - RNA, 22 nt, Homo sapiens
uucauaguucuuuuagucauua

SEQ ID NO: 86927 - RNA, 22 nt, Homo sapiens
uucuuuggaaacaguacuaauu

SEQ ID NO: 86928 - RNA, 21 nt, Homo sapiens
uucuuugcucaguguuagagu

SEQ ID NO: 86929 - RNA, 22 nt, Homo sapiens
uugacguaggaggauguugaga

SEQ ID NO: 86930 - RNA, 22 nt, Homo sapiens
uugacuuagacauucaguugga

SEQ ID NO: 86931 - RNA, 22 nt, Homo sapiens
uugagagaaaaaauuuauuggu

SEQ ID NO: 86932 - RNA, 22 nt, Homo sapiens
uugaaauguuuagaaguuugga

SEQ ID NO: 86933 - RNA, 22 nt, Homo sapiens
uugaauagaagguuuuuuguuc

SEQ ID NO: 86934 - RNA, 22 nt, Homo sapiens
uugaauaggcucaugcuuauca

SEQ ID NO: 86935 - RNA, 22 nt, Homo sapiens
uugacaaggagccauugcaucu

SEQ ID NO: 86936 - RNA, 22 nt, Homo sapiens
guuugguugcauggaaaauuua

SEQ ID NO: 86937 - RNA, 22 nt, Homo sapiens
guuugugguuaaagccuuucau

SEQ ID NO: 86938 - RNA, 22 nt, Homo sapiens
guuuugguuauauggaucaguu

SEQ ID NO: 86939 - RNA, 22 nt, Homo sapiens
uaacuaguggaauuugauuuca

SEQ ID NO: 86940 - RNA, 22 nt, Homo sapiens
gugguguuugagcugccaggga

SEQ ID NO: 86941 - RNA, 22 nt, Homo sapiens
guuugcauagugcugggagggg

SEQ ID NO: 86942 - RNA, 22 nt, Homo sapiens
uacaguaguaucuucauuuguu

SEQ ID NO: 86943 - RNA, 22 nt, Homo sapiens
uaagugaaggaaguguguuuac

SEQ ID NO: 86944 - RNA, 22 nt, Homo sapiens
uauggcuuucuacuugaguucu

SEQ ID NO: 86945 - RNA, 22 nt, Homo sapiens
uauggcguaugaauuauaucuc

SEQ ID NO: 86946 - RNA, 22 nt, Homo sapiens
uauggauuuuggaauauguggg

SEQ ID NO: 86947 - RNA, 22 nt, Homo sapiens
uaugacuuuugaauacagaugg

SEQ ID NO: 86948 - RNA, 22 nt, Homo sapiens
uauugauuaauugugauuaggc

SEQ ID NO: 86949 - RNA, 22 nt, Homo sapiens
uaugaaucugagagaucuggaa

SEQ ID NO: 86950 - RNA, 17 nt, Homo sapiens
gucuuugguugaguuua

SEQ ID NO: 86951 - RNA, 22 nt, Homo sapiens
gucucuugguuuagagcauuua

SEQ ID NO: 86952 - RNA, 20 nt, Homo sapiens
gucugucuccgaguagaauu

SEQ ID NO: 86953 - RNA, 22 nt, Homo sapiens
guacaguaguaaaagugaauga

SEQ ID NO: 86954 - RNA, 22 nt, Homo sapiens
guaaugaacuugaaagccuguu

SEQ ID NO: 86955 - RNA, 22 nt, Homo sapiens
guacaguacugaaugaauguau

SEQ ID NO: 86956 - RNA, 22 nt, Homo sapiens
gucauugucaauugacaauugu

SEQ ID NO: 86957 - RNA, 22 nt, Homo sapiens
gugcacaugguagguauugagu

SEQ ID NO: 86958 - RNA, 22 nt, Homo sapiens
gugcacaucgugcagguuuguu

SEQ ID NO: 86959 - RNA, 22 nt, Homo sapiens
gugauuuaguagaugcuaguua

SEQ ID NO: 86960 - RNA, 22 nt, Homo sapiens
ggugagauaucugcugauguuu

SEQ ID NO: 86961 - RNA, 22 nt, Homo sapiens
gcaagugucugagguuuuguau

SEQ ID NO: 86962 - RNA, 22 nt, Homo sapiens
gcucuuuugggguaauucugag

SEQ ID NO: 86963 - RNA, 19 nt, Homo sapiens
gcuuuguggggaaggagcc

SEQ ID NO: 86964 - RNA, 21 nt, Homo sapiens
ugauguugaccuaaguaguga

SEQ ID NO: 86965 - RNA, 17 nt, Homo sapiens
ugauauuuucccagaua

SEQ ID NO: 86966 - RNA, 19 nt, Homo sapiens
ugaguauauuguauucauu

SEQ ID NO: 86967 - RNA, 22 nt, Homo sapiens
ugaguauguuuaaugugacaau

SEQ ID NO: 86968 - RNA, 23 nt, Homo sapiens
ugagguguuaagcagacuugucu

SEQ ID NO: 86969 - RNA, 22 nt, Homo sapiens
ugagauuauauuucuuaacaga

SEQ ID NO: 86970 - RNA, 22 nt, Homo sapiens
ugagauuaucuugaucuugaaa

SEQ ID NO: 86971 - RNA, 21 nt, Homo sapiens
ugagauuauauuaacauggua

SEQ ID NO: 86972 - RNA, 22 nt, Homo sapiens
ugagaugugaucaccugaaggg

SEQ ID NO: 86973 - RNA, 22 nt, Homo sapiens
ugagaugugugcauucaacuca

SEQ ID NO: 86974 - RNA, 22 nt, Homo sapiens
ugacaguaaacagucuugauua

SEQ ID NO: 86975 - RNA, 22 nt, Homo sapiens
ugacaguaucuacagcuucuua

SEQ ID NO: 86976 - RNA, 22 nt, Homo sapiens
ugagacugagucuugcucuugu

SEQ ID NO: 86977 - RNA, 22 nt, Homo sapiens
ugagacugaguuuugcucuugu

SEQ ID NO: 86978 - RNA, 22 nt, Homo sapiens
ugagaugagucucgcucuguca

SEQ ID NO: 86979 - RNA, 22 nt, Homo sapiens
ugagaugaucaaaguauaggcu

SEQ ID NO: 86980 - RNA, 22 nt, Homo sapiens
ugagaugaguugcuggcucuga

SEQ ID NO: 86981 - RNA, 22 nt, Homo sapiens
ugagaugauagauauguuaauu

SEQ ID NO: 86982 - RNA, 22 nt, Homo sapiens
ugagaugaagcuagaagaaugg

SEQ ID NO: 86983 - RNA, 22 nt, Homo sapiens
ugagaugaagucuugcucuguu

SEQ ID NO: 86984 - RNA, 21 nt, Homo sapiens
ugcauuggagaauguuucuca

SEQ ID NO: 86985 - RNA, 22 nt, Homo sapiens
ugauuugucucucagcccuacu

SEQ ID NO: 86986 - RNA, 22 nt, Homo sapiens
ugauuuguuuagugccaaguuu

SEQ ID NO: 86987 - RNA, 22 nt, Homo sapiens
uggaguguguuaacuuuacaag

SEQ ID NO: 86988 - RNA, 18 nt, Homo sapiens
uggauaguuguuggcaga

SEQ ID NO: 86989 - RNA, 18 nt, Homo sapiens
uggauaugaaauucugga

SEQ ID NO: 86990 - RNA, 22 nt, Homo sapiens
uggaaugguaucuuguuggggu

SEQ ID NO: 86991 - RNA, 22 nt, Homo sapiens
ugcuuuguugaaaaucauuugg

SEQ ID NO: 86992 - RNA, 22 nt, Homo sapiens
uccauagacauuuuaagguagu

SEQ ID NO: 86993 - RNA, 22 nt, Homo sapiens
ucauucauucauccagcuugag

SEQ ID NO: 86994 - RNA, 22 nt, Homo sapiens
ucacugcacuucaggcuuucuc

SEQ ID NO: 86995 - RNA, 22 nt, Homo sapiens
ucuguggucagaguccuuggcc

SEQ ID NO: 86996 - RNA, 20 nt, Homo sapiens
ucuugguuggaggucuuuua

SEQ ID NO: 86997 - RNA, 22 nt, Homo sapiens
ucugguguuauucauguaguuu

SEQ ID NO: 86998 - RNA, 22 nt, Homo sapiens
cagugacacugaaaaguucggg

SEQ ID NO: 86999 - RNA, 22 nt, Homo sapiens
ccuuuguggggcgguggguaau

SEQ ID NO: 87000 - RNA, 22 nt, Homo sapiens
auugcaugucauguuuagugua

SEQ ID NO: 87001 - RNA, 22 nt, Homo sapiens
auugcacuccagccuugugaca

SEQ ID NO: 87002 - RNA, 22 nt, Homo sapiens
auugcacuggggguuagaauuu

SEQ ID NO: 87003 - RNA, 22 nt, Homo sapiens
auguuugguagugaauauggua

SEQ ID NO: 87004 - RNA, 22 nt, Homo sapiens
augugcuuuuggugagagauuu

SEQ ID NO: 87005 - RNA, 22 nt, Homo sapiens
auggcuugugggaacuuuuaaa

SEQ ID NO: 87006 - RNA, 22 nt, Homo sapiens
cuguauguuucuaugaauguga

SEQ ID NO: 87007 - RNA, 22 nt, Homo sapiens
cuggaauucaaaaucugaauuu

SEQ ID NO: 87008 - RNA, 22 nt, Homo sapiens
gaugguuuuuuaagaagagccu

SEQ ID NO: 87009 - RNA, 22 nt, Homo sapiens
gauggcucugcaggugagggua

SEQ ID NO: 87010 - RNA, 22 nt, Homo sapiens
gagauauucugguuuacuaaau

SEQ ID NO: 87011 - RNA, 22 nt, Homo sapiens
gagaugaucaugugguuuuguc

SEQ ID NO: 87012 - RNA, 22 nt, Homo sapiens
cuuuguguaggugccucuggcu

SEQ ID NO: 87013 - RNA, 22 nt, Homo sapiens
gaaugguuuacaaguguaaucu

SEQ ID NO: 87014 - RNA, 21 nt, Homo sapiens
aaugguguugccaacaaggug

SEQ ID NO: 87015 - RNA, 22 nt, Homo sapiens
aauuaguugucgugagaguggu

SEQ ID NO: 87016 - RNA, 22 nt, Homo sapiens
aauuaguuggcugggugcggug

SEQ ID NO: 87017 - RNA, 22 nt, Homo sapiens
aauaaagucugaagugugcuua

SEQ ID NO: 87018 - RNA, 22 nt, Homo sapiens
aagugacauugugcccauuuga

SEQ ID NO: 87019 - RNA, 22 nt, Homo sapiens
uuuguucaccucaaggauggga

SEQ ID NO: 87020 - RNA, 22 nt, Homo sapiens
uuugugucccucuaaaauuuau

SEQ ID NO: 87021 - RNA, 22 nt, Homo sapiens
uuuuaguggacaaagguauuua

SEQ ID NO: 87022 - RNA, 22 nt, Homo sapiens
acugcacuccagccuuggagac

SEQ ID NO: 87023 - RNA, 22 nt, Homo sapiens
acugcacuccagacucugucuc

SEQ ID NO: 87024 - RNA, 22 nt, Homo sapiens
acugcaaugucgaauagagaug

SEQ ID NO: 87025 - RNA, 22 nt, Homo sapiens
accauugcacuccaaccugggc

SEQ ID NO: 87026 - RNA, 22 nt, Homo sapiens
agauggugauaaaugugguacc

SEQ ID NO: 87027 - RNA, 22 nt, Homo sapiens
agacacugaaauguauugaaga

SEQ ID NO: 87028 - RNA, 22 nt, Homo sapiens
agcuuaugcuuggaagagauga

SEQ ID NO: 87029 - RNA, 17 nt, Homo sapiens
agugagaucauggcuua

SEQ ID NO: 87030 - RNA, 22 nt, Homo sapiens
aguggguguuccauuggauaaa

SEQ ID NO: 87031 - RNA, 22 nt, Homo sapiens
agugccauggcugcuagauggc

SEQ ID NO: 87032 - RNA, 22 nt, Homo sapiens
agugcaaggacauuuagguugu

SEQ ID NO: 87033 - RNA, 22 nt, Homo sapiens
agugcaaugauccggugcuggg

SEQ ID NO: 87034 - RNA, 22 nt, Homo sapiens
auaugacuuuccucuacuuccu

SEQ ID NO: 87035 - RNA, 22 nt, Homo sapiens
agugguguugccuguugaccua

SEQ ID NO: 87036 - RNA, 22 nt, Homo sapiens
augcuguuuugaauucucuaga

SEQ ID NO: 87037 - RNA, 22 nt, Homo sapiens
auggauguucuagggaugugau

SEQ ID NO: 87038 - RNA, 22 nt, Homo sapiens
auggauuuuaggauacaguuga

SEQ ID NO: 87039 - RNA, 22 nt, Homo sapiens
augacaguguggauuauuguaa

SEQ ID NO: 87040 - RNA, 22 nt, Homo sapiens
aucuuuggugcaugauacuuug

SEQ ID NO: 87041 - RNA, 22 nt, Homo sapiens
augaaugucuuauuuugagaaa

SEQ ID NO: 87042 - RNA, 22 nt, Homo sapiens
augaauuuucugauguugggua

SEQ ID NO: 87043 - RNA, 22 nt, Homo sapiens
auccauugucuaaugcuaagau

SEQ ID NO: 87044 - RNA, 22 nt, Homo sapiens
aucagagugaauaaugacaaaa

SEQ ID NO: 87045 - RNA, 22 nt, Homo sapiens
auauggcuuuuauuauguugag

SEQ ID NO: 87046 - RNA, 22 nt, Homo sapiens
uguuuuggaguggacuuugcau

SEQ ID NO: 87047 - RNA, 21 nt, Homo sapiens
uguuuuugcuguguaucucuc

SEQ ID NO: 87048 - RNA, 22 nt, Homo sapiens
ugugucuugcuggugccugcau

SEQ ID NO: 87049 - RNA, 22 nt, Homo sapiens
ugugucuugaauuuuguaugua

SEQ ID NO: 87050 - RNA, 22 nt, Homo sapiens
uguuaucauuacguucuuaguu

SEQ ID NO: 87051 - RNA, 22 nt, Homo sapiens
uguuuguuugauaugggauaaa

SEQ ID NO: 87052 - RNA, 22 nt, Homo sapiens
uguuauguuuuagagguuucaa

SEQ ID NO: 87053 - RNA, 20 nt, Homo sapiens
ugugauuauuuaguugcaug

SEQ ID NO: 87054 - RNA, 22 nt, Homo sapiens
ugugguuuuaguaaaacuaugu

SEQ ID NO: 87055 - RNA, 22 nt, Homo sapiens
uucugugcuuguggaugaagug

SEQ ID NO: 87056 - RNA, 22 nt, Homo sapiens
uucucaaggagccuucguaacu

SEQ ID NO: 87057 - RNA, 22 nt, Homo sapiens
uucuauugguaauauuuucugu

SEQ ID NO: 87058 - RNA, 22 nt, Homo sapiens
uucauagucacauucgaugucu

SEQ ID NO: 87059 - RNA, 22 nt, Homo sapiens
uugauguugaggacauaaaccu

SEQ ID NO: 87060 - RNA, 22 nt, Homo sapiens
uugaauguacuuguucucacua

SEQ ID NO: 87061 - RNA, 22 nt, Homo sapiens
uugaauagugacuuugauucug

SEQ ID NO: 87062 - RNA, 22 nt, Homo sapiens
uugaauagcauguuuagugcau

SEQ ID NO: 87063 - RNA, 22 nt, Homo sapiens
uugaaugaaaugaugucauuug

SEQ ID NO: 87064 - RNA, 22 nt, Homo sapiens
uugaaugaaauuggugugggga

SEQ ID NO: 87065 - RNA, 22 nt, Homo sapiens
uugaagugaagaacaauaucac

SEQ ID NO: 87066 - RNA, 19 nt, Homo sapiens
uugcaguauccuauauguu

SEQ ID NO: 87067 - RNA, 22 nt, Homo sapiens
uugcauaagugcauucugugau

SEQ ID NO: 87068 - RNA, 22 nt, Homo sapiens
uugcagugguuucacuggcaaa

SEQ ID NO: 87069 - RNA, 18 nt, Homo sapiens
uugcauaguguauccaaa

SEQ ID NO: 87070 - RNA, 19 nt, Homo sapiens
uugcauagguugaaccagc

SEQ ID NO: 87071 - RNA, 22 nt, Homo sapiens
uugguaguuucugucuuuagau

SEQ ID NO: 87072 - RNA, 22 nt, Homo sapiens
uugcuuuguugucuggggaaua

SEQ ID NO: 87073 - RNA, 23 nt, Homo sapiens
uugcauugcccuccauaguacuc

SEQ ID NO: 87074 - RNA, 22 nt, Homo sapiens
uugcauuagugugguacauuug

SEQ ID NO: 87075 - RNA, 22 nt, Homo sapiens
uuugguugccucuaugagccug

SEQ ID NO: 87076 - RNA, 22 nt, Homo sapiens
uuuggcuuugagaagcagugga

SEQ ID NO: 87077 - RNA, 22 nt, Homo sapiens
uuugcacuggagauucaauggg

SEQ ID NO: 87078 - RNA, 22 nt, Homo sapiens
uuugaguuugaggugcugauga

SEQ ID NO: 87079 - RNA, 22 nt, Homo sapiens
uuucuugguuguauuuagacuu

SEQ ID NO: 87080 - RNA, 22 nt, Homo sapiens
uuugaauguaaugagcaggaag

SEQ ID NO: 87081 - RNA, 22 nt, Homo sapiens
uuugacuacugaugguguacgc

SEQ ID NO: 87082 - RNA, 22 nt, Homo sapiens
uugugguaggcauguaagauga

SEQ ID NO: 87083 - RNA, 22 nt, Homo sapiens
uuggucugcucugauguuuucu

SEQ ID NO: 87084 - RNA, 22 nt, Homo sapiens
uuguauguaaccauuuggcaaa

SEQ ID NO: 87085 - RNA, 22 nt, Homo sapiens
uuguauguuguuugucagagaa

SEQ ID NO: 87086 - RNA, 22 nt, Homo sapiens
uuucacguuggggaguugagug

SEQ ID NO: 87087 - RNA, 22 nt, Homo sapiens
ugagauuaucguaauguaucuc

SEQ ID NO: 87088 - RNA, 22 nt, Homo sapiens
ugaguauguuuagaaguaaagg

SEQ ID NO: 87089 - RNA, 22 nt, Homo sapiens
ugauaagugaaagugcucuauc

SEQ ID NO: 87090 - RNA, 22 nt, Homo sapiens
ugauaugaaucaaucacucuuc

SEQ ID NO: 87091 - RNA, 22 nt, Homo sapiens
ugauaugaaagggaaauaagug

SEQ ID NO: 87092 - RNA, 22 nt, Homo sapiens
ugaugguuuuauaagggagagu

SEQ ID NO: 87093 - RNA, 22 nt, Homo sapiens
ugaugguguuaccaucuuuacu

SEQ ID NO: 87094 - RNA, 20 nt, Homo sapiens
ugauugaccagagcaguuuu

SEQ ID NO: 87095 - RNA, 22 nt, Homo sapiens
ugaucugucacuuaucacauuu

SEQ ID NO: 87096 - RNA, 18 nt, Homo sapiens
ugauaugguuuggcucug

SEQ ID NO: 87097 - RNA, 20 nt, Homo sapiens
ugauaugguuuggcuguguu

SEQ ID NO: 87098 - RNA, 22 nt, Homo sapiens
ugauaugucacuugaucauggu

SEQ ID NO: 87099 - RNA, 22 nt, Homo sapiens
ugauaugacagcucugcugcca

SEQ ID NO: 87100 - RNA, 22 nt, Homo sapiens
ugauuuguccauguggcacgug

SEQ ID NO: 87101 - RNA, 22 nt, Homo sapiens
uggauugcaaaaucuuuuugag

SEQ ID NO: 87102 - RNA, 22 nt, Homo sapiens
ugaauuguuucauucuuuacau

SEQ ID NO: 87103 - RNA, 22 nt, Homo sapiens
ugaauguuugcagcuuauacca

SEQ ID NO: 87104 - RNA, 22 nt, Homo sapiens
ugaauauguuaauuagcaucau

SEQ ID NO: 87105 - RNA, 18 nt, Homo sapiens
ugacauugagcugagaaa

SEQ ID NO: 87106 - RNA, 19 nt, Homo sapiens
ucuuugguacgugcuuuga

SEQ ID NO: 87107 - RNA, 22 nt, Homo sapiens
ucuuuggaggcgaucuguuuga

SEQ ID NO: 87108 - RNA, 22 nt, Homo sapiens
ucuuugauuuuguuacuaagac

SEQ ID NO: 87109 - RNA, 22 nt, Homo sapiens
ucuuugauuaugcagauggguu

SEQ ID NO: 87110 - RNA, 22 nt, Homo sapiens
ucauggcuuuuauuauguugag

SEQ ID NO: 87111 - RNA, 22 nt, Homo sapiens
ucagugauugguuauuuuaggc

SEQ ID NO: 87112 - RNA, 22 nt, Homo sapiens
ucauauugguuaaaauaguggg

SEQ ID NO: 87113 - RNA, 18 nt, Homo sapiens
ucauagaucaugacagug

SEQ ID NO: 87114 - RNA, 22 nt, Homo sapiens
ucauagaucaaguaauaagaca

SEQ ID NO: 87115 - RNA, 22 nt, Homo sapiens
uauuugguuauaugaguaaguu

SEQ ID NO: 87116 - RNA, 22 nt, Homo sapiens
cauagcacacguauaccuaugu

SEQ ID NO: 87117 - RNA, 22 nt, Homo sapiens
auuagguuggugcaaaacuuuc

SEQ ID NO: 87118 - RNA, 22 nt, Homo sapiens
auuagguuaggcaaacuucugu

SEQ ID NO: 87119 - RNA, 22 nt, Homo sapiens
auuauauguguaugugcauacc

SEQ ID NO: 87120 - RNA, 22 nt, Homo sapiens
auuauugacucauagaaaggau

SEQ ID NO: 87121 - RNA, 22 nt, Homo sapiens
auugugauggucaaaggaaaua

SEQ ID NO: 87122 - RNA, 20 nt, Homo sapiens
cagcuagugguaggagucgg

SEQ ID NO: 87123 - RNA, 22 nt, Homo sapiens
cuuuggugagggauaaauuuca

SEQ ID NO: 87124 - RNA, 19 nt, Homo sapiens
gaaguguuuguucuccaug

SEQ ID NO: 87125 - RNA, 22 nt, Homo sapiens
cugauguagguggucugugauc

SEQ ID NO: 87126 - RNA, 22 nt, Homo sapiens
cuguuugauuaagugguggaaa

SEQ ID NO: 87127 - RNA, 22 nt, Homo sapiens
cuguuugaggguuugcuuucag

SEQ ID NO: 87128 - RNA, 22 nt, Homo sapiens
cuuggguugauugauaaugcca

SEQ ID NO: 87129 - RNA, 22 nt, Homo sapiens
cuucuugagacuuaggcuuugg

SEQ ID NO: 87130 - RNA, 22 nt, Homo sapiens
cuucuguuaguucugauaacuu

SEQ ID NO: 87131 - RNA, 22 nt, Homo sapiens
gauuugagagaggguguuuaua

SEQ ID NO: 87132 - RNA, 22 nt, Homo sapiens
gauuagugacguugagcacugu

SEQ ID NO: 87133 - RNA, 22 nt, Homo sapiens
gauuguguucauaggcauguua

SEQ ID NO: 87134 - RNA, 22 nt, Homo sapiens
gaugauguugaauguucucacc

SEQ ID NO: 87135 - RNA, 22 nt, Homo sapiens
uacacagucaaaaauuuccagg

SEQ ID NO: 87136 - RNA, 23 nt, Homo sapiens
uacuaguaagcguguucuuugca

SEQ ID NO: 87137 - RNA, 22 nt, Homo sapiens
uacguuaucagguaugcaagag

SEQ ID NO: 87138 - RNA, 18 nt, Homo sapiens
uagagcacaagcuuuggc

SEQ ID NO: 87139 - RNA, 22 nt, Homo sapiens
uaaguaaaugaaagguugauuu

SEQ ID NO: 87140 - RNA, 21 nt, Homo sapiens
uaauaaugucucagacaccua

SEQ ID NO: 87141 - RNA, 22 nt, Homo sapiens
uaauaauguuaggcuuacucaa

SEQ ID NO: 87142 - RNA, 22 nt, Homo sapiens
uaaguguaaugucugaaguuug

SEQ ID NO: 87143 - RNA, 22 nt, Homo sapiens
uauuguuaaagauguuaaugau

SEQ ID NO: 87144 - RNA, 22 nt, Homo sapiens
uauugcuuuacucucuuauccu

SEQ ID NO: 87145 - RNA, 22 nt, Homo sapiens
uauugguuacuguugaucgcca

SEQ ID NO: 87146 - RNA, 22 nt, Homo sapiens
uauuaguuguaugauucccaag

SEQ ID NO: 87147 - RNA, 22 nt, Homo sapiens
uauugaacgugggauauugaag

SEQ ID NO: 87148 - RNA, 22 nt, Homo sapiens
uauggauuuucagauucuuauc

SEQ ID NO: 87149 - RNA, 22 nt, Homo sapiens
uaugaugcuguuuagaaucucu

SEQ ID NO: 87150 - RNA, 22 nt, Homo sapiens
uaugaccuuguccccucucgcc

SEQ ID NO: 87151 - RNA, 22 nt, Homo sapiens
uaggugauccauuuguauuuua

SEQ ID NO: 87152 - RNA, 22 nt, Homo sapiens
uaggugauugaagguggaaugu

SEQ ID NO: 87153 - RNA, 22 nt, Homo sapiens
uaggucuuuuaugaaauauauu

SEQ ID NO: 87154 - RNA, 22 nt, Homo sapiens
uaguuguugcagguaggaugua

SEQ ID NO: 87155 - RNA, 22 nt, Homo sapiens
uauaaaguaauuucuaggggcu

SEQ ID NO: 87156 - RNA, 22 nt, Homo sapiens
uauagcuaugggauguauuugc

SEQ ID NO: 87157 - RNA, 22 nt, Homo sapiens
gguauguuuagaccauuuacau

SEQ ID NO: 87158 - RNA, 22 nt, Homo sapiens
ggaauguaguaauuugguuagu

SEQ ID NO: 87159 - RNA, 22 nt, Homo sapiens
ggaauguauuaaggcauugggc

SEQ ID NO: 87160 - RNA, 22 nt, Homo sapiens
ggugaauuguaccccauaggau

SEQ ID NO: 87161 - RNA, 22 nt, Homo sapiens
guaugugacuggaacaguagga

SEQ ID NO: 87162 - RNA, 22 nt, Homo sapiens
guuaagaaguguaacuuaaguu

SEQ ID NO: 87163 - RNA, 22 nt, Homo sapiens
guuaugcagcaauugauaaucu

SEQ ID NO: 87164 - RNA, 22 nt, Homo sapiens
guuauguuauguuauguuaugu

SEQ ID NO: 87165 - RNA, 22 nt, Homo sapiens
gugcaguuuuaagugaguuucu

SEQ ID NO: 87166 - RNA, 22 nt, Homo sapiens
gugcaguuuugagugaguuucu

SEQ ID NO: 87167 - RNA, 22 nt, Homo sapiens
gugcauauaaguuguuucuagu

SEQ ID NO: 87168 - RNA, 22 nt, Homo sapiens
gugcagaugucuuuauaguagc

SEQ ID NO: 87169 - RNA, 18 nt, Homo sapiens
guccauuuguugguacac

SEQ ID NO: 87170 - RNA, 16 nt, Homo sapiens
auaugacuuuaggagg

SEQ ID NO: 87171 - RNA, 17 nt, Homo sapiens
auaugaauuuuggagau

SEQ ID NO: 87172 - RNA, 22 nt, Homo sapiens
aucaaaguaggcauauguuuuu

SEQ ID NO: 87173 - RNA, 22 nt, Homo sapiens
auaauaucagguugugaugaug

SEQ ID NO: 87174 - RNA, 22 nt, Homo sapiens
augugcuuaaaaaugcagagaa

SEQ ID NO: 87175 - RNA, 22 nt, Homo sapiens
auguggaaagcagcaugauaug

SEQ ID NO: 87176 - RNA, 17 nt, Homo sapiens
augugaauguucaaaua

SEQ ID NO: 87177 - RNA, 22 nt, Homo sapiens
auggaacauuauagauguaaaa

SEQ ID NO: 87178 - RNA, 22 nt, Homo sapiens
auguaguagauauuuauggaaa

SEQ ID NO: 87179 - RNA, 22 nt, Homo sapiens
aucugcauucccauguuuauug

SEQ ID NO: 87180 - RNA, 22 nt, Homo sapiens
aucuuugauuagacugauggau

SEQ ID NO: 87181 - RNA, 22 nt, Homo sapiens
aucuuuggauacuugauauagu

SEQ ID NO: 87182 - RNA, 22 nt, Homo sapiens
augaguaugagaauacauuaag

SEQ ID NO: 87183 - RNA, 23 nt, Homo sapiens
aaauuugccuauuauuccuaugg

SEQ ID NO: 87184 - RNA, 22 nt, Homo sapiens
acugugcuguuuuaauuauuga

SEQ ID NO: 87185 - RNA, 22 nt, Homo sapiens
acugcacuucagccuugugaca

SEQ ID NO: 87186 - RNA, 22 nt, Homo sapiens
acugcauuugucccuuuugaac

SEQ ID NO: 87187 - RNA, 18 nt, Homo sapiens
acuggaauuaaacuuuuu

SEQ ID NO: 87188 - RNA, 22 nt, Homo sapiens
aauaaaguaggaggugaggaaa

SEQ ID NO: 87189 - RNA, 22 nt, Homo sapiens
aauugcuucuguauuuuggaca

SEQ ID NO: 87190 - RNA, 22 nt, Homo sapiens
aauugcauaaaauucaacucug

SEQ ID NO: 87191 - RNA, 22 nt, Homo sapiens
acagaacugggcuugcuuuugg

SEQ ID NO: 87192 - RNA, 22 nt, Homo sapiens
uucaagcuauggugaucuuuuc

SEQ ID NO: 87193 - RNA, 22 nt, Homo sapiens
uucuauggucacagaugcuuga

SEQ ID NO: 87194 - RNA, 22 nt, Homo sapiens
uucuagagagaagacuuaagcu

SEQ ID NO: 87195 - RNA, 22 nt, Homo sapiens
uucuaugguuuaauaguuuggg

SEQ ID NO: 87196 - RNA, 22 nt, Homo sapiens
uucgucaugagacagaugcuga

SEQ ID NO: 87197 - RNA, 22 nt, Homo sapiens
uuccugugacccccaagcccac

SEQ ID NO: 87198 - RNA, 22 nt, Homo sapiens
uucauuggacuuguguucuuga

SEQ ID NO: 87199 - RNA, 22 nt, Homo sapiens
uguuuguuugugauacgguaca

SEQ ID NO: 87200 - RNA, 22 nt, Homo sapiens
uguuauguucuacuuuuaggug

SEQ ID NO: 87201 - RNA, 22 nt, Homo sapiens
uguucaugaguucucauuuuua

SEQ ID NO: 87202 - RNA, 22 nt, Homo sapiens
uguguuugauaaguccauaguu

SEQ ID NO: 87203 - RNA, 22 nt, Homo sapiens
ugugaaaucagauagccuuuuu

SEQ ID NO: 87204 - RNA, 22 nt, Homo sapiens
ugucauguuucuacugaccaaa

SEQ ID NO: 87205 - RNA, 22 nt, Homo sapiens
ugucauggauucugagucuggg

SEQ ID NO: 87206 - RNA, 22 nt, Homo sapiens
uugagugaaugaaugauuaaau

SEQ ID NO: 87207 - RNA, 22 nt, Homo sapiens
uucugugguuucauuuaccugu

SEQ ID NO: 87208 - RNA, 22 nt, Homo sapiens
uugagugaaggcuguguucuug

SEQ ID NO: 87209 - RNA, 22 nt, Homo sapiens
uugaguauuggacugguaucuu

SEQ ID NO: 87210 - RNA, 20 nt, Homo sapiens
uugccgagagaaagguguua

SEQ ID NO: 87211 - RNA, 22 nt, Homo sapiens
uugccauggaguagaauugaag

SEQ ID NO: 87212 - RNA, 22 nt, Homo sapiens
uugcaugucauaacugauggaa

SEQ ID NO: 87213 - RNA, 22 nt, Homo sapiens
uugaugauguuucugccuugcc

SEQ ID NO: 87214 - RNA, 22 nt, Homo sapiens
uugauauguuguuagauucagu

SEQ ID NO: 87215 - RNA, 22 nt, Homo sapiens
uugauguguuuccaggauuugu

SEQ ID NO: 87216 - RNA, 22 nt, Homo sapiens
uuguauguuucugugcacauga

SEQ ID NO: 87217 - RNA, 22 nt, Homo sapiens
uuguauugucuugaugaguuga

SEQ ID NO: 87218 - RNA, 22 nt, Homo sapiens
uuggcuguguuuauaugcugga

SEQ ID NO: 87219 - RNA, 22 nt, Homo sapiens
uuggauugugaaaguauucucu

SEQ ID NO: 87220 - RNA, 22 nt, Homo sapiens
uuggauuguuucuagauugggg

SEQ ID NO: 87221 - RNA, 21 nt, Homo sapiens
uuuggcuucucugcugcagcc

SEQ ID NO: 87222 - RNA, 22 nt, Homo sapiens
uuuggcuauguuguaucuuucc

SEQ ID NO: 87223 - RNA, 22 nt, Homo sapiens
uuuguaauaccugaggcugggu

SEQ ID NO: 87224 - RNA, 22 nt, Homo sapiens
uuugguugucacaacuggggga

SEQ ID NO: 87225 - RNA, 22 nt, Homo sapiens
uuuguaagaugcauagauugca

SEQ ID NO: 87226 - RNA, 21 nt, Homo sapiens
uuugugguuacugugugagcu

SEQ ID NO: 87227 - RNA, 22 nt, Homo sapiens
uuugugcuccuguugagaaucu

SEQ ID NO: 87228 - RNA, 23 nt, Homo sapiens
uuugugucccucuagaauucaug

SEQ ID NO: 87229 - RNA, 22 nt, Homo sapiens
uuugugcuccuaugagaaucua

SEQ ID NO: 87230 - RNA, 22 nt, Homo sapiens
uuugugcuccugugagaaucua

SEQ ID NO: 87231 - RNA, 22 nt, Homo sapiens
uuugucuccuaagacucugugg

SEQ ID NO: 87232 - RNA, 22 nt, Homo sapiens
uuguuuuggagaugagcuaaaa

SEQ ID NO: 87233 - RNA, 22 nt, Homo sapiens
uugugauugagugauccuuguu

SEQ ID NO: 87234 - RNA, 22 nt, Homo sapiens
uugugcaaaguugugguuucug

SEQ ID NO: 87235 - RNA, 22 nt, Homo sapiens
uuguuauguaucucaagauaaa

SEQ ID NO: 87236 - RNA, 22 nt, Homo sapiens
uuugagcauggaaauggcauga

SEQ ID NO: 87237 - RNA, 22 nt, Homo sapiens
uuugagcaugcagauugccagg

SEQ ID NO: 87238 - RNA, 22 nt, Homo sapiens
uuucauggcgaggcuucauggg

SEQ ID NO: 87239 - RNA, 20 nt, Homo sapiens
uuuggcaauaggguuuuugu

SEQ ID NO: 87240 - RNA, 22 nt, Homo sapiens
ugacuggagucuugcucugucg

SEQ ID NO: 87241 - RNA, 22 nt, Homo sapiens
ugacaugauuguauauuuagaa

SEQ ID NO: 87242 - RNA, 22 nt, Homo sapiens
ugaauacugugcaaaggauuug

SEQ ID NO: 87243 - RNA, 22 nt, Homo sapiens
ucuuugguaauggaugucugau

SEQ ID NO: 87244 - RNA, 22 nt, Homo sapiens
ucuuugguagaagcuauuuuau

SEQ ID NO: 87245 - RNA, 22 nt, Homo sapiens
ucuuugguauugugaauagugu

SEQ ID NO: 87246 - RNA, 22 nt, Homo sapiens
ucuuuguguaggucaaucuggc

SEQ ID NO: 87247 - RNA, 22 nt, Homo sapiens
ucuuugguuucugucucuguaa

SEQ ID NO: 87248 - RNA, 22 nt, Homo sapiens
ucuuaguuuagauuagcaauuc

SEQ ID NO: 87249 - RNA, 22 nt, Homo sapiens
ucuguuguuaucauaauauuga

SEQ ID NO: 87250 - RNA, 21 nt, Homo sapiens
ucuguguugaucucacuggga

SEQ ID NO: 87251 - RNA, 22 nt, Homo sapiens
ucugugguucaggcuggagugc

SEQ ID NO: 87252 - RNA, 22 nt, Homo sapiens
ucuaagaauucauuuauaagcc

SEQ ID NO: 87253 - RNA, 22 nt, Homo sapiens
uccuucaugcaucaauguaucc

SEQ ID NO: 87254 - RNA, 22 nt, Homo sapiens
uggaagcauagcagcgugugug

SEQ ID NO: 87255 - RNA, 22 nt, Homo sapiens
uggcaugauauauauucguuug

SEQ ID NO: 87256 - RNA, 22 nt, Homo sapiens
uggcaugaaguguguuuuaucu

SEQ ID NO: 87257 - RNA, 22 nt, Homo sapiens
ugggaucgucaagugaggcucg

SEQ ID NO: 87258 - RNA, 22 nt, Homo sapiens
ugguaugucuuucuuccuguag

SEQ ID NO: 87259 - RNA, 22 nt, Homo sapiens
ugauagucuuugcuggugaccu

SEQ ID NO: 87260 - RNA, 22 nt, Homo sapiens
ugagcaagaucuuuauaauuag

SEQ ID NO: 87261 - RNA, 22 nt, Homo sapiens
ugauaugaaguuagcuggcugu

SEQ ID NO: 87262 - RNA, 22 nt, Homo sapiens
ugaugaugaaugaucuuuuaca

SEQ ID NO: 87263 - RNA, 22 nt, Homo sapiens
ugcauaugcagcauuuaugauu

SEQ ID NO: 87264 - RNA, 22 nt, Homo sapiens
guauuguacuacaagcucuuua

SEQ ID NO: 87265 - RNA, 22 nt, Homo sapiens
guaucauugccuaaugcucuca

SEQ ID NO: 87266 - RNA, 22 nt, Homo sapiens
guagagguagauucuguuuuga

SEQ ID NO: 87267 - RNA, 22 nt, Homo sapiens
gugauauguuaggaucuaaguc

SEQ ID NO: 87268 - RNA, 20 nt, Homo sapiens
gugauuggucacugguuguu

SEQ ID NO: 87269 - RNA, 22 nt, Homo sapiens
gugauuauccacgucuuuguga

SEQ ID NO: 87270 - RNA, 22 nt, Homo sapiens
gucuaugagucccugaauuuaa

SEQ ID NO: 87271 - RNA, 22 nt, Homo sapiens
gugugacuagucaugccugaau

SEQ ID NO: 87272 - RNA, 22 nt, Homo sapiens
guguauauccuauuaguucugu

SEQ ID NO: 87273 - RNA, 22 nt, Homo sapiens
uauagcacugcaauauuucccu

SEQ ID NO: 87274 - RNA, 22 nt, Homo sapiens
uauagcacugagaauguaauuc

SEQ ID NO: 87275 - RNA, 22 nt, Homo sapiens
uagcaguaccccaguauccugg

SEQ ID NO: 87276 - RNA, 22 nt, Homo sapiens
uagugacauugcugggaaugcu

SEQ ID NO: 87277 - RNA, 22 nt, Homo sapiens
uauuaguuuucuguggauuaca

SEQ ID NO: 87278 - RNA, 22 nt, Homo sapiens
uauggauuucauuagacuugag

SEQ ID NO: 87279 - RNA, 22 nt, Homo sapiens
uauggauuugccuauucuguau

SEQ ID NO: 87280 - RNA, 22 nt, Homo sapiens
uauggauuugcauuccccaugu

SEQ ID NO: 87281 - RNA, 22 nt, Homo sapiens
uauugcuuaugaugcugaauua

SEQ ID NO: 87282 - RNA, 22 nt, Homo sapiens
ucaaauguuuguuuaaggcuua

SEQ ID NO: 87283 - RNA, 22 nt, Homo sapiens
uauugucacuaaaggaagcugg

SEQ ID NO: 87284 - RNA, 22 nt, Homo sapiens
uagauuauccggcugggacaau

SEQ ID NO: 87285 - RNA, 22 nt, Homo sapiens
uagauuaucccugauuugucca

SEQ ID NO: 87286 - RNA, 20 nt, Homo sapiens
guugaugcugaaguugcuua

SEQ ID NO: 87287 - RNA, 22 nt, Homo sapiens
aucaaguaguuauacguaaagg

SEQ ID NO: 87288 - RNA, 22 nt, Homo sapiens
aucacaguuaagaggugaugaa

SEQ ID NO: 87289 - RNA, 19 nt, Homo sapiens
auaauuagcagugaggaca

SEQ ID NO: 87290 - RNA, 22 nt, Homo sapiens
auaauguuugauugagcagaua

SEQ ID NO: 87291 - RNA, 22 nt, Homo sapiens
auaauagguugauugacauugc

SEQ ID NO: 87292 - RNA, 22 nt, Homo sapiens
augauauggguugucaguugua

SEQ ID NO: 87293 - RNA, 22 nt, Homo sapiens
aucaugucuucccagugauucu

SEQ ID NO: 87294 - RNA, 22 nt, Homo sapiens
augaaaguguguggaaacuuga

SEQ ID NO: 87295 - RNA, 22 nt, Homo sapiens
augagaaugauucuguuauggu

SEQ ID NO: 87296 - RNA, 22 nt, Homo sapiens
augagaugcaagauuagauggg

SEQ ID NO: 87297 - RNA, 22 nt, Homo sapiens
augagaugaggaauggcccucc

SEQ ID NO: 87298 - RNA, 19 nt, Homo sapiens
agcuuuggcuaacuuucuc

SEQ ID NO: 87299 - RNA, 22 nt, Homo sapiens
acugguuguuuaacugaauuga

SEQ ID NO: 87300 - RNA, 22 nt, Homo sapiens
acugcacuccagccuugagagc

SEQ ID NO: 87301 - RNA, 19 nt, Homo sapiens
acauggauuuugugcaaac

SEQ ID NO: 87302 - RNA, 22 nt, Homo sapiens
acauccauuugcuuuauuugcu

SEQ ID NO: 87303 - RNA, 22 nt, Homo sapiens
acugcacuccagccucgugaca

SEQ ID NO: 87304 - RNA, 22 nt, Homo sapiens
acuagaugauuauguuccauug

SEQ ID NO: 87305 - RNA, 22 nt, Homo sapiens
aaucucaacacuuugggaggcu

SEQ ID NO: 87306 - RNA, 22 nt, Homo sapiens
aaugacacugagcaucuuucau

SEQ ID NO: 87307 - RNA, 22 nt, Homo sapiens
aaggauuguaaaguugacaaau

SEQ ID NO: 87308 - RNA, 22 nt, Homo sapiens
cacugcaauuacuuuugcacca

SEQ ID NO: 87309 - RNA, 22 nt, Homo sapiens
auuugguuauucaguuguucag

SEQ ID NO: 87310 - RNA, 22 nt, Homo sapiens
auucauagugcuaagguguauc

SEQ ID NO: 87311 - RNA, 22 nt, Homo sapiens
auugaauuugguuugcuaagaa

SEQ ID NO: 87312 - RNA, 19 nt, Homo sapiens
auugacauugggguguuca

SEQ ID NO: 87313 - RNA, 22 nt, Homo sapiens
auucaagugaugugauucuucu

SEQ ID NO: 87314 - RNA, 22 nt, Homo sapiens
auuagguuagugcaaaaguaau

SEQ ID NO: 87315 - RNA, 22 nt, Homo sapiens
auugagcaaggucuccuaguau

SEQ ID NO: 87316 - RNA, 22 nt, Homo sapiens
auugcaauuaguccauagaguu

SEQ ID NO: 87317 - RNA, 22 nt, Homo sapiens
cagcuaguaauuuauugaagau

SEQ ID NO: 87318 - RNA, 22 nt, Homo sapiens
cauugcuaaaagucauauauaa

SEQ ID NO: 87319 - RNA, 22 nt, Homo sapiens
cauugguuuuucaggaguauau

SEQ ID NO: 87320 - RNA, 23 nt, Homo sapiens
ccaguauuuauguaaggaagugu

SEQ ID NO: 87321 - RNA, 22 nt, Homo sapiens
ccaguuuucaagauaaugguuu

SEQ ID NO: 87322 - RNA, 22 nt, Homo sapiens
cccaguguguuguggauauuua

SEQ ID NO: 87323 - RNA, 22 nt, Homo sapiens
cuauggauuuacuguauagggu

SEQ ID NO: 87324 - RNA, 23 nt, Homo sapiens
cuccaugagccguccagggccug

SEQ ID NO: 87325 - RNA, 22 nt, Homo sapiens
gauugguugaaaguagaauacu

SEQ ID NO: 87326 - RNA, 22 nt, Homo sapiens
gauggaguugacuaagacaaca

SEQ ID NO: 87327 - RNA, 22 nt, Homo sapiens
gauaaaguauuggguacuaugc

SEQ ID NO: 87328 - RNA, 22 nt, Homo sapiens
gaugauguuacucuuuuuccuu

SEQ ID NO: 87329 - RNA, 22 nt, Homo sapiens
gauagcauucaauuaucuguug

SEQ ID NO: 87330 - RNA, 21 nt, Homo sapiens
gaggauauuuuuauguuugga

SEQ ID NO: 87331 - RNA, 18 nt, Homo sapiens
gagcaccuuuuuugcaga

SEQ ID NO: 87332 - RNA, 22 nt, Homo sapiens
gagcuaguguaauauuuugggg

SEQ ID NO: 87333 - RNA, 22 nt, Homo sapiens
gaaucacagauuaugaguaucu

SEQ ID NO: 87334 - RNA, 22 nt, Homo sapiens
gaagauaucuaguaccauuguc

SEQ ID NO: 87335 - RNA, 22 nt, Homo sapiens
cuuuuggugguucugaugcagg

SEQ ID NO: 87336 - RNA, 22 nt, Homo sapiens
cuuuugugauucuucaguuacu

SEQ ID NO: 87337 - RNA, 22 nt, Homo sapiens
cucuuugaguuccuccuggugu

SEQ ID NO: 87338 - RNA, 22 nt, Homo sapiens
cucuuugaugugaaccgugguu

SEQ ID NO: 87339 - RNA, 22 nt, Homo sapiens
cugugguuacguucuuugugcu

SEQ ID NO: 87340 - RNA, 22 nt, Homo sapiens
cugugcuaggcaaugugguaga

SEQ ID NO: 87341 - RNA, 19 nt, Homo sapiens
cugugcauuucuguggaag

SEQ ID NO: 87342 - RNA, 22 nt, Homo sapiens
uuuagcaauucauuuugugucu

SEQ ID NO: 87343 - RNA, 23 nt, Homo sapiens
uuguucccuuccacucagucucc

SEQ ID NO: 87344 - RNA, 22 nt, Homo sapiens
uuguuauguuggucaguaaugu

SEQ ID NO: 87345 - RNA, 22 nt, Homo sapiens
uugugaauggugcugcaguaaa

SEQ ID NO: 87346 - RNA, 22 nt, Homo sapiens
uugauaugaauggcuguuugug

SEQ ID NO: 87347 - RNA, 22 nt, Homo sapiens
uugauauucugagaagcugaag

SEQ ID NO: 87348 - RNA, 22 nt, Homo sapiens
uugauaugacuaucuuuuaugu

SEQ ID NO: 87349 - RNA, 22 nt, Homo sapiens
uugauauguggaauauuuaucu

SEQ ID NO: 87350 - RNA, 22 nt, Homo sapiens
uugauauguguauagcaugugg

SEQ ID NO: 87351 - RNA, 22 nt, Homo sapiens
uuggaauuaagagauauuuucu

SEQ ID NO: 87352 - RNA, 22 nt, Homo sapiens
uuggaauuaaccuggugcugga

SEQ ID NO: 87353 - RNA, 22 nt, Homo sapiens
uuguacuagucauauuuugaaa

SEQ ID NO: 87354 - RNA, 22 nt, Homo sapiens
aacugcauuuucugauugugug

SEQ ID NO: 87355 - RNA, 22 nt, Homo sapiens
uuuuugauuaauggguagacca

SEQ ID NO: 87356 - RNA, 22 nt, Homo sapiens
uuuugguuaggauggguggcau

SEQ ID NO: 87357 - RNA, 22 nt, Homo sapiens
uuuccauguuggugaaaugagg

SEQ ID NO: 87358 - RNA, 22 nt, Homo sapiens
uuugcugagucugacuucaugg

SEQ ID NO: 87359 - RNA, 22 nt, Homo sapiens
uuagguuguugccauugaaagu

SEQ ID NO: 87360 - RNA, 22 nt, Homo sapiens
uuauggcuauugaugacaauug

SEQ ID NO: 87361 - RNA, 22 nt, Homo sapiens
uuaugucuuugagcaaugcugu

SEQ ID NO: 87362 - RNA, 23 nt, Homo sapiens
uuauggcuuuuauuauguugagg

SEQ ID NO: 87363 - RNA, 22 nt, Homo sapiens
uuaauuguaucuauagauguca

SEQ ID NO: 87364 - RNA, 22 nt, Homo sapiens
uuaauucugucugcccucaucc

SEQ ID NO: 87365 - RNA, 22 nt, Homo sapiens
uuaauagugacucauuuuccac

SEQ ID NO: 87366 - RNA, 22 nt, Homo sapiens
uugacugggccagacagagauc

SEQ ID NO: 87367 - RNA, 22 nt, Homo sapiens
uugacauaaucauuucacagug

SEQ ID NO: 87368 - RNA, 22 nt, Homo sapiens
uugagauggagucucacugugu

SEQ ID NO: 87369 - RNA, 22 nt, Homo sapiens
uugagauggagucucgcacugu

SEQ ID NO: 87370 - RNA, 22 nt, Homo sapiens
uugagauggagucucacucuug

SEQ ID NO: 87371 - RNA, 22 nt, Homo sapiens
uugagauggagucucacgcauu

SEQ ID NO: 87372 - RNA, 22 nt, Homo sapiens
uugagauggagucucacuccuu

SEQ ID NO: 87373 - RNA, 22 nt, Homo sapiens
uugagauggagucuugcgcugu

SEQ ID NO: 87374 - RNA, 22 nt, Homo sapiens
uugagauggagucuugcacugu

SEQ ID NO: 87375 - RNA, 22 nt, Homo sapiens
uugagaugaagucuugcucucu

SEQ ID NO: 87376 - RNA, 21 nt, Homo sapiens
uugagcaacuaggguuauagg

SEQ ID NO: 87377 - RNA, 22 nt, Homo sapiens
uugagauguauguauauaaugu

SEQ ID NO: 87378 - RNA, 22 nt, Homo sapiens
uugagcaauccuccugccaugu

SEQ ID NO: 87379 - RNA, 22 nt, Homo sapiens
uugagauggauagacauagcau

SEQ ID NO: 87380 - RNA, 22 nt, Homo sapiens
uugagauggagucuugcucuug

SEQ ID NO: 87381 - RNA, 22 nt, Homo sapiens
uugaggguggcauauauugauu

SEQ ID NO: 87382 - RNA, 22 nt, Homo sapiens
uugaggugggaggaucacuuga

SEQ ID NO: 87383 - RNA, 22 nt, Homo sapiens
uugaggugaauuugcaggaugc

SEQ ID NO: 87384 - RNA, 22 nt, Homo sapiens
uggcaugauguguucauugaaa

SEQ ID NO: 87385 - RNA, 22 nt, Homo sapiens
uguaaagaaagcuguuguugua

SEQ ID NO: 87386 - RNA, 22 nt, Homo sapiens
uggggugugagggagaaagaaa

SEQ ID NO: 87387 - RNA, 22 nt, Homo sapiens
uguauguugauguuauauucug

SEQ ID NO: 87388 - RNA, 22 nt, Homo sapiens
uguauguuuaaggccaguggaa

SEQ ID NO: 87389 - RNA, 22 nt, Homo sapiens
uguauuuguuguuaaauggaga

SEQ ID NO: 87390 - RNA, 22 nt, Homo sapiens
ugucuuugguucaggcaaggag

SEQ ID NO: 87391 - RNA, 20 nt, Homo sapiens
ugucuauggggguucucugc

SEQ ID NO: 87392 - RNA, 22 nt, Homo sapiens
ugaguuguugcauucuuggugu

SEQ ID NO: 87393 - RNA, 22 nt, Homo sapiens
ugaguguccaccccuuucacag

SEQ ID NO: 87394 - RNA, 21 nt, Homo sapiens
ugcaugguagucacaugauuc

SEQ ID NO: 87395 - RNA, 22 nt, Homo sapiens
uggaguguagcggcaccuauua

SEQ ID NO: 87396 - RNA, 23 nt, Homo sapiens
ugacuuaggccucaacuaugacu

SEQ ID NO: 87397 - RNA, 22 nt, Homo sapiens
ugacuauaguaaucacuucaca

SEQ ID NO: 87398 - RNA, 22 nt, Homo sapiens
ucuuuguuuucugauccugaag

SEQ ID NO: 87399 - RNA, 22 nt, Homo sapiens
ugagaugaguugcgcucugucg

SEQ ID NO: 87400 - RNA, 21 nt, Homo sapiens
ugagaugauccugcaugcaug

SEQ ID NO: 87401 - RNA, 22 nt, Homo sapiens
ugagaucucauuaugguuuuaa

SEQ ID NO: 87402 - RNA, 22 nt, Homo sapiens
ugagauauauauauuugagaca

SEQ ID NO: 87403 - RNA, 22 nt, Homo sapiens
ugagauauugggaguaauguca

SEQ ID NO: 87404 - RNA, 22 nt, Homo sapiens
ugagagaugauaaaauguuugu

SEQ ID NO: 87405 - RNA, 22 nt, Homo sapiens
ucuguguugaucacacugggag

SEQ ID NO: 87406 - RNA, 22 nt, Homo sapiens
ucugaguggcagaaugagcuga

SEQ ID NO: 87407 - RNA, 22 nt, Homo sapiens
ucuuuggugaauggucauccag

SEQ ID NO: 87408 - RNA, 22 nt, Homo sapiens
ucuuuggucaucaugggaagca

SEQ ID NO: 87409 - RNA, 22 nt, Homo sapiens
ucuuugguaugugcaugugcuu

SEQ ID NO: 87410 - RNA, 17 nt, Homo sapiens
ucuugugguucuugaau

SEQ ID NO: 87411 - RNA, 22 nt, Homo sapiens
uaucaaguguuagggagaugug

SEQ ID NO: 87412 - RNA, 22 nt, Homo sapiens
uaucauuguguuauuucuucca

SEQ ID NO: 87413 - RNA, 23 nt, Homo sapiens
uaugucuauucuaaugccagcac

SEQ ID NO: 87414 - RNA, 22 nt, Homo sapiens
uauugcccugcuuuguucuaaa

SEQ ID NO: 87415 - RNA, 22 nt, Homo sapiens
uauugcauguugagcaguaccu

SEQ ID NO: 87416 - RNA, 22 nt, Homo sapiens
ucaaguacugccuugcucuggc

SEQ ID NO: 87417 - RNA, 18 nt, Homo sapiens
ucaauguggauguucuuu

SEQ ID NO: 87418 - RNA, 23 nt, Homo sapiens
uauaugugucuaggagcuauggu

SEQ ID NO: 87419 - RNA, 19 nt, Homo sapiens
uaucaaguaugcacuguac

SEQ ID NO: 87420 - RNA, 22 nt, Homo sapiens
uaguaucacauggucuuaauua

SEQ ID NO: 87421 - RNA, 22 nt, Homo sapiens
uagggcuugugaucagguguag

SEQ ID NO: 87422 - RNA, 22 nt, Homo sapiens
uaacugcaaccucugccugcug

SEQ ID NO: 87423 - RNA, 22 nt, Homo sapiens
uaaggauuuuggugauuacacu

SEQ ID NO: 87424 - RNA, 22 nt, Homo sapiens
uaaaguuauugccccucaguua

SEQ ID NO: 87425 - RNA, 17 nt, Homo sapiens
guugaguuugagucaag

SEQ ID NO: 87426 - RNA, 22 nt, Homo sapiens
guugauguugcagucuugagga

SEQ ID NO: 87427 - RNA, 22 nt, Homo sapiens
guugaucuauguugcuggcagu

SEQ ID NO: 87428 - RNA, 22 nt, Homo sapiens
guuuggauuuucuaauuucugu

SEQ ID NO: 87429 - RNA, 22 nt, Homo sapiens
guuugugcuccuaugagaaucu

SEQ ID NO: 87430 - RNA, 22 nt, Homo sapiens
gugauuauuaugcacugcaugc

SEQ ID NO: 87431 - RNA, 22 nt, Homo sapiens
gugauugugaaaacauuaagaa

SEQ ID NO: 87432 - RNA, 19 nt, Homo sapiens
guaaugugcuucaguagca

SEQ ID NO: 87433 - RNA, 22 nt, Homo sapiens
gucugucuuuugucuuugaaau

SEQ ID NO: 87434 - RNA, 22 nt, Homo sapiens
gugaauguaaagucaugugacu

SEQ ID NO: 87435 - RNA, 22 nt, Homo sapiens
gugacugcauauaaguguaugu

SEQ ID NO: 87436 - RNA, 22 nt, Homo sapiens
caugcagcacacaugucugugc

SEQ ID NO: 87437 - RNA, 22 nt, Homo sapiens
caugguguuaggcacugggaau

SEQ ID NO: 87438 - RNA, 22 nt, Homo sapiens
cacugcaguggaagauuaagaa

SEQ ID NO: 87439 - RNA, 22 nt, Homo sapiens
auugcacuccagcuugggugac

SEQ ID NO: 87440 - RNA, 22 nt, Homo sapiens
ccaguuuuucauuuauacuagu

SEQ ID NO: 87441 - RNA, 22 nt, Homo sapiens
cugguaugugugacugcauuga

SEQ ID NO: 87442 - RNA, 22 nt, Homo sapiens
gagauuaauacacaucaaaugc

SEQ ID NO: 87443 - RNA, 22 nt, Homo sapiens
gacauguuuuuuaagguuuaug

SEQ ID NO: 87444 - RNA, 22 nt, Homo sapiens
gagauguaagaauuuauuuguu

SEQ ID NO: 87445 - RNA, 22 nt, Homo sapiens
cuuugugcccuucugcccauca

SEQ ID NO: 87446 - RNA, 22 nt, Homo sapiens
cuuugguucuguuuauaugcug

SEQ ID NO: 87447 - RNA, 22 nt, Homo sapiens
cugugguugagcuuugccauga

SEQ ID NO: 87448 - RNA, 22 nt, Homo sapiens
cugucuguuucaaaagugguua

SEQ ID NO: 87449 - RNA, 22 nt, Homo sapiens
cugugacugcagggcauauuug

SEQ ID NO: 87450 - RNA, 22 nt, Homo sapiens
cuuuuggugugaagaagcucuu

SEQ ID NO: 87451 - RNA, 22 nt, Homo sapiens
gauggauuuuuuaggcagagcu

SEQ ID NO: 87452 - RNA, 22 nt, Homo sapiens
gaguuuguaaacuauucacuaa

SEQ ID NO: 87453 - RNA, 22 nt, Homo sapiens
gaguugagagaguuguuauuuc

SEQ ID NO: 87454 - RNA, 22 nt, Homo sapiens
gcaauggaaucccuugaucaau

SEQ ID NO: 87455 - RNA, 22 nt, Homo sapiens
gcuccauuuuccauuucucuaa

SEQ ID NO: 87456 - RNA, 22 nt, Homo sapiens
ggagauuauuaguguuucaugc

SEQ ID NO: 87457 - RNA, 22 nt, Homo sapiens
ggauugugauaauuguugcaaa

SEQ ID NO: 87458 - RNA, 19 nt, Homo sapiens
aguggguguuuucuguuug

SEQ ID NO: 87459 - RNA, 20 nt, Homo sapiens
auaaauguauagguguacau

SEQ ID NO: 87460 - RNA, 22 nt, Homo sapiens
auaaagcuauuccucucuuuuu

SEQ ID NO: 87461 - RNA, 23 nt, Homo sapiens
agucuguguuuacaggcucucug

SEQ ID NO: 87462 - RNA, 22 nt, Homo sapiens
agggcuuguuuaacuaucauua

SEQ ID NO: 87463 - RNA, 18 nt, Homo sapiens
agagcacugaguuuuaga

SEQ ID NO: 87464 - RNA, 22 nt, Homo sapiens
agagguguuaaagucucuuuua

SEQ ID NO: 87465 - RNA, 22 nt, Homo sapiens
agagguuuugcccucgagauaa

SEQ ID NO: 87466 - RNA, 22 nt, Homo sapiens
agaucauaugcaguaaugaacu

SEQ ID NO: 87467 - RNA, 22 nt, Homo sapiens
agauggguuuucacauguuggc

SEQ ID NO: 87468 - RNA, 22 nt, Homo sapiens
acuuugcuuagagggcauuaaa

SEQ ID NO: 87469 - RNA, 22 nt, Homo sapiens
acugcacuccagccuguugaca

SEQ ID NO: 87470 - RNA, 22 nt, Homo sapiens
acugcacuccagccugcugaca

SEQ ID NO: 87471 - RNA, 22 nt, Homo sapiens
acuuuuguuauacagugugaua

SEQ ID NO: 87472 - RNA, 22 nt, Homo sapiens
acauaguagacacugaaaauau

SEQ ID NO: 87473 - RNA, 21 nt, Homo sapiens
auauggaacuggugacguguu

SEQ ID NO: 87474 - RNA, 23 nt, Homo sapiens
aucacuguuaacaauuucuuccu

SEQ ID NO: 87475 - RNA, 22 nt, Homo sapiens
augaaagugauaaaugucucua

SEQ ID NO: 87476 - RNA, 20 nt, Homo sapiens
augaccuauggugguauaag

SEQ ID NO: 87477 - RNA, 20 nt, Homo sapiens
augaauguccuugauggcau

SEQ ID NO: 87478 - RNA, 20 nt, Homo sapiens
augaaggcaggugugaguuu

SEQ ID NO: 87479 - RNA, 20 nt, Homo sapiens
augaagugaaguuagggaac

SEQ ID NO: 87480 - RNA, 22 nt, Homo sapiens
auggauauuuuuugaacauaga

SEQ ID NO: 87481 - RNA, 19 nt, Homo sapiens
augauugucuauggaggaa

SEQ ID NO: 87482 - RNA, 22 nt, Homo sapiens
auggauuuguaguacaugguug

SEQ ID NO: 87483 - RNA, 22 nt, Homo sapiens
augaugaaguaagugcuuagga

SEQ ID NO: 87484 - RNA, 22 nt, Homo sapiens
augagauuguuugugugaaaua

SEQ ID NO: 87485 - RNA, 22 nt, Homo sapiens
augaguugaagcuacaagaggc

SEQ ID NO: 87486 - RNA, 21 nt, Homo sapiens
auggugagaaaguagugucaa

SEQ ID NO: 87487 - RNA, 23 nt, Homo sapiens
auugaacacuuucauaugugagg

SEQ ID NO: 87488 - RNA, 22 nt, Homo sapiens
auguuauguuaaugauaaugga

SEQ ID NO: 87489 - RNA, 22 nt, Homo sapiens
uugucacucuuccuaggguagg

SEQ ID NO: 87490 - RNA, 22 nt, Homo sapiens
uugagauggaguuuugcucuug

SEQ ID NO: 87491 - RNA, 22 nt, Homo sapiens
cauugcaacuucugccucccag

SEQ ID NO: 87492 - RNA, 22 nt, Homo sapiens
ccacugcacuccagcccggcaa

SEQ ID NO: 87493 - RNA, 22 nt, Homo sapiens
uuugguugcauucacauauuuc

SEQ ID NO: 87494 - RNA, 19 nt, Homo sapiens
auaguguaggaaaacagcu

SEQ ID NO: 87495 - RNA, 22 nt, Homo sapiens
uucauaguucuuuuagucauua

SEQ ID NO: 87496 - RNA, 22 nt, Homo sapiens
gaagauaucuaguaccauuguc

SEQ ID NO: 87497 - RNA, 22 nt, Homo sapiens
uauggcuucuuauucuuucccg

SEQ ID NO: 87498 - RNA, 22 nt, Homo sapiens
ucuuuggaggcgaucuguuuga

SEQ ID NO: 87499 - RNA, 22 nt, Homo sapiens
uugauagacaucugaguuguug

SEQ ID NO: 87500 - RNA, 22 nt, Homo sapiens
uuugcacuuuuguaauaugguu

SEQ ID NO: 87501 - RNA, 22 nt, Homo sapiens
cugaaagagcauuugaaugggu

SEQ ID NO: 87502 - RNA, 22 nt, Homo sapiens
uugagauggagucuugcucugu

SEQ ID NO: 87503 - RNA, 22 nt, Homo sapiens
uagauuguaauaugcagaaugg

SEQ ID NO: 87504 - RNA, 22 nt, Homo sapiens
acagugcuuucaauguucagua

SEQ ID NO: 87505 - RNA, 18 nt, Homo sapiens
uaacagucucucaggauc

SEQ ID NO: 87506 - RNA, 20 nt, Homo sapiens
agguagauagaugauagaua

SEQ ID NO: 87507 - RNA, 22 nt, Homo sapiens
auucccuuagcugccucagccu

SEQ ID NO: 87508 - RNA, 20 nt, Homo sapiens
ucacugugaacuucuugagg

SEQ ID NO: 87509 - RNA, 22 nt, Homo sapiens
guuuugguuauauggaucaguu

SEQ ID NO: 87510 - RNA, 23 nt, Homo sapiens
uugcauagacauccucauagauu

SEQ ID NO: 87511 - RNA, 19 nt, Homo sapiens
uagaugucuuugcauagau

SEQ ID NO: 87512 - RNA, 22 nt, Homo sapiens
ugaggauaguguugaaggcagg

SEQ ID NO: 87513 - RNA, 22 nt, Homo sapiens
uuuguacugagccaagauggua

SEQ ID NO: 87514 - RNA, 18 nt, Homo sapiens
uugcauaguguauccaaa

SEQ ID NO: 87515 - RNA, 22 nt, Homo sapiens
uuuggauagugugguccuuuua

SEQ ID NO: 87516 - RNA, 22 nt, Homo sapiens
uauugcauauuauucuaguggc

SEQ ID NO: 87517 - RNA, 22 nt, Homo sapiens
cuuuuggucuaucagagaagca

SEQ ID NO: 87518 - RNA, 22 nt, Homo sapiens
uucuagcaauggcagagugucu

SEQ ID NO: 87519 - RNA, 22 nt, Homo sapiens
uacauacuguaugguucuguuu

SEQ ID NO: 87520 - RNA, 23 nt, Homo sapiens
uuaaggugaugucuuugugccuc

SEQ ID NO: 87521 - RNA, 22 nt, Homo sapiens
gagauggagucuuuuucuguca

SEQ ID NO: 87522 - RNA, 22 nt, Homo sapiens
uugagacggaguuuugcucuug

SEQ ID NO: 87523 - RNA, 22 nt, Homo sapiens
ucagucuuuuaccauuaaguau

SEQ ID NO: 87524 - RNA, 22 nt, Homo sapiens
uguaauaguaggcucacauuug

SEQ ID NO: 87525 - RNA, 22 nt, Homo sapiens
ugagagaugaacuauucuugaa

SEQ ID NO: 87526 - RNA, 22 nt, Homo sapiens
cugguuguucuggaugggcagg

SEQ ID NO: 87527 - RNA, 22 nt, Homo sapiens
auguuugguagugaauauggua

SEQ ID NO: 87528 - RNA, 22 nt, Homo sapiens
aucugcauucccauguuuauug

SEQ ID NO: 87529 - RNA, 22 nt, Homo sapiens
auugcauugugaucuucccaga

SEQ ID NO: 87530 - RNA, 22 nt, Homo sapiens
ugaguagaacaucaagucauac

SEQ ID NO: 87531 - RNA, 22 nt, Homo sapiens
cuucaucugguuugugaacuuu

SEQ ID NO: 87532 - RNA, 22 nt, Homo sapiens
uguuuuggagguccucacuaga

SEQ ID NO: 87533 - RNA, 22 nt, Homo sapiens
auuuugguuacauaguugagcu

SEQ ID NO: 87534 - RNA, 22 nt, Homo sapiens
ugguuguuuuaaaugucgucug

SEQ ID NO: 87535 - RNA, 23 nt, Homo sapiens
uuugcacuugcuccuucuauggc

SEQ ID NO: 87536 - RNA, 22 nt, Homo sapiens
gagauuuucagcuugacuggga

SEQ ID NO: 87537 - RNA, 22 nt, Homo sapiens
cucucaagaugcugggauuaca

SEQ ID NO: 87538 - RNA, 22 nt, Homo sapiens
uuuuggcuuaaagagaauguau

SEQ ID NO: 87539 - RNA, 22 nt, Homo sapiens
uuuuggucuccaguuucugcug

SEQ ID NO: 87540 - RNA, 22 nt, Homo sapiens
aggcaugauggcuccagaucau

SEQ ID NO: 87541 - RNA, 21 nt, Homo sapiens
uugagaagaauuagcucuucc

SEQ ID NO: 87542 - RNA, 22 nt, Homo sapiens
auucauagugcuaagguguauc

SEQ ID NO: 87543 - RNA, 21 nt, Homo sapiens
acaguacuugagaucuuuuga

SEQ ID NO: 87544 - RNA, 22 nt, Homo sapiens
ugucacuuugccuucuggacuu

SEQ ID NO: 87545 - RNA, 22 nt, Homo sapiens
ugacuugauacauguuuuugaa

SEQ ID NO: 87546 - RNA, 22 nt, Homo sapiens
uuugaguuugaggugcugauga

SEQ ID NO: 87547 - RNA, 22 nt, Homo sapiens
uggaguguuggggcaggaucuc

SEQ ID NO: 87548 - RNA, 22 nt, Homo sapiens
cugauaguucucuuuagaguuu

SEQ ID NO: 87549 - RNA, 20 nt, Homo sapiens
cuuaucaguggcaaguauaa

SEQ ID NO: 87550 - RNA, 18 nt, Homo sapiens
cucacaguaacuuuuaag

SEQ ID NO: 87551 - RNA, 20 nt, Homo sapiens
cucagauuauucugaagcaa

SEQ ID NO: 87552 - RNA, 22 nt, Homo sapiens
guagagguagacuuccuugucu

SEQ ID NO: 87553 - RNA, 22 nt, Homo sapiens
uaugccucuucauaaaguauga

SEQ ID NO: 87554 - RNA, 22 nt, Homo sapiens
uugagacggagucuugcucuuu

SEQ ID NO: 87555 - RNA, 22 nt, Homo sapiens
uucugcuugaucuaguguguug

SEQ ID NO: 87556 - RNA, 22 nt, Homo sapiens
acacuguauccuucuguccuuu

SEQ ID NO: 87557 - RNA, 22 nt, Homo sapiens
ccagucuuggugucuguagcac

SEQ ID NO: 87558 - RNA, 22 nt, Homo sapiens
gagguagagacuauguauuaga

SEQ ID NO: 87559 - RNA, 20 nt, Homo sapiens
ugaguagaggaguucuauca

SEQ ID NO: 87560 - RNA, 22 nt, Homo sapiens
uugcauagacaauauuaaucuu

SEQ ID NO: 87561 - RNA, 22 nt, Homo sapiens
ugcaacacauugccccugcucu

SEQ ID NO: 87562 - RNA, 22 nt, Homo sapiens
uucugcuagucugucagaucuu

SEQ ID NO: 87563 - RNA, 22 nt, Homo sapiens
cugugaucuuuuuucauguggu

SEQ ID NO: 87564 - RNA, 22 nt, Homo sapiens
uugaauagacagccagcuuuaa

SEQ ID NO: 87565 - RNA, 22 nt, Homo sapiens
uuggaaaccucugcagguguuu

SEQ ID NO: 87566 - RNA, 22 nt, Homo sapiens
acagugcuucugauaugaugcc

SEQ ID NO: 87567 - RNA, 22 nt, Homo sapiens
ugaguagaacuccuggagaugu

SEQ ID NO: 87568 - RNA, 22 nt, Homo sapiens
uuucgguuaucuagcuuuauga

SEQ ID NO: 87569 - RNA, 22 nt, Homo sapiens
uagauuaucucaccacucgagu

SEQ ID NO: 87570 - RNA, 22 nt, Homo sapiens
acagugcuguuguguuuucacg

SEQ ID NO: 87571 - RNA, 22 nt, Homo sapiens
ucuucuagcggaacccucuugu

SEQ ID NO: 87572 - RNA, 22 nt, Homo sapiens
ugaguagaagugaagauagugg

SEQ ID NO: 87573 - RNA, 22 nt, Homo sapiens
cuucucagugcucaucuuauuu

SEQ ID NO: 87574 - RNA, 22 nt, Homo sapiens
uuaaguagcugggcaugguggu

SEQ ID NO: 87575 - RNA, 23 nt, Homo sapiens
ugguuuguaagagauggacugga

SEQ ID NO: 87576 - RNA, 22 nt, Homo sapiens
gcaugaugaauaauaucacaag

SEQ ID NO: 87577 - RNA, 22 nt, Homo sapiens
uugggacuggaaggaguaaggg

SEQ ID NO: 87578 - RNA, 22 nt, Homo sapiens
uugaauagaagguuuuuuguuc

SEQ ID NO: 87579 - RNA, 20 nt, Homo sapiens
uggcauguugguaugcaccc

SEQ ID NO: 87580 - RNA, 20 nt, Homo sapiens
auguucuggaggacagaagc

SEQ ID NO: 87581 - RNA, 21 nt, Homo sapiens
uuuuugguggucauggauaga

SEQ ID NO: 87582 - RNA, 22 nt, Homo sapiens
ucuuuuugagucaguuucggua

SEQ ID NO: 87583 - RNA, 22 nt, Homo sapiens
uugaauaguggugaaaguuuga

SEQ ID NO: 87584 - RNA, 22 nt, Homo sapiens
uugaauaggcucaugcuuauca

SEQ ID NO: 87585 - RNA, 22 nt, Homo sapiens
gucucuugguuuagagcauuua

SEQ ID NO: 87586 - RNA, 23 nt, Homo sapiens
ggaguguauuggcacgaucucag

SEQ ID NO: 87587 - RNA, 22 nt, Homo sapiens
uugagauggagucuugcucuug

SEQ ID NO: 87588 - RNA, 22 nt, Homo sapiens
cacugcgacguccgccucccgg

SEQ ID NO: 87589 - RNA, 22 nt, Homo sapiens
uuacagucuuaggcagugcuuu

SEQ ID NO: 87590 - RNA, 22 nt, Homo sapiens
cacagucuugcaauauugagau

SEQ ID NO: 87591 - RNA, 22 nt, Homo sapiens
aguuuuugcugauagcaugcuu

SEQ ID NO: 87592 - RNA, 19 nt, Homo sapiens
uugcauagguugaaccagc

SEQ ID NO: 87593 - RNA, 22 nt, Homo sapiens
uugaaagacaucaccuacugcu

SEQ ID NO: 87594 - RNA, 22 nt, Homo sapiens
aucacuuucuauuucugugcca

SEQ ID NO: 87595 - RNA, 22 nt, Homo sapiens
ucagauugaugcauacuuaaau

SEQ ID NO: 87596 - RNA, 22 nt, Homo sapiens
agguaaacauggggacugcuac

SEQ ID NO: 87597 - RNA, 22 nt, Homo sapiens
cuuuuggugguucugaugcagg

SEQ ID NO: 87598 - RNA, 22 nt, Homo sapiens
uugaauagugacuuugauucug

SEQ ID NO: 87599 - RNA, 22 nt, Homo sapiens
gagguuauuggggugcuugugu

SEQ ID NO: 87600 - RNA, 22 nt, Homo sapiens
agauauuuguuaggucugucag

SEQ ID NO: 87601 - RNA, 22 nt, Homo sapiens
uuucauagaucaugcuuuugga

SEQ ID NO: 87602 - RNA, 22 nt, Homo sapiens
ugaguagauccaagacuguccu

SEQ ID NO: 87603 - RNA, 22 nt, Homo sapiens
ucaguuuguauuucagguugca

SEQ ID NO: 87604 - RNA, 22 nt, Homo sapiens
ugagaugguaaauuuuuguugu

SEQ ID NO: 87605 - RNA, 22 nt, Homo sapiens
cucaaguacaugggauuacagg

SEQ ID NO: 87606 - RNA, 22 nt, Homo sapiens
uaaggaguagaauaguaaggca

SEQ ID NO: 87607 - RNA, 22 nt, Homo sapiens
uucuugcuguauccucacaugg

SEQ ID NO: 87608 - RNA, 22 nt, Homo sapiens
gucucuuguuaucauuucugag

SEQ ID NO: 87609 - RNA, 22 nt, Homo sapiens
uugagaugaagucuugcucucu

SEQ ID NO: 87610 - RNA, 22 nt, Homo sapiens
uugagaugaaguuuugcucuuu

SEQ ID NO: 87611 - RNA, 22 nt, Homo sapiens
uuuuuugguaauugaacaauga

SEQ ID NO: 87612 - RNA, 22 nt, Homo sapiens
aggagguagggugugaaacagc

SEQ ID NO: 87613 - RNA, 23 nt, Homo sapiens
uuucaguaguuguauccuguugc

SEQ ID NO: 87614 - RNA, 22 nt, Homo sapiens
uuacagucaaguuacauuucuc

SEQ ID NO: 87615 - RNA, 22 nt, Homo sapiens
uacagucuggaggccuguguug

SEQ ID NO: 87616 - RNA, 22 nt, Homo sapiens
accacagugcuuccugcucacg

SEQ ID NO: 87617 - RNA, 22 nt, Homo sapiens
uacucuuuagcuccuuaaggaa

SEQ ID NO: 87618 - RNA, 23 nt, Homo sapiens
ggaguguaaugacucgaucucgg

SEQ ID NO: 87619 - RNA, 22 nt, Homo sapiens
aucagauuccacauuuuaucag

SEQ ID NO: 87620 - RNA, 22 nt, Homo sapiens
uuguacuuuuaguagagacggg

SEQ ID NO: 87621 - RNA, 22 nt, Homo sapiens
cacagucugggcuuguuuguac

SEQ ID NO: 87622 - RNA, 22 nt, Homo sapiens
uuuuugguugguaggcuauuaa

SEQ ID NO: 87623 - RNA, 21 nt, Homo sapiens
gcuuuuucggaagucuuuggc

SEQ ID NO: 87624 - RNA, 22 nt, Homo sapiens
uauugcuuuacucucuuauccu

SEQ ID NO: 87625 - RNA, 22 nt, Homo sapiens
uucagauugcauaccgaaagua

SEQ ID NO: 87626 - RNA, 22 nt, Homo sapiens
uuacagucucaagagugcugca

SEQ ID NO: 87627 - RNA, 22 nt, Homo sapiens
gacagugugauacuuagucuca

SEQ ID NO: 87628 - RNA, 22 nt, Homo sapiens
ucagguaguuugugggagauga

SEQ ID NO: 87629 - RNA, 22 nt, Homo sapiens
uacagucuagaggagaaucagg

SEQ ID NO: 87630 - RNA, 22 nt, Homo sapiens
agucagauuggcauuuguuggg

SEQ ID NO: 87631 - RNA, 22 nt, Homo sapiens
ucaguagagacaggauuucacc

SEQ ID NO: 87632 - RNA, 22 nt, Homo sapiens
cuuuuggugugaagaagcucuu

SEQ ID NO: 87633 - RNA, 22 nt, Homo sapiens
ucacuauugacaacagugugga

SEQ ID NO: 87634 - RNA, 22 nt, Homo sapiens
aucucuugccagucagaauggu

SEQ ID NO: 87635 - RNA, 22 nt, Homo sapiens
cucaguagaaaauacauggacu

SEQ ID NO: 87636 - RNA, 22 nt, Homo sapiens
auugucauuuucugagaaguaa

SEQ ID NO: 87637 - RNA, 22 nt, Homo sapiens
uugagauggaguguugcucugu

SEQ ID NO: 87638 - RNA, 22 nt, Homo sapiens
uugagauggagucuugcucucu

SEQ ID NO: 87639 - RNA, 22 nt, Homo sapiens
uugagauggagucuugcacugu

SEQ ID NO: 87640 - RNA, 22 nt, Homo sapiens
gauaguugugagaacucuuacu

SEQ ID NO: 87641 - RNA, 22 nt, Homo sapiens
gccaaaaugcugggauuacagg

SEQ ID NO: 87642 - RNA, 22 nt, Homo sapiens
uuggacuuuaagauagagaugu

SEQ ID NO: 87643 - RNA, 23 nt, Homo sapiens
ugagucacuuugcuggggucucu

SEQ ID NO: 87644 - RNA, 22 nt, Homo sapiens
ucagucuuuuuuuggcaagcau

SEQ ID NO: 87645 - RNA, 22 nt, Homo sapiens
ugagauggaguuucacuuuugu

SEQ ID NO: 87646 - RNA, 22 nt, Homo sapiens
uuggucacugacauguuugaaa

SEQ ID NO: 87647 - RNA, 22 nt, Homo sapiens
acaguacuuuuggauuugugaa

SEQ ID NO: 87648 - RNA, 22 nt, Homo sapiens
gauuuuuggggaagccucuuau

SEQ ID NO: 87649 - RNA, 22 nt, Homo sapiens
uugaaagaugaacuggauugga

SEQ ID NO: 87650 - RNA, 22 nt, Homo sapiens
aacagucuccaguuguauccau

SEQ ID NO: 87651 - RNA, 22 nt, Homo sapiens
uagaucuuuaaaaggugcuaga

SEQ ID NO: 87652 - RNA, 22 nt, Homo sapiens
aucagauuccagaggcagcacc

SEQ ID NO: 87653 - RNA, 22 nt, Homo sapiens
auccugaagcuuuacugaauuc

SEQ ID NO: 87654 - RNA, 22 nt, Homo sapiens
uugguacuaaaaaguagggugu

SEQ ID NO: 87655 - RNA, 21 nt, Homo sapiens
uuuccuggagcguauggcuuc

SEQ ID NO: 87656 - RNA, 22 nt, Homo sapiens
ugucaaguugugguucaauuuu

SEQ ID NO: 87657 - RNA, 23 nt, Homo sapiens
ugguuuguaagagauggacugga

SEQ ID NO: 87658 - RNA, 22 nt, Homo sapiens
uguaaaucuuucacaguugaug

SEQ ID NO: 87659 - RNA, 22 nt, Homo sapiens
uucacugggugugguggcucac

SEQ ID NO: 87660 - RNA, 19 nt, Homo sapiens
uuauacuguauuguuuagg

SEQ ID NO: 87661 - RNA, 22 nt, Homo sapiens
uuaugcaucuuccacacucauu

SEQ ID NO: 87662 - RNA, 22 nt, Homo sapiens
uuaaggcauucuuugucuucau

SEQ ID NO: 87663 - RNA, 19 nt, Homo sapiens
uuaagugugauaucucagu

SEQ ID NO: 87664 - RNA, 22 nt, Homo sapiens
uuacugcauaauuccugggaag

SEQ ID NO: 87665 - RNA, 22 nt, Homo sapiens
aucaccuuucccuuucugaauc

SEQ ID NO: 87666 - RNA, 22 nt, Homo sapiens
aucagaaucucuagaggacugu

SEQ ID NO: 87667 - RNA, 22 nt, Homo sapiens
aucagauaccuguugggaaaug

SEQ ID NO: 87668 - RNA, 22 nt, Homo sapiens
augauuguucucacucaagaga

SEQ ID NO: 87669 - RNA, 22 nt, Homo sapiens
augauucugaucuagagcuugg

SEQ ID NO: 87670 - RNA, 22 nt, Homo sapiens
auggauugucuccuugugccau

SEQ ID NO: 87671 - RNA, 19 nt, Homo sapiens
augcugguguugcucaaac

SEQ ID NO: 87672 - RNA, 22 nt, Homo sapiens
augcaauucuagauugauagua

SEQ ID NO: 87673 - RNA, 22 nt, Homo sapiens
auacuagucaagaauguaugag

SEQ ID NO: 87674 - RNA, 22 nt, Homo sapiens
auaugacuuuccucuacuuccu

SEQ ID NO: 87675 - RNA, 22 nt, Homo sapiens
auaugcuaauuuuuagucgagc

SEQ ID NO: 87676 - RNA, 20 nt, Homo sapiens
auagcauugauggacucaaa

SEQ ID NO: 87677 - RNA, 22 nt, Homo sapiens
agugcaaugauccggugcuggg

SEQ ID NO: 87678 - RNA, 22 nt, Homo sapiens
agugcauuugcaucucaauaua

SEQ ID NO: 87679 - RNA, 23 nt, Homo sapiens
aagucauggaaucaaaugaggug

SEQ ID NO: 87680 - RNA, 22 nt, Homo sapiens
aaguauagcuaugauaaacauu

SEQ ID NO: 87681 - RNA, 22 nt, Homo sapiens
aauaaaguaggaggugaggaaa

SEQ ID NO: 87682 - RNA, 22 nt, Homo sapiens
aauagcacuguagauggaggaa

SEQ ID NO: 87683 - RNA, 22 nt, Homo sapiens
aauacuuccaaaucuagucauu

SEQ ID NO: 87684 - RNA, 22 nt, Homo sapiens
gauuagaacagaagucagauua

SEQ ID NO: 87685 - RNA, 22 nt, Homo sapiens
gauauguucugagaaaugcauu

SEQ ID NO: 87686 - RNA, 22 nt, Homo sapiens
cugguuguuacaugcuugccag

SEQ ID NO: 87687 - RNA, 22 nt, Homo sapiens
cuuuggucaauugcugcgggga

SEQ ID NO: 87688 - RNA, 22 nt, Homo sapiens
cugagacacucuuaucugcaua

SEQ ID NO: 87689 - RNA, 23 nt, Homo sapiens
auugcagaaucacagagguagug

SEQ ID NO: 87690 - RNA, 22 nt, Homo sapiens
auugcauaaacacauuucuuau

SEQ ID NO: 87691 - RNA, 22 nt, Homo sapiens
auugucacuuaaaagugcaugu

SEQ ID NO: 87692 - RNA, 22 nt, Homo sapiens
cccuuagacuacuaauaugagc

SEQ ID NO: 87693 - RNA, 22 nt, Homo sapiens
cuaauacguaguauauccauga

SEQ ID NO: 87694 - RNA, 22 nt, Homo sapiens
cauaaaucuuguugaauagcac

SEQ ID NO: 87695 - RNA, 22 nt, Homo sapiens
caguggaugauguuuucugugg

SEQ ID NO: 87696 - RNA, 22 nt, Homo sapiens
ucuggauuuuugaggcaauaua

SEQ ID NO: 87697 - RNA, 20 nt, Homo sapiens
ugaaaucuucacuaagucuc

SEQ ID NO: 87698 - RNA, 22 nt, Homo sapiens
ucacaugugacauauauauuug

SEQ ID NO: 87699 - RNA, 22 nt, Homo sapiens
ucacauggaggugauaguugaa

SEQ ID NO: 87700 - RNA, 22 nt, Homo sapiens
uauuguuaaagauguuaaugau

SEQ ID NO: 87701 - RNA, 22 nt, Homo sapiens
uauugcacuccucaugcauuug

SEQ ID NO: 87702 - RNA, 22 nt, Homo sapiens
uauugcacaugaggagacauug

SEQ ID NO: 87703 - RNA, 22 nt, Homo sapiens
ucaguaaaugcuguucucuuuu

SEQ ID NO: 87704 - RNA, 22 nt, Homo sapiens
ugcuggugauucagauucaaau

SEQ ID NO: 87705 - RNA, 22 nt, Homo sapiens
uggauaguuuacugaagagugg

SEQ ID NO: 87706 - RNA, 22 nt, Homo sapiens
uggauaguucuucuacuagagu

SEQ ID NO: 87707 - RNA, 22 nt, Homo sapiens
ugagaucuuggaggcuuuguga

SEQ ID NO: 87708 - RNA, 21 nt, Homo sapiens
ugagauuaaguuguuuagaag

SEQ ID NO: 87709 - RNA, 22 nt, Homo sapiens
ugagauuaaucuuuaaguaaga

SEQ ID NO: 87710 - RNA, 23 nt, Homo sapiens
ugagauuauaaucuuuuacuucu

SEQ ID NO: 87711 - RNA, 22 nt, Homo sapiens
ugagauuauauuucuuaacaga

SEQ ID NO: 87712 - RNA, 22 nt, Homo sapiens
ugaguagaacuagucuagagcu

SEQ ID NO: 87713 - RNA, 22 nt, Homo sapiens
ggaaaucucugaggcucccuuc

SEQ ID NO: 87714 - RNA, 22 nt, Homo sapiens
gcaauggaaucccuugaucaau

SEQ ID NO: 87715 - RNA, 22 nt, Homo sapiens
gugcacaaaucuuaaauguaca

SEQ ID NO: 87716 - RNA, 22 nt, Homo sapiens
gucauugguucuguuuauguga

SEQ ID NO: 87717 - RNA, 22 nt, Homo sapiens
gucauggguuaaagguggauac

SEQ ID NO: 87718 - RNA, 22 nt, Homo sapiens
uaugaaucugagagaucuggaa

SEQ ID NO: 87719 - RNA, 22 nt, Homo sapiens
uauugauuaauugugauuaggc

SEQ ID NO: 87720 - RNA, 20 nt, Homo sapiens
uauucacucuccagucuugc

SEQ ID NO: 87721 - RNA, 22 nt, Homo sapiens
uagguagaacccagaaaucuga

SEQ ID NO: 87722 - RNA, 20 nt, Homo sapiens
uaaguuguauuugucaugaa

SEQ ID NO: 87723 - RNA, 22 nt, Homo sapiens
uaaguguaaugucugaaguuug

SEQ ID NO: 87724 - RNA, 22 nt, Homo sapiens
uacugcaguugcagcuugagga

SEQ ID NO: 87725 - RNA, 22 nt, Homo sapiens
aauaaagucugaagugugcuua

SEQ ID NO: 87726 - RNA, 22 nt, Homo sapiens
aauuaguugucgugagaguggu

SEQ ID NO: 87727 - RNA, 22 nt, Homo sapiens
acuacauaugacaucuucuuua

SEQ ID NO: 87728 - RNA, 22 nt, Homo sapiens
agcagcauauuuuuauaaugua

SEQ ID NO: 87729 - RNA, 22 nt, Homo sapiens
aggaacuguaacuaugucucug

SEQ ID NO: 87730 - RNA, 22 nt, Homo sapiens
augcacuuggcaggaugauucc

SEQ ID NO: 87731 - RNA, 22 nt, Homo sapiens
augccucugacaauuggauucu

SEQ ID NO: 87732 - RNA, 22 nt, Homo sapiens
aguaucacaguggguguauacc

SEQ ID NO: 87733 - RNA, 22 nt, Homo sapiens
aucaaaguaggcauauguuuuu

SEQ ID NO: 87734 - RNA, 22 nt, Homo sapiens
aucagaaucucuugagaguguu

SEQ ID NO: 87735 - RNA, 22 nt, Homo sapiens
aucaggaaccuuuuuggugugu

SEQ ID NO: 87736 - RNA, 22 nt, Homo sapiens
aucagauuccacauuuuaucag

SEQ ID NO: 87737 - RNA, 18 nt, Homo sapiens
guccauuuguugguacac

SEQ ID NO: 87738 - RNA, 22 nt, Homo sapiens
guccauuuguuuccagagcacu

SEQ ID NO: 87739 - RNA, 22 nt, Homo sapiens
gugcacaacgugcagguuaguu

SEQ ID NO: 87740 - RNA, 22 nt, Homo sapiens
guauuguacuacaagcucuuua

SEQ ID NO: 87741 - RNA, 22 nt, Homo sapiens
gucaucaggacgggucaucugc

SEQ ID NO: 87742 - RNA, 19 nt, Homo sapiens
ggucauggagguuguguga

SEQ ID NO: 87743 - RNA, 21 nt, Homo sapiens
uauagcagcacgauuuauaau

SEQ ID NO: 87744 - RNA, 22 nt, Homo sapiens
uauaaaguaauuucuaggggcu

SEQ ID NO: 87745 - RNA, 22 nt, Homo sapiens
uagguagauuuaaagauuuucu

SEQ ID NO: 87746 - RNA, 22 nt, Homo sapiens
uaugacuuuggaaaaauuacuu

SEQ ID NO: 87747 - RNA, 19 nt, Homo sapiens
uaugcuauuuauuagaagu

SEQ ID NO: 87748 - RNA, 22 nt, Homo sapiens
uauuaguuuucuguggauuaca

SEQ ID NO: 87749 - RNA, 22 nt, Homo sapiens
uaauacucuucucauuuuacag

SEQ ID NO: 87750 - RNA, 22 nt, Homo sapiens
uaagucuuuuuggaguuuauaa

SEQ ID NO: 87751 - RNA, 22 nt, Homo sapiens
uacaguguuuugguauuccaca

SEQ ID NO: 87752 - RNA, 22 nt, Homo sapiens
gaggcauugaaauauugcuuau

SEQ ID NO: 87753 - RNA, 22 nt, Homo sapiens
gcuguauugacuuuguaucaua

SEQ ID NO: 87754 - RNA, 19 nt, Homo sapiens
gcugguuguccacucucuc

SEQ ID NO: 87755 - RNA, 17 nt, Homo sapiens
cuucaaauaauuucccc

SEQ ID NO: 87756 - RNA, 22 nt, Homo sapiens
gaaugcuaaguuuccucccuau

SEQ ID NO: 87757 - RNA, 22 nt, Homo sapiens
gagaaugaugauuuccaauuuc

SEQ ID NO: 87758 - RNA, 22 nt, Homo sapiens
caucacuuuuccuuuuacagau

SEQ ID NO: 87759 - RNA, 22 nt, Homo sapiens
cccgggcugaaaucagauuugu

SEQ ID NO: 87760 - RNA, 22 nt, Homo sapiens
ucauagaucaaguaauaagaca

SEQ ID NO: 87761 - RNA, 22 nt, Homo sapiens
uccuuggugacauuucuugucu

SEQ ID NO: 87762 - RNA, 22 nt, Homo sapiens
ucucauugauucuggggugaug

SEQ ID NO: 87763 - RNA, 18 nt, Homo sapiens
ugacauugagcugagaaa

SEQ ID NO: 87764 - RNA, 22 nt, Homo sapiens
uggaaaucuaaguuuggauuga

SEQ ID NO: 87765 - RNA, 22 nt, Homo sapiens
uugcaucagcuccugauguacu

SEQ ID NO: 87766 - RNA, 22 nt, Homo sapiens
uugcauaauaagagggauacgu

SEQ ID NO: 87767 - RNA, 22 nt, Homo sapiens
uucuugguguaguaguugaaaa

SEQ ID NO: 87768 - RNA, 22 nt, Homo sapiens
uucuggcuaugggauacuaaau

SEQ ID NO: 87769 - RNA, 22 nt, Homo sapiens
uuacauugcuucaaauucagug

SEQ ID NO: 87770 - RNA, 21 nt, Homo sapiens
uuauaguggcaugauuuauaa

SEQ ID NO: 87771 - RNA, 22 nt, Homo sapiens
uuauccucuagacauagguuua

SEQ ID NO: 87772 - RNA, 22 nt, Homo sapiens
uuaucucaguguuuguaaacaa

SEQ ID NO: 87773 - RNA, 22 nt, Homo sapiens
uguggcauugaauaaccuugga

SEQ ID NO: 87774 - RNA, 22 nt, Homo sapiens
ugugcaaucuuccauuuuuagg

SEQ ID NO: 87775 - RNA, 22 nt, Homo sapiens
uuugucuccuaagacucugugg

SEQ ID NO: 87776 - RNA, 22 nt, Homo sapiens
uugaucaauagaauacaacaga

SEQ ID NO: 87777 - RNA, 22 nt, Homo sapiens
uugauccucugagaaucuaucg

SEQ ID NO: 87778 - RNA, 22 nt, Homo sapiens
ugucauauagaauguucuauga

SEQ ID NO: 87779 - RNA, 19 nt, Homo sapiens
ugucaucaucuuuucuugc

SEQ ID NO: 87780 - RNA, 22 nt, Homo sapiens
uguuugcuuaacguggagccag

SEQ ID NO: 87781 - RNA, 22 nt, Homo sapiens
uguuugcuguuuucuccaauga

SEQ ID NO: 87782 - RNA, 20 nt, Homo sapiens
uuaaaucuagugcagacuca

SEQ ID NO: 87783 - RNA, 22 nt, Homo sapiens
uuaagcaguggauuagaauuuu

SEQ ID NO: 87784 - RNA, 22 nt, Homo sapiens
uucauuggacuuguguucuuga

SEQ ID NO: 87785 - RNA, 22 nt, Homo sapiens
uuccauuuguucggugucgcca

SEQ ID NO: 87786 - RNA, 22 nt, Homo sapiens
uucaagucuuggcuuugccacc

SEQ ID NO: 87787 - RNA, 22 nt, Homo sapiens
cucugguuaaggcugaacuaua

SEQ ID NO: 87788 - RNA, 21 nt, Homo sapiens
cucugguuugcauuggauuau

SEQ ID NO: 87789 - RNA, 20 nt, Homo sapiens
cucugguugugaauugucuu

SEQ ID NO: 87790 - RNA, 22 nt, Homo sapiens
cucugacagugguuagcacugu

SEQ ID NO: 87791 - RNA, 22 nt, Homo sapiens
gaaugcuaaguuuccucccugu

SEQ ID NO: 87792 - RNA, 22 nt, Homo sapiens
gauaaaguauuggguacuaugc

SEQ ID NO: 87793 - RNA, 22 nt, Homo sapiens
gauaauucuagcagauacaggc

SEQ ID NO: 87794 - RNA, 22 nt, Homo sapiens
cuccuggugauuggagugugaa

SEQ ID NO: 87795 - RNA, 22 nt, Homo sapiens
cuccauuuggaacagauguccu

SEQ ID NO: 87796 - RNA, 22 nt, Homo sapiens
cuccauuuaucugaaauuuuau

SEQ ID NO: 87797 - RNA, 22 nt, Homo sapiens
cucaguguuaaggccaccucug

SEQ ID NO: 87798 - RNA, 21 nt, Homo sapiens
cucauauugcuuuuccauggu

SEQ ID NO: 87799 - RNA, 22 nt, Homo sapiens
auugcaaagcguagacucuaaa

SEQ ID NO: 87800 - RNA, 22 nt, Homo sapiens
auugaguaaaugaaaauugccu

SEQ ID NO: 87801 - RNA, 22 nt, Homo sapiens
auugaguaacaauuuuguucaa

SEQ ID NO: 87802 - RNA, 22 nt, Homo sapiens
auuauuaguuguugaaugaagu

SEQ ID NO: 87803 - RNA, 22 nt, Homo sapiens
auuauugacucauagaaaggau

SEQ ID NO: 87804 - RNA, 22 nt, Homo sapiens
auuugucacuauguggcuaaua

SEQ ID NO: 87805 - RNA, 22 nt, Homo sapiens
cagauaguuguagauaugcagc

SEQ ID NO: 87806 - RNA, 22 nt, Homo sapiens
cagcaaaucauccuauuugagc

SEQ ID NO: 87807 - RNA, 22 nt, Homo sapiens
aagcuguauuguguugcuauaa

SEQ ID NO: 87808 - RNA, 22 nt, Homo sapiens
aaucugucaguuuuguguuaau

SEQ ID NO: 87809 - RNA, 22 nt, Homo sapiens
aauugcucuccuccaaggucuu

SEQ ID NO: 87810 - RNA, 22 nt, Homo sapiens
acggaacugcuccauucuuugc

SEQ ID NO: 87811 - RNA, 22 nt, Homo sapiens
augaaagugauaaaugucucua

SEQ ID NO: 87812 - RNA, 22 nt, Homo sapiens
augagauuguuuguacuccaca

SEQ ID NO: 87813 - RNA, 22 nt, Homo sapiens
auggaagcugauuagauaguac

SEQ ID NO: 87814 - RNA, 18 nt, Homo sapiens
auaaacucaucauuuuua

SEQ ID NO: 87815 - RNA, 22 nt, Homo sapiens
auaagucaauggaacagauuaa

SEQ ID NO: 87816 - RNA, 22 nt, Homo sapiens
auagaaucaucugugcacuagu

SEQ ID NO: 87817 - RNA, 21 nt, Homo sapiens
auagcacaucagauuuuauua

SEQ ID NO: 87818 - RNA, 22 nt, Homo sapiens
agguauuuucaacuuagaaugg

SEQ ID NO: 87819 - RNA, 22 nt, Homo sapiens
aucacauuuauaguggcacgca

SEQ ID NO: 87820 - RNA, 22 nt, Homo sapiens
aucauacuguuuugauuacugu

SEQ ID NO: 87821 - RNA, 22 nt, Homo sapiens
auauuggacucugugcuaggaa

SEQ ID NO: 87822 - RNA, 22 nt, Homo sapiens
auauagcaaugaaagagaugaa

SEQ ID NO: 87823 - RNA, 20 nt, Homo sapiens
guucccuguaggugugcgga

SEQ ID NO: 87824 - RNA, 22 nt, Homo sapiens
uacaaaucuagguuuguuacug

SEQ ID NO: 87825 - RNA, 22 nt, Homo sapiens
uaauauguuuugaaaucaggaa

SEQ ID NO: 87826 - RNA, 22 nt, Homo sapiens
uaccuguagcucuucuaggcug

SEQ ID NO: 87827 - RNA, 22 nt, Homo sapiens
uacuagaggaauugcuauaacu

SEQ ID NO: 87828 - RNA, 22 nt, Homo sapiens
uauugccuugccuacuuuucca

SEQ ID NO: 87829 - RNA, 22 nt, Homo sapiens
uaugaucauuauguuauugcag

SEQ ID NO: 87830 - RNA, 22 nt, Homo sapiens
uaucuacauguagguauguaug

SEQ ID NO: 87831 - RNA, 22 nt, Homo sapiens
uauuaguuguaugauucccaag

SEQ ID NO: 87832 - RNA, 22 nt, Homo sapiens
uagugaaugucacuggcuguug

SEQ ID NO: 87833 - RNA, 22 nt, Homo sapiens
uaguagcauaccuaaguauacu

SEQ ID NO: 87834 - RNA, 22 nt, Homo sapiens
uagcaguaagaaacugacauug

SEQ ID NO: 87835 - RNA, 22 nt, Homo sapiens
uagcagaauaacuugccagccu

SEQ ID NO: 87836 - RNA, 22 nt, Homo sapiens
uauagcacugagaauguaauuc

SEQ ID NO: 87837 - RNA, 22 nt, Homo sapiens
uauagcaguguaagaaucgagu

SEQ ID NO: 87838 - RNA, 22 nt, Homo sapiens
uauagcuuuuuagggaauuugg

SEQ ID NO: 87839 - RNA, 22 nt, Homo sapiens
uaucaucauuggcaggugagaa

SEQ ID NO: 87840 - RNA, 22 nt, Homo sapiens
uaucacuuugauaguuuaaaug

SEQ ID NO: 87841 - RNA, 23 nt, Homo sapiens
guuaagugaauguguacucuauu

SEQ ID NO: 87842 - RNA, 20 nt, Homo sapiens
guccauuugcugccauugcu

SEQ ID NO: 87843 - RNA, 20 nt, Homo sapiens
gugauuggucacugguuguu

SEQ ID NO: 87844 - RNA, 23 nt, Homo sapiens
guaauacuagucauaguagcagg

SEQ ID NO: 87845 - RNA, 22 nt, Homo sapiens
guaaaguaaagcacaucaaggu

SEQ ID NO: 87846 - RNA, 22 nt, Homo sapiens
ggucacauuggacuaucaaguu

SEQ ID NO: 87847 - RNA, 22 nt, Homo sapiens
guaucauugccuaaugcucuca

SEQ ID NO: 87848 - RNA, 22 nt, Homo sapiens
ggaguguguuuuccaacuuggu

SEQ ID NO: 87849 - RNA, 21 nt, Homo sapiens
ugcauacuucucagaugauua

SEQ ID NO: 87850 - RNA, 22 nt, Homo sapiens
ugagcaauaaaguuacacaguu

SEQ ID NO: 87851 - RNA, 22 nt, Homo sapiens
ugauagaucugggcaaaguaaa

SEQ ID NO: 87852 - RNA, 22 nt, Homo sapiens
uggcauuguccaauaaaauuuu

SEQ ID NO: 87853 - RNA, 22 nt, Homo sapiens
uggacuguaaauuggggacucu

SEQ ID NO: 87854 - RNA, 22 nt, Homo sapiens
uggaagauucuagaagauucca

SEQ ID NO: 87855 - RNA, 22 nt, Homo sapiens
uggaagaugggaccucaguuuu

SEQ ID NO: 87856 - RNA, 22 nt, Homo sapiens
ucuuaguuggaaugggauaagg

SEQ ID NO: 87857 - RNA, 22 nt, Homo sapiens
ugacuggagucuugcucugucg

SEQ ID NO: 87858 - RNA, 23 nt, Homo sapiens
ugacuggagacuguugauccuuu

SEQ ID NO: 87859 - RNA, 23 nt, Homo sapiens
ugacuuguccagugauaguucgu

SEQ ID NO: 87860 - RNA, 22 nt, Homo sapiens
auugacuugauauauagcugau

SEQ ID NO: 87861 - RNA, 22 nt, Homo sapiens
augguugguuaaaucuguguau

SEQ ID NO: 87862 - RNA, 22 nt, Homo sapiens
auauggguauuaagaaucaaaa

SEQ ID NO: 87863 - RNA, 22 nt, Homo sapiens
auaauacugggaagaugagcau

SEQ ID NO: 87864 - RNA, 22 nt, Homo sapiens
auaauagcugaucauuuagaag

SEQ ID NO: 87865 - RNA, 22 nt, Homo sapiens
auaagaagugaaccagacgucu

SEQ ID NO: 87866 - RNA, 22 nt, Homo sapiens
aauggcaucuacguuaaauguc

SEQ ID NO: 87867 - RNA, 22 nt, Homo sapiens
agaugguuuuguucacagcucu

SEQ ID NO: 87868 - RNA, 22 nt, Homo sapiens
aggcauugugcaucgaugauuu

SEQ ID NO: 87869 - RNA, 17 nt, Homo sapiens
agugagaucauggcuua

SEQ ID NO: 87870 - RNA, 17 nt, Homo sapiens
auaaacucaucauuuuu

SEQ ID NO: 87871 - RNA, 22 nt, Homo sapiens
auaaaccuacauuuucacuucu

SEQ ID NO: 87872 - RNA, 22 nt, Homo sapiens
aguuagcaaaacucccaaaggu

SEQ ID NO: 87873 - RNA, 22 nt, Homo sapiens
agcaauaugacauugcuacauc

SEQ ID NO: 87874 - RNA, 22 nt, Homo sapiens
aagcuguguguaagcucucaca

SEQ ID NO: 87875 - RNA, 22 nt, Homo sapiens
aauacucaguccuggugaggcu

SEQ ID NO: 87876 - RNA, 18 nt, Homo sapiens
aaaugcucuucuggaaua

SEQ ID NO: 87877 - RNA, 22 nt, Homo sapiens
ggaugcauuuuugguugucaca

SEQ ID NO: 87878 - RNA, 22 nt, Homo sapiens
ggagaucuuguuaaaguacaga

SEQ ID NO: 87879 - RNA, 22 nt, Homo sapiens
gcuccauuuuccauuucucuaa

SEQ ID NO: 87880 - RNA, 22 nt, Homo sapiens
gcugagguucaagaagguuaaa

SEQ ID NO: 87881 - RNA, 22 nt, Homo sapiens
cugugauuauauaguuaaggua

SEQ ID NO: 87882 - RNA, 22 nt, Homo sapiens
cugugguuacguucuuugugcu

SEQ ID NO: 87883 - RNA, 22 nt, Homo sapiens
gagauuaacauuugaggagcug

SEQ ID NO: 87884 - RNA, 22 nt, Homo sapiens
gagauuaauacacaucaaaugc

SEQ ID NO: 87885 - RNA, 21 nt, Homo sapiens
cugguguuagcacuucuuccc

SEQ ID NO: 87886 - RNA, 22 nt, Homo sapiens
cuagcagacaugggcugaacca

SEQ ID NO: 87887 - RNA, 22 nt, Homo sapiens
cuagauuauccaacuuauuagc

SEQ ID NO: 87888 - RNA, 22 nt, Homo sapiens
cuaauacaguuguccaagcugg

SEQ ID NO: 87889 - RNA, 22 nt, Homo sapiens
caagugcuugaugaaugaucaa

SEQ ID NO: 87890 - RNA, 22 nt, Homo sapiens
cacaccuaccucauuauggaca

SEQ ID NO: 87891 - RNA, 22 nt, Homo sapiens
cacauguuuuagcauggcuguu

SEQ ID NO: 87892 - RNA, 17 nt, Homo sapiens
gugaaaucaucauuuuu

SEQ ID NO: 87893 - RNA, 22 nt, Homo sapiens
guauacuucugaaaauagcuau

SEQ ID NO: 87894 - RNA, 22 nt, Homo sapiens
guauacacccugugauauuauu

SEQ ID NO: 87895 - RNA, 22 nt, Homo sapiens
ggcauguugauagguagaugua

SEQ ID NO: 87896 - RNA, 22 nt, Homo sapiens
uaaaugcucuuuaaaagugcuu

SEQ ID NO: 87897 - RNA, 22 nt, Homo sapiens
uaaaugcuugagaugauggaua

SEQ ID NO: 87898 - RNA, 22 nt, Homo sapiens
uaaauugcauaaguacaaauga

SEQ ID NO: 87899 - RNA, 23 nt, Homo sapiens
uaacauugcaugauuaccugcau

SEQ ID NO: 87900 - RNA, 22 nt, Homo sapiens
uaaggcaaguuuuuaguggaca

SEQ ID NO: 87901 - RNA, 22 nt, Homo sapiens
uacauguauccauuguuuuugg

SEQ ID NO: 87902 - RNA, 22 nt, Homo sapiens
uagauuaucucaccacucgagu

SEQ ID NO: 87903 - RNA, 22 nt, Homo sapiens
uagaauggaaggcauguuugcc

SEQ ID NO: 87904 - RNA, 22 nt, Homo sapiens
uaggcaaaugcaagaguagaac

SEQ ID NO: 87905 - RNA, 21 nt, Homo sapiens
uauaguaguaugauuuacaau

SEQ ID NO: 87906 - RNA, 22 nt, Homo sapiens
ucaauguaucuccaagaauuga

SEQ ID NO: 87907 - RNA, 22 nt, Homo sapiens
ucacauucaauuguaauccccg

SEQ ID NO: 87908 - RNA, 22 nt, Homo sapiens
uauugcauguugagcaguaccu

SEQ ID NO: 87909 - RNA, 22 nt, Homo sapiens
uauuacuugucugugucucaau

SEQ ID NO: 87910 - RNA, 18 nt, Homo sapiens
uauugcuugguuuggaga

SEQ ID NO: 87911 - RNA, 20 nt, Homo sapiens
uauugcacuccagucugggc

SEQ ID NO: 87912 - RNA, 22 nt, Homo sapiens
ucuugguuaggggaaauaggca

SEQ ID NO: 87913 - RNA, 20 nt, Homo sapiens
ucuugguuggaggucuuuua

SEQ ID NO: 87914 - RNA, 22 nt, Homo sapiens
ucuguugguucuuugaggagga

SEQ ID NO: 87915 - RNA, 22 nt, Homo sapiens
ucuaagaauucauuuauaagcc

SEQ ID NO: 87916 - RNA, 22 nt, Homo sapiens
ucacuuggugaacacauuaugu

SEQ ID NO: 87917 - RNA, 22 nt, Homo sapiens
uggagugcgugucugaguuuuu

SEQ ID NO: 87918 - RNA, 22 nt, Homo sapiens
ugcuugagacacauaugaauuu

SEQ ID NO: 87919 - RNA, 22 nt, Homo sapiens
ugcugcuguuguuguuacuagc

SEQ ID NO: 87920 - RNA, 22 nt, Homo sapiens
ugcaagaugauuucaauugaua

SEQ ID NO: 87921 - RNA, 22 nt, Homo sapiens
ugagucagucucacucugcugc

SEQ ID NO: 87922 - RNA, 22 nt, Homo sapiens
ugaguuguugcauucuuggugu

SEQ ID NO: 87923 - RNA, 22 nt, Homo sapiens
ugaguucuuuguagauucugug

SEQ ID NO: 87924 - RNA, 22 nt, Homo sapiens
ugucaauauguaauaacugaau

SEQ ID NO: 87925 - RNA, 22 nt, Homo sapiens
ugguuaucauagcuaugcuacu

SEQ ID NO: 87926 - RNA, 20 nt, Homo sapiens
uggcaugaaauuuuccaagc

SEQ ID NO: 87927 - RNA, 20 nt, Homo sapiens
uucacugggcucucuguugg

SEQ ID NO: 87928 - RNA, 22 nt, Homo sapiens
uucacuggagcccaggaguugg

SEQ ID NO: 87929 - RNA, 22 nt, Homo sapiens
uucacugugaacucauauucag

SEQ ID NO: 87930 - RNA, 22 nt, Homo sapiens
uuccaagugggaaacaaaaaug

SEQ ID NO: 87931 - RNA, 22 nt, Homo sapiens
uuccaggugggcgugggccugg

SEQ ID NO: 87932 - RNA, 22 nt, Homo sapiens
uuaaguguaaguggugugggac

SEQ ID NO: 87933 - RNA, 22 nt, Homo sapiens
uuauagacacguuguaacaaac

SEQ ID NO: 87934 - RNA, 22 nt, Homo sapiens
uuagucaaguguacugugaaug

SEQ ID NO: 87935 - RNA, 22 nt, Homo sapiens
uuagcaauugauucucauaagc

SEQ ID NO: 87936 - RNA, 22 nt, Homo sapiens
uuagauuauugguguuuugcaa

SEQ ID NO: 87937 - RNA, 23 nt, Homo sapiens
uuagaucuuuaaggaaucuccac

SEQ ID NO: 87938 - RNA, 22 nt, Homo sapiens
uuugcuuaaaguccuuguggga

SEQ ID NO: 87939 - RNA, 22 nt, Homo sapiens
uuuggcauuagauaauugugua

SEQ ID NO: 87940 - RNA, 21 nt, Homo sapiens
uuuggcauuaugucaccagag

SEQ ID NO: 87941 - RNA, 22 nt, Homo sapiens
uuucauggcaguuuggggccug

SEQ ID NO: 87942 - RNA, 22 nt, Homo sapiens
uuugucauagcagcaggaaugg

SEQ ID NO: 87943 - RNA, 22 nt, Homo sapiens
uugugcaugaugcauacauggu

SEQ ID NO: 87944 - RNA, 22 nt, Homo sapiens
uuguuaagaugcagauucugga

SEQ ID NO: 87945 - RNA, 22 nt, Homo sapiens
uuguccccacccaaaugucauc

SEQ ID NO: 87946 - RNA, 21 nt, Homo sapiens
uuggccuggaggccugaaugu

SEQ ID NO: 87947 - RNA, 22 nt, Homo sapiens
uuauuugguuauuguaauuggg

SEQ ID NO: 87948 - RNA, 22 nt, Homo sapiens
ugcauguucuuacucauacaug

SEQ ID NO: 87949 - RNA, 22 nt, Homo sapiens
ugacuacagauuugcugccaga

SEQ ID NO: 87950 - RNA, 22 nt, Homo sapiens
ugacuacaccacacgguuaagg

SEQ ID NO: 87951 - RNA, 22 nt, Homo sapiens
ugacuacaaccuccaccucccg

SEQ ID NO: 87952 - RNA, 22 nt, Homo sapiens
uauugcuaaaacucaugguugc

SEQ ID NO: 87953 - RNA, 22 nt, Homo sapiens
uauugccuugccuacuuuucca

SEQ ID NO: 87954 - RNA, 22 nt, Homo sapiens
uauugcauauuauucuaguggc

SEQ ID NO: 87955 - RNA, 22 nt, Homo sapiens
ucacgguggaaucccagauccc

SEQ ID NO: 87956 - RNA, 22 nt, Homo sapiens
uaggcaauguacauaucggccc

SEQ ID NO: 87957 - RNA, 18 nt, Homo sapiens
uaaggcacuauaggcauu

SEQ ID NO: 87958 - RNA, 22 nt, Homo sapiens
uaagacacuuaaaauguuacau

SEQ ID NO: 87959 - RNA, 22 nt, Homo sapiens
caagacuguccaacauauuggg

SEQ ID NO: 87960 - RNA, 22 nt, Homo sapiens
cagguacaugcaugugugugca

SEQ ID NO: 87961 - RNA, 17 nt, Homo sapiens
cuaaggcaagagucugc

SEQ ID NO: 87962 - RNA, 22 nt, Homo sapiens
cuaaggcaguagccugaauaau

SEQ ID NO: 87963 - RNA, 22 nt, Homo sapiens
cuacacaugcaggcucccugcc

SEQ ID NO: 87964 - RNA, 22 nt, Homo sapiens
cauugucccucaaugacuauga

SEQ ID NO: 87965 - RNA, 22 nt, Homo sapiens
cauugucccucaaugucuauga

SEQ ID NO: 87966 - RNA, 22 nt, Homo sapiens
cugagcaaaaugaagacacgau

SEQ ID NO: 87967 - RNA, 22 nt, Homo sapiens
cugccuaaagaaaaagacguug

SEQ ID NO: 87968 - RNA, 22 nt, Homo sapiens
gagcaaugagcugccugcugag

SEQ ID NO: 87969 - RNA, 22 nt, Homo sapiens
gagcuaguagauuuuaaauauu

SEQ ID NO: 87970 - RNA, 22 nt, Homo sapiens
gaugccuuuuuguccucaguua

SEQ ID NO: 87971 - RNA, 22 nt, Homo sapiens
gcacauuacaaguauuagcuca

SEQ ID NO: 87972 - RNA, 22 nt, Homo sapiens
gcagaauugguuucuucuaagg

SEQ ID NO: 87973 - RNA, 21 nt, Homo sapiens
aaacuggcccaauuguuccau

SEQ ID NO: 87974 - RNA, 22 nt, Homo sapiens
aggcacggugucucaugccugu

SEQ ID NO: 87975 - RNA, 22 nt, Homo sapiens
aggcagaugagguccucagcug

SEQ ID NO: 87976 - RNA, 22 nt, Homo sapiens
auagugcugcaauaaccauggg

SEQ ID NO: 87977 - RNA, 22 nt, Homo sapiens
auagugcugcaauaaacacacg

SEQ ID NO: 87978 - RNA, 22 nt, Homo sapiens
aucauguuuauguguaggauau

SEQ ID NO: 87979 - RNA, 22 nt, Homo sapiens
ugaagacucauacuugaaucag

SEQ ID NO: 87980 - RNA, 22 nt, Homo sapiens
uggaagacaaguguuagcaugg

SEQ ID NO: 87981 - RNA, 22 nt, Homo sapiens
uggaagacaggcuguauuuuaa

SEQ ID NO: 87982 - RNA, 17 nt, Homo sapiens
ugaggcacuaguaucac

SEQ ID NO: 87983 - RNA, 22 nt, Homo sapiens
ugcauauucaaggcaggccauu

SEQ ID NO: 87984 - RNA, 22 nt, Homo sapiens
ugcagaaucccuucagauccga

SEQ ID NO: 87985 - RNA, 22 nt, Homo sapiens
ggaagccuggaaaaaauuguga

SEQ ID NO: 87986 - RNA, 22 nt, Homo sapiens
gugagcaaacuuaccuaagguu

SEQ ID NO: 87987 - RNA, 22 nt, Homo sapiens
uagucaaaucugaaggaaauuu

SEQ ID NO: 87988 - RNA, 22 nt, Homo sapiens
uauugcuaaauucuuuuccuag

SEQ ID NO: 87989 - RNA, 22 nt, Homo sapiens
uaaugcaucaugguuggcaaac

SEQ ID NO: 87990 - RNA, 22 nt, Homo sapiens
uacaaagcuuucugcaaaucau

SEQ ID NO: 87991 - RNA, 22 nt, Homo sapiens
auauuguacugcuacugguucu

SEQ ID NO: 87992 - RNA, 22 nt, Homo sapiens
auacacuagggcuccugcagaa

SEQ ID NO: 87993 - RNA, 22 nt, Homo sapiens
cacugcacuccagcuuugguga

SEQ ID NO: 87994 - RNA, 22 nt, Homo sapiens
cacugcacuccaguuucgguaa

SEQ ID NO: 87995 - RNA, 22 nt, Homo sapiens
gcaugauuuuauaucuauguaa

SEQ ID NO: 87996 - RNA, 17 nt, Homo sapiens
uuauugcuauaagcuga

SEQ ID NO: 87997 - RNA, 22 nt, Homo sapiens
uuauugcucauuugggcauucu

SEQ ID NO: 87998 - RNA, 22 nt, Homo sapiens
uuccacagggauuugcauugau

SEQ ID NO: 87999 - RNA, 22 nt, Homo sapiens
uuccacaggguugaacuaguuu

SEQ ID NO: 88000 - RNA, 22 nt, Homo sapiens
uucugcuugaucuaguguguug

SEQ ID NO: 88001 - RNA, 18 nt, Homo sapiens
uuaaggcaggacuuuaag

SEQ ID NO: 88002 - RNA, 21 nt, Homo sapiens
uuguaugguugaacuugauac

SEQ ID NO: 88003 - RNA, 22 nt, Homo sapiens
uuaaggcauucuuugucuucau

SEQ ID NO: 88004 - RNA, 22 nt, Homo sapiens
uuaaggcagugcaucuggaguu

SEQ ID NO: 88005 - RNA, 21 nt, Homo sapiens
uugguccacaugucauaguua

SEQ ID NO: 88006 - RNA, 16 nt, Homo sapiens
ugccuucuucuguauu

SEQ ID NO: 88007 - RNA, 22 nt, Homo sapiens
ugccaucauuaauauuaggcau

SEQ ID NO: 88008 - RNA, 22 nt, Homo sapiens
ugcauauucuaggauuuuguau

SEQ ID NO: 88009 - RNA, 22 nt, Homo sapiens
uggcaaaaaaccgcaguugccu

SEQ ID NO: 88010 - RNA, 22 nt, Homo sapiens
uggagcaaaguugaggccaagc

SEQ ID NO: 88011 - RNA, 22 nt, Homo sapiens
uggaagacuuuagaggcuuaua

SEQ ID NO: 88012 - RNA, 19 nt, Homo sapiens
uggcacauguauacauaug

SEQ ID NO: 88013 - RNA, 19 nt, Homo sapiens
uggcacauguauacuuaug

SEQ ID NO: 88014 - RNA, 22 nt, Homo sapiens
uggcaaaauauuuugguuucug

SEQ ID NO: 88015 - RNA, 22 nt, Homo sapiens
uggcaaaauggaauauguuggg

SEQ ID NO: 88016 - RNA, 22 nt, Homo sapiens
ugauugcacaccugcacucaag

SEQ ID NO: 88017 - RNA, 22 nt, Homo sapiens
ugaauuguuuacgagaugugag

SEQ ID NO: 88018 - RNA, 22 nt, Homo sapiens
ugaaugcuaaaggaaaacagua

SEQ ID NO: 88019 - RNA, 22 nt, Homo sapiens
ugaauugucucucacuggguuc

SEQ ID NO: 88020 - RNA, 22 nt, Homo sapiens
ucugucuugugguuugagugcc

SEQ ID NO: 88021 - RNA, 22 nt, Homo sapiens
uccaauguaaucaucauugaau

SEQ ID NO: 88022 - RNA, 22 nt, Homo sapiens
ucauauugguuaaaauaguggg

SEQ ID NO: 88023 - RNA, 22 nt, Homo sapiens
ucagugcuguuugcccucguuu

SEQ ID NO: 88024 - RNA, 20 nt, Homo sapiens
caaauugcuuucuugguuuu

SEQ ID NO: 88025 - RNA, 22 nt, Homo sapiens
auugccuaugauugagguacua

SEQ ID NO: 88026 - RNA, 22 nt, Homo sapiens
cuugccuaaucugcaugauuuu

SEQ ID NO: 88027 - RNA, 22 nt, Homo sapiens
uacaguaguaucuucauuuguu

SEQ ID NO: 88028 - RNA, 22 nt, Homo sapiens
uaagugcaugauuacaugcaua

SEQ ID NO: 88029 - RNA, 22 nt, Homo sapiens
uaauagcucggauaaacaugau

SEQ ID NO: 88030 - RNA, 22 nt, Homo sapiens
uagcagaauaacuugccagccu

SEQ ID NO: 88031 - RNA, 22 nt, Homo sapiens
gugcacaugguagguauugagu

SEQ ID NO: 88032 - RNA, 19 nt, Homo sapiens
auaguguaggaaaacagcu

SEQ ID NO: 88033 - RNA, 22 nt, Homo sapiens
aaauugcuuuugaagacuuagu

SEQ ID NO: 88034 - RNA, 22 nt, Homo sapiens
acuacaugugaugucaguauau

SEQ ID NO: 88035 - RNA, 22 nt, Homo sapiens
aaggcacugaacuuaaauucug

SEQ ID NO: 88036 - RNA, 22 nt, Homo sapiens
uacaguaauguuaaucuuugug

SEQ ID NO: 88037 - RNA, 22 nt, Homo sapiens
uauggcacacguuuaccuaugu

SEQ ID NO: 88038 - RNA, 22 nt, Homo sapiens
gugcacauuguuuaugucuguu

SEQ ID NO: 88039 - RNA, 22 nt, Homo sapiens
gcuaaggcagggcaaucauuug

SEQ ID NO: 88040 - RNA, 22 nt, Homo sapiens
ggcacgguggcucacaccugua

SEQ ID NO: 88041 - RNA, 22 nt, Homo sapiens
ucaggugccuuggcuaauuguu

SEQ ID NO: 88042 - RNA, 22 nt, Homo sapiens
ucaguguuuggaaucucaauuu

SEQ ID NO: 88043 - RNA, 22 nt, Homo sapiens
ucauauugcgguucauugacuu

SEQ ID NO: 88044 - RNA, 22 nt, Homo sapiens
ugaauaguaauguguuuggucu

SEQ ID NO: 88045 - RNA, 22 nt, Homo sapiens
auuguacuccagccuaggcaac

SEQ ID NO: 88046 - RNA, 22 nt, Homo sapiens
gagcaaugauugagccacugua

SEQ ID NO: 88047 - RNA, 22 nt, Homo sapiens
gcaagaauggaacaggagagcc

SEQ ID NO: 88048 - RNA, 22 nt, Homo sapiens
gcaagaaugagaaggauuaauu

SEQ ID NO: 88049 - RNA, 22 nt, Homo sapiens
gaauuguacugcaaucagggga

SEQ ID NO: 88050 - RNA, 22 nt, Homo sapiens
acauucagcuguuguuucaaug

SEQ ID NO: 88051 - RNA, 23 nt, Homo sapiens
auaagccuuuucuuucugcccca

SEQ ID NO: 88052 - RNA, 22 nt, Homo sapiens
augcacauauguacugcccuau

SEQ ID NO: 88053 - RNA, 22 nt, Homo sapiens
uuaaggcagugucuaugccagu

SEQ ID NO: 88054 - RNA, 22 nt, Homo sapiens
uuauugcacuccagccugggua

SEQ ID NO: 88055 - RNA, 22 nt, Homo sapiens
uuguacaggaguguaagcuuca

SEQ ID NO: 88056 - RNA, 22 nt, Homo sapiens
aucugguguauuggugcugggu

SEQ ID NO: 88057 - RNA, 22 nt, Homo sapiens
aucuuguguugaauggugcaga

SEQ ID NO: 88058 - RNA, 22 nt, Homo sapiens
auacugcacauuuagggaggga

SEQ ID NO: 88059 - RNA, 22 nt, Homo sapiens
aguggguguuccauuggauaaa

SEQ ID NO: 88060 - RNA, 22 nt, Homo sapiens
agugggccccuagaggugaggu

SEQ ID NO: 88061 - RNA, 22 nt, Homo sapiens
agcaacauuguucauaauagcu

SEQ ID NO: 88062 - RNA, 22 nt, Homo sapiens
acacgugcguauauguacguau

SEQ ID NO: 88063 - RNA, 22 nt, Homo sapiens
auggccuaugaccguuauguug

SEQ ID NO: 88064 - RNA, 22 nt, Homo sapiens
ucucaguguuaucuaucugccu

SEQ ID NO: 88065 - RNA, 22 nt, Homo sapiens
ucaggugccuuggcuaauuguu

SEQ ID NO: 88066 - RNA, 22 nt, Homo sapiens
ucaggugcagagaagaaauggg

SEQ ID NO: 88067 - RNA, 23 nt, Homo sapiens
guggccuuuggccaguccgaguc

SEQ ID NO: 88068 - RNA, 23 nt, Homo sapiens
uaugacagaggaagggggagcug

SEQ ID NO: 88069 - RNA, 22 nt, Homo sapiens
uacaggaaugucagguugcugu

SEQ ID NO: 88070 - RNA, 19 nt, Homo sapiens
uacaugcagcaggcacgca

SEQ ID NO: 88071 - RNA, 22 nt, Homo sapiens
aaguggccuagagcgaccauuu

SEQ ID NO: 88072 - RNA, 22 nt, Homo sapiens
auauagcaaugaaagagaugaa

SEQ ID NO: 88073 - RNA, 22 nt, Homo sapiens
auacagguauacaaugcauaau

SEQ ID NO: 88074 - RNA, 22 nt, Homo sapiens
gugcgggaggcgcgccuaggug

SEQ ID NO: 88075 - RNA, 22 nt, Homo sapiens
ggugccuacugugugucaggca

SEQ ID NO: 88076 - RNA, 22 nt, Homo sapiens
uaucacaguaucuagcacagug

SEQ ID NO: 88077 - RNA, 22 nt, Homo sapiens
uauggccugcguccagugguau

SEQ ID NO: 88078 - RNA, 22 nt, Homo sapiens
caccagguuggagugcaguggu

SEQ ID NO: 88079 - RNA, 22 nt, Homo sapiens
cauacagcuaguaaguguaaga

SEQ ID NO: 88080 - RNA, 22 nt, Homo sapiens
ucaggugcaguggcucugaccu

SEQ ID NO: 88081 - RNA, 22 nt, Homo sapiens
aacagugcauucagggauauau

SEQ ID NO: 88082 - RNA, 22 nt, Homo sapiens
ucucaguggugcuggcagggga

SEQ ID NO: 88083 - RNA, 22 nt, Homo sapiens
uggcacuaugugacaagguuuu

SEQ ID NO: 88084 - RNA, 22 nt, Homo sapiens
ugccuaguggccuuaugaguau

SEQ ID NO: 88085 - RNA, 22 nt, Homo sapiens
ugccuagucuauugagagucuu

SEQ ID NO: 88086 - RNA, 22 nt, Homo sapiens
gacuagugcccucagaccuaga

SEQ ID NO: 88087 - RNA, 22 nt, Homo sapiens
gaggaucucuugagcccagaag

SEQ ID NO: 88088 - RNA, 22 nt, Homo sapiens
cugggaucaguucuagucagaa

SEQ ID NO: 88089 - RNA, 22 nt, Homo sapiens
cucaguggauuagauaaugcac

SEQ ID NO: 88090 - RNA, 21 nt, Homo sapiens
cccagguucucugaggguaga

SEQ ID NO: 88091 - RNA, 22 nt, Homo sapiens
cagcaucauucaucugggguaa

SEQ ID NO: 88092 - RNA, 22 nt, Homo sapiens
auaguggcaugaucauagcuca

SEQ ID NO: 88093 - RNA, 22 nt, Homo sapiens
agcggguuuuagauuucuccug

SEQ ID NO: 88094 - RNA, 22 nt, Homo sapiens
uagcaacauucagcucagguac

SEQ ID NO: 88095 - RNA, 20 nt, Homo sapiens
uauuacagaguaauggugga

SEQ ID NO: 88096 - RNA, 22 nt, Homo sapiens
uauagcagugugagaacagacu

SEQ ID NO: 88097 - RNA, 22 nt, Homo sapiens
ugccuaguguguugagaguuuu

SEQ ID NO: 88098 - RNA, 22 nt, Homo sapiens
auggccuaugacagguauguug

SEQ ID NO: 88099 - RNA, 22 nt, Homo sapiens
agcaaccagaggagaugaggcu

SEQ ID NO: 88100 - RNA, 22 nt, Homo sapiens
agcaacaucagcagcaggaaaa

SEQ ID NO: 88101 - RNA, 22 nt, Homo sapiens
acccgguuagggggcaguggau

SEQ ID NO: 88102 - RNA, 18 nt, Homo sapiens
gauguaguauggugugga

SEQ ID NO: 88103 - RNA, 22 nt, Homo sapiens
ggagaucuuuaggaguuggacu

SEQ ID NO: 88104 - RNA, 22 nt, Homo sapiens
cuagaggcacagccuaggcacu

SEQ ID NO: 88105 - RNA, 23 nt, Homo sapiens
uagcaacaguuggaggugaggua

SEQ ID NO: 88106 - RNA, 22 nt, Homo sapiens
guaguggcaugaucuuggcuca

SEQ ID NO: 88107 - RNA, 22 nt, Homo sapiens
uggccagugucuauugguuucc

SEQ ID NO: 88108 - RNA, 22 nt, Homo sapiens
ugucagcacaacucagguuccu

SEQ ID NO: 88109 - RNA, 22 nt, Homo sapiens
ugucaggaggguccagagaaaa

SEQ ID NO: 88110 - RNA, 22 nt, Homo sapiens
ugucaguuuuaacuagggaaua

SEQ ID NO: 88111 - RNA, 22 nt, Homo sapiens
ugcauuguuccgaauguguccu

SEQ ID NO: 88112 - RNA, 22 nt, Homo sapiens
ugcaagauaggcaguuugcacu

SEQ ID NO: 88113 - RNA, 22 nt, Homo sapiens
ugcagagucuguccugccugcc

SEQ ID NO: 88114 - RNA, 22 nt, Homo sapiens
ugcaagaaucuuucaggcuagc

SEQ ID NO: 88115 - RNA, 22 nt, Homo sapiens
ugagugaaggggcucuguugug

SEQ ID NO: 88116 - RNA, 22 nt, Homo sapiens
ugaguguccaccccuuucacag

SEQ ID NO: 88117 - RNA, 22 nt, Homo sapiens
ugaguuaauuuuuguaucaugu

SEQ ID NO: 88118 - RNA, 22 nt, Homo sapiens
ugcugguauuauguuauccaga

SEQ ID NO: 88119 - RNA, 22 nt, Homo sapiens
uggaaguuaaauuaguugauga

SEQ ID NO: 88120 - RNA, 22 nt, Homo sapiens
ugacaguuuccagggcugucuc

SEQ ID NO: 88121 - RNA, 22 nt, Homo sapiens
ugaaagguuuaauucugugaga

SEQ ID NO: 88122 - RNA, 20 nt, Homo sapiens
ugacaagugagaauuauggg

SEQ ID NO: 88123 - RNA, 22 nt, Homo sapiens
ugacagcugaggcccagaguac

SEQ ID NO: 88124 - RNA, 22 nt, Homo sapiens
ugagaagugauauagaaguuaa

SEQ ID NO: 88125 - RNA, 22 nt, Homo sapiens
ugagaagcauaccagugucugu

SEQ ID NO: 88126 - RNA, 22 nt, Homo sapiens
ugagauaaugcaugugaagauc

SEQ ID NO: 88127 - RNA, 22 nt, Homo sapiens
ucagagcaaagacacuuuauca

SEQ ID NO: 88128 - RNA, 22 nt, Homo sapiens
ucucugauuaaacaagauagug

SEQ ID NO: 88129 - RNA, 22 nt, Homo sapiens
ucugugcugagaguugaaaguu

SEQ ID NO: 88130 - RNA, 22 nt, Homo sapiens
uuaguaguuugauaggaauagc

SEQ ID NO: 88131 - RNA, 22 nt, Homo sapiens
uuagaguacaggggaaucaagg

SEQ ID NO: 88132 - RNA, 22 nt, Homo sapiens
uuagcagcucuggugacaaggu

SEQ ID NO: 88133 - RNA, 22 nt, Homo sapiens
uuaaguagaugaaugugaaugu

SEQ ID NO: 88134 - RNA, 22 nt, Homo sapiens
uguugccacuguuauuaaccua

SEQ ID NO: 88135 - RNA, 22 nt, Homo sapiens
uugaaccauucuuuugauagag

SEQ ID NO: 88136 - RNA, 22 nt, Homo sapiens
uucuagcaauggcagagugucu

SEQ ID NO: 88137 - RNA, 22 nt, Homo sapiens
uuccugagccuuguaucuagua

SEQ ID NO: 88138 - RNA, 22 nt, Homo sapiens
uuccuugguucagggaaggucc

SEQ ID NO: 88139 - RNA, 22 nt, Homo sapiens
uugaguaguaaggauauuaucu

SEQ ID NO: 88140 - RNA, 22 nt, Homo sapiens
uugagcuccucucaaccuaagg

SEQ ID NO: 88141 - RNA, 22 nt, Homo sapiens
uugucaugguuaauuuuaugua

SEQ ID NO: 88142 - RNA, 22 nt, Homo sapiens
aagcacaauuucaccuucuugu

SEQ ID NO: 88143 - RNA, 22 nt, Homo sapiens
aagaggcuguaggauaaugccu

SEQ ID NO: 88144 - RNA, 22 nt, Homo sapiens
aagagguaauaacaaagcuucu

SEQ ID NO: 88145 - RNA, 22 nt, Homo sapiens
guagcagccacacuugauaacu

SEQ ID NO: 88146 - RNA, 22 nt, Homo sapiens
ggcaagaacuucacucacuuuu

SEQ ID NO: 88147 - RNA, 17 nt, Homo sapiens
ggcaagaaguggaacuc

SEQ ID NO: 88148 - RNA, 22 nt, Homo sapiens
gugaaauauuuaacguccaggu

SEQ ID NO: 88149 - RNA, 22 nt, Homo sapiens
gugaaucuguuuucuucuguuc

SEQ ID NO: 88150 - RNA, 22 nt, Homo sapiens
gugaaaagaugagcaccauaca

SEQ ID NO: 88151 - RNA, 22 nt, Homo sapiens
gucaauguaucuagcuguauua

SEQ ID NO: 88152 - RNA, 22 nt, Homo sapiens
uaacaagagagucagucagucc

SEQ ID NO: 88153 - RNA, 22 nt, Homo sapiens
uaaauugcauaaguacaaauga

SEQ ID NO: 88154 - RNA, 20 nt, Homo sapiens
gugauuggucacugguuguu

SEQ ID NO: 88155 - RNA, 22 nt, Homo sapiens
gugaucuucauggaaggugaaa

SEQ ID NO: 88156 - RNA, 22 nt, Homo sapiens
gugauaguucuuacuccaaagu

SEQ ID NO: 88157 - RNA, 23 nt, Homo sapiens
gugugguaggcuauaccaucuag

SEQ ID NO: 88158 - RNA, 22 nt, Homo sapiens
uagcaacauucagcucagguac

SEQ ID NO: 88159 - RNA, 22 nt, Homo sapiens
uagcugcacuuacaagugagaa

SEQ ID NO: 88160 - RNA, 22 nt, Homo sapiens
uauaugcacucagguguaugug

SEQ ID NO: 88161 - RNA, 22 nt, Homo sapiens
uauaugcaacauaguguaugug

SEQ ID NO: 88162 - RNA, 22 nt, Homo sapiens
uagugcuguaauucuaaugaaa

SEQ ID NO: 88163 - RNA, 18 nt, Homo sapiens
uaucucauuucuuagguc

SEQ ID NO: 88164 - RNA, 22 nt, Homo sapiens
cauugggugagaacaugcuccu

SEQ ID NO: 88165 - RNA, 19 nt, Homo sapiens
ccaguguugccagagcuga

SEQ ID NO: 88166 - RNA, 22 nt, Homo sapiens
cgugaggaaaacagaggguguu

SEQ ID NO: 88167 - RNA, 22 nt, Homo sapiens
cugagaucaugggucagguggu

SEQ ID NO: 88168 - RNA, 22 nt, Homo sapiens
cuggaaaguagacaaucuaaaa

SEQ ID NO: 88169 - RNA, 22 nt, Homo sapiens
cauggcuacugcagauguaggg

SEQ ID NO: 88170 - RNA, 22 nt, Homo sapiens
caaguguuggcuuguauacaaa

SEQ ID NO: 88171 - RNA, 22 nt, Homo sapiens
caaugcagcuuuuggagagaaa

SEQ ID NO: 88172 - RNA, 22 nt, Homo sapiens
cagagcacugauacuggguucu

SEQ ID NO: 88173 - RNA, 22 nt, Homo sapiens
gcugaguaguauuucauuguau

SEQ ID NO: 88174 - RNA, 22 nt, Homo sapiens
gaugugaaaucauaguuucuag

SEQ ID NO: 88175 - RNA, 22 nt, Homo sapiens
gcaagaugagagcccgggcagu

SEQ ID NO: 88176 - RNA, 22 nt, Homo sapiens
gccaguauuuuauugaggauuu

SEQ ID NO: 88177 - RNA, 22 nt, Homo sapiens
gagcuguuuuucacuagaccaa

SEQ ID NO: 88178 - RNA, 20 nt, Homo sapiens
gacauguugguuugcugcac

SEQ ID NO: 88179 - RNA, 22 nt, Homo sapiens
cugugcuaggcaaugugguaga

SEQ ID NO: 88180 - RNA, 22 nt, Homo sapiens
gaaacugcauuucuaacaagcu

SEQ ID NO: 88181 - RNA, 22 nt, Homo sapiens
accacagugcuuccugcucacg

SEQ ID NO: 88182 - RNA, 22 nt, Homo sapiens
acauaguagacacugaaaauau

SEQ ID NO: 88183 - RNA, 22 nt, Homo sapiens
agcaacauuguucauaauagcu

SEQ ID NO: 88184 - RNA, 22 nt, Homo sapiens
agauggugugcuaggaaaugua

SEQ ID NO: 88185 - RNA, 22 nt, Homo sapiens
aacaccauucucuguaacaaga

SEQ ID NO: 88186 - RNA, 22 nt, Homo sapiens
agcucauugcaaccuccgccuc

SEQ ID NO: 88187 - RNA, 22 nt, Homo sapiens
aguggaauuaagaaacugaauu

SEQ ID NO: 88188 - RNA, 22 nt, Homo sapiens
aguggcaaugugauguccugaa

SEQ ID NO: 88189 - RNA, 22 nt, Homo sapiens
augaucuagaguaggaaacaga

SEQ ID NO: 88190 - RNA, 22 nt, Homo sapiens
augugguaguuauagugauaag

SEQ ID NO: 88191 - RNA, 22 nt, Homo sapiens
augaacgugugcauauaagcag

SEQ ID NO: 88192 - RNA, 22 nt, Homo sapiens
augaaaacaugauuugccuguu

SEQ ID NO: 88193 - RNA, 22 nt, Homo sapiens
auagucaguagucucauaauga

SEQ ID NO: 88194 - RNA, 22 nt, Homo sapiens
aaagcagcaggugguuuucaau

SEQ ID NO: 88195 - RNA, 22 nt, Homo sapiens
aaaugcagucuuuguucugggc

SEQ ID NO: 88196 - RNA, 22 nt, Homo sapiens
aagcuguguguaagcucucaca

SEQ ID NO: 88197 - RNA, 22 nt, Homo sapiens
aagcugcauuuucuagaugcuu

SEQ ID NO: 88198 - RNA, 22 nt, Homo sapiens
aagucaaggagagaagcuucag

SEQ ID NO: 88199 - RNA, 22 nt, Homo sapiens
aagugaauguuugguagcagug

SEQ ID NO: 88200 - RNA, 22 nt, Homo sapiens
aagucaguuugggagaagcuau

SEQ ID NO: 88201 - RNA, 20 nt, Homo sapiens
uggaaaguaagucaugauau

SEQ ID NO: 88202 - RNA, 19 nt, Homo sapiens
uggucaguucugggagcug

SEQ ID NO: 88203 - RNA, 22 nt, Homo sapiens
ugggguaggccugguuaugugc

SEQ ID NO: 88204 - RNA, 22 nt, Homo sapiens
ugaggcaggagaacggcuugaa

SEQ ID NO: 88205 - RNA, 18 nt, Homo sapiens
ugaguucauuagacuucc

SEQ ID NO: 88206 - RNA, 22 nt, Homo sapiens
ugaagagucuaaaucugucuuc

SEQ ID NO: 88207 - RNA, 22 nt, Homo sapiens
ugaagugaagcaguaguguggg

SEQ ID NO: 88208 - RNA, 22 nt, Homo sapiens
ugaaggacauucuaugguagau

SEQ ID NO: 88209 - RNA, 22 nt, Homo sapiens
ugaaguaauguuuuauucuauu

SEQ ID NO: 88210 - RNA, 22 nt, Homo sapiens
ugaccacagaaagugagggagc

SEQ ID NO: 88211 - RNA, 22 nt, Homo sapiens
uccuucauuugucaacucuagu

SEQ ID NO: 88212 - RNA, 22 nt, Homo sapiens
uccugauacgguugcaguucuc

SEQ ID NO: 88213 - RNA, 22 nt, Homo sapiens
ucagugaauacauguacucaug

SEQ ID NO: 88214 - RNA, 18 nt, Homo sapiens
ucaagcaauugucaugcc

SEQ ID NO: 88215 - RNA, 22 nt, Homo sapiens
ucaacauugcugucaggcaucu

SEQ ID NO: 88216 - RNA, 22 nt, Homo sapiens
uauaugcauugugggguacuga

SEQ ID NO: 88217 - RNA, 22 nt, Homo sapiens
uagcaguaucccaccaucuggu

SEQ ID NO: 88218 - RNA, 23 nt, Homo sapiens
uaguaccauauuguuggcagcac

SEQ ID NO: 88219 - RNA, 22 nt, Homo sapiens
uaguaaacauuuuucuaucauu

SEQ ID NO: 88220 - RNA, 22 nt, Homo sapiens
uagcaguaagaaacugacauug

SEQ ID NO: 88221 - RNA, 22 nt, Homo sapiens
uaugccucuucauaaaguauga

SEQ ID NO: 88222 - RNA, 22 nt, Homo sapiens
ucaacagugggcacuguaaaug

SEQ ID NO: 88223 - RNA, 22 nt, Homo sapiens
uagcacuauuuauugaaaagga

SEQ ID NO: 88224 - RNA, 22 nt, Homo sapiens
uagagcucaucuucuuuaaacu

SEQ ID NO: 88225 - RNA, 22 nt, Homo sapiens
uacaaguaauaagggaagaauu

SEQ ID NO: 88226 - RNA, 21 nt, Homo sapiens
uacaagcuguagcacaugcca

SEQ ID NO: 88227 - RNA, 22 nt, Homo sapiens
uacaaagcuuucugcaaaucau

SEQ ID NO: 88228 - RNA, 22 nt, Homo sapiens
uaaugugaauagugcuguaaug

SEQ ID NO: 88229 - RNA, 22 nt, Homo sapiens
uaaguaguauaagguuuuuuga

SEQ ID NO: 88230 - RNA, 20 nt, Homo sapiens
uaaaugccucaugcuuuauu

SEQ ID NO: 88231 - RNA, 22 nt, Homo sapiens
uaacaccuuugauagcacuuuu

SEQ ID NO: 88232 - RNA, 22 nt, Homo sapiens
guuagaucauguuuggauaucu

SEQ ID NO: 88233 - RNA, 22 nt, Homo sapiens
gugugguauuauaacuagguau

SEQ ID NO: 88234 - RNA, 22 nt, Homo sapiens
gccauugcacucuagccugagc

SEQ ID NO: 88235 - RNA, 22 nt, Homo sapiens
ggacaucauuaccauggaccca

SEQ ID NO: 88236 - RNA, 21 nt, Homo sapiens
ggcauugugcccuugcucuag

SEQ ID NO: 88237 - RNA, 22 nt, Homo sapiens
ggcauugugauccaccagccuu

SEQ ID NO: 88238 - RNA, 22 nt, Homo sapiens
guagcagcuacuaaguugcugu

SEQ ID NO: 88239 - RNA, 22 nt, Homo sapiens
guaacagucucaacaguggucu

SEQ ID NO: 88240 - RNA, 22 nt, Homo sapiens
agcagcauggguauaaaucucc

SEQ ID NO: 88241 - RNA, 22 nt, Homo sapiens
agcagcauauuuuuauaaugua

SEQ ID NO: 88242 - RNA, 22 nt, Homo sapiens
agagguuuugcacugguucuuu

SEQ ID NO: 88243 - RNA, 22 nt, Homo sapiens
agagguuuaacuggcuuauggu

SEQ ID NO: 88244 - RNA, 22 nt, Homo sapiens
agcuuguguuuuucuaaguauc

SEQ ID NO: 88245 - RNA, 22 nt, Homo sapiens
agggcuuguuuaacuaucauua

SEQ ID NO: 88246 - RNA, 22 nt, Homo sapiens
aauuaguugucgugagaguggu

SEQ ID NO: 88247 - RNA, 22 nt, Homo sapiens
aaugcacauaaaauccuccagg

SEQ ID NO: 88248 - RNA, 22 nt, Homo sapiens
aagcugugucuugucagcuacc

SEQ ID NO: 88249 - RNA, 22 nt, Homo sapiens
aagcugguuuuauaucugugag

SEQ ID NO: 88250 - RNA, 22 nt, Homo sapiens
aaggcaagauacugguugcuga

SEQ ID NO: 88251 - RNA, 22 nt, Homo sapiens
auagcagacauuucaaggcagg

SEQ ID NO: 88252 - RNA, 22 nt, Homo sapiens
aucaaagugaauuaaugagaau

SEQ ID NO: 88253 - RNA, 22 nt, Homo sapiens
auacaaguuauuugaacugcgg

SEQ ID NO: 88254 - RNA, 22 nt, Homo sapiens
auacacauuccugggccucacc

SEQ ID NO: 88255 - RNA, 22 nt, Homo sapiens
auagcacacuauagcuucaaac

SEQ ID NO: 88256 - RNA, 22 nt, Homo sapiens
auaaaccuacauuuucacuucu

SEQ ID NO: 88257 - RNA, 22 nt, Homo sapiens
aguaacauuucuaguagagagu

SEQ ID NO: 88258 - RNA, 22 nt, Homo sapiens
aguucaaugcucuuucuacuau

SEQ ID NO: 88259 - RNA, 22 nt, Homo sapiens
augguuugugcuccuauaagaa

SEQ ID NO: 88260 - RNA, 22 nt, Homo sapiens
augagcucauaaagagugauuu

SEQ ID NO: 88261 - RNA, 22 nt, Homo sapiens
augagaaugauucuguuauggu

SEQ ID NO: 88262 - RNA, 20 nt, Homo sapiens
cagcaaccugcucucuuccu

SEQ ID NO: 88263 - RNA, 22 nt, Homo sapiens
cauugcaauccagccugggcaa

SEQ ID NO: 88264 - RNA, 22 nt, Homo sapiens
ccuggaagaaaggugcuaaaua

SEQ ID NO: 88265 - RNA, 22 nt, Homo sapiens
ccugaugacacgggagauguac

SEQ ID NO: 88266 - RNA, 22 nt, Homo sapiens
cucauggagauagagaauagaa

SEQ ID NO: 88267 - RNA, 22 nt, Homo sapiens
cucauggauggucuggcagcca

SEQ ID NO: 88268 - RNA, 22 nt, Homo sapiens
auuugguguuguuuggagccua

SEQ ID NO: 88269 - RNA, 16 nt, Homo sapiens
auugacaguggguguu

SEQ ID NO: 88270 - RNA, 22 nt, Homo sapiens
auugcacaucugcacuacagcc

SEQ ID NO: 88271 - RNA, 22 nt, Homo sapiens
gaaucauuguuucuaaguuugu

SEQ ID NO: 88272 - RNA, 22 nt, Homo sapiens
gaccacauuccacacaggcuuu

SEQ ID NO: 88273 - RNA, 22 nt, Homo sapiens
gaggcauugaaauauugcuuau

SEQ ID NO: 88274 - RNA, 22 nt, Homo sapiens
gagcucauuaaaguaggaccua

SEQ ID NO: 88275 - RNA, 22 nt, Homo sapiens
gccauugcacuccagccucggc

SEQ ID NO: 88276 - RNA, 22 nt, Homo sapiens
gccauugcacuccagccuaggu

SEQ ID NO: 88277 - RNA, 22 nt, Homo sapiens
gccauugcacucuagccuaggu

SEQ ID NO: 88278 - RNA, 22 nt, Homo sapiens
gccauugcacuccagcuugggc

SEQ ID NO: 88279 - RNA, 22 nt, Homo sapiens
gcaguagugugaucuuggcuca

SEQ ID NO: 88280 - RNA, 20 nt, Homo sapiens
gcauaugucuuuauggcagc

SEQ ID NO: 88281 - RNA, 22 nt, Homo sapiens
gcauaaagcuaauaagacgaag

SEQ ID NO: 88282 - RNA, 20 nt, Homo sapiens
gcaacauggccagagugaau

SEQ ID NO: 88283 - RNA, 22 nt, Homo sapiens
uuggccuccuggucauauccag

SEQ ID NO: 88284 - RNA, 22 nt, Homo sapiens
uugagugaaugaaugauuaaau

SEQ ID NO: 88285 - RNA, 22 nt, Homo sapiens
uuuggucuuuuauuuaaagcag

SEQ ID NO: 88286 - RNA, 22 nt, Homo sapiens
uuuggcauuagauaauugugua

SEQ ID NO: 88287 - RNA, 22 nt, Homo sapiens
uuaaaccugucuucucacuaau

SEQ ID NO: 88288 - RNA, 22 nt, Homo sapiens
uguuuugguugucccuggccag

SEQ ID NO: 88289 - RNA, 22 nt, Homo sapiens
uguuacagcagcacaaaaugga

SEQ ID NO: 88290 - RNA, 22 nt, Homo sapiens
uguuaacauuuuagagugggaa

SEQ ID NO: 88291 - RNA, 22 nt, Homo sapiens
uuccuugagucuuuuuccugag

SEQ ID NO: 88292 - RNA, 22 nt, Homo sapiens
uucuagcacuuugggagacuga

SEQ ID NO: 88293 - RNA, 22 nt, Homo sapiens
uucccucagaaacacacagccc

SEQ ID NO: 88294 - RNA, 22 nt, Homo sapiens
uucccugugguauagaagccgu

SEQ ID NO: 88295 - RNA, 22 nt, Homo sapiens
ugcauauuuuauaaagauggaa

SEQ ID NO: 88296 - RNA, 22 nt, Homo sapiens
uggagagcaaaaucaauccaaa

SEQ ID NO: 88297 - RNA, 22 nt, Homo sapiens
uggcaguuuacagcuuuaggag

SEQ ID NO: 88298 - RNA, 22 nt, Homo sapiens
ugguaugucuagauggggaagu

SEQ ID NO: 88299 - RNA, 22 nt, Homo sapiens
ugguaugucuuucuuccuguag

SEQ ID NO: 88300 - RNA, 22 nt, Homo sapiens
ugcaaacuuccuugggcagcau

SEQ ID NO: 88301 - RNA, 22 nt, Homo sapiens
ugcauaugucuuuauaguagca

SEQ ID NO: 88302 - RNA, 21 nt, Homo sapiens
ugauaugguuuggauaugugu

SEQ ID NO: 88303 - RNA, 22 nt, Homo sapiens
ugauccagugcucaguuggagu

SEQ ID NO: 88304 - RNA, 22 nt, Homo sapiens
ugaguauguuuaaugugacaau

SEQ ID NO: 88305 - RNA, 22 nt, Homo sapiens
ugaggaguauguucuguagacc

SEQ ID NO: 88306 - RNA, 18 nt, Homo sapiens
ugaggaaaggguuugcua

SEQ ID NO: 88307 - RNA, 20 nt, Homo sapiens
ugaguagaggaguucuauca

SEQ ID NO: 88308 - RNA, 18 nt, Homo sapiens
ucucacagcaaucuguca

SEQ ID NO: 88309 - RNA, 22 nt, Homo sapiens
aacagugcuguuauaaauguac

SEQ ID NO: 88310 - RNA, 22 nt, Homo sapiens
ucugugaaugugaccuuauuug

SEQ ID NO: 88311 - RNA, 22 nt, Homo sapiens
ugaauugucucucacuggguuc

SEQ ID NO: 88312 - RNA, 22 nt, Homo sapiens
ugaauaggcaguuaaguuuaug

SEQ ID NO: 88313 - RNA, 22 nt, Homo sapiens
ucuuuggguguauuucacagcc

SEQ ID NO: 88314 - RNA, 22 nt, Homo sapiens
ucauagaucaaguaauaagaca

SEQ ID NO: 88315 - RNA, 22 nt, Homo sapiens
ucauaggucacuguaaccucgu

SEQ ID NO: 88316 - RNA, 21 nt, Homo sapiens
uccugagagaggaguaacucu

SEQ ID NO: 88317 - RNA, 22 nt, Homo sapiens
uugcaugucauaacugauggaa

SEQ ID NO: 88318 - RNA, 22 nt, Homo sapiens
uugcuuuguugucuggggaaua

SEQ ID NO: 88319 - RNA, 22 nt, Homo sapiens
uucuugguguaguaguugaaaa

SEQ ID NO: 88320 - RNA, 22 nt, Homo sapiens
uugcaagaaaucagagccuucc

SEQ ID NO: 88321 - RNA, 22 nt, Homo sapiens
uugcauagaggugaguauagua

SEQ ID NO: 88322 - RNA, 22 nt, Homo sapiens
uugcaguagucugaaagcaaua

SEQ ID NO: 88323 - RNA, 22 nt, Homo sapiens
uugcagcaaauaggaaugagga

SEQ ID NO: 88324 - RNA, 22 nt, Homo sapiens
uugcaagauguuaacauuggag

SEQ ID NO: 88325 - RNA, 22 nt, Homo sapiens
uugugguaggcauguaagauga

SEQ ID NO: 88326 - RNA, 22 nt, Homo sapiens
uugucacccuacauaacaggga

SEQ ID NO: 88327 - RNA, 22 nt, Homo sapiens
uuugauugguguaccugaaagu

SEQ ID NO: 88328 - RNA, 22 nt, Homo sapiens
uguuuguuugauaugggauaaa

SEQ ID NO: 88329 - RNA, 22 nt, Homo sapiens
uguguuugauaaguccauaguu

SEQ ID NO: 88330 - RNA, 20 nt, Homo sapiens
ugugauuauuuaguugcaug

SEQ ID NO: 88331 - RNA, 22 nt, Homo sapiens
uguagcaaaucgauacuauugg

SEQ ID NO: 88332 - RNA, 22 nt, Homo sapiens
uggugagaaacuagauauuuuu

SEQ ID NO: 88333 - RNA, 22 nt, Homo sapiens
uucaagucaaggaaagaggucu

SEQ ID NO: 88334 - RNA, 22 nt, Homo sapiens
uucugugguuucauuuaccugu

SEQ ID NO: 88335 - RNA, 22 nt, Homo sapiens
uucauagucacauucgaugucu

SEQ ID NO: 88336 - RNA, 22 nt, Homo sapiens
uucauaguuuauacugauauuu

SEQ ID NO: 88337 - RNA, 23 nt, Homo sapiens
cagugcauuguggcauucagcau

SEQ ID NO: 88338 - RNA, 22 nt, Homo sapiens
cagcacauagcaguugcucagu

SEQ ID NO: 88339 - RNA, 20 nt, Homo sapiens
caaauugcuuucuugguuuu

SEQ ID NO: 88340 - RNA, 23 nt, Homo sapiens
auugcagucuugaacuccugggc

SEQ ID NO: 88341 - RNA, 22 nt, Homo sapiens
auuauuaguuguugaaugaagu

SEQ ID NO: 88342 - RNA, 22 nt, Homo sapiens
auuuggguuuuacaucaggcua

SEQ ID NO: 88343 - RNA, 22 nt, Homo sapiens
cauaguacuugcauaguacuau

SEQ ID NO: 88344 - RNA, 22 nt, Homo sapiens
cuauguaccuggaacuguauua

SEQ ID NO: 88345 - RNA, 22 nt, Homo sapiens
cugauugucuauuuaguucacu

SEQ ID NO: 88346 - RNA, 22 nt, Homo sapiens
gaaucaauugaucuaugugucu

SEQ ID NO: 88347 - RNA, 22 nt, Homo sapiens
gccauugcacuccagccucggg

SEQ ID NO: 88348 - RNA, 22 nt, Homo sapiens
gccauugcacuccagccugagc

SEQ ID NO: 88349 - RNA, 22 nt, Homo sapiens
gccauugcacuccagccuagcg

SEQ ID NO: 88350 - RNA, 22 nt, Homo sapiens
gagguaucauuauguugcccag

SEQ ID NO: 88351 - RNA, 22 nt, Homo sapiens
gaucugugugauuggaugcauu

SEQ ID NO: 88352 - RNA, 22 nt, Homo sapiens
gauagcauucaauuaucuguug

SEQ ID NO: 88353 - RNA, 22 nt, Homo sapiens
uauugucacuaaaggaagcugg

SEQ ID NO: 88354 - RNA, 22 nt, Homo sapiens
uaguagagauggggcacaugcc

SEQ ID NO: 88355 - RNA, 22 nt, Homo sapiens
uagcaggaaaggggucagaucu

SEQ ID NO: 88356 - RNA, 22 nt, Homo sapiens
uagcaguaccccaguauccugg

SEQ ID NO: 88357 - RNA, 22 nt, Homo sapiens
uagguucucaggaaugagcuuc

SEQ ID NO: 88358 - RNA, 22 nt, Homo sapiens
uaauaguuucagaaguuguuuu

SEQ ID NO: 88359 - RNA, 22 nt, Homo sapiens
uacacagucaaaaauuuccagg

SEQ ID NO: 88360 - RNA, 18 nt, Homo sapiens
uagagcacaagcuuuggc

SEQ ID NO: 88361 - RNA, 22 nt, Homo sapiens
uagaguguuuuguuaggcagca

SEQ ID NO: 88362 - RNA, 22 nt, Homo sapiens
ggcauugugaacauuucccugc

SEQ ID NO: 88363 - RNA, 22 nt, Homo sapiens
gguaucuuggagagagaaguga

SEQ ID NO: 88364 - RNA, 19 nt, Homo sapiens
ggucagcaaagucuagcug

SEQ ID NO: 88365 - RNA, 23 nt, Homo sapiens
gugcaugagucuuuauaguagca

SEQ ID NO: 88366 - RNA, 22 nt, Homo sapiens
gugcauguccacuaguccauau

SEQ ID NO: 88367 - RNA, 22 nt, Homo sapiens
guggcuagaaugaagguagcug

SEQ ID NO: 88368 - RNA, 22 nt, Homo sapiens
gugcacauauggugcauaagug

SEQ ID NO: 88369 - RNA, 22 nt, Homo sapiens
gugagcuaguuucuuugcugug

SEQ ID NO: 88370 - RNA, 22 nt, Homo sapiens
guccaguuguuuucugagguug

SEQ ID NO: 88371 - RNA, 22 nt, Homo sapiens
aguaccauuccguuggagcugg

SEQ ID NO: 88372 - RNA, 22 nt, Homo sapiens
auagaauguauuaguaaauuug

SEQ ID NO: 88373 - RNA, 22 nt, Homo sapiens
aucaggaaccuuuuuggugugu

SEQ ID NO: 88374 - RNA, 22 nt, Homo sapiens
aucugcaaauaaugaagauugg

SEQ ID NO: 88375 - RNA, 22 nt, Homo sapiens
auccuguaggcuaguagacagu

SEQ ID NO: 88376 - RNA, 22 nt, Homo sapiens
auccguugcaagggaagaauga

SEQ ID NO: 88377 - RNA, 22 nt, Homo sapiens
augcagcugaggguaguggagc

SEQ ID NO: 88378 - RNA, 22 nt, Homo sapiens
augaguaugagaauacauuaag

SEQ ID NO: 88379 - RNA, 20 nt, Homo sapiens
augagcucaucuugaaaacc

SEQ ID NO: 88380 - RNA, 22 nt, Homo sapiens
auggaacauuauagauguaaaa

SEQ ID NO: 88381 - RNA, 22 nt, Homo sapiens
augugacagugguuuuaagcgu

SEQ ID NO: 88382 - RNA, 22 nt, Homo sapiens
augugcaugcuguucugccaga

SEQ ID NO: 88383 - RNA, 22 nt, Homo sapiens
augugcaacugcuggaacaguc

SEQ ID NO: 88384 - RNA, 22 nt, Homo sapiens
augugcaaauuuccaaacucuu

SEQ ID NO: 88385 - RNA, 22 nt, Homo sapiens
aauaaaguaggaggugaggaaa

SEQ ID NO: 88386 - RNA, 22 nt, Homo sapiens
aauugcacuaagcauaguccag

SEQ ID NO: 88387 - RNA, 22 nt, Homo sapiens
acacaguaaauauugucuccuc

SEQ ID NO: 88388 - RNA, 22 nt, Homo sapiens
acacauuagcaagugcuguuau

SEQ ID NO: 88389 - RNA, 22 nt, Homo sapiens
aguacaauguugaguagaagug

SEQ ID NO: 88390 - RNA, 22 nt, Homo sapiens
agcaguguggccuuagacccgg

SEQ ID NO: 88391 - RNA, 22 nt, Homo sapiens
agcugcacaaauggaugugagg

SEQ ID NO: 88392 - RNA, 22 nt, Homo sapiens
agcugcaauguuuaguauaaua

SEQ ID NO: 88393 - RNA, 22 nt, Homo sapiens
agcauuaguugugaagccuuua

SEQ ID NO: 88394 - RNA, 22 nt, Homo sapiens
agaauaauguccccccaaggga

SEQ ID NO: 88395 - RNA, 22 nt, Homo sapiens
aagagguaggaaauggucauuu

SEQ ID NO: 88396 - RNA, 22 nt, Homo sapiens
aagagguagucugucccuuagc

SEQ ID NO: 88397 - RNA, 22 nt, Homo sapiens
aaaguguguuuccaaccugugg

SEQ ID NO: 88398 - RNA, 22 nt, Homo sapiens
uacauaguuacuuccauuucca

SEQ ID NO: 88399 - RNA, 22 nt, Homo sapiens
uacauugcacuuuauuagauac

SEQ ID NO: 88400 - RNA, 22 nt, Homo sapiens
uaagcagugcaagaauggaaua

SEQ ID NO: 88401 - RNA, 22 nt, Homo sapiens
guguaauaaucguggacuaugu

SEQ ID NO: 88402 - RNA, 22 nt, Homo sapiens
guguaaaucaaucuguugucuu

SEQ ID NO: 88403 - RNA, 22 nt, Homo sapiens
uaacuaguggaauuugauuuca

SEQ ID NO: 88404 - RNA, 22 nt, Homo sapiens
uaaaagucaucacaacuggagu

SEQ ID NO: 88405 - RNA, 17 nt, Homo sapiens
uaaagccagucaaguca

SEQ ID NO: 88406 - RNA, 22 nt, Homo sapiens
uaucucauccuccuugauccca

SEQ ID NO: 88407 - RNA, 22 nt, Homo sapiens
uagguaguuacacagcaaugua

SEQ ID NO: 88408 - RNA, 22 nt, Homo sapiens
uagguuaugauccaucuuggcu

SEQ ID NO: 88409 - RNA, 22 nt, Homo sapiens
uagguucuccacagguucucca

SEQ ID NO: 88410 - RNA, 22 nt, Homo sapiens
uagguuguccaucucuagaagc

SEQ ID NO: 88411 - RNA, 22 nt, Homo sapiens
uagcaguauugaaagaugaggg

SEQ ID NO: 88412 - RNA, 22 nt, Homo sapiens
uagcagugugaaaacagacuaa

SEQ ID NO: 88413 - RNA, 22 nt, Homo sapiens
uagaagcuacucuucuuguggc

SEQ ID NO: 88414 - RNA, 22 nt, Homo sapiens
uaggaaguuucuugauuacuua

SEQ ID NO: 88415 - RNA, 22 nt, Homo sapiens
uaggaaguuuucuugcugggcc

SEQ ID NO: 88416 - RNA, 22 nt, Homo sapiens
uagcugcccagcacgaaguugg

SEQ ID NO: 88417 - RNA, 22 nt, Homo sapiens
uagcuucuccauagcuccaugu

SEQ ID NO: 88418 - RNA, 22 nt, Homo sapiens
gugcauauaaguuguuucuagu

SEQ ID NO: 88419 - RNA, 22 nt, Homo sapiens
gugcacaugguagguauugagu

SEQ ID NO: 88420 - RNA, 22 nt, Homo sapiens
gugcaaauguuauugagguuuu

SEQ ID NO: 88421 - RNA, 18 nt, Homo sapiens
gugcaaugaauagcagag

SEQ ID NO: 88422 - RNA, 22 nt, Homo sapiens
gugagaagaaaaauauggcugu

SEQ ID NO: 88423 - RNA, 22 nt, Homo sapiens
gugagaaucaaacuacauaaau

SEQ ID NO: 88424 - RNA, 22 nt, Homo sapiens
gucauugucaauugacaauugu

SEQ ID NO: 88425 - RNA, 22 nt, Homo sapiens
guacaguuuagugcuuugagaa

SEQ ID NO: 88426 - RNA, 22 nt, Homo sapiens
guacaagugcaguuucguuaca

SEQ ID NO: 88427 - RNA, 22 nt, Homo sapiens
gucuuuaguugaaacauguggu

SEQ ID NO: 88428 - RNA, 22 nt, Homo sapiens
gugaaauacauaaucccaagug

SEQ ID NO: 88429 - RNA, 19 nt, Homo sapiens
ggcaagaguuguucugugu

SEQ ID NO: 88430 - RNA, 22 nt, Homo sapiens
ggcaagaaccacaauuacuuuu

SEQ ID NO: 88431 - RNA, 22 nt, Homo sapiens
ggcaagaaccucaauuaccuuu

SEQ ID NO: 88432 - RNA, 22 nt, Homo sapiens
ggcaagaaagaaaucaucuguc

SEQ ID NO: 88433 - RNA, 23 nt, Homo sapiens
ucaguacucuauaagugccagcu

SEQ ID NO: 88434 - RNA, 22 nt, Homo sapiens
uauugugcauguugaauaacua

SEQ ID NO: 88435 - RNA, 22 nt, Homo sapiens
uauuugguuacuugaauagcua

SEQ ID NO: 88436 - RNA, 22 nt, Homo sapiens
ucacuggagauagcaaucuggu

SEQ ID NO: 88437 - RNA, 21 nt, Homo sapiens
ugaaugucuaggcagaaguuu

SEQ ID NO: 88438 - RNA, 22 nt, Homo sapiens
ucuugucacugcauccccagcu

SEQ ID NO: 88439 - RNA, 22 nt, Homo sapiens
ugaguagaagugaagauagugg

SEQ ID NO: 88440 - RNA, 22 nt, Homo sapiens
ugagauuaaucuuuaaguaaga

SEQ ID NO: 88441 - RNA, 22 nt, Homo sapiens
ugaguauuugggggaccagaga

SEQ ID NO: 88442 - RNA, 22 nt, Homo sapiens
ugagaucuguaaagucugacau

SEQ ID NO: 88443 - RNA, 22 nt, Homo sapiens
ugagagcuuugaugcacuguuu

SEQ ID NO: 88444 - RNA, 22 nt, Homo sapiens
ugagagcuuuuuugccugguga

SEQ ID NO: 88445 - RNA, 22 nt, Homo sapiens
ugagaguagggguugggauugg

SEQ ID NO: 88446 - RNA, 22 nt, Homo sapiens
ugacagcaucaggauuggagag

SEQ ID NO: 88447 - RNA, 22 nt, Homo sapiens
ugacaagugauuaaggcauauu

SEQ ID NO: 88448 - RNA, 22 nt, Homo sapiens
uggauaguucuucuacuagagu

SEQ ID NO: 88449 - RNA, 22 nt, Homo sapiens
uggcagcgcaguugaaaaagaa

SEQ ID NO: 88450 - RNA, 22 nt, Homo sapiens
uggcagauagaaaugugguuaa

SEQ ID NO: 88451 - RNA, 22 nt, Homo sapiens
uggcaauguggaaugguccagg

SEQ ID NO: 88452 - RNA, 20 nt, Homo sapiens
uggaaucugaagaucucagu

SEQ ID NO: 88453 - RNA, 22 nt, Homo sapiens
ugcaaauguuaggugucauuau

SEQ ID NO: 88454 - RNA, 22 nt, Homo sapiens
ugauuuguccauguggcacgug

SEQ ID NO: 88455 - RNA, 22 nt, Homo sapiens
ugcaagaaacauauuccacaag

SEQ ID NO: 88456 - RNA, 22 nt, Homo sapiens
ugcaagcacacccagggauugu

SEQ ID NO: 88457 - RNA, 22 nt, Homo sapiens
ugcaagaugauuucaauugaua

SEQ ID NO: 88458 - RNA, 22 nt, Homo sapiens
ugcauuguauuguugacucgcc

SEQ ID NO: 88459 - RNA, 19 nt, Homo sapiens
ugcauugucugggaaaugg

SEQ ID NO: 88460 - RNA, 21 nt, Homo sapiens
ugcauugucuugaguuuaaau

SEQ ID NO: 88461 - RNA, 22 nt, Homo sapiens
auucaucagggauauuggucug

SEQ ID NO: 88462 - RNA, 22 nt, Homo sapiens
caaauugcuuguggaggauaau

SEQ ID NO: 88463 - RNA, 22 nt, Homo sapiens
caguucaugguaggcaccauag

SEQ ID NO: 88464 - RNA, 22 nt, Homo sapiens
cauagcacugcacuucagccug

SEQ ID NO: 88465 - RNA, 22 nt, Homo sapiens
cauagcacacguauaccuaugu

SEQ ID NO: 88466 - RNA, 22 nt, Homo sapiens
cauagcacugagcucuacccuc

SEQ ID NO: 88467 - RNA, 22 nt, Homo sapiens
cagugaauuucaggucaagagu

SEQ ID NO: 88468 - RNA, 22 nt, Homo sapiens
caccaguuuuucagugauucaa

SEQ ID NO: 88469 - RNA, 22 nt, Homo sapiens
gaauggaacugacuauagcuga

SEQ ID NO: 88470 - RNA, 22 nt, Homo sapiens
gcaagauuguguggcugaagua

SEQ ID NO: 88471 - RNA, 22 nt, Homo sapiens
gcaagaaucugggaguaaaauu

SEQ ID NO: 88472 - RNA, 22 nt, Homo sapiens
gagauuaauacacaucaaaugc

SEQ ID NO: 88473 - RNA, 22 nt, Homo sapiens
gagugcaucguggccauuuuaa

SEQ ID NO: 88474 - RNA, 22 nt, Homo sapiens
aauauagcuauguacaugucca

SEQ ID NO: 88475 - RNA, 22 nt, Homo sapiens
aauuaguaaccuaauuccaucu

SEQ ID NO: 88476 - RNA, 22 nt, Homo sapiens
aagugcaaaucuguggcugaaa

SEQ ID NO: 88477 - RNA, 22 nt, Homo sapiens
uuuuaguggacaaagguauuua

SEQ ID NO: 88478 - RNA, 23 nt, Homo sapiens
agcaaaugcucuagcacuccaac

SEQ ID NO: 88479 - RNA, 18 nt, Homo sapiens
agaugcaugcucacuaca

SEQ ID NO: 88480 - RNA, 22 nt, Homo sapiens
agaugccuaugaagagaaauua

SEQ ID NO: 88481 - RNA, 18 nt, Homo sapiens
acauucagcuugaagaua

SEQ ID NO: 88482 - RNA, 22 nt, Homo sapiens
agugauauguuugccuugaggg

SEQ ID NO: 88483 - RNA, 22 nt, Homo sapiens
agucauagaguuugcccuucuc

SEQ ID NO: 88484 - RNA, 22 nt, Homo sapiens
agucaagaaucucagcaucuuu

SEQ ID NO: 88485 - RNA, 22 nt, Homo sapiens
auagcagcucacuuauuuaugg

SEQ ID NO: 88486 - RNA, 22 nt, Homo sapiens
auaugcacaguggaguacuauu

SEQ ID NO: 88487 - RNA, 22 nt, Homo sapiens
auccuugagaaaauaaaugacc

SEQ ID NO: 88488 - RNA, 22 nt, Homo sapiens
aucaccauguguacauuagacc

SEQ ID NO: 88489 - RNA, 19 nt, Homo sapiens
augcugguguugcucaaac

SEQ ID NO: 88490 - RNA, 20 nt, Homo sapiens
augacuagaggacaugguaa

SEQ ID NO: 88491 - RNA, 22 nt, Homo sapiens
augaugaaguaagugcuuagga

SEQ ID NO: 88492 - RNA, 22 nt, Homo sapiens
uuguaacaugcuuucacuucag

SEQ ID NO: 88493 - RNA, 22 nt, Homo sapiens
uuggaaggcugaauggccucuc

SEQ ID NO: 88494 - RNA, 19 nt, Homo sapiens
uugcaguauccuauauguu

SEQ ID NO: 88495 - RNA, 19 nt, Homo sapiens
uugcauagguugaaccagc

SEQ ID NO: 88496 - RNA, 22 nt, Homo sapiens
uugugguaaucugugacagcag

SEQ ID NO: 88497 - RNA, 22 nt, Homo sapiens
uucuuugguacaagggccgacc

SEQ ID NO: 88498 - RNA, 22 nt, Homo sapiens
uucauaguaacaguaacuaugg

SEQ ID NO: 88499 - RNA, 22 nt, Homo sapiens
uucauagugaaaaauucaaagu

SEQ ID NO: 88500 - RNA, 22 nt, Homo sapiens
uugagaguggcagagguggaac

SEQ ID NO: 88501 - RNA, 22 nt, Homo sapiens
uugauuagugacuggcuacacg

SEQ ID NO: 88502 - RNA, 22 nt, Homo sapiens
uucacaguacucccuggaauua

SEQ ID NO: 88503 - RNA, 22 nt, Homo sapiens
uuaauagugacucauuuuccac

SEQ ID NO: 88504 - RNA, 22 nt, Homo sapiens
uguagucauuuggaguccagcu

SEQ ID NO: 88505 - RNA, 22 nt, Homo sapiens
uguauauguuuguacauauguc

SEQ ID NO: 88506 - RNA, 22 nt, Homo sapiens
uggcucuuucuagacuuaauua

SEQ ID NO: 88507 - RNA, 20 nt, Homo sapiens
uggcucuuugcugcuaaagu

SEQ ID NO: 88508 - RNA, 22 nt, Homo sapiens
uggugagaaaugagaugcuuuu

SEQ ID NO: 88509 - RNA, 22 nt, Homo sapiens
ugucaauauguaauaacugaau

SEQ ID NO: 88510 - RNA, 22 nt, Homo sapiens
ugucaagaugguuugauguugu

SEQ ID NO: 88511 - RNA, 20 nt, Homo sapiens
ugucaagaaacauuacuuau

SEQ ID NO: 88512 - RNA, 22 nt, Homo sapiens
uguauguuuaaggccaguggaa

SEQ ID NO: 88513 - RNA, 22 nt, Homo sapiens
ugugagcuauggaguuguagag

SEQ ID NO: 88514 - RNA, 22 nt, Homo sapiens
ugugacuaguggugaaugacgc

SEQ ID NO: 88515 - RNA, 22 nt, Homo sapiens
uuugauuguacuaaaauuguac

SEQ ID NO: 88516 - RNA, 22 nt, SARS coronavirus
agcuguaaagauaacagagcau

SEQ ID NO: 88517 - RNA, 22 nt, SARS coronavirus
uacauagucuacucuugugcag

SEQ ID NO: 88518 - RNA, 22 nt, Homo sapiens
acaugguacugauuuacgaaau

SEQ ID NO: 88519 - RNA, 22 nt, Homo sapiens
caguaguagccccuuagaugga

SEQ ID NO: 88520 - RNA, 22 nt, Homo sapiens
uagcaguauugaaagaugaggg

SEQ ID NO: 88521 - RNA, 22 nt, Homo sapiens
gugguagaaaguaccaaacuag

SEQ ID NO: 88522 - RNA, 22 nt, Homo sapiens
uuaguagagacgagcguuccac

SEQ ID NO: 88523 - RNA, 22 nt, Homo sapiens
gaaaguguugagauuacaggca

SEQ ID NO: 88524 - RNA, 22 nt, Homo sapiens
auguaguaugaagaagaugcuu

SEQ ID NO: 88525 - RNA, 22 nt, Homo sapiens
agaguauagcaacuuaguaaaa

SEQ ID NO: 88526 - RNA, 22 nt, Homo sapiens
gguagacucuguaagugaucau

SEQ ID NO: 88527 - RNA, 22 nt, Homo sapiens
aucagauaccuguugggaaaug

SEQ ID NO: 88528 - RNA, 22 nt, Homo sapiens
guuauguuauguuauguuaugu

SEQ ID NO: 88529 - RNA, 22 nt, Homo sapiens
uaguaaacagcucugccacaau

SEQ ID NO: 88530 - RNA, 22 nt, Homo sapiens
uagguaguuacacagcaaugua

SEQ ID NO: 88531 - RNA, 22 nt, Homo sapiens
uaguagagauggggcacaugcc

SEQ ID NO: 88532 - RNA, 22 nt, Homo sapiens
gagauauucugguuuacuaaau

SEQ ID NO: 88533 - RNA, 20 nt, Homo sapiens
gcaacauggccagagugaau

SEQ ID NO: 88534 - RNA, 22 nt, Homo sapiens
gcaagaauggaacaggagagcc

SEQ ID NO: 88535 - RNA, 22 nt, Homo sapiens
ugaguagaaauaaacgcaaacu

SEQ ID NO: 88536 - RNA, 20 nt, Homo sapiens
uggaaaguaagucaugauau

SEQ ID NO: 88537 - RNA, 22 nt, Homo sapiens
uugacuccagagugaguaaaug

SEQ ID NO: 88538 - RNA, 19 nt, Homo sapiens
aaguaguugugacagaugc

SEQ ID NO: 88539 - RNA, 22 nt, Homo sapiens
gcaagaaucugggaguaaaauu

SEQ ID NO: 88540 - RNA, 23 nt, Homo sapiens
ucaguagucauugggaaagugug

SEQ ID NO: 88541 - RNA, 22 nt, Seoul virus
aaagaugaaauuaugugcaauc

SEQ ID NO: 88542 - RNA, 22 nt, Seoul virus
uaguaguagacuccgcaagaaa

SEQ ID NO: 88543 - RNA, 22 nt, Homo sapiens
aaguccaugaagucuugugggu

SEQ ID NO: 88544 - RNA, 21 nt, Homo sapiens
aauacucuagguuaagagagc

SEQ ID NO: 88545 - RNA, 22 nt, Homo sapiens
aauggguaguacugugguaaca

SEQ ID NO: 88546 - RNA, 22 nt, Homo sapiens
aaugguuuuaucagcguccaaa

SEQ ID NO: 88547 - RNA, 22 nt, Homo sapiens
agaucauaugcaguaaugaacu

SEQ ID NO: 88548 - RNA, 22 nt, Homo sapiens
agagaucacugaaucacggggg

SEQ ID NO: 88549 - RNA, 22 nt, Homo sapiens
agagaucauuuuguuucaaauc

SEQ ID NO: 88550 - RNA, 22 nt, Homo sapiens
agugaacacagcuucuuugguu

SEQ ID NO: 88551 - RNA, 22 nt, Homo sapiens
agucaguggaguaaauguaauu

SEQ ID NO: 88552 - RNA, 22 nt, Homo sapiens
agucagugucuguaaggagaac

SEQ ID NO: 88553 - RNA, 22 nt, Homo sapiens
auagcccuuuucuaacuaugug

SEQ ID NO: 88554 - RNA, 22 nt, Homo sapiens
auauguauuuuaacguguaagg

SEQ ID NO: 88555 - RNA, 22 nt, Homo sapiens
augaacagagccuugagaaccu

SEQ ID NO: 88556 - RNA, 22 nt, Homo sapiens
augaaaucuuuggcagaucuua

SEQ ID NO: 88557 - RNA, 19 nt, Homo sapiens
augagaacagacuccauuu

SEQ ID NO: 88558 - RNA, 22 nt, Homo sapiens
augagaaugauucuguuauggu

SEQ ID NO: 88559 - RNA, 22 nt, Homo sapiens
augguuugugcuccuauaagaa

SEQ ID NO: 88560 - RNA, 22 nt, Homo sapiens
augguuuauuuguaagcagagu

SEQ ID NO: 88561 - RNA, 20 nt, Homo sapiens
gugagaacaugugguauuug

SEQ ID NO: 88562 - RNA, 22 nt, Homo sapiens
guaauacuuuugggauauuaga

SEQ ID NO: 88563 - RNA, 22 nt, Homo sapiens
uagcaguauugaaagaugaggg

SEQ ID NO: 88564 - RNA, 22 nt, Homo sapiens
uagugguaguagcaguaauauu

SEQ ID NO: 88565 - RNA, 21 nt, Homo sapiens
uagcaaauugcuauuaaggca

SEQ ID NO: 88566 - RNA, 22 nt, Homo sapiens
uaugguuuuggaauccugcaga

SEQ ID NO: 88567 - RNA, 22 nt, Homo sapiens
caggcagugggagacaaaacug

SEQ ID NO: 88568 - RNA, 22 nt, Homo sapiens
cauugguuuuucaggaguauau

SEQ ID NO: 88569 - RNA, 22 nt, Homo sapiens
cuaauacaguuguccaagcugg

SEQ ID NO: 88570 - RNA, 22 nt, Homo sapiens
gagaaccauuuggagaaaaagu

SEQ ID NO: 88571 - RNA, 22 nt, Homo sapiens
gagaacagaagcauuccuaauu

SEQ ID NO: 88572 - RNA, 22 nt, Homo sapiens
gaggaguagggcacaaagccuu

SEQ ID NO: 88573 - RNA, 22 nt, Homo sapiens
gauaaaucuuggcuagucuaag

SEQ ID NO: 88574 - RNA, 22 nt, Homo sapiens
uuguuugguugaguauggaagu

SEQ ID NO: 88575 - RNA, 22 nt, Homo sapiens
uuuaauacugcaucuuuacucu

SEQ ID NO: 88576 - RNA, 22 nt, Homo sapiens
uugacauaguuucugaaauaga

SEQ ID NO: 88577 - RNA, 22 nt, Homo sapiens
uuaaucacagcugaacucaaac

SEQ ID NO: 88578 - RNA, 22 nt, Homo sapiens
uuaaucaggccguuuccuaaga

SEQ ID NO: 88579 - RNA, 22 nt, Homo sapiens
ugacuauaguaaucacuucaca

SEQ ID NO: 88580 - RNA, 23 nt, Homo sapiens
ugacuuaggccucaacuaugacu

SEQ ID NO: 88581 - RNA, 20 nt, Homo sapiens
ugagaacauguggcauuugg

SEQ ID NO: 88582 - RNA, 18 nt, Homo sapiens
ugagaacauguguacaca

SEQ ID NO: 88583 - RNA, 16 nt, Homo sapiens
ugagaacaugugauau

SEQ ID NO: 88584 - RNA, 22 nt, Homo sapiens
ugagaacaugugauauuuggug

SEQ ID NO: 88585 - RNA, 22 nt, Homo sapiens
ugagaacagcagcuugggacac

SEQ ID NO: 88586 - RNA, 22 nt, Homo sapiens
ugaguuaauuuuuguaucaugu

SEQ ID NO: 88587 - RNA, 22 nt, Homo sapiens
uguaugcuuuugagagauauuu

SEQ ID NO: 88588 - RNA, 22 nt, Homo sapiens
ugucauggugcucugggcccug

SEQ ID NO: 88589 - RNA, 22 nt, Homo sapiens
ugucauggggaaaauaacagac

SEQ ID NO: 88590 - RNA, 22 nt, Homo sapiens
ugucaugguagcaaggacgagg

SEQ ID NO: 88591 - RNA, 21 nt, Homo sapiens
guaugguugaagugacaagcc

SEQ ID NO: 88592 - RNA, 22 nt, Homo sapiens
uauggacuuuaggauagcuuuu

SEQ ID NO: 88593 - RNA, 22 nt, Homo sapiens
uagcaguaagaaacugacauug

SEQ ID NO: 88594 - RNA, 22 nt, Homo sapiens
uagcaguaccccaguauccugg

SEQ ID NO: 88595 - RNA, 22 nt, Homo sapiens
uagcaguaucccaccaucuggu

SEQ ID NO: 88596 - RNA, 22 nt, Homo sapiens
ucagagcaaagacacuuuauca

SEQ ID NO: 88597 - RNA, 22 nt, Homo sapiens
uccugagacugaggagcuuugg

SEQ ID NO: 88598 - RNA, 22 nt, Homo sapiens
ugagaacauggagaacccccca

SEQ ID NO: 88599 - RNA, 20 nt, Homo sapiens
ugagaacaugugguauuugg

SEQ ID NO: 88600 - RNA, 20 nt, Homo sapiens
ugauaaguugcacuuuccuu

SEQ ID NO: 88601 - RNA, 22 nt, Homo sapiens
ugagaauauuugaagauguuag

SEQ ID NO: 88602 - RNA, 22 nt, Homo sapiens
ugaugguuuuauuaauaggacc

SEQ ID NO: 88603 - RNA, 22 nt, Homo sapiens
agccaguauuuccacagagugg

SEQ ID NO: 88604 - RNA, 22 nt, Homo sapiens
acaagugaauacaggauucucu

SEQ ID NO: 88605 - RNA, 22 nt, Homo sapiens
acccuguugagcaacuggccau

SEQ ID NO: 88606 - RNA, 22 nt, Homo sapiens
acccugugagagaguuaauauu

SEQ ID NO: 88607 - RNA, 22 nt, Homo sapiens
auggauauuuuuugaacauaga

SEQ ID NO: 88608 - RNA, 22 nt, Homo sapiens
auacaagugccauguuggugug

SEQ ID NO: 88609 - RNA, 18 nt, Homo sapiens
gaagaaguaggcauggca

SEQ ID NO: 88610 - RNA, 22 nt, Homo sapiens
gaauaaacuagagaggacugag

SEQ ID NO: 88611 - RNA, 22 nt, Homo sapiens
auucaacuaauuauugaagaug

SEQ ID NO: 88612 - RNA, 22 nt, Homo sapiens
cuagauuauccaacuuauuagc

SEQ ID NO: 88613 - RNA, 22 nt, Homo sapiens
cauggcuuucacaguaaagccu

SEQ ID NO: 88614 - RNA, 22 nt, Homo sapiens
uuaguaguuugauaggaauagc

SEQ ID NO: 88615 - RNA, 22 nt, Homo sapiens
ugucauggauucugagucuggg

SEQ ID NO: 88616 - RNA, 22 nt, Homo sapiens
uguuaaggcagagauaauacau

SEQ ID NO: 88617 - RNA, 21 nt, Homo sapiens
aacagugcugaacagacaccu

SEQ ID NO: 88618 - RNA, 22 nt, Homo sapiens
aacagacugucacauaaaauug

SEQ ID NO: 88619 - RNA, 22 nt, Homo sapiens
aacagcuaguaccaauccacua

SEQ ID NO: 88620 - RNA, 22 nt, Homo sapiens
auacccugucgugagucagaga

SEQ ID NO: 88621 - RNA, 22 nt, Homo sapiens
aguagcauuggggggcauccuc

SEQ ID NO: 88622 - RNA, 16 nt, Homo sapiens
aguaguuuuacagauu

SEQ ID NO: 88623 - RNA, 22 nt, Homo sapiens
agagaacugauuggaugugggc

SEQ ID NO: 88624 - RNA, 22 nt, Homo sapiens
agcauuaguugugaagccuuua

SEQ ID NO: 88625 - RNA, 22 nt, Homo sapiens
agcaguacauaaaaagcauccu

SEQ ID NO: 88626 - RNA, 22 nt, Homo sapiens
agcaguagaauuccugcaucac

SEQ ID NO: 88627 - RNA, 22 nt, Homo sapiens
acaguagaaaacaauggauuug

SEQ ID NO: 88628 - RNA, 20 nt, Homo sapiens
acaguagaagggauuucaaa

SEQ ID NO: 88629 - RNA, 23 nt, Homo sapiens
acugagcaauguuuacauacuug

SEQ ID NO: 88630 - RNA, 18 nt, Homo sapiens
uggauuggaaaaguuccu

SEQ ID NO: 88631 - RNA, 22 nt, Homo sapiens
ugagcagugaguguggugcagg

SEQ ID NO: 88632 - RNA, 23 nt, Homo sapiens
ucaugguagcaccaacaauaacu

SEQ ID NO: 88633 - RNA, 22 nt, Homo sapiens
ucauaggucugagaagaaaaua

SEQ ID NO: 88634 - RNA, 22 nt, Homo sapiens
uuguauaggcucaguaagaauc

SEQ ID NO: 88635 - RNA, 22 nt, Homo sapiens
gagaucaaugggauggaauuga

SEQ ID NO: 88636 - RNA, 22 nt, Homo sapiens
gacagagcaagacccuauuuaa

SEQ ID NO: 88637 - RNA, 22 nt, Homo sapiens
gagaacuaaugguuugauaagg

SEQ ID NO: 88638 - RNA, 23 nt, Homo sapiens
gagaccagcuucagaaagcacga

SEQ ID NO: 88639 - RNA, 22 nt, Homo sapiens
uaguagagauggggcacaugcc

SEQ ID NO: 88640 - RNA, 22 nt, Homo sapiens
uaugacuuuugaauacagaugg

SEQ ID NO: 88641 - RNA, 22 nt, Homo sapiens
uagagauaucaauuucauggug

SEQ ID NO: 88642 - RNA, 22 nt, Homo sapiens
gucauggaacaacuuaaaguca

SEQ ID NO: 88643 - RNA, 19 nt, Homo sapiens
ggucauggagguuguguga

SEQ ID NO: 88644 - RNA, 22 nt, Homo sapiens
ggucauggagcuuuacuuuaug

SEQ ID NO: 88645 - RNA, 22 nt, Homo sapiens
gucaguggagaaaaggacaugu

SEQ ID NO: 88646 - RNA, 22 nt, Homo sapiens
gucauauaggguuuaccuguau

SEQ ID NO: 88647 - RNA, 22 nt, Homo sapiens
guaugguuuauagggaaauugu

SEQ ID NO: 88648 - RNA, 22 nt, Homo sapiens
guagagugcugggcacuggcuc

SEQ ID NO: 88649 - RNA, 22 nt, Homo sapiens
ucaguagagacaggauuucacc

SEQ ID NO: 88650 - RNA, 22 nt, Homo sapiens
ugcaaauguuaggugucauuau

SEQ ID NO: 88651 - RNA, 22 nt, Homo sapiens
ugcaaauguuauuuugguuucu

SEQ ID NO: 88652 - RNA, 22 nt, Homo sapiens
ugaguaugaguucaggaaaggc

SEQ ID NO: 88653 - RNA, 22 nt, Homo sapiens
ggucauggauguuuauaguaca

SEQ ID NO: 88654 - RNA, 22 nt, Homo sapiens
guagaauguauacaguauacag

SEQ ID NO: 88655 - RNA, 22 nt, Homo sapiens
guacccuggaacaacccaauuu

SEQ ID NO: 88656 - RNA, 22 nt, Homo sapiens
gucauggagggacauaacuaac

SEQ ID NO: 88657 - RNA, 22 nt, Homo sapiens
gugagagaaugacuauguguuu

SEQ ID NO: 88658 - RNA, 22 nt, Homo sapiens
uaucaagauggauaaggauaga

SEQ ID NO: 88659 - RNA, 22 nt, Homo sapiens
uaugacuuuggaaaaauuacuu

SEQ ID NO: 88660 - RNA, 22 nt, Homo sapiens
uaugacuuguuuucuggucugc

SEQ ID NO: 88661 - RNA, 22 nt, Homo sapiens
uaugggauuucauuaagugucu

SEQ ID NO: 88662 - RNA, 22 nt, Homo sapiens
uaagacuuuuugggaauauaga

SEQ ID NO: 88663 - RNA, 22 nt, Homo sapiens
gcaagauuguguggcugaagua

SEQ ID NO: 88664 - RNA, 22 nt, Homo sapiens
gaugguuuuuuaagaagagccu

SEQ ID NO: 88665 - RNA, 22 nt, Homo sapiens
gagaacagagauaauuuuacuu

SEQ ID NO: 88666 - RNA, 22 nt, Homo sapiens
gagaucaaugccuauggcuuuc

SEQ ID NO: 88667 - RNA, 22 nt, Homo sapiens
gagaacuaaugauguacuaggc

SEQ ID NO: 88668 - RNA, 22 nt, Homo sapiens
gagaacugagauaagugauauu

SEQ ID NO: 88669 - RNA, 20 nt, Homo sapiens
cagucaugaagaacugugag

SEQ ID NO: 88670 - RNA, 22 nt, Homo sapiens
caguaguagccccuuagaugga

SEQ ID NO: 88671 - RNA, 22 nt, Homo sapiens
cauaaaucuuguugaauagcac

SEQ ID NO: 88672 - RNA, 21 nt, Homo sapiens
cgucauggagauguguuguac

SEQ ID NO: 88673 - RNA, 22 nt, Homo sapiens
auguuugguagugaauauggua

SEQ ID NO: 88674 - RNA, 22 nt, Homo sapiens
auguuugguaagaauauuguua

SEQ ID NO: 88675 - RNA, 22 nt, Homo sapiens
auggcccugaguucaauauauu

SEQ ID NO: 88676 - RNA, 23 nt, Homo sapiens
aagucauggaaucaaaugaggug

SEQ ID NO: 88677 - RNA, 21 nt, Homo sapiens
agagaacugaaacaugugacu

SEQ ID NO: 88678 - RNA, 22 nt, Homo sapiens
agcaacauuguucauaauagcu

SEQ ID NO: 88679 - RNA, 22 nt, Homo sapiens
augacguugugggcucucaagc

SEQ ID NO: 88680 - RNA, 22 nt, Homo sapiens
augcaaaucuuaaguaugugug

SEQ ID NO: 88681 - RNA, 22 nt, Homo sapiens
aucccugagaacuuuuaauguu

SEQ ID NO: 88682 - RNA, 22 nt, Homo sapiens
auagcuguugaauggaauauuc

SEQ ID NO: 88683 - RNA, 22 nt, Homo sapiens
auagcagugugaaaacagacug

SEQ ID NO: 88684 - RNA, 22 nt, Homo sapiens
auaacauccuuucuuaucguug

SEQ ID NO: 88685 - RNA, 22 nt, Homo sapiens
agucauggaucacaguagccuc

SEQ ID NO: 88686 - RNA, 22 nt, Homo sapiens
agucaugggagagaugugaucg

SEQ ID NO: 88687 - RNA, 22 nt, Homo sapiens
agugauggagccaggauuuaau

SEQ ID NO: 88688 - RNA, 22 nt, Homo sapiens
uugacuuagacauucaguugga

SEQ ID NO: 88689 - RNA, 22 nt, Homo sapiens
uggcuccguuguacaggcugga

SEQ ID NO: 88690 - RNA, 22 nt, Sin Nombre virus
uauaagaucacauuugauguug

SEQ ID NO: 88691 - RNA, 19 nt, Homo sapiens
aaguacuugucuuuugaag

SEQ ID NO: 88692 - RNA, 20 nt, Homo sapiens
aagugcaucguugugucugc

SEQ ID NO: 88693 - RNA, 22 nt, Homo sapiens
aagcuacauuuuauuuauguca

SEQ ID NO: 88694 - RNA, 22 nt, Homo sapiens
auaaagguaauaauaguugcau

SEQ ID NO: 88695 - RNA, 22 nt, Homo sapiens
agauacaucuaugugucugugu

SEQ ID NO: 88696 - RNA, 22 nt, Homo sapiens
uggaaguauagauaauugaaag

SEQ ID NO: 88697 - RNA, 22 nt, Homo sapiens
uggaaguaaccaugaauggaau

SEQ ID NO: 88698 - RNA, 22 nt, Homo sapiens
uggaaguaaucaugagguagca

SEQ ID NO: 88699 - RNA, 22 nt, Homo sapiens
uuaauguaauugauugauugac

SEQ ID NO: 88700 - RNA, 22 nt, Homo sapiens
uuacugcauaauuccugggaag

SEQ ID NO: 88701 - RNA, 22 nt, Homo sapiens
uuauguaggcuauagcucugca

SEQ ID NO: 88702 - RNA, 21 nt, Homo sapiens
aagcacauugaguguguguga

SEQ ID NO: 88703 - RNA, 22 nt, Homo sapiens
uuuugguguauuguauaaggua

SEQ ID NO: 88704 - RNA, 22 nt, Homo sapiens
uuuuggcucuugguaggucaga

SEQ ID NO: 88705 - RNA, 22 nt, Homo sapiens
uauugcacuuuuccauaggagu

SEQ ID NO: 88706 - RNA, 22 nt, Homo sapiens
uauugcacuccagccuuggcaa

SEQ ID NO: 88707 - RNA, 20 nt, Homo sapiens
uacugcacuuuccucauggu

SEQ ID NO: 88708 - RNA, 22 nt, Homo sapiens
uacugcacuugaccuccugggc

SEQ ID NO: 88709 - RNA, 22 nt, Homo sapiens
uaggaaguacaucucagaaucu

SEQ ID NO: 88710 - RNA, 22 nt, Homo sapiens
uuuggcuguuucuggacuaaga

SEQ ID NO: 88711 - RNA, 22 nt, Homo sapiens
uugaguuugaguauucuaaagc

SEQ ID NO: 88712 - RNA, 21 nt, Homo sapiens
uuuugcacacuaugcagcuuu

SEQ ID NO: 88713 - RNA, 22 nt, Homo sapiens
gaaguaauaaauggauucuuaa

SEQ ID NO: 88714 - RNA, 22 nt, Homo sapiens
gauggcaugugcugccaccaag

SEQ ID NO: 88715 - RNA, 22 nt, Homo sapiens
aguacaucuggcuggauagaua

SEQ ID NO: 88716 - RNA, 22 nt, Homo sapiens
agguuaugauuguagagcgagg

SEQ ID NO: 88717 - RNA, 22 nt, Homo sapiens
agguuaugauuauagagcgagg

SEQ ID NO: 88718 - RNA, 22 nt, Homo sapiens
aucaaaugcuggcagagugccu

SEQ ID NO: 88719 - RNA, 23 nt, Homo sapiens
aggaaguaacuaucuuuucuguc

SEQ ID NO: 88720 - RNA, 22 nt, Homo sapiens
ugauggcaauggcauucauuuu

SEQ ID NO: 88721 - RNA, 22 nt, Homo sapiens
ugcagcauguaggcacguuauu

SEQ ID NO: 88722 - RNA, 18 nt, Homo sapiens
ugcagcaucaguacccag

SEQ ID NO: 88723 - RNA, 22 nt, Homo sapiens
ugacauuacagucacuugcugu

SEQ ID NO: 88724 - RNA, 22 nt, Homo sapiens
ucgcaguuaauaaugaugugcg

SEQ ID NO: 88725 - RNA, 22 nt, Homo sapiens
uagugcacuacuugugggaaug

SEQ ID NO: 88726 - RNA, 17 nt, Homo sapiens
uauagcacuucucacau

SEQ ID NO: 88727 - RNA, 22 nt, Homo sapiens
uaucauuguguuauuucuucca

SEQ ID NO: 88728 - RNA, 22 nt, Homo sapiens
uaugcacuauggaaguagcuca

SEQ ID NO: 88729 - RNA, 22 nt, Homo sapiens
uaugcagacauuguuccaacca

SEQ ID NO: 88730 - RNA, 22 nt, Homo sapiens
uaaguacaugcuagauggaaug

SEQ ID NO: 88731 - RNA, 22 nt, Homo sapiens
uaaugcacucgaaucauggaau

SEQ ID NO: 88732 - RNA, 22 nt, Homo sapiens
uacugcacuccaggcucaccug

SEQ ID NO: 88733 - RNA, 22 nt, Homo sapiens
uacugcacuccagcuuaggaga

SEQ ID NO: 88734 - RNA, 22 nt, Homo sapiens
uacugcacuggaggccucagau

SEQ ID NO: 88735 - RNA, 22 nt, Homo sapiens
uacugcacucuagccuggguga

SEQ ID NO: 88736 - RNA, 22 nt, Homo sapiens
uacugcacuccagccugggaga

SEQ ID NO: 88737 - RNA, 22 nt, Homo sapiens
uacugcacuccagccuggguga

SEQ ID NO: 88738 - RNA, 22 nt, Homo sapiens
guaugcacauauguguauguau

SEQ ID NO: 88739 - RNA, 22 nt, Homo sapiens
ggaaguuaauacagauagagua

SEQ ID NO: 88740 - RNA, 22 nt, Homo sapiens
guuaugcagcuuagaaaaugaa

SEQ ID NO: 88741 - RNA, 22 nt, Homo sapiens
guuaugcagcaauugauaaucu

SEQ ID NO: 88742 - RNA, 22 nt, Homo sapiens
uuauugcacuccagccugggua

SEQ ID NO: 88743 - RNA, 16 nt, Homo sapiens
uuauugcauucuucuc

SEQ ID NO: 88744 - RNA, 22 nt, Homo sapiens
uuaugcuguuuucuggagauuu

SEQ ID NO: 88745 - RNA, 22 nt, Homo sapiens
uuuuugaguaaauauaaauugu

SEQ ID NO: 88746 - RNA, 22 nt, Homo sapiens
auaugcacaguggaguacuauu

SEQ ID NO: 88747 - RNA, 22 nt, Homo sapiens
augcacauauguacugcccuau

SEQ ID NO: 88748 - RNA, 22 nt, Homo sapiens
augcacaucagcuccagggacc

SEQ ID NO: 88749 - RNA, 22 nt, Homo sapiens
aaguaucaggaauaguuauugg

SEQ ID NO: 88750 - RNA, 22 nt, Homo sapiens
aagugcauguauuaguguaguc

SEQ ID NO: 88751 - RNA, 22 nt, Homo sapiens
uuugugugugauuauaaaaggu

SEQ ID NO: 88752 - RNA, 22 nt, Homo sapiens
auggcauugaagaguugucccu

SEQ ID NO: 88753 - RNA, 23 nt, Homo sapiens
gaguacauuaaaagcccagacug

SEQ ID NO: 88754 - RNA, 22 nt, Homo sapiens
guuuuuggggucacuauuaccg

SEQ ID NO: 88755 - RNA, 22 nt, Homo sapiens
guacaugcauaguuuauuucug

SEQ ID NO: 88756 - RNA, 22 nt, Homo sapiens
gggaucauuuuucauccuacag

SEQ ID NO: 88757 - RNA, 22 nt, Homo sapiens
gcaccacugcacucucagcuug

SEQ ID NO: 88758 - RNA, 22 nt, Homo sapiens
ugcauuaucagauguuugcuuu

SEQ ID NO: 88759 - RNA, 20 nt, Homo sapiens
uggaaguaagaauauaggug

SEQ ID NO: 88760 - RNA, 22 nt, Homo sapiens
uggaaguagauagauuguguca

SEQ ID NO: 88761 - RNA, 22 nt, Homo sapiens
uggcagacaaauuugagcauau

SEQ ID NO: 88762 - RNA, 21 nt, Homo sapiens
ucacaucguuuagcugugccu

SEQ ID NO: 88763 - RNA, 22 nt, Homo sapiens
uauugcacuccucaugcauuug

SEQ ID NO: 88764 - RNA, 22 nt, Homo sapiens
uacugcacuccaaccugagaga

SEQ ID NO: 88765 - RNA, 22 nt, Homo sapiens
uacugcacauaugaagguuccc

SEQ ID NO: 88766 - RNA, 22 nt, Homo sapiens
uacugcacuccacccuggguga

SEQ ID NO: 88767 - RNA, 22 nt, Homo sapiens
uacugcacuccagccucgguga

SEQ ID NO: 88768 - RNA, 22 nt, Homo sapiens
uacugcacuccagccuugccaa

SEQ ID NO: 88769 - RNA, 20 nt, Homo sapiens
uacugcacuccauccugggu

SEQ ID NO: 88770 - RNA, 22 nt, Homo sapiens
uaaugcacuuuccuccaaggcu

SEQ ID NO: 88771 - RNA, 22 nt, Homo sapiens
uauggcacuaguacuggaaagc

SEQ ID NO: 88772 - RNA, 22 nt, Homo sapiens
uaugcacaugugccugggugug

SEQ ID NO: 88773 - RNA, 22 nt, Homo sapiens
uauagcacugaccuuccaggac

SEQ ID NO: 88774 - RNA, 22 nt, Homo sapiens
cauuuugcaguuucugucucca

SEQ ID NO: 88775 - RNA, 22 nt, Homo sapiens
cauuugcacugagacucagcuu

SEQ ID NO: 88776 - RNA, 22 nt, Homo sapiens
cauaaugcuaagagcugccccu

SEQ ID NO: 88777 - RNA, 22 nt, Homo sapiens
uuaugcaucuuccacacucauu

SEQ ID NO: 88778 - RNA, 21 nt, Homo sapiens
uuauaguggcaugauuuauaa

SEQ ID NO: 88779 - RNA, 22 nt, Homo sapiens
ugacaucguugccauguuaugc

SEQ ID NO: 88780 - RNA, 22 nt, Homo sapiens
agacacugaaauguauugaaga

SEQ ID NO: 88781 - RNA, 22 nt, Homo sapiens
aguaccauuacucacuuauuuu

SEQ ID NO: 88782 - RNA, 22 nt, Homo sapiens
aggaaguaauaaguuugguucu

SEQ ID NO: 88783 - RNA, 22 nt, Homo sapiens
agcuuuuugggcagcuauugac

SEQ ID NO: 88784 - RNA, 22 nt, Homo sapiens
auaugcacuauacacacguaua

SEQ ID NO: 88785 - RNA, 22 nt, Homo sapiens
ucacugugagaguuuauccugu

SEQ ID NO: 88786 - RNA, 22 nt, Homo sapiens
ucacugugugucucuguaucug

SEQ ID NO: 88787 - RNA, 22 nt, Homo sapiens
cuacaguagagaggauguagaa

SEQ ID NO: 88788 - RNA, 22 nt, Homo sapiens
aauaagcugagagaauucuaca

SEQ ID NO: 88789 - RNA, 22 nt, Homo sapiens
uacaauagugacaaaucagcau

SEQ ID NO: 88790 - RNA, 22 nt, Homo sapiens
ugugaacauuuuguauauauua

SEQ ID NO: 88791 - RNA, 22 nt, Homo sapiens
ugagaauauuuuccaugucuca

SEQ ID NO: 88792 - RNA, 22 nt, Homo sapiens
augauacuggcuucauagaaug

SEQ ID NO: 88793 - RNA, 22 nt, Homo sapiens
auguguauuaccucgauuguga

SEQ ID NO: 88794 - RNA, 22 nt, Homo sapiens
auugcaauuaguccauagaguu

SEQ ID NO: 88795 - RNA, 22 nt, Homo sapiens
aucauggaguauuugcaagucu

SEQ ID NO: 88796 - RNA, 22 nt, Homo sapiens
agcaacauuguucauaauagcu

SEQ ID NO: 88797 - RNA, 22 nt, Homo sapiens
aguccaguguuaugaucaguag

SEQ ID NO: 88798 - RNA, 22 nt, Homo sapiens
aaagcagcaggugguuuucaau

SEQ ID NO: 88799 - RNA, 22 nt, Homo sapiens
aaguaaacauugagagacaaga

SEQ ID NO: 88800 - RNA, 22 nt, Homo sapiens
ugagaugauagauauguuaauu

SEQ ID NO: 88801 - RNA, 22 nt, Homo sapiens
uugugaauggugccgcgauaaa

SEQ ID NO: 88802 - RNA, 22 nt, Homo sapiens
uuggcuguguuuauaugcugga

SEQ ID NO: 88803 - RNA, 22 nt, Homo sapiens
uuaguaguuugauaggaauagc

SEQ ID NO: 88804 - RNA, 22 nt, Homo sapiens
ugugaauguaagaaaauccaac

SEQ ID NO: 88805 - RNA, 21 nt, Homo sapiens
uagcuacacugugauucaugg

SEQ ID NO: 88806 - RNA, 23 nt, Homo sapiens
uauaugugucuaggagcuauggu

SEQ ID NO: 88807 - RNA, 22 nt, Homo sapiens
uagcaacauucagcucagguac

SEQ ID NO: 88808 - RNA, 22 nt, Homo sapiens
uaugugguuaauaggaauuugu

SEQ ID NO: 88809 - RNA, 22 nt, Homo sapiens
gugaaaagaugagcaccauaca

SEQ ID NO: 88810 - RNA, 22 nt, Homo sapiens
gauaaagauagcaauagggaca

SEQ ID NO: 88811 - RNA, 22 nt, Homo sapiens
ggagaugauuaugaaucacuua

SEQ ID NO: 88812 - RNA, 22 nt, Homo sapiens
ggcaacaauuccuacuucuuuu

SEQ ID NO: 88813 - RNA, 22 nt, Homo sapiens
gagcuacauggauagucugcau

SEQ ID NO: 88814 - RNA, 22 nt, Homo sapiens
gagaacagagauaauuuuacuu

SEQ ID NO: 88815 - RNA, 22 nt, Homo sapiens
cuguaugugagaaauaauaagu

SEQ ID NO: 88816 - RNA, 22 nt, Homo sapiens
caugcauuggucuauuauguga

SEQ ID NO: 88817 - RNA, 22 nt, Homo sapiens
cagagcaaugcuuuugcuuuga

SEQ ID NO: 88818 - RNA, 22 nt, Homo sapiens
uugauauguguauagcaugugg

SEQ ID NO: 88819 - RNA, 22 nt, Homo sapiens
uugugaaugaugccgcaauaaa

SEQ ID NO: 88820 - RNA, 22 nt, Homo sapiens
uugugaauggugcugcaguaaa

SEQ ID NO: 88821 - RNA, 22 nt, Homo sapiens
uugugaauggugccucaguaaa

SEQ ID NO: 88822 - RNA, 22 nt, Homo sapiens
uagagguauguauaguauucuu

SEQ ID NO: 88823 - RNA, 23 nt, Homo sapiens
uagcaacaguuggaggugaggua

SEQ ID NO: 88824 - RNA, 22 nt, Homo sapiens
uaaguaguauaagguuuuuuga

SEQ ID NO: 88825 - RNA, 22 nt, Homo sapiens
uauuagguugguggaaaaguaa

SEQ ID NO: 88826 - RNA, 21 nt, Homo sapiens
uauagcagcacgauuuauaau

SEQ ID NO: 88827 - RNA, 23 nt, Homo sapiens
ggaaugaaaccugguuaugauau

SEQ ID NO: 88828 - RNA, 22 nt, Homo sapiens
guaaguagcuuuagauauaaau

SEQ ID NO: 88829 - RNA, 22 nt, Homo sapiens
ucauugguucuggguguuguug

SEQ ID NO: 88830 - RNA, 20 nt, Homo sapiens
ucagugcagauuguccaagu

SEQ ID NO: 88831 - RNA, 22 nt, Homo sapiens
ugagguauuuuguuaugcagcc

SEQ ID NO: 88832 - RNA, 22 nt, Homo sapiens
agagcaaugggugaauauuaaa

SEQ ID NO: 88833 - RNA, 19 nt, Homo sapiens
accuguagaaaguacaaca

SEQ ID NO: 88834 - RNA, 22 nt, Homo sapiens
aaucuguagaaggugcacauuc

SEQ ID NO: 88835 - RNA, 21 nt, Homo sapiens
agguaguuuuccuuuuggagu

SEQ ID NO: 88836 - RNA, 22 nt, Homo sapiens
auguaguaugaagaagaugcuu

SEQ ID NO: 88837 - RNA, 22 nt, Homo sapiens
augagguaguagaaagucaggu

SEQ ID NO: 88838 - RNA, 22 nt, Homo sapiens
augcauaugucuuuauaguggc

SEQ ID NO: 88839 - RNA, 17 nt, Homo sapiens
augugaauguucaaaua

SEQ ID NO: 88840 - RNA, 22 nt, Homo sapiens
cagauguaguauuuuagugaaa

SEQ ID NO: 88841 - RNA, 20 nt, Homo sapiens
cagagcaaagcaguccuggc

SEQ ID NO: 88842 - RNA, 22 nt, Homo sapiens
aauuaguaaccuaauuccaucu

SEQ ID NO: 88843 - RNA, 22 nt, Homo sapiens
aauguguuuugaaaucaggaag

SEQ ID NO: 88844 - RNA, 22 nt, Homo sapiens
auacauguucaagggcauauau

SEQ ID NO: 88845 - RNA, 22 nt, Homo sapiens
aguagcauuggggggcauccuc

SEQ ID NO: 88846 - RNA, 16 nt, Homo sapiens
aguaguuuuacagauu

SEQ ID NO: 88847 - RNA, 22 nt, Homo sapiens
gaguaacagcauaaauuuguga

SEQ ID NO: 88848 - RNA, 22 nt, Homo sapiens
gagauaguguggguacagcuau

SEQ ID NO: 88849 - RNA, 22 nt, Homo sapiens
auguggugguagccaggacagg

SEQ ID NO: 88850 - RNA, 22 nt, Homo sapiens
caguaguagccccuuagaugga

SEQ ID NO: 88851 - RNA, 21 nt, Homo sapiens
ugcauuggagaauguuucuca

SEQ ID NO: 88852 - RNA, 22 nt, Homo sapiens
ugaguaugaguucaggaaaggc

SEQ ID NO: 88853 - RNA, 22 nt, Homo sapiens
ugauaugucacuugaucauggu

SEQ ID NO: 88854 - RNA, 22 nt, Homo sapiens
guacaguaguaaaagugaauga

SEQ ID NO: 88855 - RNA, 22 nt, Homo sapiens
guacaguacugaaugaauguau

SEQ ID NO: 88856 - RNA, 18 nt, Homo sapiens
gugcaaugaauagcagag

SEQ ID NO: 88857 - RNA, 22 nt, Homo sapiens
guguaaaucaaucuguugucuu

SEQ ID NO: 88858 - RNA, 22 nt, Homo sapiens
uacaguagagaucagcaaacua

SEQ ID NO: 88859 - RNA, 22 nt, Homo sapiens
uagcaguauugaaagaugaggg

SEQ ID NO: 88860 - RNA, 22 nt, Homo sapiens
uagugguaguagcaguaauauu

SEQ ID NO: 88861 - RNA, 22 nt, Homo sapiens
uagguaguuacacagcaaugua

SEQ ID NO: 88862 - RNA, 22 nt, Homo sapiens
uagguagaacccagaaaucuga

SEQ ID NO: 88863 - RNA, 22 nt, Homo sapiens
ugugcaaucagcuucauuacau

SEQ ID NO: 88864 - RNA, 18 nt, Homo sapiens
ugugcaauauuaaccacc

SEQ ID NO: 88865 - RNA, 22 nt, Homo sapiens
uguaugcuuuugagagauauuu

SEQ ID NO: 88866 - RNA, 22 nt, Homo sapiens
ugugaugugaugagaaguuccu

SEQ ID NO: 88867 - RNA, 22 nt, Homo sapiens
uugaccaaagaagagucauugc

SEQ ID NO: 88868 - RNA, 22 nt, Homo sapiens
uugguauguaauuuauauugua

SEQ ID NO: 88869 - RNA, 22 nt, Homo sapiens
uuguaaucaacacaucauuggg

SEQ ID NO: 88870 - RNA, 23 nt, Homo sapiens
auauaguagaugugcaguaacau

SEQ ID NO: 88871 - RNA, 22 nt, Homo sapiens
aucagugcauguuuguugagcu

SEQ ID NO: 88872 - RNA, 22 nt, Homo sapiens
auacagguauacaaugcauaau

SEQ ID NO: 88873 - RNA, 22 nt, Homo sapiens
auacuagucaagaauguaugag

SEQ ID NO: 88874 - RNA, 22 nt, Homo sapiens
agcagauguuuagugagcgccu

SEQ ID NO: 88875 - RNA, 22 nt, Homo sapiens
aaagucuagaggaucaugugug

SEQ ID NO: 88876 - RNA, 23 nt, Homo sapiens
ucaguagucauugggaaagugug

SEQ ID NO: 88877 - RNA, 19 nt, Homo sapiens
ucaguagugcacauaagcc

SEQ ID NO: 88878 - RNA, 21 nt, Homo sapiens
uccugagagaggaguaacucu

SEQ ID NO: 88879 - RNA, 22 nt, Homo sapiens
ugaguauguuuagaaguaaagg

SEQ ID NO: 88880 - RNA, 22 nt, Homo sapiens
ugauaugaaucaaucacucuuc

SEQ ID NO: 88881 - RNA, 22 nt, Homo sapiens
ugauaugucccucgacaucagg

SEQ ID NO: 88882 - RNA, 20 nt, Homo sapiens
uuauagcuacaucuugacug

SEQ ID NO: 88883 - RNA, 22 nt, Homo sapiens
uuguauguaaccauuuggcaaa

SEQ ID NO: 88884 - RNA, 22 nt, Homo sapiens
uugucaaugggugagugcagag

SEQ ID NO: 88885 - RNA, 22 nt, Homo sapiens
gauauguguaucuauguacaug

SEQ ID NO: 88886 - RNA, 22 nt, Homo sapiens
uaugccucuucauaaaguauga

SEQ ID NO: 88887 - RNA, 22 nt, Homo sapiens
uaugagguagguaugacuauca

SEQ ID NO: 88888 - RNA, 18 nt, Homo sapiens
uaauaacugugaccuuga

SEQ ID NO: 88889 - RNA, 22 nt, Homo sapiens
uaaguaguguugagacaaguuu

SEQ ID NO: 88890 - RNA, 22 nt, Homo sapiens
uaaguaaaugaaagguugauuu

SEQ ID NO: 88891 - RNA, 22 nt, Homo sapiens
guagaauguauacaguauacag

SEQ ID NO: 88892 - RNA, 22 nt, Homo sapiens
gucauugguucuguuuauguga

SEQ ID NO: 88893 - RNA, 22 nt, Homo sapiens
uaaguaaaugaaagguugauuu

SEQ ID NO: 88894 - RNA, 22 nt, Homo sapiens
uagagugcugucaaagacuugu

SEQ ID NO: 88895 - RNA, 22 nt, Homo sapiens
uaugaaucugagagaucuggaa

SEQ ID NO: 88896 - RNA, 22 nt, Homo sapiens
uaggucacugcucugugucuaa

SEQ ID NO: 88897 - RNA, 22 nt, Homo sapiens
uaguaaacagcucugccacaau

SEQ ID NO: 88898 - RNA, 22 nt, Homo sapiens
gaucacaugggagaaugagagu

SEQ ID NO: 88899 - RNA, 22 nt, Homo sapiens
gagaucauugugggccaagcug

SEQ ID NO: 88900 - RNA, 22 nt, Homo sapiens
gagauaguguggguacagcuau

SEQ ID NO: 88901 - RNA, 19 nt, Homo sapiens
gcagagaugugguagcuug

SEQ ID NO: 88902 - RNA, 22 nt, Homo sapiens
cugaucuguuauacuuuucuau

SEQ ID NO: 88903 - RNA, 22 nt, Homo sapiens
cugaugaaguauuuguucugga

SEQ ID NO: 88904 - RNA, 22 nt, Homo sapiens
cugagguauaucccauuagaag

SEQ ID NO: 88905 - RNA, 22 nt, Homo sapiens
cuucaccaguuuggcagucuca

SEQ ID NO: 88906 - RNA, 22 nt, Homo sapiens
cuuccugaguccugggcucaca

SEQ ID NO: 88907 - RNA, 22 nt, Homo sapiens
cagcacauuacaaguacuuggu

SEQ ID NO: 88908 - RNA, 22 nt, Homo sapiens
auucaaagugcauguucccacu

SEQ ID NO: 88909 - RNA, 22 nt, Homo sapiens
ccauugcacucuggccuaggug

SEQ ID NO: 88910 - RNA, 22 nt, Homo sapiens
ccauugcacuucagccuaggug

SEQ ID NO: 88911 - RNA, 23 nt, Homo sapiens
ccauugcacuccagccucaguga

SEQ ID NO: 88912 - RNA, 22 nt, Homo sapiens
cuagucacaggaguugaaggau

SEQ ID NO: 88913 - RNA, 22 nt, Homo sapiens
ccuggaucauugucauucccaa

SEQ ID NO: 88914 - RNA, 22 nt, Homo sapiens
uuugcagagacuuguuaggaau

SEQ ID NO: 88915 - RNA, 20 nt, Homo sapiens
uuugcagaaucuaagaagag

SEQ ID NO: 88916 - RNA, 18 nt, Homo sapiens
uuugguccuuuauaaaca

SEQ ID NO: 88917 - RNA, 22 nt, Homo sapiens
uuuggccauaauuuuaauuggc

SEQ ID NO: 88918 - RNA, 22 nt, Homo sapiens
uugcagagccccugcaaggguc

SEQ ID NO: 88919 - RNA, 22 nt, Homo sapiens
uugaaggaggugcucacucucg

SEQ ID NO: 88920 - RNA, 22 nt, Homo sapiens
uucugcacaucgaucacaagau

SEQ ID NO: 88921 - RNA, 21 nt, Homo sapiens
uguaacugcaaaccucagauu

SEQ ID NO: 88922 - RNA, 22 nt, Homo sapiens
uggaggacugcagaacugaggc

SEQ ID NO: 88923 - RNA, 20 nt, Homo sapiens
uggucaccuucaggagguuc

SEQ ID NO: 88924 - RNA, 22 nt, Homo sapiens
ucauuggauggaaugcucugua

SEQ ID NO: 88925 - RNA, 22 nt, Homo sapiens
ucauugcauuccagcccaagca

SEQ ID NO: 88926 - RNA, 22 nt, Homo sapiens
ucauugcacucccagacacccu

SEQ ID NO: 88927 - RNA, 22 nt, Homo sapiens
ucagaugaugucccuguucuaa

SEQ ID NO: 88928 - RNA, 22 nt, Homo sapiens
ugaaguaauguuuuauucuauu

SEQ ID NO: 88929 - RNA, 22 nt, Homo sapiens
ucugguggugaugagagacagu

SEQ ID NO: 88930 - RNA, 22 nt, Homo sapiens
aaagugaauguaucccguaagu

SEQ ID NO: 88931 - RNA, 20 nt, Homo sapiens
aagcaagcauuugcaaucau

SEQ ID NO: 88932 - RNA, 22 nt, Homo sapiens
acuggcaauggcagaaauaguu

SEQ ID NO: 88933 - RNA, 22 nt, Homo sapiens
agcuggucuuggggaagaguag

SEQ ID NO: 88934 - RNA, 22 nt, Homo sapiens
accuugcacugagccgagauug

SEQ ID NO: 88935 - RNA, 22 nt, Homo sapiens
acaagcacaaaugcauagaugg

SEQ ID NO: 88936 - RNA, 22 nt, Homo sapiens
agucaacaucaugaaguggaaa

SEQ ID NO: 88937 - RNA, 22 nt, Homo sapiens
aucccuuucucuggcuaggggg

SEQ ID NO: 88938 - RNA, 20 nt, Homo sapiens
aucaaagacuuagaggggga

SEQ ID NO: 88939 - RNA, 22 nt, Homo sapiens
aucaaagcagcauggcccaguc

SEQ ID NO: 88940 - RNA, 22 nt, Homo sapiens
aucugugguuguaugcauauua

SEQ ID NO: 88941 - RNA, 22 nt, Homo sapiens
augccacagaaauaaccaaaau

SEQ ID NO: 88942 - RNA, 19 nt, Homo sapiens
augcugguguugcucaaac

SEQ ID NO: 88943 - RNA, 22 nt, Homo sapiens
uuggucugcucugauguuuucu

SEQ ID NO: 88944 - RNA, 21 nt, Homo sapiens
uugagaagaauuagcucuucc

SEQ ID NO: 88945 - RNA, 22 nt, Homo sapiens
uugaaggaacgcuguucccuug

SEQ ID NO: 88946 - RNA, 17 nt, Homo sapiens
uugagaguauaucuuac

SEQ ID NO: 88947 - RNA, 22 nt, Homo sapiens
ugucacugugcagucaugcauu

SEQ ID NO: 88948 - RNA, 22 nt, Homo sapiens
ugugcaaggcucucaaccugug

SEQ ID NO: 88949 - RNA, 22 nt, Homo sapiens
ugugcaugaaauuuaccuuuaa

SEQ ID NO: 88950 - RNA, 22 nt, Homo sapiens
uuagaguguagcaggaagaggc

SEQ ID NO: 88951 - RNA, 22 nt, Homo sapiens
uucacuguagccucagccucuu

SEQ ID NO: 88952 - RNA, 22 nt, Homo sapiens
uucacugugaauaaaggcuccc

SEQ ID NO: 88953 - RNA, 22 nt, Homo sapiens
uuugcagagucuuucgcugggc

SEQ ID NO: 88954 - RNA, 22 nt, Homo sapiens
uaggagcauaggauuguuugag

SEQ ID NO: 88955 - RNA, 22 nt, Homo sapiens
gugaaauauuuaacguccaggu

SEQ ID NO: 88956 - RNA, 22 nt, Homo sapiens
gucuuggagacauugccauuga

SEQ ID NO: 88957 - RNA, 22 nt, Homo sapiens
gcaauggaaucccuugaucaau

SEQ ID NO: 88958 - RNA, 22 nt, Homo sapiens
gcuggcaagaugcugaugcaac

SEQ ID NO: 88959 - RNA, 22 nt, Homo sapiens
ggucuuggagaauuguccuggg

SEQ ID NO: 88960 - RNA, 22 nt, Homo sapiens
ugagucgagauugcgccacugu

SEQ ID NO: 88961 - RNA, 20 nt, Homo sapiens
ugccaagaaaugaggguauu

SEQ ID NO: 88962 - RNA, 22 nt, Homo sapiens
ugcaagaaucagccuaucauua

SEQ ID NO: 88963 - RNA, 22 nt, Homo sapiens
uggcaagcuuuaauugacucuu

SEQ ID NO: 88964 - RNA, 21 nt, Homo sapiens
uggagugcaacacuagguaua

SEQ ID NO: 88965 - RNA, 22 nt, Homo sapiens
uggaaguaaccaugaauggaau

SEQ ID NO: 88966 - RNA, 22 nt, Homo sapiens
ucauucacucccuugaaguuag

SEQ ID NO: 88967 - RNA, 22 nt, Homo sapiens
ucauugcauguuaauuaaacag

SEQ ID NO: 88968 - RNA, 22 nt, Homo sapiens
ucacuggagauagcaaucuggu

SEQ ID NO: 88969 - RNA, 22 nt, Homo sapiens
ucacuggagguuccugaaguuc

SEQ ID NO: 88970 - RNA, 18 nt, Homo sapiens
ucacauggccgagagaga

SEQ ID NO: 88971 - RNA, 22 nt, Homo sapiens
ucacauucaauuguaauccccg

SEQ ID NO: 88972 - RNA, 22 nt, Homo sapiens
caccacauuccauugaucaggc

SEQ ID NO: 88973 - RNA, 22 nt, Homo sapiens
caucacuguugguacaaguaau

SEQ ID NO: 88974 - RNA, 22 nt, Homo sapiens
auugaacuguuggagagguuuu

SEQ ID NO: 88975 - RNA, 22 nt, Homo sapiens
gagagugcuuggcaucugcuga

SEQ ID NO: 88976 - RNA, 22 nt, Homo sapiens
gagaucuuggccaaguuucuua

SEQ ID NO: 88977 - RNA, 22 nt, Homo sapiens
gagaucuuuaagaacuacugcu

SEQ ID NO: 88978 - RNA, 22 nt, Homo sapiens
gagaugguguuccacugccagu

SEQ ID NO: 88979 - RNA, 22 nt, Homo sapiens
cuguccugcagagucagaauga

SEQ ID NO: 88980 - RNA, 22 nt, Homo sapiens
augcaacugcacuccagccugg

SEQ ID NO: 88981 - RNA, 22 nt, Homo sapiens
auccauugucuaaugcuaagau

SEQ ID NO: 88982 - RNA, 22 nt, Homo sapiens
aucacuggucaugagagaagua

SEQ ID NO: 88983 - RNA, 22 nt, Homo sapiens
aucaccuuucccuuucugaauc

SEQ ID NO: 88984 - RNA, 22 nt, Homo sapiens
aucuuugauuagacugauggau

SEQ ID NO: 88985 - RNA, 22 nt, Homo sapiens
aucugcuccuggugaggguuuc

SEQ ID NO: 88986 - RNA, 22 nt, Homo sapiens
aauacucuauaagggaagcugu

SEQ ID NO: 88987 - RNA, 22 nt, Homo sapiens
agcacauuaguaucuaagaaca

SEQ ID NO: 88988 - RNA, 19 nt, Homo sapiens
acauugcauuuguaggcuu

SEQ ID NO: 88989 - RNA, 23 nt, Homo sapiens
acugagcaauguuuacauacuug

SEQ ID NO: 88990 - RNA, 22 nt, Homo sapiens
cacugcauuacucaugagcaug

SEQ ID NO: 88991 - RNA, 22 nt, Homo sapiens
cacugcauccuugaccuucugg

SEQ ID NO: 88992 - RNA, 22 nt, Homo sapiens
auuuggccuuuguaugcaguau

SEQ ID NO: 88993 - RNA, 22 nt, Homo sapiens
auucacuguggguccuuuggau

SEQ ID NO: 88994 - RNA, 22 nt, Homo sapiens
ccauugcacuccagccuaggca

SEQ ID NO: 88995 - RNA, 23 nt, Homo sapiens
cucccugaacaugacacaccaga

SEQ ID NO: 88996 - RNA, 22 nt, Homo sapiens
gcaggaaucuugagaaggauuc

SEQ ID NO: 88997 - RNA, 22 nt, Homo sapiens
gaggaucucuugagcccagaag

SEQ ID NO: 88998 - RNA, 22 nt, Homo sapiens
gagcacugaauacugugguggu

SEQ ID NO: 88999 - RNA, 22 nt, Homo sapiens
cuggcucuguuagaagaaccag

SEQ ID NO: 89000 - RNA, 22 nt, Homo sapiens
cugugcauguuguccaauucuu

SEQ ID NO: 89001 - RNA, 22 nt, Homo sapiens
augaaguauuaggacacauuua

SEQ ID NO: 89002 - RNA, 17 nt, Homo sapiens
augaacucaucguucuu

SEQ ID NO: 89003 - RNA, 23 nt, Homo sapiens
augaacucaucauuuuuuauggc

SEQ ID NO: 89004 - RNA, 22 nt, Homo sapiens
auggaucauauucuugaggagg

SEQ ID NO: 89005 - RNA, 22 nt, Homo sapiens
auggacucauugaauuaagucc

SEQ ID NO: 89006 - RNA, 22 nt, Homo sapiens
aucaaaguaucucaauauggua

SEQ ID NO: 89007 - RNA, 22 nt, Homo sapiens
aaggagcagagagcccuguuuc

SEQ ID NO: 89008 - RNA, 23 nt, Homo sapiens
agcaccuuuccuccacuaucugc

SEQ ID NO: 89009 - RNA, 21 nt, Homo sapiens
aggcuguuguuuugggaugga

SEQ ID NO: 89010 - RNA, 22 nt, Homo sapiens
aggagcacuggccuuggaguca

SEQ ID NO: 89011 - RNA, 22 nt, Homo sapiens
aggacacugauagucuuuggca

SEQ ID NO: 89012 - RNA, 22 nt, Homo sapiens
aggagcacaauggucaugugga

SEQ ID NO: 89013 - RNA, 22 nt, Homo sapiens
ugagcagaaagcugcaaggucg

SEQ ID NO: 89014 - RNA, 22 nt, Homo sapiens
ugcagagucuguccugccugcc

SEQ ID NO: 89015 - RNA, 22 nt, Homo sapiens
uggucaugaggugaggcuucuc

SEQ ID NO: 89016 - RNA, 22 nt, Homo sapiens
uggcaugaagaccccauccuuu

SEQ ID NO: 89017 - RNA, 22 nt, Homo sapiens
uggaagauucuagaagauucca

SEQ ID NO: 89018 - RNA, 22 nt, Homo sapiens
ugccauugcacuccagccuggg

SEQ ID NO: 89019 - RNA, 23 nt, Homo sapiens
uggaggacaagcauggauaguga

SEQ ID NO: 89020 - RNA, 22 nt, Homo sapiens
uggcaacuugcaaccucauucu

SEQ ID NO: 89021 - RNA, 22 nt, Homo sapiens
ucacuaggcuggagugcagugg

SEQ ID NO: 89022 - RNA, 22 nt, Homo sapiens
ucagaugauuccguugacgaga

SEQ ID NO: 89023 - RNA, 19 nt, Homo sapiens
ucaccuugcccugcacaca

SEQ ID NO: 89024 - RNA, 22 nt, Homo sapiens
gcccugagauucuuggauucug

SEQ ID NO: 89025 - RNA, 22 nt, Homo sapiens
gucacugccugaggcugaugca

SEQ ID NO: 89026 - RNA, 22 nt, Homo sapiens
gucacuguggagaagaaagugg

SEQ ID NO: 89027 - RNA, 22 nt, Homo sapiens
uacucugcaguaauuccagccc

SEQ ID NO: 89028 - RNA, 22 nt, Homo sapiens
uuggagagugauauucagaugc

SEQ ID NO: 89029 - RNA, 22 nt, Homo sapiens
uuugagcauuagggcaaaggca

SEQ ID NO: 89030 - RNA, 22 nt, Homo sapiens
cagauaguuguagauaugcagc

SEQ ID NO: 89031 - RNA, 21 nt, Homo sapiens
cacuggguucaggcuugugga

SEQ ID NO: 89032 - RNA, 17 nt, Homo sapiens
cacugggugcaagagga

SEQ ID NO: 89033 - RNA, 21 nt, Homo sapiens
cacauggaggcagagagugua

SEQ ID NO: 89034 - RNA, 22 nt, Homo sapiens
cacugcaguggaagauuaagaa

SEQ ID NO: 89035 - RNA, 22 nt, Homo sapiens
cacugcauccuccaccuccugg

SEQ ID NO: 89036 - RNA, 22 nt, Homo sapiens
cacaaaguagauuagucuucca

SEQ ID NO: 89037 - RNA, 22 nt, Homo sapiens
cuaagggaggaagcugugcagg

SEQ ID NO: 89038 - RNA, 22 nt, Homo sapiens
cuagagagaagcugugugaccu

SEQ ID NO: 89039 - RNA, 20 nt, Homo sapiens
ccagcaucauuagauucugg

SEQ ID NO: 89040 - RNA, 22 nt, Homo sapiens
cuggucaugggggcacccucug

SEQ ID NO: 89041 - RNA, 19 nt, Homo sapiens
cugcaugagacaguugguu

SEQ ID NO: 89042 - RNA, 22 nt, Homo sapiens
cugagguacccacuucaucuca

SEQ ID NO: 89043 - RNA, 22 nt, Homo sapiens
gagcaaugagcugccugcugag

SEQ ID NO: 89044 - RNA, 18 nt, Homo sapiens
gagcaccuuuuuugcaga

SEQ ID NO: 89045 - RNA, 22 nt, Homo sapiens
gagauuaauacacaucaaaugc

SEQ ID NO: 89046 - RNA, 22 nt, Homo sapiens
gagugcaagguuuuucugagug

SEQ ID NO: 89047 - RNA, 22 nt, Homo sapiens
gcauggagaaggggacugauuc

SEQ ID NO: 89048 - RNA, 22 nt, Homo sapiens
gucaagauuuguaggacagaga

SEQ ID NO: 89049 - RNA, 22 nt, Homo sapiens
gucacaggaaacuaauaugcgc

SEQ ID NO: 89050 - RNA, 22 nt, Homo sapiens
gucacuggcugucuuguaugau

SEQ ID NO: 89051 - RNA, 21 nt, Homo sapiens
ggcaugaauggaaaagugaga

SEQ ID NO: 89052 - RNA, 18 nt, Homo sapiens
ucaccuugaugcuggguc

SEQ ID NO: 89053 - RNA, 18 nt, Homo sapiens
ucaccuugugagagagag

SEQ ID NO: 89054 - RNA, 23 nt, Homo sapiens
uaccacauuccuucuuuccuguu

SEQ ID NO: 89055 - RNA, 23 nt, Homo sapiens
uuaguaaacucaaugacaccaca

SEQ ID NO: 89056 - RNA, 22 nt, Homo sapiens
uugagagaaaaaauuuauuggu

SEQ ID NO: 89057 - RNA, 22 nt, Homo sapiens
uugaguagauaccuaggaauag

SEQ ID NO: 89058 - RNA, 22 nt, Homo sapiens
uucacugugaacucauauucag

SEQ ID NO: 89059 - RNA, 22 nt, Homo sapiens
uucacugugcuuaaauucugcu

SEQ ID NO: 89060 - RNA, 22 nt, Homo sapiens
ugagauaggaucuugcucuguu

SEQ ID NO: 89061 - RNA, 23 nt, Homo sapiens
ugacugaguauauguuuggugcu

SEQ ID NO: 89062 - RNA, 22 nt, Homo sapiens
ugacucuagagcugccuguggc

SEQ ID NO: 89063 - RNA, 22 nt, Homo sapiens
ucugacucuggagucucagguu

SEQ ID NO: 89064 - RNA, 22 nt, Homo sapiens
ucacugcacuagguaaugccac

SEQ ID NO: 89065 - RNA, 19 nt, Homo sapiens
ucacuggacagcacacuca

SEQ ID NO: 89066 - RNA, 22 nt, Homo sapiens
ucacuggacucuagccugggug

SEQ ID NO: 89067 - RNA, 20 nt, Homo sapiens
ucacuggagcucauuugauu

SEQ ID NO: 89068 - RNA, 18 nt, Homo sapiens
ucccucagaauuauagaa

SEQ ID NO: 89069 - RNA, 22 nt, Homo sapiens
ucagaucaguuccacaagaacu

SEQ ID NO: 89070 - RNA, 22 nt, Homo sapiens
uggaaguauagauaauugaaag

SEQ ID NO: 89071 - RNA, 21 nt, Homo sapiens
ugcugcacuucuuuugcugug

SEQ ID NO: 89072 - RNA, 22 nt, Homo sapiens
ugcauggauguuugaacacacu

SEQ ID NO: 89073 - RNA, 22 nt, Homo sapiens
ugucuugagagaggacaugacu

SEQ ID NO: 89074 - RNA, 22 nt, Homo sapiens
ugucacugugaguuugacugcu

SEQ ID NO: 89075 - RNA, 22 nt, Homo sapiens
uggccagagggcaauuagcugu

SEQ ID NO: 89076 - RNA, 22 nt, Homo sapiens
ugggaucauuaugcauagugua

SEQ ID NO: 89077 - RNA, 22 nt, Homo sapiens
uggauaguuuacugaagagugg

SEQ ID NO: 89078 - RNA, 22 nt, Homo sapiens
ugggaucauucaaugacgaaau

SEQ ID NO: 89079 - RNA, 22 nt, Homo sapiens
aagcugguuuuauaucugugag

SEQ ID NO: 89080 - RNA, 22 nt, Homo sapiens
aaaggauucuaauggaaaugcu

SEQ ID NO: 89081 - RNA, 22 nt, Homo sapiens
agcucauugcuguccuggagga

SEQ ID NO: 89082 - RNA, 22 nt, Homo sapiens
agcgacauugguugcuuugguu

SEQ ID NO: 89083 - RNA, 23 nt, Homo sapiens
agcaaaugcucuagcacuccaac

SEQ ID NO: 89084 - RNA, 22 nt, Homo sapiens
agauggugugcuaggaaaugua

SEQ ID NO: 89085 - RNA, 22 nt, Homo sapiens
acuuugcuuaucccaggcacug

SEQ ID NO: 89086 - RNA, 22 nt, Homo sapiens
accauugcacuccaaccugggc

SEQ ID NO: 89087 - RNA, 22 nt, Homo sapiens
aucauggaguauuugcaagucu

SEQ ID NO: 89088 - RNA, 22 nt, Homo sapiens
augaacucaucauuuuuauggc

SEQ ID NO: 89089 - RNA, 22 nt, Homo sapiens
augaccuuguccucagugucau

SEQ ID NO: 89090 - RNA, 22 nt, Homo sapiens
auucacugugcuuggccaaauu

SEQ ID NO: 89091 - RNA, 22 nt, Homo sapiens
augaucuguagaacuaguccuu

SEQ ID NO: 89092 - RNA, 22 nt, Homo sapiens
auucuauaguccuaggauuggg

SEQ ID NO: 89093 - RNA, 22 nt, Homo sapiens
uugaaagcuaucucaaaucgcu

SEQ ID NO: 89094 - RNA, 22 nt, Homo sapiens
uuuaaagcuaaaauauguuuau

SEQ ID NO: 89095 - RNA, 22 nt, Homo sapiens
uauauaagcugaugagccacaa

SEQ ID NO: 89096 - RNA, 22 nt, Homo sapiens
ggcaaguugcuauucuuuaaug

SEQ ID NO: 89097 - RNA, 22 nt, Homo sapiens
uuuaaagcacggaguuuguggc

SEQ ID NO: 89098 - RNA, 22 nt, Homo sapiens
uuuaaagcaugacgagaagaag

SEQ ID NO: 89099 - RNA, 22 nt, Homo sapiens
uugccaauauuuuacugagaag

SEQ ID NO: 89100 - RNA, 22 nt, Homo sapiens
uuauaaacaugaagauuugggg

SEQ ID NO: 89101 - RNA, 22 nt, Homo sapiens
uaacagcucuacagcugcucuu

SEQ ID NO: 89102 - RNA, 22 nt, Homo sapiens
cugugccaagcuugcgaugugc

SEQ ID NO: 89103 - RNA, 22 nt, Homo sapiens
agcagcuuugaucugaaugauu

SEQ ID NO: 89104 - RNA, 22 nt, Homo sapiens
agcagcuuugcauggccuguga

SEQ ID NO: 89105 - RNA, 21 nt, Homo sapiens
agcagcuuugguugaagcaga

SEQ ID NO: 89106 - RNA, 22 nt, Homo sapiens
cagcuugugguauugcugguug

SEQ ID NO: 89107 - RNA, 22 nt, Homo sapiens
uuuaaagcuccaagcaugucug

SEQ ID NO: 89108 - RNA, 22 nt, Homo sapiens
aaguugcuuuagguaagucaau

SEQ ID NO: 89109 - RNA, 22 nt, Homo sapiens
agcagcuuugcauggccugugg

SEQ ID NO: 89110 - RNA, 20 nt, Homo sapiens
ucaugccacugcgcuccagc

SEQ ID NO: 89111 - RNA, 22 nt, Homo sapiens
uuaaagcgacucucaugccuca

SEQ ID NO: 89112 - RNA, 22 nt, Homo sapiens
uuugccaaugggaauuuuccua

SEQ ID NO: 89113 - RNA, 22 nt, Homo sapiens
uauagcagugaguauugacuaa

SEQ ID NO: 89114 - RNA, 22 nt, Homo sapiens
uauacagcaaguuacugugcug

SEQ ID NO: 89115 - RNA, 22 nt, Homo sapiens
uauaacaaugcaagaauggccu

SEQ ID NO: 89116 - RNA, 22 nt, Homo sapiens
uauuccauuugugaaaggaagu

SEQ ID NO: 89117 - RNA, 22 nt, Homo sapiens
caucacagcaaguagggagugg

SEQ ID NO: 89118 - RNA, 19 nt, Homo sapiens
caguaucauugcacauagu

SEQ ID NO: 89119 - RNA, 22 nt, Homo sapiens
gauauguaguaguugaaaaaga

SEQ ID NO: 89120 - RNA, 22 nt, Homo sapiens
uugcauauguugaaccaagcgu

SEQ ID NO: 89121 - RNA, 22 nt, Homo sapiens
uuacaucaucacauuaguuugc

SEQ ID NO: 89122 - RNA, 22 nt, Homo sapiens
ugcauauguucaaaguauucug

SEQ ID NO: 89123 - RNA, 22 nt, Homo sapiens
aauuaguaaccuaauuccaucu

SEQ ID NO: 89124 - RNA, 22 nt, Homo sapiens
accuuuacaacuuguuagagua

SEQ ID NO: 89125 - RNA, 19 nt, Homo sapiens
acagugucucuauaaugau

SEQ ID NO: 89126 - RNA, 21 nt, Homo sapiens
uguauacauggaagaaugguc

SEQ ID NO: 89127 - RNA, 22 nt, Homo sapiens
uuuuguacgccuguguccauca

SEQ ID NO: 89128 - RNA, 22 nt, Homo sapiens
uuuuguacaacagcucugggga

SEQ ID NO: 89129 - RNA, 22 nt, Homo sapiens
cauacagcuaguaaguguaaga

SEQ ID NO: 89130 - RNA, 22 nt, Homo sapiens
auuacauagucaaggugucuca

SEQ ID NO: 89131 - RNA, 22 nt, Homo sapiens
cuguuugaggguuugcuuucag

SEQ ID NO: 89132 - RNA, 22 nt, Homo sapiens
gauguguuuccaggauuuguuu

SEQ ID NO: 89133 - RNA, 22 nt, Homo sapiens
agcauagugccuugaaaacaau

SEQ ID NO: 89134 - RNA, 22 nt, Homo sapiens
agcaacauuguucauaauagcu

SEQ ID NO: 89135 - RNA, 22 nt, Homo sapiens
agcaacaucagcagcaggaaaa

SEQ ID NO: 89136 - RNA, 19 nt, Homo sapiens
augacauuuggggguggac

SEQ ID NO: 89137 - RNA, 22 nt, Homo sapiens
agucaaaugcuuauguauaaag

SEQ ID NO: 89138 - RNA, 22 nt, Homo sapiens
agucacagugaccuugucugac

SEQ ID NO: 89139 - RNA, 22 nt, Homo sapiens
ucacaugucagccguggggaag

SEQ ID NO: 89140 - RNA, 22 nt, Homo sapiens
acacuuucuggagcugcacaua

SEQ ID NO: 89141 - RNA, 22 nt, Homo sapiens
acauguagacaacggacaaagu

SEQ ID NO: 89142 - RNA, 22 nt, Homo sapiens
acaugacauugggguggggaua

SEQ ID NO: 89143 - RNA, 22 nt, Homo sapiens
acauaugaguacaugugccaug

SEQ ID NO: 89144 - RNA, 22 nt, Homo sapiens
uaacauagucauauacuugcuu

SEQ ID NO: 89145 - RNA, 16 nt, Homo sapiens
ggcauguaauaagcaa

SEQ ID NO: 89146 - RNA, 22 nt, Homo sapiens
ucaccuuacuugcuucugaacu

SEQ ID NO: 89147 - RNA, 22 nt, Homo sapiens
ucagcagucacuccuaugacaa

SEQ ID NO: 89148 - RNA, 22 nt, Homo sapiens
ucaguaguuuuuuuacuaggug

SEQ ID NO: 89149 - RNA, 22 nt, Homo sapiens
ugacaugagauuugggaggggc

SEQ ID NO: 89150 - RNA, 22 nt, Homo sapiens
ucuuuuguucuauucaggccuu

SEQ ID NO: 89151 - RNA, 22 nt, Homo sapiens
ugaucugucacuuaucacauuu

SEQ ID NO: 89152 - RNA, 22 nt, Homo sapiens
ugcauauguugagaugcauauu

SEQ ID NO: 89153 - RNA, 22 nt, Homo sapiens
ugcauaugucuuuauaguagca

SEQ ID NO: 89154 - RNA, 22 nt, Homo sapiens
ugcauaugucuuuauagcagca

SEQ ID NO: 89155 - RNA, 22 nt, Homo sapiens
uucagcacugaaaauaugucau

SEQ ID NO: 89156 - RNA, 22 nt, Homo sapiens
uugcauauguugaaccagccuu

SEQ ID NO: 89157 - RNA, 22 nt, Homo sapiens
uugcauauucucugaggcagga

SEQ ID NO: 89158 - RNA, 22 nt, Homo sapiens
uuuguacugagccaagauggua

SEQ ID NO: 89159 - RNA, 22 nt, Homo sapiens
uuuguacuugguguucuggaaa

SEQ ID NO: 89160 - RNA, 18 nt, Homo sapiens
uuugugcuccacaaagga

SEQ ID NO: 89161 - RNA, 22 nt, Homo sapiens
guauacaguugacccuugaacc

SEQ ID NO: 89162 - RNA, 22 nt, Homo sapiens
gucuggcacagggaaaguacaa

SEQ ID NO: 89163 - RNA, 22 nt, Homo sapiens
uaucaagauggauaaggauaga

SEQ ID NO: 89164 - RNA, 23 nt, Homo sapiens
cuuuguacagcuugacuacuggg

SEQ ID NO: 89165 - RNA, 22 nt, Homo sapiens
cuaacaacacagcagauuagaa

SEQ ID NO: 89166 - RNA, 22 nt, Homo sapiens
uuuaaggcaugccuguacaugc

SEQ ID NO: 89167 - RNA, 19 nt, Homo sapiens
uuuuguacucugugacuug

SEQ ID NO: 89168 - RNA, 22 nt, Homo sapiens
uugacauaaucauuucacagug

SEQ ID NO: 89169 - RNA, 22 nt, Homo sapiens
ugucaucauuugagagaagaaa

SEQ ID NO: 89170 - RNA, 22 nt, Homo sapiens
ugcagcacaguagguuugcaau

SEQ ID NO: 89171 - RNA, 22 nt, Homo sapiens
ugagguagguaccauuaucacu

SEQ ID NO: 89172 - RNA, 22 nt, Homo sapiens
ugagguagaaugauucuaauau

SEQ ID NO: 89173 - RNA, 22 nt, Homo sapiens
auaugcauacccucaccaacua

SEQ ID NO: 89174 - RNA, 22 nt, Homo sapiens
auaagucaauggaacagauuaa

SEQ ID NO: 89175 - RNA, 22 nt, Homo sapiens
aaaggcaucauuaguaccaagu

SEQ ID NO: 89176 - RNA, 22 nt, Homo sapiens
aucucugagauguucugauuuu

SEQ ID NO: 89177 - RNA, 22 nt, Homo sapiens
uaagggcaugcugcaugagagu

SEQ ID NO: 89178 - RNA, 22 nt, Homo sapiens
cugaaagagcauguaacacagu

SEQ ID NO: 89179 - RNA, 22 nt, Homo sapiens
gugagcauaacaacagaguuua

SEQ ID NO: 89180 - RNA, 22 nt, Homo sapiens
gaugcaguaagaaugcauagcg

SEQ ID NO: 89181 - RNA, 19 nt, Homo sapiens
gaugcaaugcacugagguc

SEQ ID NO: 89182 - RNA, 22 nt, Homo sapiens
uaaggcuaggaauucucugaag

SEQ ID NO: 89183 - RNA, 22 nt, Homo sapiens
gagaugugugugauuauauaau

SEQ ID NO: 89184 - RNA, 22 nt, Homo sapiens
augagcagaagagauacacugu

SEQ ID NO: 89185 - RNA, 22 nt, Homo sapiens
cuagaauguauaaaaccaagcu

SEQ ID NO: 89186 - RNA, 22 nt, Homo sapiens
gagacugagucuugcucugucg

SEQ ID NO: 89187 - RNA, 23 nt, Homo sapiens
ucacaguggcugcuuaauuguga

SEQ ID NO: 89188 - RNA, 22 nt, Homo sapiens
guggguaaaucucuguucgagg

SEQ ID NO: 89189 - RNA, 20 nt, Homo sapiens
ugugagacugguuuugaacu

SEQ ID NO: 89190 - RNA, 22 nt, Homo sapiens
cugucaucauuucuaugugcca

SEQ ID NO: 89191 - RNA, 22 nt, Homo sapiens
cacaguguuacugguaugaagu

SEQ ID NO: 89192 - RNA, 22 nt, Homo sapiens
caccuguagucccagcugaggc

SEQ ID NO: 89193 - RNA, 22 nt, Homo sapiens
ggaagccugcacucgggcaggg

SEQ ID NO: 89194 - RNA, 22 nt, Homo sapiens
ucacaccauucuucuacuucag

SEQ ID NO: 89195 - RNA, 22 nt, Homo sapiens
ucacacgugaacucaucacaga

SEQ ID NO: 89196 - RNA, 22 nt, Homo sapiens
cuggaaagcaaagggugcauug

SEQ ID NO: 89197 - RNA, 22 nt, Homo sapiens
ugugacaaauuuaguggacugu

SEQ ID NO: 89198 - RNA, 22 nt, Homo sapiens
aagagguagcagucacaaaaga

SEQ ID NO: 89199 - RNA, 22 nt, Homo sapiens
uucccagagagggacuucuaau

SEQ ID NO: 89200 - RNA, 22 nt, Homo sapiens
aguacaucuggcuggauagaua

SEQ ID NO: 89201 - RNA, 19 nt, Homo sapiens
ugucccagccauagaggca

SEQ ID NO: 89202 - RNA, 20 nt, Homo sapiens
agacagcugcagcccacauc

SEQ ID NO: 89203 - RNA, 20 nt, Homo sapiens
aggagcauuuacauuggcuc

SEQ ID NO: 89204 - RNA, 22 nt, Homo sapiens
ugaaugcaucuagaaauuuauu

SEQ ID NO: 89205 - RNA, 22 nt, Homo sapiens
agcaagaaugaacucucccaga

SEQ ID NO: 89206 - RNA, 22 nt, Homo sapiens
aagcuggagugcaguggugcaa

SEQ ID NO: 89207 - RNA, 21 nt, Homo sapiens
uguagcagcaugauucauagu

SEQ ID NO: 89208 - RNA, 22 nt, Homo sapiens
uggguaauggagaaauaaaucu

SEQ ID NO: 89209 - RNA, 22 nt, Homo sapiens
guucccaguugaaaugauuagu

SEQ ID NO: 89210 - RNA, 22 nt, Homo sapiens
gugagaccaauguacuaccuuc

SEQ ID NO: 89211 - RNA, 17 nt, Homo sapiens
uguggcucuuaugcuga

SEQ ID NO: 89212 - RNA, 22 nt, Homo sapiens
ggaaagacaccuuacuauguua

SEQ ID NO: 89213 - RNA, 22 nt, Homo sapiens
ucagaugaugucccuguucuaa

SEQ ID NO: 89214 - RNA, 22 nt, Homo sapiens
ugagugaaugugaaggcuaggg

SEQ ID NO: 89215 - RNA, 21 nt, Homo sapiens
augaauguaaagaauguggga

SEQ ID NO: 89216 - RNA, 22 nt, Homo sapiens
uagugcugugauuaacauaaug

SEQ ID NO: 89217 - RNA, 22 nt, Homo sapiens
uaaguacaugcuagauggaaug

SEQ ID NO: 89218 - RNA, 20 nt, Homo sapiens
ucaaggcaggaacuguacau

SEQ ID NO: 89219 - RNA, 22 nt, Homo sapiens
ggucaacaucaucaugguaagu

SEQ ID NO: 89220 - RNA, 22 nt, Homo sapiens
aagcagauguguugaaaguacu

SEQ ID NO: 89221 - RNA, 22 nt, Homo sapiens
cugggcaaugcggcuggauaga

SEQ ID NO: 89222 - RNA, 23 nt, Homo sapiens
augaauguaaagaaugugggaag

SEQ ID NO: 89223 - RNA, 22 nt, Homo sapiens
agcaacaucagcagcaggaaaa

SEQ ID NO: 89224 - RNA, 21 nt, Homo sapiens
gagaaucaucauggcugcaua

SEQ ID NO: 89225 - RNA, 22 nt, Homo sapiens
gagcaacaguggcagugguggg

SEQ ID NO: 89226 - RNA, 22 nt, Homo sapiens
auggagacaaauaaaggagagu

SEQ ID NO: 89227 - RNA, 22 nt, Homo sapiens
ucucacaccccucucauauacc

SEQ ID NO: 89228 - RNA, 22 nt, Homo sapiens
gcugacacugggcuauagaucu

SEQ ID NO: 89229 - RNA, 22 nt, Homo sapiens
uacaugugcacaacgugcaggu

SEQ ID NO: 89230 - RNA, 22 nt, Homo sapiens
gugaugcaguacguagaggaga

SEQ ID NO: 89231 - RNA, 21 nt, Homo sapiens
aggcaagauuacuuacgagca

SEQ ID NO: 89232 - RNA, 22 nt, Homo sapiens
uaaggcaaaccuuggcugcagu

SEQ ID NO: 89233 - RNA, 22 nt, Homo sapiens
aagaugcagucauacuggagua

SEQ ID NO: 89234 - RNA, 22 nt, Homo sapiens
uaauccuagcacuuuggaagac

SEQ ID NO: 89235 - RNA, 22 nt, Homo sapiens
gagaccauuuacugccuacuua

SEQ ID NO: 89236 - RNA, 22 nt, Homo sapiens
uagagcacaagguagauuucua

SEQ ID NO: 89237 - RNA, 22 nt, Homo sapiens
uaacaccuuugauagcacuuuu

SEQ ID NO: 89238 - RNA, 22 nt, Homo sapiens
ugagguaggugaagaaugcacg

SEQ ID NO: 89239 - RNA, 22 nt, Homo sapiens
ugagauuguaucugcaaugugu

SEQ ID NO: 89240 - RNA, 22 nt, Homo sapiens
gagcacauguggagagucuggg

SEQ ID NO: 89241 - RNA, 21 nt, Homo sapiens
aggagcauuguugugguggag

SEQ ID NO: 89242 - RNA, 22 nt, Homo sapiens
aagcuggagugcaguggugcga

SEQ ID NO: 89243 - RNA, 22 nt, Homo sapiens
ggcaagaacuucacucacuuuu

SEQ ID NO: 89244 - RNA, 22 nt, Homo sapiens
ggcaagaagaacuauaacuuuu

SEQ ID NO: 89245 - RNA, 22 nt, Homo sapiens
caaaggcuucugaaacugcaga

SEQ ID NO: 89246 - RNA, 22 nt, Homo sapiens
ugaauauguuucuaaaagugca

SEQ ID NO: 89247 - RNA, 22 nt, Homo sapiens
uaucagcagagucauacuucaa

SEQ ID NO: 89248 - RNA, 22 nt, Homo sapiens
uucucaguuccuacuuugguga

SEQ ID NO: 89249 - RNA, 22 nt, Homo sapiens
cugggaucaguucuagucagaa

SEQ ID NO: 89250 - RNA, 22 nt, Homo sapiens
ugagaugugaucaccugaaggg

SEQ ID NO: 89251 - RNA, 22 nt, Homo sapiens
gcgcagugggcugugccaucca

SEQ ID NO: 89252 - RNA, 22 nt, Homo sapiens
ugagauguuuguuucagugccu

SEQ ID NO: 89253 - RNA, 22 nt, Homo sapiens
uugacuuuuauucacucugcua

SEQ ID NO: 89254 - RNA, 22 nt, Homo sapiens
gugagcacugaaagaaggcaag

SEQ ID NO: 89255 - RNA, 22 nt, Homo sapiens
acaauggaauggaguggaaagu

SEQ ID NO: 89256 - RNA, 22 nt, Homo sapiens
ugacaguguccuccuccugaga

SEQ ID NO: 89257 - RNA, 22 nt, Homo sapiens
augagcacuuguuuugggcaca

SEQ ID NO: 89258 - RNA, 22 nt, Homo sapiens
uagucccauaugauuuagugaa

SEQ ID NO: 89259 - RNA, 22 nt, Homo sapiens
cuguaauguaaugagacuacau

SEQ ID NO: 89260 - RNA, 22 nt, Homo sapiens
gagacugagucuugcucuguca

SEQ ID NO: 89261 - RNA, 22 nt, Homo sapiens
gccaacauggcgcuccauucuu

SEQ ID NO: 89262 - RNA, 17 nt, Homo sapiens
guucccaguggcauuug

SEQ ID NO: 89263 - RNA, 22 nt, Homo sapiens
uugagauggugccacuguacuc

SEQ ID NO: 89264 - RNA, 22 nt, Homo sapiens
gaauucugucgcuuacuagaug

SEQ ID NO: 89265 - RNA, 22 nt, Homo sapiens
augcagguguuuugcacugagu

SEQ ID NO: 89266 - RNA, 22 nt, Homo sapiens
uggaaucuagagaaaugcaaac

SEQ ID NO: 89267 - RNA, 21 nt, Homo sapiens
auggaaagacugccucuucaa

SEQ ID NO: 89268 - RNA, 22 nt, Homo sapiens
cacagugaaugucaucauugcc

SEQ ID NO: 89269 - RNA, 22 nt, Homo sapiens
augagaccagcagaaaaccugu

SEQ ID NO: 89270 - RNA, 19 nt, Homo sapiens
ugagaaccucuacagaguc

SEQ ID NO: 89271 - RNA, 22 nt, Homo sapiens
ugagcacauuuacaucaguucc

SEQ ID NO: 89272 - RNA, 19 nt, Homo sapiens
ugugagcauuagcauuuag

SEQ ID NO: 89273 - RNA, 22 nt, Homo sapiens
cagagcacugauacuggguucu

SEQ ID NO: 89274 - RNA, 22 nt, Homo sapiens
aagagcauuggauggggagauu

SEQ ID NO: 89275 - RNA, 22 nt, Homo sapiens
auggagaugugcgaacugagua

SEQ ID NO: 89276 - RNA, 22 nt, Homo sapiens
uagcaugucagucgccacacgu

SEQ ID NO: 89277 - RNA, 22 nt, Homo sapiens
uggaauacaugucgcugagcug

SEQ ID NO: 89278 - RNA, 22 nt, Homo sapiens
ugucaguggucuggaugcagcc

SEQ ID NO: 89279 - RNA, 22 nt, Homo sapiens
ugugaacacagaggcuauggca

SEQ ID NO: 89280 - RNA, 17 nt, Homo sapiens
ucuggcuuucacaccug

SEQ ID NO: 89281 - RNA, 22 nt, Homo sapiens
augccacugcacuucagccugg

SEQ ID NO: 89282 - RNA, 22 nt, Homo sapiens
ugagcacagagccugggguggc

SEQ ID NO: 89283 - RNA, 22 nt, Homo sapiens
gugcacaugcgugcgcacauau

SEQ ID NO: 89284 - RNA, 22 nt, Homo sapiens
agaauguaacucuaugaaggca

SEQ ID NO: 89285 - RNA, 22 nt, Homo sapiens
ucacacugaauuugaagcaaug

SEQ ID NO: 89286 - RNA, 19 nt, Homo sapiens
agugagccaagauccuacc

SEQ ID NO: 89287 - RNA, 22 nt, Homo sapiens
aaagugucuguuccuagcauga

SEQ ID NO: 89288 - RNA, 22 nt, Homo sapiens
uugcagugguuucacuggcaaa

SEQ ID NO: 89289 - RNA, 22 nt, Homo sapiens
uugagauuauuguguuccuuua

SEQ ID NO: 89290 - RNA, 22 nt, Homo sapiens
gugcacaacgugcagguuaguu

SEQ ID NO: 89291 - RNA, 16 nt, Homo sapiens
ucccaccauugcuugu

SEQ ID NO: 89292 - RNA, 22 nt, Homo sapiens
ugagcagagaucuauuacugug

SEQ ID NO: 89293 - RNA, 22 nt, Homo sapiens
ugagauguuccaaugacuauua

SEQ ID NO: 89294 - RNA, 22 nt, Homo sapiens
aucuccaggugccagcugcgcc

SEQ ID NO: 89295 - RNA, 22 nt, Homo sapiens
uggcgagaugcucgugugcaga

SEQ ID NO: 89296 - RNA, 22 nt, Homo sapiens
agcccauguggcugaggcuucu

SEQ ID NO: 89297 - RNA, 22 nt, Homo sapiens
augaaaacaugauuugccuguu

SEQ ID NO: 89298 - RNA, 23 nt, Homo sapiens
gagaccagcuucagaaagcacga

SEQ ID NO: 89299 - RNA, 22 nt, Homo sapiens
guacagugcucacaaugagagc

SEQ ID NO: 89300 - RNA, 22 nt, Homo sapiens
uaagagagcuccaucuuuuccu

SEQ ID NO: 89301 - RNA, 22 nt, Homo sapiens
gaugaggcuagagacaugugua

SEQ ID NO: 89302 - RNA, 22 nt, Homo sapiens
agaugcuguuaucaacuguagc

SEQ ID NO: 89303 - RNA, 23 nt, Homo sapiens
agccuguugccuaggcagcucau

SEQ ID NO: 89304 - RNA, 22 nt, Homo sapiens
uaauucuguauguaucagaguu

SEQ ID NO: 89305 - RNA, 22 nt, Homo sapiens
gaaauggaucagagcaagcuuu

SEQ ID NO: 89306 - RNA, 22 nt, Homo sapiens
uggucagaaaauuacuugauau

SEQ ID NO: 89307 - RNA, 22 nt, Homo sapiens
ugguucaguugcacaggcuguu

SEQ ID NO: 89308 - RNA, 22 nt, Homo sapiens
guggaaucuagagaggcaguag

SEQ ID NO: 89309 - RNA, 22 nt, Homo sapiens
ggagcugugauuugaguccaga

SEQ ID NO: 89310 - RNA, 22 nt, Homo sapiens
acaugacauugggguggggaua

SEQ ID NO: 89311 - RNA, 22 nt, Homo sapiens
uugugaagaaaccagaaaaguu

SEQ ID NO: 89312 - RNA, 22 nt, Homo sapiens
ugacaugaagaaaaacagauuu

SEQ ID NO: 89313 - RNA, 22 nt, Homo sapiens
ugaucuuuuuaauguccauggg

SEQ ID NO: 89314 - RNA, 22 nt, Homo sapiens
ugcaagaaucuuucaggcuagc

SEQ ID NO: 89315 - RNA, 22 nt, Homo sapiens
uggcaagagggaugcaagguuu

SEQ ID NO: 89316 - RNA, 22 nt, Homo sapiens
cugacuaguuuuaaugcagauu

SEQ ID NO: 89317 - RNA, 22 nt, Homo sapiens
uugggagugucucuggacugca

SEQ ID NO: 89318 - RNA, 22 nt, Homo sapiens
uagaaaguagggaagguaggau

SEQ ID NO: 89319 - RNA, 22 nt, Homo sapiens
aauaagcauaguaccugauagg

SEQ ID NO: 89320 - RNA, 22 nt, Homo sapiens
agcagugugaaaauggacuaau

SEQ ID NO: 89321 - RNA, 22 nt, Homo sapiens
uaugagagcugguagguagaga

SEQ ID NO: 89322 - RNA, 22 nt, Homo sapiens
guggguaaaucucuggggcucu

SEQ ID NO: 89323 - RNA, 22 nt, Homo sapiens
acaccauugcauuccagccugg

SEQ ID NO: 89324 - RNA, 22 nt, Homo sapiens
ugugagacugacagggcagggu

SEQ ID NO: 89325 - RNA, 22 nt, Homo sapiens
ugaaaguaauugcaguuuuuac

SEQ ID NO: 89326 - RNA, 22 nt, Homo sapiens
ugagcagaaagcugcaaggucg

SEQ ID NO: 89327 - RNA, 22 nt, Homo sapiens
ugucuagaucugaauguaauug

SEQ ID NO: 89328 - RNA, 22 nt, Homo sapiens
cauggcacuggugggagugucu

SEQ ID NO: 89329 - RNA, 22 nt, Homo sapiens
cauggcacaucuuuucugacua

SEQ ID NO: 89330 - RNA, 22 nt, Homo sapiens
ugugaagaaagucauugguagc

SEQ ID NO: 89331 - RNA, 22 nt, Homo sapiens
gugacuggacucugaagaaaau

SEQ ID NO: 89332 - RNA, 23 nt, Homo sapiens
agccugguuucccugcuucuccc

SEQ ID NO: 89333 - RNA, 22 nt, Homo sapiens
acacaugugcguagacucuuua

SEQ ID NO: 89334 - RNA, 22 nt, Homo sapiens
ugugcacauugugcagguugau

SEQ ID NO: 89335 - RNA, 22 nt, Homo sapiens
ggaucacuugagaccaggaguu

SEQ ID NO: 89336 - RNA, 22 nt, Homo sapiens
gugcaguguuugcauggaauca

SEQ ID NO: 89337 - RNA, 19 nt, Homo sapiens
uagggcacgaggcagaguc

SEQ ID NO: 89338 - RNA, 22 nt, Homo sapiens
gagacugagucuugcuuuguca

SEQ ID NO: 89339 - RNA, 22 nt, Homo sapiens
aggcuuuuguuuuggucucagg

SEQ ID NO: 89340 - RNA, 22 nt, Homo sapiens
aaagugcaguauuugggcagga

SEQ ID NO: 89341 - RNA, 22 nt, Homo sapiens
uuucccagugguacaguuuaua

SEQ ID NO: 89342 - RNA, 22 nt, Homo sapiens
ggcauguguggguuauuaaaga

SEQ ID NO: 89343 - RNA, 22 nt, Homo sapiens
ccuggcaagagacugaagauag

SEQ ID NO: 89344 - RNA, 22 nt, Homo sapiens
aacaggguggugccugguccau

SEQ ID NO: 89345 - RNA, 22 nt, Homo sapiens
ugagaaugacugggcaugcugc

SEQ ID NO: 89346 - RNA, 22 nt, Homo sapiens
ugugaauggugcugccgugaag

SEQ ID NO: 89347 - RNA, 22 nt, Homo sapiens
agagccacauuaaauaugggaa

SEQ ID NO: 89348 - RNA, 22 nt, Homo sapiens
cuggagauauuggaagaaagaa

SEQ ID NO: 89349 - RNA, 22 nt, Homo sapiens
ugacaagaguagagagggugcc

SEQ ID NO: 89350 - RNA, 22 nt, Homo sapiens
gugagcagagaucgcgugauug

SEQ ID NO: 89351 - RNA, 22 nt, Homo sapiens
gcugagaucucuugccugaacu

SEQ ID NO: 89352 - RNA, 23 nt, Homo sapiens
agcaaaugcucuagcacuccaac

SEQ ID NO: 89353 - RNA, 22 nt, Homo sapiens
aagugcuguaugggagccuagg

SEQ ID NO: 89354 - RNA, 22 nt, Homo sapiens
ugaaggcaggagggagaaaagu

SEQ ID NO: 89355 - RNA, 22 nt, Homo sapiens
ucgcaccauugcacuccagcca

SEQ ID NO: 89356 - RNA, 22 nt, Homo sapiens
ugagauguagauauggauuaga

SEQ ID NO: 89357 - RNA, 22 nt, Homo sapiens
uggacagacaagguuauagauc

SEQ ID NO: 89358 - RNA, 22 nt, Homo sapiens
uguggaaauggugcuacgaaca

SEQ ID NO: 89359 - RNA, 22 nt, Homo sapiens
ucaugugaggauaacaauagug

SEQ ID NO: 89360 - RNA, 22 nt, Homo sapiens
augugugcuugauguaaaaagu

SEQ ID NO: 89361 - RNA, 22 nt, Homo sapiens
gagacugagucucacucuguca

SEQ ID NO: 89362 - RNA, 22 nt, Homo sapiens
ggaucacagccagcucccagaa

SEQ ID NO: 89363 - RNA, 22 nt, Homo sapiens
ccaggguugcuuuagauucuga

SEQ ID NO: 89364 - RNA, 22 nt, Homo sapiens
acaccuguggucccaguaacuu

SEQ ID NO: 89365 - RNA, 22 nt, Homo sapiens
uugugaagaugugaagcaagca

SEQ ID NO: 89366 - RNA, 22 nt, Homo sapiens
augagauuguuugugugaaaua

SEQ ID NO: 89367 - RNA, 22 nt, Homo sapiens
gugcacauauggugcauaagug

SEQ ID NO: 89368 - RNA, 22 nt, Homo sapiens
guaucacacuuauugaccugca

SEQ ID NO: 89369 - RNA, 22 nt, Homo sapiens
gagcaaugauugagccacugua

SEQ ID NO: 89370 - RNA, 20 nt, Homo sapiens
gggcaaguaugugggaaguc

SEQ ID NO: 89371 - RNA, 22 nt, Homo sapiens
augccacugcacuucagcuugg

SEQ ID NO: 89372 - RNA, 22 nt, Homo sapiens
ugaauguacuuaacacuggauu

SEQ ID NO: 89373 - RNA, 22 nt, Homo sapiens
ggaaaguaacccauucucuuac

SEQ ID NO: 89374 - RNA, 22 nt, Homo sapiens
agccaagacucuguuccccuug

SEQ ID NO: 89375 - RNA, 22 nt, Homo sapiens
ucuaaagcauccagauugcuuc

SEQ ID NO: 89376 - RNA, 22 nt, Homo sapiens
cuggaaagaaucaggcuaaacu

SEQ ID NO: 89377 - RNA, 22 nt, Homo sapiens
auggcuuuaagagugucugaau

SEQ ID NO: 89378 - RNA, 22 nt, Homo sapiens
uagugcugugauaaacauauau

SEQ ID NO: 89379 - RNA, 22 nt, Homo sapiens
gccaagauuuaauucaucaguu

SEQ ID NO: 89380 - RNA, 22 nt, Homo sapiens
uugaggccugauaacacacuga

SEQ ID NO: 89381 - RNA, 22 nt, Homo sapiens
uggaagcaugcaaucugugggg

SEQ ID NO: 89382 - RNA, 22 nt, Homo sapiens
ucagugauugcuuucauggaaa

SEQ ID NO: 89383 - RNA, 22 nt, Homo sapiens
augccacuguccuccugccuag

SEQ ID NO: 89384 - RNA, 22 nt, Homo sapiens
ugccagaugcuggugugagggg

SEQ ID NO: 89385 - RNA, 20 nt, Homo sapiens
aagcagacauuuggaugaaa

SEQ ID NO: 89386 - RNA, 22 nt, Homo sapiens
ccaguucaaugauauggaaacu

SEQ ID NO: 89387 - RNA, 20 nt, Homo sapiens
ugaauguaauuacagaugua

SEQ ID NO: 89388 - RNA, 22 nt, Homo sapiens
gugacauuauuucagcuacaug

SEQ ID NO: 89389 - RNA, 22 nt, Homo sapiens
guggaaagaacacaaaauuagg

SEQ ID NO: 89390 - RNA, 19 nt, Homo sapiens
ugugaagaaaugcugcaag

SEQ ID NO: 89391 - RNA, 22 nt, Homo sapiens
ucucugaaacucuugacauccu

SEQ ID NO: 89392 - RNA, 22 nt, Homo sapiens
aguaccauuugacaugggaccc

SEQ ID NO: 89393 - RNA, 22 nt, Homo sapiens
aauggagcuguuuggaugacuu

SEQ ID NO: 89394 - RNA, 22 nt, Homo sapiens
uuggaaagagguguuuaugacu

SEQ ID NO: 89395 - RNA, 22 nt, Homo sapiens
uggcaagaagagcaugagacca

SEQ ID NO: 89396 - RNA, 22 nt, Homo sapiens
uagcagcuuuauugagguaaau

SEQ ID NO: 89397 - RNA, 22 nt, Homo sapiens
acacaugcuccacuguggccuc

SEQ ID NO: 89398 - RNA, 22 nt, Homo sapiens
auggaguguggaacugggaauc

SEQ ID NO: 89399 - RNA, 22 nt, Homo sapiens
aaggagcagagagcccuguuuc

SEQ ID NO: 89400 - RNA, 22 nt, Homo sapiens
aggaaauguuggucccauuucu

SEQ ID NO: 89401 - RNA, 22 nt, Homo sapiens
uggaguguguugcagaugaagg

SEQ ID NO: 89402 - RNA, 22 nt, Homo sapiens
ggagugucccaaucucagcuca

SEQ ID NO: 89403 - RNA, 22 nt, Homo sapiens
cugagcaaagaagugauaauga

SEQ ID NO: 89404 - RNA, 22 nt, Homo sapiens
ugggaagagggagcgauuuugg

SEQ ID NO: 89405 - RNA, 22 nt, Homo sapiens
ugaagugaagacucacagaagg

SEQ ID NO: 89406 - RNA, 21 nt, Homo sapiens
gagugcaaauaaagagagggc

SEQ ID NO: 89407 - RNA, 22 nt, Homo sapiens
ucuuugguaugugcaugugcuu

SEQ ID NO: 89408 - RNA, 22 nt, Homo sapiens
auggaaagcuguuccuacacaa

SEQ ID NO: 89409 - RNA, 22 nt, Homo sapiens
agcacgaaaccaaauucuguga

SEQ ID NO: 89410 - RNA, 22 nt, Homo sapiens
acccugucauccacauggugcu

SEQ ID NO: 89411 - RNA, 22 nt, Homo sapiens
uggaguguaaauuaguucagcc

SEQ ID NO: 89412 - RNA, 22 nt, Homo sapiens
aaagagaucuaugggcacuaug

SEQ ID NO: 89413 - RNA, 22 nt, Homo sapiens
ucucugagaccacuccaaacuc

SEQ ID NO: 89414 - RNA, 22 nt, Homo sapiens
agggcacuguagguccugccuc

SEQ ID NO: 89415 - RNA, 22 nt, Homo sapiens
gucaggcaccgauacaguuuuu

SEQ ID NO: 89416 - RNA, 22 nt, Homo sapiens
augagcaucaccagaaucaaua

SEQ ID NO: 89417 - RNA, 22 nt, Homo sapiens
gugaccagaugggcaggggugu

SEQ ID NO: 89418 - RNA, 22 nt, Homo sapiens
ugaaugcaucauguagggcuca

SEQ ID NO: 89419 - RNA, 21 nt, Homo sapiens
ugcaagaaucaggaagcugcc

SEQ ID NO: 89420 - RNA, 22 nt, Homo sapiens
ugacaugagauuugggaggggc

SEQ ID NO: 89421 - RNA, 20 nt, Homo sapiens
augaauguccuugauggcau

SEQ ID NO: 89422 - RNA, 22 nt, Homo sapiens
agggcaagacuuguuaagaaca

SEQ ID NO: 89423 - RNA, 22 nt, Homo sapiens
uuggccccuuucauccacagcu

SEQ ID NO: 89424 - RNA, 22 nt, Homo sapiens
agauggugugcuaggaaaugua

SEQ ID NO: 89425 - RNA, 22 nt, Homo sapiens
gggcaacauugaguacccugaa

SEQ ID NO: 89426 - RNA, 22 nt, Homo sapiens
acacaugugaaaaaaauguuac

SEQ ID NO: 89427 - RNA, 22 nt, Homo sapiens
acaguacaugauaaauaaggua

SEQ ID NO: 89428 - RNA, 22 nt, Homo sapiens
ugagaaacuaaguaaugaguaa

SEQ ID NO: 89429 - RNA, 22 nt, Homo sapiens
agcagugugagaauggacuaau

SEQ ID NO: 89430 - RNA, 18 nt, Homo sapiens
ugggaagaaauucuucuc

SEQ ID NO: 89431 - RNA, 22 nt, Homo sapiens
agcagugucauuuucuggugag

SEQ ID NO: 89432 - RNA, 22 nt, Homo sapiens
aggaggauugcuuucaucuuuu

SEQ ID NO: 89433 - RNA, 22 nt, Homo sapiens
uuggcauagaggcucucaagcu

SEQ ID NO: 89434 - RNA, 22 nt, Homo sapiens
cuggaaaguagacaaucuaaaa

SEQ ID NO: 89435 - RNA, 22 nt, Homo sapiens
cugagaucguggggcugcuguc

SEQ ID NO: 89436 - RNA, 22 nt, Homo sapiens
cuggagauuaaccaauugccau

SEQ ID NO: 89437 - RNA, 22 nt, Homo sapiens
caacacagugaaacccgucucu

SEQ ID NO: 89438 - RNA, 22 nt, Homo sapiens
uucacaguguuucucacgguua

SEQ ID NO: 89439 - RNA, 22 nt, Homo sapiens
cacagagugagacccugucucu

SEQ ID NO: 89440 - RNA, 23 nt, Homo sapiens
aaaugcucucaggugccaguaga

SEQ ID NO: 89441 - RNA, 22 nt, Homo sapiens
ugacauguauuagcucagugcu

SEQ ID NO: 89442 - RNA, 22 nt, Homo sapiens
ugagucccuaagacccucaggu

SEQ ID NO: 89443 - RNA, 22 nt, Homo sapiens
aagugagaugcaguggaguucc

SEQ ID NO: 89444 - RNA, 22 nt, Homo sapiens
uguagacagcacguaguugagu

SEQ ID NO: 89445 - RNA, 22 nt, Homo sapiens
uagagcacauuaucauuuccaa

SEQ ID NO: 89446 - RNA, 22 nt, Homo sapiens
ugggaucaugagcaccgcuucc

SEQ ID NO: 89447 - RNA, 22 nt, Homo sapiens
aagggagcugcauaaucuugug

SEQ ID NO: 89448 - RNA, 19 nt, Homo sapiens
gggcaaaucuggaaauuua

SEQ ID NO: 89449 - RNA, 22 nt, Homo sapiens
ugugaagauggacuaauauagu

SEQ ID NO: 89450 - RNA, 22 nt, Homo sapiens
cugcaauggagaaagugagacu

SEQ ID NO: 89451 - RNA, 22 nt, Homo sapiens
ucugacagugugaauauugacu

SEQ ID NO: 89452 - RNA, 22 nt, Homo sapiens
cuggaaggaaaaacaaccacag

SEQ ID NO: 89453 - RNA, 22 nt, Homo sapiens
cacacugucuuucagaaugguu

SEQ ID NO: 89454 - RNA, 22 nt, Homo sapiens
cuggaguuugaggcugcaguga

SEQ ID NO: 89455 - RNA, 22 nt, Homo sapiens
caaaggcuuccacugcauccuu

SEQ ID NO: 89456 - RNA, 22 nt, Homo sapiens
ggacaagagacugggacacuga

SEQ ID NO: 89457 - RNA, 22 nt, Homo sapiens
uucacugcauuucagccugggc

SEQ ID NO: 89458 - RNA, 22 nt, Homo sapiens
agagcaccauuuagcaagguga

SEQ ID NO: 89459 - RNA, 22 nt, Homo sapiens
ugugaauguaagaaaauccaac

SEQ ID NO: 89460 - RNA, 22 nt, Homo sapiens
augagauuauguaaagagacca

SEQ ID NO: 89461 - RNA, 17 nt, Homo sapiens
agcagcccauaucccca

SEQ ID NO: 89462 - RNA, 22 nt, Homo sapiens
uguaaccauccagagucccagg

SEQ ID NO: 89463 - RNA, 22 nt, Homo sapiens
ugaaaucuuugaugguggcauu

SEQ ID NO: 89464 - RNA, 22 nt, Homo sapiens
uagggcaaggaacaguuaaaaa

SEQ ID NO: 89465 - RNA, 22 nt, Homo sapiens
aaugugcacuauuagggugaua

SEQ ID NO: 89466 - RNA, 19 nt, Homo sapiens
ugagagcacaacugaacaa

SEQ ID NO: 89467 - RNA, 22 nt, Homo sapiens
ucaaugggcuacacauugagug

SEQ ID NO: 89468 - RNA, 22 nt, Homo sapiens
uggcaagagcaaaauguacagu

SEQ ID NO: 89469 - RNA, 22 nt, Homo sapiens
guagcagucacauagcagauug

SEQ ID NO: 89470 - RNA, 22 nt, Homo sapiens
gugugacuagucaugccugaau

SEQ ID NO: 89471 - RNA, 22 nt, Homo sapiens
ugagcagagggagaaguaaauu

SEQ ID NO: 89472 - RNA, 22 nt, Homo sapiens
agacccuguauguguuuaguuu

SEQ ID NO: 89473 - RNA, 22 nt, Homo sapiens
uggcagacaaauuugagcauau

SEQ ID NO: 89474 - RNA, 22 nt, Homo sapiens
agacuagagcagagcccucucu

SEQ ID NO: 89475 - RNA, 18 nt, Homo sapiens
ugcaauggagaugcagcc

SEQ ID NO: 89476 - RNA, 22 nt, Homo sapiens
uaaugcacucgaaucauggaau

SEQ ID NO: 89477 - RNA, 22 nt, Homo sapiens
ucaguggagccucacucugugg

SEQ ID NO: 89478 - RNA, 22 nt, Homo sapiens
caguagcaugccucagaaugag

SEQ ID NO: 89479 - RNA, 21 nt, Homo sapiens
acauguacacauguaugcaca

SEQ ID NO: 89480 - RNA, 22 nt, Homo sapiens
uaaucucagcuacucaggaggc

SEQ ID NO: 89481 - RNA, 22 nt, Homo sapiens
uuuucaguggccauaguggaga

SEQ ID NO: 89482 - RNA, 22 nt, Homo sapiens
gaggagucagacugugcaaggu

SEQ ID NO: 89483 - RNA, 22 nt, Homo sapiens
gugaaugcauuaagaaggggga

SEQ ID NO: 89484 - RNA, 22 nt, Homo sapiens
augccacugcacucuagccugg

SEQ ID NO: 89485 - RNA, 22 nt, Homo sapiens
cugaaauguccaucgacugaug

SEQ ID NO: 89486 - RNA, 18 nt, Homo sapiens
gaaaugccucuugcuuac

SEQ ID NO: 89487 - RNA, 22 nt, Homo sapiens
auggcagaaucaagccgacagc

SEQ ID NO: 89488 - RNA, 22 nt, Homo sapiens
acagagcaaugagcuacggucu

SEQ ID NO: 89489 - RNA, 22 nt, Homo sapiens
uugagauggauagacauagcau

SEQ ID NO: 89490 - RNA, 22 nt, Homo sapiens
ggaaugcagugagcauuagaua

SEQ ID NO: 89491 - RNA, 22 nt, Homo sapiens
ugugagacugguucugaaccca

SEQ ID NO: 89492 - RNA, 22 nt, Homo sapiens
gugagcauaggaggcuucuguu

SEQ ID NO: 89493 - RNA, 22 nt, Homo sapiens
aggcaugguggcacauacaugu

SEQ ID NO: 89494 - RNA, 22 nt, Homo sapiens
caugccacugcacuccaaccug

SEQ ID NO: 89495 - RNA, 22 nt, Homo sapiens
ucugugcauggcagaggaauga

SEQ ID NO: 89496 - RNA, 22 nt, Homo sapiens
ugugaagaugagaugacgcccu

SEQ ID NO: 89497 - RNA, 22 nt, Homo sapiens
agcccagagacuguguaaauuu

SEQ ID NO: 89498 - RNA, 19 nt, Homo sapiens
ugaccagggacagaaacca

SEQ ID NO: 89499 - RNA, 22 nt, Homo sapiens
ugagauguugcucugaaacaag

SEQ ID NO: 89500 - RNA, 22 nt, Homo sapiens
ugagaugagucucgcucuguca

SEQ ID NO: 89501 - RNA, 22 nt, Homo sapiens
uuccugagccuuguaucuagua

SEQ ID NO: 89502 - RNA, 22 nt, Homo sapiens
gaucagagugaaccuuguuaug

SEQ ID NO: 89503 - RNA, 22 nt, Homo sapiens
cuagcagacaugggcugaacca

SEQ ID NO: 89504 - RNA, 22 nt, Homo sapiens
uucacugcacuccagccugggu

SEQ ID NO: 89505 - RNA, 22 nt, Homo sapiens
aagcaggugugggaggaaaugg

SEQ ID NO: 89506 - RNA, 22 nt, Homo sapiens
auggcuuuggucucccagugau

SEQ ID NO: 89507 - RNA, 22 nt, Homo sapiens
cauggcccuggguccauaggaa

SEQ ID NO: 89508 - RNA, 22 nt, Homo sapiens
agaaugauccuucucagaggca

SEQ ID NO: 89509 - RNA, 21 nt, Homo sapiens
gaaauacugccuuaggagcug

SEQ ID NO: 89510 - RNA, 22 nt, Homo sapiens
guacauggaaugaaauucaaaa

SEQ ID NO: 89511 - RNA, 22 nt, Homo sapiens
gaguucaaaucucagcucuguu

SEQ ID NO: 89512 - RNA, 22 nt, Homo sapiens
ugcagugugaaagagccugaca

SEQ ID NO: 89513 - RNA, 22 nt, Homo sapiens
cuucucagugcucaucuuauuu

SEQ ID NO: 89514 - RNA, 22 nt, Homo sapiens
ugcaagacacuguccugggcau

SEQ ID NO: 89515 - RNA, 22 nt, Homo sapiens
ugacauggagguggaggaagau

SEQ ID NO: 89516 - RNA, 20 nt, Homo sapiens
uguacacaguguacccacau

SEQ ID NO: 89517 - RNA, 22 nt, Homo sapiens
cucuuuaguaagcaguugauga

SEQ ID NO: 89518 - RNA, 22 nt, Homo sapiens
guggguaaaucucuguuugagg

SEQ ID NO: 89519 - RNA, 22 nt, Homo sapiens
ugugaacaugacagugggcuag

SEQ ID NO: 89520 - RNA, 22 nt, Homo sapiens
uccuuugguuauaggcaccucu

SEQ ID NO: 89521 - RNA, 22 nt, Homo sapiens
uagugcuguaauucuaaugaaa

SEQ ID NO: 89522 - RNA, 22 nt, Homo sapiens
ugacaggagauuaugugauguu

SEQ ID NO: 89523 - RNA, 22 nt, Homo sapiens
augccacuguuuaugucacuua

SEQ ID NO: 89524 - RNA, 22 nt, Homo sapiens
ucucagcacaaacaaaauugcu

SEQ ID NO: 89525 - RNA, 22 nt, Homo sapiens
uugagauggagucucacgcauu

SEQ ID NO: 89526 - RNA, 22 nt, Homo sapiens
ugagcacaggugcgcgguuacu

SEQ ID NO: 89527 - RNA, 22 nt, Homo sapiens
gagaacuggcugauucaaggac

SEQ ID NO: 89528 - RNA, 22 nt, Homo sapiens
cugacaugcagccacugcaccu

SEQ ID NO: 89529 - RNA, 22 nt, Homo sapiens
ugagccaaguucacaccauugc

SEQ ID NO: 89530 - RNA, 22 nt, Homo sapiens
ugccuacucucugccaggaaug

SEQ ID NO: 89531 - RNA, 22 nt, Homo sapiens
aaagugcacuuggaagagggcc

SEQ ID NO: 89532 - RNA, 22 nt, Homo sapiens
ugugaagauguuucuuaauuga

SEQ ID NO: 89533 - RNA, 22 nt, Homo sapiens
cucuuacaguguguggugaaag

SEQ ID NO: 89534 - RNA, 20 nt, Homo sapiens
ucauacuguggaguaccagg

SEQ ID NO: 89535 - RNA, 23 nt, Homo sapiens
ucccaagauggaccagaccaagg

SEQ ID NO: 89536 - RNA, 22 nt, Homo sapiens
gugaaacuggguggugagagac

SEQ ID NO: 89537 - RNA, 22 nt, Homo sapiens
gcaaaguguuuuccaacuuggu

SEQ ID NO: 89538 - RNA, 22 nt, Homo sapiens
gugugacagcuauagacaugau

SEQ ID NO: 89539 - RNA, 22 nt, Homo sapiens
gcacauggccccaucgugccga

SEQ ID NO: 89540 - RNA, 22 nt, Homo sapiens
cucucugagccauggcugcccu

SEQ ID NO: 89541 - RNA, 22 nt, Homo sapiens
cagagguaagcaagucagcauu

SEQ ID NO: 89542 - RNA, 22 nt, Homo sapiens
augaccagagagugcgcagggu

SEQ ID NO: 89543 - RNA, 23 nt, Homo sapiens
ucacacuuaagagaaaugcagcu

SEQ ID NO: 89544 - RNA, 22 nt, Homo sapiens
gaagaaguacaagacaaauuuu

SEQ ID NO: 89545 - RNA, 22 nt, Homo sapiens
cuagcagacaggcugggagcag

SEQ ID NO: 89546 - RNA, 22 nt, Homo sapiens
augagagcaacaccuucacuug

SEQ ID NO: 89547 - RNA, 22 nt, Homo sapiens
aaagugcaguauuugggcagaa

SEQ ID NO: 89548 - RNA, 19 nt, Homo sapiens
gggaggaugcgucuucagg

SEQ ID NO: 89549 - RNA, 22 nt, Homo sapiens
gagcacugaauacugugguggu

SEQ ID NO: 89550 - RNA, 20 nt, Homo sapiens
ugggaacaugugguauaugg

SEQ ID NO: 89551 - RNA, 22 nt, Homo sapiens
auggagaugaauaucaucuguu

SEQ ID NO: 89552 - RNA, 22 nt, Homo sapiens
gaaaugucugagauguggcuca

SEQ ID NO: 89553 - RNA, 22 nt, Homo sapiens
gagaacugagauaagugauauu

SEQ ID NO: 89554 - RNA, 22 nt, Homo sapiens
ugagcagugaguguggugcagg

SEQ ID NO: 89555 - RNA, 22 nt, Homo sapiens
uucauggaguugagaaggcuaa

SEQ ID NO: 89556 - RNA, 21 nt, Homo sapiens
ugacauguuggugugcugcac

SEQ ID NO: 89557 - RNA, 23 nt, Homo sapiens
ugacagaccuucuggaagaaguc

SEQ ID NO: 89558 - RNA, 22 nt, Homo sapiens
gugcacaaaucuuaaauguaca

SEQ ID NO: 89559 - RNA, 23 nt, Homo sapiens
uggcaagaauucuuaccgugugg

SEQ ID NO: 89560 - RNA, 22 nt, Homo sapiens
ggugaucauugucucuaguaug

SEQ ID NO: 89561 - RNA, 22 nt, Homo sapiens
ucacaggguguuauuagaauua

SEQ ID NO: 89562 - RNA, 22 nt, Homo sapiens
gagacugagucuugcccuguca

SEQ ID NO: 89563 - RNA, 22 nt, Homo sapiens
aagaugcagucauacuggagga

SEQ ID NO: 89564 - RNA, 22 nt, Homo sapiens
ugagauguguccagaucuaguu

SEQ ID NO: 89565 - RNA, 22 nt, Homo sapiens
ugcaaucauuuggaggagaaga

SEQ ID NO: 89566 - RNA, 22 nt, Homo sapiens
gugggguaggguaggacucaac

SEQ ID NO: 89567 - RNA, 17 nt, Homo sapiens
agcauguguuugagauu

SEQ ID NO: 89568 - RNA, 18 nt, Homo sapiens
cuggaaggcuacuacagu

SEQ ID NO: 89569 - RNA, 22 nt, Homo sapiens
aaggcuuuuugcugacguccuu

SEQ ID NO: 89570 - RNA, 22 nt, Homo sapiens
auacagcuaaaauauuaaguua

SEQ ID NO: 89571 - RNA, 22 nt, Homo sapiens
augagauucuuagagaagucug

SEQ ID NO: 89572 - RNA, 20 nt, Homo sapiens
ucacauccucucccaacaug

SEQ ID NO: 89573 - RNA, 22 nt, Homo sapiens
gugcacaacgugcaggcuuguu

SEQ ID NO: 89574 - RNA, 22 nt, Homo sapiens
gugggcaaagcuaguguguaga

SEQ ID NO: 89575 - RNA, 22 nt, Homo sapiens
ggcaaauucuuguaugccuacu

SEQ ID NO: 89576 - RNA, 22 nt, Homo sapiens
uagagcacagugauuagaccua

SEQ ID NO: 89577 - RNA, 22 nt, Homo sapiens
ucugugguuguugcauggaaug

SEQ ID NO: 89578 - RNA, 22 nt, Homo sapiens
augagcagaugcuccugccucu

SEQ ID NO: 89579 - RNA, 21 nt, Homo sapiens
uggaaucuauagaggcaguag

SEQ ID NO: 89580 - RNA, 19 nt, Homo sapiens
acauggauuuugugcaaac

SEQ ID NO: 89581 - RNA, 22 nt, Homo sapiens
aucgcaccauugcacuccagca

SEQ ID NO: 89582 - RNA, 21 nt, Homo sapiens
cacauggaggcagagagugua

SEQ ID NO: 89583 - RNA, 22 nt, Homo sapiens
aggcuuuuggagaacacugcac

SEQ ID NO: 89584 - RNA, 20 nt, Homo sapiens
gugggcaaauccuuuccucu

SEQ ID NO: 89585 - RNA, 22 nt, Homo sapiens
gaggguguuguguugcuuaaua

SEQ ID NO: 89586 - RNA, 22 nt, Homo sapiens
ugaaugcauggggccaagaagg

SEQ ID NO: 89587 - RNA, 22 nt, Homo sapiens
ugccaguguuuuguugaagauu

SEQ ID NO: 89588 - RNA, 22 nt, Homo sapiens
ugggaagaugcugcuucuuccu

SEQ ID NO: 89589 - RNA, 22 nt, Homo sapiens
auggccugaugcaccuguccca

SEQ ID NO: 89590 - RNA, 22 nt, Homo sapiens
cuggaaucuauggauaacaucg

SEQ ID NO: 89591 - RNA, 22 nt, Homo sapiens
gcaugugaauguguaagaaaau

SEQ ID NO: 89592 - RNA, 22 nt, Homo sapiens
aaaggcuucggaucagaaggua

SEQ ID NO: 89593 - RNA, 22 nt, Homo sapiens
uucugauggaguaguccacaga

SEQ ID NO: 89594 - RNA, 22 nt, Homo sapiens
uuacaugagacugucgcuaguu

SEQ ID NO: 89595 - RNA, 22 nt, Homo sapiens
aucagcacugaucauacagcuu

SEQ ID NO: 89596 - RNA, 22 nt, Homo sapiens
cuggaaagcaaguccauugcuc

SEQ ID NO: 89597 - RNA, 22 nt, Homo sapiens
cugaauagagcacacugauggg

SEQ ID NO: 89598 - RNA, 22 nt, Homo sapiens
caugugcaugagcacauacgug

SEQ ID NO: 89599 - RNA, 22 nt, Homo sapiens
augagcuccucaaggucagaga

SEQ ID NO: 89600 - RNA, 22 nt, Homo sapiens
aaucucagagauaucugugucc

SEQ ID NO: 89601 - RNA, 19 nt, Homo sapiens
uuguccccucuaaaucuca

SEQ ID NO: 89602 - RNA, 22 nt, Homo sapiens
uggaagacauugggugaagggu

SEQ ID NO: 89603 - RNA, 22 nt, Homo sapiens
uguggcucuucuguucuccacu

SEQ ID NO: 89604 - RNA, 22 nt, Homo sapiens
uucauguaauauauuucaggcc

SEQ ID NO: 89605 - RNA, 22 nt, Homo sapiens
agcaugauugggguugggcaca

SEQ ID NO: 89606 - RNA, 22 nt, Homo sapiens
augagaugcaagauuagauggg

SEQ ID NO: 89607 - RNA, 22 nt, Homo sapiens
ucauacuguuaaaugguuuagu

SEQ ID NO: 89608 - RNA, 22 nt, Homo sapiens
uucacagucacccuucuccaug

SEQ ID NO: 89609 - RNA, 20 nt, Homo sapiens
aaggcuuucgaguuccaggg

SEQ ID NO: 89610 - RNA, 22 nt, Homo sapiens
gugcacauuguuuaugucuguu

SEQ ID NO: 89611 - RNA, 22 nt, Homo sapiens
uggaaucuacuaaagcaaaauc

SEQ ID NO: 89612 - RNA, 22 nt, Homo sapiens
augccacugcgcucuagccugg

SEQ ID NO: 89613 - RNA, 22 nt, Homo sapiens
aaguaagcauccaauaaauguu

SEQ ID NO: 89614 - RNA, 22 nt, Homo sapiens
uucugugguugaaaggagagau

SEQ ID NO: 89615 - RNA, 22 nt, Homo sapiens
uguacaugggacaggaggagag

SEQ ID NO: 89616 - RNA, 19 nt, Homo sapiens
ucacaggguugacuugagg

SEQ ID NO: 89617 - RNA, 22 nt, Homo sapiens
cagcacauagcaguugcucagu

SEQ ID NO: 89618 - RNA, 22 nt, Homo sapiens
gacagacacaauugauccauga

SEQ ID NO: 89619 - RNA, 22 nt, Homo sapiens
cugagaucaugggucagguggu

SEQ ID NO: 89620 - RNA, 22 nt, Homo sapiens
ugagaugugaagaucacaugaa

SEQ ID NO: 89621 - RNA, 22 nt, Homo sapiens
uggacagagagaccggcauuuu

SEQ ID NO: 89622 - RNA, 22 nt, Homo sapiens
ugaacugagacuagacuuguuc

SEQ ID NO: 89623 - RNA, 22 nt, Homo sapiens
ggcaagugggagggaguguuuc

SEQ ID NO: 89624 - RNA, 22 nt, Homo sapiens
aucuacagccagucugguuugu

SEQ ID NO: 89625 - RNA, 22 nt, Homo sapiens
ugagauguggcuagagagguug

SEQ ID NO: 89626 - RNA, 22 nt, Homo sapiens
cucuggauauuccugucuaaaa

SEQ ID NO: 89627 - RNA, 22 nt, Homo sapiens
auaaagccaugagcuugagaug

SEQ ID NO: 89628 - RNA, 22 nt, Homo sapiens
ugagcagugagugugcugcagg

SEQ ID NO: 89629 - RNA, 22 nt, Homo sapiens
auggagaugaacuuggguaaag

SEQ ID NO: 89630 - RNA, 22 nt, Homo sapiens
acgugcaugcacacacaugcgc

SEQ ID NO: 89631 - RNA, 22 nt, Homo sapiens
ucauugguagcucauggaaccg

SEQ ID NO: 89632 - RNA, 20 nt, Homo sapiens
gacauggaggaggauuauua

SEQ ID NO: 89633 - RNA, 22 nt, Homo sapiens
ugggaaacauccagcacauacu

SEQ ID NO: 89634 - RNA, 22 nt, Homo sapiens
guacaugcauacaugcacaucu

SEQ ID NO: 89635 - RNA, 22 nt, Homo sapiens
gagaugugguucaaggguguuu

SEQ ID NO: 89636 - RNA, 22 nt, Homo sapiens
uguggaaauaaaagaaagguua

SEQ ID NO: 89637 - RNA, 22 nt, Homo sapiens
cugagcaucauggcagaaucuu

SEQ ID NO: 89638 - RNA, 22 nt, Homo sapiens
gugagcauucaaggaaggagcu

SEQ ID NO: 89639 - RNA, 22 nt, Homo sapiens
augccacugcacuucagccugc

SEQ ID NO: 89640 - RNA, 22 nt, Homo sapiens
aagugacuagacuaugaaaccu

SEQ ID NO: 89641 - RNA, 22 nt, Homo sapiens
guucacacuugcaaccccagca

SEQ ID NO: 89642 - RNA, 23 nt, Homo sapiens
aagugagcuccaauugggugaga

SEQ ID NO: 89643 - RNA, 22 nt, Homo sapiens
accuguauaacaagugggaaau

SEQ ID NO: 89644 - RNA, 22 nt, Homo sapiens
cuggagaucuugacauugaagu

SEQ ID NO: 89645 - RNA, 22 nt, Homo sapiens
ugggaagauucuguguuuuucc

SEQ ID NO: 89646 - RNA, 22 nt, Homo sapiens
acaugcauauguuggaagaaag

SEQ ID NO: 89647 - RNA, 22 nt, Homo sapiens
uaccaugaagguggagagagaa

SEQ ID NO: 89648 - RNA, 22 nt, Homo sapiens
ugagaagacaucuuugcuuugu

SEQ ID NO: 89649 - RNA, 22 nt, Homo sapiens
uuacaccuguaauccagcacuu

SEQ ID NO: 89650 - RNA, 22 nt, Homo sapiens
aggcuuuuggagguggcuuucu

SEQ ID NO: 89651 - RNA, 22 nt, Homo sapiens
gugugcacaaucuggcaugugc

SEQ ID NO: 89652 - RNA, 22 nt, Homo sapiens
acacuggaguuaaaggugauuu

SEQ ID NO: 89653 - RNA, 22 nt, Homo sapiens
cacagugaacaauauccucugu

SEQ ID NO: 89654 - RNA, 22 nt, Homo sapiens
agugaacaaagaagugcagaua

SEQ ID NO: 89655 - RNA, 22 nt, Homo sapiens
acaugcauccaugugaagagac

SEQ ID NO: 89656 - RNA, 22 nt, Homo sapiens
uuggcaacauagugagaccccc

SEQ ID NO: 89657 - RNA, 22 nt, Homo sapiens
ugagaugaguugcgcucugucg

SEQ ID NO: 89658 - RNA, 22 nt, Homo sapiens
uuauuacuccuauuuuguagau

SEQ ID NO: 89659 - RNA, 22 nt, Homo sapiens
gucagaaucucagaugacaacg

SEQ ID NO: 89660 - RNA, 22 nt, Homo sapiens
gagacugaguuuugcucuuguu

SEQ ID NO: 89661 - RNA, 22 nt, Homo sapiens
cucugagccugagguuccuacu

SEQ ID NO: 89662 - RNA, 22 nt, Homo sapiens
ugggaagaagguuuacuugcca

SEQ ID NO: 89663 - RNA, 22 nt, Homo sapiens
ucaugugagcacagagcaagau

SEQ ID NO: 89664 - RNA, 22 nt, Homo sapiens
auaaagccaggagacguaauug

SEQ ID NO: 89665 - RNA, 22 nt, Homo sapiens
uuaaagccauaccugagagagu

SEQ ID NO: 89666 - RNA, 22 nt, Homo sapiens
uggcaagaacugcaauugcuuu

SEQ ID NO: 89667 - RNA, 22 nt, Homo sapiens
uggcaugugugaagugcccagc

SEQ ID NO: 89668 - RNA, 22 nt, Homo sapiens
ucucaguggcacccccaacacc

SEQ ID NO: 89669 - RNA, 22 nt, Homo sapiens
ugugaacaaaauuuguugcaua

SEQ ID NO: 89670 - RNA, 19 nt, Homo sapiens
ggugagaaauuaugggucu

SEQ ID NO: 89671 - RNA, 22 nt, Homo sapiens
gcauggccuuuaaaugucacag

SEQ ID NO: 89672 - RNA, 22 nt, Homo sapiens
uagacccauuguucagagagug

SEQ ID NO: 89673 - RNA, 22 nt, Homo sapiens
auggcagagucagaaagucagg

SEQ ID NO: 89674 - RNA, 22 nt, Homo sapiens
aagcugcauuuucuagaugcuu

SEQ ID NO: 89675 - RNA, 23 nt, Homo sapiens
aggccaguuuuuccugcuugcug

SEQ ID NO: 89676 - RNA, 22 nt, Homo sapiens
accacagugcuuccugcucacg

SEQ ID NO: 89677 - RNA, 22 nt, Homo sapiens
aauacugcuuugauguaagcua

SEQ ID NO: 89678 - RNA, 22 nt, Homo sapiens
cacaaugucugguaggccacuu

SEQ ID NO: 89679 - RNA, 22 nt, Homo sapiens
caugccacugcacgccauccug

SEQ ID NO: 89680 - RNA, 22 nt, Homo sapiens
uucagugagacgaaaacaacaa

SEQ ID NO: 89681 - RNA, 22 nt, Homo sapiens
ugugaauggugcugcaaugaac

SEQ ID NO: 89682 - RNA, 17 nt, Homo sapiens
uuucucagcccucuucu

SEQ ID NO: 89683 - RNA, 22 nt, Homo sapiens
augccacuguacucuagccuag

SEQ ID NO: 89684 - RNA, 22 nt, Homo sapiens
uuggaaaguuguuguaguuauu

SEQ ID NO: 89685 - RNA, 22 nt, Homo sapiens
ugacauggagagagaagccuuu

SEQ ID NO: 89686 - RNA, 22 nt, Homo sapiens
acaugagacuggguuuguaggg

SEQ ID NO: 89687 - RNA, 22 nt, Homo sapiens
gccaagaugcugcccacagaca

SEQ ID NO: 89688 - RNA, 22 nt, Homo sapiens
ugugaauggugcuuccuagaug

SEQ ID NO: 89689 - RNA, 22 nt, Homo sapiens
gagguaggaggauugcuuaagg

SEQ ID NO: 89690 - RNA, 22 nt, Homo sapiens
gagcagacaugaggaccgcugg

SEQ ID NO: 89691 - RNA, 22 nt, Homo sapiens
agagaugaagauggggcucccg

SEQ ID NO: 89692 - RNA, 22 nt, Homo sapiens
uggcaagaacgaaauguagggu

SEQ ID NO: 89693 - RNA, 22 nt, Homo sapiens
caaauccucaccucaucaugaa

SEQ ID NO: 89694 - RNA, 22 nt, Homo sapiens
uacaugugcaggucuguggggg

SEQ ID NO: 89695 - RNA, 22 nt, Homo sapiens
aagcuggauuuaguguggagca

SEQ ID NO: 89696 - RNA, 22 nt, Homo sapiens
ugcauggauguuugaacacacu

SEQ ID NO: 89697 - RNA, 22 nt, Homo sapiens
cugacaagauucaucacucagu

SEQ ID NO: 89698 - RNA, 22 nt, Homo sapiens
ugacaugaugagcaauaauggc

SEQ ID NO: 89699 - RNA, 22 nt, Homo sapiens
uggcuuuuccuugaaucugccu

SEQ ID NO: 89700 - RNA, 22 nt, Homo sapiens
augggcaaauguuggaaauucc

SEQ ID NO: 89701 - RNA, 22 nt, Homo sapiens
augccacugcacuccaaccugg

SEQ ID NO: 89702 - RNA, 22 nt, Homo sapiens
ugugcaugacagcauacaaacg

SEQ ID NO: 89703 - RNA, 22 nt, Homo sapiens
gugagauuagcugagauccuug

SEQ ID NO: 89704 - RNA, 22 nt, Homo sapiens
ugauaagaaauuguucauguag

SEQ ID NO: 89705 - RNA, 22 nt, Homo sapiens
ugugaacagaauuagucaccua

SEQ ID NO: 89706 - RNA, 22 nt, Homo sapiens
gcaguguggguagagggcaaga

SEQ ID NO: 89707 - RNA, 22 nt, Homo sapiens
aagugcacuguaagugcaggau

SEQ ID NO: 89708 - RNA, 22 nt, Homo sapiens
aaugggacugacgccucccaga

SEQ ID NO: 89709 - RNA, 22 nt, Homo sapiens
ugaguagaacuccuggagaugu

SEQ ID NO: 89710 - RNA, 22 nt, Homo sapiens
uucagugguuauuugugagauu

SEQ ID NO: 89711 - RNA, 22 nt, Homo sapiens
caaaggcuguuauaggccagga

SEQ ID NO: 89712 - RNA, 22 nt, Homo sapiens
ugaaauuauucuuaccaaggug

SEQ ID NO: 89713 - RNA, 22 nt, Homo sapiens
gugagcaguguccuugggggca

SEQ ID NO: 89714 - RNA, 22 nt, Homo sapiens
uggacaugaagggcacaggagg

SEQ ID NO: 89715 - RNA, 22 nt, Homo sapiens
gagacugagucucgcucugccg

SEQ ID NO: 89716 - RNA, 22 nt, Homo sapiens
uuacugcucuuuugucaugagu

SEQ ID NO: 89717 - RNA, 22 nt, Homo sapiens
ugagacgaagucuugcucuguu

SEQ ID NO: 89718 - RNA, 22 nt, Homo sapiens
auauggcuaugugagcauacca

SEQ ID NO: 89719 - RNA, 22 nt, Homo sapiens
ugagcagagaucacggcauugu

SEQ ID NO: 89720 - RNA, 17 nt, Homo sapiens
agugagaucauggcuua

SEQ ID NO: 89721 - RNA, 22 nt, Homo sapiens
aaaugccucccauucuacugac

SEQ ID NO: 89722 - RNA, 22 nt, Homo sapiens
ugaguuccuuucccaguccagu

SEQ ID NO: 89723 - RNA, 22 nt, Homo sapiens
gcauggaguggaaauucuuggg

SEQ ID NO: 89724 - RNA, 22 nt, Homo sapiens
ugagacgaagucucguucugua

SEQ ID NO: 89725 - RNA, 22 nt, Homo sapiens
gacagugagaugucaugugaaa

SEQ ID NO: 89726 - RNA, 22 nt, Homo sapiens
gaaagugcugcaaggccaugca

SEQ ID NO: 89727 - RNA, 22 nt, Homo sapiens
uuucaguguggcaggcauagcu

SEQ ID NO: 89728 - RNA, 22 nt, Homo sapiens
ugagacugagucuugcucuauu

SEQ ID NO: 89729 - RNA, 22 nt, Homo sapiens
ccaaaucucauguugaaaugug

SEQ ID NO: 89730 - RNA, 20 nt, Homo sapiens
ugccaagaaaugaggguauu

SEQ ID NO: 89731 - RNA, 22 nt, Homo sapiens
gaaaguguugagauuacaggca

SEQ ID NO: 89732 - RNA, 22 nt, Homo sapiens
ugagcacagcgugugggagagc

SEQ ID NO: 89733 - RNA, 18 nt, Homo sapiens
uagagcacaagcuuuggc

SEQ ID NO: 89734 - RNA, 22 nt, Homo sapiens
aggagcacaggacuuugauuau

SEQ ID NO: 89735 - RNA, 22 nt, Homo sapiens
uccaguggacagacauaccaug

SEQ ID NO: 89736 - RNA, 22 nt, Homo sapiens
cugacguguuuuccagaccuuu

SEQ ID NO: 89737 - RNA, 20 nt, Homo sapiens
guucacaggcuuccuuucag

SEQ ID NO: 89738 - RNA, 20 nt, Homo sapiens
augccacugagcagugguga

SEQ ID NO: 89739 - RNA, 22 nt, Homo sapiens
ugcaaauguuaguaacaccacu

SEQ ID NO: 89740 - RNA, 22 nt, Homo sapiens
ggaucacagagcuugggaaagg

SEQ ID NO: 89741 - RNA, 22 nt, Homo sapiens
ugagaccaacagauuccaguuc

SEQ ID NO: 89742 - RNA, 22 nt, Homo sapiens
aaaugcagauucugcuuagguu

SEQ ID NO: 89743 - RNA, 22 nt, Homo sapiens
ucaugugagcaaguugggcuca

SEQ ID NO: 89744 - RNA, 22 nt, Homo sapiens
ucaguucauggaggugucugcu

SEQ ID NO: 89745 - RNA, 22 nt, Homo sapiens
uguacacauaugugggguacau

SEQ ID NO: 89746 - RNA, 22 nt, Homo sapiens
gugaacagcagaugagugagug

SEQ ID NO: 89747 - RNA, 22 nt, Homo sapiens
gcgugguguuagaaugagaagu

SEQ ID NO: 89748 - RNA, 22 nt, Homo sapiens
uaucucaguguacaggaugaua

SEQ ID NO: 89749 - RNA, 22 nt, Homo sapiens
agcagcucaugccuuugggagg

SEQ ID NO: 89750 - RNA, 22 nt, Homo sapiens
uucacugggugugguggcucac

SEQ ID NO: 89751 - RNA, 22 nt, Homo sapiens
ugugaucaaccugcagggcugg

SEQ ID NO: 89752 - RNA, 22 nt, Homo sapiens
ucaagaccucacauagaggaga

SEQ ID NO: 89753 - RNA, 22 nt, Homo sapiens
ucacgugguucauaaggcagaa

SEQ ID NO: 89754 - RNA, 22 nt, Homo sapiens
aaucacaguuaguaagggagaa

SEQ ID NO: 89755 - RNA, 22 nt, Homo sapiens
ugaaauguugggugauggaauc

SEQ ID NO: 89756 - RNA, 22 nt, Homo sapiens
gaggaucucuugagcccagaag

SEQ ID NO: 89757 - RNA, 22 nt, Homo sapiens
ugcauggaagggagggaaagag

SEQ ID NO: 89758 - RNA, 22 nt, Homo sapiens
aggcaagaaugcuuguuucacc

SEQ ID NO: 89759 - RNA, 22 nt, Homo sapiens
aagcuggauuucgcauccuguu

SEQ ID NO: 89760 - RNA, 21 nt, Homo sapiens
agccaguguuccuuguggcuc

SEQ ID NO: 89761 - RNA, 22 nt, Homo sapiens
cagagcacuaaagguaaaaggc

SEQ ID NO: 89762 - RNA, 20 nt, Homo sapiens
gagaacugagaugcguuuga

SEQ ID NO: 89763 - RNA, 22 nt, Homo sapiens
caccacauuccauugaucaggc

SEQ ID NO: 89764 - RNA, 22 nt, Homo sapiens
cuggaaagaaacccuuaauucu

SEQ ID NO: 89765 - RNA, 22 nt, Homo sapiens
augggcacugauguauucugug

SEQ ID NO: 89766 - RNA, 20 nt, Homo sapiens
cagggcaaugaggagguaaa

SEQ ID NO: 89767 - RNA, 22 nt, Homo sapiens
ucacugggagcauuugagccuu

SEQ ID NO: 89768 - RNA, 22 nt, Homo sapiens
ucccagucuagagccggauugg

SEQ ID NO: 89769 - RNA, 22 nt, Homo sapiens
uggcagaugcucuuggugccca

SEQ ID NO: 89770 - RNA, 19 nt, Homo sapiens
ggucagcaaagucuagcug

SEQ ID NO: 89771 - RNA, 22 nt, Homo sapiens
agugcacuccagccugggcaac

SEQ ID NO: 89772 - RNA, 22 nt, Homo sapiens
uuuuacacaucaccgcucgugu

SEQ ID NO: 89773 - RNA, 22 nt, Homo sapiens
cuuugguugugcucuccacuuu

SEQ ID NO: 89774 - RNA, 19 nt, Homo sapiens
ccuuugguuuccaugacau

SEQ ID NO: 89775 - RNA, 22 nt, Homo sapiens
acacuggguaacauaucuguua

SEQ ID NO: 89776 - RNA, 22 nt, Homo sapiens
aagcaccguugccuccccugca

SEQ ID NO: 89777 - RNA, 22 nt, Homo sapiens
cacccaguaagcaugaggcccu

SEQ ID NO: 89778 - RNA, 22 nt, Homo sapiens
guggcacgaugaucugggcuca

SEQ ID NO: 89779 - RNA, 17 nt, Homo sapiens
gggucaccuugcaggua

SEQ ID NO: 89780 - RNA, 22 nt, Homo sapiens
uuggcagcuguggaaucugggc

SEQ ID NO: 89781 - RNA, 22 nt, Homo sapiens
uggucuccuuuguacccugggc

SEQ ID NO: 89782 - RNA, 22 nt, Homo sapiens
cacccagucaucuuggguuuuu

SEQ ID NO: 89783 - RNA, 22 nt, Homo sapiens
acccaguaacauaugggaggga

SEQ ID NO: 89784 - RNA, 22 nt, Homo sapiens
acccugucauccacauggugcu

SEQ ID NO: 89785 - RNA, 22 nt, Homo sapiens
agugcacugcccgcuuccuguc

SEQ ID NO: 89786 - RNA, 22 nt, Homo sapiens
ucugacucuggagucucagguu

SEQ ID NO: 89787 - RNA, 22 nt, Homo sapiens
caggcaaggugaaguguacugg

SEQ ID NO: 89788 - RNA, 22 nt, Homo sapiens
ggcaacauggugaaacucuguc

SEQ ID NO: 89789 - RNA, 22 nt, Homo sapiens
uacccaguaacaaguauuuugg

SEQ ID NO: 89790 - RNA, 22 nt, Homo sapiens
ucaccuggagacaugaagacug

SEQ ID NO: 89791 - RNA, 22 nt, Homo sapiens
ucaccuggagagcuugcuaaua

SEQ ID NO: 89792 - RNA, 22 nt, Homo sapiens
ggcagcacaauuuucugaugga

SEQ ID NO: 89793 - RNA, 22 nt, Homo sapiens
ucagauugaugcauacuuaaau

SEQ ID NO: 89794 - RNA, 22 nt, Homo sapiens
uugugaauggugccgcaguaaa

SEQ ID NO: 89795 - RNA, 21 nt, Homo sapiens
uucaucuggccguauuccagg

SEQ ID NO: 89796 - RNA, 22 nt, Homo sapiens
gagaacuaaugauguacuaggc

SEQ ID NO: 89797 - RNA, 22 nt, Homo sapiens
aaaagagcugagagguauucuu

SEQ ID NO: 89798 - RNA, 22 nt, Homo sapiens
ggcaagaaaaugcaauuacugu

SEQ ID NO: 89799 - RNA, 22 nt, Homo sapiens
uucuugcacuuaacugacauuc

SEQ ID NO: 89800 - RNA, 22 nt, Homo sapiens
uuggcaauucagauucuuuuau

SEQ ID NO: 89801 - RNA, 22 nt, Homo sapiens
uauagcagugugagaacagacu

SEQ ID NO: 89802 - RNA, 22 nt, Homo sapiens
uauuacugucaauaucacagaa

SEQ ID NO: 89803 - RNA, 22 nt, Homo sapiens
uucuauugguaauauuuucugu

SEQ ID NO: 89804 - RNA, 22 nt, Homo sapiens
gggguaggcuacacugaguucc

SEQ ID NO: 89805 - RNA, 22 nt, Homo sapiens
cugcaauggagaaagugagacu

SEQ ID NO: 89806 - RNA, 22 nt, Homo sapiens
cugcaauguuugaaauggcaaa

SEQ ID NO: 89807 - RNA, 22 nt, Homo sapiens
uugauuuguagaaugccccaac

SEQ ID NO: 89808 - RNA, 22 nt, Homo sapiens
cucaaguacaugggauuacagg

SEQ ID NO: 89809 - RNA, 19 nt, Homo sapiens
uuugaauauaaugcagcua

SEQ ID NO: 89810 - RNA, 20 nt, Homo sapiens
agacagcugcagcccacauc

SEQ ID NO: 89811 - RNA, 22 nt, Homo sapiens
uagagcaaugacucuggaaacc

SEQ ID NO: 89812 - RNA, 22 nt, Homo sapiens
auacugucucuugcuccugccc

SEQ ID NO: 89813 - RNA, 19 nt, Homo sapiens
cucuuuggugucucuucuu

SEQ ID NO: 89814 - RNA, 22 nt, Homo sapiens
uaacauuguugauuauacuaag

SEQ ID NO: 89815 - RNA, 22 nt, Homo sapiens
cacagcuaacaacuguuucuuc

SEQ ID NO: 89816 - RNA, 21 nt, Homo sapiens
uaaaacuguaacuuuguccug

SEQ ID NO: 89817 - RNA, 18 nt, Homo sapiens
uuugccacuucccagaaa

SEQ ID NO: 89818 - RNA, 22 nt, Homo sapiens
agcaacauuuuugaccuuucuu

SEQ ID NO: 89819 - RNA, 22 nt, Homo sapiens
ugacagcaucaggauuggagag

SEQ ID NO: 89820 - RNA, 22 nt, Homo sapiens
aucugugguuguaugcauauua

SEQ ID NO: 89821 - RNA, 22 nt, Homo sapiens
uuggacaagauugcagagaauu

SEQ ID NO: 89822 - RNA, 22 nt, Homo sapiens
gucuuugcuuuuaaccagaggu

SEQ ID NO: 89823 - RNA, 20 nt, Homo sapiens
guaaacucucagcauagaug

SEQ ID NO: 89824 - RNA, 22 nt, Homo sapiens
acagauugcugggccccagccc

SEQ ID NO: 89825 - RNA, 22 nt, Homo sapiens
augugcuuauagguguauguuu

SEQ ID NO: 89826 - RNA, 22 nt, Homo sapiens
uacaccugaguuugugguuuuc

SEQ ID NO: 89827 - RNA, 21 nt, Homo sapiens
uagaugguguucuagagagaa

SEQ ID NO: 89828 - RNA, 22 nt, Homo sapiens
uugugaagaaaccagaaaaguu

SEQ ID NO: 89829 - RNA, 22 nt, Homo sapiens
augcccauuuguuuucugaaag

SEQ ID NO: 89830 - RNA, 22 nt, Homo sapiens
uugcacuauuaguauagauguc

SEQ ID NO: 89831 - RNA, 22 nt, Homo sapiens
uagguuguccaucucuagaagc

SEQ ID NO: 89832 - RNA, 22 nt, Homo sapiens
augaguugaagcuacaagaggc

SEQ ID NO: 89833 - RNA, 22 nt, Homo sapiens
cuaaucugugcauagaagaggc

SEQ ID NO: 89834 - RNA, 22 nt, Homo sapiens
aaguagcuggaugcaguggcac

SEQ ID NO: 89835 - RNA, 22 nt, Homo sapiens
acaauggaauggaguggaaagu

SEQ ID NO: 89836 - RNA, 22 nt, Homo sapiens
ugaauauguuaauuagcaucau

SEQ ID NO: 89837 - RNA, 22 nt, Homo sapiens
acaggagugggauuugaguccu

SEQ ID NO: 89838 - RNA, 22 nt, Homo sapiens
uuccuugagagcuugauaucac

SEQ ID NO: 89839 - RNA, 19 nt, Homo sapiens
augaacucauucuuuuuau

SEQ ID NO: 89840 - RNA, 22 nt, Homo sapiens
uugugaauggaguagcaggauc

SEQ ID NO: 89841 - RNA, 22 nt, Homo sapiens
ugacauguauuagcucagugcu

SEQ ID NO: 89842 - RNA, 22 nt, Homo sapiens
augcaauggaaaggacaauuac

SEQ ID NO: 89843 - RNA, 22 nt, Homo sapiens
aggagaauugguucuucuugau

SEQ ID NO: 89844 - RNA, 22 nt, Homo sapiens
ucucaugaagauagagaauaga

SEQ ID NO: 89845 - RNA, 22 nt, Homo sapiens
uuaguaguuugaguggggguua

SEQ ID NO: 89846 - RNA, 21 nt, Homo sapiens
uuugcauauguugaaccagcc

SEQ ID NO: 89847 - RNA, 22 nt, Homo sapiens
gauuuuuggggaagccucuuau

SEQ ID NO: 89848 - RNA, 22 nt, Homo sapiens
uuugccaauauuuuacugagga

SEQ ID NO: 89849 - RNA, 22 nt, Homo sapiens
uugaguccccacacuggguccc

SEQ ID NO: 89850 - RNA, 22 nt, Homo sapiens
ucagaugauuccguugacgaga

SEQ ID NO: 89851 - RNA, 22 nt, Homo sapiens
gaauacugacuauuucaucugg

SEQ ID NO: 89852 - RNA, 22 nt, Homo sapiens
gaccugagagguacauguauuu

SEQ ID NO: 89853 - RNA, 22 nt, Homo sapiens
uauugcuuuacucucuuauccu

SEQ ID NO: 89854 - RNA, 22 nt, Homo sapiens
agagcaauguuaucagucucug

SEQ ID NO: 89855 - RNA, 22 nt, Homo sapiens
uucaagugaacaaaaugaggag

SEQ ID NO: 89856 - RNA, 22 nt, Homo sapiens
uugccaauauuuuacugagaag

SEQ ID NO: 89857 - RNA, 22 nt, Homo sapiens
auguccaugagcacauguauca

SEQ ID NO: 89858 - RNA, 22 nt, Homo sapiens
uaagguuuuugauaugcugcug

SEQ ID NO: 89859 - RNA, 22 nt, Homo sapiens
cuguaaagaucacagagcuggu

SEQ ID NO: 89860 - RNA, 22 nt, Homo sapiens
aagguuguauuuaauauacugu

SEQ ID NO: 89861 - RNA, 22 nt, Homo sapiens
gcaucacagcuccugugcuggc

SEQ ID NO: 89862 - RNA, 21 nt, Homo sapiens
uucucaggguguguccuaccc

SEQ ID NO: 89863 - RNA, 19 nt, Homo sapiens
cuugccccauucauccucu

SEQ ID NO: 89864 - RNA, 22 nt, Homo sapiens
auccacaugcaguuggaaacag

SEQ ID NO: 89865 - RNA, 22 nt, Homo sapiens
uuacuugagauggggugucacu

SEQ ID NO: 89866 - RNA, 22 nt, Homo sapiens
aggugaaugcucacauucuaau

SEQ ID NO: 89867 - RNA, 22 nt, Homo sapiens
aguacugucugguuaccugaca

SEQ ID NO: 89868 - RNA, 22 nt, Homo sapiens
ucauaguacuuuguuuugaaaa

SEQ ID NO: 89869 - RNA, 22 nt, Homo sapiens
uuugccaaugggaauuuuccua

SEQ ID NO: 89870 - RNA, 22 nt, Homo sapiens
gaagacauuuacaugggagacc

SEQ ID NO: 89871 - RNA, 22 nt, Homo sapiens
uuaagagcauggugccagguug

SEQ ID NO: 89872 - RNA, 22 nt, Homo sapiens
gagauaauuugaaucauggggg

SEQ ID NO: 89873 - RNA, 22 nt, Homo sapiens
uuuguacuugaagaaucuuuau

SEQ ID NO: 89874 - RNA, 22 nt, Homo sapiens
augaucacugugccuccuguga

SEQ ID NO: 89875 - RNA, 22 nt, Homo sapiens
uuggcacuugauaauauucugg

SEQ ID NO: 89876 - RNA, 22 nt, Homo sapiens
auuauguuguauuuccuugcag

SEQ ID NO: 89877 - RNA, 20 nt, Homo sapiens
uggcaugaaauuuuccaagc

SEQ ID NO: 89878 - RNA, 22 nt, Homo sapiens
gacaccugguguggaacuggag

SEQ ID NO: 89879 - RNA, 19 nt, Homo sapiens
aucaccauuauuuggaaca

SEQ ID NO: 89880 - RNA, 22 nt, Homo sapiens
uucaucuggcaauucagagauu

SEQ ID NO: 89881 - RNA, 22 nt, Homo sapiens
aucagcaguguaaaaacggacu

SEQ ID NO: 89882 - RNA, 18 nt, Homo sapiens
ucacagguaaaguugaca

SEQ ID NO: 89883 - RNA, 22 nt, Homo sapiens
uugcaucagcuccugauguacu

SEQ ID NO: 89884 - RNA, 22 nt, Homo sapiens
uccauugucuagauguaacaca

SEQ ID NO: 89885 - RNA, 22 nt, Homo sapiens
agguuguugcaugcuccuuagg

SEQ ID NO: 89886 - RNA, 22 nt, Homo sapiens
cagcagguuuuuaucaguuaag

SEQ ID NO: 89887 - RNA, 22 nt, Homo sapiens
acaucauugggggcuacaggug

SEQ ID NO: 89888 - RNA, 22 nt, Homo sapiens
aaagcuaccagauucuguugga

SEQ ID NO: 89889 - RNA, 21 nt, Homo sapiens
cuuuugcacuccagccugggu

SEQ ID NO: 89890 - RNA, 22 nt, Homo sapiens
auucaagugaugugauucuucu

SEQ ID NO: 89891 - RNA, 22 nt, Homo sapiens
acaagacuucuuguauucuagu

SEQ ID NO: 89892 - RNA, 22 nt, Homo sapiens
agagcaaugggugaauauuaaa

SEQ ID NO: 89893 - RNA, 22 nt, Homo sapiens
guggaagguaaugcagcuuacu

SEQ ID NO: 89894 - RNA, 22 nt, Homo sapiens
cucuggauauuccugucuaaaa

SEQ ID NO: 89895 - RNA, 22 nt, Homo sapiens
uauugcacuccucaugcauuug

SEQ ID NO: 89896 - RNA, 22 nt, Homo sapiens
ugaucugucacuuaucacauuu

SEQ ID NO: 89897 - RNA, 22 nt, Homo sapiens
uuccuugaaacagucaagagaa

SEQ ID NO: 89898 - RNA, 21 nt, Homo sapiens
caaugacacuguagcugugcu

SEQ ID NO: 89899 - RNA, 22 nt, Homo sapiens
auugcacaaagagggaaacuga

SEQ ID NO: 89900 - RNA, 19 nt, Homo sapiens
augaccauuuccauaguau

SEQ ID NO: 89901 - RNA, 22 nt, Homo sapiens
cagcuguuguuccagucuuuua

SEQ ID NO: 89902 - RNA, 22 nt, Homo sapiens
uaaacugcuugaaaugguguca

SEQ ID NO: 89903 - RNA, 22 nt, Homo sapiens
uccacaauggagaagaguauga

SEQ ID NO: 89904 - RNA, 19 nt, Homo sapiens
uuuuccccuuucuuaagac

SEQ ID NO: 89905 - RNA, 22 nt, Homo sapiens
uuuguacucccuuuagauaaaa

SEQ ID NO: 89906 - RNA, 22 nt, Homo sapiens
auuucuacuccuguguccagaa

SEQ ID NO: 89907 - RNA, 22 nt, Homo sapiens
ucucagugaaauaaauuauuuu

SEQ ID NO: 89908 - RNA, 22 nt, Homo sapiens
agguuguguuugugauuagaua

SEQ ID NO: 89909 - RNA, 22 nt, Homo sapiens
auaaguaguaaagcagugacua

SEQ ID NO: 89910 - RNA, 22 nt, Homo sapiens
uacaccugcacucuagccuggg

SEQ ID NO: 89911 - RNA, 20 nt, Homo sapiens
guggaagauaaguagccuga

SEQ ID NO: 89912 - RNA, 22 nt, Homo sapiens
uuuugcucuucggaagagcuug

SEQ ID NO: 89913 - RNA, 22 nt, Homo sapiens
agauggguuuucacauguuggc

SEQ ID NO: 89914 - RNA, 22 nt, Homo sapiens
uuucuacagggcuugccaggua

SEQ ID NO: 89915 - RNA, 22 nt, Homo sapiens
ucaucagugcuugcaaauuauu

SEQ ID NO: 89916 - RNA, 22 nt, Homo sapiens
cugagcaugacaucaugugacu

SEQ ID NO: 89917 - RNA, 22 nt, Homo sapiens
acauacuucuuuacauuccaua

SEQ ID NO: 89918 - RNA, 22 nt, Homo sapiens
ugagcaucucuaaaaggagcaa

SEQ ID NO: 89919 - RNA, 22 nt, Homo sapiens
gaucugugugauuggaugcauu

SEQ ID NO: 89920 - RNA, 22 nt, Homo sapiens
cucuuuuguuccuaguuugauc

SEQ ID NO: 89921 - RNA, 22 nt, Homo sapiens
ugcauuguggaucuaaaugcau

SEQ ID NO: 89922 - RNA, 22 nt, Homo sapiens
guguuauuuugcugggaaugau

SEQ ID NO: 89923 - RNA, 22 nt, Homo sapiens
aucugcauuagggugaagaccu

SEQ ID NO: 89924 - RNA, 22 nt, Homo sapiens
uucugcuugaucuaguguguug

SEQ ID NO: 89925 - RNA, 22 nt, Homo sapiens
acauaguagacacugaaaauau

SEQ ID NO: 89926 - RNA, 22 nt, Homo sapiens
aggcagaugagguccucagcug

SEQ ID NO: 89927 - RNA, 22 nt, Homo sapiens
gugaaugaaugggugaauacau

SEQ ID NO: 89928 - RNA, 22 nt, Homo sapiens
ugacugaguaguauuccacuau

SEQ ID NO: 89929 - RNA, 22 nt, Homo sapiens
acacaguaagcacaguguagau

SEQ ID NO: 89930 - RNA, 23 nt, Homo sapiens
uuuugcaauaagucacuggaaua

SEQ ID NO: 89931 - RNA, 22 nt, Homo sapiens
uuucugggggugcugauggaaa

SEQ ID NO: 89932 - RNA, 22 nt, Homo sapiens
gacuucaucauacuaugugugg

SEQ ID NO: 89933 - RNA, 18 nt, Homo sapiens
ggaaaacuuuucuaagua

SEQ ID NO: 89934 - RNA, 22 nt, Homo sapiens
aaccugaagaaaauauuugcug

SEQ ID NO: 89935 - RNA, 21 nt, Homo sapiens
uaucacauuggugauuaaguu

SEQ ID NO: 89936 - RNA, 21 nt, Homo sapiens
uucaccauggcuccacacucu

SEQ ID NO: 89937 - RNA, 22 nt, Homo sapiens
augauauguuuguagcuaucuc

SEQ ID NO: 89938 - RNA, 22 nt, Homo sapiens
agagcaaugacaugcuaugugg

SEQ ID NO: 89939 - RNA, 22 nt, Homo sapiens
aaacauugaccucauccuggca

SEQ ID NO: 89940 - RNA, 22 nt, Homo sapiens
ugauagaucugggcaaaguaaa

SEQ ID NO: 89941 - RNA, 22 nt, Homo sapiens
augagaaucauuucagcuugua

SEQ ID NO: 89942 - RNA, 22 nt, Homo sapiens
uagcagguguuccacaaauauu

SEQ ID NO: 89943 - RNA, 19 nt, Homo sapiens
gacuccagaguugugugcu

SEQ ID NO: 89944 - RNA, 22 nt, Homo sapiens
cagauacuccuggucucaggag

SEQ ID NO: 89945 - RNA, 22 nt, Homo sapiens
uguuauuuuguguuagggcaca

SEQ ID NO: 89946 - RNA, 22 nt, Homo sapiens
uucagcaggccaggcccugacu

SEQ ID NO: 89947 - RNA, 22 nt, Homo sapiens
aggcauggagacuaaaauuaua

SEQ ID NO: 89948 - RNA, 22 nt, Homo sapiens
cauggagcuaggcuugaucccu

SEQ ID NO: 89949 - RNA, 20 nt, Homo sapiens
uguggcacuguaucucucag

SEQ ID NO: 89950 - RNA, 22 nt, Homo sapiens
aucagcagcaugaaaacggacu

SEQ ID NO: 89951 - RNA, 18 nt, Homo sapiens
ucccucagaauuauagaa

SEQ ID NO: 89952 - RNA, 22 nt, Homo sapiens
ugagaacucaugggucugcugg

SEQ ID NO: 89953 - RNA, 19 nt, Homo sapiens
uuguccccucuaaaucuca

SEQ ID NO: 89954 - RNA, 22 nt, Homo sapiens
cuggcacagugucagaaacaca

SEQ ID NO: 89955 - RNA, 22 nt, Homo sapiens
augaacucaucaucuagguuuu

SEQ ID NO: 89956 - RNA, 22 nt, Homo sapiens
ugagguugucagugucauucuu

SEQ ID NO: 89957 - RNA, 22 nt, Homo sapiens
uuauugcucauuugggcauucu

SEQ ID NO: 89958 - RNA, 22 nt, Homo sapiens
augaacucaucauuuuuugugg

SEQ ID NO: 89959 - RNA, 22 nt, Homo sapiens
uuucaacuaauuuuuuggugag

SEQ ID NO: 89960 - RNA, 22 nt, Homo sapiens
auauauguuuucugggaagaaa

SEQ ID NO: 89961 - RNA, 22 nt, Homo sapiens
guggaaggucaugaauguucuu

SEQ ID NO: 89962 - RNA, 22 nt, Homo sapiens
uaucccaauguaauaucacaaa

SEQ ID NO: 89963 - RNA, 19 nt, Homo sapiens
augaacucaucauuucuca

SEQ ID NO: 89964 - RNA, 22 nt, Homo sapiens
aguguuuuucaugggauacuuu

SEQ ID NO: 89965 - RNA, 22 nt, Homo sapiens
guagaggaauggcuccaccaua

SEQ ID NO: 89966 - RNA, 22 nt, Homo sapiens
agguaauuuuaucauuauguga

SEQ ID NO: 89967 - RNA, 22 nt, Homo sapiens
ucaguggauuauuaaagucacc

SEQ ID NO: 89968 - RNA, 22 nt, Homo sapiens
uugaggccugauaacacacuga

SEQ ID NO: 89969 - RNA, 22 nt, Homo sapiens
augaagaucucugccuuguguc

SEQ ID NO: 89970 - RNA, 22 nt, Homo sapiens
caucucauugaauugcugagca

SEQ ID NO: 89971 - RNA, 22 nt, Homo sapiens
uuuggcauuagagagacuugca

SEQ ID NO: 89972 - RNA, 22 nt, Homo sapiens
gauuuguuggccugugagcuag

SEQ ID NO: 89973 - RNA, 22 nt, Homo sapiens
ugagaacuuauggugauuuuuu

SEQ ID NO: 89974 - RNA, 20 nt, Homo sapiens
uuggugaccuguuugguauu

SEQ ID NO: 89975 - RNA, 22 nt, Homo sapiens
auggaauguaaguuauguuugc

SEQ ID NO: 89976 - RNA, 23 nt, Homo sapiens
uguauacacccugugcaucuggg

SEQ ID NO: 89977 - RNA, 21 nt, Homo sapiens
ugacauguugguguucugcac

SEQ ID NO: 89978 - RNA, 22 nt, Homo sapiens
ugggaaugaaauuacauagcuu

SEQ ID NO: 89979 - RNA, 19 nt, Homo sapiens
ucccugagucuuagcuuga

SEQ ID NO: 89980 - RNA, 22 nt, Homo sapiens
caugacacuggcauguuucuuu

SEQ ID NO: 89981 - RNA, 22 nt, Homo sapiens
uacaggauagacaauuuauuaa

SEQ ID NO: 89982 - RNA, 22 nt, Homo sapiens
gagcaucauucaacaaaagucu

SEQ ID NO: 89983 - RNA, 22 nt, Homo sapiens
agagagcuugggguguuaaauu

SEQ ID NO: 89984 - RNA, 22 nt, Homo sapiens
cauguauagauuccauaguggu

SEQ ID NO: 89985 - RNA, 22 nt, Homo sapiens
gcuuuugcaggaaaggaagaau

SEQ ID NO: 89986 - RNA, 22 nt, Homo sapiens
gaaaacugcuucucuggguuuc

SEQ ID NO: 89987 - RNA, 22 nt, Homo sapiens
uaacugcaaccuccgccucccg

SEQ ID NO: 89988 - RNA, 22 nt, Homo sapiens
ugcgccauugcacucuagccug

SEQ ID NO: 89989 - RNA, 20 nt, Homo sapiens
ucaaagacauggcugucaga

SEQ ID NO: 89990 - RNA, 22 nt, Homo sapiens
gaacacaucuuugguuagagga

SEQ ID NO: 89991 - RNA, 22 nt, Homo sapiens
agaugauguuuacugagcauca

SEQ ID NO: 89992 - RNA, 22 nt, Homo sapiens
cucucaguugucuaauuaguuu

SEQ ID NO: 89993 - RNA, 23 nt, Homo sapiens
ucacacuuaagagaaaugcagcu

SEQ ID NO: 89994 - RNA, 22 nt, Homo sapiens
ugagguugguauuacugucucu

SEQ ID NO: 89995 - RNA, 22 nt, Homo sapiens
uucuaugguuuaauaguuuggg

SEQ ID NO: 89996 - RNA, 20 nt, Homo sapiens
auuagagcuacauggcuaca

SEQ ID NO: 89997 - RNA, 22 nt, Homo sapiens
acauguauauaaugcauagcga

SEQ ID NO: 89998 - RNA, 22 nt, Homo sapiens
auggcaaaaaaugcaauuacuu

SEQ ID NO: 89999 - RNA, 22 nt, Homo sapiens
augacauguauuuccaggauuu

SEQ ID NO: 90000 - RNA, 22 nt, Homo sapiens
agcacuacugcacuccagccug

SEQ ID NO: 90001 - RNA, 22 nt, Homo sapiens
ugagguugaaggacauuuuuau

SEQ ID NO: 90002 - RNA, 22 nt, Homo sapiens
uagguuguucuauuaucuuaca

SEQ ID NO: 90003 - RNA, 22 nt, Homo sapiens
ucagauuggugcaaaaguaauu

SEQ ID NO: 90004 - RNA, 22 nt, Homo sapiens
uaggcaaaugcaagaguagaac

SEQ ID NO: 90005 - RNA, 22 nt, Homo sapiens
ucugucuuguccucacccuaga

SEQ ID NO: 90006 - RNA, 22 nt, Homo sapiens
auaaauaguaguugugguggcc

SEQ ID NO: 90007 - RNA, 22 nt, Homo sapiens
ucauaguagucacuuaauaaau

SEQ ID NO: 90008 - RNA, 22 nt, Homo sapiens
uugugaauggugccacaauaaa

SEQ ID NO: 90009 - RNA, 22 nt, Homo sapiens
ucaguagcauugcuuauacagu

SEQ ID NO: 90010 - RNA, 22 nt, Homo sapiens
uuuccacauggacuuaccuucg

SEQ ID NO: 90011 - RNA, 22 nt, Homo sapiens
uaaagagcuuuugaggugucau

SEQ ID NO: 90012 - RNA, 22 nt, Homo sapiens
uaacugcaaccucugccugcug

SEQ ID NO: 90013 - RNA, 22 nt, Homo sapiens
uagguuguguucugagccucag

SEQ ID NO: 90014 - RNA, 22 nt, Homo sapiens
aagacuguaauccaucuugagu

SEQ ID NO: 90015 - RNA, 22 nt, Homo sapiens
ugggaugauguuaaacguacuc

SEQ ID NO: 90016 - RNA, 22 nt, Homo sapiens
aucaccauguguacauuagacc

SEQ ID NO: 90017 - RNA, 19 nt, Homo sapiens
uggaaugaaauguuagggg

SEQ ID NO: 90018 - RNA, 22 nt, Homo sapiens
aaucacuuuggcaccaaccuaa

SEQ ID NO: 90019 - RNA, 22 nt, Homo sapiens
gucaguggagaaaaggacaugu

SEQ ID NO: 90020 - RNA, 22 nt, Homo sapiens
uugugaaugaugucgcaguaaa

SEQ ID NO: 90021 - RNA, 22 nt, Homo sapiens
ugcgccauugcacuccagccug

SEQ ID NO: 90022 - RNA, 22 nt, Homo sapiens
acagcagugccccacucuacug

SEQ ID NO: 90023 - RNA, 22 nt, Homo sapiens
uuacuugagaugaguuggacaa

SEQ ID NO: 90024 - RNA, 22 nt, Homo sapiens
auggcuuuuuaaaucauguugu

SEQ ID NO: 90025 - RNA, 22 nt, Homo sapiens
augaagauguugccuuuuuaau

SEQ ID NO: 90026 - RNA, 22 nt, Homo sapiens
ucacuaggcuggagugcagugg

SEQ ID NO: 90027 - RNA, 22 nt, Homo sapiens
caucacauucugagauacugag

SEQ ID NO: 90028 - RNA, 22 nt, Homo sapiens
ucucugaaacucuugacauccu

SEQ ID NO: 90029 - RNA, 22 nt, Homo sapiens
uuuugccggcauguugggcuuc

SEQ ID NO: 90030 - RNA, 22 nt, Homo sapiens
uuggucaucucccuccuuuuag

SEQ ID NO: 90031 - RNA, 22 nt, Homo sapiens
ucccuggagcaagagaagaagg

SEQ ID NO: 90032 - RNA, 22 nt, Homo sapiens
cuugagcaaacaaaggugguag

SEQ ID NO: 90033 - RNA, 22 nt, Homo sapiens
ucauagaucaaguaauaagaca

SEQ ID NO: 90034 - RNA, 22 nt, Homo sapiens
auugcacaccagucugggcaaa

SEQ ID NO: 90035 - RNA, 22 nt, Homo sapiens
auaaaugcauugagaacugcug

SEQ ID NO: 90036 - RNA, 22 nt, Homo sapiens
ugagugccuggagggcagggac

SEQ ID NO: 90037 - RNA, 22 nt, Homo sapiens
augggguaggcuuugcugcagu

SEQ ID NO: 90038 - RNA, 22 nt, Homo sapiens
ugugaagaugagaugacgcccu

SEQ ID NO: 90039 - RNA, 22 nt, Homo sapiens
acagaacugggcuugcuuuugg

SEQ ID NO: 90040 - RNA, 22 nt, Homo sapiens
aauggcaagagccacagaggcg

SEQ ID NO: 90041 - RNA, 22 nt, Homo sapiens
ugggguaggcuguauacucugu

SEQ ID NO: 90042 - RNA, 22 nt, Homo sapiens
uucaaaguaaagggauggagac

SEQ ID NO: 90043 - RNA, 22 nt, Homo sapiens
cacaaucuccuuguguaagguu

SEQ ID NO: 90044 - RNA, 22 nt, Homo sapiens
uaaacugcuugaggguaaguac

SEQ ID NO: 90045 - RNA, 22 nt, Homo sapiens
aauauugucaaaauggauucca

SEQ ID NO: 90046 - RNA, 23 nt, Homo sapiens
uuugccacuuauuagcugggagg

SEQ ID NO: 90047 - RNA, 22 nt, Homo sapiens
caaaagugauugcgguuuuugc

SEQ ID NO: 90048 - RNA, 18 nt, Homo sapiens
uuucaagucuuaggugac

SEQ ID NO: 90049 - RNA, 20 nt, Homo sapiens
uauuugguuauuuccauggu

SEQ ID NO: 90050 - RNA, 23 nt, Homo sapiens
ugagucacuuugcuggggucucu

SEQ ID NO: 90051 - RNA, 22 nt, Homo sapiens
uugcacaauccugugagugagu

SEQ ID NO: 90052 - RNA, 19 nt, Homo sapiens
ccauggcaaugaucugaug

SEQ ID NO: 90053 - RNA, 22 nt, Homo sapiens
uggcaugauccuagauucaaca

SEQ ID NO: 90054 - RNA, 17 nt, Homo sapiens
ugagaacaugugguauu

SEQ ID NO: 90055 - RNA, 22 nt, Homo sapiens
uuauaacagagacuccugugcu

SEQ ID NO: 90056 - RNA, 22 nt, Homo sapiens
aucuuuggcgggaauaucacag

SEQ ID NO: 90057 - RNA, 22 nt, Homo sapiens
cuggaguaugaaccauguauca

SEQ ID NO: 90058 - RNA, 22 nt, Homo sapiens
uugcuuuguuacugcaguuucc

SEQ ID NO: 90059 - RNA, 22 nt, Homo sapiens
aucuuuggugcaugauacuuug

SEQ ID NO: 90060 - RNA, 21 nt, Homo sapiens
ucuuuggucaccaguuuucau

SEQ ID NO: 90061 - RNA, 22 nt, Homo sapiens
uucucagugcuaucuuuuaugc

SEQ ID NO: 90062 - RNA, 22 nt, Homo sapiens
aguaucaagccacacaugguca

SEQ ID NO: 90063 - RNA, 22 nt, Homo sapiens
uagguugucuucccagaguuuu

SEQ ID NO: 90064 - RNA, 22 nt, Homo sapiens
acacauuggcaauucuggagca

SEQ ID NO: 90065 - RNA, 22 nt, Homo sapiens
caauggcacuauuggaaaaggu

SEQ ID NO: 90066 - RNA, 22 nt, Homo sapiens
ccagguuucuagaauaauuccu

SEQ ID NO: 90067 - RNA, 22 nt, Homo sapiens
agauacaucuaugugucugugu

SEQ ID NO: 90068 - RNA, 22 nt, Homo sapiens
uugccacuucucuugccccauu

SEQ ID NO: 90069 - RNA, 22 nt, Homo sapiens
gaaacugcauuucuaacaagcu

SEQ ID NO: 90070 - RNA, 22 nt, Homo sapiens
uaagagcuaggauuuuaaauca

SEQ ID NO: 90071 - RNA, 22 nt, Homo sapiens
uagugacauugcugggaaugcu

SEQ ID NO: 90072 - RNA, 22 nt, Homo sapiens
agacagcugguagcacuuccug

SEQ ID NO: 90073 - RNA, 21 nt, Homo sapiens
auguaaugaagaagccacugg

SEQ ID NO: 90074 - RNA, 22 nt, Homo sapiens
uuuggccauaauuuuaauuggc

SEQ ID NO: 90075 - RNA, 18 nt, Homo sapiens
ugagaacauguguacaca

SEQ ID NO: 90076 - RNA, 22 nt, Homo sapiens
ggcaaagaugaccauuacuuuu

SEQ ID NO: 90077 - RNA, 22 nt, Homo sapiens
uacuauugcaucggugauuagg

SEQ ID NO: 90078 - RNA, 22 nt, Homo sapiens
gcaauggaaucccuugaucaau

SEQ ID NO: 90079 - RNA, 22 nt, Homo sapiens
ugauaucugaauagauacacaa

SEQ ID NO: 90080 - RNA, 22 nt, Homo sapiens
auugucauuuucugagaaguaa

SEQ ID NO: 90081 - RNA, 22 nt, Homo sapiens
uuggcaauugcuaugauuugaa

SEQ ID NO: 90082 - RNA, 22 nt, Homo sapiens
uaucacaguagaacucuuucca

SEQ ID NO: 90083 - RNA, 22 nt, Homo sapiens
gugaagaucccuguccuguucc

SEQ ID NO: 90084 - RNA, 22 nt, Homo sapiens
aaagcuacaggaccugcucauu

SEQ ID NO: 90085 - RNA, 23 nt, Homo sapiens
ugacauguaauucaguccagcag

SEQ ID NO: 90086 - RNA, 21 nt, Homo sapiens
uuucugggggagcauggcagg

SEQ ID NO: 90087 - RNA, 22 nt, Homo sapiens
ugagguuguccacuauaaucca

SEQ ID NO: 90088 - RNA, 22 nt, Homo sapiens
uucaguauugcaccuggagucc

SEQ ID NO: 90089 - RNA, 22 nt, Homo sapiens
uggcaugaagaccccauccuuu

SEQ ID NO: 90090 - RNA, 22 nt, Homo sapiens
ucuuugggauauucugaaaggg

SEQ ID NO: 90091 - RNA, 22 nt, Homo sapiens
uuugccaaucagaggcaucuug

SEQ ID NO: 90092 - RNA, 22 nt, Homo sapiens
uccuuggugacauuucuugucu

SEQ ID NO: 90093 - RNA, 22 nt, Homo sapiens
auuguacugccccccuguugcu

SEQ ID NO: 90094 - RNA, 22 nt, Homo sapiens
gcauaaagcuaauaagacgaag

SEQ ID NO: 90095 - RNA, 22 nt, Homo sapiens
ugauguugacuguaggcagaga

SEQ ID NO: 90096 - RNA, 22 nt, Homo sapiens
ucccugaguaucuaauguguuu

SEQ ID NO: 90097 - RNA, 22 nt, Homo sapiens
gacuauguuaccuuacacauca

SEQ ID NO: 90098 - RNA, 22 nt, Homo sapiens
gagauaauagcuauaggaucuu

SEQ ID NO: 90099 - RNA, 22 nt, Homo sapiens
uuggaaugcaacagaaggauaa

SEQ ID NO: 90100 - RNA, 22 nt, Homo sapiens
augaacucaucauuuuuuaugg

SEQ ID NO: 90101 - RNA, 22 nt, Homo sapiens
ugacaucugcuugugcccagga

SEQ ID NO: 90102 - RNA, 22 nt, Homo sapiens
ugcaccauugcauacuuaauua

SEQ ID NO: 90103 - RNA, 20 nt, Homo sapiens
ccagcaucauuagauucugg

SEQ ID NO: 90104 - RNA, 22 nt, Homo sapiens
auggcacuaaguucaacacuua

SEQ ID NO: 90105 - RNA, 22 nt, Homo sapiens
auggugugugaauuaaauguua

SEQ ID NO: 90106 - RNA, 23 nt, Homo sapiens
ugauaacagcauaugaagauucu

SEQ ID NO: 90107 - RNA, 22 nt, Homo sapiens
aauuaguugaaagucugcuuuu

SEQ ID NO: 90108 - RNA, 22 nt, Homo sapiens
uacuucauucuugaccuugcau

SEQ ID NO: 90109 - RNA, 22 nt, Homo sapiens
uugucauuuucagaguguuacg

SEQ ID NO: 90110 - RNA, 22 nt, Homo sapiens
cuucaucugguuugugaacuuu

SEQ ID NO: 90111 - RNA, 22 nt, Homo sapiens
aucagcagcaugaaaagcaacu

SEQ ID NO: 90112 - RNA, 22 nt, Homo sapiens
cuugaucaaugugguacuugau

SEQ ID NO: 90113 - RNA, 21 nt, Homo sapiens
augucauggaugacuaauuca

SEQ ID NO: 90114 - RNA, 22 nt, Homo sapiens
uugaguccauucgaugcugauu

SEQ ID NO: 90115 - RNA, 22 nt, Homo sapiens
ugagaacugcagggagcugcau

SEQ ID NO: 90116 - RNA, 22 nt, Homo sapiens
aacugcacauauuuguaugggu

SEQ ID NO: 90117 - RNA, 22 nt, Homo sapiens
uuugcuuguguaaaaaucugga

SEQ ID NO: 90118 - RNA, 22 nt, Homo sapiens
uuugccacugcaggcuguuuaa

SEQ ID NO: 90119 - RNA, 22 nt, Homo sapiens
uuugcacauauuugggcaaaag

SEQ ID NO: 90120 - RNA, 22 nt, Homo sapiens
aguccagguuuuguaauggcaa

SEQ ID NO: 90121 - RNA, 22 nt, Homo sapiens
ucugccuuuucaugugggaugg

SEQ ID NO: 90122 - RNA, 22 nt, Homo sapiens
aaauugcaaugcgaggcagagg

SEQ ID NO: 90123 - RNA, 22 nt, Homo sapiens
aaugcaagauguuaauuauagg

SEQ ID NO: 90124 - RNA, 21 nt, Homo sapiens
ugcuccauuuucuagccugaa

SEQ ID NO: 90125 - RNA, 21 nt, Homo sapiens
augaacucaucauuuuuuaug

SEQ ID NO: 90126 - RNA, 22 nt, Homo sapiens
gucugcaugucauaugauagua

SEQ ID NO: 90127 - RNA, 22 nt, Homo sapiens
aucuuugcugagaugcauggca

SEQ ID NO: 90128 - RNA, 22 nt, Homo sapiens
ugagaacucaugaaucuuucca

SEQ ID NO: 90129 - RNA, 22 nt, Homo sapiens
aucacaggucaaaucauuauuu

SEQ ID NO: 90130 - RNA, 22 nt, Homo sapiens
gaggcaauaugagggaggcuuc

SEQ ID NO: 90131 - RNA, 23 nt, Homo sapiens
agacugaaguaucugagacucag

SEQ ID NO: 90132 - RNA, 22 nt, Homo sapiens
uucccugaguaucuuaccaugg

SEQ ID NO: 90133 - RNA, 21 nt, Homo sapiens
uuggcacucuucucuccuuau

SEQ ID NO: 90134 - RNA, 22 nt, Homo sapiens
uucauaguucuuuuagucauua

SEQ ID NO: 90135 - RNA, 22 nt, Homo sapiens
uuugcuugaggucuagcuaccc

SEQ ID NO: 90136 - RNA, 22 nt, Homo sapiens
ggaagacaguguggugauuccu

SEQ ID NO: 90137 - RNA, 22 nt, Homo sapiens
uagguugucaucagucuccacu

SEQ ID NO: 90138 - RNA, 22 nt, Homo sapiens
uguauauguuuguacauauguc

SEQ ID NO: 90139 - RNA, 22 nt, Homo sapiens
uuuugcacauugauuugguauc

SEQ ID NO: 90140 - RNA, 21 nt, Homo sapiens
auugcacaauauacccaugua

SEQ ID NO: 90141 - RNA, 22 nt, Homo sapiens
ugugaauggugcugcaaugaac

SEQ ID NO: 90142 - RNA, 22 nt, Homo sapiens
uggcaugauauauauucguuug

SEQ ID NO: 90143 - RNA, 22 nt, Homo sapiens
uucauugcugcuuaucuccaga

SEQ ID NO: 90144 - RNA, 22 nt, Homo sapiens
gaucuguguuuguaugcauaag

SEQ ID NO: 90145 - RNA, 22 nt, Homo sapiens
ugcaugcaucuuuuauaguagc

SEQ ID NO: 90146 - RNA, 22 nt, Homo sapiens
gacagacacaauugauccauga

SEQ ID NO: 90147 - RNA, 22 nt, Homo sapiens
uauugcacuuuuccauaggagu

SEQ ID NO: 90148 - RNA, 22 nt, Homo sapiens
cugagcaucauggcagaaucuu

SEQ ID NO: 90149 - RNA, 22 nt, Homo sapiens
uucaucaggaauauugaccugu

SEQ ID NO: 90150 - RNA, 22 nt, Homo sapiens
augaggugaguaaauaaaugaa

SEQ ID NO: 90151 - RNA, 22 nt, Homo sapiens
ugcaccauugcacuccagccug

SEQ ID NO: 90152 - RNA, 22 nt, Homo sapiens
uccagguacucagggggcugag

SEQ ID NO: 90153 - RNA, 22 nt, Homo sapiens
ugagaacugguagcacuuguga

SEQ ID NO: 90154 - RNA, 22 nt, Homo sapiens
auuaagagcacauguucugggu

SEQ ID NO: 90155 - RNA, 22 nt, Homo sapiens
ugaaacauacacucugaugggg

SEQ ID NO: 90156 - RNA, 22 nt, Homo sapiens
auugccacaucucagaggcaga

SEQ ID NO: 90157 - RNA, 22 nt, Homo sapiens
caucaggugaggauucaaugca

SEQ ID NO: 90158 - RNA, 22 nt, Homo sapiens
ugcaccauugcauuccagccug

SEQ ID NO: 90159 - RNA, 18 nt, Homo sapiens
ucacagguaauuaggauu

SEQ ID NO: 90160 - RNA, 22 nt, Homo sapiens
uguuucuacugucucuguagua

SEQ ID NO: 90161 - RNA, 22 nt, Homo sapiens
ucuugcuuguuguucccuucau

SEQ ID NO: 90162 - RNA, 22 nt, Homo sapiens
ugcgccauugcauuccagccug

SEQ ID NO: 90163 - RNA, 19 nt, Homo sapiens
cuugugccugaagcuuggg

SEQ ID NO: 90164 - RNA, 22 nt, Homo sapiens
uuuuuggauaaugguacaugua

SEQ ID NO: 90165 - RNA, 22 nt, Homo sapiens
ugucauggcauuuguaaacugc

SEQ ID NO: 90166 - RNA, 22 nt, Homo sapiens
agugcaauaaggauguagaacu

SEQ ID NO: 90167 - RNA, 16 nt, Homo sapiens
ugagaacaugugacau

SEQ ID NO: 90168 - RNA, 22 nt, Homo sapiens
aagagcauuauuuaguaauuuc

SEQ ID NO: 90169 - RNA, 22 nt, Homo sapiens
ugcaaugugaaauaagcacauc

SEQ ID NO: 90170 - RNA, 22 nt, Homo sapiens
uuaugccagugauuauaagggc

SEQ ID NO: 90171 - RNA, 22 nt, Homo sapiens
ugugaagauggacuaauauagu

SEQ ID NO: 90172 - RNA, 22 nt, Homo sapiens
ugagcaauaaaguuacacaguu

SEQ ID NO: 90173 - RNA, 22 nt, Homo sapiens
gaagacauuugcugcacguccu

SEQ ID NO: 90174 - RNA, 22 nt, Homo sapiens
uugauagacacauauccaugug

SEQ ID NO: 90175 - RNA, 22 nt, Homo sapiens
uauggcuuuuauuauguuguag

SEQ ID NO: 90176 - RNA, 22 nt, Homo sapiens
caaaccuguaggggccaagagg

SEQ ID NO: 90177 - RNA, 22 nt, Homo sapiens
uauacugucuuuguaugccuag

SEQ ID NO: 90178 - RNA, 22 nt, Homo sapiens
caugacacauguuuaccuaugu

SEQ ID NO: 90179 - RNA, 22 nt, Homo sapiens
uuuaauguuacaguauugguau

SEQ ID NO: 90180 - RNA, 22 nt, Homo sapiens
agugagcuguuuuuacuuucug

SEQ ID NO: 90181 - RNA, 22 nt, Homo sapiens
agguuuucagccccagccuagg

SEQ ID NO: 90182 - RNA, 22 nt, Homo sapiens
uguuaagauguguuuuguggcu

SEQ ID NO: 90183 - RNA, 22 nt, Homo sapiens
uaacuucaucauaagucaagaa

SEQ ID NO: 90184 - RNA, 22 nt, Homo sapiens
uagguugucucuucacucugau

SEQ ID NO: 90185 - RNA, 22 nt, Homo sapiens
gugagaugugacuucugccucu

SEQ ID NO: 90186 - RNA, 22 nt, Homo sapiens
uaucacagcaaggacccauuau

SEQ ID NO: 90187 - RNA, 22 nt, Homo sapiens
gagaacauacggcauuugguuu

SEQ ID NO: 90188 - RNA, 22 nt, Homo sapiens
uuccuugagaaaggcacaaguu

SEQ ID NO: 90189 - RNA, 22 nt, Homo sapiens
guggaaaauuauugcuguuuuu

SEQ ID NO: 90190 - RNA, 22 nt, Homo sapiens
agacacugaaauguauugaaga

SEQ ID NO: 90191 - RNA, 22 nt, Homo sapiens
cacagcuagucaaugguagaca

SEQ ID NO: 90192 - RNA, 22 nt, Homo sapiens
aucucaguuaauuccaucuuuc

SEQ ID NO: 90193 - RNA, 22 nt, Homo sapiens
ugcauacacaagcauacaugua

SEQ ID NO: 90194 - RNA, 22 nt, Homo sapiens
ucuuugguagaagcuauuuuau

SEQ ID NO: 90195 - RNA, 22 nt, Homo sapiens
cugagaacaucauucagauauu

SEQ ID NO: 90196 - RNA, 22 nt, Homo sapiens
ugaucuguccaccucagcuucc

SEQ ID NO: 90197 - RNA, 22 nt, Homo sapiens
auuguacuuauugccagaauuu

SEQ ID NO: 90198 - RNA, 22 nt, Homo sapiens
uagguugucuguucacucugau

SEQ ID NO: 90199 - RNA, 22 nt, Homo sapiens
uuugccaauauuuuauugagga

SEQ ID NO: 90200 - RNA, 22 nt, Homo sapiens
acugcacuccagccucaugaca

SEQ ID NO: 90201 - RNA, 22 nt, Homo sapiens
ggaaagacaccuuacuauguua

SEQ ID NO: 90202 - RNA, 22 nt, Homo sapiens
uucuacagugacugcagccaua

SEQ ID NO: 90203 - RNA, 22 nt, Homo sapiens
ugacauguagagaacuucucau

SEQ ID NO: 90204 - RNA, 22 nt, Homo sapiens
auccuagguuagagaacaaaac

SEQ ID NO: 90205 - RNA, 22 nt, Homo sapiens
uaucucagaugagacuuguaac

SEQ ID NO: 90206 - RNA, 22 nt, Homo sapiens
ucaugucuuguuguauuuauuu

SEQ ID NO: 90207 - RNA, 21 nt, Homo sapiens
caagugaugcuucugcuuuaa

SEQ ID NO: 90208 - RNA, 22 nt, Homo sapiens
aucacaguggcucacaagagcc

SEQ ID NO: 90209 - RNA, 22 nt, Homo sapiens
ugagaugagggcugcacucaaa

SEQ ID NO: 90210 - RNA, 22 nt, Homo sapiens
ugaacacaucuccugguaccug

SEQ ID NO: 90211 - RNA, 21 nt, Homo sapiens
uucuuugcucaguguuagagu

SEQ ID NO: 90212 - RNA, 22 nt, Homo sapiens
accccguagagucugcagcuac

SEQ ID NO: 90213 - RNA, 22 nt, Homo sapiens
auaaagcaagucucuggccuca

SEQ ID NO: 90214 - RNA, 22 nt, Homo sapiens
ggauacauuuuuccuccucuuc

SEQ ID NO: 90215 - RNA, 22 nt, Homo sapiens
uuccuugagaaaguacaaggcu

SEQ ID NO: 90216 - RNA, 21 nt, Homo sapiens
ugacauguuggugugcugcac

SEQ ID NO: 90217 - RNA, 18 nt, Homo sapiens
ugcaauggagaugcagcc

SEQ ID NO: 90218 - RNA, 22 nt, Homo sapiens
aaggcaauuuguugugaggauu

SEQ ID NO: 90219 - RNA, 22 nt, Homo sapiens
cacauugaauuucugaugacaa

SEQ ID NO: 90220 - RNA, 22 nt, Homo sapiens
ucuuugccuaacccaaggucau

SEQ ID NO: 90221 - RNA, 20 nt, Homo sapiens
ucaucaguuggugcucgcug

SEQ ID NO: 90222 - RNA, 17 nt, Homo sapiens
augacuucuucagugug

SEQ ID NO: 90223 - RNA, 20 nt, Homo sapiens
uuuuggcuuaaagcagucug

SEQ ID NO: 90224 - RNA, 22 nt, Homo sapiens
uuuuggcucugucuguaucuuu

SEQ ID NO: 90225 - RNA, 22 nt, Homo sapiens
uguaagugugcaauucagugau

SEQ ID NO: 90226 - RNA, 22 nt, Homo sapiens
ugugauaguuggcuaaagcagu

SEQ ID NO: 90227 - RNA, 16 nt, Homo sapiens
uuauugcauucuucuc

SEQ ID NO: 90228 - RNA, 22 nt, Homo sapiens
uuauugcacuccagccugggua

SEQ ID NO: 90229 - RNA, 21 nt, Homo sapiens
uuauaguggcaugauuuauaa

SEQ ID NO: 90230 - RNA, 22 nt, Homo sapiens
uguguaauaccuuugacuauau

SEQ ID NO: 90231 - RNA, 22 nt, Homo sapiens
uuacugcauaauuccugggaag

SEQ ID NO: 90232 - RNA, 22 nt, Homo sapiens
uugugcuuguaacuacauucag

SEQ ID NO: 90233 - RNA, 22 nt, Homo sapiens
cuuggcuugguaucaaauaacc

SEQ ID NO: 90234 - RNA, 22 nt, Homo sapiens
agugauauguuugccuugaggg

SEQ ID NO: 90235 - RNA, 22 nt, Homo sapiens
auaagaguaguacauaugagac

SEQ ID NO: 90236 - RNA, 22 nt, Homo sapiens
auaugcacaguggaguacuauu

SEQ ID NO: 90237 - RNA, 22 nt, Homo sapiens
auagcuguugaauggaauauuc

SEQ ID NO: 90238 - RNA, 22 nt, Homo sapiens
auaugguguuugcuauucagcu

SEQ ID NO: 90239 - RNA, 22 nt, Homo sapiens
aucagagugaauaaugacaaaa

SEQ ID NO: 90240 - RNA, 22 nt, Homo sapiens
gcuaggagauccacugcucucu

SEQ ID NO: 90241 - RNA, 22 nt, Homo sapiens
gucauauaggguuuaccuguau

SEQ ID NO: 90242 - RNA, 22 nt, Homo sapiens
guggguaaaucucuguucgagg

SEQ ID NO: 90243 - RNA, 22 nt, Homo sapiens
guggguaaaucucuguuugagg

SEQ ID NO: 90244 - RNA, 22 nt, Homo sapiens
uagguagcuuuggcguuucuug

SEQ ID NO: 90245 - RNA, 22 nt, Homo sapiens
uauggcacuaguacuggaaagc

SEQ ID NO: 90246 - RNA, 20 nt, Homo sapiens
uacugcacuuuccucauggu

SEQ ID NO: 90247 - RNA, 22 nt, Homo sapiens
uacugcacuugaccuccugggc

SEQ ID NO: 90248 - RNA, 22 nt, Homo sapiens
ugaguauagaucaguucaagug

SEQ ID NO: 90249 - RNA, 21 nt, Homo sapiens
ucuggcuuucauuccccuucu

SEQ ID NO: 90250 - RNA, 22 nt, Homo sapiens
uauugcacuccucaugcauuug

SEQ ID NO: 90251 - RNA, 22 nt, Homo sapiens
ggaaaguccuucuguaggcucc

SEQ ID NO: 90252 - RNA, 22 nt, Homo sapiens
uauuagugucuuuugguuagaa

SEQ ID NO: 90253 - RNA, 22 nt, Homo sapiens
uacugcacucuagccuggguga

SEQ ID NO: 90254 - RNA, 22 nt, Homo sapiens
uacugcacuccagccugggaga

SEQ ID NO: 90255 - RNA, 22 nt, Homo sapiens
uacugcacuccacccuggguga

SEQ ID NO: 90256 - RNA, 22 nt, Homo sapiens
guuggcuuuuuaaggaaauugc

SEQ ID NO: 90257 - RNA, 18 nt, Homo sapiens
cuaguguuucuugaauca

SEQ ID NO: 90258 - RNA, 22 nt, Homo sapiens
cuuggcuucuuuauguggcuau

SEQ ID NO: 90259 - RNA, 19 nt, Homo sapiens
ugaguauauuguauucauu

SEQ ID NO: 90260 - RNA, 22 nt, Homo sapiens
uggaaaguaguucuaaucuaag

SEQ ID NO: 90261 - RNA, 22 nt, Homo sapiens
uggaaaauuaggggagguuaua

SEQ ID NO: 90262 - RNA, 22 nt, Homo sapiens
uucagcaguggccaguggaaau

SEQ ID NO: 90263 - RNA, 22 nt, Homo sapiens
uucuuagguuaaggcugagaga

SEQ ID NO: 90264 - RNA, 22 nt, Homo sapiens
uguguacugcagaguauucugu

SEQ ID NO: 90265 - RNA, 22 nt, Homo sapiens
uuuggcuuugagaagcagugga

SEQ ID NO: 90266 - RNA, 22 nt, Homo sapiens
uuuggcuuuuguaauaacugcc

SEQ ID NO: 90267 - RNA, 21 nt, Homo sapiens
uuuggcuucucugcugcagcc

SEQ ID NO: 90268 - RNA, 22 nt, Homo sapiens
aaaguggugugaguauguaucu

SEQ ID NO: 90269 - RNA, 22 nt, Homo sapiens
aaagugauugcgguuuuugcca

SEQ ID NO: 90270 - RNA, 22 nt, Homo sapiens
acaaagugccuccuuuuagagu

SEQ ID NO: 90271 - RNA, 22 nt, Homo sapiens
auggaguuuacuuaguguaaua

SEQ ID NO: 90272 - RNA, 22 nt, Homo sapiens
auagaguuagaaagaaauguuu

SEQ ID NO: 90273 - RNA, 22 nt, Homo sapiens
ugugcuugcuucuucuccuagu

SEQ ID NO: 90274 - RNA, 18 nt, Homo sapiens
uuagguaggucuuugugu

SEQ ID NO: 90275 - RNA, 22 nt, Homo sapiens
uuggccuuuucaaugccucuuu

SEQ ID NO: 90276 - RNA, 23 nt, Homo sapiens
uuuguaguagcaugauuuauaau

SEQ ID NO: 90277 - RNA, 22 nt, Homo sapiens
uuuguaagaugcauagauugca

SEQ ID NO: 90278 - RNA, 22 nt, Homo sapiens
uuuggcuuaagauugacugcaa

SEQ ID NO: 90279 - RNA, 22 nt, Homo sapiens
auuggcuuuauacauaagaaua

SEQ ID NO: 90280 - RNA, 22 nt, Homo sapiens
auuggcuuuugaaagucugcga

SEQ ID NO: 90281 - RNA, 22 nt, Homo sapiens
ccuucuuuuguaaggcugaaua

SEQ ID NO: 90282 - RNA, 22 nt, Homo sapiens
ccaguuuucucacuguugcagu

SEQ ID NO: 90283 - RNA, 22 nt, Homo sapiens
gauauguguaucuauguacaug

SEQ ID NO: 90284 - RNA, 22 nt, Homo sapiens
aggacacugauagucuuuggca

SEQ ID NO: 90285 - RNA, 22 nt, Homo sapiens
agguagguugagaugggcauca

SEQ ID NO: 90286 - RNA, 22 nt, Homo sapiens
agagguuuugcacugguucuuu

SEQ ID NO: 90287 - RNA, 22 nt, Homo sapiens
aucaaaguaggcauauguuuuu

SEQ ID NO: 90288 - RNA, 19 nt, Homo sapiens
auaguguaggaaaacagcu

SEQ ID NO: 90289 - RNA, 22 nt, Homo sapiens
auacaagugccauguuggugug

SEQ ID NO: 90290 - RNA, 22 nt, Homo sapiens
auagagugcuucaucaguagua

SEQ ID NO: 90291 - RNA, 22 nt, Homo sapiens
auguagugugauuuucacuaga

SEQ ID NO: 90292 - RNA, 22 nt, Homo sapiens
uggcuuuguaagguuucauuuu

SEQ ID NO: 90293 - RNA, 18 nt, Homo sapiens
ucuuuggcugaacuguag

SEQ ID NO: 90294 - RNA, 22 nt, Homo sapiens
ugacaucguugccauguuaugc

SEQ ID NO: 90295 - RNA, 22 nt, Homo sapiens
ucgcaguuaauaaugaugugcg

SEQ ID NO: 90296 - RNA, 22 nt, Homo sapiens
guuaugcagcaauugauaaucu

SEQ ID NO: 90297 - RNA, 22 nt, Homo sapiens
guuaugcagcuuagaaaaugaa

SEQ ID NO: 90298 - RNA, 22 nt, Homo sapiens
guguuugguugauagagccacu

SEQ ID NO: 90299 - RNA, 22 nt, Homo sapiens
guguauauccuauuaguucugu

SEQ ID NO: 90300 - RNA, 22 nt, Homo sapiens
uaauauguuuugaaaucaggaa

SEQ ID NO: 90301 - RNA, 22 nt, Homo sapiens
uacugcacuccagccuugccaa

SEQ ID NO: 90302 - RNA, 22 nt, Homo sapiens
uacugcacuccaaccugagaga

SEQ ID NO: 90303 - RNA, 22 nt, Homo sapiens
uacugcacuccagccucgguga

SEQ ID NO: 90304 - RNA, 22 nt, Homo sapiens
uacugcacuccaggcucaccug

SEQ ID NO: 90305 - RNA, 20 nt, Homo sapiens
uacugcacuccauccugggu

SEQ ID NO: 90306 - RNA, 21 nt, Homo sapiens
uauaguaguaugauuuacaau

SEQ ID NO: 90307 - RNA, 22 nt, Homo sapiens
uauaguguuuucaaaaguaugu

SEQ ID NO: 90308 - RNA, 22 nt, Homo sapiens
uauugcacuuuuccauaggagu

SEQ ID NO: 90309 - RNA, 21 nt, Homo sapiens
ucacaucguuuagcugugccu

SEQ ID NO: 90310 - RNA, 17 nt, Homo sapiens
uauguaguacuuauaaa

SEQ ID NO: 90311 - RNA, 23 nt, Homo sapiens
uauaugugucuaggagcuauggu

SEQ ID NO: 90312 - RNA, 22 nt, Homo sapiens
uagugcuguaauucuaaugaaa

SEQ ID NO: 90313 - RNA, 22 nt, Homo sapiens
uagcugagacuacaguaggugc

SEQ ID NO: 90314 - RNA, 22 nt, Homo sapiens
gcuaggagaucugcugcucucu

SEQ ID NO: 90315 - RNA, 22 nt, Homo sapiens
gauaaaguauuggguacuaugc

SEQ ID NO: 90316 - RNA, 22 nt, Homo sapiens
ugcagugucaauaauaauuagu

SEQ ID NO: 90317 - RNA, 22 nt, Homo sapiens
uuauggcuuugcgguguuagca

SEQ ID NO: 90318 - RNA, 22 nt, Homo sapiens
uuuaaggcacuucaugguuuca

SEQ ID NO: 90319 - RNA, 22 nt, Homo sapiens
uuuaauguuacaguauugguau

SEQ ID NO: 90320 - RNA, 22 nt, Homo sapiens
uugauauauugcaugggcuacu

SEQ ID NO: 90321 - RNA, 22 nt, Homo sapiens
auggcuugugacccaugcuuca

SEQ ID NO: 90322 - RNA, 15 nt, Homo sapiens
aaauaugucaguucu

SEQ ID NO: 90323 - RNA, 22 nt, Homo sapiens
auucccuguagaauaaggaugg

SEQ ID NO: 90324 - RNA, 22 nt, Homo sapiens
acccgguuagggggcaguggau

SEQ ID NO: 90325 - RNA, 20 nt, Homo sapiens
uuuguaucucuggguacugg

SEQ ID NO: 90326 - RNA, 22 nt, Homo sapiens
uuucauguuuuucugugaggca

SEQ ID NO: 90327 - RNA, 19 nt, Homo sapiens
uuucccugcagaccuacua

SEQ ID NO: 90328 - RNA, 22 nt, Homo sapiens
uucuacuccucauggcagguug

SEQ ID NO: 90329 - RNA, 22 nt, Homo sapiens
uggaagucauugagguguguua

SEQ ID NO: 90330 - RNA, 22 nt, Homo sapiens
ugucccaguuggguauugaauu

SEQ ID NO: 90331 - RNA, 22 nt, Homo sapiens
ucccugaaucucagguucugua

SEQ ID NO: 90332 - RNA, 22 nt, Homo sapiens
ugagaggugaauggcaggcuca

SEQ ID NO: 90333 - RNA, 22 nt, Homo sapiens
cuggaaggaaaaacaaccacag

SEQ ID NO: 90334 - RNA, 21 nt, Homo sapiens
gugaggucauugggcuuucug

SEQ ID NO: 90335 - RNA, 20 nt, Homo sapiens
guucccuguaggugugcgga

SEQ ID NO: 90336 - RNA, 22 nt, Homo sapiens
ggagugucccaaucucagcuca

SEQ ID NO: 90337 - RNA, 22 nt, Homo sapiens
ggagugucagaaacaguguccu

SEQ ID NO: 90338 - RNA, 17 nt, Homo sapiens
ucccuguuuuuucaguc

SEQ ID NO: 90339 - RNA, 18 nt, Homo sapiens
ucucacagcaaucuguca

SEQ ID NO: 90340 - RNA, 22 nt, Homo sapiens
gagcucaccuuaccucuggagc

SEQ ID NO: 90341 - RNA, 22 nt, Homo sapiens
cacccgugcucccuccagcugc

SEQ ID NO: 90342 - RNA, 22 nt, Homo sapiens
uuguucccuucuggcuuuuaug

SEQ ID NO: 90343 - RNA, 22 nt, Homo sapiens
uuucccugaaggcucugaaguc

SEQ ID NO: 90344 - RNA, 22 nt, Homo sapiens
uucccugugugcagaugggugu

SEQ ID NO: 90345 - RNA, 22 nt, Homo sapiens
uguguuugauaaguccauaguu

SEQ ID NO: 90346 - RNA, 22 nt, Homo sapiens
uguggaguguaugugacagaga

SEQ ID NO: 90347 - RNA, 22 nt, Homo sapiens
uggucuccuuuguacccugggc

SEQ ID NO: 90348 - RNA, 21 nt, Homo sapiens
uggucccauaagauuacaaug

SEQ ID NO: 90349 - RNA, 22 nt, Homo sapiens
uuugucuccuaagacucugugg

SEQ ID NO: 90350 - RNA, 22 nt, Homo sapiens
uuguauccaucuuucaggcaac

SEQ ID NO: 90351 - RNA, 22 nt, Homo sapiens
ugugguuuuaguaaaacuaugu

SEQ ID NO: 90352 - RNA, 21 nt, Homo sapiens
uggucccauaagauuauaaug

SEQ ID NO: 90353 - RNA, 22 nt, Homo sapiens
uccagguuuggcuuuauaacuu

SEQ ID NO: 90354 - RNA, 22 nt, Homo sapiens
ucugggguuuccacuuuuacuu

SEQ ID NO: 90355 - RNA, 19 nt, Homo sapiens
ucucacagcucuacuaugu

SEQ ID NO: 90356 - RNA, 21 nt, Homo sapiens
cccagguucucugaggguaga

SEQ ID NO: 90357 - RNA, 22 nt, Homo sapiens
cagugguuuucaacccugguug

SEQ ID NO: 90358 - RNA, 22 nt, Homo sapiens
uaucacggaguacauguucugu

SEQ ID NO: 90359 - RNA, 22 nt, Homo sapiens
gggaggucauuguaaggucuua

SEQ ID NO: 90360 - RNA, 22 nt, Homo sapiens
gugucucagcccagaccuauuu

SEQ ID NO: 90361 - RNA, 18 nt, Homo sapiens
gucucacaugguggaagc

SEQ ID NO: 90362 - RNA, 22 nt, Homo sapiens
uggaguguagaagccagccucc

SEQ ID NO: 90363 - RNA, 22 nt, Homo sapiens
gugguguuugagcugccaggga

SEQ ID NO: 90364 - RNA, 22 nt, Homo sapiens
acucacagcaaccuccgccucc

SEQ ID NO: 90365 - RNA, 22 nt, Homo sapiens
ugugguuuuucacauuuagaga

SEQ ID NO: 90366 - RNA, 22 nt, Homo sapiens
uucacugggugugguggcucac

SEQ ID NO: 90367 - RNA, 22 nt, Homo sapiens
cuucucagugcucaucuuauuu

SEQ ID NO: 90368 - RNA, 22 nt, Homo sapiens
acaguacuuuuggauuugugaa

SEQ ID NO: 90369 - RNA, 22 nt, Homo sapiens
auguuugguagugaauauggua

SEQ ID NO: 90370 - RNA, 22 nt, Homo sapiens
uguuuuggagguccucacuaga

SEQ ID NO: 90371 - RNA, 22 nt, Homo sapiens
uacagucuggaggccuguguug

SEQ ID NO: 90372 - RNA, 22 nt, Homo sapiens
uuuuuugguaauugaacaauga

SEQ ID NO: 90373 - RNA, 22 nt, Homo sapiens
cacugcgacguccgccucccgg

SEQ ID NO: 90374 - RNA, 22 nt, Homo sapiens
gagguagagacuauguauuaga

SEQ ID NO: 90375 - RNA, 22 nt, Homo sapiens
uuuggauagugugguccuuuua

SEQ ID NO: 90376 - RNA, 22 nt, Homo sapiens
uauugcuuuacucucuuauccu

SEQ ID NO: 90377 - RNA, 23 nt, Homo sapiens
ggaguguauuggcacgaucucag

SEQ ID NO: 90378 - RNA, 22 nt, Homo sapiens
uuguacuuuuaguagagacggg

SEQ ID NO: 90379 - RNA, 23 nt, Homo sapiens
ugagucacuuugcuggggucucu

SEQ ID NO: 90380 - RNA, 22 nt, Homo sapiens
uuugaguuugaggugcugauga

SEQ ID NO: 90381 - RNA, 22 nt, Homo sapiens
uugcauagacaauauuaaucuu

SEQ ID NO: 90382 - RNA, 22 nt, Homo sapiens
uuggacuuuaagauagagaugu

SEQ ID NO: 90383 - RNA, 22 nt, Homo sapiens
ugucacuuugccuucuggacuu

SEQ ID NO: 90384 - RNA, 22 nt, Homo sapiens
cucaguagaaaauacauggacu

SEQ ID NO: 90385 - RNA, 22 nt, Homo sapiens
auuuugguuacauaguugagcu

SEQ ID NO: 90386 - RNA, 22 nt, Homo sapiens
uuugcacuuuuguaauaugguu

SEQ ID NO: 90387 - RNA, 22 nt, Homo sapiens
acagugcuuucaauguucagua

SEQ ID NO: 90388 - RNA, 22 nt, Homo sapiens
cugauaguucucuuuagaguuu

SEQ ID NO: 90389 - RNA, 22 nt, Homo sapiens
cucucaagaugcugggauuaca

SEQ ID NO: 90390 - RNA, 22 nt, Homo sapiens
uguaauaguaggcucacauuug

SEQ ID NO: 90391 - RNA, 22 nt, Homo sapiens
aggcaugauggcuccagaucau

SEQ ID NO: 90392 - RNA, 22 nt, Homo sapiens
cuuuuggugugaagaagcucuu

SEQ ID NO: 90393 - RNA, 22 nt, Homo sapiens
ugagaugguaaauuuuuguugu

SEQ ID NO: 90394 - RNA, 22 nt, Homo sapiens
ugaguagauccaagacuguccu

SEQ ID NO: 90395 - RNA, 21 nt, Homo sapiens
acaguacuugagaucuuuuga

SEQ ID NO: 90396 - RNA, 22 nt, Homo sapiens
gauuuuuggggaagccucuuau

SEQ ID NO: 90397 - RNA, 22 nt, Homo sapiens
uauggcuucuuauucuuucccg

SEQ ID NO: 90398 - RNA, 21 nt, Homo sapiens
gcuuuuucggaagucuuuggc

SEQ ID NO: 90399 - RNA, 22 nt, Homo sapiens
auugcauugugaucuucccaga

SEQ ID NO: 90400 - RNA, 22 nt, Homo sapiens
ucagucuuuuuuuggcaagcau

SEQ ID NO: 90401 - RNA, 21 nt, Homo sapiens
uugagaagaauuagcucuucc

SEQ ID NO: 90402 - RNA, 22 nt, Homo sapiens
gauaguugugagaacucuuacu

SEQ ID NO: 90403 - RNA, 22 nt, Homo sapiens
uugagauggaguguugcucugu

SEQ ID NO: 90404 - RNA, 22 nt, Homo sapiens
uugagauggagucuugcucucu

SEQ ID NO: 90405 - RNA, 23 nt, Homo sapiens
uuaaggugaugucuuugugccuc

SEQ ID NO: 90406 - RNA, 23 nt, Homo sapiens
uuucaguaguuguauccuguugc

SEQ ID NO: 90407 - RNA, 22 nt, Homo sapiens
uugaaagaugaacuggauugga

SEQ ID NO: 90408 - RNA, 22 nt, Homo sapiens
accacagugcuuccugcucacg

SEQ ID NO: 90409 - RNA, 19 nt, Homo sapiens
uugcauagguugaaccagc

SEQ ID NO: 90410 - RNA, 22 nt, Homo sapiens
uuggucacugacauguuugaaa

SEQ ID NO: 90411 - RNA, 22 nt, Homo sapiens
uucagauugcauaccgaaagua

SEQ ID NO: 90412 - RNA, 20 nt, Homo sapiens
agguagauagaugauagaua

SEQ ID NO: 90413 - RNA, 22 nt, Homo sapiens
uugaauagaagguuuuuuguuc

SEQ ID NO: 90414 - RNA, 22 nt, Homo sapiens
uucuagcaauggcagagugucu

SEQ ID NO: 90415 - RNA, 22 nt, Homo sapiens
cugaaagagcauuugaaugggu

SEQ ID NO: 90416 - RNA, 22 nt, Homo sapiens
uuacagucucaagagugcugca

SEQ ID NO: 90417 - RNA, 22 nt, Homo sapiens
gagauuuucagcuugacuggga

SEQ ID NO: 90418 - RNA, 22 nt, Homo sapiens
uugaauaggcucaugcuuauca

SEQ ID NO: 90419 - RNA, 23 nt, Homo sapiens
ugguuuguaagagauggacugga

SEQ ID NO: 90420 - RNA, 22 nt, Homo sapiens
cuuuuggucuaucagagaagca

SEQ ID NO: 90421 - RNA, 22 nt, Homo sapiens
ugcaacacauugccccugcucu

SEQ ID NO: 90422 - RNA, 22 nt, Homo sapiens
uaaggaguagaauaguaaggca

SEQ ID NO: 90423 - RNA, 22 nt, Homo sapiens
uucugcuugaucuaguguguug

SEQ ID NO: 90424 - RNA, 22 nt, Homo sapiens
ccacugcacuccagcccggcaa

SEQ ID NO: 90425 - RNA, 22 nt, Homo sapiens
cauugcaacuucugccucccag

SEQ ID NO: 90426 - RNA, 22 nt, Homo sapiens
cugugaucuuuuuucauguggu

SEQ ID NO: 90427 - RNA, 22 nt, Homo sapiens
uugaauagugacuuugauucug

SEQ ID NO: 90428 - RNA, 22 nt, Homo sapiens
gagguuauuggggugcuugugu

SEQ ID NO: 90429 - RNA, 22 nt, Homo sapiens
uagauuaucucaccacucgagu

SEQ ID NO: 90430 - RNA, 22 nt, Homo sapiens
ucuuuuugagucaguuucggua

SEQ ID NO: 90431 - RNA, 22 nt, Homo sapiens
agguaaacauggggacugcuac

SEQ ID NO: 90432 - RNA, 22 nt, Homo sapiens
ugagagaugaacuauucuugaa

SEQ ID NO: 90433 - RNA, 22 nt, Homo sapiens
ucagauugaugcauacuuaaau

SEQ ID NO: 90434 - RNA, 22 nt, Homo sapiens
acagugcuguuguguuuucacg

SEQ ID NO: 90435 - RNA, 22 nt, Homo sapiens
uugagauggagucuugcucuug

SEQ ID NO: 90436 - RNA, 22 nt, Homo sapiens
ucaguuuguauuucagguugca

SEQ ID NO: 90437 - RNA, 22 nt, Homo sapiens
gucucuugguuuagagcauuua

SEQ ID NO: 90438 - RNA, 22 nt, Homo sapiens
cacagucugggcuuguuuguac

SEQ ID NO: 90439 - RNA, 22 nt, Homo sapiens
uauugcauauuauucuaguggc

SEQ ID NO: 90440 - RNA, 22 nt, Homo sapiens
uugagauggagucuugcacugu

SEQ ID NO: 90441 - RNA, 22 nt, Homo sapiens
uuugguugcauucacauauuuc

SEQ ID NO: 90442 - RNA, 22 nt, Homo sapiens
aucugcauucccauguuuauug

SEQ ID NO: 90443 - RNA, 22 nt, Homo sapiens
uugauagacaucugaguuguug

SEQ ID NO: 90444 - RNA, 22 nt, Homo sapiens
uacagucuagaggagaaucagg

SEQ ID NO: 90445 - RNA, 21 nt, Homo sapiens
uuuuugguggucauggauaga

SEQ ID NO: 90446 - RNA, 22 nt, Homo sapiens
uugaauaguggugaaaguuuga

SEQ ID NO: 90447 - RNA, 22 nt, Homo sapiens
uucuugcuguauccucacaugg

SEQ ID NO: 90448 - RNA, 22 nt, Homo sapiens
acagugcuucugauaugaugcc

SEQ ID NO: 90449 - RNA, 22 nt, Homo sapiens
aguuuuugcugauagcaugcuu

SEQ ID NO: 90450 - RNA, 22 nt, Homo sapiens
agauauuuguuaggucugucag

SEQ ID NO: 90451 - RNA, 22 nt, Homo sapiens
uuggaaaccucugcagguguuu

SEQ ID NO: 90452 - RNA, 22 nt, Homo sapiens
uugggacuggaaggaguaaggg

SEQ ID NO: 90453 - RNA, 22 nt, Homo sapiens
ucuucuagcggaacccucuugu

SEQ ID NO: 90454 - RNA, 22 nt, Homo sapiens
ugaguagaagugaagauagugg

SEQ ID NO: 90455 - RNA, 22 nt, Homo sapiens
gcaugaugaauaauaucacaag

SEQ ID NO: 90456 - RNA, 22 nt, Homo sapiens
uagaucuuuaaaaggugcuaga

SEQ ID NO: 90457 - RNA, 20 nt, Homo sapiens
ucacugugaacuucuugagg

SEQ ID NO: 90458 - RNA, 22 nt, Homo sapiens
cugguuguucuggaugggcagg

SEQ ID NO: 90459 - RNA, 18 nt, Homo sapiens
uaacagucucucaggauc

SEQ ID NO: 90460 - RNA, 22 nt, Homo sapiens
agucagauuggcauuuguuggg

SEQ ID NO: 90461 - RNA, 22 nt, Homo sapiens
ucaguagagacaggauuucacc

SEQ ID NO: 90462 - RNA, 22 nt, Homo sapiens
uugaaagacaucaccuacugcu

SEQ ID NO: 90463 - RNA, 22 nt, Homo sapiens
uacucuuuagcuccuuaaggaa

SEQ ID NO: 90464 - RNA, 22 nt, Homo sapiens
uggaguguuggggcaggaucuc

SEQ ID NO: 90465 - RNA, 22 nt, Homo sapiens
auccugaagcuuuacugaauuc

SEQ ID NO: 90466 - RNA, 20 nt, Homo sapiens
cuuaucaguggcaaguauaa

SEQ ID NO: 90467 - RNA, 18 nt, Homo sapiens
cucacaguaacuuuuaag

SEQ ID NO: 90468 - RNA, 22 nt, Homo sapiens
ugacuugauacauguuuuugaa

SEQ ID NO: 90469 - RNA, 22 nt, Homo sapiens
auugucauuuucugagaaguaa

SEQ ID NO: 90470 - RNA, 22 nt, Homo sapiens
gccaaaaugcugggauuacagg

SEQ ID NO: 90471 - RNA, 22 nt, Homo sapiens
ugguuguuuuaaaugucgucug

SEQ ID NO: 90472 - RNA, 22 nt, Homo sapiens
uugagacggagucuugcucuuu

SEQ ID NO: 90473 - RNA, 22 nt, Homo sapiens
uucauaguucuuuuagucauua

SEQ ID NO: 90474 - RNA, 22 nt, Homo sapiens
ucacuauugacaacagugugga

SEQ ID NO: 90475 - RNA, 22 nt, Homo sapiens
aucacuuucuauuucugugcca

SEQ ID NO: 90476 - RNA, 22 nt, Homo sapiens
ucagguaguuugugggagauga

SEQ ID NO: 90477 - RNA, 22 nt, Homo sapiens
aucagauuccacauuuuaucag

SEQ ID NO: 90478 - RNA, 22 nt, Homo sapiens
uuuuggcuuaaagagaauguau

SEQ ID NO: 90479 - RNA, 22 nt, Homo sapiens
ugaguagaacuccuggagaugu

SEQ ID NO: 90480 - RNA, 22 nt, Homo sapiens
auucauagugcuaagguguauc

SEQ ID NO: 90481 - RNA, 22 nt, Homo sapiens
uuucauagaucaugcuuuugga

SEQ ID NO: 90482 - RNA, 22 nt, Homo sapiens
gucucuuguuaucauuucugag

SEQ ID NO: 90483 - RNA, 20 nt, Homo sapiens
ugaguagaggaguucuauca

SEQ ID NO: 90484 - RNA, 22 nt, Homo sapiens
gaagauaucuaguaccauuguc

SEQ ID NO: 90485 - RNA, 22 nt, Homo sapiens
aggagguagggugugaaacagc

SEQ ID NO: 90486 - RNA, 23 nt, Homo sapiens
uuugcacuugcuccuucuauggc

SEQ ID NO: 90487 - RNA, 22 nt, Homo sapiens
uugagacggaguuuugcucuug

SEQ ID NO: 90488 - RNA, 22 nt, Homo sapiens
uuacagucaaguuacauuucuc

SEQ ID NO: 90489 - RNA, 22 nt, Homo sapiens
gagauggagucuuuuucuguca

SEQ ID NO: 90490 - RNA, 22 nt, Homo sapiens
uugagauggagucuugcucugu

SEQ ID NO: 90491 - RNA, 22 nt, Homo sapiens
aacagucuccaguuguauccau

SEQ ID NO: 90492 - RNA, 22 nt, Homo sapiens
uagauuguaauaugcagaaugg

SEQ ID NO: 90493 - RNA, 22 nt, Homo sapiens
ucuuuggaggcgaucuguuuga

SEQ ID NO: 90494 - RNA, 22 nt, Homo sapiens
ucagucuuuuaccauuaaguau

SEQ ID NO: 90495 - RNA, 22 nt, Homo sapiens
aucagauuccagaggcagcacc

SEQ ID NO: 90496 - RNA, 22 nt, Homo sapiens
ugagauggaguuucacuuuugu

SEQ ID NO: 90497 - RNA, 19 nt, Homo sapiens
uagaugucuuugcauagau

SEQ ID NO: 90498 - RNA, 22 nt, Homo sapiens
cuuuuggugguucugaugcagg

SEQ ID NO: 90499 - RNA, 22 nt, Homo sapiens
guuuugguuauauggaucaguu

SEQ ID NO: 90500 - RNA, 22 nt, Homo sapiens
aucucuugccagucagaauggu

SEQ ID NO: 90501 - RNA, 22 nt, Homo sapiens
uuaaguagcugggcaugguggu

SEQ ID NO: 90502 - RNA, 22 nt, Homo sapiens
guagagguagacuuccuugucu

SEQ ID NO: 90503 - RNA, 22 nt, Homo sapiens
ccagucuuggugucuguagcac

SEQ ID NO: 90504 - RNA, 22 nt, Homo sapiens
uuucgguuaucuagcuuuauga

SEQ ID NO: 90505 - RNA, 23 nt, Homo sapiens
ggaguguaaugacucgaucucgg

SEQ ID NO: 90506 - RNA, 22 nt, Homo sapiens
uugagauggaguuuugcucuug

SEQ ID NO: 90507 - RNA, 20 nt, Homo sapiens
cucagauuauucugaagcaa

SEQ ID NO: 90508 - RNA, 20 nt, Homo sapiens
auguucuggaggacagaagc

SEQ ID NO: 90509 - RNA, 22 nt, Homo sapiens
auucccuuagcugccucagccu

SEQ ID NO: 90510 - RNA, 19 nt, Homo sapiens
auaguguaggaaaacagcu

SEQ ID NO: 90511 - RNA, 22 nt, Homo sapiens
cuucaucugguuugugaacuuu

SEQ ID NO: 90512 - RNA, 22 nt, Homo sapiens
ugaggauaguguugaaggcagg

SEQ ID NO: 90513 - RNA, 22 nt, Homo sapiens
uaugccucuucauaaaguauga

SEQ ID NO: 90514 - RNA, 22 nt, Homo sapiens
cacagucuugcaauauugagau

SEQ ID NO: 90515 - RNA, 22 nt, Homo sapiens
uuuguacugagccaagauggua

SEQ ID NO: 90516 - RNA, 22 nt, Homo sapiens
uugucacucuuccuaggguagg

SEQ ID NO: 90517 - RNA, 22 nt, Homo sapiens
ugaguagaacaucaagucauac

SEQ ID NO: 90518 - RNA, 22 nt, Homo sapiens
cucaaguacaugggauuacagg

SEQ ID NO: 90519 - RNA, 22 nt, Homo sapiens
uucugcuagucugucagaucuu

SEQ ID NO: 90520 - RNA, 22 nt, Homo sapiens
uuuuugguugguaggcuauuaa

SEQ ID NO: 90521 - RNA, 23 nt, Homo sapiens
uugcauagacauccucauagauu

SEQ ID NO: 90522 - RNA, 22 nt, Homo sapiens
uacauacuguaugguucuguuu

SEQ ID NO: 90523 - RNA, 18 nt, Homo sapiens
uugcauaguguauccaaa

SEQ ID NO: 90524 - RNA, 22 nt, Homo sapiens
uuacagucuuaggcagugcuuu

SEQ ID NO: 90525 - RNA, 22 nt, Homo sapiens
acacuguauccuucuguccuuu

SEQ ID NO: 90526 - RNA, 22 nt, Homo sapiens
uugaauagacagccagcuuuaa

SEQ ID NO: 90527 - RNA, 22 nt, Homo sapiens
uuuuggucuccaguuucugcug

SEQ ID NO: 90528 - RNA, 22 nt, Homo sapiens
uugagaugaaguuuugcucuuu

SEQ ID NO: 90529 - RNA, 22 nt, Homo sapiens
uugagaugaagucuugcucucu

SEQ ID NO: 90530 - RNA, 22 nt, Homo sapiens
gacagugugauacuuagucuca

SEQ ID NO: 90531 - RNA, 20 nt, Homo sapiens
uggcauguugguaugcaccc

SEQ ID NO: 90532 - RNA, 22 nt, Homo sapiens
ugucaucauuugagagaagaaa

SEQ ID NO: 90533 - RNA, 22 nt, Homo sapiens
ugucauguugguguacugcacc

SEQ ID NO: 90534 - RNA, 22 nt, Homo sapiens
ugugaauggugcugcaaugaac

SEQ ID NO: 90535 - RNA, 22 nt, Homo sapiens
uguuuguuugugauacgguaca

SEQ ID NO: 90536 - RNA, 22 nt, Homo sapiens
uguuuguuugauaugggauaaa

SEQ ID NO: 90537 - RNA, 22 nt, Homo sapiens
uguuuugguugucccuggccag

SEQ ID NO: 90538 - RNA, 22 nt, Homo sapiens
uuaaagcuggcguuacaguuug

SEQ ID NO: 90539 - RNA, 22 nt, Homo sapiens
uuaauuguaucuauagauguca

SEQ ID NO: 90540 - RNA, 22 nt, Homo sapiens
uuccacuuuuuccuugugcucc

SEQ ID NO: 90541 - RNA, 22 nt, Homo sapiens
uucucaaggagccuucguaacu

SEQ ID NO: 90542 - RNA, 22 nt, Homo sapiens
uuacaguaugaguaagaguucu

SEQ ID NO: 90543 - RNA, 22 nt, Homo sapiens
uuacaguauugcaaggacuagg

SEQ ID NO: 90544 - RNA, 22 nt, Homo sapiens
uuaguaguuugauaggaauagc

SEQ ID NO: 90545 - RNA, 22 nt, Homo sapiens
uuauacacugugggaguguaaa

SEQ ID NO: 90546 - RNA, 22 nt, Homo sapiens
uucagcaguggccaguggaaau

SEQ ID NO: 90547 - RNA, 22 nt, Homo sapiens
uuucccugaaggcucugaaguc

SEQ ID NO: 90548 - RNA, 22 nt, Homo sapiens
uuugaauggaaguuuugugaaa

SEQ ID NO: 90549 - RNA, 22 nt, Homo sapiens
uuucauguuuuucugugaggca

SEQ ID NO: 90550 - RNA, 22 nt, Homo sapiens
uuuguaagaugcauagauugca

SEQ ID NO: 90551 - RNA, 22 nt, Homo sapiens
uuugguugucacaacuggggga

SEQ ID NO: 90552 - RNA, 22 nt, Homo sapiens
uuuguucaccucaaggauggga

SEQ ID NO: 90553 - RNA, 22 nt, Homo sapiens
uuggcuguguuuauaugcugga

SEQ ID NO: 90554 - RNA, 23 nt, Homo sapiens
uuggccuccuugugucuagggcu

SEQ ID NO: 90555 - RNA, 22 nt, Homo sapiens
uugugaauggugccucaguaaa

SEQ ID NO: 90556 - RNA, 22 nt, Homo sapiens
uugcaucagcuccugauguacu

SEQ ID NO: 90557 - RNA, 22 nt, Homo sapiens
uugauguaggcauucaaggcua

SEQ ID NO: 90558 - RNA, 22 nt, Homo sapiens
uugaugauguuucugccuugcc

SEQ ID NO: 90559 - RNA, 23 nt, Homo sapiens
uugcauugcccuccauaguacuc

SEQ ID NO: 90560 - RNA, 22 nt, Homo sapiens
uugauagguuuuauguauaguu

SEQ ID NO: 90561 - RNA, 22 nt, Homo sapiens
uugaguccccacacuggguccc

SEQ ID NO: 90562 - RNA, 22 nt, Homo sapiens
uugaggugaauuugcaggaugc

SEQ ID NO: 90563 - RNA, 22 nt, Homo sapiens
caaguguuggcuuguauacaaa

SEQ ID NO: 90564 - RNA, 22 nt, Homo sapiens
auugaauuugguuugcuaagaa

SEQ ID NO: 90565 - RNA, 22 nt, Homo sapiens
auugacuugauauauagcugau

SEQ ID NO: 90566 - RNA, 22 nt, Homo sapiens
auucaagugaugugauucuucu

SEQ ID NO: 90567 - RNA, 22 nt, Homo sapiens
auuauuaguuguugaaugaagu

SEQ ID NO: 90568 - RNA, 22 nt, Homo sapiens
auuauguuguauuuccuugcag

SEQ ID NO: 90569 - RNA, 22 nt, Homo sapiens
auuauauguguaugugcauacc

SEQ ID NO: 90570 - RNA, 22 nt, Homo sapiens
cuagauuauccaacuuauuagc

SEQ ID NO: 90571 - RNA, 22 nt, Homo sapiens
gauaugaguagucgcauugaug

SEQ ID NO: 90572 - RNA, 22 nt, Homo sapiens
gauaguugugagaacucuuacu

SEQ ID NO: 90573 - RNA, 22 nt, Homo sapiens
gaugauguuacucuuuuuccuu

SEQ ID NO: 90574 - RNA, 22 nt, Homo sapiens
gauaauucuagcagauacaggc

SEQ ID NO: 90575 - RNA, 22 nt, Homo sapiens
gauaaaucuuggcuagucuaag

SEQ ID NO: 90576 - RNA, 22 nt, Homo sapiens
gcaaaaaguagugcugguuagg

SEQ ID NO: 90577 - RNA, 22 nt, Homo sapiens
cugucuguuucaaaagugguua

SEQ ID NO: 90578 - RNA, 22 nt, Homo sapiens
cugugguuacguucuuugugcu

SEQ ID NO: 90579 - RNA, 22 nt, Homo sapiens
cuucggugaguagauggguuaa

SEQ ID NO: 90580 - RNA, 23 nt, Homo sapiens
gaaguaauaaauggauucuuaac

SEQ ID NO: 90581 - RNA, 22 nt, Homo sapiens
gaaucauuggguugauucaaga

SEQ ID NO: 90582 - RNA, 22 nt, Homo sapiens
cuuuuacacuguuagugggaau

SEQ ID NO: 90583 - RNA, 22 nt, Homo sapiens
cuuuuacacugguggugggaau

SEQ ID NO: 90584 - RNA, 22 nt, Homo sapiens
cuuuuacacuguuggcaggauu

SEQ ID NO: 90585 - RNA, 22 nt, Homo sapiens
auguaguagauauuuauggaaa

SEQ ID NO: 90586 - RNA, 22 nt, Homo sapiens
augauacuggcuucauagaaug

SEQ ID NO: 90587 - RNA, 22 nt, Homo sapiens
augagggagggguggugccgca

SEQ ID NO: 90588 - RNA, 22 nt, Homo sapiens
augagggaagcucacgugucca

SEQ ID NO: 90589 - RNA, 22 nt, Homo sapiens
auagaaucaucugugcacuagu

SEQ ID NO: 90590 - RNA, 22 nt, Homo sapiens
auaauguuugauugagcagaua

SEQ ID NO: 90591 - RNA, 22 nt, Homo sapiens
agguauauuggacagauguaaa

SEQ ID NO: 90592 - RNA, 22 nt, Homo sapiens
agguuguguuugugauuagaua

SEQ ID NO: 90593 - RNA, 22 nt, Homo sapiens
aguucaaugcucuuucuacuau

SEQ ID NO: 90594 - RNA, 21 nt, Homo sapiens
auauuacuguuagaggacugc

SEQ ID NO: 90595 - RNA, 22 nt, Homo sapiens
aucaaguaguuauacguaaagg

SEQ ID NO: 90596 - RNA, 22 nt, Homo sapiens
aucacaguuaagaggugaugaa

SEQ ID NO: 90597 - RNA, 22 nt, Homo sapiens
agagguauuggaaggaguguca

SEQ ID NO: 90598 - RNA, 22 nt, Homo sapiens
agaguauagcaacuuaguaaaa

SEQ ID NO: 90599 - RNA, 21 nt, Homo sapiens
agccugugggucauaguugcc

SEQ ID NO: 90600 - RNA, 22 nt, Homo sapiens
acaagugaauacaggauucucu

SEQ ID NO: 90601 - RNA, 22 nt, Homo sapiens
aauugcaccaucuagaucaaga

SEQ ID NO: 90602 - RNA, 22 nt, Homo sapiens
aaucuguagaaggugcacauuc

SEQ ID NO: 90603 - RNA, 22 nt, Homo sapiens
ucuuugauuuuguuacuaagac

SEQ ID NO: 90604 - RNA, 22 nt, Homo sapiens
ucuuugauuaugcagauggguu

SEQ ID NO: 90605 - RNA, 22 nt, Homo sapiens
ucauugguucuggguguuguug

SEQ ID NO: 90606 - RNA, 22 nt, Homo sapiens
ucauugcuuauuuguuggugga

SEQ ID NO: 90607 - RNA, 18 nt, Homo sapiens
ucccucagaauuauagaa

SEQ ID NO: 90608 - RNA, 22 nt, Homo sapiens
ugaucuguguauauugaaccag

SEQ ID NO: 90609 - RNA, 22 nt, Homo sapiens
ugauggccuguucuccauaugu

SEQ ID NO: 90610 - RNA, 22 nt, Homo sapiens
ugagcaauaaaguuacacaguu

SEQ ID NO: 90611 - RNA, 22 nt, Homo sapiens
ugagcauuguguuugacuguga

SEQ ID NO: 90612 - RNA, 22 nt, Homo sapiens
ugagacaaucucaucucaguga

SEQ ID NO: 90613 - RNA, 22 nt, Homo sapiens
ugagguauuuuguuaugcagcc

SEQ ID NO: 90614 - RNA, 22 nt, Homo sapiens
ugaguuguugcauucuuggugu

SEQ ID NO: 90615 - RNA, 18 nt, Homo sapiens
ugauaucaucacaauuga

SEQ ID NO: 90616 - RNA, 22 nt, Homo sapiens
guauuuuguuagggugugguau

SEQ ID NO: 90617 - RNA, 20 nt, Homo sapiens
guuaaggcagcauuacucuu

SEQ ID NO: 90618 - RNA, 22 nt, Homo sapiens
guuaugcagcaauugauaaucu

SEQ ID NO: 90619 - RNA, 22 nt, Homo sapiens
guccuguuuuuaagguucauag

SEQ ID NO: 90620 - RNA, 22 nt, Homo sapiens
gucuaugagucccugaauuuaa

SEQ ID NO: 90621 - RNA, 22 nt, Homo sapiens
gugagauuaccauuuaaaucag

SEQ ID NO: 90622 - RNA, 20 nt, Homo sapiens
gugauuggucacugguuguu

SEQ ID NO: 90623 - RNA, 22 nt, Homo sapiens
gugauuauccacgucuuuguga

SEQ ID NO: 90624 - RNA, 22 nt, Homo sapiens
gugauuauuaugcacugcaugc

SEQ ID NO: 90625 - RNA, 22 nt, Homo sapiens
gugaucaugauccugaagcauu

SEQ ID NO: 90626 - RNA, 21 nt, Homo sapiens
gugaucaugucacugcacucc

SEQ ID NO: 90627 - RNA, 22 nt, Homo sapiens
gugaucuucauggaaggugaaa

SEQ ID NO: 90628 - RNA, 23 nt, Homo sapiens
guucaucagggauauuggccuga

SEQ ID NO: 90629 - RNA, 17 nt, Homo sapiens
guugaguuugagucaag

SEQ ID NO: 90630 - RNA, 22 nt, Homo sapiens
guugauguugcagucuugagga

SEQ ID NO: 90631 - RNA, 18 nt, Homo sapiens
uaaaggcacuguguuguu

SEQ ID NO: 90632 - RNA, 22 nt, Homo sapiens
uaaauugcauaaguacaaauga

SEQ ID NO: 90633 - RNA, 22 nt, Homo sapiens
uaaucucagcuacucaggaggc

SEQ ID NO: 90634 - RNA, 22 nt, Homo sapiens
uaaggauuuuggugauuacacu

SEQ ID NO: 90635 - RNA, 22 nt, Homo sapiens
uagauuaucucaccacucgagu

SEQ ID NO: 90636 - RNA, 19 nt, Homo sapiens
uagaugucuuugcauagau

SEQ ID NO: 90637 - RNA, 22 nt, Homo sapiens
uagagguauguauaguauucuu

SEQ ID NO: 90638 - RNA, 22 nt, Homo sapiens
uagaucaacuuugguaagagaa

SEQ ID NO: 90639 - RNA, 22 nt, Homo sapiens
uauugccuugccuacuuuucca

SEQ ID NO: 90640 - RNA, 22 nt, Homo sapiens
uaugagguagguaugacuauca

SEQ ID NO: 90641 - RNA, 22 nt, Homo sapiens
uaugaugcuguuuagaaucucu

SEQ ID NO: 90642 - RNA, 21 nt, Homo sapiens
uauaguaguaugauuuacaau

SEQ ID NO: 90643 - RNA, 20 nt, Homo sapiens
uagcaggugucaggugauau

SEQ ID NO: 90644 - RNA, 22 nt, Homo sapiens
gugauagaucugggauucagaa

SEQ ID NO: 90645 - RNA, 22 nt, Homo sapiens
gugaguuauuauuuauguaaac

SEQ ID NO: 90646 - RNA, 22 nt, Homo sapiens
uaacaccuuugauagcacuuuu

SEQ ID NO: 90647 - RNA, 22 nt, Homo sapiens
guuuugguuauauggaucaguu

SEQ ID NO: 90648 - RNA, 22 nt, Homo sapiens
guucaucagggauacuggcuua

SEQ ID NO: 90649 - RNA, 22 nt, Homo sapiens
guaucaugaaguuucuucauuu

SEQ ID NO: 90650 - RNA, 22 nt, Homo sapiens
guauaguaguacaaaaguuuuu

SEQ ID NO: 90651 - RNA, 22 nt, Homo sapiens
guaucauugccuaaugcucuca

SEQ ID NO: 90652 - RNA, 22 nt, Homo sapiens
gugaaagcaucugacugugcca

SEQ ID NO: 90653 - RNA, 22 nt, Homo sapiens
uagcauaauuuguagaaaauca

SEQ ID NO: 90654 - RNA, 22 nt, Homo sapiens
uagugaaugucacuggcuguug

SEQ ID NO: 90655 - RNA, 22 nt, Homo sapiens
uaucaagaugacaaacuuugcu

SEQ ID NO: 90656 - RNA, 22 nt, Homo sapiens
uaguuauggaguaauuuuaagc

SEQ ID NO: 90657 - RNA, 22 nt, Homo sapiens
uagauuaucccugauuugucca

SEQ ID NO: 90658 - RNA, 17 nt, Homo sapiens
uauguaguacuuauaaa

SEQ ID NO: 90659 - RNA, 22 nt, Homo sapiens
uaucucaguguacaggaugaua

SEQ ID NO: 90660 - RNA, 22 nt, Homo sapiens
ucaacguauuuauauagcagag

SEQ ID NO: 90661 - RNA, 22 nt, Homo sapiens
cugagagaggagcuaaaacugc

SEQ ID NO: 90662 - RNA, 22 nt, Homo sapiens
cauggauuuuuuugaauggcag

SEQ ID NO: 90663 - RNA, 22 nt, Homo sapiens
cacagugaacugguggguuuuu

SEQ ID NO: 90664 - RNA, 22 nt, Homo sapiens
cacugcauuggaugguuccucc

SEQ ID NO: 90665 - RNA, 22 nt, Homo sapiens
gauuagaacagaagucagauua

SEQ ID NO: 90666 - RNA, 18 nt, Homo sapiens
gauguaguauggugugga

SEQ ID NO: 90667 - RNA, 22 nt, Homo sapiens
ggagucugauuuuuauguugcu

SEQ ID NO: 90668 - RNA, 21 nt, Homo sapiens
cuuugguuucugacuugcaua

SEQ ID NO: 90669 - RNA, 22 nt, Homo sapiens
cuuuuacacuguuggugggaau

SEQ ID NO: 90670 - RNA, 22 nt, Homo sapiens
cuuuuacacugcuggugggaau

SEQ ID NO: 90671 - RNA, 22 nt, Homo sapiens
gagcuaguagauuuuaaauauu

SEQ ID NO: 90672 - RNA, 22 nt, Homo sapiens
gagauuaacauuugaggagcug

SEQ ID NO: 90673 - RNA, 22 nt, Homo sapiens
ugagagaugauaaaauguuugu

SEQ ID NO: 90674 - RNA, 17 nt, Homo sapiens
ugagggaugccugguuc

SEQ ID NO: 90675 - RNA, 22 nt, Homo sapiens
ugagauauauauauuugagaca

SEQ ID NO: 90676 - RNA, 22 nt, Homo sapiens
ugagauaguacuuuuuuaaagg

SEQ ID NO: 90677 - RNA, 22 nt, Homo sapiens
ugagaucaagguuaauauaauc

SEQ ID NO: 90678 - RNA, 22 nt, Homo sapiens
ugacuuuagaauuuuauccaga

SEQ ID NO: 90679 - RNA, 22 nt, Homo sapiens
ugacagcaucaggauuggagag

SEQ ID NO: 90680 - RNA, 22 nt, Homo sapiens
ugacagagaagcauugaguuca

SEQ ID NO: 90681 - RNA, 22 nt, Homo sapiens
ugaaauaguuaaguugccuagu

SEQ ID NO: 90682 - RNA, 22 nt, Homo sapiens
ucucuguuuauuuuugguguau

SEQ ID NO: 90683 - RNA, 22 nt, Homo sapiens
ucuagaugaaguauaaaguagu

SEQ ID NO: 90684 - RNA, 22 nt, Homo sapiens
uccugagaauagaguugcaugu

SEQ ID NO: 90685 - RNA, 22 nt, Homo sapiens
ucugugguucaggcuggagugc

SEQ ID NO: 90686 - RNA, 22 nt, Homo sapiens
ucuguggucagaguccuuggcc

SEQ ID NO: 90687 - RNA, 22 nt, Homo sapiens
ucugugguuguugcauggaaug

SEQ ID NO: 90688 - RNA, 22 nt, Homo sapiens
ucuguuguuaucauaauauuga

SEQ ID NO: 90689 - RNA, 22 nt, Homo sapiens
ugucauguggcuaacgauucau

SEQ ID NO: 90690 - RNA, 19 nt, Homo sapiens
ugucaucaucuuuucuugc

SEQ ID NO: 90691 - RNA, 18 nt, Homo sapiens
ugucagaguggauuguaa

SEQ ID NO: 90692 - RNA, 22 nt, Homo sapiens
uguauguugauguuauauucug

SEQ ID NO: 90693 - RNA, 22 nt, Homo sapiens
ugucaagaugguuugauguugu

SEQ ID NO: 90694 - RNA, 20 nt, Homo sapiens
ugucaagaaacauuacuuau

SEQ ID NO: 90695 - RNA, 22 nt, Homo sapiens
ugguguuugagaagcugauguc

SEQ ID NO: 90696 - RNA, 23 nt, Homo sapiens
ugguuuguaagagauggacugga

SEQ ID NO: 90697 - RNA, 21 nt, Homo sapiens
uggaaucuauuauuccaguuu

SEQ ID NO: 90698 - RNA, 22 nt, Homo sapiens
ugcagugucaauaauaauuagu

SEQ ID NO: 90699 - RNA, 22 nt, Homo sapiens
ugagguaugugaugucuuuuag

SEQ ID NO: 90700 - RNA, 22 nt, Homo sapiens
ugagguaugacuuauuauucuu

SEQ ID NO: 90701 - RNA, 22 nt, Homo sapiens
uuccaguguguucauccucaga

SEQ ID NO: 90702 - RNA, 22 nt, Homo sapiens
uuccagugggacgagaugugga

SEQ ID NO: 90703 - RNA, 22 nt, Homo sapiens
uugacuuagacauucaguugga

SEQ ID NO: 90704 - RNA, 22 nt, Homo sapiens
uugacguaggaggauguugaga

SEQ ID NO: 90705 - RNA, 22 nt, Homo sapiens
uugagcuaugaguuaauaggac

SEQ ID NO: 90706 - RNA, 22 nt, Homo sapiens
uugagauggugccacuguacuc

SEQ ID NO: 90707 - RNA, 22 nt, Homo sapiens
uuauggcuuugcgguguuagca

SEQ ID NO: 90708 - RNA, 22 nt, Homo sapiens
uuagucaaguguacugugaaug

SEQ ID NO: 90709 - RNA, 22 nt, Homo sapiens
uuauacuacuauaaagagguag

SEQ ID NO: 90710 - RNA, 22 nt, Homo sapiens
uuagaguacaggggaaucaagg

SEQ ID NO: 90711 - RNA, 20 nt, Homo sapiens
uuagaguaguaugauuuaua

SEQ ID NO: 90712 - RNA, 22 nt, Homo sapiens
uuagguaauauauugcugcuuu

SEQ ID NO: 90713 - RNA, 22 nt, Homo sapiens
ugugaagaaagucauugguagc

SEQ ID NO: 90714 - RNA, 22 nt, Homo sapiens
ugugaucaugguauuaaucugc

SEQ ID NO: 90715 - RNA, 22 nt, Homo sapiens
ugugaucaauuagugaugucug

SEQ ID NO: 90716 - RNA, 22 nt, Homo sapiens
uuaauguaauugauugauugac

SEQ ID NO: 90717 - RNA, 22 nt, Homo sapiens
uuaaugcuuuugggauauuucu

SEQ ID NO: 90718 - RNA, 22 nt, Homo sapiens
uuacccuuuaacccuuuaaagu

SEQ ID NO: 90719 - RNA, 22 nt, Homo sapiens
uuaaguagaugaaugugaaugu

SEQ ID NO: 90720 - RNA, 22 nt, Homo sapiens
uguugguuaaaucagguuuuaa

SEQ ID NO: 90721 - RNA, 22 nt, Homo sapiens
uuuuuggguaaugauuaucaau

SEQ ID NO: 90722 - RNA, 22 nt, Homo sapiens
uuuuugaguaaauauaaauugu

SEQ ID NO: 90723 - RNA, 21 nt, Homo sapiens
aagcacauugaguguguguga

SEQ ID NO: 90724 - RNA, 22 nt, Homo sapiens
uugauauucugagaagcugaag

SEQ ID NO: 90725 - RNA, 22 nt, Homo sapiens
uugaucacuguacuaugacuau

SEQ ID NO: 90726 - RNA, 22 nt, Homo sapiens
uugaucaauagaauacaacaga

SEQ ID NO: 90727 - RNA, 22 nt, Homo sapiens
uuguuaagaugcagauucugga

SEQ ID NO: 90728 - RNA, 22 nt, Homo sapiens
uugucaugguuaauuuuaugua

SEQ ID NO: 90729 - RNA, 22 nt, Homo sapiens
acuuuuugauggggagaacauu

SEQ ID NO: 90730 - RNA, 22 nt, Homo sapiens
agagaucauuuuguuucaaauc

SEQ ID NO: 90731 - RNA, 22 nt, Homo sapiens
agaucauaugcaguaaugaacu

SEQ ID NO: 90732 - RNA, 21 nt, Homo sapiens
agagucaucucuaucuguacc

SEQ ID NO: 90733 - RNA, 22 nt, Homo sapiens
auaaaagcaggucuaggucagg

SEQ ID NO: 90734 - RNA, 22 nt, Homo sapiens
agcuaguauuuuguuaaggauu

SEQ ID NO: 90735 - RNA, 18 nt, Homo sapiens
auucuacaggccuuuuga

SEQ ID NO: 90736 - RNA, 22 nt, Homo sapiens
auucaacuaauuauugaagaug

SEQ ID NO: 90737 - RNA, 22 nt, Homo sapiens
auguggugguagccaggacagg

SEQ ID NO: 90738 - RNA, 21 nt, Homo sapiens
auguaaugaagaagccacugg

SEQ ID NO: 90739 - RNA, 20 nt, Homo sapiens
augguaguagcaccuuuaca

SEQ ID NO: 90740 - RNA, 22 nt, Homo sapiens
augauacuguucuaagauuuuu

SEQ ID NO: 90741 - RNA, 22 nt, Homo sapiens
auaauagcugaucauuuagaag

SEQ ID NO: 90742 - RNA, 22 nt, Homo sapiens
auaagaguaguacauaugagac

SEQ ID NO: 90743 - RNA, 22 nt, Homo sapiens
auaugguguuugcuauucagcu

SEQ ID NO: 90744 - RNA, 22 nt, Homo sapiens
aucaccuggaggugaucacuug

SEQ ID NO: 90745 - RNA, 22 nt, Homo sapiens
aucaccauguguacauuagacc

SEQ ID NO: 90746 - RNA, 22 nt, Homo sapiens
aucacugugauuucuacugugc

SEQ ID NO: 90747 - RNA, 22 nt, Homo sapiens
augagaaucauuucagcuugua

SEQ ID NO: 90748 - RNA, 22 nt, Homo sapiens
aaagaguucagguagauuucaa

SEQ ID NO: 90749 - RNA, 22 nt, Homo sapiens
aauauugucaaaauggauucca

SEQ ID NO: 90750 - RNA, 22 nt, Homo sapiens
aaucugucaguuuuguguuaau

SEQ ID NO: 90751 - RNA, 22 nt, Homo sapiens
uuuugguguacaauucuaugga

SEQ ID NO: 90752 - RNA, 22 nt, Homo sapiens
uuuugguuguuggguaagagua

SEQ ID NO: 90753 - RNA, 22 nt, Homo sapiens
uuugaagcuaaggugcuugguu

SEQ ID NO: 90754 - RNA, 23 nt, Homo sapiens
uuauggcuuuuauuauguugagg

SEQ ID NO: 90755 - RNA, 22 nt, Homo sapiens
uuauauguuacucccucuagca

SEQ ID NO: 90756 - RNA, 22 nt, Homo sapiens
uuaggcuaguuucuuaaacucu

SEQ ID NO: 90757 - RNA, 22 nt, Homo sapiens
uuauaguuuuucaccuggagaa

SEQ ID NO: 90758 - RNA, 22 nt, Homo sapiens
uguguaauaccuuugacuauau

SEQ ID NO: 90759 - RNA, 18 nt, Homo sapiens
ugugcaauauuaaccacc

SEQ ID NO: 90760 - RNA, 22 nt, Homo sapiens
uuaaugaacuuuauuuuguaga

SEQ ID NO: 90761 - RNA, 20 nt, Homo sapiens
ugugauuauuuaguugcaug

SEQ ID NO: 90762 - RNA, 17 nt, Homo sapiens
ugugaucaucacccuug

SEQ ID NO: 90763 - RNA, 22 nt, Homo sapiens
ugucuuggacuugaaucucauu

SEQ ID NO: 90764 - RNA, 22 nt, Homo sapiens
ugucaaagagacaucugcacuc

SEQ ID NO: 90765 - RNA, 22 nt, Homo sapiens
ugucaauauguaauaacugaau

SEQ ID NO: 90766 - RNA, 22 nt, Homo sapiens
uguaauguuugguagguuaggu

SEQ ID NO: 90767 - RNA, 22 nt, Homo sapiens
uguauagaucugauucaucucc

SEQ ID NO: 90768 - RNA, 22 nt, Homo sapiens
uggcuacuguacuugagcuauu

SEQ ID NO: 90769 - RNA, 22 nt, Homo sapiens
ugguguccugucucugcgcuug

SEQ ID NO: 90770 - RNA, 22 nt, Homo sapiens
uugugcuuuuuaaauagcuucc

SEQ ID NO: 90771 - RNA, 22 nt, Homo sapiens
uuuaauguuacaguauugguau

SEQ ID NO: 90772 - RNA, 22 nt, Homo sapiens
uuucuacagugaacgauuucua

SEQ ID NO: 90773 - RNA, 22 nt, Homo sapiens
uuuauggagagauauuuauggu

SEQ ID NO: 90774 - RNA, 19 nt, Homo sapiens
uuggucccuuuggguucuu

SEQ ID NO: 90775 - RNA, 22 nt, Homo sapiens
uuguaaucaacacaucauuggg

SEQ ID NO: 90776 - RNA, 22 nt, Homo sapiens
uuguaaaguucuuaggaagcuc

SEQ ID NO: 90777 - RNA, 22 nt, Homo sapiens
uuggaaacaccuggugagguua

SEQ ID NO: 90778 - RNA, 22 nt, Homo sapiens
uuggaagcacauuguuuaauua

SEQ ID NO: 90779 - RNA, 22 nt, Homo sapiens
uugguaaucccuagugucuaga

SEQ ID NO: 90780 - RNA, 22 nt, Homo sapiens
uugagauaggaacucacuaugc

SEQ ID NO: 90781 - RNA, 22 nt, Homo sapiens
uugagauggagucucacgcauu

SEQ ID NO: 90782 - RNA, 22 nt, Homo sapiens
uugauguugaggacauaaaccu

SEQ ID NO: 90783 - RNA, 22 nt, Homo sapiens
uugcagagucaguuauuuugcc

SEQ ID NO: 90784 - RNA, 22 nt, Homo sapiens
acauugcauauggcacccucuu

SEQ ID NO: 90785 - RNA, 22 nt, Homo sapiens
accauugcacuccuuucugggc

SEQ ID NO: 90786 - RNA, 21 nt, Homo sapiens
agagaacugaaacaugugacu

SEQ ID NO: 90787 - RNA, 22 nt, Homo sapiens
agagaacugauuggaugugggc

SEQ ID NO: 90788 - RNA, 22 nt, Homo sapiens
agagugcuuuauuagauguagc

SEQ ID NO: 90789 - RNA, 19 nt, Homo sapiens
agaguauuguuacuucucu

SEQ ID NO: 90790 - RNA, 22 nt, Homo sapiens
agagauaaagauuuuaauuuug

SEQ ID NO: 90791 - RNA, 22 nt, Homo sapiens
agagauacauucugagaagugc

SEQ ID NO: 90792 - RNA, 22 nt, Homo sapiens
aagugucuuaccgggagggagu

SEQ ID NO: 90793 - RNA, 23 nt, Homo sapiens
aagucauggaaucaaaugaggug

SEQ ID NO: 90794 - RNA, 22 nt, Homo sapiens
aucaccuuucccuuucugaauc

SEQ ID NO: 90795 - RNA, 22 nt, Homo sapiens
aucugcauucccauguuuauug

SEQ ID NO: 90796 - RNA, 22 nt, Homo sapiens
auccuugagaaaauaaaugacc

SEQ ID NO: 90797 - RNA, 22 nt, Homo sapiens
aucuacuugcugggucucugga

SEQ ID NO: 90798 - RNA, 22 nt, Homo sapiens
augaaugucuuauuuugagaaa

SEQ ID NO: 90799 - RNA, 22 nt, Homo sapiens
auaagaucauuugcuaagaggg

SEQ ID NO: 90800 - RNA, 22 nt, Homo sapiens
auaaaugccuguuguuuuaagc

SEQ ID NO: 90801 - RNA, 22 nt, Homo sapiens
agugauguggaguuuggaugga

SEQ ID NO: 90802 - RNA, 22 nt, Homo sapiens
agucaagaaucucagcaucuuu

SEQ ID NO: 90803 - RNA, 22 nt, Homo sapiens
agcuguuguucucagaggcuuu

SEQ ID NO: 90804 - RNA, 22 nt, Homo sapiens
cuuugaugagaaaauacuuugu

SEQ ID NO: 90805 - RNA, 22 nt, Homo sapiens
cuguaugugagaaauaauaagu

SEQ ID NO: 90806 - RNA, 22 nt, Homo sapiens
cuacauuguagguauucaaacu

SEQ ID NO: 90807 - RNA, 19 nt, Homo sapiens
cuuugguugagcguguugg

SEQ ID NO: 90808 - RNA, 22 nt, Homo sapiens
gacuggauagauaaaguuaguu

SEQ ID NO: 90809 - RNA, 22 nt, Homo sapiens
gagaucaaugccuauggcuuuc

SEQ ID NO: 90810 - RNA, 22 nt, Homo sapiens
gagaucaugcugguucucucau

SEQ ID NO: 90811 - RNA, 22 nt, Homo sapiens
gagaucaaguauucuccacuaa

SEQ ID NO: 90812 - RNA, 21 nt, Homo sapiens
gagaaucaucauggcugcaua

SEQ ID NO: 90813 - RNA, 21 nt, Homo sapiens
gagaaucuuuucagggcaaac

SEQ ID NO: 90814 - RNA, 22 nt, Homo sapiens
gauguguuuguuucuggaggag

SEQ ID NO: 90815 - RNA, 22 nt, Homo sapiens
gaucugugugauuggaugcauu

SEQ ID NO: 90816 - RNA, 22 nt, Homo sapiens
gagauuaauacacaucaaaugc

SEQ ID NO: 90817 - RNA, 22 nt, Homo sapiens
gagaugugugugauuauauaau

SEQ ID NO: 90818 - RNA, 22 nt, Homo sapiens
gaguuagguugucaaugucuua

SEQ ID NO: 90819 - RNA, 22 nt, Homo sapiens
cauauaguaggugcucuguguu

SEQ ID NO: 90820 - RNA, 22 nt, Homo sapiens
auucaucagggauauuggucug

SEQ ID NO: 90821 - RNA, 22 nt, Homo sapiens
auguuagcaucuggcacuaugg

SEQ ID NO: 90822 - RNA, 22 nt, Homo sapiens
auguuauguuaaugauaaugga

SEQ ID NO: 90823 - RNA, 22 nt, Homo sapiens
auggcuagauuguaugguaguu

SEQ ID NO: 90824 - RNA, 22 nt, Homo sapiens
auugucacuuaaaagugcaugu

SEQ ID NO: 90825 - RNA, 22 nt, Homo sapiens
auuguguagucuuacugcuugc

SEQ ID NO: 90826 - RNA, 22 nt, Homo sapiens
gugguguuugagcugccaggga

SEQ ID NO: 90827 - RNA, 22 nt, Homo sapiens
gugguucuaaaccuuuuuuggu

SEQ ID NO: 90828 - RNA, 19 nt, Homo sapiens
gugguauuaccuuuugauu

SEQ ID NO: 90829 - RNA, 22 nt, Homo sapiens
uaacuucaucauaagucaagaa

SEQ ID NO: 90830 - RNA, 22 nt, Homo sapiens
uaccacugccgagaaaacagau

SEQ ID NO: 90831 - RNA, 22 nt, Homo sapiens
uaauagagucauuauuauuguu

SEQ ID NO: 90832 - RNA, 22 nt, Homo sapiens
uaagucuuuuuggaguuuauaa

SEQ ID NO: 90833 - RNA, 22 nt, Homo sapiens
uaaguuagugugagaauuuugc

SEQ ID NO: 90834 - RNA, 18 nt, Homo sapiens
uaauaacugugaccuuga

SEQ ID NO: 90835 - RNA, 22 nt, Homo sapiens
uaauacucuucucauuuuacag

SEQ ID NO: 90836 - RNA, 22 nt, Homo sapiens
uaugacuuguuuucuggucugc

SEQ ID NO: 90837 - RNA, 22 nt, Homo sapiens
uauggccuuuuuaaugauauug

SEQ ID NO: 90838 - RNA, 22 nt, Homo sapiens
uauugauuaauugugauuaggc

SEQ ID NO: 90839 - RNA, 22 nt, Homo sapiens
uauauguuuucauaaggcuaga

SEQ ID NO: 90840 - RNA, 23 nt, Homo sapiens
uauaugugucuaggagcuauggu

SEQ ID NO: 90841 - RNA, 22 nt, Homo sapiens
uagcuguuggugggaagucaga

SEQ ID NO: 90842 - RNA, 22 nt, Homo sapiens
gugcuuauccccauucuggagg

SEQ ID NO: 90843 - RNA, 22 nt, Homo sapiens
gugauuuaguagaugcuaguua

SEQ ID NO: 90844 - RNA, 22 nt, Homo sapiens
gugauugugaaaacauuaagaa

SEQ ID NO: 90845 - RNA, 22 nt, Homo sapiens
gucauauaggguuuaccuguau

SEQ ID NO: 90846 - RNA, 22 nt, Homo sapiens
gcugauguuuucagguaauucu

SEQ ID NO: 90847 - RNA, 17 nt, Homo sapiens
gcugauguuugcauuuu

SEQ ID NO: 90848 - RNA, 22 nt, Homo sapiens
ggcucguguuuucuguccaguu

SEQ ID NO: 90849 - RNA, 22 nt, Homo sapiens
uggaguguagaagccagccucc

SEQ ID NO: 90850 - RNA, 22 nt, Homo sapiens
uggaguguaauuagccaucagu

SEQ ID NO: 90851 - RNA, 19 nt, Homo sapiens
ugcuuauccagagaaacuu

SEQ ID NO: 90852 - RNA, 22 nt, Homo sapiens
ugcugcuguuguuguuacuagc

SEQ ID NO: 90853 - RNA, 22 nt, Homo sapiens
uggaaucuuaggugaaggcuuu

SEQ ID NO: 90854 - RNA, 19 nt, Homo sapiens
ugaguauauuguauucauu

SEQ ID NO: 90855 - RNA, 22 nt, Homo sapiens
ugagauuaaucuuuaaguaaga

SEQ ID NO: 90856 - RNA, 22 nt, Homo sapiens
ugagaugugaucaccugaaggg

SEQ ID NO: 90857 - RNA, 22 nt, Homo sapiens
ugagucaugcuggagucauggc

SEQ ID NO: 90858 - RNA, 22 nt, Homo sapiens
ugaguuaggagaguguggcucu

SEQ ID NO: 90859 - RNA, 22 nt, Homo sapiens
ugaguuagguaauaauaaauau

SEQ ID NO: 90860 - RNA, 22 nt, Homo sapiens
ugacagaggucuuuuaauagcu

SEQ ID NO: 90861 - RNA, 22 nt, Homo sapiens
ugagauaacuaaaaacauuuug

SEQ ID NO: 90862 - RNA, 22 nt, Homo sapiens
ugagauauugggaguaauguca

SEQ ID NO: 90863 - RNA, 22 nt, Homo sapiens
ugagaucugucuuuauaguauu

SEQ ID NO: 90864 - RNA, 22 nt, Homo sapiens
uauuucaguugugcagguaguu

SEQ ID NO: 90865 - RNA, 22 nt, Homo sapiens
uauuugguuauaugaguaaguu

SEQ ID NO: 90866 - RNA, 22 nt, Homo sapiens
uauuugauugacuuuagcagga

SEQ ID NO: 90867 - RNA, 22 nt, Homo sapiens
uauuuguccccuccaaaaguca

SEQ ID NO: 90868 - RNA, 22 nt, Homo sapiens
ucacuguguauguauaugcagg

SEQ ID NO: 90869 - RNA, 22 nt, Homo sapiens
ucauauguaugugcaauuuugu

SEQ ID NO: 90870 - RNA, 22 nt, Homo sapiens
ucuuuaguuaagggacauuuua

SEQ ID NO: 90871 - RNA, 22 nt, Homo sapiens
guuauguuauguuauguuaugu

SEQ ID NO: 90872 - RNA, 22 nt, Homo sapiens
guggcagaaaagagaagcaaug

SEQ ID NO: 90873 - RNA, 22 nt, Homo sapiens
guggcaaguguuccaagaggcg

SEQ ID NO: 90874 - RNA, 22 nt, Homo sapiens
guggcuagaaugaagguagcug

SEQ ID NO: 90875 - RNA, 22 nt, Homo sapiens
gggauuguaauacugaguuggu

SEQ ID NO: 90876 - RNA, 23 nt, Homo sapiens
gggauuguaaaauaugagggcag

SEQ ID NO: 90877 - RNA, 22 nt, Homo sapiens
guaugaguuuucugaugugugg

SEQ ID NO: 90878 - RNA, 22 nt, Homo sapiens
gguuagaaacagguccucagga

SEQ ID NO: 90879 - RNA, 22 nt, Homo sapiens
uaguagagauggggcacaugcc

SEQ ID NO: 90880 - RNA, 22 nt, Homo sapiens
uagguuaugauccaucuuggcu

SEQ ID NO: 90881 - RNA, 22 nt, Homo sapiens
uauuaguuuucuguggauuaca

SEQ ID NO: 90882 - RNA, 22 nt, Homo sapiens
uauuugauuaacaagagccuaa

SEQ ID NO: 90883 - RNA, 22 nt, Homo sapiens
uauuguuuuucccaggagucua

SEQ ID NO: 90884 - RNA, 22 nt, Homo sapiens
uaugauuuuugggagaggucaa

SEQ ID NO: 90885 - RNA, 22 nt, Homo sapiens
uaugacuuuugaauacagaugg

SEQ ID NO: 90886 - RNA, 22 nt, Homo sapiens
uaugaagccaggauuuauuauu

SEQ ID NO: 90887 - RNA, 22 nt, Homo sapiens
uaucauaguuuggacuuucauu

SEQ ID NO: 90888 - RNA, 22 nt, Homo sapiens
uaugcuuauugucucauccacu

SEQ ID NO: 90889 - RNA, 22 nt, Homo sapiens
guuggcuuuuuaaggaaauugc

SEQ ID NO: 90890 - RNA, 22 nt, Homo sapiens
uaaguaguauaagguuuuuuga

SEQ ID NO: 90891 - RNA, 22 nt, Homo sapiens
uaaguaauugugguuucugcca

SEQ ID NO: 90892 - RNA, 22 nt, Homo sapiens
uaaguguaaugucugaaguuug

SEQ ID NO: 90893 - RNA, 22 nt, Homo sapiens
uagaucaauuaauuguuacuug

SEQ ID NO: 90894 - RNA, 22 nt, Homo sapiens
cagcuaguaauuuauugaagau

SEQ ID NO: 90895 - RNA, 22 nt, Homo sapiens
auuaauguaauuaguaaaguug

SEQ ID NO: 90896 - RNA, 22 nt, Homo sapiens
auuuugguuacauaguugagcu

SEQ ID NO: 90897 - RNA, 22 nt, Homo sapiens
cauauaguaguacuguuagguu

SEQ ID NO: 90898 - RNA, 19 nt, Homo sapiens
cuauugcacauagcugaag

SEQ ID NO: 90899 - RNA, 22 nt, Homo sapiens
ccuugguugugcuucaacuucu

SEQ ID NO: 90900 - RNA, 21 nt, Homo sapiens
cucugguuugcauuggauuau

SEQ ID NO: 90901 - RNA, 21 nt, Homo sapiens
cucauauugcuuuuccauggu

SEQ ID NO: 90902 - RNA, 22 nt, Homo sapiens
cuuaaugcuacggcucuguguu

SEQ ID NO: 90903 - RNA, 20 nt, Homo sapiens
cuuaaugcagcauuucucag

SEQ ID NO: 90904 - RNA, 22 nt, Homo sapiens
gaaucaauugaucuaugugucu

SEQ ID NO: 90905 - RNA, 22 nt, Homo sapiens
gaaucacagauuaugaguaucu

SEQ ID NO: 90906 - RNA, 22 nt, Homo sapiens
gaaucacugugguaucccaugc

SEQ ID NO: 90907 - RNA, 22 nt, Homo sapiens
gaagaucacacuguagaucuau

SEQ ID NO: 90908 - RNA, 22 nt, Homo sapiens
gaagauaucuaguaccauuguc

SEQ ID NO: 90909 - RNA, 22 nt, Homo sapiens
cuuuggcacuuccuaagugcca

SEQ ID NO: 90910 - RNA, 22 nt, Homo sapiens
cuuguuguggaggggagugcag

SEQ ID NO: 90911 - RNA, 22 nt, Homo sapiens
gaguauuuuacaucguguaauu

SEQ ID NO: 90912 - RNA, 22 nt, Homo sapiens
gaucacaugggagaaugagagu

SEQ ID NO: 90913 - RNA, 22 nt, Homo sapiens
gaugauguugaauguucucacc

SEQ ID NO: 90914 - RNA, 22 nt, Homo sapiens
gagauauucugguuuacuaaau

SEQ ID NO: 90915 - RNA, 22 nt, Homo sapiens
gagauaggauucacuuucaugu

SEQ ID NO: 90916 - RNA, 22 nt, Homo sapiens
gagauaauagcuauaggaucuu

SEQ ID NO: 90917 - RNA, 22 nt, Homo sapiens
gagaucaaugggauggaauuga

SEQ ID NO: 90918 - RNA, 22 nt, Homo sapiens
gagaugcaccuugucacguuuc

SEQ ID NO: 90919 - RNA, 22 nt, Homo sapiens
ucucaugaagauagagaauaga

SEQ ID NO: 90920 - RNA, 22 nt, Homo sapiens
aacacuaucugccuuacaggga

SEQ ID NO: 90921 - RNA, 19 nt, Homo sapiens
ucuuuagucacauuuuuau

SEQ ID NO: 90922 - RNA, 22 nt, Homo sapiens
ucuuuagugacaguugugcaag

SEQ ID NO: 90923 - RNA, 22 nt, Homo sapiens
ugacaacugauuaacuccuuua

SEQ ID NO: 90924 - RNA, 22 nt, Homo sapiens
ucauaguacuuuguuuugaaaa

SEQ ID NO: 90925 - RNA, 22 nt, Homo sapiens
ucauaguagucacuuaauaaau

SEQ ID NO: 90926 - RNA, 21 nt, Homo sapiens
ucagugcugugggcaaggugc

SEQ ID NO: 90927 - RNA, 22 nt, Homo sapiens
uggcuuuuauuauguugaggua

SEQ ID NO: 90928 - RNA, 22 nt, Homo sapiens
ugccaugaagagaggaagcagu

SEQ ID NO: 90929 - RNA, 22 nt, Homo sapiens
ugaguauagaucaguucaagug

SEQ ID NO: 90930 - RNA, 22 nt, Homo sapiens
ugaguaauguugaucuuugaua

SEQ ID NO: 90931 - RNA, 22 nt, Homo sapiens
ugaggaaugaccccgugugguc

SEQ ID NO: 90932 - RNA, 22 nt, Homo sapiens
ugagcaagaucuuuauaauuag

SEQ ID NO: 90933 - RNA, 19 nt, Homo sapiens
ugagauuguaugaggagau

SEQ ID NO: 90934 - RNA, 22 nt, Homo sapiens
ugagauuaucguaauguaucuc

SEQ ID NO: 90935 - RNA, 17 nt, Homo sapiens
ugcaauuuaagcuagau

SEQ ID NO: 90936 - RNA, 22 nt, Homo sapiens
ugauuagagcccaagcuuugaa

SEQ ID NO: 90937 - RNA, 21 nt, Homo sapiens
ugauguugaccuaaguaguga

SEQ ID NO: 90938 - RNA, 22 nt, Homo sapiens
uguaagcauuauauaauuguug

SEQ ID NO: 90939 - RNA, 18 nt, Homo sapiens
uguuugguucugcgccuc

SEQ ID NO: 90940 - RNA, 22 nt, Homo sapiens
uguuauguucuacuuuuaggug

SEQ ID NO: 90941 - RNA, 21 nt, Homo sapiens
uguuuuugcuguguaucucuc

SEQ ID NO: 90942 - RNA, 22 nt, Homo sapiens
uucucuguggauugggugagag

SEQ ID NO: 90943 - RNA, 22 nt, Homo sapiens
uucaucaguuauauuggccuga

SEQ ID NO: 90944 - RNA, 22 nt, Homo sapiens
uuacagugguugcuauugugaa

SEQ ID NO: 90945 - RNA, 22 nt, Homo sapiens
uuacaguagaugaggguauaau

SEQ ID NO: 90946 - RNA, 21 nt, Homo sapiens
uuauaguggcaugauuuauaa

SEQ ID NO: 90947 - RNA, 22 nt, Homo sapiens
uuaugcuugugugaauuuuccc

SEQ ID NO: 90948 - RNA, 22 nt, Homo sapiens
uuguauguuguuugucagagaa

SEQ ID NO: 90949 - RNA, 22 nt, Homo sapiens
uuguaguagcauuauuuauaau

SEQ ID NO: 90950 - RNA, 22 nt, Homo sapiens
uugucaacaugaaacuguguuu

SEQ ID NO: 90951 - RNA, 22 nt, Homo sapiens
uuguggcuuaucucauuuagcg

SEQ ID NO: 90952 - RNA, 22 nt, Homo sapiens
uuucuacagggcuugccaggua

SEQ ID NO: 90953 - RNA, 22 nt, Homo sapiens
uuugugagguggauagauugca

SEQ ID NO: 90954 - RNA, 22 nt, Homo sapiens
uuuggucccaaugugauaaggu

SEQ ID NO: 90955 - RNA, 22 nt, Homo sapiens
uuugccaauauuuuauugagga

SEQ ID NO: 90956 - RNA, 22 nt, Homo sapiens
uuugaugcaucucuacuuuguu

SEQ ID NO: 90957 - RNA, 21 nt, Homo sapiens
uuugaucauuaaaagugaauc

SEQ ID NO: 90958 - RNA, 22 nt, Homo sapiens
uugcagagaaauuucugguuua

SEQ ID NO: 90959 - RNA, 22 nt, Homo sapiens
uugcacuauaggaaaauguguc

SEQ ID NO: 90960 - RNA, 22 nt, Homo sapiens
uucuugguguaguaguugaaaa

SEQ ID NO: 90961 - RNA, 22 nt, Homo sapiens
uugauugacaugucucuguuca

SEQ ID NO: 90962 - RNA, 22 nt, Homo sapiens
uugauguguuuccaggauuugu

SEQ ID NO: 90963 - RNA, 18 nt, Homo sapiens
uugcaucauuuuguuguu

SEQ ID NO: 90964 - RNA, 22 nt, Homo sapiens
uugcaucagcaggcauaauugg

SEQ ID NO: 90965 - RNA, 22 nt, Homo sapiens
auagaguuagaaagaaauguuu

SEQ ID NO: 90966 - RNA, 22 nt, Homo sapiens
auacuguuuuacaucauugccu

SEQ ID NO: 90967 - RNA, 22 nt, Homo sapiens
auaauaucagguugugaugaug

SEQ ID NO: 90968 - RNA, 22 nt, Homo sapiens
aucaaguacuguacugaaagug

SEQ ID NO: 90969 - RNA, 17 nt, Homo sapiens
auaugaauuuuggagau

SEQ ID NO: 90970 - RNA, 22 nt, Homo sapiens
auaucaacaucgugucauuagu

SEQ ID NO: 90971 - RNA, 22 nt, Homo sapiens
auaucaaggccauuuucuaaau

SEQ ID NO: 90972 - RNA, 22 nt, Homo sapiens
auccuuuagacuguccaguuga

SEQ ID NO: 90973 - RNA, 22 nt, Homo sapiens
auggaguuuacuuaguguaaua

SEQ ID NO: 90974 - RNA, 22 nt, Homo sapiens
auggaguguaauauugagagcu

SEQ ID NO: 90975 - RNA, 22 nt, Homo sapiens
auggaagcugauuagauaguac

SEQ ID NO: 90976 - RNA, 22 nt, Homo sapiens
augcauaugucuuuauaguggc

SEQ ID NO: 90977 - RNA, 22 nt, Homo sapiens
augcaauucuagauugauagua

SEQ ID NO: 90978 - RNA, 22 nt, Homo sapiens
augaguaugagaauacauuaag

SEQ ID NO: 90979 - RNA, 22 nt, Homo sapiens
augaguaguugcuaaauauuga

SEQ ID NO: 90980 - RNA, 22 nt, Homo sapiens
augaggauagguuucuauuagg

SEQ ID NO: 90981 - RNA, 22 nt, Homo sapiens
aauugaaugcagaugccaggga

SEQ ID NO: 90982 - RNA, 22 nt, Homo sapiens
aaguuaauguuuaagacuccua

SEQ ID NO: 90983 - RNA, 22 nt, Homo sapiens
accugagauuacaggugcuggc

SEQ ID NO: 90984 - RNA, 22 nt, Homo sapiens
agcaguagaauuccugcaucac

SEQ ID NO: 90985 - RNA, 22 nt, Homo sapiens
agaauacugucuauucauggua

SEQ ID NO: 90986 - RNA, 22 nt, Homo sapiens
acugugcuguuuuaauuauuga

SEQ ID NO: 90987 - RNA, 20 nt, Homo sapiens
agguuauuauaauuagaaga

SEQ ID NO: 90988 - RNA, 22 nt, Homo sapiens
agguauuuucaacuuagaaugg

SEQ ID NO: 90989 - RNA, 22 nt, Homo sapiens
aagaguuaguaaaauuuccucu

SEQ ID NO: 90990 - RNA, 21 nt, Abelson murine leukemia virus
aaaagauuuuauuuagucucc

SEQ ID NO: 90991 - RNA, 13 nt, Abelson murine leukemia virus
aacagcugaauau

SEQ ID NO: 90992 - RNA, 20 nt, Abelson murine leukemia virus
aacagcugaauaugggccaa

SEQ ID NO: 90993 - RNA, 13 nt, Abelson murine leukemia virus
acauaacugagaa

SEQ ID NO: 90994 - RNA, 15 nt, Abelson murine leukemia virus
auaugggccaaacag

SEQ ID NO: 90995 - RNA, 20 nt, Abelson murine leukemia virus
aucugugguaagcaguuccu

SEQ ID NO: 90996 - RNA, 16 nt, Abelson murine leukemia virus
augggccaaacaggau

SEQ ID NO: 90997 - RNA, 17 nt, Abelson murine leukemia virus
cagagaaacagcugaau

SEQ ID NO: 90998 - RNA, 21 nt, Abelson murine leukemia virus
cagagaaacagcugaauaugg

SEQ ID NO: 90999 - RNA, 19 nt, Abelson murine leukemia virus
caguuccugccccggcuca

SEQ ID NO: 91000 - RNA, 17 nt, Abelson murine leukemia virus
cauaacugagaauagag

SEQ ID NO: 91001 - RNA, 21 nt, Abelson murine leukemia virus
ccaaacaggauaucuguggua

SEQ ID NO: 91002 - RNA, 22 nt, Abelson murine leukemia virus
ccaaacaggauaugcuguggua

SEQ ID NO: 91003 - RNA, 15 nt, Abelson murine leukemia virus
ccaucagauguuucc

SEQ ID NO: 91004 - RNA, 16 nt, Abelson murine leukemia virus
cccggcucagggccaa

SEQ ID NO: 91005 - RNA, 13 nt, Abelson murine leukemia virus
ccugccccggcuc

SEQ ID NO: 91006 - RNA, 21 nt, Abelson murine leukemia virus
ccugccccggcucagggccaa

SEQ ID NO: 91007 - RNA, 15 nt, Abelson murine leukemia virus
cucagggccaagaac

SEQ ID NO: 91008 - RNA, 17 nt, Abelson murine leukemia virus
aaauacauaacugagaa

SEQ ID NO: 91009 - RNA, 22 nt, Abelson murine leukemia virus
gauaugcugugguaagcaguuc

SEQ ID NO: 91010 - RNA, 22 nt, Abelson murine leukemia virus
gaucaaggucaggaacagagaa

SEQ ID NO: 91011 - RNA, 23 nt, Abelson murine leukemia virus
gcaguuccugccccggcucaggg

SEQ ID NO: 91012 - RNA, 14 nt, Abelson murine leukemia virus
gcccucagcaguuu

SEQ ID NO: 91013 - RNA, 17 nt, Abelson murine leukemia virus
gcugaauaugggccaaa

SEQ ID NO: 91014 - RNA, 18 nt, Abelson murine leukemia virus
gcugaauaugggccaaac

SEQ ID NO: 91015 - RNA, 17 nt, Abelson murine leukemia virus
gcugugguaagcaguuc

SEQ ID NO: 91016 - RNA, 19 nt, Abelson murine leukemia virus
gcugugguaagcaguuccu

SEQ ID NO: 91017 - RNA, 22 nt, Abelson murine leukemia virus
ggaacagcugaauaugggccaa

SEQ ID NO: 91018 - RNA, 12 nt, Abelson murine leukemia virus
ggaccugaaaug

SEQ ID NO: 91019 - RNA, 14 nt, Abelson murine leukemia virus
gugguaagcaguuc

SEQ ID NO: 91020 - RNA, 21 nt, Abelson murine leukemia virus
guuccugccccggcucagggc

SEQ ID NO: 91021 - RNA, 13 nt, Abelson murine leukemia virus
uaagcaguuccug

SEQ ID NO: 91022 - RNA, 22 nt, Abelson murine leukemia virus
uaagcaguuccugccccggcuc

SEQ ID NO: 91023 - RNA, 18 nt, Abelson murine leukemia virus
uaucugugguaagcaguu

SEQ ID NO: 91024 - RNA, 21 nt, Abelson murine leukemia virus
uaucugugguaagcaguuccu

SEQ ID NO: 91025 - RNA, 12 nt, Abelson murine leukemia virus
uaugcuguggua

SEQ ID NO: 91026 - RNA, 18 nt, Abelson murine leukemia virus
uauuugaacuaaccaauc

SEQ ID NO: 91027 - RNA, 21 nt, Abelson murine leukemia virus
ucaggaacagagaaacagcug

SEQ ID NO: 91028 - RNA, 23 nt, Abelson murine leukemia virus
uccugccccggcucagggccaag

SEQ ID NO: 91029 - RNA, 16 nt, Abelson murine leukemia virus
ugccccggcucagggc

SEQ ID NO: 91030 - RNA, 14 nt, Abelson murine leukemia virus
aagcaguuccugcc

SEQ ID NO: 91031 - RNA, 21 nt, Abelson murine leukemia virus
aagcaguuccugccccggcuc

SEQ ID NO: 91032 - RNA, 18 nt, Abelson murine leukemia virus
aggaacagagaaacagcu

SEQ ID NO: 91033 - RNA, 21 nt, Abelson murine leukemia virus
caagaacaguuggaacagcug

SEQ ID NO: 91034 - RNA, 23 nt, Abelson murine leukemia virus
cagaucaaggucaggaacagaga

SEQ ID NO: 91035 - RNA, 20 nt, Abelson murine leukemia virus
cagcugaauaugggccaaac

SEQ ID NO: 91036 - RNA, 16 nt, Abelson murine leukemia virus
caggauaucuguggua

SEQ ID NO: 91037 - RNA, 17 nt, Abelson murine leukemia virus
caggauaugcuguggua

SEQ ID NO: 91038 - RNA, 17 nt, Abelson murine leukemia virus
caguuccugccccggcu

SEQ ID NO: 91039 - RNA, 22 nt, Abelson murine leukemia virus
caguuccugccccggcucaggg

SEQ ID NO: 91040 - RNA, 23 nt, Abelson murine leukemia virus
caguuccugccccggcucagggc

SEQ ID NO: 91041 - RNA, 19 nt, Abelson murine leukemia virus
cccggcucagggccaagaa

SEQ ID NO: 91042 - RNA, 19 nt, Abelson murine leukemia virus
ccggcucagggccaagaac

SEQ ID NO: 91043 - RNA, 17 nt, Abelson murine leukemia virus
cugaauaugggccaaac

SEQ ID NO: 91044 - RNA, 20 nt, Abelson murine leukemia virus
cugaauaugggccaaacagg

SEQ ID NO: 91045 - RNA, 16 nt, Abelson murine leukemia virus
cugugguaagcaguuc

SEQ ID NO: 91046 - RNA, 21 nt, Abelson murine leukemia virus
cugugguaagcaguuccugcc

SEQ ID NO: 91047 - RNA, 21 nt, Abelson murine leukemia virus
gaauaugggccaaacaggaua

SEQ ID NO: 91048 - RNA, 17 nt, Abelson murine leukemia virus
gaucaaggucaggaaca

SEQ ID NO: 91049 - RNA, 16 nt, Abelson murine leukemia virus
gcugugguaagcaguu

SEQ ID NO: 91050 - RNA, 18 nt, Abelson murine leukemia virus
ggaacagagaaacagcug

SEQ ID NO: 91051 - RNA, 20 nt, Abelson murine leukemia virus
ggaacagagaaacagcugaa

SEQ ID NO: 91052 - RNA, 15 nt, Abelson murine leukemia virus
ggauaugcuguggua

SEQ ID NO: 91053 - RNA, 23 nt, Abelson murine leukemia virus
ggauaugcugugguaagcaguuc

SEQ ID NO: 91054 - RNA, 23 nt, Abelson murine leukemia virus
ggucaggaacagagaaacagcug

SEQ ID NO: 91055 - RNA, 19 nt, Abelson murine leukemia virus
uaugcugugguaagcaguu

SEQ ID NO: 91056 - RNA, 20 nt, Abelson murine leukemia virus
ucaggaacagagaaacagcu

SEQ ID NO: 91057 - RNA, 14 nt, Abelson murine leukemia virus
ucagggccaagaac

SEQ ID NO: 91058 - RNA, 16 nt, Abelson murine leukemia virus
ugaacuaaccaaucag

SEQ ID NO: 91059 - RNA, 11 nt, Abelson murine leukemia virus
ugcugugguaa

SEQ ID NO: 91060 - RNA, 20 nt, Abelson murine leukemia virus
ugcugugguaagcaguuccu

SEQ ID NO: 91061 - RNA, 13 nt, Abelson murine leukemia virus
uggaacagcugaa

SEQ ID NO: 91062 - RNA, 18 nt, Abelson murine leukemia virus
uggaacagcugaauaugg

SEQ ID NO: 91063 - RNA, 15 nt, Abelson murine leukemia virus
aaaaauacauaacug

SEQ ID NO: 91064 - RNA, 19 nt, Abelson murine leukemia virus
aacaggauaucugugguaa

SEQ ID NO: 91065 - RNA, 20 nt, Abelson murine leukemia virus
aacaggauaugcugugguaa

SEQ ID NO: 91066 - RNA, 15 nt, Abelson murine leukemia virus
aauaugggccaaaca

SEQ ID NO: 91067 - RNA, 20 nt, Abelson murine leukemia virus
aauaugggccaaacaggaua

SEQ ID NO: 91068 - RNA, 23 nt, Abelson murine leukemia virus
acagcugaauaugggccaaacag

SEQ ID NO: 91069 - RNA, 13 nt, Abelson murine leukemia virus
agagaaacagcug

SEQ ID NO: 91070 - RNA, 18 nt, Abelson murine leukemia virus
agaucaaggucaggaaca

SEQ ID NO: 91071 - RNA, 17 nt, Abelson murine leukemia virus
aguuccugccccggcuc

SEQ ID NO: 91072 - RNA, 20 nt, Abelson murine leukemia virus
aguuccugccccggcucagg

SEQ ID NO: 91073 - RNA, 21 nt, Abelson murine leukemia virus
caaacaggauaugcuguggua

SEQ ID NO: 91074 - RNA, 22 nt, Abelson murine leukemia virus
caaacaggauaugcugugguaa

SEQ ID NO: 91075 - RNA, 21 nt, Abelson murine leukemia virus
caaacaggauaucugugguaa

SEQ ID NO: 91076 - RNA, 18 nt, Abelson murine leukemia virus
cagcugaauaugggccaa

SEQ ID NO: 91077 - RNA, 17 nt, Abelson murine leukemia virus
ccagcccucagcaguuu

SEQ ID NO: 91078 - RNA, 15 nt, Abelson murine leukemia virus
ccggcucagggccaa

SEQ ID NO: 91079 - RNA, 18 nt, Abelson murine leukemia virus
ccggcucagggccaagaa

SEQ ID NO: 91080 - RNA, 21 nt, Abelson murine leukemia virus
cugaauaugggccaaacagga

SEQ ID NO: 91081 - RNA, 18 nt, Abelson murine leukemia virus
cugccccggcucagggcc

SEQ ID NO: 91082 - RNA, 22 nt, Abelson murine leukemia virus
cugccccggcucagggccaaga

SEQ ID NO: 91083 - RNA, 17 nt, Abelson murine leukemia virus
gaacagagaaacagcug

SEQ ID NO: 91084 - RNA, 18 nt, Abelson murine leukemia virus
gaacaguuggaacagcug

SEQ ID NO: 91085 - RNA, 13 nt, Abelson murine leukemia virus
gaauaugggccaa

SEQ ID NO: 91086 - RNA, 17 nt, Abelson murine leukemia virus
gaauaugggccaaacag

SEQ ID NO: 91087 - RNA, 16 nt, Abelson murine leukemia virus
gagaaacagcugaaua

SEQ ID NO: 91088 - RNA, 18 nt, Abelson murine leukemia virus
gccccggcucagggccaa

SEQ ID NO: 91089 - RNA, 22 nt, Abelson murine leukemia virus
gcucaauaaaagagcccacaac

SEQ ID NO: 91090 - RNA, 12 nt, Abelson murine leukemia virus
gcucagggccaa

SEQ ID NO: 91091 - RNA, 16 nt, Abelson murine leukemia virus
gcucagggccaagaac

SEQ ID NO: 91092 - RNA, 14 nt, Abelson murine leukemia virus
ggauaucuguggua

SEQ ID NO: 91093 - RNA, 22 nt, Abelson murine leukemia virus
ggauaucugugguaagcaguuc

SEQ ID NO: 91094 - RNA, 13 nt, Abelson murine leukemia virus
ggcucagggccaa

SEQ ID NO: 91095 - RNA, 16 nt, Abelson murine leukemia virus
ggcucagggccaagaa

SEQ ID NO: 91096 - RNA, 18 nt, Abelson murine leukemia virus
ggcucagggccaagaaca

SEQ ID NO: 91097 - RNA, 21 nt, Abelson murine leukemia virus
gguccagcccucagcaguuuc

SEQ ID NO: 91098 - RNA, 13 nt, Abelson murine leukemia virus
guaagcaguuccu

SEQ ID NO: 91099 - RNA, 13 nt, Abelson murine leukemia virus
guuggaacagcug

SEQ ID NO: 91100 - RNA, 15 nt, Abelson murine leukemia virus
ugaauaugggccaaa

SEQ ID NO: 91101 - RNA, 16 nt, Abelson murine leukemia virus
ugaauaugggccaaac

SEQ ID NO: 91102 - RNA, 18 nt, Abelson murine leukemia virus
ugaauaugggccaaacag

SEQ ID NO: 91103 - RNA, 21 nt, Abelson murine leukemia virus
ugaauaugggccaaacaggau

SEQ ID NO: 91104 - RNA, 22 nt, Abelson murine leukemia virus
ugaauaugggccaaacaggaua

SEQ ID NO: 91105 - RNA, 12 nt, Abelson murine leukemia virus
ugggccaaacag

SEQ ID NO: 91106 - RNA, 13 nt, Abelson murine leukemia virus
aauaugggccaaa

SEQ ID NO: 91107 - RNA, 16 nt, Abelson murine leukemia virus
aauaugggccaaacag

SEQ ID NO: 91108 - RNA, 16 nt, Abelson murine leukemia virus
acaguuggaacagcug

SEQ ID NO: 91109 - RNA, 23 nt, Abelson murine leukemia virus
agaaacagcugaauaugggccaa

SEQ ID NO: 91110 - RNA, 16 nt, Abelson murine leukemia virus
agggccaagaacagau

SEQ ID NO: 91111 - RNA, 22 nt, Abelson murine leukemia virus
aguuccugccccggcucagggc

SEQ ID NO: 91112 - RNA, 20 nt, Abelson murine leukemia virus
caaacaggauaucuguggua

SEQ ID NO: 91113 - RNA, 14 nt, Abelson murine leukemia virus
cagagaaacagcug

SEQ ID NO: 91114 - RNA, 18 nt, Abelson murine leukemia virus
cauaacugagaauagaga

SEQ ID NO: 91115 - RNA, 19 nt, Abelson murine leukemia virus
ccugccccggcucagggcc

SEQ ID NO: 91116 - RNA, 12 nt, Abelson murine leukemia virus
cucagcaguuuc

SEQ ID NO: 91117 - RNA, 12 nt, Abelson murine leukemia virus
cucagggccaag

SEQ ID NO: 91118 - RNA, 14 nt, Abelson murine leukemia virus
cuccccgagcucaa

SEQ ID NO: 91119 - RNA, 20 nt, Abelson murine leukemia virus
cuucugcuccccgagcucaa

SEQ ID NO: 91120 - RNA, 21 nt, Abelson murine leukemia virus
gaacuaaccaaucaguucgcu

SEQ ID NO: 91121 - RNA, 21 nt, Abelson murine leukemia virus
gaauagagaaguucagaucaa

SEQ ID NO: 91122 - RNA, 12 nt, Abelson murine leukemia virus
gagaaacagcug

SEQ ID NO: 91123 - RNA, 13 nt, Abelson murine leukemia virus
gauaucuguggua

SEQ ID NO: 91124 - RNA, 21 nt, Abelson murine leukemia virus
gauaucugugguaagcaguuc

SEQ ID NO: 91125 - RNA, 23 nt, Abelson murine leukemia virus
gauaucugugguaagcaguuccu

SEQ ID NO: 91126 - RNA, 14 nt, Abelson murine leukemia virus
gauaugcuguggua

SEQ ID NO: 91127 - RNA, 14 nt, Abelson murine leukemia virus
gccaaacaggauau

SEQ ID NO: 91128 - RNA, 17 nt, Abelson murine leukemia virus
gcucagggccaagaaca

SEQ ID NO: 91129 - RNA, 19 nt, Abelson murine leukemia virus
gcucagggccaagaacaga

SEQ ID NO: 91130 - RNA, 23 nt, Abelson murine leukemia virus
ggaaaaauacauaacugagaaua

SEQ ID NO: 91131 - RNA, 13 nt, Abelson murine leukemia virus
gugguaagcaguu

SEQ ID NO: 91132 - RNA, 11 nt, Abelson murine leukemia virus
uaucuguggua

SEQ ID NO: 91133 - RNA, 12 nt, Abelson murine leukemia virus
uaucugugguaa

SEQ ID NO: 91134 - RNA, 20 nt, Abelson murine leukemia virus
ugccccggcucagggccaag

SEQ ID NO: 91135 - RNA, 16 nt, Abelson murine leukemia virus
ugggccaaacaggaua

SEQ ID NO: 91136 - RNA, 17 nt, Abelson murine leukemia virus
ugggccaaacaggauau

SEQ ID NO: 91137 - RNA, 15 nt, Abelson murine leukemia virus
ugguaagcaguuccu

SEQ ID NO: 91138 - RNA, 20 nt, Abelson murine leukemia virus
uuccugccccggcucagggc

SEQ ID NO: 91139 - RNA, 23 nt, Abelson murine leukemia virus
uuccugccccggcucagggccaa

SEQ ID NO: 91140 - RNA, 12 nt, Abelson murine leukemia virus
uuggaacagcug

SEQ ID NO: 91141 - RNA, 16 nt, Abelson murine leukemia virus
uuucuagagaaccauc

SEQ ID NO: 91142 - RNA, 18 nt, Adeno-associated virus 2
gccccauuggcaccagau

SEQ ID NO: 91143 - RNA, 17 nt, Adeno-associated virus 2
cuaauggcguguauuca

SEQ ID NO: 91144 - RNA, 14 nt, Adeno-associated virus 2
caccagauaccuga

SEQ ID NO: 91145 - RNA, 14 nt, Adeno-associated virus 2
auuggcaccagaua

SEQ ID NO: 91146 - RNA, 15 nt, Adeno-associated virus 2
acucguaaucuguaa

SEQ ID NO: 91147 - RNA, 13 nt, Adeno-associated virus 2
accagauaccuga

SEQ ID NO: 91148 - RNA, 14 nt, Adeno-associated virus 2
uaccguggauacua

SEQ ID NO: 91149 - RNA, 18 nt, Adeno-associated virus 2
cugacucguaaucuguaa

SEQ ID NO: 91150 - RNA, 20 nt, Adeno-associated virus 2
cauuggcaccagauaccuga

SEQ ID NO: 91151 - RNA, 12 nt, Adeno-associated virus 2
accagauaccug

SEQ ID NO: 91152 - RNA, 21 nt, Adeno-associated virus 2
uggacuuaccguggauacuaa

SEQ ID NO: 91153 - RNA, 20 nt, Adeno-associated virus 2
uggauacuaauggcguguau

SEQ ID NO: 91154 - RNA, 21 nt, Adeno-associated virus 2
ucgccccauuggcaccagaua

SEQ ID NO: 91155 - RNA, 23 nt, Adeno-associated virus 2
gccucgccccauuggcaccagau

SEQ ID NO: 91156 - RNA, 20 nt, Adeno-associated virus 2
uaauugcuuguuaaucaaua

SEQ ID NO: 91157 - RNA, 22 nt, Adeno-associated virus 2
cuguaauugcuuguuaaucaau

SEQ ID NO: 91158 - RNA, 23 nt, Adeno-associated virus 2
cuguaauugcuuguuaaucaaua

SEQ ID NO: 91159 - RNA, 17 nt, Adeno-associated virus 2
ccccauuggcaccagau

SEQ ID NO: 91160 - RNA, 22 nt, Adeno-associated virus 2
aaucguggacuuaccguggaua

SEQ ID NO: 91161 - RNA, 14 nt, Adeno-associated virus 2
uguaauugcuuguu

SEQ ID NO: 91162 - RNA, 15 nt, Adeno-associated virus 2
gcaccagauaccuga

SEQ ID NO: 91163 - RNA, 16 nt, Adeno-associated virus 2
cccauuggcaccagau

SEQ ID NO: 91164 - RNA, 22 nt, Adeno-associated virus 2
ccauuggcaccagauaccugac

SEQ ID NO: 91165 - RNA, 13 nt, Adeno-associated virus 2
auuggcaccagau

SEQ ID NO: 91166 - RNA, 19 nt, Adeno-associated virus 2
auuggcaccagauaccuga

SEQ ID NO: 91167 - RNA, 22 nt, Adeno-associated virus 2
agagccucgccccauuggcacc

SEQ ID NO: 91168 - RNA, 17 nt, Avian myelocytomatosis virus
acuaauauuacucggau

SEQ ID NO: 91169 - RNA, 13 nt, Avian myelocytomatosis virus
acuauuagguucc

SEQ ID NO: 91170 - RNA, 18 nt, Avian myelocytomatosis virus
acuauugcaacugcaugc

SEQ ID NO: 91171 - RNA, 18 nt, Avian myelocytomatosis virus
acugccucauaauugaua

SEQ ID NO: 91172 - RNA, 13 nt, Avian myelocytomatosis virus
accccaaacuaga

SEQ ID NO: 91173 - RNA, 23 nt, Avian myelocytomatosis virus
aaauuuuguauuuaaggcauucc

SEQ ID NO: 91174 - RNA, 16 nt, Avian myelocytomatosis virus
aacagcacaacccuca

SEQ ID NO: 91175 - RNA, 15 nt, Avian myelocytomatosis virus
aaccucaaaacugcc

SEQ ID NO: 91176 - RNA, 21 nt, Avian myelocytomatosis virus
aacgguuuggccagaaccuca

SEQ ID NO: 91177 - RNA, 19 nt, Avian myelocytomatosis virus
aacuagacugaaacuauga

SEQ ID NO: 91178 - RNA, 16 nt, Avian myelocytomatosis virus
aacuaugauaaaauau

SEQ ID NO: 91179 - RNA, 13 nt, Avian myelocytomatosis virus
auuauaacuaaua

SEQ ID NO: 91180 - RNA, 23 nt, Avian myelocytomatosis virus
caacuauuagguucccagucucu

SEQ ID NO: 91181 - RNA, 13 nt, Avian myelocytomatosis virus
aucagaacuacaa

SEQ ID NO: 91182 - RNA, 18 nt, Avian myelocytomatosis virus
aucagaacuacaacuauu

SEQ ID NO: 91183 - RNA, 17 nt, Avian myelocytomatosis virus
agucucuccccauuaua

SEQ ID NO: 91184 - RNA, 13 nt, Avian myelocytomatosis virus
auaacuaauauua

SEQ ID NO: 91185 - RNA, 17 nt, Avian myelocytomatosis virus
auaccccaaacuagacu

SEQ ID NO: 91186 - RNA, 15 nt, Avian myelocytomatosis virus
ccauuauaacuaaua

SEQ ID NO: 91187 - RNA, 14 nt, Avian myelocytomatosis virus
ccaucagaacuaca

SEQ ID NO: 91188 - RNA, 15 nt, Avian myelocytomatosis virus
ccaucagaacuacaa

SEQ ID NO: 91189 - RNA, 16 nt, Avian myelocytomatosis virus
ccaucagaacuacaac

SEQ ID NO: 91190 - RNA, 21 nt, Avian myelocytomatosis virus
ccaucagaacuacaacuauua

SEQ ID NO: 91191 - RNA, 13 nt, Avian myelocytomatosis virus
ccccaaacuagac

SEQ ID NO: 91192 - RNA, 16 nt, Avian myelocytomatosis virus
cccagucucuccccau

SEQ ID NO: 91193 - RNA, 23 nt, Avian myelocytomatosis virus
ccaaacuagacugaaacuaugau

SEQ ID NO: 91194 - RNA, 19 nt, Avian myelocytomatosis virus
caugcuuggggaugaacuc

SEQ ID NO: 91195 - RNA, 19 nt, Avian myelocytomatosis virus
cauaagggaugaugggaca

SEQ ID NO: 91196 - RNA, 20 nt, Avian myelocytomatosis virus
caguccauugaguauggaac

SEQ ID NO: 91197 - RNA, 12 nt, Avian myelocytomatosis virus
cuauugcaacug

SEQ ID NO: 91198 - RNA, 13 nt, Avian myelocytomatosis virus
cuacaucagucca

SEQ ID NO: 91199 - RNA, 11 nt, Avian myelocytomatosis virus
gccagaaccuc

SEQ ID NO: 91200 - RNA, 10 nt, Avian myelocytomatosis virus
ggaugaacuc

SEQ ID NO: 91201 - RNA, 12 nt, Avian myelocytomatosis virus
ggaugaacucuu

SEQ ID NO: 91202 - RNA, 16 nt, Avian myelocytomatosis virus
ggaugaacucuucaac

SEQ ID NO: 91203 - RNA, 19 nt, Avian myelocytomatosis virus
ggaacucuuggacaucacu

SEQ ID NO: 91204 - RNA, 15 nt, Avian myelocytomatosis virus
gagccaucagaacua

SEQ ID NO: 91205 - RNA, 21 nt, Avian myelocytomatosis virus
gagccaucagaacuacaacua

SEQ ID NO: 91206 - RNA, 19 nt, Avian myelocytomatosis virus
cuuaacuugagacuacaca

SEQ ID NO: 91207 - RNA, 13 nt, Avian myelocytomatosis virus
uggggaugaacuc

SEQ ID NO: 91208 - RNA, 22 nt, Avian myelocytomatosis virus
uuaacuugagacuacacaaccu

SEQ ID NO: 91209 - RNA, 21 nt, Avian myelocytomatosis virus
uuagaauaccccaaacuagac

SEQ ID NO: 91210 - RNA, 17 nt, Avian myelocytomatosis virus
ugagacuacacaaccuu

SEQ ID NO: 91211 - RNA, 19 nt, Avian myelocytomatosis virus
ugaguauggaacuauugca

SEQ ID NO: 91212 - RNA, 17 nt, Avian myelocytomatosis virus
aacuauugcaacugcau

SEQ ID NO: 91213 - RNA, 13 nt, Avian myelocytomatosis virus
aacucuucaacuu

SEQ ID NO: 91214 - RNA, 16 nt, Avian myelocytomatosis virus
aacuugagacuacaca

SEQ ID NO: 91215 - RNA, 20 nt, Avian myelocytomatosis virus
ucaugaacuacaucagucca

SEQ ID NO: 91216 - RNA, 21 nt, Avian myelocytomatosis virus
ucaugaacuacaucaguccau

SEQ ID NO: 91217 - RNA, 18 nt, Avian myelocytomatosis virus
uccccauuauaacuaaua

SEQ ID NO: 91218 - RNA, 18 nt, Avian myelocytomatosis virus
ucuaauaucacucaugaa

SEQ ID NO: 91219 - RNA, 20 nt, Avian myelocytomatosis virus
ucuccccauuauaacuaaua

SEQ ID NO: 91220 - RNA, 18 nt, Avian myelocytomatosis virus
ucacuuagaauaccccaa

SEQ ID NO: 91221 - RNA, 15 nt, Avian myelocytomatosis virus
ucagaacuacaacua

SEQ ID NO: 91222 - RNA, 12 nt, Avian myelocytomatosis virus
uauggaacuauu

SEQ ID NO: 91223 - RNA, 16 nt, Avian myelocytomatosis virus
uaucacucaugaacua

SEQ ID NO: 91224 - RNA, 20 nt, Avian myelocytomatosis virus
uaucacucaugaacuacauc

SEQ ID NO: 91225 - RNA, 16 nt, Avian myelocytomatosis virus
uagaauaccccaaacu

SEQ ID NO: 91226 - RNA, 18 nt, Avian myelocytomatosis virus
uaacagcacaacccucac

SEQ ID NO: 91227 - RNA, 23 nt, Avian myelocytomatosis virus
uaacagcacaacccucaccuauc

SEQ ID NO: 91228 - RNA, 20 nt, Avian myelocytomatosis virus
caugaacuacaucaguccau

SEQ ID NO: 91229 - RNA, 14 nt, Avian myelocytomatosis virus
caucagaacuacaa

SEQ ID NO: 91230 - RNA, 15 nt, Avian myelocytomatosis virus
cagaaccucaaaacu

SEQ ID NO: 91231 - RNA, 18 nt, Avian myelocytomatosis virus
cagaacuacaacuauuag

SEQ ID NO: 91232 - RNA, 23 nt, Avian myelocytomatosis virus
auugauacuuugggcauaaggga

SEQ ID NO: 91233 - RNA, 17 nt, Avian myelocytomatosis virus
auuuuguauuuaaggca

SEQ ID NO: 91234 - RNA, 16 nt, Avian myelocytomatosis virus
caaaacugccucauaa

SEQ ID NO: 91235 - RNA, 14 nt, Avian myelocytomatosis virus
auggaacuauugca

SEQ ID NO: 91236 - RNA, 20 nt, Avian myelocytomatosis virus
auggaacuauugcaacugca

SEQ ID NO: 91237 - RNA, 14 nt, Avian myelocytomatosis virus
agccaucagaacua

SEQ ID NO: 91238 - RNA, 21 nt, Avian myelocytomatosis virus
agccaucagaacuacaacuau

SEQ ID NO: 91239 - RNA, 16 nt, Avian myelocytomatosis virus
auaacuaauauuacuc

SEQ ID NO: 91240 - RNA, 13 nt, Avian myelocytomatosis virus
auaauugauacuu

SEQ ID NO: 91241 - RNA, 14 nt, Avian myelocytomatosis virus
auaucacucaugaa

SEQ ID NO: 91242 - RNA, 17 nt, Avian myelocytomatosis virus
auaucacucaugaacua

SEQ ID NO: 91243 - RNA, 14 nt, Avian myelocytomatosis virus
accucaaaacugcc

SEQ ID NO: 91244 - RNA, 14 nt, Avian myelocytomatosis virus
acuacaucagucca

SEQ ID NO: 91245 - RNA, 21 nt, Avian myelocytomatosis virus
acuauuagguucccagucucu

SEQ ID NO: 91246 - RNA, 21 nt, Avian myelocytomatosis virus
acuuaacuugagacuacacaa

SEQ ID NO: 91247 - RNA, 18 nt, Avian myelocytomatosis virus
cugguggcccugauaaca

SEQ ID NO: 91248 - RNA, 14 nt, Avian myelocytomatosis virus
cuagacugaaacua

SEQ ID NO: 91249 - RNA, 12 nt, Avian myelocytomatosis virus
cuauuagguucc

SEQ ID NO: 91250 - RNA, 16 nt, Avian myelocytomatosis virus
cuauugcaacugcaug

SEQ ID NO: 91251 - RNA, 23 nt, Avian myelocytomatosis virus
cgacuuaacuugagacuacacaa

SEQ ID NO: 91252 - RNA, 19 nt, Avian myelocytomatosis virus
cgagccaucagaacuacaa

SEQ ID NO: 91253 - RNA, 15 nt, Avian myelocytomatosis virus
gagacuacacaaccu

SEQ ID NO: 91254 - RNA, 16 nt, Avian myelocytomatosis virus
gagacuacacaaccuu

SEQ ID NO: 91255 - RNA, 23 nt, Avian myelocytomatosis virus
gagccaucagaacuacaacuauu

SEQ ID NO: 91256 - RNA, 15 nt, Avian myelocytomatosis virus
gaguauggaacuauu

SEQ ID NO: 91257 - RNA, 19 nt, Avian myelocytomatosis virus
gaaacuaugauaaaauauu

SEQ ID NO: 91258 - RNA, 17 nt, Avian myelocytomatosis virus
gaaccucaaaacugccu

SEQ ID NO: 91259 - RNA, 20 nt, Avian myelocytomatosis virus
cugugcgacuuaacuugaga

SEQ ID NO: 91260 - RNA, 17 nt, Avian myelocytomatosis virus
uaacuugagacuacaca

SEQ ID NO: 91261 - RNA, 12 nt, Avian myelocytomatosis virus
ggccagaaccuc

SEQ ID NO: 91262 - RNA, 16 nt, Avian myelocytomatosis virus
ucuuggacaucacuua

SEQ ID NO: 91263 - RNA, 14 nt, Avian myelocytomatosis virus
ugaacucuucaacu

SEQ ID NO: 91264 - RNA, 20 nt, Avian myelocytomatosis virus
ucaguccauugaguauggaa

SEQ ID NO: 91265 - RNA, 23 nt, Avian myelocytomatosis virus
ucaguccauugaguauggaacua

SEQ ID NO: 91266 - RNA, 13 nt, Avian myelocytomatosis virus
ucagaacuacaac

SEQ ID NO: 91267 - RNA, 17 nt, Avian myelocytomatosis virus
ucagaacuacaacuauu

SEQ ID NO: 91268 - RNA, 16 nt, Avian myelocytomatosis virus
ucacucaugaacuaca

SEQ ID NO: 91269 - RNA, 22 nt, Avian myelocytomatosis virus
uccauugaguauggaacuauug

SEQ ID NO: 91270 - RNA, 14 nt, Avian myelocytomatosis virus
ugcuuggggaugaa

SEQ ID NO: 91271 - RNA, 17 nt, Avian myelocytomatosis virus
ugcuuggggaugaacuc

SEQ ID NO: 91272 - RNA, 23 nt, Avian myelocytomatosis virus
uggccagaaccucaaaacugccu

SEQ ID NO: 91273 - RNA, 18 nt, Avian myelocytomatosis virus
ugggacauucuucaugcu

SEQ ID NO: 91274 - RNA, 20 nt, Avian myelocytomatosis virus
ugugcgacuuaacuugagac

SEQ ID NO: 91275 - RNA, 17 nt, Avian myelocytomatosis virus
uuaacuugagacuacac

SEQ ID NO: 91276 - RNA, 18 nt, Avian myelocytomatosis virus
uuaacuugagacuacaca

SEQ ID NO: 91277 - RNA, 18 nt, Avian myelocytomatosis virus
uuagaauaccccaaacua

SEQ ID NO: 91278 - RNA, 23 nt, Avian myelocytomatosis virus
uugaguauggaacuauugcaacu

SEQ ID NO: 91279 - RNA, 21 nt, Avian myelocytomatosis virus
acaucacuuagaauaccccaa

SEQ ID NO: 91280 - RNA, 20 nt, Avian myelocytomatosis virus
acagcacaacccucaccuau

SEQ ID NO: 91281 - RNA, 16 nt, Avian myelocytomatosis virus
agacugaaacuaugau

SEQ ID NO: 91282 - RNA, 16 nt, Avian myelocytomatosis virus
acuuaacuugagacua

SEQ ID NO: 91283 - RNA, 22 nt, Avian myelocytomatosis virus
aacucuuggacaucacuuagaa

SEQ ID NO: 91284 - RNA, 14 nt, Avian myelocytomatosis virus
aaacuagacugaaa

SEQ ID NO: 91285 - RNA, 20 nt, Avian myelocytomatosis virus
aaacuagacugaaacuauga

SEQ ID NO: 91286 - RNA, 13 nt, Avian myelocytomatosis virus
cacucaugaacua

SEQ ID NO: 91287 - RNA, 17 nt, Avian myelocytomatosis virus
cacucaugaacuacauc

SEQ ID NO: 91288 - RNA, 17 nt, Avian myelocytomatosis virus
cacuuagaauaccccaa

SEQ ID NO: 91289 - RNA, 19 nt, Avian myelocytomatosis virus
augcuuggggaugaacucu

SEQ ID NO: 91290 - RNA, 21 nt, Avian myelocytomatosis virus
auggaacuauugcaacugcau

SEQ ID NO: 91291 - RNA, 15 nt, Avian myelocytomatosis virus
aguauggaacuauug

SEQ ID NO: 91292 - RNA, 19 nt, Avian myelocytomatosis virus
aguauggaacuauugcaac

SEQ ID NO: 91293 - RNA, 16 nt, Avian myelocytomatosis virus
auaucacucaugaacu

SEQ ID NO: 91294 - RNA, 15 nt, Avian myelocytomatosis virus
aucacucaugaacua

SEQ ID NO: 91295 - RNA, 12 nt, Avian myelocytomatosis virus
augaacuacauc

SEQ ID NO: 91296 - RNA, 19 nt, Avian myelocytomatosis virus
augaacuacaucaguccau

SEQ ID NO: 91297 - RNA, 13 nt, Avian myelocytomatosis virus
cauugaguaugga

SEQ ID NO: 91298 - RNA, 21 nt, Avian myelocytomatosis virus
cauugaguauggaacuauugc

SEQ ID NO: 91299 - RNA, 17 nt, Avian myelocytomatosis virus
caucagaacuacaacua

SEQ ID NO: 91300 - RNA, 13 nt, Avian myelocytomatosis virus
caugaacuacauc

SEQ ID NO: 91301 - RNA, 15 nt, Avian myelocytomatosis virus
caugaacuacaucag

SEQ ID NO: 91302 - RNA, 16 nt, Avian myelocytomatosis virus
ccucaccuaucggaag

SEQ ID NO: 91303 - RNA, 14 nt, Avian myelocytomatosis virus
cugauaacagcaca

SEQ ID NO: 91304 - RNA, 22 nt, Avian myelocytomatosis virus
cucuuuagacgagccaucagaa

SEQ ID NO: 91305 - RNA, 16 nt, Avian myelocytomatosis virus
cugaaacuaugauaaa

SEQ ID NO: 91306 - RNA, 20 nt, Avian myelocytomatosis virus
cugcaugcugugcgacuuaa

SEQ ID NO: 91307 - RNA, 14 nt, Avian myelocytomatosis virus
cuugagacuacaca

SEQ ID NO: 91308 - RNA, 13 nt, Avian myelocytomatosis virus
cuuggggaugaac

SEQ ID NO: 91309 - RNA, 12 nt, Avian myelocytomatosis virus
cuacaacuauua

SEQ ID NO: 91310 - RNA, 17 nt, Avian myelocytomatosis virus
cuagacugaaacuauga

SEQ ID NO: 91311 - RNA, 16 nt, Avian myelocytomatosis virus
cucaaaacugccucau

SEQ ID NO: 91312 - RNA, 15 nt, Avian myelocytomatosis virus
cucaugaacuacauc

SEQ ID NO: 91313 - RNA, 17 nt, Avian myelocytomatosis virus
cucaugaacuacaucag

SEQ ID NO: 91314 - RNA, 22 nt, Avian myelocytomatosis virus
gacuuaacuugagacuacacaa

SEQ ID NO: 91315 - RNA, 23 nt, Avian myelocytomatosis virus
cuuuagacgagccaucagaacua

SEQ ID NO: 91316 - RNA, 14 nt, Avian myelocytomatosis virus
uaccccaaacuaga

SEQ ID NO: 91317 - RNA, 19 nt, Avian myelocytomatosis virus
uaauaucacucaugaacua

SEQ ID NO: 91318 - RNA, 15 nt, Avian myelocytomatosis virus
uaaagcugaacguuu

SEQ ID NO: 91319 - RNA, 19 nt, Avian myelocytomatosis virus
guggcccugauaacagcac

SEQ ID NO: 91320 - RNA, 17 nt, Avian myelocytomatosis virus
ucacucaugaacuacau

SEQ ID NO: 91321 - RNA, 22 nt, Avian myelocytomatosis virus
ucaugcuuggggaugaacucuu

SEQ ID NO: 91322 - RNA, 14 nt, Avian myelocytomatosis virus
aacuacaacuauua

SEQ ID NO: 91323 - RNA, 21 nt, Avian myelocytomatosis virus
aacuagacugaaacuaugaua

SEQ ID NO: 91324 - RNA, 20 nt, Avian myelocytomatosis virus
uggaacuauugcaacugcau

SEQ ID NO: 91325 - RNA, 22 nt, Avian myelocytomatosis virus
uuaguguuucuaauaucacuca

SEQ ID NO: 91326 - RNA, 17 nt, Avian myelocytomatosis virus
acucaugaacuacauca

SEQ ID NO: 91327 - RNA, 12 nt, Avian myelocytomatosis virus
acuagacugaaa

SEQ ID NO: 91328 - RNA, 15 nt, Avian myelocytomatosis virus
acuagacugaaacua

SEQ ID NO: 91329 - RNA, 14 nt, Avian myelocytomatosis virus
acugaaacuaugau

SEQ ID NO: 91330 - RNA, 16 nt, Avian myelocytomatosis virus
acuuagaauaccccaa

SEQ ID NO: 91331 - RNA, 18 nt, Avian myelocytomatosis virus
agaaccucaaaacugccu

SEQ ID NO: 91332 - RNA, 17 nt, Avian myelocytomatosis virus
agacugaaacuaugaua

SEQ ID NO: 91333 - RNA, 23 nt, Avian myelocytomatosis virus
aggcauuccugguggcccugaua

SEQ ID NO: 91334 - RNA, 14 nt, Avian myelocytomatosis virus
auacuuugggcaua

SEQ ID NO: 91335 - RNA, 24 nt, Avian myelocytomatosis virus
auauuaguguuucuaauaucacuc

SEQ ID NO: 91336 - RNA, 18 nt, Avian myelocytomatosis virus
aucacucaugaacuacau

SEQ ID NO: 91337 - RNA, 18 nt, Avian myelocytomatosis virus
auuagguucccagucucu

SEQ ID NO: 91338 - RNA, 14 nt, Avian myelocytomatosis virus
caaacuagacugaa

SEQ ID NO: 91339 - RNA, 15 nt, Avian myelocytomatosis virus
auuuaaggcauuccu

SEQ ID NO: 91340 - RNA, 14 nt, Avian myelocytomatosis virus
cacucaugaacuac

SEQ ID NO: 91341 - RNA, 18 nt, Avian myelocytomatosis virus
caccuaucggaagguuuc

SEQ ID NO: 91342 - RNA, 22 nt, Avian myelocytomatosis virus
ccaucagaacuacaacuauuag

SEQ ID NO: 91343 - RNA, 24 nt, Avian myelocytomatosis virus
cagcacaacccucaccuaucggaa

SEQ ID NO: 91344 - RNA, 17 nt, Avian myelocytomatosis virus
cauugaguauggaacua

SEQ ID NO: 91345 - RNA, 22 nt, Avian myelocytomatosis virus
ccaaacuagacugaaacuauga

SEQ ID NO: 91346 - RNA, 14 nt, Avian myelocytomatosis virus
cucaugaacuacau

SEQ ID NO: 91347 - RNA, 14 nt, Avian myelocytomatosis virus
cuaauaucacucau

SEQ ID NO: 91348 - RNA, 21 nt, Avian myelocytomatosis virus
cuucaugcuuggggaugaacu

SEQ ID NO: 91349 - RNA, 22 nt, Avian myelocytomatosis virus
cuucaugcuuggggaugaacuc

SEQ ID NO: 91350 - RNA, 23 nt, Avian myelocytomatosis virus
cuucaugcuuggggaugaacucu

SEQ ID NO: 91351 - RNA, 20 nt, Avian myelocytomatosis virus
cuuaacuugagacuacacaa

SEQ ID NO: 91352 - RNA, 15 nt, Avian myelocytomatosis virus
cugauaacagcacaa

SEQ ID NO: 91353 - RNA, 13 nt, Avian myelocytomatosis virus
gaacuacaucagu

SEQ ID NO: 91354 - RNA, 21 nt, Avian myelocytomatosis virus
gaacguuucucuuuagacgag

SEQ ID NO: 91355 - RNA, 17 nt, Avian myelocytomatosis virus
gaacuauugcaacugca

SEQ ID NO: 91356 - RNA, 15 nt, Avian myelocytomatosis virus
cuugagacuacacaa

SEQ ID NO: 91357 - RNA, 13 nt, Avian myelocytomatosis virus
ggacaucacuuag

SEQ ID NO: 91358 - RNA, 11 nt, Avian myelocytomatosis virus
uauaacuaaua

SEQ ID NO: 91359 - RNA, 14 nt, Avian myelocytomatosis virus
uauuagguucccag

SEQ ID NO: 91360 - RNA, 19 nt, Avian myelocytomatosis virus
uauuagguucccagucucu

SEQ ID NO: 91361 - RNA, 14 nt, Avian myelocytomatosis virus
uauugcaacugcau

SEQ ID NO: 91362 - RNA, 14 nt, Avian myelocytomatosis virus
uaacagcacaaccc

SEQ ID NO: 91363 - RNA, 13 nt, Avian myelocytomatosis virus
uaauaucacucau

SEQ ID NO: 91364 - RNA, 15 nt, Avian myelocytomatosis virus
uaauaucacucauga

SEQ ID NO: 91365 - RNA, 21 nt, Avian myelocytomatosis virus
uaauaucacucaugaacuaca

SEQ ID NO: 91366 - RNA, 23 nt, Avian myelocytomatosis virus
uaauaucacucaugaacuacauc

SEQ ID NO: 91367 - RNA, 14 nt, Avian myelocytomatosis virus
uuuaaggcauuccu

SEQ ID NO: 91368 - RNA, 13 nt, Avian myelocytomatosis virus
uugagacuacaca

SEQ ID NO: 91369 - RNA, 18 nt, Avian myelocytomatosis virus
uugagacuacacaaccuu

SEQ ID NO: 91370 - RNA, 17 nt, Avian myelocytomatosis virus
uggggaugaacucuuca

SEQ ID NO: 91371 - RNA, 17 nt, Avian myelocytomatosis virus
ugggcauaagggaugau

SEQ ID NO: 91372 - RNA, 12 nt, Avian myelocytomatosis virus
ugaaacuaugau

SEQ ID NO: 91373 - RNA, 12 nt, Avian myelocytomatosis virus
ugauaacagcac

SEQ ID NO: 91374 - RNA, 20 nt, Avian myelocytomatosis virus
ucaugcuuggggaugaacuc

SEQ ID NO: 91375 - RNA, 17 nt, Avian myelocytomatosis virus
ucggaagguuucgugcu

SEQ ID NO: 91376 - RNA, 20 nt, Avian myelocytomatosis virus
ucuccgaacgguuuggccag

SEQ ID NO: 91377 - RNA, 22 nt, B19 virus
ugaccacccccaugccuuauca

SEQ ID NO: 91378 - RNA, 14 nt, B19 virus
ugcguaacuaaacg

SEQ ID NO: 91379 - RNA, 21 nt, B19 virus
uguaucagcaauuuguggaau

SEQ ID NO: 91380 - RNA, 14 nt, B19 virus
gucauggacaguua

SEQ ID NO: 91381 - RNA, 19 nt, B19 virus
gaccacccccaugccuuau

SEQ ID NO: 91382 - RNA, 17 nt, B19 virus
caccgugcccucagcca

SEQ ID NO: 91383 - RNA, 18 nt, B19 virus
caauuacgucauuuccug

SEQ ID NO: 91384 - RNA, 13 nt, B19 virus
acuuagagcuuau

SEQ ID NO: 91385 - RNA, 18 nt, B19 virus
acuuaguugcucguauua

SEQ ID NO: 91386 - RNA, 15 nt, B19 virus
acgucauuuccugug

SEQ ID NO: 91387 - RNA, 15 nt, B19 virus
acagccuaacacaaa

SEQ ID NO: 91388 - RNA, 14 nt, B19 virus
uggaacagacuuag

SEQ ID NO: 91389 - RNA, 16 nt, B19 virus
aauuacgucauuuccu

SEQ ID NO: 91390 - RNA, 22 nt, B19 virus
ucagccaggaugcguaacuaaa

SEQ ID NO: 91391 - RNA, 14 nt, B19 virus
ucuguuugacuuag

SEQ ID NO: 91392 - RNA, 15 nt, B19 virus
uagugaagacuuaca

SEQ ID NO: 91393 - RNA, 16 nt, B19 virus
aaauaaacauuuguug

SEQ ID NO: 91394 - RNA, 20 nt, B19 virus
cuagaggagaaaaugcagua

SEQ ID NO: 91395 - RNA, 23 nt, B19 virus
cuagaggagaaaaugcaguauua

SEQ ID NO: 91396 - RNA, 22 nt, B19 virus
ccgccgguaggcgggacuuccg

SEQ ID NO: 91397 - RNA, 15 nt, B19 virus
augccuuaucaucca

SEQ ID NO: 91398 - RNA, 12 nt, B19 virus
auauagucauca

SEQ ID NO: 91399 - RNA, 18 nt, B19 virus
aguacuuaaccagauaug

SEQ ID NO: 91400 - RNA, 21 nt, B19 virus
auaaauuugcuaaagcugugu

SEQ ID NO: 91401 - RNA, 19 nt, B19 virus
auuaucuagugaagacuua

SEQ ID NO: 91402 - RNA, 22 nt, B19 virus
auuuccugugacgucacuuccg

SEQ ID NO: 91403 - RNA, 18 nt, B19 virus
caaagucauggacaguua

SEQ ID NO: 91404 - RNA, 19 nt, B19 virus
cacaagccugggcaaguua

SEQ ID NO: 91405 - RNA, 22 nt, B19 virus
aaagguuacuggaacagacuua

SEQ ID NO: 91406 - RNA, 22 nt, B19 virus
aaagucauggacaguuaucuga

SEQ ID NO: 91407 - RNA, 19 nt, B19 virus
aaauauuaaaagaucacua

SEQ ID NO: 91408 - RNA, 15 nt, B19 virus
aauuuaaguacuuaa

SEQ ID NO: 91409 - RNA, 21 nt, B19 virus
acaauuacgucauuuccugug

SEQ ID NO: 91410 - RNA, 20 nt, B19 virus
acuuaaccagauaugaacaa

SEQ ID NO: 91411 - RNA, 17 nt, B19 virus
aaaacucuccagacuua

SEQ ID NO: 91412 - RNA, 22 nt, B19 virus
uuagaauguuaagauuguguaa

SEQ ID NO: 91413 - RNA, 20 nt, B19 virus
uuaucuagugaagacuuaca

SEQ ID NO: 91414 - RNA, 22 nt, B19 virus
uguaccugcccccuccuguacc

SEQ ID NO: 91415 - RNA, 21 nt, B19 virus
uccaguagcagucaugcagaa

SEQ ID NO: 91416 - RNA, 19 nt, B19 virus
ggaacagacuuagagcuua

SEQ ID NO: 91417 - RNA, 16 nt, B19 virus
gccuuaucauccagua

SEQ ID NO: 91418 - RNA, 20 nt, B19 virus
uagaggagaaaaugcaguau

SEQ ID NO: 91419 - RNA, 14 nt, B19 virus
uagugaagacuuac

SEQ ID NO: 91420 - RNA, 13 nt, B19 virus
ccuaacacaaaag

SEQ ID NO: 91421 - RNA, 15 nt, B19 virus
cuccuguaccuauaa

SEQ ID NO: 91422 - RNA, 14 nt, B19 virus
cuggaacagacuua

SEQ ID NO: 91423 - RNA, 23 nt, B19 virus
acuuccggugggcgggacuuccg

SEQ ID NO: 91424 - RNA, 17 nt, B19 virus
acaaaagauauagacaa

SEQ ID NO: 91425 - RNA, 16 nt, B19 virus
agucaugcagaaccua

SEQ ID NO: 91426 - RNA, 21 nt, B19 virus
cagccuaacacaaaagauaua

SEQ ID NO: 91427 - RNA, 19 nt, B19 virus
uaaacauuuguugugguua

SEQ ID NO: 91428 - RNA, 20 nt, B19 virus
uacaagauggcggacaauua

SEQ ID NO: 91429 - RNA, 12 nt, B19 virus
ucuccagacuua

SEQ ID NO: 91430 - RNA, 13 nt, B19 virus
ucuccagacuuau

SEQ ID NO: 91431 - RNA, 12 nt, B19 virus
uccuguaccuau

SEQ ID NO: 91432 - RNA, 15 nt, B19 virus
aagauauagacaaug

SEQ ID NO: 91433 - RNA, 16 nt, B19 virus
aacucuccagacuuau

SEQ ID NO: 91434 - RNA, 16 nt, B19 virus
uuuagaaaaauaaaca

SEQ ID NO: 91435 - RNA, 12 nt, B19 virus
uuuccugugacg

SEQ ID NO: 91436 - RNA, 17 nt, B19 virus
aaagauauagacaaugu

SEQ ID NO: 91437 - RNA, 23 nt, B19 virus
aaauuuaaaagaagacaccaaau

SEQ ID NO: 91438 - RNA, 19 nt, B19 virus
cuauguugggccuggcaau

SEQ ID NO: 91439 - RNA, 18 nt, B19 virus
ccaggaugcguaacuaaa

SEQ ID NO: 91440 - RNA, 21 nt, B19 virus
ccuagaggagaaaaugcagua

SEQ ID NO: 91441 - RNA, 23 nt, B19 virus
auauuucuuuagauaauccccua

SEQ ID NO: 91442 - RNA, 21 nt, B19 virus
auccaguagcagucaugcaga

SEQ ID NO: 91443 - RNA, 20 nt, B19 virus
auccucucuguuugacuuag

SEQ ID NO: 91444 - RNA, 23 nt, B19 virus
aucugaccacccccaugccuuau

SEQ ID NO: 91445 - RNA, 21 nt, B19 virus
auuuaaaagaagacaccaaau

SEQ ID NO: 91446 - RNA, 13 nt, B19 virus
auggcggacaauu

SEQ ID NO: 91447 - RNA, 23 nt, B19 virus
aaccuagaggagaaaaugcagua

SEQ ID NO: 91448 - RNA, 14 nt, B19 virus
aaaaugcaguauua

SEQ ID NO: 91449 - RNA, 17 nt, B19 virus
aaaugcaguauuaucua

SEQ ID NO: 91450 - RNA, 17 nt, B19 virus
accacccccaugccuua

SEQ ID NO: 91451 - RNA, 22 nt, B19 virus
accuagaggagaaaaugcagua

SEQ ID NO: 91452 - RNA, 18 nt, B19 virus
aaaaacucuccagacuua

SEQ ID NO: 91453 - RNA, 13 nt, Bacteriophage phig1e
acaacugcuguua

SEQ ID NO: 91454 - RNA, 17 nt, Bacteriophage phig1e
aacaucuauauauucca

SEQ ID NO: 91455 - RNA, 16 nt, Bacteriophage phig1e
aagucaugacuuuacu

SEQ ID NO: 91456 - RNA, 16 nt, Bacteriophage phig1e
auggcuugugcaugca

SEQ ID NO: 91457 - RNA, 14 nt, Bacteriophage phig1e
aucuguaugaauuu

SEQ ID NO: 91458 - RNA, 14 nt, Bacteriophage phig1e
caacugcuguuacu

SEQ ID NO: 91459 - RNA, 18 nt, Bacteriophage phig1e
auacgaugcguaucuuaa

SEQ ID NO: 91460 - RNA, 22 nt, Bacteriophage phig1e
auaacgcccaauuuauggguuu

SEQ ID NO: 91461 - RNA, 17 nt, Bacteriophage phig1e
auaacgauugcuuuauc

SEQ ID NO: 91462 - RNA, 21 nt, Bacteriophage phig1e
auaacgauugcuuuaucucua

SEQ ID NO: 91463 - RNA, 14 nt, Bacteriophage phig1e
agaucguggcugca

SEQ ID NO: 91464 - RNA, 23 nt, Bacteriophage phig1e
cauacaacugcuguuacugacua

SEQ ID NO: 91465 - RNA, 22 nt, Bacteriophage phig1e
gagaucaagucaugacuuuacu

SEQ ID NO: 91466 - RNA, 15 nt, Bacteriophage phig1e
gaucaagucaugacu

SEQ ID NO: 91467 - RNA, 15 nt, Bacteriophage phig1e
aagucaugacuuuac

SEQ ID NO: 91468 - RNA, 20 nt, Bacteriophage phig1e
uuauacgaugcguaucuuaa

SEQ ID NO: 91469 - RNA, 11 nt, Bacteriophage phig1e
uauacgaugcg

SEQ ID NO: 91470 - RNA, 20 nt, Bacteriophage phig1e
uacaacugcuguuacugacu

SEQ ID NO: 91471 - RNA, 23 nt, Bacteriophage phig1e
augaauuugagcaggaaauugau

SEQ ID NO: 91472 - RNA, 15 nt, Bacteriophage phig1e
augacuuuacuguua

SEQ ID NO: 91473 - RNA, 17 nt, Bacteriophage phig1e
agucaugacuuuacugu

SEQ ID NO: 91474 - RNA, 12 nt, Bacteriophage phig1e
aucaagucauga

SEQ ID NO: 91475 - RNA, 19 nt, Bacteriophage phig1e
auacaacugcuguuacuga

SEQ ID NO: 91476 - RNA, 14 nt, Bacteriophage phig1e
acaacugcuguuac

SEQ ID NO: 91477 - RNA, 18 nt, Bacteriophage phig1e
gaaaaguagccaguuucu

SEQ ID NO: 91478 - RNA, 19 nt, Bacteriophage phig1e
agaucaagucaugacuuua

SEQ ID NO: 91479 - RNA, 22 nt, Bacteriophage phig1e
aacgauugcuuuaucucuaugu

SEQ ID NO: 91480 - RNA, 17 nt, Bacteriophage phig1e
aacugcuguuacugacu

SEQ ID NO: 91481 - RNA, 17 nt, Bacteriophage phig1e
augcaccuuuaaauugg

SEQ ID NO: 91482 - RNA, 16 nt, Bacteriophage phig1e
augacuuuacuguuag

SEQ ID NO: 91483 - RNA, 15 nt, Bacteriophage phig1e
cccaauuuauggguu

SEQ ID NO: 91484 - RNA, 14 nt, Bacteriophage phig1e
cuauaacgauugcu

SEQ ID NO: 91485 - RNA, 19 nt, Bacteriophage phig1e
gacuauaacgauugcuuua

SEQ ID NO: 91486 - RNA, 14 nt, Bacteriophage phig1e
acuuuacuguuaga

SEQ ID NO: 91487 - RNA, 16 nt, Bacteriophage phig1e
caugacuuuacuguua

SEQ ID NO: 91488 - RNA, 23 nt, Bacteriophage phig1e
ccauacaacugcuguuacugacu

SEQ ID NO: 91489 - RNA, 24 nt, Bacteriophage phig1e
ccauacaacugcuguuacugacua

SEQ ID NO: 91490 - RNA, 22 nt, Bacteriophage phig1e
gagauggcuugugcaugcaccu

SEQ ID NO: 91491 - RNA, 21 nt, Bacteriophage phig1e
cuaaauaucgagaucaaguca

SEQ ID NO: 91492 - RNA, 22 nt, Bacteriophage phig1e
uauaacgauugcuuuaucucua

SEQ ID NO: 91493 - RNA, 17 nt, Bacteriophage phig1e
ucaugacuuuacuguua

SEQ ID NO: 91494 - RNA, 23 nt, Bacteriophage phig1e
uccccaauuuauacgaugcguau

SEQ ID NO: 91495 - RNA, 21 nt, Barmah Forest virus
uccguuuuacaaaauugcacg

SEQ ID NO: 91496 - RNA, 19 nt, Barmah Forest virus
uguaguaguaaguauagua

SEQ ID NO: 91497 - RNA, 19 nt, Barmah Forest virus
uguaguauuaaguauagua

SEQ ID NO: 91498 - RNA, 23 nt, Barmah Forest virus
uguaguauuaaguauaguauuac

SEQ ID NO: 91499 - RNA, 18 nt, Barmah Forest virus
uguaucuacgaaccggca

SEQ ID NO: 91500 - RNA, 16 nt, Barmah Forest virus
uguuauguaaguaugu

SEQ ID NO: 91501 - RNA, 17 nt, Barmah Forest virus
uuagaaaaacuuaauau

SEQ ID NO: 91502 - RNA, 23 nt, Barmah Forest virus
uauaaccccugaauaguaacaaa

SEQ ID NO: 91503 - RNA, 16 nt, Barmah Forest virus
uaguucaaagggccau

SEQ ID NO: 91504 - RNA, 21 nt, Barmah Forest virus
uaguucaaagggccauauuac

SEQ ID NO: 91505 - RNA, 23 nt, Barmah Forest virus
ucaaagggccauauaaccccuga

SEQ ID NO: 91506 - RNA, 23 nt, Barmah Forest virus
ucaaagggccauauuaccccuga

SEQ ID NO: 91507 - RNA, 16 nt, Barmah Forest virus
ucaacuccaacagcuu

SEQ ID NO: 91508 - RNA, 13 nt, Barmah Forest virus
uacaaaauugcac

SEQ ID NO: 91509 - RNA, 13 nt, Barmah Forest virus
uacguaaguaugu

SEQ ID NO: 91510 - RNA, 20 nt, Barmah Forest virus
uaagaaaccaacccaaaaga

SEQ ID NO: 91511 - RNA, 15 nt, Barmah Forest virus
uaaguauaguauuau

SEQ ID NO: 91512 - RNA, 21 nt, Barmah Forest virus
gguagacgauggagaccagca

SEQ ID NO: 91513 - RNA, 21 nt, Barmah Forest virus
guagacgauggagaccagcac

SEQ ID NO: 91514 - RNA, 17 nt, Barmah Forest virus
guagccgaacucuacgg

SEQ ID NO: 91515 - RNA, 19 nt, Barmah Forest virus
guauguaguaguaaguaua

SEQ ID NO: 91516 - RNA, 20 nt, Barmah Forest virus
ggaccaucucaacuccaaca

SEQ ID NO: 91517 - RNA, 23 nt, Barmah Forest virus
ggagaccagcaccaguccagaga

SEQ ID NO: 91518 - RNA, 18 nt, Barmah Forest virus
ggagcaaguaccaaauga

SEQ ID NO: 91519 - RNA, 15 nt, Barmah Forest virus
gcccaagaagacacc

SEQ ID NO: 91520 - RNA, 18 nt, Barmah Forest virus
gcccaagaagacaccacc

SEQ ID NO: 91521 - RNA, 23 nt, Barmah Forest virus
gcccaagaagacaccaccaccaa

SEQ ID NO: 91522 - RNA, 19 nt, Barmah Forest virus
cguaaguauguaguauuaa

SEQ ID NO: 91523 - RNA, 16 nt, Barmah Forest virus
cuacaacccaagcaga

SEQ ID NO: 91524 - RNA, 13 nt, Barmah Forest virus
cuacagcagagau

SEQ ID NO: 91525 - RNA, 20 nt, Barmah Forest virus
cuuaaggagcaaguaccaaa

SEQ ID NO: 91526 - RNA, 20 nt, Barmah Forest virus
gagcaaguaccaaaugaaac

SEQ ID NO: 91527 - RNA, 21 nt, Barmah Forest virus
gaacucuacggagauguagga

SEQ ID NO: 91528 - RNA, 13 nt, Barmah Forest virus
gaagaaguccaaa

SEQ ID NO: 91529 - RNA, 15 nt, Barmah Forest virus
gaauuaguauaguca

SEQ ID NO: 91530 - RNA, 17 nt, Barmah Forest virus
gaauuaguauagucaua

SEQ ID NO: 91531 - RNA, 16 nt, Barmah Forest virus
gauccguuuuacaaaa

SEQ ID NO: 91532 - RNA, 20 nt, Barmah Forest virus
gaggucugucuagugccaaa

SEQ ID NO: 91533 - RNA, 16 nt, Barmah Forest virus
ccugaauaguaacaaa

SEQ ID NO: 91534 - RNA, 14 nt, Barmah Forest virus
caucucaacuccaa

SEQ ID NO: 91535 - RNA, 15 nt, Barmah Forest virus
caucucaacuccaac

SEQ ID NO: 91536 - RNA, 17 nt, Barmah Forest virus
caccuacagcagagauc

SEQ ID NO: 91537 - RNA, 15 nt, Barmah Forest virus
cacggcagaauguau

SEQ ID NO: 91538 - RNA, 21 nt, Barmah Forest virus
cagaaacaaaaaagagcacag

SEQ ID NO: 91539 - RNA, 19 nt, Barmah Forest virus
auuucauccccacccaaac

SEQ ID NO: 91540 - RNA, 21 nt, Barmah Forest virus
caaacaaaagcagguaccaau

SEQ ID NO: 91541 - RNA, 17 nt, Barmah Forest virus
caaaaauaguaguucaa

SEQ ID NO: 91542 - RNA, 15 nt, Barmah Forest virus
auuaguauagucaua

SEQ ID NO: 91543 - RNA, 15 nt, Barmah Forest virus
acguaaguauguagu

SEQ ID NO: 91544 - RNA, 20 nt, Barmah Forest virus
acuagcucuacaacccaagc

SEQ ID NO: 91545 - RNA, 14 nt, Barmah Forest virus
agaggaccaucuca

SEQ ID NO: 91546 - RNA, 15 nt, Barmah Forest virus
agaggaccaucucaa

SEQ ID NO: 91547 - RNA, 21 nt, Barmah Forest virus
agaggaccaucucaacuccaa

SEQ ID NO: 91548 - RNA, 17 nt, Barmah Forest virus
agacaccaccaccaaaa

SEQ ID NO: 91549 - RNA, 13 nt, Barmah Forest virus
agaaauaguucaa

SEQ ID NO: 91550 - RNA, 21 nt, Barmah Forest virus
agaaauaguucaaagggccau

SEQ ID NO: 91551 - RNA, 15 nt, Barmah Forest virus
agaagaagcccaaga

SEQ ID NO: 91552 - RNA, 15 nt, Barmah Forest virus
accagcaccagucca

SEQ ID NO: 91553 - RNA, 22 nt, Barmah Forest virus
aggaccaucucaacuccaacag

SEQ ID NO: 91554 - RNA, 15 nt, Barmah Forest virus
aggagaggaccaucu

SEQ ID NO: 91555 - RNA, 17 nt, Barmah Forest virus
agcucuacaacccaagc

SEQ ID NO: 91556 - RNA, 20 nt, Barmah Forest virus
agcucuacaacccaagcaga

SEQ ID NO: 91557 - RNA, 14 nt, Barmah Forest virus
aguaguaaguauag

SEQ ID NO: 91558 - RNA, 23 nt, Barmah Forest virus
aaauaguaguucaaagggccaua

SEQ ID NO: 91559 - RNA, 21 nt, Barmah Forest virus
gaauaacguacccggugccua

SEQ ID NO: 91560 - RNA, 22 nt, Barmah Forest virus
ggcaaaacuagaaaaaauucau

SEQ ID NO: 91561 - RNA, 23 nt, Barmah Forest virus
gccauauaaccccugaauaguaa

SEQ ID NO: 91562 - RNA, 23 nt, Barmah Forest virus
gccauauuaccccugaauaguaa

SEQ ID NO: 91563 - RNA, 15 nt, Barmah Forest virus
gccuauauacucaac

SEQ ID NO: 91564 - RNA, 17 nt, Barmah Forest virus
gcauccgaacucuacgg

SEQ ID NO: 91565 - RNA, 15 nt, Barmah Forest virus
cuagaaaaaauucau

SEQ ID NO: 91566 - RNA, 20 nt, Barmah Forest virus
cugcaucuuuccggugaugc

SEQ ID NO: 91567 - RNA, 13 nt, Barmah Forest virus
cugaagcaaacaa

SEQ ID NO: 91568 - RNA, 22 nt, Barmah Forest virus
cugaagcaaacaaaagcaggua

SEQ ID NO: 91569 - RNA, 15 nt, Barmah Forest virus
cauccccacccaaac

SEQ ID NO: 91570 - RNA, 23 nt, Barmah Forest virus
cauggauuucauccccacccaaa

SEQ ID NO: 91571 - RNA, 22 nt, Barmah Forest virus
ccaguugaaugcuaccgaauaa

SEQ ID NO: 91572 - RNA, 21 nt, Barmah Forest virus
ccaaaaccaaaaaagacccag

SEQ ID NO: 91573 - RNA, 21 nt, Barmah Forest virus
ccaacagcuuguggcugcauu

SEQ ID NO: 91574 - RNA, 11 nt, Barmah Forest virus
ccaacccaaaa

SEQ ID NO: 91575 - RNA, 18 nt, Barmah Forest virus
uaguaguucaaagggcca

SEQ ID NO: 91576 - RNA, 12 nt, Barmah Forest virus
uaaaaccaagga

SEQ ID NO: 91577 - RNA, 16 nt, Barmah Forest virus
ucucaacuccaacagc

SEQ ID NO: 91578 - RNA, 18 nt, Barmah Forest virus
ucugaagcaaacaaaagc

SEQ ID NO: 91579 - RNA, 16 nt, Barmah Forest virus
ucuagaaaaguagaaa

SEQ ID NO: 91580 - RNA, 22 nt, Barmah Forest virus
ucaaauucugccgaaccccaga

SEQ ID NO: 91581 - RNA, 14 nt, Barmah Forest virus
uccaaacccggcaa

SEQ ID NO: 91582 - RNA, 15 nt, Barmah Forest virus
aauuaguauagucau

SEQ ID NO: 91583 - RNA, 21 nt, Barmah Forest virus
aauucaugcaccaaaguugga

SEQ ID NO: 91584 - RNA, 12 nt, Barmah Forest virus
aaguauaguauu

SEQ ID NO: 91585 - RNA, 15 nt, Barmah Forest virus
aaguauguaguagua

SEQ ID NO: 91586 - RNA, 21 nt, Barmah Forest virus
aaguauguaguauuaaguaua

SEQ ID NO: 91587 - RNA, 14 nt, Barmah Forest virus
aacuagugaccuca

SEQ ID NO: 91588 - RNA, 20 nt, Barmah Forest virus
ugcauugggcgcacuagcuc

SEQ ID NO: 91589 - RNA, 13 nt, Barmah Forest virus
ugggcaccgagca

SEQ ID NO: 91590 - RNA, 23 nt, Barmah Forest virus
uguaguaguaaguauaguauuau

SEQ ID NO: 91591 - RNA, 22 nt, Barmah Forest virus
uggagaccagcaccaguccaga

SEQ ID NO: 91592 - RNA, 12 nt, Barmah Forest virus
uuaguauaguca

SEQ ID NO: 91593 - RNA, 12 nt, Barmah Forest virus
uuaaguauagua

SEQ ID NO: 91594 - RNA, 12 nt, Barmah Forest virus
augcaccaaagu

SEQ ID NO: 91595 - RNA, 18 nt, Barmah Forest virus
aguguagaaauaguucaa

SEQ ID NO: 91596 - RNA, 19 nt, Barmah Forest virus
agcauccaguugaaugcua

SEQ ID NO: 91597 - RNA, 12 nt, Barmah Forest virus
caccaccaaaac

SEQ ID NO: 91598 - RNA, 14 nt, Barmah Forest virus
caccaccaaaacca

SEQ ID NO: 91599 - RNA, 22 nt, Barmah Forest virus
cagaggucugucuagugccaaa

SEQ ID NO: 91600 - RNA, 14 nt, Barmah Forest virus
cagcaccaguccag

SEQ ID NO: 91601 - RNA, 17 nt, Barmah Forest virus
cagcaccaguccagaga

SEQ ID NO: 91602 - RNA, 19 nt, Barmah Forest virus
cagcaccaguccagagaua

SEQ ID NO: 91603 - RNA, 13 nt, Barmah Forest virus
caaaaaagaccca

SEQ ID NO: 91604 - RNA, 17 nt, Barmah Forest virus
aagaaaccaacccaaaa

SEQ ID NO: 91605 - RNA, 23 nt, Barmah Forest virus
aagagaaaaacacaaaaauagua

SEQ ID NO: 91606 - RNA, 17 nt, Barmah Forest virus
aaccccaaccaccagcg

SEQ ID NO: 91607 - RNA, 15 nt, Barmah Forest virus
aauaugaaagcagag

SEQ ID NO: 91608 - RNA, 14 nt, Barmah Forest virus
aaguauguaguauu

SEQ ID NO: 91609 - RNA, 23 nt, Barmah Forest virus
agauaucuuaaggagcaaguacc

SEQ ID NO: 91610 - RNA, 20 nt, Barmah Forest virus
agaggucugucuagugccaa

SEQ ID NO: 91611 - RNA, 19 nt, Barmah Forest virus
agcacagaagaagcccaag

SEQ ID NO: 91612 - RNA, 22 nt, Barmah Forest virus
agcagagauccguuuuacaaaa

SEQ ID NO: 91613 - RNA, 23 nt, Barmah Forest virus
agcagagauccguuuuacaaaau

SEQ ID NO: 91614 - RNA, 14 nt, Barmah Forest virus
agaaaccaacccaa

SEQ ID NO: 91615 - RNA, 16 nt, Barmah Forest virus
agaaaccaacccaaaa

SEQ ID NO: 91616 - RNA, 17 nt, Barmah Forest virus
agaaaccaacccaaaag

SEQ ID NO: 91617 - RNA, 21 nt, Barmah Forest virus
agacaacuagucucggcaaca

SEQ ID NO: 91618 - RNA, 20 nt, Barmah Forest virus
accaaucuagaaaaguagaa

SEQ ID NO: 91619 - RNA, 20 nt, Barmah Forest virus
acccaagcagaaacaaaaaa

SEQ ID NO: 91620 - RNA, 15 nt, Barmah Forest virus
acccagaagccuaag

SEQ ID NO: 91621 - RNA, 18 nt, Barmah Forest virus
acccagaagccuaagaaa

SEQ ID NO: 91622 - RNA, 12 nt, Barmah Forest virus
aaaaauaguagu

SEQ ID NO: 91623 - RNA, 10 nt, Barmah Forest virus
aaaaccaaaa

SEQ ID NO: 91624 - RNA, 14 nt, Barmah Forest virus
aaacagcuguuaga

SEQ ID NO: 91625 - RNA, 15 nt, Barmah Forest virus
aaaccgucugaagca

SEQ ID NO: 91626 - RNA, 20 nt, Barmah Forest virus
gaaaccaacccaaaagaaga

SEQ ID NO: 91627 - RNA, 14 nt, Barmah Forest virus
gaagcccaagaaga

SEQ ID NO: 91628 - RNA, 12 nt, Barmah Forest virus
cuugcaaugcau

SEQ ID NO: 91629 - RNA, 15 nt, Barmah Forest virus
gagaaugacugcauc

SEQ ID NO: 91630 - RNA, 16 nt, Barmah Forest virus
gacaccaccaccaaaa

SEQ ID NO: 91631 - RNA, 22 nt, Barmah Forest virus
gauggagaccagcaccagucca

SEQ ID NO: 91632 - RNA, 18 nt, Barmah Forest virus
cucuacaacccaagcaga

SEQ ID NO: 91633 - RNA, 17 nt, Barmah Forest virus
cgagaaugacugcaucu

SEQ ID NO: 91634 - RNA, 20 nt, Barmah Forest virus
uagacaacuagucucggcaa

SEQ ID NO: 91635 - RNA, 21 nt, Barmah Forest virus
uaaggagcaaguaccaaauga

SEQ ID NO: 91636 - RNA, 17 nt, Barmah Forest virus
guccagagauacauacc

SEQ ID NO: 91637 - RNA, 17 nt, Barmah Forest virus
gccuauauacucaacua

SEQ ID NO: 91638 - RNA, 21 nt, Barmah Forest virus
gccguaggagaggaccaucuc

SEQ ID NO: 91639 - RNA, 20 nt, Barmah Forest virus
gccuaagaaaccaacccaaa

SEQ ID NO: 91640 - RNA, 21 nt, Barmah Forest virus
gccuaagaaaccaacccaaaa

SEQ ID NO: 91641 - RNA, 22 nt, Barmah Forest virus
gcacuagcucuacaacccaagc

SEQ ID NO: 91642 - RNA, 22 nt, Barmah Forest virus
gcugcauugggcgcacuagcuc

SEQ ID NO: 91643 - RNA, 12 nt, Barmah Forest virus
guaaguauagua

SEQ ID NO: 91644 - RNA, 12 nt, Barmah Forest virus
guaaguauguag

SEQ ID NO: 91645 - RNA, 22 nt, Barmah Forest virus
guagaaaauaugaaagcagaga

SEQ ID NO: 91646 - RNA, 20 nt, Barmah Forest virus
accucagaggucugucuagu

SEQ ID NO: 91647 - RNA, 17 nt, Barmah Forest virus
auaugaaagcagagauc

SEQ ID NO: 91648 - RNA, 12 nt, Barmah Forest virus
auaguaguucaa

SEQ ID NO: 91649 - RNA, 16 nt, Barmah Forest virus
auaguucaaagggcca

SEQ ID NO: 91650 - RNA, 16 nt, Barmah Forest virus
aguccagagauacaua

SEQ ID NO: 91651 - RNA, 17 nt, Barmah Forest virus
agccggcggguacauuu

SEQ ID NO: 91652 - RNA, 16 nt, Barmah Forest virus
agcuugcaaugcauuu

SEQ ID NO: 91653 - RNA, 18 nt, Barmah Forest virus
agaaaaaauucaugcacc

SEQ ID NO: 91654 - RNA, 13 nt, Barmah Forest virus
agcaaguaccaaa

SEQ ID NO: 91655 - RNA, 17 nt, Barmah Forest virus
auggauuucauccccac

SEQ ID NO: 91656 - RNA, 17 nt, Barmah Forest virus
auguaguauuaaguaua

SEQ ID NO: 91657 - RNA, 17 nt, Barmah Forest virus
caacagcuuguggcugc

SEQ ID NO: 91658 - RNA, 22 nt, Barmah Forest virus
caacccaaaagaagaaguccaa

SEQ ID NO: 91659 - RNA, 20 nt, Barmah Forest virus
caacccaagcagaaacaaaa

SEQ ID NO: 91660 - RNA, 14 nt, Barmah Forest virus
caaaaaagagcaca

SEQ ID NO: 91661 - RNA, 22 nt, Barmah Forest virus
auugcacggcagaauguaucua

SEQ ID NO: 91662 - RNA, 21 nt, Barmah Forest virus
caagaagacaccaccaccaaa

SEQ ID NO: 91663 - RNA, 21 nt, Barmah Forest virus
cagcuguuagagcuugcaaug

SEQ ID NO: 91664 - RNA, 17 nt, Barmah Forest virus
cauaccccaaccccaac

SEQ ID NO: 91665 - RNA, 13 nt, Barmah Forest virus
caugcaccaaagu

SEQ ID NO: 91666 - RNA, 13 nt, Barmah Forest virus
ccaacccaaaaga

SEQ ID NO: 91667 - RNA, 21 nt, Barmah Forest virus
ucugaagcaaacaaaagcagg

SEQ ID NO: 91668 - RNA, 20 nt, Barmah Forest virus
ucuuaaggagcaaguaccaa

SEQ ID NO: 91669 - RNA, 23 nt, Barmah Forest virus
uuaaggagcaaguaccaaaugaa

SEQ ID NO: 91670 - RNA, 13 nt, Barmah Forest virus
uaaguauguagua

SEQ ID NO: 91671 - RNA, 17 nt, Barmah Forest virus
uaaguauguaguauuaa

SEQ ID NO: 91672 - RNA, 15 nt, Barmah Forest virus
guauaguauuacagg

SEQ ID NO: 91673 - RNA, 21 nt, Barmah Forest virus
guauagucauaguuaguguag

SEQ ID NO: 91674 - RNA, 12 nt, Barmah Forest virus
guauuaaguaua

SEQ ID NO: 91675 - RNA, 15 nt, Barmah Forest virus
uagaaauaguucaaa

SEQ ID NO: 91676 - RNA, 22 nt, Barmah Forest virus
uaucuuaaggagcaaguaccaa

SEQ ID NO: 91677 - RNA, 12 nt, Barmah Forest virus
uaugaaagcaga

SEQ ID NO: 91678 - RNA, 23 nt, Barmah Forest virus
uauuaccccugaauaguaacaaa

SEQ ID NO: 91679 - RNA, 14 nt, Barmah Forest virus
ucuagugccaaaac

SEQ ID NO: 91680 - RNA, 14 nt, Barmah Forest virus
uucaaagggccaua

SEQ ID NO: 91681 - RNA, 14 nt, Barmah Forest virus
aagcagguaccaau

SEQ ID NO: 91682 - RNA, 16 nt, Barmah Forest virus
aauaguaacaaaaauc

SEQ ID NO: 91683 - RNA, 17 nt, Barmah Forest virus
aacguacccggugccua

SEQ ID NO: 91684 - RNA, 22 nt, Barmah Forest virus
aagauuaguuuguuauguaagu

SEQ ID NO: 91685 - RNA, 20 nt, Barmah Forest virus
aagagaaaaacacaaaaaua

SEQ ID NO: 91686 - RNA, 15 nt, Barmah Forest virus
uuuagaaaaacuuaa

SEQ ID NO: 91687 - RNA, 15 nt, Barmah Forest virus
gcaaguaccaaauga

SEQ ID NO: 91688 - RNA, 21 nt, Barmah Forest virus
gcacuagcucuacaacccaag

SEQ ID NO: 91689 - RNA, 21 nt, Barmah Forest virus
gcagaaacaaaaaagagcaca

SEQ ID NO: 91690 - RNA, 15 nt, Barmah Forest virus
gcagguaccaaucua

SEQ ID NO: 91691 - RNA, 15 nt, Barmah Forest virus
gcucuacaacccaag

SEQ ID NO: 91692 - RNA, 21 nt, Barmah Forest virus
ggauuucauccccacccaaac

SEQ ID NO: 91693 - RNA, 22 nt, Barmah Forest virus
gagaccagcaccaguccagaga

SEQ ID NO: 91694 - RNA, 21 nt, Barmah Forest virus
gagcauccaguugaaugcuac

SEQ ID NO: 91695 - RNA, 14 nt, Barmah Forest virus
gagcaaguaccaaa

SEQ ID NO: 91696 - RNA, 22 nt, Barmah Forest virus
gagcacagaagaagcccaagaa

SEQ ID NO: 91697 - RNA, 17 nt, Barmah Forest virus
aaauucaugcaccaaag

SEQ ID NO: 91698 - RNA, 21 nt, Barmah Forest virus
gaacucuacggagauguaggc

SEQ ID NO: 91699 - RNA, 14 nt, Barmah Forest virus
gaagaagcccaaga

SEQ ID NO: 91700 - RNA, 14 nt, Barmah Forest virus
gaaaccaacccaaa

SEQ ID NO: 91701 - RNA, 22 nt, Barmah Forest virus
cauaccccaaccccaaccacca

SEQ ID NO: 91702 - RNA, 13 nt, Barmah Forest virus
ccaagaagacacc

SEQ ID NO: 91703 - RNA, 19 nt, Barmah Forest virus
aaaauucaugcaccaaagu

SEQ ID NO: 91704 - RNA, 21 nt, Barmah Forest virus
cuaagaaaccaacccaaaaga

SEQ ID NO: 91705 - RNA, 19 nt, Barmah Forest virus
aggaccaucucaacuccaa

SEQ ID NO: 91706 - RNA, 18 nt, Barmah Forest virus
aguaaguauaguauuaua

SEQ ID NO: 91707 - RNA, 16 nt, Barmah Forest virus
aguauguaguauuaag

SEQ ID NO: 91708 - RNA, 14 nt, Barmah Forest virus
aguauuaaguauag

SEQ ID NO: 91709 - RNA, 17 nt, Barmah Forest virus
aguccaaacccggcaaa

SEQ ID NO: 91710 - RNA, 22 nt, Barmah Forest virus
aguccagagauacauaccccaa

SEQ ID NO: 91711 - RNA, 13 nt, Barmah Forest virus
auacauaccccaa

SEQ ID NO: 91712 - RNA, 17 nt, Barmah Forest virus
aucuagaaaaguagaaa

SEQ ID NO: 91713 - RNA, 16 nt, Barmah Forest virus
auaugaaagcagagau

SEQ ID NO: 91714 - RNA, 14 nt, Barmah Forest virus
caaguaccaaauga

SEQ ID NO: 91715 - RNA, 17 nt, Barmah Forest virus
caaucuagaaaaguaga

SEQ ID NO: 91716 - RNA, 23 nt, Barmah Forest virus
aucuuaaggagcaaguaccaaau

SEQ ID NO: 91717 - RNA, 17 nt, Barmah Forest virus
auguaguaguaaguaua

SEQ ID NO: 91718 - RNA, 11 nt, Barmah Forest virus
caaaaccaaaa

SEQ ID NO: 91719 - RNA, 17 nt, Barmah Forest virus
caaaagaagaaguccaa

SEQ ID NO: 91720 - RNA, 20 nt, Barmah Forest virus
aaggagcaaguaccaaauga

SEQ ID NO: 91721 - RNA, 19 nt, Barmah Forest virus
aaguuggauaaaaccaagg

SEQ ID NO: 91722 - RNA, 13 nt, Barmah Forest virus
aagaagcccaaga

SEQ ID NO: 91723 - RNA, 21 nt, Barmah Forest virus
aagcccaagaagacaccacca

SEQ ID NO: 91724 - RNA, 21 nt, Barmah Forest virus
aauaguaguucaaagggccau

SEQ ID NO: 91725 - RNA, 23 nt, Barmah Forest virus
aaccaaggaagauaucuuaagga

SEQ ID NO: 91726 - RNA, 19 nt, Barmah Forest virus
aacaaaagcagguaccaau

SEQ ID NO: 91727 - RNA, 18 nt, Barmah Forest virus
aacccaagcagaaacaaa

SEQ ID NO: 91728 - RNA, 18 nt, Barmah Forest virus
aaauucaugcaccaaagu

SEQ ID NO: 91729 - RNA, 20 nt, Barmah Forest virus
aaauaguucaaagggccaua

SEQ ID NO: 91730 - RNA, 12 nt, Barmah Forest virus
aaaagacccaga

SEQ ID NO: 91731 - RNA, 17 nt, BK polyomavirus
aaaagcaccuguuuaaa

SEQ ID NO: 91732 - RNA, 15 nt, BK polyomavirus
aaaagcagcauuuau

SEQ ID NO: 91733 - RNA, 19 nt, BK polyomavirus
aaaagcagcauuuauuaaa

SEQ ID NO: 91734 - RNA, 17 nt, BK polyomavirus
aaaagcucaaauucugu

SEQ ID NO: 91735 - RNA, 13 nt, BK polyomavirus
aaaauauucugua

SEQ ID NO: 91736 - RNA, 20 nt, BK polyomavirus
aaaauauucuguaacuuuua

SEQ ID NO: 91737 - RNA, 20 nt, BK polyomavirus
aaaaugacuuuagcagugau

SEQ ID NO: 91738 - RNA, 19 nt, BK polyomavirus
aaaaugggaugaagauuua

SEQ ID NO: 91739 - RNA, 15 nt, BK polyomavirus
aaacuguuaguggua

SEQ ID NO: 91740 - RNA, 22 nt, BK polyomavirus
aaauaucuugcaaggccucucc

SEQ ID NO: 91741 - RNA, 17 nt, BK polyomavirus
aaaugacuuuagcagug

SEQ ID NO: 91742 - RNA, 21 nt, BK polyomavirus
aaauugcaucccuugcuacug

SEQ ID NO: 91743 - RNA, 17 nt, BK polyomavirus
aaaugcagggagugcua

SEQ ID NO: 91744 - RNA, 18 nt, BK polyomavirus
aaaugcagggagugcuaa

SEQ ID NO: 91745 - RNA, 12 nt, BK polyomavirus
aaagcagcauuu

SEQ ID NO: 91746 - RNA, 23 nt, BK polyomavirus
aaagcaccuguuuaaagcauuuu

SEQ ID NO: 91747 - RNA, 23 nt, BK polyomavirus
aaagccuuuacacaaaugcaacu

SEQ ID NO: 91748 - RNA, 17 nt, BK polyomavirus
aaagcucaaauucugua

SEQ ID NO: 91749 - RNA, 20 nt, BK polyomavirus
aaagcucaaauucuguauaa

SEQ ID NO: 91750 - RNA, 15 nt, BK polyomavirus
aaccuucaugcaggg

SEQ ID NO: 91751 - RNA, 11 nt, BK polyomavirus
aaauugcugcu

SEQ ID NO: 91752 - RNA, 12 nt, BK polyomavirus
aaauugcugcug

SEQ ID NO: 91753 - RNA, 19 nt, BK polyomavirus
aacagagguuauuggaaua

SEQ ID NO: 91754 - RNA, 19 nt, BK polyomavirus
aauaucaagaauacauuuc

SEQ ID NO: 91755 - RNA, 16 nt, BK polyomavirus
aaugcagggagugcua

SEQ ID NO: 91756 - RNA, 17 nt, BK polyomavirus
aauguauauguacaaua

SEQ ID NO: 91757 - RNA, 22 nt, BK polyomavirus
aauugcaucccuugcuacugua

SEQ ID NO: 91758 - RNA, 16 nt, BK polyomavirus
aauugcuggugcuccu

SEQ ID NO: 91759 - RNA, 22 nt, BK polyomavirus
aagccuuuacacaaaugcaacu

SEQ ID NO: 91760 - RNA, 21 nt, BK polyomavirus
aaguucuuugaugauugggau

SEQ ID NO: 91761 - RNA, 15 nt, BK polyomavirus
aaguucaaauugcau

SEQ ID NO: 91762 - RNA, 21 nt, BK polyomavirus
aauacauuuccccaugcauau

SEQ ID NO: 91763 - RNA, 23 nt, BK polyomavirus
aaggcaguaauuuccacuucuuu

SEQ ID NO: 91764 - RNA, 16 nt, BK polyomavirus
aagucuuucugugcca

SEQ ID NO: 91765 - RNA, 13 nt, BK polyomavirus
acaaauaucagca

SEQ ID NO: 91766 - RNA, 13 nt, BK polyomavirus
acaggccacaaau

SEQ ID NO: 91767 - RNA, 18 nt, BK polyomavirus
acaggcuaucagcuuuac

SEQ ID NO: 91768 - RNA, 20 nt, BK polyomavirus
acagagguagaaugcuuccu

SEQ ID NO: 91769 - RNA, 23 nt, BK polyomavirus
acauacaggcuaucagcuuuaca

SEQ ID NO: 91770 - RNA, 14 nt, BK polyomavirus
acauacuuaucuca

SEQ ID NO: 91771 - RNA, 16 nt, BK polyomavirus
acauacuuaucucaga

SEQ ID NO: 91772 - RNA, 16 nt, BK polyomavirus
accuauucaaggcagu

SEQ ID NO: 91773 - RNA, 11 nt, BK polyomavirus
acccuaaagac

SEQ ID NO: 91774 - RNA, 18 nt, BK polyomavirus
acccuuggaaaugcaggg

SEQ ID NO: 91775 - RNA, 19 nt, BK polyomavirus
accacccaaaaaaaaaaga

SEQ ID NO: 91776 - RNA, 18 nt, BK polyomavirus
acuaacuuauauuuagau

SEQ ID NO: 91777 - RNA, 14 nt, BK polyomavirus
agagcauugugauu

SEQ ID NO: 91778 - RNA, 15 nt, BK polyomavirus
agaauccagccuuuc

SEQ ID NO: 91779 - RNA, 18 nt, BK polyomavirus
agaauccagccuuuccuu

SEQ ID NO: 91780 - RNA, 16 nt, BK polyomavirus
agacccuaaagacuuu

SEQ ID NO: 91781 - RNA, 15 nt, BK polyomavirus
acuuauggaaaaaua

SEQ ID NO: 91782 - RNA, 23 nt, BK polyomavirus
agaaagguagaagacccuaaaga

SEQ ID NO: 91783 - RNA, 23 nt, BK polyomavirus
agaaaugggggauccagaugaaa

SEQ ID NO: 91784 - RNA, 16 nt, BK polyomavirus
agaagcaacagcagau

SEQ ID NO: 91785 - RNA, 18 nt, BK polyomavirus
auuuaauaaaugcugcuu

SEQ ID NO: 91786 - RNA, 14 nt, BK polyomavirus
auuauauuucaucc

SEQ ID NO: 91787 - RNA, 16 nt, BK polyomavirus
auugcuggugcuccug

SEQ ID NO: 91788 - RNA, 18 nt, BK polyomavirus
auugcuggugcuccuggg

SEQ ID NO: 91789 - RNA, 16 nt, BK polyomavirus
auucuagauuguauau

SEQ ID NO: 91790 - RNA, 16 nt, BK polyomavirus
auguauauguacaaua

SEQ ID NO: 91791 - RNA, 12 nt, BK polyomavirus
caaguaggguau

SEQ ID NO: 91792 - RNA, 16 nt, BK polyomavirus
caauaaaagcaccugu

SEQ ID NO: 91793 - RNA, 12 nt, BK polyomavirus
caauauaucuua

SEQ ID NO: 91794 - RNA, 13 nt, BK polyomavirus
caaaagcagcauu

SEQ ID NO: 91795 - RNA, 15 nt, BK polyomavirus
caaaagcagcauuua

SEQ ID NO: 91796 - RNA, 14 nt, BK polyomavirus
aucucagaauccag

SEQ ID NO: 91797 - RNA, 14 nt, BK polyomavirus
aucugaggcugcug

SEQ ID NO: 91798 - RNA, 17 nt, BK polyomavirus
aucugaggcugcugcug

SEQ ID NO: 91799 - RNA, 19 nt, BK polyomavirus
aucugaggcugcugcugcc

SEQ ID NO: 91800 - RNA, 23 nt, BK polyomavirus
auccucuucucuuguaauaucaa

SEQ ID NO: 91801 - RNA, 22 nt, BK polyomavirus
auacauacuuaucucagaaucc

SEQ ID NO: 91802 - RNA, 18 nt, BK polyomavirus
auacauuuccccaugcau

SEQ ID NO: 91803 - RNA, 15 nt, BK polyomavirus
auacaaaagcagcau

SEQ ID NO: 91804 - RNA, 22 nt, BK polyomavirus
auacuacuaaagaaaaagcuca

SEQ ID NO: 91805 - RNA, 21 nt, BK polyomavirus
auagaaguucaaauugcaucc

SEQ ID NO: 91806 - RNA, 21 nt, BK polyomavirus
auaaaugcugcuuuuguauaa

SEQ ID NO: 91807 - RNA, 16 nt, BK polyomavirus
agucuuucugugccau

SEQ ID NO: 91808 - RNA, 22 nt, BK polyomavirus
agucuuucugugccaucaaaca

SEQ ID NO: 91809 - RNA, 14 nt, BK polyomavirus
auaaaaaacuuaug

SEQ ID NO: 91810 - RNA, 14 nt, BK polyomavirus
aggauucuuuacag

SEQ ID NO: 91811 - RNA, 18 nt, BK polyomavirus
agcugaaacauacaggcu

SEQ ID NO: 91812 - RNA, 12 nt, BK polyomavirus
aggccacaaaua

SEQ ID NO: 91813 - RNA, 14 nt, BK polyomavirus
aggccuaacuccuc

SEQ ID NO: 91814 - RNA, 13 nt, BK polyomavirus
agcauugugauug

SEQ ID NO: 91815 - RNA, 17 nt, BK polyomavirus
agcauuuugguuugcaa

SEQ ID NO: 91816 - RNA, 17 nt, BK polyomavirus
agccuuuccuuccauuc

SEQ ID NO: 91817 - RNA, 18 nt, BK polyomavirus
agccuuuccuuccauuca

SEQ ID NO: 91818 - RNA, 15 nt, BK polyomavirus
agcucaaauucugua

SEQ ID NO: 91819 - RNA, 12 nt, BK polyomavirus
aaaaaguauaca

SEQ ID NO: 91820 - RNA, 13 nt, BK polyomavirus
aaaaauauucugu

SEQ ID NO: 91821 - RNA, 14 nt, BK polyomavirus
aaaaauauucugua

SEQ ID NO: 91822 - RNA, 17 nt, BK polyomavirus
aaaaaugggaugaagau

SEQ ID NO: 91823 - RNA, 14 nt, BK polyomavirus
aaaagcaccuguuu

SEQ ID NO: 91824 - RNA, 17 nt, BK polyomavirus
cuaacuccucaaacaua

SEQ ID NO: 91825 - RNA, 21 nt, BK polyomavirus
cuaagugcugaaaaugacuuu

SEQ ID NO: 91826 - RNA, 17 nt, BK polyomavirus
ccuguuuaaagcauuuu

SEQ ID NO: 91827 - RNA, 11 nt, BK polyomavirus
ccuuagcucaa

SEQ ID NO: 91828 - RNA, 12 nt, BK polyomavirus
ccuuagcucaag

SEQ ID NO: 91829 - RNA, 22 nt, BK polyomavirus
aaacacugaaagccuuuacaca

SEQ ID NO: 91830 - RNA, 23 nt, BK polyomavirus
aaacauacaggcuaucagcuuua

SEQ ID NO: 91831 - RNA, 23 nt, BK polyomavirus
cucaggcggaucuuaaaauaucu

SEQ ID NO: 91832 - RNA, 10 nt, BK polyomavirus
cugcugcuau

SEQ ID NO: 91833 - RNA, 11 nt, BK polyomavirus
cugcugcuaua

SEQ ID NO: 91834 - RNA, 21 nt, BK polyomavirus
cugcugcuauagaaguucaaa

SEQ ID NO: 91835 - RNA, 15 nt, BK polyomavirus
cugcugcugcuauag

SEQ ID NO: 91836 - RNA, 12 nt, BK polyomavirus
cuggugcuccug

SEQ ID NO: 91837 - RNA, 16 nt, BK polyomavirus
cuguacaaacagaggu

SEQ ID NO: 91838 - RNA, 18 nt, BK polyomavirus
cuguggaaaucuacugau

SEQ ID NO: 91839 - RNA, 11 nt, BK polyomavirus
cuguguauacu

SEQ ID NO: 91840 - RNA, 15 nt, BK polyomavirus
cuguuacagcacagc

SEQ ID NO: 91841 - RNA, 17 nt, BK polyomavirus
aaacacccuaaccucuu

SEQ ID NO: 91842 - RNA, 22 nt, BK polyomavirus
ccuaacuccucaaacauaugcu

SEQ ID NO: 91843 - RNA, 14 nt, BK polyomavirus
cccuguuugucaau

SEQ ID NO: 91844 - RNA, 16 nt, BK polyomavirus
ccacaaauaucagcag

SEQ ID NO: 91845 - RNA, 20 nt, BK polyomavirus
ccagguucaugggugcugcu

SEQ ID NO: 91846 - RNA, 17 nt, BK polyomavirus
cauuuccccaugcauau

SEQ ID NO: 91847 - RNA, 21 nt, BK polyomavirus
cauguccagagucuucaguuu

SEQ ID NO: 91848 - RNA, 14 nt, BK polyomavirus
cauacuuaucucag

SEQ ID NO: 91849 - RNA, 13 nt, BK polyomavirus
cauauacauuuaa

SEQ ID NO: 91850 - RNA, 19 nt, BK polyomavirus
cagugcuugauccaugucc

SEQ ID NO: 91851 - RNA, 18 nt, BK polyomavirus
caguuucugaauccucuu

SEQ ID NO: 91852 - RNA, 21 nt, BK polyomavirus
caguggcugaaauugcugcug

SEQ ID NO: 91853 - RNA, 16 nt, BK polyomavirus
caggccacaaauauca

SEQ ID NO: 91854 - RNA, 19 nt, BK polyomavirus
caggcuaucagcuuuacaa

SEQ ID NO: 91855 - RNA, 14 nt, BK polyomavirus
cagggagugcuaau

SEQ ID NO: 91856 - RNA, 20 nt, BK polyomavirus
cagggucacaaaaagugcau

SEQ ID NO: 91857 - RNA, 23 nt, BK polyomavirus
caggugcuuuuauuguacauaua

SEQ ID NO: 91858 - RNA, 20 nt, BK polyomavirus
cagguucaugggugcugcuc

SEQ ID NO: 91859 - RNA, 15 nt, BK polyomavirus
gaaacauacaggcua

SEQ ID NO: 91860 - RNA, 22 nt, BK polyomavirus
gaaaaugacuuuagcagugaua

SEQ ID NO: 91861 - RNA, 19 nt, BK polyomavirus
gaaaaagcucaaauucugu

SEQ ID NO: 91862 - RNA, 15 nt, BK polyomavirus
gaaaaauauucugua

SEQ ID NO: 91863 - RNA, 16 nt, BK polyomavirus
gaaaaauauucuguaa

SEQ ID NO: 91864 - RNA, 18 nt, BK polyomavirus
cuuaaccuucaugcaggg

SEQ ID NO: 91865 - RNA, 22 nt, BK polyomavirus
cuuugaugauugggaucacaaa

SEQ ID NO: 91866 - RNA, 16 nt, BK polyomavirus
gaagaagcaacagcag

SEQ ID NO: 91867 - RNA, 15 nt, BK polyomavirus
gaagacccuaaagac

SEQ ID NO: 91868 - RNA, 19 nt, BK polyomavirus
gaaaugcagggagugcuaa

SEQ ID NO: 91869 - RNA, 23 nt, BK polyomavirus
gaaaugcagggagugcuaaugaa

SEQ ID NO: 91870 - RNA, 21 nt, BK polyomavirus
gaaaugggggauccagaugaa

SEQ ID NO: 91871 - RNA, 11 nt, BK polyomavirus
gaaagccuuua

SEQ ID NO: 91872 - RNA, 18 nt, BK polyomavirus
aaagacuuucccucugau

SEQ ID NO: 91873 - RNA, 19 nt, BK polyomavirus
aaauugcaucccuugcuac

SEQ ID NO: 91874 - RNA, 14 nt, BK polyomavirus
gauauguuugccag

SEQ ID NO: 91875 - RNA, 20 nt, BK polyomavirus
gagcuguuaguaaacaggcc

SEQ ID NO: 91876 - RNA, 15 nt, BK polyomavirus
gagucuucaguuucu

SEQ ID NO: 91877 - RNA, 22 nt, BK polyomavirus
ggaugaagauuuauuuugccau

SEQ ID NO: 91878 - RNA, 15 nt, BK polyomavirus
ggcugaaauugcugc

SEQ ID NO: 91879 - RNA, 15 nt, BK polyomavirus
ggcugcugcugcuau

SEQ ID NO: 91880 - RNA, 16 nt, BK polyomavirus
ggcuguaacuguacaa

SEQ ID NO: 91881 - RNA, 22 nt, BK polyomavirus
ggcuuauacaaaagcagcauuu

SEQ ID NO: 91882 - RNA, 21 nt, BK polyomavirus
gggaggcugcugcugcuauag

SEQ ID NO: 91883 - RNA, 11 nt, BK polyomavirus
gggaucacaaa

SEQ ID NO: 91884 - RNA, 22 nt, BK polyomavirus
ggggaggcugcugcugcuauag

SEQ ID NO: 91885 - RNA, 23 nt, BK polyomavirus
gcugcccauccacucucuggguu

SEQ ID NO: 91886 - RNA, 15 nt, BK polyomavirus
gcuauagaaguucaa

SEQ ID NO: 91887 - RNA, 14 nt, BK polyomavirus
gcuauagcugcuau

SEQ ID NO: 91888 - RNA, 15 nt, BK polyomavirus
gcuauagcugcuaua

SEQ ID NO: 91889 - RNA, 16 nt, BK polyomavirus
gcuauagcugcuauag

SEQ ID NO: 91890 - RNA, 16 nt, BK polyomavirus
gcuaucagcuuuacaa

SEQ ID NO: 91891 - RNA, 22 nt, BK polyomavirus
gcuuauacaaaagcagcauuua

SEQ ID NO: 91892 - RNA, 19 nt, BK polyomavirus
gcuuuuauuguacauauac

SEQ ID NO: 91893 - RNA, 21 nt, BK polyomavirus
gcuuuuauuguacauauacau

SEQ ID NO: 91894 - RNA, 16 nt, BK polyomavirus
gcagggagugcuaaug

SEQ ID NO: 91895 - RNA, 18 nt, BK polyomavirus
gcagauucucaacacuca

SEQ ID NO: 91896 - RNA, 20 nt, BK polyomavirus
gcaccuguuuaaagcauuuu

SEQ ID NO: 91897 - RNA, 17 nt, BK polyomavirus
gccugcuuugcugugua

SEQ ID NO: 91898 - RNA, 17 nt, BK polyomavirus
uuuauuguacauauaca

SEQ ID NO: 91899 - RNA, 21 nt, BK polyomavirus
uuggguaaggauucuuuacag

SEQ ID NO: 91900 - RNA, 18 nt, BK polyomavirus
uuguauuuccagguucau

SEQ ID NO: 91901 - RNA, 23 nt, BK polyomavirus
uuugucaauauaucuuaucauau

SEQ ID NO: 91902 - RNA, 22 nt, BK polyomavirus
aacaauucuagauuguauauca

SEQ ID NO: 91903 - RNA, 19 nt, BK polyomavirus
uugcuacuguagagggcau

SEQ ID NO: 91904 - RNA, 20 nt, BK polyomavirus
uugcugcuggggaggcugcu

SEQ ID NO: 91905 - RNA, 17 nt, BK polyomavirus
uugcuggguuugcugcu

SEQ ID NO: 91906 - RNA, 18 nt, BK polyomavirus
uugcuggguuugcugcuu

SEQ ID NO: 91907 - RNA, 14 nt, BK polyomavirus
uuggaaaugcaggg

SEQ ID NO: 91908 - RNA, 22 nt, BK polyomavirus
uuggaaaugcagggagugcuaa

SEQ ID NO: 91909 - RNA, 20 nt, BK polyomavirus
aagcaacagcagauucucaa

SEQ ID NO: 91910 - RNA, 21 nt, BK polyomavirus
aacauacaggcuaucagcuuu

SEQ ID NO: 91911 - RNA, 18 nt, BK polyomavirus
aauagaacccuugccugc

SEQ ID NO: 91912 - RNA, 16 nt, BK polyomavirus
aauccucuucucuugu

SEQ ID NO: 91913 - RNA, 20 nt, BK polyomavirus
aauccagccuuuccuuccau

SEQ ID NO: 91914 - RNA, 22 nt, BK polyomavirus
aauccagccuuuccuuccauuc

SEQ ID NO: 91915 - RNA, 18 nt, BK polyomavirus
aagucuuucugugccauc

SEQ ID NO: 91916 - RNA, 21 nt, BK polyomavirus
aagguagaagacccuaaagac

SEQ ID NO: 91917 - RNA, 11 nt, BK polyomavirus
uucaaauugca

SEQ ID NO: 91918 - RNA, 17 nt, BK polyomavirus
uuauaggugccaaccua

SEQ ID NO: 91919 - RNA, 14 nt, BK polyomavirus
uuauuguacauaua

SEQ ID NO: 91920 - RNA, 15 nt, BK polyomavirus
uuauacaaaagcagc

SEQ ID NO: 91921 - RNA, 21 nt, BK polyomavirus
uuauacaaaagcagcauuuau

SEQ ID NO: 91922 - RNA, 20 nt, BK polyomavirus
uuaaaacacugaaagccuuu

SEQ ID NO: 91923 - RNA, 14 nt, BK polyomavirus
uuaaaauaucuugc

SEQ ID NO: 91924 - RNA, 22 nt, BK polyomavirus
uggggaggcugcugcugcuaua

SEQ ID NO: 91925 - RNA, 23 nt, BK polyomavirus
uggggaggcugcugcugcuauag

SEQ ID NO: 91926 - RNA, 16 nt, BK polyomavirus
ugguggaggaaaaccu

SEQ ID NO: 91927 - RNA, 18 nt, BK polyomavirus
uguacauauacauuuaau

SEQ ID NO: 91928 - RNA, 18 nt, BK polyomavirus
ugucccuguuugucaaua

SEQ ID NO: 91929 - RNA, 13 nt, BK polyomavirus
ugugauugggauu

SEQ ID NO: 91930 - RNA, 16 nt, BK polyomavirus
ugugauugggauucag

SEQ ID NO: 91931 - RNA, 22 nt, BK polyomavirus
ugaaaaaguauacauacuuauc

SEQ ID NO: 91932 - RNA, 16 nt, BK polyomavirus
ugauugggaucacaaa

SEQ ID NO: 91933 - RNA, 22 nt, BK polyomavirus
ugccaguguaucugaggcugcu

SEQ ID NO: 91934 - RNA, 13 nt, BK polyomavirus
ugccaucaaacac

SEQ ID NO: 91935 - RNA, 16 nt, BK polyomavirus
ugccaaccuauggaac

SEQ ID NO: 91936 - RNA, 18 nt, BK polyomavirus
ugcuaaugaauuacaggu

SEQ ID NO: 91937 - RNA, 15 nt, BK polyomavirus
uggaauaacuagcau

SEQ ID NO: 91938 - RNA, 18 nt, BK polyomavirus
ucuaaagcuaagugcuga

SEQ ID NO: 91939 - RNA, 17 nt, BK polyomavirus
ucuccacuguuguguuc

SEQ ID NO: 91940 - RNA, 19 nt, BK polyomavirus
ucuccacuguuguguucca

SEQ ID NO: 91941 - RNA, 18 nt, BK polyomavirus
uccugguggaguuccuuu

SEQ ID NO: 91942 - RNA, 15 nt, BK polyomavirus
ucauccuugaaaaag

SEQ ID NO: 91943 - RNA, 21 nt, BK polyomavirus
uccagccuuuccuuccauuca

SEQ ID NO: 91944 - RNA, 22 nt, BK polyomavirus
uccagccuuuccuuccauucaa

SEQ ID NO: 91945 - RNA, 20 nt, BK polyomavirus
uauuacagagguagaaugcu

SEQ ID NO: 91946 - RNA, 21 nt, BK polyomavirus
uauguuugccagugaugaaga

SEQ ID NO: 91947 - RNA, 16 nt, BK polyomavirus
ucaaacauaugcugua

SEQ ID NO: 91948 - RNA, 15 nt, BK polyomavirus
ucaagaauacauuuc

SEQ ID NO: 91949 - RNA, 15 nt, BK polyomavirus
ucacuuagcaaaaag

SEQ ID NO: 91950 - RNA, 16 nt, BK polyomavirus
ucagcuuuacaaagag

SEQ ID NO: 91951 - RNA, 15 nt, BK polyomavirus
ucacaaaaagugcau

SEQ ID NO: 91952 - RNA, 17 nt, BK polyomavirus
uaugcuguaauugcugg

SEQ ID NO: 91953 - RNA, 14 nt, BK polyomavirus
uaucugaggcugcu

SEQ ID NO: 91954 - RNA, 17 nt, BK polyomavirus
uaucugaggcugcugcu

SEQ ID NO: 91955 - RNA, 18 nt, BK polyomavirus
uaucugaggcugcugcug

SEQ ID NO: 91956 - RNA, 13 nt, BK polyomavirus
uauauguacaaua

SEQ ID NO: 91957 - RNA, 20 nt, BK polyomavirus
guauuaguuccuuagcucaa

SEQ ID NO: 91958 - RNA, 15 nt, BK polyomavirus
gucaauauaucuuau

SEQ ID NO: 91959 - RNA, 16 nt, BK polyomavirus
guagaugcuauuacag

SEQ ID NO: 91960 - RNA, 22 nt, BK polyomavirus
guaccucagaggcuauagcugc

SEQ ID NO: 91961 - RNA, 19 nt, BK polyomavirus
guucaugggugcugcucua

SEQ ID NO: 91962 - RNA, 22 nt, BK polyomavirus
guucaugggugcugcucuagca

SEQ ID NO: 91963 - RNA, 22 nt, BK polyomavirus
guuccagagcuguuaguaaaca

SEQ ID NO: 91964 - RNA, 21 nt, BK polyomavirus
gucuuucugugccaucaaaca

SEQ ID NO: 91965 - RNA, 21 nt, BK polyomavirus
gugaugaagaagcaacagcag

SEQ ID NO: 91966 - RNA, 22 nt, BK polyomavirus
gugccaaccuauggaacagaag

SEQ ID NO: 91967 - RNA, 15 nt, BK polyomavirus
guggaaaucuacuga

SEQ ID NO: 91968 - RNA, 17 nt, BK polyomavirus
uacagaucuuuuucuca

SEQ ID NO: 91969 - RNA, 17 nt, BK polyomavirus
uacagcacagcaagaau

SEQ ID NO: 91970 - RNA, 21 nt, BK polyomavirus
uacaggcuaucagcuuuacaa

SEQ ID NO: 91971 - RNA, 23 nt, BK polyomavirus
uaccucagaggcuauagcugcua

SEQ ID NO: 91972 - RNA, 18 nt, BK polyomavirus
uaaaaguggcuuauacaa

SEQ ID NO: 91973 - RNA, 24 nt, BK polyomavirus
uaaaaguggcuuauacaaaagcag

SEQ ID NO: 91974 - RNA, 20 nt, BK polyomavirus
uaaaaggcccuaaguaauua

SEQ ID NO: 91975 - RNA, 22 nt, BK polyomavirus
uaacaaguaccucagaggcuau

SEQ ID NO: 91976 - RNA, 15 nt, BK polyomavirus
uaaggucacuuagca

SEQ ID NO: 91977 - RNA, 22 nt, BK polyomavirus
uuauggaaaaauauucuguaac

SEQ ID NO: 91978 - RNA, 18 nt, BK polyomavirus
uuagcucaaguaggguau

SEQ ID NO: 91979 - RNA, 19 nt, BK polyomavirus
uuauaaggucacuuagcaa

SEQ ID NO: 91980 - RNA, 17 nt, BK polyomavirus
uuauacaaaagcagcau

SEQ ID NO: 91981 - RNA, 14 nt, BK polyomavirus
uuaucauaucuggg

SEQ ID NO: 91982 - RNA, 13 nt, BK polyomavirus
uuccauaccauac

SEQ ID NO: 91983 - RNA, 15 nt, BK polyomavirus
uucuaccugggauuc

SEQ ID NO: 91984 - RNA, 16 nt, BK polyomavirus
uucucuuguaauauca

SEQ ID NO: 91985 - RNA, 13 nt, BK polyomavirus
uguacauauacau

SEQ ID NO: 91986 - RNA, 13 nt, BK polyomavirus
uguaauaucaaga

SEQ ID NO: 91987 - RNA, 14 nt, BK polyomavirus
ugggaggcuguaac

SEQ ID NO: 91988 - RNA, 20 nt, BK polyomavirus
ugcuuaaccuucaugcaggg

SEQ ID NO: 91989 - RNA, 21 nt, BK polyomavirus
ugcuuaaccuucaugcagggu

SEQ ID NO: 91990 - RNA, 12 nt, BK polyomavirus
ugcugcugcuau

SEQ ID NO: 91991 - RNA, 13 nt, BK polyomavirus
ugcugcugcuaua

SEQ ID NO: 91992 - RNA, 16 nt, BK polyomavirus
ugcugcugcuauagaa

SEQ ID NO: 91993 - RNA, 16 nt, BK polyomavirus
ugcuggguuugcugcu

SEQ ID NO: 91994 - RNA, 14 nt, BK polyomavirus
ugcuauaggccuaa

SEQ ID NO: 91995 - RNA, 15 nt, BK polyomavirus
ugcuauuacagaggu

SEQ ID NO: 91996 - RNA, 14 nt, BK polyomavirus
uggaggaaaaccua

SEQ ID NO: 91997 - RNA, 19 nt, BK polyomavirus
ugcuuuuauuguacauaua

SEQ ID NO: 91998 - RNA, 22 nt, BK polyomavirus
uggaagucuuucugugccauca

SEQ ID NO: 91999 - RNA, 21 nt, BK polyomavirus
ucugaauccucuucucuugua

SEQ ID NO: 92000 - RNA, 15 nt, BK polyomavirus
ucugagacuugggaa

SEQ ID NO: 92001 - RNA, 13 nt, BK polyomavirus
ucuuguaauauca

SEQ ID NO: 92002 - RNA, 14 nt, BK polyomavirus
ucuuaucauaucug

SEQ ID NO: 92003 - RNA, 20 nt, BK polyomavirus
ucuucaguuucugaauccuc

SEQ ID NO: 92004 - RNA, 23 nt, BK polyomavirus
ucuacugaugugggaggcuguaa

SEQ ID NO: 92005 - RNA, 15 nt, BK polyomavirus
ucuuucugugccauc

SEQ ID NO: 92006 - RNA, 20 nt, BK polyomavirus
ucuuucugugccaucaaaca

SEQ ID NO: 92007 - RNA, 13 nt, BK polyomavirus
ugaaauugcugcu

SEQ ID NO: 92008 - RNA, 14 nt, BK polyomavirus
ugaaauugcugcug

SEQ ID NO: 92009 - RNA, 22 nt, BK polyomavirus
uccagguucaugggugcugcuc

SEQ ID NO: 92010 - RNA, 13 nt, BK polyomavirus
uccacucucuggg

SEQ ID NO: 92011 - RNA, 12 nt, BK polyomavirus
uccagagucuuc

SEQ ID NO: 92012 - RNA, 19 nt, BK polyomavirus
uccagagucuucaguuucu

SEQ ID NO: 92013 - RNA, 17 nt, BK polyomavirus
uccagaugaaaaccuua

SEQ ID NO: 92014 - RNA, 16 nt, BK polyomavirus
ucccuugcuacuguag

SEQ ID NO: 92015 - RNA, 23 nt, BK polyomavirus
ucccuuuuuuuuuguauuuccag

SEQ ID NO: 92016 - RNA, 19 nt, BK polyomavirus
uccucaaacauaugcugua

SEQ ID NO: 92017 - RNA, 15 nt, BK polyomavirus
uccuuccauucaaca

SEQ ID NO: 92018 - RNA, 19 nt, BK polyomavirus
uccuugaaaaaguauacau

SEQ ID NO: 92019 - RNA, 19 nt, BK polyomavirus
uauggaaaaauauucugua

SEQ ID NO: 92020 - RNA, 16 nt, BK polyomavirus
ucagaauccagccuuu

SEQ ID NO: 92021 - RNA, 17 nt, BK polyomavirus
ucagaauccagccuuuc

SEQ ID NO: 92022 - RNA, 22 nt, BK polyomavirus
ucagaauccagccuuuccuucc

SEQ ID NO: 92023 - RNA, 21 nt, BK polyomavirus
ucagaggcuauagcugcuaua

SEQ ID NO: 92024 - RNA, 22 nt, BK polyomavirus
ucagaggcuauagcugcuauag

SEQ ID NO: 92025 - RNA, 19 nt, BK polyomavirus
ucagcagcugaaacauaca

SEQ ID NO: 92026 - RNA, 18 nt, BK polyomavirus
ucagcaggggcugaagua

SEQ ID NO: 92027 - RNA, 22 nt, BK polyomavirus
ucaguggcugaaauugcugcug

SEQ ID NO: 92028 - RNA, 20 nt, BK polyomavirus
ucaggcggaucuuaaaauau

SEQ ID NO: 92029 - RNA, 14 nt, BK polyomavirus
uuguauaagccacu

SEQ ID NO: 92030 - RNA, 19 nt, BK polyomavirus
uugucccuguuugucaaua

SEQ ID NO: 92031 - RNA, 14 nt, BK polyomavirus
ccaaccuauggaac

SEQ ID NO: 92032 - RNA, 11 nt, BK polyomavirus
caugcauauau

SEQ ID NO: 92033 - RNA, 15 nt, BK polyomavirus
caugcuuaaccuuca

SEQ ID NO: 92034 - RNA, 13 nt, BK polyomavirus
caugggugcugcu

SEQ ID NO: 92035 - RNA, 16 nt, BK polyomavirus
caugggugcugcucua

SEQ ID NO: 92036 - RNA, 19 nt, BK polyomavirus
caugguggaggaaaaccua

SEQ ID NO: 92037 - RNA, 18 nt, BK polyomavirus
cauuuaauaaaugcugcu

SEQ ID NO: 92038 - RNA, 20 nt, BK polyomavirus
ccacaggauuuucaguggcu

SEQ ID NO: 92039 - RNA, 19 nt, BK polyomavirus
ccagagucuucaguuucug

SEQ ID NO: 92040 - RNA, 17 nt, BK polyomavirus
ccagaugaaaaccuuag

SEQ ID NO: 92041 - RNA, 21 nt, BK polyomavirus
ccaguguaucugaggcugcug

SEQ ID NO: 92042 - RNA, 22 nt, BK polyomavirus
ccaugcauauauuauauuucau

SEQ ID NO: 92043 - RNA, 15 nt, BK polyomavirus
cccagagagaaaaau

SEQ ID NO: 92044 - RNA, 20 nt, BK polyomavirus
cccagagagaaaaaugcuuc

SEQ ID NO: 92045 - RNA, 19 nt, BK polyomavirus
cauacaggcuaucagcuuu

SEQ ID NO: 92046 - RNA, 12 nt, BK polyomavirus
cauauacauuua

SEQ ID NO: 92047 - RNA, 17 nt, BK polyomavirus
caucccuugcuacugua

SEQ ID NO: 92048 - RNA, 18 nt, BK polyomavirus
caucccuugcuacuguag

SEQ ID NO: 92049 - RNA, 20 nt, BK polyomavirus
cauccuugaaaaaguauaca

SEQ ID NO: 92050 - RNA, 21 nt, BK polyomavirus
cauccuugaaaaaguauacau

SEQ ID NO: 92051 - RNA, 20 nt, BK polyomavirus
cagugaugaagaagcaacag

SEQ ID NO: 92052 - RNA, 21 nt, BK polyomavirus
cagggucacaaaaagugcaug

SEQ ID NO: 92053 - RNA, 22 nt, BK polyomavirus
caggugcuuuuauuguacauau

SEQ ID NO: 92054 - RNA, 15 nt, BK polyomavirus
cagcugaaacauaca

SEQ ID NO: 92055 - RNA, 23 nt, BK polyomavirus
caggcggaucuuaaaauaucuug

SEQ ID NO: 92056 - RNA, 15 nt, BK polyomavirus
cagggagugcuaaug

SEQ ID NO: 92057 - RNA, 17 nt, BK polyomavirus
cagggagugcuaaugaa

SEQ ID NO: 92058 - RNA, 20 nt, BK polyomavirus
cagggagugcuaaugaauua

SEQ ID NO: 92059 - RNA, 13 nt, BK polyomavirus
cagagucuucagu

SEQ ID NO: 92060 - RNA, 14 nt, BK polyomavirus
caagaauacauuuc

SEQ ID NO: 92061 - RNA, 23 nt, BK polyomavirus
caagaauacauuuccccaugcau

SEQ ID NO: 92062 - RNA, 12 nt, BK polyomavirus
caaguaccucag

SEQ ID NO: 92063 - RNA, 19 nt, BK polyomavirus
caaguaccucagaggcuau

SEQ ID NO: 92064 - RNA, 19 nt, BK polyomavirus
caaccuauggaacagaaga

SEQ ID NO: 92065 - RNA, 19 nt, BK polyomavirus
caauucuagauuguauauc

SEQ ID NO: 92066 - RNA, 14 nt, BK polyomavirus
cacaaaaagugcau

SEQ ID NO: 92067 - RNA, 16 nt, BK polyomavirus
cacaaaaagugcauga

SEQ ID NO: 92068 - RNA, 21 nt, BK polyomavirus
auugcaucccuugcuacugua

SEQ ID NO: 92069 - RNA, 16 nt, BK polyomavirus
auuuccccaugcauau

SEQ ID NO: 92070 - RNA, 16 nt, BK polyomavirus
caaaguuuccacugua

SEQ ID NO: 92071 - RNA, 12 nt, BK polyomavirus
augggaugaaga

SEQ ID NO: 92072 - RNA, 13 nt, BK polyomavirus
augggugcugcuc

SEQ ID NO: 92073 - RNA, 12 nt, BK polyomavirus
auguuugccagu

SEQ ID NO: 92074 - RNA, 18 nt, BK polyomavirus
auggaaaaauauucugua

SEQ ID NO: 92075 - RNA, 15 nt, BK polyomavirus
auucaacaauucuag

SEQ ID NO: 92076 - RNA, 20 nt, BK polyomavirus
auucagugcuugauccaugu

SEQ ID NO: 92077 - RNA, 21 nt, BK polyomavirus
auucagugcuugauccauguc

SEQ ID NO: 92078 - RNA, 12 nt, BK polyomavirus
augacuuuagca

SEQ ID NO: 92079 - RNA, 16 nt, BK polyomavirus
augaggaccuaaccug

SEQ ID NO: 92080 - RNA, 19 nt, BK polyomavirus
aucuuaucauaucuggguc

SEQ ID NO: 92081 - RNA, 14 nt, BK polyomavirus
augcaacucuugac

SEQ ID NO: 92082 - RNA, 17 nt, BK polyomavirus
augcagggagugcuaau

SEQ ID NO: 92083 - RNA, 18 nt, BK polyomavirus
augcagggagugcuaaug

SEQ ID NO: 92084 - RNA, 16 nt, BK polyomavirus
augcagggucacaaaa

SEQ ID NO: 92085 - RNA, 16 nt, BK polyomavirus
augcuauuacagaggu

SEQ ID NO: 92086 - RNA, 17 nt, BK polyomavirus
augcuauuacagaggua

SEQ ID NO: 92087 - RNA, 23 nt, BK polyomavirus
augcugcuuuuguauaagccacu

SEQ ID NO: 92088 - RNA, 21 nt, BK polyomavirus
augcuucccuguuacagcaca

SEQ ID NO: 92089 - RNA, 14 nt, BK polyomavirus
agauucucaacacu

SEQ ID NO: 92090 - RNA, 14 nt, BK polyomavirus
agauuguauaucag

SEQ ID NO: 92091 - RNA, 21 nt, BK polyomavirus
agaaaaagcucaaauucugua

SEQ ID NO: 92092 - RNA, 20 nt, BK polyomavirus
agagagaaaaaugcuucccu

SEQ ID NO: 92093 - RNA, 19 nt, BK polyomavirus
agauauguuugccagugau

SEQ ID NO: 92094 - RNA, 15 nt, BK polyomavirus
aggcccuaaguaauu

SEQ ID NO: 92095 - RNA, 22 nt, BK polyomavirus
agccacuuuuaagcuuguguua

SEQ ID NO: 92096 - RNA, 23 nt, BK polyomavirus
agcaggggcugaaguaucugaga

SEQ ID NO: 92097 - RNA, 17 nt, BK polyomavirus
agcagugauagcccaga

SEQ ID NO: 92098 - RNA, 18 nt, BK polyomavirus
agucaagcuguauuuagu

SEQ ID NO: 92099 - RNA, 17 nt, BK polyomavirus
aggccuuuuaaaacacu

SEQ ID NO: 92100 - RNA, 23 nt, BK polyomavirus
aggugcuuuuauuguacauauac

SEQ ID NO: 92101 - RNA, 18 nt, BK polyomavirus
agguucaugggugcugcu

SEQ ID NO: 92102 - RNA, 22 nt, BK polyomavirus
agguucaugggugcugcucuag

SEQ ID NO: 92103 - RNA, 17 nt, BK polyomavirus
aguuucugaauccucuu

SEQ ID NO: 92104 - RNA, 17 nt, BK polyomavirus
auaggccuaacuccuca

SEQ ID NO: 92105 - RNA, 21 nt, BK polyomavirus
auaucaguugcaaaaucagcu

SEQ ID NO: 92106 - RNA, 18 nt, BK polyomavirus
auauguacaauaaaagca

SEQ ID NO: 92107 - RNA, 13 nt, BK polyomavirus
auauguuugccag

SEQ ID NO: 92108 - RNA, 14 nt, BK polyomavirus
auauguuugccagu

SEQ ID NO: 92109 - RNA, 16 nt, BK polyomavirus
aucacaaaguuuccac

SEQ ID NO: 92110 - RNA, 18 nt, BK polyomavirus
auacaaaagcagcauuua

SEQ ID NO: 92111 - RNA, 19 nt, BK polyomavirus
auacaaaagcagcauuuau

SEQ ID NO: 92112 - RNA, 15 nt, BK polyomavirus
accucagaggcuaua

SEQ ID NO: 92113 - RNA, 19 nt, BK polyomavirus
accucagaggcuauagcug

SEQ ID NO: 92114 - RNA, 22 nt, BK polyomavirus
accucagaggcuauagcugcua

SEQ ID NO: 92115 - RNA, 18 nt, BK polyomavirus
accuaguugccaguguau

SEQ ID NO: 92116 - RNA, 19 nt, BK polyomavirus
acauuuaauaaaugcugcu

SEQ ID NO: 92117 - RNA, 15 nt, BK polyomavirus
acuucuuugcuguag

SEQ ID NO: 92118 - RNA, 22 nt, BK polyomavirus
acuccucaaacauaugcuguaa

SEQ ID NO: 92119 - RNA, 13 nt, BK polyomavirus
acaaguaccucag

SEQ ID NO: 92120 - RNA, 20 nt, BK polyomavirus
acaaguaccucagaggcuau

SEQ ID NO: 92121 - RNA, 18 nt, BK polyomavirus
acaauaaaagcaccuguu

SEQ ID NO: 92122 - RNA, 22 nt, BK polyomavirus
acaauaaaagcaccuguuuaaa

SEQ ID NO: 92123 - RNA, 14 nt, BK polyomavirus
acaaaagcagcauu

SEQ ID NO: 92124 - RNA, 13 nt, BK polyomavirus
acaaaaagugcau

SEQ ID NO: 92125 - RNA, 23 nt, BK polyomavirus
acaauucuagauuguauaucagu

SEQ ID NO: 92126 - RNA, 21 nt, BK polyomavirus
acacaaaugcaacucuugacu

SEQ ID NO: 92127 - RNA, 16 nt, BK polyomavirus
acaggcuaucagcuuu

SEQ ID NO: 92128 - RNA, 20 nt, BK polyomavirus
acaggcuaucagcuuuacaa

SEQ ID NO: 92129 - RNA, 21 nt, BK polyomavirus
acauacaggcuaucagcuuua

SEQ ID NO: 92130 - RNA, 15 nt, BK polyomavirus
acauacuuaucucag

SEQ ID NO: 92131 - RNA, 14 nt, BK polyomavirus
acauauacauuuaa

SEQ ID NO: 92132 - RNA, 11 nt, BK polyomavirus
guaauugcugg

SEQ ID NO: 92133 - RNA, 20 nt, BK polyomavirus
guaccucagaggcuauagcu

SEQ ID NO: 92134 - RNA, 13 nt, BK polyomavirus
gcuuugcugugua

SEQ ID NO: 92135 - RNA, 21 nt, BK polyomavirus
gcuuugcuguguauacuacua

SEQ ID NO: 92136 - RNA, 17 nt, BK polyomavirus
ggaaauuggguaaggau

SEQ ID NO: 92137 - RNA, 20 nt, BK polyomavirus
ggaucuuaaaauaucuugca

SEQ ID NO: 92138 - RNA, 15 nt, BK polyomavirus
ggcuuauacaaaagc

SEQ ID NO: 92139 - RNA, 14 nt, BK polyomavirus
ggcuuuagucuaaa

SEQ ID NO: 92140 - RNA, 23 nt, BK polyomavirus
gggaucacaaaguuuccacugua

SEQ ID NO: 92141 - RNA, 13 nt, BK polyomavirus
gggauucagugcu

SEQ ID NO: 92142 - RNA, 14 nt, BK polyomavirus
gcugcugcugccac

SEQ ID NO: 92143 - RNA, 14 nt, BK polyomavirus
gcugcugcugcuau

SEQ ID NO: 92144 - RNA, 18 nt, BK polyomavirus
gcuaucagcuuuacaaag

SEQ ID NO: 92145 - RNA, 15 nt, BK polyomavirus
gccucuaucagcaau

SEQ ID NO: 92146 - RNA, 15 nt, BK polyomavirus
guggaggaaaaccua

SEQ ID NO: 92147 - RNA, 14 nt, BK polyomavirus
guucaugggugcug

SEQ ID NO: 92148 - RNA, 20 nt, BK polyomavirus
guucaugggugcugcucuag

SEQ ID NO: 92149 - RNA, 15 nt, BK polyomavirus
guuucugaauccucu

SEQ ID NO: 92150 - RNA, 20 nt, BK polyomavirus
uaaaacacugaaagccuuua

SEQ ID NO: 92151 - RNA, 14 nt, BK polyomavirus
uaagcuuguguuau

SEQ ID NO: 92152 - RNA, 22 nt, BK polyomavirus
uaauucaaacuguuagugguau

SEQ ID NO: 92153 - RNA, 17 nt, BK polyomavirus
uacaaaagcagcauuua

SEQ ID NO: 92154 - RNA, 21 nt, BK polyomavirus
uacaaaagcagcauuuauuaa

SEQ ID NO: 92155 - RNA, 20 nt, BK polyomavirus
uacagcacagcaagaauucc

SEQ ID NO: 92156 - RNA, 19 nt, BK polyomavirus
uacaggcuaucagcuuuac

SEQ ID NO: 92157 - RNA, 13 nt, BK polyomavirus
uacauauacauuu

SEQ ID NO: 92158 - RNA, 22 nt, BK polyomavirus
uaccucagaggcuauagcugcu

SEQ ID NO: 92159 - RNA, 22 nt, BK polyomavirus
uacuuaucucagaauccagccu

SEQ ID NO: 92160 - RNA, 13 nt, BK polyomavirus
uagaaugcuuccu

SEQ ID NO: 92161 - RNA, 19 nt, BK polyomavirus
uagaagacccuaaagacuu

SEQ ID NO: 92162 - RNA, 19 nt, BK polyomavirus
uagaugcuauuacagaggu

SEQ ID NO: 92163 - RNA, 12 nt, BK polyomavirus
uagcugcuauag

SEQ ID NO: 92164 - RNA, 23 nt, BK polyomavirus
uagucaagcuguauuuaguaaua

SEQ ID NO: 92165 - RNA, 12 nt, BK polyomavirus
uauagcugcuau

SEQ ID NO: 92166 - RNA, 13 nt, BK polyomavirus
uauagcugcuaua

SEQ ID NO: 92167 - RNA, 22 nt, BK polyomavirus
uauaggccuaacuccucaaaca

SEQ ID NO: 92168 - RNA, 13 nt, BK polyomavirus
uauaucuuaucau

SEQ ID NO: 92169 - RNA, 20 nt, BK polyomavirus
uauauguacaauaaaagcac

SEQ ID NO: 92170 - RNA, 18 nt, BK polyomavirus
cucuaucagcaaucaggc

SEQ ID NO: 92171 - RNA, 17 nt, BK polyomavirus
cugcccauccacucucu

SEQ ID NO: 92172 - RNA, 13 nt, BK polyomavirus
cugcugcugcuau

SEQ ID NO: 92173 - RNA, 14 nt, BK polyomavirus
cugcugcugcuaua

SEQ ID NO: 92174 - RNA, 16 nt, BK polyomavirus
cugcugcugcuauaga

SEQ ID NO: 92175 - RNA, 18 nt, BK polyomavirus
cugcuggggaggcugcug

SEQ ID NO: 92176 - RNA, 21 nt, BK polyomavirus
cuccucaaacauaugcuguaa

SEQ ID NO: 92177 - RNA, 19 nt, BK polyomavirus
cuauugcuggguuugcugc

SEQ ID NO: 92178 - RNA, 19 nt, BK polyomavirus
cuagauuguauaucaguug

SEQ ID NO: 92179 - RNA, 19 nt, BK polyomavirus
cuaucagcuuuacaaagag

SEQ ID NO: 92180 - RNA, 19 nt, BK polyomavirus
gaucuuaaaauaucuugca

SEQ ID NO: 92181 - RNA, 21 nt, BK polyomavirus
gaucuuaaaauaucuugcaag

SEQ ID NO: 92182 - RNA, 17 nt, BK polyomavirus
gaugugggaggcuguaa

SEQ ID NO: 92183 - RNA, 15 nt, BK polyomavirus
gauucucaacacuca

SEQ ID NO: 92184 - RNA, 12 nt, BK polyomavirus
gauucuuuacag

SEQ ID NO: 92185 - RNA, 19 nt, BK polyomavirus
gcaaggccucuccacuguu

SEQ ID NO: 92186 - RNA, 17 nt, BK polyomavirus
gagagaaaaaugcuucc

SEQ ID NO: 92187 - RNA, 15 nt, BK polyomavirus
gaggcugcugcugcu

SEQ ID NO: 92188 - RNA, 17 nt, BK polyomavirus
gaggcugcugcugcuau

SEQ ID NO: 92189 - RNA, 22 nt, BK polyomavirus
gagggcauaacaaguaccucag

SEQ ID NO: 92190 - RNA, 19 nt, BK polyomavirus
gauaaauaauaaaauauua

SEQ ID NO: 92191 - RNA, 22 nt, BK polyomavirus
gagcaugguggaggaaaaccua

SEQ ID NO: 92192 - RNA, 16 nt, BK polyomavirus
cuugcaaggccucucc

SEQ ID NO: 92193 - RNA, 22 nt, BK polyomavirus
cuguauaaaaaacuuauggaaa

SEQ ID NO: 92194 - RNA, 12 nt, BK polyomavirus
cuuuaauucaaa

SEQ ID NO: 92195 - RNA, 14 nt, BK polyomavirus
cuuuacagaucuuu

SEQ ID NO: 92196 - RNA, 22 nt, BK polyomavirus
cuuuuauuguacauauacauuu

SEQ ID NO: 92197 - RNA, 21 nt, BK polyomavirus
cuuuuguauaagccacuuuua

SEQ ID NO: 92198 - RNA, 23 nt, BK polyomavirus
gaaaaagcucaaauucuguauaa

SEQ ID NO: 92199 - RNA, 12 nt, BK polyomavirus
gaaaaauauucu

SEQ ID NO: 92200 - RNA, 14 nt, BK polyomavirus
gaaaaauauucugu

SEQ ID NO: 92201 - RNA, 14 nt, BK polyomavirus
gaaacauacaggcu

SEQ ID NO: 92202 - RNA, 23 nt, BK polyomavirus
gaaauuggguaaggauucuuuac

SEQ ID NO: 92203 - RNA, 16 nt, BK polyomavirus
aaacauaugcuguaau

SEQ ID NO: 92204 - RNA, 22 nt, BK polyomavirus
aaaaccuuaggggcuuuagucu

SEQ ID NO: 92205 - RNA, 18 nt, BK polyomavirus
aaaagcucaaauucugua

SEQ ID NO: 92206 - RNA, 22 nt, BK polyomavirus
aaaagcucaaauucuguauaaa

SEQ ID NO: 92207 - RNA, 13 nt, BK polyomavirus
aaaagugcaugag

SEQ ID NO: 92208 - RNA, 23 nt, BK polyomavirus
aaaaguggcuuauacaaaagcag

SEQ ID NO: 92209 - RNA, 12 nt, BK polyomavirus
aaaaagugcaug

SEQ ID NO: 92210 - RNA, 17 nt, BK polyomavirus
aaaaagugcaugagcau

SEQ ID NO: 92211 - RNA, 19 nt, BK polyomavirus
aaaaagcucaaauucugua

SEQ ID NO: 92212 - RNA, 23 nt, BK polyomavirus
accucagaggcuauagcugcuau

SEQ ID NO: 92213 - RNA, 18 nt, BK polyomavirus
acauuuccccaugcauau

SEQ ID NO: 92214 - RNA, 21 nt, BK polyomavirus
agaacccuugccugcuuugcu

SEQ ID NO: 92215 - RNA, 21 nt, BK polyomavirus
agaacccuuggaaaugcaggg

SEQ ID NO: 92216 - RNA, 17 nt, BK polyomavirus
acuuucccucugaucua

SEQ ID NO: 92217 - RNA, 21 nt, BK polyomavirus
acuccucaaacauaugcugua

SEQ ID NO: 92218 - RNA, 21 nt, BK polyomavirus
agauuuauuuugccaugaaga

SEQ ID NO: 92219 - RNA, 16 nt, BK polyomavirus
agagguagaaugcuuc

SEQ ID NO: 92220 - RNA, 18 nt, BK polyomavirus
agaggcuauagcugcuau

SEQ ID NO: 92221 - RNA, 19 nt, BK polyomavirus
agaggcuauagcugcuaua

SEQ ID NO: 92222 - RNA, 22 nt, BK polyomavirus
agagggcauaacaaguaccuca

SEQ ID NO: 92223 - RNA, 19 nt, BK polyomavirus
agagaaaaaugcuucccug

SEQ ID NO: 92224 - RNA, 13 nt, BK polyomavirus
aauaaaagcaccu

SEQ ID NO: 92225 - RNA, 17 nt, BK polyomavirus
aagauuuauuuugccau

SEQ ID NO: 92226 - RNA, 12 nt, BK polyomavirus
aagcagcauuua

SEQ ID NO: 92227 - RNA, 14 nt, BK polyomavirus
aauaucagcagcug

SEQ ID NO: 92228 - RNA, 13 nt, BK polyomavirus
aauaaaugcugcu

SEQ ID NO: 92229 - RNA, 15 nt, BK polyomavirus
aauaauaaaauauua

SEQ ID NO: 92230 - RNA, 22 nt, BK polyomavirus
acaauucuagauuguauaucag

SEQ ID NO: 92231 - RNA, 23 nt, BK polyomavirus
aacuccucaaacauaugcuguaa

SEQ ID NO: 92232 - RNA, 23 nt, BK polyomavirus
aagagcauugugauugggauuca

SEQ ID NO: 92233 - RNA, 17 nt, BK polyomavirus
aagauauguuugccagu

SEQ ID NO: 92234 - RNA, 14 nt, BK polyomavirus
aagaaaaagcucaa

SEQ ID NO: 92235 - RNA, 21 nt, BK polyomavirus
aaaguggcuuauacaaaagca

SEQ ID NO: 92236 - RNA, 14 nt, BK polyomavirus
aacaaguaccucag

SEQ ID NO: 92237 - RNA, 15 nt, BK polyomavirus
caaacauaugcugua

SEQ ID NO: 92238 - RNA, 16 nt, BK polyomavirus
caaacauaugcuguaa

SEQ ID NO: 92239 - RNA, 12 nt, BK polyomavirus
caaaaagugcau

SEQ ID NO: 92240 - RNA, 17 nt, BK polyomavirus
caaaguuuccacuguag

SEQ ID NO: 92241 - RNA, 13 nt, BK polyomavirus
caaccuauggaac

SEQ ID NO: 92242 - RNA, 13 nt, BK polyomavirus
caagaauacauuu

SEQ ID NO: 92243 - RNA, 21 nt, BK polyomavirus
caagaauacauuuccccaugc

SEQ ID NO: 92244 - RNA, 22 nt, BK polyomavirus
caagaauacauuuccccaugca

SEQ ID NO: 92245 - RNA, 20 nt, BK polyomavirus
auuuccccaugcauauauua

SEQ ID NO: 92246 - RNA, 15 nt, BK polyomavirus
auuuauuuugccaug

SEQ ID NO: 92247 - RNA, 11 nt, BK polyomavirus
auucuuuacag

SEQ ID NO: 92248 - RNA, 12 nt, BK polyomavirus
auuguacauaua

SEQ ID NO: 92249 - RNA, 19 nt, BK polyomavirus
auugucccuguuugucaau

SEQ ID NO: 92250 - RNA, 23 nt, BK polyomavirus
auucagugcuugauccaugucca

SEQ ID NO: 92251 - RNA, 12 nt, BK polyomavirus
auuccauaccau

SEQ ID NO: 92252 - RNA, 14 nt, BK polyomavirus
auuccauaccauac

SEQ ID NO: 92253 - RNA, 15 nt, BK polyomavirus
auuccauaccauaca

SEQ ID NO: 92254 - RNA, 23 nt, BK polyomavirus
cagcaggggcugaaguaucugag

SEQ ID NO: 92255 - RNA, 13 nt, BK polyomavirus
cagcugaaacaua

SEQ ID NO: 92256 - RNA, 19 nt, BK polyomavirus
cagccuuuccuuccauuca

SEQ ID NO: 92257 - RNA, 18 nt, BK polyomavirus
cagaggcuauagcugcua

SEQ ID NO: 92258 - RNA, 14 nt, BK polyomavirus
cagaugaaaaccuu

SEQ ID NO: 92259 - RNA, 15 nt, BK polyomavirus
cagaugaaaaccuua

SEQ ID NO: 92260 - RNA, 20 nt, BK polyomavirus
cagagagaaaaaugcuuccc

SEQ ID NO: 92261 - RNA, 19 nt, BK polyomavirus
cacaaaguuuccacuguag

SEQ ID NO: 92262 - RNA, 22 nt, BK polyomavirus
caauugucccuguuugucaaua

SEQ ID NO: 92263 - RNA, 22 nt, BK polyomavirus
caagcuuaaaaguggcuuauac

SEQ ID NO: 92264 - RNA, 15 nt, BK polyomavirus
caaggccucuccacu

SEQ ID NO: 92265 - RNA, 20 nt, BK polyomavirus
caauucuagauuguauauca

SEQ ID NO: 92266 - RNA, 18 nt, BK polyomavirus
agcagcugaaacauacag

SEQ ID NO: 92267 - RNA, 18 nt, BK polyomavirus
agcuguauuuaguaauag

SEQ ID NO: 92268 - RNA, 13 nt, BK polyomavirus
agcuuuacaaaga

SEQ ID NO: 92269 - RNA, 16 nt, BK polyomavirus
aggcuauagcugcuau

SEQ ID NO: 92270 - RNA, 18 nt, BK polyomavirus
aggcuauagcugcuauag

SEQ ID NO: 92271 - RNA, 17 nt, BK polyomavirus
aggcuaucagcuuuaca

SEQ ID NO: 92272 - RNA, 20 nt, BK polyomavirus
aggcugcccauccacucucu

SEQ ID NO: 92273 - RNA, 16 nt, BK polyomavirus
aggcugcugcugccac

SEQ ID NO: 92274 - RNA, 16 nt, BK polyomavirus
aggcugcugcugcuau

SEQ ID NO: 92275 - RNA, 17 nt, BK polyomavirus
aggcugcugcugcuaua

SEQ ID NO: 92276 - RNA, 21 nt, BK polyomavirus
aggcugcugcugcuauagaag

SEQ ID NO: 92277 - RNA, 19 nt, BK polyomavirus
agguucaugggugcugcuc

SEQ ID NO: 92278 - RNA, 20 nt, BK polyomavirus
agguucaugggugcugcucu

SEQ ID NO: 92279 - RNA, 23 nt, BK polyomavirus
agugguauuaguuccuuagcuca

SEQ ID NO: 92280 - RNA, 13 nt, BK polyomavirus
auaaaauauuaaa

SEQ ID NO: 92281 - RNA, 18 nt, BK polyomavirus
auaaaagcaccuguuuaa

SEQ ID NO: 92282 - RNA, 16 nt, BK polyomavirus
augcagggagugcuaa

SEQ ID NO: 92283 - RNA, 17 nt, BK polyomavirus
augauugggaucacaaa

SEQ ID NO: 92284 - RNA, 22 nt, BK polyomavirus
augaggaccuaaccuguggaaa

SEQ ID NO: 92285 - RNA, 17 nt, BK polyomavirus
augaagaagcaacagca

SEQ ID NO: 92286 - RNA, 18 nt, BK polyomavirus
auaucaagaauacauuuc

SEQ ID NO: 92287 - RNA, 12 nt, BK polyomavirus
auaucaguugca

SEQ ID NO: 92288 - RNA, 16 nt, BK polyomavirus
auaucaguugcaaaau

SEQ ID NO: 92289 - RNA, 22 nt, BK polyomavirus
auaucagcagcugaaacauaca

SEQ ID NO: 92290 - RNA, 22 nt, BK polyomavirus
auauguacaauaaaagcaccug

SEQ ID NO: 92291 - RNA, 17 nt, BK polyomavirus
auauguuugccagugau

SEQ ID NO: 92292 - RNA, 22 nt, BK polyomavirus
auagcccagagagaaaaaugcu

SEQ ID NO: 92293 - RNA, 12 nt, BK polyomavirus
auagcugcuaua

SEQ ID NO: 92294 - RNA, 13 nt, BK polyomavirus
auagcugcuauag

SEQ ID NO: 92295 - RNA, 17 nt, BK polyomavirus
auaggugccaaccuaug

SEQ ID NO: 92296 - RNA, 20 nt, BK polyomavirus
auccauguccagagucuuca

SEQ ID NO: 92297 - RNA, 19 nt, BK polyomavirus
aucccuugcuacuguagag

SEQ ID NO: 92298 - RNA, 23 nt, BK polyomavirus
auccuugaaaaaguauacauacu

SEQ ID NO: 92299 - RNA, 12 nt, BK polyomavirus
uuaaagcauuuu

SEQ ID NO: 92300 - RNA, 13 nt, BK polyomavirus
uguuguguuccag

SEQ ID NO: 92301 - RNA, 15 nt, BK polyomavirus
uuaucucagaaucca

SEQ ID NO: 92302 - RNA, 16 nt, BK polyomavirus
uucaguuucugaaucc

SEQ ID NO: 92303 - RNA, 14 nt, BK polyomavirus
uucauccuugaaaa

SEQ ID NO: 92304 - RNA, 16 nt, BK polyomavirus
uuccagguucaugggu

SEQ ID NO: 92305 - RNA, 22 nt, BK polyomavirus
uuccagguucaugggugcugcu

SEQ ID NO: 92306 - RNA, 23 nt, BK polyomavirus
uuccagguucaugggugcugcuc

SEQ ID NO: 92307 - RNA, 12 nt, BK polyomavirus
uuccccaugcau

SEQ ID NO: 92308 - RNA, 17 nt, BK polyomavirus
uuccuaaacccagaaau

SEQ ID NO: 92309 - RNA, 14 nt, BK polyomavirus
uuccuuccauucaa

SEQ ID NO: 92310 - RNA, 20 nt, BK polyomavirus
uucucaacacucaacaccac

SEQ ID NO: 92311 - RNA, 22 nt, BK polyomavirus
uucuguauaaaaaacuuaugga

SEQ ID NO: 92312 - RNA, 13 nt, BK polyomavirus
uggaggaaaaccu

SEQ ID NO: 92313 - RNA, 16 nt, BK polyomavirus
uggcugaaauugcugc

SEQ ID NO: 92314 - RNA, 17 nt, BK polyomavirus
uggcugaaauugcugcu

SEQ ID NO: 92315 - RNA, 21 nt, BK polyomavirus
uguauaaaaaacuuauggaaa

SEQ ID NO: 92316 - RNA, 24 nt, BK polyomavirus
uguauuuccagguucaugggugcu

SEQ ID NO: 92317 - RNA, 15 nt, BK polyomavirus
uguaacuguacaaac

SEQ ID NO: 92318 - RNA, 23 nt, BK polyomavirus
ugggaucacaaaguuuccacugu

SEQ ID NO: 92319 - RNA, 17 nt, BK polyomavirus
ugggauuccauaccaua

SEQ ID NO: 92320 - RNA, 14 nt, BK polyomavirus
uggguuugcugcuu

SEQ ID NO: 92321 - RNA, 14 nt, BK polyomavirus
ugcaugagcauggu

SEQ ID NO: 92322 - RNA, 18 nt, BK polyomavirus
ugcaucccuugcuacugu

SEQ ID NO: 92323 - RNA, 16 nt, BK polyomavirus
ugcuguaauugcuggu

SEQ ID NO: 92324 - RNA, 21 nt, BK polyomavirus
ugcuuuuauuguacauauaca

SEQ ID NO: 92325 - RNA, 13 nt, BK polyomavirus
ugcuacuguagag

SEQ ID NO: 92326 - RNA, 14 nt, BK polyomavirus
ugcugcugcuauag

SEQ ID NO: 92327 - RNA, 19 nt, BK polyomavirus
ugcugcuggggaggcugcu

SEQ ID NO: 92328 - RNA, 17 nt, BK polyomavirus
ugcugcuuuuguauaag

SEQ ID NO: 92329 - RNA, 19 nt, BK polyomavirus
ugcuggugcuccuggggcu

SEQ ID NO: 92330 - RNA, 17 nt, BK polyomavirus
aaccuauucaaggcagu

SEQ ID NO: 92331 - RNA, 19 nt, BK polyomavirus
aacuguacaaacagagguu

SEQ ID NO: 92332 - RNA, 15 nt, BK polyomavirus
aacuguuagugguau

SEQ ID NO: 92333 - RNA, 22 nt, BK polyomavirus
aacauaugcuguaauugcuggu

SEQ ID NO: 92334 - RNA, 23 nt, BK polyomavirus
uuucaguggcugaaauugcugcu

SEQ ID NO: 92335 - RNA, 23 nt, BK polyomavirus
uuuccagguucaugggugcugcu

SEQ ID NO: 92336 - RNA, 17 nt, BK polyomavirus
uuuccccaugcauauau

SEQ ID NO: 92337 - RNA, 22 nt, BK polyomavirus
uuucccucugaucuacaccagu

SEQ ID NO: 92338 - RNA, 19 nt, BK polyomavirus
uuugcugcuuuaauucaaa

SEQ ID NO: 92339 - RNA, 14 nt, BK polyomavirus
aagcuaagugcuga

SEQ ID NO: 92340 - RNA, 14 nt, BK polyomavirus
aaggauucuuuaca

SEQ ID NO: 92341 - RNA, 15 nt, BK polyomavirus
aaggauucuuuacag

SEQ ID NO: 92342 - RNA, 15 nt, BK polyomavirus
aauaucaagaauaca

SEQ ID NO: 92343 - RNA, 22 nt, BK polyomavirus
aauaucagcagcugaaacauac

SEQ ID NO: 92344 - RNA, 15 nt, BK polyomavirus
aaguuuccacuguag

SEQ ID NO: 92345 - RNA, 14 nt, BK polyomavirus
aauacauuucccca

SEQ ID NO: 92346 - RNA, 22 nt, BK polyomavirus
aauacauuuccccaugcauaua

SEQ ID NO: 92347 - RNA, 19 nt, BK polyomavirus
aauucuagauuguauauca

SEQ ID NO: 92348 - RNA, 19 nt, BK polyomavirus
aauugcaucccuugcuacu

SEQ ID NO: 92349 - RNA, 15 nt, BK polyomavirus
ucaugggugcugcuc

SEQ ID NO: 92350 - RNA, 12 nt, BK polyomavirus
ucaguugcaaaa

SEQ ID NO: 92351 - RNA, 14 nt, BK polyomavirus
ucaguuucugaauc

SEQ ID NO: 92352 - RNA, 17 nt, BK polyomavirus
ucaguuucugaauccuc

SEQ ID NO: 92353 - RNA, 17 nt, BK polyomavirus
uccacuguuguguucca

SEQ ID NO: 92354 - RNA, 21 nt, BK polyomavirus
uccagagcuguuaguaaacag

SEQ ID NO: 92355 - RNA, 16 nt, BK polyomavirus
uccagaugaaaaccuu

SEQ ID NO: 92356 - RNA, 14 nt, BK polyomavirus
uccauucaacaauu

SEQ ID NO: 92357 - RNA, 20 nt, BK polyomavirus
uccauucaacaauucuagau

SEQ ID NO: 92358 - RNA, 12 nt, BK polyomavirus
ucaaauucugua

SEQ ID NO: 92359 - RNA, 15 nt, BK polyomavirus
ucaaauucuguauaa

SEQ ID NO: 92360 - RNA, 22 nt, BK polyomavirus
ucaaauugcaucccuugcuacu

SEQ ID NO: 92361 - RNA, 20 nt, BK polyomavirus
uauugcuggguuugcugcuu

SEQ ID NO: 92362 - RNA, 16 nt, BK polyomavirus
uauuuugccaugaaga

SEQ ID NO: 92363 - RNA, 17 nt, BK polyomavirus
ucagcagcugaaacaua

SEQ ID NO: 92364 - RNA, 21 nt, BK polyomavirus
ucaagcuguauuuaguaauag

SEQ ID NO: 92365 - RNA, 14 nt, BK polyomavirus
ucugagacuuggga

SEQ ID NO: 92366 - RNA, 13 nt, BK polyomavirus
ucuuaaaauaucu

SEQ ID NO: 92367 - RNA, 15 nt, BK polyomavirus
ucuucagcaggggcu

SEQ ID NO: 92368 - RNA, 17 nt, BK polyomavirus
ucuucaguuucugaauc

SEQ ID NO: 92369 - RNA, 14 nt, BK polyomavirus
ugaauccucuucuc

SEQ ID NO: 92370 - RNA, 12 nt, BK polyomavirus
ugaauuacaggu

SEQ ID NO: 92371 - RNA, 14 nt, BK polyomavirus
ugaaguaucugaga

SEQ ID NO: 92372 - RNA, 15 nt, BK polyomavirus
ugaaguaucugagac

SEQ ID NO: 92373 - RNA, 16 nt, BK polyomavirus
ugaccuuugggaaucu

SEQ ID NO: 92374 - RNA, 20 nt, BK polyomavirus
ucuucuaccugggauuccau

SEQ ID NO: 92375 - RNA, 16 nt, BK polyomavirus
ucuugacuaugggggu

SEQ ID NO: 92376 - RNA, 23 nt, BK polyomavirus
ucuuguaauaucaagaauacauu

SEQ ID NO: 92377 - RNA, 16 nt, BK polyomavirus
ugaaacauacaggcua

SEQ ID NO: 92378 - RNA, 12 nt, BK polyomavirus
ugaaagccuuua

SEQ ID NO: 92379 - RNA, 20 nt, BK polyomavirus
ugaagaagcaacagcagauu

SEQ ID NO: 92380 - RNA, 16 nt, BK polyomavirus
uaaagcuaagugcuga

SEQ ID NO: 92381 - RNA, 17 nt, BK polyomavirus
uaaauguauauguacaa

SEQ ID NO: 92382 - RNA, 17 nt, BK polyomavirus
guggcugaaauugcugc

SEQ ID NO: 92383 - RNA, 17 nt, BK polyomavirus
gugcuaaugaauuacag

SEQ ID NO: 92384 - RNA, 15 nt, BK polyomavirus
gucugaccuuuggga

SEQ ID NO: 92385 - RNA, 22 nt, BK polyomavirus
uagucuaaagcuaagugcugaa

SEQ ID NO: 92386 - RNA, 20 nt, BK polyomavirus
uaggugccaaccuauggaac

SEQ ID NO: 92387 - RNA, 14 nt, BK polyomavirus
uagagggcauaaca

SEQ ID NO: 92388 - RNA, 14 nt, BK polyomavirus
uacaaaagcagcau

SEQ ID NO: 92389 - RNA, 13 nt, BK polyomavirus
aaaauaucuugca

SEQ ID NO: 92390 - RNA, 13 nt, BK polyomavirus
aaaaugcuucccu

SEQ ID NO: 92391 - RNA, 19 nt, BK polyomavirus
aaaaugcuucccuguuaca

SEQ ID NO: 92392 - RNA, 21 nt, BK polyomavirus
ccagccuuuccuuccauucaa

SEQ ID NO: 92393 - RNA, 20 nt, BK polyomavirus
caugcagggucacaaaaagu

SEQ ID NO: 92394 - RNA, 23 nt, BK polyomavirus
caugguggaggaaaaccuauuca

SEQ ID NO: 92395 - RNA, 19 nt, BK polyomavirus
cauugugauugggauucag

SEQ ID NO: 92396 - RNA, 15 nt, BK polyomavirus
caucccuugcuacug

SEQ ID NO: 92397 - RNA, 18 nt, BK polyomavirus
ccucuucucuuguaauau

SEQ ID NO: 92398 - RNA, 20 nt, BK polyomavirus
ccucuucucuuguaauauca

SEQ ID NO: 92399 - RNA, 21 nt, BK polyomavirus
ccugggauuccauaccauaca

SEQ ID NO: 92400 - RNA, 21 nt, BK polyomavirus
ccuugaaaaaguauacauacu

SEQ ID NO: 92401 - RNA, 16 nt, BK polyomavirus
ccuuuacacaaaugca

SEQ ID NO: 92402 - RNA, 12 nt, BK polyomavirus
cugaaguaucug

SEQ ID NO: 92403 - RNA, 22 nt, BK polyomavirus
cugaccuuugggaaucuucagc

SEQ ID NO: 92404 - RNA, 21 nt, BK polyomavirus
cugcuggggaggcugcugcug

SEQ ID NO: 92405 - RNA, 15 nt, BK polyomavirus
cugcuuuaauucaaa

SEQ ID NO: 92406 - RNA, 21 nt, BK polyomavirus
cuggggaggcugcugcugcua

SEQ ID NO: 92407 - RNA, 16 nt, BK polyomavirus
cuuguaauaucaagaa

SEQ ID NO: 92408 - RNA, 14 nt, BK polyomavirus
cuugcuacuguaga

SEQ ID NO: 92409 - RNA, 13 nt, BK polyomavirus
cuuggaaaugcag

SEQ ID NO: 92410 - RNA, 15 nt, BK polyomavirus
cuucuuugcuguagg

SEQ ID NO: 92411 - RNA, 12 nt, BK polyomavirus
cuuagcaaaaag

SEQ ID NO: 92412 - RNA, 17 nt, BK polyomavirus
cuuagcucaaguagggu

SEQ ID NO: 92413 - RNA, 14 nt, BK polyomavirus
cuuaggggcuuuag

SEQ ID NO: 92414 - RNA, 22 nt, BK polyomavirus
cuuauacaaaagcagcauuuau

SEQ ID NO: 92415 - RNA, 22 nt, BK polyomavirus
cuuaucucagaauccagccuuu

SEQ ID NO: 92416 - RNA, 21 nt, BK polyomavirus
cuacugaugugggaggcugua

SEQ ID NO: 92417 - RNA, 22 nt, BK polyomavirus
cuacugaugugggaggcuguaa

SEQ ID NO: 92418 - RNA, 16 nt, BK polyomavirus
cuacuguagagggcau

SEQ ID NO: 92419 - RNA, 17 nt, BK polyomavirus
cuacuguagagggcaua

SEQ ID NO: 92420 - RNA, 18 nt, BK polyomavirus
cuauagcugcuauaggcc

SEQ ID NO: 92421 - RNA, 20 nt, BK polyomavirus
cuauaggccuaacuccucaa

SEQ ID NO: 92422 - RNA, 20 nt, BK polyomavirus
cucagaggcuauagcugcua

SEQ ID NO: 92423 - RNA, 16 nt, BK polyomavirus
cucaacaccacccaaa

SEQ ID NO: 92424 - RNA, 20 nt, BK polyomavirus
cuauugcuggguuugcugcu

SEQ ID NO: 92425 - RNA, 13 nt, BK polyomavirus
cuaucagcuuuac

SEQ ID NO: 92426 - RNA, 15 nt, BK polyomavirus
cuaucagcuuuacaa

SEQ ID NO: 92427 - RNA, 17 nt, BK polyomavirus
cggaucuuaaaauaucu

SEQ ID NO: 92428 - RNA, 23 nt, BK polyomavirus
gcaugcuuaaccuucaugcaggg

SEQ ID NO: 92429 - RNA, 14 nt, BK polyomavirus
gccagugaugaaga

SEQ ID NO: 92430 - RNA, 22 nt, BK polyomavirus
gccaguguaucugaggcugcug

SEQ ID NO: 92431 - RNA, 13 nt, BK polyomavirus
gcuaagugcugaa

SEQ ID NO: 92432 - RNA, 13 nt, BK polyomavirus
gcugcucuagcac

SEQ ID NO: 92433 - RNA, 11 nt, BK polyomavirus
gcugcugcuau

SEQ ID NO: 92434 - RNA, 13 nt, BK polyomavirus
gcugcugcugcua

SEQ ID NO: 92435 - RNA, 15 nt, BK polyomavirus
gcugcugcugcuaua

SEQ ID NO: 92436 - RNA, 20 nt, BK polyomavirus
gccuuuacacaaaugcaacu

SEQ ID NO: 92437 - RNA, 23 nt, BK polyomavirus
gcggaucuuaaaauaucuugcaa

SEQ ID NO: 92438 - RNA, 23 nt, BK polyomavirus
ggcuuauacaaaagcagcauuua

SEQ ID NO: 92439 - RNA, 18 nt, BK polyomavirus
ggcuaucagcuuuacaaa

SEQ ID NO: 92440 - RNA, 20 nt, BK polyomavirus
ggcuaucagcuuuacaaaga

SEQ ID NO: 92441 - RNA, 15 nt, BK polyomavirus
ggcuauagcugcuau

SEQ ID NO: 92442 - RNA, 18 nt, BK polyomavirus
ggaggcugcugcugcuau

SEQ ID NO: 92443 - RNA, 19 nt, BK polyomavirus
ggaggcugcugcugcuaua

SEQ ID NO: 92444 - RNA, 20 nt, BK polyomavirus
ggaggcuguaacuguacaaa

SEQ ID NO: 92445 - RNA, 17 nt, BK polyomavirus
guaaggauucuuuacag

SEQ ID NO: 92446 - RNA, 17 nt, BK polyomavirus
guaauaucaagaauaca

SEQ ID NO: 92447 - RNA, 15 nt, BK polyomavirus
gguuugcugcuuuaa

SEQ ID NO: 92448 - RNA, 14 nt, BK polyomavirus
ggucacuuagcaaa

SEQ ID NO: 92449 - RNA, 15 nt, BK polyomavirus
ggucacuuagcaaaa

SEQ ID NO: 92450 - RNA, 13 nt, BK polyomavirus
ggugcugcucuag

SEQ ID NO: 92451 - RNA, 15 nt, BK polyomavirus
ggcuuuagucuaaag

SEQ ID NO: 92452 - RNA, 20 nt, BK polyomavirus
gggaccuaguugccagugua

SEQ ID NO: 92453 - RNA, 14 nt, BK polyomavirus
gguagaaugcuucc

SEQ ID NO: 92454 - RNA, 18 nt, BK polyomavirus
gguagaugcuauuacaga

SEQ ID NO: 92455 - RNA, 16 nt, BK polyomavirus
gguauuaguuccuuag

SEQ ID NO: 92456 - RNA, 14 nt, BK polyomavirus
gaauccagccuuuc

SEQ ID NO: 92457 - RNA, 23 nt, BK polyomavirus
gaauccucuucucuuguaauauc

SEQ ID NO: 92458 - RNA, 17 nt, BK polyomavirus
gaagucuuucugugcca

SEQ ID NO: 92459 - RNA, 21 nt, BK polyomavirus
cuuuagcagugauagcccaga

SEQ ID NO: 92460 - RNA, 18 nt, BK polyomavirus
gaccuaguugccagugua

SEQ ID NO: 92461 - RNA, 19 nt, BK polyomavirus
gaccuaguugccaguguau

SEQ ID NO: 92462 - RNA, 20 nt, BK polyomavirus
aaacuuauggaaaaauauuc

SEQ ID NO: 92463 - RNA, 22 nt, BK polyomavirus
aaagcaccuguuuaaagcauuu

SEQ ID NO: 92464 - RNA, 13 nt, BK polyomavirus
aaagcagcauuua

SEQ ID NO: 92465 - RNA, 12 nt, BK polyomavirus
aaaggcccuaag

SEQ ID NO: 92466 - RNA, 21 nt, BK polyomavirus
aaagguagaagacccuaaaga

SEQ ID NO: 92467 - RNA, 13 nt, BK polyomavirus
aaaguauacauac

SEQ ID NO: 92468 - RNA, 16 nt, BK polyomavirus
aaaugacuuuagcagu

SEQ ID NO: 92469 - RNA, 18 nt, BK polyomavirus
aaaugcugcuuuuguaua

SEQ ID NO: 92470 - RNA, 18 nt, BK polyomavirus
aaaugcuucccuguuaca

SEQ ID NO: 92471 - RNA, 15 nt, BK polyomavirus
gagaaaaaugcuucc

SEQ ID NO: 92472 - RNA, 19 nt, BK polyomavirus
gaggcuauagcugcuauag

SEQ ID NO: 92473 - RNA, 15 nt, BK polyomavirus
gaggcuauagcugcu

SEQ ID NO: 92474 - RNA, 17 nt, BK polyomavirus
gaggcuauagcugcuau

SEQ ID NO: 92475 - RNA, 16 nt, BK polyomavirus
gaggcugcugcugcua

SEQ ID NO: 92476 - RNA, 18 nt, BK polyomavirus
gaggcugcugcugcuaua

SEQ ID NO: 92477 - RNA, 20 nt, BK polyomavirus
gaugaagauuuauuuugcca

SEQ ID NO: 92478 - RNA, 23 nt, BK polyomavirus
gauucagugcuugauccaugucc

SEQ ID NO: 92479 - RNA, 15 nt, BK polyomavirus
gauuuauuuugccau

SEQ ID NO: 92480 - RNA, 16 nt, BK polyomavirus
aguauacauacuuauc

SEQ ID NO: 92481 - RNA, 16 nt, BK polyomavirus
agguagaaugcuuccu

SEQ ID NO: 92482 - RNA, 18 nt, BK polyomavirus
aguguaucugaggcugcu

SEQ ID NO: 92483 - RNA, 21 nt, BK polyomavirus
agugaugaagaagcaacagca

SEQ ID NO: 92484 - RNA, 20 nt, BK polyomavirus
agugcuaaugaauuacaggu

SEQ ID NO: 92485 - RNA, 18 nt, BK polyomavirus
agugcuugauccaugucc

SEQ ID NO: 92486 - RNA, 20 nt, BK polyomavirus
aguggcugaaauugcugcug

SEQ ID NO: 92487 - RNA, 22 nt, BK polyomavirus
aguggcugaaauugcugcuggg

SEQ ID NO: 92488 - RNA, 17 nt, BK polyomavirus
agaggcuauagcugcua

SEQ ID NO: 92489 - RNA, 21 nt, BK polyomavirus
agcuuaaaaguggcuuauaca

SEQ ID NO: 92490 - RNA, 15 nt, BK polyomavirus
aggcuauagcugcua

SEQ ID NO: 92491 - RNA, 17 nt, BK polyomavirus
aggcuauagcugcuaua

SEQ ID NO: 92492 - RNA, 14 nt, BK polyomavirus
aggcuaucagcuuu

SEQ ID NO: 92493 - RNA, 12 nt, BK polyomavirus
aggcugcugcug

SEQ ID NO: 92494 - RNA, 15 nt, BK polyomavirus
aggcugcugcugcua

SEQ ID NO: 92495 - RNA, 18 nt, BK polyomavirus
aggcugcugcugcuauag

SEQ ID NO: 92496 - RNA, 16 nt, BK polyomavirus
aggcuguaacuguaca

SEQ ID NO: 92497 - RNA, 14 nt, BK polyomavirus
auauuauauuucau

SEQ ID NO: 92498 - RNA, 12 nt, BK polyomavirus
auauacauuuaa

SEQ ID NO: 92499 - RNA, 13 nt, BK polyomavirus
auacuuaucucag

SEQ ID NO: 92500 - RNA, 13 nt, BK polyomavirus
auacuacuaaaga

SEQ ID NO: 92501 - RNA, 14 nt, BK polyomavirus
auacuacuaaagaa

SEQ ID NO: 92502 - RNA, 17 nt, BK polyomavirus
auacauacuuaucucag

SEQ ID NO: 92503 - RNA, 13 nt, BK polyomavirus
aucagcuuuacaa

SEQ ID NO: 92504 - RNA, 17 nt, BK polyomavirus
aucccuugcuacuguag

SEQ ID NO: 92505 - RNA, 19 nt, BK polyomavirus
auccuugaaaaaguauaca

SEQ ID NO: 92506 - RNA, 20 nt, BK polyomavirus
auccuugaaaaaguauacau

SEQ ID NO: 92507 - RNA, 17 nt, BK polyomavirus
acaggccacaaauauca

SEQ ID NO: 92508 - RNA, 18 nt, BK polyomavirus
acaggccacaaauaucag

SEQ ID NO: 92509 - RNA, 13 nt, BK polyomavirus
agaagacccuaaa

SEQ ID NO: 92510 - RNA, 21 nt, BK polyomavirus
agaaugcuuccuaaacccaga

SEQ ID NO: 92511 - RNA, 15 nt, BK polyomavirus
agacacaugugugcu

SEQ ID NO: 92512 - RNA, 15 nt, BK polyomavirus
agagaaaaaugcuuc

SEQ ID NO: 92513 - RNA, 19 nt, BK polyomavirus
acuuauauuuagauaaaua

SEQ ID NO: 92514 - RNA, 13 nt, BK polyomavirus
acuuaucucagaa

SEQ ID NO: 92515 - RNA, 18 nt, BK polyomavirus
acuuaucucagaauccag

SEQ ID NO: 92516 - RNA, 22 nt, BK polyomavirus
acugaugugggaggcuguaacu

SEQ ID NO: 92517 - RNA, 18 nt, BK polyomavirus
auuaguuccuuagcucaa

SEQ ID NO: 92518 - RNA, 13 nt, BK polyomavirus
auugggaucacaa

SEQ ID NO: 92519 - RNA, 21 nt, BK polyomavirus
auugggaucacaaaguuucca

SEQ ID NO: 92520 - RNA, 19 nt, BK polyomavirus
auugcuggguuugcugcuu

SEQ ID NO: 92521 - RNA, 23 nt, BK polyomavirus
auugcuggugcuccuggggcuau

SEQ ID NO: 92522 - RNA, 12 nt, BK polyomavirus
auucucaacacu

SEQ ID NO: 92523 - RNA, 14 nt, BK polyomavirus
auucucaacacuca

SEQ ID NO: 92524 - RNA, 21 nt, BK polyomavirus
auguccagagucuucaguuuc

SEQ ID NO: 92525 - RNA, 22 nt, BK polyomavirus
caaacacccuaaccucuucuac

SEQ ID NO: 92526 - RNA, 17 nt, BK polyomavirus
caaauaucagcagcuga

SEQ ID NO: 92527 - RNA, 17 nt, BK polyomavirus
auuucauccuugaaaaa

SEQ ID NO: 92528 - RNA, 16 nt, BK polyomavirus
auuguacauauacauu

SEQ ID NO: 92529 - RNA, 19 nt, BK polyomavirus
cagagguagaaugcuuccu

SEQ ID NO: 92530 - RNA, 19 nt, BK polyomavirus
caccuguuuaaagcauuuu

SEQ ID NO: 92531 - RNA, 19 nt, BK polyomavirus
cauaggcugcccauccacu

SEQ ID NO: 92532 - RNA, 17 nt, BK polyomavirus
cagugcuugauccaugu

SEQ ID NO: 92533 - RNA, 16 nt, BK polyomavirus
ccacuucuuugcugua

SEQ ID NO: 92534 - RNA, 21 nt, BK polyomavirus
ccagagagaaaaaugcuuccc

SEQ ID NO: 92535 - RNA, 18 nt, BK polyomavirus
ccuguuacagcacagcaa

SEQ ID NO: 92536 - RNA, 16 nt, BK polyomavirus
ccuucaugcaggguca

SEQ ID NO: 92537 - RNA, 21 nt, BK polyomavirus
ccuuccauucaacaauucuag

SEQ ID NO: 92538 - RNA, 19 nt, BK polyomavirus
ccuugaaaaaguauacaua

SEQ ID NO: 92539 - RNA, 20 nt, BK polyomavirus
ccuugaaaaaguauacauac

SEQ ID NO: 92540 - RNA, 22 nt, BK polyomavirus
ccuuuacacaaaugcaacucuu

SEQ ID NO: 92541 - RNA, 21 nt, BK polyomavirus
ccuuuccuuccauucaacaau

SEQ ID NO: 92542 - RNA, 14 nt, BK polyomavirus
ccuuuuaaaacacu

SEQ ID NO: 92543 - RNA, 23 nt, BK polyomavirus
cccuggaagucuuucugugccau

SEQ ID NO: 92544 - RNA, 16 nt, BK polyomavirus
gagguagaaugcuucc

SEQ ID NO: 92545 - RNA, 13 nt, BK polyomavirus
gauauguuugcca

SEQ ID NO: 92546 - RNA, 18 nt, BK polyomavirus
gaugauugggaucacaaa

SEQ ID NO: 92547 - RNA, 15 nt, BK polyomavirus
gcagggagugcuaau

SEQ ID NO: 92548 - RNA, 17 nt, BK polyomavirus
gcagggagugcuaauga

SEQ ID NO: 92549 - RNA, 13 nt, BK polyomavirus
gcagggucacaaa

SEQ ID NO: 92550 - RNA, 21 nt, BK polyomavirus
gcagggucacaaaaagugcau

SEQ ID NO: 92551 - RNA, 22 nt, BK polyomavirus
gcagggucacaaaaagugcaug

SEQ ID NO: 92552 - RNA, 16 nt, BK polyomavirus
gcaucccuugcuacug

SEQ ID NO: 92553 - RNA, 14 nt, BK polyomavirus
gaagacccuaaaga

SEQ ID NO: 92554 - RNA, 19 nt, BK polyomavirus
gaauacauuuccccaugca

SEQ ID NO: 92555 - RNA, 23 nt, BK polyomavirus
gaagucuuucugugccaucaaac

SEQ ID NO: 92556 - RNA, 14 nt, BK polyomavirus
cuugauccaugucc

SEQ ID NO: 92557 - RNA, 14 nt, BK polyomavirus
cuuggaaaugcagg

SEQ ID NO: 92558 - RNA, 23 nt, BK polyomavirus
cuuggaaaugcagggagugcuaa

SEQ ID NO: 92559 - RNA, 23 nt, BK polyomavirus
gaggaaaaccuauucaaggcagu

SEQ ID NO: 92560 - RNA, 16 nt, BK polyomavirus
gaccuaaccuguggaa

SEQ ID NO: 92561 - RNA, 17 nt, BK polyomavirus
cuuaaccuucaugcagg

SEQ ID NO: 92562 - RNA, 13 nt, BK polyomavirus
cuuagcucaagua

SEQ ID NO: 92563 - RNA, 17 nt, BK polyomavirus
cuuauacaaaagcagca

SEQ ID NO: 92564 - RNA, 20 nt, BK polyomavirus
cuguguauacuacuaaagaa

SEQ ID NO: 92565 - RNA, 12 nt, BK polyomavirus
cuguuugucaau

SEQ ID NO: 92566 - RNA, 21 nt, BK polyomavirus
cuguuugucaauauaucuuau

SEQ ID NO: 92567 - RNA, 23 nt, BK polyomavirus
cuuaucucagaauccagccuuuc

SEQ ID NO: 92568 - RNA, 22 nt, BK polyomavirus
cuucucuuguaauaucaagaau

SEQ ID NO: 92569 - RNA, 15 nt, BK polyomavirus
cugaggcugcugcug

SEQ ID NO: 92570 - RNA, 14 nt, BK polyomavirus
cugaaauugcugcu

SEQ ID NO: 92571 - RNA, 15 nt, BK polyomavirus
cugaaauugcugcug

SEQ ID NO: 92572 - RNA, 13 nt, BK polyomavirus
cugaaagccuuua

SEQ ID NO: 92573 - RNA, 23 nt, BK polyomavirus
cugcuauagaaguucaaauugca

SEQ ID NO: 92574 - RNA, 21 nt, BK polyomavirus
cuggaagucuuucugugccau

SEQ ID NO: 92575 - RNA, 18 nt, BK polyomavirus
cuaaugaauuacagguca

SEQ ID NO: 92576 - RNA, 22 nt, BK polyomavirus
cuaccugggauuccauaccaua

SEQ ID NO: 92577 - RNA, 14 nt, BK polyomavirus
cuacuguagagggc

SEQ ID NO: 92578 - RNA, 21 nt, BK polyomavirus
cuacuguagagggcauaacaa

SEQ ID NO: 92579 - RNA, 23 nt, BK polyomavirus
cucagaggcuauagcugcuauag

SEQ ID NO: 92580 - RNA, 21 nt, BK polyomavirus
cuauagaaguucaaauugcau

SEQ ID NO: 92581 - RNA, 13 nt, BK polyomavirus
cuauagcugcuau

SEQ ID NO: 92582 - RNA, 14 nt, BK polyomavirus
cuauagcugcuaua

SEQ ID NO: 92583 - RNA, 15 nt, BK polyomavirus
cuauagcugcuauag

SEQ ID NO: 92584 - RNA, 18 nt, BK polyomavirus
cuaaagaaaaagcucaaa

SEQ ID NO: 92585 - RNA, 18 nt, BK polyomavirus
gcggaucuuaaaauaucu

SEQ ID NO: 92586 - RNA, 16 nt, BK polyomavirus
ggaaaaauauucugua

SEQ ID NO: 92587 - RNA, 14 nt, BK polyomavirus
gcuugauccauguc

SEQ ID NO: 92588 - RNA, 14 nt, BK polyomavirus
gcucaaauucugua

SEQ ID NO: 92589 - RNA, 19 nt, BK polyomavirus
gcuuuuguauaagccacuu

SEQ ID NO: 92590 - RNA, 21 nt, BK polyomavirus
ggaaaugcagggagugcuaau

SEQ ID NO: 92591 - RNA, 22 nt, BK polyomavirus
ggaaaugcagggagugcuaaug

SEQ ID NO: 92592 - RNA, 16 nt, BK polyomavirus
ggaagucuuucugugc

SEQ ID NO: 92593 - RNA, 16 nt, BK polyomavirus
ggccucuaucagcaau

SEQ ID NO: 92594 - RNA, 15 nt, BK polyomavirus
gucacaaaaagugca

SEQ ID NO: 92595 - RNA, 15 nt, BK polyomavirus
gucacuuagcaaaaa

SEQ ID NO: 92596 - RNA, 13 nt, BK polyomavirus
gguagaaugcuuc

SEQ ID NO: 92597 - RNA, 20 nt, BK polyomavirus
gggucacaaaaagugcauga

SEQ ID NO: 92598 - RNA, 21 nt, BK polyomavirus
ggggauccagaugaaaaccuu

SEQ ID NO: 92599 - RNA, 18 nt, BK polyomavirus
ggucacaaaaagugcaug

SEQ ID NO: 92600 - RNA, 18 nt, BK polyomavirus
gucuaaagcuaagugcug

SEQ ID NO: 92601 - RNA, 22 nt, BK polyomavirus
uaaaagcaccuguuuaaagcau

SEQ ID NO: 92602 - RNA, 19 nt, BK polyomavirus
uaaaaggcccuaaguaauu

SEQ ID NO: 92603 - RNA, 11 nt, BK polyomavirus
uaaagcauuuu

SEQ ID NO: 92604 - RNA, 15 nt, BK polyomavirus
uacaccaguuucuua

SEQ ID NO: 92605 - RNA, 17 nt, BK polyomavirus
uacauuuccccaugcau

SEQ ID NO: 92606 - RNA, 19 nt, BK polyomavirus
uaauaucaagaauacauuu

SEQ ID NO: 92607 - RNA, 22 nt, BK polyomavirus
ucaacaauucuagauuguauau

SEQ ID NO: 92608 - RNA, 23 nt, BK polyomavirus
ucaagaauacauuuccccaugca

SEQ ID NO: 92609 - RNA, 19 nt, BK polyomavirus
uauuggaauaacuagcaug

SEQ ID NO: 92610 - RNA, 13 nt, BK polyomavirus
uauuguacauaua

SEQ ID NO: 92611 - RNA, 14 nt, BK polyomavirus
uauuguacauauac

SEQ ID NO: 92612 - RNA, 19 nt, BK polyomavirus
uauaaaaaacuuauggaaa

SEQ ID NO: 92613 - RNA, 14 nt, BK polyomavirus
uaguaaacaggcca

SEQ ID NO: 92614 - RNA, 21 nt, BK polyomavirus
uagcagugauagcccagagag

SEQ ID NO: 92615 - RNA, 11 nt, BK polyomavirus
uaucagcagcu

SEQ ID NO: 92616 - RNA, 15 nt, BK polyomavirus
uauacaaaagcagca

SEQ ID NO: 92617 - RNA, 18 nt, BK polyomavirus
uauacaaaagcagcauuu

SEQ ID NO: 92618 - RNA, 12 nt, BK polyomavirus
uauguuugccag

SEQ ID NO: 92619 - RNA, 18 nt, BK polyomavirus
uuacagaucuuuuucuca

SEQ ID NO: 92620 - RNA, 19 nt, BK polyomavirus
uguuccagagcuguuagua

SEQ ID NO: 92621 - RNA, 20 nt, BK polyomavirus
uguaggccucuaucagcaau

SEQ ID NO: 92622 - RNA, 14 nt, BK polyomavirus
uguauauguacaau

SEQ ID NO: 92623 - RNA, 16 nt, BK polyomavirus
uguauauguacaauaa

SEQ ID NO: 92624 - RNA, 16 nt, BK polyomavirus
uguauacuacuaaaga

SEQ ID NO: 92625 - RNA, 17 nt, BK polyomavirus
uguauacuacuaaagaa

SEQ ID NO: 92626 - RNA, 18 nt, BK polyomavirus
ugggggaccuaguugcca

SEQ ID NO: 92627 - RNA, 23 nt, BK polyomavirus
ugggggaccuaguugccagugua

SEQ ID NO: 92628 - RNA, 22 nt, BK polyomavirus
ugggggauccagaugaaaaccu

SEQ ID NO: 92629 - RNA, 18 nt, BK polyomavirus
ugggguagaugcuauuac

SEQ ID NO: 92630 - RNA, 16 nt, BK polyomavirus
uggguucuccuguuua

SEQ ID NO: 92631 - RNA, 17 nt, BK polyomavirus
uggguucuccuguuuau

SEQ ID NO: 92632 - RNA, 20 nt, BK polyomavirus
ugcuacuguagagggcauaa

SEQ ID NO: 92633 - RNA, 14 nt, BK polyomavirus
uggcugaaauugcu

SEQ ID NO: 92634 - RNA, 18 nt, BK polyomavirus
uggcugaaauugcugcug

SEQ ID NO: 92635 - RNA, 14 nt, BK polyomavirus
uugcuggugcuccu

SEQ ID NO: 92636 - RNA, 16 nt, BK polyomavirus
uugaaaaaguauacau

SEQ ID NO: 92637 - RNA, 13 nt, BK polyomavirus
uuccuuccauuca

SEQ ID NO: 92638 - RNA, 22 nt, BK polyomavirus
uucagcaggggcugaaguaucu

SEQ ID NO: 92639 - RNA, 16 nt, BK polyomavirus
uucaugggugcugcuc

SEQ ID NO: 92640 - RNA, 21 nt, BK polyomavirus
uucaugggugcugcucuagca

SEQ ID NO: 92641 - RNA, 12 nt, BK polyomavirus
uugggaaucuuc

SEQ ID NO: 92642 - RNA, 22 nt, BK polyomavirus
uuuccacuguaggccucuauca

SEQ ID NO: 92643 - RNA, 19 nt, BK polyomavirus
uuuccccaugcauauauua

SEQ ID NO: 92644 - RNA, 22 nt, BK polyomavirus
uuuauaggugccaaccuaugga

SEQ ID NO: 92645 - RNA, 11 nt, BK polyomavirus
uccccaugcau

SEQ ID NO: 92646 - RNA, 18 nt, BK polyomavirus
ucucaacacucaacacca

SEQ ID NO: 92647 - RNA, 14 nt, BK polyomavirus
ucucagaauccagc

SEQ ID NO: 92648 - RNA, 19 nt, BK polyomavirus
ucucagaauccagccuuuc

SEQ ID NO: 92649 - RNA, 20 nt, BK polyomavirus
uccuggggcuauugcugggu

SEQ ID NO: 92650 - RNA, 17 nt, BK polyomavirus
ugcccauccacucucug

SEQ ID NO: 92651 - RNA, 14 nt, BK polyomavirus
ugcagggagugcua

SEQ ID NO: 92652 - RNA, 15 nt, BK polyomavirus
ugcagggagugcuaa

SEQ ID NO: 92653 - RNA, 16 nt, BK polyomavirus
ugcagggagugcuaau

SEQ ID NO: 92654 - RNA, 17 nt, BK polyomavirus
ugcagggagugcuaaug

SEQ ID NO: 92655 - RNA, 22 nt, BK polyomavirus
ugcagggucacaaaaagugcau

SEQ ID NO: 92656 - RNA, 14 nt, BK polyomavirus
ugaggcugcugcug

SEQ ID NO: 92657 - RNA, 20 nt, BK polyomavirus
ugaaaaaugggaugaagauu

SEQ ID NO: 92658 - RNA, 16 nt, Homo sapiens
ugcauacacacacaca

SEQ ID NO: 92659 - RNA, 21 nt, Homo sapiens
ugaaugaaacccccacacaca

SEQ ID NO: 92660 - RNA, 11 nt, Homo sapiens
acacagccaca

SEQ ID NO: 92661 - RNA, 20 nt, Homo sapiens
cacacagaaaauauacugua

SEQ ID NO: 92662 - RNA, 22 nt, Homo sapiens
ugcauacacacacacacacagc

SEQ ID NO: 92663 - RNA, 22 nt, Homo sapiens
cacacagaaaauauacuguaaa

SEQ ID NO: 92664 - RNA, 15 nt, Homo sapiens
gccacacacacagaa

SEQ ID NO: 92665 - RNA, 20 nt, Homo sapiens
cacagccacacacacagaaa

SEQ ID NO: 92666 - RNA, 10 nt, Homo sapiens
uauacuguaa

SEQ ID NO: 92667 - RNA, 14 nt, Homo sapiens
gccacacacacaga

SEQ ID NO: 92668 - RNA, 12 nt, Homo sapiens
cacacaugcaua

SEQ ID NO: 92669 - RNA, 22 nt, Homo sapiens
gcauacacacacacacacagcc

SEQ ID NO: 92670 - RNA, 12 nt, Homo sapiens
aauauacuguaa

SEQ ID NO: 92671 - RNA, 22 nt, Homo sapiens
uacacacacacacacagccaca

SEQ ID NO: 92672 - RNA, 22 nt, Homo sapiens
acacacagaaaauauacuguaa

SEQ ID NO: 92673 - RNA, 11 nt, Homo sapiens
acacacacaga

SEQ ID NO: 92674 - RNA, 18 nt, Homo sapiens
ccacacacacacacaugc

SEQ ID NO: 92675 - RNA, 20 nt, Homo sapiens
ccacacacacacacaugcau

SEQ ID NO: 92676 - RNA, 19 nt, Homo sapiens
cacacagaaaauauacugu

SEQ ID NO: 92677 - RNA, 12 nt, Homo sapiens
uauacuguaaag

SEQ ID NO: 92678 - RNA, 20 nt, Homo sapiens
uacacacacacacacagcca

SEQ ID NO: 92679 - RNA, 19 nt, Homo sapiens
augaaacccccacacacac

SEQ ID NO: 92680 - RNA, 14 nt, Homo sapiens
augcauacacacac

SEQ ID NO: 92681 - RNA, 15 nt, Homo sapiens
augcauacacacaca

SEQ ID NO: 92682 - RNA, 19 nt, Homo sapiens
auacacacacacacacagc

SEQ ID NO: 92683 - RNA, 19 nt, Homo sapiens
acugaaugaaacccccaca

SEQ ID NO: 92684 - RNA, 11 nt, Homo sapiens
uauacuguaaa

SEQ ID NO: 92685 - RNA, 17 nt, Black beetle virus
ucuagcccgaaagggca

SEQ ID NO: 92686 - RNA, 18 nt, Black beetle virus
ucuagcccgaaagggcag

SEQ ID NO: 92687 - RNA, 17 nt, Black beetle virus
cuagcccgaaagggcag

SEQ ID NO: 92688 - RNA, 22 nt, Black beetle virus
cucuuaggagcacccacacccg

SEQ ID NO: 92689 - RNA, 11 nt, Black beetle virus
cguucuagccc

SEQ ID NO: 92690 - RNA, 14 nt, Black beetle virus
cguucuagcccgaa

SEQ ID NO: 92691 - RNA, 14 nt, Black beetle virus
uaggagcacccaca

SEQ ID NO: 92692 - RNA, 19 nt, Black beetle virus
uaggagcacccacacccgu

SEQ ID NO: 92693 - RNA, 19 nt, Black beetle virus
guucuagcccgaaagggca

SEQ ID NO: 92694 - RNA, 21 nt, Black beetle virus
guucuagcccgaaagggcaga

SEQ ID NO: 92695 - RNA, 19 nt, Black beetle virus
ggcucuuaggagcacccac

SEQ ID NO: 92696 - RNA, 16 nt, Black beetle virus
acacccguucuagccc

SEQ ID NO: 92697 - RNA, 13 nt, Black beetle virus
cccguucuagccc

SEQ ID NO: 92698 - RNA, 10 nt, Black beetle virus
guucuagccc

SEQ ID NO: 92699 - RNA, 13 nt, Black beetle virus
guucuagcccgaa

SEQ ID NO: 92700 - RNA, 15 nt, Black beetle virus
ucuuaggagcaccca

SEQ ID NO: 92701 - RNA, 17 nt, Black beetle virus
ucuuaggagcacccaca

SEQ ID NO: 92702 - RNA, 14 nt, Black beetle virus
ucuagcccgaaagg

SEQ ID NO: 92703 - RNA, 16 nt, Black beetle virus
ucuagcccgaaagggc

SEQ ID NO: 92704 - RNA, 16 nt, Black beetle virus
gcucuuaggagcaccc

SEQ ID NO: 92705 - RNA, 17 nt, Black beetle virus
gcucuuaggagcaccca

SEQ ID NO: 92706 - RNA, 13 nt, Black beetle virus
acccguucuagcc

SEQ ID NO: 92707 - RNA, 15 nt, Black beetle virus
acacccguucuagcc

SEQ ID NO: 92708 - RNA, 20 nt, Black beetle virus
acacccguucuagcccgaaa

SEQ ID NO: 92709 - RNA, 14 nt, Black beetle virus
uagcccgaaagggc

SEQ ID NO: 92710 - RNA, 18 nt, Black beetle virus
ggagcacccacacccguu

SEQ ID NO: 92711 - RNA, 21 nt, Black beetle virus
gcacccacacccguucuagcc

SEQ ID NO: 92712 - RNA, 22 nt, Black beetle virus
gcacccacacccguucuagccc

SEQ ID NO: 92713 - RNA, 13 nt, Black beetle virus
cccgaaagggcag

SEQ ID NO: 92714 - RNA, 15 nt, Black beetle virus
cacccguucuagccc

SEQ ID NO: 92715 - RNA, 17 nt, Black beetle virus
cacacccguucuagccc

SEQ ID NO: 92716 - RNA, 20 nt, Black beetle virus
acccacacccguucuagccc

SEQ ID NO: 92717 - RNA, 21 nt, Black beetle virus
acccacacccguucuagcccg

SEQ ID NO: 92718 - RNA, 12 nt, Black beetle virus
aggagcacccac

SEQ ID NO: 92719 - RNA, 13 nt, Black beetle virus
aggagcacccaca

SEQ ID NO: 92720 - RNA, 22 nt, Black beetle virus
ggagcacccacacccguucuag

SEQ ID NO: 92721 - RNA, 15 nt, Black beetle virus
cuagcccgaaagggc

SEQ ID NO: 92722 - RNA, 16 nt, Black beetle virus
cccacacccguucuag

SEQ ID NO: 92723 - RNA, 22 nt, Black beetle virus
ccacacccguucuagcccgaaa

SEQ ID NO: 92724 - RNA, 12 nt, Black beetle virus
uaggagcaccca

SEQ ID NO: 92725 - RNA, 15 nt, Black beetle virus
uaggagcacccacac

SEQ ID NO: 92726 - RNA, 21 nt, Black beetle virus
guggcucuuaggagcacccac

SEQ ID NO: 92727 - RNA, 22 nt, Black beetle virus
agguggcucuuaggagcaccca

SEQ ID NO: 92728 - RNA, 14 nt, Black beetle virus
cacccguucuagcc

SEQ ID NO: 92729 - RNA, 17 nt, Black beetle virus
acccacacccguucuag

SEQ ID NO: 92730 - RNA, 15 nt, Bovine leukemia virus
agagaagcugcugac

SEQ ID NO: 92731 - RNA, 18 nt, Bovine leukemia virus
cagagacgucagcugcca

SEQ ID NO: 92732 - RNA, 16 nt, Bovine leukemia virus
cagagaagcugcugac

SEQ ID NO: 92733 - RNA, 18 nt, Bovine leukemia virus
cagcucucgguccugagc

SEQ ID NO: 92734 - RNA, 23 nt, Bovine leukemia virus
cagcugccagagaagcugcugac

SEQ ID NO: 92735 - RNA, 13 nt, Bovine leukemia virus
agcugcugaccuc

SEQ ID NO: 92736 - RNA, 19 nt, Bovine leukemia virus
ugaccucaccugcugauaa

SEQ ID NO: 92737 - RNA, 18 nt, Bovine leukemia virus
uguaugaaagaucaugca

SEQ ID NO: 92738 - RNA, 14 nt, Bovine leukemia virus
uucuccuccugaga

SEQ ID NO: 92739 - RNA, 17 nt, Bovine leukemia virus
aaaaugccggcccuguc

SEQ ID NO: 92740 - RNA, 14 nt, Bovine leukemia virus
ccugagcugcugac

SEQ ID NO: 92741 - RNA, 17 nt, Bovine leukemia virus
cuagugcucagcucucg

SEQ ID NO: 92742 - RNA, 14 nt, Bovine leukemia virus
cuugccuccugacc

SEQ ID NO: 92743 - RNA, 17 nt, Bovine leukemia virus
cugccagagaagcugcu

SEQ ID NO: 92744 - RNA, 19 nt, Bovine leukemia virus
cugccagagaagcugcuga

SEQ ID NO: 92745 - RNA, 15 nt, Bovine leukemia virus
gguccugagcucucu

SEQ ID NO: 92746 - RNA, 17 nt, Bovine leukemia virus
gcguucuccuccugaga

SEQ ID NO: 92747 - RNA, 21 nt, Bovine leukemia virus
gagacgucagcugccagagaa

SEQ ID NO: 92748 - RNA, 18 nt, Bovine leukemia virus
gaccucaccugcugauaa

SEQ ID NO: 92749 - RNA, 19 nt, Bovine leukemia virus
gacccuagugcucagcucu

SEQ ID NO: 92750 - RNA, 21 nt, Bovine leukemia virus
gaagcguucuccuccugagac

SEQ ID NO: 92751 - RNA, 22 nt, Bovine leukemia virus
gaagcguucuccuccugagacc

SEQ ID NO: 92752 - RNA, 21 nt, Bovine leukemia virus
agcucucgguccugagcucuc

SEQ ID NO: 92753 - RNA, 12 nt, Bovine leukemia virus
agcucucuugcu

SEQ ID NO: 92754 - RNA, 17 nt, Bovine leukemia virus
aucuccgguccucugac

SEQ ID NO: 92755 - RNA, 19 nt, Bovine leukemia virus
auccacacccugagcugcu

SEQ ID NO: 92756 - RNA, 22 nt, Bovine leukemia virus
auccacacccugagcugcugac

SEQ ID NO: 92757 - RNA, 14 nt, Bovine leukemia virus
acccugagcugcug

SEQ ID NO: 92758 - RNA, 17 nt, Bovine leukemia virus
acccugagcugcugacc

SEQ ID NO: 92759 - RNA, 17 nt, Bovine leukemia virus
acucucucucuugccuc

SEQ ID NO: 92760 - RNA, 23 nt, Bovine leukemia virus
acucucucucuugccuccugacc

SEQ ID NO: 92761 - RNA, 18 nt, Bovine leukemia virus
agaccgccgcgagcucua

SEQ ID NO: 92762 - RNA, 22 nt, Bovine leukemia virus
agaagcguucuccuccugagac

SEQ ID NO: 92763 - RNA, 23 nt, Bovine leukemia virus
agaagcguucuccuccugagacc

SEQ ID NO: 92764 - RNA, 19 nt, Bovine leukemia virus
cagagacgucagcugccag

SEQ ID NO: 92765 - RNA, 14 nt, Bovine leukemia virus
cccugagcugcuga

SEQ ID NO: 92766 - RNA, 15 nt, Bovine leukemia virus
ccugagacccuagug

SEQ ID NO: 92767 - RNA, 22 nt, Bovine leukemia virus
ccuccugagacccuagugcuca

SEQ ID NO: 92768 - RNA, 17 nt, Bovine leukemia virus
ccagagaagcugcugac

SEQ ID NO: 92769 - RNA, 23 nt, Bovine leukemia virus
gagggugguucucggcugagacc

SEQ ID NO: 92770 - RNA, 18 nt, Bovine leukemia virus
gaccgccgcgagcucuau

SEQ ID NO: 92771 - RNA, 11 nt, Bovine leukemia virus
gagcugcugac

SEQ ID NO: 92772 - RNA, 14 nt, Bovine leukemia virus
gagaagcugcugac

SEQ ID NO: 92773 - RNA, 18 nt, Bovine leukemia virus
cucagcucucgguccuga

SEQ ID NO: 92774 - RNA, 14 nt, Bovine leukemia virus
cugagacccuagug

SEQ ID NO: 92775 - RNA, 15 nt, Bovine leukemia virus
cugagcucucuugcu

SEQ ID NO: 92776 - RNA, 15 nt, Bovine leukemia virus
cucccgagaccuucu

SEQ ID NO: 92777 - RNA, 13 nt, Bovine leukemia virus
ggacucucucucu

SEQ ID NO: 92778 - RNA, 15 nt, Bovine leukemia virus
ggacucucucucuug

SEQ ID NO: 92779 - RNA, 19 nt, Bovine leukemia virus
ggacucucucucuugccuc

SEQ ID NO: 92780 - RNA, 20 nt, Bovine leukemia virus
gcugaccucaccugcugaua

SEQ ID NO: 92781 - RNA, 20 nt, Bovine leukemia virus
gucagguaaggcaaaccacg

SEQ ID NO: 92782 - RNA, 13 nt, Bovine leukemia virus
uaauaaaaugccg

SEQ ID NO: 92783 - RNA, 16 nt, Bovine leukemia virus
gugguucucggcugag

SEQ ID NO: 92784 - RNA, 12 nt, Bovine leukemia virus
ugagcugcugac

SEQ ID NO: 92785 - RNA, 20 nt, Bovine leukemia virus
ugcaggccuaggcgccgcca

SEQ ID NO: 92786 - RNA, 15 nt, Bovine leukemia virus
uccugagcucucuug

SEQ ID NO: 92787 - RNA, 22 nt, Bovine leukemia virus
uucuccuccugagacccuagug

SEQ ID NO: 92788 - RNA, 15 nt, Bovine leukemia virus
acacccugagcugcu

SEQ ID NO: 92789 - RNA, 15 nt, Bovine leukemia virus
agcucucgguccuga

SEQ ID NO: 92790 - RNA, 19 nt, Bovine leukemia virus
agcucucgguccugagcuc

SEQ ID NO: 92791 - RNA, 16 nt, Bovine leukemia virus
aucuccgguccucuga

SEQ ID NO: 92792 - RNA, 20 nt, Bovine leukemia virus
gcugccagagaagcugcuga

SEQ ID NO: 92793 - RNA, 19 nt, Bovine leukemia virus
gccagagaagcugcugacg

SEQ ID NO: 92794 - RNA, 12 nt, Bovine leukemia virus
gagcugcugacc

SEQ ID NO: 92795 - RNA, 11 nt, Bovine leukemia virus
gagcucucuug

SEQ ID NO: 92796 - RNA, 13 nt, Bovine leukemia virus
gagcucucuugcu

SEQ ID NO: 92797 - RNA, 13 nt, Bovine leukemia virus
gaagcugcugacg

SEQ ID NO: 92798 - RNA, 17 nt, Bovine leukemia virus
cuuucccgaaaaaucca

SEQ ID NO: 92799 - RNA, 18 nt, Bovine leukemia virus
caggccuaggcgccgcca

SEQ ID NO: 92800 - RNA, 23 nt, Bovine leukemia virus
ccagaagcguucuccuccugaga

SEQ ID NO: 92801 - RNA, 10 nt, Bovine leukemia virus
ccuccugacc

SEQ ID NO: 92802 - RNA, 12 nt, Bovine leukemia virus
ccuccugagacc

SEQ ID NO: 92803 - RNA, 21 nt, Bovine leukemia virus
cugguggcuagaauccccgua

SEQ ID NO: 92804 - RNA, 20 nt, Bovine leukemia virus
cugcugaccucaccugcuga

SEQ ID NO: 92805 - RNA, 23 nt, Bovine leukemia virus
cugcugaccucaccugcugauaa

SEQ ID NO: 92806 - RNA, 13 nt, Bovine leukemia virus
cucggcugagacc

SEQ ID NO: 92807 - RNA, 18 nt, Bovine leukemia virus
cgccgccaccgccccgua

SEQ ID NO: 92808 - RNA, 15 nt, Bovine leukemia virus
cgguccugagcucuc

SEQ ID NO: 92809 - RNA, 16 nt, Bovine leukemia virus
cgguccugagcucucu

SEQ ID NO: 92810 - RNA, 17 nt, Bovine leukemia virus
cgguccugagcucucuu

SEQ ID NO: 92811 - RNA, 15 nt, Bovine leukemia virus
ucgguccugagcucu

SEQ ID NO: 92812 - RNA, 22 nt, Bovine leukemia virus
ucgguccugagcucucuugcuc

SEQ ID NO: 92813 - RNA, 14 nt, Bovine leukemia virus
ucuccgguccucug

SEQ ID NO: 92814 - RNA, 18 nt, Bovine leukemia virus
ucucgguccugagcucuc

SEQ ID NO: 92815 - RNA, 16 nt, Bovine leukemia virus
uccacacccugagcug

SEQ ID NO: 92816 - RNA, 18 nt, Bovine leukemia virus
uccacacccugagcugcu

SEQ ID NO: 92817 - RNA, 21 nt, Bovine leukemia virus
uccacacccugagcugcugac

SEQ ID NO: 92818 - RNA, 15 nt, Bovine leukemia virus
guucuccuccugaga

SEQ ID NO: 92819 - RNA, 15 nt, Bovine leukemia virus
guucucggcugagac

SEQ ID NO: 92820 - RNA, 19 nt, Bovine leukemia virus
guggacucucucucuugcc

SEQ ID NO: 92821 - RNA, 16 nt, Bovine leukemia virus
ugccagagaagcugcu

SEQ ID NO: 92822 - RNA, 19 nt, Bovine leukemia virus
ugccagagaagcugcugac

SEQ ID NO: 92823 - RNA, 20 nt, Bovine leukemia virus
ugagaccgccgcgagcucua

SEQ ID NO: 92824 - RNA, 12 nt, Bovine leukemia virus
ccgcgagcucua

SEQ ID NO: 92825 - RNA, 17 nt, Bovine leukemia virus
ccacacccugagcugcu

SEQ ID NO: 92826 - RNA, 14 nt, Bovine leukemia virus
caugcaggccuagg

SEQ ID NO: 92827 - RNA, 23 nt, Bovine leukemia virus
cagacagagacgucagcugccag

SEQ ID NO: 92828 - RNA, 19 nt, Bovine leukemia virus
caggccuaggcgccgccac

SEQ ID NO: 92829 - RNA, 22 nt, Bovine leukemia virus
cagcucucgguccugagcucuc

SEQ ID NO: 92830 - RNA, 14 nt, Bovine leukemia virus
augccggcccuguc

SEQ ID NO: 92831 - RNA, 13 nt, Bovine leukemia virus
acacccugagcug

SEQ ID NO: 92832 - RNA, 21 nt, Bovine leukemia virus
acguggacucucucucuugcc

SEQ ID NO: 92833 - RNA, 16 nt, Bovine leukemia virus
accgccgcgagcucua

SEQ ID NO: 92834 - RNA, 15 nt, Bovine leukemia virus
gccccguaaaccaga

SEQ ID NO: 92835 - RNA, 20 nt, Bovine leukemia virus
gcugcugaccucaccugcug

SEQ ID NO: 92836 - RNA, 16 nt, Bovine leukemia virus
guucucggcugagacc

SEQ ID NO: 92837 - RNA, 21 nt, Bovine leukemia virus
cggcaccagaagcguucuccu

SEQ ID NO: 92838 - RNA, 12 nt, Bovine leukemia virus
cgcgagcucuau

SEQ ID NO: 92839 - RNA, 17 nt, Bovine leukemia virus
cugaccccgcgcuccaa

SEQ ID NO: 92840 - RNA, 17 nt, Bovine leukemia virus
cuauccggcagcgguca

SEQ ID NO: 92841 - RNA, 19 nt, Bovine leukemia virus
gaauccccguaccucccca

SEQ ID NO: 92842 - RNA, 16 nt, Bovine leukemia virus
gagucauuuguaugaa

SEQ ID NO: 92843 - RNA, 16 nt, Bovine leukemia virus
gacucucucucuugcc

SEQ ID NO: 92844 - RNA, 14 nt, Bovine leukemia virus
gacggcagcuggug

SEQ ID NO: 92845 - RNA, 21 nt, Bovine leukemia virus
gacggcagcugguggcuagaa

SEQ ID NO: 92846 - RNA, 15 nt, Bovine leukemia virus
ucuugccuccugacc

SEQ ID NO: 92847 - RNA, 16 nt, Bovine leukemia virus
ucucuugccuccugac

SEQ ID NO: 92848 - RNA, 19 nt, Bovine leukemia virus
ugagaccgccgcgagcucu

SEQ ID NO: 92849 - RNA, 22 nt, Bovine leukemia virus
ucagcugccagagaagcugcug

SEQ ID NO: 92850 - RNA, 23 nt, Bovine leukemia virus
ucagcugccagagaagcugcuga

SEQ ID NO: 92851 - RNA, 21 nt, Bovine leukemia virus
ucagcucucgguccugagcuc

SEQ ID NO: 92852 - RNA, 12 nt, Bovine leukemia virus
ucaccugcugau

SEQ ID NO: 92853 - RNA, 16 nt, Bovine leukemia virus
uggacucucucucuug

SEQ ID NO: 92854 - RNA, 21 nt, Bovine leukemia virus
ugcucagcucucgguccugag

SEQ ID NO: 92855 - RNA, 15 nt, Bunyamwera virus
ugggaucacuuggaa

SEQ ID NO: 92856 - RNA, 14 nt, Bunyamwera virus
uguaagcagggaug

SEQ ID NO: 92857 - RNA, 19 nt, Bunyamwera virus
uuauuaaaucaaaaauaau

SEQ ID NO: 92858 - RNA, 19 nt, Bunyamwera virus
uuaucucucuuucuuccca

SEQ ID NO: 92859 - RNA, 12 nt, Bunyamwera virus
uguggcaaaaau

SEQ ID NO: 92860 - RNA, 16 nt, Bunyamwera virus
ucagugaaccagagaa

SEQ ID NO: 92861 - RNA, 19 nt, Bunyamwera virus
ucauuguuaaauacauuca

SEQ ID NO: 92862 - RNA, 15 nt, Bunyamwera virus
uuggcugaaaagaau

SEQ ID NO: 92863 - RNA, 22 nt, Bunyamwera virus
uuuuuaaucgggcuaaagucau

SEQ ID NO: 92864 - RNA, 15 nt, Bunyamwera virus
gauaacagcauucaa

SEQ ID NO: 92865 - RNA, 19 nt, Bunyamwera virus
gauaacagcauucaaaaaa

SEQ ID NO: 92866 - RNA, 15 nt, Bunyamwera virus
gcaaucgggaucuac

SEQ ID NO: 92867 - RNA, 13 nt, Bunyamwera virus
gaaaagaauggga

SEQ ID NO: 92868 - RNA, 21 nt, Bunyamwera virus
cuuucuucccaggaucagaga

SEQ ID NO: 92869 - RNA, 15 nt, Bunyamwera virus
guuaaauacauucaa

SEQ ID NO: 92870 - RNA, 19 nt, Bunyamwera virus
uaaaucaaaaauaaucaac

SEQ ID NO: 92871 - RNA, 20 nt, Bunyamwera virus
uagugcagcugccagggacu

SEQ ID NO: 92872 - RNA, 17 nt, Bunyamwera virus
uacauucaaaauucaua

SEQ ID NO: 92873 - RNA, 15 nt, Bunyamwera virus
uaauuggacauucca

SEQ ID NO: 92874 - RNA, 21 nt, Bunyamwera virus
gcgcaaggaaauggaaccaaa

SEQ ID NO: 92875 - RNA, 18 nt, Bunyamwera virus
gcagcaacuuggacuguu

SEQ ID NO: 92876 - RNA, 16 nt, Bunyamwera virus
gcagagguacauggga

SEQ ID NO: 92877 - RNA, 15 nt, Bunyamwera virus
ggaagaaaaccaaug

SEQ ID NO: 92878 - RNA, 13 nt, Bunyamwera virus
gggcuaaagucau

SEQ ID NO: 92879 - RNA, 17 nt, Bunyamwera virus
aauuuucuuauguagga

SEQ ID NO: 92880 - RNA, 14 nt, Bunyamwera virus
acaaaguucagcgc

SEQ ID NO: 92881 - RNA, 14 nt, Bunyamwera virus
auucauauugacac

SEQ ID NO: 92882 - RNA, 15 nt, Bunyamwera virus
auuaauucauuguua

SEQ ID NO: 92883 - RNA, 14 nt, Bunyamwera virus
cacauugugucaaa

SEQ ID NO: 92884 - RNA, 15 nt, Bunyamwera virus
cagucugcacugaca

SEQ ID NO: 92885 - RNA, 16 nt, Bunyamwera virus
ccaauguuagugcagc

SEQ ID NO: 92886 - RNA, 16 nt, Bunyamwera virus
ugauaacagcauucaa

SEQ ID NO: 92887 - RNA, 17 nt, Bunyamwera virus
ugauaacagcauucaaa

SEQ ID NO: 92888 - RNA, 19 nt, Bunyamwera virus
ugcuaaauucggaaucaac

SEQ ID NO: 92889 - RNA, 12 nt, Bunyamwera virus
uguuagugcagc

SEQ ID NO: 92890 - RNA, 17 nt, Bunyamwera virus
uguuaucgguagcacac

SEQ ID NO: 92891 - RNA, 16 nt, Bunyamwera virus
uugacagaaguucagu

SEQ ID NO: 92892 - RNA, 20 nt, Bunyamwera virus
uucagcgcaaggaaauggaa

SEQ ID NO: 92893 - RNA, 18 nt, Bunyamwera virus
uuguuaaauacauucaaa

SEQ ID NO: 92894 - RNA, 22 nt, Bunyamwera virus
guucagcgcaaggaaauggaac

SEQ ID NO: 92895 - RNA, 14 nt, Bunyamwera virus
uaaauacauucaaa

SEQ ID NO: 92896 - RNA, 19 nt, Bunyamwera virus
uaauuggacauuccaaaag

SEQ ID NO: 92897 - RNA, 19 nt, Bunyamwera virus
uagaagcagcaacuuggac

SEQ ID NO: 92898 - RNA, 13 nt, Bunyamwera virus
ucaaaauucauau

SEQ ID NO: 92899 - RNA, 19 nt, Bunyamwera virus
cgcaaggaaauggaaccaa

SEQ ID NO: 92900 - RNA, 15 nt, Bunyamwera virus
cuauguggcaaaaau

SEQ ID NO: 92901 - RNA, 17 nt, Bunyamwera virus
cuguuaguaaauugaca

SEQ ID NO: 92902 - RNA, 23 nt, Bunyamwera virus
cuguuuuguuaucgguagcacac

SEQ ID NO: 92903 - RNA, 21 nt, Bunyamwera virus
gaaaaccaauguuagugcagc

SEQ ID NO: 92904 - RNA, 17 nt, Bunyamwera virus
gaagaaaaccaauguua

SEQ ID NO: 92905 - RNA, 15 nt, Bunyamwera virus
gaaauggaaccaaaa

SEQ ID NO: 92906 - RNA, 21 nt, Bunyamwera virus
aaagaaugggaucacuuggaa

SEQ ID NO: 92907 - RNA, 18 nt, Bunyamwera virus
gauaacagcauucaaaaa

SEQ ID NO: 92908 - RNA, 15 nt, Bunyamwera virus
aaauaccuugagaaa

SEQ ID NO: 92909 - RNA, 15 nt, Bunyamwera virus
gacauuccaaaagca

SEQ ID NO: 92910 - RNA, 19 nt, Bunyamwera virus
gacauuccaaaagcacuau

SEQ ID NO: 92911 - RNA, 20 nt, Bunyamwera virus
gcaaggaaauggaaccaaaa

SEQ ID NO: 92912 - RNA, 19 nt, Bunyamwera virus
gggaucuacaaaguucagc

SEQ ID NO: 92913 - RNA, 18 nt, Bunyamwera virus
ggcugaaaagaaugggau

SEQ ID NO: 92914 - RNA, 20 nt, Bunyamwera virus
agugaaccagagaaauugau

SEQ ID NO: 92915 - RNA, 20 nt, Bunyamwera virus
agcauucaaaaaaguacaau

SEQ ID NO: 92916 - RNA, 15 nt, Bunyamwera virus
auguaagcagggaug

SEQ ID NO: 92917 - RNA, 13 nt, Bunyamwera virus
auguuagugcagc

SEQ ID NO: 92918 - RNA, 13 nt, Bunyamwera virus
auuggacauucca

SEQ ID NO: 92919 - RNA, 18 nt, Bunyamwera virus
auuuaauuggacauucca

SEQ ID NO: 92920 - RNA, 21 nt, Bunyamwera virus
auuuaauuggacauuccaaaa

SEQ ID NO: 92921 - RNA, 14 nt, Bunyamwera virus
acagaaguucaguc

SEQ ID NO: 92922 - RNA, 15 nt, Bunyamwera virus
aauuggacauuccaa

SEQ ID NO: 92923 - RNA, 22 nt, Bunyamwera virus
aaugcggcagagguacauggga

SEQ ID NO: 92924 - RNA, 23 nt, Bunyamwera virus
aacagcauucaaaaaaguacaau

SEQ ID NO: 92925 - RNA, 13 nt, Bunyamwera virus
aaagcacuaugug

SEQ ID NO: 92926 - RNA, 16 nt, Bunyamwera virus
aaaaugauaacagcau

SEQ ID NO: 92927 - RNA, 22 nt, Bunyamwera virus
uuuaauuggacauuccaaaagc

SEQ ID NO: 92928 - RNA, 21 nt, Bunyamwera virus
ugguuggggacagaaagacag

SEQ ID NO: 92929 - RNA, 18 nt, Bunyamwera virus
uaacagcauucaaaaaag

SEQ ID NO: 92930 - RNA, 22 nt, Bunyamwera virus
uaguaaauugacagaaguucag

SEQ ID NO: 92931 - RNA, 15 nt, Bunyamwera virus
ucaaaaaaguacaau

SEQ ID NO: 92932 - RNA, 18 nt, Bunyamwera virus
ucaaaauucauauugaca

SEQ ID NO: 92933 - RNA, 17 nt, Bunyamwera virus
cuaaauucggaaucaac

SEQ ID NO: 92934 - RNA, 16 nt, Bunyamwera virus
gagaaauugauuauua

SEQ ID NO: 92935 - RNA, 17 nt, Bunyamwera virus
gaacuuucagauucuac

SEQ ID NO: 92936 - RNA, 13 nt, Bunyamwera virus
gaagaaaaccaau

SEQ ID NO: 92937 - RNA, 14 nt, Bunyamwera virus
gacagaaguucagu

SEQ ID NO: 92938 - RNA, 18 nt, Bunyamwera virus
cauuguuaaauacauuca

SEQ ID NO: 92939 - RNA, 14 nt, Bunyamwera virus
cauucaaaauucau

SEQ ID NO: 92940 - RNA, 17 nt, Bunyamwera virus
cauuccaaaagcacuau

SEQ ID NO: 92941 - RNA, 15 nt, Bunyamwera virus
caauguuagugcagc

SEQ ID NO: 92942 - RNA, 23 nt, Bunyamwera virus
caaaaaugauaacagcauucaaa

SEQ ID NO: 92943 - RNA, 14 nt, Bunyamwera virus
agacagcgggcuaa

SEQ ID NO: 92944 - RNA, 19 nt, Bunyamwera virus
auaccuugagaaaacaaug

SEQ ID NO: 92945 - RNA, 14 nt, Bunyamwera virus
agagguacauggga

SEQ ID NO: 92946 - RNA, 23 nt, Bunyamwera virus
agcuuagguuggaagaaaaccaa

SEQ ID NO: 92947 - RNA, 19 nt, Bunyamwera virus
aaaugauaacagcauucaa

SEQ ID NO: 92948 - RNA, 22 nt, Bunyamwera virus
gaugcauuuuuaaucgggcuaa

SEQ ID NO: 92949 - RNA, 19 nt, Bunyamwera virus
gcauucaaaaaaguacaau

SEQ ID NO: 92950 - RNA, 21 nt, Bunyamwera virus
guaagcagggaugcauuuuua

SEQ ID NO: 92951 - RNA, 22 nt, Bunyamwera virus
cuuaggaacuuucagauucuac

SEQ ID NO: 92952 - RNA, 19 nt, Bunyamwera virus
cuuagcaaucgggaucuac

SEQ ID NO: 92953 - RNA, 18 nt, Bunyamwera virus
cauucaaaaaaguacaau

SEQ ID NO: 92954 - RNA, 20 nt, Bunyamwera virus
uucauuguuaaauacauuca

SEQ ID NO: 92955 - RNA, 10 nt, Bunyamwera virus
uuagugcagc

SEQ ID NO: 92956 - RNA, 16 nt, Bunyamwera virus
uggaagaaaaccaaug

SEQ ID NO: 92957 - RNA, 20 nt, Bunyamwera virus
uggacuguuaguaaauugac

SEQ ID NO: 92958 - RNA, 14 nt, Bunyamwera virus
aauuggacauucca

SEQ ID NO: 92959 - RNA, 18 nt, Bunyamwera virus
aaugauaacagcauucaa

SEQ ID NO: 92960 - RNA, 16 nt, Bunyamwera virus
aaugggaucacuugga

SEQ ID NO: 92961 - RNA, 14 nt, Bunyamwera virus
uuucuucccaggau

SEQ ID NO: 92962 - RNA, 22 nt, Bunyamwera virus
uuucuucccaggaucagagaug

SEQ ID NO: 92963 - RNA, 12 nt, Bunyamwera virus
ugacacauugug

SEQ ID NO: 92964 - RNA, 15 nt, Bunyamwera virus
ugacagaaguucagu

SEQ ID NO: 92965 - RNA, 14 nt, Bunyamwera virus
ucuacaaaguucag

SEQ ID NO: 92966 - RNA, 23 nt, Bunyamwera virus
ucuacaaaguucagcgcaaggaa

SEQ ID NO: 92967 - RNA, 22 nt, Bunyamwera virus
ucaacccuuuggcugaaaagaa

SEQ ID NO: 92968 - RNA, 15 nt, Bunyamwera virus
ucaaaaauaaucaac

SEQ ID NO: 92969 - RNA, 22 nt, Bunyamwera virus
uccaaaagcacuauguggcaaa

SEQ ID NO: 92970 - RNA, 16 nt, Bunyamwera virus
gucugcacugacaguu

SEQ ID NO: 92971 - RNA, 16 nt, Bunyamwera virus
auuccaaaagcacuau

SEQ ID NO: 92972 - RNA, 17 nt, Bunyamwera virus
auugacagaaguucagu

SEQ ID NO: 92973 - RNA, 14 nt, Bunyamwera virus
caaaaauaaucaac

SEQ ID NO: 92974 - RNA, 14 nt, Bunyamwera virus
caaaaaugauaaca

SEQ ID NO: 92975 - RNA, 19 nt, Bunyamwera virus
caaaaaugauaacagcauu

SEQ ID NO: 92976 - RNA, 17 nt, Bunyamwera virus
acuguuaguaaauugac

SEQ ID NO: 92977 - RNA, 22 nt, Bunyamwera virus
aauucauauugacacauugugu

SEQ ID NO: 92978 - RNA, 10 nt, Bunyamwera virus
aaaaccaaug

SEQ ID NO: 92979 - RNA, 10 nt, Crimean-Congo hemorrhagic fever virus
aaacacuuaa

SEQ ID NO: 92980 - RNA, 23 nt, Crimean-Congo hemorrhagic fever virus
aaguaagacgguuuauaccgugc

SEQ ID NO: 92981 - RNA, 19 nt, Crimean-Congo hemorrhagic fever virus
auuucaauuguuauacugc

SEQ ID NO: 92982 - RNA, 17 nt, Crimean-Congo hemorrhagic fever virus
augcuuuuuuacuugcu

SEQ ID NO: 92983 - RNA, 16 nt, Crimean-Congo hemorrhagic fever virus
caauucucucaauuau

SEQ ID NO: 92984 - RNA, 18 nt, Crimean-Congo hemorrhagic fever virus
gucuaagugagucaauaa

SEQ ID NO: 92985 - RNA, 21 nt, Crimean-Congo hemorrhagic fever virus
gugugcacuacuuauaaccau

SEQ ID NO: 92986 - RNA, 18 nt, Crimean-Congo hemorrhagic fever virus
uacuuauaaccauuucaa

SEQ ID NO: 92987 - RNA, 19 nt, Crimean-Congo hemorrhagic fever virus
uacuuauaaccauuucaau

SEQ ID NO: 92988 - RNA, 13 nt, Crimean-Congo hemorrhagic fever virus
ucaguuucauuac

SEQ ID NO: 92989 - RNA, 19 nt, Crimean-Congo hemorrhagic fever virus
ucugaaccgccauccauaa

SEQ ID NO: 92990 - RNA, 14 nt, Crimean-Congo hemorrhagic fever virus
ugcuguucauguca

SEQ ID NO: 92991 - RNA, 19 nt, Crimean-Congo hemorrhagic fever virus
ugcuguucaugucaguuuc

SEQ ID NO: 92992 - RNA, 14 nt, Crimean-Congo hemorrhagic fever virus
uucaugucaguuuc

SEQ ID NO: 92993 - RNA, 14 nt, Crimean-Congo hemorrhagic fever virus
ccgugccauuugcu

SEQ ID NO: 92994 - RNA, 19 nt, Crimean-Congo hemorrhagic fever virus
cuuauaaccauuucaauug

SEQ ID NO: 92995 - RNA, 21 nt, Crimean-Congo hemorrhagic fever virus
cugucuaagugagucaauaau

SEQ ID NO: 92996 - RNA, 21 nt, Crimean-Congo hemorrhagic fever virus
cuaucuuugcuguucauguca

SEQ ID NO: 92997 - RNA, 19 nt, Crimean-Congo hemorrhagic fever virus
gccauccauaauugcaaua

SEQ ID NO: 92998 - RNA, 19 nt, Crimean-Congo hemorrhagic fever virus
gccuuuaccauacugguau

SEQ ID NO: 92999 - RNA, 10 nt, Crimean-Congo hemorrhagic fever virus
gaaccgccau

SEQ ID NO: 93000 - RNA, 11 nt, Crimean-Congo hemorrhagic fever virus
auacugcaauu

SEQ ID NO: 93001 - RNA, 17 nt, Crimean-Congo hemorrhagic fever virus
auacugguauucuacua

SEQ ID NO: 93002 - RNA, 18 nt, Crimean-Congo hemorrhagic fever virus
aucaugcuuuuuuacuug

SEQ ID NO: 93003 - RNA, 20 nt, Crimean-Congo hemorrhagic fever virus
auuucaauuguuauacugca

SEQ ID NO: 93004 - RNA, 22 nt, Crimean-Congo hemorrhagic fever virus
auuagccuuuaccauacuggua

SEQ ID NO: 93005 - RNA, 13 nt, Crimean-Congo hemorrhagic fever virus
ccauaauugcaau

SEQ ID NO: 93006 - RNA, 22 nt, Crimean-Congo hemorrhagic fever virus
gauaucuggaccauuaaccuag

SEQ ID NO: 93007 - RNA, 14 nt, Crimean-Congo hemorrhagic fever virus
cuuauuuuauuaac

SEQ ID NO: 93008 - RNA, 18 nt, Crimean-Congo hemorrhagic fever virus
cuuauuuuauuaaccuuu

SEQ ID NO: 93009 - RNA, 21 nt, Crimean-Congo hemorrhagic fever virus
cuguucaugucaguuucauua

SEQ ID NO: 93010 - RNA, 15 nt, Crimean-Congo hemorrhagic fever virus
ucaauuauucauuag

SEQ ID NO: 93011 - RNA, 16 nt, Crimean-Congo hemorrhagic fever virus
uacugcaauucucuca

SEQ ID NO: 93012 - RNA, 17 nt, Crimean-Congo hemorrhagic fever virus
uguuucaaggucaagua

SEQ ID NO: 93013 - RNA, 13 nt, Crimean-Congo hemorrhagic fever virus
uuaaacacuuaaa

SEQ ID NO: 93014 - RNA, 15 nt, Crimean-Congo hemorrhagic fever virus
uuguuauacugcaau

SEQ ID NO: 93015 - RNA, 15 nt, Crimean-Congo hemorrhagic fever virus
ucuaagugagucaau

SEQ ID NO: 93016 - RNA, 16 nt, Crimean-Congo hemorrhagic fever virus
ucuaagugagucaaua

SEQ ID NO: 93017 - RNA, 21 nt, Crimean-Congo hemorrhagic fever virus
ucaugucaguuucauuacuuc

SEQ ID NO: 93018 - RNA, 22 nt, Crimean-Congo hemorrhagic fever virus
uccaauguuucaaggucaagua

SEQ ID NO: 93019 - RNA, 19 nt, Crimean-Congo hemorrhagic fever virus
ugccauuugcugauaucug

SEQ ID NO: 93020 - RNA, 16 nt, Crimean-Congo hemorrhagic fever virus
auuguuauacugcaau

SEQ ID NO: 93021 - RNA, 17 nt, Crimean-Congo hemorrhagic fever virus
auuagccuuuaccauac

SEQ ID NO: 93022 - RNA, 14 nt, Crimean-Congo hemorrhagic fever virus
auuacuuccagggu

SEQ ID NO: 93023 - RNA, 18 nt, Crimean-Congo hemorrhagic fever virus
agccuuuaccauacuggu

SEQ ID NO: 93024 - RNA, 17 nt, Crimean-Congo hemorrhagic fever virus
auaauugcaauacuuaa

SEQ ID NO: 93025 - RNA, 17 nt, Crimean-Congo hemorrhagic fever virus
auacugcaauucucuca

SEQ ID NO: 93026 - RNA, 17 nt, Crimean-Congo hemorrhagic fever virus
auaccgugccauuugcu

SEQ ID NO: 93027 - RNA, 21 nt, Crimean-Congo hemorrhagic fever virus
auccauaauugcaauacuuaa

SEQ ID NO: 93028 - RNA, 22 nt, Crimean-Congo hemorrhagic fever virus
cucaacuuccuuccuucugaac

SEQ ID NO: 93029 - RNA, 20 nt, Crimean-Congo hemorrhagic fever virus
cucucaauuauucauuagcc

SEQ ID NO: 93030 - RNA, 22 nt, Crimean-Congo hemorrhagic fever virus
ccuagucggcuggugugcacua

SEQ ID NO: 93031 - RNA, 12 nt, Crimean-Congo hemorrhagic fever virus
caguuucauuac

SEQ ID NO: 93032 - RNA, 16 nt, Crimean-Congo hemorrhagic fever virus
ucaauuguuauacugc

SEQ ID NO: 93033 - RNA, 23 nt, Crimean-Congo hemorrhagic fever virus
ucaauuguuauacugcaauucuc

SEQ ID NO: 93034 - RNA, 19 nt, Crimean-Congo hemorrhagic fever virus
uauaccgugccauuugcug

SEQ ID NO: 93035 - RNA, 15 nt, Crimean-Congo hemorrhagic fever virus
uauacugcaauucuc

SEQ ID NO: 93036 - RNA, 12 nt, Crimean-Congo hemorrhagic fever virus
uauguaaccuua

SEQ ID NO: 93037 - RNA, 17 nt, Crimean-Congo hemorrhagic fever virus
ucuguacucaacuuccu

SEQ ID NO: 93038 - RNA, 14 nt, Crimean-Congo hemorrhagic fever virus
uacucaacuuccuu

SEQ ID NO: 93039 - RNA, 16 nt, Crimean-Congo hemorrhagic fever virus
uaaccuuauuuuauua

SEQ ID NO: 93040 - RNA, 16 nt, Crimean-Congo hemorrhagic fever virus
uguuuuaaacacuuaa

SEQ ID NO: 93041 - RNA, 17 nt, Crimean-Congo hemorrhagic fever virus
ugguauucuacuaucuu

SEQ ID NO: 93042 - RNA, 20 nt, Crimean-Congo hemorrhagic fever virus
ugcucuguacucaacuuccu

SEQ ID NO: 93043 - RNA, 12 nt, Crimean-Congo hemorrhagic fever virus
cauaauugcaau

SEQ ID NO: 93044 - RNA, 17 nt, Crimean-Congo hemorrhagic fever virus
cauccauaauugcaaua

SEQ ID NO: 93045 - RNA, 19 nt, Crimean-Congo hemorrhagic fever virus
aucuuugcuguucauguca

SEQ ID NO: 93046 - RNA, 13 nt, Crimean-Congo hemorrhagic fever virus
auugcaauacuua

SEQ ID NO: 93047 - RNA, 14 nt, Crimean-Congo hemorrhagic fever virus
caauuauucauuag

SEQ ID NO: 93048 - RNA, 22 nt, Crimean-Congo hemorrhagic fever virus
auacaaacugcucuguacucaa

SEQ ID NO: 93049 - RNA, 12 nt, Crimean-Congo hemorrhagic fever virus
auaaccauuuca

SEQ ID NO: 93050 - RNA, 13 nt, Crimean-Congo hemorrhagic fever virus
auacccuccaaug

SEQ ID NO: 93051 - RNA, 14 nt, Crimean-Congo hemorrhagic fever virus
auacccuccaaugu

SEQ ID NO: 93052 - RNA, 19 nt, Crimean-Congo hemorrhagic fever virus
uacuaucuuugcuguucau

SEQ ID NO: 93053 - RNA, 18 nt, Crimean-Congo hemorrhagic fever virus
uauacugcaauucucuca

SEQ ID NO: 93054 - RNA, 16 nt, Crimean-Congo hemorrhagic fever virus
cuuguuuuaaacacuu

SEQ ID NO: 93055 - RNA, 17 nt, Crimean-Congo hemorrhagic fever virus
cuuguuuuaaacacuua

SEQ ID NO: 93056 - RNA, 19 nt, Crimean-Congo hemorrhagic fever virus
cgccauccauaauugcaau

SEQ ID NO: 93057 - RNA, 14 nt, Crimean-Congo hemorrhagic fever virus
ugcaauucucucaa

SEQ ID NO: 93058 - RNA, 18 nt, Crimean-Congo hemorrhagic fever virus
ucuuugcuguucauguca

SEQ ID NO: 93059 - RNA, 11 nt, Crimean-Congo hemorrhagic fever virus
ugaaccgccau

SEQ ID NO: 93060 - RNA, 16 nt, Crimean-Congo hemorrhagic fever virus
ucuacuaucuuugcug

SEQ ID NO: 93061 - RNA, 16 nt, Crimean-Congo hemorrhagic fever virus
ugcuuuuuuacuugcu

SEQ ID NO: 93062 - RNA, 12 nt, Homo sapiens
uggacuuguccc

SEQ ID NO: 93063 - RNA, 17 nt, Homo sapiens
ucucaugaccaaaugcu

SEQ ID NO: 93064 - RNA, 11 nt, Homo sapiens
gccacaaccaa

SEQ ID NO: 93065 - RNA, 21 nt, Homo sapiens
gcauccagagucccugccugg

SEQ ID NO: 93066 - RNA, 16 nt, Homo sapiens
agaaaagcaguggcuc

SEQ ID NO: 93067 - RNA, 12 nt, Homo sapiens
cuucccacggcu

SEQ ID NO: 93068 - RNA, 23 nt, Homo sapiens
gucccagaaugccuccugcaggg

SEQ ID NO: 93069 - RNA, 16 nt, Homo sapiens
gucugggccacucagg

SEQ ID NO: 93070 - RNA, 23 nt, Homo sapiens
gaucauuaucagccugugccacg

SEQ ID NO: 93071 - RNA, 18 nt, Homo sapiens
uauuuaccuucuaccucu

SEQ ID NO: 93072 - RNA, 14 nt, Homo sapiens
acccuuaggccagc

SEQ ID NO: 93073 - RNA, 13 nt, Homo sapiens
auucuuccugcuu

SEQ ID NO: 93074 - RNA, 15 nt, Homo sapiens
ggacaacauccuuaa

SEQ ID NO: 93075 - RNA, 18 nt, Homo sapiens
ggcuguggccuaaccugc

SEQ ID NO: 93076 - RNA, 13 nt, Homo sapiens
ccucuccacucau

SEQ ID NO: 93077 - RNA, 21 nt, Homo sapiens
uagagcagccacaaccaaaaa

SEQ ID NO: 93078 - RNA, 16 nt, Homo sapiens
cuucuaguucugccag

SEQ ID NO: 93079 - RNA, 13 nt, Homo sapiens
augucucucauga

SEQ ID NO: 93080 - RNA, 14 nt, Homo sapiens
cagaaaacaaaaaa

SEQ ID NO: 93081 - RNA, 11 nt, Homo sapiens
gguucucaggc

SEQ ID NO: 93082 - RNA, 19 nt, Homo sapiens
cugagcagguguucuucau

SEQ ID NO: 93083 - RNA, 16 nt, Homo sapiens
cuuuccaaccggcuuu

SEQ ID NO: 93084 - RNA, 19 nt, Homo sapiens
gagcagccacaaccaaaaa

SEQ ID NO: 93085 - RNA, 19 nt, Homo sapiens
gcugggaauaagugccagg

SEQ ID NO: 93086 - RNA, 19 nt, Homo sapiens
acucaugugacucuuucca

SEQ ID NO: 93087 - RNA, 19 nt, Homo sapiens
cgauugcaggagucccugc

SEQ ID NO: 93088 - RNA, 15 nt, Homo sapiens
ugcuguauccaucca

SEQ ID NO: 93089 - RNA, 16 nt, Homo sapiens
aacaugcuugcauuau

SEQ ID NO: 93090 - RNA, 15 nt, Homo sapiens
acucgugucuggcac

SEQ ID NO: 93091 - RNA, 13 nt, Homo sapiens
uauccauccaugg

SEQ ID NO: 93092 - RNA, 22 nt, Homo sapiens
ccaucucuacugaaaguacaaa

SEQ ID NO: 93093 - RNA, 18 nt, Homo sapiens
acucagucuuuaaucuga

SEQ ID NO: 93094 - RNA, 13 nt, Homo sapiens
guguguguguaug

SEQ ID NO: 93095 - RNA, 13 nt, Homo sapiens
ccucgagauccca

SEQ ID NO: 93096 - RNA, 13 nt, Homo sapiens
cuuugucccagaa

SEQ ID NO: 93097 - RNA, 17 nt, Homo sapiens
agcuggguguguuggca

SEQ ID NO: 93098 - RNA, 13 nt, Homo sapiens
cugaaaguacaaa

SEQ ID NO: 93099 - RNA, 17 nt, Homo sapiens
acacucccacuuggcau

SEQ ID NO: 93100 - RNA, 16 nt, Homo sapiens
ucacugcuguagacau

SEQ ID NO: 93101 - RNA, 19 nt, Homo sapiens
agcaagucacuggccagug

SEQ ID NO: 93102 - RNA, 23 nt, Homo sapiens
agaucuuucaggacucuaccuca

SEQ ID NO: 93103 - RNA, 14 nt, Homo sapiens
uaaaauugugaugu

SEQ ID NO: 93104 - RNA, 18 nt, Homo sapiens
ucaugugacucuuuccaa

SEQ ID NO: 93105 - RNA, 22 nt, Homo sapiens
uccucaaagggagagagugcua

SEQ ID NO: 93106 - RNA, 20 nt, Homo sapiens
cugaccuggaaagaaaaagc

SEQ ID NO: 93107 - RNA, 17 nt, Homo sapiens
cauccauagcaccucca

SEQ ID NO: 93108 - RNA, 22 nt, Homo sapiens
acacuguucugaaagugacuca

SEQ ID NO: 93109 - RNA, 20 nt, Homo sapiens
ugagggugacuauggagcug

SEQ ID NO: 93110 - RNA, 15 nt, Homo sapiens
acuuggcaucauuca

SEQ ID NO: 93111 - RNA, 15 nt, Homo sapiens
cgggacaccuaggcu

SEQ ID NO: 93112 - RNA, 15 nt, Homo sapiens
uaccagcaucuccca

SEQ ID NO: 93113 - RNA, 19 nt, Homo sapiens
gaaggaggagucagggaga

SEQ ID NO: 93114 - RNA, 14 nt, Homo sapiens
aggagucagggaga

SEQ ID NO: 93115 - RNA, 17 nt, Homo sapiens
uggaccagccucuccac

SEQ ID NO: 93116 - RNA, 20 nt, Homo sapiens
acucaugugacucuuuccaa

SEQ ID NO: 93117 - RNA, 20 nt, Homo sapiens
ucccgggacaccuaggcuag

SEQ ID NO: 93118 - RNA, 17 nt, Homo sapiens
aaaucuagaagacuguc

SEQ ID NO: 93119 - RNA, 14 nt, Homo sapiens
ccuuugucccagaa

SEQ ID NO: 93120 - RNA, 20 nt, Homo sapiens
auagcaccuccacauaccug

SEQ ID NO: 93121 - RNA, 22 nt, Homo sapiens
ccugacccucaucuuucuucca

SEQ ID NO: 93122 - RNA, 18 nt, Homo sapiens
cagcccgggucaucugua

SEQ ID NO: 93123 - RNA, 23 nt, Homo sapiens
aaucugagaggccacagugcaau

SEQ ID NO: 93124 - RNA, 19 nt, Homo sapiens
caaaaaaaccucuaugcaa

SEQ ID NO: 93125 - RNA, 16 nt, Homo sapiens
uuucaaaaaaucugac

SEQ ID NO: 93126 - RNA, 20 nt, Homo sapiens
gaucaugccacuacacucca

SEQ ID NO: 93127 - RNA, 23 nt, Homo sapiens
aaaaaccucuaugcaaucugagu

SEQ ID NO: 93128 - RNA, 16 nt, Homo sapiens
gagaucccaacacugc

SEQ ID NO: 93129 - RNA, 14 nt, Homo sapiens
gcagggauucuucc

SEQ ID NO: 93130 - RNA, 16 nt, Homo sapiens
acaauccaucucucaa

SEQ ID NO: 93131 - RNA, 14 nt, Homo sapiens
ugccagcauuuccc

SEQ ID NO: 93132 - RNA, 22 nt, Homo sapiens
gcugaggccucucauuccagag

SEQ ID NO: 93133 - RNA, 17 nt, Homo sapiens
agagcugaacuauuaga

SEQ ID NO: 93134 - RNA, 15 nt, Homo sapiens
acaauccaucucuca

SEQ ID NO: 93135 - RNA, 23 nt, Homo sapiens
caguuuucaggaugauacacuau

SEQ ID NO: 93136 - RNA, 22 nt, Homo sapiens
acccuuaggccagcaccaucuc

SEQ ID NO: 93137 - RNA, 13 nt, Homo sapiens
aaccucuaugcaa

SEQ ID NO: 93138 - RNA, 13 nt, Homo sapiens
gauguguggacac

SEQ ID NO: 93139 - RNA, 14 nt, Homo sapiens
uacagaggacagua

SEQ ID NO: 93140 - RNA, 19 nt, Homo sapiens
gcaauaaccucaaagugac

SEQ ID NO: 93141 - RNA, 20 nt, Homo sapiens
uuaccuucuaccucuuggcu

SEQ ID NO: 93142 - RNA, 22 nt, Homo sapiens
ccuuuggacuugucccgggaca

SEQ ID NO: 93143 - RNA, 17 nt, Homo sapiens
gagcuccuuagccuuug

SEQ ID NO: 93144 - RNA, 20 nt, Homo sapiens
ucaaguaguguaucacagua

SEQ ID NO: 93145 - RNA, 21 nt, Homo sapiens
aguacguguuauuuuuuucaa

SEQ ID NO: 93146 - RNA, 18 nt, Homo sapiens
uuaaucugagaggccaca

SEQ ID NO: 93147 - RNA, 19 nt, Homo sapiens
aagacugucagcuuccaaa

SEQ ID NO: 93148 - RNA, 13 nt, Homo sapiens
uuuguuccaugag

SEQ ID NO: 93149 - RNA, 12 nt, Homo sapiens
ugucucucauga

SEQ ID NO: 93150 - RNA, 14 nt, Homo sapiens
cuaugcaaucugag

SEQ ID NO: 93151 - RNA, 17 nt, Homo sapiens
aggccagcaccaucucu

SEQ ID NO: 93152 - RNA, 18 nt, Homo sapiens
aaccucuaugcaaucuga

SEQ ID NO: 93153 - RNA, 13 nt, Homo sapiens
cccagcuacuuga

SEQ ID NO: 93154 - RNA, 16 nt, Homo sapiens
ugccuuggugugcugu

SEQ ID NO: 93155 - RNA, 14 nt, Homo sapiens
cucauuuuaacuca

SEQ ID NO: 93156 - RNA, 16 nt, Homo sapiens
caaagugacuauucag

SEQ ID NO: 93157 - RNA, 22 nt, Homo sapiens
ucaguuugcuagcagaaaucua

SEQ ID NO: 93158 - RNA, 16 nt, Homo sapiens
agccuccagguuuccu

SEQ ID NO: 93159 - RNA, 13 nt, Homo sapiens
cuccugcagggau

SEQ ID NO: 93160 - RNA, 22 nt, Homo sapiens
caugcuugcauuauauuuguaa

SEQ ID NO: 93161 - RNA, 17 nt, Homo sapiens
agucccugccaucaugu

SEQ ID NO: 93162 - RNA, 18 nt, Homo sapiens
agccuuggcucuacccug

SEQ ID NO: 93163 - RNA, 22 nt, Homo sapiens
uaugguaggaacugcugggcuu

SEQ ID NO: 93164 - RNA, 20 nt, Homo sapiens
uuguauuuaccuucuaccuc

SEQ ID NO: 93165 - RNA, 20 nt, Homo sapiens
uaagcugagcuccuuagccu

SEQ ID NO: 93166 - RNA, 12 nt, Homo sapiens
gaggaagggaca

SEQ ID NO: 93167 - RNA, 13 nt, Homo sapiens
ucucauuccagag

SEQ ID NO: 93168 - RNA, 16 nt, Homo sapiens
ucucccuccucugccc

SEQ ID NO: 93169 - RNA, 16 nt, Homo sapiens
ucaugugacucuuucc

SEQ ID NO: 93170 - RNA, 15 nt, Homo sapiens
gcuuuguggcacugg

SEQ ID NO: 93171 - RNA, 15 nt, Homo sapiens
aaagugacuauucag

SEQ ID NO: 93172 - RNA, 14 nt, Homo sapiens
guccaucagccucc

SEQ ID NO: 93173 - RNA, 15 nt, Homo sapiens
aggccagcaccaucu

SEQ ID NO: 93174 - RNA, 12 nt, Homo sapiens
gacuauggagcu

SEQ ID NO: 93175 - RNA, 20 nt, Homo sapiens
agggacaccaagccuuggcu

SEQ ID NO: 93176 - RNA, 17 nt, Homo sapiens
aucaacauuuguuccau

SEQ ID NO: 93177 - RNA, 16 nt, Homo sapiens
cuucagauuugccuua

SEQ ID NO: 93178 - RNA, 23 nt, Homo sapiens
acagacacucccacuuggcauca

SEQ ID NO: 93179 - RNA, 17 nt, Homo sapiens
cuuuuguuuaccagaga

SEQ ID NO: 93180 - RNA, 16 nt, Homo sapiens
uaugugggggucugug

SEQ ID NO: 93181 - RNA, 14 nt, Homo sapiens
gccuggugcagugg

SEQ ID NO: 93182 - RNA, 19 nt, Homo sapiens
guguucuucauuaccucag

SEQ ID NO: 93183 - RNA, 16 nt, Homo sapiens
caacauccuuaaguca

SEQ ID NO: 93184 - RNA, 16 nt, Homo sapiens
cagacuucccacggcu

SEQ ID NO: 93185 - RNA, 20 nt, Homo sapiens
auucacagcaagucacuggc

SEQ ID NO: 93186 - RNA, 18 nt, Homo sapiens
aagggacaccaagccuug

SEQ ID NO: 93187 - RNA, 15 nt, Homo sapiens
ugugacucuuuccaa

SEQ ID NO: 93188 - RNA, 17 nt, Homo sapiens
acauccuuaagucaaaa

SEQ ID NO: 93189 - RNA, 17 nt, Homo sapiens
uucuuccaaacaggcuc

SEQ ID NO: 93190 - RNA, 19 nt, Homo sapiens
cucacaccuguaaucccaa

SEQ ID NO: 93191 - RNA, 13 nt, Homo sapiens
gcacagccuggcu

SEQ ID NO: 93192 - RNA, 23 nt, Homo sapiens
cuuaucaacauuuguuccaugag

SEQ ID NO: 93193 - RNA, 14 nt, Homo sapiens
guuugcuagcagaa

SEQ ID NO: 93194 - RNA, 13 nt, Homo sapiens
aagugacuauuca

SEQ ID NO: 93195 - RNA, 21 nt, Homo sapiens
cuucccacggcuccucgagau

SEQ ID NO: 93196 - RNA, 19 nt, Homo sapiens
uccggccuccugucccuca

SEQ ID NO: 93197 - RNA, 16 nt, Homo sapiens
uuguauuuaccuucua

SEQ ID NO: 93198 - RNA, 15 nt, Homo sapiens
accuuuccugaggaa

SEQ ID NO: 93199 - RNA, 11 nt, Homo sapiens
cagcauuuccc

SEQ ID NO: 93200 - RNA, 20 nt, Homo sapiens
ccgggucaucuguaccucug

SEQ ID NO: 93201 - RNA, 23 nt, Homo sapiens
auccuacccccugugccuuguca

SEQ ID NO: 93202 - RNA, 17 nt, Homo sapiens
ugagcuggggaugucuc

SEQ ID NO: 93203 - RNA, 17 nt, Homo sapiens
aucugagaggccacagu

SEQ ID NO: 93204 - RNA, 19 nt, Homo sapiens
ccuacccccugugccuugu

SEQ ID NO: 93205 - RNA, 10 nt, Homo sapiens
ucccaugagc

SEQ ID NO: 93206 - RNA, 16 nt, Homo sapiens
uaaucugagaggccac

SEQ ID NO: 93207 - RNA, 21 nt, Homo sapiens
gccuccuuuccccucccucag

SEQ ID NO: 93208 - RNA, 23 nt, Homo sapiens
gcugagcagguguucuucauuac

SEQ ID NO: 93209 - RNA, 16 nt, Homo sapiens
ggauguaccagcaucu

SEQ ID NO: 93210 - RNA, 14 nt, Homo sapiens
aaccggcuuugugg

SEQ ID NO: 93211 - RNA, 14 nt, Homo sapiens
gaaggcuaugggga

SEQ ID NO: 93212 - RNA, 19 nt, Homo sapiens
aacacacacuguucugaaa

SEQ ID NO: 93213 - RNA, 23 nt, Homo sapiens
ucuguguguguguaugugggggu

SEQ ID NO: 93214 - RNA, 23 nt, Homo sapiens
uaugagcuggggaugucucucau

SEQ ID NO: 93215 - RNA, 18 nt, Homo sapiens
ugggcaggguacagacac

SEQ ID NO: 93216 - RNA, 14 nt, Homo sapiens
ccacaaccaaaaaa

SEQ ID NO: 93217 - RNA, 16 nt, Homo sapiens
aaaaccucuaugcaau

SEQ ID NO: 93218 - RNA, 14 nt, Homo sapiens
ccaucucuacugaa

SEQ ID NO: 93219 - RNA, 14 nt, Homo sapiens
gaccaaaacaaaca

SEQ ID NO: 93220 - RNA, 11 nt, Homo sapiens
cuaugguucuc

SEQ ID NO: 93221 - RNA, 19 nt, Homo sapiens
acaaccucauuuuaacuca

SEQ ID NO: 93222 - RNA, 21 nt, Homo sapiens
gguacagacacucccacuugg

SEQ ID NO: 93223 - RNA, 12 nt, Homo sapiens
cagcugggacac

SEQ ID NO: 93224 - RNA, 16 nt, Homo sapiens
augugacucuuuccaa

SEQ ID NO: 93225 - RNA, 19 nt, Homo sapiens
uguauccauccauggggcu

SEQ ID NO: 93226 - RNA, 14 nt, Homo sapiens
ugugauguguccug

SEQ ID NO: 93227 - RNA, 17 nt, Homo sapiens
caaugguuaacaucuuc

SEQ ID NO: 93228 - RNA, 23 nt, Homo sapiens
uaccuccuaauuccacacccuca

SEQ ID NO: 93229 - RNA, 14 nt, Homo sapiens
gagccugacccuca

SEQ ID NO: 93230 - RNA, 14 nt, Homo sapiens
gguagguugggaga

SEQ ID NO: 93231 - RNA, 13 nt, Homo sapiens
gagaaugucagua

SEQ ID NO: 93232 - RNA, 23 nt, Homo sapiens
uuggcagcucuacucuggagguu

SEQ ID NO: 93233 - RNA, 11 nt, Homo sapiens
cucucucauga

SEQ ID NO: 93234 - RNA, 15 nt, Homo sapiens
uuucccaacaccucu

SEQ ID NO: 93235 - RNA, 16 nt, Homo sapiens
gccugggggauguacc

SEQ ID NO: 93236 - RNA, 20 nt, Homo sapiens
gccuugucacgccagacuuc

SEQ ID NO: 93237 - RNA, 20 nt, Homo sapiens
gagugggguagguugggaga

SEQ ID NO: 93238 - RNA, 15 nt, Homo sapiens
gaaggaauuauuccc

SEQ ID NO: 93239 - RNA, 13 nt, Homo sapiens
uccccucccucag

SEQ ID NO: 93240 - RNA, 13 nt, Homo sapiens
gacuguagaagaa

SEQ ID NO: 93241 - RNA, 22 nt, Homo sapiens
ucuucuauggguuggacaaccu

SEQ ID NO: 93242 - RNA, 20 nt, Homo sapiens
uccggccuccugucccucau

SEQ ID NO: 93243 - RNA, 20 nt, Homo sapiens
cuacuccuuguaaagacugu

SEQ ID NO: 93244 - RNA, 17 nt, Homo sapiens
uccuuuccccucccuca

SEQ ID NO: 93245 - RNA, 14 nt, Homo sapiens
aggggcucucucau

SEQ ID NO: 93246 - RNA, 16 nt, Homo sapiens
agccacaaccaaaaaa

SEQ ID NO: 93247 - RNA, 14 nt, Homo sapiens
ucuucauuaccuca

SEQ ID NO: 93248 - RNA, 12 nt, Homo sapiens
uuauaaucuacu

SEQ ID NO: 93249 - RNA, 15 nt, Homo sapiens
uacaacacacacugu

SEQ ID NO: 93250 - RNA, 15 nt, Homo sapiens
ucucuuuaccuccua

SEQ ID NO: 93251 - RNA, 18 nt, Homo sapiens
ccagaggucuggcccuau

SEQ ID NO: 93252 - RNA, 21 nt, Homo sapiens
gcuccccacgucagcugggac

SEQ ID NO: 93253 - RNA, 16 nt, Homo sapiens
cucaggggucauucau

SEQ ID NO: 93254 - RNA, 14 nt, Homo sapiens
cucaucaggccauu

SEQ ID NO: 93255 - RNA, 15 nt, Homo sapiens
uucagauuugccuua

SEQ ID NO: 93256 - RNA, 11 nt, Homo sapiens
cccugccauca

SEQ ID NO: 93257 - RNA, 22 nt, Homo sapiens
aaaaaccucuaugcaaucugag

SEQ ID NO: 93258 - RNA, 15 nt, Homo sapiens
aucccaugagcuccu

SEQ ID NO: 93259 - RNA, 19 nt, Homo sapiens
ugucacgccagacuuccca

SEQ ID NO: 93260 - RNA, 13 nt, Homo sapiens
auucacagcaagu

SEQ ID NO: 93261 - RNA, 20 nt, Homo sapiens
cugugccuuggugugcugua

SEQ ID NO: 93262 - RNA, 16 nt, Homo sapiens
acucaggggucauuca

SEQ ID NO: 93263 - RNA, 12 nt, Homo sapiens
ucuucauuaccu

SEQ ID NO: 93264 - RNA, 23 nt, Homo sapiens
ugugaaggaauuauucccaugag

SEQ ID NO: 93265 - RNA, 14 nt, Homo sapiens
cuucauuaccucag

SEQ ID NO: 93266 - RNA, 23 nt, Homo sapiens
caucucuuuaccuccuaauucca

SEQ ID NO: 93267 - RNA, 13 nt, Homo sapiens
gugucacccuuag

SEQ ID NO: 93268 - RNA, 20 nt, Homo sapiens
cauuaucagccugugccacg

SEQ ID NO: 93269 - RNA, 17 nt, Homo sapiens
agcaucucccaguucau

SEQ ID NO: 93270 - RNA, 14 nt, Homo sapiens
uuuucucaugauga

SEQ ID NO: 93271 - RNA, 15 nt, Homo sapiens
aaaugcuuuuccuca

SEQ ID NO: 93272 - RNA, 20 nt, Homo sapiens
gaccaaaugcuuuuccucaa

SEQ ID NO: 93273 - RNA, 13 nt, Homo sapiens
gaagagaagggca

SEQ ID NO: 93274 - RNA, 17 nt, Homo sapiens
agagggcugccuuugga

SEQ ID NO: 93275 - RNA, 14 nt, Homo sapiens
uguauccauccaug

SEQ ID NO: 93276 - RNA, 20 nt, Homo sapiens
acucacuuaucccaagagaa

SEQ ID NO: 93277 - RNA, 15 nt, Homo sapiens
aucauuaucagccug

SEQ ID NO: 93278 - RNA, 17 nt, Homo sapiens
accucuuggcugccuug

SEQ ID NO: 93279 - RNA, 20 nt, Homo sapiens
gggaggcagagguugcagug

SEQ ID NO: 93280 - RNA, 14 nt, Homo sapiens
gcaagucacuggcc

SEQ ID NO: 93281 - RNA, 18 nt, Homo sapiens
augagcuccuuaaggcuc

SEQ ID NO: 93282 - RNA, 13 nt, Homo sapiens
agucauccucaga

SEQ ID NO: 93283 - RNA, 20 nt, Homo sapiens
uacuugagaggcugaggcaa

SEQ ID NO: 93284 - RNA, 20 nt, Homo sapiens
ucuucauuaccucagugaga

SEQ ID NO: 93285 - RNA, 16 nt, Homo sapiens
ucuuuugucccagaaa

SEQ ID NO: 93286 - RNA, 21 nt, Homo sapiens
caugagcuccuuaaggcucuu

SEQ ID NO: 93287 - RNA, 23 nt, Homo sapiens
cucagaucauuaucagccugugc

SEQ ID NO: 93288 - RNA, 16 nt, Homo sapiens
caaaugcuuuuccuca

SEQ ID NO: 93289 - RNA, 19 nt, Homo sapiens
ugaacuauuagagcugccu

SEQ ID NO: 93290 - RNA, 18 nt, Homo sapiens
auucacagcaagucacug

SEQ ID NO: 93291 - RNA, 15 nt, Homo sapiens
cuuccucuccugucu

SEQ ID NO: 93292 - RNA, 16 nt, Homo sapiens
gaugauacacuaugaa

SEQ ID NO: 93293 - RNA, 15 nt, Homo sapiens
cuauucaguuuucag

SEQ ID NO: 93294 - RNA, 16 nt, Homo sapiens
ugacucacuuauccca

SEQ ID NO: 93295 - RNA, 20 nt, Homo sapiens
ugagcuggggaugucucuca

SEQ ID NO: 93296 - RNA, 17 nt, Homo sapiens
auucuuucccaacaccu

SEQ ID NO: 93297 - RNA, 20 nt, Homo sapiens
agguguucuucauuaccuca

SEQ ID NO: 93298 - RNA, 16 nt, Homo sapiens
gaggccucucauucca

SEQ ID NO: 93299 - RNA, 19 nt, Homo sapiens
caguggcuggaucugugag

SEQ ID NO: 93300 - RNA, 17 nt, Homo sapiens
cuucauuaccucaguga

SEQ ID NO: 93301 - RNA, 16 nt, Homo sapiens
ugucccagaaugccuc

SEQ ID NO: 93302 - RNA, 14 nt, Homo sapiens
ucagaucauuauca

SEQ ID NO: 93303 - RNA, 13 nt, Homo sapiens
auuauucccauga

SEQ ID NO: 93304 - RNA, 18 nt, Homo sapiens
uagcaccuccacauaccu

SEQ ID NO: 93305 - RNA, 13 nt, Homo sapiens
guggcauccagag

SEQ ID NO: 93306 - RNA, 18 nt, Homo sapiens
ucucuacugaaaguacaa

SEQ ID NO: 93307 - RNA, 11 nt, Homo sapiens
uuuaugguucu

SEQ ID NO: 93308 - RNA, 14 nt, Homo sapiens
aggagggaggugcu

SEQ ID NO: 93309 - RNA, 21 nt, Homo sapiens
ugucccagaaugccuccugca

SEQ ID NO: 93310 - RNA, 19 nt, Homo sapiens
aucucuacugaaaguacaa

SEQ ID NO: 93311 - RNA, 18 nt, Homo sapiens
uggaagugugggucugug

SEQ ID NO: 93312 - RNA, 15 nt, Homo sapiens
augcuugcauuauau

SEQ ID NO: 93313 - RNA, 16 nt, Homo sapiens
ugaggggcucucucau

SEQ ID NO: 93314 - RNA, 14 nt, Homo sapiens
agacuugguuucaa

SEQ ID NO: 93315 - RNA, 17 nt, Homo sapiens
ccuuuccccucccucag

SEQ ID NO: 93316 - RNA, 20 nt, Homo sapiens
gaagaaagagcaacaaucca

SEQ ID NO: 93317 - RNA, 13 nt, Homo sapiens
ccuuuugccaucc

SEQ ID NO: 93318 - RNA, 15 nt, Homo sapiens
uaccuucuaccucuu

SEQ ID NO: 93319 - RNA, 20 nt, Homo sapiens
acacucccacuuggcaucau

SEQ ID NO: 93320 - RNA, 21 nt, Homo sapiens
ggcacagccuggcuguggccu

SEQ ID NO: 93321 - RNA, 16 nt, Homo sapiens
agagucccugccugga

SEQ ID NO: 93322 - RNA, 17 nt, Homo sapiens
ggccuccugucccucau

SEQ ID NO: 93323 - RNA, 20 nt, Homo sapiens
cuuccaaacauuaaugcaau

SEQ ID NO: 93324 - RNA, 16 nt, Homo sapiens
ccacacccucacugcu

SEQ ID NO: 93325 - RNA, 21 nt, Homo sapiens
auccuacccccugugccuugu

SEQ ID NO: 93326 - RNA, 17 nt, Homo sapiens
aagacuuaucaacauuu

SEQ ID NO: 93327 - RNA, 14 nt, Homo sapiens
caaaaaaucugacc

SEQ ID NO: 93328 - RNA, 16 nt, Homo sapiens
agcaagucacuggcca

SEQ ID NO: 93329 - RNA, 19 nt, Homo sapiens
cugucccucauccauagca

SEQ ID NO: 93330 - RNA, 20 nt, Homo sapiens
ggaccagccucuccacucau

SEQ ID NO: 93331 - RNA, 19 nt, Homo sapiens
gaaaagcaguggcuccauu

SEQ ID NO: 93332 - RNA, 13 nt, Homo sapiens
aguaaguacgugu

SEQ ID NO: 93333 - RNA, 20 nt, Homo sapiens
ggcagagguugcaguguggu

SEQ ID NO: 93334 - RNA, 22 nt, Homo sapiens
gggccacucaggggucauucau

SEQ ID NO: 93335 - RNA, 20 nt, Homo sapiens
gcuccauugguguugacaua

SEQ ID NO: 93336 - RNA, 17 nt, Homo sapiens
gaagugugggucugugu

SEQ ID NO: 93337 - RNA, 23 nt, Homo sapiens
ggagugaggaugucugggccacu

SEQ ID NO: 93338 - RNA, 12 nt, Homo sapiens
gccagacuuccc

SEQ ID NO: 93339 - RNA, 13 nt, Homo sapiens
ccacaaccaaaaa

SEQ ID NO: 93340 - RNA, 21 nt, Homo sapiens
aaucugaccaaaacaaacaaa

SEQ ID NO: 93341 - RNA, 21 nt, Homo sapiens
agcaccaucucuuuaccuccu

SEQ ID NO: 93342 - RNA, 17 nt, Homo sapiens
ccuaauuccacacccuc

SEQ ID NO: 93343 - RNA, 12 nt, Homo sapiens
guuuaccagaga

SEQ ID NO: 93344 - RNA, 23 nt, Homo sapiens
guguucuucauuaccucagugag

SEQ ID NO: 93345 - RNA, 20 nt, Homo sapiens
ggcugaggccucucauucca

SEQ ID NO: 93346 - RNA, 15 nt, Homo sapiens
augugacucuuucca

SEQ ID NO: 93347 - RNA, 17 nt, Homo sapiens
gggcugaggccucucau

SEQ ID NO: 93348 - RNA, 18 nt, Homo sapiens
uggggaugucucucauga

SEQ ID NO: 93349 - RNA, 19 nt, Homo sapiens
acuccuuguaaagacugua

SEQ ID NO: 93350 - RNA, 15 nt, Homo sapiens
cccaucucuacugaa

SEQ ID NO: 93351 - RNA, 13 nt, Homo sapiens
cuaccucuuggcu

SEQ ID NO: 93352 - RNA, 19 nt, Homo sapiens
caccaucucuuuaccuccu

SEQ ID NO: 93353 - RNA, 12 nt, Homo sapiens
auuauucccaug

SEQ ID NO: 93354 - RNA, 16 nt, Homo sapiens
gccuccugucccucau

SEQ ID NO: 93355 - RNA, 12 nt, Homo sapiens
uaaagacuguag

SEQ ID NO: 93356 - RNA, 18 nt, Homo sapiens
uauuagagcugccugugc

SEQ ID NO: 93357 - RNA, 15 nt, Homo sapiens
uagccuuugucccag

SEQ ID NO: 93358 - RNA, 17 nt, Homo sapiens
gcaucucccaguucaua

SEQ ID NO: 93359 - RNA, 21 nt, Homo sapiens
uguggggagggauuuggggcu

SEQ ID NO: 93360 - RNA, 22 nt, Homo sapiens
uauguggaagugugggucugug

SEQ ID NO: 93361 - RNA, 13 nt, Homo sapiens
agaucccaacacu

SEQ ID NO: 93362 - RNA, 19 nt, Homo sapiens
aaaacuucaguaaguacgu

SEQ ID NO: 93363 - RNA, 18 nt, Homo sapiens
auauaaacaugcuugcau

SEQ ID NO: 93364 - RNA, 12 nt, Homo sapiens
gacuuaucaaca

SEQ ID NO: 93365 - RNA, 13 nt, Homo sapiens
auuuaugugaugg

SEQ ID NO: 93366 - RNA, 18 nt, Homo sapiens
aucaacauuuguuccaug

SEQ ID NO: 93367 - RNA, 17 nt, Homo sapiens
ugauaagcugagcuccu

SEQ ID NO: 93368 - RNA, 18 nt, Homo sapiens
gacucuuuccaaccggcu

SEQ ID NO: 93369 - RNA, 20 nt, Homo sapiens
ugaccaaaacaaacaaacag

SEQ ID NO: 93370 - RNA, 21 nt, Homo sapiens
cauucuuucccaacaccucuu

SEQ ID NO: 93371 - RNA, 12 nt, Homo sapiens
ccucucauucca

SEQ ID NO: 93372 - RNA, 13 nt, Homo sapiens
ccuuaaggcucuu

SEQ ID NO: 93373 - RNA, 23 nt, Homo sapiens
agcccgggucaucuguaccucug

SEQ ID NO: 93374 - RNA, 21 nt, Homo sapiens
uccagguuuccuuaagggaca

SEQ ID NO: 93375 - RNA, 12 nt, Homo sapiens
ucaucaggccau

SEQ ID NO: 93376 - RNA, 13 nt, Homo sapiens
agauuugccuuau

SEQ ID NO: 93377 - RNA, 15 nt, Homo sapiens
aaacauuaaugcaau

SEQ ID NO: 93378 - RNA, 16 nt, Homo sapiens
uggggaugucucucau

SEQ ID NO: 93379 - RNA, 18 nt, Homo sapiens
aagauguuucaaaaaauc

SEQ ID NO: 93380 - RNA, 20 nt, Homo sapiens
uaccuggcccugugccuugg

SEQ ID NO: 93381 - RNA, 23 nt, Homo sapiens
cuccacucaugugacucuuucca

SEQ ID NO: 93382 - RNA, 15 nt, Homo sapiens
agcuccuuaaggcuc

SEQ ID NO: 93383 - RNA, 20 nt, Homo sapiens
aacccuucagauuugccuua

SEQ ID NO: 93384 - RNA, 14 nt, Homo sapiens
aaggcucuuuugua

SEQ ID NO: 93385 - RNA, 17 nt, Homo sapiens
cuccucgagaucccaac

SEQ ID NO: 93386 - RNA, 16 nt, Homo sapiens
cagagucccugccugg

SEQ ID NO: 93387 - RNA, 23 nt, Homo sapiens
cucaucaggccauugucccugaa

SEQ ID NO: 93388 - RNA, 22 nt, Homo sapiens
agcucaggaaccgaggcaggga

SEQ ID NO: 93389 - RNA, 16 nt, Homo sapiens
acccagcuaugguucu

SEQ ID NO: 93390 - RNA, 22 nt, Homo sapiens
ccgacuuuuguuuaccagagaa

SEQ ID NO: 93391 - RNA, 16 nt, Homo sapiens
guucuucauuaccuca

SEQ ID NO: 93392 - RNA, 14 nt, Homo sapiens
uaugguucucaggc

SEQ ID NO: 93393 - RNA, 21 nt, Homo sapiens
auuguauuuaccuucuaccuc

SEQ ID NO: 93394 - RNA, 20 nt, Homo sapiens
cuggaucugugaggggcucu

SEQ ID NO: 93395 - RNA, 19 nt, Homo sapiens
gauuuuuaugccaccugaa

SEQ ID NO: 93396 - RNA, 18 nt, Homo sapiens
cugucagcuuccaaacau

SEQ ID NO: 93397 - RNA, 19 nt, Homo sapiens
ucauguuuacagaggacag

SEQ ID NO: 93398 - RNA, 13 nt, Homo sapiens
gcagcucuacucu

SEQ ID NO: 93399 - RNA, 19 nt, Homo sapiens
accgaggcagggaaggauc

SEQ ID NO: 93400 - RNA, 14 nt, Homo sapiens
uggcccuaugcuuc

SEQ ID NO: 93401 - RNA, 23 nt, Homo sapiens
cacaacccuucagauuugccuua

SEQ ID NO: 93402 - RNA, 19 nt, Homo sapiens
cagggcugaggccucucau

SEQ ID NO: 93403 - RNA, 22 nt, Homo sapiens
gugaggaugucugggccacuca

SEQ ID NO: 93404 - RNA, 15 nt, Homo sapiens
uggcuggaucuguga

SEQ ID NO: 93405 - RNA, 20 nt, Homo sapiens
acaaaaaaaccucuaugcaa

SEQ ID NO: 93406 - RNA, 16 nt, Homo sapiens
augaaauugcugaaag

SEQ ID NO: 93407 - RNA, 14 nt, Homo sapiens
agagagugcuauug

SEQ ID NO: 93408 - RNA, 17 nt, Homo sapiens
uccaacauuaaaagcca

SEQ ID NO: 93409 - RNA, 22 nt, Homo sapiens
auccauagcaccuccacauacc

SEQ ID NO: 93410 - RNA, 19 nt, Homo sapiens
ccacucaggggucauucau

SEQ ID NO: 93411 - RNA, 19 nt, Homo sapiens
aagggacaccaagccuugg

SEQ ID NO: 93412 - RNA, 16 nt, Homo sapiens
gggcucagaguggggu

SEQ ID NO: 93413 - RNA, 14 nt, Homo sapiens
ucccucauccauag

SEQ ID NO: 93414 - RNA, 14 nt, Homo sapiens
gagagagugcuauu

SEQ ID NO: 93415 - RNA, 12 nt, Homo sapiens
ucagauuugccu

SEQ ID NO: 93416 - RNA, 17 nt, Homo sapiens
ugccuuuggacuugucc

SEQ ID NO: 93417 - RNA, 18 nt, Homo sapiens
gugccuuggugugcugua

SEQ ID NO: 93418 - RNA, 21 nt, Homo sapiens
ucugugaggggcucucucaug

SEQ ID NO: 93419 - RNA, 23 nt, Homo sapiens
cagcacguguggccuguucuucu

SEQ ID NO: 93420 - RNA, 22 nt, Homo sapiens
cugcuccccacgucagcuggga

SEQ ID NO: 93421 - RNA, 16 nt, Homo sapiens
agaucgcaguuugccu

SEQ ID NO: 93422 - RNA, 13 nt, Homo sapiens
auguuucaaaaaa

SEQ ID NO: 93423 - RNA, 20 nt, Homo sapiens
gaagauguuucaaaaaaucu

SEQ ID NO: 93424 - RNA, 17 nt, Homo sapiens
ccccugugccuugucac

SEQ ID NO: 93425 - RNA, 14 nt, Homo sapiens
cucacuuaucccaa

SEQ ID NO: 93426 - RNA, 16 nt, Homo sapiens
cacgagaucaagagau

SEQ ID NO: 93427 - RNA, 20 nt, Homo sapiens
ucuaccucuuggcugccuug

SEQ ID NO: 93428 - RNA, 21 nt, Homo sapiens
cuacccccugugccuugucac

SEQ ID NO: 93429 - RNA, 16 nt, Homo sapiens
guguuggcacaugccu

SEQ ID NO: 93430 - RNA, 12 nt, Homo sapiens
cauugguguuga

SEQ ID NO: 93431 - RNA, 12 nt, Homo sapiens
uggaucugugag

SEQ ID NO: 93432 - RNA, 16 nt, Homo sapiens
cuuuccccucccucag

SEQ ID NO: 93433 - RNA, 14 nt, Homo sapiens
guaggaacugcugg

SEQ ID NO: 93434 - RNA, 16 nt, Homo sapiens
cucaucuuucuuccaa

SEQ ID NO: 93435 - RNA, 17 nt, Homo sapiens
cagugagaagccagcuu

SEQ ID NO: 93436 - RNA, 16 nt, Homo sapiens
gugccaggauggaaug

SEQ ID NO: 93437 - RNA, 21 nt, Homo sapiens
aggagucccugccaucauguu

SEQ ID NO: 93438 - RNA, 21 nt, Homo sapiens
aguagagcagccacaaccaaa

SEQ ID NO: 93439 - RNA, 13 nt, Homo sapiens
acccugaguucau

SEQ ID NO: 93440 - RNA, 12 nt, Homo sapiens
aauaagugccag

SEQ ID NO: 93441 - RNA, 18 nt, Homo sapiens
ccagaaugccuccugcag

SEQ ID NO: 93442 - RNA, 16 nt, Homo sapiens
acaaaaaaaccucuau

SEQ ID NO: 93443 - RNA, 20 nt, Homo sapiens
cuucuaguucugccaggaga

SEQ ID NO: 93444 - RNA, 12 nt, Homo sapiens
cacgagaucaag

SEQ ID NO: 93445 - RNA, 13 nt, Homo sapiens
guacagacacucc

SEQ ID NO: 93446 - RNA, 15 nt, Homo sapiens
cucagaggguguccu

SEQ ID NO: 93447 - RNA, 23 nt, Homo sapiens
agagacgggcccuggugguggcu

SEQ ID NO: 93448 - RNA, 16 nt, Homo sapiens
gcuguggcauccagag

SEQ ID NO: 93449 - RNA, 20 nt, Homo sapiens
agcauaggaaaccacacaga

SEQ ID NO: 93450 - RNA, 12 nt, Homo sapiens
aauucuauuaca

SEQ ID NO: 93451 - RNA, 14 nt, Homo sapiens
aaaccucuaugcaa

SEQ ID NO: 93452 - RNA, 18 nt, Homo sapiens
auagcaccuccacauacc

SEQ ID NO: 93453 - RNA, 21 nt, Homo sapiens
ccaacauuaaaagccaccccc

SEQ ID NO: 93454 - RNA, 24 nt, Homo sapiens
acaauccaucucucaaguagugua

SEQ ID NO: 93455 - RNA, 22 nt, Homo sapiens
uaacucagucuuuaaucugaga

SEQ ID NO: 93456 - RNA, 19 nt, Homo sapiens
gggcugauuguauuuaccu

SEQ ID NO: 93457 - RNA, 15 nt, Homo sapiens
ggagagagugcuauu

SEQ ID NO: 93458 - RNA, 19 nt, Homo sapiens
cuggggaugucucucauga

SEQ ID NO: 93459 - RNA, 15 nt, Homo sapiens
agugcuauuguagag

SEQ ID NO: 93460 - RNA, 21 nt, Homo sapiens
gagaucaugccacuacacucc

SEQ ID NO: 93461 - RNA, 14 nt, Homo sapiens
ggccugacucucag

SEQ ID NO: 93462 - RNA, 18 nt, Homo sapiens
cuccauugguguugacau

SEQ ID NO: 93463 - RNA, 20 nt, Homo sapiens
gacuugucccgggacaccua

SEQ ID NO: 93464 - RNA, 23 nt, Homo sapiens
aaagugacucacuuaucccaaga

SEQ ID NO: 93465 - RNA, 12 nt, Homo sapiens
cacaaccaaaaa

SEQ ID NO: 93466 - RNA, 23 nt, Homo sapiens
aucugugaggggcucucucauga

SEQ ID NO: 93467 - RNA, 17 nt, Homo sapiens
acuuaaaagaacaugua

SEQ ID NO: 93468 - RNA, 19 nt, Homo sapiens
ugagggugacuauggagcu

SEQ ID NO: 93469 - RNA, 21 nt, Homo sapiens
cuguagacauuugcuaugagc

SEQ ID NO: 93470 - RNA, 18 nt, Homo sapiens
uccagagucccugccugg

SEQ ID NO: 93471 - RNA, 11 nt, Homo sapiens
cugaccaaaac

SEQ ID NO: 93472 - RNA, 17 nt, Homo sapiens
uucuuucccaacaccuc

SEQ ID NO: 93473 - RNA, 18 nt, Homo sapiens
uguuucaaaaaaucugac

SEQ ID NO: 93474 - RNA, 16 nt, Homo sapiens
uaguucugccaggaga

SEQ ID NO: 93475 - RNA, 15 nt, Homo sapiens
aagaaagacuuauca

SEQ ID NO: 93476 - RNA, 18 nt, Homo sapiens
gccagacuucccacggcu

SEQ ID NO: 93477 - RNA, 14 nt, Homo sapiens
uaccucuuggcugc

SEQ ID NO: 93478 - RNA, 18 nt, Homo sapiens
ugcuguauccauccaugg

SEQ ID NO: 93479 - RNA, 23 nt, Homo sapiens
auaagcagucauccucagaucau

SEQ ID NO: 93480 - RNA, 23 nt, Homo sapiens
cugccaucauguuuacagaggac

SEQ ID NO: 93481 - RNA, 12 nt, Homo sapiens
ggugugcuguau

SEQ ID NO: 93482 - RNA, 11 nt, Homo sapiens
uuuggggcuca

SEQ ID NO: 93483 - RNA, 16 nt, Homo sapiens
agucaaaagagagaag

SEQ ID NO: 93484 - RNA, 15 nt, Homo sapiens
acaaacaaacagaaa

SEQ ID NO: 93485 - RNA, 18 nt, Homo sapiens
cucagaggguguccugca

SEQ ID NO: 93486 - RNA, 13 nt, Homo sapiens
agaagccagcuuu

SEQ ID NO: 93487 - RNA, 18 nt, Homo sapiens
gcugaggccucucauucc

SEQ ID NO: 93488 - RNA, 14 nt, Homo sapiens
cagcuuccaaacau

SEQ ID NO: 93489 - RNA, 19 nt, Homo sapiens
cuuaucaacauuuguucca

SEQ ID NO: 93490 - RNA, 20 nt, Homo sapiens
gcuauggggauagaugugug

SEQ ID NO: 93491 - RNA, 16 nt, Homo sapiens
auguguguguguugug

SEQ ID NO: 93492 - RNA, 19 nt, Homo sapiens
agaaaagcaguggcuccau

SEQ ID NO: 93493 - RNA, 19 nt, Homo sapiens
uuccaaacaggcucagagg

SEQ ID NO: 93494 - RNA, 13 nt, Homo sapiens
cucgagaucccaa

SEQ ID NO: 93495 - RNA, 14 nt, Homo sapiens
cgucagcugggaca

SEQ ID NO: 93496 - RNA, 22 nt, Homo sapiens
cuuuggacuugucccgggacac

SEQ ID NO: 93497 - RNA, 19 nt, Homo sapiens
guguggugagaucaugcca

SEQ ID NO: 93498 - RNA, 16 nt, Homo sapiens
gauucuuccugcuuag

SEQ ID NO: 93499 - RNA, 17 nt, Homo sapiens
acccuucagauuugccu

SEQ ID NO: 93500 - RNA, 19 nt, Homo sapiens
auccauggggcugauugua

SEQ ID NO: 93501 - RNA, 19 nt, Homo sapiens
uaccuggcccugugccuug

SEQ ID NO: 93502 - RNA, 19 nt, Homo sapiens
gcagccacaaccaaaaaau

SEQ ID NO: 93503 - RNA, 13 nt, Homo sapiens
auuugcuaugagc

SEQ ID NO: 93504 - RNA, 15 nt, Homo sapiens
acucccacuuggcau

SEQ ID NO: 93505 - RNA, 13 nt, Homo sapiens
agaaaucuagaag

SEQ ID NO: 93506 - RNA, 23 nt, Homo sapiens
cucucgcaagggaaguccuugca

SEQ ID NO: 93507 - RNA, 21 nt, Homo sapiens
cauccagagucccugccugga

SEQ ID NO: 93508 - RNA, 18 nt, Homo sapiens
ugccugugccuuuugcca

SEQ ID NO: 93509 - RNA, 13 nt, Homo sapiens
gagaguccaucag

SEQ ID NO: 93510 - RNA, 16 nt, Homo sapiens
ugguguugacauacau

SEQ ID NO: 93511 - RNA, 19 nt, Homo sapiens
acccucaucuuucuuccaa

SEQ ID NO: 93512 - RNA, 16 nt, Homo sapiens
uucaggacucuaccuc

SEQ ID NO: 93513 - RNA, 16 nt, Homo sapiens
aaaugcuuuuccucaa

SEQ ID NO: 93514 - RNA, 14 nt, Homo sapiens
cccacuuggcauca

SEQ ID NO: 93515 - RNA, 15 nt, Homo sapiens
uuccaaccggcuuug

SEQ ID NO: 93516 - RNA, 19 nt, Homo sapiens
uagagcagccacaaccaaa

SEQ ID NO: 93517 - RNA, 15 nt, Homo sapiens
ucuucauuaccucag

SEQ ID NO: 93518 - RNA, 11 nt, Homo sapiens
ggcugccuugu

SEQ ID NO: 93519 - RNA, 19 nt, Homo sapiens
gucuguguguuuaugugug

SEQ ID NO: 93520 - RNA, 14 nt, Homo sapiens
cugagagaggccau

SEQ ID NO: 93521 - RNA, 15 nt, Homo sapiens
cuccucgagauccca

SEQ ID NO: 93522 - RNA, 21 nt, Homo sapiens
caucuuucuuccaaacaggcu

SEQ ID NO: 93523 - RNA, 14 nt, Homo sapiens
uagagcugccugug

SEQ ID NO: 93524 - RNA, 21 nt, Homo sapiens
cacagcaagucacuggccagu

SEQ ID NO: 93525 - RNA, 14 nt, Homo sapiens
cuuuccaaccggcu

SEQ ID NO: 93526 - RNA, 14 nt, Homo sapiens
uaccuucuaccucu

SEQ ID NO: 93527 - RNA, 21 nt, Homo sapiens
acccgggaggcagagguugca

SEQ ID NO: 93528 - RNA, 20 nt, Homo sapiens
uguagucccagcuacuugag

SEQ ID NO: 93529 - RNA, 23 nt, Homo sapiens
cacauaccuggcccugugccuug

SEQ ID NO: 93530 - RNA, 16 nt, Homo sapiens
cuguucuuuuguccca

SEQ ID NO: 93531 - RNA, 11 nt, Homo sapiens
aucccaugagc

SEQ ID NO: 93532 - RNA, 22 nt, Homo sapiens
gugccuugucacgccagacuuc

SEQ ID NO: 93533 - RNA, 15 nt, Homo sapiens
acacuguucugaaag

SEQ ID NO: 93534 - RNA, 14 nt, Homo sapiens
cauuuguuccauga

SEQ ID NO: 93535 - RNA, 19 nt, Homo sapiens
gauacacuaugaagauguu

SEQ ID NO: 93536 - RNA, 12 nt, Homo sapiens
auugucccugaa

SEQ ID NO: 93537 - RNA, 13 nt, Homo sapiens
cucuuuaccuccu

SEQ ID NO: 93538 - RNA, 13 nt, Homo sapiens
cucugcccgggag

SEQ ID NO: 93539 - RNA, 12 nt, Homo sapiens
uggcuguggcau

SEQ ID NO: 93540 - RNA, 18 nt, Homo sapiens
gggagccugacccucauc

SEQ ID NO: 93541 - RNA, 15 nt, Homo sapiens
ugaggggcucucuca

SEQ ID NO: 93542 - RNA, 18 nt, Homo sapiens
cccagaaugccuccugca

SEQ ID NO: 93543 - RNA, 22 nt, Homo sapiens
auaaccucaaagugacuauuca

SEQ ID NO: 93544 - RNA, 16 nt, Homo sapiens
agaucacgagaucaag

SEQ ID NO: 93545 - RNA, 20 nt, Homo sapiens
uuuggggcucagaguggggu

SEQ ID NO: 93546 - RNA, 15 nt, Homo sapiens
gcuauuguagagcca

SEQ ID NO: 93547 - RNA, 14 nt, Homo sapiens
ccuucagauuugcc

SEQ ID NO: 93548 - RNA, 21 nt, Homo sapiens
uggagguuuguuuagaagaag

SEQ ID NO: 93549 - RNA, 15 nt, Homo sapiens
auuuaugguucucag

SEQ ID NO: 93550 - RNA, 18 nt, Homo sapiens
ugugccuuggugugcugu

SEQ ID NO: 93551 - RNA, 16 nt, Homo sapiens
cugccagcauuucccu

SEQ ID NO: 93552 - RNA, 20 nt, Homo sapiens
ucuuucaggacucuaccuca

SEQ ID NO: 93553 - RNA, 14 nt, Homo sapiens
gugagaucaugcca

SEQ ID NO: 93554 - RNA, 21 nt, Homo sapiens
aagagaaugaaauugcugaaa

SEQ ID NO: 93555 - RNA, 16 nt, Homo sapiens
acugcugggcuuggca

SEQ ID NO: 93556 - RNA, 23 nt, Homo sapiens
agaagacugucagcuuccaaaca

SEQ ID NO: 93557 - RNA, 10 nt, Homo sapiens
auugugaugu

SEQ ID NO: 93558 - RNA, 20 nt, Homo sapiens
ccagacuucccacggcuccu

SEQ ID NO: 93559 - RNA, 21 nt, Homo sapiens
gccaguggcuggaucugugag

SEQ ID NO: 93560 - RNA, 16 nt, Homo sapiens
uguggugagaucaugc

SEQ ID NO: 93561 - RNA, 16 nt, Homo sapiens
ggaauuauucccauga

SEQ ID NO: 93562 - RNA, 22 nt, Homo sapiens
uccugaggaagagggacuguuc

SEQ ID NO: 93563 - RNA, 15 nt, Homo sapiens
gagcagccacaacca

SEQ ID NO: 93564 - RNA, 17 nt, Homo sapiens
aggcugaggcaagagaa

SEQ ID NO: 93565 - RNA, 16 nt, Homo sapiens
caucucuuuaccuccu

SEQ ID NO: 93566 - RNA, 16 nt, Homo sapiens
agggagagagugcuau

SEQ ID NO: 93567 - RNA, 20 nt, Homo sapiens
ccuuuggacuugucccggga

SEQ ID NO: 93568 - RNA, 21 nt, Homo sapiens
augugggggucuguguguuua

SEQ ID NO: 93569 - RNA, 18 nt, Homo sapiens
auaaucacaacccuucag

SEQ ID NO: 93570 - RNA, 13 nt, Homo sapiens
ggaagggacacca

SEQ ID NO: 93571 - RNA, 20 nt, Homo sapiens
aaagcaguggcuccauuggu

SEQ ID NO: 93572 - RNA, 21 nt, Homo sapiens
uccuuuccccucccucaggcc

SEQ ID NO: 93573 - RNA, 17 nt, Homo sapiens
acugcugggcuuggcag

SEQ ID NO: 93574 - RNA, 21 nt, Homo sapiens
cagguguucuucauuaccuca

SEQ ID NO: 93575 - RNA, 19 nt, Homo sapiens
acuugucccgggacaccua

SEQ ID NO: 93576 - RNA, 12 nt, Homo sapiens
ucaguaugugga

SEQ ID NO: 93577 - RNA, 12 nt, Homo sapiens
auccaucucuca

SEQ ID NO: 93578 - RNA, 19 nt, Homo sapiens
auagugaaaccccaucucu

SEQ ID NO: 93579 - RNA, 15 nt, Homo sapiens
caauccaucucucaa

SEQ ID NO: 93580 - RNA, 21 nt, Homo sapiens
aucuuucuuccaaacaggcuc

SEQ ID NO: 93581 - RNA, 23 nt, Homo sapiens
auuguuugaacccgggaggcaga

SEQ ID NO: 93582 - RNA, 14 nt, Homo sapiens
ucuuuugucccaga

SEQ ID NO: 93583 - RNA, 22 nt, Homo sapiens
acauaccuggcccugugccuug

SEQ ID NO: 93584 - RNA, 19 nt, Homo sapiens
acaacauccuuaagucaaa

SEQ ID NO: 93585 - RNA, 22 nt, Homo sapiens
augagcuggggaugucucucau

SEQ ID NO: 93586 - RNA, 16 nt, Homo sapiens
acuucccacggcuccu

SEQ ID NO: 93587 - RNA, 12 nt, Homo sapiens
cagccacaacca

SEQ ID NO: 93588 - RNA, 18 nt, Homo sapiens
guaauuuaaaauugugau

SEQ ID NO: 93589 - RNA, 14 nt, Homo sapiens
auguaccagcaucu

SEQ ID NO: 93590 - RNA, 24 nt, Homo sapiens
aagaucuuucaggacucuaccuca

SEQ ID NO: 93591 - RNA, 15 nt, Homo sapiens
aggggcucucucaug

SEQ ID NO: 93592 - RNA, 23 nt, Homo sapiens
uaauuccacacccucacugcugu

SEQ ID NO: 93593 - RNA, 21 nt, Homo sapiens
ugcuguagacauuugcuauga

SEQ ID NO: 93594 - RNA, 18 nt, Homo sapiens
aucacgagaucaagagau

SEQ ID NO: 93595 - RNA, 17 nt, Homo sapiens
uccuuguaaagacugua

SEQ ID NO: 93596 - RNA, 16 nt, Homo sapiens
cacuaaaagaucgcag

SEQ ID NO: 93597 - RNA, 14 nt, Homo sapiens
cuagcagaaaucua

SEQ ID NO: 93598 - RNA, 18 nt, Homo sapiens
cccucaucuuucuuccaa

SEQ ID NO: 93599 - RNA, 18 nt, Homo sapiens
ucucaggccugacucuca

SEQ ID NO: 93600 - RNA, 13 nt, Homo sapiens
ucugaccaaaaca

SEQ ID NO: 93601 - RNA, 23 nt, Homo sapiens
cauaaauuuaugguucucaggcc

SEQ ID NO: 93602 - RNA, 14 nt, Homo sapiens
uuguuuaccagaga

SEQ ID NO: 93603 - RNA, 21 nt, Homo sapiens
ugcuauuguagagccagaggu

SEQ ID NO: 93604 - RNA, 15 nt, Homo sapiens
ggcucacaccuguaa

SEQ ID NO: 93605 - RNA, 19 nt, Homo sapiens
gggcucucucaugauagaa

SEQ ID NO: 93606 - RNA, 18 nt, Homo sapiens
cggccuccugucccucau

SEQ ID NO: 93607 - RNA, 16 nt, Homo sapiens
cugaccaaaacaaaca

SEQ ID NO: 93608 - RNA, 22 nt, Homo sapiens
guggcuggaucugugaggggcu

SEQ ID NO: 93609 - RNA, 20 nt, Homo sapiens
auaucaguuugcuagcagaa

SEQ ID NO: 93610 - RNA, 17 nt, Homo sapiens
auuuaccuucuaccucu

SEQ ID NO: 93611 - RNA, 23 nt, Homo sapiens
agggcagggcugaggccucucau

SEQ ID NO: 93612 - RNA, 22 nt, Homo sapiens
ccucuccacucaugugacucuu

SEQ ID NO: 93613 - RNA, 15 nt, Homo sapiens
uucuaguucugccag

SEQ ID NO: 93614 - RNA, 23 nt, Homo sapiens
uuaugccaccugaauaaagaaug

SEQ ID NO: 93615 - RNA, 16 nt, Homo sapiens
uuuauuuuucucauga

SEQ ID NO: 93616 - RNA, 21 nt, Homo sapiens
aaagaucuuucaggacucuac

SEQ ID NO: 93617 - RNA, 15 nt, Homo sapiens
agaaggcuaugggga

SEQ ID NO: 93618 - RNA, 16 nt, Homo sapiens
agcaguggcuccauug

SEQ ID NO: 93619 - RNA, 17 nt, Homo sapiens
cuaguucugccaggaga

SEQ ID NO: 93620 - RNA, 15 nt, Homo sapiens
augauacacuaugaa

SEQ ID NO: 93621 - RNA, 22 nt, Homo sapiens
uggccuguucuucuauggguug

SEQ ID NO: 93622 - RNA, 11 nt, Homo sapiens
caaaaaaucug

SEQ ID NO: 93623 - RNA, 17 nt, Homo sapiens
aaugucaguauguggaa

SEQ ID NO: 93624 - RNA, 15 nt, Homo sapiens
ucaagaccauaguga

SEQ ID NO: 93625 - RNA, 20 nt, Homo sapiens
aaaauucuauuacaguaugu

SEQ ID NO: 93626 - RNA, 14 nt, Homo sapiens
cuuccaaacaggcu

SEQ ID NO: 93627 - RNA, 17 nt, Homo sapiens
uccacacccucacugcu

SEQ ID NO: 93628 - RNA, 21 nt, Homo sapiens
uaccuucuaccucuuggcugc

SEQ ID NO: 93629 - RNA, 12 nt, Homo sapiens
ccuucuaccucu

SEQ ID NO: 93630 - RNA, 17 nt, Homo sapiens
gugaggggcucucucau

SEQ ID NO: 93631 - RNA, 21 nt, Homo sapiens
aacaaaaaaaccucuaugcaa

SEQ ID NO: 93632 - RNA, 19 nt, Homo sapiens
gcagguguucuucauuacc

SEQ ID NO: 93633 - RNA, 15 nt, Homo sapiens
ggaugucucucauga

SEQ ID NO: 93634 - RNA, 21 nt, Homo sapiens
gccagcauuucccuuccuucc

SEQ ID NO: 93635 - RNA, 18 nt, Homo sapiens
caaccucauuuuaacuca

SEQ ID NO: 93636 - RNA, 18 nt, Homo sapiens
caguggcuggaucuguga

SEQ ID NO: 93637 - RNA, 21 nt, Homo sapiens
uaaauuuaugguucucaggcc

SEQ ID NO: 93638 - RNA, 20 nt, Homo sapiens
gcagggaaggaucccaugag

SEQ ID NO: 93639 - RNA, 13 nt, Homo sapiens
cuuuugucccaga

SEQ ID NO: 93640 - RNA, 15 nt, Homo sapiens
aggccauugucccug

SEQ ID NO: 93641 - RNA, 14 nt, Homo sapiens
uauuggcagcucua

SEQ ID NO: 93642 - RNA, 21 nt, Homo sapiens
agagcaacaauccaucucuca

SEQ ID NO: 93643 - RNA, 18 nt, Homo sapiens
auaaacaugcuugcauua

SEQ ID NO: 93644 - RNA, 18 nt, Homo sapiens
ucuuucaggacucuaccu

SEQ ID NO: 93645 - RNA, 20 nt, Homo sapiens
uugccuuauuggcagcucua

SEQ ID NO: 93646 - RNA, 15 nt, Homo sapiens
cucauuccagaggaa

SEQ ID NO: 93647 - RNA, 21 nt, Homo sapiens
uacagacacucccacuuggca

SEQ ID NO: 93648 - RNA, 21 nt, Homo sapiens
agacgggcccuggugguggcu

SEQ ID NO: 93649 - RNA, 18 nt, Homo sapiens
acgucagcugggacaccc

SEQ ID NO: 93650 - RNA, 18 nt, Homo sapiens
cuuaaaagaacauguaua

SEQ ID NO: 93651 - RNA, 16 nt, Homo sapiens
ggacaaccucauuuua

SEQ ID NO: 93652 - RNA, 17 nt, Homo sapiens
ggguuggacaaccucau

SEQ ID NO: 93653 - RNA, 15 nt, Homo sapiens
ugucucucaugacca

SEQ ID NO: 93654 - RNA, 17 nt, Homo sapiens
acucaggggucauucau

SEQ ID NO: 93655 - RNA, 21 nt, Homo sapiens
agguguucuucauuaccucag

SEQ ID NO: 93656 - RNA, 16 nt, Homo sapiens
gccgagaguccaucag

SEQ ID NO: 93657 - RNA, 21 nt, Homo sapiens
uucuauggguuggacaaccuc

SEQ ID NO: 93658 - RNA, 14 nt, Homo sapiens
uuggacaaccucau

SEQ ID NO: 93659 - RNA, 19 nt, Homo sapiens
uguuuacagaggacaguau

SEQ ID NO: 93660 - RNA, 11 nt, Homo sapiens
cacugcuguag

SEQ ID NO: 93661 - RNA, 21 nt, Homo sapiens
gccgagaguccaucagccucc

SEQ ID NO: 93662 - RNA, 21 nt, Homo sapiens
aaccggcuuuguggcacuggg

SEQ ID NO: 93663 - RNA, 22 nt, Homo sapiens
cuaggcuaggguggggagagac

SEQ ID NO: 93664 - RNA, 15 nt, Homo sapiens
gccuuauuggcagcu

SEQ ID NO: 93665 - RNA, 18 nt, Homo sapiens
ucuccacucaugugacuc

SEQ ID NO: 93666 - RNA, 20 nt, Homo sapiens
uccucugcccgggagcucag

SEQ ID NO: 93667 - RNA, 18 nt, Homo sapiens
caccaucucuuuaccucc

SEQ ID NO: 93668 - RNA, 20 nt, Homo sapiens
uaggccagcaccaucucuuu

SEQ ID NO: 93669 - RNA, 20 nt, Homo sapiens
cagggauucuuccugcuuag

SEQ ID NO: 93670 - RNA, 20 nt, Homo sapiens
gagaguccaucagccuccau

SEQ ID NO: 93671 - RNA, 12 nt, Homo sapiens
cuggcccugugc

SEQ ID NO: 93672 - RNA, 21 nt, Homo sapiens
caacaauccaucucucaagua

SEQ ID NO: 93673 - RNA, 20 nt, Homo sapiens
ucacagcaagucacuggcca

SEQ ID NO: 93674 - RNA, 19 nt, Homo sapiens
ucaagaccauagugaccaa

SEQ ID NO: 93675 - RNA, 14 nt, Homo sapiens
uucagauuugccuu

SEQ ID NO: 93676 - RNA, 13 nt, Homo sapiens
auucuuucccaac

SEQ ID NO: 93677 - RNA, 15 nt, Homo sapiens
uaugguucucaggcc

SEQ ID NO: 93678 - RNA, 13 nt, Homo sapiens
ugaggccucucau

SEQ ID NO: 93679 - RNA, 21 nt, Homo sapiens
cucgcaagggaaguccuugca

SEQ ID NO: 93680 - RNA, 15 nt, Homo sapiens
auucuuugaccuguu

SEQ ID NO: 93681 - RNA, 19 nt, Homo sapiens
gcuguggccuaaccugccg

SEQ ID NO: 93682 - RNA, 15 nt, Homo sapiens
ugucccucauccaua

SEQ ID NO: 93683 - RNA, 18 nt, Homo sapiens
gcuaugguucucucgcaa

SEQ ID NO: 93684 - RNA, 17 nt, Homo sapiens
agaggguguccugcacc

SEQ ID NO: 93685 - RNA, 18 nt, Homo sapiens
ugucccagaaugccuccu

SEQ ID NO: 93686 - RNA, 11 nt, Homo sapiens
gcaucauucac

SEQ ID NO: 93687 - RNA, 14 nt, Homo sapiens
gugacucuuuccaa

SEQ ID NO: 93688 - RNA, 17 nt, Homo sapiens
gucugggccacucaggg

SEQ ID NO: 93689 - RNA, 16 nt, Homo sapiens
accccaucucuacuga

SEQ ID NO: 93690 - RNA, 12 nt, Homo sapiens
guacagacacuc

SEQ ID NO: 93691 - RNA, 16 nt, Homo sapiens
ggaccagccucuccac

SEQ ID NO: 93692 - RNA, 23 nt, Homo sapiens
ccaugagcuccuuaaggcucuuu

SEQ ID NO: 93693 - RNA, 16 nt, Homo sapiens
ccaucucuuuaccucc

SEQ ID NO: 93694 - RNA, 22 nt, Homo sapiens
ccuugcaagcuaauucuuugac

SEQ ID NO: 93695 - RNA, 14 nt, Homo sapiens
guguucuucauuac

SEQ ID NO: 93696 - RNA, 18 nt, Homo sapiens
uguaauuuaaaauuguga

SEQ ID NO: 93697 - RNA, 17 nt, Homo sapiens
gaagccagcuuuccuca

SEQ ID NO: 93698 - RNA, 14 nt, Homo sapiens
aaugaugggucagu

SEQ ID NO: 93699 - RNA, 18 nt, Homo sapiens
agcagccacaaccaaaaa

SEQ ID NO: 93700 - RNA, 22 nt, Homo sapiens
ucaaagggagagagugcuauug

SEQ ID NO: 93701 - RNA, 18 nt, Homo sapiens
uucugucuuuauaaucua

SEQ ID NO: 93702 - RNA, 18 nt, Homo sapiens
agggauuuggggcucaga

SEQ ID NO: 93703 - RNA, 19 nt, Homo sapiens
aaccccaucucuacugaaa

SEQ ID NO: 93704 - RNA, 17 nt, Homo sapiens
accagccucuccacuca

SEQ ID NO: 93705 - RNA, 15 nt, Homo sapiens
cgucagcugggacac

SEQ ID NO: 93706 - RNA, 15 nt, Homo sapiens
ugccagcauuucccu

SEQ ID NO: 93707 - RNA, 22 nt, Homo sapiens
auaggaaaccacacagacuugg

SEQ ID NO: 93708 - RNA, 23 nt, Homo sapiens
ccucacugcuguagacauuugcu

SEQ ID NO: 93709 - RNA, 18 nt, Homo sapiens
cugccgagaguccaucag

SEQ ID NO: 93710 - RNA, 14 nt, Homo sapiens
uaagggacaacauc

SEQ ID NO: 93711 - RNA, 14 nt, Homo sapiens
acaaacaaacagaa

SEQ ID NO: 93712 - RNA, 18 nt, Homo sapiens
uccaucagccuccauccu

SEQ ID NO: 93713 - RNA, 13 nt, Homo sapiens
ucccacuuggcau

SEQ ID NO: 93714 - RNA, 12 nt, Homo sapiens
ucuuccaaacag

SEQ ID NO: 93715 - RNA, 12 nt, Homo sapiens
uucuucuauggg

SEQ ID NO: 93716 - RNA, 16 nt, Homo sapiens
gaaagaaaaagcaaua

SEQ ID NO: 93717 - RNA, 14 nt, Homo sapiens
agaggacaguauuu

SEQ ID NO: 93718 - RNA, 17 nt, Homo sapiens
ccucuuggcugccuugu

SEQ ID NO: 93719 - RNA, 11 nt, Homo sapiens
aaagacuguag

SEQ ID NO: 93720 - RNA, 19 nt, Homo sapiens
aagaggcaccacuaaaaga

SEQ ID NO: 93721 - RNA, 15 nt, Homo sapiens
cuuguaaagacugua

SEQ ID NO: 93722 - RNA, 12 nt, Homo sapiens
ucuuuaccuccu

SEQ ID NO: 93723 - RNA, 12 nt, Homo sapiens
aaaaaaucugac

SEQ ID NO: 93724 - RNA, 17 nt, Homo sapiens
ccuuaagucaaaagaga

SEQ ID NO: 93725 - RNA, 19 nt, Homo sapiens
agaaaucuagaagacuguc

SEQ ID NO: 93726 - RNA, 14 nt, Homo sapiens
ccucauccauagca

SEQ ID NO: 93727 - RNA, 15 nt, Homo sapiens
auuccacacccucac

SEQ ID NO: 93728 - RNA, 20 nt, Homo sapiens
cgagacuugguuucaaaaaa

SEQ ID NO: 93729 - RNA, 19 nt, Homo sapiens
uaccucuuggcugccuugu

SEQ ID NO: 93730 - RNA, 20 nt, Homo sapiens
cugucuuuauaaucuacucc

SEQ ID NO: 93731 - RNA, 18 nt, Homo sapiens
ugaggggcucucucauga

SEQ ID NO: 93732 - RNA, 16 nt, Homo sapiens
ccuuguaaagacugua

SEQ ID NO: 93733 - RNA, 16 nt, Homo sapiens
uaaauuuaugugaugg

SEQ ID NO: 93734 - RNA, 14 nt, Homo sapiens
aaaguacaaaaauu

SEQ ID NO: 93735 - RNA, 22 nt, Homo sapiens
agagcaacaauccaucucucaa

SEQ ID NO: 93736 - RNA, 19 nt, Homo sapiens
gccacucaggggucauuca

SEQ ID NO: 93737 - RNA, 23 nt, Homo sapiens
uauguggaagugugggucugugu

SEQ ID NO: 93738 - RNA, 15 nt, Homo sapiens
gggaguuuagggugg

SEQ ID NO: 93739 - RNA, 20 nt, Homo sapiens
ugaaaccccaucucuacuga

SEQ ID NO: 93740 - RNA, 15 nt, Homo sapiens
aggagggcaggcauc

SEQ ID NO: 93741 - RNA, 20 nt, Homo sapiens
cuacccccugugccuuguca

SEQ ID NO: 93742 - RNA, 14 nt, Homo sapiens
aaagcaauaaccuc

SEQ ID NO: 93743 - RNA, 19 nt, Homo sapiens
ugcuauuguagagccagag

SEQ ID NO: 93744 - RNA, 17 nt, Homo sapiens
cuaauuccacacccuca

SEQ ID NO: 93745 - RNA, 16 nt, Homo sapiens
ugacauacauccaaca

SEQ ID NO: 93746 - RNA, 11 nt, Homo sapiens
ggccagcacca

SEQ ID NO: 93747 - RNA, 19 nt, Homo sapiens
accaaaugcuuuuccucaa

SEQ ID NO: 93748 - RNA, 13 nt, Homo sapiens
uaugcaaucugag

SEQ ID NO: 93749 - RNA, 12 nt, Homo sapiens
uuuguuuaccag

SEQ ID NO: 93750 - RNA, 18 nt, Homo sapiens
agccuccauccuaccccc

SEQ ID NO: 93751 - RNA, 14 nt, Homo sapiens
cugaggcaagagaa

SEQ ID NO: 93752 - RNA, 22 nt, Homo sapiens
augaugagguuuucuuaacuua

SEQ ID NO: 93753 - RNA, 16 nt, Homo sapiens
acaugcuugcauuaua

SEQ ID NO: 93754 - RNA, 22 nt, Homo sapiens
ccuguagucccagcuacuugag

SEQ ID NO: 93755 - RNA, 17 nt, Homo sapiens
ucaaagugacuauucag

SEQ ID NO: 93756 - RNA, 12 nt, Homo sapiens
uaugcaaucuga

SEQ ID NO: 93757 - RNA, 13 nt, Homo sapiens
aaauuuaugugau

SEQ ID NO: 93758 - RNA, 11 nt, Homo sapiens
ccgggacaccu

SEQ ID NO: 93759 - RNA, 20 nt, Homo sapiens
auaagcagucauccucagau

SEQ ID NO: 93760 - RNA, 13 nt, Homo sapiens
cagaggacaguau

SEQ ID NO: 93761 - RNA, 21 nt, Homo sapiens
aaagugacucacuuaucccaa

SEQ ID NO: 93762 - RNA, 23 nt, Homo sapiens
agguguucuucauuaccucagug

SEQ ID NO: 93763 - RNA, 19 nt, Homo sapiens
ccggccuccugucccucau

SEQ ID NO: 93764 - RNA, 19 nt, Homo sapiens
ugucuuuauaaucuacucc

SEQ ID NO: 93765 - RNA, 14 nt, Homo sapiens
aucuagaagacugu

SEQ ID NO: 93766 - RNA, 14 nt, Homo sapiens
aaucugaccaaaac

SEQ ID NO: 93767 - RNA, 14 nt, Homo sapiens
guuggcacaugccu

SEQ ID NO: 93768 - RNA, 20 nt, Homo sapiens
cuggcuguggccuaaccugc

SEQ ID NO: 93769 - RNA, 18 nt, Homo sapiens
uccuuuccccucccucag

SEQ ID NO: 93770 - RNA, 19 nt, Homo sapiens
cacuaugaagauguuucaa

SEQ ID NO: 93771 - RNA, 15 nt, Homo sapiens
ucuagaagacuguca

SEQ ID NO: 93772 - RNA, 17 nt, Homo sapiens
ugggagaaugucaguau

SEQ ID NO: 93773 - RNA, 15 nt, Homo sapiens
auguaccagcaucuc

SEQ ID NO: 93774 - RNA, 15 nt, Homo sapiens
ugagcagguguucuu

SEQ ID NO: 93775 - RNA, 22 nt, Homo sapiens
accucauaucaguuugcuagca

SEQ ID NO: 93776 - RNA, 19 nt, Homo sapiens
uucuaguucugccaggaga

SEQ ID NO: 93777 - RNA, 15 nt, Homo sapiens
cuuaucccaagagaa

SEQ ID NO: 93778 - RNA, 11 nt, Homo sapiens
ucaguaugugg

SEQ ID NO: 93779 - RNA, 16 nt, Homo sapiens
ccucagugagaagcca

SEQ ID NO: 93780 - RNA, 13 nt, Homo sapiens
uaguucugccagg

SEQ ID NO: 93781 - RNA, 13 nt, Homo sapiens
cucucucaugaua

SEQ ID NO: 93782 - RNA, 15 nt, Homo sapiens
cuaauuccacacccu

SEQ ID NO: 93783 - RNA, 14 nt, Homo sapiens
caucuguaccucug

SEQ ID NO: 93784 - RNA, 13 nt, Homo sapiens
auacacuaugaag

SEQ ID NO: 93785 - RNA, 18 nt, Homo sapiens
auugguguugacauacau

SEQ ID NO: 93786 - RNA, 14 nt, Homo sapiens
ugaggccucucauu

SEQ ID NO: 93787 - RNA, 17 nt, Homo sapiens
ccacaaccaaaaaauuc

SEQ ID NO: 93788 - RNA, 16 nt, Homo sapiens
auucaguuuucaggau

SEQ ID NO: 93789 - RNA, 16 nt, Homo sapiens
accggggccugggcag

SEQ ID NO: 93790 - RNA, 17 nt, Homo sapiens
uggguuggacaaccuca

SEQ ID NO: 93791 - RNA, 15 nt, Homo sapiens
ucaucuguaccucug

SEQ ID NO: 93792 - RNA, 12 nt, Homo sapiens
cuccacauaccu

SEQ ID NO: 93793 - RNA, 14 nt, Homo sapiens
ccagagucccugcc

SEQ ID NO: 93794 - RNA, 13 nt, Homo sapiens
cuucauuaccuca

SEQ ID NO: 93795 - RNA, 16 nt, Homo sapiens
aaaucuagaagacugu

SEQ ID NO: 93796 - RNA, 20 nt, Homo sapiens
uccauccauggggcugauug

SEQ ID NO: 93797 - RNA, 15 nt, Homo sapiens
acagacacucccacu

SEQ ID NO: 93798 - RNA, 15 nt, Homo sapiens
ugcccgggagcucag

SEQ ID NO: 93799 - RNA, 13 nt, Homo sapiens
ucuuucccaacac

SEQ ID NO: 93800 - RNA, 15 nt, Homo sapiens
agugggguagguugg

SEQ ID NO: 93801 - RNA, 18 nt, Homo sapiens
ucuuccaaacaggcucag

SEQ ID NO: 93802 - RNA, 15 nt, Homo sapiens
cucaucuuucuucca

SEQ ID NO: 93803 - RNA, 22 nt, Homo sapiens
aaacaaaaaaaccucuaugcaa

SEQ ID NO: 93804 - RNA, 18 nt, Homo sapiens
caggagucccugccauca

SEQ ID NO: 93805 - RNA, 21 nt, Homo sapiens
ccuuaagggacaacauccuua

SEQ ID NO: 93806 - RNA, 14 nt, Homo sapiens
uccuuaagggacaa

SEQ ID NO: 93807 - RNA, 15 nt, Homo sapiens
uggggcugauuguau

SEQ ID NO: 93808 - RNA, 21 nt, Homo sapiens
gugauguguccugauaagcug

SEQ ID NO: 93809 - RNA, 19 nt, Homo sapiens
cuuuauaaucuacuccuug

SEQ ID NO: 93810 - RNA, 21 nt, Homo sapiens
acuauggagcugagcaggugu

SEQ ID NO: 93811 - RNA, 15 nt, Homo sapiens
agggcugccuuugga

SEQ ID NO: 93812 - RNA, 23 nt, Homo sapiens
ugcuuagcuugagggugacuaug

SEQ ID NO: 93813 - RNA, 18 nt, Homo sapiens
ccacucaggggucauuca

SEQ ID NO: 93814 - RNA, 14 nt, Homo sapiens
acuugucccgggac

SEQ ID NO: 93815 - RNA, 20 nt, Homo sapiens
acaaccaaaaaauucuacaa

SEQ ID NO: 93816 - RNA, 12 nt, Homo sapiens
uuuaugguucuc

SEQ ID NO: 93817 - RNA, 23 nt, Homo sapiens
cuauuagagcugccugugccuuu

SEQ ID NO: 93818 - RNA, 13 nt, Homo sapiens
uccccucaaccca

SEQ ID NO: 93819 - RNA, 17 nt, Homo sapiens
ucugucuuuauaaucua

SEQ ID NO: 93820 - RNA, 16 nt, Homo sapiens
cuuuccucaucaggcc

SEQ ID NO: 93821 - RNA, 22 nt, Homo sapiens
uccuacccccugugccuuguca

SEQ ID NO: 93822 - RNA, 21 nt, Homo sapiens
uuaacuuaaaagaacauguau

SEQ ID NO: 93823 - RNA, 18 nt, Homo sapiens
ucuuuauaaucuacuccu

SEQ ID NO: 93824 - RNA, 11 nt, Homo sapiens
guucucaggcc

SEQ ID NO: 93825 - RNA, 22 nt, Homo sapiens
cuaaccugccgagaguccauca

SEQ ID NO: 93826 - RNA, 20 nt, Homo sapiens
auuuguaaauuuaugugaug

SEQ ID NO: 93827 - RNA, 16 nt, Homo sapiens
gacaaccucauuuuaa

SEQ ID NO: 93828 - RNA, 13 nt, Homo sapiens
agugagaagccag

SEQ ID NO: 93829 - RNA, 21 nt, Homo sapiens
cuugucacgccagacuuccca

SEQ ID NO: 93830 - RNA, 21 nt, Homo sapiens
aaagacuguagaagaaagagc

SEQ ID NO: 93831 - RNA, 17 nt, Homo sapiens
ccacuuggcaucauuca

SEQ ID NO: 93832 - RNA, 18 nt, Homo sapiens
caggccauugucccugaa

SEQ ID NO: 93833 - RNA, 16 nt, Homo sapiens
ugacucucagcagcua

SEQ ID NO: 93834 - RNA, 22 nt, Homo sapiens
cuccucgagaucccaacacugc

SEQ ID NO: 93835 - RNA, 16 nt, Homo sapiens
ucucucgcaagggaag

SEQ ID NO: 93836 - RNA, 22 nt, Homo sapiens
gaagugugucacccuuaggcca

SEQ ID NO: 93837 - RNA, 16 nt, Homo sapiens
ccucaucuuucuucca

SEQ ID NO: 93838 - RNA, 23 nt, Homo sapiens
cuagcagaaaucuagaagacugu

SEQ ID NO: 93839 - RNA, 19 nt, Homo sapiens
cccacuuggcaucauucac

SEQ ID NO: 93840 - RNA, 19 nt, Homo sapiens
ugagaggccacagugcaau

SEQ ID NO: 93841 - RNA, 13 nt, Homo sapiens
cuagaagacuguc

SEQ ID NO: 93842 - RNA, 14 nt, Homo sapiens
uuaucagccugugc

SEQ ID NO: 93843 - RNA, 19 nt, Homo sapiens
cacacuguucugaaaguga

SEQ ID NO: 93844 - RNA, 15 nt, Homo sapiens
uaaauuuaugugaug

SEQ ID NO: 93845 - RNA, 22 nt, Homo sapiens
agcagaaaucuagaagacuguc

SEQ ID NO: 93846 - RNA, 17 nt, Homo sapiens
gcuguauccauccaugg

SEQ ID NO: 93847 - RNA, 23 nt, Homo sapiens
accaagccuuggcucuacccuga

SEQ ID NO: 93848 - RNA, 12 nt, Homo sapiens
cucuacccugag

SEQ ID NO: 93849 - RNA, 15 nt, Homo sapiens
gucaguauguggaag

SEQ ID NO: 93850 - RNA, 17 nt, Homo sapiens
gaaaucuagaagacugu

SEQ ID NO: 93851 - RNA, 22 nt, Homo sapiens
ugucccucauccauagcaccuc

SEQ ID NO: 93852 - RNA, 12 nt, Homo sapiens
gaucccaugagc

SEQ ID NO: 93853 - RNA, 14 nt, Homo sapiens
cuuguaaagacugu

SEQ ID NO: 93854 - RNA, 23 nt, Homo sapiens
ccuuggugugcuguauccaucca

SEQ ID NO: 93855 - RNA, 12 nt, Homo sapiens
acauuuguucca

SEQ ID NO: 93856 - RNA, 14 nt, Homo sapiens
gaaggaauuauucc

SEQ ID NO: 93857 - RNA, 21 nt, Homo sapiens
ugcaggagucccugccaucau

SEQ ID NO: 93858 - RNA, 14 nt, Homo sapiens
ggcuuuguggcacu

SEQ ID NO: 93859 - RNA, 15 nt, Homo sapiens
aagucacuggccagu

SEQ ID NO: 93860 - RNA, 17 nt, Homo sapiens
accaucucuuuaccucc

SEQ ID NO: 93861 - RNA, 16 nt, Homo sapiens
cagccucuccacucau

SEQ ID NO: 93862 - RNA, 24 nt, Homo sapiens
uggagcugagcagguguucuucau

SEQ ID NO: 93863 - RNA, 12 nt, Homo sapiens
cucuuuaccucc

SEQ ID NO: 93864 - RNA, 18 nt, Homo sapiens
uauggguuggacaaccuc

SEQ ID NO: 93865 - RNA, 14 nt, Homo sapiens
acucaggggucauu

SEQ ID NO: 93866 - RNA, 20 nt, Homo sapiens
gauguaccagcaucucccag

SEQ ID NO: 93867 - RNA, 17 nt, Homo sapiens
caaaaaaucugaccaaa

SEQ ID NO: 93868 - RNA, 16 nt, Homo sapiens
cuuguaaagacuguag

SEQ ID NO: 93869 - RNA, 14 nt, Homo sapiens
gagcgagacuuggu

SEQ ID NO: 93870 - RNA, 16 nt, Homo sapiens
uuaccagagaaaaagg

SEQ ID NO: 93871 - RNA, 20 nt, Homo sapiens
uucuaccucuuggcugccuu

SEQ ID NO: 93872 - RNA, 20 nt, Homo sapiens
uguauuuaccuucuaccucu

SEQ ID NO: 93873 - RNA, 14 nt, Homo sapiens
cugugccuuuugcc

SEQ ID NO: 93874 - RNA, 20 nt, Homo sapiens
ccagaggaagggacaccaag

SEQ ID NO: 93875 - RNA, 23 nt, Homo sapiens
aagaaagagcaacaauccaucuc

SEQ ID NO: 93876 - RNA, 19 nt, Homo sapiens
cauugguguugacauacau

SEQ ID NO: 93877 - RNA, 17 nt, Homo sapiens
uccauugguguugacau

SEQ ID NO: 93878 - RNA, 22 nt, Homo sapiens
acuuaucccaagagaaugaaau

SEQ ID NO: 93879 - RNA, 17 nt, Homo sapiens
ucuuuauaaucuacucc

SEQ ID NO: 93880 - RNA, 21 nt, Homo sapiens
uuccggccuccugucccucau

SEQ ID NO: 93881 - RNA, 17 nt, Homo sapiens
caugaguuggcugggaa

SEQ ID NO: 93882 - RNA, 17 nt, Homo sapiens
ccagagaaaaagggagg

SEQ ID NO: 93883 - RNA, 20 nt, Homo sapiens
cucuacucuggagguuuguu

SEQ ID NO: 93884 - RNA, 15 nt, Homo sapiens
cugcuccccacguca

SEQ ID NO: 93885 - RNA, 23 nt, Homo sapiens
ccgggaggcagagguugcagugu

SEQ ID NO: 93886 - RNA, 23 nt, Homo sapiens
uguucuucauuaccucagugaga

SEQ ID NO: 93887 - RNA, 18 nt, Homo sapiens
uccaaacauuaaugcaau

SEQ ID NO: 93888 - RNA, 16 nt, Homo sapiens
gaucccaacacugcca

SEQ ID NO: 93889 - RNA, 20 nt, Homo sapiens
ucccugaagagaagggcagg

SEQ ID NO: 93890 - RNA, 21 nt, Homo sapiens
cucuacugaaaguacaaaaau

SEQ ID NO: 93891 - RNA, 17 nt, Homo sapiens
agcacguguggccuguu

SEQ ID NO: 93892 - RNA, 18 nt, Homo sapiens
acccucaucuuucuucca

SEQ ID NO: 93893 - RNA, 14 nt, Homo sapiens
acccucaucuuucu

SEQ ID NO: 93894 - RNA, 14 nt, Homo sapiens
aaagacuguagaag

SEQ ID NO: 93895 - RNA, 15 nt, Homo sapiens
uuugcuagcagaaau

SEQ ID NO: 93896 - RNA, 18 nt, Homo sapiens
cucaaagugacuauucag

SEQ ID NO: 93897 - RNA, 18 nt, Homo sapiens
agacauuugcuaugagcu

SEQ ID NO: 93898 - RNA, 15 nt, Homo sapiens
ccuaggcuagggugg

SEQ ID NO: 93899 - RNA, 22 nt, Homo sapiens
cugagagaggccauucuuuccc

SEQ ID NO: 93900 - RNA, 20 nt, Homo sapiens
uguagaagaaagagcaacaa

SEQ ID NO: 93901 - RNA, 22 nt, Homo sapiens
agaaagacuuaucaacauuugu

SEQ ID NO: 93902 - RNA, 18 nt, Homo sapiens
ucccugaagagaagggca

SEQ ID NO: 93903 - RNA, 18 nt, Homo sapiens
gaaaucuagaagacuguc

SEQ ID NO: 93904 - RNA, 17 nt, Homo sapiens
caacaauccaucucuca

SEQ ID NO: 93905 - RNA, 22 nt, Homo sapiens
aucuacuccuuguaaagacugu

SEQ ID NO: 93906 - RNA, 18 nt, Homo sapiens
agaaaucuagaagacugu

SEQ ID NO: 93907 - RNA, 19 nt, Homo sapiens
ucuauggguuggacaaccu

SEQ ID NO: 93908 - RNA, 14 nt, Homo sapiens
cuuuugucccagaa

SEQ ID NO: 93909 - RNA, 16 nt, Homo sapiens
gugugggaguguguaa

SEQ ID NO: 93910 - RNA, 20 nt, Homo sapiens
caggccauugucccugaaga

SEQ ID NO: 93911 - RNA, 20 nt, Homo sapiens
cagcuuuccucaucaggcca

SEQ ID NO: 93912 - RNA, 11 nt, Homo sapiens
gagaucccaac

SEQ ID NO: 93913 - RNA, 16 nt, Homo sapiens
cucaggaaccgaggca

SEQ ID NO: 93914 - RNA, 22 nt, Homo sapiens
aacauagugaaaccccaucucu

SEQ ID NO: 93915 - RNA, 21 nt, Homo sapiens
cauaccuggcccugugccuug

SEQ ID NO: 93916 - RNA, 13 nt, Homo sapiens
aggggucauucau

SEQ ID NO: 93917 - RNA, 14 nt, Homo sapiens
ccacauaccuggcc

SEQ ID NO: 93918 - RNA, 21 nt, Homo sapiens
cugugccuuggugugcuguau

SEQ ID NO: 93919 - RNA, 13 nt, Homo sapiens
ucucucaugacca

SEQ ID NO: 93920 - RNA, 18 nt, Homo sapiens
uccucgagaucccaacac

SEQ ID NO: 93921 - RNA, 15 nt, Homo sapiens
uuggcucuacccuga

SEQ ID NO: 93922 - RNA, 17 nt, Homo sapiens
agccgggagccugaccc

SEQ ID NO: 93923 - RNA, 14 nt, Homo sapiens
aaccucuaugcaau

SEQ ID NO: 93924 - RNA, 12 nt, Homo sapiens
uucauuaccuca

SEQ ID NO: 93925 - RNA, 23 nt, Homo sapiens
agagcugccugugccuuuugcca

SEQ ID NO: 93926 - RNA, 18 nt, Homo sapiens
aagacugucagcuuccaa

SEQ ID NO: 93927 - RNA, 20 nt, Homo sapiens
aagucacuggccaguggcug

SEQ ID NO: 93928 - RNA, 15 nt, Homo sapiens
ggacaccaagccuug

SEQ ID NO: 93929 - RNA, 17 nt, Homo sapiens
ucaugugacucuuucca

SEQ ID NO: 93930 - RNA, 18 nt, Homo sapiens
caaccggcuuuguggcac

SEQ ID NO: 93931 - RNA, 12 nt, Homo sapiens
cauugucccuga

SEQ ID NO: 93932 - RNA, 20 nt, Homo sapiens
acagacacucccacuuggca

SEQ ID NO: 93933 - RNA, 20 nt, Homo sapiens
ugcuguagacauuugcuaug

SEQ ID NO: 93934 - RNA, 23 nt, Homo sapiens
cugccuccuuuccccucccucag

SEQ ID NO: 93935 - RNA, 23 nt, Homo sapiens
guuucaaaaaaucugaccaaaac

SEQ ID NO: 93936 - RNA, 16 nt, Homo sapiens
uugugauguguccuga

SEQ ID NO: 93937 - RNA, 16 nt, Homo sapiens
ugucagcuuccaaaca

SEQ ID NO: 93938 - RNA, 16 nt, Homo sapiens
agucccagcuacuuga

SEQ ID NO: 93939 - RNA, 21 nt, Homo sapiens
ccaguggcuggaucugugagg

SEQ ID NO: 93940 - RNA, 21 nt, Homo sapiens
cauuggaccuuuccugaggaa

SEQ ID NO: 93941 - RNA, 16 nt, Homo sapiens
cagccacaaccaaaaa

SEQ ID NO: 93942 - RNA, 12 nt, Homo sapiens
aaaucuagaaga

SEQ ID NO: 93943 - RNA, 18 nt, Homo sapiens
cuggaccagccucuccac

SEQ ID NO: 93944 - RNA, 19 nt, Homo sapiens
gcuguagacauuugcuaug

SEQ ID NO: 93945 - RNA, 16 nt, Homo sapiens
gagccgggagccugac

SEQ ID NO: 93946 - RNA, 16 nt, Homo sapiens
agucauccucagauca

SEQ ID NO: 93947 - RNA, 23 nt, Homo sapiens
accuccuaauuccacacccucac

SEQ ID NO: 93948 - RNA, 19 nt, Homo sapiens
agcuggggaugucucucau

SEQ ID NO: 93949 - RNA, 17 nt, Homo sapiens
agguuagcugcucccca

SEQ ID NO: 93950 - RNA, 12 nt, Homo sapiens
ggaugucucuca

SEQ ID NO: 93951 - RNA, 16 nt, Homo sapiens
ggccagcaccaucucu

SEQ ID NO: 93952 - RNA, 22 nt, Homo sapiens
cauucacagcaagucacuggcc

SEQ ID NO: 93953 - RNA, 12 nt, Homo sapiens
guaaagacugua

SEQ ID NO: 93954 - RNA, 16 nt, Homo sapiens
ugucccgggacaccua

SEQ ID NO: 93955 - RNA, 19 nt, Homo sapiens
auucuuucccaacaccucu

SEQ ID NO: 93956 - RNA, 22 nt, Homo sapiens
cauaccuggcccugugccuugg

SEQ ID NO: 93957 - RNA, 16 nt, Homo sapiens
aagcaauaaccucaaa

SEQ ID NO: 93958 - RNA, 17 nt, Homo sapiens
gaagcguuguccucagc

SEQ ID NO: 93959 - RNA, 15 nt, Homo sapiens
ucaucuuucuuccaa

SEQ ID NO: 93960 - RNA, 18 nt, Homo sapiens
auuuaccuucuaccucuu

SEQ ID NO: 93961 - RNA, 23 nt, Homo sapiens
acauaccuggcccugugccuugg

SEQ ID NO: 93962 - RNA, 19 nt, Homo sapiens
gugugugggaguguguaau

SEQ ID NO: 93963 - RNA, 23 nt, Homo sapiens
uccacucaugugacucuuuccaa

SEQ ID NO: 93964 - RNA, 11 nt, Homo sapiens
ucauuaccuca

SEQ ID NO: 93965 - RNA, 14 nt, Homo sapiens
cuucagauuugccu

SEQ ID NO: 93966 - RNA, 16 nt, Homo sapiens
gggagaaugucaguau

SEQ ID NO: 93967 - RNA, 17 nt, Homo sapiens
ucaaaaaaucugaccaa

SEQ ID NO: 93968 - RNA, 19 nt, Homo sapiens
aaggaucccaugagcuccu

SEQ ID NO: 93969 - RNA, 18 nt, Homo sapiens
ugagaagccagcuuuccu

SEQ ID NO: 93970 - RNA, 17 nt, Homo sapiens
agccagaggucuggccc

SEQ ID NO: 93971 - RNA, 19 nt, Homo sapiens
ccagcaucucccaguucau

SEQ ID NO: 93972 - RNA, 14 nt, Homo sapiens
uccucaaagggaga

SEQ ID NO: 93973 - RNA, 15 nt, Homo sapiens
gauguuucaaaaaau

SEQ ID NO: 93974 - RNA, 13 nt, Homo sapiens
aagagcaacaauc

SEQ ID NO: 93975 - RNA, 22 nt, Homo sapiens
cuccauugguguugacauacau

SEQ ID NO: 93976 - RNA, 23 nt, Homo sapiens
acauagugaaaccccaucucuac

SEQ ID NO: 93977 - RNA, 15 nt, Homo sapiens
ugcugggcuuggcag

SEQ ID NO: 93978 - RNA, 17 nt, Homo sapiens
ggaaagaaaaagcaaua

SEQ ID NO: 93979 - RNA, 14 nt, Homo sapiens
aaggagagcauagg

SEQ ID NO: 93980 - RNA, 21 nt, Homo sapiens
gagaagccagcuuuccucauc

SEQ ID NO: 93981 - RNA, 14 nt, Homo sapiens
aaagugacuauuca

SEQ ID NO: 93982 - RNA, 20 nt, Homo sapiens
acucucagcagcuaugguag

SEQ ID NO: 93983 - RNA, 20 nt, Homo sapiens
ccuggaaagaaaaagcaaua

SEQ ID NO: 93984 - RNA, 15 nt, Homo sapiens
ggggaugucucucau

SEQ ID NO: 93985 - RNA, 22 nt, Homo sapiens
gagcuggggaugucucucauga

SEQ ID NO: 93986 - RNA, 14 nt, Homo sapiens
gauagaaggcuaug

SEQ ID NO: 93987 - RNA, 17 nt, Homo sapiens
uaugguucucucgcaag

SEQ ID NO: 93988 - RNA, 12 nt, Homo sapiens
uauaaucuacuc

SEQ ID NO: 93989 - RNA, 15 nt, Homo sapiens
ucauaaucacaaccc

SEQ ID NO: 93990 - RNA, 15 nt, Homo sapiens
aucuagaagacuguc

SEQ ID NO: 93991 - RNA, 17 nt, Homo sapiens
ucugcccgggagcucag

SEQ ID NO: 93992 - RNA, 21 nt, Homo sapiens
acucuggagguuuguuuagaa

SEQ ID NO: 93993 - RNA, 16 nt, Homo sapiens
guagacauuugcuaug

SEQ ID NO: 93994 - RNA, 21 nt, Homo sapiens
cuggggaugucucucaugacc

SEQ ID NO: 93995 - RNA, 20 nt, Homo sapiens
gcaauaaccucaaagugacu

SEQ ID NO: 93996 - RNA, 22 nt, Homo sapiens
cauagugaccaacauagugaaa

SEQ ID NO: 93997 - RNA, 18 nt, Homo sapiens
agugaaaccccaucucua

SEQ ID NO: 93998 - RNA, 14 nt, Homo sapiens
acuucccacggcuc

SEQ ID NO: 93999 - RNA, 17 nt, Homo sapiens
uccucagaucauuauca

SEQ ID NO: 94000 - RNA, 20 nt, Homo sapiens
uagucccagcuacuugagag

SEQ ID NO: 94001 - RNA, 23 nt, Homo sapiens
agcagaaaucuagaagacuguca

SEQ ID NO: 94002 - RNA, 20 nt, Homo sapiens
ucaggaugauacacuaugaa

SEQ ID NO: 94003 - RNA, 16 nt, Homo sapiens
gcagccacaaccaaaa

SEQ ID NO: 94004 - RNA, 14 nt, Homo sapiens
uuuccaaccggcuu

SEQ ID NO: 94005 - RNA, 19 nt, Homo sapiens
accuggcccugugccuugg

SEQ ID NO: 94006 - RNA, 16 nt, Homo sapiens
uccugucccucaucca

SEQ ID NO: 94007 - RNA, 16 nt, Homo sapiens
agggaaggaucccaug

SEQ ID NO: 94008 - RNA, 18 nt, Homo sapiens
cucaugugacucuuucca

SEQ ID NO: 94009 - RNA, 15 nt, Homo sapiens
acgccagacuuccca

SEQ ID NO: 94010 - RNA, 21 nt, Homo sapiens
uauuagagcugccugugccuu

SEQ ID NO: 94011 - RNA, 14 nt, Homo sapiens
gugaggggcucucu

SEQ ID NO: 94012 - RNA, 16 nt, Homo sapiens
uguaaauuuaugugau

SEQ ID NO: 94013 - RNA, 14 nt, Homo sapiens
cugccgagagucca

SEQ ID NO: 94014 - RNA, 18 nt, Homo sapiens
gaucauuaucagccugug

SEQ ID NO: 94015 - RNA, 18 nt, Homo sapiens
ccuccugucccucaucca

SEQ ID NO: 94016 - RNA, 15 nt, Homo sapiens
accuccacauaccug

SEQ ID NO: 94017 - RNA, 17 nt, Homo sapiens
gaggccauucuuuccca

SEQ ID NO: 94018 - RNA, 21 nt, Homo sapiens
aucuuucaggacucuaccuca

SEQ ID NO: 94019 - RNA, 16 nt, Homo sapiens
gaaccgaggcagggaa

SEQ ID NO: 94020 - RNA, 18 nt, Homo sapiens
ugcuguagacauuugcua

SEQ ID NO: 94021 - RNA, 14 nt, Homo sapiens
gaccuguugggagu

SEQ ID NO: 94022 - RNA, 13 nt, Homo sapiens
agcucuacucugg

SEQ ID NO: 94023 - RNA, 22 nt, Homo sapiens
uaugagcuggggaugucucuca

SEQ ID NO: 94024 - RNA, 21 nt, Homo sapiens
ggcuccucgagaucccaacac

SEQ ID NO: 94025 - RNA, 22 nt, Homo sapiens
gcacguguggccuguucuucua

SEQ ID NO: 94026 - RNA, 15 nt, Homo sapiens
cuucccacggcuccu

SEQ ID NO: 94027 - RNA, 20 nt, Homo sapiens
ggcagucugagagaggccau

SEQ ID NO: 94028 - RNA, 14 nt, Homo sapiens
gagaguccaucagc

SEQ ID NO: 94029 - RNA, 15 nt, Homo sapiens
ccugugccuuuugcc

SEQ ID NO: 94030 - RNA, 14 nt, Homo sapiens
aucucuuuaccucc

SEQ ID NO: 94031 - RNA, 23 nt, Homo sapiens
ugagcagguguucuucauuaccu

SEQ ID NO: 94032 - RNA, 23 nt, Homo sapiens
augagcuggggaugucucucaug

SEQ ID NO: 94033 - RNA, 19 nt, Homo sapiens
cuccuuguaaagacuguag

SEQ ID NO: 94034 - RNA, 23 nt, Homo sapiens
cuucuaccucuuggcugccuugu

SEQ ID NO: 94035 - RNA, 21 nt, Homo sapiens
ggcagggcugaggccucucau

SEQ ID NO: 94036 - RNA, 21 nt, Homo sapiens
caaaaaaaccucuaugcaauc

SEQ ID NO: 94037 - RNA, 14 nt, Homo sapiens
cuuucaggacucua

SEQ ID NO: 94038 - RNA, 20 nt, Homo sapiens
uuagagcugccugugccuuu

SEQ ID NO: 94039 - RNA, 12 nt, Homo sapiens
gaaggaucccau

SEQ ID NO: 94040 - RNA, 14 nt, Homo sapiens
ugauacacuaugaa

SEQ ID NO: 94041 - RNA, 16 nt, Homo sapiens
uucuucauuaccucag

SEQ ID NO: 94042 - RNA, 15 nt, Homo sapiens
ugauuguauuuaccu

SEQ ID NO: 94043 - RNA, 18 nt, Homo sapiens
ucaggccauugucccuga

SEQ ID NO: 94044 - RNA, 21 nt, Homo sapiens
cugugaggggcucucucauga

SEQ ID NO: 94045 - RNA, 14 nt, Homo sapiens
cgagaucaagagau

SEQ ID NO: 94046 - RNA, 19 nt, Homo sapiens
ucccucaggccgaaggagg

SEQ ID NO: 94047 - RNA, 16 nt, Homo sapiens
auugcaggagucccug

SEQ ID NO: 94048 - RNA, 16 nt, Homo sapiens
aaccucaaagugacua

SEQ ID NO: 94049 - RNA, 15 nt, Homo sapiens
aguauguggaagugu

SEQ ID NO: 94050 - RNA, 15 nt, Homo sapiens
auacacuaugaagau

SEQ ID NO: 94051 - RNA, 19 nt, Homo sapiens
agcuuuccucaucaggcca

SEQ ID NO: 94052 - RNA, 17 nt, Homo sapiens
uaaccucaaagugacua

SEQ ID NO: 94053 - RNA, 15 nt, Homo sapiens
aaaaccucuaugcaa

SEQ ID NO: 94054 - RNA, 21 nt, Homo sapiens
aaaauucuauuacaguauguc

SEQ ID NO: 94055 - RNA, 13 nt, Homo sapiens
ccucccucaggcc

SEQ ID NO: 94056 - RNA, 19 nt, Homo sapiens
ucuguguguguguaugugg

SEQ ID NO: 94057 - RNA, 13 nt, Homo sapiens
ggagggcaggcau

SEQ ID NO: 94058 - RNA, 22 nt, Homo sapiens
uccuuagccuuugucccagaau

SEQ ID NO: 94059 - RNA, 17 nt, Homo sapiens
uaugugggggucugugu

SEQ ID NO: 94060 - RNA, 16 nt, Homo sapiens
cuuucuuccaaacagg

SEQ ID NO: 94061 - RNA, 14 nt, Homo sapiens
gacucucagcagcu

SEQ ID NO: 94062 - RNA, 13 nt, Homo sapiens
ccaucucuuuacc

SEQ ID NO: 94063 - RNA, 16 nt, Homo sapiens
aaaacuucaguaagua

SEQ ID NO: 94064 - RNA, 17 nt, Homo sapiens
acucuaccucauaucag

SEQ ID NO: 94065 - RNA, 17 nt, Homo sapiens
aggccacagugcaauuu

SEQ ID NO: 94066 - RNA, 19 nt, Homo sapiens
cugcaccggggccugggca

SEQ ID NO: 94067 - RNA, 22 nt, Homo sapiens
ccucacugcuguagacauuugc

SEQ ID NO: 94068 - RNA, 22 nt, Homo sapiens
aaucugaguagagcagccacaa

SEQ ID NO: 94069 - RNA, 17 nt, Homo sapiens
ccagaaaagcaguggcu

SEQ ID NO: 94070 - RNA, 17 nt, Homo sapiens
uggaaagaaaaagcaau

SEQ ID NO: 94071 - RNA, 16 nt, Homo sapiens
cuuuguggcacugggg

SEQ ID NO: 94072 - RNA, 22 nt, Homo sapiens
uuucaaaaaaucugaccaaaac

SEQ ID NO: 94073 - RNA, 14 nt, Homo sapiens
gccauucuuuccca

SEQ ID NO: 94074 - RNA, 14 nt, Homo sapiens
gccacagugcaauu

SEQ ID NO: 94075 - RNA, 23 nt, Homo sapiens
auuccacacccucacugcuguag

SEQ ID NO: 94076 - RNA, 18 nt, Homo sapiens
cuccugucccucauccau

SEQ ID NO: 94077 - RNA, 13 nt, Homo sapiens
aaccucaaaguga

SEQ ID NO: 94078 - RNA, 16 nt, Homo sapiens
cugaaagaucuuucag

SEQ ID NO: 94079 - RNA, 20 nt, Homo sapiens
accaucucuuuaccuccuaa

SEQ ID NO: 94080 - RNA, 22 nt, Homo sapiens
acuccuuguaaagacuguagaa

SEQ ID NO: 94081 - RNA, 20 nt, Homo sapiens
gagaagccagcuuuccucau

SEQ ID NO: 94082 - RNA, 13 nt, Homo sapiens
ccuugugaaggaa

SEQ ID NO: 94083 - RNA, 21 nt, Homo sapiens
agagugggguagguugggaga

SEQ ID NO: 94084 - RNA, 17 nt, Homo sapiens
cuggcccugugccuugg

SEQ ID NO: 94085 - RNA, 13 nt, Homo sapiens
caacacacacugu

SEQ ID NO: 94086 - RNA, 16 nt, Homo sapiens
agcagccacaaccaaa

SEQ ID NO: 94087 - RNA, 13 nt, Homo sapiens
uggugugcuguau

SEQ ID NO: 94088 - RNA, 15 nt, Homo sapiens
auagcaccuccacau

SEQ ID NO: 94089 - RNA, 15 nt, Homo sapiens
guucugaaagugacu

SEQ ID NO: 94090 - RNA, 19 nt, Homo sapiens
cagaaaucuagaagacugu

SEQ ID NO: 94091 - RNA, 14 nt, Homo sapiens
guguccugcaccgg

SEQ ID NO: 94092 - RNA, 13 nt, Homo sapiens
uccugucccucau

SEQ ID NO: 94093 - RNA, 21 nt, Homo sapiens
uggcugggaauaagugccagg

SEQ ID NO: 94094 - RNA, 13 nt, Homo sapiens
acugcuguagaca

SEQ ID NO: 94095 - RNA, 17 nt, Homo sapiens
ccagcuuuccucaucag

SEQ ID NO: 94096 - RNA, 21 nt, Homo sapiens
uaaucugagaggccacagugc

SEQ ID NO: 94097 - RNA, 18 nt, Homo sapiens
ggccacagugcaauuuua

SEQ ID NO: 94098 - RNA, 14 nt, Homo sapiens
uuuaaaauugugau

SEQ ID NO: 94099 - RNA, 18 nt, Homo sapiens
ucagucuuuaaucugaga

SEQ ID NO: 94100 - RNA, 19 nt, Homo sapiens
gcugccuuuggacuugucc

SEQ ID NO: 94101 - RNA, 20 nt, Homo sapiens
auaccuggcccugugccuug

SEQ ID NO: 94102 - RNA, 18 nt, Homo sapiens
ccacucaugugacucuuu

SEQ ID NO: 94103 - RNA, 16 nt, Homo sapiens
gcugaggcaagagaau

SEQ ID NO: 94104 - RNA, 20 nt, Homo sapiens
ccucgagaucccaacacugc

SEQ ID NO: 94105 - RNA, 18 nt, Homo sapiens
aggcagagguugcagugu

SEQ ID NO: 94106 - RNA, 23 nt, Homo sapiens
acuugucccgggacaccuaggcu

SEQ ID NO: 94107 - RNA, 17 nt, Homo sapiens
gccuggaccagccucuc

SEQ ID NO: 94108 - RNA, 22 nt, Homo sapiens
cacacacuguucugaaagugac

SEQ ID NO: 94109 - RNA, 14 nt, Homo sapiens
ccagcuuuccucau

SEQ ID NO: 94110 - RNA, 21 nt, Homo sapiens
cagcaccaucucuuuaccucc

SEQ ID NO: 94111 - RNA, 17 nt, Homo sapiens
cacuuaucccaagagaa

SEQ ID NO: 94112 - RNA, 20 nt, Homo sapiens
uguaaucccaacauuuuggg

SEQ ID NO: 94113 - RNA, 18 nt, Homo sapiens
cgggagccugacccucau

SEQ ID NO: 94114 - RNA, 19 nt, Homo sapiens
agacauuugcuaugagcug

SEQ ID NO: 94115 - RNA, 16 nt, Homo sapiens
ccuccucugcccggga

SEQ ID NO: 94116 - RNA, 12 nt, Homo sapiens
auaaucuacucc

SEQ ID NO: 94117 - RNA, 13 nt, Homo sapiens
aucuguaccucug

SEQ ID NO: 94118 - RNA, 20 nt, Homo sapiens
uauggguuggacaaccucau

SEQ ID NO: 94119 - RNA, 19 nt, Homo sapiens
cauccaacauuaaaagcca

SEQ ID NO: 94120 - RNA, 18 nt, Homo sapiens
ccaaaacaaacaaacaga

SEQ ID NO: 94121 - RNA, 20 nt, Homo sapiens
ucaaagggagagagugcuau

SEQ ID NO: 94122 - RNA, 11 nt, Homo sapiens
ugaaagaucuu

SEQ ID NO: 94123 - RNA, 12 nt, Homo sapiens
aucccaagagaa

SEQ ID NO: 94124 - RNA, 14 nt, Homo sapiens
gcuuagcuugaggg

SEQ ID NO: 94125 - RNA, 23 nt, Homo sapiens
gcguggaacucgugucuggcaca

SEQ ID NO: 94126 - RNA, 17 nt, Homo sapiens
uaggccagcaccaucuc

SEQ ID NO: 94127 - RNA, 17 nt, Homo sapiens
caugccuguagucccag

SEQ ID NO: 94128 - RNA, 17 nt, Homo sapiens
agacugucagcuuccaa

SEQ ID NO: 94129 - RNA, 15 nt, Homo sapiens
ccuuggugugcugua

SEQ ID NO: 94130 - RNA, 16 nt, Homo sapiens
ccauagugaccaacau

SEQ ID NO: 94131 - RNA, 18 nt, Homo sapiens
cuggugguggcucgggag

SEQ ID NO: 94132 - RNA, 19 nt, Homo sapiens
aggccauucuuucccaaca

SEQ ID NO: 94133 - RNA, 14 nt, Homo sapiens
aacaauccaucucu

SEQ ID NO: 94134 - RNA, 14 nt, Homo sapiens
gggaguguguaauu

SEQ ID NO: 94135 - RNA, 19 nt, Homo sapiens
uccugucccucauccauag

SEQ ID NO: 94136 - RNA, 21 nt, Homo sapiens
agguuuguuuagaagaagugu

SEQ ID NO: 94137 - RNA, 22 nt, Homo sapiens
gccuggcuguggccuaaccugc

SEQ ID NO: 94138 - RNA, 13 nt, Homo sapiens
accucuaugcaau

SEQ ID NO: 94139 - RNA, 20 nt, Homo sapiens
acacuaugaagauguuucaa

SEQ ID NO: 94140 - RNA, 21 nt, Homo sapiens
auuuaugguucucaggccuga

SEQ ID NO: 94141 - RNA, 15 nt, Homo sapiens
agccacaaccaaaaa

SEQ ID NO: 94142 - RNA, 13 nt, Homo sapiens
aucuuucuuccaa

SEQ ID NO: 94143 - RNA, 14 nt, Homo sapiens
gagaaaaagggagg

SEQ ID NO: 94144 - RNA, 13 nt, Homo sapiens
cauuaaugcaaug

SEQ ID NO: 94145 - RNA, 17 nt, Homo sapiens
guuucaaaaaaucugac

SEQ ID NO: 94146 - RNA, 18 nt, Homo sapiens
uuugcuagcagaaaucua

SEQ ID NO: 94147 - RNA, 22 nt, Homo sapiens
ugagcuggggaugucucucaug

SEQ ID NO: 94148 - RNA, 18 nt, Homo sapiens
auuuuauuuuucucauga

SEQ ID NO: 94149 - RNA, 21 nt, Homo sapiens
cauccuacccccugugccuug

SEQ ID NO: 94150 - RNA, 13 nt, Homo sapiens
aucugaccaaaac

SEQ ID NO: 94151 - RNA, 13 nt, Homo sapiens
cuaguucugccag

SEQ ID NO: 94152 - RNA, 14 nt, Homo sapiens
uauuuuucucauga

SEQ ID NO: 94153 - RNA, 18 nt, Homo sapiens
ccaacacugccagcauuu

SEQ ID NO: 94154 - RNA, 13 nt, Homo sapiens
aacacacacuguu

SEQ ID NO: 94155 - RNA, 13 nt, Homo sapiens
uagcagaaaucua

SEQ ID NO: 94156 - RNA, 19 nt, Homo sapiens
gaaaucuagaagacuguca

SEQ ID NO: 94157 - RNA, 15 nt, Homo sapiens
aucucuuuaccuccu

SEQ ID NO: 94158 - RNA, 19 nt, Homo sapiens
uaucagccugugccacgau

SEQ ID NO: 94159 - RNA, 17 nt, Homo sapiens
ucucaugauagaaggcu

SEQ ID NO: 94160 - RNA, 23 nt, Homo sapiens
acaauccaucucucaaguagugu

SEQ ID NO: 94161 - RNA, 19 nt, Homo sapiens
ucagcacguguggccuguu

SEQ ID NO: 94162 - RNA, 22 nt, Homo sapiens
ugggccacucaggggucauuca

SEQ ID NO: 94163 - RNA, 19 nt, Homo sapiens
gcucuacccugaguucaua

SEQ ID NO: 94164 - RNA, 17 nt, Homo sapiens
aacaugcuugcauuaua

SEQ ID NO: 94165 - RNA, 15 nt, Homo sapiens
aggagucccugccau

SEQ ID NO: 94166 - RNA, 16 nt, Homo sapiens
uuagagcugccugugc

SEQ ID NO: 94167 - RNA, 21 nt, Homo sapiens
uaggaacugcugggcuuggca

SEQ ID NO: 94168 - RNA, 22 nt, Homo sapiens
ugcuucuaguucugccaggaga

SEQ ID NO: 94169 - RNA, 12 nt, Homo sapiens
aauugcugaaag

SEQ ID NO: 94170 - RNA, 14 nt, Homo sapiens
aggggucauucaug

SEQ ID NO: 94171 - RNA, 21 nt, Homo sapiens
ugacccucaucuuucuuccaa

SEQ ID NO: 94172 - RNA, 18 nt, Homo sapiens
gaaaccacacagacuugg

SEQ ID NO: 94173 - RNA, 19 nt, Homo sapiens
gcgaagcguuguccucagc

SEQ ID NO: 94174 - RNA, 15 nt, Homo sapiens
cucagaucauuauca

SEQ ID NO: 94175 - RNA, 14 nt, Homo sapiens
uaaacaugcuugca

SEQ ID NO: 94176 - RNA, 20 nt, Homo sapiens
cuaguucugccaggagacag

SEQ ID NO: 94177 - RNA, 13 nt, Homo sapiens
caggagucccugc

SEQ ID NO: 94178 - RNA, 16 nt, Homo sapiens
gucaucuguaccucug

SEQ ID NO: 94179 - RNA, 15 nt, Homo sapiens
uguguuggcacaugc

SEQ ID NO: 94180 - RNA, 16 nt, Homo sapiens
cauggggcugauugua

SEQ ID NO: 94181 - RNA, 12 nt, Homo sapiens
gcuuuguggcac

SEQ ID NO: 94182 - RNA, 14 nt, Homo sapiens
ugggucaguuguau

SEQ ID NO: 94183 - RNA, 18 nt, Homo sapiens
cagggauucuuccugcuu

SEQ ID NO: 94184 - RNA, 16 nt, Homo sapiens
gggagagagugcuauu

SEQ ID NO: 94185 - RNA, 23 nt, Homo sapiens
cugagcagguguucuucauuacc

SEQ ID NO: 94186 - RNA, 20 nt, Homo sapiens
cauucuuucccaacaccucu

SEQ ID NO: 94187 - RNA, 21 nt, Homo sapiens
ccauggggcugauuguauuua

SEQ ID NO: 94188 - RNA, 18 nt, Homo sapiens
caacauuuguuccaugag

SEQ ID NO: 94189 - RNA, 14 nt, Homo sapiens
acuuaucaacauuu

SEQ ID NO: 94190 - RNA, 16 nt, Homo sapiens
uuucccaacaccucuu

SEQ ID NO: 94191 - RNA, 19 nt, Homo sapiens
cuuggcagcccgggucauc

SEQ ID NO: 94192 - RNA, 13 nt, Homo sapiens
cuuucuuccaaac

SEQ ID NO: 94193 - RNA, 14 nt, Homo sapiens
accuucuaccucuu

SEQ ID NO: 94194 - RNA, 23 nt, Homo sapiens
agacacucccacuuggcaucauu

SEQ ID NO: 94195 - RNA, 20 nt, Homo sapiens
ucaaaaaaucugaccaaaac

SEQ ID NO: 94196 - RNA, 14 nt, Homo sapiens
gggcucucucauga

SEQ ID NO: 94197 - RNA, 15 nt, Homo sapiens
ccuccugucccucau

SEQ ID NO: 94198 - RNA, 16 nt, Homo sapiens
ugugauggcaaagaag

SEQ ID NO: 94199 - RNA, 21 nt, Homo sapiens
aggcagggaaggaucccauga

SEQ ID NO: 94200 - RNA, 15 nt, Homo sapiens
agggaaguccuugca

SEQ ID NO: 94201 - RNA, 14 nt, Homo sapiens
agggugacuaugga

SEQ ID NO: 94202 - RNA, 12 nt, Homo sapiens
uauucccaugag

SEQ ID NO: 94203 - RNA, 16 nt, Homo sapiens
accugccgagagucca

SEQ ID NO: 94204 - RNA, 12 nt, Homo sapiens
gccugugccuuu

SEQ ID NO: 94205 - RNA, 21 nt, Homo sapiens
uuccacacccucacugcugua

SEQ ID NO: 94206 - RNA, 21 nt, Homo sapiens
ucuuucaggacucuaccucau

SEQ ID NO: 94207 - RNA, 12 nt, Homo sapiens
uacacuaugaag

SEQ ID NO: 94208 - RNA, 17 nt, Homo sapiens
agccuuggcucuacccu

SEQ ID NO: 94209 - RNA, 15 nt, Homo sapiens
ugucccagaaaagca

SEQ ID NO: 94210 - RNA, 10 nt, Homo sapiens
gggucugugu

SEQ ID NO: 94211 - RNA, 16 nt, Homo sapiens
uuggcagcucuacucu

SEQ ID NO: 94212 - RNA, 17 nt, Homo sapiens
uacccccugugccuugu

SEQ ID NO: 94213 - RNA, 15 nt, Homo sapiens
agaccauagugacca

SEQ ID NO: 94214 - RNA, 14 nt, Homo sapiens
cgccagacuuccca

SEQ ID NO: 94215 - RNA, 21 nt, Homo sapiens
cagaaaucuagaagacuguca

SEQ ID NO: 94216 - RNA, 16 nt, Homo sapiens
gcccgggagcucagga

SEQ ID NO: 94217 - RNA, 18 nt, Homo sapiens
accaaaugcuuuuccuca

SEQ ID NO: 94218 - RNA, 15 nt, Homo sapiens
acauacauccaacau

SEQ ID NO: 94219 - RNA, 23 nt, Homo sapiens
uuauauuuguaaauuuaugugau

SEQ ID NO: 94220 - RNA, 15 nt, Homo sapiens
ggcccugugccuugg

SEQ ID NO: 94221 - RNA, 18 nt, Homo sapiens
aggagggaggugcuucua

SEQ ID NO: 94222 - RNA, 19 nt, Homo sapiens
gagaggccacagugcaauu

SEQ ID NO: 94223 - RNA, 16 nt, Homo sapiens
gacaccuaggcuaggg

SEQ ID NO: 94224 - RNA, 17 nt, Homo sapiens
aucuagaagacugucag

SEQ ID NO: 94225 - RNA, 14 nt, Homo sapiens
acauuuguuccaug

SEQ ID NO: 94226 - RNA, 16 nt, Homo sapiens
acaaccaaaaaauucu

SEQ ID NO: 94227 - RNA, 14 nt, Homo sapiens
gcuggggaugucuc

SEQ ID NO: 94228 - RNA, 13 nt, Homo sapiens
ggggcucucucau

SEQ ID NO: 94229 - RNA, 15 nt, Homo sapiens
ccauugguguugaca

SEQ ID NO: 94230 - RNA, 20 nt, Homo sapiens
acugcuguagacauuugcua

SEQ ID NO: 94231 - RNA, 15 nt, Homo sapiens
cugccgagaguccau

SEQ ID NO: 94232 - RNA, 14 nt, Homo sapiens
uagaagacugucag

SEQ ID NO: 94233 - RNA, 12 nt, Homo sapiens
uggcugccuugu

SEQ ID NO: 94234 - RNA, 16 nt, Homo sapiens
aagccagcuuuccuca

SEQ ID NO: 94235 - RNA, 22 nt, Homo sapiens
agcaucucccaguucauaauca

SEQ ID NO: 94236 - RNA, 23 nt, Homo sapiens
caugaccaaaugcuuuuccucaa

SEQ ID NO: 94237 - RNA, 18 nt, Homo sapiens
accuggcccugugccuug

SEQ ID NO: 94238 - RNA, 20 nt, Homo sapiens
caucucuacugaaaguacaa

SEQ ID NO: 94239 - RNA, 13 nt, Homo sapiens
aaucugaccaaaa

SEQ ID NO: 94240 - RNA, 21 nt, Homo sapiens
agcuugagggugacuauggag

SEQ ID NO: 94241 - RNA, 18 nt, Homo sapiens
ugagcuggggaugucucu

SEQ ID NO: 94242 - RNA, 23 nt, Homo sapiens
ugaagauguuucaaaaaaucuga

SEQ ID NO: 94243 - RNA, 15 nt, Homo sapiens
gacaaccucauuuua

SEQ ID NO: 94244 - RNA, 22 nt, Homo sapiens
cugacccucaucuuucuuccaa

SEQ ID NO: 94245 - RNA, 21 nt, Homo sapiens
aaagagcaacaauccaucucu

SEQ ID NO: 94246 - RNA, 11 nt, Homo sapiens
ucccucaggcc

SEQ ID NO: 94247 - RNA, 16 nt, Homo sapiens
ggccauucuuucccaa

SEQ ID NO: 94248 - RNA, 15 nt, Homo sapiens
cuuaggccagcacca

SEQ ID NO: 94249 - RNA, 14 nt, Homo sapiens
ccauagcaccucca

SEQ ID NO: 94250 - RNA, 21 nt, Dengue virus
uccgggaggccacaaaccaug

SEQ ID NO: 94251 - RNA, 12 nt, Dengue virus
ugcuaccuguga

SEQ ID NO: 94252 - RNA, 23 nt, Dengue virus
uaaaaaauccgggaggccacaaa

SEQ ID NO: 94253 - RNA, 19 nt, Dengue virus
gcucaccugagaaggugua

SEQ ID NO: 94254 - RNA, 13 nt, Dengue virus
gcccaaggugaga

SEQ ID NO: 94255 - RNA, 17 nt, Dengue virus
gcauauugacgcuggga

SEQ ID NO: 94256 - RNA, 15 nt, Dengue virus
gagcaaacugugcag

SEQ ID NO: 94257 - RNA, 15 nt, Dengue virus
gagaugaagcuguag

SEQ ID NO: 94258 - RNA, 18 nt, Dengue virus
cagcauauugacgcuggg

SEQ ID NO: 94259 - RNA, 18 nt, Dengue virus
agcuguagucucacugga

SEQ ID NO: 94260 - RNA, 20 nt, Dengue virus
aggccacuuugaugccauag

SEQ ID NO: 94261 - RNA, 16 nt, Dengue virus
accauggaagcuguac

SEQ ID NO: 94262 - RNA, 15 nt, Dengue virus
accugagaaggugua

SEQ ID NO: 94263 - RNA, 14 nt, Dengue virus
aaacuaugcuaccu

SEQ ID NO: 94264 - RNA, 12 nt, Dengue virus
gaugaagcugua

SEQ ID NO: 94265 - RNA, 24 nt, Dengue virus
gcaaacugugcagccuguagcuca

SEQ ID NO: 94266 - RNA, 18 nt, Dengue virus
gccacaaaccauggaagc

SEQ ID NO: 94267 - RNA, 20 nt, Dengue virus
cuagagguuagaggagaccc

SEQ ID NO: 94268 - RNA, 19 nt, Dengue virus
cgggaaaaacuaugcuacc

SEQ ID NO: 94269 - RNA, 16 nt, Dengue virus
ugucuccucagcauca

SEQ ID NO: 94270 - RNA, 23 nt, Dengue virus
ugacgcugggaaagaccagagau

SEQ ID NO: 94271 - RNA, 17 nt, Dengue virus
uguagcucaccugagaa

SEQ ID NO: 94272 - RNA, 16 nt, Dengue virus
uccaaggacguuaaaa

SEQ ID NO: 94273 - RNA, 21 nt, Dengue virus
cacaaaccauggaagcuguac

SEQ ID NO: 94274 - RNA, 22 nt, Dengue virus
cagccuguagcucaccugagaa

SEQ ID NO: 94275 - RNA, 13 nt, Dengue virus
auggaagcuguac

SEQ ID NO: 94276 - RNA, 12 nt, Dengue virus
augaagcuguag

SEQ ID NO: 94277 - RNA, 15 nt, Dengue virus
augcuaccugugagc

SEQ ID NO: 94278 - RNA, 21 nt, Dengue virus
aacugugcagccuguagcuca

SEQ ID NO: 94279 - RNA, 16 nt, Dengue virus
acuuugaugccauagc

SEQ ID NO: 94280 - RNA, 14 nt, Dengue virus
aaacagcauauuga

SEQ ID NO: 94281 - RNA, 14 nt, Dengue virus
ugaagcuguagucu

SEQ ID NO: 94282 - RNA, 14 nt, Dengue virus
uaugcuaccuguga

SEQ ID NO: 94283 - RNA, 16 nt, Dengue virus
cguuaaaagaagucag

SEQ ID NO: 94284 - RNA, 20 nt, Dengue virus
cuagcgguuagaggagaccc

SEQ ID NO: 94285 - RNA, 20 nt, Dengue virus
cugcugucuccucagcauca

SEQ ID NO: 94286 - RNA, 14 nt, Dengue virus
cugugcagccugua

SEQ ID NO: 94287 - RNA, 19 nt, Dengue virus
cugugcagccuguagcuca

SEQ ID NO: 94288 - RNA, 21 nt, Dengue virus
cugugcagccuguagcucacc

SEQ ID NO: 94289 - RNA, 23 nt, Dengue virus
gcaaacugugcagccuguagcuc

SEQ ID NO: 94290 - RNA, 19 nt, Dengue virus
gcaacaaugggggcccaag

SEQ ID NO: 94291 - RNA, 17 nt, Dengue virus
ggccacaaaccauggaa

SEQ ID NO: 94292 - RNA, 20 nt, Dengue virus
aggugagaugaagcuguagu

SEQ ID NO: 94293 - RNA, 22 nt, Dengue virus
agccuguagcucaccugagaag

SEQ ID NO: 94294 - RNA, 13 nt, Dengue virus
agcaaacugugca

SEQ ID NO: 94295 - RNA, 15 nt, Dengue virus
caaaaaacagcauau

SEQ ID NO: 94296 - RNA, 21 nt, Dengue virus
caaacugugcagccuguagcu

SEQ ID NO: 94297 - RNA, 12 nt, Dengue virus
auuaagccauag

SEQ ID NO: 94298 - RNA, 13 nt, Dengue virus
auuaagccauagu

SEQ ID NO: 94299 - RNA, 12 nt, Dengue virus
auggaagcugua

SEQ ID NO: 94300 - RNA, 22 nt, Dengue virus
caugaaacaaaacagaagucag

SEQ ID NO: 94301 - RNA, 18 nt, Dengue virus
cccguccaaggacguuaa

SEQ ID NO: 94302 - RNA, 22 nt, Dengue virus
cccaaggugagaugaagcugua

SEQ ID NO: 94303 - RNA, 13 nt, Dengue virus
ugagcaaacugug

SEQ ID NO: 94304 - RNA, 15 nt, Dengue virus
uugagcaaacugugc

SEQ ID NO: 94305 - RNA, 21 nt, Dengue virus
uugaugccauagcuugagcaa

SEQ ID NO: 94306 - RNA, 14 nt, Dengue virus
aagcuguagucuca

SEQ ID NO: 94307 - RNA, 23 nt, Dengue virus
uaaaagaagucaggccacuuuga

SEQ ID NO: 94308 - RNA, 15 nt, Dengue virus
guggacuagcgguua

SEQ ID NO: 94309 - RNA, 16 nt, Dengue virus
guagcucaccugagaa

SEQ ID NO: 94310 - RNA, 15 nt, Dengue virus
ucggauuaagccaua

SEQ ID NO: 94311 - RNA, 13 nt, Dengue virus
uaugcuaccugug

SEQ ID NO: 94312 - RNA, 20 nt, Dengue virus
ucaccugagaagguguaaaa

SEQ ID NO: 94313 - RNA, 13 nt, Dengue virus
cauggaagcugua

SEQ ID NO: 94314 - RNA, 22 nt, Dengue virus
ccauagcuugagcaaacugugc

SEQ ID NO: 94315 - RNA, 17 nt, Dengue virus
cuguagcucaccugaga

SEQ ID NO: 94316 - RNA, 20 nt, Dengue virus
cgcugggaaagaccagagau

SEQ ID NO: 94317 - RNA, 21 nt, Dengue virus
gggaggccacaaaccauggaa

SEQ ID NO: 94318 - RNA, 17 nt, Dengue virus
gggcccaaggugagaug

SEQ ID NO: 94319 - RNA, 14 nt, Dengue virus
ggauuaagccauag

SEQ ID NO: 94320 - RNA, 16 nt, Dengue virus
ggauuaagccauagua

SEQ ID NO: 94321 - RNA, 20 nt, Dengue virus
ggcccaaggugagaugaagc

SEQ ID NO: 94322 - RNA, 17 nt, Dengue virus
gcuguagucucacugga

SEQ ID NO: 94323 - RNA, 15 nt, Dengue virus
gcccaaggugagaug

SEQ ID NO: 94324 - RNA, 22 nt, Dengue virus
gaagcuguagucucacuggaag

SEQ ID NO: 94325 - RNA, 18 nt, Dengue virus
agccuguagcucaccuga

SEQ ID NO: 94326 - RNA, 14 nt, Dengue virus
agaucgcagcaaca

SEQ ID NO: 94327 - RNA, 20 nt, Dengue virus
aguacgggaaaaacuaugcu

SEQ ID NO: 94328 - RNA, 18 nt, Dengue virus
augggggcccaaggugag

SEQ ID NO: 94329 - RNA, 17 nt, Dengue virus
caccugagaagguguaa

SEQ ID NO: 94330 - RNA, 17 nt, Dengue virus
aacuaugcuaccuguga

SEQ ID NO: 94331 - RNA, 15 nt, Dengue virus
accauggaagcugua

SEQ ID NO: 94332 - RNA, 19 nt, Dengue virus
agaagucaggccacuuuga

SEQ ID NO: 94333 - RNA, 14 nt, Dengue virus
acuaugcuaccugu

SEQ ID NO: 94334 - RNA, 23 nt, Dobrava virus
acuaacaacaacuaccuaccuca

SEQ ID NO: 94335 - RNA, 14 nt, Dobrava virus
acuaccuaccucaa

SEQ ID NO: 94336 - RNA, 16 nt, Dobrava virus
accucaacaacuacua

SEQ ID NO: 94337 - RNA, 21 nt, Dobrava virus
acacuaccucaacaacuacua

SEQ ID NO: 94338 - RNA, 18 nt, Dobrava virus
acaacaacuaccuaccuc

SEQ ID NO: 94339 - RNA, 20 nt, Dobrava virus
acaacaacuaccuaccucaa

SEQ ID NO: 94340 - RNA, 16 nt, Dobrava virus
acaacuaccuaccuca

SEQ ID NO: 94341 - RNA, 14 nt, Dobrava virus
aacuaccuaccuca

SEQ ID NO: 94342 - RNA, 13 nt, Dobrava virus
aauguauuugcac

SEQ ID NO: 94343 - RNA, 11 nt, Dobrava virus
cacuaccucaa

SEQ ID NO: 94344 - RNA, 17 nt, Dobrava virus
cacuaccucaacaacua

SEQ ID NO: 94345 - RNA, 18 nt, Dobrava virus
caacaacuaccuaccuca

SEQ ID NO: 94346 - RNA, 19 nt, Dobrava virus
caacaacuaccuaccucaa

SEQ ID NO: 94347 - RNA, 18 nt, Dobrava virus
caacaacuacuaccucau

SEQ ID NO: 94348 - RNA, 14 nt, Dobrava virus
caacuacuaccuca

SEQ ID NO: 94349 - RNA, 15 nt, Dobrava virus
caacuaccuaccuca

SEQ ID NO: 94350 - RNA, 15 nt, Dobrava virus
auguauuugcacuag

SEQ ID NO: 94351 - RNA, 19 nt, Dobrava virus
auuaacuuuuuacauuuau

SEQ ID NO: 94352 - RNA, 12 nt, Dobrava virus
auuauacuacug

SEQ ID NO: 94353 - RNA, 18 nt, Dobrava virus
auuugaucuguacuaaca

SEQ ID NO: 94354 - RNA, 15 nt, Dobrava virus
auuuuccggagcaua

SEQ ID NO: 94355 - RNA, 21 nt, Dobrava virus
cuuuuccuuucuuuacuaaca

SEQ ID NO: 94356 - RNA, 14 nt, Dobrava virus
aacaacaacuaccu

SEQ ID NO: 94357 - RNA, 16 nt, Dobrava virus
gcugcauuaacugcuu

SEQ ID NO: 94358 - RNA, 23 nt, Dobrava virus
ggccauuuauccguuauguaauc

SEQ ID NO: 94359 - RNA, 13 nt, Dobrava virus
cuaccuaccucaa

SEQ ID NO: 94360 - RNA, 16 nt, Dobrava virus
ccguuauguaaucuca

SEQ ID NO: 94361 - RNA, 17 nt, Dobrava virus
cauuugaucuguacuaa

SEQ ID NO: 94362 - RNA, 16 nt, Dobrava virus
uauguaaucucagggu

SEQ ID NO: 94363 - RNA, 22 nt, Dobrava virus
uauggauguagauuucauuuga

SEQ ID NO: 94364 - RNA, 22 nt, Dobrava virus
uaucuugcggagcauacuacua

SEQ ID NO: 94365 - RNA, 14 nt, Dobrava virus
uauccguuauguaa

SEQ ID NO: 94366 - RNA, 19 nt, Dobrava virus
uaucccaugcuuuauguaa

SEQ ID NO: 94367 - RNA, 20 nt, Dobrava virus
uaucccaugcuuuauguaau

SEQ ID NO: 94368 - RNA, 14 nt, Dobrava virus
ucuguacuuauuaa

SEQ ID NO: 94369 - RNA, 19 nt, Dobrava virus
ucccaugcuuuauguaauc

SEQ ID NO: 94370 - RNA, 16 nt, Dobrava virus
uccuucauuacuauaa

SEQ ID NO: 94371 - RNA, 23 nt, Dobrava virus
guauauagcuuucaacaaugcaa

SEQ ID NO: 94372 - RNA, 21 nt, Dobrava virus
guacuaacaucuuauuuccuu

SEQ ID NO: 94373 - RNA, 16 nt, Dobrava virus
uaacaacaacuaccua

SEQ ID NO: 94374 - RNA, 21 nt, Dobrava virus
uaacaacaacuaccuaccuca

SEQ ID NO: 94375 - RNA, 15 nt, Dobrava virus
aacaacacuaccuca

SEQ ID NO: 94376 - RNA, 11 nt, Dobrava virus
uaccuaccuca

SEQ ID NO: 94377 - RNA, 23 nt, Dobrava virus
uaccucaacaacuacuaccucau

SEQ ID NO: 94378 - RNA, 14 nt, Dobrava virus
aacacuaccucaac

SEQ ID NO: 94379 - RNA, 21 nt, Dobrava virus
aacacuaccucaacaacuacu

SEQ ID NO: 94380 - RNA, 22 nt, Dobrava virus
aacacuaccucaacaacuacua

SEQ ID NO: 94381 - RNA, 22 nt, Dobrava virus
uuguugcauuaucccaugcuuu

SEQ ID NO: 94382 - RNA, 15 nt, Dobrava virus
ugcuuggacuggaau

SEQ ID NO: 94383 - RNA, 13 nt, Dobrava virus
ugcacuagggguu

SEQ ID NO: 94384 - RNA, 17 nt, Dobrava virus
uggugaauguauuugca

SEQ ID NO: 94385 - RNA, 20 nt, Dobrava virus
uggauguagauuucauuuga

SEQ ID NO: 94386 - RNA, 16 nt, Dobrava virus
uguugcauuaucccau

SEQ ID NO: 94387 - RNA, 20 nt, Dobrava virus
ccaugcuuuauguaauccca

SEQ ID NO: 94388 - RNA, 16 nt, Dobrava virus
caugcuuuauguaauc

SEQ ID NO: 94389 - RNA, 16 nt, Dobrava virus
cauuugaucuguacua

SEQ ID NO: 94390 - RNA, 20 nt, Dobrava virus
auuaucccaugcuuuaugua

SEQ ID NO: 94391 - RNA, 17 nt, Dobrava virus
auuuuccggagcauacu

SEQ ID NO: 94392 - RNA, 21 nt, Dobrava virus
auuuuccggagcauacuacua

SEQ ID NO: 94393 - RNA, 14 nt, Dobrava virus
caacuaccuaccuc

SEQ ID NO: 94394 - RNA, 16 nt, Dobrava virus
caacuaccuaccucaa

SEQ ID NO: 94395 - RNA, 13 nt, Dobrava virus
caacuacuaccuc

SEQ ID NO: 94396 - RNA, 13 nt, Dobrava virus
auaacuccuucau

SEQ ID NO: 94397 - RNA, 18 nt, Dobrava virus
acaacaacacuaccucaa

SEQ ID NO: 94398 - RNA, 14 nt, Dobrava virus
acaacaacuaccua

SEQ ID NO: 94399 - RNA, 19 nt, Dobrava virus
acaacaacuaccuaccuca

SEQ ID NO: 94400 - RNA, 14 nt, Dobrava virus
acaacacuaccuca

SEQ ID NO: 94401 - RNA, 15 nt, Dobrava virus
acaacacuaccucaa

SEQ ID NO: 94402 - RNA, 21 nt, Dobrava virus
acaacacuaccucaacaacua

SEQ ID NO: 94403 - RNA, 15 nt, Dobrava virus
acaacuacuaccuca

SEQ ID NO: 94404 - RNA, 10 nt, Dobrava virus
acuaccucaa

SEQ ID NO: 94405 - RNA, 19 nt, Dobrava virus
acuaccucauugauuugcu

SEQ ID NO: 94406 - RNA, 20 nt, Dobrava virus
acuaccucauugauuugcuu

SEQ ID NO: 94407 - RNA, 14 nt, Dobrava virus
acuaacaacaacua

SEQ ID NO: 94408 - RNA, 17 nt, Dobrava virus
gcuuuauguaaucccac

SEQ ID NO: 94409 - RNA, 20 nt, Dobrava virus
guacguggguauuucuauau

SEQ ID NO: 94410 - RNA, 13 nt, Dobrava virus
guacuaacaucuu

SEQ ID NO: 94411 - RNA, 20 nt, Dobrava virus
uauauuuauuuucauuuucc

SEQ ID NO: 94412 - RNA, 12 nt, Dobrava virus
uaccuaccucaa

SEQ ID NO: 94413 - RNA, 17 nt, Dobrava virus
uaccucaacaacuacua

SEQ ID NO: 94414 - RNA, 22 nt, Dobrava virus
uaccucaacaacuacuaccuca

SEQ ID NO: 94415 - RNA, 20 nt, Dobrava virus
uaacuccuucauuacuauaa

SEQ ID NO: 94416 - RNA, 15 nt, Dobrava virus
uaacaacaacuaccu

SEQ ID NO: 94417 - RNA, 22 nt, Dobrava virus
uaacaacaacuaccuaccucaa

SEQ ID NO: 94418 - RNA, 18 nt, Dobrava virus
guuuaaacuucuguacuu

SEQ ID NO: 94419 - RNA, 14 nt, Dobrava virus
guuauguaaucuca

SEQ ID NO: 94420 - RNA, 20 nt, Dobrava virus
cuuuagggagucuacuacua

SEQ ID NO: 94421 - RNA, 18 nt, Dobrava virus
ccuaccucaaaacaacaa

SEQ ID NO: 94422 - RNA, 15 nt, Dobrava virus
uauccguuauguaau

SEQ ID NO: 94423 - RNA, 23 nt, Dobrava virus
ucauuuuccggagcauacuacua

SEQ ID NO: 94424 - RNA, 15 nt, Dobrava virus
ucucuuuagggaguc

SEQ ID NO: 94425 - RNA, 20 nt, Dobrava virus
ucuuuagggagucuacuacu

SEQ ID NO: 94426 - RNA, 21 nt, Dobrava virus
uuauguaaucccacguaugcu

SEQ ID NO: 94427 - RNA, 17 nt, Dobrava virus
uuaucaaccuaguuauc

SEQ ID NO: 94428 - RNA, 13 nt, Dobrava virus
uucuuuacuaaca

SEQ ID NO: 94429 - RNA, 18 nt, Dobrava virus
acuccuucauuacuauaa

SEQ ID NO: 94430 - RNA, 22 nt, Dobrava virus
acguaugcugcauuaacugcuu

SEQ ID NO: 94431 - RNA, 13 nt, Dobrava virus
aacacuaccucaa

SEQ ID NO: 94432 - RNA, 14 nt, Dobrava virus
aacaacacuaccuc

SEQ ID NO: 94433 - RNA, 16 nt, Dobrava virus
aacaacacuaccucaa

SEQ ID NO: 94434 - RNA, 17 nt, Dobrava virus
aacaacuaccuaccuca

SEQ ID NO: 94435 - RNA, 18 nt, Dobrava virus
aacaacuaccuaccucaa

SEQ ID NO: 94436 - RNA, 20 nt, Dobrava virus
aauaacuccuucauuacuau

SEQ ID NO: 94437 - RNA, 13 nt, Dobrava virus
acaacacuaccuc

SEQ ID NO: 94438 - RNA, 18 nt, Dobrava virus
augcugcauuaacugcuu

SEQ ID NO: 94439 - RNA, 17 nt, Dobrava virus
auuaucccaugcuuuau

SEQ ID NO: 94440 - RNA, 17 nt, Dobrava virus
auuuauccguuauguaa

SEQ ID NO: 94441 - RNA, 12 nt, Dobrava virus
caacacuaccuc

SEQ ID NO: 94442 - RNA, 20 nt, Dobrava virus
caacacuaccucaacaacua

SEQ ID NO: 94443 - RNA, 16 nt, Dobrava virus
ucaacaacuacuaccu

SEQ ID NO: 94444 - RNA, 15 nt, Dobrava virus
uauuuucauuuuccg

SEQ ID NO: 94445 - RNA, 17 nt, Dobrava virus
uauaaaccuuaguccuu

SEQ ID NO: 94446 - RNA, 20 nt, Dobrava virus
ucucuuuagggagucuacua

SEQ ID NO: 94447 - RNA, 16 nt, Dobrava virus
uaggacgucaccuuaa

SEQ ID NO: 94448 - RNA, 18 nt, Dobrava virus
uaaaaaaaauaacuccuu

SEQ ID NO: 94449 - RNA, 13 nt, Dobrava virus
uguauuugcacua

SEQ ID NO: 94450 - RNA, 21 nt, Dobrava virus
uucauuugaucuguacuaaca

SEQ ID NO: 94451 - RNA, 12 nt, Dobrava virus
uucuguacuuau

SEQ ID NO: 94452 - RNA, 16 nt, Dobrava virus
uuuccggagcauacua

SEQ ID NO: 94453 - RNA, 19 nt, Dobrava virus
uuuccggagcauacuacua

SEQ ID NO: 94454 - RNA, 20 nt, Dobrava virus
uuugcuuccugaaugucucu

SEQ ID NO: 94455 - RNA, 23 nt, Dobrava virus
aacugcuuggacuggaauuauua

SEQ ID NO: 94456 - RNA, 16 nt, Dobrava virus
aacuaccuaccucaaa

SEQ ID NO: 94457 - RNA, 13 nt, Dobrava virus
aacuacuaccuca

SEQ ID NO: 94458 - RNA, 13 nt, Dobrava virus
cuaacaacaacua

SEQ ID NO: 94459 - RNA, 23 nt, Dobrava virus
cuaacaacaacuaccuaccucaa

SEQ ID NO: 94460 - RNA, 12 nt, Dobrava virus
cuacuaccucau

SEQ ID NO: 94461 - RNA, 20 nt, Dobrava virus
cucaacaacuacuaccucau

SEQ ID NO: 94462 - RNA, 22 nt, Dobrava virus
cucaaaacaacaacacuaccuc

SEQ ID NO: 94463 - RNA, 13 nt, Dobrava virus
cucauugauuugc

SEQ ID NO: 94464 - RNA, 22 nt, Dobrava virus
cucuuuagggagucuacuacua

SEQ ID NO: 94465 - RNA, 18 nt, Dobrava virus
ccucaacaacuacuaccu

SEQ ID NO: 94466 - RNA, 20 nt, Dobrava virus
ccucaacaacuacuaccuca

SEQ ID NO: 94467 - RNA, 20 nt, Dobrava virus
ccuuucuuuacuaacaacaa

SEQ ID NO: 94468 - RNA, 22 nt, Dobrava virus
cauuuuccggagcauacuacua

SEQ ID NO: 94469 - RNA, 15 nt, Dobrava virus
gaucuguacuaacau

SEQ ID NO: 94470 - RNA, 13 nt, Dobrava virus
gacuggaauuauu

SEQ ID NO: 94471 - RNA, 21 nt, Dobrava virus
cuuuacuaacaacaacuaccu

SEQ ID NO: 94472 - RNA, 22 nt, Dobrava virus
cuuuacuaacaacaacuaccua

SEQ ID NO: 94473 - RNA, 12 nt, Dobrava virus
acacuaccucaa

SEQ ID NO: 94474 - RNA, 21 nt, Dobrava virus
aucccacguaugcugcauuaa

SEQ ID NO: 94475 - RNA, 20 nt, Dobrava virus
auauuagcuuguccuuguau

SEQ ID NO: 94476 - RNA, 21 nt, Dobrava virus
cauuuuccggagcauacuacu

SEQ ID NO: 94477 - RNA, 22 nt, Dobrava virus
ccucaaaacaacaacacuaccu

SEQ ID NO: 94478 - RNA, 23 nt, Dobrava virus
ccucaaaacaacaacacuaccuc

SEQ ID NO: 94479 - RNA, 15 nt, Dobrava virus
ccucaacaacuacua

SEQ ID NO: 94480 - RNA, 21 nt, Dobrava virus
ccucauugauuugcuuccuga

SEQ ID NO: 94481 - RNA, 13 nt, Dobrava virus
auuauacuacuga

SEQ ID NO: 94482 - RNA, 23 nt, Dobrava virus
augucucuuuagggagucuacua

SEQ ID NO: 94483 - RNA, 16 nt, Dobrava virus
auuuauccguuaugua

SEQ ID NO: 94484 - RNA, 23 nt, Dobrava virus
auuuauccguuauguaaucucag

SEQ ID NO: 94485 - RNA, 13 nt, Dobrava virus
caacacuaccuca

SEQ ID NO: 94486 - RNA, 14 nt, Dobrava virus
caacacuaccucaa

SEQ ID NO: 94487 - RNA, 23 nt, Dobrava virus
cacguaugcugcauuaacugcuu

SEQ ID NO: 94488 - RNA, 20 nt, Dobrava virus
cacuaccucaacaacuacua

SEQ ID NO: 94489 - RNA, 21 nt, Dobrava virus
cucuuuagggagucuacuacu

SEQ ID NO: 94490 - RNA, 16 nt, Dobrava virus
cuaacaacaacuaccu

SEQ ID NO: 94491 - RNA, 22 nt, Dobrava virus
cuaacaacaacuaccuaccuca

SEQ ID NO: 94492 - RNA, 23 nt, Dobrava virus
cucaaaacaacaacacuaccuca

SEQ ID NO: 94493 - RNA, 17 nt, Dobrava virus
cucaacaacuacuaccu

SEQ ID NO: 94494 - RNA, 19 nt, Dobrava virus
cucaacaacuacuaccuca

SEQ ID NO: 94495 - RNA, 13 nt, Dobrava virus
ggagcauacuacu

SEQ ID NO: 94496 - RNA, 19 nt, Dobrava virus
uaucaaccuaguuaucuaa

SEQ ID NO: 94497 - RNA, 17 nt, Dobrava virus
ucaacaacuacuaccuc

SEQ ID NO: 94498 - RNA, 19 nt, Dobrava virus
ucaacaacuacuaccucau

SEQ ID NO: 94499 - RNA, 14 nt, Dobrava virus
uauuauacuacuga

SEQ ID NO: 94500 - RNA, 15 nt, Dobrava virus
uggauguagauuuca

SEQ ID NO: 94501 - RNA, 18 nt, Dobrava virus
uggguauuucuauaucuu

SEQ ID NO: 94502 - RNA, 20 nt, Dobrava virus
uuacuaacaacaacuaccua

SEQ ID NO: 94503 - RNA, 14 nt, Dobrava virus
uuggugaauguauu

SEQ ID NO: 94504 - RNA, 14 nt, Dobrava virus
uuuauguaauccca

SEQ ID NO: 94505 - RNA, 15 nt, Dobrava virus
uuucauuugaucugu

SEQ ID NO: 94506 - RNA, 21 nt, Dobrava virus
uucauuuuccggagcauacua

SEQ ID NO: 94507 - RNA, 14 nt, Dobrava virus
uccguuauguaauc

SEQ ID NO: 94508 - RNA, 15 nt, Dobrava virus
uccguuauguaaucu

SEQ ID NO: 94509 - RNA, 17 nt, Dobrava virus
ugauuugcuuccugaau

SEQ ID NO: 94510 - RNA, 17 nt, Dobrava virus
ugauuggugaauguauu

SEQ ID NO: 94511 - RNA, 21 nt, Dobrava virus
ugaauguauuugcacuagggg

SEQ ID NO: 94512 - RNA, 19 nt, Dobrava virus
uuuccggagcauacuacua

SEQ ID NO: 94513 - RNA, 20 nt, Dobrava virus
ucuugcggagcauacuacua

SEQ ID NO: 94514 - RNA, 21 nt, Dobrava virus
ucuuuagggagucuacuacua

SEQ ID NO: 94515 - RNA, 20 nt, Dobrava virus
cuggaauuauuauacuacug

SEQ ID NO: 94516 - RNA, 17 nt, Seoul virus
ucuugcggagucuacua

SEQ ID NO: 94517 - RNA, 19 nt, Seoul virus
uuugcggagucuacuacua

SEQ ID NO: 94518 - RNA, 22 nt, Eastern equine encephalitis virus
caaaaaucuacgcggcaaugca

SEQ ID NO: 94519 - RNA, 15 nt, Eastern equine encephalitis virus
auucaaguacugcaa

SEQ ID NO: 94520 - RNA, 18 nt, Eastern equine encephalitis virus
caagggcaccugcaacaa

SEQ ID NO: 94521 - RNA, 13 nt, Eastern equine encephalitis virus
cacuauaggcagu

SEQ ID NO: 94522 - RNA, 14 nt, Eastern equine encephalitis virus
augcagugcauaag

SEQ ID NO: 94523 - RNA, 20 nt, Eastern equine encephalitis virus
aucuugucaaccacauaaca

SEQ ID NO: 94524 - RNA, 16 nt, Eastern equine encephalitis virus
auaaugcugcuccuaa

SEQ ID NO: 94525 - RNA, 22 nt, Eastern equine encephalitis virus
auaaugcugucuuuuauaucaa

SEQ ID NO: 94526 - RNA, 14 nt, Eastern equine encephalitis virus
auauacaauuacac

SEQ ID NO: 94527 - RNA, 23 nt, Eastern equine encephalitis virus
aggggauaggcucauaucucucu

SEQ ID NO: 94528 - RNA, 22 nt, Eastern equine encephalitis virus
aggcucauaucucucugcagaa

SEQ ID NO: 94529 - RNA, 15 nt, Eastern equine encephalitis virus
auaaacacuacaggc

SEQ ID NO: 94530 - RNA, 22 nt, Eastern equine encephalitis virus
auaacacuaagggcagugcaua

SEQ ID NO: 94531 - RNA, 15 nt, Eastern equine encephalitis virus
acaaaaucauauuaa

SEQ ID NO: 94532 - RNA, 15 nt, Eastern equine encephalitis virus
aauuacacuacaggu

SEQ ID NO: 94533 - RNA, 18 nt, Eastern equine encephalitis virus
aauuuaauacacacuuua

SEQ ID NO: 94534 - RNA, 17 nt, Eastern equine encephalitis virus
aaguaauuuaauacaca

SEQ ID NO: 94535 - RNA, 22 nt, Eastern equine encephalitis virus
aagggcaccugcaacaaaaauc

SEQ ID NO: 94536 - RNA, 20 nt, Eastern equine encephalitis virus
aacacuauaggcaguguaua

SEQ ID NO: 94537 - RNA, 21 nt, Eastern equine encephalitis virus
aacacuauaggcaguguauaa

SEQ ID NO: 94538 - RNA, 21 nt, Eastern equine encephalitis virus
aacacuaagggcagugcauaa

SEQ ID NO: 94539 - RNA, 23 nt, Eastern equine encephalitis virus
aaacuacaauugugugcuucuga

SEQ ID NO: 94540 - RNA, 12 nt, Eastern equine encephalitis virus
aacuccaguauc

SEQ ID NO: 94541 - RNA, 13 nt, Eastern equine encephalitis virus
aacacuacaggca

SEQ ID NO: 94542 - RNA, 18 nt, Eastern equine encephalitis virus
agaaccgcaaccaguuga

SEQ ID NO: 94543 - RNA, 12 nt, Eastern equine encephalitis virus
agaaacuacaau

SEQ ID NO: 94544 - RNA, 13 nt, Eastern equine encephalitis virus
agcaacagcuucu

SEQ ID NO: 94545 - RNA, 21 nt, Eastern equine encephalitis virus
accguugagcgucuacugcag

SEQ ID NO: 94546 - RNA, 18 nt, Eastern equine encephalitis virus
cuugucaaccacauaaca

SEQ ID NO: 94547 - RNA, 19 nt, Eastern equine encephalitis virus
cuugucaaccacauaacac

SEQ ID NO: 94548 - RNA, 23 nt, Eastern equine encephalitis virus
aaacuccaguauccaauccugga

SEQ ID NO: 94549 - RNA, 18 nt, Eastern equine encephalitis virus
gaugcagugcauaaggcu

SEQ ID NO: 94550 - RNA, 22 nt, Eastern equine encephalitis virus
gcaaccaguugaaugcuacaaa

SEQ ID NO: 94551 - RNA, 16 nt, Eastern equine encephalitis virus
gccgaugcagugcaua

SEQ ID NO: 94552 - RNA, 13 nt, Eastern equine encephalitis virus
gcgucuacugcag

SEQ ID NO: 94553 - RNA, 20 nt, Eastern equine encephalitis virus
guaauauaccgccuccuaua

SEQ ID NO: 94554 - RNA, 17 nt, Eastern equine encephalitis virus
guaaucggagcagguau

SEQ ID NO: 94555 - RNA, 17 nt, Eastern equine encephalitis virus
cauuuucucauccgaga

SEQ ID NO: 94556 - RNA, 13 nt, Eastern equine encephalitis virus
aaaaucauauuaa

SEQ ID NO: 94557 - RNA, 21 nt, Eastern equine encephalitis virus
ccacauaacacuauaggcagu

SEQ ID NO: 94558 - RNA, 19 nt, Eastern equine encephalitis virus
ccuauaaacacuacaggca

SEQ ID NO: 94559 - RNA, 15 nt, Eastern equine encephalitis virus
ccgaugcagugcaua

SEQ ID NO: 94560 - RNA, 15 nt, Eastern equine encephalitis virus
cuccuauaaacacua

SEQ ID NO: 94561 - RNA, 14 nt, Eastern equine encephalitis virus
cuuacuaaacacua

SEQ ID NO: 94562 - RNA, 15 nt, Eastern equine encephalitis virus
cuucucaucagcaga

SEQ ID NO: 94563 - RNA, 18 nt, Eastern equine encephalitis virus
cuauaaacacuacaggca

SEQ ID NO: 94564 - RNA, 21 nt, Eastern equine encephalitis virus
uugucaaccacauaacacuau

SEQ ID NO: 94565 - RNA, 12 nt, Eastern equine encephalitis virus
aaucaggcauaa

SEQ ID NO: 94566 - RNA, 17 nt, Eastern equine encephalitis virus
aaguuaccuauccugcu

SEQ ID NO: 94567 - RNA, 14 nt, Eastern equine encephalitis virus
uuccguccaugaga

SEQ ID NO: 94568 - RNA, 14 nt, Eastern equine encephalitis virus
ugccgcauauacaa

SEQ ID NO: 94569 - RNA, 13 nt, Eastern equine encephalitis virus
uaaacacuacagg

SEQ ID NO: 94570 - RNA, 22 nt, Eastern equine encephalitis virus
uaaugcugcuccuaaguaauuu

SEQ ID NO: 94571 - RNA, 17 nt, Eastern equine encephalitis virus
ucuacgcggcaaugcaa

SEQ ID NO: 94572 - RNA, 20 nt, Eastern equine encephalitis virus
uccuaaguaauuuaauacac

SEQ ID NO: 94573 - RNA, 20 nt, Eastern equine encephalitis virus
uauaaggcugucuuacuaaa

SEQ ID NO: 94574 - RNA, 16 nt, Eastern equine encephalitis virus
ugacgguggugcauaa

SEQ ID NO: 94575 - RNA, 14 nt, Eastern equine encephalitis virus
ugcauaaugcugcu

SEQ ID NO: 94576 - RNA, 15 nt, Eastern equine encephalitis virus
uccugcucccaugua

SEQ ID NO: 94577 - RNA, 16 nt, Eastern equine encephalitis virus
uuauaacacuaagggc

SEQ ID NO: 94578 - RNA, 18 nt, Eastern equine encephalitis virus
uguauucaaguacugcaa

SEQ ID NO: 94579 - RNA, 21 nt, Eastern equine encephalitis virus
ugucaaccacauaacacuaua

SEQ ID NO: 94580 - RNA, 22 nt, Eastern equine encephalitis virus
uauuaccacauuauaacacuaa

SEQ ID NO: 94581 - RNA, 18 nt, Eastern equine encephalitis virus
ucaaccacauaacacuau

SEQ ID NO: 94582 - RNA, 14 nt, Eastern equine encephalitis virus
uauaaacacuacag

SEQ ID NO: 94583 - RNA, 17 nt, Eastern equine encephalitis virus
uauaaacacuacaggca

SEQ ID NO: 94584 - RNA, 22 nt, Eastern equine encephalitis virus
uaaaguagagaacaugaaggca

SEQ ID NO: 94585 - RNA, 18 nt, Eastern equine encephalitis virus
uaacgccgccgaugcagu

SEQ ID NO: 94586 - RNA, 22 nt, Eastern equine encephalitis virus
uaacgccgccgaugcagugcau

SEQ ID NO: 94587 - RNA, 20 nt, Eastern equine encephalitis virus
uaauacacacuuuauaauca

SEQ ID NO: 94588 - RNA, 19 nt, Eastern equine encephalitis virus
uaauauaccgccuccuaua

SEQ ID NO: 94589 - RNA, 20 nt, Eastern equine encephalitis virus
uaaugcugucuuuuauauca

SEQ ID NO: 94590 - RNA, 11 nt, Eastern equine encephalitis virus
uacacuacagg

SEQ ID NO: 94591 - RNA, 21 nt, Eastern equine encephalitis virus
ggcaguguauaaggcugucuu

SEQ ID NO: 94592 - RNA, 11 nt, Eastern equine encephalitis virus
ggcagugcaua

SEQ ID NO: 94593 - RNA, 16 nt, Eastern equine encephalitis virus
gugcauaaggcugcua

SEQ ID NO: 94594 - RNA, 18 nt, Eastern equine encephalitis virus
gugcauaaggcugcuaua

SEQ ID NO: 94595 - RNA, 13 nt, Eastern equine encephalitis virus
guauucaaguacu

SEQ ID NO: 94596 - RNA, 22 nt, Eastern equine encephalitis virus
cuauauuaccacauuauaacac

SEQ ID NO: 94597 - RNA, 13 nt, Eastern equine encephalitis virus
cuacagguaauau

SEQ ID NO: 94598 - RNA, 15 nt, Eastern equine encephalitis virus
cguacauuuucucau

SEQ ID NO: 94599 - RNA, 20 nt, Eastern equine encephalitis virus
cugcuauauuaccacauuau

SEQ ID NO: 94600 - RNA, 14 nt, Eastern equine encephalitis virus
cugcagaaccgcaa

SEQ ID NO: 94601 - RNA, 17 nt, Eastern equine encephalitis virus
gagaacaugaaggcaau

SEQ ID NO: 94602 - RNA, 19 nt, Eastern equine encephalitis virus
gaaugcuacaaaguuaccu

SEQ ID NO: 94603 - RNA, 19 nt, Eastern equine encephalitis virus
gcauaauugccgcauauac

SEQ ID NO: 94604 - RNA, 20 nt, Eastern equine encephalitis virus
cacuaagggcagugcauaau

SEQ ID NO: 94605 - RNA, 18 nt, Eastern equine encephalitis virus
cacuuuauaaucaggcau

SEQ ID NO: 94606 - RNA, 20 nt, Eastern equine encephalitis virus
auuuacaaaaucauauuaau

SEQ ID NO: 94607 - RNA, 13 nt, Eastern equine encephalitis virus
auuaccacauuau

SEQ ID NO: 94608 - RNA, 15 nt, Eastern equine encephalitis virus
ccuccuauaaacacu

SEQ ID NO: 94609 - RNA, 23 nt, Eastern equine encephalitis virus
ccuccuauaaacacuacaggcag

SEQ ID NO: 94610 - RNA, 13 nt, Eastern equine encephalitis virus
cauuauaacacua

SEQ ID NO: 94611 - RNA, 15 nt, Eastern equine encephalitis virus
cauaaggcugcuaua

SEQ ID NO: 94612 - RNA, 22 nt, Eastern equine encephalitis virus
cauaaggcugcuauauuaccac

SEQ ID NO: 94613 - RNA, 20 nt, Eastern equine encephalitis virus
cauguauucaaguacugcaa

SEQ ID NO: 94614 - RNA, 18 nt, Eastern equine encephalitis virus
auauaccgccuccuauaa

SEQ ID NO: 94615 - RNA, 16 nt, Eastern equine encephalitis virus
auacaauuacacuaca

SEQ ID NO: 94616 - RNA, 19 nt, Eastern equine encephalitis virus
aucuacgcggcaaugcaaa

SEQ ID NO: 94617 - RNA, 16 nt, Eastern equine encephalitis virus
aggcaaucaccguuga

SEQ ID NO: 94618 - RNA, 23 nt, Eastern equine encephalitis virus
agcuauggugacgguggugcaua

SEQ ID NO: 94619 - RNA, 19 nt, Eastern equine encephalitis virus
agugcauaaggcugcuaua

SEQ ID NO: 94620 - RNA, 12 nt, Eastern equine encephalitis virus
acacuacaggca

SEQ ID NO: 94621 - RNA, 19 nt, Eastern equine encephalitis virus
acacuacagguaauauacc

SEQ ID NO: 94622 - RNA, 19 nt, Eastern equine encephalitis virus
acacuauaggcaguguaua

SEQ ID NO: 94623 - RNA, 18 nt, Eastern equine encephalitis virus
acacuaagggcagugcau

SEQ ID NO: 94624 - RNA, 14 nt, Eastern equine encephalitis virus
aauuuaauacacac

SEQ ID NO: 94625 - RNA, 17 nt, Eastern equine encephalitis virus
acauaacacuauaggca

SEQ ID NO: 94626 - RNA, 19 nt, Eastern equine encephalitis virus
acauaacacuauaggcagu

SEQ ID NO: 94627 - RNA, 17 nt, Eastern equine encephalitis virus
acuauaggcaguguaua

SEQ ID NO: 94628 - RNA, 13 nt, Eastern equine encephalitis virus
auuauaacacuaa

SEQ ID NO: 94629 - RNA, 14 nt, Eastern equine encephalitis virus
auuacacuacaggu

SEQ ID NO: 94630 - RNA, 16 nt, Eastern equine encephalitis virus
auugccgcauauacaa

SEQ ID NO: 94631 - RNA, 19 nt, Eastern equine encephalitis virus
auguauucaaguacugcaa

SEQ ID NO: 94632 - RNA, 21 nt, Eastern equine encephalitis virus
auggugacgguggugcauaac

SEQ ID NO: 94633 - RNA, 13 nt, Eastern equine encephalitis virus
caaccacauaaca

SEQ ID NO: 94634 - RNA, 16 nt, Eastern equine encephalitis virus
caaccacauaacacua

SEQ ID NO: 94635 - RNA, 13 nt, Eastern equine encephalitis virus
caaguacugcaag

SEQ ID NO: 94636 - RNA, 17 nt, Eastern equine encephalitis virus
cacuacaggcagcgcau

SEQ ID NO: 94637 - RNA, 13 nt, Eastern equine encephalitis virus
cacuaagggcagu

SEQ ID NO: 94638 - RNA, 17 nt, Eastern equine encephalitis virus
cacuaagggcagugcau

SEQ ID NO: 94639 - RNA, 18 nt, Eastern equine encephalitis virus
cacuaagggcagugcaua

SEQ ID NO: 94640 - RNA, 16 nt, Eastern equine encephalitis virus
cagaagaaacuacaau

SEQ ID NO: 94641 - RNA, 22 nt, Eastern equine encephalitis virus
cacacuuuauaaucaggcauaa

SEQ ID NO: 94642 - RNA, 20 nt, Eastern equine encephalitis virus
cacauaacacuauaggcagu

SEQ ID NO: 94643 - RNA, 14 nt, Eastern equine encephalitis virus
agggcagugcauaa

SEQ ID NO: 94644 - RNA, 22 nt, Eastern equine encephalitis virus
agggcagugcauaaugcugcuc

SEQ ID NO: 94645 - RNA, 21 nt, Eastern equine encephalitis virus
aggcauaauugccgcauauac

SEQ ID NO: 94646 - RNA, 19 nt, Eastern equine encephalitis virus
agcgucuacugcaggggau

SEQ ID NO: 94647 - RNA, 19 nt, Eastern equine encephalitis virus
auccugcucccauguauuc

SEQ ID NO: 94648 - RNA, 13 nt, Eastern equine encephalitis virus
auacaauuacacu

SEQ ID NO: 94649 - RNA, 16 nt, Eastern equine encephalitis virus
auaauugccgcauaua

SEQ ID NO: 94650 - RNA, 20 nt, Eastern equine encephalitis virus
auaauugccgcauauacaau

SEQ ID NO: 94651 - RNA, 13 nt, Eastern equine encephalitis virus
auaaggcugcuau

SEQ ID NO: 94652 - RNA, 19 nt, Eastern equine encephalitis virus
auaacgccgccgaugcagu

SEQ ID NO: 94653 - RNA, 14 nt, Eastern equine encephalitis virus
aaugcugcuccuaa

SEQ ID NO: 94654 - RNA, 20 nt, Eastern equine encephalitis virus
acacuuuauaaucaggcaua

SEQ ID NO: 94655 - RNA, 19 nt, Eastern equine encephalitis virus
acacuaagggcagugcaua

SEQ ID NO: 94656 - RNA, 20 nt, Eastern equine encephalitis virus
acacuaagggcagugcauaa

SEQ ID NO: 94657 - RNA, 21 nt, Eastern equine encephalitis virus
acauuauaacacuaagggcag

SEQ ID NO: 94658 - RNA, 16 nt, Eastern equine encephalitis virus
acuaagggcagugcau

SEQ ID NO: 94659 - RNA, 12 nt, Eastern equine encephalitis virus
acuaaacacuaa

SEQ ID NO: 94660 - RNA, 14 nt, Eastern equine encephalitis virus
uuacaaaaucauau

SEQ ID NO: 94661 - RNA, 13 nt, Eastern equine encephalitis virus
uuacacuacaggu

SEQ ID NO: 94662 - RNA, 18 nt, Eastern equine encephalitis virus
ugucuuuuauaucaauuu

SEQ ID NO: 94663 - RNA, 12 nt, Eastern equine encephalitis virus
ugcagugcauaa

SEQ ID NO: 94664 - RNA, 14 nt, Eastern equine encephalitis virus
ugcauaaggcugcu

SEQ ID NO: 94665 - RNA, 18 nt, Eastern equine encephalitis virus
ugcauaaggcugcuauau

SEQ ID NO: 94666 - RNA, 22 nt, Eastern equine encephalitis virus
ugcauaacgccgccgaugcagu

SEQ ID NO: 94667 - RNA, 12 nt, Eastern equine encephalitis virus
aacagcuucuca

SEQ ID NO: 94668 - RNA, 13 nt, Eastern equine encephalitis virus
aacacuaagggca

SEQ ID NO: 94669 - RNA, 20 nt, Eastern equine encephalitis virus
aacacuaagggcagugcaua

SEQ ID NO: 94670 - RNA, 22 nt, Eastern equine encephalitis virus
aacacuacaggcagcgcauaau

SEQ ID NO: 94671 - RNA, 13 nt, Eastern equine encephalitis virus
aacacuauaggca

SEQ ID NO: 94672 - RNA, 14 nt, Eastern equine encephalitis virus
uugaaugcuacaaa

SEQ ID NO: 94673 - RNA, 19 nt, Eastern equine encephalitis virus
aaucuacgcggcaaugcaa

SEQ ID NO: 94674 - RNA, 22 nt, Eastern equine encephalitis virus
aacgccgccgaugcagugcaua

SEQ ID NO: 94675 - RNA, 17 nt, Eastern equine encephalitis virus
uacaauuacacuacagg

SEQ ID NO: 94676 - RNA, 16 nt, Eastern equine encephalitis virus
uaacacuaagggcagu

SEQ ID NO: 94677 - RNA, 20 nt, Eastern equine encephalitis virus
uaacacuaagggcagugcau

SEQ ID NO: 94678 - RNA, 13 nt, Eastern equine encephalitis virus
guacugcaagcaa

SEQ ID NO: 94679 - RNA, 19 nt, Eastern equine encephalitis virus
gugcauaaggcugcuauau

SEQ ID NO: 94680 - RNA, 15 nt, Eastern equine encephalitis virus
gugcauaaugcugcu

SEQ ID NO: 94681 - RNA, 20 nt, Eastern equine encephalitis virus
gugcauaaugcugcuccuaa

SEQ ID NO: 94682 - RNA, 24 nt, Eastern equine encephalitis virus
uaucagucucguaaaguagagaac

SEQ ID NO: 94683 - RNA, 17 nt, Eastern equine encephalitis virus
cauauacaauuacacua

SEQ ID NO: 94684 - RNA, 20 nt, Eastern equine encephalitis virus
cauaacgccgccgaugcagu

SEQ ID NO: 94685 - RNA, 14 nt, Eastern equine encephalitis virus
caggcagcgcauaa

SEQ ID NO: 94686 - RNA, 21 nt, Eastern equine encephalitis virus
ccuaaguaauuuaauacacac

SEQ ID NO: 94687 - RNA, 21 nt, Eastern equine encephalitis virus
cuauggugacgguggugcaua

SEQ ID NO: 94688 - RNA, 17 nt, Eastern equine encephalitis virus
cugucuuacuaaacacu

SEQ ID NO: 94689 - RNA, 19 nt, Eastern equine encephalitis virus
cugcuauauuaccacauua

SEQ ID NO: 94690 - RNA, 12 nt, Eastern equine encephalitis virus
cgccgaugcagu

SEQ ID NO: 94691 - RNA, 17 nt, Eastern equine encephalitis virus
cuaagggcagugcauaa

SEQ ID NO: 94692 - RNA, 17 nt, Eastern equine encephalitis virus
cuacaggcagcgcauaa

SEQ ID NO: 94693 - RNA, 12 nt, Eastern equine encephalitis virus
cuaaacacuaaa

SEQ ID NO: 94694 - RNA, 21 nt, Eastern equine encephalitis virus
ggcagcgcauaaugcugucuu

SEQ ID NO: 94695 - RNA, 14 nt, Eastern equine encephalitis virus
gcaccugcaacaaa

SEQ ID NO: 94696 - RNA, 15 nt, Eastern equine encephalitis virus
gaagcuguugcagaa

SEQ ID NO: 94697 - RNA, 16 nt, Eastern equine encephalitis virus
uugccgcauauacaau

SEQ ID NO: 94698 - RNA, 17 nt, Eastern equine encephalitis virus
uucaaguacugcaagca

SEQ ID NO: 94699 - RNA, 15 nt, Eastern equine encephalitis virus
ugucuuuuauaucaa

SEQ ID NO: 94700 - RNA, 16 nt, Eastern equine encephalitis virus
ucuuacuaaacacuaa

SEQ ID NO: 94701 - RNA, 16 nt, Eastern equine encephalitis virus
ucuacgcggcaaugca

SEQ ID NO: 94702 - RNA, 14 nt, Eastern equine encephalitis virus
ucgagcgugagaag

SEQ ID NO: 94703 - RNA, 17 nt, Eastern equine encephalitis virus
uccuauaaacacuacag

SEQ ID NO: 94704 - RNA, 19 nt, Eastern equine encephalitis virus
uccuauaaacacuacaggc

SEQ ID NO: 94705 - RNA, 14 nt, Eastern equine encephalitis virus
cgaugcagugcaua

SEQ ID NO: 94706 - RNA, 16 nt, Eastern equine encephalitis virus
cgccgaugcagugcau

SEQ ID NO: 94707 - RNA, 17 nt, Eastern equine encephalitis virus
cgccgaugcagugcaua

SEQ ID NO: 94708 - RNA, 19 nt, Eastern equine encephalitis virus
cguugagcgucuacugcag

SEQ ID NO: 94709 - RNA, 20 nt, Eastern equine encephalitis virus
cgggacaagggcaccugcaa

SEQ ID NO: 94710 - RNA, 16 nt, Eastern equine encephalitis virus
cuaagggcagugcaua

SEQ ID NO: 94711 - RNA, 21 nt, Eastern equine encephalitis virus
cuccuaaguaauuuaauacac

SEQ ID NO: 94712 - RNA, 23 nt, Eastern equine encephalitis virus
cuccuaaguaauuuaauacacac

SEQ ID NO: 94713 - RNA, 17 nt, Eastern equine encephalitis virus
cuccuauaaacacuaca

SEQ ID NO: 94714 - RNA, 12 nt, Eastern equine encephalitis virus
guguauaaggcu

SEQ ID NO: 94715 - RNA, 21 nt, Eastern equine encephalitis virus
uaacacuaagggcagugcaua

SEQ ID NO: 94716 - RNA, 22 nt, Eastern equine encephalitis virus
uaacacuaagggcagugcauaa

SEQ ID NO: 94717 - RNA, 16 nt, Eastern equine encephalitis virus
uaacacuauaggcagu

SEQ ID NO: 94718 - RNA, 21 nt, Eastern equine encephalitis virus
uaacacuauaggcaguguaua

SEQ ID NO: 94719 - RNA, 14 nt, Eastern equine encephalitis virus
uaaacacuacaggc

SEQ ID NO: 94720 - RNA, 18 nt, Eastern equine encephalitis virus
uaauugccgcauauacaa

SEQ ID NO: 94721 - RNA, 16 nt, Eastern equine encephalitis virus
uacaauuacacuacag

SEQ ID NO: 94722 - RNA, 19 nt, Eastern equine encephalitis virus
uacaauuacacuacaggua

SEQ ID NO: 94723 - RNA, 15 nt, Eastern equine encephalitis virus
uacuaaacacuaaau

SEQ ID NO: 94724 - RNA, 12 nt, Eastern equine encephalitis virus
uauauuaccaca

SEQ ID NO: 94725 - RNA, 15 nt, Eastern equine encephalitis virus
uauacaauuacacua

SEQ ID NO: 94726 - RNA, 13 nt, Eastern equine encephalitis virus
gcuauauuaccac

SEQ ID NO: 94727 - RNA, 22 nt, Eastern equine encephalitis virus
gcuauggugacgguggugcaua

SEQ ID NO: 94728 - RNA, 17 nt, Eastern equine encephalitis virus
acuaagggcagugcaua

SEQ ID NO: 94729 - RNA, 19 nt, Eastern equine encephalitis virus
acuaagggcagugcauaau

SEQ ID NO: 94730 - RNA, 17 nt, Eastern equine encephalitis virus
acuacaggcagcgcaua

SEQ ID NO: 94731 - RNA, 22 nt, Eastern equine encephalitis virus
accacauaacacuauaggcagu

SEQ ID NO: 94732 - RNA, 22 nt, Eastern equine encephalitis virus
acacacuuuauaaucaggcaua

SEQ ID NO: 94733 - RNA, 14 nt, Eastern equine encephalitis virus
auaaggcugcuaua

SEQ ID NO: 94734 - RNA, 23 nt, Eastern equine encephalitis virus
auaaggcugcuauauuaccacau

SEQ ID NO: 94735 - RNA, 19 nt, Eastern equine encephalitis virus
auaauugccgcauauacaa

SEQ ID NO: 94736 - RNA, 14 nt, Eastern equine encephalitis virus
auaccgccuccuau

SEQ ID NO: 94737 - RNA, 23 nt, Eastern equine encephalitis virus
auaccgccuccuauaaacacuac

SEQ ID NO: 94738 - RNA, 12 nt, Eastern equine encephalitis virus
auauuaccacau

SEQ ID NO: 94739 - RNA, 16 nt, Eastern equine encephalitis virus
auauuaccacauuaua

SEQ ID NO: 94740 - RNA, 20 nt, Eastern equine encephalitis virus
auauuaccacauuauaacac

SEQ ID NO: 94741 - RNA, 17 nt, Eastern equine encephalitis virus
aguaauuuaauacacac

SEQ ID NO: 94742 - RNA, 19 nt, Eastern equine encephalitis virus
aguacugcaagcaacagcu

SEQ ID NO: 94743 - RNA, 11 nt, Eastern equine encephalitis virus
auaacacuaua

SEQ ID NO: 94744 - RNA, 12 nt, Eastern equine encephalitis virus
auaacacuauag

SEQ ID NO: 94745 - RNA, 17 nt, Eastern equine encephalitis virus
auaacacuauaggcagu

SEQ ID NO: 94746 - RNA, 22 nt, Eastern equine encephalitis virus
auaacacuauaggcaguguaua

SEQ ID NO: 94747 - RNA, 21 nt, Eastern equine encephalitis virus
caauugugugcuucugaaggu

SEQ ID NO: 94748 - RNA, 18 nt, Eastern equine encephalitis virus
caaccacauaacacuaua

SEQ ID NO: 94749 - RNA, 14 nt, Eastern equine encephalitis virus
caacagcuucucau

SEQ ID NO: 94750 - RNA, 21 nt, Eastern equine encephalitis virus
aucuugucaaccacauaacac

SEQ ID NO: 94751 - RNA, 12 nt, Eastern equine encephalitis virus
augcagugcaua

SEQ ID NO: 94752 - RNA, 13 nt, Eastern equine encephalitis virus
augcagugcauaa

SEQ ID NO: 94753 - RNA, 17 nt, Eastern equine encephalitis virus
augcagugcauaaggcu

SEQ ID NO: 94754 - RNA, 22 nt, Eastern equine encephalitis virus
augcagugcauaaggcugcuau

SEQ ID NO: 94755 - RNA, 14 nt, Eastern equine encephalitis virus
caugaaggcaauca

SEQ ID NO: 94756 - RNA, 17 nt, Eastern equine encephalitis virus
ccaguugaaugcuacaa

SEQ ID NO: 94757 - RNA, 14 nt, Eastern equine encephalitis virus
ccgaugcagugcau

SEQ ID NO: 94758 - RNA, 16 nt, Eastern equine encephalitis virus
ccgaugcagugcauaa

SEQ ID NO: 94759 - RNA, 18 nt, Eastern equine encephalitis virus
ccgcauauacaauuacac

SEQ ID NO: 94760 - RNA, 13 nt, Eastern equine encephalitis virus
ccgccgaugcagu

SEQ ID NO: 94761 - RNA, 15 nt, Eastern equine encephalitis virus
cauauacaauuacac

SEQ ID NO: 94762 - RNA, 20 nt, Eastern equine encephalitis virus
cauauacaauuacacuacag

SEQ ID NO: 94763 - RNA, 23 nt, Eastern equine encephalitis virus
cauauacaauuacacuacaggua

SEQ ID NO: 94764 - RNA, 17 nt, Eastern equine encephalitis virus
cauaauugccgcauaua

SEQ ID NO: 94765 - RNA, 18 nt, Eastern equine encephalitis virus
cauaauugccgcauauac

SEQ ID NO: 94766 - RNA, 19 nt, Eastern equine encephalitis virus
cauaauugccgcauauaca

SEQ ID NO: 94767 - RNA, 14 nt, Homo sapiens
uggaagcacagcuu

SEQ ID NO: 94768 - RNA, 14 nt, Homo sapiens
agccagggucucac

SEQ ID NO: 94769 - RNA, 16 nt, Homo sapiens
ccgugaggccagagac

SEQ ID NO: 94770 - RNA, 15 nt, Homo sapiens
aaugggagacggggg

SEQ ID NO: 94771 - RNA, 22 nt, Homo sapiens
ugagcaauccugcaagaacaag

SEQ ID NO: 94772 - RNA, 23 nt, Homo sapiens
ccugacaacacucauugaccuga

SEQ ID NO: 94773 - RNA, 20 nt, Homo sapiens
agccacagggugagcacucu

SEQ ID NO: 94774 - RNA, 12 nt, Homo sapiens
cauggugaaggu

SEQ ID NO: 94775 - RNA, 21 nt, Homo sapiens
gaaaacaugcuacacacugca

SEQ ID NO: 94776 - RNA, 19 nt, Homo sapiens
gcuugaccuuuaagagaaa

SEQ ID NO: 94777 - RNA, 21 nt, Homo sapiens
ucuggagauaaaauaaaaaga

SEQ ID NO: 94778 - RNA, 14 nt, Homo sapiens
caucuuccaacuca

SEQ ID NO: 94779 - RNA, 15 nt, Homo sapiens
ugggagaaccaaaaa

SEQ ID NO: 94780 - RNA, 22 nt, Homo sapiens
cacggacgacgcgagggcccca

SEQ ID NO: 94781 - RNA, 18 nt, Homo sapiens
ugcggccuuuggcuucac

SEQ ID NO: 94782 - RNA, 13 nt, Homo sapiens
uucugggacacag

SEQ ID NO: 94783 - RNA, 15 nt, Homo sapiens
gaacgaagccaccuu

SEQ ID NO: 94784 - RNA, 20 nt, Homo sapiens
uaucaaugaguaacaggaaa

SEQ ID NO: 94785 - RNA, 20 nt, Homo sapiens
gaguucauacccuguuacca

SEQ ID NO: 94786 - RNA, 21 nt, Homo sapiens
cagcugcuugggcuucauccu

SEQ ID NO: 94787 - RNA, 20 nt, Homo sapiens
augaccuugaaugaugccau

SEQ ID NO: 94788 - RNA, 16 nt, Homo sapiens
uucucccucagucugg

SEQ ID NO: 94789 - RNA, 22 nt, Homo sapiens
ucaggugucccugcacuugcag

SEQ ID NO: 94790 - RNA, 16 nt, Homo sapiens
cagccccagugcccac

SEQ ID NO: 94791 - RNA, 15 nt, Homo sapiens
cuacucgaguuacag

SEQ ID NO: 94792 - RNA, 20 nt, Homo sapiens
agagaaugcacaaacagagg

SEQ ID NO: 94793 - RNA, 17 nt, Homo sapiens
gucucauacucaccuca

SEQ ID NO: 94794 - RNA, 15 nt, Homo sapiens
uacaggagugagcac

SEQ ID NO: 94795 - RNA, 24 nt, Homo sapiens
cuccuuucaccacaugugcacaug

SEQ ID NO: 94796 - RNA, 17 nt, Homo sapiens
ucucugaggacacuaac

SEQ ID NO: 94797 - RNA, 23 nt, Homo sapiens
cuuguaaauagcucagguguccc

SEQ ID NO: 94798 - RNA, 20 nt, Homo sapiens
gaggucaaggcugcagugag

SEQ ID NO: 94799 - RNA, 24 nt, Homo sapiens
aaaaccaauguucucucuucucca

SEQ ID NO: 94800 - RNA, 14 nt, Homo sapiens
aguuccaccaucaa

SEQ ID NO: 94801 - RNA, 24 nt, Homo sapiens
aaggugugcucugaucauccacug

SEQ ID NO: 94802 - RNA, 23 nt, Homo sapiens
uagauuuuagacccuauugcugc

SEQ ID NO: 94803 - RNA, 21 nt, Homo sapiens
uaaugacuuaagcacacuuga

SEQ ID NO: 94804 - RNA, 16 nt, Homo sapiens
cacgaauauugcugau

SEQ ID NO: 94805 - RNA, 17 nt, Homo sapiens
agccugcuccagcuguu

SEQ ID NO: 94806 - RNA, 17 nt, Homo sapiens
uccuaguuccaccauca

SEQ ID NO: 94807 - RNA, 16 nt, Homo sapiens
augcuggcuguuggcu

SEQ ID NO: 94808 - RNA, 23 nt, Homo sapiens
gagaaaaaauauuuuccugccag

SEQ ID NO: 94809 - RNA, 22 nt, Homo sapiens
uaaaguuucuguugauaaucau

SEQ ID NO: 94810 - RNA, 22 nt, Homo sapiens
agaugaugccaugggcccucuc

SEQ ID NO: 94811 - RNA, 17 nt, Homo sapiens
cagaaucucaaauaacu

SEQ ID NO: 94812 - RNA, 18 nt, Homo sapiens
ucuagcauggcugccaau

SEQ ID NO: 94813 - RNA, 16 nt, Homo sapiens
gaguaggaagacuuug

SEQ ID NO: 94814 - RNA, 15 nt, Homo sapiens
cuguucuuuccaaag

SEQ ID NO: 94815 - RNA, 21 nt, Homo sapiens
cugaucauccacugugccaug

SEQ ID NO: 94816 - RNA, 15 nt, Homo sapiens
acaugcacgugugug

SEQ ID NO: 94817 - RNA, 16 nt, Homo sapiens
ucuuagaaaaaccacc

SEQ ID NO: 94818 - RNA, 18 nt, Homo sapiens
gccaugaggaacaaggca

SEQ ID NO: 94819 - RNA, 18 nt, Homo sapiens
acaucuugcucugcugac

SEQ ID NO: 94820 - RNA, 21 nt, Homo sapiens
ggaaauauuaagaaagacuau

SEQ ID NO: 94821 - RNA, 12 nt, Homo sapiens
aaaaaaaagggg

SEQ ID NO: 94822 - RNA, 14 nt, Homo sapiens
gauacccaucccau

SEQ ID NO: 94823 - RNA, 16 nt, Homo sapiens
ggcccugccuccuuug

SEQ ID NO: 94824 - RNA, 20 nt, Homo sapiens
gcaaaguaucccuacuguaa

SEQ ID NO: 94825 - RNA, 12 nt, Homo sapiens
cucacgccugua

SEQ ID NO: 94826 - RNA, 14 nt, Homo sapiens
agguuggcaaaaag

SEQ ID NO: 94827 - RNA, 23 nt, Homo sapiens
aaaugcccagcuuaaaggggcua

SEQ ID NO: 94828 - RNA, 20 nt, Homo sapiens
accauuuagcacacugcuug

SEQ ID NO: 94829 - RNA, 15 nt, Homo sapiens
auccucccaccucag

SEQ ID NO: 94830 - RNA, 22 nt, Homo sapiens
caaccacugcgaccacaagaag

SEQ ID NO: 94831 - RNA, 19 nt, Homo sapiens
aacagguuuuccugaagaa

SEQ ID NO: 94832 - RNA, 20 nt, Homo sapiens
cacacaguauuacuucugcu

SEQ ID NO: 94833 - RNA, 21 nt, Homo sapiens
aagugcugggauuacaggugu

SEQ ID NO: 94834 - RNA, 14 nt, Homo sapiens
agcugccaccugcc

SEQ ID NO: 94835 - RNA, 22 nt, Homo sapiens
cuaaaugugaaugaugauccua

SEQ ID NO: 94836 - RNA, 13 nt, Homo sapiens
cugauggugcaau

SEQ ID NO: 94837 - RNA, 17 nt, Homo sapiens
ucuuuaaugucacaggc

SEQ ID NO: 94838 - RNA, 18 nt, Homo sapiens
ucuaaaggcuaccuuugu

SEQ ID NO: 94839 - RNA, 23 nt, Homo sapiens
agagucacuggaacacuaaugag

SEQ ID NO: 94840 - RNA, 17 nt, Homo sapiens
uucuccaccugccaggg

SEQ ID NO: 94841 - RNA, 16 nt, Homo sapiens
cugauggugcaaugac

SEQ ID NO: 94842 - RNA, 16 nt, Homo sapiens
cagccaugauucuuuu

SEQ ID NO: 94843 - RNA, 16 nt, Homo sapiens
augccagcuuaucuca

SEQ ID NO: 94844 - RNA, 22 nt, Homo sapiens
ucauuuaggugaggaagcaaaa

SEQ ID NO: 94845 - RNA, 17 nt, Homo sapiens
gcuaccuacauacaauu

SEQ ID NO: 94846 - RNA, 16 nt, Homo sapiens
acuaaaaggugaccaa

SEQ ID NO: 94847 - RNA, 15 nt, Homo sapiens
gaccgugaggccaga

SEQ ID NO: 94848 - RNA, 17 nt, Homo sapiens
uauacauaaacaagacc

SEQ ID NO: 94849 - RNA, 23 nt, Homo sapiens
ucggcgccuuaaggauguucuag

SEQ ID NO: 94850 - RNA, 18 nt, Homo sapiens
agcugggacuacaggcac

SEQ ID NO: 94851 - RNA, 17 nt, Homo sapiens
acuucuuauacauuuga

SEQ ID NO: 94852 - RNA, 14 nt, Homo sapiens
gagguacgaaaaga

SEQ ID NO: 94853 - RNA, 16 nt, Homo sapiens
gguuucuaaagcugcc

SEQ ID NO: 94854 - RNA, 19 nt, Homo sapiens
aagauaaaugugcugaaug

SEQ ID NO: 94855 - RNA, 17 nt, Homo sapiens
accucugccugaaguca

SEQ ID NO: 94856 - RNA, 14 nt, Homo sapiens
aagaaagacuaucu

SEQ ID NO: 94857 - RNA, 12 nt, Homo sapiens
uggacacagcuc

SEQ ID NO: 94858 - RNA, 18 nt, Homo sapiens
ccacaaccgaccagaugc

SEQ ID NO: 94859 - RNA, 18 nt, Homo sapiens
accuugaaugaugccaug

SEQ ID NO: 94860 - RNA, 20 nt, Homo sapiens
ccucauuagcauuuugcuaa

SEQ ID NO: 94861 - RNA, 14 nt, Homo sapiens
agagucacuggaac

SEQ ID NO: 94862 - RNA, 19 nt, Homo sapiens
acaggauuauuggaaauuu

SEQ ID NO: 94863 - RNA, 21 nt, Homo sapiens
uguuaacauggacaugaucuu

SEQ ID NO: 94864 - RNA, 14 nt, Homo sapiens
gaauguuugccucu

SEQ ID NO: 94865 - RNA, 15 nt, Homo sapiens
guucugggacacagu

SEQ ID NO: 94866 - RNA, 17 nt, Homo sapiens
acccugcucuccgacca

SEQ ID NO: 94867 - RNA, 15 nt, Homo sapiens
auggcuuuugugcau

SEQ ID NO: 94868 - RNA, 16 nt, Homo sapiens
uaacauggaaguacua

SEQ ID NO: 94869 - RNA, 12 nt, Homo sapiens
uguuuuccauga

SEQ ID NO: 94870 - RNA, 14 nt, Homo sapiens
uucuacccaggugc

SEQ ID NO: 94871 - RNA, 20 nt, Homo sapiens
caagacucuuuggacacuca

SEQ ID NO: 94872 - RNA, 21 nt, Homo sapiens
aagagguuuuaaaaaaauccc

SEQ ID NO: 94873 - RNA, 22 nt, Homo sapiens
caauaaggggagaguaacccug

SEQ ID NO: 94874 - RNA, 22 nt, Homo sapiens
uggauguucugacccugcuuca

SEQ ID NO: 94875 - RNA, 17 nt, Homo sapiens
uaaugaaaccugugucu

SEQ ID NO: 94876 - RNA, 22 nt, Homo sapiens
cucaaacucuugaccucaggug

SEQ ID NO: 94877 - RNA, 19 nt, Homo sapiens
cugccauauucuguuggcc

SEQ ID NO: 94878 - RNA, 21 nt, Homo sapiens
acaacaaaccuguuucugcag

SEQ ID NO: 94879 - RNA, 14 nt, Homo sapiens
gaacacuccuucac

SEQ ID NO: 94880 - RNA, 15 nt, Homo sapiens
gugaggaagcaaaag

SEQ ID NO: 94881 - RNA, 15 nt, Homo sapiens
ucgugacaacacuug

SEQ ID NO: 94882 - RNA, 18 nt, Homo sapiens
agucccaccuuggcugca

SEQ ID NO: 94883 - RNA, 14 nt, Homo sapiens
agaacuuuccagga

SEQ ID NO: 94884 - RNA, 22 nt, Homo sapiens
gggaaugaaugucagugugacu

SEQ ID NO: 94885 - RNA, 18 nt, Homo sapiens
ccucaaccuccugggcua

SEQ ID NO: 94886 - RNA, 13 nt, Homo sapiens
augaauacagaua

SEQ ID NO: 94887 - RNA, 20 nt, Homo sapiens
agacucgauaguggugguga

SEQ ID NO: 94888 - RNA, 24 nt, Homo sapiens
uuuccuggcacugcuuccagugag

SEQ ID NO: 94889 - RNA, 13 nt, Homo sapiens
uacaggaaguacu

SEQ ID NO: 94890 - RNA, 15 nt, Homo sapiens
ucaacucuccuccag

SEQ ID NO: 94891 - RNA, 15 nt, Homo sapiens
ugaagucacacagug

SEQ ID NO: 94892 - RNA, 22 nt, Homo sapiens
aucacggcucacugcagccuca

SEQ ID NO: 94893 - RNA, 21 nt, Homo sapiens
aucgucacugcuuaacuucac

SEQ ID NO: 94894 - RNA, 17 nt, Homo sapiens
uguuagugguuacccag

SEQ ID NO: 94895 - RNA, 18 nt, Homo sapiens
aguuggucccccuuccau

SEQ ID NO: 94896 - RNA, 18 nt, Homo sapiens
ugcagugguaugaucacg

SEQ ID NO: 94897 - RNA, 22 nt, Homo sapiens
gcacuuuguucuggcucuucca

SEQ ID NO: 94898 - RNA, 17 nt, Homo sapiens
auguucuuucacccuuu

SEQ ID NO: 94899 - RNA, 19 nt, Homo sapiens
cccagucuggaaugcagug

SEQ ID NO: 94900 - RNA, 18 nt, Homo sapiens
gcaugaaguaauaugcac

SEQ ID NO: 94901 - RNA, 13 nt, Homo sapiens
agcagugugauug

SEQ ID NO: 94902 - RNA, 18 nt, Homo sapiens
cuccccagcaagugagag

SEQ ID NO: 94903 - RNA, 17 nt, Homo sapiens
uagcugggacuacaggc

SEQ ID NO: 94904 - RNA, 15 nt, Homo sapiens
auccacccaccucag

SEQ ID NO: 94905 - RNA, 17 nt, Homo sapiens
agugcuuguuccucuca

SEQ ID NO: 94906 - RNA, 17 nt, Homo sapiens
cuuuccuguagucccau

SEQ ID NO: 94907 - RNA, 18 nt, Homo sapiens
ccagcgugugacuacucc

SEQ ID NO: 94908 - RNA, 14 nt, Homo sapiens
ucugccucugacac

SEQ ID NO: 94909 - RNA, 19 nt, Homo sapiens
uuaucaaucucuaguuguc

SEQ ID NO: 94910 - RNA, 14 nt, Homo sapiens
gcucugccucccau

SEQ ID NO: 94911 - RNA, 17 nt, Homo sapiens
gacacaugcaaggucau

SEQ ID NO: 94912 - RNA, 14 nt, Homo sapiens
uaugugagcacaaa

SEQ ID NO: 94913 - RNA, 20 nt, Homo sapiens
uucuacucgaguuacagaca

SEQ ID NO: 94914 - RNA, 18 nt, Homo sapiens
ucucaaguuaucagggua

SEQ ID NO: 94915 - RNA, 18 nt, Homo sapiens
caagucaagugaaaaagg

SEQ ID NO: 94916 - RNA, 13 nt, Homo sapiens
gcaggauucuucc

SEQ ID NO: 94917 - RNA, 23 nt, Homo sapiens
augugagaccauuuagcacacug

SEQ ID NO: 94918 - RNA, 22 nt, Homo sapiens
gccugggggcugggcagaggaa

SEQ ID NO: 94919 - RNA, 16 nt, Homo sapiens
uggggagaaaguacuu

SEQ ID NO: 94920 - RNA, 22 nt, Homo sapiens
accccagugcuuguuccucuca

SEQ ID NO: 94921 - RNA, 19 nt, Homo sapiens
uaauuuaccugaagucuuu

SEQ ID NO: 94922 - RNA, 16 nt, Homo sapiens
cucuuagaaaaaccac

SEQ ID NO: 94923 - RNA, 12 nt, Homo sapiens
caaaaaacaacu

SEQ ID NO: 94924 - RNA, 14 nt, Homo sapiens
agcauggcugccaa

SEQ ID NO: 94925 - RNA, 21 nt, Homo sapiens
gggcucccuucccaccucucu

SEQ ID NO: 94926 - RNA, 17 nt, Homo sapiens
auucucauuugucacac

SEQ ID NO: 94927 - RNA, 20 nt, Homo sapiens
caugacacgaauauugcuga

SEQ ID NO: 94928 - RNA, 16 nt, Homo sapiens
cauuucugagaucaaa

SEQ ID NO: 94929 - RNA, 18 nt, Homo sapiens
aaccacugcgaccacaag

SEQ ID NO: 94930 - RNA, 21 nt, Homo sapiens
cuuuugagugccuuacacaau

SEQ ID NO: 94931 - RNA, 16 nt, Homo sapiens
ccacaaccgaccagau

SEQ ID NO: 94932 - RNA, 19 nt, Homo sapiens
agaggcagggucucacucu

SEQ ID NO: 94933 - RNA, 22 nt, Homo sapiens
cacugugcugagucugaaggcu

SEQ ID NO: 94934 - RNA, 16 nt, Homo sapiens
ugcacuccagccuggg

SEQ ID NO: 94935 - RNA, 17 nt, Homo sapiens
ugcccuaaaguguauuu

SEQ ID NO: 94936 - RNA, 16 nt, Homo sapiens
acuaaggaaucuuucu

SEQ ID NO: 94937 - RNA, 14 nt, Homo sapiens
ggcuuggggaccag

SEQ ID NO: 94938 - RNA, 22 nt, Homo sapiens
aagaagcccaggaaaggcucca

SEQ ID NO: 94939 - RNA, 18 nt, Homo sapiens
gucacacacuuuggcuau

SEQ ID NO: 94940 - RNA, 17 nt, Homo sapiens
uagaagucuuagaugua

SEQ ID NO: 94941 - RNA, 23 nt, Homo sapiens
augaugccaugaggaacaaggca

SEQ ID NO: 94942 - RNA, 15 nt, Homo sapiens
cuucauggacuucca

SEQ ID NO: 94943 - RNA, 20 nt, Homo sapiens
ugggugucaagagggucuga

SEQ ID NO: 94944 - RNA, 16 nt, Homo sapiens
caaaaaaagaaaaaga

SEQ ID NO: 94945 - RNA, 16 nt, Homo sapiens
acaugugcacaugcac

SEQ ID NO: 94946 - RNA, 22 nt, Homo sapiens
cucaaccuccugggcuaaguga

SEQ ID NO: 94947 - RNA, 18 nt, Homo sapiens
gaguacuacaguccuccc

SEQ ID NO: 94948 - RNA, 16 nt, Homo sapiens
aacucuugaccucagg

SEQ ID NO: 94949 - RNA, 14 nt, Homo sapiens
cuguaucaugacaa

SEQ ID NO: 94950 - RNA, 16 nt, Homo sapiens
cuaagagucucuauua

SEQ ID NO: 94951 - RNA, 17 nt, Homo sapiens
uuaucagaauucucaga

SEQ ID NO: 94952 - RNA, 17 nt, Homo sapiens
cccauaugccugggcag

SEQ ID NO: 94953 - RNA, 22 nt, Homo sapiens
ucccaucacuucccuacaugga

SEQ ID NO: 94954 - RNA, 17 nt, Homo sapiens
ucuguccuacucugugu

SEQ ID NO: 94955 - RNA, 23 nt, Homo sapiens
uugguggcagaguggauucuuga

SEQ ID NO: 94956 - RNA, 13 nt, Homo sapiens
cagagcugccacc

SEQ ID NO: 94957 - RNA, 17 nt, Homo sapiens
auauuuaccagaccaca

SEQ ID NO: 94958 - RNA, 23 nt, Homo sapiens
acaagaucacaagucagcacuac

SEQ ID NO: 94959 - RNA, 12 nt, Homo sapiens
gcaggaccucag

SEQ ID NO: 94960 - RNA, 16 nt, Homo sapiens
ucccaaagcagugcau

SEQ ID NO: 94961 - RNA, 11 nt, Homo sapiens
uuucaccacau

SEQ ID NO: 94962 - RNA, 21 nt, Homo sapiens
ccugcaaccugauugugucuc

SEQ ID NO: 94963 - RNA, 12 nt, Homo sapiens
ccagaauuuccc

SEQ ID NO: 94964 - RNA, 21 nt, Homo sapiens
cucaaaagcugggcagguugg

SEQ ID NO: 94965 - RNA, 16 nt, Homo sapiens
cagugguuggcaauug

SEQ ID NO: 94966 - RNA, 14 nt, Homo sapiens
gcgcgguggcucac

SEQ ID NO: 94967 - RNA, 16 nt, Homo sapiens
acuucccuacauggag

SEQ ID NO: 94968 - RNA, 20 nt, Homo sapiens
gccaagcagagguugggagg

SEQ ID NO: 94969 - RNA, 14 nt, Homo sapiens
gcucacugcagccu

SEQ ID NO: 94970 - RNA, 16 nt, Homo sapiens
cuccuggcccacugca

SEQ ID NO: 94971 - RNA, 19 nt, Homo sapiens
acccucuggagauaaaaua

SEQ ID NO: 94972 - RNA, 17 nt, Homo sapiens
cauguuuuucuucuccc

SEQ ID NO: 94973 - RNA, 20 nt, Homo sapiens
ggaagccagcaggcucucag

SEQ ID NO: 94974 - RNA, 20 nt, Homo sapiens
aaaaaggaugcauucccuac

SEQ ID NO: 94975 - RNA, 19 nt, Homo sapiens
gcacagacccugcccugug

SEQ ID NO: 94976 - RNA, 18 nt, Homo sapiens
gagauagccaaggccaaa

SEQ ID NO: 94977 - RNA, 17 nt, Homo sapiens
agcugggacuacaggug

SEQ ID NO: 94978 - RNA, 15 nt, Homo sapiens
ccaccaacauacucc

SEQ ID NO: 94979 - RNA, 19 nt, Homo sapiens
cagcuaacauggaaguacu

SEQ ID NO: 94980 - RNA, 23 nt, Homo sapiens
agaaccaaaaagaggcuauguga

SEQ ID NO: 94981 - RNA, 21 nt, Homo sapiens
ugaagcugggagaaccaaaaa

SEQ ID NO: 94982 - RNA, 20 nt, Homo sapiens
cuacucuagggaaaaaccag

SEQ ID NO: 94983 - RNA, 23 nt, Homo sapiens
aaagaccgugugugaaauucucu

SEQ ID NO: 94984 - RNA, 21 nt, Homo sapiens
cauuuuuaguagagacagggu

SEQ ID NO: 94985 - RNA, 24 nt, Homo sapiens
cagcugacuuuucuguccgagcuu

SEQ ID NO: 94986 - RNA, 14 nt, Homo sapiens
ucccauuugcuccu

SEQ ID NO: 94987 - RNA, 14 nt, Homo sapiens
auucagcucugcaa

SEQ ID NO: 94988 - RNA, 12 nt, Homo sapiens
aguuuuaugaga

SEQ ID NO: 94989 - RNA, 19 nt, Homo sapiens
ucugccucugacacacagc

SEQ ID NO: 94990 - RNA, 14 nt, Homo sapiens
acagcucuucucca

SEQ ID NO: 94991 - RNA, 16 nt, Homo sapiens
uucuucccuacaguug

SEQ ID NO: 94992 - RNA, 23 nt, Homo sapiens
acacuaacgauuuguuaaugaua

SEQ ID NO: 94993 - RNA, 14 nt, Homo sapiens
uuagaagucacaca

SEQ ID NO: 94994 - RNA, 17 nt, Homo sapiens
cuccaugagugcagcuc

SEQ ID NO: 94995 - RNA, 22 nt, Homo sapiens
cucagaagacacugaugggcaa

SEQ ID NO: 94996 - RNA, 22 nt, Homo sapiens
caacaccucugcacaagcugca

SEQ ID NO: 94997 - RNA, 14 nt, Homo sapiens
ggcuggguggcacc

SEQ ID NO: 94998 - RNA, 12 nt, Homo sapiens
aaaaaaaauccc

SEQ ID NO: 94999 - RNA, 21 nt, Homo sapiens
uuuuaagaaaaaggaugcaca

SEQ ID NO: 95000 - RNA, 22 nt, Homo sapiens
cauguuggccaggcuggucuca

SEQ ID NO: 95001 - RNA, 19 nt, Homo sapiens
uggacccugaggcccagag

SEQ ID NO: 95002 - RNA, 20 nt, Homo sapiens
cagaaggaagacuucauccc

SEQ ID NO: 95003 - RNA, 17 nt, Homo sapiens
ggauucuuauggacaau

SEQ ID NO: 95004 - RNA, 17 nt, Homo sapiens
acccaguuagcucucaa

SEQ ID NO: 95005 - RNA, 22 nt, Homo sapiens
aggauccugagccagauuucac

SEQ ID NO: 95006 - RNA, 15 nt, Homo sapiens
ucaguaauaacucua

SEQ ID NO: 95007 - RNA, 18 nt, Homo sapiens
aaaagaugaagcugagau

SEQ ID NO: 95008 - RNA, 22 nt, Homo sapiens
acaguucaauucucauuuguca

SEQ ID NO: 95009 - RNA, 11 nt, Homo sapiens
agugacagagg

SEQ ID NO: 95010 - RNA, 18 nt, Homo sapiens
aucaacaucuuggucaga

SEQ ID NO: 95011 - RNA, 23 nt, Homo sapiens
gaagaaaauaguggugugauuug

SEQ ID NO: 95012 - RNA, 19 nt, Homo sapiens
gacagagugagacucuguc

SEQ ID NO: 95013 - RNA, 17 nt, Homo sapiens
uaauaauaaaacaacag

SEQ ID NO: 95014 - RNA, 22 nt, Homo sapiens
acguuucuaaaggcuaccuuug

SEQ ID NO: 95015 - RNA, 22 nt, Homo sapiens
ccccgcacugggcuuggggacc

SEQ ID NO: 95016 - RNA, 17 nt, Homo sapiens
gacuacaggcacccacc

SEQ ID NO: 95017 - RNA, 16 nt, Homo sapiens
aagugagagaggggga

SEQ ID NO: 95018 - RNA, 23 nt, Homo sapiens
gauguacuuuaccugaaacaacc

SEQ ID NO: 95019 - RNA, 16 nt, Homo sapiens
uggcuuuugugcauua

SEQ ID NO: 95020 - RNA, 14 nt, Homo sapiens
agacucugucucaa

SEQ ID NO: 95021 - RNA, 22 nt, Homo sapiens
ucugaucauccacugugccaug

SEQ ID NO: 95022 - RNA, 21 nt, Homo sapiens
gauuaauuaaaacacaacauc

SEQ ID NO: 95023 - RNA, 15 nt, Homo sapiens
aggaagcacaugccu

SEQ ID NO: 95024 - RNA, 20 nt, Homo sapiens
ugugauugacgggacuguug

SEQ ID NO: 95025 - RNA, 16 nt, Homo sapiens
gcccacuucugccaua

SEQ ID NO: 95026 - RNA, 18 nt, Homo sapiens
uauuucccucaccuuucc

SEQ ID NO: 95027 - RNA, 18 nt, Homo sapiens
aaaggaugcacagaguug

SEQ ID NO: 95028 - RNA, 23 nt, Homo sapiens
uacugcagcuuuguuuguuguca

SEQ ID NO: 95029 - RNA, 21 nt, Homo sapiens
accuagccuuagaagucacac

SEQ ID NO: 95030 - RNA, 19 nt, Homo sapiens
acagcugggguggggaccu

SEQ ID NO: 95031 - RNA, 18 nt, Homo sapiens
uguuuagcccaaaaccaa

SEQ ID NO: 95032 - RNA, 16 nt, Homo sapiens
cuggucccacucaguc

SEQ ID NO: 95033 - RNA, 14 nt, Homo sapiens
guaucaaugaguaa

SEQ ID NO: 95034 - RNA, 15 nt, Homo sapiens
guaaggaauaccugu

SEQ ID NO: 95035 - RNA, 18 nt, Homo sapiens
cauaaugacuuaagcaca

SEQ ID NO: 95036 - RNA, 21 nt, Homo sapiens
cagaaguuugagaucagccug

SEQ ID NO: 95037 - RNA, 19 nt, Homo sapiens
cgaggacagggaggugacc

SEQ ID NO: 95038 - RNA, 14 nt, Homo sapiens
ucacugcaaccucc

SEQ ID NO: 95039 - RNA, 17 nt, Homo sapiens
uuaagagaaaugagcuu

SEQ ID NO: 95040 - RNA, 15 nt, Homo sapiens
uucgaauccagagag

SEQ ID NO: 95041 - RNA, 17 nt, Homo sapiens
uucaccacaugugcaca

SEQ ID NO: 95042 - RNA, 12 nt, Homo sapiens
cuggggugggag

SEQ ID NO: 95043 - RNA, 17 nt, Homo sapiens
caagagagacagcacag

SEQ ID NO: 95044 - RNA, 21 nt, Homo sapiens
guaaaugggggugcauuugag

SEQ ID NO: 95045 - RNA, 12 nt, Homo sapiens
uggcaccagcag

SEQ ID NO: 95046 - RNA, 12 nt, Homo sapiens
cacuccaugagu

SEQ ID NO: 95047 - RNA, 20 nt, Homo sapiens
uuaagcacacuugacaucaa

SEQ ID NO: 95048 - RNA, 24 nt, Homo sapiens
acaaaggagagcuagcagcaggga

SEQ ID NO: 95049 - RNA, 23 nt, Homo sapiens
aggaagccagcaggcucucaggc

SEQ ID NO: 95050 - RNA, 14 nt, Homo sapiens
augagaaaugccag

SEQ ID NO: 95051 - RNA, 17 nt, Homo sapiens
uacuuguggacacagcu

SEQ ID NO: 95052 - RNA, 14 nt, Homo sapiens
gaagacuucauccc

SEQ ID NO: 95053 - RNA, 20 nt, Homo sapiens
aaacuuuucuaauacucuac

SEQ ID NO: 95054 - RNA, 16 nt, Homo sapiens
gccuggucguuuucaa

SEQ ID NO: 95055 - RNA, 23 nt, Homo sapiens
cgaauuuucacagccaugauucu

SEQ ID NO: 95056 - RNA, 16 nt, Homo sapiens
agcccuuagcagggaa

SEQ ID NO: 95057 - RNA, 18 nt, Homo sapiens
uagagccagggucucacu

SEQ ID NO: 95058 - RNA, 18 nt, Homo sapiens
gcuuaaaacaacacucac

SEQ ID NO: 95059 - RNA, 12 nt, Homo sapiens
uuuacaacuggg

SEQ ID NO: 95060 - RNA, 23 nt, Homo sapiens
aauagcugggacuacagguguga

SEQ ID NO: 95061 - RNA, 17 nt, Homo sapiens
uaaugacuuaagcacac

SEQ ID NO: 95062 - RNA, 16 nt, Homo sapiens
guucaugcacacuugc

SEQ ID NO: 95063 - RNA, 18 nt, Homo sapiens
uggguacuuguggacaca

SEQ ID NO: 95064 - RNA, 14 nt, Homo sapiens
ugauuuaaaucagc

SEQ ID NO: 95065 - RNA, 12 nt, Homo sapiens
ccaaggugggag

SEQ ID NO: 95066 - RNA, 14 nt, Homo sapiens
aauucuacuuugag

SEQ ID NO: 95067 - RNA, 13 nt, Homo sapiens
acaggugugaacc

SEQ ID NO: 95068 - RNA, 18 nt, Homo sapiens
cuacucgaguuacagaca

SEQ ID NO: 95069 - RNA, 20 nt, Homo sapiens
ugagucaccaagcccaguua

SEQ ID NO: 95070 - RNA, 12 nt, Homo sapiens
ucucaggccagc

SEQ ID NO: 95071 - RNA, 16 nt, Homo sapiens
cuccucuccccagcaa

SEQ ID NO: 95072 - RNA, 18 nt, Homo sapiens
gaagucuuuguacagaca

SEQ ID NO: 95073 - RNA, 20 nt, Homo sapiens
uucccaucuuccaaggguac

SEQ ID NO: 95074 - RNA, 16 nt, Homo sapiens
augucagugugacuga

SEQ ID NO: 95075 - RNA, 19 nt, Homo sapiens
cucccaaagugcugggauu

SEQ ID NO: 95076 - RNA, 17 nt, Homo sapiens
ucucaacugagugagca

SEQ ID NO: 95077 - RNA, 20 nt, Homo sapiens
cuccuucaccuuugucccca

SEQ ID NO: 95078 - RNA, 15 nt, Homo sapiens
aauuguuuggggaug

SEQ ID NO: 95079 - RNA, 13 nt, Homo sapiens
cacgcgugcacac

SEQ ID NO: 95080 - RNA, 19 nt, Homo sapiens
aguugaugaaauaucaaga

SEQ ID NO: 95081 - RNA, 20 nt, Homo sapiens
agagugagacucugucucaa

SEQ ID NO: 95082 - RNA, 21 nt, Homo sapiens
caaaucagcugcuacuacucc

SEQ ID NO: 95083 - RNA, 20 nt, Homo sapiens
ccuggcccacugcaucguuu

SEQ ID NO: 95084 - RNA, 12 nt, Homo sapiens
uaaagcugccag

SEQ ID NO: 95085 - RNA, 20 nt, Homo sapiens
augagcugcacuccaugagu

SEQ ID NO: 95086 - RNA, 21 nt, Homo sapiens
gacacucacacggacacucaa

SEQ ID NO: 95087 - RNA, 15 nt, Homo sapiens
gcagggaaacagcua

SEQ ID NO: 95088 - RNA, 20 nt, Homo sapiens
uaggugacagagugagacuc

SEQ ID NO: 95089 - RNA, 20 nt, Homo sapiens
uccaggggugggacacccug

SEQ ID NO: 95090 - RNA, 15 nt, Homo sapiens
cuucccuacauggag

SEQ ID NO: 95091 - RNA, 20 nt, Homo sapiens
acacauuuuuuaaaugcacc

SEQ ID NO: 95092 - RNA, 15 nt, Homo sapiens
auuuuauuaugcaug

SEQ ID NO: 95093 - RNA, 14 nt, Homo sapiens
cuaaggugugcucu

SEQ ID NO: 95094 - RNA, 18 nt, Homo sapiens
acugugccaugugccagg

SEQ ID NO: 95095 - RNA, 22 nt, Homo sapiens
gcuucucacugccaugccagcu

SEQ ID NO: 95096 - RNA, 18 nt, Homo sapiens
agcuaggccuggccagau

SEQ ID NO: 95097 - RNA, 16 nt, Homo sapiens
agagcaguguggaaaa

SEQ ID NO: 95098 - RNA, 19 nt, Homo sapiens
cuacagagcagacaguuaa

SEQ ID NO: 95099 - RNA, 20 nt, Homo sapiens
uuaaaacaacacucacauuu

SEQ ID NO: 95100 - RNA, 23 nt, Homo sapiens
ggauguucuagcauggcugccaa

SEQ ID NO: 95101 - RNA, 19 nt, Homo sapiens
augccucucucaggccaaa

SEQ ID NO: 95102 - RNA, 14 nt, Homo sapiens
caccuugacagggc

SEQ ID NO: 95103 - RNA, 15 nt, Homo sapiens
ucaccaagcccaguu

SEQ ID NO: 95104 - RNA, 19 nt, Homo sapiens
uuccaaggguacuaaggaa

SEQ ID NO: 95105 - RNA, 22 nt, Homo sapiens
caucuaugugagaccauuuagc

SEQ ID NO: 95106 - RNA, 21 nt, Homo sapiens
gaaccaagaacuuuccaggaa

SEQ ID NO: 95107 - RNA, 14 nt, Homo sapiens
guuuuacugcagcu

SEQ ID NO: 95108 - RNA, 14 nt, Homo sapiens
gagccuuccagggg

SEQ ID NO: 95109 - RNA, 18 nt, Homo sapiens
aagccagcaggcucucag

SEQ ID NO: 95110 - RNA, 14 nt, Homo sapiens
ccugggcaauguga

SEQ ID NO: 95111 - RNA, 19 nt, Homo sapiens
cuugauucauaaugacuua

SEQ ID NO: 95112 - RNA, 18 nt, Homo sapiens
gcauaaguuaacuuccaa

SEQ ID NO: 95113 - RNA, 16 nt, Homo sapiens
ucaccacaugugcaca

SEQ ID NO: 95114 - RNA, 14 nt, Homo sapiens
aacauggaaguacu

SEQ ID NO: 95115 - RNA, 20 nt, Homo sapiens
cuccuggccucaagugauuc

SEQ ID NO: 95116 - RNA, 14 nt, Homo sapiens
cucauacucaccuc

SEQ ID NO: 95117 - RNA, 18 nt, Homo sapiens
cuuucccucccuuccucu

SEQ ID NO: 95118 - RNA, 21 nt, Homo sapiens
acuggaacacuaaugaggaaa

SEQ ID NO: 95119 - RNA, 11 nt, Homo sapiens
aacuggcugca

SEQ ID NO: 95120 - RNA, 17 nt, Homo sapiens
ucuccaccugccaggga

SEQ ID NO: 95121 - RNA, 19 nt, Homo sapiens
cacgacugcccggcagggu

SEQ ID NO: 95122 - RNA, 14 nt, Homo sapiens
uacaggaaguacug

SEQ ID NO: 95123 - RNA, 14 nt, Homo sapiens
gccucucucaggcc

SEQ ID NO: 95124 - RNA, 22 nt, Homo sapiens
aacugcaucaagaugugacaug

SEQ ID NO: 95125 - RNA, 13 nt, Homo sapiens
caccagcagccug

SEQ ID NO: 95126 - RNA, 14 nt, Homo sapiens
ugcaccacugcacu

SEQ ID NO: 95127 - RNA, 14 nt, Homo sapiens
cucugugucaggug

SEQ ID NO: 95128 - RNA, 19 nt, Homo sapiens
caugaaguaauaugcacac

SEQ ID NO: 95129 - RNA, 14 nt, Homo sapiens
auaaccuagccuua

SEQ ID NO: 95130 - RNA, 18 nt, Homo sapiens
aaggacacuagaagauuu

SEQ ID NO: 95131 - RNA, 16 nt, Homo sapiens
aucauaaaacuugaug

SEQ ID NO: 95132 - RNA, 13 nt, Homo sapiens
aaauguacagcaa

SEQ ID NO: 95133 - RNA, 15 nt, Homo sapiens
ugugcgccuacagga

SEQ ID NO: 95134 - RNA, 15 nt, Homo sapiens
aauauauaaccagug

SEQ ID NO: 95135 - RNA, 19 nt, Homo sapiens
aagugauccucccaccuca

SEQ ID NO: 95136 - RNA, 22 nt, Homo sapiens
agcuaacauggaaguacuauaa

SEQ ID NO: 95137 - RNA, 13 nt, Homo sapiens
ucuacccaggugc

SEQ ID NO: 95138 - RNA, 15 nt, Homo sapiens
gaggaaagcaaagga

SEQ ID NO: 95139 - RNA, 17 nt, Homo sapiens
ucuugauucauaaugac

SEQ ID NO: 95140 - RNA, 18 nt, Homo sapiens
ccgugugugaaauucucu

SEQ ID NO: 95141 - RNA, 17 nt, Homo sapiens
accaaaucagcugcuac

SEQ ID NO: 95142 - RNA, 23 nt, Homo sapiens
cuuaaaccgccaaggcuggggga

SEQ ID NO: 95143 - RNA, 14 nt, Homo sapiens
cuugacagggcaca

SEQ ID NO: 95144 - RNA, 21 nt, Homo sapiens
acugcauaugaaaggacacua

SEQ ID NO: 95145 - RNA, 14 nt, Homo sapiens
ucucccuucauccu

SEQ ID NO: 95146 - RNA, 17 nt, Homo sapiens
guaaauagcucaggugu

SEQ ID NO: 95147 - RNA, 21 nt, Homo sapiens
cugcagcuuuguuuguuguca

SEQ ID NO: 95148 - RNA, 23 nt, Homo sapiens
cuaagagggagggagggcuccag

SEQ ID NO: 95149 - RNA, 19 nt, Homo sapiens
caggugugaaccaccacac

SEQ ID NO: 95150 - RNA, 19 nt, Homo sapiens
uuuuacuggggauucuuga

SEQ ID NO: 95151 - RNA, 16 nt, Homo sapiens
gaugccagggacccac

SEQ ID NO: 95152 - RNA, 15 nt, Homo sapiens
cagguuggugggggc

SEQ ID NO: 95153 - RNA, 12 nt, Homo sapiens
aaucucuaguug

SEQ ID NO: 95154 - RNA, 19 nt, Homo sapiens
uaauucuuagcucauucuc

SEQ ID NO: 95155 - RNA, 15 nt, Homo sapiens
cagguuuuuggucug

SEQ ID NO: 95156 - RNA, 14 nt, Homo sapiens
uaauuaguuccuca

SEQ ID NO: 95157 - RNA, 15 nt, Homo sapiens
agccugggcaaugug

SEQ ID NO: 95158 - RNA, 18 nt, Homo sapiens
cagccugggcaaugugau

SEQ ID NO: 95159 - RNA, 15 nt, Homo sapiens
cagagacacaagccu

SEQ ID NO: 95160 - RNA, 19 nt, Homo sapiens
cacugugccaugugccagg

SEQ ID NO: 95161 - RNA, 22 nt, Homo sapiens
uucaguguacauggaauaacau

SEQ ID NO: 95162 - RNA, 14 nt, Homo sapiens
augaucacggcuca

SEQ ID NO: 95163 - RNA, 10 nt, Homo sapiens
acccaagggc

SEQ ID NO: 95164 - RNA, 20 nt, Homo sapiens
acacaaacgggcucagcaaa

SEQ ID NO: 95165 - RNA, 19 nt, Homo sapiens
guuaauaaaggaacauuaa

SEQ ID NO: 95166 - RNA, 19 nt, Homo sapiens
cagccucccgaguagcugg

SEQ ID NO: 95167 - RNA, 22 nt, Homo sapiens
cuugagaggguggaauauccaa

SEQ ID NO: 95168 - RNA, 21 nt, Homo sapiens
ccucccaaagugcugggauua

SEQ ID NO: 95169 - RNA, 19 nt, Homo sapiens
cccaggccuccccagcacc

SEQ ID NO: 95170 - RNA, 21 nt, Homo sapiens
cagggucucacucugucgccc

SEQ ID NO: 95171 - RNA, 19 nt, Homo sapiens
acugaugggcaacccccag

SEQ ID NO: 95172 - RNA, 14 nt, Homo sapiens
ugggcaaugugaua

SEQ ID NO: 95173 - RNA, 20 nt, Homo sapiens
ccagagaggguggugaccuc

SEQ ID NO: 95174 - RNA, 19 nt, Homo sapiens
guuuaaaaauccccaaaaa

SEQ ID NO: 95175 - RNA, 14 nt, Homo sapiens
augacaaagacuga

SEQ ID NO: 95176 - RNA, 21 nt, Homo sapiens
cucuugagccugggaggucaa

SEQ ID NO: 95177 - RNA, 20 nt, Homo sapiens
gggcacagaaaauggaagac

SEQ ID NO: 95178 - RNA, 17 nt, Homo sapiens
guacguugugcauuugg

SEQ ID NO: 95179 - RNA, 14 nt, Homo sapiens
ccaaggccaaagga

SEQ ID NO: 95180 - RNA, 19 nt, Homo sapiens
ggccagagggagugacaga

SEQ ID NO: 95181 - RNA, 12 nt, Homo sapiens
uaaauagcucag

SEQ ID NO: 95182 - RNA, 15 nt, Homo sapiens
aguucaucuugaauu

SEQ ID NO: 95183 - RNA, 13 nt, Homo sapiens
aacacaacaucuu

SEQ ID NO: 95184 - RNA, 22 nt, Homo sapiens
ugaaacgcaaccaccaccaacc

SEQ ID NO: 95185 - RNA, 18 nt, Homo sapiens
uauggcuuuugugcauua

SEQ ID NO: 95186 - RNA, 17 nt, Homo sapiens
auucagcucugcaagaa

SEQ ID NO: 95187 - RNA, 21 nt, Homo sapiens
acaguuaagagaaaugagcuu

SEQ ID NO: 95188 - RNA, 13 nt, Homo sapiens
ccagacccggcug

SEQ ID NO: 95189 - RNA, 13 nt, Homo sapiens
gccucacaguccu

SEQ ID NO: 95190 - RNA, 13 nt, Homo sapiens
cugcugacagugu

SEQ ID NO: 95191 - RNA, 20 nt, Homo sapiens
gaaaagcugcugacaguguu

SEQ ID NO: 95192 - RNA, 17 nt, Homo sapiens
uacuaaggaaucuuucu

SEQ ID NO: 95193 - RNA, 13 nt, Homo sapiens
uauuuaccagacc

SEQ ID NO: 95194 - RNA, 13 nt, Homo sapiens
aaguuugagauca

SEQ ID NO: 95195 - RNA, 12 nt, Homo sapiens
acuuugauacca

SEQ ID NO: 95196 - RNA, 15 nt, Homo sapiens
auaauuaguuccuca

SEQ ID NO: 95197 - RNA, 12 nt, Homo sapiens
ucaccaagccca

SEQ ID NO: 95198 - RNA, 23 nt, Homo sapiens
augacuccagaauuucccaaagc

SEQ ID NO: 95199 - RNA, 18 nt, Homo sapiens
gcugggcuucaguggcag

SEQ ID NO: 95200 - RNA, 20 nt, Homo sapiens
aagugauccucccaccucag

SEQ ID NO: 95201 - RNA, 13 nt, Homo sapiens
gugauccacccac

SEQ ID NO: 95202 - RNA, 19 nt, Homo sapiens
guuuauugucaaaguggug

SEQ ID NO: 95203 - RNA, 19 nt, Homo sapiens
aguaacccugucuaaugaa

SEQ ID NO: 95204 - RNA, 20 nt, Homo sapiens
cacagaaaauggaagacagc

SEQ ID NO: 95205 - RNA, 21 nt, Homo sapiens
uuugcuaaaugugaaugauga

SEQ ID NO: 95206 - RNA, 16 nt, Homo sapiens
auaaguuaacuuccaa

SEQ ID NO: 95207 - RNA, 21 nt, Homo sapiens
acacaggcccggcuccaggcu

SEQ ID NO: 95208 - RNA, 18 nt, Homo sapiens
cacaggcagguccagggu

SEQ ID NO: 95209 - RNA, 14 nt, Homo sapiens
aguaauaugcacac

SEQ ID NO: 95210 - RNA, 14 nt, Homo sapiens
caugugcacaugca

SEQ ID NO: 95211 - RNA, 14 nt, Homo sapiens
uacaagcgugagcc

SEQ ID NO: 95212 - RNA, 15 nt, Homo sapiens
ugaaaauucuugaua

SEQ ID NO: 95213 - RNA, 23 nt, Homo sapiens
agccugcaguuauuaacacuaac

SEQ ID NO: 95214 - RNA, 14 nt, Homo sapiens
acggcucacugcag

SEQ ID NO: 95215 - RNA, 11 nt, Homo sapiens
gcuucugccau

SEQ ID NO: 95216 - RNA, 16 nt, Homo sapiens
uuccuacugggggcaa

SEQ ID NO: 95217 - RNA, 18 nt, Homo sapiens
cagaggagagaggacccc

SEQ ID NO: 95218 - RNA, 11 nt, Homo sapiens
agaaugcucuu

SEQ ID NO: 95219 - RNA, 19 nt, Homo sapiens
cuauguugcccaggcaggu

SEQ ID NO: 95220 - RNA, 16 nt, Homo sapiens
cgcuggaccuugaacu

SEQ ID NO: 95221 - RNA, 18 nt, Homo sapiens
cccucaacaccucugcac

SEQ ID NO: 95222 - RNA, 17 nt, Homo sapiens
ccauggacccaauauuu

SEQ ID NO: 95223 - RNA, 15 nt, Homo sapiens
aucacgccacugcac

SEQ ID NO: 95224 - RNA, 17 nt, Homo sapiens
caguauuacuucugcua

SEQ ID NO: 95225 - RNA, 15 nt, Homo sapiens
gcaucaagaugugac

SEQ ID NO: 95226 - RNA, 18 nt, Homo sapiens
agguaugcaaucaaaucu

SEQ ID NO: 95227 - RNA, 16 nt, Homo sapiens
gggcaacccuggugac

SEQ ID NO: 95228 - RNA, 17 nt, Homo sapiens
uaaaugggggugcauuu

SEQ ID NO: 95229 - RNA, 20 nt, Homo sapiens
aagcauaaaaauuagccaag

SEQ ID NO: 95230 - RNA, 17 nt, Homo sapiens
agaucacgccacugcac

SEQ ID NO: 95231 - RNA, 14 nt, Homo sapiens
auguucugggacac

SEQ ID NO: 95232 - RNA, 17 nt, Homo sapiens
caggcacccaccaucau

SEQ ID NO: 95233 - RNA, 21 nt, Homo sapiens
gccgagauugcaccacugcac

SEQ ID NO: 95234 - RNA, 20 nt, Homo sapiens
auguuuuucuucucccucag

SEQ ID NO: 95235 - RNA, 22 nt, Homo sapiens
gcagagcagagaccaucccuga

SEQ ID NO: 95236 - RNA, 20 nt, Homo sapiens
aggcugggagagccuuccag

SEQ ID NO: 95237 - RNA, 14 nt, Homo sapiens
aguuugaaccaaga

SEQ ID NO: 95238 - RNA, 18 nt, Homo sapiens
ucuguacgucugacaggc

SEQ ID NO: 95239 - RNA, 19 nt, Homo sapiens
aagcaggacuaaaugucua

SEQ ID NO: 95240 - RNA, 22 nt, Homo sapiens
ccuggaugcagccucacagucc

SEQ ID NO: 95241 - RNA, 18 nt, Homo sapiens
ccaggcuggcgugcagug

SEQ ID NO: 95242 - RNA, 20 nt, Homo sapiens
aaucagcugcuacuacuccu

SEQ ID NO: 95243 - RNA, 17 nt, Homo sapiens
aaggaagacaaugugaa

SEQ ID NO: 95244 - RNA, 21 nt, Homo sapiens
cacucacauuuauucugcuca

SEQ ID NO: 95245 - RNA, 18 nt, Homo sapiens
ugggacaugggaaagggg

SEQ ID NO: 95246 - RNA, 17 nt, Homo sapiens
uuucaccacaugugcac

SEQ ID NO: 95247 - RNA, 19 nt, Homo sapiens
aaggaugaucuaggaagac

SEQ ID NO: 95248 - RNA, 13 nt, Homo sapiens
cacacacauacac

SEQ ID NO: 95249 - RNA, 19 nt, Homo sapiens
ccucauuagcauuuugcua

SEQ ID NO: 95250 - RNA, 15 nt, Homo sapiens
uaucaggguauucca

SEQ ID NO: 95251 - RNA, 17 nt, Homo sapiens
uaacauggaaguacuau

SEQ ID NO: 95252 - RNA, 20 nt, Homo sapiens
ccagugaggcucugcccuug

SEQ ID NO: 95253 - RNA, 19 nt, Homo sapiens
cucugagacucgcgacaau

SEQ ID NO: 95254 - RNA, 12 nt, Homo sapiens
agcuuuucccaa

SEQ ID NO: 95255 - RNA, 15 nt, Homo sapiens
uuggauuguccccga

SEQ ID NO: 95256 - RNA, 12 nt, Homo sapiens
ugggacacaguu

SEQ ID NO: 95257 - RNA, 14 nt, Homo sapiens
uagugguuacccag

SEQ ID NO: 95258 - RNA, 19 nt, Homo sapiens
ccuugaaaacacuguucuc

SEQ ID NO: 95259 - RNA, 21 nt, Homo sapiens
aauagcugggacuacaggugu

SEQ ID NO: 95260 - RNA, 22 nt, Homo sapiens
cacgaauauugcugauggugca

SEQ ID NO: 95261 - RNA, 18 nt, Homo sapiens
aauccccaaaaaagcgaa

SEQ ID NO: 95262 - RNA, 18 nt, Homo sapiens
auuguaaggaaugauuaa

SEQ ID NO: 95263 - RNA, 21 nt, Homo sapiens
uuuguagagccagggucucac

SEQ ID NO: 95264 - RNA, 11 nt, Homo sapiens
uccuucuuccc

SEQ ID NO: 95265 - RNA, 19 nt, Homo sapiens
uauauuguuuucaguguac

SEQ ID NO: 95266 - RNA, 15 nt, Homo sapiens
cauguauuaccugaa

SEQ ID NO: 95267 - RNA, 14 nt, Homo sapiens
gugaggaagcaaaa

SEQ ID NO: 95268 - RNA, 16 nt, Homo sapiens
aaaccuguuucugcag

SEQ ID NO: 95269 - RNA, 11 nt, Homo sapiens
accugaagucu

SEQ ID NO: 95270 - RNA, 23 nt, Homo sapiens
uuaaauaaaucauaaaacuugau

SEQ ID NO: 95271 - RNA, 16 nt, Homo sapiens
auggcuuuugugcauu

SEQ ID NO: 95272 - RNA, 17 nt, Homo sapiens
cuacucgaguuacagac

SEQ ID NO: 95273 - RNA, 19 nt, Homo sapiens
cgagaucacgccacugcac

SEQ ID NO: 95274 - RNA, 13 nt, Homo sapiens
ucuaaagcugcca

SEQ ID NO: 95275 - RNA, 17 nt, Homo sapiens
ucacucuuauugcccac

SEQ ID NO: 95276 - RNA, 18 nt, Homo sapiens
caaaaagaggcuauguga

SEQ ID NO: 95277 - RNA, 22 nt, Homo sapiens
auuguuuucaguguacauggaa

SEQ ID NO: 95278 - RNA, 20 nt, Homo sapiens
gcugggcagaggaaagcaaa

SEQ ID NO: 95279 - RNA, 19 nt, Homo sapiens
cgggcacucagaagacacu

SEQ ID NO: 95280 - RNA, 17 nt, Homo sapiens
ugcacaugcacgugugu

SEQ ID NO: 95281 - RNA, 18 nt, Homo sapiens
cugggauuacaagcguga

SEQ ID NO: 95282 - RNA, 18 nt, Homo sapiens
caguuaagagaaaugagc

SEQ ID NO: 95283 - RNA, 17 nt, Homo sapiens
cacuucccuacauggag

SEQ ID NO: 95284 - RNA, 23 nt, Homo sapiens
aucacggcucacugcagccucaa

SEQ ID NO: 95285 - RNA, 22 nt, Homo sapiens
ccaauuuaaagaaaacuguuaa

SEQ ID NO: 95286 - RNA, 16 nt, Homo sapiens
acgccuguaauccuag

SEQ ID NO: 95287 - RNA, 17 nt, Homo sapiens
ggagguacgaaaagagg

SEQ ID NO: 95288 - RNA, 22 nt, Homo sapiens
gacaaagcgugguggacaugca

SEQ ID NO: 95289 - RNA, 14 nt, Homo sapiens
acuugggagcaaaa

SEQ ID NO: 95290 - RNA, 19 nt, Homo sapiens
cccaggcuggcgugcagug

SEQ ID NO: 95291 - RNA, 19 nt, Homo sapiens
acuaaaagguaugcaauca

SEQ ID NO: 95292 - RNA, 14 nt, Homo sapiens
cuguucccaugaga

SEQ ID NO: 95293 - RNA, 19 nt, Homo sapiens
cagugccaaaaacaacaac

SEQ ID NO: 95294 - RNA, 14 nt, Homo sapiens
agaagaaacuaccc

SEQ ID NO: 95295 - RNA, 10 nt, Homo sapiens
cucacuccuu

SEQ ID NO: 95296 - RNA, 19 nt, Homo sapiens
ugccagcuuaucucagggg

SEQ ID NO: 95297 - RNA, 17 nt, Homo sapiens
auauugccauuucuucc

SEQ ID NO: 95298 - RNA, 17 nt, Homo sapiens
ggacuacaggcacccac

SEQ ID NO: 95299 - RNA, 20 nt, Homo sapiens
uacaguuacucagaauucuc

SEQ ID NO: 95300 - RNA, 11 nt, Homo sapiens
uaugugagcac

SEQ ID NO: 95301 - RNA, 21 nt, Homo sapiens
gaguugauucagcucugcaag

SEQ ID NO: 95302 - RNA, 17 nt, Homo sapiens
uguccuacucuguguca

SEQ ID NO: 95303 - RNA, 17 nt, Homo sapiens
ugucauauaagauucau

SEQ ID NO: 95304 - RNA, 18 nt, Homo sapiens
uuccucauuagcauuuug

SEQ ID NO: 95305 - RNA, 20 nt, Homo sapiens
agccgagauugcaccacugc

SEQ ID NO: 95306 - RNA, 18 nt, Homo sapiens
caccaucaccagacaggu

SEQ ID NO: 95307 - RNA, 18 nt, Homo sapiens
caaagcgugguggacaug

SEQ ID NO: 95308 - RNA, 21 nt, Homo sapiens
cacugcaccgggccacagaga

SEQ ID NO: 95309 - RNA, 23 nt, Homo sapiens
cuaagugauccucccaccucagc

SEQ ID NO: 95310 - RNA, 17 nt, Homo sapiens
gucucacuauguugccc

SEQ ID NO: 95311 - RNA, 19 nt, Homo sapiens
aacuagggaagauaauauu

SEQ ID NO: 95312 - RNA, 23 nt, Homo sapiens
aggauauaguuaucaaucucuag

SEQ ID NO: 95313 - RNA, 14 nt, Homo sapiens
gaguugaagacaga

SEQ ID NO: 95314 - RNA, 17 nt, Homo sapiens
uccaaggguacuaagga

SEQ ID NO: 95315 - RNA, 14 nt, Homo sapiens
uaaaacacaacauc

SEQ ID NO: 95316 - RNA, 15 nt, Homo sapiens
ucucauuugucacac

SEQ ID NO: 95317 - RNA, 23 nt, Homo sapiens
uucauuuggcauuccccacuuga

SEQ ID NO: 95318 - RNA, 22 nt, Homo sapiens
cuuuugcccacacuugggagca

SEQ ID NO: 95319 - RNA, 18 nt, Homo sapiens
ugcaugaaguaauaugca

SEQ ID NO: 95320 - RNA, 15 nt, Homo sapiens
agaccuucuccuuca

SEQ ID NO: 95321 - RNA, 20 nt, Homo sapiens
uguuccugaaccgaugagaa

SEQ ID NO: 95322 - RNA, 12 nt, Homo sapiens
uuucauugcugg

SEQ ID NO: 95323 - RNA, 16 nt, Homo sapiens
auuccccacccugaaa

SEQ ID NO: 95324 - RNA, 12 nt, Homo sapiens
gacuacaggugu

SEQ ID NO: 95325 - RNA, 16 nt, Homo sapiens
cugggcuuggggacca

SEQ ID NO: 95326 - RNA, 18 nt, Homo sapiens
gcacucaaagcuuguuaa

SEQ ID NO: 95327 - RNA, 18 nt, Homo sapiens
aauucucauuugucacac

SEQ ID NO: 95328 - RNA, 17 nt, Homo sapiens
cuucuaccuuccugcaa

SEQ ID NO: 95329 - RNA, 23 nt, Homo sapiens
caucuuggucagauuugaacucu

SEQ ID NO: 95330 - RNA, 21 nt, Homo sapiens
gcacugacauuguuggccaaa

SEQ ID NO: 95331 - RNA, 18 nt, Homo sapiens
acaugccucucucaggcc

SEQ ID NO: 95332 - RNA, 19 nt, Homo sapiens
aacucugauuaugaauaca

SEQ ID NO: 95333 - RNA, 23 nt, Homo sapiens
cuaagugaggaugaaaaaauaac

SEQ ID NO: 95334 - RNA, 17 nt, Homo sapiens
gaagcauuuacuuugug

SEQ ID NO: 95335 - RNA, 17 nt, Homo sapiens
cccagagugaacacucu

SEQ ID NO: 95336 - RNA, 18 nt, Homo sapiens
uuaacauggacaugaucu

SEQ ID NO: 95337 - RNA, 15 nt, Homo sapiens
ucugacccacugcuu

SEQ ID NO: 95338 - RNA, 12 nt, Homo sapiens
cucuacaaaaag

SEQ ID NO: 95339 - RNA, 20 nt, Homo sapiens
ggaaaagcugcugacagugu

SEQ ID NO: 95340 - RNA, 21 nt, Homo sapiens
cagugguuggcaauuguuuca

SEQ ID NO: 95341 - RNA, 13 nt, Homo sapiens
ggcauccaguauc

SEQ ID NO: 95342 - RNA, 18 nt, Homo sapiens
ucugcugacagacacagg

SEQ ID NO: 95343 - RNA, 23 nt, Homo sapiens
caacugcaucaagaugugacaug

SEQ ID NO: 95344 - RNA, 21 nt, Homo sapiens
augagccucagcauccuggca

SEQ ID NO: 95345 - RNA, 17 nt, Homo sapiens
aggaggggugugggcac

SEQ ID NO: 95346 - RNA, 17 nt, Homo sapiens
aaguaucccuacuguaa

SEQ ID NO: 95347 - RNA, 21 nt, Homo sapiens
gagacagcacaggcagcccca

SEQ ID NO: 95348 - RNA, 20 nt, Homo sapiens
cugaagucuuuguacagaca

SEQ ID NO: 95349 - RNA, 16 nt, Homo sapiens
ccuuucccaucuucca

SEQ ID NO: 95350 - RNA, 22 nt, Homo sapiens
ucgaauccagagagcagugugg

SEQ ID NO: 95351 - RNA, 12 nt, Homo sapiens
ugguggcagcuc

SEQ ID NO: 95352 - RNA, 15 nt, Homo sapiens
uaggcauuugcugaa

SEQ ID NO: 95353 - RNA, 15 nt, Homo sapiens
uuagcccaaaaccaa

SEQ ID NO: 95354 - RNA, 12 nt, Homo sapiens
acauacucccau

SEQ ID NO: 95355 - RNA, 16 nt, Homo sapiens
agcucaccucucccuu

SEQ ID NO: 95356 - RNA, 12 nt, Homo sapiens
ugagugccuuac

SEQ ID NO: 95357 - RNA, 21 nt, Homo sapiens
gcacuauaauguaagcucuac

SEQ ID NO: 95358 - RNA, 14 nt, Homo sapiens
cugcacuugcagac

SEQ ID NO: 95359 - RNA, 15 nt, Homo sapiens
gccaccuuugaagaa

SEQ ID NO: 95360 - RNA, 15 nt, Homo sapiens
ccaccaucaccagac

SEQ ID NO: 95361 - RNA, 17 nt, Homo sapiens
auuguuuucaguguaca

SEQ ID NO: 95362 - RNA, 21 nt, Homo sapiens
gaacagguuuaaaaaucccca

SEQ ID NO: 95363 - RNA, 18 nt, Homo sapiens
ucaccaaaucagcugcua

SEQ ID NO: 95364 - RNA, 22 nt, Homo sapiens
cacagugagucgaggacaggga

SEQ ID NO: 95365 - RNA, 21 nt, Homo sapiens
ugauucuuuugcccacacuug

SEQ ID NO: 95366 - RNA, 23 nt, Homo sapiens
gagccuccugcccuuaccugcca

SEQ ID NO: 95367 - RNA, 23 nt, Homo sapiens
agacuuuuccaacccucaucacc

SEQ ID NO: 95368 - RNA, 14 nt, Homo sapiens
ucuaaagcugccag

SEQ ID NO: 95369 - RNA, 15 nt, Homo sapiens
auuuuuuugagacag

SEQ ID NO: 95370 - RNA, 20 nt, Homo sapiens
ccugaauuucucacaaagga

SEQ ID NO: 95371 - RNA, 19 nt, Homo sapiens
cacaugcacgugugugcac

SEQ ID NO: 95372 - RNA, 16 nt, Homo sapiens
auucauaaugacuuaa

SEQ ID NO: 95373 - RNA, 22 nt, Homo sapiens
cucuuccacuuugauaccauug

SEQ ID NO: 95374 - RNA, 13 nt, Homo sapiens
augaggcauuugu

SEQ ID NO: 95375 - RNA, 21 nt, Homo sapiens
aacagguuuaaaaauccccaa

SEQ ID NO: 95376 - RNA, 17 nt, Homo sapiens
agacaccuugacagggc

SEQ ID NO: 95377 - RNA, 11 nt, Homo sapiens
aucaccagaca

SEQ ID NO: 95378 - RNA, 13 nt, Homo sapiens
agcugaaccuggg

SEQ ID NO: 95379 - RNA, 20 nt, Homo sapiens
acagagugagacucugucuc

SEQ ID NO: 95380 - RNA, 12 nt, Homo sapiens
guucccauuugc

SEQ ID NO: 95381 - RNA, 15 nt, Homo sapiens
aaugggggugcauuu

SEQ ID NO: 95382 - RNA, 21 nt, Homo sapiens
cuguuggccagugugacaagg

SEQ ID NO: 95383 - RNA, 14 nt, Homo sapiens
caagaugugacaug

SEQ ID NO: 95384 - RNA, 13 nt, Homo sapiens
aucccuacuguaa

SEQ ID NO: 95385 - RNA, 13 nt, Homo sapiens
acauaucugucau

SEQ ID NO: 95386 - RNA, 19 nt, Homo sapiens
ucagacagcugccugggau

SEQ ID NO: 95387 - RNA, 23 nt, Homo sapiens
gcugagggugagugggugaauaa

SEQ ID NO: 95388 - RNA, 15 nt, Homo sapiens
ugaacacucuuggua

SEQ ID NO: 95389 - RNA, 13 nt, Homo sapiens
uucaugcugcuua

SEQ ID NO: 95390 - RNA, 16 nt, Homo sapiens
acccugcuucaaauau

SEQ ID NO: 95391 - RNA, 17 nt, Homo sapiens
cauacucugcuuagaau

SEQ ID NO: 95392 - RNA, 14 nt, Homo sapiens
cagcuaaugggaca

SEQ ID NO: 95393 - RNA, 16 nt, Homo sapiens
caggcagguccagggu

SEQ ID NO: 95394 - RNA, 20 nt, Homo sapiens
augucucuuuaaugucacag

SEQ ID NO: 95395 - RNA, 22 nt, Homo sapiens
gcucagcaaaagaugcuucuca

SEQ ID NO: 95396 - RNA, 20 nt, Homo sapiens
ggcacucagaagacacugau

SEQ ID NO: 95397 - RNA, 15 nt, Homo sapiens
augcaaggucauuuu

SEQ ID NO: 95398 - RNA, 22 nt, Homo sapiens
guuggccagugugacaaggauu

SEQ ID NO: 95399 - RNA, 13 nt, Homo sapiens
uucccaaacugau

SEQ ID NO: 95400 - RNA, 16 nt, Homo sapiens
guucagguaacaggca

SEQ ID NO: 95401 - RNA, 22 nt, Homo sapiens
uuccuggcacugcuuccaguga

SEQ ID NO: 95402 - RNA, 16 nt, Homo sapiens
acucagaagacacuga

SEQ ID NO: 95403 - RNA, 16 nt, Homo sapiens
acacucaaaagcuggg

SEQ ID NO: 95404 - RNA, 22 nt, Homo sapiens
agcugggguggggaccucaggc

SEQ ID NO: 95405 - RNA, 14 nt, Homo sapiens
aguucaucuugaau

SEQ ID NO: 95406 - RNA, 15 nt, Homo sapiens
ucaaccccaugagac

SEQ ID NO: 95407 - RNA, 15 nt, Homo sapiens
caaaggaagcacaug

SEQ ID NO: 95408 - RNA, 16 nt, Homo sapiens
cauaauuguucuuagu

SEQ ID NO: 95409 - RNA, 17 nt, Homo sapiens
uaggugaggaagcaaaa

SEQ ID NO: 95410 - RNA, 17 nt, Homo sapiens
cuaggcauuugcugaau

SEQ ID NO: 95411 - RNA, 19 nt, Homo sapiens
gagacagaguuuucacucu

SEQ ID NO: 95412 - RNA, 17 nt, Homo sapiens
ucuguuggccaguguga

SEQ ID NO: 95413 - RNA, 18 nt, Homo sapiens
gagaagagaaugcacaaa

SEQ ID NO: 95414 - RNA, 17 nt, Homo sapiens
cuguucucugcccucca

SEQ ID NO: 95415 - RNA, 22 nt, Homo sapiens
aguuuuuauggcuuuugugcau

SEQ ID NO: 95416 - RNA, 16 nt, Homo sapiens
aucccuuaccucggug

SEQ ID NO: 95417 - RNA, 20 nt, Homo sapiens
aacuugauguguuaucucuu

SEQ ID NO: 95418 - RNA, 23 nt, Homo sapiens
gcaggcuucuuccccccaaaacu

SEQ ID NO: 95419 - RNA, 17 nt, Homo sapiens
auuagccaaguguggua

SEQ ID NO: 95420 - RNA, 19 nt, Homo sapiens
aggcugucaauuacaggaa

SEQ ID NO: 95421 - RNA, 18 nt, Homo sapiens
auuggaaauuuguuauaa

SEQ ID NO: 95422 - RNA, 16 nt, Homo sapiens
ccuuucaccacaugug

SEQ ID NO: 95423 - RNA, 18 nt, Homo sapiens
uuccaaugcuuugauccc

SEQ ID NO: 95424 - RNA, 16 nt, Homo sapiens
aacuacccucuggaga

SEQ ID NO: 95425 - RNA, 17 nt, Homo sapiens
gagccuccugcccuuac

SEQ ID NO: 95426 - RNA, 23 nt, Homo sapiens
cuggcugcaaaggguaucaggug

SEQ ID NO: 95427 - RNA, 22 nt, Homo sapiens
gaccucaggugauccacccacc

SEQ ID NO: 95428 - RNA, 12 nt, Homo sapiens
aaacugcacugu

SEQ ID NO: 95429 - RNA, 15 nt, Homo sapiens
ggaagacaaugugaa

SEQ ID NO: 95430 - RNA, 20 nt, Homo sapiens
guaauuugugauacaaugcu

SEQ ID NO: 95431 - RNA, 17 nt, Homo sapiens
ugagacucugucucaaa

SEQ ID NO: 95432 - RNA, 12 nt, Homo sapiens
ccaagcucugcu

SEQ ID NO: 95433 - RNA, 21 nt, Homo sapiens
uuaugagaaaugccagugugc

SEQ ID NO: 95434 - RNA, 19 nt, Homo sapiens
auuuuuguagagccagggu

SEQ ID NO: 95435 - RNA, 18 nt, Homo sapiens
gccagcaggcucucaggc

SEQ ID NO: 95436 - RNA, 20 nt, Homo sapiens
ggaggauguucugggacaca

SEQ ID NO: 95437 - RNA, 20 nt, Homo sapiens
agcugcuugggcuucauccu

SEQ ID NO: 95438 - RNA, 18 nt, Homo sapiens
uccuaggcauuugcugaa

SEQ ID NO: 95439 - RNA, 16 nt, Homo sapiens
aaucucuugcacucaa

SEQ ID NO: 95440 - RNA, 16 nt, Homo sapiens
aguaucccuacuguaa

SEQ ID NO: 95441 - RNA, 18 nt, Homo sapiens
uggccaggcuggucucaa

SEQ ID NO: 95442 - RNA, 16 nt, Homo sapiens
caggugugaaccacca

SEQ ID NO: 95443 - RNA, 13 nt, Homo sapiens
ucccuuucuuccc

SEQ ID NO: 95444 - RNA, 22 nt, Homo sapiens
agacaaugugaaaagaaaaaug

SEQ ID NO: 95445 - RNA, 17 nt, Homo sapiens
ugcacagcuaacaugga

SEQ ID NO: 95446 - RNA, 21 nt, Homo sapiens
cucuacucuagggaaaaacca

SEQ ID NO: 95447 - RNA, 23 nt, Homo sapiens
acaggaagguagaaauaucugaa

SEQ ID NO: 95448 - RNA, 13 nt, Homo sapiens
gguagaagcccuu

SEQ ID NO: 95449 - RNA, 17 nt, Homo sapiens
caucaagaugugacaug

SEQ ID NO: 95450 - RNA, 20 nt, Homo sapiens
cggaaugaaccacaucuugc

SEQ ID NO: 95451 - RNA, 20 nt, Homo sapiens
uucgcaggauucuuccuccc

SEQ ID NO: 95452 - RNA, 14 nt, Homo sapiens
ucuucucuacucua

SEQ ID NO: 95453 - RNA, 14 nt, Homo sapiens
ugacaggcaaugcu

SEQ ID NO: 95454 - RNA, 17 nt, Homo sapiens
aagugaagacaaugacu

SEQ ID NO: 95455 - RNA, 15 nt, Homo sapiens
gaccgugugugaaau

SEQ ID NO: 95456 - RNA, 14 nt, Homo sapiens
uaugaggcauuugu

SEQ ID NO: 95457 - RNA, 22 nt, Homo sapiens
uacucaccucaccccacugugg

SEQ ID NO: 95458 - RNA, 22 nt, Homo sapiens
gcagaguugaagacagagcuac

SEQ ID NO: 95459 - RNA, 19 nt, Homo sapiens
auuccuguucccaugagau

SEQ ID NO: 95460 - RNA, 12 nt, Homo sapiens
gcaguguggaaa

SEQ ID NO: 95461 - RNA, 17 nt, Homo sapiens
acaugcacagcuaacau

SEQ ID NO: 95462 - RNA, 14 nt, Homo sapiens
gcccaaugcacuuu

SEQ ID NO: 95463 - RNA, 18 nt, Homo sapiens
cauuuaaaaaaaaucccu

SEQ ID NO: 95464 - RNA, 24 nt, Homo sapiens
uucuccaagcaggacauggacaag

SEQ ID NO: 95465 - RNA, 23 nt, Homo sapiens
cgccagauucuuuccugaggcug

SEQ ID NO: 95466 - RNA, 21 nt, Homo sapiens
gacaguuaagagaaaugagcu

SEQ ID NO: 95467 - RNA, 14 nt, Homo sapiens
uaacaccaugauua

SEQ ID NO: 95468 - RNA, 15 nt, Homo sapiens
guauucuuauuuaau

SEQ ID NO: 95469 - RNA, 14 nt, Homo sapiens
gagggagugacaga

SEQ ID NO: 95470 - RNA, 18 nt, Homo sapiens
cuaacuuuccuucauuca

SEQ ID NO: 95471 - RNA, 17 nt, Homo sapiens
uuaagagaaaugagcug

SEQ ID NO: 95472 - RNA, 22 nt, Homo sapiens
aagacugaguacguugugcauu

SEQ ID NO: 95473 - RNA, 21 nt, Homo sapiens
acccacugcuuuuggucugug

SEQ ID NO: 95474 - RNA, 18 nt, Homo sapiens
ccaaacacauacaggaag

SEQ ID NO: 95475 - RNA, 15 nt, Homo sapiens
ugggacacccuguga

SEQ ID NO: 95476 - RNA, 15 nt, Homo sapiens
aaaaagaaugcagag

SEQ ID NO: 95477 - RNA, 22 nt, Homo sapiens
aagaugcuucucacugccaugc

SEQ ID NO: 95478 - RNA, 18 nt, Homo sapiens
uuuugcccacacuuggga

SEQ ID NO: 95479 - RNA, 20 nt, Homo sapiens
cuuuacuucauggacuucca

SEQ ID NO: 95480 - RNA, 21 nt, Homo sapiens
cugacccaugcugcccuguga

SEQ ID NO: 95481 - RNA, 17 nt, Homo sapiens
aucuugcucugcugaca

SEQ ID NO: 95482 - RNA, 14 nt, Homo sapiens
gagauggccaugua

SEQ ID NO: 95483 - RNA, 16 nt, Homo sapiens
aggugaggaagcaaaa

SEQ ID NO: 95484 - RNA, 12 nt, Homo sapiens
uugaccucaggu

SEQ ID NO: 95485 - RNA, 16 nt, Homo sapiens
ugugugcacguacaca

SEQ ID NO: 95486 - RNA, 15 nt, Homo sapiens
gaugcagugcuucca

SEQ ID NO: 95487 - RNA, 22 nt, Homo sapiens
cauggaaguacuauaauuuacc

SEQ ID NO: 95488 - RNA, 19 nt, Homo sapiens
gcauuuacuuuguguucac

SEQ ID NO: 95489 - RNA, 22 nt, Homo sapiens
cagcuuaucucaggggugugcg

SEQ ID NO: 95490 - RNA, 18 nt, Homo sapiens
auuaagaaagacuaucua

SEQ ID NO: 95491 - RNA, 12 nt, Homo sapiens
gucuacacugug

SEQ ID NO: 95492 - RNA, 14 nt, Homo sapiens
ggagacgggggcag

SEQ ID NO: 95493 - RNA, 14 nt, Homo sapiens
uugggcuucauccu

SEQ ID NO: 95494 - RNA, 12 nt, Homo sapiens
aauucuucucca

SEQ ID NO: 95495 - RNA, 19 nt, Homo sapiens
acugaguacguugugcauu

SEQ ID NO: 95496 - RNA, 20 nt, Homo sapiens
auacagacagagauggccau

SEQ ID NO: 95497 - RNA, 23 nt, Homo sapiens
agccacuauuguuagucucuuga

SEQ ID NO: 95498 - RNA, 20 nt, Homo sapiens
agaaaauaguggugugauuu

SEQ ID NO: 95499 - RNA, 18 nt, Homo sapiens
gaauauaacuuuuuccaa

SEQ ID NO: 95500 - RNA, 20 nt, Homo sapiens
cuggcaugggaaugaauguc

SEQ ID NO: 95501 - RNA, 21 nt, Homo sapiens
cugggcagaaggaagacuuca

SEQ ID NO: 95502 - RNA, 19 nt, Homo sapiens
ucauacucaccucacccca

SEQ ID NO: 95503 - RNA, 14 nt, Homo sapiens
ugguucaggguugg

SEQ ID NO: 95504 - RNA, 21 nt, Homo sapiens
ugcuuuuuaaagaaugcucuu

SEQ ID NO: 95505 - RNA, 14 nt, Homo sapiens
ucauaaugacuuaa

SEQ ID NO: 95506 - RNA, 13 nt, Homo sapiens
cugacccacugcu

SEQ ID NO: 95507 - RNA, 18 nt, Homo sapiens
ugggguacccacugcucu

SEQ ID NO: 95508 - RNA, 14 nt, Homo sapiens
caggcucucaggcc

SEQ ID NO: 95509 - RNA, 19 nt, Homo sapiens
caauaaagcagcguuucua

SEQ ID NO: 95510 - RNA, 16 nt, Homo sapiens
ucaggaagcucagggc

SEQ ID NO: 95511 - RNA, 20 nt, Homo sapiens
ucaaagauauuuugcuuugu

SEQ ID NO: 95512 - RNA, 15 nt, Homo sapiens
aguaggaagacuuug

SEQ ID NO: 95513 - RNA, 20 nt, Homo sapiens
uguguucaugcacacuugca

SEQ ID NO: 95514 - RNA, 14 nt, Homo sapiens
cguguuaugacucc

SEQ ID NO: 95515 - RNA, 22 nt, Homo sapiens
guacauggaauaacauguaauu

SEQ ID NO: 95516 - RNA, 17 nt, Homo sapiens
ccuggguaacuagggaa

SEQ ID NO: 95517 - RNA, 16 nt, Homo sapiens
aaccccaucucuacaa

SEQ ID NO: 95518 - RNA, 22 nt, Homo sapiens
gugugugcacguacacacacau

SEQ ID NO: 95519 - RNA, 19 nt, Homo sapiens
cgaaaagaggggaagagac

SEQ ID NO: 95520 - RNA, 21 nt, Homo sapiens
agagacaggguuuugccaugu

SEQ ID NO: 95521 - RNA, 16 nt, Homo sapiens
uaugacuccagaauuu

SEQ ID NO: 95522 - RNA, 18 nt, Homo sapiens
cuaagcuauucaguaaua

SEQ ID NO: 95523 - RNA, 22 nt, Homo sapiens
ucuaaacaaaaaaaggcgguga

SEQ ID NO: 95524 - RNA, 19 nt, Homo sapiens
gcagccuggggucugacaa

SEQ ID NO: 95525 - RNA, 18 nt, Homo sapiens
ugucucuuuaaugucaca

SEQ ID NO: 95526 - RNA, 19 nt, Homo sapiens
ucuuuucuugcaugaggcu

SEQ ID NO: 95527 - RNA, 23 nt, Homo sapiens
agacagucccugccaauggacua

SEQ ID NO: 95528 - RNA, 14 nt, Homo sapiens
agccucacaguccu

SEQ ID NO: 95529 - RNA, 13 nt, Homo sapiens
cacacugcuugug

SEQ ID NO: 95530 - RNA, 15 nt, Homo sapiens
agguggggucacucu

SEQ ID NO: 95531 - RNA, 13 nt, Homo sapiens
ugcaaggucauuu

SEQ ID NO: 95532 - RNA, 17 nt, Homo sapiens
aaugaaugucaguguga

SEQ ID NO: 95533 - RNA, 14 nt, Homo sapiens
ucuuaguuugcagu

SEQ ID NO: 95534 - RNA, 12 nt, Homo sapiens
ggccauguauua

SEQ ID NO: 95535 - RNA, 13 nt, Homo sapiens
ccucuuccacuuu

SEQ ID NO: 95536 - RNA, 15 nt, Homo sapiens
caugcugcccuguga

SEQ ID NO: 95537 - RNA, 23 nt, Homo sapiens
gguaugaucacggcucacugcag

SEQ ID NO: 95538 - RNA, 20 nt, Homo sapiens
accuuuaagagaaaugagcu

SEQ ID NO: 95539 - RNA, 14 nt, Homo sapiens
uaucagaauucuca

SEQ ID NO: 95540 - RNA, 16 nt, Homo sapiens
agucucuugauucaua

SEQ ID NO: 95541 - RNA, 14 nt, Homo sapiens
cugcugacaguguu

SEQ ID NO: 95542 - RNA, 17 nt, Homo sapiens
ucgaugcagugcuucca

SEQ ID NO: 95543 - RNA, 20 nt, Homo sapiens
gggcucccuucccaccucuc

SEQ ID NO: 95544 - RNA, 22 nt, Homo sapiens
uccuuaccagcagagcaccuua

SEQ ID NO: 95545 - RNA, 17 nt, Homo sapiens
ggaauccagacccggcu

SEQ ID NO: 95546 - RNA, 19 nt, Homo sapiens
uuccaaacacauacaggaa

SEQ ID NO: 95547 - RNA, 16 nt, Homo sapiens
cucuucaaucucuugc

SEQ ID NO: 95548 - RNA, 15 nt, Homo sapiens
auacacuuacacuuu

SEQ ID NO: 95549 - RNA, 17 nt, Homo sapiens
aauacaguaucucaggg

SEQ ID NO: 95550 - RNA, 16 nt, Homo sapiens
uauuuaccagaccaca

SEQ ID NO: 95551 - RNA, 18 nt, Homo sapiens
cuacugggggcaacccug

SEQ ID NO: 95552 - RNA, 19 nt, Homo sapiens
agggagggcuccagacaca

SEQ ID NO: 95553 - RNA, 21 nt, Homo sapiens
ucagugccuuauggaacacuc

SEQ ID NO: 95554 - RNA, 23 nt, Homo sapiens
aacacucacauuuauucugcuca

SEQ ID NO: 95555 - RNA, 19 nt, Homo sapiens
gauugugcgugcaugugug

SEQ ID NO: 95556 - RNA, 24 nt, Homo sapiens
cacugcuuaacuucacauauugau

SEQ ID NO: 95557 - RNA, 11 nt, Homo sapiens
cuuucuucccu

SEQ ID NO: 95558 - RNA, 16 nt, Homo sapiens
aaaagaggcuauguga

SEQ ID NO: 95559 - RNA, 12 nt, Homo sapiens
uguaucaugaca

SEQ ID NO: 95560 - RNA, 23 nt, Homo sapiens
aaugugacuugagcccagaguga

SEQ ID NO: 95561 - RNA, 16 nt, Homo sapiens
augaaacauuuuguca

SEQ ID NO: 95562 - RNA, 13 nt, Homo sapiens
uucaguaauaacu

SEQ ID NO: 95563 - RNA, 15 nt, Homo sapiens
ccaaugggagcucau

SEQ ID NO: 95564 - RNA, 20 nt, Homo sapiens
aggcagggucucacucuguc

SEQ ID NO: 95565 - RNA, 23 nt, Homo sapiens
ccccaggcugggcuguucacucu

SEQ ID NO: 95566 - RNA, 14 nt, Homo sapiens
ucucucgugauuga

SEQ ID NO: 95567 - RNA, 20 nt, Homo sapiens
cacagcuucauuuccugugu

SEQ ID NO: 95568 - RNA, 17 nt, Homo sapiens
cacgcuggagugcagug

SEQ ID NO: 95569 - RNA, 19 nt, Homo sapiens
accugccaggaagccagca

SEQ ID NO: 95570 - RNA, 23 nt, Homo sapiens
agucgaggacagggaggugaccc

SEQ ID NO: 95571 - RNA, 14 nt, Homo sapiens
auuacuucugcuac

SEQ ID NO: 95572 - RNA, 14 nt, Homo sapiens
uuugauucagacag

SEQ ID NO: 95573 - RNA, 18 nt, Homo sapiens
ggcacucagaagacacug

SEQ ID NO: 95574 - RNA, 20 nt, Homo sapiens
aucgucacugcuuaacuuca

SEQ ID NO: 95575 - RNA, 16 nt, Homo sapiens
augcucugcauguuac

SEQ ID NO: 95576 - RNA, 13 nt, Homo sapiens
aaaggaggggaua

SEQ ID NO: 95577 - RNA, 23 nt, Homo sapiens
gaauccagagagcaguguggaaa

SEQ ID NO: 95578 - RNA, 17 nt, Homo sapiens
cuucuguccuacucugu

SEQ ID NO: 95579 - RNA, 20 nt, Homo sapiens
uuggggaugagaaagguuga

SEQ ID NO: 95580 - RNA, 12 nt, Homo sapiens
ccagauugcaac

SEQ ID NO: 95581 - RNA, 19 nt, Homo sapiens
cugccagccgagauagcca

SEQ ID NO: 95582 - RNA, 18 nt, Homo sapiens
acaucuuggucagauuug

SEQ ID NO: 95583 - RNA, 14 nt, Homo sapiens
gacagagucucacu

SEQ ID NO: 95584 - RNA, 16 nt, Homo sapiens
aaggggcccaagagag

SEQ ID NO: 95585 - RNA, 20 nt, Homo sapiens
aggucauugguggcagagug

SEQ ID NO: 95586 - RNA, 18 nt, Homo sapiens
agcaauacagacuacuuc

SEQ ID NO: 95587 - RNA, 12 nt, Homo sapiens
cugcuccagcug

SEQ ID NO: 95588 - RNA, 18 nt, Homo sapiens
gaaaaaauaacacuguac

SEQ ID NO: 95589 - RNA, 15 nt, Homo sapiens
uuccaaacacauaca

SEQ ID NO: 95590 - RNA, 15 nt, Homo sapiens
acaguauuacuucug

SEQ ID NO: 95591 - RNA, 13 nt, Homo sapiens
uacaggugugaac

SEQ ID NO: 95592 - RNA, 13 nt, Homo sapiens
ggugaacagaaca

SEQ ID NO: 95593 - RNA, 16 nt, Homo sapiens
cugcccuuaccugcca

SEQ ID NO: 95594 - RNA, 15 nt, Homo sapiens
auacauuugauaaag

SEQ ID NO: 95595 - RNA, 21 nt, Homo sapiens
guagcuuuucccaaacugauc

SEQ ID NO: 95596 - RNA, 20 nt, Homo sapiens
ccagccugggugacagagca

SEQ ID NO: 95597 - RNA, 16 nt, Homo sapiens
uuguacagacaacaaa

SEQ ID NO: 95598 - RNA, 13 nt, Homo sapiens
guccgagcuuuga

SEQ ID NO: 95599 - RNA, 15 nt, Homo sapiens
uucagcugguugagg

SEQ ID NO: 95600 - RNA, 15 nt, Homo sapiens
cuaaugaaaccugug

SEQ ID NO: 95601 - RNA, 19 nt, Homo sapiens
ugagcacaaagguagcuuu

SEQ ID NO: 95602 - RNA, 20 nt, Homo sapiens
caggcugggcuucaguggca

SEQ ID NO: 95603 - RNA, 21 nt, Homo sapiens
guacacuguuucaaacuuuac

SEQ ID NO: 95604 - RNA, 21 nt, Homo sapiens
acacauuuuuuaaaugcaccu

SEQ ID NO: 95605 - RNA, 16 nt, Homo sapiens
ugccagcuuaucucag

SEQ ID NO: 95606 - RNA, 17 nt, Homo sapiens
uuauuauggcacaucag

SEQ ID NO: 95607 - RNA, 21 nt, Homo sapiens
acagugagucgaggacaggga

SEQ ID NO: 95608 - RNA, 14 nt, Homo sapiens
cucaccugccccuc

SEQ ID NO: 95609 - RNA, 16 nt, Homo sapiens
auacucccaucuguga

SEQ ID NO: 95610 - RNA, 15 nt, Homo sapiens
cugccaugccagcuu

SEQ ID NO: 95611 - RNA, 14 nt, Homo sapiens
uaguggugugauuu

SEQ ID NO: 95612 - RNA, 15 nt, Homo sapiens
auauguggaguucau

SEQ ID NO: 95613 - RNA, 13 nt, Homo sapiens
caauuauuuugca

SEQ ID NO: 95614 - RNA, 16 nt, Homo sapiens
guugaugaaauaucaa

SEQ ID NO: 95615 - RNA, 21 nt, Homo sapiens
aggacagggaggugaccccag

SEQ ID NO: 95616 - RNA, 18 nt, Homo sapiens
uagcugggacuacaggug

SEQ ID NO: 95617 - RNA, 16 nt, Homo sapiens
ucucugcccuccaaga

SEQ ID NO: 95618 - RNA, 12 nt, Homo sapiens
gagaaaugagcu

SEQ ID NO: 95619 - RNA, 18 nt, Homo sapiens
gcuucaguggcagcugcu

SEQ ID NO: 95620 - RNA, 15 nt, Homo sapiens
agugagcaucaugga

SEQ ID NO: 95621 - RNA, 22 nt, Homo sapiens
aagcgugguggacaugcacagc

SEQ ID NO: 95622 - RNA, 19 nt, Homo sapiens
uuuauuuuuguagagccag

SEQ ID NO: 95623 - RNA, 21 nt, Homo sapiens
gagggcacagaaaauggaaga

SEQ ID NO: 95624 - RNA, 20 nt, Homo sapiens
augagaggaaaucaccgaaa

SEQ ID NO: 95625 - RNA, 14 nt, Homo sapiens
ccaucaccagacag

SEQ ID NO: 95626 - RNA, 16 nt, Homo sapiens
acacuugggagcaaaa

SEQ ID NO: 95627 - RNA, 16 nt, Homo sapiens
cccaguuagcucucaa

SEQ ID NO: 95628 - RNA, 20 nt, Homo sapiens
acaguuaagagaaaugagcu

SEQ ID NO: 95629 - RNA, 15 nt, Homo sapiens
aagagaaaugagcug

SEQ ID NO: 95630 - RNA, 16 nt, Homo sapiens
aaauuuguaugcucaa

SEQ ID NO: 95631 - RNA, 16 nt, Homo sapiens
uccuggccucaaguga

SEQ ID NO: 95632 - RNA, 15 nt, Homo sapiens
uagccaaguguggua

SEQ ID NO: 95633 - RNA, 18 nt, Homo sapiens
cuuuuuaaagaaugcucu

SEQ ID NO: 95634 - RNA, 15 nt, Homo sapiens
cuggcaagaaugugu

SEQ ID NO: 95635 - RNA, 16 nt, Homo sapiens
ucacugcuuaacuuca

SEQ ID NO: 95636 - RNA, 22 nt, Homo sapiens
gugccucugggacuggacaauu

SEQ ID NO: 95637 - RNA, 15 nt, Homo sapiens
agcauuuagacucuc

SEQ ID NO: 95638 - RNA, 16 nt, Homo sapiens
ggaacacucugagacu

SEQ ID NO: 95639 - RNA, 17 nt, Homo sapiens
cuguucagcugguugag

SEQ ID NO: 95640 - RNA, 17 nt, Homo sapiens
aggugaggaagcaaaag

SEQ ID NO: 95641 - RNA, 14 nt, Homo sapiens
gcuggagugcagug

SEQ ID NO: 95642 - RNA, 23 nt, Homo sapiens
ugcagccucacaguccuuaccag

SEQ ID NO: 95643 - RNA, 17 nt, Homo sapiens
cacucuggcagcucaga

SEQ ID NO: 95644 - RNA, 20 nt, Homo sapiens
uugugauacaaugcugugcc

SEQ ID NO: 95645 - RNA, 23 nt, Homo sapiens
ugccaugccagcuuaucucaggg

SEQ ID NO: 95646 - RNA, 21 nt, Homo sapiens
uucauuuaggugaggaagcaa

SEQ ID NO: 95647 - RNA, 20 nt, Homo sapiens
aaaucagcugcuacuacucc

SEQ ID NO: 95648 - RNA, 15 nt, Homo sapiens
augcuuguacauaau

SEQ ID NO: 95649 - RNA, 18 nt, Homo sapiens
agcacaaagguagcuuuu

SEQ ID NO: 95650 - RNA, 18 nt, Homo sapiens
ucccccugacaacacuca

SEQ ID NO: 95651 - RNA, 13 nt, Homo sapiens
aaugccagugugc

SEQ ID NO: 95652 - RNA, 19 nt, Homo sapiens
accucagccucccaaagug

SEQ ID NO: 95653 - RNA, 18 nt, Homo sapiens
uuugcuaagugaggauga

SEQ ID NO: 95654 - RNA, 15 nt, Homo sapiens
cgugugacuacuccc

SEQ ID NO: 95655 - RNA, 13 nt, Homo sapiens
ugagccacugcac

SEQ ID NO: 95656 - RNA, 14 nt, Homo sapiens
cacagaguuguuac

SEQ ID NO: 95657 - RNA, 14 nt, Homo sapiens
gucacuuuccucuu

SEQ ID NO: 95658 - RNA, 20 nt, Homo sapiens
uuccaauuuacauacucugc

SEQ ID NO: 95659 - RNA, 16 nt, Homo sapiens
cccugguggcagcuca

SEQ ID NO: 95660 - RNA, 16 nt, Homo sapiens
aagcugggagaaccaa

SEQ ID NO: 95661 - RNA, 20 nt, Homo sapiens
agugggagcugaguggggga

SEQ ID NO: 95662 - RNA, 13 nt, Homo sapiens
uucuuccacaaga

SEQ ID NO: 95663 - RNA, 13 nt, Homo sapiens
uacagacaacaaa

SEQ ID NO: 95664 - RNA, 23 nt, Homo sapiens
guguuuccuggcacugcuuccag

SEQ ID NO: 95665 - RNA, 14 nt, Homo sapiens
agcuuaucucaggg

SEQ ID NO: 95666 - RNA, 22 nt, Homo sapiens
ucaaaagguuaauaaaguaauu

SEQ ID NO: 95667 - RNA, 15 nt, Homo sapiens
acagggugagcacuc

SEQ ID NO: 95668 - RNA, 15 nt, Homo sapiens
gaggugggauccucc

SEQ ID NO: 95669 - RNA, 17 nt, Homo sapiens
agcugggguggggaccu

SEQ ID NO: 95670 - RNA, 17 nt, Homo sapiens
uagcugggacuacaggu

SEQ ID NO: 95671 - RNA, 20 nt, Homo sapiens
uacucaccucaccccacugu

SEQ ID NO: 95672 - RNA, 18 nt, Homo sapiens
uuucauuuaggugaggaa

SEQ ID NO: 95673 - RNA, 16 nt, Homo sapiens
uccuaagcuauucagu

SEQ ID NO: 95674 - RNA, 22 nt, Homo sapiens
ugauucuccugccucagccucc

SEQ ID NO: 95675 - RNA, 19 nt, Homo sapiens
gcagagguugggaggccau

SEQ ID NO: 95676 - RNA, 11 nt, Homo sapiens
agaaugcacaa

SEQ ID NO: 95677 - RNA, 18 nt, Homo sapiens
caagucagcacuaccucc

SEQ ID NO: 95678 - RNA, 19 nt, Homo sapiens
uccucuccccagcaaguga

SEQ ID NO: 95679 - RNA, 20 nt, Homo sapiens
guaaaugggggugcauuuga

SEQ ID NO: 95680 - RNA, 18 nt, Homo sapiens
uuccucuuuccaucuacc

SEQ ID NO: 95681 - RNA, 15 nt, Homo sapiens
gucccauugauguac

SEQ ID NO: 95682 - RNA, 18 nt, Homo sapiens
augcauucccuacagauu

SEQ ID NO: 95683 - RNA, 18 nt, Homo sapiens
caggccuccccagcaccu

SEQ ID NO: 95684 - RNA, 13 nt, Homo sapiens
ugcagugcuucca

SEQ ID NO: 95685 - RNA, 23 nt, Homo sapiens
agcacuaaggugugcucugauca

SEQ ID NO: 95686 - RNA, 13 nt, Homo sapiens
aaggauggaccac

SEQ ID NO: 95687 - RNA, 13 nt, Homo sapiens
uggauguucugac

SEQ ID NO: 95688 - RNA, 21 nt, Homo sapiens
cacuaaggugugcucugauca

SEQ ID NO: 95689 - RNA, 12 nt, Homo sapiens
aggcggugagca

SEQ ID NO: 95690 - RNA, 12 nt, Homo sapiens
aggaagcucagg

SEQ ID NO: 95691 - RNA, 15 nt, Homo sapiens
aacaacugaccaguu

SEQ ID NO: 95692 - RNA, 18 nt, Homo sapiens
accuggccucugcacucc

SEQ ID NO: 95693 - RNA, 14 nt, Homo sapiens
agagcaguguggaa

SEQ ID NO: 95694 - RNA, 16 nt, Homo sapiens
auguucugggacacag

SEQ ID NO: 95695 - RNA, 22 nt, Homo sapiens
cuggaugcagccucacaguccu

SEQ ID NO: 95696 - RNA, 21 nt, Homo sapiens
gcacccccggcccagugcccc

SEQ ID NO: 95697 - RNA, 21 nt, Homo sapiens
cuuaagcacacuugacaucaa

SEQ ID NO: 95698 - RNA, 13 nt, Homo sapiens
ugaagcugagaug

SEQ ID NO: 95699 - RNA, 23 nt, Homo sapiens
ugugaaugaugauccuaggcauu

SEQ ID NO: 95700 - RNA, 15 nt, Homo sapiens
agcccugagcuuucu

SEQ ID NO: 95701 - RNA, 14 nt, Homo sapiens
ccugaagucacaca

SEQ ID NO: 95702 - RNA, 21 nt, Homo sapiens
auuacaacugcuacagagcag

SEQ ID NO: 95703 - RNA, 21 nt, Homo sapiens
accaguuugaaccaagaacuu

SEQ ID NO: 95704 - RNA, 21 nt, Homo sapiens
cuggccccucagggucccugg

SEQ ID NO: 95705 - RNA, 14 nt, Homo sapiens
ccaauuuacauacu

SEQ ID NO: 95706 - RNA, 16 nt, Homo sapiens
uccuguucccaugaga

SEQ ID NO: 95707 - RNA, 15 nt, Homo sapiens
auauauaagccaaaa

SEQ ID NO: 95708 - RNA, 21 nt, Homo sapiens
aacaucuuggucagauuugaa

SEQ ID NO: 95709 - RNA, 14 nt, Homo sapiens
cuaggaggucucua

SEQ ID NO: 95710 - RNA, 13 nt, Homo sapiens
aauucuacuuuga

SEQ ID NO: 95711 - RNA, 15 nt, Homo sapiens
cucaaugcacugaca

SEQ ID NO: 95712 - RNA, 20 nt, Homo sapiens
aguaacccugucuaaugaaa

SEQ ID NO: 95713 - RNA, 20 nt, Homo sapiens
cuugaccucaggugauccac

SEQ ID NO: 95714 - RNA, 21 nt, Homo sapiens
gcagacucuacagaggccaug

SEQ ID NO: 95715 - RNA, 11 nt, Homo sapiens
cacuccaugag

SEQ ID NO: 95716 - RNA, 22 nt, Homo sapiens
aaugaaaccugugucucugaga

SEQ ID NO: 95717 - RNA, 20 nt, Homo sapiens
guggugaacagaacaaaagg

SEQ ID NO: 95718 - RNA, 18 nt, Homo sapiens
gucuaugggacucaaugc

SEQ ID NO: 95719 - RNA, 19 nt, Homo sapiens
gaagugacaccaguucuuu

SEQ ID NO: 95720 - RNA, 23 nt, Homo sapiens
uucacaguucucuccuucuuccc

SEQ ID NO: 95721 - RNA, 21 nt, Homo sapiens
cuuguacauaaugcgugcaua

SEQ ID NO: 95722 - RNA, 23 nt, Homo sapiens
ccuacaguugaaaaacagcugag

SEQ ID NO: 95723 - RNA, 21 nt, Homo sapiens
auuaacuuuuauaaacuuuac

SEQ ID NO: 95724 - RNA, 21 nt, Homo sapiens
uaaaugugaaugaugauccua

SEQ ID NO: 95725 - RNA, 20 nt, Homo sapiens
uuuccuguagucccauugau

SEQ ID NO: 95726 - RNA, 20 nt, Homo sapiens
aaacucuugaccucagguga

SEQ ID NO: 95727 - RNA, 17 nt, Homo sapiens
gacucuuuggacacuca

SEQ ID NO: 95728 - RNA, 17 nt, Homo sapiens
cagacccugcccugugg

SEQ ID NO: 95729 - RNA, 19 nt, Homo sapiens
cauuccuguucccaugaga

SEQ ID NO: 95730 - RNA, 13 nt, Homo sapiens
gaaaugccagugu

SEQ ID NO: 95731 - RNA, 22 nt, Homo sapiens
auucuccaccugccagggacag

SEQ ID NO: 95732 - RNA, 20 nt, Homo sapiens
aaggcuaccuuuguauucuc

SEQ ID NO: 95733 - RNA, 15 nt, Homo sapiens
cucauccucauaccc

SEQ ID NO: 95734 - RNA, 14 nt, Homo sapiens
agguggggcagcuu

SEQ ID NO: 95735 - RNA, 12 nt, Homo sapiens
augccagugugc

SEQ ID NO: 95736 - RNA, 19 nt, Homo sapiens
uaggaagguuaauguucau

SEQ ID NO: 95737 - RNA, 13 nt, Homo sapiens
caucuaugugaga

SEQ ID NO: 95738 - RNA, 16 nt, Homo sapiens
cacaugugcacaugca

SEQ ID NO: 95739 - RNA, 23 nt, Homo sapiens
gccaggccagagggagugacaga

SEQ ID NO: 95740 - RNA, 22 nt, Homo sapiens
caguuguugauaaccacuaaga

SEQ ID NO: 95741 - RNA, 18 nt, Homo sapiens
aguaggaagacuuuggaa

SEQ ID NO: 95742 - RNA, 15 nt, Homo sapiens
auccagacccggcug

SEQ ID NO: 95743 - RNA, 15 nt, Homo sapiens
acacucacauuuauu

SEQ ID NO: 95744 - RNA, 19 nt, Homo sapiens
uguccggucccugucccag

SEQ ID NO: 95745 - RNA, 13 nt, Homo sapiens
gcacuccaugagu

SEQ ID NO: 95746 - RNA, 13 nt, Homo sapiens
ugcuuugugauuu

SEQ ID NO: 95747 - RNA, 16 nt, Homo sapiens
aaugcucuuuacuuca

SEQ ID NO: 95748 - RNA, 19 nt, Homo sapiens
ucagccucccgaauagcug

SEQ ID NO: 95749 - RNA, 17 nt, Homo sapiens
ccgaauagcugggacua

SEQ ID NO: 95750 - RNA, 13 nt, Homo sapiens
acagaaaauggaa

SEQ ID NO: 95751 - RNA, 16 nt, Homo sapiens
ucuuauuuaaugaaag

SEQ ID NO: 95752 - RNA, 16 nt, Homo sapiens
gaaugcagugguauga

SEQ ID NO: 95753 - RNA, 13 nt, Homo sapiens
ggguucacugcaa

SEQ ID NO: 95754 - RNA, 17 nt, Homo sapiens
aucgaugcagugcuucc

SEQ ID NO: 95755 - RNA, 19 nt, Homo sapiens
aaccacuaagagucucuau

SEQ ID NO: 95756 - RNA, 19 nt, Homo sapiens
aagccagcaggcucucagg

SEQ ID NO: 95757 - RNA, 16 nt, Homo sapiens
uugggcuggugucacc

SEQ ID NO: 95758 - RNA, 19 nt, Homo sapiens
uuaaggaugcuuguacaua

SEQ ID NO: 95759 - RNA, 16 nt, Homo sapiens
cucccaggcauucccc

SEQ ID NO: 95760 - RNA, 14 nt, Homo sapiens
auuguuuucagugu

SEQ ID NO: 95761 - RNA, 14 nt, Homo sapiens
ggccccucaggguc

SEQ ID NO: 95762 - RNA, 14 nt, Homo sapiens
ucccaccucagccu

SEQ ID NO: 95763 - RNA, 15 nt, Homo sapiens
ucaaggcugcaguga

SEQ ID NO: 95764 - RNA, 17 nt, Homo sapiens
uacuucauggacuucca

SEQ ID NO: 95765 - RNA, 15 nt, Homo sapiens
cucuuuaaugucaca

SEQ ID NO: 95766 - RNA, 19 nt, Homo sapiens
acacuugacaucaacugca

SEQ ID NO: 95767 - RNA, 19 nt, Homo sapiens
uaacaccaugauuaaccac

SEQ ID NO: 95768 - RNA, 13 nt, Homo sapiens
ugaaaacacuguu

SEQ ID NO: 95769 - RNA, 17 nt, Homo sapiens
agcacacuugacaucaa

SEQ ID NO: 95770 - RNA, 14 nt, Homo sapiens
uacaggugugaguc

SEQ ID NO: 95771 - RNA, 22 nt, Homo sapiens
ugcaagaauugaagcaggacua

SEQ ID NO: 95772 - RNA, 17 nt, Homo sapiens
acggacacucaaaagcu

SEQ ID NO: 95773 - RNA, 17 nt, Homo sapiens
cugggagaaccaaaaag

SEQ ID NO: 95774 - RNA, 22 nt, Homo sapiens
ucgcuccugugucuugcaaugg

SEQ ID NO: 95775 - RNA, 20 nt, Homo sapiens
uccauguuugauguaucuga

SEQ ID NO: 95776 - RNA, 16 nt, Homo sapiens
ugaauuuuggcugugu

SEQ ID NO: 95777 - RNA, 16 nt, Homo sapiens
auugaauauaacuuuu

SEQ ID NO: 95778 - RNA, 20 nt, Homo sapiens
acuugggccacugugaagag

SEQ ID NO: 95779 - RNA, 19 nt, Homo sapiens
caugucuuuucuugcauga

SEQ ID NO: 95780 - RNA, 20 nt, Homo sapiens
uuaaauaaugugaaacugga

SEQ ID NO: 95781 - RNA, 18 nt, Homo sapiens
ucaauuacaggaaguacu

SEQ ID NO: 95782 - RNA, 21 nt, Homo sapiens
gugaccucugccugaagucac

SEQ ID NO: 95783 - RNA, 16 nt, Homo sapiens
cuggcuaugcauuuga

SEQ ID NO: 95784 - RNA, 12 nt, Homo sapiens
aauaacacugua

SEQ ID NO: 95785 - RNA, 22 nt, Homo sapiens
ccgagcuuugaaaauucagugg

SEQ ID NO: 95786 - RNA, 15 nt, Homo sapiens
aaggguaucugguga

SEQ ID NO: 95787 - RNA, 12 nt, Homo sapiens
auggacuuuguu

SEQ ID NO: 95788 - RNA, 16 nt, Homo sapiens
cuugaggcaacucauc

SEQ ID NO: 95789 - RNA, 18 nt, Homo sapiens
guaaaugggggugcauuu

SEQ ID NO: 95790 - RNA, 20 nt, Homo sapiens
cugggagagccuuccagggg

SEQ ID NO: 95791 - RNA, 15 nt, Homo sapiens
uguuacugucuucag

SEQ ID NO: 95792 - RNA, 18 nt, Homo sapiens
accacaugugcacaugca

SEQ ID NO: 95793 - RNA, 21 nt, Homo sapiens
aaaugucucuuuaaugucaca

SEQ ID NO: 95794 - RNA, 20 nt, Homo sapiens
cuagcacuuugggaggccaa

SEQ ID NO: 95795 - RNA, 21 nt, Homo sapiens
aggauauaguuaucaaucucu

SEQ ID NO: 95796 - RNA, 14 nt, Homo sapiens
acuguccuacccac

SEQ ID NO: 95797 - RNA, 22 nt, Homo sapiens
guuauaauaauguuaacaugga

SEQ ID NO: 95798 - RNA, 15 nt, Homo sapiens
gccccugcccggcug

SEQ ID NO: 95799 - RNA, 18 nt, Homo sapiens
cugcucuccgaccagaca

SEQ ID NO: 95800 - RNA, 22 nt, Homo sapiens
aagagacuuggaaaugggagac

SEQ ID NO: 95801 - RNA, 19 nt, Homo sapiens
uuauauauaagccaaaaaa

SEQ ID NO: 95802 - RNA, 14 nt, Homo sapiens
cuuucuacccagcg

SEQ ID NO: 95803 - RNA, 17 nt, Homo sapiens
acuugauguguuaucuc

SEQ ID NO: 95804 - RNA, 18 nt, Homo sapiens
cucagccucccaaagugc

SEQ ID NO: 95805 - RNA, 23 nt, Homo sapiens
aaauaacuaaaagguaugcaauc

SEQ ID NO: 95806 - RNA, 19 nt, Homo sapiens
uucuucagagacuccugca

SEQ ID NO: 95807 - RNA, 14 nt, Homo sapiens
uacguugugcauuu

SEQ ID NO: 95808 - RNA, 12 nt, Homo sapiens
aagcugggagaa

SEQ ID NO: 95809 - RNA, 16 nt, Homo sapiens
ggagggagaagaaaga

SEQ ID NO: 95810 - RNA, 16 nt, Homo sapiens
cugccacccuggggag

SEQ ID NO: 95811 - RNA, 16 nt, Homo sapiens
aggggcccaagagaga

SEQ ID NO: 95812 - RNA, 23 nt, Homo sapiens
acaucaacugcaucaagauguga

SEQ ID NO: 95813 - RNA, 13 nt, Homo sapiens
gugauccucccac

SEQ ID NO: 95814 - RNA, 21 nt, Homo sapiens
cgcccagucuggaaugcagug

SEQ ID NO: 95815 - RNA, 18 nt, Homo sapiens
gaauaauacaguaucuca

SEQ ID NO: 95816 - RNA, 15 nt, Homo sapiens
ccuaauccucuagga

SEQ ID NO: 95817 - RNA, 21 nt, Homo sapiens
gaguuauuuuuauuuauuuaa

SEQ ID NO: 95818 - RNA, 16 nt, Homo sapiens
acuguaauuugugaua

SEQ ID NO: 95819 - RNA, 18 nt, Homo sapiens
auuucuaaaucuccaaaa

SEQ ID NO: 95820 - RNA, 12 nt, Homo sapiens
uguuugugauug

SEQ ID NO: 95821 - RNA, 14 nt, Homo sapiens
ccccgaugggaugg

SEQ ID NO: 95822 - RNA, 19 nt, Homo sapiens
auucucauuugucacacac

SEQ ID NO: 95823 - RNA, 17 nt, Homo sapiens
ccaauauuuaccagacc

SEQ ID NO: 95824 - RNA, 19 nt, Homo sapiens
uuccaaugcuuugaucccu

SEQ ID NO: 95825 - RNA, 22 nt, Homo sapiens
ugggucgcgugaugcgcauguc

SEQ ID NO: 95826 - RNA, 14 nt, Homo sapiens
ugagucgaggacag

SEQ ID NO: 95827 - RNA, 17 nt, Homo sapiens
ccuaggcauuugcugaa

SEQ ID NO: 95828 - RNA, 23 nt, Homo sapiens
aaacuggaaaguacguuaugaua

SEQ ID NO: 95829 - RNA, 21 nt, Homo sapiens
augaccuugaaugaugccaug

SEQ ID NO: 95830 - RNA, 22 nt, Homo sapiens
cucugccugaagucacacagug

SEQ ID NO: 95831 - RNA, 19 nt, Homo sapiens
auuuaacagaaauguacag

SEQ ID NO: 95832 - RNA, 19 nt, Homo sapiens
aacuggguacuuguggaca

SEQ ID NO: 95833 - RNA, 21 nt, Homo sapiens
aggccaaaggaagcacaugcc

SEQ ID NO: 95834 - RNA, 16 nt, Homo sapiens
aggaaacugcacuguu

SEQ ID NO: 95835 - RNA, 21 nt, Homo sapiens
gacuugagcccagagugaaca

SEQ ID NO: 95836 - RNA, 15 nt, Homo sapiens
gugauguguuuccau

SEQ ID NO: 95837 - RNA, 12 nt, Homo sapiens
acccaccucagc

SEQ ID NO: 95838 - RNA, 15 nt, Homo sapiens
acuuuccucuuccac

SEQ ID NO: 95839 - RNA, 20 nt, Homo sapiens
aacuuuccuucauucaaccc

SEQ ID NO: 95840 - RNA, 14 nt, Homo sapiens
cgaguuacagacaa

SEQ ID NO: 95841 - RNA, 22 nt, Homo sapiens
uacugaggugcuauguucuuag

SEQ ID NO: 95842 - RNA, 12 nt, Homo sapiens
ucccaaacccuu

SEQ ID NO: 95843 - RNA, 16 nt, Homo sapiens
uccuguagucccauug

SEQ ID NO: 95844 - RNA, 23 nt, Homo sapiens
ucuaugggacucaaugcacugac

SEQ ID NO: 95845 - RNA, 21 nt, Homo sapiens
uugaagacagagcuacacagg

SEQ ID NO: 95846 - RNA, 18 nt, Homo sapiens
agugggcccaaugcacuu

SEQ ID NO: 95847 - RNA, 12 nt, Homo sapiens
gauccuccaggu

SEQ ID NO: 95848 - RNA, 23 nt, Homo sapiens
ugcauaccacuuuuguucuuggu

SEQ ID NO: 95849 - RNA, 18 nt, Homo sapiens
gcgggggagcaggcagug

SEQ ID NO: 95850 - RNA, 16 nt, Homo sapiens
cccaaacccuucagug

SEQ ID NO: 95851 - RNA, 13 nt, Homo sapiens
cucugaaaaccaa

SEQ ID NO: 95852 - RNA, 15 nt, Homo sapiens
ucagcugaaccuggg

SEQ ID NO: 95853 - RNA, 19 nt, Homo sapiens
auggcuuggggggcuccag

SEQ ID NO: 95854 - RNA, 19 nt, Homo sapiens
cccacuggaggcaugugau

SEQ ID NO: 95855 - RNA, 23 nt, Homo sapiens
ugugaaacuggauuaaacuuaau

SEQ ID NO: 95856 - RNA, 14 nt, Homo sapiens
cucccacaaaggag

SEQ ID NO: 95857 - RNA, 15 nt, Homo sapiens
uccaccugccaggga

SEQ ID NO: 95858 - RNA, 11 nt, Homo sapiens
cuuaccugcca

SEQ ID NO: 95859 - RNA, 17 nt, Homo sapiens
cucgcgacaaugcaaac

SEQ ID NO: 95860 - RNA, 20 nt, Homo sapiens
aucacaagucagcacuaccu

SEQ ID NO: 95861 - RNA, 13 nt, Homo sapiens
aaucuaaauggaa

SEQ ID NO: 95862 - RNA, 14 nt, Homo sapiens
gccuaggugacaga

SEQ ID NO: 95863 - RNA, 19 nt, Homo sapiens
cuaggaaucaugugccaag

SEQ ID NO: 95864 - RNA, 15 nt, Homo sapiens
augcugucccuuacg

SEQ ID NO: 95865 - RNA, 14 nt, Homo sapiens
acgggcucagcaaa

SEQ ID NO: 95866 - RNA, 17 nt, Homo sapiens
ugaggaaacugcacugu

SEQ ID NO: 95867 - RNA, 15 nt, Homo sapiens
cucuuauauugccau

SEQ ID NO: 95868 - RNA, 17 nt, Homo sapiens
ccacaucuugcucugcu

SEQ ID NO: 95869 - RNA, 19 nt, Homo sapiens
uucuuuuuccccaauaaau

SEQ ID NO: 95870 - RNA, 17 nt, Homo sapiens
gcacagcuaacauggaa

SEQ ID NO: 95871 - RNA, 15 nt, Homo sapiens
cugcaucaagaugug

SEQ ID NO: 95872 - RNA, 14 nt, Homo sapiens
ccaggaagccagca

SEQ ID NO: 95873 - RNA, 14 nt, Homo sapiens
uugcagacaggcaa

SEQ ID NO: 95874 - RNA, 18 nt, Homo sapiens
gauacaggaaaagcugcu

SEQ ID NO: 95875 - RNA, 15 nt, Homo sapiens
cuaugugagcacaaa

SEQ ID NO: 95876 - RNA, 12 nt, Homo sapiens
gucugacaggca

SEQ ID NO: 95877 - RNA, 17 nt, Homo sapiens
cugcgugguugaugauc

SEQ ID NO: 95878 - RNA, 20 nt, Homo sapiens
aacuuuguuuagcccaaaac

SEQ ID NO: 95879 - RNA, 19 nt, Homo sapiens
guacuggagaaaauggacg

SEQ ID NO: 95880 - RNA, 20 nt, Homo sapiens
uucuguccgagcuuugaaaa

SEQ ID NO: 95881 - RNA, 18 nt, Homo sapiens
cgaucuggguucacugca

SEQ ID NO: 95882 - RNA, 23 nt, Homo sapiens
cuugcaaaguaucccuacuguaa

SEQ ID NO: 95883 - RNA, 20 nt, Homo sapiens
agcuugaccgugaggccaga

SEQ ID NO: 95884 - RNA, 20 nt, Homo sapiens
guuacagacaaagcguggug

SEQ ID NO: 95885 - RNA, 21 nt, Homo sapiens
cagacuacuucuuccccagau

SEQ ID NO: 95886 - RNA, 20 nt, Homo sapiens
acugagugagcaucauggag

SEQ ID NO: 95887 - RNA, 13 nt, Homo sapiens
agggugacggggg

SEQ ID NO: 95888 - RNA, 14 nt, Homo sapiens
uaucaggugcugcc

SEQ ID NO: 95889 - RNA, 15 nt, Homo sapiens
ggaaacugcacuguu

SEQ ID NO: 95890 - RNA, 17 nt, Homo sapiens
acaaugacuuacuguac

SEQ ID NO: 95891 - RNA, 19 nt, Homo sapiens
augccagcuuaucucaggg

SEQ ID NO: 95892 - RNA, 18 nt, Homo sapiens
uugucacuuuccucuucc

SEQ ID NO: 95893 - RNA, 19 nt, Homo sapiens
gggugacagagcaagugag

SEQ ID NO: 95894 - RNA, 22 nt, Homo sapiens
guaagcucuacugaggugcuau

SEQ ID NO: 95895 - RNA, 18 nt, Homo sapiens
ucaccucaccccacugug

SEQ ID NO: 95896 - RNA, 18 nt, Homo sapiens
acagcucuucuccaggcu

SEQ ID NO: 95897 - RNA, 15 nt, Homo sapiens
cagggugagcacucu

SEQ ID NO: 95898 - RNA, 15 nt, Homo sapiens
cccccuuccauggac

SEQ ID NO: 95899 - RNA, 12 nt, Homo sapiens
acuuuaccuuuu

SEQ ID NO: 95900 - RNA, 21 nt, Homo sapiens
auuccaaacacauacaggaag

SEQ ID NO: 95901 - RNA, 17 nt, Homo sapiens
gacucuacagaggccau

SEQ ID NO: 95902 - RNA, 23 nt, Homo sapiens
cacguuucuaaaggcuaccuuug

SEQ ID NO: 95903 - RNA, 15 nt, Homo sapiens
uuccauggacuuugu

SEQ ID NO: 95904 - RNA, 21 nt, Homo sapiens
cucugaggacacuaaccacgc

SEQ ID NO: 95905 - RNA, 13 nt, Homo sapiens
ggagaggggcaca

SEQ ID NO: 95906 - RNA, 11 nt, Homo sapiens
acgccacugca

SEQ ID NO: 95907 - RNA, 16 nt, Homo sapiens
gcaggcucucaggcca

SEQ ID NO: 95908 - RNA, 19 nt, Homo sapiens
ugcucacauaucugucauu

SEQ ID NO: 95909 - RNA, 19 nt, Homo sapiens
aaauaacacuguacugcaa

SEQ ID NO: 95910 - RNA, 15 nt, Homo sapiens
cugggauuacaggug

SEQ ID NO: 95911 - RNA, 22 nt, Homo sapiens
acuaaggugugcucugaucauc

SEQ ID NO: 95912 - RNA, 18 nt, Homo sapiens
ccccucaacaccucugca

SEQ ID NO: 95913 - RNA, 14 nt, Homo sapiens
guuacauaagauaa

SEQ ID NO: 95914 - RNA, 13 nt, Homo sapiens
acacugcuuguga

SEQ ID NO: 95915 - RNA, 17 nt, Homo sapiens
uuagacagagucucacu

SEQ ID NO: 95916 - RNA, 22 nt, Homo sapiens
aaacacauacaggaagguagaa

SEQ ID NO: 95917 - RNA, 21 nt, Homo sapiens
guccucccaucucacacauga

SEQ ID NO: 95918 - RNA, 16 nt, Homo sapiens
uacucgaguuacagac

SEQ ID NO: 95919 - RNA, 18 nt, Homo sapiens
acauuuauucugcucaca

SEQ ID NO: 95920 - RNA, 15 nt, Homo sapiens
cauuuauucugcuca

SEQ ID NO: 95921 - RNA, 22 nt, Homo sapiens
acuuuguuuagcccaaaaccaa

SEQ ID NO: 95922 - RNA, 14 nt, Homo sapiens
uagccaaggccaaa

SEQ ID NO: 95923 - RNA, 17 nt, Homo sapiens
cacaugugcacaugcac

SEQ ID NO: 95924 - RNA, 20 nt, Homo sapiens
caucauccuaagcuauucag

SEQ ID NO: 95925 - RNA, 17 nt, Homo sapiens
ugaguacguugugcauu

SEQ ID NO: 95926 - RNA, 13 nt, Homo sapiens
aagugaggaugaa

SEQ ID NO: 95927 - RNA, 14 nt, Homo sapiens
aacucuugaccuca

SEQ ID NO: 95928 - RNA, 19 nt, Homo sapiens
uucagugccaaaaacaaca

SEQ ID NO: 95929 - RNA, 23 nt, Homo sapiens
cccugguggaaugcgggggagca

SEQ ID NO: 95930 - RNA, 20 nt, Homo sapiens
uguaauuugugauacaaugc

SEQ ID NO: 95931 - RNA, 23 nt, Homo sapiens
aggggagcaaaaucgaugcagug

SEQ ID NO: 95932 - RNA, 15 nt, Homo sapiens
ucuauauccauaacu

SEQ ID NO: 95933 - RNA, 15 nt, Homo sapiens
aagaagcucucuccu

SEQ ID NO: 95934 - RNA, 12 nt, Homo sapiens
acagccaugauu

SEQ ID NO: 95935 - RNA, 22 nt, Homo sapiens
augugcugaaugguuuucaaaa

SEQ ID NO: 95936 - RNA, 17 nt, Homo sapiens
gggaccagagcugccac

SEQ ID NO: 95937 - RNA, 14 nt, Homo sapiens
cagagauggccaug

SEQ ID NO: 95938 - RNA, 20 nt, Homo sapiens
uggaugcagccucacagucc

SEQ ID NO: 95939 - RNA, 23 nt, Homo sapiens
auaagaaccuuuugagugccuua

SEQ ID NO: 95940 - RNA, 16 nt, Homo sapiens
acagacuggaagcaca

SEQ ID NO: 95941 - RNA, 14 nt, Homo sapiens
uccaaggguacuaa

SEQ ID NO: 95942 - RNA, 14 nt, Homo sapiens
acaguaucucaggg

SEQ ID NO: 95943 - RNA, 14 nt, Homo sapiens
ccucugaaaaccaa

SEQ ID NO: 95944 - RNA, 15 nt, Homo sapiens
cucaaauaacuaaaa

SEQ ID NO: 95945 - RNA, 15 nt, Homo sapiens
cuuguguuaugaagc

SEQ ID NO: 95946 - RNA, 19 nt, Homo sapiens
gagugggcccaaugcacuu

SEQ ID NO: 95947 - RNA, 14 nt, Homo sapiens
ucauacucaccuca

SEQ ID NO: 95948 - RNA, 17 nt, Homo sapiens
agcaauccugcaagaac

SEQ ID NO: 95949 - RNA, 16 nt, Homo sapiens
guacuauguaucaaug

SEQ ID NO: 95950 - RNA, 17 nt, Homo sapiens
ucagaucucuaacuuca

SEQ ID NO: 95951 - RNA, 17 nt, Homo sapiens
aucuggguucacugcaa

SEQ ID NO: 95952 - RNA, 22 nt, Homo sapiens
auacacacacacgcgugcacac

SEQ ID NO: 95953 - RNA, 16 nt, Homo sapiens
uuuaaaugcaccugga

SEQ ID NO: 95954 - RNA, 22 nt, Homo sapiens
uaaguacuauguaucaaugagu

SEQ ID NO: 95955 - RNA, 15 nt, Homo sapiens
cugccucugacacac

SEQ ID NO: 95956 - RNA, 14 nt, Homo sapiens
aguagagucacugg

SEQ ID NO: 95957 - RNA, 15 nt, Homo sapiens
ccccagugcccacag

SEQ ID NO: 95958 - RNA, 19 nt, Homo sapiens
gaucccccgccccauccuc

SEQ ID NO: 95959 - RNA, 22 nt, Homo sapiens
uauucuguuggccagugugaca

SEQ ID NO: 95960 - RNA, 15 nt, Homo sapiens
ccaaggccaaaggaa

SEQ ID NO: 95961 - RNA, 15 nt, Homo sapiens
aaggcggugagcaau

SEQ ID NO: 95962 - RNA, 16 nt, Homo sapiens
guuugguucaugguga

SEQ ID NO: 95963 - RNA, 11 nt, Homo sapiens
uucugagauca

SEQ ID NO: 95964 - RNA, 22 nt, Homo sapiens
uggucaccaaaucagcugcuac

SEQ ID NO: 95965 - RNA, 15 nt, Homo sapiens
uucaaccccaugaga

SEQ ID NO: 95966 - RNA, 23 nt, Homo sapiens
gcccugugggcccccaaauggaa

SEQ ID NO: 95967 - RNA, 20 nt, Homo sapiens
acacugcauguuugugauug

SEQ ID NO: 95968 - RNA, 14 nt, Homo sapiens
cauaacucugauua

SEQ ID NO: 95969 - RNA, 22 nt, Homo sapiens
uaagaaccuuuugagugccuua

SEQ ID NO: 95970 - RNA, 18 nt, Homo sapiens
ccaggcaggucuugaacu

SEQ ID NO: 95971 - RNA, 19 nt, Homo sapiens
aagagaaaaaauauuuucc

SEQ ID NO: 95972 - RNA, 14 nt, Homo sapiens
gccugguggcagcu

SEQ ID NO: 95973 - RNA, 14 nt, Homo sapiens
cucuacaaaaagca

SEQ ID NO: 95974 - RNA, 19 nt, Homo sapiens
uggaagagcuccuugauau

SEQ ID NO: 95975 - RNA, 17 nt, Homo sapiens
ugaaaaaauaacacugu

SEQ ID NO: 95976 - RNA, 12 nt, Homo sapiens
aggcucucaggc

SEQ ID NO: 95977 - RNA, 16 nt, Homo sapiens
agauagauauaugcuc

SEQ ID NO: 95978 - RNA, 12 nt, Homo sapiens
uaagccaaaaaa

SEQ ID NO: 95979 - RNA, 23 nt, Homo sapiens
gcagguuggugggggccucggug

SEQ ID NO: 95980 - RNA, 11 nt, Homo sapiens
acugaccaguu

SEQ ID NO: 95981 - RNA, 17 nt, Homo sapiens
gaaaacacuguucucug

SEQ ID NO: 95982 - RNA, 21 nt, Homo sapiens
gccgagaucacgccacugcac

SEQ ID NO: 95983 - RNA, 24 nt, Homo sapiens
ugugcucugaucauccacugugcc

SEQ ID NO: 95984 - RNA, 23 nt, Homo sapiens
auuagccaagugugguagagugu

SEQ ID NO: 95985 - RNA, 18 nt, Homo sapiens
aauaucaagagagguuaa

SEQ ID NO: 95986 - RNA, 13 nt, Homo sapiens
gagagcagugugg

SEQ ID NO: 95987 - RNA, 15 nt, Homo sapiens
cugauggugcaauga

SEQ ID NO: 95988 - RNA, 20 nt, Homo sapiens
ggugugaaccaccacaccca

SEQ ID NO: 95989 - RNA, 14 nt, Homo sapiens
aggggcaguggugg

SEQ ID NO: 95990 - RNA, 18 nt, Homo sapiens
gcucugaucauccacugu

SEQ ID NO: 95991 - RNA, 13 nt, Homo sapiens
agcccaccccuca

SEQ ID NO: 95992 - RNA, 16 nt, Homo sapiens
aucacagccucugaaa

SEQ ID NO: 95993 - RNA, 15 nt, Homo sapiens
ccuuagaagucacac

SEQ ID NO: 95994 - RNA, 20 nt, Homo sapiens
cauuucugagaucaaaacgg

SEQ ID NO: 95995 - RNA, 15 nt, Homo sapiens
gaggccucgacccac

SEQ ID NO: 95996 - RNA, 16 nt, Homo sapiens
agcuuugaaaauucag

SEQ ID NO: 95997 - RNA, 13 nt, Homo sapiens
uaagaaagacuau

SEQ ID NO: 95998 - RNA, 16 nt, Homo sapiens
cagaguugaagacaga

SEQ ID NO: 95999 - RNA, 19 nt, Homo sapiens
cuguuggccagugugacaa

SEQ ID NO: 96000 - RNA, 14 nt, Homo sapiens
agagaaaugagcug

SEQ ID NO: 96001 - RNA, 19 nt, Homo sapiens
ucagcaauacagacuacuu

SEQ ID NO: 96002 - RNA, 18 nt, Homo sapiens
uagccuuagaagucacac

SEQ ID NO: 96003 - RNA, 14 nt, Homo sapiens
auaaagcagcguuu

SEQ ID NO: 96004 - RNA, 23 nt, Homo sapiens
uccaggggugggacacccuguga

SEQ ID NO: 96005 - RNA, 17 nt, Homo sapiens
agaaaauggaagacagc

SEQ ID NO: 96006 - RNA, 23 nt, Homo sapiens
acucacacggacacucaaaagcu

SEQ ID NO: 96007 - RNA, 21 nt, Homo sapiens
ccuagccuuagaagucacaca

SEQ ID NO: 96008 - RNA, 20 nt, Homo sapiens
uaggagggcuggcaacuuag

SEQ ID NO: 96009 - RNA, 22 nt, Homo sapiens
cccuuuuuuggcugcugaaggc

SEQ ID NO: 96010 - RNA, 20 nt, Homo sapiens
aacaucuuuuucuacucgag

SEQ ID NO: 96011 - RNA, 20 nt, Homo sapiens
uaacauguaauuaaguacua

SEQ ID NO: 96012 - RNA, 13 nt, Homo sapiens
aggugacagagug

SEQ ID NO: 96013 - RNA, 15 nt, Homo sapiens
cugcacuccaugagu

SEQ ID NO: 96014 - RNA, 15 nt, Homo sapiens
aaagaggcuauguga

SEQ ID NO: 96015 - RNA, 14 nt, Homo sapiens
ggguaucuggugac

SEQ ID NO: 96016 - RNA, 23 nt, Homo sapiens
ggacucaaugcacugacauuguu

SEQ ID NO: 96017 - RNA, 18 nt, Homo sapiens
auacucaccucaccccac

SEQ ID NO: 96018 - RNA, 13 nt, Homo sapiens
gugauacaaugcu

SEQ ID NO: 96019 - RNA, 13 nt, Homo sapiens
auaaaucauaaaa

SEQ ID NO: 96020 - RNA, 23 nt, Homo sapiens
aagugcugggauuacagguguga

SEQ ID NO: 96021 - RNA, 21 nt, Homo sapiens
acugcacuauagccuagguga

SEQ ID NO: 96022 - RNA, 17 nt, Homo sapiens
ucugccugaagucacac

SEQ ID NO: 96023 - RNA, 12 nt, Homo sapiens
aagucacacagu

SEQ ID NO: 96024 - RNA, 14 nt, Homo sapiens
gcucucaggccagc

SEQ ID NO: 96025 - RNA, 18 nt, Homo sapiens
ugccgucuaccugagggg

SEQ ID NO: 96026 - RNA, 21 nt, Homo sapiens
agccgagaucacgccacugca

SEQ ID NO: 96027 - RNA, 13 nt, Homo sapiens
accaauguucucu

SEQ ID NO: 96028 - RNA, 16 nt, Homo sapiens
gaaaauggaagacagc

SEQ ID NO: 96029 - RNA, 19 nt, Homo sapiens
uuuugucuaugggacucaa

SEQ ID NO: 96030 - RNA, 18 nt, Homo sapiens
uggaaagaguaggaagac

SEQ ID NO: 96031 - RNA, 16 nt, Homo sapiens
uaaaauuacugaugca

SEQ ID NO: 96032 - RNA, 11 nt, Homo sapiens
gccuuacacaa

SEQ ID NO: 96033 - RNA, 19 nt, Homo sapiens
gaugaaaaaauaacacugu

SEQ ID NO: 96034 - RNA, 19 nt, Homo sapiens
uccaaggauggaccacaca

SEQ ID NO: 96035 - RNA, 19 nt, Homo sapiens
aguggggcuggaagcagaa

SEQ ID NO: 96036 - RNA, 16 nt, Homo sapiens
uacaguaucucagggc

SEQ ID NO: 96037 - RNA, 22 nt, Homo sapiens
cagugguuggcaauuguuucaa

SEQ ID NO: 96038 - RNA, 22 nt, Homo sapiens
uacaaaaguuuaaaaagcucac

SEQ ID NO: 96039 - RNA, 16 nt, Homo sapiens
aaugacuuaagcacac

SEQ ID NO: 96040 - RNA, 14 nt, Homo sapiens
uagaaauuccccac

SEQ ID NO: 96041 - RNA, 13 nt, Homo sapiens
uauguguaaguau

SEQ ID NO: 96042 - RNA, 19 nt, Homo sapiens
accagagcugccaccugcc

SEQ ID NO: 96043 - RNA, 23 nt, Homo sapiens
agcuccuucuguccuacucugug

SEQ ID NO: 96044 - RNA, 13 nt, Homo sapiens
ggacuacaggcac

SEQ ID NO: 96045 - RNA, 13 nt, Homo sapiens
uuaucucaggggu

SEQ ID NO: 96046 - RNA, 21 nt, Homo sapiens
gaauuucccaaagcagugcau

SEQ ID NO: 96047 - RNA, 16 nt, Homo sapiens
ggaaaggcuccaggag

SEQ ID NO: 96048 - RNA, 12 nt, Homo sapiens
aaaacacaacau

SEQ ID NO: 96049 - RNA, 21 nt, Homo sapiens
aaauucucuuuccuguagucc

SEQ ID NO: 96050 - RNA, 16 nt, Homo sapiens
ccaugagaugaugcca

SEQ ID NO: 96051 - RNA, 15 nt, Homo sapiens
cuucaaauauuuccc

SEQ ID NO: 96052 - RNA, 14 nt, Homo sapiens
guaagcucuacuga

SEQ ID NO: 96053 - RNA, 19 nt, Homo sapiens
cuugcuucaaccccaugag

SEQ ID NO: 96054 - RNA, 13 nt, Homo sapiens
gccucagugccac

SEQ ID NO: 96055 - RNA, 22 nt, Homo sapiens
augauccuaggcauuugcugaa

SEQ ID NO: 96056 - RNA, 15 nt, Homo sapiens
ccuaggcauuugcug

SEQ ID NO: 96057 - RNA, 16 nt, Homo sapiens
cuccagcucaccagcc

SEQ ID NO: 96058 - RNA, 16 nt, Homo sapiens
auuaaccacuucagcu

SEQ ID NO: 96059 - RNA, 18 nt, Homo sapiens
ccgcauuuggauuggaug

SEQ ID NO: 96060 - RNA, 19 nt, Homo sapiens
aggguugggcuggugucac

SEQ ID NO: 96061 - RNA, 17 nt, Homo sapiens
auucauauuuacuucuu

SEQ ID NO: 96062 - RNA, 20 nt, Homo sapiens
gugcccccacccccacccuc

SEQ ID NO: 96063 - RNA, 15 nt, Homo sapiens
cagcucugcaagaau

SEQ ID NO: 96064 - RNA, 22 nt, Homo sapiens
agcucaggugucccugcacuug

SEQ ID NO: 96065 - RNA, 13 nt, Homo sapiens
auacccaucccau

SEQ ID NO: 96066 - RNA, 23 nt, Homo sapiens
caucuugcucugcugacagacac

SEQ ID NO: 96067 - RNA, 9 nt, Homo sapiens
ucccagugc

SEQ ID NO: 96068 - RNA, 19 nt, Homo sapiens
gcacaugccucucucaggc

SEQ ID NO: 96069 - RNA, 13 nt, Homo sapiens
acuuugaccucug

SEQ ID NO: 96070 - RNA, 19 nt, Homo sapiens
ucugcauguuacauaagau

SEQ ID NO: 96071 - RNA, 20 nt, Homo sapiens
acuaaugaggaaacugcacu

SEQ ID NO: 96072 - RNA, 13 nt, Homo sapiens
gguaucaggugcu

SEQ ID NO: 96073 - RNA, 17 nt, Homo sapiens
cuucaaccccaugagac

SEQ ID NO: 96074 - RNA, 18 nt, Homo sapiens
accaccaaccacugcgac

SEQ ID NO: 96075 - RNA, 14 nt, Homo sapiens
caaggcugcaguga

SEQ ID NO: 96076 - RNA, 16 nt, Homo sapiens
gccaaugggagcucau

SEQ ID NO: 96077 - RNA, 15 nt, Homo sapiens
cagagaccaucccug

SEQ ID NO: 96078 - RNA, 10 nt, Homo sapiens
uuuccaugau

SEQ ID NO: 96079 - RNA, 20 nt, Homo sapiens
uccaauauucgcugugucag

SEQ ID NO: 96080 - RNA, 18 nt, Homo sapiens
cgauuguuccugaaccga

SEQ ID NO: 96081 - RNA, 16 nt, Homo sapiens
cagugccaaaaacaac

SEQ ID NO: 96082 - RNA, 15 nt, Homo sapiens
cccacuucugccaua

SEQ ID NO: 96083 - RNA, 12 nt, Homo sapiens
aaauucuugaua

SEQ ID NO: 96084 - RNA, 13 nt, Homo sapiens
uuaugacuccaga

SEQ ID NO: 96085 - RNA, 21 nt, Homo sapiens
ugcagaaagaccgugugugaa

SEQ ID NO: 96086 - RNA, 19 nt, Homo sapiens
ccaucucuacaaaaagcau

SEQ ID NO: 96087 - RNA, 12 nt, Homo sapiens
acgcgugcacac

SEQ ID NO: 96088 - RNA, 15 nt, Homo sapiens
aauucuuucaguggc

SEQ ID NO: 96089 - RNA, 12 nt, Homo sapiens
cuaugggacuca

SEQ ID NO: 96090 - RNA, 16 nt, Homo sapiens
gaguuacagacaaagc

SEQ ID NO: 96091 - RNA, 23 nt, Homo sapiens
cacuauagccuaggugacagagu

SEQ ID NO: 96092 - RNA, 12 nt, Homo sapiens
ggcucucaggcc

SEQ ID NO: 96093 - RNA, 16 nt, Homo sapiens
aggccauuuguguuua

SEQ ID NO: 96094 - RNA, 14 nt, Homo sapiens
agaaucucaaauaa

SEQ ID NO: 96095 - RNA, 18 nt, Homo sapiens
agguaaggaauaccuguc

SEQ ID NO: 96096 - RNA, 21 nt, Homo sapiens
caaagcgugguggacaugcac

SEQ ID NO: 96097 - RNA, 18 nt, Homo sapiens
guugugugugcuuucuaa

SEQ ID NO: 96098 - RNA, 9 nt, Homo sapiens
gacuuggaa

SEQ ID NO: 96099 - RNA, 20 nt, Homo sapiens
cucuuccacuuugauaccau

SEQ ID NO: 96100 - RNA, 14 nt, Homo sapiens
ugaagacaaugacu

SEQ ID NO: 96101 - RNA, 19 nt, Homo sapiens
ggaugcagccucacagucc

SEQ ID NO: 96102 - RNA, 16 nt, Homo sapiens
agaacgaagccaccuu

SEQ ID NO: 96103 - RNA, 13 nt, Homo sapiens
caggaagcucagg

SEQ ID NO: 96104 - RNA, 18 nt, Homo sapiens
aggcauccaguaucuuga

SEQ ID NO: 96105 - RNA, 13 nt, Homo sapiens
cacagaggcugcc

SEQ ID NO: 96106 - RNA, 17 nt, Homo sapiens
ugugaaauucucuuucc

SEQ ID NO: 96107 - RNA, 15 nt, Homo sapiens
aguagagucacugga

SEQ ID NO: 96108 - RNA, 15 nt, Homo sapiens
uuguaugagguuuga

SEQ ID NO: 96109 - RNA, 12 nt, Homo sapiens
ugugucagcaua

SEQ ID NO: 96110 - RNA, 13 nt, Homo sapiens
acaaugugaaaag

SEQ ID NO: 96111 - RNA, 13 nt, Homo sapiens
ccuguucccauga

SEQ ID NO: 96112 - RNA, 18 nt, Homo sapiens
acaugaucuucuuuauaa

SEQ ID NO: 96113 - RNA, 21 nt, Homo sapiens
agaucagccugggcaauguga

SEQ ID NO: 96114 - RNA, 19 nt, Homo sapiens
guugcaggaccucagguga

SEQ ID NO: 96115 - RNA, 11 nt, Homo sapiens
agccuuccagg

SEQ ID NO: 96116 - RNA, 21 nt, Homo sapiens
ucgagccacaaccgaccagau

SEQ ID NO: 96117 - RNA, 14 nt, Homo sapiens
acuuguggacacag

SEQ ID NO: 96118 - RNA, 22 nt, Homo sapiens
ugaauaauacaguaucucaggg

SEQ ID NO: 96119 - RNA, 18 nt, Homo sapiens
uucaccacaugugcacau

SEQ ID NO: 96120 - RNA, 18 nt, Homo sapiens
ccaccucucucacuccuu

SEQ ID NO: 96121 - RNA, 12 nt, Homo sapiens
uuucaaacuuua

SEQ ID NO: 96122 - RNA, 17 nt, Homo sapiens
cagagcugccaccugcc

SEQ ID NO: 96123 - RNA, 15 nt, Homo sapiens
uaaaaauccccaaaa

SEQ ID NO: 96124 - RNA, 21 nt, Homo sapiens
uaggcauuugcugaauacaga

SEQ ID NO: 96125 - RNA, 16 nt, Homo sapiens
gaagucuuuguacaga

SEQ ID NO: 96126 - RNA, 15 nt, Homo sapiens
cagaagaaacuaccc

SEQ ID NO: 96127 - RNA, 14 nt, Homo sapiens
auucucuccuguac

SEQ ID NO: 96128 - RNA, 15 nt, Homo sapiens
cagcuccuucugucc

SEQ ID NO: 96129 - RNA, 21 nt, Homo sapiens
uugcaaaguaucccuacugua

SEQ ID NO: 96130 - RNA, 18 nt, Homo sapiens
aggacagggaggugaccc

SEQ ID NO: 96131 - RNA, 14 nt, Homo sapiens
gaccagagcugcca

SEQ ID NO: 96132 - RNA, 19 nt, Homo sapiens
acacugcauguuugugauu

SEQ ID NO: 96133 - RNA, 20 nt, Homo sapiens
aggcaggaggaucacuugag

SEQ ID NO: 96134 - RNA, 13 nt, Homo sapiens
ccaguucuuuuaa

SEQ ID NO: 96135 - RNA, 17 nt, Homo sapiens
cgaugcagugcuuccaa

SEQ ID NO: 96136 - RNA, 14 nt, Homo sapiens
aaucucuugcacuc

SEQ ID NO: 96137 - RNA, 16 nt, Homo sapiens
caguccauagcagaga

SEQ ID NO: 96138 - RNA, 22 nt, Homo sapiens
cauacacacacacgcgugcaca

SEQ ID NO: 96139 - RNA, 21 nt, Homo sapiens
ccugcaguuauuaacacuaac

SEQ ID NO: 96140 - RNA, 18 nt, Homo sapiens
agcaggcucucaggccag

SEQ ID NO: 96141 - RNA, 22 nt, Homo sapiens
ugccucagccucccaaagugcu

SEQ ID NO: 96142 - RNA, 15 nt, Homo sapiens
uuccuguagucccau

SEQ ID NO: 96143 - RNA, 16 nt, Homo sapiens
acuuagguguggggga

SEQ ID NO: 96144 - RNA, 12 nt, Homo sapiens
cgaucuggguuc

SEQ ID NO: 96145 - RNA, 15 nt, Homo sapiens
agaaccaaaaagagg

SEQ ID NO: 96146 - RNA, 23 nt, Homo sapiens
uucauuuaggugaggaagcaaaa

SEQ ID NO: 96147 - RNA, 18 nt, Homo sapiens
caggcccggcuccaggcu

SEQ ID NO: 96148 - RNA, 22 nt, Homo sapiens
gccauauucuguuggccagugu

SEQ ID NO: 96149 - RNA, 21 nt, Homo sapiens
cugauucccaagcucugcucc

SEQ ID NO: 96150 - RNA, 14 nt, Homo sapiens
aaagcaugugagac

SEQ ID NO: 96151 - RNA, 20 nt, Homo sapiens
gauagauauaugcucugcau

SEQ ID NO: 96152 - RNA, 16 nt, Homo sapiens
ugucccugcacuugca

SEQ ID NO: 96153 - RNA, 18 nt, Homo sapiens
gguaugaucacggcucac

SEQ ID NO: 96154 - RNA, 21 nt, Homo sapiens
ucuuauccaacaucaacaucu

SEQ ID NO: 96155 - RNA, 17 nt, Homo sapiens
ccuuccaggggugggac

SEQ ID NO: 96156 - RNA, 20 nt, Homo sapiens
acugcacuccagccugggug

SEQ ID NO: 96157 - RNA, 19 nt, Homo sapiens
cuggagaaaauggacgugu

SEQ ID NO: 96158 - RNA, 18 nt, Homo sapiens
cuauagccuaggugacag

SEQ ID NO: 96159 - RNA, 18 nt, Homo sapiens
agauagccaaggccaaag

SEQ ID NO: 96160 - RNA, 19 nt, Homo sapiens
ugaccuugaaugaugccau

SEQ ID NO: 96161 - RNA, 18 nt, Homo sapiens
gcccaguuggguggaugc

SEQ ID NO: 96162 - RNA, 17 nt, Homo sapiens
auagccuaggugacaga

SEQ ID NO: 96163 - RNA, 15 nt, Homo sapiens
acuauguugcccagg

SEQ ID NO: 96164 - RNA, 22 nt, Homo sapiens
ucucgugauugauaagaaccuu

SEQ ID NO: 96165 - RNA, 16 nt, Homo sapiens
agaucucuaacuucac

SEQ ID NO: 96166 - RNA, 14 nt, Homo sapiens
aucagcugcuacua

SEQ ID NO: 96167 - RNA, 20 nt, Homo sapiens
augcuugcuucaaccccaug

SEQ ID NO: 96168 - RNA, 20 nt, Homo sapiens
aggagagcuagcagcaggga

SEQ ID NO: 96169 - RNA, 15 nt, Homo sapiens
auguguguucaugca

SEQ ID NO: 96170 - RNA, 19 nt, Homo sapiens
uuuuauggcuuuugugcau

SEQ ID NO: 96171 - RNA, 14 nt, Homo sapiens
gcuggcgugcagug

SEQ ID NO: 96172 - RNA, 20 nt, Homo sapiens
cugugucuugcaauggcagc

SEQ ID NO: 96173 - RNA, 14 nt, Homo sapiens
aggauugcuacugu

SEQ ID NO: 96174 - RNA, 23 nt, Homo sapiens
acaguucaauucucauuugucac

SEQ ID NO: 96175 - RNA, 20 nt, Homo sapiens
aauaauacaguaucucaggg

SEQ ID NO: 96176 - RNA, 19 nt, Homo sapiens
aacauguaauuaaguacua

SEQ ID NO: 96177 - RNA, 12 nt, Homo sapiens
aacuugggccac

SEQ ID NO: 96178 - RNA, 21 nt, Homo sapiens
accucaccccacuguggcuga

SEQ ID NO: 96179 - RNA, 22 nt, Homo sapiens
ggaaaauuuuaaaaauacagau

SEQ ID NO: 96180 - RNA, 13 nt, Homo sapiens
cuacagagcagac

SEQ ID NO: 96181 - RNA, 22 nt, Homo sapiens
uaugaggcauuuguuugaacug

SEQ ID NO: 96182 - RNA, 23 nt, Homo sapiens
auucaacagguuuuccugaagaa

SEQ ID NO: 96183 - RNA, 15 nt, Homo sapiens
acuuaaccugaagcu

SEQ ID NO: 96184 - RNA, 17 nt, Homo sapiens
caugggaaugaauguca

SEQ ID NO: 96185 - RNA, 15 nt, Homo sapiens
augcagugcuuccaa

SEQ ID NO: 96186 - RNA, 16 nt, Homo sapiens
gucuuuguacagacaa

SEQ ID NO: 96187 - RNA, 23 nt, Homo sapiens
ugcagugguaugaucacggcuca

SEQ ID NO: 96188 - RNA, 15 nt, Homo sapiens
uucacagccaugauu

SEQ ID NO: 96189 - RNA, 21 nt, Homo sapiens
aaaucgugacaacacuugugu

SEQ ID NO: 96190 - RNA, 14 nt, Homo sapiens
ccaaugauggucac

SEQ ID NO: 96191 - RNA, 16 nt, Homo sapiens
uacguugugcauuugg

SEQ ID NO: 96192 - RNA, 14 nt, Homo sapiens
ugcacuccaugagu

SEQ ID NO: 96193 - RNA, 15 nt, Homo sapiens
ucaagaugugacaug

SEQ ID NO: 96194 - RNA, 12 nt, Homo sapiens
aguguacaugga

SEQ ID NO: 96195 - RNA, 13 nt, Homo sapiens
ggcuuuugugcau

SEQ ID NO: 96196 - RNA, 17 nt, Homo sapiens
accucuugagccuugaa

SEQ ID NO: 96197 - RNA, 20 nt, Homo sapiens
cccacuguggcugauuugga

SEQ ID NO: 96198 - RNA, 15 nt, Homo sapiens
gccucucccaucacu

SEQ ID NO: 96199 - RNA, 22 nt, Homo sapiens
ucuuucagccaagaauucuuaa

SEQ ID NO: 96200 - RNA, 17 nt, Homo sapiens
ucucauacucaccucac

SEQ ID NO: 96201 - RNA, 17 nt, Homo sapiens
cucacauaucugucauu

SEQ ID NO: 96202 - RNA, 16 nt, Homo sapiens
aggugauccacccacc

SEQ ID NO: 96203 - RNA, 14 nt, Homo sapiens
ugccaaaaacaaca

SEQ ID NO: 96204 - RNA, 14 nt, Homo sapiens
uuccaauuuacaua

SEQ ID NO: 96205 - RNA, 19 nt, Homo sapiens
uggaggggggaggugggau

SEQ ID NO: 96206 - RNA, 16 nt, Homo sapiens
ugaccaguuguugaua

SEQ ID NO: 96207 - RNA, 22 nt, Homo sapiens
ggggcccaaauucuuucagugg

SEQ ID NO: 96208 - RNA, 14 nt, Homo sapiens
ggugugugaagcug

SEQ ID NO: 96209 - RNA, 17 nt, Homo sapiens
augcucugcauguuaca

SEQ ID NO: 96210 - RNA, 22 nt, Homo sapiens
gaagcacaugccucucucaggc

SEQ ID NO: 96211 - RNA, 19 nt, Homo sapiens
ugcccacgcuggagugcag

SEQ ID NO: 96212 - RNA, 14 nt, Homo sapiens
guacgggaggguaa

SEQ ID NO: 96213 - RNA, 20 nt, Homo sapiens
uuaagaggcagggucucacu

SEQ ID NO: 96214 - RNA, 23 nt, Homo sapiens
uaccugaagucuuuguacagaca

SEQ ID NO: 96215 - RNA, 19 nt, Homo sapiens
ucaaacucuugaccucagg

SEQ ID NO: 96216 - RNA, 15 nt, Homo sapiens
gauagccaaggccaa

SEQ ID NO: 96217 - RNA, 21 nt, Homo sapiens
agcaccuuagacagucccugc

SEQ ID NO: 96218 - RNA, 13 nt, Homo sapiens
aguguacauggaa

SEQ ID NO: 96219 - RNA, 17 nt, Homo sapiens
ggccaggcuggucucaa

SEQ ID NO: 96220 - RNA, 22 nt, Homo sapiens
cucugcacaagcugcacccuca

SEQ ID NO: 96221 - RNA, 20 nt, Homo sapiens
cugagaugggacaggaucaa

SEQ ID NO: 96222 - RNA, 17 nt, Homo sapiens
ggagauuuacaacuggg

SEQ ID NO: 96223 - RNA, 18 nt, Homo sapiens
aagaguaggaagacuuug

SEQ ID NO: 96224 - RNA, 22 nt, Homo sapiens
acccuccuuucaccacaugugc

SEQ ID NO: 96225 - RNA, 21 nt, Homo sapiens
guaugcucaauuauuuugcau

SEQ ID NO: 96226 - RNA, 17 nt, Homo sapiens
cucuuuucaaaacauuu

SEQ ID NO: 96227 - RNA, 16 nt, Homo sapiens
gcuuucuacccagcga

SEQ ID NO: 96228 - RNA, 21 nt, Homo sapiens
cagcuaacauggaaguacuau

SEQ ID NO: 96229 - RNA, 13 nt, Homo sapiens
aggaacacuccuu

SEQ ID NO: 96230 - RNA, 13 nt, Homo sapiens
cuugggagcaaaa

SEQ ID NO: 96231 - RNA, 18 nt, Homo sapiens
agagcuacacaggggaaa

SEQ ID NO: 96232 - RNA, 14 nt, Homo sapiens
cugcacuccagccu

SEQ ID NO: 96233 - RNA, 18 nt, Homo sapiens
uguggaugauaaaacaca

SEQ ID NO: 96234 - RNA, 17 nt, Homo sapiens
cugggguggggaccuca

SEQ ID NO: 96235 - RNA, 12 nt, Homo sapiens
aaauaacacugu

SEQ ID NO: 96236 - RNA, 14 nt, Homo sapiens
augauagcuacugu

SEQ ID NO: 96237 - RNA, 22 nt, Homo sapiens
ucuugaccucaggugauccacc

SEQ ID NO: 96238 - RNA, 14 nt, Homo sapiens
ugggccuggcuccc

SEQ ID NO: 96239 - RNA, 21 nt, Homo sapiens
cugaagucuuuguacagacaa

SEQ ID NO: 96240 - RNA, 22 nt, Homo sapiens
uugcccacacuugggagcaaaa

SEQ ID NO: 96241 - RNA, 13 nt, Homo sapiens
ugugacugaucuc

SEQ ID NO: 96242 - RNA, 21 nt, Homo sapiens
uugcccacacuugggagcaaa

SEQ ID NO: 96243 - RNA, 18 nt, Homo sapiens
cugggagaaccaaaaaga

SEQ ID NO: 96244 - RNA, 19 nt, Homo sapiens
aucuaggaagacuuuggaa

SEQ ID NO: 96245 - RNA, 14 nt, Homo sapiens
acccaccucagccu

SEQ ID NO: 96246 - RNA, 19 nt, Homo sapiens
ucacauuuauucugcucac

SEQ ID NO: 96247 - RNA, 21 nt, Homo sapiens
augaaaccugugucucugaga

SEQ ID NO: 96248 - RNA, 15 nt, Homo sapiens
gaaaagcugcugaca

SEQ ID NO: 96249 - RNA, 11 nt, Homo sapiens
cuuccaaggau

SEQ ID NO: 96250 - RNA, 22 nt, Homo sapiens
ggcugggggccucagugccacu

SEQ ID NO: 96251 - RNA, 16 nt, Homo sapiens
uucagugccaaaaaca

SEQ ID NO: 96252 - RNA, 16 nt, Homo sapiens
uucugaggauugcaga

SEQ ID NO: 96253 - RNA, 13 nt, Homo sapiens
agggaaaaaccag

SEQ ID NO: 96254 - RNA, 20 nt, Homo sapiens
uaagcacacuugacaucaac

SEQ ID NO: 96255 - RNA, 18 nt, Homo sapiens
auuauaauuaguuccuca

SEQ ID NO: 96256 - RNA, 17 nt, Homo sapiens
aaaucagcugcuacuac

SEQ ID NO: 96257 - RNA, 15 nt, Homo sapiens
aggauuuugauccaa

SEQ ID NO: 96258 - RNA, 20 nt, Homo sapiens
augccucucucaggccaaac

SEQ ID NO: 96259 - RNA, 11 nt, Homo sapiens
caucuauguga

SEQ ID NO: 96260 - RNA, 22 nt, Homo sapiens
gauuacaagcgugagccacugc

SEQ ID NO: 96261 - RNA, 22 nt, Homo sapiens
cccaggugguuauggagagggu

SEQ ID NO: 96262 - RNA, 21 nt, Homo sapiens
uugaaaaaaaaaaacacaaaa

SEQ ID NO: 96263 - RNA, 20 nt, Homo sapiens
ccuuagcagggaaacagcua

SEQ ID NO: 96264 - RNA, 19 nt, Homo sapiens
cuccugguguggaagagcu

SEQ ID NO: 96265 - RNA, 20 nt, Homo sapiens
agaggggaacagacuggaag

SEQ ID NO: 96266 - RNA, 21 nt, Homo sapiens
gaacucuucaaucucuugcac

SEQ ID NO: 96267 - RNA, 22 nt, Homo sapiens
agacucgauagugguggugaac

SEQ ID NO: 96268 - RNA, 23 nt, Homo sapiens
cuuaccagcagagcaccuuagac

SEQ ID NO: 96269 - RNA, 15 nt, Homo sapiens
caggaagguagaaau

SEQ ID NO: 96270 - RNA, 13 nt, Homo sapiens
aaauaacacugua

SEQ ID NO: 96271 - RNA, 18 nt, Homo sapiens
acacauuuuucuuaggga

SEQ ID NO: 96272 - RNA, 19 nt, Homo sapiens
uuucuggcuaugcauuuga

SEQ ID NO: 96273 - RNA, 17 nt, Homo sapiens
uucuccaagcaggacau

SEQ ID NO: 96274 - RNA, 18 nt, Homo sapiens
acucuagggaaaaaccag

SEQ ID NO: 96275 - RNA, 17 nt, Homo sapiens
gauccuaguuccaccau

SEQ ID NO: 96276 - RNA, 16 nt, Homo sapiens
ccuuuugagugccuua

SEQ ID NO: 96277 - RNA, 15 nt, Homo sapiens
agaaaacuguuaaua

SEQ ID NO: 96278 - RNA, 16 nt, Homo sapiens
cacgcuggagugcagu

SEQ ID NO: 96279 - RNA, 12 nt, Homo sapiens
aacuuuccuuca

SEQ ID NO: 96280 - RNA, 19 nt, Homo sapiens
uaaccaguguuguggauuu

SEQ ID NO: 96281 - RNA, 14 nt, Homo sapiens
ucuuauauugccau

SEQ ID NO: 96282 - RNA, 21 nt, Homo sapiens
gugagggaacagagagguuaa

SEQ ID NO: 96283 - RNA, 17 nt, Homo sapiens
uuguuggccaaagccaa

SEQ ID NO: 96284 - RNA, 19 nt, Homo sapiens
gcuuccuccugguguggaa

SEQ ID NO: 96285 - RNA, 14 nt, Homo sapiens
gagcuuucugcuau

SEQ ID NO: 96286 - RNA, 18 nt, Homo sapiens
acagacaacaaaccuguu

SEQ ID NO: 96287 - RNA, 16 nt, Homo sapiens
aucaagaugugacaug

SEQ ID NO: 96288 - RNA, 17 nt, Homo sapiens
gaagacaaugacuuacu

SEQ ID NO: 96289 - RNA, 18 nt, Homo sapiens
cacuugggagcaaaagau

SEQ ID NO: 96290 - RNA, 14 nt, Homo sapiens
agugguggugaaca

SEQ ID NO: 96291 - RNA, 13 nt, Homo sapiens
uaaugggacacua

SEQ ID NO: 96292 - RNA, 16 nt, Homo sapiens
aaaaaggaugcacaga

SEQ ID NO: 96293 - RNA, 17 nt, Homo sapiens
ugcccuccaagaccuuc

SEQ ID NO: 96294 - RNA, 17 nt, Homo sapiens
acacuguacugcaauaa

SEQ ID NO: 96295 - RNA, 13 nt, Homo sapiens
ccugaagucacac

SEQ ID NO: 96296 - RNA, 11 nt, Homo sapiens
augacacgaau

SEQ ID NO: 96297 - RNA, 20 nt, Homo sapiens
cagggucucacuauguugcc

SEQ ID NO: 96298 - RNA, 18 nt, Homo sapiens
aggagaggggcacagggu

SEQ ID NO: 96299 - RNA, 16 nt, Homo sapiens
gaggaaacugcacugu

SEQ ID NO: 96300 - RNA, 18 nt, Homo sapiens
ccuggguaacuagggaag

SEQ ID NO: 96301 - RNA, 14 nt, Homo sapiens
cuuuguacagacaa

SEQ ID NO: 96302 - RNA, 19 nt, Homo sapiens
cuuucaccacaugugcaca

SEQ ID NO: 96303 - RNA, 16 nt, Homo sapiens
auaucugaaaauguau

SEQ ID NO: 96304 - RNA, 19 nt, Homo sapiens
cacagaaaauggaagacag

SEQ ID NO: 96305 - RNA, 16 nt, Homo sapiens
cucgaguuacagacaa

SEQ ID NO: 96306 - RNA, 19 nt, Homo sapiens
cagcugcgguccacccagg

SEQ ID NO: 96307 - RNA, 23 nt, Homo sapiens
aauacagauagauauaugcucug

SEQ ID NO: 96308 - RNA, 14 nt, Homo sapiens
auguugcccaggca

SEQ ID NO: 96309 - RNA, 19 nt, Homo sapiens
auuuugcuaaaugugaaug

SEQ ID NO: 96310 - RNA, 17 nt, Homo sapiens
cugguguggaagagcuc

SEQ ID NO: 96311 - RNA, 14 nt, Homo sapiens
ucuacgccagggga

SEQ ID NO: 96312 - RNA, 13 nt, Homo sapiens
agugagacccugu

SEQ ID NO: 96313 - RNA, 22 nt, Homo sapiens
ucccagacccccuugcccaggc

SEQ ID NO: 96314 - RNA, 14 nt, Homo sapiens
uagcccaaaaccaa

SEQ ID NO: 96315 - RNA, 13 nt, Homo sapiens
aaaagcugggcag

SEQ ID NO: 96316 - RNA, 18 nt, Homo sapiens
cugcaucaagaugugaca

SEQ ID NO: 96317 - RNA, 23 nt, Homo sapiens
ggcccuggccuagcauacguaca

SEQ ID NO: 96318 - RNA, 20 nt, Homo sapiens
aagugagacccugucucaaa

SEQ ID NO: 96319 - RNA, 19 nt, Homo sapiens
caggccaaacucaccugcc

SEQ ID NO: 96320 - RNA, 15 nt, Homo sapiens
ugaaugucaguguga

SEQ ID NO: 96321 - RNA, 20 nt, Homo sapiens
cugugucuuuuuucacuaca

SEQ ID NO: 96322 - RNA, 16 nt, Homo sapiens
uggaagacagcucuua

SEQ ID NO: 96323 - RNA, 20 nt, Homo sapiens
agcuguaaaguugcagguug

SEQ ID NO: 96324 - RNA, 22 nt, Homo sapiens
aauaaauuuguaugcucaauua

SEQ ID NO: 96325 - RNA, 23 nt, Homo sapiens
ucuguggguuucuaaagcugcca

SEQ ID NO: 96326 - RNA, 17 nt, Homo sapiens
uuggagggugucccaaa

SEQ ID NO: 96327 - RNA, 16 nt, Homo sapiens
ucuuuugagcauuuag

SEQ ID NO: 96328 - RNA, 21 nt, Homo sapiens
aagauucauauuuacuucuua

SEQ ID NO: 96329 - RNA, 21 nt, Homo sapiens
cauuuaggugaggaagcaaaa

SEQ ID NO: 96330 - RNA, 20 nt, Homo sapiens
uacguuaugauaguguccca

SEQ ID NO: 96331 - RNA, 12 nt, Homo sapiens
ggacucaaugca

SEQ ID NO: 96332 - RNA, 23 nt, Homo sapiens
augggauggcuuggggggcucca

SEQ ID NO: 96333 - RNA, 13 nt, Homo sapiens
ccagggucucacu

SEQ ID NO: 96334 - RNA, 12 nt, Homo sapiens
uagaagucacac

SEQ ID NO: 96335 - RNA, 17 nt, Homo sapiens
gccucucucaggccaaa

SEQ ID NO: 96336 - RNA, 16 nt, Homo sapiens
agguuuuuggucugac

SEQ ID NO: 96337 - RNA, 20 nt, Homo sapiens
ucuguggucuaaacaaaaaa

SEQ ID NO: 96338 - RNA, 14 nt, Homo sapiens
ccacaugugcacau

SEQ ID NO: 96339 - RNA, 13 nt, Homo sapiens
cucagcaaaagau

SEQ ID NO: 96340 - RNA, 19 nt, Homo sapiens
cauucuccuuguguuacua

SEQ ID NO: 96341 - RNA, 18 nt, Homo sapiens
ccaccaccaucaccagac

SEQ ID NO: 96342 - RNA, 22 nt, Homo sapiens
ccugcccuuaccugccaggaag

SEQ ID NO: 96343 - RNA, 18 nt, Homo sapiens
gcuaggaacacuccuuca

SEQ ID NO: 96344 - RNA, 14 nt, Homo sapiens
acuuuguguucacc

SEQ ID NO: 96345 - RNA, 18 nt, Homo sapiens
augaaaaaauaacacugu

SEQ ID NO: 96346 - RNA, 23 nt, Homo sapiens
cugcacuauagccuaggugacag

SEQ ID NO: 96347 - RNA, 14 nt, Homo sapiens
aguagagacagggu

SEQ ID NO: 96348 - RNA, 15 nt, Homo sapiens
ugggauggauuucca

SEQ ID NO: 96349 - RNA, 13 nt, Homo sapiens
aagcacacuugac

SEQ ID NO: 96350 - RNA, 23 nt, Homo sapiens
cacagcuaacauggaaguacuau

SEQ ID NO: 96351 - RNA, 16 nt, Homo sapiens
aggcccuucucuccag

SEQ ID NO: 96352 - RNA, 21 nt, Homo sapiens
gcuuccuccugguguggaaga

SEQ ID NO: 96353 - RNA, 16 nt, Homo sapiens
aaagaaugcucuuuac

SEQ ID NO: 96354 - RNA, 19 nt, Homo sapiens
cuggcacugcuuccaguga

SEQ ID NO: 96355 - RNA, 14 nt, Homo sapiens
cacaugcacgugug

SEQ ID NO: 96356 - RNA, 16 nt, Homo sapiens
gccucugcacuccccu

SEQ ID NO: 96357 - RNA, 18 nt, Homo sapiens
uacgugaguccuggcaug

SEQ ID NO: 96358 - RNA, 15 nt, Homo sapiens
uuagacagucccugc

SEQ ID NO: 96359 - RNA, 15 nt, Homo sapiens
cccuggccuagcaua

SEQ ID NO: 96360 - RNA, 18 nt, Homo sapiens
auucuguuggccagugug

SEQ ID NO: 96361 - RNA, 17 nt, Homo sapiens
gaagaauugaaaaacca

SEQ ID NO: 96362 - RNA, 19 nt, Homo sapiens
agugggugaauaauacagu

SEQ ID NO: 96363 - RNA, 12 nt, Homo sapiens
aaaugccagugu

SEQ ID NO: 96364 - RNA, 22 nt, Homo sapiens
aacuuuuauaaacuuuaccuuu

SEQ ID NO: 96365 - RNA, 22 nt, Homo sapiens
acugugaagagaaccauaucaa

SEQ ID NO: 96366 - RNA, 15 nt, Homo sapiens
gcuggagugcaguga

SEQ ID NO: 96367 - RNA, 20 nt, Homo sapiens
aacacaaacgggcucagcaa

SEQ ID NO: 96368 - RNA, 16 nt, Homo sapiens
gcuucauuuccugugu

SEQ ID NO: 96369 - RNA, 21 nt, Homo sapiens
cuaaaugaaaaucgugacaac

SEQ ID NO: 96370 - RNA, 17 nt, Homo sapiens
aggaugcuuguacauaa

SEQ ID NO: 96371 - RNA, 20 nt, Homo sapiens
cuuuuauaaacuuuaccuuu

SEQ ID NO: 96372 - RNA, 18 nt, Homo sapiens
auccagagagcagugugg

SEQ ID NO: 96373 - RNA, 19 nt, Homo sapiens
gguggaaugcgggggagca

SEQ ID NO: 96374 - RNA, 13 nt, Homo sapiens
gcauguguguuca

SEQ ID NO: 96375 - RNA, 12 nt, Homo sapiens
cagagucucacu

SEQ ID NO: 96376 - RNA, 22 nt, Homo sapiens
augaaaugaggucagagccugc

SEQ ID NO: 96377 - RNA, 16 nt, Homo sapiens
gcgugagccacugcac

SEQ ID NO: 96378 - RNA, 20 nt, Homo sapiens
accaugauuaaccacuucag

SEQ ID NO: 96379 - RNA, 18 nt, Homo sapiens
agaaaugagcugcacucc

SEQ ID NO: 96380 - RNA, 17 nt, Homo sapiens
aguaauaugcacacauu

SEQ ID NO: 96381 - RNA, 20 nt, Homo sapiens
uggauuaaacuuaaucuaaa

SEQ ID NO: 96382 - RNA, 20 nt, Homo sapiens
uccugugucuugcaauggca

SEQ ID NO: 96383 - RNA, 23 nt, Homo sapiens
acucuauuuuuguaaaaagggaa

SEQ ID NO: 96384 - RNA, 15 nt, Homo sapiens
uuggaauuuugugcc

SEQ ID NO: 96385 - RNA, 14 nt, Homo sapiens
auccacccaccuca

SEQ ID NO: 96386 - RNA, 15 nt, Homo sapiens
guggucuaaacaaaa

SEQ ID NO: 96387 - RNA, 16 nt, Homo sapiens
aguaugaggcauuugu

SEQ ID NO: 96388 - RNA, 14 nt, Homo sapiens
caaaggaagcacau

SEQ ID NO: 96389 - RNA, 16 nt, Homo sapiens
ggccccugcccggcug

SEQ ID NO: 96390 - RNA, 16 nt, Homo sapiens
aucuaggaagacuuug

SEQ ID NO: 96391 - RNA, 13 nt, Homo sapiens
agcugcacccuca

SEQ ID NO: 96392 - RNA, 18 nt, Homo sapiens
cagagucucacuguugcc

SEQ ID NO: 96393 - RNA, 18 nt, Homo sapiens
cucaggaguuugagacca

SEQ ID NO: 96394 - RNA, 23 nt, Homo sapiens
ucuucuccaggcuguaucccaug

SEQ ID NO: 96395 - RNA, 18 nt, Homo sapiens
gaccagggauuuccauga

SEQ ID NO: 96396 - RNA, 21 nt, Homo sapiens
uccucugacagaagaacccca

SEQ ID NO: 96397 - RNA, 19 nt, Homo sapiens
cagccucccgaauagcugg

SEQ ID NO: 96398 - RNA, 13 nt, Homo sapiens
ccaguaucuugaa

SEQ ID NO: 96399 - RNA, 21 nt, Homo sapiens
uucccuuuuuuggcugcugaa

SEQ ID NO: 96400 - RNA, 20 nt, Homo sapiens
acgccagauucuuuccugag

SEQ ID NO: 96401 - RNA, 11 nt, Homo sapiens
accaaccuggg

SEQ ID NO: 96402 - RNA, 22 nt, Homo sapiens
agguuuuuggucugacccacug

SEQ ID NO: 96403 - RNA, 14 nt, Homo sapiens
cagagaaaguacuu

SEQ ID NO: 96404 - RNA, 12 nt, Homo sapiens
caaauauuuccc

SEQ ID NO: 96405 - RNA, 14 nt, Homo sapiens
ucuuaauucuuagc

SEQ ID NO: 96406 - RNA, 20 nt, Homo sapiens
auagauauaugcucugcaug

SEQ ID NO: 96407 - RNA, 21 nt, Homo sapiens
ugacccaugcugcccugugag

SEQ ID NO: 96408 - RNA, 22 nt, Homo sapiens
uagccugccucuucucuacucu

SEQ ID NO: 96409 - RNA, 16 nt, Homo sapiens
acuuccacugccaucc

SEQ ID NO: 96410 - RNA, 15 nt, Homo sapiens
aggguaaggcugugg

SEQ ID NO: 96411 - RNA, 18 nt, Homo sapiens
cccaaauucuuucagugg

SEQ ID NO: 96412 - RNA, 20 nt, Homo sapiens
accucaggugagaagcagag

SEQ ID NO: 96413 - RNA, 17 nt, Homo sapiens
gagucucacuguugccc

SEQ ID NO: 96414 - RNA, 21 nt, Homo sapiens
cugggguggggaccucaggcc

SEQ ID NO: 96415 - RNA, 12 nt, Homo sapiens
uccuccaggugc

SEQ ID NO: 96416 - RNA, 14 nt, Homo sapiens
ccucaggcaggugg

SEQ ID NO: 96417 - RNA, 18 nt, Homo sapiens
aggccaaacucaccugcc

SEQ ID NO: 96418 - RNA, 13 nt, Homo sapiens
gggguaugggaga

SEQ ID NO: 96419 - RNA, 19 nt, Homo sapiens
ugaagucccagauacuugg

SEQ ID NO: 96420 - RNA, 14 nt, Homo sapiens
cuaugugagcacaa

SEQ ID NO: 96421 - RNA, 17 nt, Homo sapiens
uauaauguaagcucuac

SEQ ID NO: 96422 - RNA, 19 nt, Homo sapiens
aaugaggaaacugcacugu

SEQ ID NO: 96423 - RNA, 13 nt, Homo sapiens
uuucuugcaugag

SEQ ID NO: 96424 - RNA, 18 nt, Homo sapiens
aauaaauuuguaugcuca

SEQ ID NO: 96425 - RNA, 20 nt, Homo sapiens
gcgaucuggguucacugcaa

SEQ ID NO: 96426 - RNA, 15 nt, Homo sapiens
cccaccaucaugucu

SEQ ID NO: 96427 - RNA, 15 nt, Homo sapiens
ucccugccaauggac

SEQ ID NO: 96428 - RNA, 21 nt, Homo sapiens
uauuuuuagacagagucucac

SEQ ID NO: 96429 - RNA, 16 nt, Homo sapiens
ggccuggccagaugca

SEQ ID NO: 96430 - RNA, 18 nt, Homo sapiens
gcagacaguuaagagaaa

SEQ ID NO: 96431 - RNA, 18 nt, Homo sapiens
augccagcuuaucucagg

SEQ ID NO: 96432 - RNA, 21 nt, Homo sapiens
uuguuaguaugaggcauuugu

SEQ ID NO: 96433 - RNA, 14 nt, Homo sapiens
aaauauaauugaca

SEQ ID NO: 96434 - RNA, 16 nt, Homo sapiens
ggcuucauccuccuca

SEQ ID NO: 96435 - RNA, 13 nt, Homo sapiens
uggccaaagccaa

SEQ ID NO: 96436 - RNA, 20 nt, Homo sapiens
ccagguuuuuggucugaccc

SEQ ID NO: 96437 - RNA, 21 nt, Homo sapiens
agcuugaccgugaggccagag

SEQ ID NO: 96438 - RNA, 20 nt, Homo sapiens
ugguggacaugcacagcuaa

SEQ ID NO: 96439 - RNA, 17 nt, Homo sapiens
gagucgaggacagggag

SEQ ID NO: 96440 - RNA, 16 nt, Homo sapiens
ucccaucucacacaug

SEQ ID NO: 96441 - RNA, 14 nt, Homo sapiens
uaauguaagcucua

SEQ ID NO: 96442 - RNA, 20 nt, Homo sapiens
augaucuuugcagacaggca

SEQ ID NO: 96443 - RNA, 18 nt, Homo sapiens
acuuguggacacagcucu

SEQ ID NO: 96444 - RNA, 12 nt, Homo sapiens
cccagauugcaa

SEQ ID NO: 96445 - RNA, 23 nt, Homo sapiens
ccuccuccagccgccaugcuccu

SEQ ID NO: 96446 - RNA, 14 nt, Homo sapiens
ccaaacucaccugc

SEQ ID NO: 96447 - RNA, 20 nt, Homo sapiens
acaggaaguacuggagaaaa

SEQ ID NO: 96448 - RNA, 16 nt, Homo sapiens
cacagacccugcccug

SEQ ID NO: 96449 - RNA, 15 nt, Homo sapiens
aacccauuuuagaga

SEQ ID NO: 96450 - RNA, 14 nt, Homo sapiens
ggucugugugauga

SEQ ID NO: 96451 - RNA, 15 nt, Homo sapiens
ggacagggaggugac

SEQ ID NO: 96452 - RNA, 14 nt, Homo sapiens
uguuuucucuugag

SEQ ID NO: 96453 - RNA, 15 nt, Homo sapiens
gacagagcaagugag

SEQ ID NO: 96454 - RNA, 20 nt, Homo sapiens
aggccagagggagugacaga

SEQ ID NO: 96455 - RNA, 15 nt, Homo sapiens
cuuccccccaaaacu

SEQ ID NO: 96456 - RNA, 17 nt, Homo sapiens
uuaaauaaaucauaaaa

SEQ ID NO: 96457 - RNA, 20 nt, Homo sapiens
aaugacuuaagcacacuuga

SEQ ID NO: 96458 - RNA, 17 nt, Homo sapiens
ugggauuacagguguga

SEQ ID NO: 96459 - RNA, 22 nt, Homo sapiens
aucuucuuuauaauucuacuuu

SEQ ID NO: 96460 - RNA, 19 nt, Homo sapiens
caugcacagcuaacaugga

SEQ ID NO: 96461 - RNA, 21 nt, Homo sapiens
gaagccagcaggcucucaggc

SEQ ID NO: 96462 - RNA, 19 nt, Homo sapiens
uaaaugggggugcauuuga

SEQ ID NO: 96463 - RNA, 19 nt, Homo sapiens
aagcacaugccucucucag

SEQ ID NO: 96464 - RNA, 14 nt, Homo sapiens
guuuucaguguaca

SEQ ID NO: 96465 - RNA, 18 nt, Homo sapiens
auggacaugaucuucuuu

SEQ ID NO: 96466 - RNA, 21 nt, Homo sapiens
cuccugguguggaagagcucc

SEQ ID NO: 96467 - RNA, 15 nt, Homo sapiens
agauaauacaccacu

SEQ ID NO: 96468 - RNA, 20 nt, Homo sapiens
ccaggcuggcgugcaguggu

SEQ ID NO: 96469 - RNA, 12 nt, Homo sapiens
gagccugcaguu

SEQ ID NO: 96470 - RNA, 16 nt, Homo sapiens
ccgcacugggcuuggg

SEQ ID NO: 96471 - RNA, 19 nt, Homo sapiens
uggcugggggccucagugc

SEQ ID NO: 96472 - RNA, 13 nt, Homo sapiens
cuuuugugcauua

SEQ ID NO: 96473 - RNA, 18 nt, Homo sapiens
guaucccaugagccucag

SEQ ID NO: 96474 - RNA, 20 nt, Homo sapiens
cuuucuucccuacaguugaa

SEQ ID NO: 96475 - RNA, 14 nt, Homo sapiens
ucacgccacugcac

SEQ ID NO: 96476 - RNA, 15 nt, Homo sapiens
aaguuaacuuccaau

SEQ ID NO: 96477 - RNA, 18 nt, Homo sapiens
aguacguugugcauuugg

SEQ ID NO: 96478 - RNA, 13 nt, Homo sapiens
uugcggacagcca

SEQ ID NO: 96479 - RNA, 20 nt, Homo sapiens
gaccuucuccuucaccuuug

SEQ ID NO: 96480 - RNA, 19 nt, Homo sapiens
aagaauugaaaaaccauuu

SEQ ID NO: 96481 - RNA, 18 nt, Homo sapiens
accagcgugugacuacuc

SEQ ID NO: 96482 - RNA, 14 nt, Homo sapiens
ugauaaccacuaag

SEQ ID NO: 96483 - RNA, 17 nt, Homo sapiens
cuguuucugcagccacu

SEQ ID NO: 96484 - RNA, 15 nt, Homo sapiens
accaccaccaucacc

SEQ ID NO: 96485 - RNA, 16 nt, Homo sapiens
gcuaugugagcacaaa

SEQ ID NO: 96486 - RNA, 14 nt, Homo sapiens
uuugcagacaggca

SEQ ID NO: 96487 - RNA, 21 nt, Homo sapiens
accgggcacucagaagacacu

SEQ ID NO: 96488 - RNA, 19 nt, Homo sapiens
gaccuuuaagagaaaugag

SEQ ID NO: 96489 - RNA, 14 nt, Homo sapiens
auccucccaccuca

SEQ ID NO: 96490 - RNA, 19 nt, Homo sapiens
uaaugacuuaagcacacuu

SEQ ID NO: 96491 - RNA, 20 nt, Homo sapiens
acuuuucuuucagccaagaa

SEQ ID NO: 96492 - RNA, 18 nt, Homo sapiens
aguuuuauuuuuguagag

SEQ ID NO: 96493 - RNA, 13 nt, Homo sapiens
ucccucauccuca

SEQ ID NO: 96494 - RNA, 18 nt, Homo sapiens
ggacauugcggacagcca

SEQ ID NO: 96495 - RNA, 20 nt, Homo sapiens
agagaauucucuuauccaac

SEQ ID NO: 96496 - RNA, 20 nt, Homo sapiens
cccacuggaggcaugugaug

SEQ ID NO: 96497 - RNA, 14 nt, Homo sapiens
ucuaugacacaugc

SEQ ID NO: 96498 - RNA, 16 nt, Homo sapiens
uguucaugcacacuug

SEQ ID NO: 96499 - RNA, 21 nt, Homo sapiens
uuugucauauaagauucauau

SEQ ID NO: 96500 - RNA, 19 nt, Homo sapiens
gccuacaggagugagcacu

SEQ ID NO: 96501 - RNA, 14 nt, Homo sapiens
ucaaauaacuaaaa

SEQ ID NO: 96502 - RNA, 21 nt, Homo sapiens
gcaugugaugagaggaaauca

SEQ ID NO: 96503 - RNA, 14 nt, Homo sapiens
auguguuuccauau

SEQ ID NO: 96504 - RNA, 20 nt, Homo sapiens
ccaacaucaacaucuugguc

SEQ ID NO: 96505 - RNA, 21 nt, Homo sapiens
accaucucuccuccuuuucac

SEQ ID NO: 96506 - RNA, 21 nt, Homo sapiens
caaaaagaggcuaugugagca

SEQ ID NO: 96507 - RNA, 14 nt, Homo sapiens
aagagucucuauua

SEQ ID NO: 96508 - RNA, 17 nt, Homo sapiens
aaagauucuacaaagcu

SEQ ID NO: 96509 - RNA, 13 nt, Homo sapiens
ucauucaacccac

SEQ ID NO: 96510 - RNA, 21 nt, Homo sapiens
aggacacuagaagauuuugaa

SEQ ID NO: 96511 - RNA, 15 nt, Homo sapiens
augagguacucuccu

SEQ ID NO: 96512 - RNA, 14 nt, Homo sapiens
cuguucuuucuggc

SEQ ID NO: 96513 - RNA, 14 nt, Homo sapiens
agaguagagucacu

SEQ ID NO: 96514 - RNA, 23 nt, Homo sapiens
uuucaguggcuaccuacauacaa

SEQ ID NO: 96515 - RNA, 16 nt, Homo sapiens
aauccagacccggcug

SEQ ID NO: 96516 - RNA, 17 nt, Homo sapiens
cuccacuuucuagccag

SEQ ID NO: 96517 - RNA, 14 nt, Homo sapiens
aaacucaccugccc

SEQ ID NO: 96518 - RNA, 19 nt, Homo sapiens
cuugaccucaggugaucca

SEQ ID NO: 96519 - RNA, 20 nt, Homo sapiens
agacugaguacguugugcau

SEQ ID NO: 96520 - RNA, 15 nt, Homo sapiens
aaauaacacuguacu

SEQ ID NO: 96521 - RNA, 13 nt, Homo sapiens
cucauaguauggu

SEQ ID NO: 96522 - RNA, 21 nt, Homo sapiens
ugcgaucuggguucacugcaa

SEQ ID NO: 96523 - RNA, 14 nt, Homo sapiens
ccuuagacaguccc

SEQ ID NO: 96524 - RNA, 15 nt, Homo sapiens
cgcuggagugcagug

SEQ ID NO: 96525 - RNA, 13 nt, Homo sapiens
aaugcaccuggaa

SEQ ID NO: 96526 - RNA, 21 nt, Homo sapiens
uacacacacacgcgugcacac

SEQ ID NO: 96527 - RNA, 18 nt, Homo sapiens
uuuccuucauucaaccca

SEQ ID NO: 96528 - RNA, 16 nt, Homo sapiens
cuauuguuucuuucaa

SEQ ID NO: 96529 - RNA, 19 nt, Homo sapiens
gccaccaacauacucccau

SEQ ID NO: 96530 - RNA, 13 nt, Homo sapiens
guacuacaguccu

SEQ ID NO: 96531 - RNA, 18 nt, Homo sapiens
agcuccgcuuucuaccca

SEQ ID NO: 96532 - RNA, 22 nt, Homo sapiens
agcuaggccuggccagaugcac

SEQ ID NO: 96533 - RNA, 20 nt, Homo sapiens
cuuaaauauguggaguucau

SEQ ID NO: 96534 - RNA, 21 nt, Homo sapiens
agguuuuccugaagaauugaa

SEQ ID NO: 96535 - RNA, 14 nt, Homo sapiens
uggucuacacugug

SEQ ID NO: 96536 - RNA, 16 nt, Homo sapiens
aagagaaccauaucaa

SEQ ID NO: 96537 - RNA, 11 nt, Homo sapiens
cccuacaugga

SEQ ID NO: 96538 - RNA, 21 nt, Homo sapiens
aggccagagggagugacagag

SEQ ID NO: 96539 - RNA, 22 nt, Homo sapiens
aaugcacugacauuguuggcca

SEQ ID NO: 96540 - RNA, 21 nt, Homo sapiens
augugacuugagcccagagug

SEQ ID NO: 96541 - RNA, 12 nt, Homo sapiens
acuguacaugaa

SEQ ID NO: 96542 - RNA, 13 nt, Homo sapiens
agagccagggucu

SEQ ID NO: 96543 - RNA, 18 nt, Homo sapiens
ugccucgaacuggcugca

SEQ ID NO: 96544 - RNA, 17 nt, Homo sapiens
uaguaugaggcauuugu

SEQ ID NO: 96545 - RNA, 16 nt, Homo sapiens
accaguuguugauaac

SEQ ID NO: 96546 - RNA, 20 nt, Homo sapiens
agcacaugccucucucaggc

SEQ ID NO: 96547 - RNA, 14 nt, Homo sapiens
cuccauguuugaug

SEQ ID NO: 96548 - RNA, 19 nt, Homo sapiens
cagggucucacucugucgc

SEQ ID NO: 96549 - RNA, 21 nt, Homo sapiens
aucuuccaaggguacuaagga

SEQ ID NO: 96550 - RNA, 19 nt, Homo sapiens
ccuauauuguuuucagugu

SEQ ID NO: 96551 - RNA, 17 nt, Homo sapiens
gcucuuuugagcauuua

SEQ ID NO: 96552 - RNA, 17 nt, Homo sapiens
uuccacaaguuaaauaa

SEQ ID NO: 96553 - RNA, 16 nt, Homo sapiens
cuccauguuugaugua

SEQ ID NO: 96554 - RNA, 13 nt, Homo sapiens
cugugugaugaug

SEQ ID NO: 96555 - RNA, 11 nt, Homo sapiens
gagcugggaug

SEQ ID NO: 96556 - RNA, 20 nt, Homo sapiens
gcuuaaaggggcuagaguga

SEQ ID NO: 96557 - RNA, 14 nt, Homo sapiens
caguguacauggaa

SEQ ID NO: 96558 - RNA, 14 nt, Homo sapiens
cacaggcccggcuc

SEQ ID NO: 96559 - RNA, 13 nt, Homo sapiens
ugaauaauacagu

SEQ ID NO: 96560 - RNA, 18 nt, Homo sapiens
gugauccucccaccucag

SEQ ID NO: 96561 - RNA, 18 nt, Homo sapiens
gccaugggccuccugugu

SEQ ID NO: 96562 - RNA, 15 nt, Homo sapiens
cauaaugcgugcaua

SEQ ID NO: 96563 - RNA, 22 nt, Homo sapiens
ugaaaauguauguguaaguauu

SEQ ID NO: 96564 - RNA, 17 nt, Homo sapiens
cuguacaaaguagaagu

SEQ ID NO: 96565 - RNA, 22 nt, Homo sapiens
ccuugaaaacacuguucucugc

SEQ ID NO: 96566 - RNA, 20 nt, Homo sapiens
acaugccucucucaggccaa

SEQ ID NO: 96567 - RNA, 22 nt, Homo sapiens
gauauaugcucugcauguuaca

SEQ ID NO: 96568 - RNA, 15 nt, Homo sapiens
uguuggccaguguga

SEQ ID NO: 96569 - RNA, 11 nt, Homo sapiens
uggaagacagc

SEQ ID NO: 96570 - RNA, 16 nt, Homo sapiens
aauugcuucaagcauu

SEQ ID NO: 96571 - RNA, 20 nt, Homo sapiens
acauacaauuccaaacacau

SEQ ID NO: 96572 - RNA, 18 nt, Homo sapiens
uuaacuuccaauuuacau

SEQ ID NO: 96573 - RNA, 19 nt, Homo sapiens
gaggauugcuugagcucag

SEQ ID NO: 96574 - RNA, 18 nt, Homo sapiens
cucuuugggccuggcucc

SEQ ID NO: 96575 - RNA, 23 nt, Homo sapiens
agcugggguggggaccucaggcc

SEQ ID NO: 96576 - RNA, 18 nt, Homo sapiens
aaagaugaagcugagaug

SEQ ID NO: 96577 - RNA, 16 nt, Homo sapiens
gaagagcuccuugaua

SEQ ID NO: 96578 - RNA, 20 nt, Homo sapiens
acugcacuauagccuaggug

SEQ ID NO: 96579 - RNA, 14 nt, Homo sapiens
caccacaugugcac

SEQ ID NO: 96580 - RNA, 15 nt, Homo sapiens
agaucacgccacugc

SEQ ID NO: 96581 - RNA, 17 nt, Homo sapiens
uguacauggaauaacau

SEQ ID NO: 96582 - RNA, 20 nt, Homo sapiens
caaccccuucgcuccugugu

SEQ ID NO: 96583 - RNA, 13 nt, Homo sapiens
ugcccacacuugg

SEQ ID NO: 96584 - RNA, 14 nt, Homo sapiens
agagaaggggccca

SEQ ID NO: 96585 - RNA, 14 nt, Homo sapiens
cagggaggugaccc

SEQ ID NO: 96586 - RNA, 15 nt, Homo sapiens
ugugaaccaccacac

SEQ ID NO: 96587 - RNA, 23 nt, Homo sapiens
aauaacuaaaagguaugcaauca

SEQ ID NO: 96588 - RNA, 20 nt, Homo sapiens
ggacaaggaugaucuaggaa

SEQ ID NO: 96589 - RNA, 16 nt, Homo sapiens
aagguaugcaaucaaa

SEQ ID NO: 96590 - RNA, 13 nt, Homo sapiens
caggaaguacugg

SEQ ID NO: 96591 - RNA, 21 nt, Homo sapiens
uuaccugccaggaagccagca

SEQ ID NO: 96592 - RNA, 20 nt, Homo sapiens
gaccucaggugauccaccca

SEQ ID NO: 96593 - RNA, 16 nt, Homo sapiens
uagaagucacacagua

SEQ ID NO: 96594 - RNA, 23 nt, Homo sapiens
auaauauuaaggaagacaaugug

SEQ ID NO: 96595 - RNA, 22 nt, Homo sapiens
auguccaagaagcccaggaaag

SEQ ID NO: 96596 - RNA, 16 nt, Homo sapiens
caaaaguuuaaaaagc

SEQ ID NO: 96597 - RNA, 16 nt, Homo sapiens
cauauucuguuggcca

SEQ ID NO: 96598 - RNA, 21 nt, Homo sapiens
ugaacuccuggccucaaguga

SEQ ID NO: 96599 - RNA, 12 nt, Homo sapiens
ucucuugauuca

SEQ ID NO: 96600 - RNA, 22 nt, Homo sapiens
ucuaaauaauaauaaaacaaca

SEQ ID NO: 96601 - RNA, 16 nt, Homo sapiens
gcaucaagaugugaca

SEQ ID NO: 96602 - RNA, 19 nt, Homo sapiens
ugaucacggcucacugcag

SEQ ID NO: 96603 - RNA, 19 nt, Homo sapiens
uuugcuaaaugugaaugau

SEQ ID NO: 96604 - RNA, 13 nt, Homo sapiens
ggcuaccuacaua

SEQ ID NO: 96605 - RNA, 24 nt, Homo sapiens
uuaaaucagccguguaaccaugga

SEQ ID NO: 96606 - RNA, 22 nt, Homo sapiens
agcuacuguuuauuauuuuauu

SEQ ID NO: 96607 - RNA, 23 nt, Homo sapiens
uucgaauccagagagcagugugg

SEQ ID NO: 96608 - RNA, 18 nt, Homo sapiens
uaaaacccaagugccuua

SEQ ID NO: 96609 - RNA, 23 nt, Homo sapiens
ugauagugucccacggugccuug

SEQ ID NO: 96610 - RNA, 21 nt, Homo sapiens
ugaaaaaaaaaaacacaaaaa

SEQ ID NO: 96611 - RNA, 18 nt, Homo sapiens
cagcugcuugggcuucau

SEQ ID NO: 96612 - RNA, 15 nt, Homo sapiens
cuuacuguacaugaa

SEQ ID NO: 96613 - RNA, 20 nt, Homo sapiens
ucccuacauggaguauaugu

SEQ ID NO: 96614 - RNA, 22 nt, Homo sapiens
accauucuccaccugccaggga

SEQ ID NO: 96615 - RNA, 20 nt, Homo sapiens
caagacgcugugcugcccug

SEQ ID NO: 96616 - RNA, 19 nt, Homo sapiens
ucuucuccacuuucuagcc

SEQ ID NO: 96617 - RNA, 13 nt, Homo sapiens
cauauuuacuucu

SEQ ID NO: 96618 - RNA, 23 nt, Homo sapiens
cuucccacuggaggcaugugaug

SEQ ID NO: 96619 - RNA, 12 nt, Homo sapiens
agcucagguguc

SEQ ID NO: 96620 - RNA, 15 nt, Homo sapiens
gugagcacuaaggug

SEQ ID NO: 96621 - RNA, 22 nt, Homo sapiens
ucaaaauaaaaaugagguacuc

SEQ ID NO: 96622 - RNA, 18 nt, Homo sapiens
guuaagagaaaugagcuu

SEQ ID NO: 96623 - RNA, 14 nt, Homo sapiens
aaaugccagugugc

SEQ ID NO: 96624 - RNA, 12 nt, Homo sapiens
ucuaaagcugcc

SEQ ID NO: 96625 - RNA, 15 nt, Homo sapiens
cuuaccugccaggaa

SEQ ID NO: 96626 - RNA, 18 nt, Homo sapiens
uauucaguaauaacucua

SEQ ID NO: 96627 - RNA, 13 nt, Homo sapiens
ucuugaagacuuu

SEQ ID NO: 96628 - RNA, 21 nt, Homo sapiens
cuggcaugggaaugaauguca

SEQ ID NO: 96629 - RNA, 11 nt, Homo sapiens
acuuacuguac

SEQ ID NO: 96630 - RNA, 23 nt, Homo sapiens
gaacacuaaugaggaaacugcac

SEQ ID NO: 96631 - RNA, 16 nt, Homo sapiens
ugccugguggcagcug

SEQ ID NO: 96632 - RNA, 23 nt, Homo sapiens
gcauuuagacucucgacuggcca

SEQ ID NO: 96633 - RNA, 16 nt, Homo sapiens
aagacuuuucuuucag

SEQ ID NO: 96634 - RNA, 18 nt, Homo sapiens
aagcgugagccacugcac

SEQ ID NO: 96635 - RNA, 16 nt, Homo sapiens
aggggaagagacuugg

SEQ ID NO: 96636 - RNA, 13 nt, Homo sapiens
gcuaugcauuuga

SEQ ID NO: 96637 - RNA, 22 nt, Homo sapiens
gacucgauagugguggugaaca

SEQ ID NO: 96638 - RNA, 17 nt, Homo sapiens
gaucuaggaagacuuug

SEQ ID NO: 96639 - RNA, 19 nt, Homo sapiens
uaguuugcaguuacacuaa

SEQ ID NO: 96640 - RNA, 19 nt, Homo sapiens
gguuccuaauccucuagga

SEQ ID NO: 96641 - RNA, 20 nt, Homo sapiens
cuuacacuuuaugcacaaaa

SEQ ID NO: 96642 - RNA, 17 nt, Homo sapiens
aaggaagacuucauccc

SEQ ID NO: 96643 - RNA, 16 nt, Homo sapiens
uucagccaagaauucu

SEQ ID NO: 96644 - RNA, 21 nt, Homo sapiens
gcacaugccucucucaggcca

SEQ ID NO: 96645 - RNA, 16 nt, Homo sapiens
cagagaugugccccca

SEQ ID NO: 96646 - RNA, 14 nt, Homo sapiens
auccuggaguucug

SEQ ID NO: 96647 - RNA, 18 nt, Homo sapiens
agcugccugggaucccuc

SEQ ID NO: 96648 - RNA, 15 nt, Homo sapiens
uuucaaccaguuuga

SEQ ID NO: 96649 - RNA, 17 nt, Homo sapiens
uuccccccaaaacugau

SEQ ID NO: 96650 - RNA, 19 nt, Homo sapiens
aauccagagagcagugugg

SEQ ID NO: 96651 - RNA, 22 nt, Homo sapiens
cccaagggccuggccugagcug

SEQ ID NO: 96652 - RNA, 15 nt, Homo sapiens
cuuauacauuugaua

SEQ ID NO: 96653 - RNA, 14 nt, Homo sapiens
cugcccuccaagac

SEQ ID NO: 96654 - RNA, 14 nt, Homo sapiens
auuguuagucucuu

SEQ ID NO: 96655 - RNA, 21 nt, Homo sapiens
cccagccccuucugacccaug

SEQ ID NO: 96656 - RNA, 16 nt, Homo sapiens
gaagacuucaucccuc

SEQ ID NO: 96657 - RNA, 14 nt, Homo sapiens
ucuuuggacccuga

SEQ ID NO: 96658 - RNA, 21 nt, Homo sapiens
aaugagcugcacuccaugagu

SEQ ID NO: 96659 - RNA, 14 nt, Homo sapiens
caucaagaugugac

SEQ ID NO: 96660 - RNA, 21 nt, Homo sapiens
cuuaccugccaggaagccagc

SEQ ID NO: 96661 - RNA, 16 nt, Homo sapiens
acacaguucaauucuc

SEQ ID NO: 96662 - RNA, 17 nt, Homo sapiens
gaggacuuuucuuugug

SEQ ID NO: 96663 - RNA, 16 nt, Homo sapiens
cuaagcuauucaguaa

SEQ ID NO: 96664 - RNA, 20 nt, Homo sapiens
gcccacgcuggagugcagug

SEQ ID NO: 96665 - RNA, 14 nt, Homo sapiens
ggcagggucucacu

SEQ ID NO: 96666 - RNA, 16 nt, Homo sapiens
gaaaaaauaacacugu

SEQ ID NO: 96667 - RNA, 20 nt, Homo sapiens
agauagccaaggccaaagga

SEQ ID NO: 96668 - RNA, 18 nt, Homo sapiens
ucucacacaugagcauca

SEQ ID NO: 96669 - RNA, 13 nt, Homo sapiens
gaaacugcacugu

SEQ ID NO: 96670 - RNA, 20 nt, Homo sapiens
gaggcaggaggaucacuuga

SEQ ID NO: 96671 - RNA, 23 nt, Homo sapiens
auuacaggugugaaccaccacac

SEQ ID NO: 96672 - RNA, 13 nt, Homo sapiens
caggcaagcaccu

SEQ ID NO: 96673 - RNA, 12 nt, Homo sapiens
uccagacacaug

SEQ ID NO: 96674 - RNA, 20 nt, Homo sapiens
aggacauugcggacagccac

SEQ ID NO: 96675 - RNA, 17 nt, Homo sapiens
gcacagggucucuacca

SEQ ID NO: 96676 - RNA, 18 nt, Homo sapiens
uaaccagcagaaaugccu

SEQ ID NO: 96677 - RNA, 17 nt, Homo sapiens
uggaauaaggagaauga

SEQ ID NO: 96678 - RNA, 22 nt, Homo sapiens
uucaauucucauuugucacaca

SEQ ID NO: 96679 - RNA, 22 nt, Homo sapiens
gaagacagcucuuauauugcca

SEQ ID NO: 96680 - RNA, 22 nt, Homo sapiens
ccuucagugccaaaaacaacaa

SEQ ID NO: 96681 - RNA, 17 nt, Homo sapiens
gccuggggucugacaau

SEQ ID NO: 96682 - RNA, 12 nt, Homo sapiens
ccauccagguuc

SEQ ID NO: 96683 - RNA, 18 nt, Homo sapiens
uucuagcauggcugccaa

SEQ ID NO: 96684 - RNA, 21 nt, Homo sapiens
cgagcaugccuggauggggcu

SEQ ID NO: 96685 - RNA, 19 nt, Homo sapiens
gaauucuuaaauaugugga

SEQ ID NO: 96686 - RNA, 19 nt, Homo sapiens
cagccugggugacagagca

SEQ ID NO: 96687 - RNA, 22 nt, Homo sapiens
cagcuuguaaauagcucaggug

SEQ ID NO: 96688 - RNA, 16 nt, Homo sapiens
agcaccauaacuuugu

SEQ ID NO: 96689 - RNA, 14 nt, Homo sapiens
augacuuacuguac

SEQ ID NO: 96690 - RNA, 20 nt, Homo sapiens
uucuccacuuucuagccaga

SEQ ID NO: 96691 - RNA, 18 nt, Homo sapiens
ugcaucaagaugugacau

SEQ ID NO: 96692 - RNA, 13 nt, Homo sapiens
gggaccucaggcc

SEQ ID NO: 96693 - RNA, 14 nt, Homo sapiens
cugucgcccagucu

SEQ ID NO: 96694 - RNA, 22 nt, Homo sapiens
ccucagccucccaaagugcugg

SEQ ID NO: 96695 - RNA, 12 nt, Homo sapiens
gguggacaugca

SEQ ID NO: 96696 - RNA, 23 nt, Homo sapiens
cuuucccucccuuccucuuucca

SEQ ID NO: 96697 - RNA, 19 nt, Homo sapiens
acuccuguaggaagguuaa

SEQ ID NO: 96698 - RNA, 22 nt, Homo sapiens
uaaaugucucuuuaaugucaca

SEQ ID NO: 96699 - RNA, 22 nt, Homo sapiens
accuuuguauucucuccuguac

SEQ ID NO: 96700 - RNA, 21 nt, Homo sapiens
uagucccauugauguacuuua

SEQ ID NO: 96701 - RNA, 13 nt, Homo sapiens
ccagcugcuuggg

SEQ ID NO: 96702 - RNA, 12 nt, Homo sapiens
gaagcauuuacu

SEQ ID NO: 96703 - RNA, 13 nt, Homo sapiens
cuauguucuuagu

SEQ ID NO: 96704 - RNA, 17 nt, Homo sapiens
agacuggaagcacagcu

SEQ ID NO: 96705 - RNA, 19 nt, Homo sapiens
augcacagcuaacauggaa

SEQ ID NO: 96706 - RNA, 21 nt, Homo sapiens
caaaaaagcgaaccgugagga

SEQ ID NO: 96707 - RNA, 20 nt, Homo sapiens
gcuggcgugcaguggugcga

SEQ ID NO: 96708 - RNA, 12 nt, Homo sapiens
aucuuugcagac

SEQ ID NO: 96709 - RNA, 20 nt, Homo sapiens
gcuuguaaauagcucaggug

SEQ ID NO: 96710 - RNA, 20 nt, Homo sapiens
ugaggauuuugauccaagcu

SEQ ID NO: 96711 - RNA, 13 nt, Homo sapiens
ugacuuacuguac

SEQ ID NO: 96712 - RNA, 16 nt, Homo sapiens
ccuauauuguuuucag

SEQ ID NO: 96713 - RNA, 13 nt, Homo sapiens
ugcuaaaugugaa

SEQ ID NO: 96714 - RNA, 14 nt, Homo sapiens
agauaaaugugcug

SEQ ID NO: 96715 - RNA, 21 nt, Homo sapiens
caggaagccagcaggcucuca

SEQ ID NO: 96716 - RNA, 17 nt, Homo sapiens
aaagaggcuaugugagc

SEQ ID NO: 96717 - RNA, 13 nt, Homo sapiens
gcauuuguuugaa

SEQ ID NO: 96718 - RNA, 14 nt, Homo sapiens
cacuguugcccagg

SEQ ID NO: 96719 - RNA, 11 nt, Homo sapiens
uggugugauuu

SEQ ID NO: 96720 - RNA, 22 nt, Homo sapiens
uuguguuuauauauaagccaaa

SEQ ID NO: 96721 - RNA, 21 nt, Homo sapiens
acccccugaauuucucacaaa

SEQ ID NO: 96722 - RNA, 13 nt, Homo sapiens
aauugacaggauu

SEQ ID NO: 96723 - RNA, 18 nt, Homo sapiens
uacuucuuauacauuuga

SEQ ID NO: 96724 - RNA, 15 nt, Homo sapiens
ugauuaaauucuugc

SEQ ID NO: 96725 - RNA, 12 nt, Homo sapiens
ucuggcagcuca

SEQ ID NO: 96726 - RNA, 12 nt, Homo sapiens
ccaucaccagac

SEQ ID NO: 96727 - RNA, 16 nt, Homo sapiens
cgugcacacaccagag

SEQ ID NO: 96728 - RNA, 13 nt, Homo sapiens
ccucucucaggcc

SEQ ID NO: 96729 - RNA, 20 nt, Homo sapiens
caggguuuugccauguuggc

SEQ ID NO: 96730 - RNA, 23 nt, Homo sapiens
aaguuuuuauggcuuuugugcau

SEQ ID NO: 96731 - RNA, 17 nt, Homo sapiens
auaaaaccccaucucua

SEQ ID NO: 96732 - RNA, 17 nt, Homo sapiens
aauccagagagcagugu

SEQ ID NO: 96733 - RNA, 14 nt, Homo sapiens
uucagcucugcaag

SEQ ID NO: 96734 - RNA, 16 nt, Homo sapiens
gacacauguccaagaa

SEQ ID NO: 96735 - RNA, 22 nt, Homo sapiens
guuacauaagauaaaugugcug

SEQ ID NO: 96736 - RNA, 22 nt, Homo sapiens
cugugggucgcgugaugcgcau

SEQ ID NO: 96737 - RNA, 16 nt, Homo sapiens
acuguccuacccaccc

SEQ ID NO: 96738 - RNA, 16 nt, Homo sapiens
aaagguugaagcacca

SEQ ID NO: 96739 - RNA, 22 nt, Homo sapiens
aaugguuuucuuguguguuuau

SEQ ID NO: 96740 - RNA, 16 nt, Homo sapiens
uuccaaacacauacag

SEQ ID NO: 96741 - RNA, 16 nt, Homo sapiens
aaaggugaccaaugau

SEQ ID NO: 96742 - RNA, 22 nt, Homo sapiens
aaacugauuacaacugcuacag

SEQ ID NO: 96743 - RNA, 16 nt, Homo sapiens
gacaucugucuaggaa

SEQ ID NO: 96744 - RNA, 16 nt, Homo sapiens
uauauaagccaaaaaa

SEQ ID NO: 96745 - RNA, 14 nt, Homo sapiens
gauccuccaggugc

SEQ ID NO: 96746 - RNA, 14 nt, Homo sapiens
aggcagggucucac

SEQ ID NO: 96747 - RNA, 18 nt, Homo sapiens
cugcagagggcacagaaa

SEQ ID NO: 96748 - RNA, 17 nt, Homo sapiens
ccauuucugagaucaaa

SEQ ID NO: 96749 - RNA, 15 nt, Homo sapiens
uacagauagauauau

SEQ ID NO: 96750 - RNA, 16 nt, Homo sapiens
agccuaggugacagag

SEQ ID NO: 96751 - RNA, 21 nt, Homo sapiens
gaaugauuaauuaaaacacaa

SEQ ID NO: 96752 - RNA, 15 nt, Homo sapiens
cagccugcuccagcu

SEQ ID NO: 96753 - RNA, 22 nt, Homo sapiens
caaguccucagugguuggcaau

SEQ ID NO: 96754 - RNA, 17 nt, Homo sapiens
uuaugacuccagaauuu

SEQ ID NO: 96755 - RNA, 19 nt, Homo sapiens
gaugaccuugaaugaugcc

SEQ ID NO: 96756 - RNA, 22 nt, Homo sapiens
guuugaagaugccgcauuugga

SEQ ID NO: 96757 - RNA, 15 nt, Homo sapiens
auggacaaugaccca

SEQ ID NO: 96758 - RNA, 11 nt, Homo sapiens
caagcucugcu

SEQ ID NO: 96759 - RNA, 20 nt, Homo sapiens
accucugccugaagucacac

SEQ ID NO: 96760 - RNA, 22 nt, Homo sapiens
aggcauccaguaucuugaagac

SEQ ID NO: 96761 - RNA, 21 nt, Homo sapiens
uuguacauaaugcgugcauac

SEQ ID NO: 96762 - RNA, 14 nt, Homo sapiens
aaauggaagacagc

SEQ ID NO: 96763 - RNA, 16 nt, Homo sapiens
gacauuguuggccaaa

SEQ ID NO: 96764 - RNA, 23 nt, Homo sapiens
auucuuaaauauguggaguucau

SEQ ID NO: 96765 - RNA, 13 nt, Homo sapiens
gagugagcugguu

SEQ ID NO: 96766 - RNA, 17 nt, Homo sapiens
uguucagcuccagcuca

SEQ ID NO: 96767 - RNA, 16 nt, Homo sapiens
cuagguucgaauccag

SEQ ID NO: 96768 - RNA, 19 nt, Homo sapiens
uacaggaagguagaaauau

SEQ ID NO: 96769 - RNA, 13 nt, Homo sapiens
accuuguuucccu

SEQ ID NO: 96770 - RNA, 19 nt, Homo sapiens
aguuugagaccaaccuggg

SEQ ID NO: 96771 - RNA, 12 nt, Homo sapiens
cuaaugggacac

SEQ ID NO: 96772 - RNA, 23 nt, Homo sapiens
ugcacacauuuuuuaaaugcacc

SEQ ID NO: 96773 - RNA, 15 nt, Homo sapiens
accugaaacaaccca

SEQ ID NO: 96774 - RNA, 13 nt, Homo sapiens
accagagcugcca

SEQ ID NO: 96775 - RNA, 18 nt, Homo sapiens
cucagcaggggaggguag

SEQ ID NO: 96776 - RNA, 16 nt, Homo sapiens
gauccucccaccucag

SEQ ID NO: 96777 - RNA, 16 nt, Homo sapiens
aaucauaaaacuugau

SEQ ID NO: 96778 - RNA, 20 nt, Homo sapiens
cccagcccacuucugccaua

SEQ ID NO: 96779 - RNA, 18 nt, Homo sapiens
aaacuacccucuggagau

SEQ ID NO: 96780 - RNA, 19 nt, Homo sapiens
acguguuaugacuccagaa

SEQ ID NO: 96781 - RNA, 15 nt, Homo sapiens
acccucuggagauaa

SEQ ID NO: 96782 - RNA, 19 nt, Homo sapiens
aagugagacccugucucaa

SEQ ID NO: 96783 - RNA, 16 nt, Homo sapiens
auagugucccacggug

SEQ ID NO: 96784 - RNA, 17 nt, Homo sapiens
aggcuaugugagcacaa

SEQ ID NO: 96785 - RNA, 11 nt, Homo sapiens
ggggugcccuc

SEQ ID NO: 96786 - RNA, 20 nt, Homo sapiens
aaugcucuuuacuucaugga

SEQ ID NO: 96787 - RNA, 22 nt, Homo sapiens
auucauauuuacuucuuauaca

SEQ ID NO: 96788 - RNA, 13 nt, Homo sapiens
aaugcacuuuguu

SEQ ID NO: 96789 - RNA, 20 nt, Homo sapiens
uugaaauauaggaacuuaaa

SEQ ID NO: 96790 - RNA, 11 nt, Homo sapiens
acacccuguga

SEQ ID NO: 96791 - RNA, 13 nt, Homo sapiens
aggggcacagggu

SEQ ID NO: 96792 - RNA, 17 nt, Homo sapiens
augacaucugucuagga

SEQ ID NO: 96793 - RNA, 22 nt, Homo sapiens
ggcccagagggccugcaaggga

SEQ ID NO: 96794 - RNA, 13 nt, Homo sapiens
acaucaacugcau

SEQ ID NO: 96795 - RNA, 14 nt, Homo sapiens
gacuuggaaauggg

SEQ ID NO: 96796 - RNA, 14 nt, Homo sapiens
cauguccaagaagc

SEQ ID NO: 96797 - RNA, 18 nt, Homo sapiens
ucuaugggacucaaugca

SEQ ID NO: 96798 - RNA, 15 nt, Homo sapiens
gucuuagauguauau

SEQ ID NO: 96799 - RNA, 17 nt, Homo sapiens
ugauccacccaccucag

SEQ ID NO: 96800 - RNA, 12 nt, Homo sapiens
aaauucuuucag

SEQ ID NO: 96801 - RNA, 19 nt, Homo sapiens
cuuuccuguagucccauug

SEQ ID NO: 96802 - RNA, 12 nt, Homo sapiens
gggcucagcaaa

SEQ ID NO: 96803 - RNA, 23 nt, Homo sapiens
aaaagaugcuucucacugccaug

SEQ ID NO: 96804 - RNA, 20 nt, Homo sapiens
cagagugaacacucuuggua

SEQ ID NO: 96805 - RNA, 12 nt, Homo sapiens
ggaggauguucu

SEQ ID NO: 96806 - RNA, 21 nt, Homo sapiens
aguggugcgaucuggguucac

SEQ ID NO: 96807 - RNA, 21 nt, Homo sapiens
ucacaggcagguccaggguuu

SEQ ID NO: 96808 - RNA, 15 nt, Homo sapiens
aggaagacaauguga

SEQ ID NO: 96809 - RNA, 20 nt, Homo sapiens
aggccuggccagaugcacca

SEQ ID NO: 96810 - RNA, 18 nt, Homo sapiens
aauuuucacagccaugau

SEQ ID NO: 96811 - RNA, 19 nt, Homo sapiens
cuguuucugcagccacuau

SEQ ID NO: 96812 - RNA, 20 nt, Homo sapiens
uauguggaguucaucuugaa

SEQ ID NO: 96813 - RNA, 17 nt, Homo sapiens
acacuugggagcaaaag

SEQ ID NO: 96814 - RNA, 13 nt, Homo sapiens
cauacaauuccaa

SEQ ID NO: 96815 - RNA, 19 nt, Homo sapiens
ggccgggcgcgguggcuca

SEQ ID NO: 96816 - RNA, 13 nt, Homo sapiens
uguggguuucuaa

SEQ ID NO: 96817 - RNA, 18 nt, Homo sapiens
cagacacaggcccggcuc

SEQ ID NO: 96818 - RNA, 15 nt, Homo sapiens
ccacuuugauaccau

SEQ ID NO: 96819 - RNA, 18 nt, Homo sapiens
aaagaggggaagagacuu

SEQ ID NO: 96820 - RNA, 15 nt, Homo sapiens
uguacagacaacaaa

SEQ ID NO: 96821 - RNA, 16 nt, Homo sapiens
cuugccgucuaccuga

SEQ ID NO: 96822 - RNA, 18 nt, Homo sapiens
gcucaccagccccagugc

SEQ ID NO: 96823 - RNA, 13 nt, Homo sapiens
aaggagauuuaca

SEQ ID NO: 96824 - RNA, 18 nt, Homo sapiens
cugcgucucauacucacc

SEQ ID NO: 96825 - RNA, 22 nt, Homo sapiens
cucuugauucauaaugacuuaa

SEQ ID NO: 96826 - RNA, 15 nt, Homo sapiens
caggcauguucucug

SEQ ID NO: 96827 - RNA, 18 nt, Homo sapiens
auauugccauuucuucca

SEQ ID NO: 96828 - RNA, 15 nt, Homo sapiens
acacuugcacccaug

SEQ ID NO: 96829 - RNA, 17 nt, Homo sapiens
ggccuggucguuuucaa

SEQ ID NO: 96830 - RNA, 22 nt, Homo sapiens
aaccuagccuuagaagucacac

SEQ ID NO: 96831 - RNA, 13 nt, Homo sapiens
agcuguucagcug

SEQ ID NO: 96832 - RNA, 15 nt, Homo sapiens
uguguucaugcacac

SEQ ID NO: 96833 - RNA, 20 nt, Homo sapiens
guaauuaaguacuauguauc

SEQ ID NO: 96834 - RNA, 21 nt, Homo sapiens
cuugaccgugaggccagagac

SEQ ID NO: 96835 - RNA, 19 nt, Homo sapiens
caacugcaucaagauguga

SEQ ID NO: 96836 - RNA, 17 nt, Homo sapiens
uacauaaugcgugcaua

SEQ ID NO: 96837 - RNA, 14 nt, Homo sapiens
cauccacugugcca

SEQ ID NO: 96838 - RNA, 15 nt, Homo sapiens
gcauguuugugauug

SEQ ID NO: 96839 - RNA, 19 nt, Homo sapiens
gaccaguuguugauaacca

SEQ ID NO: 96840 - RNA, 15 nt, Homo sapiens
ugguucccauuugcu

SEQ ID NO: 96841 - RNA, 23 nt, Homo sapiens
aggaagcaaaagcaucuauguga

SEQ ID NO: 96842 - RNA, 16 nt, Homo sapiens
ugcaggaccucaggug

SEQ ID NO: 96843 - RNA, 11 nt, Homo sapiens
cugaaaaccaa

SEQ ID NO: 96844 - RNA, 17 nt, Homo sapiens
cuggcacuauaauguaa

SEQ ID NO: 96845 - RNA, 22 nt, Homo sapiens
ugacaaggggcaguggugguuu

SEQ ID NO: 96846 - RNA, 17 nt, Homo sapiens
guaugaucacggcucac

SEQ ID NO: 96847 - RNA, 19 nt, Homo sapiens
auucucuccuguaccucuu

SEQ ID NO: 96848 - RNA, 14 nt, Homo sapiens
caguggcuaccuac

SEQ ID NO: 96849 - RNA, 17 nt, Homo sapiens
ugcgaucuggguucacu

SEQ ID NO: 96850 - RNA, 14 nt, Homo sapiens
uggcuaaauucaug

SEQ ID NO: 96851 - RNA, 20 nt, Homo sapiens
cucuacccuggcacuauaau

SEQ ID NO: 96852 - RNA, 18 nt, Homo sapiens
cuugucuuuggacccuga

SEQ ID NO: 96853 - RNA, 16 nt, Homo sapiens
auaauucuacuuugag

SEQ ID NO: 96854 - RNA, 17 nt, Homo sapiens
gaucacgccacugcacu

SEQ ID NO: 96855 - RNA, 23 nt, Homo sapiens
ucugcuuuuuaaagaaugcucuu

SEQ ID NO: 96856 - RNA, 15 nt, Homo sapiens
acugcuuuuggucug

SEQ ID NO: 96857 - RNA, 16 nt, Homo sapiens
gauccacccaccucag

SEQ ID NO: 96858 - RNA, 13 nt, Homo sapiens
aaaacauuuuacu

SEQ ID NO: 96859 - RNA, 21 nt, Homo sapiens
cccuauugcugcuugaggcaa

SEQ ID NO: 96860 - RNA, 19 nt, Homo sapiens
gcagauacaggaaaagcug

SEQ ID NO: 96861 - RNA, 19 nt, Homo sapiens
cuccccgggcagcagagag

SEQ ID NO: 96862 - RNA, 17 nt, Homo sapiens
caaaacauuuuacuuua

SEQ ID NO: 96863 - RNA, 12 nt, Homo sapiens
uuccugaggcug

SEQ ID NO: 96864 - RNA, 21 nt, Homo sapiens
aauacagacuacuucuucccc

SEQ ID NO: 96865 - RNA, 13 nt, Homo sapiens
uacgggaggguaa

SEQ ID NO: 96866 - RNA, 14 nt, Homo sapiens
ucccccuuccaugg

SEQ ID NO: 96867 - RNA, 11 nt, Homo sapiens
aaugcagagau

SEQ ID NO: 96868 - RNA, 18 nt, Homo sapiens
aaccuuuugagugccuua

SEQ ID NO: 96869 - RNA, 13 nt, Homo sapiens
cgaccagacaccu

SEQ ID NO: 96870 - RNA, 13 nt, Homo sapiens
cuggcgugcagug

SEQ ID NO: 96871 - RNA, 16 nt, Homo sapiens
ucuagggaaaaaccag

SEQ ID NO: 96872 - RNA, 24 nt, Homo sapiens
ugucacuuuccucuuccacuuuga

SEQ ID NO: 96873 - RNA, 21 nt, Homo sapiens
aggggauagagagagaccacu

SEQ ID NO: 96874 - RNA, 17 nt, Homo sapiens
uuccugaaccgaugaga

SEQ ID NO: 96875 - RNA, 18 nt, Homo sapiens
cacuaauggggcggugag

SEQ ID NO: 96876 - RNA, 22 nt, Homo sapiens
ccagccugcuaauuccccagau

SEQ ID NO: 96877 - RNA, 18 nt, Homo sapiens
gacccaugcugcccugug

SEQ ID NO: 96878 - RNA, 15 nt, Homo sapiens
cugggcuugucugua

SEQ ID NO: 96879 - RNA, 16 nt, Homo sapiens
acugacauuguuggcc

SEQ ID NO: 96880 - RNA, 19 nt, Homo sapiens
aggaggggugugggcaccc

SEQ ID NO: 96881 - RNA, 13 nt, Homo sapiens
gcugccugggauc

SEQ ID NO: 96882 - RNA, 21 nt, Homo sapiens
ggauugcuacuguccuaccca

SEQ ID NO: 96883 - RNA, 16 nt, Homo sapiens
uucauacccuguuacc

SEQ ID NO: 96884 - RNA, 14 nt, Homo sapiens
uaacacuguacugc

SEQ ID NO: 96885 - RNA, 11 nt, Homo sapiens
cagcucugcaa

SEQ ID NO: 96886 - RNA, 20 nt, Homo sapiens
cuggcagaguugaagacaga

SEQ ID NO: 96887 - RNA, 18 nt, Homo sapiens
guacuacaguccucccau

SEQ ID NO: 96888 - RNA, 11 nt, Homo sapiens
uauaugcucug

SEQ ID NO: 96889 - RNA, 21 nt, Homo sapiens
gauucauauuuacuucuuaua

SEQ ID NO: 96890 - RNA, 23 nt, Homo sapiens
aggggcccaaauucuuucagugg

SEQ ID NO: 96891 - RNA, 16 nt, Homo sapiens
uggggcuggaagcaga

SEQ ID NO: 96892 - RNA, 18 nt, Homo sapiens
ugucuuuuuucacuacau

SEQ ID NO: 96893 - RNA, 21 nt, Homo sapiens
gugagcacuaaggugugcucu

SEQ ID NO: 96894 - RNA, 20 nt, Homo sapiens
aagagggagggagggcucca

SEQ ID NO: 96895 - RNA, 17 nt, Homo sapiens
gugauuuucauugcugg

SEQ ID NO: 96896 - RNA, 21 nt, Homo sapiens
aucagccugggcaaugugaua

SEQ ID NO: 96897 - RNA, 13 nt, Homo sapiens
aggguggugaccu

SEQ ID NO: 96898 - RNA, 13 nt, Homo sapiens
uacguugugcauu

SEQ ID NO: 96899 - RNA, 11 nt, Homo sapiens
guuuucagugu

SEQ ID NO: 96900 - RNA, 20 nt, Homo sapiens
ugaagacagagcuacacagg

SEQ ID NO: 96901 - RNA, 14 nt, Homo sapiens
accaaccacugcga

SEQ ID NO: 96902 - RNA, 19 nt, Homo sapiens
uuuccuguagucccauuga

SEQ ID NO: 96903 - RNA, 16 nt, Homo sapiens
uguucugggacacagu

SEQ ID NO: 96904 - RNA, 17 nt, Homo sapiens
agcuuguaaauagcuca

SEQ ID NO: 96905 - RNA, 13 nt, Homo sapiens
aauggaagacagc

SEQ ID NO: 96906 - RNA, 16 nt, Homo sapiens
ugaguacuacaguccu

SEQ ID NO: 96907 - RNA, 16 nt, Homo sapiens
aacucaaacucuuaaa

SEQ ID NO: 96908 - RNA, 23 nt, Homo sapiens
cugcagagggcacagaaaaugga

SEQ ID NO: 96909 - RNA, 21 nt, Homo sapiens
gagaucacgccacugcacuau

SEQ ID NO: 96910 - RNA, 18 nt, Homo sapiens
aguggcuaccuacauaca

SEQ ID NO: 96911 - RNA, 16 nt, Homo sapiens
augcucuuuacuucau

SEQ ID NO: 96912 - RNA, 22 nt, Homo sapiens
agcagagcaccuuagacagucc

SEQ ID NO: 96913 - RNA, 22 nt, Homo sapiens
uaaugaaagacuguacaaagua

SEQ ID NO: 96914 - RNA, 15 nt, Homo sapiens
uggaagcacagcuuc

SEQ ID NO: 96915 - RNA, 17 nt, Homo sapiens
uccuuuagcgcccaguu

SEQ ID NO: 96916 - RNA, 14 nt, Homo sapiens
cacacgcgugcaca

SEQ ID NO: 96917 - RNA, 20 nt, Homo sapiens
gaauuauaauuaguuccuca

SEQ ID NO: 96918 - RNA, 14 nt, Homo sapiens
aaacagcugagggu

SEQ ID NO: 96919 - RNA, 13 nt, Homo sapiens
cuuuggacacuca

SEQ ID NO: 96920 - RNA, 21 nt, Homo sapiens
guggguuucuaaagcugccag

SEQ ID NO: 96921 - RNA, 15 nt, Homo sapiens
ugaaugaugccauga

SEQ ID NO: 96922 - RNA, 15 nt, Homo sapiens
agcugccaccugccu

SEQ ID NO: 96923 - RNA, 15 nt, Homo sapiens
acaguccucccaucu

SEQ ID NO: 96924 - RNA, 15 nt, Homo sapiens
uggggaccucaggcc

SEQ ID NO: 96925 - RNA, 12 nt, Homo sapiens
uuucuacccagc

SEQ ID NO: 96926 - RNA, 17 nt, Homo sapiens
cuuuucccaaacugauc

SEQ ID NO: 96927 - RNA, 16 nt, Homo sapiens
gaacuggguacuugug

SEQ ID NO: 96928 - RNA, 21 nt, Homo sapiens
cuuggggaccagagcugccac

SEQ ID NO: 96929 - RNA, 21 nt, Homo sapiens
ccacaucuugcucugcugaca

SEQ ID NO: 96930 - RNA, 21 nt, Homo sapiens
uacugaugcagaaagaccgug

SEQ ID NO: 96931 - RNA, 23 nt, Homo sapiens
aucaaaucugcuuuuuaaagaau

SEQ ID NO: 96932 - RNA, 12 nt, Homo sapiens
uguuaugacucc

SEQ ID NO: 96933 - RNA, 21 nt, Homo sapiens
cuuuucgcaggauucuuccuc

SEQ ID NO: 96934 - RNA, 18 nt, Homo sapiens
aagaauguguuuaaacuu

SEQ ID NO: 96935 - RNA, 12 nt, Homo sapiens
uuacacaauggu

SEQ ID NO: 96936 - RNA, 20 nt, Homo sapiens
uguucugacccugcuucaaa

SEQ ID NO: 96937 - RNA, 16 nt, Homo sapiens
uggacaugcacagcua

SEQ ID NO: 96938 - RNA, 22 nt, Homo sapiens
ccugggugacagagcaagugag

SEQ ID NO: 96939 - RNA, 23 nt, Homo sapiens
cuguggguuucuaaagcugccag

SEQ ID NO: 96940 - RNA, 13 nt, Homo sapiens
accucucucacuc

SEQ ID NO: 96941 - RNA, 19 nt, Homo sapiens
uuguauucucuccuguacc

SEQ ID NO: 96942 - RNA, 23 nt, Homo sapiens
aucuacccuccgauuguuccuga

SEQ ID NO: 96943 - RNA, 15 nt, Homo sapiens
guguuuauugucaaa

SEQ ID NO: 96944 - RNA, 20 nt, Homo sapiens
gcagaaggaagacuucaucc

SEQ ID NO: 96945 - RNA, 23 nt, Homo sapiens
aaauucuucuccacuuucuagcc

SEQ ID NO: 96946 - RNA, 16 nt, Homo sapiens
ccugcggugcuaucuc

SEQ ID NO: 96947 - RNA, 14 nt, Homo sapiens
auaacuuuuuccaa

SEQ ID NO: 96948 - RNA, 16 nt, Homo sapiens
agagaaaguacuucuc

SEQ ID NO: 96949 - RNA, 17 nt, Homo sapiens
agcugcacuccaugagu

SEQ ID NO: 96950 - RNA, 21 nt, Homo sapiens
uuuuaaaaaaaucccauuuaa

SEQ ID NO: 96951 - RNA, 17 nt, Homo sapiens
auauugcugauggugca

SEQ ID NO: 96952 - RNA, 15 nt, Homo sapiens
ccuccaggugcacaa

SEQ ID NO: 96953 - RNA, 20 nt, Homo sapiens
cuucagaucucuaacuucac

SEQ ID NO: 96954 - RNA, 20 nt, Homo sapiens
ugcagacucuacagaggcca

SEQ ID NO: 96955 - RNA, 14 nt, Homo sapiens
aaggaagcacaugc

SEQ ID NO: 96956 - RNA, 19 nt, Homo sapiens
acauguaauuaaguacuau

SEQ ID NO: 96957 - RNA, 21 nt, Homo sapiens
augccaugggcccucucagca

SEQ ID NO: 96958 - RNA, 17 nt, Homo sapiens
gccuggccccucagggu

SEQ ID NO: 96959 - RNA, 20 nt, Homo sapiens
auaaugacuuaagcacacuu

SEQ ID NO: 96960 - RNA, 15 nt, Homo sapiens
uggucccccuuccau

SEQ ID NO: 96961 - RNA, 21 nt, Homo sapiens
caagcuggucccacucagucc

SEQ ID NO: 96962 - RNA, 17 nt, Homo sapiens
ccucuuugagugaagcu

SEQ ID NO: 96963 - RNA, 13 nt, Homo sapiens
aagaaacuacccu

SEQ ID NO: 96964 - RNA, 22 nt, Homo sapiens
gggccuggccugagcugggaug

SEQ ID NO: 96965 - RNA, 19 nt, Homo sapiens
ggagcugccuguucagcuc

SEQ ID NO: 96966 - RNA, 22 nt, Homo sapiens
gacuggccaagguuuggggaag

SEQ ID NO: 96967 - RNA, 16 nt, Homo sapiens
acccaguuagcucuca

SEQ ID NO: 96968 - RNA, 16 nt, Homo sapiens
uaucuagauacuguau

SEQ ID NO: 96969 - RNA, 13 nt, Homo sapiens
uauaagccaaaaa

SEQ ID NO: 96970 - RNA, 21 nt, Homo sapiens
uaacauguaauuaaguacuau

SEQ ID NO: 96971 - RNA, 21 nt, Homo sapiens
ucuuagauguauauauuuccu

SEQ ID NO: 96972 - RNA, 15 nt, Homo sapiens
ugggaggccauuugu

SEQ ID NO: 96973 - RNA, 21 nt, Homo sapiens
gugcugggauuacagguguga

SEQ ID NO: 96974 - RNA, 18 nt, Homo sapiens
ugccucugacacacagcu

SEQ ID NO: 96975 - RNA, 13 nt, Homo sapiens
gucccccuuccau

SEQ ID NO: 96976 - RNA, 23 nt, Homo sapiens
cuaacuuuccuucauucaaccca

SEQ ID NO: 96977 - RNA, 16 nt, Homo sapiens
aauuacaggaaguacu

SEQ ID NO: 96978 - RNA, 14 nt, Homo sapiens
gacccuauugcugc

SEQ ID NO: 96979 - RNA, 21 nt, Homo sapiens
aggugcuauguucuuagugga

SEQ ID NO: 96980 - RNA, 14 nt, Homo sapiens
gacaggaccaggga

SEQ ID NO: 96981 - RNA, 12 nt, Homo sapiens
cacauuccugau

SEQ ID NO: 96982 - RNA, 17 nt, Homo sapiens
gccauccucccaagggg

SEQ ID NO: 96983 - RNA, 21 nt, Homo sapiens
aguucagccugggugugugaa

SEQ ID NO: 96984 - RNA, 18 nt, Homo sapiens
gagccagauuucacucuc

SEQ ID NO: 96985 - RNA, 22 nt, Homo sapiens
aggggcccaaauucuuucagug

SEQ ID NO: 96986 - RNA, 22 nt, Homo sapiens
aaaaaugcuugcuucaacccca

SEQ ID NO: 96987 - RNA, 22 nt, Homo sapiens
acagacaaagcgugguggacau

SEQ ID NO: 96988 - RNA, 18 nt, Homo sapiens
ucacuucccuacauggag

SEQ ID NO: 96989 - RNA, 20 nt, Homo sapiens
ccacccuccuuucaccacau

SEQ ID NO: 96990 - RNA, 20 nt, Homo sapiens
ugccagcuuaucucaggggu

SEQ ID NO: 96991 - RNA, 22 nt, Homo sapiens
uuaaaacaacacucacauuuau

SEQ ID NO: 96992 - RNA, 13 nt, Homo sapiens
gccucucucaggc

SEQ ID NO: 96993 - RNA, 20 nt, Homo sapiens
cccagcucugguccauagag

SEQ ID NO: 96994 - RNA, 17 nt, Homo sapiens
ucauuagcauuuugcua

SEQ ID NO: 96995 - RNA, 19 nt, Homo sapiens
acuucuuauacauuugaua

SEQ ID NO: 96996 - RNA, 12 nt, Homo sapiens
uaagagaaauga

SEQ ID NO: 96997 - RNA, 18 nt, Homo sapiens
aggaguuugagaccaacc

SEQ ID NO: 96998 - RNA, 11 nt, Homo sapiens
ccaaugcuuug

SEQ ID NO: 96999 - RNA, 14 nt, Homo sapiens
acaaguccucagug

SEQ ID NO: 97000 - RNA, 20 nt, Homo sapiens
ggaggugaccccagguuucu

SEQ ID NO: 97001 - RNA, 12 nt, Homo sapiens
gcuaaagggaaa

SEQ ID NO: 97002 - RNA, 22 nt, Homo sapiens
agaaaguacuucuccacccugc

SEQ ID NO: 97003 - RNA, 17 nt, Homo sapiens
acuuggaaaugggagac

SEQ ID NO: 97004 - RNA, 21 nt, Homo sapiens
uaguugucacuuuccucuucc

SEQ ID NO: 97005 - RNA, 19 nt, Homo sapiens
cuucuuccccccgcuguca

SEQ ID NO: 97006 - RNA, 21 nt, Homo sapiens
ccucucagauuguaccauuga

SEQ ID NO: 97007 - RNA, 15 nt, Homo sapiens
auacaguaucucagg

SEQ ID NO: 97008 - RNA, 15 nt, Homo sapiens
ugcauuuggugguuu

SEQ ID NO: 97009 - RNA, 16 nt, Homo sapiens
ucucaggccagcugcu

SEQ ID NO: 97010 - RNA, 20 nt, Homo sapiens
cucaaacucuugaccucagg

SEQ ID NO: 97011 - RNA, 21 nt, Homo sapiens
cuuuguuuagcccaaaaccaa

SEQ ID NO: 97012 - RNA, 19 nt, Homo sapiens
uuagugguuacccaguuag

SEQ ID NO: 97013 - RNA, 17 nt, Homo sapiens
cacuaaggugugcucug

SEQ ID NO: 97014 - RNA, 21 nt, Homo sapiens
ccucuucucuacucuagggaa

SEQ ID NO: 97015 - RNA, 17 nt, Homo sapiens
cagaaggaagacuucau

SEQ ID NO: 97016 - RNA, 14 nt, Homo sapiens
cuauguugcccagg

SEQ ID NO: 97017 - RNA, 21 nt, Homo sapiens
cuuuuuuggcugcugaaggcu

SEQ ID NO: 97018 - RNA, 15 nt, Homo sapiens
cuuacuuaggugugg

SEQ ID NO: 97019 - RNA, 20 nt, Homo sapiens
gagaaggcaaccuugacucu

SEQ ID NO: 97020 - RNA, 23 nt, Homo sapiens
aaaaccaccaccaucaccagaca

SEQ ID NO: 97021 - RNA, 22 nt, Homo sapiens
cucaagugauucuccugccuca

SEQ ID NO: 97022 - RNA, 21 nt, Homo sapiens
gauggccauguauuaccugaa

SEQ ID NO: 97023 - RNA, 13 nt, Homo sapiens
uuuuagacagagu

SEQ ID NO: 97024 - RNA, 15 nt, Homo sapiens
uuagcauuuugcuaa

SEQ ID NO: 97025 - RNA, 15 nt, Homo sapiens
agcucuuuugagcau

SEQ ID NO: 97026 - RNA, 16 nt, Homo sapiens
uacucaccucacccca

SEQ ID NO: 97027 - RNA, 20 nt, Homo sapiens
acacagcucuucuccaggcu

SEQ ID NO: 97028 - RNA, 13 nt, Homo sapiens
cccugcccggcug

SEQ ID NO: 97029 - RNA, 23 nt, Homo sapiens
acagaagaaacuacccucuggag

SEQ ID NO: 97030 - RNA, 20 nt, Homo sapiens
ucaugcugcuuagaugacau

SEQ ID NO: 97031 - RNA, 19 nt, Homo sapiens
gacagaagaaacuacccuc

SEQ ID NO: 97032 - RNA, 15 nt, Homo sapiens
aaauauuucccucac

SEQ ID NO: 97033 - RNA, 20 nt, Homo sapiens
auguucugggacacaguuca

SEQ ID NO: 97034 - RNA, 14 nt, Homo sapiens
accacuucagcuga

SEQ ID NO: 97035 - RNA, 17 nt, Homo sapiens
cacacuugggagcaaaa

SEQ ID NO: 97036 - RNA, 20 nt, Homo sapiens
uagaauuugggggaaaauuu

SEQ ID NO: 97037 - RNA, 13 nt, Homo sapiens
cuguucccaugag

SEQ ID NO: 97038 - RNA, 22 nt, Homo sapiens
cgggaggauguucugggacaca

SEQ ID NO: 97039 - RNA, 16 nt, Homo sapiens
uagacagagucucacu

SEQ ID NO: 97040 - RNA, 19 nt, Homo sapiens
auauuuugcuuugugauuu

SEQ ID NO: 97041 - RNA, 20 nt, Homo sapiens
agcucacauagauaugacuu

SEQ ID NO: 97042 - RNA, 15 nt, Homo sapiens
gcugcacuccaugag

SEQ ID NO: 97043 - RNA, 17 nt, Homo sapiens
gggggcuccagggggug

SEQ ID NO: 97044 - RNA, 16 nt, Homo sapiens
guaucaggugcugcca

SEQ ID NO: 97045 - RNA, 12 nt, Homo sapiens
accaaccacugc

SEQ ID NO: 97046 - RNA, 15 nt, Homo sapiens
cagugguaugaucac

SEQ ID NO: 97047 - RNA, 14 nt, Homo sapiens
cauggaaguacuau

SEQ ID NO: 97048 - RNA, 18 nt, Homo sapiens
gcugcuacuacuccugua

SEQ ID NO: 97049 - RNA, 13 nt, Homo sapiens
auacacuuacacu

SEQ ID NO: 97050 - RNA, 16 nt, Homo sapiens
uuagaagucacacagu

SEQ ID NO: 97051 - RNA, 13 nt, Homo sapiens
aauaacauguaau

SEQ ID NO: 97052 - RNA, 13 nt, Homo sapiens
agcagaaaugccu

SEQ ID NO: 97053 - RNA, 19 nt, Homo sapiens
agcccaccccucaacaccu

SEQ ID NO: 97054 - RNA, 14 nt, Homo sapiens
gcugcacuccauga

SEQ ID NO: 97055 - RNA, 17 nt, Homo sapiens
caaugaguaacaggaaa

SEQ ID NO: 97056 - RNA, 15 nt, Homo sapiens
ggagggcuccagaca

SEQ ID NO: 97057 - RNA, 18 nt, Homo sapiens
agcccagagugaacacuc

SEQ ID NO: 97058 - RNA, 12 nt, Homo sapiens
agacccggcugc

SEQ ID NO: 97059 - RNA, 15 nt, Homo sapiens
ggcuaugugagcaca

SEQ ID NO: 97060 - RNA, 17 nt, Homo sapiens
aaugaggaaacugcacu

SEQ ID NO: 97061 - RNA, 18 nt, Homo sapiens
ugaucccuucuuacuuaa

SEQ ID NO: 97062 - RNA, 13 nt, Homo sapiens
ccagagcugccac

SEQ ID NO: 97063 - RNA, 15 nt, Homo sapiens
cuuagugugugcaau

SEQ ID NO: 97064 - RNA, 12 nt, Homo sapiens
uauacauuugau

SEQ ID NO: 97065 - RNA, 15 nt, Homo sapiens
agcaggcucucaggc

SEQ ID NO: 97066 - RNA, 22 nt, Homo sapiens
aacgccuguaggaagaaaaagg

SEQ ID NO: 97067 - RNA, 15 nt, Homo sapiens
gaaagugaccauguu

SEQ ID NO: 97068 - RNA, 20 nt, Homo sapiens
guagagacaggguuuugcca

SEQ ID NO: 97069 - RNA, 14 nt, Homo sapiens
ugaccucaggugau

SEQ ID NO: 97070 - RNA, 21 nt, Homo sapiens
aucacaagucagcacuaccuc

SEQ ID NO: 97071 - RNA, 17 nt, Homo sapiens
uguccuacccacccucc

SEQ ID NO: 97072 - RNA, 13 nt, Homo sapiens
ggcuuggggacca

SEQ ID NO: 97073 - RNA, 20 nt, Homo sapiens
ucauugaccugaggcccuuc

SEQ ID NO: 97074 - RNA, 13 nt, Homo sapiens
ucucucuucucca

SEQ ID NO: 97075 - RNA, 19 nt, Homo sapiens
ggcucagcggggacagcuc

SEQ ID NO: 97076 - RNA, 21 nt, Homo sapiens
aggaucaaaguugaugaaaua

SEQ ID NO: 97077 - RNA, 16 nt, Homo sapiens
cacuucccuacaugga

SEQ ID NO: 97078 - RNA, 14 nt, Homo sapiens
ucugacacacagcu

SEQ ID NO: 97079 - RNA, 14 nt, Homo sapiens
uucucugaaggaca

SEQ ID NO: 97080 - RNA, 21 nt, Homo sapiens
auuuuguuuuugucuuaaaaa

SEQ ID NO: 97081 - RNA, 15 nt, Homo sapiens
cuucuguccuacucu

SEQ ID NO: 97082 - RNA, 13 nt, Homo sapiens
agauggccaugua

SEQ ID NO: 97083 - RNA, 22 nt, Homo sapiens
ggagaguaacccugucuaauga

SEQ ID NO: 97084 - RNA, 14 nt, Homo sapiens
cucuacucuaggga

SEQ ID NO: 97085 - RNA, 14 nt, Homo sapiens
gugggauccuccag

SEQ ID NO: 97086 - RNA, 18 nt, Homo sapiens
ucacauuuauucugcuca

SEQ ID NO: 97087 - RNA, 16 nt, Homo sapiens
gaucaaaguugaugaa

SEQ ID NO: 97088 - RNA, 14 nt, Homo sapiens
auggauuuccagcc

SEQ ID NO: 97089 - RNA, 12 nt, Homo sapiens
ccagccuugacc

SEQ ID NO: 97090 - RNA, 16 nt, Homo sapiens
gcuugggcuucauccu

SEQ ID NO: 97091 - RNA, 18 nt, Homo sapiens
ggccagagggagugacag

SEQ ID NO: 97092 - RNA, 19 nt, Homo sapiens
gacaguuaagagaaaugag

SEQ ID NO: 97093 - RNA, 17 nt, Homo sapiens
gcaagugagacccuguc

SEQ ID NO: 97094 - RNA, 13 nt, Homo sapiens
uggcccacgcacu

SEQ ID NO: 97095 - RNA, 17 nt, Homo sapiens
auugauaugcuuauaca

SEQ ID NO: 97096 - RNA, 12 nt, Homo sapiens
gagacaggguuu

SEQ ID NO: 97097 - RNA, 13 nt, Homo sapiens
uggcccacugcau

SEQ ID NO: 97098 - RNA, 22 nt, Homo sapiens
gacugaguacguugugcauuug

SEQ ID NO: 97099 - RNA, 13 nt, Homo sapiens
agugggugaauaa

SEQ ID NO: 97100 - RNA, 15 nt, Homo sapiens
uacccucuggagaua

SEQ ID NO: 97101 - RNA, 17 nt, Homo sapiens
cagaguggauucuugaa

SEQ ID NO: 97102 - RNA, 21 nt, Homo sapiens
aagcugggagaaccaaaaaga

SEQ ID NO: 97103 - RNA, 14 nt, Homo sapiens
gcucuggacaggca

SEQ ID NO: 97104 - RNA, 17 nt, Homo sapiens
gcaauccugcaagaaca

SEQ ID NO: 97105 - RNA, 22 nt, Homo sapiens
uugaagacuuuucuuucagcca

SEQ ID NO: 97106 - RNA, 13 nt, Homo sapiens
cucugcacaagcu

SEQ ID NO: 97107 - RNA, 22 nt, Homo sapiens
caugcuccuggcccacugcauc

SEQ ID NO: 97108 - RNA, 14 nt, Homo sapiens
guaugguaggguaa

SEQ ID NO: 97109 - RNA, 19 nt, Homo sapiens
aaugaugauccuaggcauu

SEQ ID NO: 97110 - RNA, 16 nt, Homo sapiens
gaugauaaaacacaaa

SEQ ID NO: 97111 - RNA, 14 nt, Homo sapiens
gugcagcucuggag

SEQ ID NO: 97112 - RNA, 13 nt, Homo sapiens
uugagacagaguu

SEQ ID NO: 97113 - RNA, 17 nt, Homo sapiens
gaauuucucacaaagga

SEQ ID NO: 97114 - RNA, 15 nt, Homo sapiens
ggacaggcauguucu

SEQ ID NO: 97115 - RNA, 16 nt, Homo sapiens
cagcgagcccuggugg

SEQ ID NO: 97116 - RNA, 16 nt, Homo sapiens
ccaguguuguggauuu

SEQ ID NO: 97117 - RNA, 19 nt, Homo sapiens
acaggcccggcuccaggcu

SEQ ID NO: 97118 - RNA, 16 nt, Homo sapiens
cagcaggcucucaggc

SEQ ID NO: 97119 - RNA, 19 nt, Homo sapiens
cacuaaugaggaaacugca

SEQ ID NO: 97120 - RNA, 13 nt, Homo sapiens
caaagcagugcau

SEQ ID NO: 97121 - RNA, 17 nt, Homo sapiens
auuuaccugaagucuuu

SEQ ID NO: 97122 - RNA, 23 nt, Homo sapiens
aaaacauuuuacuuuaaaaggag

SEQ ID NO: 97123 - RNA, 17 nt, Homo sapiens
agaauugaaaaaccauu

SEQ ID NO: 97124 - RNA, 16 nt, Homo sapiens
gaauuuuuacugggga

SEQ ID NO: 97125 - RNA, 20 nt, Homo sapiens
gggaggucaaggcugcagug

SEQ ID NO: 97126 - RNA, 17 nt, Homo sapiens
agacacaggcccggcuc

SEQ ID NO: 97127 - RNA, 15 nt, Homo sapiens
aaugagccuggcaag

SEQ ID NO: 97128 - RNA, 18 nt, Homo sapiens
gauuacaggugugaacca

SEQ ID NO: 97129 - RNA, 16 nt, Homo sapiens
acaagcugcacccuca

SEQ ID NO: 97130 - RNA, 15 nt, Homo sapiens
auguaagcucuacug

SEQ ID NO: 97131 - RNA, 17 nt, Homo sapiens
augccugguggcagcug

SEQ ID NO: 97132 - RNA, 16 nt, Homo sapiens
gagagggggauguuuc

SEQ ID NO: 97133 - RNA, 15 nt, Homo sapiens
gaagaacgaagccac

SEQ ID NO: 97134 - RNA, 16 nt, Homo sapiens
ugagacccugucucaa

SEQ ID NO: 97135 - RNA, 12 nt, Homo sapiens
ccacuucugcca

SEQ ID NO: 97136 - RNA, 13 nt, Homo sapiens
caaaaacaacaac

SEQ ID NO: 97137 - RNA, 17 nt, Homo sapiens
aauaacacuguacugca

SEQ ID NO: 97138 - RNA, 16 nt, Homo sapiens
cuaaaagguaugcaau

SEQ ID NO: 97139 - RNA, 14 nt, Homo sapiens
agacuucaucccuc

SEQ ID NO: 97140 - RNA, 16 nt, Homo sapiens
gcccacacuugggagc

SEQ ID NO: 97141 - RNA, 17 nt, Homo sapiens
acaccaugauuaaccac

SEQ ID NO: 97142 - RNA, 21 nt, Homo sapiens
gcacagcugggguggggaccu

SEQ ID NO: 97143 - RNA, 20 nt, Homo sapiens
aagacccuuguggucccacc

SEQ ID NO: 97144 - RNA, 15 nt, Homo sapiens
cuuuagcgcccaguu

SEQ ID NO: 97145 - RNA, 10 nt, Homo sapiens
uguagagugg

SEQ ID NO: 97146 - RNA, 12 nt, Homo sapiens
uagauacuguau

SEQ ID NO: 97147 - RNA, 18 nt, Homo sapiens
caacaggguuuuuuucca

SEQ ID NO: 97148 - RNA, 14 nt, Homo sapiens
uugcaauggcagcc

SEQ ID NO: 97149 - RNA, 16 nt, Homo sapiens
cuugaaugaugccaug

SEQ ID NO: 97150 - RNA, 19 nt, Homo sapiens
acccucuuagaaaaaccac

SEQ ID NO: 97151 - RNA, 14 nt, Homo sapiens
uggaauaacaugua

SEQ ID NO: 97152 - RNA, 20 nt, Homo sapiens
aggaagccucccacgacugc

SEQ ID NO: 97153 - RNA, 18 nt, Homo sapiens
ugaguacguugugcauuu

SEQ ID NO: 97154 - RNA, 20 nt, Homo sapiens
gccgugauuuucauugcugg

SEQ ID NO: 97155 - RNA, 14 nt, Homo sapiens
acccaccccagugc

SEQ ID NO: 97156 - RNA, 14 nt, Homo sapiens
agccccauccucug

SEQ ID NO: 97157 - RNA, 13 nt, Homo sapiens
aggcggugagcaa

SEQ ID NO: 97158 - RNA, 15 nt, Homo sapiens
ccucaccccacugug

SEQ ID NO: 97159 - RNA, 23 nt, Homo sapiens
cacaguauuacuucugcuacaua

SEQ ID NO: 97160 - RNA, 14 nt, Homo sapiens
gaggcaugugauga

SEQ ID NO: 97161 - RNA, 19 nt, Homo sapiens
agauagccaaggccaaagg

SEQ ID NO: 97162 - RNA, 16 nt, Homo sapiens
ggaaugaaugucagug

SEQ ID NO: 97163 - RNA, 13 nt, Homo sapiens
aggcaacugcauu

SEQ ID NO: 97164 - RNA, 17 nt, Homo sapiens
gugggaggggaagaaaa

SEQ ID NO: 97165 - RNA, 13 nt, Homo sapiens
gagcaggcuucuu

SEQ ID NO: 97166 - RNA, 16 nt, Homo sapiens
cuuucccaucuuccaa

SEQ ID NO: 97167 - RNA, 18 nt, Homo sapiens
gcacagacccugcccugu

SEQ ID NO: 97168 - RNA, 21 nt, Homo sapiens
gcccaggaaaggcuccaggag

SEQ ID NO: 97169 - RNA, 14 nt, Homo sapiens
acauucuguuaauc

SEQ ID NO: 97170 - RNA, 14 nt, Homo sapiens
uucaguggcagcug

SEQ ID NO: 97171 - RNA, 23 nt, Homo sapiens
uuuuaugagaaaugccagugugc

SEQ ID NO: 97172 - RNA, 16 nt, Homo sapiens
gacacaggcccggcuc

SEQ ID NO: 97173 - RNA, 17 nt, Homo sapiens
aaauacagauagauaua

SEQ ID NO: 97174 - RNA, 18 nt, Homo sapiens
augcagugguaugaucac

SEQ ID NO: 97175 - RNA, 23 nt, Homo sapiens
ccucagggucccugguggcagcu

SEQ ID NO: 97176 - RNA, 13 nt, Homo sapiens
ucuucucuacucu

SEQ ID NO: 97177 - RNA, 22 nt, Homo sapiens
ggacucaaugcacugacauugu

SEQ ID NO: 97178 - RNA, 14 nt, Homo sapiens
aaauucaugcugcu

SEQ ID NO: 97179 - RNA, 22 nt, Homo sapiens
ugguuuuuaaaaaacugcugac

SEQ ID NO: 97180 - RNA, 13 nt, Homo sapiens
ugaacacucuugg

SEQ ID NO: 97181 - RNA, 12 nt, Homo sapiens
auucuucuguac

SEQ ID NO: 97182 - RNA, 18 nt, Homo sapiens
aauuccaaacacauacag

SEQ ID NO: 97183 - RNA, 13 nt, Homo sapiens
agaaguuucugcc

SEQ ID NO: 97184 - RNA, 13 nt, Homo sapiens
auugaaaaaccau

SEQ ID NO: 97185 - RNA, 23 nt, Homo sapiens
ugacuuaagcacacuugacauca

SEQ ID NO: 97186 - RNA, 20 nt, Homo sapiens
uacagauagauauaugcucu

SEQ ID NO: 97187 - RNA, 20 nt, Homo sapiens
aaucuaaauggaaccacucu

SEQ ID NO: 97188 - RNA, 18 nt, Homo sapiens
acuauguugcccaggcag

SEQ ID NO: 97189 - RNA, 16 nt, Homo sapiens
guccccgcacugggcu

SEQ ID NO: 97190 - RNA, 14 nt, Homo sapiens
gaccuucuccuuca

SEQ ID NO: 97191 - RNA, 20 nt, Homo sapiens
guguuuauauauaagccaaa

SEQ ID NO: 97192 - RNA, 17 nt, Homo sapiens
caugccucucucaggcc

SEQ ID NO: 97193 - RNA, 17 nt, Homo sapiens
caugauguuuuccauga

SEQ ID NO: 97194 - RNA, 15 nt, Homo sapiens
aaaauuacugaugca

SEQ ID NO: 97195 - RNA, 14 nt, Homo sapiens
ucaagaugugacau

SEQ ID NO: 97196 - RNA, 15 nt, Homo sapiens
uaauuaaaacacaac

SEQ ID NO: 97197 - RNA, 22 nt, Homo sapiens
agccccauucugccugcccagg

SEQ ID NO: 97198 - RNA, 18 nt, Homo sapiens
aaagggcccagagagggu

SEQ ID NO: 97199 - RNA, 17 nt, Homo sapiens
guucuuaguuugcaguu

SEQ ID NO: 97200 - RNA, 21 nt, Homo sapiens
ucuuucagccaagaauucuua

SEQ ID NO: 97201 - RNA, 15 nt, Homo sapiens
accucugcacaagcu

SEQ ID NO: 97202 - RNA, 13 nt, Homo sapiens
gauauaugcucug

SEQ ID NO: 97203 - RNA, 16 nt, Homo sapiens
auaauacaguaucuca

SEQ ID NO: 97204 - RNA, 13 nt, Homo sapiens
auauaacuuuuuc

SEQ ID NO: 97205 - RNA, 14 nt, Homo sapiens
uugccauguuggcc

SEQ ID NO: 97206 - RNA, 19 nt, Homo sapiens
cagaaagaccgugugugaa

SEQ ID NO: 97207 - RNA, 14 nt, Homo sapiens
aaaguacuucucca

SEQ ID NO: 97208 - RNA, 13 nt, Homo sapiens
uugaaugaugcca

SEQ ID NO: 97209 - RNA, 14 nt, Homo sapiens
ccuacucuguguca

SEQ ID NO: 97210 - RNA, 13 nt, Homo sapiens
uugcaugaggcua

SEQ ID NO: 97211 - RNA, 23 nt, Homo sapiens
caaagacugaguacguugugcau

SEQ ID NO: 97212 - RNA, 18 nt, Homo sapiens
gagcaagugagacccugu

SEQ ID NO: 97213 - RNA, 20 nt, Homo sapiens
agacucuacagaggccaugg

SEQ ID NO: 97214 - RNA, 18 nt, Homo sapiens
ucucacuauguugcccag

SEQ ID NO: 97215 - RNA, 15 nt, Homo sapiens
auccuagcacuuugg

SEQ ID NO: 97216 - RNA, 23 nt, Homo sapiens
ggaagcacaugccucucucaggc

SEQ ID NO: 97217 - RNA, 19 nt, Homo sapiens
cagaaaugccuuacccuca

SEQ ID NO: 97218 - RNA, 22 nt, Homo sapiens
ggaugaaaaaauaacacuguac

SEQ ID NO: 97219 - RNA, 16 nt, Homo sapiens
acuuguggacacagcu

SEQ ID NO: 97220 - RNA, 15 nt, Homo sapiens
cuuuugagugccuua

SEQ ID NO: 97221 - RNA, 12 nt, Homo sapiens
gcgugcacacac

SEQ ID NO: 97222 - RNA, 20 nt, Homo sapiens
auaacuuuguuuagcccaaa

SEQ ID NO: 97223 - RNA, 18 nt, Homo sapiens
cauacaauuccaaacaca

SEQ ID NO: 97224 - RNA, 15 nt, Homo sapiens
auaguggugugauuu

SEQ ID NO: 97225 - RNA, 19 nt, Homo sapiens
ucucagauuguaccauuga

SEQ ID NO: 97226 - RNA, 15 nt, Homo sapiens
ucauacucaccucac

SEQ ID NO: 97227 - RNA, 15 nt, Homo sapiens
gcuuugaaaauucag

SEQ ID NO: 97228 - RNA, 16 nt, Homo sapiens
caccucugcacaagcu

SEQ ID NO: 97229 - RNA, 11 nt, Homo sapiens
agccagaggag

SEQ ID NO: 97230 - RNA, 13 nt, Homo sapiens
gaccaucccugaa

SEQ ID NO: 97231 - RNA, 14 nt, Homo sapiens
uguguuaucucuua

SEQ ID NO: 97232 - RNA, 20 nt, Homo sapiens
gggucucacuauguugccca

SEQ ID NO: 97233 - RNA, 23 nt, Homo sapiens
auagugguggugaacagaacaaa

SEQ ID NO: 97234 - RNA, 15 nt, Homo sapiens
auagccaaggccaaa

SEQ ID NO: 97235 - RNA, 15 nt, Homo sapiens
gccuccccagcaccu

SEQ ID NO: 97236 - RNA, 15 nt, Homo sapiens
agaguugaagacaga

SEQ ID NO: 97237 - RNA, 19 nt, Homo sapiens
aauuuagaaauauaauuga

SEQ ID NO: 97238 - RNA, 19 nt, Homo sapiens
cucuggcuaaauucaugcu

SEQ ID NO: 97239 - RNA, 14 nt, Homo sapiens
gaagucacacagua

SEQ ID NO: 97240 - RNA, 14 nt, Homo sapiens
ccaaaggaagcaca

SEQ ID NO: 97241 - RNA, 23 nt, Homo sapiens
ucuacuuugagugcugucuccau

SEQ ID NO: 97242 - RNA, 15 nt, Homo sapiens
uaggaagacuuugga

SEQ ID NO: 97243 - RNA, 14 nt, Homo sapiens
ugggccacugugaa

SEQ ID NO: 97244 - RNA, 14 nt, Homo sapiens
ugcacaaacagagg

SEQ ID NO: 97245 - RNA, 23 nt, Homo sapiens
gugaagcugggagaaccaaaaag

SEQ ID NO: 97246 - RNA, 15 nt, Homo sapiens
aucuuuucauuuagg

SEQ ID NO: 97247 - RNA, 22 nt, Homo sapiens
ccuucuuacuuaaccugaagcu

SEQ ID NO: 97248 - RNA, 21 nt, Homo sapiens
cccagauagcuggcugggugg

SEQ ID NO: 97249 - RNA, 19 nt, Homo sapiens
ugcaucguuucaucuucca

SEQ ID NO: 97250 - RNA, 22 nt, Homo sapiens
cucaucuuagguuggcaaaaag

SEQ ID NO: 97251 - RNA, 15 nt, Homo sapiens
gcuccuucuguccua

SEQ ID NO: 97252 - RNA, 20 nt, Homo sapiens
ucauggagggagaagaaaga

SEQ ID NO: 97253 - RNA, 22 nt, Homo sapiens
aaugugacuugagcccagagug

SEQ ID NO: 97254 - RNA, 15 nt, Homo sapiens
aagccgugauuuuca

SEQ ID NO: 97255 - RNA, 19 nt, Homo sapiens
aagacuuuggaaagacuuu

SEQ ID NO: 97256 - RNA, 16 nt, Homo sapiens
ucagguggggcagcuu

SEQ ID NO: 97257 - RNA, 19 nt, Homo sapiens
ugggcccccaaauggaaau

SEQ ID NO: 97258 - RNA, 17 nt, Homo sapiens
cagcucuguccugggag

SEQ ID NO: 97259 - RNA, 18 nt, Homo sapiens
ccacgcuggagugcagug

SEQ ID NO: 97260 - RNA, 18 nt, Homo sapiens
aucccauaugccugggca

SEQ ID NO: 97261 - RNA, 18 nt, Homo sapiens
agccauuccuguucccau

SEQ ID NO: 97262 - RNA, 13 nt, Homo sapiens
auucaugcugcuu

SEQ ID NO: 97263 - RNA, 15 nt, Homo sapiens
uaaggaauaccuguc

SEQ ID NO: 97264 - RNA, 14 nt, Homo sapiens
aguugccagucacc

SEQ ID NO: 97265 - RNA, 18 nt, Homo sapiens
ucucacuguugcccaggc

SEQ ID NO: 97266 - RNA, 18 nt, Homo sapiens
cguuaugauaguguccca

SEQ ID NO: 97267 - RNA, 15 nt, Homo sapiens
acaggugugagucac

SEQ ID NO: 97268 - RNA, 12 nt, Homo sapiens
acucugugucag

SEQ ID NO: 97269 - RNA, 12 nt, Homo sapiens
gucuugaacucc

SEQ ID NO: 97270 - RNA, 13 nt, Homo sapiens
aauaacacuguac

SEQ ID NO: 97271 - RNA, 20 nt, Homo sapiens
aauauuucccucaccuuucc

SEQ ID NO: 97272 - RNA, 17 nt, Homo sapiens
ucccccagcagccuggg

SEQ ID NO: 97273 - RNA, 20 nt, Homo sapiens
agccaagaauucuuaaauau

SEQ ID NO: 97274 - RNA, 14 nt, Homo sapiens
accaccaaccacug

SEQ ID NO: 97275 - RNA, 17 nt, Homo sapiens
ccaaagggccccuuucu

SEQ ID NO: 97276 - RNA, 17 nt, Homo sapiens
ccaaaggaagcacaugc

SEQ ID NO: 97277 - RNA, 19 nt, Homo sapiens
gcacugggcuuggggacca

SEQ ID NO: 97278 - RNA, 15 nt, Homo sapiens
guugaaagaucaaaa

SEQ ID NO: 97279 - RNA, 15 nt, Homo sapiens
gcugggcuucagugg

SEQ ID NO: 97280 - RNA, 19 nt, Homo sapiens
ucagcaaaagaugcuucuc

SEQ ID NO: 97281 - RNA, 21 nt, Homo sapiens
gagccgagauugcaccacugc

SEQ ID NO: 97282 - RNA, 22 nt, Homo sapiens
acuauagccuaggugacagagu

SEQ ID NO: 97283 - RNA, 19 nt, Homo sapiens
cuuacuuaaccugaagcua

SEQ ID NO: 97284 - RNA, 23 nt, Homo sapiens
guucaauucucauuugucacaca

SEQ ID NO: 97285 - RNA, 13 nt, Homo sapiens
aaagcagugcaug

SEQ ID NO: 97286 - RNA, 17 nt, Homo sapiens
cauaagauaaaugugcu

SEQ ID NO: 97287 - RNA, 13 nt, Homo sapiens
aguuacacuaaaa

SEQ ID NO: 97288 - RNA, 14 nt, Homo sapiens
ugaagucacacagu

SEQ ID NO: 97289 - RNA, 21 nt, Homo sapiens
cuaaaaggugaccaaugaugg

SEQ ID NO: 97290 - RNA, 16 nt, Homo sapiens
ucaacaccucugcaca

SEQ ID NO: 97291 - RNA, 23 nt, Homo sapiens
aaaaccccaucucuacaaaaagc

SEQ ID NO: 97292 - RNA, 17 nt, Homo sapiens
ucuggcuaugcauuuga

SEQ ID NO: 97293 - RNA, 19 nt, Homo sapiens
gagcaaaaucgaugcagug

SEQ ID NO: 97294 - RNA, 20 nt, Homo sapiens
cugaggugggaggaucucuu

SEQ ID NO: 97295 - RNA, 20 nt, Homo sapiens
uacauggaauaacauguaau

SEQ ID NO: 97296 - RNA, 16 nt, Homo sapiens
agucucacuguugccc

SEQ ID NO: 97297 - RNA, 23 nt, Homo sapiens
aaaguuuuaugagaaaugccagu

SEQ ID NO: 97298 - RNA, 19 nt, Homo sapiens
ugaguacuacaguccuccc

SEQ ID NO: 97299 - RNA, 15 nt, Homo sapiens
ucuaugacacaugca

SEQ ID NO: 97300 - RNA, 20 nt, Homo sapiens
gcccuucuaccuuccugcaa

SEQ ID NO: 97301 - RNA, 21 nt, Homo sapiens
aaaaauagccugccucuucuc

SEQ ID NO: 97302 - RNA, 15 nt, Homo sapiens
uccacugugccaugu

SEQ ID NO: 97303 - RNA, 18 nt, Homo sapiens
ugagaggggaacagacug

SEQ ID NO: 97304 - RNA, 14 nt, Homo sapiens
agaaaguacuucuu

SEQ ID NO: 97305 - RNA, 20 nt, Homo sapiens
ccuuucaccacaugugcaca

SEQ ID NO: 97306 - RNA, 23 nt, Homo sapiens
gacccacggagcccuuaugacau

SEQ ID NO: 97307 - RNA, 19 nt, Homo sapiens
auacaauuccaaacacaua

SEQ ID NO: 97308 - RNA, 17 nt, Homo sapiens
acauaaugcgugcauac

SEQ ID NO: 97309 - RNA, 16 nt, Homo sapiens
uaacaggcagauacag

SEQ ID NO: 97310 - RNA, 15 nt, Homo sapiens
aaggaugcccaaaga

SEQ ID NO: 97311 - RNA, 23 nt, Homo sapiens
cacagcugggguggggaccucag

SEQ ID NO: 97312 - RNA, 19 nt, Homo sapiens
agugagucgaggacaggga

SEQ ID NO: 97313 - RNA, 13 nt, Homo sapiens
aucaaucucuagu

SEQ ID NO: 97314 - RNA, 18 nt, Homo sapiens
ugaucacggcucacugca

SEQ ID NO: 97315 - RNA, 12 nt, Homo sapiens
gacucaaugcac

SEQ ID NO: 97316 - RNA, 15 nt, Homo sapiens
uggccucccaacuca

SEQ ID NO: 97317 - RNA, 13 nt, Homo sapiens
ccucuuucccucc

SEQ ID NO: 97318 - RNA, 13 nt, Homo sapiens
uggucaccaaauc

SEQ ID NO: 97319 - RNA, 18 nt, Homo sapiens
cagcaagugagagcuggg

SEQ ID NO: 97320 - RNA, 18 nt, Homo sapiens
ugccauauucuguuggcc

SEQ ID NO: 97321 - RNA, 16 nt, Homo sapiens
uucuaaaggcuaccuu

SEQ ID NO: 97322 - RNA, 14 nt, Homo sapiens
cucucaggccagcu

SEQ ID NO: 97323 - RNA, 16 nt, Homo sapiens
cucuauuaaaauuacu

SEQ ID NO: 97324 - RNA, 14 nt, Homo sapiens
cuccagggggugcc

SEQ ID NO: 97325 - RNA, 14 nt, Homo sapiens
uaggcauuugcuga

SEQ ID NO: 97326 - RNA, 23 nt, Homo sapiens
cuuuccaggaaggcuaaagggaa

SEQ ID NO: 97327 - RNA, 21 nt, Homo sapiens
uacucgaguuacagacaaagc

SEQ ID NO: 97328 - RNA, 15 nt, Homo sapiens
auccacugugccaug

SEQ ID NO: 97329 - RNA, 16 nt, Homo sapiens
uccugggagugagcug

SEQ ID NO: 97330 - RNA, 21 nt, Homo sapiens
aaagcgugguggacaugcaca

SEQ ID NO: 97331 - RNA, 13 nt, Homo sapiens
ucaaucucuaguu

SEQ ID NO: 97332 - RNA, 17 nt, Homo sapiens
aucacggcucacugcag

SEQ ID NO: 97333 - RNA, 16 nt, Homo sapiens
ucaaggcugcagugag

SEQ ID NO: 97334 - RNA, 19 nt, Homo sapiens
ugcugcuugaggcaacuca

SEQ ID NO: 97335 - RNA, 17 nt, Homo sapiens
gcaggcucucaggccag

SEQ ID NO: 97336 - RNA, 22 nt, Homo sapiens
uagcagcagggagggcuucugc

SEQ ID NO: 97337 - RNA, 17 nt, Homo sapiens
ccaaagugcugggauua

SEQ ID NO: 97338 - RNA, 14 nt, Homo sapiens
aggaauaccugucc

SEQ ID NO: 97339 - RNA, 19 nt, Homo sapiens
gauacaggaaaagcugcug

SEQ ID NO: 97340 - RNA, 18 nt, Homo sapiens
cccugagcuuucugcuau

SEQ ID NO: 97341 - RNA, 15 nt, Homo sapiens
uuggccagugugaca

SEQ ID NO: 97342 - RNA, 10 nt, Homo sapiens
uuggggacca

SEQ ID NO: 97343 - RNA, 17 nt, Homo sapiens
cucuccccagcaaguga

SEQ ID NO: 97344 - RNA, 10 nt, Homo sapiens
ggaagagcuc

SEQ ID NO: 97345 - RNA, 13 nt, Homo sapiens
uguucugggacac

SEQ ID NO: 97346 - RNA, 19 nt, Homo sapiens
cacuauagccuaggugaca

SEQ ID NO: 97347 - RNA, 15 nt, Homo sapiens
cugccugaagucaca

SEQ ID NO: 97348 - RNA, 19 nt, Homo sapiens
cuggugaccagcaccaucu

SEQ ID NO: 97349 - RNA, 16 nt, Homo sapiens
augggacucaaugcac

SEQ ID NO: 97350 - RNA, 19 nt, Homo sapiens
aaaaucagccugcuccagc

SEQ ID NO: 97351 - RNA, 22 nt, Homo sapiens
ugccccucaacucuccuccaga

SEQ ID NO: 97352 - RNA, 16 nt, Homo sapiens
uuggucccccuuccau

SEQ ID NO: 97353 - RNA, 14 nt, Homo sapiens
agcaaaagauucua

SEQ ID NO: 97354 - RNA, 16 nt, Homo sapiens
gcucugcugacagaca

SEQ ID NO: 97355 - RNA, 17 nt, Homo sapiens
gccagcaggcucucagg

SEQ ID NO: 97356 - RNA, 21 nt, Homo sapiens
aggaguuugggguaugggaga

SEQ ID NO: 97357 - RNA, 14 nt, Homo sapiens
cagaaauguguuau

SEQ ID NO: 97358 - RNA, 16 nt, Homo sapiens
caaugacuuacuguac

SEQ ID NO: 97359 - RNA, 17 nt, Homo sapiens
acuaaggugugcucuga

SEQ ID NO: 97360 - RNA, 15 nt, Homo sapiens
agggagaagaaagaa

SEQ ID NO: 97361 - RNA, 23 nt, Homo sapiens
gagcccacgcccccacuggugac

SEQ ID NO: 97362 - RNA, 18 nt, Homo sapiens
guccuacucugugucagg

SEQ ID NO: 97363 - RNA, 20 nt, Homo sapiens
aaccuggguaacuagggaag

SEQ ID NO: 97364 - RNA, 15 nt, Homo sapiens
cacccugaaagcccu

SEQ ID NO: 97365 - RNA, 14 nt, Homo sapiens
cacaucuugcucug

SEQ ID NO: 97366 - RNA, 15 nt, Homo sapiens
uggcuuuugugcauu

SEQ ID NO: 97367 - RNA, 13 nt, Homo sapiens
ccucauuagcauu

SEQ ID NO: 97368 - RNA, 16 nt, Homo sapiens
cacuuugauaccauug

SEQ ID NO: 97369 - RNA, 18 nt, Homo sapiens
ggggaagaaaaacucuau

SEQ ID NO: 97370 - RNA, 23 nt, Homo sapiens
gaucacagccucugaaaaccaau

SEQ ID NO: 97371 - RNA, 17 nt, Homo sapiens
agauagccaaggccaaa

SEQ ID NO: 97372 - RNA, 20 nt, Homo sapiens
aggcuccaggagcagccaca

SEQ ID NO: 97373 - RNA, 24 nt, Homo sapiens
accaugauuaaccacuucagcuga

SEQ ID NO: 97374 - RNA, 15 nt, Homo sapiens
ucccuucuuacuuaa

SEQ ID NO: 97375 - RNA, 19 nt, Homo sapiens
ccagagaggguggugaccu

SEQ ID NO: 97376 - RNA, 20 nt, Homo sapiens
cacuauaauguaagcucuac

SEQ ID NO: 97377 - RNA, 15 nt, Homo sapiens
uagcugggacuacag

SEQ ID NO: 97378 - RNA, 13 nt, Homo sapiens
caucucuacaaaa

SEQ ID NO: 97379 - RNA, 15 nt, Homo sapiens
aaauaccagccagua

SEQ ID NO: 97380 - RNA, 19 nt, Homo sapiens
cugaugcagaaagaccgug

SEQ ID NO: 97381 - RNA, 22 nt, Homo sapiens
cacucuuauugcccacgcugga

SEQ ID NO: 97382 - RNA, 22 nt, Homo sapiens
gucaccaaaucagcugcuacua

SEQ ID NO: 97383 - RNA, 18 nt, Homo sapiens
agacaccuugacagggca

SEQ ID NO: 97384 - RNA, 19 nt, Homo sapiens
cuucaaucucuugcacuca

SEQ ID NO: 97385 - RNA, 14 nt, Homo sapiens
caggccccugccac

SEQ ID NO: 97386 - RNA, 22 nt, Homo sapiens
ucauaaugacuuaagcacacuu

SEQ ID NO: 97387 - RNA, 23 nt, Homo sapiens
ugccauccucccaaggggcccaa

SEQ ID NO: 97388 - RNA, 15 nt, Homo sapiens
gccugaagucacaca

SEQ ID NO: 97389 - RNA, 18 nt, Homo sapiens
ugaaugaugccaugagga

SEQ ID NO: 97390 - RNA, 20 nt, Homo sapiens
guacuggagaaaauggacgu

SEQ ID NO: 97391 - RNA, 21 nt, Homo sapiens
aaaauggacguguuaugacuc

SEQ ID NO: 97392 - RNA, 17 nt, Homo sapiens
cugggacuacaggugug

SEQ ID NO: 97393 - RNA, 21 nt, Homo sapiens
auaacacuguacugcaauaag

SEQ ID NO: 97394 - RNA, 17 nt, Homo sapiens
uguucaugcacacuugc

SEQ ID NO: 97395 - RNA, 15 nt, Homo sapiens
acuaagagucucuau

SEQ ID NO: 97396 - RNA, 16 nt, Homo sapiens
uauaauguaagcucua

SEQ ID NO: 97397 - RNA, 18 nt, Homo sapiens
agcaccuuagacaguccc

SEQ ID NO: 97398 - RNA, 19 nt, Homo sapiens
uuuuagacccuauugcugc

SEQ ID NO: 97399 - RNA, 16 nt, Homo sapiens
uauuuuuagacagagu

SEQ ID NO: 97400 - RNA, 22 nt, Homo sapiens
ucugauccuaguuccaccauca

SEQ ID NO: 97401 - RNA, 17 nt, Homo sapiens
gccacagggugagcacu

SEQ ID NO: 97402 - RNA, 19 nt, Homo sapiens
ggguuucuaaagcugccag

SEQ ID NO: 97403 - RNA, 18 nt, Homo sapiens
aaguacuucuccacccug

SEQ ID NO: 97404 - RNA, 19 nt, Homo sapiens
gaccagggauuuccaugau

SEQ ID NO: 97405 - RNA, 14 nt, Homo sapiens
uccagacccggcug

SEQ ID NO: 97406 - RNA, 21 nt, Homo sapiens
cuuuguuuguugucagcugaa

SEQ ID NO: 97407 - RNA, 21 nt, Homo sapiens
cuaaaguguauuuuuuuacua

SEQ ID NO: 97408 - RNA, 16 nt, Homo sapiens
auacaguaucucaggg

SEQ ID NO: 97409 - RNA, 17 nt, Homo sapiens
guuuccuggcacugcuu

SEQ ID NO: 97410 - RNA, 23 nt, Homo sapiens
uuuuauuuuuagacagagucuca

SEQ ID NO: 97411 - RNA, 18 nt, Homo sapiens
gcuugaccgugaggccag

SEQ ID NO: 97412 - RNA, 13 nt, Homo sapiens
cuagauacuguau

SEQ ID NO: 97413 - RNA, 16 nt, Homo sapiens
ucuacugaggugcuau

SEQ ID NO: 97414 - RNA, 19 nt, Homo sapiens
caaaaaaaggcggugagca

SEQ ID NO: 97415 - RNA, 19 nt, Homo sapiens
gaaugaaugucagugugac

SEQ ID NO: 97416 - RNA, 17 nt, Homo sapiens
auagccaaggccaaagg

SEQ ID NO: 97417 - RNA, 13 nt, Homo sapiens
ugaacagaacaaa

SEQ ID NO: 97418 - RNA, 22 nt, Homo sapiens
ggagggcuccagacacaugucc

SEQ ID NO: 97419 - RNA, 22 nt, Homo sapiens
ucagccauuccuguucccauga

SEQ ID NO: 97420 - RNA, 13 nt, Homo sapiens
gacccaugcugcc

SEQ ID NO: 97421 - RNA, 19 nt, Homo sapiens
caccucugcacaagcugca

SEQ ID NO: 97422 - RNA, 18 nt, Homo sapiens
uuuuuaaaaaacugcuga

SEQ ID NO: 97423 - RNA, 13 nt, Homo sapiens
acuuaagcacacu

SEQ ID NO: 97424 - RNA, 22 nt, Homo sapiens
ucccacuggaggcaugugauga

SEQ ID NO: 97425 - RNA, 16 nt, Homo sapiens
ccaauauuuaccagac

SEQ ID NO: 97426 - RNA, 19 nt, Homo sapiens
ccauuuagcacacugcuug

SEQ ID NO: 97427 - RNA, 16 nt, Homo sapiens
cuuauuuaaugaaaga

SEQ ID NO: 97428 - RNA, 19 nt, Homo sapiens
aaacugauuacaacugcua

SEQ ID NO: 97429 - RNA, 11 nt, Homo sapiens
caucuuccaag

SEQ ID NO: 97430 - RNA, 18 nt, Homo sapiens
aaaugggggugcauuuga

SEQ ID NO: 97431 - RNA, 20 nt, Homo sapiens
ucucacuauguugcccaggc

SEQ ID NO: 97432 - RNA, 18 nt, Homo sapiens
cuugaaaacacuguucuc

SEQ ID NO: 97433 - RNA, 19 nt, Homo sapiens
agguagaaauaucugaaaa

SEQ ID NO: 97434 - RNA, 15 nt, Homo sapiens
cauuuuuuaaaugca

SEQ ID NO: 97435 - RNA, 14 nt, Homo sapiens
ucucucuucuccac

SEQ ID NO: 97436 - RNA, 18 nt, Homo sapiens
agugccaaaaacaacaac

SEQ ID NO: 97437 - RNA, 18 nt, Homo sapiens
uguuaacauggacaugau

SEQ ID NO: 97438 - RNA, 14 nt, Homo sapiens
accagagcugccac

SEQ ID NO: 97439 - RNA, 20 nt, Homo sapiens
agccccaucccaaacccuuc

SEQ ID NO: 97440 - RNA, 22 nt, Homo sapiens
ugccuuauggaacacucugaga

SEQ ID NO: 97441 - RNA, 16 nt, Homo sapiens
aaugaggaaacugcac

SEQ ID NO: 97442 - RNA, 16 nt, Homo sapiens
cauguguguucaugca

SEQ ID NO: 97443 - RNA, 20 nt, Homo sapiens
ccaaaaaaugcuugcuucaa

SEQ ID NO: 97444 - RNA, 20 nt, Homo sapiens
caugccucucucaggccaaa

SEQ ID NO: 97445 - RNA, 12 nt, Homo sapiens
ugguaugaucac

SEQ ID NO: 97446 - RNA, 18 nt, Homo sapiens
cugccuguugggccagga

SEQ ID NO: 97447 - RNA, 23 nt, Homo sapiens
agaagcccuucuaccuuccugca

SEQ ID NO: 97448 - RNA, 19 nt, Homo sapiens
ccgugaggccagagacaca

SEQ ID NO: 97449 - RNA, 16 nt, Homo sapiens
ugggacacccugugau

SEQ ID NO: 97450 - RNA, 9 nt, Homo sapiens
augcacaaa

SEQ ID NO: 97451 - RNA, 18 nt, Homo sapiens
uagcagggaaacagcuaa

SEQ ID NO: 97452 - RNA, 18 nt, Homo sapiens
agaauugaaaaaccauuu

SEQ ID NO: 97453 - RNA, 14 nt, Homo sapiens
ucuacagaggccau

SEQ ID NO: 97454 - RNA, 14 nt, Homo sapiens
uagaguugauacua

SEQ ID NO: 97455 - RNA, 22 nt, Homo sapiens
uucucuugagaggguggaauau

SEQ ID NO: 97456 - RNA, 23 nt, Homo sapiens
uaaguacuauguaucaaugagua

SEQ ID NO: 97457 - RNA, 19 nt, Homo sapiens
guugauucagcucugcaag

SEQ ID NO: 97458 - RNA, 21 nt, Homo sapiens
cuuccaauuuacauacucugc

SEQ ID NO: 97459 - RNA, 18 nt, Homo sapiens
cuugaccgugaggccaga

SEQ ID NO: 97460 - RNA, 16 nt, Homo sapiens
gcccaaauucuuucag

SEQ ID NO: 97461 - RNA, 15 nt, Homo sapiens
ugaggcugggcuccc

SEQ ID NO: 97462 - RNA, 20 nt, Homo sapiens
aguggcuaccuacauacaau

SEQ ID NO: 97463 - RNA, 16 nt, Homo sapiens
acuuuaccugaaacaa

SEQ ID NO: 97464 - RNA, 15 nt, Homo sapiens
acacuguacugcaau

SEQ ID NO: 97465 - RNA, 14 nt, Homo sapiens
uuuuccugccaggc

SEQ ID NO: 97466 - RNA, 21 nt, Homo sapiens
guacauggaauaacauguaau

SEQ ID NO: 97467 - RNA, 17 nt, Homo sapiens
ugaauuuuggcuguguc

SEQ ID NO: 97468 - RNA, 20 nt, Homo sapiens
uucagcuccagcucaccagc

SEQ ID NO: 97469 - RNA, 15 nt, Homo sapiens
uaaauucaugcugcu

SEQ ID NO: 97470 - RNA, 15 nt, Homo sapiens
gaagcauuuacuuug

SEQ ID NO: 97471 - RNA, 18 nt, Homo sapiens
cauuccuguucccaugag

SEQ ID NO: 97472 - RNA, 20 nt, Homo sapiens
cacaaaauguaggguuauaa

SEQ ID NO: 97473 - RNA, 19 nt, Homo sapiens
ccuuucaauaggaaaaacu

SEQ ID NO: 97474 - RNA, 18 nt, Homo sapiens
aucuuccaaggguacuaa

SEQ ID NO: 97475 - RNA, 22 nt, Homo sapiens
gacgccaucccagccccaauga

SEQ ID NO: 97476 - RNA, 18 nt, Homo sapiens
gaccucugccugaaguca

SEQ ID NO: 97477 - RNA, 16 nt, Homo sapiens
aaucucuaguugucac

SEQ ID NO: 97478 - RNA, 21 nt, Homo sapiens
cccuucauccuucuggaauaa

SEQ ID NO: 97479 - RNA, 17 nt, Homo sapiens
uagauguauauauuucc

SEQ ID NO: 97480 - RNA, 12 nt, Homo sapiens
caccccacugug

SEQ ID NO: 97481 - RNA, 22 nt, Homo sapiens
gaaaaucgugacaacacuugug

SEQ ID NO: 97482 - RNA, 24 nt, Homo sapiens
acaaagcgugguggacaugcacag

SEQ ID NO: 97483 - RNA, 20 nt, Homo sapiens
gaaugaaugucagugugacu

SEQ ID NO: 97484 - RNA, 22 nt, Homo sapiens
ucuccauguuugauguaucuga

SEQ ID NO: 97485 - RNA, 19 nt, Homo sapiens
uggggaccagagcugccac

SEQ ID NO: 97486 - RNA, 21 nt, Homo sapiens
cugcacuccaugagugcagcu

SEQ ID NO: 97487 - RNA, 18 nt, Homo sapiens
aaacucuccucugcugcu

SEQ ID NO: 97488 - RNA, 13 nt, Homo sapiens
guacucuccugga

SEQ ID NO: 97489 - RNA, 21 nt, Homo sapiens
auauguuuuaagaggcagggu

SEQ ID NO: 97490 - RNA, 23 nt, Homo sapiens
uucugacccaugcugcccuguga

SEQ ID NO: 97491 - RNA, 21 nt, Homo sapiens
ggaagcacaugccucucucag

SEQ ID NO: 97492 - RNA, 18 nt, Homo sapiens
agccuaggugacagagug

SEQ ID NO: 97493 - RNA, 15 nt, Homo sapiens
uccucccaccucagc

SEQ ID NO: 97494 - RNA, 15 nt, Homo sapiens
ggaccagagcugcca

SEQ ID NO: 97495 - RNA, 22 nt, Homo sapiens
ugaacuggguacuuguggacac

SEQ ID NO: 97496 - RNA, 14 nt, Homo sapiens
gauucauaaugacu

SEQ ID NO: 97497 - RNA, 17 nt, Homo sapiens
aaagcugcugacagugu

SEQ ID NO: 97498 - RNA, 23 nt, Homo sapiens
gugagcaauccugcaagaacaag

SEQ ID NO: 97499 - RNA, 22 nt, Homo sapiens
uaugcaugaaguaauaugcaca

SEQ ID NO: 97500 - RNA, 15 nt, Homo sapiens
aaaccgaauuuucac

SEQ ID NO: 97501 - RNA, 18 nt, Homo sapiens
ccaaaggaagcacaugcc

SEQ ID NO: 97502 - RNA, 16 nt, Homo sapiens
ggccuccugugugugc

SEQ ID NO: 97503 - RNA, 21 nt, Homo sapiens
ucaaccuccugggcuaaguga

SEQ ID NO: 97504 - RNA, 13 nt, Homo sapiens
agugguuacccag

SEQ ID NO: 97505 - RNA, 17 nt, Homo sapiens
uccugggcuaagugauc

SEQ ID NO: 97506 - RNA, 18 nt, Homo sapiens
gccaggcaugguggccca

SEQ ID NO: 97507 - RNA, 16 nt, Homo sapiens
augggggugcauuuga

SEQ ID NO: 97508 - RNA, 23 nt, Homo sapiens
aagugggggaguggccacagaaa

SEQ ID NO: 97509 - RNA, 20 nt, Homo sapiens
aaagacuguacaaaguagaa

SEQ ID NO: 97510 - RNA, 22 nt, Homo sapiens
gaggcagccccauucugccugc

SEQ ID NO: 97511 - RNA, 17 nt, Homo sapiens
aauucucauuugucaca

SEQ ID NO: 97512 - RNA, 11 nt, Homo sapiens
cgcgugcacac

SEQ ID NO: 97513 - RNA, 23 nt, Homo sapiens
augcuugcuucaaccccaugaga

SEQ ID NO: 97514 - RNA, 19 nt, Homo sapiens
aaaagcaucuaugugagac

SEQ ID NO: 97515 - RNA, 13 nt, Homo sapiens
acugcagcuuugu

SEQ ID NO: 97516 - RNA, 18 nt, Homo sapiens
uggcaugggaaugaaugu

SEQ ID NO: 97517 - RNA, 14 nt, Homo sapiens
caucccugaaggcc

SEQ ID NO: 97518 - RNA, 14 nt, Homo sapiens
ggcagcucagagag

SEQ ID NO: 97519 - RNA, 16 nt, Homo sapiens
uuggaauuuugugccc

SEQ ID NO: 97520 - RNA, 23 nt, Homo sapiens
aguacacuguuucaaacuuuacu

SEQ ID NO: 97521 - RNA, 14 nt, Homo sapiens
gucagcacuaccuc

SEQ ID NO: 97522 - RNA, 23 nt, Homo sapiens
agcggcuggcagcccaccccuca

SEQ ID NO: 97523 - RNA, 17 nt, Homo sapiens
ugccucugccucugaca

SEQ ID NO: 97524 - RNA, 15 nt, Homo sapiens
caaacucaccugccc

SEQ ID NO: 97525 - RNA, 19 nt, Homo sapiens
caaggcugggggaagaagc

SEQ ID NO: 97526 - RNA, 15 nt, Homo sapiens
ccugccaggaagcca

SEQ ID NO: 97527 - RNA, 22 nt, Homo sapiens
gaggcugggcucccuucccacc

SEQ ID NO: 97528 - RNA, 15 nt, Homo sapiens
ugguugagguuucaa

SEQ ID NO: 97529 - RNA, 15 nt, Homo sapiens
acaggaucaaaguug

SEQ ID NO: 97530 - RNA, 21 nt, Homo sapiens
acgccacugcacuauagccua

SEQ ID NO: 97531 - RNA, 17 nt, Homo sapiens
uuccuguucccaugaga

SEQ ID NO: 97532 - RNA, 19 nt, Homo sapiens
uccaaaguacacuguuuca

SEQ ID NO: 97533 - RNA, 16 nt, Homo sapiens
gguucuacccaggugc

SEQ ID NO: 97534 - RNA, 23 nt, Homo sapiens
guaauuuuuuuaucgucacugcu

SEQ ID NO: 97535 - RNA, 16 nt, Homo sapiens
gcagccacauuccuga

SEQ ID NO: 97536 - RNA, 16 nt, Homo sapiens
auacagauagauauau

SEQ ID NO: 97537 - RNA, 16 nt, Homo sapiens
auuuuuagacagaguc

SEQ ID NO: 97538 - RNA, 16 nt, Homo sapiens
uccccaagcaguguga

SEQ ID NO: 97539 - RNA, 20 nt, Homo sapiens
uuuccuucauucaacccacc

SEQ ID NO: 97540 - RNA, 16 nt, Homo sapiens
cagagagcagugugga

SEQ ID NO: 97541 - RNA, 21 nt, Homo sapiens
ggguguggcgcagcauauuca

SEQ ID NO: 97542 - RNA, 15 nt, Homo sapiens
ccccuguucuggcag

SEQ ID NO: 97543 - RNA, 20 nt, Homo sapiens
uugaguccagaaguuugaga

SEQ ID NO: 97544 - RNA, 17 nt, Homo sapiens
uuccacuuugauaccau

SEQ ID NO: 97545 - RNA, 16 nt, Homo sapiens
auucucauuugucaca

SEQ ID NO: 97546 - RNA, 19 nt, Homo sapiens
uggacuuccacugccaucc

SEQ ID NO: 97547 - RNA, 13 nt, Homo sapiens
ucagggucccugg

SEQ ID NO: 97548 - RNA, 17 nt, Homo sapiens
gucuugcaauggcagcc

SEQ ID NO: 97549 - RNA, 16 nt, Homo sapiens
ucacggcucacugcag

SEQ ID NO: 97550 - RNA, 13 nt, Homo sapiens
cuuauauacagac

SEQ ID NO: 97551 - RNA, 20 nt, Homo sapiens
aaagcuuaccaaggggaaug

SEQ ID NO: 97552 - RNA, 18 nt, Homo sapiens
ccaacgucugugccauuu

SEQ ID NO: 97553 - RNA, 20 nt, Homo sapiens
ccaguaaaugggggugcauu

SEQ ID NO: 97554 - RNA, 21 nt, Homo sapiens
auuguuagucucuugauucau

SEQ ID NO: 97555 - RNA, 17 nt, Homo sapiens
cuuucuagccagaggag

SEQ ID NO: 97556 - RNA, 20 nt, Homo sapiens
ccucuuucccucccuuccuc

SEQ ID NO: 97557 - RNA, 22 nt, Homo sapiens
gcacacugcuugugaaaggaaa

SEQ ID NO: 97558 - RNA, 16 nt, Homo sapiens
uacaggugugagucac

SEQ ID NO: 97559 - RNA, 19 nt, Homo sapiens
cccacgcuggagugcagug

SEQ ID NO: 97560 - RNA, 19 nt, Homo sapiens
cauaaugacuuaagcacac

SEQ ID NO: 97561 - RNA, 13 nt, Homo sapiens
uauaagaaauaca

SEQ ID NO: 97562 - RNA, 17 nt, Homo sapiens
auaaugacuuaagcaca

SEQ ID NO: 97563 - RNA, 15 nt, Homo sapiens
ccaaaucagcugcua

SEQ ID NO: 97564 - RNA, 16 nt, Homo sapiens
cuugguucccauuugc

SEQ ID NO: 97565 - RNA, 22 nt, Homo sapiens
cacccuccuuucaccacaugug

SEQ ID NO: 97566 - RNA, 20 nt, Homo sapiens
agacagaguuuucacucuua

SEQ ID NO: 97567 - RNA, 14 nt, Homo sapiens
ugcacgugugugca

SEQ ID NO: 97568 - RNA, 18 nt, Homo sapiens
gaggacacuaaccacgcu

SEQ ID NO: 97569 - RNA, 19 nt, Homo sapiens
agaagacacugaugggcaa

SEQ ID NO: 97570 - RNA, 20 nt, Homo sapiens
acugcaccgggccacagaga

SEQ ID NO: 97571 - RNA, 20 nt, Homo sapiens
gcucaggugucccugcacuu

SEQ ID NO: 97572 - RNA, 15 nt, Homo sapiens
cugaaugguuuucaa

SEQ ID NO: 97573 - RNA, 14 nt, Homo sapiens
caccaccaaccacu

SEQ ID NO: 97574 - RNA, 17 nt, Homo sapiens
agaaaaaggaugcacag

SEQ ID NO: 97575 - RNA, 11 nt, Homo sapiens
aaagcugccag

SEQ ID NO: 97576 - RNA, 16 nt, Homo sapiens
ggcucucaggccagcu

SEQ ID NO: 97577 - RNA, 17 nt, Homo sapiens
gaaaguacguuaugaua

SEQ ID NO: 97578 - RNA, 14 nt, Homo sapiens
aauacaguaucuca

SEQ ID NO: 97579 - RNA, 20 nt, Homo sapiens
augugagaccauuuagcaca

SEQ ID NO: 97580 - RNA, 16 nt, Homo sapiens
gaauccagacccggcu

SEQ ID NO: 97581 - RNA, 19 nt, Homo sapiens
aaacuacccucuggagaua

SEQ ID NO: 97582 - RNA, 22 nt, Homo sapiens
agugaagcugggagaaccaaaa

SEQ ID NO: 97583 - RNA, 16 nt, Homo sapiens
ggauguucugggacac

SEQ ID NO: 97584 - RNA, 14 nt, Homo sapiens
ccuggccucaagug

SEQ ID NO: 97585 - RNA, 16 nt, Homo sapiens
agcauacguacacauu

SEQ ID NO: 97586 - RNA, 13 nt, Homo sapiens
ugcuucagccucc

SEQ ID NO: 97587 - RNA, 13 nt, Homo sapiens
ccaaugaugguca

SEQ ID NO: 97588 - RNA, 19 nt, Homo sapiens
gccagcuuaucucaggggu

SEQ ID NO: 97589 - RNA, 14 nt, Homo sapiens
aagagaaaugagcu

SEQ ID NO: 97590 - RNA, 16 nt, Homo sapiens
cugcaucaagauguga

SEQ ID NO: 97591 - RNA, 18 nt, Homo sapiens
ccaaggauggaccacaca

SEQ ID NO: 97592 - RNA, 19 nt, Homo sapiens
accauuuugggguacccac

SEQ ID NO: 97593 - RNA, 13 nt, Homo sapiens
gaugauaaaacac

SEQ ID NO: 97594 - RNA, 20 nt, Homo sapiens
gcagccucacaguccuuacc

SEQ ID NO: 97595 - RNA, 20 nt, Homo sapiens
uugaaagaucaaaagguuaa

SEQ ID NO: 97596 - RNA, 16 nt, Homo sapiens
cauccacugugccaug

SEQ ID NO: 97597 - RNA, 21 nt, Homo sapiens
ccaauauuuaccagaccacaa

SEQ ID NO: 97598 - RNA, 13 nt, Homo sapiens
uucugcucacaua

SEQ ID NO: 97599 - RNA, 14 nt, Homo sapiens
uuaagagaaaugag

SEQ ID NO: 97600 - RNA, 21 nt, Homo sapiens
ugugugcacguacacacacau

SEQ ID NO: 97601 - RNA, 16 nt, Homo sapiens
ugggcagagcagagac

SEQ ID NO: 97602 - RNA, 17 nt, Homo sapiens
aagcaugugagacuggu

SEQ ID NO: 97603 - RNA, 13 nt, Homo sapiens
cugugauggggcc

SEQ ID NO: 97604 - RNA, 14 nt, Homo sapiens
aucacaagucagca

SEQ ID NO: 97605 - RNA, 12 nt, Homo sapiens
cuaugcauuuga

SEQ ID NO: 97606 - RNA, 22 nt, Homo sapiens
ccaggugcuaggaacacuccuu

SEQ ID NO: 97607 - RNA, 14 nt, Homo sapiens
gagcccuuaugaca

SEQ ID NO: 97608 - RNA, 20 nt, Homo sapiens
aauuucccaaagcagugcau

SEQ ID NO: 97609 - RNA, 15 nt, Homo sapiens
acacuaaaaggugac

SEQ ID NO: 97610 - RNA, 21 nt, Homo sapiens
ugggguacccacugcucuggu

SEQ ID NO: 97611 - RNA, 19 nt, Homo sapiens
cagcuuguaaauagcucag

SEQ ID NO: 97612 - RNA, 19 nt, Homo sapiens
uacuacaguccucccaucu

SEQ ID NO: 97613 - RNA, 23 nt, Homo sapiens
cccaaacccauuuuagagacaga

SEQ ID NO: 97614 - RNA, 23 nt, Homo sapiens
cagcuuuguuuguugucagcuga

SEQ ID NO: 97615 - RNA, 23 nt, Homo sapiens
ugaaaggaaagaggcucuggcua

SEQ ID NO: 97616 - RNA, 22 nt, Homo sapiens
uaggccuggggacggcuuuuac

SEQ ID NO: 97617 - RNA, 13 nt, Homo sapiens
ccaggcugggcug

SEQ ID NO: 97618 - RNA, 18 nt, Homo sapiens
uguacgucugacaggcaa

SEQ ID NO: 97619 - RNA, 23 nt, Homo sapiens
accucaggccugggggcugggca

SEQ ID NO: 97620 - RNA, 9 nt, Homo sapiens
ucuuuccau

SEQ ID NO: 97621 - RNA, 15 nt, Homo sapiens
gguuuuacugcagcu

SEQ ID NO: 97622 - RNA, 12 nt, Homo sapiens
cugaggugggag

SEQ ID NO: 97623 - RNA, 16 nt, Homo sapiens
uucaguguacauggaa

SEQ ID NO: 97624 - RNA, 18 nt, Homo sapiens
gugcacguacacacacau

SEQ ID NO: 97625 - RNA, 18 nt, Homo sapiens
cuccaagaccuucuccuu

SEQ ID NO: 97626 - RNA, 16 nt, Homo sapiens
uugcugucccuuuucc

SEQ ID NO: 97627 - RNA, 17 nt, Homo sapiens
acucagaagacacugau

SEQ ID NO: 97628 - RNA, 22 nt, Homo sapiens
gaaaagaggggaagagacuugg

SEQ ID NO: 97629 - RNA, 14 nt, Homo sapiens
agaguaacccuguc

SEQ ID NO: 97630 - RNA, 16 nt, Homo sapiens
ugaaaauucuugauaa

SEQ ID NO: 97631 - RNA, 23 nt, Homo sapiens
acccuggugaccagcaccaucuc

SEQ ID NO: 97632 - RNA, 16 nt, Homo sapiens
ugguggacaugcacag

SEQ ID NO: 97633 - RNA, 13 nt, Homo sapiens
aaacucaccugcc

SEQ ID NO: 97634 - RNA, 18 nt, Homo sapiens
accacaucuugcucugcu

SEQ ID NO: 97635 - RNA, 13 nt, Homo sapiens
uguggacacagcu

SEQ ID NO: 97636 - RNA, 21 nt, Homo sapiens
acauacucugcuuagaauuug

SEQ ID NO: 97637 - RNA, 22 nt, Homo sapiens
ucaacaucuuggucagauuuga

SEQ ID NO: 97638 - RNA, 12 nt, Homo sapiens
cccggcccagug

SEQ ID NO: 97639 - RNA, 17 nt, Homo sapiens
ccaccuuggcucaaguc

SEQ ID NO: 97640 - RNA, 16 nt, Homo sapiens
aaagaagauucugugg

SEQ ID NO: 97641 - RNA, 23 nt, Homo sapiens
aaauggacguguuaugacuccag

SEQ ID NO: 97642 - RNA, 18 nt, Homo sapiens
cucuggcuaaauucaugc

SEQ ID NO: 97643 - RNA, 19 nt, Homo sapiens
aaagacuguacaaaguaga

SEQ ID NO: 97644 - RNA, 20 nt, Homo sapiens
ugcccaggcuggcgugcagu

SEQ ID NO: 97645 - RNA, 18 nt, Homo sapiens
ucuggagguacgaaaaga

SEQ ID NO: 97646 - RNA, 12 nt, Homo sapiens
agcuuaucucag

SEQ ID NO: 97647 - RNA, 13 nt, Homo sapiens
gcggcuggcagcc

SEQ ID NO: 97648 - RNA, 20 nt, Homo sapiens
auaugcuuauacacuuacac

SEQ ID NO: 97649 - RNA, 16 nt, Homo sapiens
aaauucaugcugcuua

SEQ ID NO: 97650 - RNA, 16 nt, Homo sapiens
uaacagaaauguacag

SEQ ID NO: 97651 - RNA, 19 nt, Homo sapiens
cuuuucgcaggauucuucc

SEQ ID NO: 97652 - RNA, 13 nt, Homo sapiens
cccaucucuacaa

SEQ ID NO: 97653 - RNA, 19 nt, Homo sapiens
agugauccucccaccucag

SEQ ID NO: 97654 - RNA, 18 nt, Homo sapiens
uuucuaugacacaugcaa

SEQ ID NO: 97655 - RNA, 19 nt, Homo sapiens
gugugggggaagcaccaua

SEQ ID NO: 97656 - RNA, 17 nt, Homo sapiens
ugaauuguaaggaauga

SEQ ID NO: 97657 - RNA, 18 nt, Homo sapiens
aauacaccacuacauucu

SEQ ID NO: 97658 - RNA, 19 nt, Homo sapiens
ggaagccacagggugagca

SEQ ID NO: 97659 - RNA, 16 nt, Homo sapiens
uccaaaugcccagcuu

SEQ ID NO: 97660 - RNA, 17 nt, Homo sapiens
ccucuuagaaaaaccac

SEQ ID NO: 97661 - RNA, 14 nt, Homo sapiens
uguggcgcagcaua

SEQ ID NO: 97662 - RNA, 21 nt, Homo sapiens
cuucaaucucuugcacucaaa

SEQ ID NO: 97663 - RNA, 17 nt, Homo sapiens
uguggaugauaaaacac

SEQ ID NO: 97664 - RNA, 23 nt, Homo sapiens
ucuaaugaaaccugugucucuga

SEQ ID NO: 97665 - RNA, 23 nt, Homo sapiens
aauucucuuuccuguagucccau

SEQ ID NO: 97666 - RNA, 15 nt, Homo sapiens
cuuuccuucauucaa

SEQ ID NO: 97667 - RNA, 15 nt, Homo sapiens
agguacgaaaagagg

SEQ ID NO: 97668 - RNA, 11 nt, Homo sapiens
cucagugccac

SEQ ID NO: 97669 - RNA, 17 nt, Homo sapiens
cgugcacacaccagagc

SEQ ID NO: 97670 - RNA, 17 nt, Homo sapiens
aaccaccaccaaccacu

SEQ ID NO: 97671 - RNA, 22 nt, Homo sapiens
uaaaauaaauuuguaugcucaa

SEQ ID NO: 97672 - RNA, 16 nt, Homo sapiens
ugaauaauacaguauc

SEQ ID NO: 97673 - RNA, 15 nt, Homo sapiens
aacugaccaguuguu

SEQ ID NO: 97674 - RNA, 20 nt, Homo sapiens
acaagcgugagccacugcac

SEQ ID NO: 97675 - RNA, 19 nt, Homo sapiens
auaauguuaacauggacau

SEQ ID NO: 97676 - RNA, 13 nt, Homo sapiens
agauaaaugugcu

SEQ ID NO: 97677 - RNA, 18 nt, Homo sapiens
uugcaggaccucagguga

SEQ ID NO: 97678 - RNA, 15 nt, Homo sapiens
uuuuaaaugcaccug

SEQ ID NO: 97679 - RNA, 14 nt, Homo sapiens
uuccccacuugaga

SEQ ID NO: 97680 - RNA, 22 nt, Homo sapiens
cagugcccacaggaucagucug

SEQ ID NO: 97681 - RNA, 19 nt, Homo sapiens
acaucuugcucugcugaca

SEQ ID NO: 97682 - RNA, 14 nt, Homo sapiens
cuuuccuucauuca

SEQ ID NO: 97683 - RNA, 21 nt, Homo sapiens
gccguacucuuuggggcagcu

SEQ ID NO: 97684 - RNA, 15 nt, Homo sapiens
caaaguagaagucuu

SEQ ID NO: 97685 - RNA, 16 nt, Homo sapiens
cuagcauggcugccaa

SEQ ID NO: 97686 - RNA, 14 nt, Homo sapiens
auauauaagccaaa

SEQ ID NO: 97687 - RNA, 18 nt, Homo sapiens
cacacuugggagcaaaag

SEQ ID NO: 97688 - RNA, 17 nt, Homo sapiens
uacaggugugagucacc

SEQ ID NO: 97689 - RNA, 16 nt, Homo sapiens
gucccauugauguacu

SEQ ID NO: 97690 - RNA, 14 nt, Homo sapiens
uaacagaaauguac

SEQ ID NO: 97691 - RNA, 21 nt, Homo sapiens
aaugacuuacuguacaugaaa

SEQ ID NO: 97692 - RNA, 20 nt, Homo sapiens
uugcaggaccucaggugaga

SEQ ID NO: 97693 - RNA, 16 nt, Homo sapiens
ucuaugacacaugcaa

SEQ ID NO: 97694 - RNA, 19 nt, Homo sapiens
aauaacacuguacugcaau

SEQ ID NO: 97695 - RNA, 16 nt, Homo sapiens
aaaagcaucuauguga

SEQ ID NO: 97696 - RNA, 18 nt, Homo sapiens
cacguacacacacauaca

SEQ ID NO: 97697 - RNA, 20 nt, Homo sapiens
augccaugaggaacaaggca

SEQ ID NO: 97698 - RNA, 16 nt, Homo sapiens
ugcagccucaaccucc

SEQ ID NO: 97699 - RNA, 15 nt, Homo sapiens
acuggaagcacagcu

SEQ ID NO: 97700 - RNA, 16 nt, Homo sapiens
ucauccacugugccau

SEQ ID NO: 97701 - RNA, 12 nt, Homo sapiens
cuuugagugaag

SEQ ID NO: 97702 - RNA, 20 nt, Homo sapiens
cagggcacaccgggcacuca

SEQ ID NO: 97703 - RNA, 20 nt, Homo sapiens
aagcugggagaaccaaaaag

SEQ ID NO: 97704 - RNA, 17 nt, Homo sapiens
cucuuauccaacaucaa

SEQ ID NO: 97705 - RNA, 16 nt, Homo sapiens
caaggcaaggcuguca

SEQ ID NO: 97706 - RNA, 14 nt, Homo sapiens
cuacagaggccaug

SEQ ID NO: 97707 - RNA, 18 nt, Homo sapiens
gugauccacccaccucag

SEQ ID NO: 97708 - RNA, 13 nt, Homo sapiens
caccucugcacaa

SEQ ID NO: 97709 - RNA, 14 nt, Homo sapiens
ugggacuacaggca

SEQ ID NO: 97710 - RNA, 14 nt, Homo sapiens
cugaugcagaaaga

SEQ ID NO: 97711 - RNA, 22 nt, Homo sapiens
acacugugcugagucugaaggc

SEQ ID NO: 97712 - RNA, 17 nt, Homo sapiens
ccacauuccugaugcuu

SEQ ID NO: 97713 - RNA, 13 nt, Homo sapiens
auuuauucugcuc

SEQ ID NO: 97714 - RNA, 20 nt, Homo sapiens
cuggcacugcuuccagugag

SEQ ID NO: 97715 - RNA, 21 nt, Homo sapiens
uucgaauccagagagcagugu

SEQ ID NO: 97716 - RNA, 15 nt, Homo sapiens
gccugggaucccuca

SEQ ID NO: 97717 - RNA, 17 nt, Homo sapiens
ugaaguaauaugcacac

SEQ ID NO: 97718 - RNA, 17 nt, Homo sapiens
ucaaaauaaaaaugagg

SEQ ID NO: 97719 - RNA, 15 nt, Homo sapiens
gcuucaaccccauga

SEQ ID NO: 97720 - RNA, 19 nt, Homo sapiens
ccccuucauuuggcauucc

SEQ ID NO: 97721 - RNA, 15 nt, Homo sapiens
aaaaaucccuuaccu

SEQ ID NO: 97722 - RNA, 21 nt, Homo sapiens
cuccacuuucuagccagagga

SEQ ID NO: 97723 - RNA, 21 nt, Homo sapiens
ccugcccuuaccugccaggaa

SEQ ID NO: 97724 - RNA, 15 nt, Homo sapiens
ggugaccagcaccau

SEQ ID NO: 97725 - RNA, 20 nt, Homo sapiens
uauggcuuuugugcauuauc

SEQ ID NO: 97726 - RNA, 14 nt, Homo sapiens
gucucauacucacc

SEQ ID NO: 97727 - RNA, 17 nt, Homo sapiens
cugaguacguugugcau

SEQ ID NO: 97728 - RNA, 11 nt, Homo sapiens
gguggggaccu

SEQ ID NO: 97729 - RNA, 10 nt, Homo sapiens
ccauggacuu

SEQ ID NO: 97730 - RNA, 23 nt, Homo sapiens
ugaggaugaaaaaauaacacugu

SEQ ID NO: 97731 - RNA, 13 nt, Homo sapiens
ccuuagacagucc

SEQ ID NO: 97732 - RNA, 20 nt, Homo sapiens
ccuagcacuuugggaggcca

SEQ ID NO: 97733 - RNA, 20 nt, Homo sapiens
uggucguuuucaacagaauu

SEQ ID NO: 97734 - RNA, 14 nt, Homo sapiens
gcugggagaaccaa

SEQ ID NO: 97735 - RNA, 13 nt, Homo sapiens
aaagcugcugaca

SEQ ID NO: 97736 - RNA, 18 nt, Homo sapiens
acauggaauaacauguaa

SEQ ID NO: 97737 - RNA, 17 nt, Homo sapiens
gucuaggaaucaugugc

SEQ ID NO: 97738 - RNA, 19 nt, Homo sapiens
auucauaaugacuuaagca

SEQ ID NO: 97739 - RNA, 23 nt, Homo sapiens
uucuaccuuccugcaacaccuug

SEQ ID NO: 97740 - RNA, 13 nt, Homo sapiens
uaaguacuaugua

SEQ ID NO: 97741 - RNA, 17 nt, Homo sapiens
acacaguauuacuucug

SEQ ID NO: 97742 - RNA, 22 nt, Homo sapiens
caugugccagguuuuuggucug

SEQ ID NO: 97743 - RNA, 23 nt, Homo sapiens
uucaauauccccaagcaguguga

SEQ ID NO: 97744 - RNA, 20 nt, Homo sapiens
aguagcugggacuacaggca

SEQ ID NO: 97745 - RNA, 22 nt, Homo sapiens
uuuggcauuccccacuugagaa

SEQ ID NO: 97746 - RNA, 15 nt, Homo sapiens
uaucagaauucucag

SEQ ID NO: 97747 - RNA, 19 nt, Homo sapiens
cacagcugggguggggacc

SEQ ID NO: 97748 - RNA, 14 nt, Homo sapiens
acgucugacaggca

SEQ ID NO: 97749 - RNA, 22 nt, Homo sapiens
guuuuaagaggcagggucucac

SEQ ID NO: 97750 - RNA, 18 nt, Homo sapiens
gaccuugaaugaugccau

SEQ ID NO: 97751 - RNA, 15 nt, Homo sapiens
ucuacugaggugcua

SEQ ID NO: 97752 - RNA, 17 nt, Homo sapiens
ucuagcauggcugccaa

SEQ ID NO: 97753 - RNA, 23 nt, Homo sapiens
ucuuauauugccauuucuuccac

SEQ ID NO: 97754 - RNA, 15 nt, Homo sapiens
cagugcccccuggug

SEQ ID NO: 97755 - RNA, 16 nt, Homo sapiens
gaguucaucuugaauu

SEQ ID NO: 97756 - RNA, 17 nt, Homo sapiens
gccagcuuaucucaggg

SEQ ID NO: 97757 - RNA, 15 nt, Homo sapiens
cuaacuuuccuucau

SEQ ID NO: 97758 - RNA, 21 nt, Homo sapiens
acacagcucuucuccaggcug

SEQ ID NO: 97759 - RNA, 22 nt, Homo sapiens
ggcugguuagagguucccuuug

SEQ ID NO: 97760 - RNA, 23 nt, Homo sapiens
ugguggcagaguggauucuugaa

SEQ ID NO: 97761 - RNA, 17 nt, Homo sapiens
cucacauuuauucugcu

SEQ ID NO: 97762 - RNA, 15 nt, Homo sapiens
gauguucugggacac

SEQ ID NO: 97763 - RNA, 15 nt, Homo sapiens
caaaagauucuacaa

SEQ ID NO: 97764 - RNA, 20 nt, Homo sapiens
gugagcaauccugcaagaac

SEQ ID NO: 97765 - RNA, 14 nt, Homo sapiens
acacgcgugcacac

SEQ ID NO: 97766 - RNA, 15 nt, Homo sapiens
acagcuaacauggaa

SEQ ID NO: 97767 - RNA, 18 nt, Homo sapiens
aagaccuucuccuucacc

SEQ ID NO: 97768 - RNA, 13 nt, Homo sapiens
cagcuuaucucag

SEQ ID NO: 97769 - RNA, 22 nt, Homo sapiens
acucuauuuuuguaaaaaggga

SEQ ID NO: 97770 - RNA, 12 nt, Homo sapiens
acugggggcaac

SEQ ID NO: 97771 - RNA, 17 nt, Homo sapiens
auucgcugugucagcau

SEQ ID NO: 97772 - RNA, 18 nt, Homo sapiens
cugccauuucugagauca

SEQ ID NO: 97773 - RNA, 18 nt, Homo sapiens
auuuuuuugagacagagu

SEQ ID NO: 97774 - RNA, 20 nt, Homo sapiens
ugaauaauacaguaucucag

SEQ ID NO: 97775 - RNA, 22 nt, Homo sapiens
cauuuuggauucuuauggacaa

SEQ ID NO: 97776 - RNA, 19 nt, Homo sapiens
cauggacaaggaugaucua

SEQ ID NO: 97777 - RNA, 19 nt, Homo sapiens
cuuucugcuaucaaagagg

SEQ ID NO: 97778 - RNA, 19 nt, Homo sapiens
cacauuuauucugcucaca

SEQ ID NO: 97779 - RNA, 13 nt, Homo sapiens
uugaacuuugacc

SEQ ID NO: 97780 - RNA, 21 nt, Homo sapiens
uucucagaaucucaaauaacu

SEQ ID NO: 97781 - RNA, 22 nt, Homo sapiens
uucaaccaguuugaaccaagaa

SEQ ID NO: 97782 - RNA, 18 nt, Homo sapiens
ggagauaaaauaaaaaga

SEQ ID NO: 97783 - RNA, 15 nt, Homo sapiens
uucucauuugucaca

SEQ ID NO: 97784 - RNA, 15 nt, Homo sapiens
auugauaagaaccuu

SEQ ID NO: 97785 - RNA, 20 nt, Homo sapiens
aguccucagugguuggcaau

SEQ ID NO: 97786 - RNA, 19 nt, Homo sapiens
cauuaucuagauacuguau

SEQ ID NO: 97787 - RNA, 23 nt, Homo sapiens
accaugauuaaccacuucagcug

SEQ ID NO: 97788 - RNA, 17 nt, Homo sapiens
ucagaaauguguuauca

SEQ ID NO: 97789 - RNA, 21 nt, Homo sapiens
uagagacaggguuuugccaug

SEQ ID NO: 97790 - RNA, 13 nt, Homo sapiens
caacucaucuuag

SEQ ID NO: 97791 - RNA, 22 nt, Homo sapiens
aggucagagccugcaguuauua

SEQ ID NO: 97792 - RNA, 13 nt, Homo sapiens
gauuaaacuuaau

SEQ ID NO: 97793 - RNA, 23 nt, Homo sapiens
gugaaccaccacacccagcccac

SEQ ID NO: 97794 - RNA, 13 nt, Homo sapiens
aguugaagacaga

SEQ ID NO: 97795 - RNA, 22 nt, Homo sapiens
guagagacaggguuuugccaug

SEQ ID NO: 97796 - RNA, 15 nt, Homo sapiens
acugccaugccagcu

SEQ ID NO: 97797 - RNA, 13 nt, Homo sapiens
ugaaaaaauaaca

SEQ ID NO: 97798 - RNA, 20 nt, Homo sapiens
ugguuaucuaauauguaaca

SEQ ID NO: 97799 - RNA, 17 nt, Homo sapiens
uauuuaccagaccacaa

SEQ ID NO: 97800 - RNA, 14 nt, Homo sapiens
guuacugucuucag

SEQ ID NO: 97801 - RNA, 16 nt, Homo sapiens
cugccugaagucacac

SEQ ID NO: 97802 - RNA, 14 nt, Homo sapiens
gugucgggcaugac

SEQ ID NO: 97803 - RNA, 19 nt, Homo sapiens
gugcugggauuacaggugu

SEQ ID NO: 97804 - RNA, 23 nt, Homo sapiens
acuaaugaggaaacugcacuguu

SEQ ID NO: 97805 - RNA, 11 nt, Homo sapiens
agagcugccac

SEQ ID NO: 97806 - RNA, 13 nt, Homo sapiens
ggugccuugggga

SEQ ID NO: 97807 - RNA, 22 nt, Homo sapiens
uucccuacaguugaaaaacagc

SEQ ID NO: 97808 - RNA, 21 nt, Homo sapiens
uucagagacuccugcaggcag

SEQ ID NO: 97809 - RNA, 16 nt, Homo sapiens
auccacccaccucagc

SEQ ID NO: 97810 - RNA, 15 nt, Homo sapiens
uagcauggcugccaa

SEQ ID NO: 97811 - RNA, 15 nt, Homo sapiens
uguuucugaaaggga

SEQ ID NO: 97812 - RNA, 21 nt, Homo sapiens
caucccucuggggcuguucac

SEQ ID NO: 97813 - RNA, 23 nt, Homo sapiens
caccaaaucagcugcuacuacuc

SEQ ID NO: 97814 - RNA, 15 nt, Homo sapiens
ccugggcaaugugau

SEQ ID NO: 97815 - RNA, 23 nt, Homo sapiens
aaaacuuuucuaauacucuaccc

SEQ ID NO: 97816 - RNA, 14 nt, Homo sapiens
uccuuucaccacau

SEQ ID NO: 97817 - RNA, 21 nt, Homo sapiens
acagauuuuuggagaaaggau

SEQ ID NO: 97818 - RNA, 21 nt, Homo sapiens
cauaguaugguggcuggguug

SEQ ID NO: 97819 - RNA, 16 nt, Homo sapiens
aaaggaugcccaaaga

SEQ ID NO: 97820 - RNA, 13 nt, Homo sapiens
cagagcaagugag

SEQ ID NO: 97821 - RNA, 12 nt, Homo sapiens
uucacuacauua

SEQ ID NO: 97822 - RNA, 20 nt, Homo sapiens
aagccagcaggcucucaggc

SEQ ID NO: 97823 - RNA, 16 nt, Homo sapiens
gccucucucaggccaa

SEQ ID NO: 97824 - RNA, 10 nt, Homo sapiens
ggacuuuguu

SEQ ID NO: 97825 - RNA, 23 nt, Homo sapiens
ugugcauuaucuagauacuguau

SEQ ID NO: 97826 - RNA, 14 nt, Homo sapiens
uaucccuacuguaa

SEQ ID NO: 97827 - RNA, 12 nt, Homo sapiens
cagugugacaag

SEQ ID NO: 97828 - RNA, 22 nt, Homo sapiens
cauguguguucaugcacacuug

SEQ ID NO: 97829 - RNA, 22 nt, Homo sapiens
gacagccacggccaggccagag

SEQ ID NO: 97830 - RNA, 16 nt, Homo sapiens
gcacaugccucucuca

SEQ ID NO: 97831 - RNA, 22 nt, Homo sapiens
uuaaaauaaauuuguaugcuca

SEQ ID NO: 97832 - RNA, 12 nt, Homo sapiens
gaaccauaucaa

SEQ ID NO: 97833 - RNA, 22 nt, Homo sapiens
uuauauugccauuucuuccaca

SEQ ID NO: 97834 - RNA, 14 nt, Homo sapiens
aguacguugugcau

SEQ ID NO: 97835 - RNA, 20 nt, Homo sapiens
ccugugaguacuacaguccu

SEQ ID NO: 97836 - RNA, 12 nt, Homo sapiens
aagaaacuaccc

SEQ ID NO: 97837 - RNA, 21 nt, Homo sapiens
aggaugaaagugaccauguuu

SEQ ID NO: 97838 - RNA, 18 nt, Homo sapiens
gaaagaccgugugugaaa

SEQ ID NO: 97839 - RNA, 12 nt, Homo sapiens
guaaggcugugg

SEQ ID NO: 97840 - RNA, 17 nt, Homo sapiens
ccauguuggccaggcug

SEQ ID NO: 97841 - RNA, 16 nt, Homo sapiens
guuugaaccaagaacu

SEQ ID NO: 97842 - RNA, 19 nt, Homo sapiens
caaccaguuugaaccaaga

SEQ ID NO: 97843 - RNA, 18 nt, Homo sapiens
auuaucuagauacuguau

SEQ ID NO: 97844 - RNA, 23 nt, Homo sapiens
guuuuuauggcuuuugugcauua

SEQ ID NO: 97845 - RNA, 13 nt, Homo sapiens
agagacagaagaa

SEQ ID NO: 97846 - RNA, 20 nt, Homo sapiens
auuuugggguacccacugcu

SEQ ID NO: 97847 - RNA, 23 nt, Homo sapiens
cacugugaagagaaccauaucaa

SEQ ID NO: 97848 - RNA, 22 nt, Homo sapiens
caauuauuuauuaaaugcccag

SEQ ID NO: 97849 - RNA, 16 nt, Homo sapiens
uagcugggacuacagg

SEQ ID NO: 97850 - RNA, 22 nt, Homo sapiens
aaccacuucagcugacuuuucu

SEQ ID NO: 97851 - RNA, 19 nt, Homo sapiens
uacucgaguuacagacaaa

SEQ ID NO: 97852 - RNA, 22 nt, Homo sapiens
aaaacuugauguguuaucucuu

SEQ ID NO: 97853 - RNA, 15 nt, Homo sapiens
gggaggggaagaaaa

SEQ ID NO: 97854 - RNA, 13 nt, Homo sapiens
aucuuccaagggu

SEQ ID NO: 97855 - RNA, 12 nt, Homo sapiens
acacacagcucu

SEQ ID NO: 97856 - RNA, 20 nt, Homo sapiens
cagagaauucucuuauccaa

SEQ ID NO: 97857 - RNA, 18 nt, Homo sapiens
uuguuucaaccaguuuga

SEQ ID NO: 97858 - RNA, 15 nt, Homo sapiens
aagagaaaugagcuu

SEQ ID NO: 97859 - RNA, 15 nt, Homo sapiens
ccagcucugguccau

SEQ ID NO: 97860 - RNA, 17 nt, Homo sapiens
gcugguugagguuucaa

SEQ ID NO: 97861 - RNA, 16 nt, Homo sapiens
cauccagguucagcuu

SEQ ID NO: 97862 - RNA, 15 nt, Homo sapiens
cugcauguuacauaa

SEQ ID NO: 97863 - RNA, 20 nt, Homo sapiens
aagauucauauuuacuucuu

SEQ ID NO: 97864 - RNA, 14 nt, Homo sapiens
aauugaaaaaccau

SEQ ID NO: 97865 - RNA, 15 nt, Homo sapiens
auccuaggcauuugc

SEQ ID NO: 97866 - RNA, 19 nt, Homo sapiens
agccuuagaagucacacag

SEQ ID NO: 97867 - RNA, 23 nt, Homo sapiens
ucuuuccuguagucccauugaug

SEQ ID NO: 97868 - RNA, 19 nt, Homo sapiens
cuuccaaggguacuaagga

SEQ ID NO: 97869 - RNA, 16 nt, Homo sapiens
ucucacuguugcccag

SEQ ID NO: 97870 - RNA, 15 nt, Homo sapiens
uggccucaagugauu

SEQ ID NO: 97871 - RNA, 15 nt, Homo sapiens
aaaaauaacacugua

SEQ ID NO: 97872 - RNA, 19 nt, Homo sapiens
aucucuugcacucaaagcu

SEQ ID NO: 97873 - RNA, 23 nt, Homo sapiens
acaaagcgugguggacaugcaca

SEQ ID NO: 97874 - RNA, 20 nt, Homo sapiens
uugagaauuacccuuuugcc

SEQ ID NO: 97875 - RNA, 15 nt, Homo sapiens
gggcuggaagcagaa

SEQ ID NO: 97876 - RNA, 12 nt, Homo sapiens
ugccgcauuugg

SEQ ID NO: 97877 - RNA, 16 nt, Homo sapiens
uuacuuuguguucacc

SEQ ID NO: 97878 - RNA, 14 nt, Homo sapiens
uugauguacuuuac

SEQ ID NO: 97879 - RNA, 19 nt, Homo sapiens
augacaucagcaauacaga

SEQ ID NO: 97880 - RNA, 23 nt, Homo sapiens
ggacaaggaugaucuaggaagac

SEQ ID NO: 97881 - RNA, 14 nt, Homo sapiens
uuccagugaggcuc

SEQ ID NO: 97882 - RNA, 19 nt, Homo sapiens
cuccgcuuucuacccagcg

SEQ ID NO: 97883 - RNA, 14 nt, Homo sapiens
ucgcgugaugcgca

SEQ ID NO: 97884 - RNA, 16 nt, Homo sapiens
uugggaggccauuugu

SEQ ID NO: 97885 - RNA, 20 nt, Homo sapiens
acgcgugcacacaccagagc

SEQ ID NO: 97886 - RNA, 18 nt, Homo sapiens
uuuuguuccacaaguuaa

SEQ ID NO: 97887 - RNA, 20 nt, Homo sapiens
gugccuuauggaacacucug

SEQ ID NO: 97888 - RNA, 20 nt, Homo sapiens
aguuugggguaugggagaga

SEQ ID NO: 97889 - RNA, 12 nt, Homo sapiens
uucaaucucuug

SEQ ID NO: 97890 - RNA, 21 nt, Homo sapiens
caggguuuugccauguuggcc

SEQ ID NO: 97891 - RNA, 22 nt, Homo sapiens
guuuuaugagaaaugccagugu

SEQ ID NO: 97892 - RNA, 22 nt, Homo sapiens
guagucaggugccucaagagaa

SEQ ID NO: 97893 - RNA, 18 nt, Homo sapiens
agaagaaaauaguggugu

SEQ ID NO: 97894 - RNA, 18 nt, Homo sapiens
accaacauacucccaucu

SEQ ID NO: 97895 - RNA, 17 nt, Homo sapiens
agucuuuguacagacaa

SEQ ID NO: 97896 - RNA, 21 nt, Homo sapiens
aagcacaugccucucucaggc

SEQ ID NO: 97897 - RNA, 23 nt, Homo sapiens
aaggaugaucuaggaagacuuug

SEQ ID NO: 97898 - RNA, 16 nt, Homo sapiens
caaugcuuugaucccu

SEQ ID NO: 97899 - RNA, 14 nt, Homo sapiens
augaaaauucuuga

SEQ ID NO: 97900 - RNA, 23 nt, Homo sapiens
uacagacaaagcgugguggacau

SEQ ID NO: 97901 - RNA, 13 nt, Homo sapiens
ugugauaaaaccc

SEQ ID NO: 97902 - RNA, 22 nt, Homo sapiens
gccaguaaaugggggugcauuu

SEQ ID NO: 97903 - RNA, 18 nt, Homo sapiens
auuuuagagacagaagaa

SEQ ID NO: 97904 - RNA, 19 nt, Homo sapiens
ugauccuaggcauuugcug

SEQ ID NO: 97905 - RNA, 15 nt, Homo sapiens
agaaagacuaucuaa

SEQ ID NO: 97906 - RNA, 14 nt, Homo sapiens
uucaaccaguuuga

SEQ ID NO: 97907 - RNA, 18 nt, Homo sapiens
auuagcauuuugcuaaau

SEQ ID NO: 97908 - RNA, 14 nt, Homo sapiens
ugacauuguuggcc

SEQ ID NO: 97909 - RNA, 14 nt, Homo sapiens
acacugcuugugaa

SEQ ID NO: 97910 - RNA, 21 nt, Homo sapiens
cagacucuacagaggccaugg

SEQ ID NO: 97911 - RNA, 20 nt, Homo sapiens
acgugugugcacguacacac

SEQ ID NO: 97912 - RNA, 20 nt, Homo sapiens
aagaugcuucucacugccau

SEQ ID NO: 97913 - RNA, 14 nt, Homo sapiens
uccucccaccucag

SEQ ID NO: 97914 - RNA, 14 nt, Homo sapiens
aggauguucuagca

SEQ ID NO: 97915 - RNA, 22 nt, Homo sapiens
cucuacugaggugcuauguucu

SEQ ID NO: 97916 - RNA, 16 nt, Homo sapiens
uaggaacacuccuuca

SEQ ID NO: 97917 - RNA, 19 nt, Homo sapiens
agcacuaaggugugcucug

SEQ ID NO: 97918 - RNA, 15 nt, Homo sapiens
acaaaaaacaacuga

SEQ ID NO: 97919 - RNA, 19 nt, Homo sapiens
ugaaaaaauaacacuguac

SEQ ID NO: 97920 - RNA, 13 nt, Homo sapiens
ugaugaucuuugc

SEQ ID NO: 97921 - RNA, 22 nt, Homo sapiens
uggaauuuugugcccccaugua

SEQ ID NO: 97922 - RNA, 23 nt, Homo sapiens
aacacuaaugaggaaacugcacu

SEQ ID NO: 97923 - RNA, 18 nt, Homo sapiens
gcucacauaucugucauu

SEQ ID NO: 97924 - RNA, 12 nt, Homo sapiens
gaaccaagaacu

SEQ ID NO: 97925 - RNA, 18 nt, Homo sapiens
guuuagcccaaaaccaag

SEQ ID NO: 97926 - RNA, 13 nt, Homo sapiens
aggcuggucucaa

SEQ ID NO: 97927 - RNA, 13 nt, Homo sapiens
ugaaccacaucuu

SEQ ID NO: 97928 - RNA, 12 nt, Homo sapiens
ggcuaagugauc

SEQ ID NO: 97929 - RNA, 13 nt, Homo sapiens
gaagacaauguga

SEQ ID NO: 97930 - RNA, 16 nt, Homo sapiens
cccacugcucugguua

SEQ ID NO: 97931 - RNA, 20 nt, Homo sapiens
ccauguaagcaccccuucau

SEQ ID NO: 97932 - RNA, 13 nt, Homo sapiens
uugaacaaacugg

SEQ ID NO: 97933 - RNA, 15 nt, Homo sapiens
aacuuccaauuuaca

SEQ ID NO: 97934 - RNA, 19 nt, Homo sapiens
ucccuuugacgccauccca

SEQ ID NO: 97935 - RNA, 13 nt, Homo sapiens
uuucuacucgagu

SEQ ID NO: 97936 - RNA, 23 nt, Homo sapiens
aggccuggccagaugcaccagcc

SEQ ID NO: 97937 - RNA, 13 nt, Homo sapiens
ucucaggccaaac

SEQ ID NO: 97938 - RNA, 17 nt, Homo sapiens
aaaguuucucuuuucaa

SEQ ID NO: 97939 - RNA, 17 nt, Homo sapiens
cugggagagccuuccag

SEQ ID NO: 97940 - RNA, 17 nt, Homo sapiens
ugcaugaaguaauaugc

SEQ ID NO: 97941 - RNA, 14 nt, Homo sapiens
aacacauacaggaa

SEQ ID NO: 97942 - RNA, 13 nt, Homo sapiens
gguggaugccugg

SEQ ID NO: 97943 - RNA, 14 nt, Homo sapiens
agcagagguuggga

SEQ ID NO: 97944 - RNA, 16 nt, Homo sapiens
caucuugaauuguaag

SEQ ID NO: 97945 - RNA, 16 nt, Homo sapiens
acuugcacccaugugu

SEQ ID NO: 97946 - RNA, 17 nt, Homo sapiens
gacguguuaugacucca

SEQ ID NO: 97947 - RNA, 16 nt, Homo sapiens
aauucucagaaucuca

SEQ ID NO: 97948 - RNA, 19 nt, Homo sapiens
uuagaaaaaccaccaccau

SEQ ID NO: 97949 - RNA, 19 nt, Homo sapiens
aguucauacccuguuacca

SEQ ID NO: 97950 - RNA, 18 nt, Homo sapiens
uacuguaauuugugauac

SEQ ID NO: 97951 - RNA, 17 nt, Homo sapiens
guggugaacagaacaaa

SEQ ID NO: 97952 - RNA, 20 nt, Homo sapiens
cuaucaaguauuauaccuuu

SEQ ID NO: 97953 - RNA, 19 nt, Homo sapiens
gcauuuggugguuucagaa

SEQ ID NO: 97954 - RNA, 14 nt, Homo sapiens
auccuaggcauuug

SEQ ID NO: 97955 - RNA, 18 nt, Homo sapiens
aggggagaguaacccugu

SEQ ID NO: 97956 - RNA, 19 nt, Homo sapiens
aaucauaaaacuugaugug

SEQ ID NO: 97957 - RNA, 13 nt, Homo sapiens
gagaaggggccca

SEQ ID NO: 97958 - RNA, 21 nt, Homo sapiens
acucacacggacacucaaaag

SEQ ID NO: 97959 - RNA, 15 nt, Homo sapiens
acacucuugguagaa

SEQ ID NO: 97960 - RNA, 16 nt, Homo sapiens
ugggaggccaaggugg

SEQ ID NO: 97961 - RNA, 20 nt, Homo sapiens
ugguccauagagagcaagac

SEQ ID NO: 97962 - RNA, 23 nt, Homo sapiens
aagcucugcuccucuccccagca

SEQ ID NO: 97963 - RNA, 12 nt, Homo sapiens
gaaaacacuguu

SEQ ID NO: 97964 - RNA, 16 nt, Homo sapiens
uaagagaaaugagcug

SEQ ID NO: 97965 - RNA, 12 nt, Homo sapiens
acaugugcacau

SEQ ID NO: 97966 - RNA, 18 nt, Homo sapiens
gucacuuuccucuuccac

SEQ ID NO: 97967 - RNA, 18 nt, Homo sapiens
cugacacacagcucuguc

SEQ ID NO: 97968 - RNA, 16 nt, Homo sapiens
agugaagcugggagaa

SEQ ID NO: 97969 - RNA, 14 nt, Homo sapiens
ugugccaugugcca

SEQ ID NO: 97970 - RNA, 23 nt, Homo sapiens
acaggcaaugcuggcuguuggcu

SEQ ID NO: 97971 - RNA, 17 nt, Homo sapiens
gcaauacagacuacuuc

SEQ ID NO: 97972 - RNA, 16 nt, Homo sapiens
caaggauccugagcca

SEQ ID NO: 97973 - RNA, 18 nt, Homo sapiens
aggccuggccagaugcac

SEQ ID NO: 97974 - RNA, 14 nt, Homo sapiens
ccagcuuaucucag

SEQ ID NO: 97975 - RNA, 15 nt, Homo sapiens
guagagucacuggaa

SEQ ID NO: 97976 - RNA, 18 nt, Homo sapiens
cacaugccucucucaggc

SEQ ID NO: 97977 - RNA, 13 nt, Homo sapiens
uuauacauuugau

SEQ ID NO: 97978 - RNA, 14 nt, Homo sapiens
auccuagcacuuug

SEQ ID NO: 97979 - RNA, 21 nt, Homo sapiens
uggcagugggagcugccuguu

SEQ ID NO: 97980 - RNA, 14 nt, Homo sapiens
ucccugcaaccuga

SEQ ID NO: 97981 - RNA, 22 nt, Homo sapiens
ggaagccucccacgacugcccg

SEQ ID NO: 97982 - RNA, 16 nt, Homo sapiens
ugacuuaagcacacuu

SEQ ID NO: 97983 - RNA, 14 nt, Homo sapiens
cuccccgggcagca

SEQ ID NO: 97984 - RNA, 18 nt, Homo sapiens
gcaggcucucaggccagc

SEQ ID NO: 97985 - RNA, 14 nt, Homo sapiens
aacucuuaaaaccc

SEQ ID NO: 97986 - RNA, 20 nt, Homo sapiens
agcugggagaaccaaaaaga

SEQ ID NO: 97987 - RNA, 15 nt, Homo sapiens
cuuuucauaaccuag

SEQ ID NO: 97988 - RNA, 22 nt, Homo sapiens
ccuuuccaaaugcccagcuuaa

SEQ ID NO: 97989 - RNA, 12 nt, Homo sapiens
uucaaacuuuac

SEQ ID NO: 97990 - RNA, 21 nt, Homo sapiens
uguucaugcacacuugcaccc

SEQ ID NO: 97991 - RNA, 11 nt, Homo sapiens
cuaugggacuc

SEQ ID NO: 97992 - RNA, 20 nt, Homo sapiens
ggaucaaaguugaugaaaua

SEQ ID NO: 97993 - RNA, 18 nt, Homo sapiens
aaaacuuuucuaauacuc

SEQ ID NO: 97994 - RNA, 19 nt, Homo sapiens
cacuauaauguaagcucua

SEQ ID NO: 97995 - RNA, 19 nt, Homo sapiens
cugauucccaagcucugcu

SEQ ID NO: 97996 - RNA, 15 nt, Homo sapiens
ugaacagaacaaaag

SEQ ID NO: 97997 - RNA, 19 nt, Homo sapiens
uccaugauguuuuccauga

SEQ ID NO: 97998 - RNA, 15 nt, Homo sapiens
uccagcucaccagcc

SEQ ID NO: 97999 - RNA, 12 nt, Homo sapiens
agagccuuccag

SEQ ID NO: 98000 - RNA, 13 nt, Homo sapiens
acguugugcauuu

SEQ ID NO: 98001 - RNA, 15 nt, Homo sapiens
ccaaacucaccugcc

SEQ ID NO: 98002 - RNA, 17 nt, Homo sapiens
ccucaggcaggugggau

SEQ ID NO: 98003 - RNA, 18 nt, Homo sapiens
aaucucaaauaacuaaaa

SEQ ID NO: 98004 - RNA, 18 nt, Homo sapiens
ccugggugugugaagcug

SEQ ID NO: 98005 - RNA, 20 nt, Homo sapiens
auggacuuccacugccaucc

SEQ ID NO: 98006 - RNA, 12 nt, Homo sapiens
cugcauguuaca

SEQ ID NO: 98007 - RNA, 21 nt, Homo sapiens
cacuugcagacucuacagagg

SEQ ID NO: 98008 - RNA, 16 nt, Homo sapiens
ugcuuguacauaaugc

SEQ ID NO: 98009 - RNA, 21 nt, Homo sapiens
agcauacguacacauuuuauu

SEQ ID NO: 98010 - RNA, 20 nt, Homo sapiens
aauucucuaguuugauuaaa

SEQ ID NO: 98011 - RNA, 21 nt, Homo sapiens
guggcagcugcuuuugucuau

SEQ ID NO: 98012 - RNA, 15 nt, Homo sapiens
uucucucuucuccac

SEQ ID NO: 98013 - RNA, 17 nt, Homo sapiens
cauucuccuuguguuac

SEQ ID NO: 98014 - RNA, 13 nt, Homo sapiens
caggccagcugcu

SEQ ID NO: 98015 - RNA, 20 nt, Homo sapiens
aaggcugucaauuacaggaa

SEQ ID NO: 98016 - RNA, 18 nt, Homo sapiens
cacugaugggcaaccccc

SEQ ID NO: 98017 - RNA, 12 nt, Homo sapiens
cagggucucacu

SEQ ID NO: 98018 - RNA, 13 nt, Homo sapiens
gccaggaagccag

SEQ ID NO: 98019 - RNA, 20 nt, Homo sapiens
augaucacggcucacugcag

SEQ ID NO: 98020 - RNA, 21 nt, Homo sapiens
gaaccacucuaucaaguauua

SEQ ID NO: 98021 - RNA, 13 nt, Homo sapiens
auacaauuccaaa

SEQ ID NO: 98022 - RNA, 23 nt, Homo sapiens
uugaagacuuuucuuucagccaa

SEQ ID NO: 98023 - RNA, 16 nt, Homo sapiens
cugggggccucagugc

SEQ ID NO: 98024 - RNA, 16 nt, Homo sapiens
cacugcuuaacuucac

SEQ ID NO: 98025 - RNA, 20 nt, Homo sapiens
cgagauugcaccacugcacu

SEQ ID NO: 98026 - RNA, 22 nt, Homo sapiens
cagcguuucuaugacacaugca

SEQ ID NO: 98027 - RNA, 12 nt, Homo sapiens
gcccacacuugg

SEQ ID NO: 98028 - RNA, 19 nt, Homo sapiens
agaauuucccaaagcagug

SEQ ID NO: 98029 - RNA, 22 nt, Homo sapiens
aagugagacccugucucaaaaa

SEQ ID NO: 98030 - RNA, 14 nt, Homo sapiens
cuuagaaaaaccac

SEQ ID NO: 98031 - RNA, 11 nt, Homo sapiens
gaggcuaugug

SEQ ID NO: 98032 - RNA, 18 nt, Homo sapiens
auuccuguucccaugaga

SEQ ID NO: 98033 - RNA, 13 nt, Homo sapiens
cuaaagcugccag

SEQ ID NO: 98034 - RNA, 14 nt, Homo sapiens
gauccaagcugguc

SEQ ID NO: 98035 - RNA, 21 nt, Homo sapiens
ccaguaaaugggggugcauuu

SEQ ID NO: 98036 - RNA, 16 nt, Homo sapiens
auuugcugaauacaga

SEQ ID NO: 98037 - RNA, 16 nt, Homo sapiens
ucauacucaccucacc

SEQ ID NO: 98038 - RNA, 20 nt, Homo sapiens
gacuuaagcacacuugacau

SEQ ID NO: 98039 - RNA, 19 nt, Homo sapiens
gcacucagaagacacugau

SEQ ID NO: 98040 - RNA, 17 nt, Homo sapiens
uuguaaauagcucaggu

SEQ ID NO: 98041 - RNA, 16 nt, Homo sapiens
cuaguugucacuuucc

SEQ ID NO: 98042 - RNA, 18 nt, Homo sapiens
cagagcugccaccugccu

SEQ ID NO: 98043 - RNA, 23 nt, Homo sapiens
aaagcagugcaugcugucccuua

SEQ ID NO: 98044 - RNA, 22 nt, Homo sapiens
aacuggaaaguacguuaugaua

SEQ ID NO: 98045 - RNA, 19 nt, Homo sapiens
gaaaauaguggugugauuu

SEQ ID NO: 98046 - RNA, 19 nt, Homo sapiens
acuugauguguuaucucuu

SEQ ID NO: 98047 - RNA, 23 nt, Homo sapiens
uuccucauuagcauuuugcuaaa

SEQ ID NO: 98048 - RNA, 16 nt, Homo sapiens
ccuaguuccaccauca

SEQ ID NO: 98049 - RNA, 22 nt, Homo sapiens
augugauaaaaccccaucucua

SEQ ID NO: 98050 - RNA, 16 nt, Homo sapiens
uaaaagguaugcaauc

SEQ ID NO: 98051 - RNA, 17 nt, Homo sapiens
cuuagguuggcaaaaag

SEQ ID NO: 98052 - RNA, 17 nt, Homo sapiens
uaugaucacggcucacu

SEQ ID NO: 98053 - RNA, 22 nt, Homo sapiens
agccauuccuguucccaugaga

SEQ ID NO: 98054 - RNA, 17 nt, Homo sapiens
caggaaaggcuccagga

SEQ ID NO: 98055 - RNA, 11 nt, Homo sapiens
cuuuugugcau

SEQ ID NO: 98056 - RNA, 13 nt, Homo sapiens
ugcacccaugugu

SEQ ID NO: 98057 - RNA, 13 nt, Homo sapiens
gagacucugucuc

SEQ ID NO: 98058 - RNA, 23 nt, Homo sapiens
cggagacggagucccaccuuggc

SEQ ID NO: 98059 - RNA, 18 nt, Homo sapiens
gcaggacuaaaugucuag

SEQ ID NO: 98060 - RNA, 20 nt, Homo sapiens
aacucaaacucuuaaaaccc

SEQ ID NO: 98061 - RNA, 19 nt, Homo sapiens
agcuuucugcuaucaaaga

SEQ ID NO: 98062 - RNA, 19 nt, Homo sapiens
agacaggguuuugccaugu

SEQ ID NO: 98063 - RNA, 13 nt, Homo sapiens
ugaaaauucuuga

SEQ ID NO: 98064 - RNA, 21 nt, Homo sapiens
gcacacuugcacccaugugua

SEQ ID NO: 98065 - RNA, 16 nt, Homo sapiens
aaaauaccagccagua

SEQ ID NO: 98066 - RNA, 17 nt, Homo sapiens
auguugaaagaucaaaa

SEQ ID NO: 98067 - RNA, 11 nt, Homo sapiens
agaaaaaccac

SEQ ID NO: 98068 - RNA, 15 nt, Homo sapiens
caagugccuuagcaa

SEQ ID NO: 98069 - RNA, 23 nt, Homo sapiens
auuuccugugucuuuuuucacua

SEQ ID NO: 98070 - RNA, 21 nt, Homo sapiens
caggcucucaggccagcugcu

SEQ ID NO: 98071 - RNA, 15 nt, Homo sapiens
caaggcugcagugag

SEQ ID NO: 98072 - RNA, 16 nt, Homo sapiens
gaugagaggaaaucac

SEQ ID NO: 98073 - RNA, 23 nt, Homo sapiens
cacuguuuuauuuuaauucaguu

SEQ ID NO: 98074 - RNA, 22 nt, Homo sapiens
acugaguacguugugcauuugg

SEQ ID NO: 98075 - RNA, 16 nt, Homo sapiens
cuacccuggcacuaua

SEQ ID NO: 98076 - RNA, 18 nt, Homo sapiens
guggugaacagaacaaaa

SEQ ID NO: 98077 - RNA, 19 nt, Homo sapiens
cugaaaaccaauguucucu

SEQ ID NO: 98078 - RNA, 18 nt, Homo sapiens
gugcugggauuacaggug

SEQ ID NO: 98079 - RNA, 20 nt, Homo sapiens
gccuccccagcaccuaggug

SEQ ID NO: 98080 - RNA, 15 nt, Homo sapiens
ucccaacucacccca

SEQ ID NO: 98081 - RNA, 22 nt, Homo sapiens
ucauaguggcuuaaaacaacac

SEQ ID NO: 98082 - RNA, 20 nt, Homo sapiens
agcauuuugcuaaaugugaa

SEQ ID NO: 98083 - RNA, 17 nt, Homo sapiens
cuaauauguaacaagcc

SEQ ID NO: 98084 - RNA, 21 nt, Homo sapiens
aucaacugcaucaagauguga

SEQ ID NO: 98085 - RNA, 19 nt, Homo sapiens
guucuggcucuuccaggcu

SEQ ID NO: 98086 - RNA, 19 nt, Homo sapiens
guagcugggacuacaggca

SEQ ID NO: 98087 - RNA, 16 nt, Homo sapiens
guuggucccccuucca

SEQ ID NO: 98088 - RNA, 20 nt, Homo sapiens
ucucaaacucuugaccucag

SEQ ID NO: 98089 - RNA, 21 nt, Homo sapiens
uacacuaaaaggugaccaaug

SEQ ID NO: 98090 - RNA, 13 nt, Homo sapiens
acagggugagcac

SEQ ID NO: 98091 - RNA, 15 nt, Homo sapiens
ucccacucaguccau

SEQ ID NO: 98092 - RNA, 22 nt, Homo sapiens
acugcaucguuucaucuuccaa

SEQ ID NO: 98093 - RNA, 17 nt, Homo sapiens
gcugggagagccuucca

SEQ ID NO: 98094 - RNA, 13 nt, Homo sapiens
ugccucucucagg

SEQ ID NO: 98095 - RNA, 14 nt, Homo sapiens
acaggcaagcaccu

SEQ ID NO: 98096 - RNA, 19 nt, Homo sapiens
gacagucccugccaaugga

SEQ ID NO: 98097 - RNA, 17 nt, Homo sapiens
uucccuacaguugaaaa

SEQ ID NO: 98098 - RNA, 12 nt, Homo sapiens
gaagcacagcuu

SEQ ID NO: 98099 - RNA, 15 nt, Homo sapiens
agagaugugccccca

SEQ ID NO: 98100 - RNA, 15 nt, Homo sapiens
cucugacacacagcu

SEQ ID NO: 98101 - RNA, 15 nt, Homo sapiens
gucggaaaacaugcu

SEQ ID NO: 98102 - RNA, 13 nt, Homo sapiens
auagacaauuuau

SEQ ID NO: 98103 - RNA, 20 nt, Homo sapiens
caaaaguuuaaaaagcucac

SEQ ID NO: 98104 - RNA, 15 nt, Homo sapiens
agacuggaagcacag

SEQ ID NO: 98105 - RNA, 15 nt, Homo sapiens
agucucuugauucau

SEQ ID NO: 98106 - RNA, 15 nt, Homo sapiens
ucuuuguacagacaa

SEQ ID NO: 98107 - RNA, 15 nt, Homo sapiens
agcaggacauggaca

SEQ ID NO: 98108 - RNA, 11 nt, Homo sapiens
gaccucaggug

SEQ ID NO: 98109 - RNA, 15 nt, Homo sapiens
gagaccaucccugaa

SEQ ID NO: 98110 - RNA, 15 nt, Homo sapiens
cucucaggccaaacu

SEQ ID NO: 98111 - RNA, 19 nt, Homo sapiens
ccacuuucuagccagagga

SEQ ID NO: 98112 - RNA, 18 nt, Homo sapiens
aaagcaucuaugugagac

SEQ ID NO: 98113 - RNA, 13 nt, Homo sapiens
ugacacacagcuc

SEQ ID NO: 98114 - RNA, 17 nt, Homo sapiens
uggccccugcccggcug

SEQ ID NO: 98115 - RNA, 15 nt, Homo sapiens
guucuacccaggugc

SEQ ID NO: 98116 - RNA, 12 nt, Homo sapiens
acagacaaagcg

SEQ ID NO: 98117 - RNA, 21 nt, Homo sapiens
caggugauccacccaccucag

SEQ ID NO: 98118 - RNA, 20 nt, Homo sapiens
gaucagccugggcaauguga

SEQ ID NO: 98119 - RNA, 22 nt, Homo sapiens
acucauucuucuguacgucuga

SEQ ID NO: 98120 - RNA, 18 nt, Homo sapiens
acuauaauguaagcucua

SEQ ID NO: 98121 - RNA, 17 nt, Homo sapiens
caugccuggauggggcu

SEQ ID NO: 98122 - RNA, 20 nt, Homo sapiens
cagccucccgaguagcuggg

SEQ ID NO: 98123 - RNA, 19 nt, Homo sapiens
gugacaacacuuguguuau

SEQ ID NO: 98124 - RNA, 19 nt, Homo sapiens
cagauugcaacaggcuggg

SEQ ID NO: 98125 - RNA, 23 nt, Homo sapiens
guucaucauccuaagcuauucag

SEQ ID NO: 98126 - RNA, 19 nt, Homo sapiens
gaaugcagagaugugcccc

SEQ ID NO: 98127 - RNA, 20 nt, Homo sapiens
uuuaugagaaaugccagugu

SEQ ID NO: 98128 - RNA, 18 nt, Homo sapiens
uggucccccuuccaugga

SEQ ID NO: 98129 - RNA, 20 nt, Homo sapiens
gauacccaucccauaugccu

SEQ ID NO: 98130 - RNA, 16 nt, Homo sapiens
aagucagcacuaccuc

SEQ ID NO: 98131 - RNA, 23 nt, Homo sapiens
gccaagguuuggggaagaacgaa

SEQ ID NO: 98132 - RNA, 20 nt, Homo sapiens
agguacgaaaagaggggaag

SEQ ID NO: 98133 - RNA, 19 nt, Homo sapiens
acaccuugacagggcacac

SEQ ID NO: 98134 - RNA, 16 nt, Homo sapiens
agaaaaaggaugcauu

SEQ ID NO: 98135 - RNA, 21 nt, Homo sapiens
aaagguagcuuuucccaaacu

SEQ ID NO: 98136 - RNA, 23 nt, Homo sapiens
uauacacuuacacuuuaugcaca

SEQ ID NO: 98137 - RNA, 17 nt, Homo sapiens
uugaccgugaggccaga

SEQ ID NO: 98138 - RNA, 18 nt, Homo sapiens
cauaaguuaacuuccaau

SEQ ID NO: 98139 - RNA, 15 nt, Homo sapiens
caccaaccacugcga

SEQ ID NO: 98140 - RNA, 23 nt, Homo sapiens
cccucaacaccucugcacaagcu

SEQ ID NO: 98141 - RNA, 21 nt, Homo sapiens
gguggaugccugguggcagcu

SEQ ID NO: 98142 - RNA, 21 nt, Homo sapiens
ugcauguuacauaagauaaau

SEQ ID NO: 98143 - RNA, 16 nt, Homo sapiens
agagcugggugucaag

SEQ ID NO: 98144 - RNA, 18 nt, Homo sapiens
gcaccgggccacagagaa

SEQ ID NO: 98145 - RNA, 20 nt, Homo sapiens
cccagagaggguggugaccu

SEQ ID NO: 98146 - RNA, 19 nt, Homo sapiens
auaacacuguacugcaaua

SEQ ID NO: 98147 - RNA, 14 nt, Homo sapiens
aaccacuucagcug

SEQ ID NO: 98148 - RNA, 14 nt, Homo sapiens
augacaucagcaau

SEQ ID NO: 98149 - RNA, 12 nt, Homo sapiens
aagaugaagcug

SEQ ID NO: 98150 - RNA, 17 nt, Homo sapiens
uuaagcacacuugacau

SEQ ID NO: 98151 - RNA, 19 nt, Homo sapiens
acccaauauuuaccagacc

SEQ ID NO: 98152 - RNA, 15 nt, Homo sapiens
ucccaucugugaaag

SEQ ID NO: 98153 - RNA, 13 nt, Homo sapiens
gauggauuuccag

SEQ ID NO: 98154 - RNA, 21 nt, Homo sapiens
agugcugggauuacaggugug

SEQ ID NO: 98155 - RNA, 18 nt, Homo sapiens
gaucauccacugugccau

SEQ ID NO: 98156 - RNA, 13 nt, Homo sapiens
cuccuuguguuac

SEQ ID NO: 98157 - RNA, 21 nt, Homo sapiens
gugaugaugaaaugaggucag

SEQ ID NO: 98158 - RNA, 14 nt, Homo sapiens
acuggcugcaaagg

SEQ ID NO: 98159 - RNA, 19 nt, Homo sapiens
ugggcuggugucaccugaa

SEQ ID NO: 98160 - RNA, 16 nt, Homo sapiens
accccucaacaccucu

SEQ ID NO: 98161 - RNA, 23 nt, Homo sapiens
caaagcucuuuugagcauuuaga

SEQ ID NO: 98162 - RNA, 13 nt, Homo sapiens
auccacugugcca

SEQ ID NO: 98163 - RNA, 21 nt, Homo sapiens
aagaaccuuuugagugccuua

SEQ ID NO: 98164 - RNA, 23 nt, Homo sapiens
auaacucuacccuggcacuauaa

SEQ ID NO: 98165 - RNA, 16 nt, Homo sapiens
agucccauugauguac

SEQ ID NO: 98166 - RNA, 19 nt, Homo sapiens
gagugagacucugucucaa

SEQ ID NO: 98167 - RNA, 15 nt, Homo sapiens
cacugcgaccacaag

SEQ ID NO: 98168 - RNA, 21 nt, Homo sapiens
acccugucuaaugaaaccugu

SEQ ID NO: 98169 - RNA, 20 nt, Homo sapiens
cugggauuacaggugugaac

SEQ ID NO: 98170 - RNA, 20 nt, Homo sapiens
gugcagugagccgagaucac

SEQ ID NO: 98171 - RNA, 21 nt, Homo sapiens
auacauaaacaagaccacguu

SEQ ID NO: 98172 - RNA, 15 nt, Homo sapiens
cucuccgaccagaca

SEQ ID NO: 98173 - RNA, 19 nt, Homo sapiens
gcucagcggggacagcucc

SEQ ID NO: 98174 - RNA, 14 nt, Homo sapiens
agaaaguacuucuc

SEQ ID NO: 98175 - RNA, 21 nt, Homo sapiens
ugucagccauuccuguuccca

SEQ ID NO: 98176 - RNA, 21 nt, Homo sapiens
aggcuucuuccccccaaaacu

SEQ ID NO: 98177 - RNA, 22 nt, Homo sapiens
uagucccauugauguacuuuac

SEQ ID NO: 98178 - RNA, 15 nt, Homo sapiens
uaaugauagcuacug

SEQ ID NO: 98179 - RNA, 16 nt, Homo sapiens
caugcuacacacugca

SEQ ID NO: 98180 - RNA, 15 nt, Homo sapiens
cagccucacaguccu

SEQ ID NO: 98181 - RNA, 22 nt, Homo sapiens
guuguuugauucagacagcugc

SEQ ID NO: 98182 - RNA, 14 nt, Homo sapiens
aagaggcagggucu

SEQ ID NO: 98183 - RNA, 15 nt, Homo sapiens
gauguuuccaaugcu

SEQ ID NO: 98184 - RNA, 20 nt, Homo sapiens
ugcccacgcuggagugcagu

SEQ ID NO: 98185 - RNA, 14 nt, Homo sapiens
caucaugucuggcu

SEQ ID NO: 98186 - RNA, 16 nt, Homo sapiens
uacuaaggaaucuuuc

SEQ ID NO: 98187 - RNA, 22 nt, Homo sapiens
uucaguggcuaccuacauacaa

SEQ ID NO: 98188 - RNA, 13 nt, Homo sapiens
aggggugggacac

SEQ ID NO: 98189 - RNA, 15 nt, Homo sapiens
acacuuacacuuuau

SEQ ID NO: 98190 - RNA, 16 nt, Homo sapiens
ccccaggguccuguag

SEQ ID NO: 98191 - RNA, 13 nt, Homo sapiens
guucccaugagau

SEQ ID NO: 98192 - RNA, 16 nt, Homo sapiens
uaacaggaaaauuuua

SEQ ID NO: 98193 - RNA, 12 nt, Homo sapiens
gccugcccuccc

SEQ ID NO: 98194 - RNA, 23 nt, Homo sapiens
uacucccaucugugaaaggaaag

SEQ ID NO: 98195 - RNA, 16 nt, Homo sapiens
augaguaacaggaaaa

SEQ ID NO: 98196 - RNA, 15 nt, Homo sapiens
ccacugcgaccacaa

SEQ ID NO: 98197 - RNA, 21 nt, Homo sapiens
agaauuauaauuaguuccuca

SEQ ID NO: 98198 - RNA, 12 nt, Homo sapiens
ccggcugcgugg

SEQ ID NO: 98199 - RNA, 19 nt, Homo sapiens
agaaaauggacguguuaug

SEQ ID NO: 98200 - RNA, 19 nt, Homo sapiens
gaaaaaccaccaccaucac

SEQ ID NO: 98201 - RNA, 12 nt, Homo sapiens
uugugcauuugg

SEQ ID NO: 98202 - RNA, 13 nt, Homo sapiens
uacgccaggggaa

SEQ ID NO: 98203 - RNA, 21 nt, Homo sapiens
uugugcauuaucuagauacug

SEQ ID NO: 98204 - RNA, 21 nt, Homo sapiens
auaaugcgugcauaccacuuu

SEQ ID NO: 98205 - RNA, 14 nt, Homo sapiens
uugcaccacugcac

SEQ ID NO: 98206 - RNA, 14 nt, Homo sapiens
aauauuuaccagac

SEQ ID NO: 98207 - RNA, 13 nt, Homo sapiens
uguucccaugaga

SEQ ID NO: 98208 - RNA, 23 nt, Homo sapiens
auaaaguuucuguugauaaucau

SEQ ID NO: 98209 - RNA, 20 nt, Homo sapiens
ucuguuggccagugugacaa

SEQ ID NO: 98210 - RNA, 20 nt, Homo sapiens
agccccuggaugcagccuca

SEQ ID NO: 98211 - RNA, 23 nt, Homo sapiens
ucuuauuuaaugaaagacuguac

SEQ ID NO: 98212 - RNA, 21 nt, Homo sapiens
cuugagaauuacccuuuugcc

SEQ ID NO: 98213 - RNA, 22 nt, Homo sapiens
cgcuaaaugaaaaucgugacaa

SEQ ID NO: 98214 - RNA, 14 nt, Homo sapiens
agagaaaugagcuu

SEQ ID NO: 98215 - RNA, 19 nt, Homo sapiens
ugugugaaauucucuuucc

SEQ ID NO: 98216 - RNA, 14 nt, Homo sapiens
caugagaugaugcc

SEQ ID NO: 98217 - RNA, 19 nt, Homo sapiens
aagaguaggaagacuuugg

SEQ ID NO: 98218 - RNA, 13 nt, Homo sapiens
cugaagucacaca

SEQ ID NO: 98219 - RNA, 17 nt, Homo sapiens
cuaacuugucuuuggac

SEQ ID NO: 98220 - RNA, 16 nt, Homo sapiens
agccucugaaaaccaa

SEQ ID NO: 98221 - RNA, 17 nt, Homo sapiens
aagcgugagccacugca

SEQ ID NO: 98222 - RNA, 13 nt, Homo sapiens
ggaaaugggagac

SEQ ID NO: 98223 - RNA, 15 nt, Homo sapiens
gugaagcugggagaa

SEQ ID NO: 98224 - RNA, 17 nt, Homo sapiens
cacuguugcccaggcug

SEQ ID NO: 98225 - RNA, 20 nt, Homo sapiens
cugcaucaagaugugacaug

SEQ ID NO: 98226 - RNA, 19 nt, Homo sapiens
cuguuggcugggggccuca

SEQ ID NO: 98227 - RNA, 17 nt, Homo sapiens
agaccaucccugaaggc

SEQ ID NO: 98228 - RNA, 15 nt, Homo sapiens
gagacagcacaggca

SEQ ID NO: 98229 - RNA, 21 nt, Homo sapiens
aauuaguuccucauuagcauu

SEQ ID NO: 98230 - RNA, 19 nt, Homo sapiens
ggcacccggccccugcugg

SEQ ID NO: 98231 - RNA, 13 nt, Homo sapiens
ggagaaaauggac

SEQ ID NO: 98232 - RNA, 16 nt, Homo sapiens
cacuaaccacgcugga

SEQ ID NO: 98233 - RNA, 19 nt, Homo sapiens
gaagucacacaguauuacu

SEQ ID NO: 98234 - RNA, 18 nt, Homo sapiens
uuuaagagaaaugagcug

SEQ ID NO: 98235 - RNA, 14 nt, Homo sapiens
agcucuacugaggu

SEQ ID NO: 98236 - RNA, 16 nt, Homo sapiens
ucugccugaagucaca

SEQ ID NO: 98237 - RNA, 14 nt, Homo sapiens
uuggagaaaggauu

SEQ ID NO: 98238 - RNA, 17 nt, Homo sapiens
gacucaaugcacugaca

SEQ ID NO: 98239 - RNA, 21 nt, Homo sapiens
cccacgacugcccggcagggu

SEQ ID NO: 98240 - RNA, 22 nt, Homo sapiens
agccaaggccaaaggaagcaca

SEQ ID NO: 98241 - RNA, 22 nt, Homo sapiens
ggaaggagaggagaggggcaca

SEQ ID NO: 98242 - RNA, 14 nt, Homo sapiens
ugccuuggggacaa

SEQ ID NO: 98243 - RNA, 16 nt, Homo sapiens
aagagggucugaggaa

SEQ ID NO: 98244 - RNA, 17 nt, Homo sapiens
cgauagugguggugaac

SEQ ID NO: 98245 - RNA, 17 nt, Homo sapiens
cucagagagggugggag

SEQ ID NO: 98246 - RNA, 18 nt, Homo sapiens
guuugguucauggugaag

SEQ ID NO: 98247 - RNA, 23 nt, Homo sapiens
uaagugaggaugaaaaaauaaca

SEQ ID NO: 98248 - RNA, 17 nt, Homo sapiens
gugaacagaacaaaagg

SEQ ID NO: 98249 - RNA, 23 nt, Homo sapiens
aaguuuuaugagaaaugccagug

SEQ ID NO: 98250 - RNA, 16 nt, Homo sapiens
cauccaguaucuugaa

SEQ ID NO: 98251 - RNA, 20 nt, Homo sapiens
gcaccacugcacuccagccu

SEQ ID NO: 98252 - RNA, 17 nt, Homo sapiens
aaggaaagaggcucugg

SEQ ID NO: 98253 - RNA, 20 nt, Homo sapiens
caaggccaaaggaagcacau

SEQ ID NO: 98254 - RNA, 22 nt, Homo sapiens
acaguugaaaaacagcugaggg

SEQ ID NO: 98255 - RNA, 16 nt, Homo sapiens
aggcucucaggccagc

SEQ ID NO: 98256 - RNA, 21 nt, Homo sapiens
gccgagauagccaaggccaaa

SEQ ID NO: 98257 - RNA, 19 nt, Homo sapiens
uaagccaaaaaaugcuugc

SEQ ID NO: 98258 - RNA, 21 nt, Homo sapiens
cauauucaggaagcucagggc

SEQ ID NO: 98259 - RNA, 20 nt, Homo sapiens
cagacucuacagaggccaug

SEQ ID NO: 98260 - RNA, 17 nt, Homo sapiens
cugccugaagucacaca

SEQ ID NO: 98261 - RNA, 14 nt, Homo sapiens
augucaagccauaa

SEQ ID NO: 98262 - RNA, 16 nt, Homo sapiens
ggaccagagcugccac

SEQ ID NO: 98263 - RNA, 22 nt, Homo sapiens
accuagguggggccugggguag

SEQ ID NO: 98264 - RNA, 13 nt, Homo sapiens
cucuugcacucaa

SEQ ID NO: 98265 - RNA, 14 nt, Homo sapiens
caggaaguacugga

SEQ ID NO: 98266 - RNA, 11 nt, Homo sapiens
uacauggaaua

SEQ ID NO: 98267 - RNA, 17 nt, Homo sapiens
gugcucugaucauccac

SEQ ID NO: 98268 - RNA, 14 nt, Homo sapiens
uagggaaaaaccag

SEQ ID NO: 98269 - RNA, 17 nt, Homo sapiens
agaguaggaagacuuug

SEQ ID NO: 98270 - RNA, 22 nt, Homo sapiens
uucauuuaggugaggaagcaaa

SEQ ID NO: 98271 - RNA, 20 nt, Homo sapiens
gcauggcugccaaugggagc

SEQ ID NO: 98272 - RNA, 17 nt, Homo sapiens
cccacuguggcugauuu

SEQ ID NO: 98273 - RNA, 20 nt, Homo sapiens
uguuucugcagccacuauug

SEQ ID NO: 98274 - RNA, 18 nt, Homo sapiens
uaagagaaaugagcugca

SEQ ID NO: 98275 - RNA, 16 nt, Homo sapiens
agccaaggccaaagga

SEQ ID NO: 98276 - RNA, 13 nt, Homo sapiens
cugcacuccauga

SEQ ID NO: 98277 - RNA, 18 nt, Homo sapiens
ucucuugcacucaaagcu

SEQ ID NO: 98278 - RNA, 16 nt, Homo sapiens
ugcaugcugucccuua

SEQ ID NO: 98279 - RNA, 22 nt, Homo sapiens
acauguuuuucuucucccucag

SEQ ID NO: 98280 - RNA, 18 nt, Homo sapiens
uuucauaaccuagccuua

SEQ ID NO: 98281 - RNA, 17 nt, Homo sapiens
cuugaaugaugccauga

SEQ ID NO: 98282 - RNA, 15 nt, Homo sapiens
cauacccuguuacca

SEQ ID NO: 98283 - RNA, 19 nt, Homo sapiens
cuuagaauuugggggaaaa

SEQ ID NO: 98284 - RNA, 16 nt, Homo sapiens
acccaccaucaugucu

SEQ ID NO: 98285 - RNA, 13 nt, Homo sapiens
cacuugacaucaa

SEQ ID NO: 98286 - RNA, 16 nt, Homo sapiens
cuucaaccccaugaga

SEQ ID NO: 98287 - RNA, 17 nt, Homo sapiens
acuggaacacuaaugag

SEQ ID NO: 98288 - RNA, 17 nt, Homo sapiens
agauguauauauuuccu

SEQ ID NO: 98289 - RNA, 17 nt, Homo sapiens
ugugccugaagucccag

SEQ ID NO: 98290 - RNA, 20 nt, Homo sapiens
gaacagguuuaaaaaucccc

SEQ ID NO: 98291 - RNA, 19 nt, Homo sapiens
gucaggugccucaagagaa

SEQ ID NO: 98292 - RNA, 15 nt, Homo sapiens
gauauaagaaauaca

SEQ ID NO: 98293 - RNA, 15 nt, Homo sapiens
gugaaaggaaagagg

SEQ ID NO: 98294 - RNA, 18 nt, Homo sapiens
accuuuuuuauacauaaa

SEQ ID NO: 98295 - RNA, 13 nt, Homo sapiens
aggacauggacaa

SEQ ID NO: 98296 - RNA, 15 nt, Homo sapiens
uugauguucuuucac

SEQ ID NO: 98297 - RNA, 18 nt, Homo sapiens
gccaaaaaaugcuugcuu

SEQ ID NO: 98298 - RNA, 22 nt, Homo sapiens
guuuuuauggcuuuugugcauu

SEQ ID NO: 98299 - RNA, 17 nt, Homo sapiens
uauggcuuuugugcauu

SEQ ID NO: 98300 - RNA, 14 nt, Homo sapiens
uaagagucucuauu

SEQ ID NO: 98301 - RNA, 15 nt, Homo sapiens
cacagcuaacaugga

SEQ ID NO: 98302 - RNA, 23 nt, Homo sapiens
acauuuuuaagugcugcauuuaa

SEQ ID NO: 98303 - RNA, 16 nt, Homo sapiens
uguucucugaggacac

SEQ ID NO: 98304 - RNA, 19 nt, Homo sapiens
gaucagccugggcaaugug

SEQ ID NO: 98305 - RNA, 14 nt, Homo sapiens
aguugauucagcuc

SEQ ID NO: 98306 - RNA, 17 nt, Homo sapiens
cugcuuccagugaggcu

SEQ ID NO: 98307 - RNA, 19 nt, Homo sapiens
ggcacucagaagacacuga

SEQ ID NO: 98308 - RNA, 22 nt, Homo sapiens
aggaugaucuaggaagacuuug

SEQ ID NO: 98309 - RNA, 14 nt, Homo sapiens
acagaguuguuaca

SEQ ID NO: 98310 - RNA, 13 nt, Homo sapiens
auucuucugcuuc

SEQ ID NO: 98311 - RNA, 17 nt, Homo sapiens
gcccaggcaggucuuga

SEQ ID NO: 98312 - RNA, 22 nt, Homo sapiens
gauacuguaucaugacaaagac

SEQ ID NO: 98313 - RNA, 20 nt, Homo sapiens
ugagcauuuagacucucgac

SEQ ID NO: 98314 - RNA, 16 nt, Homo sapiens
cacacgcgugcacaca

SEQ ID NO: 98315 - RNA, 17 nt, Homo sapiens
aggauguucugggacac

SEQ ID NO: 98316 - RNA, 16 nt, Homo sapiens
ugacagacacaggccc

SEQ ID NO: 98317 - RNA, 21 nt, Homo sapiens
accagcagagcaccuuagaca

SEQ ID NO: 98318 - RNA, 21 nt, Homo sapiens
gggcccaaauucuuucagugg

SEQ ID NO: 98319 - RNA, 15 nt, Homo sapiens
gugagcacaaaggua

SEQ ID NO: 98320 - RNA, 18 nt, Homo sapiens
ugcuucaaccccaugaga

SEQ ID NO: 98321 - RNA, 20 nt, Homo sapiens
uggagaaaauggacguguua

SEQ ID NO: 98322 - RNA, 19 nt, Homo sapiens
ucaccaaaucagcugcuac

SEQ ID NO: 98323 - RNA, 13 nt, Homo sapiens
uugacaggauuau

SEQ ID NO: 98324 - RNA, 18 nt, Homo sapiens
uuauggcuuuugugcauu

SEQ ID NO: 98325 - RNA, 10 nt, Homo sapiens
cuucugccau

SEQ ID NO: 98326 - RNA, 13 nt, Homo sapiens
aaagauacaguua

SEQ ID NO: 98327 - RNA, 14 nt, Homo sapiens
gcccuuaccugcca

SEQ ID NO: 98328 - RNA, 14 nt, Homo sapiens
augugcacaugcac

SEQ ID NO: 98329 - RNA, 16 nt, Homo sapiens
auggaguauaugucaa

SEQ ID NO: 98330 - RNA, 19 nt, Homo sapiens
uaagaaaaaggaugcacag

SEQ ID NO: 98331 - RNA, 17 nt, Homo sapiens
cauucugccugcccagg

SEQ ID NO: 98332 - RNA, 14 nt, Homo sapiens
gugccuuacacaau

SEQ ID NO: 98333 - RNA, 16 nt, Homo sapiens
caagaccacguuucua

SEQ ID NO: 98334 - RNA, 15 nt, Homo sapiens
aucccaugagccuca

SEQ ID NO: 98335 - RNA, 16 nt, Homo sapiens
accacaaaacuuuucu

SEQ ID NO: 98336 - RNA, 13 nt, Homo sapiens
caguguacaugga

SEQ ID NO: 98337 - RNA, 18 nt, Homo sapiens
guuaucuaauauguaaca

SEQ ID NO: 98338 - RNA, 17 nt, Homo sapiens
gacagcugccugggauc

SEQ ID NO: 98339 - RNA, 19 nt, Homo sapiens
ccugugaguacuacagucc

SEQ ID NO: 98340 - RNA, 21 nt, Homo sapiens
uagacgagcaggcuucuuccc

SEQ ID NO: 98341 - RNA, 13 nt, Homo sapiens
ccucaggugaucc

SEQ ID NO: 98342 - RNA, 15 nt, Homo sapiens
cagaaucucaaauaa

SEQ ID NO: 98343 - RNA, 18 nt, Homo sapiens
agcacacugcuugugaaa

SEQ ID NO: 98344 - RNA, 17 nt, Homo sapiens
augccagcuuaucucag

SEQ ID NO: 98345 - RNA, 18 nt, Homo sapiens
ugacaucagcaauacaga

SEQ ID NO: 98346 - RNA, 16 nt, Homo sapiens
ugauucagacagcugc

SEQ ID NO: 98347 - RNA, 17 nt, Homo sapiens
cagauuguaccauugag

SEQ ID NO: 98348 - RNA, 19 nt, Homo sapiens
guuuuuaaaaaacugcuga

SEQ ID NO: 98349 - RNA, 21 nt, Homo sapiens
agugcagugagccgagaucac

SEQ ID NO: 98350 - RNA, 12 nt, Homo sapiens
ucugaaaaccaa

SEQ ID NO: 98351 - RNA, 16 nt, Homo sapiens
cuacugaggugcuaug

SEQ ID NO: 98352 - RNA, 11 nt, Homo sapiens
cagagcugcca

SEQ ID NO: 98353 - RNA, 21 nt, Homo sapiens
aggaagguagaaauaucugaa

SEQ ID NO: 98354 - RNA, 13 nt, Homo sapiens
caacugaccaguu

SEQ ID NO: 98355 - RNA, 15 nt, Homo sapiens
ugaaacaacccaaag

SEQ ID NO: 98356 - RNA, 19 nt, Homo sapiens
auuacaggaaguacuggag

SEQ ID NO: 98357 - RNA, 21 nt, Homo sapiens
uuaacuuccaauuuacauacu

SEQ ID NO: 98358 - RNA, 13 nt, Homo sapiens
uccuagcacuuug

SEQ ID NO: 98359 - RNA, 23 nt, Homo sapiens
agccaagaauucuuaaauaugug

SEQ ID NO: 98360 - RNA, 22 nt, Homo sapiens
ggagugggcccaaugcacuuug

SEQ ID NO: 98361 - RNA, 12 nt, Homo sapiens
ucaaccccauga

SEQ ID NO: 98362 - RNA, 17 nt, Homo sapiens
caaaaaacaacugacca

SEQ ID NO: 98363 - RNA, 20 nt, Homo sapiens
uaaaacaacacucacauuua

SEQ ID NO: 98364 - RNA, 21 nt, Homo sapiens
aguuccucauuagcauuuugc

SEQ ID NO: 98365 - RNA, 18 nt, Homo sapiens
auguaucaaugaguaaca

SEQ ID NO: 98366 - RNA, 14 nt, Homo sapiens
caccaagcccaguu

SEQ ID NO: 98367 - RNA, 15 nt, Homo sapiens
ucaguguacauggaa

SEQ ID NO: 98368 - RNA, 13 nt, Homo sapiens
uggcagcucagag

SEQ ID NO: 98369 - RNA, 18 nt, Homo sapiens
aaggggagaguaacccug

SEQ ID NO: 98370 - RNA, 16 nt, Homo sapiens
cagacaggaccaggga

SEQ ID NO: 98371 - RNA, 16 nt, Homo sapiens
uagcacagacccugcc

SEQ ID NO: 98372 - RNA, 23 nt, Homo sapiens
acaucuuggucagauuugaacuc

SEQ ID NO: 98373 - RNA, 23 nt, Homo sapiens
ugcagcucuggagguacgaaaag

SEQ ID NO: 98374 - RNA, 12 nt, Homo sapiens
uaaaugugaaug

SEQ ID NO: 98375 - RNA, 18 nt, Homo sapiens
cugaagucuuuguacaga

SEQ ID NO: 98376 - RNA, 13 nt, Homo sapiens
agauauaugcucu

SEQ ID NO: 98377 - RNA, 12 nt, Homo sapiens
accaucccugaa

SEQ ID NO: 98378 - RNA, 17 nt, Homo sapiens
gaaaugagcugcacucc

SEQ ID NO: 98379 - RNA, 23 nt, Homo sapiens
gugaagacaaugacuuacuguac

SEQ ID NO: 98380 - RNA, 14 nt, Homo sapiens
agcagaaaugccuu

SEQ ID NO: 98381 - RNA, 19 nt, Homo sapiens
cguuucuaugacacaugca

SEQ ID NO: 98382 - RNA, 17 nt, Homo sapiens
aaaaccagcgugugacu

SEQ ID NO: 98383 - RNA, 13 nt, Homo sapiens
acaggcacccacc

SEQ ID NO: 98384 - RNA, 16 nt, Homo sapiens
augaggaaacugcacu

SEQ ID NO: 98385 - RNA, 20 nt, Homo sapiens
ggaaacagcuaaugggacac

SEQ ID NO: 98386 - RNA, 21 nt, Homo sapiens
gaaugcucuuuacuucaugga

SEQ ID NO: 98387 - RNA, 15 nt, Homo sapiens
gaaugcgggggagca

SEQ ID NO: 98388 - RNA, 15 nt, Homo sapiens
aggucauugguggca

SEQ ID NO: 98389 - RNA, 18 nt, Homo sapiens
cugggauuacagguguga

SEQ ID NO: 98390 - RNA, 21 nt, Homo sapiens
ggaagcuccgcuuucuaccca

SEQ ID NO: 98391 - RNA, 14 nt, Homo sapiens
ucaguguacaugga

SEQ ID NO: 98392 - RNA, 18 nt, Homo sapiens
aagcgugguggacaugca

SEQ ID NO: 98393 - RNA, 16 nt, Homo sapiens
agcaucuaugugagac

SEQ ID NO: 98394 - RNA, 15 nt, Homo sapiens
agaccgugugugaaa

SEQ ID NO: 98395 - RNA, 13 nt, Homo sapiens
ccacagggugagc

SEQ ID NO: 98396 - RNA, 21 nt, Homo sapiens
guuucuuuuuucggcuaaaaa

SEQ ID NO: 98397 - RNA, 22 nt, Homo sapiens
uuccugaagaauugaaaaacca

SEQ ID NO: 98398 - RNA, 21 nt, Homo sapiens
cuuuucuguccgagcuuugaa

SEQ ID NO: 98399 - RNA, 12 nt, Homo sapiens
uagaaaaaccac

SEQ ID NO: 98400 - RNA, 17 nt, Homo sapiens
cacaugcaaggucauuu

SEQ ID NO: 98401 - RNA, 14 nt, Homo sapiens
acauacucccaucu

SEQ ID NO: 98402 - RNA, 20 nt, Homo sapiens
aauacagauagauauaugcu

SEQ ID NO: 98403 - RNA, 15 nt, Homo sapiens
guaugaggcauuugu

SEQ ID NO: 98404 - RNA, 18 nt, Homo sapiens
uccuacucugugucaggu

SEQ ID NO: 98405 - RNA, 24 nt, Homo sapiens
ggauccuccaggugcacaagcucc

SEQ ID NO: 98406 - RNA, 20 nt, Homo sapiens
auuaacuuuuauaaacuuua

SEQ ID NO: 98407 - RNA, 17 nt, Homo sapiens
agacauacuaaccagca

SEQ ID NO: 98408 - RNA, 21 nt, Homo sapiens
uuuaagaaaaaggaugcacag

SEQ ID NO: 98409 - RNA, 12 nt, Homo sapiens
cagcuaacaugg

SEQ ID NO: 98410 - RNA, 22 nt, Homo sapiens
gaaugaaugucagugugacuga

SEQ ID NO: 98411 - RNA, 11 nt, Homo sapiens
ucuggcagcuc

SEQ ID NO: 98412 - RNA, 15 nt, Homo sapiens
uaugacaucagcaau

SEQ ID NO: 98413 - RNA, 16 nt, Homo sapiens
cuuggcgcugccccug

SEQ ID NO: 98414 - RNA, 21 nt, Homo sapiens
ucugagacucgcgacaaugca

SEQ ID NO: 98415 - RNA, 21 nt, Homo sapiens
cacuauagccuaggugacaga

SEQ ID NO: 98416 - RNA, 22 nt, Homo sapiens
uguaagcucuacugaggugcua

SEQ ID NO: 98417 - RNA, 21 nt, Homo sapiens
accauuuugggguacccacug

SEQ ID NO: 98418 - RNA, 14 nt, Homo sapiens
ugaucuuugcagac

SEQ ID NO: 98419 - RNA, 14 nt, Homo sapiens
gccuggacccugug

SEQ ID NO: 98420 - RNA, 17 nt, Homo sapiens
auaccugucccccugac

SEQ ID NO: 98421 - RNA, 19 nt, Homo sapiens
cugacccugcuucaaauau

SEQ ID NO: 98422 - RNA, 18 nt, Homo sapiens
cuuacacuuuaugcacaa

SEQ ID NO: 98423 - RNA, 18 nt, Homo sapiens
gacauugcggacagccac

SEQ ID NO: 98424 - RNA, 14 nt, Homo sapiens
caggugcugccauc

SEQ ID NO: 98425 - RNA, 17 nt, Homo sapiens
uccaaaguacacuguuu

SEQ ID NO: 98426 - RNA, 15 nt, Homo sapiens
gcuugggcuucaucc

SEQ ID NO: 98427 - RNA, 12 nt, Homo sapiens
gaauuucucaca

SEQ ID NO: 98428 - RNA, 17 nt, Homo sapiens
aaauauguggaguucau

SEQ ID NO: 98429 - RNA, 20 nt, Homo sapiens
cgaucuggguucacugcaac

SEQ ID NO: 98430 - RNA, 22 nt, Homo sapiens
auucaugcugcuuagaugacau

SEQ ID NO: 98431 - RNA, 18 nt, Homo sapiens
ggcaugggaaugaauguc

SEQ ID NO: 98432 - RNA, 15 nt, Homo sapiens
ucacugcagccucaa

SEQ ID NO: 98433 - RNA, 20 nt, Homo sapiens
uauuaaggaagacaauguga

SEQ ID NO: 98434 - RNA, 20 nt, Homo sapiens
gauuuugaaauuuuuauuaa

SEQ ID NO: 98435 - RNA, 21 nt, Homo sapiens
caugagccucagcauccuggc

SEQ ID NO: 98436 - RNA, 16 nt, Homo sapiens
ugcgucucauacucac

SEQ ID NO: 98437 - RNA, 13 nt, Homo sapiens
caaccccaugaga

SEQ ID NO: 98438 - RNA, 23 nt, Homo sapiens
uggguugcaggaccucaggugag

SEQ ID NO: 98439 - RNA, 23 nt, Homo sapiens
gauaaaauaaaaagaugaagcug

SEQ ID NO: 98440 - RNA, 19 nt, Homo sapiens
cugaauuucucacaaagga

SEQ ID NO: 98441 - RNA, 20 nt, Homo sapiens
ugccucugacacacagcucu

SEQ ID NO: 98442 - RNA, 17 nt, Homo sapiens
aaugucagugugacuga

SEQ ID NO: 98443 - RNA, 14 nt, Homo sapiens
aaaaugagguacuc

SEQ ID NO: 98444 - RNA, 13 nt, Homo sapiens
guaaaaagggaaa

SEQ ID NO: 98445 - RNA, 12 nt, Homo sapiens
agacaaugacuu

SEQ ID NO: 98446 - RNA, 14 nt, Homo sapiens
guauuauaccuuuu

SEQ ID NO: 98447 - RNA, 18 nt, Homo sapiens
augaucuaggaagacuuu

SEQ ID NO: 98448 - RNA, 15 nt, Homo sapiens
ugacuuaagcacacu

SEQ ID NO: 98449 - RNA, 13 nt, Homo sapiens
ugcacacaccaga

SEQ ID NO: 98450 - RNA, 19 nt, Homo sapiens
cauguaauuaaguacuaug

SEQ ID NO: 98451 - RNA, 18 nt, Homo sapiens
gcaaaagcaucuauguga

SEQ ID NO: 98452 - RNA, 15 nt, Homo sapiens
gcccccugguggaau

SEQ ID NO: 98453 - RNA, 22 nt, Homo sapiens
caucauggagggagaagaaaga

SEQ ID NO: 98454 - RNA, 17 nt, Homo sapiens
uagccuuagaagucaca

SEQ ID NO: 98455 - RNA, 12 nt, Homo sapiens
agcucaccagcc

SEQ ID NO: 98456 - RNA, 16 nt, Homo sapiens
ucuagauacuguauca

SEQ ID NO: 98457 - RNA, 20 nt, Homo sapiens
cagccucccgaauagcuggg

SEQ ID NO: 98458 - RNA, 13 nt, Homo sapiens
ggcggugagcaau

SEQ ID NO: 98459 - RNA, 21 nt, Homo sapiens
gaacacuaaugaggaaacugc

SEQ ID NO: 98460 - RNA, 12 nt, Homo sapiens
ugggcagaggaa

SEQ ID NO: 98461 - RNA, 23 nt, Homo sapiens
acuuugaccucugcagcaauaaa

SEQ ID NO: 98462 - RNA, 19 nt, Homo sapiens
agcucugcuccucucccca

SEQ ID NO: 98463 - RNA, 15 nt, Homo sapiens
caccacaugugcaca

SEQ ID NO: 98464 - RNA, 21 nt, Homo sapiens
caugggaaugaaugucagugu

SEQ ID NO: 98465 - RNA, 22 nt, Homo sapiens
uccugugugugcgccuacagga

SEQ ID NO: 98466 - RNA, 18 nt, Homo sapiens
gcauccuggcacccggcc

SEQ ID NO: 98467 - RNA, 13 nt, Homo sapiens
auacucaccucac

SEQ ID NO: 98468 - RNA, 18 nt, Homo sapiens
cuguggaugauaaaacac

SEQ ID NO: 98469 - RNA, 18 nt, Homo sapiens
cuacuguaauuugugaua

SEQ ID NO: 98470 - RNA, 21 nt, Homo sapiens
ucuuucaguggcuaccuacau

SEQ ID NO: 98471 - RNA, 14 nt, Homo sapiens
gcuaggaacacucc

SEQ ID NO: 98472 - RNA, 21 nt, Homo sapiens
aguagagucacuggaacacua

SEQ ID NO: 98473 - RNA, 23 nt, Homo sapiens
cuauagccuaggugacagaguga

SEQ ID NO: 98474 - RNA, 17 nt, Homo sapiens
uuccucuuccacuuuga

SEQ ID NO: 98475 - RNA, 18 nt, Homo sapiens
agaaccuuuugagugccu

SEQ ID NO: 98476 - RNA, 14 nt, Homo sapiens
ugguggacaugcac

SEQ ID NO: 98477 - RNA, 13 nt, Homo sapiens
accuguuucugca

SEQ ID NO: 98478 - RNA, 13 nt, Homo sapiens
auguguguucaug

SEQ ID NO: 98479 - RNA, 12 nt, Homo sapiens
aaagcagugcau

SEQ ID NO: 98480 - RNA, 20 nt, Homo sapiens
cuuuuuaauauugauaugcu

SEQ ID NO: 98481 - RNA, 15 nt, Homo sapiens
ccaggagcagccaca

SEQ ID NO: 98482 - RNA, 17 nt, Homo sapiens
uguaagcaccccuucau

SEQ ID NO: 98483 - RNA, 22 nt, Homo sapiens
agugcuuguuccucucaucucc

SEQ ID NO: 98484 - RNA, 16 nt, Homo sapiens
acacucuugguagaag

SEQ ID NO: 98485 - RNA, 12 nt, Homo sapiens
aauaaaacaaca

SEQ ID NO: 98486 - RNA, 20 nt, Homo sapiens
uaaguacuauguaucaauga

SEQ ID NO: 98487 - RNA, 22 nt, Homo sapiens
cucuacccucuuagaaaaacca

SEQ ID NO: 98488 - RNA, 17 nt, Homo sapiens
ggaagguucuacgccag

SEQ ID NO: 98489 - RNA, 19 nt, Homo sapiens
agaaccaaaaagaggcuau

SEQ ID NO: 98490 - RNA, 19 nt, Homo sapiens
gcacuccaugagugcagcu

SEQ ID NO: 98491 - RNA, 12 nt, Homo sapiens
agagcagugugg

SEQ ID NO: 98492 - RNA, 24 nt, Homo sapiens
gaugggauggcuuggggggcucca

SEQ ID NO: 98493 - RNA, 20 nt, Homo sapiens
gcgagcccugguggcagugg

SEQ ID NO: 98494 - RNA, 14 nt, Homo sapiens
gcaggcucucaggc

SEQ ID NO: 98495 - RNA, 14 nt, Homo sapiens
ucacuggaacacua

SEQ ID NO: 98496 - RNA, 20 nt, Homo sapiens
ucugcucacauaucugucau

SEQ ID NO: 98497 - RNA, 15 nt, Homo sapiens
ugauuaugaauacag

SEQ ID NO: 98498 - RNA, 15 nt, Homo sapiens
caggugcugccaucc

SEQ ID NO: 98499 - RNA, 20 nt, Homo sapiens
aggugggaggauugcuugag

SEQ ID NO: 98500 - RNA, 15 nt, Homo sapiens
uagauauaugcucug

SEQ ID NO: 98501 - RNA, 21 nt, Homo sapiens
uccucauuagcauuuugcuaa

SEQ ID NO: 98502 - RNA, 21 nt, Homo sapiens
ugaugccaugggcccucucag

SEQ ID NO: 98503 - RNA, 12 nt, Homo sapiens
aagguaugcaau

SEQ ID NO: 98504 - RNA, 16 nt, Homo sapiens
gggcuguucacucucu

SEQ ID NO: 98505 - RNA, 21 nt, Homo sapiens
ugaaauaucaagagagguuaa

SEQ ID NO: 98506 - RNA, 15 nt, Homo sapiens
agugugacugaucuc

SEQ ID NO: 98507 - RNA, 12 nt, Homo sapiens
ccuggcaagaau

SEQ ID NO: 98508 - RNA, 20 nt, Homo sapiens
acugcaucaagaugugacau

SEQ ID NO: 98509 - RNA, 13 nt, Homo sapiens
ucuuuauaauucu

SEQ ID NO: 98510 - RNA, 17 nt, Homo sapiens
auguucucugaggacac

SEQ ID NO: 98511 - RNA, 11 nt, Homo sapiens
caaggccaaag

SEQ ID NO: 98512 - RNA, 22 nt, Homo sapiens
ccccuguagagugggagcugag

SEQ ID NO: 98513 - RNA, 14 nt, Homo sapiens
uugugguuaaucug

SEQ ID NO: 98514 - RNA, 13 nt, Homo sapiens
aggcuaugugagc

SEQ ID NO: 98515 - RNA, 22 nt, Homo sapiens
ccugaagucuuuguacagacaa

SEQ ID NO: 98516 - RNA, 21 nt, Homo sapiens
aaccuuuugagugccuuacac

SEQ ID NO: 98517 - RNA, 12 nt, Homo sapiens
agaucacgccac

SEQ ID NO: 98518 - RNA, 13 nt, Homo sapiens
cauggaaguacua

SEQ ID NO: 98519 - RNA, 22 nt, Homo sapiens
aucuuccaaggguacuaaggaa

SEQ ID NO: 98520 - RNA, 15 nt, Homo sapiens
ggacuuggaagcucc

SEQ ID NO: 98521 - RNA, 22 nt, Homo sapiens
ugggacuacaggugugagucac

SEQ ID NO: 98522 - RNA, 14 nt, Homo sapiens
accaucaagccacc

SEQ ID NO: 98523 - RNA, 16 nt, Homo sapiens
gcugggacuacaggug

SEQ ID NO: 98524 - RNA, 20 nt, Homo sapiens
aacucuacccuggcacuaua

SEQ ID NO: 98525 - RNA, 17 nt, Homo sapiens
gcugauggugcaaugac

SEQ ID NO: 98526 - RNA, 24 nt, Homo sapiens
ugcacuuuguucuggcucuuccag

SEQ ID NO: 98527 - RNA, 16 nt, Homo sapiens
ugcuugagcucaggag

SEQ ID NO: 98528 - RNA, 19 nt, Homo sapiens
cacauguccaagaagccca

SEQ ID NO: 98529 - RNA, 21 nt, Homo sapiens
gcaugacacgaauauugcuga

SEQ ID NO: 98530 - RNA, 22 nt, Homo sapiens
uaccugaagucuuuguacagac

SEQ ID NO: 98531 - RNA, 19 nt, Homo sapiens
uauaagauucauauuuacu

SEQ ID NO: 98532 - RNA, 15 nt, Homo sapiens
gggagagccuuccag

SEQ ID NO: 98533 - RNA, 20 nt, Homo sapiens
cuuggugucgggcaugacac

SEQ ID NO: 98534 - RNA, 23 nt, Homo sapiens
gaagagccuugcggaagguucua

SEQ ID NO: 98535 - RNA, 11 nt, Homo sapiens
uaugcauuuga

SEQ ID NO: 98536 - RNA, 22 nt, Homo sapiens
ugggggaucacagccucugaaa

SEQ ID NO: 98537 - RNA, 14 nt, Homo sapiens
aggaagacuuugga

SEQ ID NO: 98538 - RNA, 19 nt, Homo sapiens
aaaguuuaaaaagcucaca

SEQ ID NO: 98539 - RNA, 12 nt, Homo sapiens
gguuucauucug

SEQ ID NO: 98540 - RNA, 20 nt, Homo sapiens
augagguacucuccuggaaa

SEQ ID NO: 98541 - RNA, 23 nt, Homo sapiens
gagugggcccaaugcacuuuguu

SEQ ID NO: 98542 - RNA, 13 nt, Homo sapiens
cauacucaccuca

SEQ ID NO: 98543 - RNA, 14 nt, Homo sapiens
gccagggucucacu

SEQ ID NO: 98544 - RNA, 23 nt, Homo sapiens
caaagccuccuccagccgccaug

SEQ ID NO: 98545 - RNA, 18 nt, Homo sapiens
uucuugaacaaacuggaa

SEQ ID NO: 98546 - RNA, 18 nt, Homo sapiens
ugggcccaaugcacuuug

SEQ ID NO: 98547 - RNA, 16 nt, Homo sapiens
agcgugagccacugca

SEQ ID NO: 98548 - RNA, 23 nt, Homo sapiens
ugcacagcuaacauggaaguacu

SEQ ID NO: 98549 - RNA, 14 nt, Homo sapiens
auacaguaucucag

SEQ ID NO: 98550 - RNA, 16 nt, Homo sapiens
agcccaccuuggcuca

SEQ ID NO: 98551 - RNA, 13 nt, Homo sapiens
uauauaagccaaa

SEQ ID NO: 98552 - RNA, 12 nt, Homo sapiens
aagaaugcucuu

SEQ ID NO: 98553 - RNA, 13 nt, Homo sapiens
uccagccccugga

SEQ ID NO: 98554 - RNA, 14 nt, Homo sapiens
uggcuuuugugcau

SEQ ID NO: 98555 - RNA, 17 nt, Homo sapiens
accacaagaaggaugau

SEQ ID NO: 98556 - RNA, 20 nt, Homo sapiens
gaacauguuuuucuucuccc

SEQ ID NO: 98557 - RNA, 16 nt, Homo sapiens
cuuuugagugccuuac

SEQ ID NO: 98558 - RNA, 22 nt, Homo sapiens
accucugccugaagucacacag

SEQ ID NO: 98559 - RNA, 20 nt, Homo sapiens
ugggugacagagcaagugag

SEQ ID NO: 98560 - RNA, 16 nt, Homo sapiens
cugcuucaaauauuuc

SEQ ID NO: 98561 - RNA, 16 nt, Homo sapiens
uggcccacgcacuucg

SEQ ID NO: 98562 - RNA, 18 nt, Homo sapiens
cuugagcccagagugaac

SEQ ID NO: 98563 - RNA, 23 nt, Homo sapiens
gugcuaggaacacuccuucacag

SEQ ID NO: 98564 - RNA, 13 nt, Homo sapiens
cuuagacaguccc

SEQ ID NO: 98565 - RNA, 14 nt, Homo sapiens
gcuuuugugcauua

SEQ ID NO: 98566 - RNA, 14 nt, Homo sapiens
aagauaaaugugcu

SEQ ID NO: 98567 - RNA, 19 nt, Homo sapiens
aagugguacuaacuuuccu

SEQ ID NO: 98568 - RNA, 22 nt, Homo sapiens
uucuuccccccaaaacugauua

SEQ ID NO: 98569 - RNA, 19 nt, Homo sapiens
ucagcuuguaaauagcuca

SEQ ID NO: 98570 - RNA, 15 nt, Homo sapiens
ggcacaccgggcacu

SEQ ID NO: 98571 - RNA, 18 nt, Homo sapiens
ggaggccauuuguguuua

SEQ ID NO: 98572 - RNA, 14 nt, Homo sapiens
cucugcauguuaca

SEQ ID NO: 98573 - RNA, 22 nt, Homo sapiens
gcacaugccucucucaggccaa

SEQ ID NO: 98574 - RNA, 14 nt, Homo sapiens
agaaauguguuauc

SEQ ID NO: 98575 - RNA, 21 nt, Homo sapiens
cuuccaacucaaacucuuaaa

SEQ ID NO: 98576 - RNA, 21 nt, Homo sapiens
agauauuuugcuuugugauuu

SEQ ID NO: 98577 - RNA, 20 nt, Homo sapiens
uaagcucuacugaggugcua

SEQ ID NO: 98578 - RNA, 14 nt, Homo sapiens
agccuggacccugu

SEQ ID NO: 98579 - RNA, 21 nt, Homo sapiens
gucucuuuaaugucacaggca

SEQ ID NO: 98580 - RNA, 16 nt, Homo sapiens
uccaugauguuuucca

SEQ ID NO: 98581 - RNA, 16 nt, Homo sapiens
ugaguacguugugcau

SEQ ID NO: 98582 - RNA, 22 nt, Homo sapiens
uaucuugaagacuuuucuuuca

SEQ ID NO: 98583 - RNA, 19 nt, Homo sapiens
cgccagauucuuuccugag

SEQ ID NO: 98584 - RNA, 21 nt, Homo sapiens
cucugagacucgcgacaaugc

SEQ ID NO: 98585 - RNA, 16 nt, Homo sapiens
agcgugugacuacucc

SEQ ID NO: 98586 - RNA, 15 nt, Homo sapiens
agagaaggggcccaa

SEQ ID NO: 98587 - RNA, 16 nt, Homo sapiens
auguguguucaugcac

SEQ ID NO: 98588 - RNA, 15 nt, Homo sapiens
uagugugugcaauuu

SEQ ID NO: 98589 - RNA, 15 nt, Homo sapiens
auucuccugccucag

SEQ ID NO: 98590 - RNA, 17 nt, Homo sapiens
ggaagggggcugggaca

SEQ ID NO: 98591 - RNA, 17 nt, Homo sapiens
gaaccaaaaagaggcua

SEQ ID NO: 98592 - RNA, 17 nt, Homo sapiens
caugugcacaugcacgu

SEQ ID NO: 98593 - RNA, 23 nt, Homo sapiens
aacuuuguuuagcccaaaaccaa

SEQ ID NO: 98594 - RNA, 13 nt, Homo sapiens
cauccaguaucuu

SEQ ID NO: 98595 - RNA, 20 nt, Homo sapiens
ugcggaaugaaccacaucuu

SEQ ID NO: 98596 - RNA, 17 nt, Homo sapiens
gagaaaugccagugugc

SEQ ID NO: 98597 - RNA, 17 nt, Homo sapiens
caaaaagaggcuaugug

SEQ ID NO: 98598 - RNA, 22 nt, Homo sapiens
gcaauacagacuacuucuuccc

SEQ ID NO: 98599 - RNA, 22 nt, Homo sapiens
agugguggugaacagaacaaaa

SEQ ID NO: 98600 - RNA, 20 nt, Homo sapiens
gucagauuugaacucuucaa

SEQ ID NO: 98601 - RNA, 15 nt, Homo sapiens
aucuagauacuguau

SEQ ID NO: 98602 - RNA, 13 nt, Homo sapiens
cucauuugucaca

SEQ ID NO: 98603 - RNA, 21 nt, Homo sapiens
agaguaacccugucuaaugaa

SEQ ID NO: 98604 - RNA, 22 nt, Homo sapiens
ugcccacacuugggagcaaaag

SEQ ID NO: 98605 - RNA, 16 nt, Homo sapiens
uaaaacccaagugccu

SEQ ID NO: 98606 - RNA, 15 nt, Homo sapiens
augccucucucaggc

SEQ ID NO: 98607 - RNA, 15 nt, Homo sapiens
gcuucaguggcagcu

SEQ ID NO: 98608 - RNA, 13 nt, Homo sapiens
aagacuucauccc

SEQ ID NO: 98609 - RNA, 16 nt, Homo sapiens
cugucaauuacaggaa

SEQ ID NO: 98610 - RNA, 19 nt, Homo sapiens
aucauccacugugccaugu

SEQ ID NO: 98611 - RNA, 14 nt, Homo sapiens
cguugugcauuugg

SEQ ID NO: 98612 - RNA, 16 nt, Homo sapiens
cacuaaggugugcucu

SEQ ID NO: 98613 - RNA, 21 nt, Homo sapiens
cucugagaguagagucacugg

SEQ ID NO: 98614 - RNA, 20 nt, Homo sapiens
ggaugaaaaaauaacacugu

SEQ ID NO: 98615 - RNA, 18 nt, Homo sapiens
gaucuaggaagacuuugg

SEQ ID NO: 98616 - RNA, 11 nt, Homo sapiens
ggccaguguga

SEQ ID NO: 98617 - RNA, 14 nt, Homo sapiens
uccacugugccaug

SEQ ID NO: 98618 - RNA, 20 nt, Homo sapiens
ugggugaauaauacaguauc

SEQ ID NO: 98619 - RNA, 13 nt, Homo sapiens
cuggagugcagug

SEQ ID NO: 98620 - RNA, 17 nt, Homo sapiens
acuugacaucaacugca

SEQ ID NO: 98621 - RNA, 21 nt, Homo sapiens
ucagugccaaaaacaacaaca

SEQ ID NO: 98622 - RNA, 13 nt, Homo sapiens
ucauaaugacuua

SEQ ID NO: 98623 - RNA, 18 nt, Homo sapiens
aauacagauauaagaaau

SEQ ID NO: 98624 - RNA, 15 nt, Homo sapiens
agugggggaucacag

SEQ ID NO: 98625 - RNA, 16 nt, Homo sapiens
cuuagacagucccugc

SEQ ID NO: 98626 - RNA, 23 nt, Homo sapiens
cucuucuccaccucccacaaagg

SEQ ID NO: 98627 - RNA, 21 nt, Homo sapiens
gauuauuggaaauuuguuaua

SEQ ID NO: 98628 - RNA, 22 nt, Homo sapiens
acagccaugauucuuuugccca

SEQ ID NO: 98629 - RNA, 15 nt, Homo sapiens
ucuacccuggcacua

SEQ ID NO: 98630 - RNA, 15 nt, Homo sapiens
cucacauaucuguca

SEQ ID NO: 98631 - RNA, 19 nt, Homo sapiens
cuacauggaguauauguca

SEQ ID NO: 98632 - RNA, 18 nt, Homo sapiens
auggcugccaaugggagc

SEQ ID NO: 98633 - RNA, 18 nt, Homo sapiens
cgcugugucagcauagaa

SEQ ID NO: 98634 - RNA, 13 nt, Homo sapiens
uagaaaaaccacc

SEQ ID NO: 98635 - RNA, 13 nt, Homo sapiens
augagaugaugcc

SEQ ID NO: 98636 - RNA, 17 nt, Homo sapiens
uccagagagcagugugg

SEQ ID NO: 98637 - RNA, 14 nt, Homo sapiens
cucugccugaaguc

SEQ ID NO: 98638 - RNA, 15 nt, Homo sapiens
cgaguuacagacaaa

SEQ ID NO: 98639 - RNA, 20 nt, Homo sapiens
cucuggacaggcauguucuc

SEQ ID NO: 98640 - RNA, 15 nt, Homo sapiens
uaagagaaaugagcu

SEQ ID NO: 98641 - RNA, 14 nt, Homo sapiens
acagcuaacaugga

SEQ ID NO: 98642 - RNA, 20 nt, Homo sapiens
cccaggccuccccagcaccu

SEQ ID NO: 98643 - RNA, 16 nt, Homo sapiens
gagccuggcaagaaug

SEQ ID NO: 98644 - RNA, 17 nt, Homo sapiens
agagaggguggugaccu

SEQ ID NO: 98645 - RNA, 23 nt, Homo sapiens
cuguacaaaguagaagucuuaga

SEQ ID NO: 98646 - RNA, 14 nt, Homo sapiens
uggaacacuaauga

SEQ ID NO: 98647 - RNA, 15 nt, Homo sapiens
caaaucagcugcuac

SEQ ID NO: 98648 - RNA, 16 nt, Homo sapiens
ccccaggcugggcugu

SEQ ID NO: 98649 - RNA, 18 nt, Homo sapiens
cagauagauauaugcucu

SEQ ID NO: 98650 - RNA, 15 nt, Homo sapiens
ccacggccaggccag

SEQ ID NO: 98651 - RNA, 17 nt, Homo sapiens
guggcagcucaccucuc

SEQ ID NO: 98652 - RNA, 20 nt, Homo sapiens
uaauuuuuuugagacagagu

SEQ ID NO: 98653 - RNA, 21 nt, Homo sapiens
uaagagggagggagggcucca

SEQ ID NO: 98654 - RNA, 13 nt, Homo sapiens
uucugaaagggac

SEQ ID NO: 98655 - RNA, 19 nt, Homo sapiens
caauuacaggaaguacugg

SEQ ID NO: 98656 - RNA, 23 nt, Homo sapiens
auggcugccaaugggagcucaug

SEQ ID NO: 98657 - RNA, 20 nt, Homo sapiens
aucuccaaaauaaaacuuuu

SEQ ID NO: 98658 - RNA, 19 nt, Homo sapiens
gcuguucacucucucgucu

SEQ ID NO: 98659 - RNA, 13 nt, Homo sapiens
gaagaaaaaggau

SEQ ID NO: 98660 - RNA, 20 nt, Homo sapiens
gaagguucuacgccagggga

SEQ ID NO: 98661 - RNA, 19 nt, Homo sapiens
cagagucucacuguugccc

SEQ ID NO: 98662 - RNA, 18 nt, Homo sapiens
acuucuuauacauuugau

SEQ ID NO: 98663 - RNA, 16 nt, Homo sapiens
cccauugauguacuuu

SEQ ID NO: 98664 - RNA, 14 nt, Homo sapiens
ucagccucccaaag

SEQ ID NO: 98665 - RNA, 20 nt, Homo sapiens
ccugaagucacacagugagu

SEQ ID NO: 98666 - RNA, 16 nt, Homo sapiens
ggcuucaguggcagcu

SEQ ID NO: 98667 - RNA, 22 nt, Homo sapiens
cauagagagcaagacgcugugc

SEQ ID NO: 98668 - RNA, 17 nt, Homo sapiens
aaagacuguacaaagua

SEQ ID NO: 98669 - RNA, 15 nt, Homo sapiens
agggggugcccuccc

SEQ ID NO: 98670 - RNA, 13 nt, Homo sapiens
aacaccucugcac

SEQ ID NO: 98671 - RNA, 13 nt, Homo sapiens
cucuacaaaaagc

SEQ ID NO: 98672 - RNA, 22 nt, Homo sapiens
agacagaguuuucacucuuauu

SEQ ID NO: 98673 - RNA, 14 nt, Homo sapiens
aagcauuuacuuug

SEQ ID NO: 98674 - RNA, 18 nt, Homo sapiens
accauuuagcacacugcu

SEQ ID NO: 98675 - RNA, 13 nt, Homo sapiens
uuagaaaaaccac

SEQ ID NO: 98676 - RNA, 17 nt, Homo sapiens
ucaccacaugugcacau

SEQ ID NO: 98677 - RNA, 20 nt, Homo sapiens
aggguaucaggugcugccau

SEQ ID NO: 98678 - RNA, 23 nt, Homo sapiens
auuacaagcgugagccacugcac

SEQ ID NO: 98679 - RNA, 20 nt, Homo sapiens
aggugauccacccaccucag

SEQ ID NO: 98680 - RNA, 15 nt, Homo sapiens
aaguaaggcaugguu

SEQ ID NO: 98681 - RNA, 17 nt, Homo sapiens
aucagccugcuccagcu

SEQ ID NO: 98682 - RNA, 17 nt, Homo sapiens
uugaggauuuugaucca

SEQ ID NO: 98683 - RNA, 20 nt, Homo sapiens
cugaucucucgugauugaua

SEQ ID NO: 98684 - RNA, 14 nt, Homo sapiens
cucugguccauaga

SEQ ID NO: 98685 - RNA, 19 nt, Homo sapiens
cacgugguccuaaucuucu

SEQ ID NO: 98686 - RNA, 19 nt, Homo sapiens
uacuggagaaaauggacgu

SEQ ID NO: 98687 - RNA, 16 nt, Homo sapiens
ccuggccccucagggu

SEQ ID NO: 98688 - RNA, 17 nt, Homo sapiens
auaauacaguaucucag

SEQ ID NO: 98689 - RNA, 19 nt, Homo sapiens
agcugggagaaccaaaaag

SEQ ID NO: 98690 - RNA, 19 nt, Homo sapiens
ugggauuacaggugugaac

SEQ ID NO: 98691 - RNA, 22 nt, Homo sapiens
uuuguuaguaugaggcauuugu

SEQ ID NO: 98692 - RNA, 15 nt, Homo sapiens
gauuucuguuuagau

SEQ ID NO: 98693 - RNA, 20 nt, Homo sapiens
uguuggccaaagccaaagcu

SEQ ID NO: 98694 - RNA, 16 nt, Homo sapiens
ccagacacauguccaa

SEQ ID NO: 98695 - RNA, 12 nt, Homo sapiens
uauguugcccag

SEQ ID NO: 98696 - RNA, 13 nt, Homo sapiens
gagguacucuccu

SEQ ID NO: 98697 - RNA, 14 nt, Homo sapiens
cuuauacauuugau

SEQ ID NO: 98698 - RNA, 15 nt, Homo sapiens
uacaaaagcauguga

SEQ ID NO: 98699 - RNA, 18 nt, Homo sapiens
auaaaguuuuaugagaaa

SEQ ID NO: 98700 - RNA, 15 nt, Homo sapiens
aucaagaugugacau

SEQ ID NO: 98701 - RNA, 19 nt, Homo sapiens
uacagacaacaaaccuguu

SEQ ID NO: 98702 - RNA, 24 nt, Homo sapiens
agcgugcauaaguuaacuuccaau

SEQ ID NO: 98703 - RNA, 18 nt, Homo sapiens
ugagaaaugccagugugc

SEQ ID NO: 98704 - RNA, 16 nt, Homo sapiens
uucugggacacaguuc

SEQ ID NO: 98705 - RNA, 18 nt, Homo sapiens
ccacagggugagcacucu

SEQ ID NO: 98706 - RNA, 15 nt, Homo sapiens
aacacuguacugcaa

SEQ ID NO: 98707 - RNA, 21 nt, Homo sapiens
uucuugauaaagaagauucug

SEQ ID NO: 98708 - RNA, 21 nt, Homo sapiens
aaauucuguuuuucuaggccu

SEQ ID NO: 98709 - RNA, 21 nt, Homo sapiens
aauucucuuauccaacaucaa

SEQ ID NO: 98710 - RNA, 14 nt, Homo sapiens
cagaugcaccagcc

SEQ ID NO: 98711 - RNA, 20 nt, Homo sapiens
uacuaacuuuccuucauuca

SEQ ID NO: 98712 - RNA, 20 nt, Homo sapiens
aauucucauuugucacacac

SEQ ID NO: 98713 - RNA, 20 nt, Homo sapiens
ggugggagugggcccaaugc

SEQ ID NO: 98714 - RNA, 21 nt, Homo sapiens
aagacugaguacguugugcau

SEQ ID NO: 98715 - RNA, 21 nt, Homo sapiens
auauuaaggaagacaauguga

SEQ ID NO: 98716 - RNA, 18 nt, Homo sapiens
augcacagcuaacaugga

SEQ ID NO: 98717 - RNA, 18 nt, Homo sapiens
acagccucugaaaaccaa

SEQ ID NO: 98718 - RNA, 16 nt, Homo sapiens
ugaagucacacaguga

SEQ ID NO: 98719 - RNA, 17 nt, Homo sapiens
acauuccugaugcuucu

SEQ ID NO: 98720 - RNA, 18 nt, Homo sapiens
uaggaggaacagguuuaa

SEQ ID NO: 98721 - RNA, 15 nt, Homo sapiens
gucacucuggcagcu

SEQ ID NO: 98722 - RNA, 11 nt, Homo sapiens
aguuugcaguu

SEQ ID NO: 98723 - RNA, 16 nt, Homo sapiens
aaaaggggggugggag

SEQ ID NO: 98724 - RNA, 18 nt, Homo sapiens
cauguguguucaugcaca

SEQ ID NO: 98725 - RNA, 16 nt, Homo sapiens
gucuggaaugcagugg

SEQ ID NO: 98726 - RNA, 12 nt, Homo sapiens
acaguaucucag

SEQ ID NO: 98727 - RNA, 11 nt, Homo sapiens
cgaguuacaga

SEQ ID NO: 98728 - RNA, 22 nt, Homo sapiens
uucuacucgaguuacagacaaa

SEQ ID NO: 98729 - RNA, 20 nt, Homo sapiens
gcccaggcuggcgugcagug

SEQ ID NO: 98730 - RNA, 17 nt, Homo sapiens
caucacuucccuacaug

SEQ ID NO: 98731 - RNA, 20 nt, Homo sapiens
cgcuacccgggaagggggcu

SEQ ID NO: 98732 - RNA, 17 nt, Homo sapiens
cccaauauuuaccagac

SEQ ID NO: 98733 - RNA, 21 nt, Homo sapiens
gccaguuggucccccuuccau

SEQ ID NO: 98734 - RNA, 15 nt, Homo sapiens
acagggaggugaccc

SEQ ID NO: 98735 - RNA, 21 nt, Homo sapiens
cccacccuccuuucaccacau

SEQ ID NO: 98736 - RNA, 22 nt, Homo sapiens
ccacaagacccuugugguccca

SEQ ID NO: 98737 - RNA, 14 nt, Homo sapiens
cacaugugcacaug

SEQ ID NO: 98738 - RNA, 21 nt, Homo sapiens
ugggcagagcagagaccaucc

SEQ ID NO: 98739 - RNA, 13 nt, Homo sapiens
ccaucaagccacc

SEQ ID NO: 98740 - RNA, 23 nt, Homo sapiens
ucucuugauucauaaugacuuaa

SEQ ID NO: 98741 - RNA, 22 nt, Homo sapiens
cucacacggacacucaaaagcu

SEQ ID NO: 98742 - RNA, 13 nt, Homo sapiens
agcgugagccacu

SEQ ID NO: 98743 - RNA, 18 nt, Homo sapiens
cuccugggcuaagugauc

SEQ ID NO: 98744 - RNA, 19 nt, Homo sapiens
cuggccagaugcaccagcc

SEQ ID NO: 98745 - RNA, 19 nt, Homo sapiens
cucuuucccucccuuccuc

SEQ ID NO: 98746 - RNA, 14 nt, Homo sapiens
caaaugcccagcuu

SEQ ID NO: 98747 - RNA, 13 nt, Homo sapiens
acuguugcccagg

SEQ ID NO: 98748 - RNA, 20 nt, Homo sapiens
cagccugggugacagagcaa

SEQ ID NO: 98749 - RNA, 13 nt, Homo sapiens
ucuuccccagaua

SEQ ID NO: 98750 - RNA, 19 nt, Homo sapiens
cacugcacuauagccuagg

SEQ ID NO: 98751 - RNA, 18 nt, Homo sapiens
aucacuucccuacaugga

SEQ ID NO: 98752 - RNA, 14 nt, Homo sapiens
agccuuagaaguca

SEQ ID NO: 98753 - RNA, 19 nt, Homo sapiens
augucucuuuaaugucaca

SEQ ID NO: 98754 - RNA, 19 nt, Homo sapiens
ccacugugaagagaaccau

SEQ ID NO: 98755 - RNA, 14 nt, Homo sapiens
aauauugcugaugg

SEQ ID NO: 98756 - RNA, 20 nt, Homo sapiens
aggugggaggaucucuugag

SEQ ID NO: 98757 - RNA, 18 nt, Homo sapiens
ccaaggguacuaaggaau

SEQ ID NO: 98758 - RNA, 20 nt, Homo sapiens
uugagcucaggaguuugaga

SEQ ID NO: 98759 - RNA, 16 nt, Homo sapiens
auauuguuuucagugu

SEQ ID NO: 98760 - RNA, 16 nt, Homo sapiens
cuguuggccaguguga

SEQ ID NO: 98761 - RNA, 14 nt, Homo sapiens
caguuagcucucaa

SEQ ID NO: 98762 - RNA, 21 nt, Homo sapiens
uuguagagccagggucucacu

SEQ ID NO: 98763 - RNA, 14 nt, Homo sapiens
uacuuguggacaca

SEQ ID NO: 98764 - RNA, 17 nt, Homo sapiens
gacaccuugacagggca

SEQ ID NO: 98765 - RNA, 14 nt, Homo sapiens
guugugugugcuuu

SEQ ID NO: 98766 - RNA, 15 nt, Homo sapiens
ggcuguaucccauga

SEQ ID NO: 98767 - RNA, 22 nt, Homo sapiens
cuccagcucaccagccccagug

SEQ ID NO: 98768 - RNA, 18 nt, Homo sapiens
cacuuacacuuuaugcac

SEQ ID NO: 98769 - RNA, 19 nt, Homo sapiens
uuuuuaagugcugcauuua

SEQ ID NO: 98770 - RNA, 17 nt, Homo sapiens
caggugccucaagagaa

SEQ ID NO: 98771 - RNA, 15 nt, Homo sapiens
cuuacuuaaccugaa

SEQ ID NO: 98772 - RNA, 18 nt, Homo sapiens
cugagugggggaucacag

SEQ ID NO: 98773 - RNA, 15 nt, Homo sapiens
ugaguccuggcaugg

SEQ ID NO: 98774 - RNA, 22 nt, Homo sapiens
ucagaagacacugaugggcaac

SEQ ID NO: 98775 - RNA, 20 nt, Homo sapiens
ggaugcauucccuacagauu

SEQ ID NO: 98776 - RNA, 14 nt, Homo sapiens
auuguuucuuucaa

SEQ ID NO: 98777 - RNA, 15 nt, Homo sapiens
cuggaugcagccuca

SEQ ID NO: 98778 - RNA, 21 nt, Homo sapiens
auauuaagaaagacuaucuaa

SEQ ID NO: 98779 - RNA, 19 nt, Homo sapiens
cauauucaggaagcucagg

SEQ ID NO: 98780 - RNA, 18 nt, Homo sapiens
uacucgaguuacagacaa

SEQ ID NO: 98781 - RNA, 20 nt, Homo sapiens
ucucacucugucgcccaguc

SEQ ID NO: 98782 - RNA, 18 nt, Homo sapiens
cucucaggccaaacucac

SEQ ID NO: 98783 - RNA, 14 nt, Homo sapiens
cagcaggcucucag

SEQ ID NO: 98784 - RNA, 15 nt, Homo sapiens
acaccuugacagggc

SEQ ID NO: 98785 - RNA, 15 nt, Homo sapiens
ugccaaaaacaacaa

SEQ ID NO: 98786 - RNA, 21 nt, Homo sapiens
cagggucucacuauguugccc

SEQ ID NO: 98787 - RNA, 12 nt, Homo sapiens
ugacacacagcu

SEQ ID NO: 98788 - RNA, 23 nt, Homo sapiens
accucugccugaagucacacagu

SEQ ID NO: 98789 - RNA, 18 nt, Homo sapiens
aaugucagugugacugau

SEQ ID NO: 98790 - RNA, 23 nt, Homo sapiens
gugccaagcagagguugggaggc

SEQ ID NO: 98791 - RNA, 16 nt, Homo sapiens
ggcccaaugcacuuug

SEQ ID NO: 98792 - RNA, 18 nt, Homo sapiens
aaaaguuuaaaaagcuca

SEQ ID NO: 98793 - RNA, 17 nt, Homo sapiens
uccuucauucaacccac

SEQ ID NO: 98794 - RNA, 21 nt, Homo sapiens
aaugcccagccccuucugacc

SEQ ID NO: 98795 - RNA, 15 nt, Homo sapiens
accacaugugcacau

SEQ ID NO: 98796 - RNA, 23 nt, Homo sapiens
cccauguaagcaccccuucauuu

SEQ ID NO: 98797 - RNA, 19 nt, Homo sapiens
cucauuugucacacacuuu

SEQ ID NO: 98798 - RNA, 22 nt, Homo sapiens
acaggguuuugccauguuggcc

SEQ ID NO: 98799 - RNA, 14 nt, Homo sapiens
aucugaaaauguau

SEQ ID NO: 98800 - RNA, 13 nt, Homo sapiens
ucaagaugugaca

SEQ ID NO: 98801 - RNA, 20 nt, Homo sapiens
auuuacauacucugcuuaga

SEQ ID NO: 98802 - RNA, 18 nt, Homo sapiens
ccagcaggcucucaggcc

SEQ ID NO: 98803 - RNA, 23 nt, Homo sapiens
uaucuaauauguaacaagccacc

SEQ ID NO: 98804 - RNA, 20 nt, Homo sapiens
aagcacaugccucucucagg

SEQ ID NO: 98805 - RNA, 21 nt, Homo sapiens
cggccccugcugguucagggu

SEQ ID NO: 98806 - RNA, 21 nt, Homo sapiens
cuguaauccuagcacuuuggg

SEQ ID NO: 98807 - RNA, 19 nt, Homo sapiens
ucacaagucagcacuaccu

SEQ ID NO: 98808 - RNA, 15 nt, Homo sapiens
auuuugauccaagcu

SEQ ID NO: 98809 - RNA, 15 nt, Homo sapiens
aggcucgagcaugcc

SEQ ID NO: 98810 - RNA, 19 nt, Homo sapiens
ucaccaacgucugugccau

SEQ ID NO: 98811 - RNA, 19 nt, Homo sapiens
cugaguacguugugcauuu

SEQ ID NO: 98812 - RNA, 18 nt, Homo sapiens
cuccugugucuugcaaug

SEQ ID NO: 98813 - RNA, 20 nt, Homo sapiens
cagaauucucagaaucucaa

SEQ ID NO: 98814 - RNA, 21 nt, Homo sapiens
auucuucuccacuuucuagcc

SEQ ID NO: 98815 - RNA, 20 nt, Homo sapiens
aaaaacaacugaccaguugu

SEQ ID NO: 98816 - RNA, 22 nt, Homo sapiens
cgagauagccaaggccaaagga

SEQ ID NO: 98817 - RNA, 22 nt, Homo sapiens
caccauauuaccacagacauac

SEQ ID NO: 98818 - RNA, 22 nt, Homo sapiens
cuucuuccccccaaaacugauu

SEQ ID NO: 98819 - RNA, 19 nt, Homo sapiens
auuuuguuuuugucuuaaa

SEQ ID NO: 98820 - RNA, 19 nt, Homo sapiens
auuugaacucuucaaucuc

SEQ ID NO: 98821 - RNA, 15 nt, Homo sapiens
ugagaccaaccuggg

SEQ ID NO: 98822 - RNA, 18 nt, Homo sapiens
aaggggcccaaauucuuu

SEQ ID NO: 98823 - RNA, 17 nt, Homo sapiens
ccugaaacaacccaaag

SEQ ID NO: 98824 - RNA, 18 nt, Homo sapiens
gcagccuggggucugaca

SEQ ID NO: 98825 - RNA, 14 nt, Homo sapiens
ggcaugguggccca

SEQ ID NO: 98826 - RNA, 16 nt, Homo sapiens
ugccaggaagccagca

SEQ ID NO: 98827 - RNA, 22 nt, Homo sapiens
gggccaguuggucccccuucca

SEQ ID NO: 98828 - RNA, 12 nt, Homo sapiens
uacguugugcau

SEQ ID NO: 98829 - RNA, 15 nt, Homo sapiens
gauagauauaugcuc

SEQ ID NO: 98830 - RNA, 15 nt, Homo sapiens
ugagugggugaauaa

SEQ ID NO: 98831 - RNA, 17 nt, Homo sapiens
ucuuaauucuuagcuca

SEQ ID NO: 98832 - RNA, 20 nt, Homo sapiens
cuggcgugcaguggugcgau

SEQ ID NO: 98833 - RNA, 21 nt, Homo sapiens
aucuugaauuguaaggaauga

SEQ ID NO: 98834 - RNA, 21 nt, Homo sapiens
cgcaaccaccaccaaccacug

SEQ ID NO: 98835 - RNA, 22 nt, Homo sapiens
aagcagugcaugcugucccuua

SEQ ID NO: 98836 - RNA, 19 nt, Homo sapiens
acuuaagcacacuugacau

SEQ ID NO: 98837 - RNA, 12 nt, Homo sapiens
uucuuuccugag

SEQ ID NO: 98838 - RNA, 22 nt, Homo sapiens
ucuugaaauauaggaacuuaaa

SEQ ID NO: 98839 - RNA, 12 nt, Homo sapiens
aacguggcugcu

SEQ ID NO: 98840 - RNA, 13 nt, Homo sapiens
guuucuccaagca

SEQ ID NO: 98841 - RNA, 15 nt, Homo sapiens
guacguugugcauuu

SEQ ID NO: 98842 - RNA, 20 nt, Homo sapiens
uggggcagcuugaggguugg

SEQ ID NO: 98843 - RNA, 13 nt, Homo sapiens
acaugugcacaug

SEQ ID NO: 98844 - RNA, 23 nt, Homo sapiens
agugguggugaacagaacaaaag

SEQ ID NO: 98845 - RNA, 22 nt, Homo sapiens
caucuugcucugcugacagaca

SEQ ID NO: 98846 - RNA, 16 nt, Homo sapiens
gggacucaaugcacug

SEQ ID NO: 98847 - RNA, 19 nt, Homo sapiens
cucacauuuauucugcuca

SEQ ID NO: 98848 - RNA, 15 nt, Homo sapiens
guaggaagacuuugg

SEQ ID NO: 98849 - RNA, 13 nt, Homo sapiens
gagagccuuccag

SEQ ID NO: 98850 - RNA, 21 nt, Homo sapiens
aaaguggugagaggcauccag

SEQ ID NO: 98851 - RNA, 12 nt, Homo sapiens
cagauacuuggg

SEQ ID NO: 98852 - RNA, 15 nt, Homo sapiens
ucuggcucuuccagg

SEQ ID NO: 98853 - RNA, 14 nt, Homo sapiens
caggugugagucac

SEQ ID NO: 98854 - RNA, 13 nt, Homo sapiens
aagcauucuucaa

SEQ ID NO: 98855 - RNA, 14 nt, Homo sapiens
ucacagccucugaa

SEQ ID NO: 98856 - RNA, 21 nt, Homo sapiens
cacucacacggacacucaaaa

SEQ ID NO: 98857 - RNA, 20 nt, Homo sapiens
ggagcaaaaucgaugcagug

SEQ ID NO: 98858 - RNA, 16 nt, Homo sapiens
accugucccccugaca

SEQ ID NO: 98859 - RNA, 15 nt, Homo sapiens
auggagggagaagaa

SEQ ID NO: 98860 - RNA, 21 nt, Homo sapiens
gaugaucuaggaagacuuugg

SEQ ID NO: 98861 - RNA, 20 nt, Homo sapiens
cuuuaagagaaaugagcugc

SEQ ID NO: 98862 - RNA, 16 nt, Homo sapiens
acagcuccuucugucc

SEQ ID NO: 98863 - RNA, 18 nt, Homo sapiens
cuuucugcuaucaaagag

SEQ ID NO: 98864 - RNA, 18 nt, Homo sapiens
gauuaauuaaaacacaac

SEQ ID NO: 98865 - RNA, 22 nt, Homo sapiens
cacacccagcccacuucugcca

SEQ ID NO: 98866 - RNA, 15 nt, Homo sapiens
ucccaucacuucccu

SEQ ID NO: 98867 - RNA, 16 nt, Homo sapiens
acuugagaauuacccu

SEQ ID NO: 98868 - RNA, 14 nt, Homo sapiens
guaugaggcauuug

SEQ ID NO: 98869 - RNA, 22 nt, Homo sapiens
gcagcagggagggcuucugcca

SEQ ID NO: 98870 - RNA, 19 nt, Homo sapiens
acgcaaccaccaccaacca

SEQ ID NO: 98871 - RNA, 17 nt, Homo sapiens
uagucucuugauucaua

SEQ ID NO: 98872 - RNA, 13 nt, Homo sapiens
uggucugacccac

SEQ ID NO: 98873 - RNA, 14 nt, Homo sapiens
aucccucauccuca

SEQ ID NO: 98874 - RNA, 19 nt, Homo sapiens
agccagcaggcucucaggc

SEQ ID NO: 98875 - RNA, 18 nt, Homo sapiens
ugaacucuucaaucucuu

SEQ ID NO: 98876 - RNA, 20 nt, Homo sapiens
gauguucugacccugcuuca

SEQ ID NO: 98877 - RNA, 15 nt, Homo sapiens
ugccugaagucacac

SEQ ID NO: 98878 - RNA, 19 nt, Homo sapiens
aaagcgugguggacaugca

SEQ ID NO: 98879 - RNA, 20 nt, Homo sapiens
ucuuugcagacaggcaagca

SEQ ID NO: 98880 - RNA, 12 nt, Homo sapiens
gacagcucuuau

SEQ ID NO: 98881 - RNA, 20 nt, Homo sapiens
uaugcaugaaguaauaugca

SEQ ID NO: 98882 - RNA, 17 nt, Homo sapiens
cagauagauauaugcuc

SEQ ID NO: 98883 - RNA, 13 nt, Homo sapiens
ccagaugccaggg

SEQ ID NO: 98884 - RNA, 17 nt, Homo sapiens
gaccaguuguugauaac

SEQ ID NO: 98885 - RNA, 19 nt, Homo sapiens
uccuucacagaugggugcu

SEQ ID NO: 98886 - RNA, 23 nt, Homo sapiens
gccuggggucugacaauaccucg

SEQ ID NO: 98887 - RNA, 18 nt, Homo sapiens
cuuuucauaaccuagccu

SEQ ID NO: 98888 - RNA, 20 nt, Homo sapiens
augagccuggcaagaaugug

SEQ ID NO: 98889 - RNA, 13 nt, Homo sapiens
guaacuuacuuag

SEQ ID NO: 98890 - RNA, 17 nt, Homo sapiens
guggugagaggcaucca

SEQ ID NO: 98891 - RNA, 19 nt, Homo sapiens
uguuucugcagccacuauu

SEQ ID NO: 98892 - RNA, 14 nt, Homo sapiens
gcuaugcauuugaa

SEQ ID NO: 98893 - RNA, 14 nt, Homo sapiens
auugauguacuuua

SEQ ID NO: 98894 - RNA, 18 nt, Homo sapiens
agacaggguuuugccaug

SEQ ID NO: 98895 - RNA, 14 nt, Homo sapiens
aggaaaggcuccag

SEQ ID NO: 98896 - RNA, 23 nt, Homo sapiens
gcauaaagucagggguucccuuu

SEQ ID NO: 98897 - RNA, 14 nt, Homo sapiens
cccugucucaaaaa

SEQ ID NO: 98898 - RNA, 13 nt, Homo sapiens
gagaaaugagcug

SEQ ID NO: 98899 - RNA, 19 nt, Homo sapiens
cucaaacucuuaaaaccca

SEQ ID NO: 98900 - RNA, 12 nt, Homo sapiens
acggacacucaa

SEQ ID NO: 98901 - RNA, 22 nt, Homo sapiens
cagccucugaaaaccaauguuc

SEQ ID NO: 98902 - RNA, 24 nt, Homo sapiens
caacacucacauuuauucugcuca

SEQ ID NO: 98903 - RNA, 20 nt, Homo sapiens
guauuuuguuuuugucuuaa

SEQ ID NO: 98904 - RNA, 23 nt, Homo sapiens
caaagcgugguggacaugcacag

SEQ ID NO: 98905 - RNA, 18 nt, Homo sapiens
ggagggucugcagggaau

SEQ ID NO: 98906 - RNA, 20 nt, Homo sapiens
uauaguuaucaaucucuagu

SEQ ID NO: 98907 - RNA, 19 nt, Homo sapiens
agaaauaucugaaaaugua

SEQ ID NO: 98908 - RNA, 17 nt, Homo sapiens
agucugauucccaagcu

SEQ ID NO: 98909 - RNA, 20 nt, Homo sapiens
cagagugagacucugucuca

SEQ ID NO: 98910 - RNA, 20 nt, Homo sapiens
cauuccuguucccaugagau

SEQ ID NO: 98911 - RNA, 16 nt, Homo sapiens
cagaaguuugagauca

SEQ ID NO: 98912 - RNA, 15 nt, Homo sapiens
ugccaugccagcuua

SEQ ID NO: 98913 - RNA, 22 nt, Homo sapiens
cugggcagaggaaagcaaagga

SEQ ID NO: 98914 - RNA, 16 nt, Homo sapiens
cauauuaccacagaca

SEQ ID NO: 98915 - RNA, 16 nt, Homo sapiens
gcugggauuacaggug

SEQ ID NO: 98916 - RNA, 21 nt, Homo sapiens
auucacuagguucgaauccag

SEQ ID NO: 98917 - RNA, 13 nt, Homo sapiens
ucugacacacagc

SEQ ID NO: 98918 - RNA, 15 nt, Homo sapiens
uccuucauucaaccc

SEQ ID NO: 98919 - RNA, 16 nt, Homo sapiens
uggggauaugauuuaa

SEQ ID NO: 98920 - RNA, 14 nt, Homo sapiens
aguagcugggacua

SEQ ID NO: 98921 - RNA, 22 nt, Homo sapiens
aagcugagaugggacaggauca

SEQ ID NO: 98922 - RNA, 21 nt, Homo sapiens
acuccagaauuucccaaagca

SEQ ID NO: 98923 - RNA, 17 nt, Homo sapiens
aaaacacaaaaguuucu

SEQ ID NO: 98924 - RNA, 15 nt, Homo sapiens
cuugcacccaugugu

SEQ ID NO: 98925 - RNA, 21 nt, Homo sapiens
uaacuaaaagguaugcaauca

SEQ ID NO: 98926 - RNA, 15 nt, Homo sapiens
ucuuccacuuugaua

SEQ ID NO: 98927 - RNA, 14 nt, Homo sapiens
uggucagauuugaa

SEQ ID NO: 98928 - RNA, 21 nt, Homo sapiens
gcuuauacacuuacacuuuau

SEQ ID NO: 98929 - RNA, 13 nt, Homo sapiens
ggauguucuagca

SEQ ID NO: 98930 - RNA, 14 nt, Homo sapiens
ugggguaugggaga

SEQ ID NO: 98931 - RNA, 14 nt, Homo sapiens
gccugccucuucuc

SEQ ID NO: 98932 - RNA, 21 nt, Homo sapiens
cuucagugccaaaaacaacaa

SEQ ID NO: 98933 - RNA, 15 nt, Homo sapiens
aguugauucagcucu

SEQ ID NO: 98934 - RNA, 19 nt, Homo sapiens
ccuguagucccauugaugu

SEQ ID NO: 98935 - RNA, 15 nt, Homo sapiens
gagagaaggggccca

SEQ ID NO: 98936 - RNA, 16 nt, Homo sapiens
agauguauauauuucc

SEQ ID NO: 98937 - RNA, 18 nt, Homo sapiens
ugcccggcaggguccuag

SEQ ID NO: 98938 - RNA, 20 nt, Homo sapiens
uuaugagaaaugccagugug

SEQ ID NO: 98939 - RNA, 16 nt, Homo sapiens
caggcaagcaccuccu

SEQ ID NO: 98940 - RNA, 21 nt, Homo sapiens
gacacagcucuucuccaggcu

SEQ ID NO: 98941 - RNA, 19 nt, Homo sapiens
agacaaugacuuacuguac

SEQ ID NO: 98942 - RNA, 15 nt, Homo sapiens
aaagaguaggaagac

SEQ ID NO: 98943 - RNA, 17 nt, Homo sapiens
acaugccucucucaggc

SEQ ID NO: 98944 - RNA, 18 nt, Homo sapiens
gagccacugcaccgggcc

SEQ ID NO: 98945 - RNA, 13 nt, Homo sapiens
gugcccccaugua

SEQ ID NO: 98946 - RNA, 18 nt, Homo sapiens
gcaucaagaugugacaug

SEQ ID NO: 98947 - RNA, 14 nt, Homo sapiens
aucucucgugauug

SEQ ID NO: 98948 - RNA, 23 nt, Feline calicivirus
caaguaucccuuugggcugccgc

SEQ ID NO: 98949 - RNA, 20 nt, Feline calicivirus
cuuugggcugccgcauuugc

SEQ ID NO: 98950 - RNA, 21 nt, Feline calicivirus
gcauuugcgccuaaccccagg

SEQ ID NO: 98951 - RNA, 15 nt, Feline calicivirus
gggcugccgcauuug

SEQ ID NO: 98952 - RNA, 22 nt, Feline calicivirus
gggcugccgcauuugcgccuaa

SEQ ID NO: 98953 - RNA, 14 nt, Feline calicivirus
gcgccuaaccccag

SEQ ID NO: 98954 - RNA, 13 nt, Feline calicivirus
ugggcugccgcau

SEQ ID NO: 98955 - RNA, 17 nt, Feline calicivirus
ugggcugccgcauuugc

SEQ ID NO: 98956 - RNA, 19 nt, Feline calicivirus
uuugggcugccgcauuugc

SEQ ID NO: 98957 - RNA, 13 nt, Feline calicivirus
uaucccuuugggc

SEQ ID NO: 98958 - RNA, 23 nt, Feline calicivirus
uaucccuuugggcugccgcauuu

SEQ ID NO: 98959 - RNA, 11 nt, Feline calicivirus
ccgcauuugcg

SEQ ID NO: 98960 - RNA, 23 nt, Feline calicivirus
ccgcauuugcgccuaaccccagg

SEQ ID NO: 98961 - RNA, 11 nt, Feline calicivirus
gccgcauuugc

SEQ ID NO: 98962 - RNA, 14 nt, Feline calicivirus
gggcugccgcauuu

SEQ ID NO: 98963 - RNA, 15 nt, Feline calicivirus
ggcugccgcauuugc

SEQ ID NO: 98964 - RNA, 22 nt, Feline calicivirus
ggcugccgcauuugcgccuaac

SEQ ID NO: 98965 - RNA, 13 nt, Feline calicivirus
cugccgcauuugc

SEQ ID NO: 98966 - RNA, 14 nt, Feline calicivirus
cugccgcauuugcg

SEQ ID NO: 98967 - RNA, 18 nt, Feline calicivirus
cugccgcauuugcgccua

SEQ ID NO: 98968 - RNA, 16 nt, Feline calicivirus
ugggcugccgcauuug

SEQ ID NO: 98969 - RNA, 18 nt, Feline calicivirus
ugggcugccgcauuugcg

SEQ ID NO: 98970 - RNA, 20 nt, Feline calicivirus
uugggcugccgcauuugcgc

SEQ ID NO: 98971 - RNA, 17 nt, Feline calicivirus
aguaucccuuugggcug

SEQ ID NO: 98972 - RNA, 20 nt, Feline calicivirus
ccuuugggcugccgcauuug

SEQ ID NO: 98973 - RNA, 20 nt, Feline calicivirus
cccuuugggcugccgcauuu

SEQ ID NO: 98974 - RNA, 22 nt, Feline calicivirus
cccuuugggcugccgcauuugc

SEQ ID NO: 98975 - RNA, 19 nt, Feline calicivirus
auuugcgccuaaccccagg

SEQ ID NO: 98976 - RNA, 16 nt, Feline calicivirus
gcauuugcgccuaacc

SEQ ID NO: 98977 - RNA, 20 nt, Feline calicivirus
gcauuugcgccuaaccccag

SEQ ID NO: 98978 - RNA, 18 nt, Feline calicivirus
guaucccuuugggcugcc

SEQ ID NO: 98979 - RNA, 12 nt, Feline calicivirus
ugccgcauuugc

SEQ ID NO: 98980 - RNA, 13 nt, Feline calicivirus
ugccgcauuugcg

SEQ ID NO: 98981 - RNA, 14 nt, Feline calicivirus
cauuugcgccuaac

SEQ ID NO: 98982 - RNA, 20 nt, Feline calicivirus
aucccuuugggcugccgcau

SEQ ID NO: 98983 - RNA, 23 nt, Feline calicivirus
cacaaguaucccuuugggcugcc

SEQ ID NO: 98984 - RNA, 14 nt, Feline foamy virus
cagcuuagucaucu

SEQ ID NO: 98985 - RNA, 17 nt, Feline foamy virus
auuauuugccuugcuca

SEQ ID NO: 98986 - RNA, 17 nt, Feline foamy virus
caacuuucggcaugcaa

SEQ ID NO: 98987 - RNA, 16 nt, Feline foamy virus
auaucgaaacuaugua

SEQ ID NO: 98988 - RNA, 14 nt, Feline foamy virus
auaguaacuaucaa

SEQ ID NO: 98989 - RNA, 18 nt, Feline foamy virus
aguugcauguuucugcua

SEQ ID NO: 98990 - RNA, 20 nt, Feline foamy virus
aguaaauaaaguacagcuua

SEQ ID NO: 98991 - RNA, 18 nt, Feline foamy virus
aggguagaggaaauguuc

SEQ ID NO: 98992 - RNA, 20 nt, Feline foamy virus
accauguauucuuuagucau

SEQ ID NO: 98993 - RNA, 18 nt, Feline foamy virus
agauacuuagaguaugaa

SEQ ID NO: 98994 - RNA, 14 nt, Feline foamy virus
agaaacugcaauag

SEQ ID NO: 98995 - RNA, 14 nt, Feline foamy virus
agaagaacaacuuu

SEQ ID NO: 98996 - RNA, 17 nt, Feline foamy virus
acuuucggcaugcaaca

SEQ ID NO: 98997 - RNA, 14 nt, Feline foamy virus
aagagaagaacaac

SEQ ID NO: 98998 - RNA, 22 nt, Feline foamy virus
aaauaaaguacagcuuagucau

SEQ ID NO: 98999 - RNA, 23 nt, Feline foamy virus
aagauuuugauauguauuuugcu

SEQ ID NO: 99000 - RNA, 14 nt, Feline foamy virus
aaguagauuuugca

SEQ ID NO: 99001 - RNA, 17 nt, Feline foamy virus
aagucaccgucuuacau

SEQ ID NO: 99002 - RNA, 20 nt, Feline foamy virus
aauauuauuugccuugcuca

SEQ ID NO: 99003 - RNA, 12 nt, Feline foamy virus
aaaccauguauu

SEQ ID NO: 99004 - RNA, 22 nt, Feline foamy virus
aaaccauguauucuuuagucau

SEQ ID NO: 99005 - RNA, 22 nt, Feline foamy virus
aaaaccauguauucuuuaguca

SEQ ID NO: 99006 - RNA, 23 nt, Feline foamy virus
aaaaccauguauucuuuagucau

SEQ ID NO: 99007 - RNA, 19 nt, Feline foamy virus
caugacucgugcacaggaa

SEQ ID NO: 99008 - RNA, 11 nt, Feline foamy virus
ccauguauucu

SEQ ID NO: 99009 - RNA, 18 nt, Feline foamy virus
cgaaacuguguacuggaa

SEQ ID NO: 99010 - RNA, 20 nt, Feline foamy virus
cuagagccuacucuucuuga

SEQ ID NO: 99011 - RNA, 18 nt, Feline foamy virus
cuugaacuguucgaaucc

SEQ ID NO: 99012 - RNA, 23 nt, Feline foamy virus
gguggcagagugguuauguaucu

SEQ ID NO: 99013 - RNA, 16 nt, Feline foamy virus
gcuccuuuaggguaga

SEQ ID NO: 99014 - RNA, 15 nt, Feline foamy virus
gccuacucuucuuga

SEQ ID NO: 99015 - RNA, 21 nt, Feline foamy virus
gacuagagguguggaaacuuu

SEQ ID NO: 99016 - RNA, 12 nt, Feline foamy virus
gagcuaagucac

SEQ ID NO: 99017 - RNA, 14 nt, Feline foamy virus
aaacugcaauagua

SEQ ID NO: 99018 - RNA, 13 nt, Feline foamy virus
aaacuauguaucc

SEQ ID NO: 99019 - RNA, 21 nt, Feline foamy virus
aaacuguguacuggaaguaga

SEQ ID NO: 99020 - RNA, 18 nt, Feline foamy virus
cuuuaaaaccauguauuc

SEQ ID NO: 99021 - RNA, 22 nt, Feline foamy virus
cuuuacauguucaagacauaua

SEQ ID NO: 99022 - RNA, 12 nt, Feline foamy virus
cuuuagucaucu

SEQ ID NO: 99023 - RNA, 13 nt, Feline foamy virus
cuuuagucaucua

SEQ ID NO: 99024 - RNA, 22 nt, Feline foamy virus
uggaaaaauauauuccugacua

SEQ ID NO: 99025 - RNA, 20 nt, Feline foamy virus
ugcuauuagcagcauauaaa

SEQ ID NO: 99026 - RNA, 22 nt, Feline foamy virus
uucauuuaagguucgaaacugu

SEQ ID NO: 99027 - RNA, 12 nt, Feline foamy virus
uucgaauccuuu

SEQ ID NO: 99028 - RNA, 14 nt, Feline foamy virus
uuagucaucuagau

SEQ ID NO: 99029 - RNA, 16 nt, Feline foamy virus
uuagucaucugaugau

SEQ ID NO: 99030 - RNA, 17 nt, Feline foamy virus
aaguacagcuuagucau

SEQ ID NO: 99031 - RNA, 13 nt, Feline foamy virus
aaguagauuuugc

SEQ ID NO: 99032 - RNA, 13 nt, Feline foamy virus
aauguucuaaucu

SEQ ID NO: 99033 - RNA, 13 nt, Feline foamy virus
uucuuuagucauc

SEQ ID NO: 99034 - RNA, 15 nt, Feline foamy virus
uuuaagagacugaaa

SEQ ID NO: 99035 - RNA, 14 nt, Feline foamy virus
uuuagucaucuaga

SEQ ID NO: 99036 - RNA, 21 nt, Feline foamy virus
uuugauauguauuuugcuuga

SEQ ID NO: 99037 - RNA, 16 nt, Feline foamy virus
aacugcaauaguaacu

SEQ ID NO: 99038 - RNA, 19 nt, Feline foamy virus
uauaaaaggguuaugguag

SEQ ID NO: 99039 - RNA, 22 nt, Feline foamy virus
uauaaaaggguuaugguagauu

SEQ ID NO: 99040 - RNA, 16 nt, Feline foamy virus
ucuuuagucaucuaga

SEQ ID NO: 99041 - RNA, 17 nt, Feline foamy virus
ucuuuagucaucuagau

SEQ ID NO: 99042 - RNA, 18 nt, Feline foamy virus
uaguaacuaucaauguua

SEQ ID NO: 99043 - RNA, 14 nt, Feline foamy virus
uaguugcauguuuc

SEQ ID NO: 99044 - RNA, 16 nt, Feline foamy virus
uagaggaaauguucua

SEQ ID NO: 99045 - RNA, 19 nt, Feline foamy virus
uagauacuuagaguaugaa

SEQ ID NO: 99046 - RNA, 15 nt, Feline foamy virus
uaaaaccauguauuc

SEQ ID NO: 99047 - RNA, 22 nt, Feline foamy virus
gucacgagaaaagaaccuagaa

SEQ ID NO: 99048 - RNA, 18 nt, Feline foamy virus
gucaucuagauacuuaga

SEQ ID NO: 99049 - RNA, 20 nt, Feline foamy virus
ggagcucuucucacagacuu

SEQ ID NO: 99050 - RNA, 23 nt, Feline foamy virus
ggagcuaagucaccgucuuacau

SEQ ID NO: 99051 - RNA, 14 nt, Feline foamy virus
uaagucaccgucuu

SEQ ID NO: 99052 - RNA, 22 nt, Feline foamy virus
uaaguagugaauaaauuacucu

SEQ ID NO: 99053 - RNA, 16 nt, Feline foamy virus
uaagauaaguagugaa

SEQ ID NO: 99054 - RNA, 20 nt, Feline foamy virus
uaagauuuugauauguauuu

SEQ ID NO: 99055 - RNA, 15 nt, Feline foamy virus
uaaaggguugcuuca

SEQ ID NO: 99056 - RNA, 18 nt, Feline foamy virus
uaaaguacagcuuaguca

SEQ ID NO: 99057 - RNA, 20 nt, Feline foamy virus
uaaaaggguuaugguagauu

SEQ ID NO: 99058 - RNA, 13 nt, Feline foamy virus
uaguaacuaucaa

SEQ ID NO: 99059 - RNA, 14 nt, Feline foamy virus
uagcagcauauaaa

SEQ ID NO: 99060 - RNA, 14 nt, Feline foamy virus
uaucuuaaaggguu

SEQ ID NO: 99061 - RNA, 23 nt, Feline foamy virus
uauuagcagcauauaaaaggguu

SEQ ID NO: 99062 - RNA, 15 nt, Feline foamy virus
uauuauuugccuugc

SEQ ID NO: 99063 - RNA, 20 nt, Feline foamy virus
uauuauuugccuugcucaaa

SEQ ID NO: 99064 - RNA, 18 nt, Feline foamy virus
gcacaggaagcuccuuua

SEQ ID NO: 99065 - RNA, 14 nt, Feline foamy virus
gagaaaagaaccua

SEQ ID NO: 99066 - RNA, 15 nt, Feline foamy virus
cuggggacuagaggu

SEQ ID NO: 99067 - RNA, 16 nt, Feline foamy virus
cugucauacucgggga

SEQ ID NO: 99068 - RNA, 19 nt, Feline foamy virus
cugucauacucggggaaag

SEQ ID NO: 99069 - RNA, 16 nt, Feline foamy virus
cuuagucaucugauga

SEQ ID NO: 99070 - RNA, 21 nt, Feline foamy virus
auuguacgggagcucuucuca

SEQ ID NO: 99071 - RNA, 20 nt, Feline foamy virus
caaaauuaaauaaauuggcu

SEQ ID NO: 99072 - RNA, 21 nt, Feline foamy virus
auuacucucguucauguauuc

SEQ ID NO: 99073 - RNA, 15 nt, Feline foamy virus
ccuaucuuaaagggu

SEQ ID NO: 99074 - RNA, 17 nt, Feline foamy virus
ccuaucuuaaaggguug

SEQ ID NO: 99075 - RNA, 21 nt, Feline foamy virus
cauguauucuuuagucaucua

SEQ ID NO: 99076 - RNA, 19 nt, Feline foamy virus
cauguucaagacauauaaa

SEQ ID NO: 99077 - RNA, 14 nt, Feline foamy virus
cauacucggggaaa

SEQ ID NO: 99078 - RNA, 21 nt, Feline foamy virus
ccagcuuggguaagauuuuga

SEQ ID NO: 99079 - RNA, 21 nt, Feline foamy virus
aguugcauguuucugcuauua

SEQ ID NO: 99080 - RNA, 13 nt, Feline foamy virus
agagguguggaaa

SEQ ID NO: 99081 - RNA, 21 nt, Feline foamy virus
auccuuuaaaaccauguauuc

SEQ ID NO: 99082 - RNA, 19 nt, Feline foamy virus
auaaaguacagcuuaguca

SEQ ID NO: 99083 - RNA, 17 nt, Feline foamy virus
acucucguucauguauu

SEQ ID NO: 99084 - RNA, 18 nt, Feline foamy virus
acugaaaagcaugacucg

SEQ ID NO: 99085 - RNA, 13 nt, Feline foamy virus
acaggaagcuccu

SEQ ID NO: 99086 - RNA, 18 nt, Feline foamy virus
accauguauucuuuaguc

SEQ ID NO: 99087 - RNA, 21 nt, Feline foamy virus
uuuaguugcauguuucugcua

SEQ ID NO: 99088 - RNA, 15 nt, Feline foamy virus
uguauucuuuaguca

SEQ ID NO: 99089 - RNA, 19 nt, Feline foamy virus
uguauucuuuagucaucua

SEQ ID NO: 99090 - RNA, 16 nt, Feline foamy virus
uguaggagcuaaguca

SEQ ID NO: 99091 - RNA, 23 nt, Feline foamy virus
uguaggagcuaagucaccgucuu

SEQ ID NO: 99092 - RNA, 18 nt, Feline foamy virus
uuacucucguucauguau

SEQ ID NO: 99093 - RNA, 21 nt, Feline foamy virus
uuagucaucugaugaugucac

SEQ ID NO: 99094 - RNA, 11 nt, Feline foamy virus
uuaaaggguug

SEQ ID NO: 99095 - RNA, 14 nt, Feline foamy virus
uuaaaggguugcuu

SEQ ID NO: 99096 - RNA, 16 nt, Feline foamy virus
uguucaagacauauaa

SEQ ID NO: 99097 - RNA, 17 nt, Feline foamy virus
uguucaagacauauaaa

SEQ ID NO: 99098 - RNA, 21 nt, Feline foamy virus
uguucaagacauauaaagggu

SEQ ID NO: 99099 - RNA, 20 nt, Feline foamy virus
uccuuuuuuagguacuuagu

SEQ ID NO: 99100 - RNA, 16 nt, Feline foamy virus
ucgaaacuauguaucc

SEQ ID NO: 99101 - RNA, 20 nt, Feline foamy virus
ucgaaacuguguacuggaag

SEQ ID NO: 99102 - RNA, 14 nt, Feline foamy virus
ucggcaugcaacag

SEQ ID NO: 99103 - RNA, 22 nt, Feline foamy virus
ucguucauguauucauaucgaa

SEQ ID NO: 99104 - RNA, 19 nt, Feline foamy virus
ugacuaaacuuccugggga

SEQ ID NO: 99105 - RNA, 22 nt, Feline foamy virus
ugacuaaacuuccuggggacua

SEQ ID NO: 99106 - RNA, 15 nt, Feline foamy virus
ugaaaagcaugacuc

SEQ ID NO: 99107 - RNA, 20 nt, Feline foamy virus
cugacuaaacuuccugggga

SEQ ID NO: 99108 - RNA, 23 nt, Feline foamy virus
cugacuaaacuuccuggggacua

SEQ ID NO: 99109 - RNA, 22 nt, Feline foamy virus
cuaagucaccgucuuacaucua

SEQ ID NO: 99110 - RNA, 13 nt, Feline foamy virus
cuagauacuuaga

SEQ ID NO: 99111 - RNA, 18 nt, Feline foamy virus
cgugcacaggaagcuccu

SEQ ID NO: 99112 - RNA, 19 nt, Feline foamy virus
gaaacugcaauaguaacua

SEQ ID NO: 99113 - RNA, 13 nt, Feline foamy virus
ggaacucuuacau

SEQ ID NO: 99114 - RNA, 11 nt, Feline foamy virus
ggaagcuccuu

SEQ ID NO: 99115 - RNA, 15 nt, Feline foamy virus
uacuggaaguagauu

SEQ ID NO: 99116 - RNA, 18 nt, Feline foamy virus
uaccuggauuaugcaacu

SEQ ID NO: 99117 - RNA, 12 nt, Feline foamy virus
uacagcuuaguc

SEQ ID NO: 99118 - RNA, 13 nt, Feline foamy virus
uacagcuuaguca

SEQ ID NO: 99119 - RNA, 18 nt, Feline foamy virus
uacagcuuagucaucuga

SEQ ID NO: 99120 - RNA, 13 nt, Feline foamy virus
guugcauguuucu

SEQ ID NO: 99121 - RNA, 17 nt, Feline foamy virus
guugcauguuucugcua

SEQ ID NO: 99122 - RNA, 23 nt, Feline foamy virus
cauaucgaaacuauguauccuuu

SEQ ID NO: 99123 - RNA, 18 nt, Feline foamy virus
cagagugguuauguaucu

SEQ ID NO: 99124 - RNA, 16 nt, Feline foamy virus
cagcuuagucaucuga

SEQ ID NO: 99125 - RNA, 13 nt, Feline foamy virus
auguuucugcuau

SEQ ID NO: 99126 - RNA, 17 nt, Feline foamy virus
auguucuaaucuccuau

SEQ ID NO: 99127 - RNA, 15 nt, Feline foamy virus
auguauucauaucga

SEQ ID NO: 99128 - RNA, 18 nt, Feline foamy virus
auguauucuuuagucauc

SEQ ID NO: 99129 - RNA, 22 nt, Feline foamy virus
caagacauauaaaggguggaaa

SEQ ID NO: 99130 - RNA, 23 nt, Feline foamy virus
caagacauauaaaggguggaaaa

SEQ ID NO: 99131 - RNA, 21 nt, Feline foamy virus
agucaccgucuuacaucuaga

SEQ ID NO: 99132 - RNA, 20 nt, Feline foamy virus
aguacagcuuagucaucuga

SEQ ID NO: 99133 - RNA, 14 nt, Feline foamy virus
auauguauuuugcu

SEQ ID NO: 99134 - RNA, 14 nt, Feline foamy virus
auauaaaaggguua

SEQ ID NO: 99135 - RNA, 14 nt, Feline foamy virus
auaaguagugaaua

SEQ ID NO: 99136 - RNA, 14 nt, Feline foamy virus
agauaaguagugaa

SEQ ID NO: 99137 - RNA, 20 nt, Feline foamy virus
acuuugcugccucugcuuca

SEQ ID NO: 99138 - RNA, 15 nt, Feline foamy virus
aggaagcuccuuuag

SEQ ID NO: 99139 - RNA, 19 nt, Feline foamy virus
uccuuuaaaaccauguauu

SEQ ID NO: 99140 - RNA, 22 nt, Feline foamy virus
uccuuuaggguagaggaaaugu

SEQ ID NO: 99141 - RNA, 13 nt, Feline foamy virus
ucauacucgggga

SEQ ID NO: 99142 - RNA, 18 nt, Feline foamy virus
ucuuaaaggguugcuuca

SEQ ID NO: 99143 - RNA, 21 nt, Feline foamy virus
ugaugucacgagaaaagaacc

SEQ ID NO: 99144 - RNA, 15 nt, Feline foamy virus
ugagauugagacucu

SEQ ID NO: 99145 - RNA, 19 nt, Feline foamy virus
uggaaguagauuuugcaua

SEQ ID NO: 99146 - RNA, 12 nt, Feline foamy virus
uggaacucuuac

SEQ ID NO: 99147 - RNA, 17 nt, Feline foamy virus
uggaacucuuacaucac

SEQ ID NO: 99148 - RNA, 19 nt, Feline foamy virus
uggaacucuuacaucaccu

SEQ ID NO: 99149 - RNA, 15 nt, Feline foamy virus
uucuuuagucaucua

SEQ ID NO: 99150 - RNA, 18 nt, Feline foamy virus
uuugcugccucugcuuca

SEQ ID NO: 99151 - RNA, 18 nt, Feline foamy virus
uuuggaacucuuacauca

SEQ ID NO: 99152 - RNA, 19 nt, Feline foamy virus
uuuggaacucuuacaucac

SEQ ID NO: 99153 - RNA, 12 nt, Feline foamy virus
uuuuagguacuu

SEQ ID NO: 99154 - RNA, 21 nt, Feline foamy virus
uggcagagugguuauguaucu

SEQ ID NO: 99155 - RNA, 18 nt, Feline foamy virus
uggauuaugcaacuuugu

SEQ ID NO: 99156 - RNA, 21 nt, Feline foamy virus
ugguguaggagcuaagucacc

SEQ ID NO: 99157 - RNA, 17 nt, Feline foamy virus
ugucauacucggggaaa

SEQ ID NO: 99158 - RNA, 16 nt, Feline foamy virus
uuauuugccuugcuca

SEQ ID NO: 99159 - RNA, 14 nt, Feline foamy virus
uuaaaaccauguau

SEQ ID NO: 99160 - RNA, 22 nt, Feline foamy virus
uguucaagacauauaaagggug

SEQ ID NO: 99161 - RNA, 14 nt, Feline foamy virus
uguucuaaucuccu

SEQ ID NO: 99162 - RNA, 20 nt, Feline foamy virus
ugcacaggaagcuccuuuag

SEQ ID NO: 99163 - RNA, 20 nt, Feline foamy virus
ugcuugaauauuauuugccu

SEQ ID NO: 99164 - RNA, 20 nt, Feline foamy virus
uggaaguagauuuugcauaa

SEQ ID NO: 99165 - RNA, 14 nt, Feline foamy virus
ugcguccaggguga

SEQ ID NO: 99166 - RNA, 16 nt, Feline foamy virus
ugagacucuccagcuu

SEQ ID NO: 99167 - RNA, 14 nt, Feline foamy virus
ugaaaagcaugacu

SEQ ID NO: 99168 - RNA, 19 nt, Feline foamy virus
ugauauguauuuugcuuga

SEQ ID NO: 99169 - RNA, 11 nt, Feline foamy virus
aacucuuacau

SEQ ID NO: 99170 - RNA, 13 nt, Feline foamy virus
aagauaaguagug

SEQ ID NO: 99171 - RNA, 22 nt, Feline foamy virus
aauccuuuuuuagguacuuagu

SEQ ID NO: 99172 - RNA, 13 nt, Feline foamy virus
aauaaaguacagc

SEQ ID NO: 99173 - RNA, 15 nt, Feline foamy virus
uucaagacauauaaa

SEQ ID NO: 99174 - RNA, 18 nt, Feline foamy virus
uaugaaaaaagaaacugc

SEQ ID NO: 99175 - RNA, 18 nt, Feline foamy virus
ucaccgucuuacaucuag

SEQ ID NO: 99176 - RNA, 16 nt, Feline foamy virus
uauuagcagcauauaa

SEQ ID NO: 99177 - RNA, 18 nt, Feline foamy virus
uauuauuugccuugcuca

SEQ ID NO: 99178 - RNA, 20 nt, Feline foamy virus
uccuuuaaaaccauguauuc

SEQ ID NO: 99179 - RNA, 20 nt, Feline foamy virus
ucgaaacuauguauccuuua

SEQ ID NO: 99180 - RNA, 12 nt, Feline foamy virus
ucgaauccuuuu

SEQ ID NO: 99181 - RNA, 13 nt, Feline foamy virus
ucuuacaucuaga

SEQ ID NO: 99182 - RNA, 13 nt, Feline foamy virus
ucguucauguauu

SEQ ID NO: 99183 - RNA, 13 nt, Feline foamy virus
guggaaacuuugc

SEQ ID NO: 99184 - RNA, 21 nt, Feline foamy virus
guucgaaacuguguacuggaa

SEQ ID NO: 99185 - RNA, 21 nt, Feline foamy virus
guagauuguacgggagcucuu

SEQ ID NO: 99186 - RNA, 13 nt, Feline foamy virus
uaaaguacagcuu

SEQ ID NO: 99187 - RNA, 19 nt, Feline foamy virus
uacagcuuagucaucugau

SEQ ID NO: 99188 - RNA, 19 nt, Feline foamy virus
uacucucguucauguauuc

SEQ ID NO: 99189 - RNA, 14 nt, Feline foamy virus
gcuuagucaucuga

SEQ ID NO: 99190 - RNA, 22 nt, Feline foamy virus
ggaaauguucuaaucuccuauc

SEQ ID NO: 99191 - RNA, 11 nt, Feline foamy virus
ggggaaaguuu

SEQ ID NO: 99192 - RNA, 22 nt, Feline foamy virus
gggagcuugguguaggagcuaa

SEQ ID NO: 99193 - RNA, 17 nt, Feline foamy virus
gcauaacuuuaaacuuu

SEQ ID NO: 99194 - RNA, 18 nt, Feline foamy virus
gaaguagauuuugcauaa

SEQ ID NO: 99195 - RNA, 13 nt, Feline foamy virus
gaggaaauguucu

SEQ ID NO: 99196 - RNA, 17 nt, Feline foamy virus
aaauguucuaaucuccu

SEQ ID NO: 99197 - RNA, 20 nt, Feline foamy virus
cugcuauuagcagcauauaa

SEQ ID NO: 99198 - RNA, 17 nt, Feline foamy virus
cuuaaaggguugcuuca

SEQ ID NO: 99199 - RNA, 18 nt, Feline foamy virus
cuauuagcagcauauaaa

SEQ ID NO: 99200 - RNA, 17 nt, Feline foamy virus
cucucguucauguauuc

SEQ ID NO: 99201 - RNA, 18 nt, Feline foamy virus
cucucguucauguauuca

SEQ ID NO: 99202 - RNA, 15 nt, Feline foamy virus
cauauaaaaggguua

SEQ ID NO: 99203 - RNA, 20 nt, Feline foamy virus
cauaucgaaacuauguaucc

SEQ ID NO: 99204 - RNA, 14 nt, Feline foamy virus
caucuagagccuac

SEQ ID NO: 99205 - RNA, 23 nt, Feline foamy virus
caucuagauacuuagaguaugaa

SEQ ID NO: 99206 - RNA, 16 nt, Feline foamy virus
cauguauucauaucga

SEQ ID NO: 99207 - RNA, 23 nt, Feline foamy virus
cauguucaagacauauaaagggu

SEQ ID NO: 99208 - RNA, 16 nt, Feline foamy virus
cauguuucugcuauua

SEQ ID NO: 99209 - RNA, 21 nt, Feline foamy virus
cauuuaagguucgaaacugug

SEQ ID NO: 99210 - RNA, 16 nt, Feline foamy virus
caauaguaacuaucaa

SEQ ID NO: 99211 - RNA, 22 nt, Feline foamy virus
auguauucuuuagucaucuaga

SEQ ID NO: 99212 - RNA, 13 nt, Feline foamy virus
auguauccuuuaa

SEQ ID NO: 99213 - RNA, 17 nt, Feline foamy virus
auguucaagacauauaa

SEQ ID NO: 99214 - RNA, 20 nt, Feline foamy virus
auuacucucguucauguauu

SEQ ID NO: 99215 - RNA, 14 nt, Feline foamy virus
auuugccuugcuca

SEQ ID NO: 99216 - RNA, 20 nt, Feline foamy virus
auaaaguacagcuuagucau

SEQ ID NO: 99217 - RNA, 21 nt, Feline foamy virus
auaaaguacagcuuagucauc

SEQ ID NO: 99218 - RNA, 16 nt, Feline foamy virus
auacuuagaguaugaa

SEQ ID NO: 99219 - RNA, 15 nt, Feline foamy virus
aucuagauacuuaga

SEQ ID NO: 99220 - RNA, 17 nt, Feline foamy virus
aucaauguuaguaaaua

SEQ ID NO: 99221 - RNA, 22 nt, Feline foamy virus
agcucuucucacagacuuggcu

SEQ ID NO: 99222 - RNA, 17 nt, Feline foamy virus
aguacagcuuagucauc

SEQ ID NO: 99223 - RNA, 20 nt, Feline foamy virus
acugcaauaguaacuaucaa

SEQ ID NO: 99224 - RNA, 17 nt, Feline foamy virus
agagugguuauguaucu

SEQ ID NO: 99225 - RNA, 19 nt, Feline foamy virus
acauguucaagacauauaa

SEQ ID NO: 99226 - RNA, 23 nt, Feline foamy virus
accuagaagagaagaacaacuuu

SEQ ID NO: 99227 - RNA, 15 nt, Feline foamy virus
aauaguaacuaucaa

SEQ ID NO: 99228 - RNA, 12 nt, Feline foamy virus
aaccauguauuc

SEQ ID NO: 99229 - RNA, 13 nt, Feline foamy virus
aaaaccauguauu

SEQ ID NO: 99230 - RNA, 16 nt, Fujinami sarcoma virus
aacccagaaggccauu

SEQ ID NO: 99231 - RNA, 21 nt, Fujinami sarcoma virus
aacuauauaagccauuguaac

SEQ ID NO: 99232 - RNA, 12 nt, Fujinami sarcoma virus
aaggaaguagug

SEQ ID NO: 99233 - RNA, 22 nt, Fujinami sarcoma virus
acauaagacagucuaaaguccu

SEQ ID NO: 99234 - RNA, 23 nt, Fujinami sarcoma virus
acaagacaucucggaugucauug

SEQ ID NO: 99235 - RNA, 17 nt, Fujinami sarcoma virus
agacaucucggauguca

SEQ ID NO: 99236 - RNA, 20 nt, Fujinami sarcoma virus
agucaucauuacauaagaca

SEQ ID NO: 99237 - RNA, 19 nt, Fujinami sarcoma virus
agucuaaaguccuaaaaag

SEQ ID NO: 99238 - RNA, 23 nt, Fujinami sarcoma virus
agccauuguaaccuucuaauaaa

SEQ ID NO: 99239 - RNA, 16 nt, Fujinami sarcoma virus
auaacugaggggacca

SEQ ID NO: 99240 - RNA, 19 nt, Fujinami sarcoma virus
auguugccaguuagucauc

SEQ ID NO: 99241 - RNA, 17 nt, Fujinami sarcoma virus
cauaagacagucuaaag

SEQ ID NO: 99242 - RNA, 15 nt, Fujinami sarcoma virus
gaaguaguggcguga

SEQ ID NO: 99243 - RNA, 22 nt, Fujinami sarcoma virus
gccauugguggcagcugauguc

SEQ ID NO: 99244 - RNA, 18 nt, Fujinami sarcoma virus
ggggaccaugguauguau

SEQ ID NO: 99245 - RNA, 18 nt, Fujinami sarcoma virus
uaagccauuguaaccuuc

SEQ ID NO: 99246 - RNA, 20 nt, Fujinami sarcoma virus
uaagacagucuaaaguccua

SEQ ID NO: 99247 - RNA, 16 nt, Fujinami sarcoma virus
gucaucauugccacuu

SEQ ID NO: 99248 - RNA, 21 nt, Fujinami sarcoma virus
gugcauaacuauauaagccau

SEQ ID NO: 99249 - RNA, 22 nt, Fujinami sarcoma virus
gugcauaacuauauaagccauu

SEQ ID NO: 99250 - RNA, 15 nt, Fujinami sarcoma virus
guccuaaaaaggaaa

SEQ ID NO: 99251 - RNA, 12 nt, Fujinami sarcoma virus
ucaggaaguagu

SEQ ID NO: 99252 - RNA, 13 nt, Fujinami sarcoma virus
ucaggaaguagua

SEQ ID NO: 99253 - RNA, 13 nt, Fujinami sarcoma virus
ucaggagugagua

SEQ ID NO: 99254 - RNA, 14 nt, Fujinami sarcoma virus
uaugggcaaggcua

SEQ ID NO: 99255 - RNA, 13 nt, Fujinami sarcoma virus
uauauaagccauu

SEQ ID NO: 99256 - RNA, 16 nt, Fujinami sarcoma virus
ugccacuuagucauca

SEQ ID NO: 99257 - RNA, 20 nt, Fujinami sarcoma virus
uggcagcugaugucgugaua

SEQ ID NO: 99258 - RNA, 21 nt, Fujinami sarcoma virus
ugaugucgugauaucaccuua

SEQ ID NO: 99259 - RNA, 20 nt, Fujinami sarcoma virus
ucauuggcugcaaccaguaa

SEQ ID NO: 99260 - RNA, 14 nt, Fujinami sarcoma virus
ucaggaaguaguaa

SEQ ID NO: 99261 - RNA, 15 nt, Fujinami sarcoma virus
aggaaaaacaagaca

SEQ ID NO: 99262 - RNA, 15 nt, Fujinami sarcoma virus
agucaucauugccac

SEQ ID NO: 99263 - RNA, 22 nt, Fujinami sarcoma virus
caggagugaguaguauaacuga

SEQ ID NO: 99264 - RNA, 17 nt, Fujinami sarcoma virus
caucauuacauaagaca

SEQ ID NO: 99265 - RNA, 22 nt, Fujinami sarcoma virus
caucauuacauaagacagucua

SEQ ID NO: 99266 - RNA, 17 nt, Fujinami sarcoma virus
ccaguaaggaaguagug

SEQ ID NO: 99267 - RNA, 16 nt, Fujinami sarcoma virus
uaacuauauaagccau

SEQ ID NO: 99268 - RNA, 19 nt, Fujinami sarcoma virus
guguaacccagaaggccau

SEQ ID NO: 99269 - RNA, 13 nt, Fujinami sarcoma virus
ggcaaggcuaaag

SEQ ID NO: 99270 - RNA, 13 nt, Fujinami sarcoma virus
gguuagggguccc

SEQ ID NO: 99271 - RNA, 19 nt, Fujinami sarcoma virus
guacgcgguuagggguccc

SEQ ID NO: 99272 - RNA, 18 nt, Fujinami sarcoma virus
guauaacugaggggacca

SEQ ID NO: 99273 - RNA, 15 nt, Fujinami sarcoma virus
gccgcggugcgcugc

SEQ ID NO: 99274 - RNA, 16 nt, Fujinami sarcoma virus
gcuguuucgcgaugua

SEQ ID NO: 99275 - RNA, 22 nt, Fujinami sarcoma virus
ccuaaaaaggaaaaacaagaca

SEQ ID NO: 99276 - RNA, 14 nt, Fujinami sarcoma virus
cugaugucgugaua

SEQ ID NO: 99277 - RNA, 21 nt, Fujinami sarcoma virus
ugcaaccaguaaggaaguagu

SEQ ID NO: 99278 - RNA, 19 nt, Fujinami sarcoma virus
uguugccaguuagucauca

SEQ ID NO: 99279 - RNA, 24 nt, Fujinami sarcoma virus
ugggcaaggcuaaagcugugcaua

SEQ ID NO: 99280 - RNA, 16 nt, Fujinami sarcoma virus
uggguguaacccagaa

SEQ ID NO: 99281 - RNA, 16 nt, Fujinami sarcoma virus
uucgcgauguacgggu

SEQ ID NO: 99282 - RNA, 19 nt, Fujinami sarcoma virus
accuuaugggcaaggcuaa

SEQ ID NO: 99283 - RNA, 16 nt, Fujinami sarcoma virus
acagucuaaaguccua

SEQ ID NO: 99284 - RNA, 17 nt, Fujinami sarcoma virus
cauaacuauauaagcca

SEQ ID NO: 99285 - RNA, 16 nt, Fujinami sarcoma virus
caucucggaugucauu

SEQ ID NO: 99286 - RNA, 20 nt, Fujinami sarcoma virus
auugguggcagcugaugucg

SEQ ID NO: 99287 - RNA, 15 nt, Fujinami sarcoma virus
cacuuagucaucauu

SEQ ID NO: 99288 - RNA, 18 nt, Fujinami sarcoma virus
cuuagucaucauuacaua

SEQ ID NO: 99289 - RNA, 18 nt, Fujinami sarcoma virus
cugcggaaauuugacuga

SEQ ID NO: 99290 - RNA, 14 nt, Fujinami sarcoma virus
cuaaaguccuaaaa

SEQ ID NO: 99291 - RNA, 15 nt, Fujinami sarcoma virus
gcaaccaguaaggaa

SEQ ID NO: 99292 - RNA, 18 nt, Fujinami sarcoma virus
ggaaaaacaagacaucuc

SEQ ID NO: 99293 - RNA, 21 nt, Fujinami sarcoma virus
gccauuguaaccuucuaauaa

SEQ ID NO: 99294 - RNA, 17 nt, Fujinami sarcoma virus
guaacccagaaggccau

SEQ ID NO: 99295 - RNA, 15 nt, Fujinami sarcoma virus
ggguccccucaggaa

SEQ ID NO: 99296 - RNA, 20 nt, Fujinami sarcoma virus
uaaaaaggaaaaacaagaca

SEQ ID NO: 99297 - RNA, 22 nt, Fujinami sarcoma virus
uaaagcugugcauaacuauaua

SEQ ID NO: 99298 - RNA, 22 nt, Fujinami sarcoma virus
guuguacgcgguuagggguccc

SEQ ID NO: 99299 - RNA, 21 nt, Fujinami sarcoma virus
uagucaucauuacauaagaca

SEQ ID NO: 99300 - RNA, 16 nt, Fujinami sarcoma virus
uaacccagaaggccau

SEQ ID NO: 99301 - RNA, 18 nt, Fujinami sarcoma virus
uccuaaaaaggaaaaaca

SEQ ID NO: 99302 - RNA, 15 nt, Fujinami sarcoma virus
aacuauauaagccau

SEQ ID NO: 99303 - RNA, 16 nt, Fujinami sarcoma virus
aacuauauaagccauu

SEQ ID NO: 99304 - RNA, 14 nt, Fujinami sarcoma virus
aaccaguaaggaag

SEQ ID NO: 99305 - RNA, 17 nt, Fujinami sarcoma virus
uuagucaucauuacaua

SEQ ID NO: 99306 - RNA, 23 nt, Fujinami sarcoma virus
uucgguuguacgcgguuaggggu

SEQ ID NO: 99307 - RNA, 19 nt, Fujinami sarcoma virus
ugcgcugcugcgaaauaaa

SEQ ID NO: 99308 - RNA, 14 nt, Fujinami sarcoma virus
ggcuuuugcgcugu

SEQ ID NO: 99309 - RNA, 22 nt, Fujinami sarcoma virus
ggagauguugccaguuagucau

SEQ ID NO: 99310 - RNA, 22 nt, Fujinami sarcoma virus
ggcaaggcuaaagcugugcaua

SEQ ID NO: 99311 - RNA, 19 nt, Fujinami sarcoma virus
cuaaagcugugcauaacua

SEQ ID NO: 99312 - RNA, 21 nt, Fujinami sarcoma virus
cgggucaggagugaguaguau

SEQ ID NO: 99313 - RNA, 19 nt, Fujinami sarcoma virus
cauugccacuuagucauca

SEQ ID NO: 99314 - RNA, 12 nt, Fujinami sarcoma virus
caggagugagua

SEQ ID NO: 99315 - RNA, 20 nt, Fujinami sarcoma virus
aagacaucucggaugucauu

SEQ ID NO: 99316 - RNA, 16 nt, Fujinami sarcoma virus
acccagaaggccauug

SEQ ID NO: 99317 - RNA, 11 nt, Fujinami sarcoma virus
aggaaguagua

SEQ ID NO: 99318 - RNA, 16 nt, Fujinami sarcoma virus
aucauuacauaagaca

SEQ ID NO: 99319 - RNA, 11 nt, Fujinami sarcoma virus
caagacaucuc

SEQ ID NO: 99320 - RNA, 13 nt, Fujinami sarcoma virus
caggaaguaguaa

SEQ ID NO: 99321 - RNA, 20 nt, Fujinami sarcoma virus
caaggcuaaagcugugcaua

SEQ ID NO: 99322 - RNA, 21 nt, Hepatitis A virus
auuucugagguuuguuuauuu

SEQ ID NO: 99323 - RNA, 18 nt, Hepatitis A virus
uuaaacaaauuuucuuaa

SEQ ID NO: 99324 - RNA, 17 nt, Hepatitis A virus
ucugagguuuguuuauu

SEQ ID NO: 99325 - RNA, 19 nt, Hepatitis A virus
ucuuaaaauuucugagguu

SEQ ID NO: 99326 - RNA, 14 nt, Hepatitis A virus
caaauuuucuuaaa

SEQ ID NO: 99327 - RNA, 15 nt, Hepatitis A virus
caaauuuucuuaaaa

SEQ ID NO: 99328 - RNA, 16 nt, Hepatitis A virus
aauuucugagguuugu

SEQ ID NO: 99329 - RNA, 21 nt, Hepatitis A virus
agguuuguuuauuucuuuuau

SEQ ID NO: 99330 - RNA, 19 nt, Hepatitis A virus
uuucugagguuuguuuauu

SEQ ID NO: 99331 - RNA, 15 nt, Hepatitis A virus
uuucuuaaaauuucu

SEQ ID NO: 99332 - RNA, 20 nt, Hepatitis A virus
uaaaauuucugagguuuguu

SEQ ID NO: 99333 - RNA, 20 nt, Hepatitis A virus
guuuaaacaaauuuucuuaa

SEQ ID NO: 99334 - RNA, 20 nt, Hepatitis A virus
auuucugagguuuguuuauu

SEQ ID NO: 99335 - RNA, 14 nt, Hepatitis A virus
acaaauuuucuuaa

SEQ ID NO: 99336 - RNA, 15 nt, Hepatitis A virus
acaaauuuucuuaaa

SEQ ID NO: 99337 - RNA, 14 nt, Hepatitis A virus
ucuuuuaucaguaa

SEQ ID NO: 99338 - RNA, 14 nt, Hepatitis A virus
uauuucuuuuauca

SEQ ID NO: 99339 - RNA, 17 nt, Hepatitis A virus
cuuaaaauuucugaggu

SEQ ID NO: 99340 - RNA, 13 nt, Hepatitis A virus
auuucuuuuauca

SEQ ID NO: 99341 - RNA, 21 nt, Hepatitis A virus
caaauuuucuuaaaauuucug

SEQ ID NO: 99342 - RNA, 14 nt, Hepatitis A virus
aaauuucugagguu

SEQ ID NO: 99343 - RNA, 16 nt, Hepatitis B virus
aaauuagacaacuauu

SEQ ID NO: 99344 - RNA, 15 nt, Hepatitis B virus
aaguugggguacuuu

SEQ ID NO: 99345 - RNA, 21 nt, Hepatitis B virus
aacuuuacugggcuuuauucu

SEQ ID NO: 99346 - RNA, 20 nt, Hepatitis B virus
aauuaguagucagcuauguc

SEQ ID NO: 99347 - RNA, 14 nt, Hepatitis B virus
acaaaggcauuaaa

SEQ ID NO: 99348 - RNA, 18 nt, Hepatitis B virus
acuucaugggauauguaa

SEQ ID NO: 99349 - RNA, 16 nt, Hepatitis B virus
acuguaccugucuuua

SEQ ID NO: 99350 - RNA, 14 nt, Hepatitis B virus
acuaggcauuauuu

SEQ ID NO: 99351 - RNA, 17 nt, Hepatitis B virus
accccguugcccggcaa

SEQ ID NO: 99352 - RNA, 13 nt, Hepatitis B virus
acauucauuuaca

SEQ ID NO: 99353 - RNA, 17 nt, Hepatitis B virus
caaaacuaggcauuauu

SEQ ID NO: 99354 - RNA, 21 nt, Hepatitis B virus
caaaacuaggcauuauuuaca

SEQ ID NO: 99355 - RNA, 18 nt, Hepatitis B virus
auuaaaccguauuauccu

SEQ ID NO: 99356 - RNA, 14 nt, Hepatitis B virus
auguauacaaucua

SEQ ID NO: 99357 - RNA, 14 nt, Hepatitis B virus
auacaaucuaagca

SEQ ID NO: 99358 - RNA, 18 nt, Hepatitis B virus
auaugcauguauacaauc

SEQ ID NO: 99359 - RNA, 21 nt, Hepatitis B virus
auauuguacaaaaacucaagc

SEQ ID NO: 99360 - RNA, 16 nt, Hepatitis B virus
aggcauuaaaccguau

SEQ ID NO: 99361 - RNA, 20 nt, Hepatitis B virus
aaaacuaggcauuauuuaca

SEQ ID NO: 99362 - RNA, 18 nt, Hepatitis B virus
cucaccauacagcacuca

SEQ ID NO: 99363 - RNA, 23 nt, Hepatitis B virus
cucaccauacagcacucaggcaa

SEQ ID NO: 99364 - RNA, 14 nt, Hepatitis B virus
cucacauucauuua

SEQ ID NO: 99365 - RNA, 13 nt, Hepatitis B virus
cguauuauccuga

SEQ ID NO: 99366 - RNA, 21 nt, Hepatitis B virus
cgcaggaacauauuguacaaa

SEQ ID NO: 99367 - RNA, 12 nt, Hepatitis B virus
ccuacuguucaa

SEQ ID NO: 99368 - RNA, 19 nt, Hepatitis B virus
ggaauuaguagucagcuau

SEQ ID NO: 99369 - RNA, 15 nt, Hepatitis B virus
gcuuuauucuucuac

SEQ ID NO: 99370 - RNA, 22 nt, Hepatitis B virus
gcucuguaucgggaggccuuag

SEQ ID NO: 99371 - RNA, 22 nt, Hepatitis B virus
gccuuucuguguaaacaauauc

SEQ ID NO: 99372 - RNA, 17 nt, Hepatitis B virus
gcaguuaaucauuacuu

SEQ ID NO: 99373 - RNA, 20 nt, Hepatitis B virus
aaacuuuacugggcuuuauu

SEQ ID NO: 99374 - RNA, 22 nt, Hepatitis B virus
cuuaacuucaugggauauguaa

SEQ ID NO: 99375 - RNA, 20 nt, Hepatitis B virus
gaaacuuuacugggcuuuau

SEQ ID NO: 99376 - RNA, 14 nt, Hepatitis B virus
gaauugugggucuu

SEQ ID NO: 99377 - RNA, 14 nt, Hepatitis B virus
gacaacuauugugg

SEQ ID NO: 99378 - RNA, 14 nt, Hepatitis B virus
ucagcuaugucaau

SEQ ID NO: 99379 - RNA, 15 nt, Hepatitis B virus
ucuauccuaaccuua

SEQ ID NO: 99380 - RNA, 15 nt, Hepatitis B virus
ucgccaacuuacaag

SEQ ID NO: 99381 - RNA, 21 nt, Hepatitis B virus
uacagcacucaggcaagcuau

SEQ ID NO: 99382 - RNA, 13 nt, Hepatitis B virus
uaauuaugccugc

SEQ ID NO: 99383 - RNA, 18 nt, Hepatitis B virus
ugaugccuuuauaugcau

SEQ ID NO: 99384 - RNA, 17 nt, Hepatitis B virus
ugccuugaugccuuuau

SEQ ID NO: 99385 - RNA, 17 nt, Hepatitis B virus
uucaaaacuaggcauua

SEQ ID NO: 99386 - RNA, 21 nt, Hepatitis B virus
uguggaaggcuggcauucuau

SEQ ID NO: 99387 - RNA, 23 nt, Hepatitis B virus
uucaagccuccaagcugugccuu

SEQ ID NO: 99388 - RNA, 17 nt, Hepatitis B virus
uuggacaaaggcauuaa

SEQ ID NO: 99389 - RNA, 13 nt, Hepatitis B virus
uuggagcuucugu

SEQ ID NO: 99390 - RNA, 12 nt, Hepatitis B virus
uuuccugccuua

SEQ ID NO: 99391 - RNA, 20 nt, Hepatitis B virus
uuucacauuuccugccuuac

SEQ ID NO: 99392 - RNA, 16 nt, Hepatitis B virus
aacuuacaaggccuuu

SEQ ID NO: 99393 - RNA, 13 nt, Hepatitis B virus
acaaggccuuucu

SEQ ID NO: 99394 - RNA, 19 nt, Hepatitis B virus
acaccgccucugcucugua

SEQ ID NO: 99395 - RNA, 16 nt, Hepatitis B virus
acauuuccugccuuac

SEQ ID NO: 99396 - RNA, 20 nt, Hepatitis B virus
acuguucaagccuccaagcu

SEQ ID NO: 99397 - RNA, 18 nt, Hepatitis B virus
auaaggugggaaacuuua

SEQ ID NO: 99398 - RNA, 20 nt, Hepatitis B virus
agccuccaagcugugccuug

SEQ ID NO: 99399 - RNA, 13 nt, Hepatitis B virus
acuuuuggaagag

SEQ ID NO: 99400 - RNA, 14 nt, Hepatitis B virus
agaucuccucgaca

SEQ ID NO: 99401 - RNA, 15 nt, Hepatitis B virus
caaaacuaggcauua

SEQ ID NO: 99402 - RNA, 20 nt, Hepatitis B virus
caacuuacaaggccuuucug

SEQ ID NO: 99403 - RNA, 17 nt, Hepatitis B virus
auguauacaaucuaagc

SEQ ID NO: 99404 - RNA, 23 nt, Hepatitis B virus
auguuuucgaaaauugccuguaa

SEQ ID NO: 99405 - RNA, 15 nt, Hepatitis B virus
augcauguauacaau

SEQ ID NO: 99406 - RNA, 15 nt, Hepatitis B virus
ccagcauccagggaa

SEQ ID NO: 99407 - RNA, 17 nt, Hepatitis B virus
guuucacauuuccugcc

SEQ ID NO: 99408 - RNA, 13 nt, Hepatitis B virus
guccuacuguuca

SEQ ID NO: 99409 - RNA, 12 nt, Hepatitis B virus
gucaauguuaau

SEQ ID NO: 99410 - RNA, 18 nt, Hepatitis B virus
guuacucucuuuuuugcc

SEQ ID NO: 99411 - RNA, 15 nt, Hepatitis B virus
guuaauaugggccua

SEQ ID NO: 99412 - RNA, 13 nt, Hepatitis B virus
uaccugucuuuaa

SEQ ID NO: 99413 - RNA, 19 nt, Hepatitis B virus
gcugccccuuuuacacaau

SEQ ID NO: 99414 - RNA, 21 nt, Hepatitis B virus
gcucuguaucgggaggccuua

SEQ ID NO: 99415 - RNA, 18 nt, Hepatitis B virus
gccuuacuuuuggaagag

SEQ ID NO: 99416 - RNA, 20 nt, Hepatitis B virus
gccuuucuguguaaacaaua

SEQ ID NO: 99417 - RNA, 17 nt, Hepatitis B virus
guauacaaucuaagcag

SEQ ID NO: 99418 - RNA, 23 nt, Hepatitis B virus
ggccaccugggugggaaguaauu

SEQ ID NO: 99419 - RNA, 18 nt, Hepatitis B virus
cugaauaugcaguuaauc

SEQ ID NO: 99420 - RNA, 22 nt, Hepatitis B virus
cugaauaugcaguuaaucauua

SEQ ID NO: 99421 - RNA, 19 nt, Hepatitis B virus
cugccccuuuuacacaaug

SEQ ID NO: 99422 - RNA, 18 nt, Hepatitis B virus
cuauccuaaccuuaccaa

SEQ ID NO: 99423 - RNA, 14 nt, Hepatitis B virus
cguauuauccugaa

SEQ ID NO: 99424 - RNA, 14 nt, Hepatitis B virus
gaauaugcaguuaa

SEQ ID NO: 99425 - RNA, 17 nt, Hepatitis B virus
gaaggcuggcauucuau

SEQ ID NO: 99426 - RNA, 22 nt, Hepatitis B virus
cuguggaaggcuggcauucuau

SEQ ID NO: 99427 - RNA, 16 nt, Hepatitis B virus
cugucuuuaauccuga

SEQ ID NO: 99428 - RNA, 16 nt, Hepatitis B virus
gaaaaaaggagauuaa

SEQ ID NO: 99429 - RNA, 19 nt, Hepatitis B virus
uaugccugcuagguucuau

SEQ ID NO: 99430 - RNA, 14 nt, Hepatitis B virus
ucacauuuccugcc

SEQ ID NO: 99431 - RNA, 22 nt, Hepatitis B virus
ucuguggaaggcuggcauucua

SEQ ID NO: 99432 - RNA, 13 nt, Hepatitis B virus
uguaaacaauauc

SEQ ID NO: 99433 - RNA, 21 nt, Hepatitis B virus
uguaccugucuuuaauccuga

SEQ ID NO: 99434 - RNA, 15 nt, Hepatitis B virus
uggacaaaggcauua

SEQ ID NO: 99435 - RNA, 14 nt, Hepatitis B virus
uggaaaguauguca

SEQ ID NO: 99436 - RNA, 12 nt, Hepatitis B virus
uucaagccucca

SEQ ID NO: 99437 - RNA, 17 nt, Hepatitis B virus
uucugacuucuuuccuu

SEQ ID NO: 99438 - RNA, 19 nt, Hepatitis B virus
uuauaugcauguauacaau

SEQ ID NO: 99439 - RNA, 20 nt, Hepatitis B virus
uucaaaacuaggcauuauuu

SEQ ID NO: 99440 - RNA, 14 nt, Hepatitis B virus
uuaauagaugucaa

SEQ ID NO: 99441 - RNA, 16 nt, Hepatitis B virus
uuaaucauuacuucaa

SEQ ID NO: 99442 - RNA, 23 nt, Hepatitis B virus
uuugugggucaccauauucuugg

SEQ ID NO: 99443 - RNA, 13 nt, Hepatitis B virus
uuuuuugccuucu

SEQ ID NO: 99444 - RNA, 14 nt, Hepatitis B virus
uuuacauacucugu

SEQ ID NO: 99445 - RNA, 20 nt, Hepatitis B virus
uuuacugggcuuuauucuuc

SEQ ID NO: 99446 - RNA, 13 nt, Hepatitis B virus
uuuccugccuuac

SEQ ID NO: 99447 - RNA, 18 nt, Hepatitis B virus
uuggaagacccagcaucc

SEQ ID NO: 99448 - RNA, 17 nt, Hepatitis B virus
uguaucgggaggccuua

SEQ ID NO: 99449 - RNA, 14 nt, Hepatitis B virus
uuaaaccguauuau

SEQ ID NO: 99450 - RNA, 22 nt, Hepatitis B virus
uuacugggcuuuauucuucuac

SEQ ID NO: 99451 - RNA, 22 nt, Hepatitis B virus
ugcccuuggacaaaggcauuaa

SEQ ID NO: 99452 - RNA, 16 nt, Hepatitis B virus
ucuuuuuugccuucug

SEQ ID NO: 99453 - RNA, 15 nt, Hepatitis B virus
uccugaauaugcagu

SEQ ID NO: 99454 - RNA, 21 nt, Hepatitis B virus
ucauguccuacuguucaagcc

SEQ ID NO: 99455 - RNA, 23 nt, Hepatitis B virus
auauuguacaaaaacucaagcaa

SEQ ID NO: 99456 - RNA, 23 nt, Hepatitis B virus
aucuaagcaggcuuucacuuucu

SEQ ID NO: 99457 - RNA, 16 nt, Hepatitis B virus
acuucaaaacuaggca

SEQ ID NO: 99458 - RNA, 14 nt, Hepatitis B virus
agacccagcaucca

SEQ ID NO: 99459 - RNA, 15 nt, Hepatitis B virus
caaaaacucaagcaa

SEQ ID NO: 99460 - RNA, 20 nt, Hepatitis B virus
auuguacaaaaacucaagca

SEQ ID NO: 99461 - RNA, 14 nt, Hepatitis B virus
auugugguuucaca

SEQ ID NO: 99462 - RNA, 14 nt, Hepatitis B virus
cacuuucucgccaa

SEQ ID NO: 99463 - RNA, 14 nt, Hepatitis B virus
caccauauucuugg

SEQ ID NO: 99464 - RNA, 19 nt, Hepatitis B virus
caucucauguucauguccu

SEQ ID NO: 99465 - RNA, 16 nt, Hepatitis B virus
cauguccuacuguuca

SEQ ID NO: 99466 - RNA, 12 nt, Hepatitis B virus
cauuacuucaaa

SEQ ID NO: 99467 - RNA, 17 nt, Hepatitis B virus
ccggaacauuguucacc

SEQ ID NO: 99468 - RNA, 17 nt, Hepatitis B virus
ccuuuccucacauucau

SEQ ID NO: 99469 - RNA, 20 nt, Hepatitis B virus
ccuucuauucgagaucuccu

SEQ ID NO: 99470 - RNA, 18 nt, Hepatitis B virus
ccugucuuuaauccugau

SEQ ID NO: 99471 - RNA, 21 nt, Hepatitis B virus
guacaaaaacucaagcaaugu

SEQ ID NO: 99472 - RNA, 14 nt, Hepatitis B virus
guaauuuggaagac

SEQ ID NO: 99473 - RNA, 19 nt, Hepatitis B virus
ggaaggcuggcauucuaua

SEQ ID NO: 99474 - RNA, 13 nt, Hepatitis B virus
ggaaguaauuugg

SEQ ID NO: 99475 - RNA, 18 nt, Hepatitis B virus
ggaaaguaugucaaagaa

SEQ ID NO: 99476 - RNA, 14 nt, Hepatitis B virus
ggacauuauuaaua

SEQ ID NO: 99477 - RNA, 17 nt, Hepatitis B virus
ucaaaacuaggcauuau

SEQ ID NO: 99478 - RNA, 16 nt, Hepatitis B virus
uaucgggaggccuuag

SEQ ID NO: 99479 - RNA, 17 nt, Hepatitis B virus
uaucgggaggccuuaga

SEQ ID NO: 99480 - RNA, 17 nt, Hepatitis B virus
uaccgcaggaacauauu

SEQ ID NO: 99481 - RNA, 18 nt, Hepatitis B virus
uaauagaugucaacaaua

SEQ ID NO: 99482 - RNA, 13 nt, Hepatitis B virus
gaggacauuauua

SEQ ID NO: 99483 - RNA, 17 nt, Hepatitis B virus
cuuggacaaaggcauua

SEQ ID NO: 99484 - RNA, 20 nt, Hepatitis B virus
cuuggacaaaggcauuaaac

SEQ ID NO: 99485 - RNA, 13 nt, Hepatitis B virus
cuaaaccuuuacc

SEQ ID NO: 99486 - RNA, 17 nt, Hepatitis B virus
cuaggcauuauuuacau

SEQ ID NO: 99487 - RNA, 19 nt, Hepatitis B virus
cuacucccuuaacuucaug

SEQ ID NO: 99488 - RNA, 12 nt, Hepatitis B virus
cugggcuuuauu

SEQ ID NO: 99489 - RNA, 19 nt, Hepatitis B virus
cuccggaacauuguucacc

SEQ ID NO: 99490 - RNA, 20 nt, Hepatitis B virus
cucucuuuuuugccuucuga

SEQ ID NO: 99491 - RNA, 16 nt, Hepatitis B virus
ucucuuuuuugccuuc

SEQ ID NO: 99492 - RNA, 14 nt, Hepatitis B virus
uccuacuguucaag

SEQ ID NO: 99493 - RNA, 21 nt, Hepatitis B virus
ugaauaugcaguuaaucauua

SEQ ID NO: 99494 - RNA, 22 nt, Hepatitis B virus
uauucuucuacuguaccugucu

SEQ ID NO: 99495 - RNA, 21 nt, Hepatitis B virus
uauugauuggaaaguauguca

SEQ ID NO: 99496 - RNA, 18 nt, Hepatitis B virus
ucaaaacuaggcauuauu

SEQ ID NO: 99497 - RNA, 17 nt, Hepatitis B virus
ucacauuuccugccuua

SEQ ID NO: 99498 - RNA, 16 nt, Hepatitis B virus
uccaagcugugccuug

SEQ ID NO: 99499 - RNA, 18 nt, Hepatitis B virus
uaauuuggaagacccagc

SEQ ID NO: 99500 - RNA, 14 nt, Hepatitis B virus
uaguagucagcuau

SEQ ID NO: 99501 - RNA, 22 nt, Hepatitis B virus
uacuuuaccgcaggaacauauu

SEQ ID NO: 99502 - RNA, 17 nt, Hepatitis B virus
uaaaauuaauuaugccu

SEQ ID NO: 99503 - RNA, 19 nt, Hepatitis B virus
gucuccggaacauuguuca

SEQ ID NO: 99504 - RNA, 20 nt, Hepatitis B virus
guacaaaaacucaagcaaug

SEQ ID NO: 99505 - RNA, 15 nt, Hepatitis B virus
guccuacuguucaag

SEQ ID NO: 99506 - RNA, 17 nt, Hepatitis B virus
uuaccgcaggaacauau

SEQ ID NO: 99507 - RNA, 16 nt, Hepatitis B virus
uucuguguaaacaaua

SEQ ID NO: 99508 - RNA, 17 nt, Hepatitis B virus
uucacauuuccugccuu

SEQ ID NO: 99509 - RNA, 23 nt, Hepatitis B virus
uucaccucaccauacagcacuca

SEQ ID NO: 99510 - RNA, 18 nt, Hepatitis B virus
uguaucgggaggccuuag

SEQ ID NO: 99511 - RNA, 19 nt, Hepatitis B virus
ugggcccucugacaguuaa

SEQ ID NO: 99512 - RNA, 17 nt, Hepatitis B virus
aacauuguucaccucac

SEQ ID NO: 99513 - RNA, 14 nt, Hepatitis B virus
aaggcuggcauucu

SEQ ID NO: 99514 - RNA, 18 nt, Hepatitis B virus
ccucacauucauuuacag

SEQ ID NO: 99515 - RNA, 21 nt, Hepatitis B virus
cuagguucuauccuaaccuua

SEQ ID NO: 99516 - RNA, 16 nt, Hepatitis B virus
cuucuguggaguuacu

SEQ ID NO: 99517 - RNA, 16 nt, Hepatitis B virus
cuucuacuguaccugu

SEQ ID NO: 99518 - RNA, 21 nt, Hepatitis B virus
cuucuacuguaccugucuuua

SEQ ID NO: 99519 - RNA, 17 nt, Hepatitis B virus
ggagauuaaaauuaauu

SEQ ID NO: 99520 - RNA, 14 nt, Hepatitis B virus
ggaggacauuauua

SEQ ID NO: 99521 - RNA, 15 nt, Hepatitis B virus
gcugccccuuuuaca

SEQ ID NO: 99522 - RNA, 13 nt, Hepatitis B virus
gcuggcauucuau

SEQ ID NO: 99523 - RNA, 16 nt, Hepatitis B virus
gccuuuauaugcaugu

SEQ ID NO: 99524 - RNA, 21 nt, Hepatitis B virus
cuuuacugggcuuuauucuuc

SEQ ID NO: 99525 - RNA, 20 nt, Hepatitis B virus
aaacuaggcauuauuuacau

SEQ ID NO: 99526 - RNA, 17 nt, Hepatitis B virus
gacccguauaaagaauu

SEQ ID NO: 99527 - RNA, 21 nt, Hepatitis B virus
caacaauaugugggcccucug

SEQ ID NO: 99528 - RNA, 16 nt, Hepatitis B virus
caaauauuugcccuug

SEQ ID NO: 99529 - RNA, 14 nt, Hepatitis B virus
caaaaacucaagca

SEQ ID NO: 99530 - RNA, 14 nt, Hepatitis B virus
cacauucauuuaca

SEQ ID NO: 99531 - RNA, 15 nt, Hepatitis B virus
cacauucauuuacag

SEQ ID NO: 99532 - RNA, 18 nt, Hepatitis B virus
cagcuaugucaauguuaa

SEQ ID NO: 99533 - RNA, 17 nt, Hepatitis B virus
cacucaggcaagcuauu

SEQ ID NO: 99534 - RNA, 18 nt, Hepatitis B virus
agcaggcuuucacuuucu

SEQ ID NO: 99535 - RNA, 14 nt, Hepatitis B virus
aguagucagcuaug

SEQ ID NO: 99536 - RNA, 20 nt, Hepatitis B virus
accucaccauacagcacuca

SEQ ID NO: 99537 - RNA, 13 nt, Hepatitis B virus
acuuuacugggcu

SEQ ID NO: 99538 - RNA, 16 nt, Hepatitis B virus
acuuuacugggcuuua

SEQ ID NO: 99539 - RNA, 19 nt, Hepatitis B virus
aauaugugggcccucugac

SEQ ID NO: 99540 - RNA, 17 nt, Hepatitis B virus
aauauuugcccuuggac

SEQ ID NO: 99541 - RNA, 16 nt, Hepatitis B virus
aaguaauuuggaagac

SEQ ID NO: 99542 - RNA, 14 nt, Hepatitis B virus
aaaaggagauuaaa

SEQ ID NO: 99543 - RNA, 19 nt, Hepatitis B virus
aaaccaaacguuggggcua

SEQ ID NO: 99544 - RNA, 16 nt, Hepatitis C virus
accaugucaccaauga

SEQ ID NO: 99545 - RNA, 18 nt, Hepatitis C virus
aggguaacgccucgaggu

SEQ ID NO: 99546 - RNA, 19 nt, Hepatitis C virus
augccauccugcacacucc

SEQ ID NO: 99547 - RNA, 12 nt, Hepatitis C virus
auuccucggggc

SEQ ID NO: 99548 - RNA, 20 nt, Hepatitis C virus
gacugugcccgcuucagccu

SEQ ID NO: 99549 - RNA, 15 nt, Hepatitis C virus
cgaugccauccugca

SEQ ID NO: 99550 - RNA, 23 nt, Hepatitis C virus
ugguugcucuuucucuaucuucc

SEQ ID NO: 99551 - RNA, 19 nt, Hepatitis C virus
guuggucaacuguuuaccu

SEQ ID NO: 99552 - RNA, 16 nt, Hepatitis C virus
ucagccuaccaagugc

SEQ ID NO: 99553 - RNA, 19 nt, Hepatitis C virus
cugcucggcccucuacgug

SEQ ID NO: 99554 - RNA, 16 nt, Hepatitis C virus
ucaacuguuuaccuuc

SEQ ID NO: 99555 - RNA, 19 nt, Hepatitis C virus
auuccucggggcuuuacca

SEQ ID NO: 99556 - RNA, 19 nt, Hepatitis C virus
auccugcacacuccggggu

SEQ ID NO: 99557 - RNA, 21 nt, Hepatitis C virus
ucuggcccugcucucuugccu

SEQ ID NO: 99558 - RNA, 13 nt, Hepatitis C virus
uugccugacugug

SEQ ID NO: 99559 - RNA, 18 nt, Hepatitis C virus
ucaccaaugauugcccua

SEQ ID NO: 99560 - RNA, 17 nt, Hepatitis C virus
uccuuccuucuuuaaug

SEQ ID NO: 99561 - RNA, 14 nt, Hepatitis C virus
gcaauuccucgggg

SEQ ID NO: 99562 - RNA, 17 nt, Hepatitis C virus
cgucauaucgaucugcu

SEQ ID NO: 99563 - RNA, 15 nt, Hepatitis C virus
gcgccacccucugcu

SEQ ID NO: 99564 - RNA, 17 nt, Hepatitis C virus
uacgugggggaccugug

SEQ ID NO: 99565 - RNA, 17 nt, Hepatitis C virus
ccgaugccauccugcac

SEQ ID NO: 99566 - RNA, 13 nt, Hepatitis C virus
auaucgaucugcu

SEQ ID NO: 99567 - RNA, 13 nt, Hepatitis C virus
acgccucgaggug

SEQ ID NO: 99568 - RNA, 14 nt, Hepatitis C virus
uccuucuggcccug

SEQ ID NO: 99569 - RNA, 22 nt, Hepatitis C virus
ccagggacggcaaacuccccac

SEQ ID NO: 99570 - RNA, 17 nt, Hepatitis C virus
cagggacggcaaacucc

SEQ ID NO: 99571 - RNA, 15 nt, Hepatitis D virus
cucuccccagaguug

SEQ ID NO: 99572 - RNA, 19 nt, Hepatitis D virus
acgcggacccugcagagug

SEQ ID NO: 99573 - RNA, 19 nt, Hepatitis D virus
cagcgaggaggcugggacc

SEQ ID NO: 99574 - RNA, 22 nt, Hepatitis D virus
ucgcagguuugcgucucgcguc

SEQ ID NO: 99575 - RNA, 12 nt, Hepatitis D virus
uucucucgcuuc

SEQ ID NO: 99576 - RNA, 13 nt, Hepatitis D virus
acguccacucgga

SEQ ID NO: 99577 - RNA, 14 nt, Hepatitis D virus
acgguccccucgga

SEQ ID NO: 99578 - RNA, 18 nt, Hepatitis D virus
uuuccacucgcagguuug

SEQ ID NO: 99579 - RNA, 16 nt, Hepatitis D virus
ccucuccccagaguug

SEQ ID NO: 99580 - RNA, 14 nt, Hepatitis D virus
cuucucucugggaa

SEQ ID NO: 99581 - RNA, 15 nt, Hepatitis E virus
cuucugcugcgccca

SEQ ID NO: 99582 - RNA, 17 nt, Hepatitis E virus
cguuccgcgcucccuga

SEQ ID NO: 99583 - RNA, 16 nt, Hepatitis E virus
ccuucuuucuguugcu

SEQ ID NO: 99584 - RNA, 17 nt, Hepatitis E virus
ccuucuuucuguugcuu

SEQ ID NO: 99585 - RNA, 19 nt, Hepatitis E virus
ccacucggcuccgcuuggc

SEQ ID NO: 99586 - RNA, 19 nt, Hepatitis E virus
gcguuccgcgcucccugaa

SEQ ID NO: 99587 - RNA, 18 nt, Hepatitis E virus
gcccagcgccccgccgcu

SEQ ID NO: 99588 - RNA, 13 nt, Hepatitis E virus
aaccucgacugau

SEQ ID NO: 99589 - RNA, 15 nt, Hepatitis E virus
aaccucgacugaugu

SEQ ID NO: 99590 - RNA, 17 nt, Hepatitis E virus
uggcuacgccaucucca

SEQ ID NO: 99591 - RNA, 17 nt, Hepatitis E virus
uuccgcgcucccugaaa

SEQ ID NO: 99592 - RNA, 18 nt, Hepatitis E virus
uuccgcgcucccugaaaa

SEQ ID NO: 99593 - RNA, 21 nt, Hepatitis E virus
uauaaccuaucaacaucuccc

SEQ ID NO: 99594 - RNA, 14 nt, Hepatitis E virus
uaccccuccaggac

SEQ ID NO: 99595 - RNA, 15 nt, Hepatitis E virus
auuaugcccaguacc

SEQ ID NO: 99596 - RNA, 13 nt, Hepatitis E virus
auuucucauuucu

SEQ ID NO: 99597 - RNA, 12 nt, Hepatitis E virus
aggacggcacca

SEQ ID NO: 99598 - RNA, 17 nt, Hepatitis E virus
aggacggcaccaauacu

SEQ ID NO: 99599 - RNA, 22 nt, Hepatitis E virus
cauguuucugccuaugcugccc

SEQ ID NO: 99600 - RNA, 18 nt, Hepatitis E virus
caugaauucaauaaccuc

SEQ ID NO: 99601 - RNA, 17 nt, Hepatitis E virus
gcccaugacaccccgcc

SEQ ID NO: 99602 - RNA, 20 nt, Hepatitis E virus
cugcguuccgcgcucccuga

SEQ ID NO: 99603 - RNA, 17 nt, Hepatitis E virus
cuguugcuuauuucuca

SEQ ID NO: 99604 - RNA, 22 nt, Hepatitis E virus
gaccgggcugauucucagcccu

SEQ ID NO: 99605 - RNA, 23 nt, Hepatitis E virus
gcaguauaaccuaucaacaucuc

SEQ ID NO: 99606 - RNA, 14 nt, Hepatitis E virus
uccguugacaugaa

SEQ ID NO: 99607 - RNA, 21 nt, Hepatitis E virus
ucugcguuccgcgcucccuga

SEQ ID NO: 99608 - RNA, 19 nt, Hepatitis E virus
uggcuacagaagcuucuaa

SEQ ID NO: 99609 - RNA, 15 nt, Hepatitis E virus
uggcuacgccaucuc

SEQ ID NO: 99610 - RNA, 21 nt, Hepatitis E virus
uugcuugugccccccuucuuu

SEQ ID NO: 99611 - RNA, 23 nt, Hepatitis E virus
uucugcguuccgcgcucccugaa

SEQ ID NO: 99612 - RNA, 14 nt, Hepatitis E virus
uucuguugcuuauu

SEQ ID NO: 99613 - RNA, 18 nt, Hepatitis E virus
ugcuuauuucucauuucu

SEQ ID NO: 99614 - RNA, 16 nt, Hepatitis E virus
uggccaccgguacaaa

SEQ ID NO: 99615 - RNA, 12 nt, Hepatitis E virus
ucuguugcuuau

SEQ ID NO: 99616 - RNA, 15 nt, Hepatitis E virus
ccgcccgcugguccc

SEQ ID NO: 99617 - RNA, 20 nt, Hepatitis E virus
cccccuucuuucuguugcuu

SEQ ID NO: 99618 - RNA, 16 nt, Hepatitis E virus
uaauuaugcccaguac

SEQ ID NO: 99619 - RNA, 19 nt, Hepatitis E virus
cguuccgcgcucccugaaa

SEQ ID NO: 99620 - RNA, 12 nt, Hepatitis E virus
cgccaacccgcc

SEQ ID NO: 99621 - RNA, 15 nt, Hepatitis E virus
cuuucuguugcuuau

SEQ ID NO: 99622 - RNA, 22 nt, Hepatitis E virus
acaccccgccagugccugaugu

SEQ ID NO: 99623 - RNA, 21 nt, Hepatitis E virus
auguugacucccgcggcgcca

SEQ ID NO: 99624 - RNA, 19 nt, Hepatitis E virus
cuccaucucguucuggcca

SEQ ID NO: 99625 - RNA, 14 nt, Hepatitis E virus
cgcgcucccugaaa

SEQ ID NO: 99626 - RNA, 16 nt, Hepatitis E virus
cggucgcuccggccca

SEQ ID NO: 99627 - RNA, 12 nt, Hepatitis E virus
caguauaaccua

SEQ ID NO: 99628 - RNA, 18 nt, Hepatitis E virus
caugucuucugcugcgcc

SEQ ID NO: 99629 - RNA, 22 nt, Hepatitis E virus
cccccgaugucaccgcugcggc

SEQ ID NO: 99630 - RNA, 19 nt, Hepatitis E virus
cccuucuuucuguugcuua

SEQ ID NO: 99631 - RNA, 16 nt, Hepatitis E virus
cuuucuguugcuuauu

SEQ ID NO: 99632 - RNA, 17 nt, Hepatitis E virus
ucuuagcccgcuucuac

SEQ ID NO: 99633 - RNA, 22 nt, Hepatitis E virus
ucuuucuguugcuuauuucuca

SEQ ID NO: 99634 - RNA, 17 nt, Hepatitis E virus
ucucauuucugcguucc

SEQ ID NO: 99635 - RNA, 16 nt, Hepatitis E virus
uuguucgugcuacaau

SEQ ID NO: 99636 - RNA, 16 nt, Hepatitis E virus
ugguggcuacgccauc

SEQ ID NO: 99637 - RNA, 17 nt, Hepatitis E virus
ugccccccuucuuucug

SEQ ID NO: 99638 - RNA, 19 nt, Hepatitis E virus
ugcguuccgcgcucccuga

SEQ ID NO: 99639 - RNA, 19 nt, Hepatitis E virus
ccccgaugucaccgcugcg

SEQ ID NO: 99640 - RNA, 13 nt, Hepatitis E virus
ccccgccgcugcc

SEQ ID NO: 99641 - RNA, 14 nt, Hepatitis GB virus A
gauggcgugguggu

SEQ ID NO: 99642 - RNA, 16 nt, Hepatitis GB virus A
ccucugcagaucucua

SEQ ID NO: 99643 - RNA, 17 nt, Hepatitis GB virus A
cuccucccucugcagau

SEQ ID NO: 99644 - RNA, 13 nt, Hepatitis GB virus A
cugcagaucucua

SEQ ID NO: 99645 - RNA, 14 nt, Hepatitis GB virus A
cucugcagaucucu

SEQ ID NO: 99646 - RNA, 15 nt, Hepatitis GB virus A
ccucccucugcagau

SEQ ID NO: 99647 - RNA, 23 nt, Hepatitis GB virus A
aacgaucgcuccucccucugcag

SEQ ID NO: 99648 - RNA, 15 nt, Hepatitis GB virus A
guggcggccuaccgc

SEQ ID NO: 99649 - RNA, 15 nt, Hepatitis GB virus A
gcagaucucuagcuc

SEQ ID NO: 99650 - RNA, 22 nt, Hepatitis GB virus A
gggaaacgaucgcuccucccuc

SEQ ID NO: 99651 - RNA, 15 nt, Hepatitis GB virus A
cagaucucuagcucg

SEQ ID NO: 99652 - RNA, 17 nt, Hepatitis GB virus A
ucccucugcagaucucu

SEQ ID NO: 99653 - RNA, 19 nt, Hepatitis GB virus B
caggggagaccccgggcuu

SEQ ID NO: 99654 - RNA, 17 nt, Hepatitis GB virus B
ccgucucggguggguga

SEQ ID NO: 99655 - RNA, 14 nt, Hepatitis GB virus B
uggucugaagggga

SEQ ID NO: 99656 - RNA, 16 nt, Hepatitis GB virus B
ccgucgugugugguga

SEQ ID NO: 99657 - RNA, 23 nt, Hepatitis GB virus B
uuuagggcagcggcaacagggga

SEQ ID NO: 99658 - RNA, 18 nt, Homo sapiens
cccugacagggccagugc

SEQ ID NO: 99659 - RNA, 14 nt, Homo sapiens
gggccggccagugg

SEQ ID NO: 99660 - RNA, 17 nt, Homo sapiens
gccugcaggaccucgug

SEQ ID NO: 99661 - RNA, 20 nt, Homo sapiens
ccugacagggccagugcagu

SEQ ID NO: 99662 - RNA, 23 nt, Homo sapiens
gguccugcagccugcaggaccuc

SEQ ID NO: 99663 - RNA, 13 nt, Homo sapiens
ucgcugugccaca

SEQ ID NO: 99664 - RNA, 15 nt, Homo sapiens
cuggaugcccaggaa

SEQ ID NO: 99665 - RNA, 21 nt, Homo sapiens
agggaggcaggggaggggugc

SEQ ID NO: 99666 - RNA, 22 nt, Homo sapiens
aagcccaggggccggccagugg

SEQ ID NO: 99667 - RNA, 13 nt, Homo sapiens
ggaccucgugcca

SEQ ID NO: 99668 - RNA, 12 nt, Homo sapiens
acagggccagug

SEQ ID NO: 99669 - RNA, 14 nt, Homo sapiens
caggggaggggugc

SEQ ID NO: 99670 - RNA, 15 nt, Homo sapiens
ugacagggccagugc

SEQ ID NO: 99671 - RNA, 22 nt, Homo sapiens
ggcuggagugugaggguccugc

SEQ ID NO: 99672 - RNA, 14 nt, Homo sapiens
gagucgcugugcca

SEQ ID NO: 99673 - RNA, 15 nt, Homo sapiens
aucauuugacuaaga

SEQ ID NO: 99674 - RNA, 24 nt, Homo sapiens
ggcucccaugucaagagucgcugu

SEQ ID NO: 99675 - RNA, 16 nt, Homo sapiens
uguccccugacagggc

SEQ ID NO: 99676 - RNA, 16 nt, Homo sapiens
ccugacagggccagug

SEQ ID NO: 99677 - RNA, 12 nt, Homo sapiens
gggccaugccuc

SEQ ID NO: 99678 - RNA, 13 nt, Homo sapiens
cccacgagggugc

SEQ ID NO: 99679 - RNA, 17 nt, Homo sapiens
ccaggggccggccagug

SEQ ID NO: 99680 - RNA, 16 nt, Homo sapiens
caccccgagggcugag

SEQ ID NO: 99681 - RNA, 19 nt, Homo sapiens
uguccccugacagggccag

SEQ ID NO: 99682 - RNA, 20 nt, Homo sapiens
uccccugacagggccagugc

SEQ ID NO: 99683 - RNA, 22 nt, Homo sapiens
uccccugacagggccagugcag

SEQ ID NO: 99684 - RNA, 16 nt, Homo sapiens
agagucgcugugccac

SEQ ID NO: 99685 - RNA, 18 nt, Homo sapiens
gcccuggaugcccaggaa

SEQ ID NO: 99686 - RNA, 14 nt, Homo sapiens
ugucaagagucgcu

SEQ ID NO: 99687 - RNA, 21 nt, Homo sapiens
ucauuugacuaagagucucca

SEQ ID NO: 99688 - RNA, 15 nt, Homo sapiens
agucgcugugccaca

SEQ ID NO: 99689 - RNA, 13 nt, Homo sapiens
gagccugguccca

SEQ ID NO: 99690 - RNA, 16 nt, Homo sapiens
ccacgagggugccgug

SEQ ID NO: 99691 - RNA, 22 nt, Homo sapiens
ccccaggagggaggcaggggag

SEQ ID NO: 99692 - RNA, 14 nt, Homo sapiens
ucgguccuggugcc

SEQ ID NO: 99693 - RNA, 17 nt, Homo sapiens
uccccugacagggccag

SEQ ID NO: 99694 - RNA, 14 nt, Homo sapiens
guguggggccaugc

SEQ ID NO: 99695 - RNA, 13 nt, Homo sapiens
cuggcucccaugu

SEQ ID NO: 99696 - RNA, 18 nt, Homo sapiens
gccaugccuccucaggag

SEQ ID NO: 99697 - RNA, 23 nt, Homo sapiens
guguccccugacagggccagugc

SEQ ID NO: 99698 - RNA, 19 nt, Homo sapiens
cucugcgucgguccuggug

SEQ ID NO: 99699 - RNA, 17 nt, Homo sapiens
acagggccagugcaguu

SEQ ID NO: 99700 - RNA, 21 nt, Homo sapiens
cccugacagggccagugcagu

SEQ ID NO: 99701 - RNA, 21 nt, Homo sapiens
uguccccugacagggccagug

SEQ ID NO: 99702 - RNA, 19 nt, Homo sapiens
auuuauggccgggcagggu

SEQ ID NO: 99703 - RNA, 18 nt, Homo sapiens
caggggccggccaguggc

SEQ ID NO: 99704 - RNA, 19 nt, Homo sapiens
ugcaggaccucgugccacc

SEQ ID NO: 99705 - RNA, 17 nt, Homo sapiens
gcugagccuggucccac

SEQ ID NO: 99706 - RNA, 17 nt, Homo sapiens
ggcucccaugucaagag

SEQ ID NO: 99707 - RNA, 23 nt, Homo sapiens
aggggugcggcggucccagcucc

SEQ ID NO: 99708 - RNA, 14 nt, Homo sapiens
augucaagagucgc

SEQ ID NO: 99709 - RNA, 23 nt, Homo sapiens
ccacgggcccggguugggucacc

SEQ ID NO: 99710 - RNA, 14 nt, Homo sapiens
gcaggggaggggug

SEQ ID NO: 99711 - RNA, 19 nt, Homo sapiens
caguuugguguguccuccg

SEQ ID NO: 99712 - RNA, 19 nt, Homo sapiens
cugcagccugcaggaccuc

SEQ ID NO: 99713 - RNA, 21 nt, Homo sapiens
cgggcaggguguggggccaug

SEQ ID NO: 99714 - RNA, 16 nt, Homo sapiens
cgucgguccuggugcc

SEQ ID NO: 99715 - RNA, 19 nt, Homo sapiens
cccaggggccggccagugg

SEQ ID NO: 99716 - RNA, 19 nt, Homo sapiens
gcccuggaugcccaggaau

SEQ ID NO: 99717 - RNA, 17 nt, Homo sapiens
agagucgcugugccaca

SEQ ID NO: 99718 - RNA, 15 nt, Homo sapiens
ggaccucgugccacc

SEQ ID NO: 99719 - RNA, 22 nt, Homo sapiens
auugguuuuccaaucauuugac

SEQ ID NO: 99720 - RNA, 15 nt, Homo sapiens
ucccacgagggugcc

SEQ ID NO: 99721 - RNA, 16 nt, Homo sapiens
caugccuccucaggag

SEQ ID NO: 99722 - RNA, 20 nt, Homo sapiens
gccgggcaggguguggggcc

SEQ ID NO: 99723 - RNA, 21 nt, Homo sapiens
gccuggucccacgagggugcc

SEQ ID NO: 99724 - RNA, 17 nt, Homo sapiens
cccacgagggugccgug

SEQ ID NO: 99725 - RNA, 16 nt, Homo sapiens
ccugcaggaccucgug

SEQ ID NO: 99726 - RNA, 16 nt, Homo sapiens
acaggaccccagcucu

SEQ ID NO: 99727 - RNA, 17 nt, Homo sapiens
auuugacuaagagucuc

SEQ ID NO: 99728 - RNA, 15 nt, Homo sapiens
ggccgggcagggugu

SEQ ID NO: 99729 - RNA, 12 nt, Homo sapiens
cagggccagugc

SEQ ID NO: 99730 - RNA, 14 nt, Homo sapiens
gccuuaccaggaga

SEQ ID NO: 99731 - RNA, 17 nt, Homo sapiens
gacagggccagugcagu

SEQ ID NO: 99732 - RNA, 16 nt, Homo sapiens
aggggccggccagugg

SEQ ID NO: 99733 - RNA, 20 nt, Homo sapiens
agcccaggggccggccagug

SEQ ID NO: 99734 - RNA, 16 nt, Homo sapiens
cugacagggccagugc

SEQ ID NO: 99735 - RNA, 14 nt, Homo sapiens
uggccgggcagggu

SEQ ID NO: 99736 - RNA, 14 nt, Homo sapiens
ugacagggccagug

SEQ ID NO: 99737 - RNA, 15 nt, Homo sapiens
ugacuaagagucucc

SEQ ID NO: 99738 - RNA, 18 nt, Homo sapiens
gcucugcgucgguccugg

SEQ ID NO: 99739 - RNA, 12 nt, Homo sapiens
ggccaguggccu

SEQ ID NO: 99740 - RNA, 15 nt, Homo sapiens
cugacagggccagug

SEQ ID NO: 99741 - RNA, 15 nt, Homo sapiens
gugcggcggucccag

SEQ ID NO: 99742 - RNA, 13 nt, Homo sapiens
ccacgagggugcc

SEQ ID NO: 99743 - RNA, 13 nt, Homo sapiens
gggccagugcagu

SEQ ID NO: 99744 - RNA, 20 nt, Homo sapiens
agugcaguuugguguguccu

SEQ ID NO: 99745 - RNA, 21 nt, Homo sapiens
agccuggucccacgagggugc

SEQ ID NO: 99746 - RNA, 18 nt, Homo sapiens
cugagccuggucccacga

SEQ ID NO: 99747 - RNA, 16 nt, Homo sapiens
ggucccacgagggugc

SEQ ID NO: 99748 - RNA, 13 nt, Homo sapiens
accucgugccacc

SEQ ID NO: 99749 - RNA, 19 nt, Homo sapiens
cugacagggccagugcagu

SEQ ID NO: 99750 - RNA, 16 nt, Homo sapiens
gagucgcugugccaca

SEQ ID NO: 99751 - RNA, 13 nt, Homo sapiens
cggguugggucac

SEQ ID NO: 99752 - RNA, 18 nt, Homo sapiens
cccaggggccggccagug

SEQ ID NO: 99753 - RNA, 13 nt, Homo sapiens
gggaggcagggga

SEQ ID NO: 99754 - RNA, 18 nt, Homo sapiens
gacagggccagugcaguu

SEQ ID NO: 99755 - RNA, 14 nt, Homo sapiens
uggggccaugccuc

SEQ ID NO: 99756 - RNA, 13 nt, Homo sapiens
gguccuggugccc

SEQ ID NO: 99757 - RNA, 15 nt, Homo sapiens
gcgucgguccuggug

SEQ ID NO: 99758 - RNA, 21 nt, Human adenovirus A
uuuguuggauagcaaagccau

SEQ ID NO: 99759 - RNA, 14 nt, Human adenovirus A
uuuuacuucuucca

SEQ ID NO: 99760 - RNA, 14 nt, Human adenovirus A
uuuucuuuauguua

SEQ ID NO: 99761 - RNA, 17 nt, Human adenovirus A
uuuugacccauuugaca

SEQ ID NO: 99762 - RNA, 18 nt, Human adenovirus A
uuugggacgcugguucaa

SEQ ID NO: 99763 - RNA, 23 nt, Human adenovirus A
uuuggcggccaugcaaagccagc

SEQ ID NO: 99764 - RNA, 15 nt, Human adenovirus A
uuggcggccaugcaa

SEQ ID NO: 99765 - RNA, 20 nt, Human adenovirus A
uuggcggccaugcaaagcca

SEQ ID NO: 99766 - RNA, 20 nt, Human adenovirus A
uuggcuucgaaugcugugac

SEQ ID NO: 99767 - RNA, 21 nt, Human adenovirus A
uuguacaguuuggguugacuu

SEQ ID NO: 99768 - RNA, 14 nt, Human adenovirus A
uugucaacuacaua

SEQ ID NO: 99769 - RNA, 17 nt, Human adenovirus A
uuguagacauagccaau

SEQ ID NO: 99770 - RNA, 14 nt, Human adenovirus A
uuguagcauacaau

SEQ ID NO: 99771 - RNA, 17 nt, Human adenovirus A
uuguagccugcuuucag

SEQ ID NO: 99772 - RNA, 21 nt, Human adenovirus A
uuguagcuacagaauuacuaa

SEQ ID NO: 99773 - RNA, 18 nt, Human adenovirus A
ucccucgaugaugccgca

SEQ ID NO: 99774 - RNA, 20 nt, Human adenovirus A
ucccucgcccgcacagucac

SEQ ID NO: 99775 - RNA, 14 nt, Human adenovirus A
uccucacugaucgc

SEQ ID NO: 99776 - RNA, 22 nt, Human adenovirus A
uccuucuaaagguacagaggaa

SEQ ID NO: 99777 - RNA, 20 nt, Human adenovirus A
ucgaucccucauaucacucu

SEQ ID NO: 99778 - RNA, 16 nt, Human adenovirus A
uccaaaaccaggucca

SEQ ID NO: 99779 - RNA, 18 nt, Human adenovirus A
uccacgauuaagacauau

SEQ ID NO: 99780 - RNA, 22 nt, Human adenovirus A
uccacgauuaagacauauggca

SEQ ID NO: 99781 - RNA, 18 nt, Human adenovirus A
uccauagugggauuuuua

SEQ ID NO: 99782 - RNA, 16 nt, Human adenovirus A
uccaugagcccgggga

SEQ ID NO: 99783 - RNA, 12 nt, Human adenovirus A
ucacuacagugu

SEQ ID NO: 99784 - RNA, 13 nt, Human adenovirus A
ucacuacagugua

SEQ ID NO: 99785 - RNA, 21 nt, Human adenovirus A
ucaggagcagaaaucuugaag

SEQ ID NO: 99786 - RNA, 13 nt, Human adenovirus A
ucaggccagugag

SEQ ID NO: 99787 - RNA, 17 nt, Human adenovirus A
ucagcugggaugcuuuu

SEQ ID NO: 99788 - RNA, 22 nt, Human adenovirus A
ucagugaaacgcccuagaugua

SEQ ID NO: 99789 - RNA, 16 nt, Human adenovirus A
ucaguagccuugcagg

SEQ ID NO: 99790 - RNA, 20 nt, Human adenovirus A
ucuguguauacgccuccuau

SEQ ID NO: 99791 - RNA, 19 nt, Human adenovirus A
ucuuuauggccugagugua

SEQ ID NO: 99792 - RNA, 17 nt, Human adenovirus A
ucuuuacaacuguaugc

SEQ ID NO: 99793 - RNA, 15 nt, Human adenovirus A
ucuugucaacuacau

SEQ ID NO: 99794 - RNA, 13 nt, Human adenovirus A
ucuucuucccaau

SEQ ID NO: 99795 - RNA, 21 nt, Human adenovirus A
ucuucaucuuuucuagaugaa

SEQ ID NO: 99796 - RNA, 14 nt, Human adenovirus A
ucuucccaacuguc

SEQ ID NO: 99797 - RNA, 15 nt, Human adenovirus A
ucuucccaacuguca

SEQ ID NO: 99798 - RNA, 16 nt, Human adenovirus A
ucgccaaguaacaaca

SEQ ID NO: 99799 - RNA, 15 nt, Human adenovirus A
ucuauucggugccua

SEQ ID NO: 99800 - RNA, 20 nt, Human adenovirus A
ucucugacugauaccaugga

SEQ ID NO: 99801 - RNA, 15 nt, Human adenovirus A
ugaugccacuugaau

SEQ ID NO: 99802 - RNA, 19 nt, Human adenovirus A
ugaugaauuugcaggugcc

SEQ ID NO: 99803 - RNA, 13 nt, Human adenovirus A
ugaugacuucaac

SEQ ID NO: 99804 - RNA, 22 nt, Human adenovirus A
ugcaaugugcccacuaccugag

SEQ ID NO: 99805 - RNA, 19 nt, Human adenovirus A
ugcaacugcugaagcaaac

SEQ ID NO: 99806 - RNA, 23 nt, Human adenovirus A
ugcaagaaggccauguacuugac

SEQ ID NO: 99807 - RNA, 12 nt, Human adenovirus A
ugagaugguguu

SEQ ID NO: 99808 - RNA, 18 nt, Human adenovirus A
ugauaugcauuuacagua

SEQ ID NO: 99809 - RNA, 16 nt, Human adenovirus A
ugaucaacgacuaaaa

SEQ ID NO: 99810 - RNA, 22 nt, Human adenovirus A
ugaucgcgcuaggcgacgccaa

SEQ ID NO: 99811 - RNA, 21 nt, Human adenovirus A
ugaauuucagcggggugauau

SEQ ID NO: 99812 - RNA, 13 nt, Human adenovirus A
ugaauuugcaggu

SEQ ID NO: 99813 - RNA, 13 nt, Human adenovirus A
ugacagacuugca

SEQ ID NO: 99814 - RNA, 22 nt, Human adenovirus A
ugacuggacagcggccauggau

SEQ ID NO: 99815 - RNA, 18 nt, Human adenovirus A
ugaaccuaauagcacuuu

SEQ ID NO: 99816 - RNA, 19 nt, Human adenovirus A
uggccaauaccgugggaua

SEQ ID NO: 99817 - RNA, 19 nt, Human adenovirus A
uggaucccgcgguuuuggc

SEQ ID NO: 99818 - RNA, 22 nt, Human adenovirus A
uggaucgggaagauacuaccua

SEQ ID NO: 99819 - RNA, 22 nt, Human adenovirus A
uggccgauggccuaaagccacu

SEQ ID NO: 99820 - RNA, 12 nt, Human adenovirus A
uggcgaccagug

SEQ ID NO: 99821 - RNA, 16 nt, Human adenovirus A
ugggaucgcuugcaac

SEQ ID NO: 99822 - RNA, 18 nt, Human adenovirus A
ugggaggcguagaugugc

SEQ ID NO: 99823 - RNA, 15 nt, Human adenovirus A
ugggaaggaggcagu

SEQ ID NO: 99824 - RNA, 18 nt, Human adenovirus A
uggucuccguguacucuu

SEQ ID NO: 99825 - RNA, 21 nt, Human adenovirus A
uguagaagcugaaaucagcug

SEQ ID NO: 99826 - RNA, 19 nt, Human adenovirus A
ugucagcugggaugcuuuu

SEQ ID NO: 99827 - RNA, 12 nt, Human adenovirus A
ugucagugaaac

SEQ ID NO: 99828 - RNA, 14 nt, Human adenovirus A
uguaagaacauaca

SEQ ID NO: 99829 - RNA, 16 nt, Human adenovirus A
uguaacugaaaaugga

SEQ ID NO: 99830 - RNA, 18 nt, Human adenovirus A
uguaacugaaaauggaac

SEQ ID NO: 99831 - RNA, 14 nt, Human adenovirus A
uguacacguuuauu

SEQ ID NO: 99832 - RNA, 22 nt, Human adenovirus A
ugugcgguuuaagaaaucuuuu

SEQ ID NO: 99833 - RNA, 16 nt, Human adenovirus A
ugucauccgcauuuaa

SEQ ID NO: 99834 - RNA, 14 nt, Human adenovirus A
ugucccaacaagca

SEQ ID NO: 99835 - RNA, 21 nt, Human adenovirus A
ugucucgcgaccgcuuaucau

SEQ ID NO: 99836 - RNA, 16 nt, Human adenovirus A
ugcugucacugagcac

SEQ ID NO: 99837 - RNA, 19 nt, Human adenovirus A
ugcugaagaaacagaagaa

SEQ ID NO: 99838 - RNA, 18 nt, Human adenovirus A
ugcugaagcaaacccugg

SEQ ID NO: 99839 - RNA, 15 nt, Human adenovirus A
uggaaacuguauauu

SEQ ID NO: 99840 - RNA, 16 nt, Human adenovirus A
uggaacaguaucugga

SEQ ID NO: 99841 - RNA, 17 nt, Human adenovirus A
uggaacccuuacacuca

SEQ ID NO: 99842 - RNA, 18 nt, Human adenovirus A
uggaacccuuacacucaa

SEQ ID NO: 99843 - RNA, 20 nt, Human adenovirus A
ugcuuuguuggauagcaaag

SEQ ID NO: 99844 - RNA, 17 nt, Human adenovirus A
uggaacugcagacagug

SEQ ID NO: 99845 - RNA, 14 nt, Human adenovirus A
uggaauaacaagcc

SEQ ID NO: 99846 - RNA, 14 nt, Human adenovirus A
uggacuuugagcac

SEQ ID NO: 99847 - RNA, 20 nt, Human adenovirus A
uggauacucugcgcuuuauu

SEQ ID NO: 99848 - RNA, 15 nt, Human adenovirus A
uggauagcaaagcca

SEQ ID NO: 99849 - RNA, 16 nt, Human adenovirus A
uggaguacaagcuuga

SEQ ID NO: 99850 - RNA, 20 nt, Human adenovirus A
uggaguggcgauuccaagga

SEQ ID NO: 99851 - RNA, 14 nt, Human adenovirus A
uucuuaagcaguga

SEQ ID NO: 99852 - RNA, 16 nt, Human adenovirus A
uugaucugucagugaa

SEQ ID NO: 99853 - RNA, 17 nt, Human adenovirus A
uugaucugucagugaaa

SEQ ID NO: 99854 - RNA, 13 nt, Human adenovirus A
uucuucuucccaa

SEQ ID NO: 99855 - RNA, 14 nt, Human adenovirus A
uucuucuucccaau

SEQ ID NO: 99856 - RNA, 14 nt, Human adenovirus A
uugcgcacugaaaa

SEQ ID NO: 99857 - RNA, 19 nt, Human adenovirus A
uugcgcacugaaaaaccaa

SEQ ID NO: 99858 - RNA, 22 nt, Human adenovirus A
uugauggaagaaucaccgaaca

SEQ ID NO: 99859 - RNA, 20 nt, Human adenovirus A
uugcaaacagcaaacuuucu

SEQ ID NO: 99860 - RNA, 14 nt, Human adenovirus A
uugcguugcaaugu

SEQ ID NO: 99861 - RNA, 16 nt, Human adenovirus A
uuggauggucaggcca

SEQ ID NO: 99862 - RNA, 17 nt, Human adenovirus A
uuggcaccauacaacaa

SEQ ID NO: 99863 - RNA, 16 nt, Human adenovirus A
uuggcauuaggccauc

SEQ ID NO: 99864 - RNA, 19 nt, Human adenovirus A
uucuaacugauuaugagau

SEQ ID NO: 99865 - RNA, 18 nt, Human adenovirus A
uuccacgauuaagacaua

SEQ ID NO: 99866 - RNA, 18 nt, Human adenovirus A
uuccagcugagcaguuag

SEQ ID NO: 99867 - RNA, 16 nt, Human adenovirus A
uucccaacugucaaac

SEQ ID NO: 99868 - RNA, 19 nt, Human adenovirus A
uucaaccccguuuacccuu

SEQ ID NO: 99869 - RNA, 23 nt, Human adenovirus A
uucacgcaauagacucugccaac

SEQ ID NO: 99870 - RNA, 20 nt, Human adenovirus A
uuaauggacuuugagcaccu

SEQ ID NO: 99871 - RNA, 16 nt, Human adenovirus A
uuaauaaaaacacugu

SEQ ID NO: 99872 - RNA, 19 nt, Human adenovirus A
uuacauguggagcuuucaa

SEQ ID NO: 99873 - RNA, 21 nt, Human adenovirus A
uuacccuuuugacccauuuga

SEQ ID NO: 99874 - RNA, 16 nt, Human adenovirus A
uguguacacguuuauu

SEQ ID NO: 99875 - RNA, 13 nt, Human adenovirus A
uguguuccaguau

SEQ ID NO: 99876 - RNA, 21 nt, Human adenovirus A
uuaacuuuauauugcauuugu

SEQ ID NO: 99877 - RNA, 14 nt, Human adenovirus A
uuaagaaaucuuuu

SEQ ID NO: 99878 - RNA, 20 nt, Human adenovirus A
uguuaaagaguauccauuua

SEQ ID NO: 99879 - RNA, 18 nt, Human adenovirus A
uuauuacugguacuauga

SEQ ID NO: 99880 - RNA, 16 nt, Human adenovirus A
uuauaaucuccaaaua

SEQ ID NO: 99881 - RNA, 14 nt, Human adenovirus A
uuagauuguuauac

SEQ ID NO: 99882 - RNA, 23 nt, Human adenovirus A
uuagaccacugucgccaaccuca

SEQ ID NO: 99883 - RNA, 18 nt, Human adenovirus A
cccuaaauauuguauuuc

SEQ ID NO: 99884 - RNA, 20 nt, Human adenovirus A
ccccgcggacaugcuuuucu

SEQ ID NO: 99885 - RNA, 15 nt, Human adenovirus A
ccccauuguaacuga

SEQ ID NO: 99886 - RNA, 19 nt, Human adenovirus A
ccccaggggccagcucacg

SEQ ID NO: 99887 - RNA, 16 nt, Human adenovirus A
cccacuuuauaugcua

SEQ ID NO: 99888 - RNA, 16 nt, Human adenovirus A
ccauggcgaccagugu

SEQ ID NO: 99889 - RNA, 17 nt, Human adenovirus A
ccauuguaaaugcuuug

SEQ ID NO: 99890 - RNA, 17 nt, Human adenovirus A
ccauuuuaccuuguaua

SEQ ID NO: 99891 - RNA, 20 nt, Human adenovirus A
ccaguggucguacgugguuu

SEQ ID NO: 99892 - RNA, 14 nt, Human adenovirus A
ccaugcaaagccag

SEQ ID NO: 99893 - RNA, 16 nt, Human adenovirus A
ccaaugugcaggcuaa

SEQ ID NO: 99894 - RNA, 21 nt, Human adenovirus A
ccagagcccccgcguccuccu

SEQ ID NO: 99895 - RNA, 23 nt, Human adenovirus A
cauggugauuaaauauaucuuuu

SEQ ID NO: 99896 - RNA, 22 nt, Human adenovirus A
cauuuagcgacguaaugccauu

SEQ ID NO: 99897 - RNA, 15 nt, Human adenovirus A
cauuugacacaucag

SEQ ID NO: 99898 - RNA, 16 nt, Human adenovirus A
ccaaccucacugcuuu

SEQ ID NO: 99899 - RNA, 23 nt, Human adenovirus A
cagggucuacuguugaugcagua

SEQ ID NO: 99900 - RNA, 16 nt, Human adenovirus A
caguaaguagguccau

SEQ ID NO: 99901 - RNA, 22 nt, Human adenovirus A
cagucauagcaacaacgcuggg

SEQ ID NO: 99902 - RNA, 21 nt, Human adenovirus A
cauaauuaaacccuuuagcag

SEQ ID NO: 99903 - RNA, 16 nt, Human adenovirus A
caguccugaugcuuuu

SEQ ID NO: 99904 - RNA, 13 nt, Human adenovirus A
cagugaguaaaag

SEQ ID NO: 99905 - RNA, 22 nt, Human adenovirus A
cauaucacucuucgcugcaguu

SEQ ID NO: 99906 - RNA, 23 nt, Human adenovirus A
caucuuuucuagaugaagcgcag

SEQ ID NO: 99907 - RNA, 14 nt, Human adenovirus A
caucugugucuuua

SEQ ID NO: 99908 - RNA, 22 nt, Human adenovirus A
cagaugcuaagggacaaguuaa

SEQ ID NO: 99909 - RNA, 12 nt, Human adenovirus A
cagacugcugua

SEQ ID NO: 99910 - RNA, 16 nt, Human adenovirus A
cagacugcuguaaugg

SEQ ID NO: 99911 - RNA, 20 nt, Human adenovirus A
cagaauuacuaaaacaguaa

SEQ ID NO: 99912 - RNA, 16 nt, Human adenovirus A
cagccuucuggcguua

SEQ ID NO: 99913 - RNA, 21 nt, Human adenovirus A
cagccuucuggcguuacagcu

SEQ ID NO: 99914 - RNA, 16 nt, Human adenovirus A
cagcggggugauaugc

SEQ ID NO: 99915 - RNA, 17 nt, Human adenovirus A
cagcgucugacgcugcg

SEQ ID NO: 99916 - RNA, 22 nt, Human adenovirus A
cagcuuccgcggccgcuucuac

SEQ ID NO: 99917 - RNA, 21 nt, Human adenovirus A
cagcugauuucagcuucuaca

SEQ ID NO: 99918 - RNA, 11 nt, Human adenovirus A
cagcugccaag

SEQ ID NO: 99919 - RNA, 19 nt, Human adenovirus A
cagcugguuacaccugcuc

SEQ ID NO: 99920 - RNA, 22 nt, Human adenovirus A
caggaugccucggaguaccuga

SEQ ID NO: 99921 - RNA, 23 nt, Human adenovirus A
augcagacuaaauggaagacauc

SEQ ID NO: 99922 - RNA, 11 nt, Human adenovirus A
augcaaagcca

SEQ ID NO: 99923 - RNA, 19 nt, Human adenovirus A
augauuuaccccuaaauau

SEQ ID NO: 99924 - RNA, 15 nt, Human adenovirus A
augcauuuacaguac

SEQ ID NO: 99925 - RNA, 20 nt, Human adenovirus A
augcauuuacaguacaaaua

SEQ ID NO: 99926 - RNA, 21 nt, Human adenovirus A
augcuaagggacaaguuaaaa

SEQ ID NO: 99927 - RNA, 16 nt, Human adenovirus A
augaagcgcagcagaa

SEQ ID NO: 99928 - RNA, 22 nt, Human adenovirus A
augaagcgcagcagaacccagu

SEQ ID NO: 99929 - RNA, 23 nt, Human adenovirus A
augaaucuuuaccaggcaaagaa

SEQ ID NO: 99930 - RNA, 18 nt, Human adenovirus A
auuaaagcuuuugcuaaa

SEQ ID NO: 99931 - RNA, 17 nt, Human adenovirus A
auuaaguauuaccugca

SEQ ID NO: 99932 - RNA, 13 nt, Human adenovirus A
auuaaugcauugu

SEQ ID NO: 99933 - RNA, 14 nt, Human adenovirus A
auuaaugcauugug

SEQ ID NO: 99934 - RNA, 11 nt, Human adenovirus A
auuaauggagu

SEQ ID NO: 99935 - RNA, 21 nt, Human adenovirus A
auuaauggaguuguagacaua

SEQ ID NO: 99936 - RNA, 13 nt, Human adenovirus A
auucaagugcagu

SEQ ID NO: 99937 - RNA, 13 nt, Human adenovirus A
auucuucuuccca

SEQ ID NO: 99938 - RNA, 13 nt, Human adenovirus A
auugaaaccagcg

SEQ ID NO: 99939 - RNA, 15 nt, Human adenovirus A
auugaaccugaucua

SEQ ID NO: 99940 - RNA, 22 nt, Human adenovirus A
auugacaaacgcccugcuccga

SEQ ID NO: 99941 - RNA, 19 nt, Human adenovirus A
auguauggaggagcuaaaa

SEQ ID NO: 99942 - RNA, 16 nt, Human adenovirus A
auggguaguagcauca

SEQ ID NO: 99943 - RNA, 15 nt, Human adenovirus A
augucagcugggaug

SEQ ID NO: 99944 - RNA, 21 nt, Human adenovirus A
auggaacaacaggugcaagaa

SEQ ID NO: 99945 - RNA, 23 nt, Human adenovirus A
auggaguggcgauuccaaggaau

SEQ ID NO: 99946 - RNA, 23 nt, Human adenovirus A
auggaguuguagacauagccaau

SEQ ID NO: 99947 - RNA, 17 nt, Human adenovirus A
auggccugaguguaaua

SEQ ID NO: 99948 - RNA, 17 nt, Human adenovirus A
auggcucuuacuugccg

SEQ ID NO: 99949 - RNA, 16 nt, Human adenovirus A
augggaaggaggcagu

SEQ ID NO: 99950 - RNA, 18 nt, Human adenovirus A
caacuuucauuguuauag

SEQ ID NO: 99951 - RNA, 13 nt, Human adenovirus A
caagaaggccaug

SEQ ID NO: 99952 - RNA, 12 nt, Human adenovirus A
caaguaacaaca

SEQ ID NO: 99953 - RNA, 16 nt, Human adenovirus A
caagucuguuguuuac

SEQ ID NO: 99954 - RNA, 19 nt, Human adenovirus A
caacgcugggcauggugau

SEQ ID NO: 99955 - RNA, 17 nt, Human adenovirus A
caauagacucugccaac

SEQ ID NO: 99956 - RNA, 18 nt, Human adenovirus A
cacaaagaaaacaucacu

SEQ ID NO: 99957 - RNA, 19 nt, Human adenovirus A
cacaaagaaaacaucacuc

SEQ ID NO: 99958 - RNA, 11 nt, Human adenovirus A
cacaaauugcg

SEQ ID NO: 99959 - RNA, 15 nt, Human adenovirus A
cacaugaauguuaaa

SEQ ID NO: 99960 - RNA, 20 nt, Human adenovirus A
cacaugaauguuaaagagua

SEQ ID NO: 99961 - RNA, 14 nt, Human adenovirus A
cacaugauuuccag

SEQ ID NO: 99962 - RNA, 15 nt, Human adenovirus A
auuuuucccacuuua

SEQ ID NO: 99963 - RNA, 20 nt, Human adenovirus A
auuuugaaaaaauacaugag

SEQ ID NO: 99964 - RNA, 16 nt, Human adenovirus A
auugauacacaccuca

SEQ ID NO: 99965 - RNA, 18 nt, Human adenovirus A
auugauacacaccucauu

SEQ ID NO: 99966 - RNA, 19 nt, Human adenovirus A
caacagcagcaacaaggaa

SEQ ID NO: 99967 - RNA, 18 nt, Human adenovirus A
caaacuuuacaaaccacu

SEQ ID NO: 99968 - RNA, 19 nt, Human adenovirus A
caaacuuuacaaaccacuu

SEQ ID NO: 99969 - RNA, 15 nt, Human adenovirus A
acgauuaagacauau

SEQ ID NO: 99970 - RNA, 16 nt, Human adenovirus A
accuguggcaccugca

SEQ ID NO: 99971 - RNA, 17 nt, Human adenovirus A
accccauuguaacugaa

SEQ ID NO: 99972 - RNA, 21 nt, Human adenovirus A
acccccuuuuacuucuuccaa

SEQ ID NO: 99973 - RNA, 22 nt, Human adenovirus A
acccuuuugacccauuugacac

SEQ ID NO: 99974 - RNA, 14 nt, Human adenovirus A
acccuuuguuacac

SEQ ID NO: 99975 - RNA, 14 nt, Human adenovirus A
accgaggcaguuuc

SEQ ID NO: 99976 - RNA, 13 nt, Human adenovirus A
accgcugcucagc

SEQ ID NO: 99977 - RNA, 16 nt, Human adenovirus A
accuaauagcacuuug

SEQ ID NO: 99978 - RNA, 12 nt, Human adenovirus A
accuacuuugag

SEQ ID NO: 99979 - RNA, 16 nt, Human adenovirus A
acuuaaauugagaugg

SEQ ID NO: 99980 - RNA, 20 nt, Human adenovirus A
acuuaaauugagaugguguu

SEQ ID NO: 99981 - RNA, 16 nt, Human adenovirus A
acuggauuugcgcacu

SEQ ID NO: 99982 - RNA, 16 nt, Human adenovirus A
acugucgccaaccuca

SEQ ID NO: 99983 - RNA, 17 nt, Human adenovirus A
acugucgccaaccucac

SEQ ID NO: 99984 - RNA, 15 nt, Human adenovirus A
acuugaauucuggaa

SEQ ID NO: 99985 - RNA, 21 nt, Human adenovirus A
acuugaauucuggaauaacaa

SEQ ID NO: 99986 - RNA, 16 nt, Human adenovirus A
acuucguugauaucaa

SEQ ID NO: 99987 - RNA, 21 nt, Human adenovirus A
acugccggucgcgaaacuggg

SEQ ID NO: 99988 - RNA, 16 nt, Human adenovirus A
acugcuagaacaagcc

SEQ ID NO: 99989 - RNA, 14 nt, Human adenovirus A
acugcugaagcaaa

SEQ ID NO: 99990 - RNA, 13 nt, Human adenovirus A
acuacacaaagaa

SEQ ID NO: 99991 - RNA, 20 nt, Human adenovirus A
acuacacaaagaaaacauca

SEQ ID NO: 99992 - RNA, 17 nt, Human adenovirus A
acuaaauggaagacauc

SEQ ID NO: 99993 - RNA, 20 nt, Human adenovirus A
acuaaaacaaaucuaucagu

SEQ ID NO: 99994 - RNA, 17 nt, Human adenovirus A
acuaccgcugcucagcu

SEQ ID NO: 99995 - RNA, 17 nt, Human adenovirus A
acggggcaauaguugag

SEQ ID NO: 99996 - RNA, 11 nt, Human adenovirus A
acaccuacuuc

SEQ ID NO: 99997 - RNA, 20 nt, Human adenovirus A
acaccuacuucacccuggga

SEQ ID NO: 99998 - RNA, 21 nt, Human adenovirus A
acaccucauuaaauuuuucac

SEQ ID NO: 99999 - RNA, 16 nt, Human adenovirus A
acaccugcuccagaaa

SEQ ID NO: 100000 - RNA, 10 nt, Human adenovirus A
acacugugcg

SEQ ID NO: 100001 - RNA, 21 nt, Human adenovirus A
acacuuuaauaaaaacacugu

SEQ ID NO: 100002 - RNA, 21 nt, Human adenovirus A
acagaggcuccucacugaucg

SEQ ID NO: 100003 - RNA, 20 nt, Human adenovirus A
acaccaccucccucuuacga

SEQ ID NO: 100004 - RNA, 22 nt, Human adenovirus A
acacaaagaaaacaucacucua

SEQ ID NO: 100005 - RNA, 23 nt, Human adenovirus A
acacaaugcauuaauaauaaaac

SEQ ID NO: 100006 - RNA, 16 nt, Human adenovirus A
acaucaacugugcuac

SEQ ID NO: 100007 - RNA, 19 nt, Human adenovirus A
acaucaccgaggcaguuuc

SEQ ID NO: 100008 - RNA, 21 nt, Human adenovirus A
acauugcuucauugaauuacc

SEQ ID NO: 100009 - RNA, 13 nt, Human adenovirus A
acaguacaaauac

SEQ ID NO: 100010 - RNA, 22 nt, Human adenovirus A
acagucaagcuuguacuccaau

SEQ ID NO: 100011 - RNA, 21 nt, Human adenovirus A
acaaggaaccgaccugcaaca

SEQ ID NO: 100012 - RNA, 14 nt, Human adenovirus A
acaagccgcucuca

SEQ ID NO: 100013 - RNA, 21 nt, Human adenovirus A
acaacgcugggcauggugauu

SEQ ID NO: 100014 - RNA, 22 nt, Human adenovirus A
acaacaggugcaagaaggccau

SEQ ID NO: 100015 - RNA, 18 nt, Human adenovirus A
acaaguaccaacuaccgc

SEQ ID NO: 100016 - RNA, 18 nt, Human adenovirus A
acaaggucuagccaacau

SEQ ID NO: 100017 - RNA, 16 nt, Human adenovirus A
acaacaagucuucuga

SEQ ID NO: 100018 - RNA, 18 nt, Human adenovirus A
acaaaccacuuaguuuua

SEQ ID NO: 100019 - RNA, 20 nt, Human adenovirus A
acaaaccacuuaguuuuaaa

SEQ ID NO: 100020 - RNA, 20 nt, Human adenovirus A
acaaaccuuuacugcaaugg

SEQ ID NO: 100021 - RNA, 16 nt, Human adenovirus A
acaaagaccccauugu

SEQ ID NO: 100022 - RNA, 18 nt, Human adenovirus A
aaucuuuuaccaaugaau

SEQ ID NO: 100023 - RNA, 18 nt, Human adenovirus A
auaucacucuucgcugca

SEQ ID NO: 100024 - RNA, 18 nt, Human adenovirus A
auaccauggacagcucca

SEQ ID NO: 100025 - RNA, 18 nt, Human adenovirus A
auagucugacuuuacaua

SEQ ID NO: 100026 - RNA, 13 nt, Human adenovirus A
auauggagugugc

SEQ ID NO: 100027 - RNA, 13 nt, Human adenovirus A
auaauaaaaccau

SEQ ID NO: 100028 - RNA, 16 nt, Human adenovirus A
auaauguaagugaggu

SEQ ID NO: 100029 - RNA, 16 nt, Human adenovirus A
auacaugaguguaugu

SEQ ID NO: 100030 - RNA, 13 nt, Human adenovirus A
aguccauaugacu

SEQ ID NO: 100031 - RNA, 15 nt, Human adenovirus A
aguacaaauacaguu

SEQ ID NO: 100032 - RNA, 21 nt, Human adenovirus A
aggcgcauuggaaaagugcac

SEQ ID NO: 100033 - RNA, 18 nt, Human adenovirus A
aggcgccgcagacggcug

SEQ ID NO: 100034 - RNA, 17 nt, Human adenovirus A
auaacaguugaaaaagg

SEQ ID NO: 100035 - RNA, 16 nt, Human adenovirus A
auaaaccauggaauuu

SEQ ID NO: 100036 - RNA, 17 nt, Human adenovirus A
auaaaaccugugccuca

SEQ ID NO: 100037 - RNA, 15 nt, Human adenovirus A
aguuugauagaccug

SEQ ID NO: 100038 - RNA, 14 nt, Human adenovirus A
aguuguagacauag

SEQ ID NO: 100039 - RNA, 14 nt, Human adenovirus A
agucugacuuuaca

SEQ ID NO: 100040 - RNA, 15 nt, Human adenovirus A
agucugacuuuacau

SEQ ID NO: 100041 - RNA, 17 nt, Human adenovirus A
agucugacuuuacauaa

SEQ ID NO: 100042 - RNA, 19 nt, Human adenovirus A
aguuacucaauuauuacau

SEQ ID NO: 100043 - RNA, 16 nt, Human adenovirus A
agauauaaaguuuaaa

SEQ ID NO: 100044 - RNA, 17 nt, Human adenovirus A
agagugguuguacuuug

SEQ ID NO: 100045 - RNA, 18 nt, Human adenovirus A
agauacuaccuacuccua

SEQ ID NO: 100046 - RNA, 20 nt, Human adenovirus A
acuuuguagcauacaauuag

SEQ ID NO: 100047 - RNA, 18 nt, Human adenovirus A
acuuuucaaacuuuacaa

SEQ ID NO: 100048 - RNA, 16 nt, Human adenovirus A
agagcucgacaaggaa

SEQ ID NO: 100049 - RNA, 17 nt, Human adenovirus A
agagcucgacaaggaac

SEQ ID NO: 100050 - RNA, 12 nt, Human adenovirus A
agcaacaaggaa

SEQ ID NO: 100051 - RNA, 19 nt, Human adenovirus A
agcaacuuuuuaaccacug

SEQ ID NO: 100052 - RNA, 15 nt, Human adenovirus A
agauucuucuuccca

SEQ ID NO: 100053 - RNA, 17 nt, Human adenovirus A
agauucuucuucccaau

SEQ ID NO: 100054 - RNA, 19 nt, Human adenovirus A
agaugaguaaagauauucc

SEQ ID NO: 100055 - RNA, 13 nt, Human adenovirus A
agccugcucuuac

SEQ ID NO: 100056 - RNA, 22 nt, Human adenovirus A
agccugaaccuaauagcacuuu

SEQ ID NO: 100057 - RNA, 21 nt, Human adenovirus A
agcauuuuuuguugcuccagu

SEQ ID NO: 100058 - RNA, 16 nt, Human adenovirus A
agcaguuagaguuuca

SEQ ID NO: 100059 - RNA, 13 nt, Human adenovirus A
agcauacaauuag

SEQ ID NO: 100060 - RNA, 13 nt, Human adenovirus A
agcauacuuacca

SEQ ID NO: 100061 - RNA, 18 nt, Human adenovirus A
agcaucagcuaauuccuc

SEQ ID NO: 100062 - RNA, 20 nt, Human adenovirus A
agcaucagcuaauuccucaa

SEQ ID NO: 100063 - RNA, 16 nt, Human adenovirus A
agcagcaacaaggaaa

SEQ ID NO: 100064 - RNA, 21 nt, Human adenovirus A
aggaaauacuauauuaacuuu

SEQ ID NO: 100065 - RNA, 13 nt, Human adenovirus A
agcgggugacugg

SEQ ID NO: 100066 - RNA, 23 nt, Human adenovirus A
agcguccggguucacuacagugu

SEQ ID NO: 100067 - RNA, 20 nt, Human adenovirus A
aggaguugcaggaugaauuu

SEQ ID NO: 100068 - RNA, 23 nt, Human adenovirus A
aggcaaagaacaucaacugugcu

SEQ ID NO: 100069 - RNA, 19 nt, Human adenovirus A
gggaauaucucauuugcaa

SEQ ID NO: 100070 - RNA, 18 nt, Human adenovirus A
ggccagcucacgguguca

SEQ ID NO: 100071 - RNA, 21 nt, Human adenovirus A
ggcgcggacgagcucccggag

SEQ ID NO: 100072 - RNA, 16 nt, Human adenovirus A
ggcucuuacuugccga

SEQ ID NO: 100073 - RNA, 21 nt, Human adenovirus A
ggcugauuuauauaguuugau

SEQ ID NO: 100074 - RNA, 23 nt, Human adenovirus A
ggcugggguauggguaguagcau

SEQ ID NO: 100075 - RNA, 11 nt, Human adenovirus A
ggcggccaugc

SEQ ID NO: 100076 - RNA, 12 nt, Human adenovirus A
ggcaaugcagca

SEQ ID NO: 100077 - RNA, 22 nt, Human adenovirus A
ggauccaaacgguaguggcaau

SEQ ID NO: 100078 - RNA, 20 nt, Human adenovirus A
ggaucgcuugcaacugcuga

SEQ ID NO: 100079 - RNA, 21 nt, Human adenovirus A
ggaucgggaagauacuaccua

SEQ ID NO: 100080 - RNA, 18 nt, Human adenovirus A
ggaucguauuauggcuuu

SEQ ID NO: 100081 - RNA, 15 nt, Human adenovirus A
ggaacaguaucugga

SEQ ID NO: 100082 - RNA, 23 nt, Human adenovirus A
ggaaccccaaaucgcacacuugc

SEQ ID NO: 100083 - RNA, 13 nt, Human adenovirus A
ggaagaccuuuag

SEQ ID NO: 100084 - RNA, 23 nt, Human adenovirus A
gcuuuguuggauagcaaagccau

SEQ ID NO: 100085 - RNA, 13 nt, Human adenovirus A
ggaacagccaaac

SEQ ID NO: 100086 - RNA, 21 nt, Human adenovirus A
ggaacagccaaaccggccaga

SEQ ID NO: 100087 - RNA, 13 nt, Human adenovirus A
guauugauuuucc

SEQ ID NO: 100088 - RNA, 15 nt, Human adenovirus A
guauuugucuccucu

SEQ ID NO: 100089 - RNA, 23 nt, Human adenovirus A
guaguuucuuuacaacuguaugc

SEQ ID NO: 100090 - RNA, 23 nt, Human adenovirus A
guacgcaagcauuuuuuguugcu

SEQ ID NO: 100091 - RNA, 21 nt, Human adenovirus A
gguuuaagaaaucuuuuacca

SEQ ID NO: 100092 - RNA, 15 nt, Human adenovirus A
guaaaaaaggacuuu

SEQ ID NO: 100093 - RNA, 13 nt, Human adenovirus A
ggugggaugcauc

SEQ ID NO: 100094 - RNA, 23 nt, Human adenovirus A
gguguuaugaaucuuuauugaua

SEQ ID NO: 100095 - RNA, 21 nt, Human adenovirus A
ggucgaccguccacuguagau

SEQ ID NO: 100096 - RNA, 15 nt, Human adenovirus A
ggucgaccuguggca

SEQ ID NO: 100097 - RNA, 16 nt, Human adenovirus A
gggcgacuacccggcg

SEQ ID NO: 100098 - RNA, 14 nt, Human adenovirus A
gguaagaaucgcaa

SEQ ID NO: 100099 - RNA, 14 nt, Human adenovirus A
gcagacuaaaugga

SEQ ID NO: 100100 - RNA, 16 nt, Human adenovirus A
gcagacuaaauggaag

SEQ ID NO: 100101 - RNA, 13 nt, Human adenovirus A
gcagcagaaccca

SEQ ID NO: 100102 - RNA, 14 nt, Human adenovirus A
gccccgcgacacgg

SEQ ID NO: 100103 - RNA, 14 nt, Human adenovirus A
gcccgcacagucac

SEQ ID NO: 100104 - RNA, 12 nt, Human adenovirus A
gcccgcauguau

SEQ ID NO: 100105 - RNA, 13 nt, Human adenovirus A
gccgcugcagcuu

SEQ ID NO: 100106 - RNA, 22 nt, Human adenovirus A
gccuuacauguggagcuuucaa

SEQ ID NO: 100107 - RNA, 19 nt, Human adenovirus A
gccuuacguccugauugua

SEQ ID NO: 100108 - RNA, 14 nt, Human adenovirus A
gccucggaguaccu

SEQ ID NO: 100109 - RNA, 17 nt, Human adenovirus A
gccggucaggaugccuc

SEQ ID NO: 100110 - RNA, 20 nt, Human adenovirus A
gccggcguagaccaaccacc

SEQ ID NO: 100111 - RNA, 19 nt, Human adenovirus A
gcgccuucaauuggaacag

SEQ ID NO: 100112 - RNA, 19 nt, Human adenovirus A
gcgugaaguauuccaugag

SEQ ID NO: 100113 - RNA, 17 nt, Human adenovirus A
gcuacguugaguacuuc

SEQ ID NO: 100114 - RNA, 15 nt, Human adenovirus A
gcgcguacgcggaca

SEQ ID NO: 100115 - RNA, 22 nt, Human adenovirus A
gcgguuuuggcggccaugcaaa

SEQ ID NO: 100116 - RNA, 15 nt, Human adenovirus A
gcguccacacaguuu

SEQ ID NO: 100117 - RNA, 17 nt, Human adenovirus A
gcucuauucggugccua

SEQ ID NO: 100118 - RNA, 20 nt, Human adenovirus A
gcucauuggaguacaagcuu

SEQ ID NO: 100119 - RNA, 12 nt, Human adenovirus A
gcugcaguuuuu

SEQ ID NO: 100120 - RNA, 21 nt, Human adenovirus A
gcugcaguuuuuuuuccacac

SEQ ID NO: 100121 - RNA, 10 nt, Human adenovirus A
gcugcagcuu

SEQ ID NO: 100122 - RNA, 12 nt, Human adenovirus A
gcuuaguauuug

SEQ ID NO: 100123 - RNA, 18 nt, Human adenovirus A
guggccgaugcucgcaag

SEQ ID NO: 100124 - RNA, 20 nt, Human adenovirus A
guguacuuuucaaacuuuac

SEQ ID NO: 100125 - RNA, 14 nt, Human adenovirus A
guccauaugacuaa

SEQ ID NO: 100126 - RNA, 22 nt, Human adenovirus A
guccccgcggacaugcuuuucu

SEQ ID NO: 100127 - RNA, 13 nt, Human adenovirus A
guuaaaagaccaa

SEQ ID NO: 100128 - RNA, 18 nt, Human adenovirus A
guuaaacuaucacuugca

SEQ ID NO: 100129 - RNA, 13 nt, Human adenovirus A
guuaaacugccuc

SEQ ID NO: 100130 - RNA, 21 nt, Human adenovirus A
guuacucaauuauuacauggu

SEQ ID NO: 100131 - RNA, 19 nt, Human adenovirus A
guuagaguuucaagcuugg

SEQ ID NO: 100132 - RNA, 15 nt, Human adenovirus A
guugaaaaaggaauu

SEQ ID NO: 100133 - RNA, 15 nt, Human adenovirus A
guugaaguuacucaa

SEQ ID NO: 100134 - RNA, 19 nt, Human adenovirus A
guuccacgauuaagacaua

SEQ ID NO: 100135 - RNA, 13 nt, Human adenovirus A
guuuuacagugcu

SEQ ID NO: 100136 - RNA, 18 nt, Human adenovirus A
guuguguaaacacuaccg

SEQ ID NO: 100137 - RNA, 19 nt, Human adenovirus A
guugugccacuauaaaugu

SEQ ID NO: 100138 - RNA, 16 nt, Human adenovirus A
guuguuagcuauuuua

SEQ ID NO: 100139 - RNA, 14 nt, Human adenovirus A
guuuagauguaucu

SEQ ID NO: 100140 - RNA, 13 nt, Human adenovirus A
guuguagacauag

SEQ ID NO: 100141 - RNA, 11 nt, Human adenovirus A
uaaaagaccaa

SEQ ID NO: 100142 - RNA, 14 nt, Human adenovirus A
uaaaccauggaauu

SEQ ID NO: 100143 - RNA, 13 nt, Human adenovirus A
uaacaacagucag

SEQ ID NO: 100144 - RNA, 22 nt, Human adenovirus A
uaacaaaagguguuuuugguau

SEQ ID NO: 100145 - RNA, 15 nt, Human adenovirus A
uaaaugcaacuuuca

SEQ ID NO: 100146 - RNA, 15 nt, Human adenovirus A
uaaauggaagacauc

SEQ ID NO: 100147 - RNA, 16 nt, Human adenovirus A
uaaauggaagacauca

SEQ ID NO: 100148 - RNA, 22 nt, Human adenovirus A
uaaauggaaggucagauucuuc

SEQ ID NO: 100149 - RNA, 11 nt, Human adenovirus A
uaaauugagau

SEQ ID NO: 100150 - RNA, 20 nt, Human adenovirus A
uaagcugggugggaugcauc

SEQ ID NO: 100151 - RNA, 21 nt, Human adenovirus A
uaauuuauggacccacuggcu

SEQ ID NO: 100152 - RNA, 20 nt, Human adenovirus A
uaacugucauccgcauuuaa

SEQ ID NO: 100153 - RNA, 22 nt, Human adenovirus A
uacagcuucagaugacuggaca

SEQ ID NO: 100154 - RNA, 21 nt, Human adenovirus A
uacaguuuggguugacuuuuc

SEQ ID NO: 100155 - RNA, 23 nt, Human adenovirus A
uacagccccuuugaagagcucga

SEQ ID NO: 100156 - RNA, 22 nt, Human adenovirus A
uacacaaagaaaacaucacucu

SEQ ID NO: 100157 - RNA, 16 nt, Human adenovirus A
uacaagguaaaauggg

SEQ ID NO: 100158 - RNA, 22 nt, Human adenovirus A
uacgugccuccccgcuauuugg

SEQ ID NO: 100159 - RNA, 21 nt, Human adenovirus A
uacuaaagaaacaaacuacau

SEQ ID NO: 100160 - RNA, 16 nt, Human adenovirus A
uacuaccgucaucucu

SEQ ID NO: 100161 - RNA, 24 nt, Human adenovirus A
uacuucacgcaauagacucugcca

SEQ ID NO: 100162 - RNA, 20 nt, Human adenovirus A
uacuuaccggaaaucugaaa

SEQ ID NO: 100163 - RNA, 15 nt, Human adenovirus A
uaccuauuaaagugu

SEQ ID NO: 100164 - RNA, 18 nt, Human adenovirus A
uacauaaaccauggaauu

SEQ ID NO: 100165 - RNA, 23 nt, Human adenovirus A
uacauaggcuggguuuauggaau

SEQ ID NO: 100166 - RNA, 18 nt, Human adenovirus A
uauacaagguaaaauggg

SEQ ID NO: 100167 - RNA, 21 nt, Human adenovirus A
uauacuaaagaaacaaacuac

SEQ ID NO: 100168 - RNA, 15 nt, Human adenovirus A
uaguggcaaugcagc

SEQ ID NO: 100169 - RNA, 15 nt, Human adenovirus A
uaguagcaucagcua

SEQ ID NO: 100170 - RNA, 14 nt, Human adenovirus A
uauauuaacuuuau

SEQ ID NO: 100171 - RNA, 21 nt, Human adenovirus A
uauaucuuuuaacaacaagcu

SEQ ID NO: 100172 - RNA, 22 nt, Human adenovirus A
uauacgcgugguuaaacugccu

SEQ ID NO: 100173 - RNA, 23 nt, Human adenovirus A
uagauguaauuaauggacuuuga

SEQ ID NO: 100174 - RNA, 15 nt, Human adenovirus A
uagcugaaaacaacu

SEQ ID NO: 100175 - RNA, 23 nt, Human adenovirus A
uagcugaaaacaacugcacuuga

SEQ ID NO: 100176 - RNA, 18 nt, Human adenovirus A
uagaaucggcaacagcag

SEQ ID NO: 100177 - RNA, 14 nt, Human adenovirus A
uagacauagccaau

SEQ ID NO: 100178 - RNA, 14 nt, Human adenovirus A
uagacucugccaac

SEQ ID NO: 100179 - RNA, 14 nt, Human adenovirus A
cuuucgaucccuca

SEQ ID NO: 100180 - RNA, 15 nt, Human adenovirus A
cuuucgaucccucau

SEQ ID NO: 100181 - RNA, 21 nt, Human adenovirus A
cuuucuccaaaucuuaaaugg

SEQ ID NO: 100182 - RNA, 13 nt, Human adenovirus A
cuuuucaaacuuu

SEQ ID NO: 100183 - RNA, 14 nt, Human adenovirus A
cuuuucaaacuuua

SEQ ID NO: 100184 - RNA, 14 nt, Human adenovirus A
cuuuuacuucuucc

SEQ ID NO: 100185 - RNA, 14 nt, Human adenovirus A
cuuuuaccaaugaa

SEQ ID NO: 100186 - RNA, 17 nt, Human adenovirus A
cuuuuaccaaugaauua

SEQ ID NO: 100187 - RNA, 21 nt, Human adenovirus A
cuuuguagcugaaaacaacug

SEQ ID NO: 100188 - RNA, 12 nt, Human adenovirus A
gaaaaaauacau

SEQ ID NO: 100189 - RNA, 13 nt, Human adenovirus A
gaaaaaccaccag

SEQ ID NO: 100190 - RNA, 18 nt, Human adenovirus A
gaaaaaccaccaggugua

SEQ ID NO: 100191 - RNA, 11 nt, Human adenovirus A
gaaaacaucac

SEQ ID NO: 100192 - RNA, 12 nt, Human adenovirus A
cuuuuccaaugc

SEQ ID NO: 100193 - RNA, 18 nt, Human adenovirus A
cuuuucucucugacugau

SEQ ID NO: 100194 - RNA, 15 nt, Human adenovirus A
cuguggaaagcauuu

SEQ ID NO: 100195 - RNA, 13 nt, Human adenovirus A
cugugggugacaa

SEQ ID NO: 100196 - RNA, 19 nt, Human adenovirus A
cuuuaguauagguauugau

SEQ ID NO: 100197 - RNA, 16 nt, Human adenovirus A
cuuuaccuacuuugag

SEQ ID NO: 100198 - RNA, 20 nt, Human adenovirus A
cuuuaacggaaaacacguua

SEQ ID NO: 100199 - RNA, 20 nt, Human adenovirus A
cuuuauggccugaguguaau

SEQ ID NO: 100200 - RNA, 20 nt, Human adenovirus A
cuuuauuaaacaucaugauu

SEQ ID NO: 100201 - RNA, 16 nt, Human adenovirus A
cuuuauugauacuugu

SEQ ID NO: 100202 - RNA, 21 nt, Human adenovirus A
cuuucaaccccaaaugggacu

SEQ ID NO: 100203 - RNA, 17 nt, Human adenovirus A
cuuguuuuuucugacau

SEQ ID NO: 100204 - RNA, 15 nt, Human adenovirus A
cuuguacuccaauga

SEQ ID NO: 100205 - RNA, 15 nt, Human adenovirus A
cuugucaacuacaua

SEQ ID NO: 100206 - RNA, 22 nt, Human adenovirus A
gaaggucagauucuucuuccca

SEQ ID NO: 100207 - RNA, 12 nt, Human adenovirus A
gaaggaggcagu

SEQ ID NO: 100208 - RNA, 17 nt, Human adenovirus A
gaagcugaaaucagcug

SEQ ID NO: 100209 - RNA, 20 nt, Human adenovirus A
gaagcugaaaucagcugcca

SEQ ID NO: 100210 - RNA, 14 nt, Human adenovirus A
gaacgagaucggca

SEQ ID NO: 100211 - RNA, 17 nt, Human adenovirus A
gaacggcagcugccaag

SEQ ID NO: 100212 - RNA, 21 nt, Human adenovirus A
gaagauacuaccuacuccuac

SEQ ID NO: 100213 - RNA, 18 nt, Human adenovirus A
gaagauuucugcugucau

SEQ ID NO: 100214 - RNA, 19 nt, Human adenovirus A
gaagauuucugcugucauu

SEQ ID NO: 100215 - RNA, 17 nt, Human adenovirus A
gaauaucucauuugcaa

SEQ ID NO: 100216 - RNA, 19 nt, Human adenovirus A
gacaaaccuuuacugcaau

SEQ ID NO: 100217 - RNA, 22 nt, Human adenovirus A
gacaaggaaccgaccugcaaca

SEQ ID NO: 100218 - RNA, 22 nt, Human adenovirus A
gaaacugggggcguacacuggc

SEQ ID NO: 100219 - RNA, 23 nt, Human adenovirus A
gaaagagaacaaacagugccugu

SEQ ID NO: 100220 - RNA, 13 nt, Human adenovirus A
gaaccuaacuguc

SEQ ID NO: 100221 - RNA, 15 nt, Human adenovirus A
gaaccuaacugucau

SEQ ID NO: 100222 - RNA, 16 nt, Human adenovirus A
gaaccuaacugucauc

SEQ ID NO: 100223 - RNA, 15 nt, Human adenovirus A
gaacccuuacacuca

SEQ ID NO: 100224 - RNA, 22 nt, Human adenovirus A
gaaacaaguuuagaaaccccac

SEQ ID NO: 100225 - RNA, 17 nt, Human adenovirus A
gcaauagacucugccaa

SEQ ID NO: 100226 - RNA, 19 nt, Human adenovirus A
gcaaggcgguauuugcuau

SEQ ID NO: 100227 - RNA, 21 nt, Human adenovirus A
gcaaggcgguauuugcuauac

SEQ ID NO: 100228 - RNA, 22 nt, Human adenovirus A
gcaaagaacaucaacugugcua

SEQ ID NO: 100229 - RNA, 13 nt, Human adenovirus A
gauucuucuuccc

SEQ ID NO: 100230 - RNA, 18 nt, Human adenovirus A
gauugauaucuugaaucu

SEQ ID NO: 100231 - RNA, 19 nt, Human adenovirus A
gauucucucguugauuaua

SEQ ID NO: 100232 - RNA, 19 nt, Human adenovirus A
gauggaguggcgauuccaa

SEQ ID NO: 100233 - RNA, 15 nt, Human adenovirus A
gauguaauuaaugga

SEQ ID NO: 100234 - RNA, 20 nt, Human adenovirus A
gauguaauuaauggacuuug

SEQ ID NO: 100235 - RNA, 15 nt, Human adenovirus A
gaucugucagugaaa

SEQ ID NO: 100236 - RNA, 21 nt, Human adenovirus A
gaugaacggaacuacucagaa

SEQ ID NO: 100237 - RNA, 22 nt, Human adenovirus A
gaugaagcgcagcagaacccag

SEQ ID NO: 100238 - RNA, 14 nt, Human adenovirus A
gauaaugagccuga

SEQ ID NO: 100239 - RNA, 14 nt, Human adenovirus A
gauacacaccucau

SEQ ID NO: 100240 - RNA, 19 nt, Human adenovirus A
gauacacaccucauuaaau

SEQ ID NO: 100241 - RNA, 18 nt, Human adenovirus A
gauagaccugaccacaug

SEQ ID NO: 100242 - RNA, 17 nt, Human adenovirus A
gaguugcaggaugaauu

SEQ ID NO: 100243 - RNA, 15 nt, Human adenovirus A
gagcaggauggugua

SEQ ID NO: 100244 - RNA, 18 nt, Human adenovirus A
gaggcgcgcgaguuaaga

SEQ ID NO: 100245 - RNA, 22 nt, Human adenovirus A
gacggcagcugcaccucguuaa

SEQ ID NO: 100246 - RNA, 22 nt, Human adenovirus A
gacggaacgccaacgcugcaaa

SEQ ID NO: 100247 - RNA, 22 nt, Human adenovirus A
gacuguuuuauuaaaaaucaaa

SEQ ID NO: 100248 - RNA, 14 nt, Human adenovirus A
gagacaucuguguc

SEQ ID NO: 100249 - RNA, 16 nt, Human adenovirus A
gagacaucugugucuu

SEQ ID NO: 100250 - RNA, 15 nt, Human adenovirus A
cgccaacgcugcaaa

SEQ ID NO: 100251 - RNA, 21 nt, Human adenovirus A
cgcgccacggacaccuacuuc

SEQ ID NO: 100252 - RNA, 12 nt, Human adenovirus A
cgcaccacugua

SEQ ID NO: 100253 - RNA, 13 nt, Human adenovirus A
cgcagaugauaga

SEQ ID NO: 100254 - RNA, 19 nt, Human adenovirus A
cgcaguggucuuacaugca

SEQ ID NO: 100255 - RNA, 19 nt, Human adenovirus A
cgcauugcgauaaacugga

SEQ ID NO: 100256 - RNA, 18 nt, Human adenovirus A
cgcauuggaaaagugcac

SEQ ID NO: 100257 - RNA, 16 nt, Human adenovirus A
ccuaauagcacuuugg

SEQ ID NO: 100258 - RNA, 17 nt, Human adenovirus A
ccuaauagcacuuugga

SEQ ID NO: 100259 - RNA, 14 nt, Human adenovirus A
ccuaccacauucug

SEQ ID NO: 100260 - RNA, 12 nt, Human adenovirus A
ccuaccacugua

SEQ ID NO: 100261 - RNA, 13 nt, Human adenovirus A
ccuaccacuguac

SEQ ID NO: 100262 - RNA, 12 nt, Human adenovirus A
cgaggcaguuuc

SEQ ID NO: 100263 - RNA, 21 nt, Human adenovirus A
cguuagcguccacacaguuuc

SEQ ID NO: 100264 - RNA, 17 nt, Human adenovirus A
cgugagacuuaccauuu

SEQ ID NO: 100265 - RNA, 14 nt, Human adenovirus A
cguagaccaaccac

SEQ ID NO: 100266 - RNA, 16 nt, Human adenovirus A
cggugccuaugugaua

SEQ ID NO: 100267 - RNA, 21 nt, Human adenovirus A
cgggaagauacuaccuacucc

SEQ ID NO: 100268 - RNA, 17 nt, Human adenovirus A
cgcguauaguguaaaaa

SEQ ID NO: 100269 - RNA, 19 nt, Human adenovirus A
cgcgucggggcuacugcuc

SEQ ID NO: 100270 - RNA, 15 nt, Human adenovirus A
cgcuaugaaucuuua

SEQ ID NO: 100271 - RNA, 19 nt, Human adenovirus A
cgcuaugaaucuuuaccag

SEQ ID NO: 100272 - RNA, 19 nt, Human adenovirus A
cgcuauugguggaaaaaga

SEQ ID NO: 100273 - RNA, 18 nt, Human adenovirus A
cgcugaaacagcaggguc

SEQ ID NO: 100274 - RNA, 16 nt, Human adenovirus A
cuagcggccacuaaag

SEQ ID NO: 100275 - RNA, 19 nt, Human adenovirus A
cuauuaaccugggauacua

SEQ ID NO: 100276 - RNA, 17 nt, Human adenovirus A
cuauuaacuuugaugaa

SEQ ID NO: 100277 - RNA, 17 nt, Human adenovirus A
cuaugaaucuuuaccag

SEQ ID NO: 100278 - RNA, 12 nt, Human adenovirus A
cuaauagcacuu

SEQ ID NO: 100279 - RNA, 19 nt, Human adenovirus A
cuagaaaagucaacccaaa

SEQ ID NO: 100280 - RNA, 14 nt, Human adenovirus A
cuaaaacaaggucu

SEQ ID NO: 100281 - RNA, 14 nt, Human adenovirus A
cuccuaccacugua

SEQ ID NO: 100282 - RNA, 15 nt, Human adenovirus A
cuccucacugaucgc

SEQ ID NO: 100283 - RNA, 12 nt, Human adenovirus A
cucgacaaggaa

SEQ ID NO: 100284 - RNA, 18 nt, Human adenovirus A
cucgcaguauggcagcug

SEQ ID NO: 100285 - RNA, 14 nt, Human adenovirus A
cucacauuaggcau

SEQ ID NO: 100286 - RNA, 15 nt, Human adenovirus A
cucacauuaggcaua

SEQ ID NO: 100287 - RNA, 17 nt, Human adenovirus A
cuccaaauaaaauugcu

SEQ ID NO: 100288 - RNA, 12 nt, Human adenovirus A
cugcaacagcca

SEQ ID NO: 100289 - RNA, 13 nt, Human adenovirus A
cugcugaagcaaa

SEQ ID NO: 100290 - RNA, 12 nt, Human adenovirus A
cuguacugcaaa

SEQ ID NO: 100291 - RNA, 21 nt, Human adenovirus A
cucuuauaaaauuucccucuu

SEQ ID NO: 100292 - RNA, 16 nt, Human adenovirus A
cugauugcguugcaau

SEQ ID NO: 100293 - RNA, 13 nt, Human adenovirus A
ugguuaaacugcc

SEQ ID NO: 100294 - RNA, 14 nt, Human adenovirus A
ugguuaaacugccu

SEQ ID NO: 100295 - RNA, 17 nt, Human adenovirus A
ugguuaaacugccuccu

SEQ ID NO: 100296 - RNA, 16 nt, Human adenovirus A
uggaucguauuauggc

SEQ ID NO: 100297 - RNA, 16 nt, Human adenovirus A
uggauuuucugaucaa

SEQ ID NO: 100298 - RNA, 14 nt, Human adenovirus A
uguggagcuuucaa

SEQ ID NO: 100299 - RNA, 21 nt, Human adenovirus A
ugugcuauuguuaacacugcc

SEQ ID NO: 100300 - RNA, 21 nt, Human adenovirus A
uguacaguuuggguugacuuu

SEQ ID NO: 100301 - RNA, 18 nt, Human adenovirus A
uguacacguuuauuugag

SEQ ID NO: 100302 - RNA, 20 nt, Human adenovirus A
uguacagaaaaaaauugcca

SEQ ID NO: 100303 - RNA, 16 nt, Human adenovirus A
uguaauggguucaagc

SEQ ID NO: 100304 - RNA, 18 nt, Human adenovirus A
uguccccgcggacaugcu

SEQ ID NO: 100305 - RNA, 13 nt, Human adenovirus A
ugucccaacaagc

SEQ ID NO: 100306 - RNA, 21 nt, Human adenovirus A
uucaacaggcgggaaaaguga

SEQ ID NO: 100307 - RNA, 13 nt, Human adenovirus A
uuacuucuuccaa

SEQ ID NO: 100308 - RNA, 13 nt, Human adenovirus A
uuacaaaccacuu

SEQ ID NO: 100309 - RNA, 22 nt, Human adenovirus A
uuacaagaguuacuuuccuuag

SEQ ID NO: 100310 - RNA, 18 nt, Human adenovirus A
uuaauuuuaguuggaaua

SEQ ID NO: 100311 - RNA, 15 nt, Human adenovirus A
uuaacuuugaugaaa

SEQ ID NO: 100312 - RNA, 18 nt, Human adenovirus A
uuaagaacacggugaaug

SEQ ID NO: 100313 - RNA, 23 nt, Human adenovirus A
uuaaugcauuguguacacguuua

SEQ ID NO: 100314 - RNA, 23 nt, Human adenovirus A
uguucuuaguaggcuaacuguua

SEQ ID NO: 100315 - RNA, 13 nt, Human adenovirus A
uuaaaaauuucaa

SEQ ID NO: 100316 - RNA, 22 nt, Human adenovirus A
uuaacaacaagcuaauugcuaa

SEQ ID NO: 100317 - RNA, 23 nt, Human adenovirus A
uuaacaacaagcuaauugcuaau

SEQ ID NO: 100318 - RNA, 11 nt, Human adenovirus A
uuaacacugcc

SEQ ID NO: 100319 - RNA, 18 nt, Human adenovirus A
uguugaucugucagugaa

SEQ ID NO: 100320 - RNA, 22 nt, Human adenovirus A
uguugcuccaguuauugacaaa

SEQ ID NO: 100321 - RNA, 19 nt, Human adenovirus A
uguuggauagcaaagccau

SEQ ID NO: 100322 - RNA, 18 nt, Human adenovirus A
ugcggggggaauaucuca

SEQ ID NO: 100323 - RNA, 23 nt, Human adenovirus A
ugcgcagaugauagagauaagca

SEQ ID NO: 100324 - RNA, 16 nt, Human adenovirus A
uggaauaacaagccua

SEQ ID NO: 100325 - RNA, 12 nt, Human adenovirus A
ugcugaagcaaa

SEQ ID NO: 100326 - RNA, 13 nt, Human adenovirus A
ugcugaagcaaac

SEQ ID NO: 100327 - RNA, 16 nt, Human adenovirus A
ugcugaagcaaacccu

SEQ ID NO: 100328 - RNA, 16 nt, Human adenovirus A
ugcugaaaucuggaca

SEQ ID NO: 100329 - RNA, 21 nt, Human adenovirus A
ugccaagugguauugauuuuc

SEQ ID NO: 100330 - RNA, 19 nt, Human adenovirus A
ugaugcauaauuaaacccu

SEQ ID NO: 100331 - RNA, 17 nt, Human adenovirus A
ugaucuucccgaauauc

SEQ ID NO: 100332 - RNA, 15 nt, Human adenovirus A
ugauguuaccaccga

SEQ ID NO: 100333 - RNA, 21 nt, Human adenovirus A
ugauaucuugaaucugucggc

SEQ ID NO: 100334 - RNA, 15 nt, Human adenovirus A
ugauucuaacugauu

SEQ ID NO: 100335 - RNA, 17 nt, Human adenovirus A
ugauugaaccugaucua

SEQ ID NO: 100336 - RNA, 10 nt, Human adenovirus A
ugauuuccag

SEQ ID NO: 100337 - RNA, 11 nt, Human adenovirus A
ugcaaagccag

SEQ ID NO: 100338 - RNA, 19 nt, Human adenovirus A
ugcaagaaggccauguacu

SEQ ID NO: 100339 - RNA, 20 nt, Human adenovirus A
ugcaaggcgguauuugcuau

SEQ ID NO: 100340 - RNA, 14 nt, Human adenovirus A
ucuuuucuuuaugu

SEQ ID NO: 100341 - RNA, 16 nt, Human adenovirus A
ugaaaaaauacaugag

SEQ ID NO: 100342 - RNA, 15 nt, Human adenovirus A
ugaaaacaacugcac

SEQ ID NO: 100343 - RNA, 17 nt, Human adenovirus A
ugagacuuaccauuugg

SEQ ID NO: 100344 - RNA, 17 nt, Human adenovirus A
ugagauguuuauuuuga

SEQ ID NO: 100345 - RNA, 18 nt, Human adenovirus A
ugauacacaccucauuaa

SEQ ID NO: 100346 - RNA, 18 nt, Human adenovirus A
ugaguacgaaagucuguu

SEQ ID NO: 100347 - RNA, 16 nt, Human adenovirus A
ugaguaaagauauucc

SEQ ID NO: 100348 - RNA, 19 nt, Human adenovirus A
aacauccgcguccgacaaa

SEQ ID NO: 100349 - RNA, 14 nt, Human adenovirus A
aacgucgccugagu

SEQ ID NO: 100350 - RNA, 20 nt, Human adenovirus A
aacgcugaugccacuugaau

SEQ ID NO: 100351 - RNA, 13 nt, Human adenovirus A
aacgcccugcucc

SEQ ID NO: 100352 - RNA, 14 nt, Human adenovirus A
aacgguaguggcaa

SEQ ID NO: 100353 - RNA, 19 nt, Human adenovirus A
aacgguaguggcaaugcag

SEQ ID NO: 100354 - RNA, 21 nt, Human adenovirus A
aagagaacaaacagugccugu

SEQ ID NO: 100355 - RNA, 22 nt, Human adenovirus A
aagaccgaugcguuacccuaga

SEQ ID NO: 100356 - RNA, 18 nt, Human adenovirus A
aagauuucugcugucauu

SEQ ID NO: 100357 - RNA, 17 nt, Human adenovirus A
aauacugcuagaacaag

SEQ ID NO: 100358 - RNA, 22 nt, Human adenovirus A
aauaaaagcauacuuaccaaag

SEQ ID NO: 100359 - RNA, 13 nt, Human adenovirus A
aauaaaauugcuc

SEQ ID NO: 100360 - RNA, 22 nt, Human adenovirus A
aaucccuacccaccaucuucau

SEQ ID NO: 100361 - RNA, 17 nt, Human adenovirus A
aaucgcagucaccacca

SEQ ID NO: 100362 - RNA, 23 nt, Human adenovirus A
aaucaaccuuucgaucccucaua

SEQ ID NO: 100363 - RNA, 16 nt, Human adenovirus A
aauauucaagugcagu

SEQ ID NO: 100364 - RNA, 15 nt, Human adenovirus A
aauauuguauuucca

SEQ ID NO: 100365 - RNA, 16 nt, Human adenovirus A
aauauuguauuuccag

SEQ ID NO: 100366 - RNA, 17 nt, Human adenovirus A
aagcucuugaccaccgu

SEQ ID NO: 100367 - RNA, 17 nt, Human adenovirus A
aagcuuggcaagcauaa

SEQ ID NO: 100368 - RNA, 20 nt, Human adenovirus A
aagcuuguacuccaaugagc

SEQ ID NO: 100369 - RNA, 19 nt, Human adenovirus A
aagccauggcgaccagugu

SEQ ID NO: 100370 - RNA, 13 nt, Human adenovirus A
aagccgcucucac

SEQ ID NO: 100371 - RNA, 11 nt, Human adenovirus A
aagcagugaaa

SEQ ID NO: 100372 - RNA, 21 nt, Human adenovirus A
aaggucagauucuucuuccca

SEQ ID NO: 100373 - RNA, 18 nt, Human adenovirus A
aagugacgucacaacaag

SEQ ID NO: 100374 - RNA, 23 nt, Human adenovirus A
aagucgaaauauucaagugcagu

SEQ ID NO: 100375 - RNA, 22 nt, Human adenovirus A
aagucgggacacggcugccugc

SEQ ID NO: 100376 - RNA, 16 nt, Human adenovirus A
uugugugcugaauuua

SEQ ID NO: 100377 - RNA, 21 nt, Human adenovirus A
uuuacauaauguaagugaggu

SEQ ID NO: 100378 - RNA, 12 nt, Human adenovirus A
uuuauuaaacau

SEQ ID NO: 100379 - RNA, 18 nt, Human adenovirus A
uuuauggacccacuggcu

SEQ ID NO: 100380 - RNA, 14 nt, Human adenovirus A
uuuaccuacuuuga

SEQ ID NO: 100381 - RNA, 14 nt, Human adenovirus A
uuguauuuugagau

SEQ ID NO: 100382 - RNA, 16 nt, Human adenovirus A
uuguagacauagccaa

SEQ ID NO: 100383 - RNA, 19 nt, Human adenovirus A
uuguagauaauccagucau

SEQ ID NO: 100384 - RNA, 21 nt, Human adenovirus A
uuguagcugaaaacaacugca

SEQ ID NO: 100385 - RNA, 12 nt, Human adenovirus A
uuuccugagaca

SEQ ID NO: 100386 - RNA, 16 nt, Human adenovirus A
uuucggccauuuugga

SEQ ID NO: 100387 - RNA, 14 nt, Human adenovirus A
uuucugacauggua

SEQ ID NO: 100388 - RNA, 21 nt, Human adenovirus A
uuuggcggccaugcaaagcca

SEQ ID NO: 100389 - RNA, 17 nt, Human adenovirus A
uuugggaaccuuugaca

SEQ ID NO: 100390 - RNA, 18 nt, Human adenovirus A
uuugggcuaguucuuguc

SEQ ID NO: 100391 - RNA, 16 nt, Human adenovirus A
uuuuccacacaucuca

SEQ ID NO: 100392 - RNA, 14 nt, Human adenovirus A
aacaguaaccauua

SEQ ID NO: 100393 - RNA, 15 nt, Human adenovirus A
uuugguuucgccaag

SEQ ID NO: 100394 - RNA, 18 nt, Human adenovirus A
uuuguagcauacaauuag

SEQ ID NO: 100395 - RNA, 20 nt, Human adenovirus A
uuuuaccuuguauaccuccc

SEQ ID NO: 100396 - RNA, 15 nt, Human adenovirus A
uuggcauuaggccau

SEQ ID NO: 100397 - RNA, 16 nt, Human adenovirus A
uuggauagcaaagcca

SEQ ID NO: 100398 - RNA, 13 nt, Human adenovirus A
uugcuuucugccc

SEQ ID NO: 100399 - RNA, 22 nt, Human adenovirus A
uugcgauagcucuuccagcuga

SEQ ID NO: 100400 - RNA, 11 nt, Human adenovirus A
aacacugugcg

SEQ ID NO: 100401 - RNA, 19 nt, Human adenovirus A
aacaccugaagcugaauac

SEQ ID NO: 100402 - RNA, 23 nt, Human adenovirus A
uugcaaacagcaaacuuucucca

SEQ ID NO: 100403 - RNA, 19 nt, Human adenovirus A
uugcaacugcugaagcaaa

SEQ ID NO: 100404 - RNA, 20 nt, Human adenovirus A
uugcagggcgcccauaacau

SEQ ID NO: 100405 - RNA, 16 nt, Human adenovirus A
uugcauuuuaguaaaa

SEQ ID NO: 100406 - RNA, 22 nt, Human adenovirus A
uucaagcuuggcaagcauaaca

SEQ ID NO: 100407 - RNA, 17 nt, Human adenovirus A
uucaaccccaaauggga

SEQ ID NO: 100408 - RNA, 16 nt, Human adenovirus A
uucaaccuauuaaccu

SEQ ID NO: 100409 - RNA, 16 nt, Human adenovirus A
uucacuacaguguaug

SEQ ID NO: 100410 - RNA, 21 nt, Human adenovirus A
uucagauggcucuuacuugcc

SEQ ID NO: 100411 - RNA, 16 nt, Human adenovirus A
uugaaaaaauacauga

SEQ ID NO: 100412 - RNA, 17 nt, Human adenovirus A
uugaaaaaauacaugag

SEQ ID NO: 100413 - RNA, 20 nt, Human adenovirus A
uugaagagcucgacaaggaa

SEQ ID NO: 100414 - RNA, 20 nt, Human adenovirus A
uugacccauuugacacauca

SEQ ID NO: 100415 - RNA, 15 nt, Human adenovirus A
uugagauuggcaaug

SEQ ID NO: 100416 - RNA, 21 nt, Human adenovirus A
uugcaaacagcaaacuuucuc

SEQ ID NO: 100417 - RNA, 19 nt, Human adenovirus A
uugauuuacaaaccgugca

SEQ ID NO: 100418 - RNA, 19 nt, Human adenovirus A
ucuccaaaucuuaaaugga

SEQ ID NO: 100419 - RNA, 14 nt, Human adenovirus A
ucuccccacagcug

SEQ ID NO: 100420 - RNA, 18 nt, Human adenovirus A
ucucccuguaaguacgug

SEQ ID NO: 100421 - RNA, 21 nt, Human adenovirus A
ucuuacgaaaccgugauggca

SEQ ID NO: 100422 - RNA, 13 nt, Human adenovirus A
ucuuacaugcaca

SEQ ID NO: 100423 - RNA, 14 nt, Human adenovirus A
ucuuaagcagugaa

SEQ ID NO: 100424 - RNA, 14 nt, Human adenovirus A
ucuguacugcaaac

SEQ ID NO: 100425 - RNA, 12 nt, Human adenovirus A
ucuuaaauggaa

SEQ ID NO: 100426 - RNA, 21 nt, Human adenovirus A
ucuuaaauggaaggucagauu

SEQ ID NO: 100427 - RNA, 16 nt, Human adenovirus A
ucuggacaugcagguc

SEQ ID NO: 100428 - RNA, 13 nt, Human adenovirus A
ucgcacacuugcu

SEQ ID NO: 100429 - RNA, 23 nt, Human adenovirus A
ucggcaacagcagcaacaaggaa

SEQ ID NO: 100430 - RNA, 18 nt, Human adenovirus A
ucggcacgagccagcuga

SEQ ID NO: 100431 - RNA, 18 nt, Human adenovirus A
ucgggaagauacuaccua

SEQ ID NO: 100432 - RNA, 23 nt, Human adenovirus A
ucgggacacggcugccugcauag

SEQ ID NO: 100433 - RNA, 15 nt, Human adenovirus A
ucuagccaacaucca

SEQ ID NO: 100434 - RNA, 13 nt, Human adenovirus A
ucguugauaucaa

SEQ ID NO: 100435 - RNA, 17 nt, Human adenovirus A
ucguugauuauaaucuc

SEQ ID NO: 100436 - RNA, 16 nt, Human adenovirus A
uccuucccauuuuacc

SEQ ID NO: 100437 - RNA, 23 nt, Human adenovirus A
ucgaacugcggugcgugucacag

SEQ ID NO: 100438 - RNA, 20 nt, Human adenovirus A
ucgaaauauucaagugcagu

SEQ ID NO: 100439 - RNA, 19 nt, Human adenovirus A
ucgaccguccacuguagau

SEQ ID NO: 100440 - RNA, 17 nt, Human adenovirus A
ucgaugaugcauaauua

SEQ ID NO: 100441 - RNA, 13 nt, Human adenovirus A
uccugaugcuuuu

SEQ ID NO: 100442 - RNA, 23 nt, Human adenovirus A
uccugaugcuuuucgccagcagc

SEQ ID NO: 100443 - RNA, 14 nt, Human adenovirus A
uccugauuguagcu

SEQ ID NO: 100444 - RNA, 20 nt, Human adenovirus A
uccgacaaaugaugaaugaa

SEQ ID NO: 100445 - RNA, 19 nt, Human adenovirus A
uccucuguaguuucuuuac

SEQ ID NO: 100446 - RNA, 21 nt, Human adenovirus A
ucccagacugcuguaaugggu

SEQ ID NO: 100447 - RNA, 14 nt, Human adenovirus A
ucccucuucccaac

SEQ ID NO: 100448 - RNA, 19 nt, Human adenovirus A
ucccucuucccaacuguca

SEQ ID NO: 100449 - RNA, 15 nt, Human adenovirus A
uccaaugagcuaaua

SEQ ID NO: 100450 - RNA, 14 nt, Human adenovirus A
uccacacaucucac

SEQ ID NO: 100451 - RNA, 16 nt, Human adenovirus A
uccacgauuaagacau

SEQ ID NO: 100452 - RNA, 23 nt, Human adenovirus A
uccacccuguacgcaagcauuuu

SEQ ID NO: 100453 - RNA, 13 nt, Human adenovirus A
ucauccgcauuua

SEQ ID NO: 100454 - RNA, 19 nt, Human adenovirus A
ucauccgcauuuaagcaac

SEQ ID NO: 100455 - RNA, 12 nt, Human adenovirus A
uccaauggucuu

SEQ ID NO: 100456 - RNA, 20 nt, Human adenovirus A
ucaggagcagaaaucuugaa

SEQ ID NO: 100457 - RNA, 23 nt, Human adenovirus A
ucaccguuguacgauaccacucg

SEQ ID NO: 100458 - RNA, 13 nt, Human adenovirus A
uauuucaaccuau

SEQ ID NO: 100459 - RNA, 14 nt, Human adenovirus A
ucaaaauggccgua

SEQ ID NO: 100460 - RNA, 22 nt, Human adenovirus A
ucaaaagcuacguugaguacuu

SEQ ID NO: 100461 - RNA, 22 nt, Human adenovirus A
ucaaaauuuucuccccacagcu

SEQ ID NO: 100462 - RNA, 20 nt, Human adenovirus A
ucaaaccugacagacuugca

SEQ ID NO: 100463 - RNA, 22 nt, Human adenovirus A
ucaaaccugacagacuugcaaa

SEQ ID NO: 100464 - RNA, 19 nt, Human adenovirus A
ucaaacuuuacaaaccacu

SEQ ID NO: 100465 - RNA, 22 nt, Human adenovirus A
ucaacuacauaaaccauggaau

SEQ ID NO: 100466 - RNA, 20 nt, Human adenovirus A
ucaaccuuucgaucccucau

SEQ ID NO: 100467 - RNA, 18 nt, Human adenovirus A
uauucauugucauugcca

SEQ ID NO: 100468 - RNA, 16 nt, Human adenovirus A
uauuggguuacagguu

SEQ ID NO: 100469 - RNA, 23 nt, Human adenovirus A
uauuaacuuuauauugcauuugu

SEQ ID NO: 100470 - RNA, 18 nt, Human adenovirus A
uauguauguguugugcca

SEQ ID NO: 100471 - RNA, 15 nt, Human adenovirus A
uauagguauugauaa

SEQ ID NO: 100472 - RNA, 17 nt, Human adenovirus A
uagaaucggcaacagca

SEQ ID NO: 100473 - RNA, 20 nt, Human adenovirus A
uagaagcugaaaucagcugc

SEQ ID NO: 100474 - RNA, 12 nt, Human adenovirus A
uagaaauugaug

SEQ ID NO: 100475 - RNA, 16 nt, Human adenovirus A
uagaaauugauggaag

SEQ ID NO: 100476 - RNA, 17 nt, Human adenovirus A
uacugcgagccguagaa

SEQ ID NO: 100477 - RNA, 15 nt, Human adenovirus A
uauggguaguagcau

SEQ ID NO: 100478 - RNA, 22 nt, Human adenovirus A
uaugggaucgcuugcaacugcu

SEQ ID NO: 100479 - RNA, 15 nt, Human adenovirus A
uaugcuauuuuucag

SEQ ID NO: 100480 - RNA, 21 nt, Human adenovirus A
uaugcuauuuuucagcagagu

SEQ ID NO: 100481 - RNA, 14 nt, Human adenovirus A
uauggaauuauguc

SEQ ID NO: 100482 - RNA, 19 nt, Human adenovirus A
uaugcauuuacaguacaaa

SEQ ID NO: 100483 - RNA, 13 nt, Human adenovirus A
uaugaaucuuuau

SEQ ID NO: 100484 - RNA, 21 nt, Human adenovirus A
uaucacucuucgcugcaguuu

SEQ ID NO: 100485 - RNA, 14 nt, Human adenovirus A
uaucacuugcaacc

SEQ ID NO: 100486 - RNA, 14 nt, Human adenovirus A
uaauuccacuuauu

SEQ ID NO: 100487 - RNA, 20 nt, Human adenovirus A
uaauucccaucuguguauac

SEQ ID NO: 100488 - RNA, 20 nt, Human adenovirus A
uaaguacgugagacuuacca

SEQ ID NO: 100489 - RNA, 23 nt, Human adenovirus A
uaagggacaaguuaaaagaccaa

SEQ ID NO: 100490 - RNA, 20 nt, Human adenovirus A
uacagauuggcaccauacaa

SEQ ID NO: 100491 - RNA, 21 nt, Human adenovirus A
uacagauuggcaccauacaac

SEQ ID NO: 100492 - RNA, 17 nt, Human adenovirus A
uacucggaauugucacc

SEQ ID NO: 100493 - RNA, 20 nt, Human adenovirus A
uacuccggcccaauauggua

SEQ ID NO: 100494 - RNA, 12 nt, Human adenovirus A
aacaacagucag

SEQ ID NO: 100495 - RNA, 21 nt, Human adenovirus A
aacaacagucaguguccauca

SEQ ID NO: 100496 - RNA, 12 nt, Human adenovirus A
uacucaauuauu

SEQ ID NO: 100497 - RNA, 17 nt, Human adenovirus A
uacguugaguacuucgg

SEQ ID NO: 100498 - RNA, 13 nt, Human adenovirus A
uaccuacuccuac

SEQ ID NO: 100499 - RNA, 19 nt, Human adenovirus A
uaccuauuaaaguguccca

SEQ ID NO: 100500 - RNA, 14 nt, Human adenovirus A
uacaugaguguaug

SEQ ID NO: 100501 - RNA, 11 nt, Human adenovirus A
uacgcaauuug

SEQ ID NO: 100502 - RNA, 13 nt, Human adenovirus A
uacgcccugauuu

SEQ ID NO: 100503 - RNA, 15 nt, Human adenovirus A
uacgcccugauuucc

SEQ ID NO: 100504 - RNA, 12 nt, Human adenovirus A
uaagaacauaca

SEQ ID NO: 100505 - RNA, 13 nt, Human adenovirus A
uaagaacauacaa

SEQ ID NO: 100506 - RNA, 21 nt, Human adenovirus A
uaacugauuaugagauguuua

SEQ ID NO: 100507 - RNA, 13 nt, Human adenovirus A
uaagaaaacgcau

SEQ ID NO: 100508 - RNA, 19 nt, Human adenovirus A
uaagcagugaaaaauaaua

SEQ ID NO: 100509 - RNA, 12 nt, Human adenovirus A
uaacagcacgau

SEQ ID NO: 100510 - RNA, 23 nt, Human adenovirus A
uaacaacagucaguguccaucag

SEQ ID NO: 100511 - RNA, 15 nt, Human adenovirus A
uaacugaaaauggaa

SEQ ID NO: 100512 - RNA, 17 nt, Human adenovirus A
uaaaguuuaaacuacac

SEQ ID NO: 100513 - RNA, 22 nt, Human adenovirus A
uaaacuaucacuugcaaccugu

SEQ ID NO: 100514 - RNA, 19 nt, Human adenovirus A
uaaagaaacaaacuacaua

SEQ ID NO: 100515 - RNA, 13 nt, Human adenovirus A
uaaagaaacugug

SEQ ID NO: 100516 - RNA, 19 nt, Human adenovirus A
uaaaagaccaaaauuuuca

SEQ ID NO: 100517 - RNA, 18 nt, Human adenovirus A
uaaaacuuccaacuuauu

SEQ ID NO: 100518 - RNA, 14 nt, Human adenovirus A
uaaaagauguagcu

SEQ ID NO: 100519 - RNA, 15 nt, Human adenovirus A
uaaaaccuagaccau

SEQ ID NO: 100520 - RNA, 16 nt, Human adenovirus A
guugacuggcaugggc

SEQ ID NO: 100521 - RNA, 19 nt, Human adenovirus A
guugauaucaauguuaucc

SEQ ID NO: 100522 - RNA, 12 nt, Human adenovirus A
guccauaugacu

SEQ ID NO: 100523 - RNA, 14 nt, Human adenovirus A
gucuuaaaaucucc

SEQ ID NO: 100524 - RNA, 15 nt, Human adenovirus A
gucuuaaaaucuccu

SEQ ID NO: 100525 - RNA, 13 nt, Human adenovirus A
guggaaagcauuu

SEQ ID NO: 100526 - RNA, 20 nt, Human adenovirus A
guggaaaaagaucaaggaaa

SEQ ID NO: 100527 - RNA, 13 nt, Human adenovirus A
guggaacagccaa

SEQ ID NO: 100528 - RNA, 12 nt, Human adenovirus A
gugccacagguc

SEQ ID NO: 100529 - RNA, 18 nt, Human adenovirus A
gugccguuggcagagucu

SEQ ID NO: 100530 - RNA, 18 nt, Human adenovirus A
guucccuaucauuaagaa

SEQ ID NO: 100531 - RNA, 20 nt, Human adenovirus A
guuccacgauuaagacauau

SEQ ID NO: 100532 - RNA, 21 nt, Human adenovirus A
guucaacagaaucaaucucag

SEQ ID NO: 100533 - RNA, 15 nt, Human adenovirus A
guucacuacagugua

SEQ ID NO: 100534 - RNA, 23 nt, Human adenovirus A
guggaucgggaagauacuaccua

SEQ ID NO: 100535 - RNA, 15 nt, Human adenovirus A
guggcaaugcagcag

SEQ ID NO: 100536 - RNA, 16 nt, Human adenovirus A
guguaagaacauacaa

SEQ ID NO: 100537 - RNA, 15 nt, Human adenovirus A
gugucccaacaagca

SEQ ID NO: 100538 - RNA, 16 nt, Human adenovirus A
gucauccgcauuuaag

SEQ ID NO: 100539 - RNA, 23 nt, Human adenovirus A
gucaggaugccucggaguaccug

SEQ ID NO: 100540 - RNA, 20 nt, Human adenovirus A
guccaauaguugcauagguu

SEQ ID NO: 100541 - RNA, 22 nt, Human adenovirus A
gucaccguuguacgauaccacu

SEQ ID NO: 100542 - RNA, 14 nt, Human adenovirus A
guaugucagcuggg

SEQ ID NO: 100543 - RNA, 17 nt, Human adenovirus A
guaugucagcugggaug

SEQ ID NO: 100544 - RNA, 16 nt, Human adenovirus A
guauuugcuauaccau

SEQ ID NO: 100545 - RNA, 17 nt, Human adenovirus A
gucaaaagcuacguuga

SEQ ID NO: 100546 - RNA, 13 nt, Human adenovirus A
guagcaucagcua

SEQ ID NO: 100547 - RNA, 22 nt, Human adenovirus A
guacuuuucaaacuuuacaaac

SEQ ID NO: 100548 - RNA, 19 nt, Human adenovirus A
guauacugaugaucuuccc

SEQ ID NO: 100549 - RNA, 15 nt, Human adenovirus A
guauaauaaaacugg

SEQ ID NO: 100550 - RNA, 16 nt, Human adenovirus A
guagguuuuacagugc

SEQ ID NO: 100551 - RNA, 19 nt, Human adenovirus A
guaguaugcgcagacgcau

SEQ ID NO: 100552 - RNA, 23 nt, Human adenovirus A
ggguucacuacaguguaugucag

SEQ ID NO: 100553 - RNA, 15 nt, Human adenovirus A
ggggcuacugcucau

SEQ ID NO: 100554 - RNA, 15 nt, Human adenovirus A
gggggaauaucucau

SEQ ID NO: 100555 - RNA, 19 nt, Human adenovirus A
cuuucgaucccucauauca

SEQ ID NO: 100556 - RNA, 17 nt, Human adenovirus A
cuuucuccaaaucuuaa

SEQ ID NO: 100557 - RNA, 23 nt, Human adenovirus A
cuuucaacaggcgggaaaaguga

SEQ ID NO: 100558 - RNA, 14 nt, Human adenovirus A
cuuaagcagugaaa

SEQ ID NO: 100559 - RNA, 14 nt, Human adenovirus A
cuuaauuuuaguug

SEQ ID NO: 100560 - RNA, 20 nt, Human adenovirus A
cuuacauguggagcuuucaa

SEQ ID NO: 100561 - RNA, 16 nt, Human adenovirus A
cuuaccggaaaucuga

SEQ ID NO: 100562 - RNA, 16 nt, Human adenovirus A
cuuuguagcauacaau

SEQ ID NO: 100563 - RNA, 18 nt, Human adenovirus A
cuuuguagcauacaauua

SEQ ID NO: 100564 - RNA, 19 nt, Human adenovirus A
cuuuguagcugaaaacaac

SEQ ID NO: 100565 - RNA, 22 nt, Human adenovirus A
cuuuguuggauagcaaagccau

SEQ ID NO: 100566 - RNA, 16 nt, Human adenovirus A
cuuuucaaacuuuaca

SEQ ID NO: 100567 - RNA, 22 nt, Human adenovirus A
cuuuucaaacuuuacaaaccac

SEQ ID NO: 100568 - RNA, 23 nt, Human adenovirus A
cuuuucaaacuuuacaaaccacu

SEQ ID NO: 100569 - RNA, 23 nt, Human adenovirus A
gaaacugggggcguacacuggcu

SEQ ID NO: 100570 - RNA, 19 nt, Human adenovirus A
gaaacuaggaagugcgguu

SEQ ID NO: 100571 - RNA, 17 nt, Human adenovirus A
gaaaaugaugacuucaa

SEQ ID NO: 100572 - RNA, 16 nt, Human adenovirus A
gaaaagucaacccaaa

SEQ ID NO: 100573 - RNA, 14 nt, Human adenovirus A
gaaaacaacugcac

SEQ ID NO: 100574 - RNA, 21 nt, Human adenovirus A
cuuuuuugccugguaaaacaa

SEQ ID NO: 100575 - RNA, 13 nt, Human adenovirus A
aaacuuucuccaa

SEQ ID NO: 100576 - RNA, 21 nt, Human adenovirus A
aaacccuggaccacaugccua

SEQ ID NO: 100577 - RNA, 22 nt, Human adenovirus A
aaagaacaucaacugugcuaca

SEQ ID NO: 100578 - RNA, 16 nt, Human adenovirus A
gaauucuggaauaaca

SEQ ID NO: 100579 - RNA, 20 nt, Human adenovirus A
gaaugccgcuugagugacug

SEQ ID NO: 100580 - RNA, 16 nt, Human adenovirus A
gaauggccaauaccgu

SEQ ID NO: 100581 - RNA, 13 nt, Human adenovirus A
aaaccagguccau

SEQ ID NO: 100582 - RNA, 14 nt, Human adenovirus A
aaaccauuuuauua

SEQ ID NO: 100583 - RNA, 19 nt, Human adenovirus A
gaagaaaaugaugacuuca

SEQ ID NO: 100584 - RNA, 20 nt, Human adenovirus A
gaagaaaaugaugacuucaa

SEQ ID NO: 100585 - RNA, 17 nt, Human adenovirus A
gaagaaccuaacuguca

SEQ ID NO: 100586 - RNA, 18 nt, Human adenovirus A
gaagaaccuaacugucau

SEQ ID NO: 100587 - RNA, 19 nt, Human adenovirus A
gaagaaccuaacugucauc

SEQ ID NO: 100588 - RNA, 17 nt, Human adenovirus A
gaaauauucaagugcag

SEQ ID NO: 100589 - RNA, 14 nt, Human adenovirus A
gaaaucuuuuacca

SEQ ID NO: 100590 - RNA, 15 nt, Human adenovirus A
gaaaguguuaaccau

SEQ ID NO: 100591 - RNA, 21 nt, Human adenovirus A
gaaauacuauauuaacuuuau

SEQ ID NO: 100592 - RNA, 18 nt, Human adenovirus A
gacauagccaaucaggcu

SEQ ID NO: 100593 - RNA, 15 nt, Human adenovirus A
gacaugauaugaagu

SEQ ID NO: 100594 - RNA, 12 nt, Human adenovirus A
aaauacaucaug

SEQ ID NO: 100595 - RNA, 18 nt, Human adenovirus A
aaauguugaaguuacuca

SEQ ID NO: 100596 - RNA, 20 nt, Human adenovirus A
aaauuaaguauuaccugcac

SEQ ID NO: 100597 - RNA, 15 nt, Human adenovirus A
aaaucccccuccuac

SEQ ID NO: 100598 - RNA, 15 nt, Human adenovirus A
aaaucuggacaugca

SEQ ID NO: 100599 - RNA, 13 nt, Human adenovirus A
aaauuguguacuu

SEQ ID NO: 100600 - RNA, 18 nt, Human adenovirus A
aaauuguguacuuuucaa

SEQ ID NO: 100601 - RNA, 17 nt, Human adenovirus A
aaauuucccucuuccca

SEQ ID NO: 100602 - RNA, 18 nt, Human adenovirus A
aaauuucccucuucccaa

SEQ ID NO: 100603 - RNA, 15 nt, Human adenovirus A
gagucgaggucaaga

SEQ ID NO: 100604 - RNA, 15 nt, Human adenovirus A
gaguaauaaaaccug

SEQ ID NO: 100605 - RNA, 17 nt, Human adenovirus A
gaguacaagcuugacug

SEQ ID NO: 100606 - RNA, 16 nt, Human adenovirus A
gaguacgaaagucugu

SEQ ID NO: 100607 - RNA, 14 nt, Human adenovirus A
gauagcaaagccau

SEQ ID NO: 100608 - RNA, 17 nt, Human adenovirus A
gauaucaauguuaucca

SEQ ID NO: 100609 - RNA, 12 nt, Human adenovirus A
aacaaacuacau

SEQ ID NO: 100610 - RNA, 16 nt, Human adenovirus A
gacgucacaacaagau

SEQ ID NO: 100611 - RNA, 17 nt, Human adenovirus A
gagagggcuccuaaccu

SEQ ID NO: 100612 - RNA, 18 nt, Human adenovirus A
gagagggcuccuaaccug

SEQ ID NO: 100613 - RNA, 22 nt, Human adenovirus A
gcaggcgcgucggggcuacugc

SEQ ID NO: 100614 - RNA, 22 nt, Human adenovirus A
gcaggucgaggggcaccgucac

SEQ ID NO: 100615 - RNA, 14 nt, Human adenovirus A
gcaguaauugauga

SEQ ID NO: 100616 - RNA, 17 nt, Human adenovirus A
gcagcugauuucagcuu

SEQ ID NO: 100617 - RNA, 21 nt, Human adenovirus A
gcagcugauuucagcuucuac

SEQ ID NO: 100618 - RNA, 22 nt, Human adenovirus A
gcagcugauuucagcuucuaca

SEQ ID NO: 100619 - RNA, 13 nt, Human adenovirus A
gcaggaauggcca

SEQ ID NO: 100620 - RNA, 22 nt, Human adenovirus A
gcagacuaaauggaagacauca

SEQ ID NO: 100621 - RNA, 16 nt, Human adenovirus A
gcacugaaaaaccaac

SEQ ID NO: 100622 - RNA, 20 nt, Human adenovirus A
gcacuggucgcaccacugua

SEQ ID NO: 100623 - RNA, 14 nt, Human adenovirus A
gcacuuaauuacaa

SEQ ID NO: 100624 - RNA, 20 nt, Human adenovirus A
gcaccauacaacaaguacca

SEQ ID NO: 100625 - RNA, 22 nt, Human adenovirus A
gcaccaaggcguggaacagcca

SEQ ID NO: 100626 - RNA, 22 nt, Human adenovirus A
gcaauuagggccagcauugccg

SEQ ID NO: 100627 - RNA, 23 nt, Human adenovirus A
gcaaguaccgcgcgcccgcugaa

SEQ ID NO: 100628 - RNA, 23 nt, Human adenovirus A
gcaauaaaauagggguaaugugg

SEQ ID NO: 100629 - RNA, 17 nt, Human adenovirus A
gcaacuuuuuaaccacu

SEQ ID NO: 100630 - RNA, 17 nt, Human adenovirus A
gcaagaaggccauguac

SEQ ID NO: 100631 - RNA, 18 nt, Human adenovirus A
gcgacacggcacgcggcc

SEQ ID NO: 100632 - RNA, 17 nt, Human adenovirus A
gcgacguaaugccauua

SEQ ID NO: 100633 - RNA, 11 nt, Human adenovirus A
gcgacuacccg

SEQ ID NO: 100634 - RNA, 21 nt, Human adenovirus A
gcgagagugguuguacuuugc

SEQ ID NO: 100635 - RNA, 17 nt, Human adenovirus A
gcgcauacccauuccag

SEQ ID NO: 100636 - RNA, 13 nt, Human adenovirus A
gcccugauuuccc

SEQ ID NO: 100637 - RNA, 17 nt, Human adenovirus A
gcccuuccuaauuccac

SEQ ID NO: 100638 - RNA, 15 nt, Human adenovirus A
gccggaguacgucag

SEQ ID NO: 100639 - RNA, 14 nt, Human adenovirus A
gccguacaugggca

SEQ ID NO: 100640 - RNA, 15 nt, Human adenovirus A
gccguauauggcgcc

SEQ ID NO: 100641 - RNA, 21 nt, Human adenovirus A
gccugaaccuaauagcacuuu

SEQ ID NO: 100642 - RNA, 15 nt, Human adenovirus A
gccaugcaaagccag

SEQ ID NO: 100643 - RNA, 23 nt, Human adenovirus A
gccagcagccccaagcuaaccgc

SEQ ID NO: 100644 - RNA, 14 nt, Human adenovirus A
gccagcugaacggg

SEQ ID NO: 100645 - RNA, 20 nt, Human adenovirus A
gcccacuagaaucggcaaca

SEQ ID NO: 100646 - RNA, 19 nt, Human adenovirus A
gcccgcgcgcggacuuuca

SEQ ID NO: 100647 - RNA, 23 nt, Human adenovirus A
gcugccaagugguauugauuuuc

SEQ ID NO: 100648 - RNA, 21 nt, Human adenovirus A
gcugacggccauuguucgaga

SEQ ID NO: 100649 - RNA, 17 nt, Human adenovirus A
gcugaugccacuugaau

SEQ ID NO: 100650 - RNA, 16 nt, Human adenovirus A
gcgccuucaauuggaa

SEQ ID NO: 100651 - RNA, 18 nt, Human adenovirus A
gcuaugaaucuuuaccag

SEQ ID NO: 100652 - RNA, 17 nt, Human adenovirus A
gcuuuguuggauagcaa

SEQ ID NO: 100653 - RNA, 18 nt, Human adenovirus A
gcuuuguuggauagcaaa

SEQ ID NO: 100654 - RNA, 18 nt, Human adenovirus A
gcuuugcucgagacaucu

SEQ ID NO: 100655 - RNA, 18 nt, Human adenovirus A
gcuuuuccugagacacca

SEQ ID NO: 100656 - RNA, 15 nt, Human adenovirus A
gcuuuucucucugac

SEQ ID NO: 100657 - RNA, 20 nt, Human adenovirus A
gcuuuuggauggaaccccaa

SEQ ID NO: 100658 - RNA, 17 nt, Human adenovirus A
gcuuuugggacgcuggu

SEQ ID NO: 100659 - RNA, 17 nt, Human adenovirus A
gcuuaucaugugcuauu

SEQ ID NO: 100660 - RNA, 14 nt, Human adenovirus A
ggaauuaauggagu

SEQ ID NO: 100661 - RNA, 23 nt, Human adenovirus A
ggaauggccaauaccgugggaua

SEQ ID NO: 100662 - RNA, 18 nt, Human adenovirus A
ggaacuggccaagcaaaa

SEQ ID NO: 100663 - RNA, 18 nt, Human adenovirus A
ggaaaucugaaaauacau

SEQ ID NO: 100664 - RNA, 15 nt, Human adenovirus A
ggaacgagaucggca

SEQ ID NO: 100665 - RNA, 18 nt, Human adenovirus A
ggaacgagaucggcacga

SEQ ID NO: 100666 - RNA, 14 nt, Human adenovirus A
ggggaauaucucau

SEQ ID NO: 100667 - RNA, 12 nt, Human adenovirus A
gggcauggugau

SEQ ID NO: 100668 - RNA, 20 nt, Human adenovirus A
gggaucgcuugcaacugcug

SEQ ID NO: 100669 - RNA, 13 nt, Human adenovirus A
gggauauguuucu

SEQ ID NO: 100670 - RNA, 18 nt, Human adenovirus A
ggcugguuuaauauacaa

SEQ ID NO: 100671 - RNA, 22 nt, Human adenovirus A
ggauuugcgcacugaaaaacca

SEQ ID NO: 100672 - RNA, 18 nt, Human adenovirus A
ggccauuuuggaagcagu

SEQ ID NO: 100673 - RNA, 17 nt, Human adenovirus A
ggccaugcaaagccagc

SEQ ID NO: 100674 - RNA, 12 nt, Human adenovirus A
ggccaagcaaaa

SEQ ID NO: 100675 - RNA, 18 nt, Human adenovirus A
ggaugcauccgaggugac

SEQ ID NO: 100676 - RNA, 14 nt, Human adenovirus A
ggacccacuggcug

SEQ ID NO: 100677 - RNA, 14 nt, Human adenovirus A
ggaccaacgcguga

SEQ ID NO: 100678 - RNA, 15 nt, Human adenovirus A
ggacagcggccaugg

SEQ ID NO: 100679 - RNA, 18 nt, Human adenovirus A
cccugugaggaacaguca

SEQ ID NO: 100680 - RNA, 14 nt, Human adenovirus A
ccggaaaucugaaa

SEQ ID NO: 100681 - RNA, 19 nt, Human adenovirus A
cccugcuccgacaacagcu

SEQ ID NO: 100682 - RNA, 19 nt, Human adenovirus A
cccuguacgcaagcauuuu

SEQ ID NO: 100683 - RNA, 18 nt, Human adenovirus A
ccuaauagcacuuuggau

SEQ ID NO: 100684 - RNA, 20 nt, Human adenovirus A
ccuaacugucauccgcauuu

SEQ ID NO: 100685 - RNA, 13 nt, Human adenovirus A
ccucauaucacuc

SEQ ID NO: 100686 - RNA, 23 nt, Human adenovirus A
ccucauuaaauuuuucaccaaac

SEQ ID NO: 100687 - RNA, 23 nt, Human adenovirus A
ccucccagacugcuguaaugggu

SEQ ID NO: 100688 - RNA, 17 nt, Human adenovirus A
ccugcauagcauggcuu

SEQ ID NO: 100689 - RNA, 22 nt, Human adenovirus A
ccugcauagcauggcuugguuu

SEQ ID NO: 100690 - RNA, 20 nt, Human adenovirus A
ccugcucuuacccgccugug

SEQ ID NO: 100691 - RNA, 18 nt, Human adenovirus A
aaaauuucccucuuccca

SEQ ID NO: 100692 - RNA, 22 nt, Human adenovirus A
aaaauuuugguuccacgauuaa

SEQ ID NO: 100693 - RNA, 13 nt, Human adenovirus A
ccugucuuaaaau

SEQ ID NO: 100694 - RNA, 12 nt, Human adenovirus A
aaaauugccaac

SEQ ID NO: 100695 - RNA, 19 nt, Human adenovirus A
ccuguauauuaagguacau

SEQ ID NO: 100696 - RNA, 19 nt, Human adenovirus A
cccgcugaaacagcagggu

SEQ ID NO: 100697 - RNA, 13 nt, Human adenovirus A
cccaguaugcuga

SEQ ID NO: 100698 - RNA, 17 nt, Human adenovirus A
cccaguaugcugaagaa

SEQ ID NO: 100699 - RNA, 22 nt, Human adenovirus A
cccauuguaacugaaaauggaa

SEQ ID NO: 100700 - RNA, 23 nt, Human adenovirus A
ccccaaaucgcacacuugcuauu

SEQ ID NO: 100701 - RNA, 15 nt, Human adenovirus A
cccaugauguuacca

SEQ ID NO: 100702 - RNA, 18 nt, Human adenovirus A
cccaugcauccugugugg

SEQ ID NO: 100703 - RNA, 14 nt, Human adenovirus A
cccaucugcuuucu

SEQ ID NO: 100704 - RNA, 18 nt, Human adenovirus A
ccaggcuguacgcccuga

SEQ ID NO: 100705 - RNA, 16 nt, Human adenovirus A
ccagagcguugguucg

SEQ ID NO: 100706 - RNA, 22 nt, Human adenovirus A
ccagcucacggugucagaauaa

SEQ ID NO: 100707 - RNA, 15 nt, Human adenovirus A
ccacuuuauaugcua

SEQ ID NO: 100708 - RNA, 14 nt, Human adenovirus A
ccauugaaaccagc

SEQ ID NO: 100709 - RNA, 20 nt, Human adenovirus A
ccauuaaaugcaacuuucau

SEQ ID NO: 100710 - RNA, 14 nt, Human adenovirus A
ccauuguaacugaa

SEQ ID NO: 100711 - RNA, 16 nt, Human adenovirus A
ccauuguaacugaaaa

SEQ ID NO: 100712 - RNA, 22 nt, Human adenovirus A
ccauuguaacugaaaauggaac

SEQ ID NO: 100713 - RNA, 22 nt, Human adenovirus A
ccauuuagcgacguaaugccau

SEQ ID NO: 100714 - RNA, 22 nt, Human adenovirus A
ccauuuuauuagcucauuggag

SEQ ID NO: 100715 - RNA, 12 nt, Human adenovirus A
ccauuuugcauu

SEQ ID NO: 100716 - RNA, 19 nt, Human adenovirus A
cccaaaucgcacacuugcu

SEQ ID NO: 100717 - RNA, 23 nt, Human adenovirus A
caugugcuauuguuaacacugcc

SEQ ID NO: 100718 - RNA, 14 nt, Human adenovirus A
caucuguaguggcg

SEQ ID NO: 100719 - RNA, 20 nt, Human adenovirus A
caucugaaauuaaaucuugg

SEQ ID NO: 100720 - RNA, 14 nt, Human adenovirus A
cauaucacucuucg

SEQ ID NO: 100721 - RNA, 21 nt, Human adenovirus A
cauaggcuggguuuauggaau

SEQ ID NO: 100722 - RNA, 13 nt, Human adenovirus A
cauuuagaccacu

SEQ ID NO: 100723 - RNA, 17 nt, Human adenovirus A
cauuuaagcaacauuaa

SEQ ID NO: 100724 - RNA, 18 nt, Human adenovirus A
cauuuaagcaacauuaaa

SEQ ID NO: 100725 - RNA, 23 nt, Human adenovirus A
cauuaguucuuuucuuuauguua

SEQ ID NO: 100726 - RNA, 12 nt, Human adenovirus A
cauuaaccuaug

SEQ ID NO: 100727 - RNA, 22 nt, Human adenovirus A
cauuacuaccgucaucucuaca

SEQ ID NO: 100728 - RNA, 23 nt, Human adenovirus A
cauuugcaaggcgguauuugcua

SEQ ID NO: 100729 - RNA, 16 nt, Human adenovirus A
cauuugacacaucaga

SEQ ID NO: 100730 - RNA, 18 nt, Human adenovirus A
ccaaaucgcacacuugcu

SEQ ID NO: 100731 - RNA, 19 nt, Human adenovirus A
ccaaaucgcacacuugcua

SEQ ID NO: 100732 - RNA, 22 nt, Human adenovirus A
ccaaagccauggcgaccagugu

SEQ ID NO: 100733 - RNA, 20 nt, Human adenovirus A
ccaaggcguggaacagccaa

SEQ ID NO: 100734 - RNA, 15 nt, Human adenovirus A
ccaauacagauauaa

SEQ ID NO: 100735 - RNA, 20 nt, Human adenovirus A
ccaaugcgccugcuuaaaau

SEQ ID NO: 100736 - RNA, 15 nt, Human adenovirus A
caguaugcugaagaa

SEQ ID NO: 100737 - RNA, 23 nt, Human adenovirus A
caguaugcugaagaaacagaaga

SEQ ID NO: 100738 - RNA, 15 nt, Human adenovirus A
caggggccagcucac

SEQ ID NO: 100739 - RNA, 20 nt, Human adenovirus A
cagacuaaauggaagacauc

SEQ ID NO: 100740 - RNA, 21 nt, Human adenovirus A
cagaaugugguaggaucuaca

SEQ ID NO: 100741 - RNA, 15 nt, Human adenovirus A
cagaauuacuaaaac

SEQ ID NO: 100742 - RNA, 23 nt, Human adenovirus A
caguuugggcuaguucuugucaa

SEQ ID NO: 100743 - RNA, 23 nt, Human adenovirus A
caguuuuuuuuccacacaucuca

SEQ ID NO: 100744 - RNA, 16 nt, Human adenovirus A
cauaacaucaggagca

SEQ ID NO: 100745 - RNA, 23 nt, Human adenovirus A
caguucgagaggacauucugacu

SEQ ID NO: 100746 - RNA, 20 nt, Human adenovirus A
caguggacggucgaccugug

SEQ ID NO: 100747 - RNA, 17 nt, Human adenovirus A
caguggucuuacaugca

SEQ ID NO: 100748 - RNA, 12 nt, Human adenovirus A
caguuauugaca

SEQ ID NO: 100749 - RNA, 10 nt, Human adenovirus A
cagugccugu

SEQ ID NO: 100750 - RNA, 21 nt, Human adenovirus A
cagugccuguugaucugucag

SEQ ID NO: 100751 - RNA, 24 nt, Human adenovirus A
cagugaaacgcccuagauguaauu

SEQ ID NO: 100752 - RNA, 13 nt, Human adenovirus A
cagucagugucca

SEQ ID NO: 100753 - RNA, 17 nt, Human adenovirus A
cagucaguguccaucag

SEQ ID NO: 100754 - RNA, 15 nt, Human adenovirus A
cguauuauggcuuua

SEQ ID NO: 100755 - RNA, 17 nt, Human adenovirus A
cggugccuaugugauaa

SEQ ID NO: 100756 - RNA, 21 nt, Human adenovirus A
cguccggguucacuacagugu

SEQ ID NO: 100757 - RNA, 19 nt, Human adenovirus A
cuaaagaaacaaacuacau

SEQ ID NO: 100758 - RNA, 20 nt, Human adenovirus A
cuaaagaaacaaacuacaua

SEQ ID NO: 100759 - RNA, 17 nt, Human adenovirus A
cguuuauuugaguccau

SEQ ID NO: 100760 - RNA, 13 nt, Human adenovirus A
cuaaaacaagguc

SEQ ID NO: 100761 - RNA, 18 nt, Human adenovirus A
cguguaagaacauacaac

SEQ ID NO: 100762 - RNA, 19 nt, Human adenovirus A
cguguacacaaugcauuaa

SEQ ID NO: 100763 - RNA, 15 nt, Human adenovirus A
cuacaguguauguca

SEQ ID NO: 100764 - RNA, 19 nt, Human adenovirus A
cuacagaauuacuaaaaca

SEQ ID NO: 100765 - RNA, 21 nt, Human adenovirus A
cuacagauuggcaccauacaa

SEQ ID NO: 100766 - RNA, 19 nt, Human adenovirus A
cuacaaggcucgcuuuacg

SEQ ID NO: 100767 - RNA, 21 nt, Human adenovirus A
cuaacugucauccgcauuuaa

SEQ ID NO: 100768 - RNA, 13 nt, Human adenovirus A
cgcugcaguuuuu

SEQ ID NO: 100769 - RNA, 13 nt, Human adenovirus A
aaaccaacaaaca

SEQ ID NO: 100770 - RNA, 15 nt, Human adenovirus A
aaaccaccaggugua

SEQ ID NO: 100771 - RNA, 18 nt, Human adenovirus A
aaaccacuuaguuuuaaa

SEQ ID NO: 100772 - RNA, 23 nt, Human adenovirus A
aaacagcagggucuacuguugau

SEQ ID NO: 100773 - RNA, 15 nt, Human adenovirus A
cgcaguggucuuaca

SEQ ID NO: 100774 - RNA, 15 nt, Human adenovirus A
cgcacugaaaaacca

SEQ ID NO: 100775 - RNA, 19 nt, Human adenovirus A
ccuuaauuuuaguuggaau

SEQ ID NO: 100776 - RNA, 23 nt, Human adenovirus A
ccuguguggauacucugcgcuuu

SEQ ID NO: 100777 - RNA, 21 nt, Human adenovirus A
ccuguugaucugucagugaaa

SEQ ID NO: 100778 - RNA, 15 nt, Human adenovirus A
cgcccgcuauuggug

SEQ ID NO: 100779 - RNA, 15 nt, Human adenovirus A
cgcauacccauucca

SEQ ID NO: 100780 - RNA, 16 nt, Human adenovirus A
cgccaaccucacugcu

SEQ ID NO: 100781 - RNA, 18 nt, Human adenovirus A
cucagcgggugacuggga

SEQ ID NO: 100782 - RNA, 17 nt, Human adenovirus A
cuauucuagcaaaauga

SEQ ID NO: 100783 - RNA, 18 nt, Human adenovirus A
cuaugggaucgcuugcaa

SEQ ID NO: 100784 - RNA, 14 nt, Human adenovirus A
cucucgaacugcgg

SEQ ID NO: 100785 - RNA, 21 nt, Human adenovirus A
cucucugacugauaccaugga

SEQ ID NO: 100786 - RNA, 21 nt, Human adenovirus A
cucugacugauaccauggaca

SEQ ID NO: 100787 - RNA, 16 nt, Human adenovirus A
cucgguaccuauuaaa

SEQ ID NO: 100788 - RNA, 17 nt, Human adenovirus A
cucguuaaacuaucacu

SEQ ID NO: 100789 - RNA, 20 nt, Human adenovirus A
cucgcaguauggcagcugau

SEQ ID NO: 100790 - RNA, 22 nt, Human adenovirus A
cuccugaacgucgccugaguua

SEQ ID NO: 100791 - RNA, 18 nt, Human adenovirus A
cuguuaggggaacuggcc

SEQ ID NO: 100792 - RNA, 12 nt, Human adenovirus A
cugugggugaca

SEQ ID NO: 100793 - RNA, 21 nt, Human adenovirus A
cugucuuaaaaucuccugaac

SEQ ID NO: 100794 - RNA, 14 nt, Human adenovirus A
cuguacgcccugau

SEQ ID NO: 100795 - RNA, 15 nt, Human adenovirus A
cugguuagagccaug

SEQ ID NO: 100796 - RNA, 20 nt, Human adenovirus A
cugcggugcgugucacagca

SEQ ID NO: 100797 - RNA, 15 nt, Human adenovirus A
cugccugcauagcau

SEQ ID NO: 100798 - RNA, 14 nt, Human adenovirus A
cugcgacauuuaga

SEQ ID NO: 100799 - RNA, 21 nt, Human adenovirus A
cugcgcuuuauuaaacaucau

SEQ ID NO: 100800 - RNA, 22 nt, Human adenovirus A
cugcucuuacccgccugugcga

SEQ ID NO: 100801 - RNA, 19 nt, Human adenovirus A
cucuguaguuucuuuacaa

SEQ ID NO: 100802 - RNA, 21 nt, Human adenovirus A
cugauugcguugcaaugugcc

SEQ ID NO: 100803 - RNA, 19 nt, Human adenovirus A
cugauuuauauaguuugau

SEQ ID NO: 100804 - RNA, 14 nt, Human adenovirus A
auguguagguuuua

SEQ ID NO: 100805 - RNA, 14 nt, Human adenovirus A
auguguuccaguau

SEQ ID NO: 100806 - RNA, 16 nt, Human adenovirus A
auuaauggacuuugag

SEQ ID NO: 100807 - RNA, 15 nt, Human adenovirus A
auuaaugcauugugu

SEQ ID NO: 100808 - RNA, 18 nt, Human adenovirus A
auuaaugcauuguguaca

SEQ ID NO: 100809 - RNA, 20 nt, Human adenovirus A
auguaucucccuguaaguac

SEQ ID NO: 100810 - RNA, 20 nt, Human adenovirus A
auggguaguagcaucagcua

SEQ ID NO: 100811 - RNA, 18 nt, Human adenovirus A
auggucaggccagugagu

SEQ ID NO: 100812 - RNA, 18 nt, Human adenovirus A
aucuucccgaauauccaa

SEQ ID NO: 100813 - RNA, 21 nt, Human adenovirus A
aucuguguauacgccuccuau

SEQ ID NO: 100814 - RNA, 20 nt, Human adenovirus A
auggccaauaccgugggaua

SEQ ID NO: 100815 - RNA, 15 nt, Human adenovirus A
augggcgacuacccg

SEQ ID NO: 100816 - RNA, 15 nt, Human adenovirus A
auggccgauggccua

SEQ ID NO: 100817 - RNA, 22 nt, Human adenovirus A
auuuuucccacuuuauaugcua

SEQ ID NO: 100818 - RNA, 14 nt, Human adenovirus A
auuugacacaucag

SEQ ID NO: 100819 - RNA, 23 nt, Human adenovirus A
auuugaguccauuuugcauuuua

SEQ ID NO: 100820 - RNA, 23 nt, Human adenovirus A
auuugcaaggcgguauuugcuau

SEQ ID NO: 100821 - RNA, 11 nt, Human adenovirus A
auuugcuauac

SEQ ID NO: 100822 - RNA, 15 nt, Human adenovirus A
auuuaagcaacauua

SEQ ID NO: 100823 - RNA, 14 nt, Human adenovirus A
auuucugcugucau

SEQ ID NO: 100824 - RNA, 22 nt, Human adenovirus A
auugguggaaaaagaucaagga

SEQ ID NO: 100825 - RNA, 16 nt, Human adenovirus A
auuguuuaagaauuua

SEQ ID NO: 100826 - RNA, 17 nt, Human adenovirus A
auuacuaaaacaguaac

SEQ ID NO: 100827 - RNA, 18 nt, Human adenovirus A
auuaggcaccccaguaag

SEQ ID NO: 100828 - RNA, 20 nt, Human adenovirus A
auugccgcgcgcauugcgau

SEQ ID NO: 100829 - RNA, 22 nt, Human adenovirus A
auugccagcguccggguucacu

SEQ ID NO: 100830 - RNA, 15 nt, Human adenovirus A
auugcguugcaaugu

SEQ ID NO: 100831 - RNA, 13 nt, Human adenovirus A
auugcucgaugau

SEQ ID NO: 100832 - RNA, 17 nt, Human adenovirus A
auucucucguugauuau

SEQ ID NO: 100833 - RNA, 23 nt, Human adenovirus A
auucucucguugauuauaaucuc

SEQ ID NO: 100834 - RNA, 17 nt, Human adenovirus A
auugauacacaccucau

SEQ ID NO: 100835 - RNA, 14 nt, Human adenovirus A
caaaauaaugacua

SEQ ID NO: 100836 - RNA, 19 nt, Human adenovirus A
caacuaccgcccugugagg

SEQ ID NO: 100837 - RNA, 20 nt, Human adenovirus A
caacugcugaagcaaacccu

SEQ ID NO: 100838 - RNA, 20 nt, Human adenovirus A
caacugucaaaccugacaga

SEQ ID NO: 100839 - RNA, 13 nt, Human adenovirus A
caacugugcuaca

SEQ ID NO: 100840 - RNA, 22 nt, Human adenovirus A
caacugugcuacacgcugccca

SEQ ID NO: 100841 - RNA, 12 nt, Human adenovirus A
caagacuauucu

SEQ ID NO: 100842 - RNA, 14 nt, Human adenovirus A
caauacagauauaa

SEQ ID NO: 100843 - RNA, 18 nt, Human adenovirus A
caauagacucugccaacg

SEQ ID NO: 100844 - RNA, 19 nt, Human adenovirus A
caagcaggagaacaagaag

SEQ ID NO: 100845 - RNA, 21 nt, Human adenovirus A
caagcauuuuuuguugcucca

SEQ ID NO: 100846 - RNA, 22 nt, Human adenovirus A
caagcauuuuuuguugcuccag

SEQ ID NO: 100847 - RNA, 15 nt, Human adenovirus A
cacaguuucuuuacg

SEQ ID NO: 100848 - RNA, 18 nt, Human adenovirus A
cacaucaccgaggcaguu

SEQ ID NO: 100849 - RNA, 14 nt, Human adenovirus A
cacaucagacguac

SEQ ID NO: 100850 - RNA, 22 nt, Human adenovirus A
cacaucucaccuggaccuuuaa

SEQ ID NO: 100851 - RNA, 13 nt, Human adenovirus A
cagaacccaguau

SEQ ID NO: 100852 - RNA, 19 nt, Human adenovirus A
cagaacccaguaugcugaa

SEQ ID NO: 100853 - RNA, 22 nt, Human adenovirus A
cagaagaaaaugaugacuucaa

SEQ ID NO: 100854 - RNA, 14 nt, Human adenovirus A
cagaaggaguaaua

SEQ ID NO: 100855 - RNA, 16 nt, Human adenovirus A
cagaauaacaguugaa

SEQ ID NO: 100856 - RNA, 21 nt, Human adenovirus A
cacugcggggggaauaucuca

SEQ ID NO: 100857 - RNA, 21 nt, Human adenovirus A
cacuggcuggcuuuuggaugg

SEQ ID NO: 100858 - RNA, 22 nt, Human adenovirus A
cacuguagugcaaaauaaugac

SEQ ID NO: 100859 - RNA, 11 nt, Human adenovirus A
cacuacagugu

SEQ ID NO: 100860 - RNA, 19 nt, Human adenovirus A
cacucuauuucaaccuauu

SEQ ID NO: 100861 - RNA, 14 nt, Human adenovirus A
cacugaaaaaccaa

SEQ ID NO: 100862 - RNA, 18 nt, Human adenovirus A
caccuacuucacccuggg

SEQ ID NO: 100863 - RNA, 19 nt, Human adenovirus A
aggcauuccuucaugugua

SEQ ID NO: 100864 - RNA, 20 nt, Human adenovirus A
aggcauuccuucauguguag

SEQ ID NO: 100865 - RNA, 18 nt, Human adenovirus A
aggccaucuuugggauga

SEQ ID NO: 100866 - RNA, 16 nt, Human adenovirus A
aggccauguacuugac

SEQ ID NO: 100867 - RNA, 23 nt, Human adenovirus A
aggcgaggguccaauaguugcau

SEQ ID NO: 100868 - RNA, 13 nt, Human adenovirus A
agcugaaaacaac

SEQ ID NO: 100869 - RNA, 19 nt, Human adenovirus A
agcugauuucagcuucuac

SEQ ID NO: 100870 - RNA, 14 nt, Human adenovirus A
aggaauguccucca

SEQ ID NO: 100871 - RNA, 21 nt, Human adenovirus A
aggacuuuguagcauacaauu

SEQ ID NO: 100872 - RNA, 18 nt, Human adenovirus A
agucauagcaacaacgcu

SEQ ID NO: 100873 - RNA, 13 nt, Human adenovirus A
aguauuccaugag

SEQ ID NO: 100874 - RNA, 19 nt, Human adenovirus A
agucaaaagcuacguugag

SEQ ID NO: 100875 - RNA, 14 nt, Human adenovirus A
aggucgaggggcac

SEQ ID NO: 100876 - RNA, 18 nt, Human adenovirus A
agccauggcgaccagugu

SEQ ID NO: 100877 - RNA, 20 nt, Human adenovirus A
agccguucccggaauugccu

SEQ ID NO: 100878 - RNA, 13 nt, Human adenovirus A
agccucacuggca

SEQ ID NO: 100879 - RNA, 22 nt, Human adenovirus A
agauaacaccugaagcugaaua

SEQ ID NO: 100880 - RNA, 19 nt, Human adenovirus A
agauaauccagucauagca

SEQ ID NO: 100881 - RNA, 15 nt, Human adenovirus A
agcauucgaagccaa

SEQ ID NO: 100882 - RNA, 16 nt, Human adenovirus A
agcauucgaagccaag

SEQ ID NO: 100883 - RNA, 16 nt, Human adenovirus A
agaugauugaaccuga

SEQ ID NO: 100884 - RNA, 16 nt, Human adenovirus A
agcauuuuuuguugcu

SEQ ID NO: 100885 - RNA, 21 nt, Human adenovirus A
agcuaugggaucgcuugcaac

SEQ ID NO: 100886 - RNA, 17 nt, Human adenovirus A
agcucacggugucagaa

SEQ ID NO: 100887 - RNA, 17 nt, Human adenovirus A
agcucauuggaguacaa

SEQ ID NO: 100888 - RNA, 14 nt, Human adenovirus A
agcucgacaaggaa

SEQ ID NO: 100889 - RNA, 20 nt, Human adenovirus A
agcgccggaccccacaugau

SEQ ID NO: 100890 - RNA, 22 nt, Human adenovirus A
agcggcauuccccauccaaaac

SEQ ID NO: 100891 - RNA, 17 nt, Human adenovirus A
auaugcauuuacaguac

SEQ ID NO: 100892 - RNA, 14 nt, Human adenovirus A
auauggagugugcu

SEQ ID NO: 100893 - RNA, 15 nt, Human adenovirus A
auauggagugugcua

SEQ ID NO: 100894 - RNA, 18 nt, Human adenovirus A
auaucuuuuaacaacaag

SEQ ID NO: 100895 - RNA, 15 nt, Human adenovirus A
auagcaacaacgcug

SEQ ID NO: 100896 - RNA, 20 nt, Human adenovirus A
aucaauguuauccacauugc

SEQ ID NO: 100897 - RNA, 20 nt, Human adenovirus A
aucuagaaauugauggaaga

SEQ ID NO: 100898 - RNA, 12 nt, Human adenovirus A
aucuccaaauaa

SEQ ID NO: 100899 - RNA, 23 nt, Human adenovirus A
aucugaaaauacaucauggucuc

SEQ ID NO: 100900 - RNA, 13 nt, Human adenovirus A
aucuggacaugca

SEQ ID NO: 100901 - RNA, 21 nt, Human adenovirus A
auccuacaaaaaguaacaaca

SEQ ID NO: 100902 - RNA, 19 nt, Human adenovirus A
auccaaacgguaguggcaa

SEQ ID NO: 100903 - RNA, 13 nt, Human adenovirus A
auacaagguaaaa

SEQ ID NO: 100904 - RNA, 19 nt, Human adenovirus A
auacaagguaaaaugggaa

SEQ ID NO: 100905 - RNA, 13 nt, Human adenovirus A
auacacaccucau

SEQ ID NO: 100906 - RNA, 14 nt, Human adenovirus A
auacacaccucauu

SEQ ID NO: 100907 - RNA, 14 nt, Human adenovirus A
auaccgugggauau

SEQ ID NO: 100908 - RNA, 21 nt, Human adenovirus A
auacgcgugguuaaacugccu

SEQ ID NO: 100909 - RNA, 15 nt, Human adenovirus A
auacuuaauacuggc

SEQ ID NO: 100910 - RNA, 13 nt, Human adenovirus A
auacuaccuacuc

SEQ ID NO: 100911 - RNA, 18 nt, Human adenovirus A
auacuauauuaacuuuau

SEQ ID NO: 100912 - RNA, 16 nt, Human adenovirus A
auaaguauacugauga

SEQ ID NO: 100913 - RNA, 13 nt, Human adenovirus A
auaaaaacacugu

SEQ ID NO: 100914 - RNA, 14 nt, Human adenovirus A
auaaaaacacugug

SEQ ID NO: 100915 - RNA, 17 nt, Human adenovirus A
aguuuuaaauuguuccu

SEQ ID NO: 100916 - RNA, 18 nt, Human adenovirus A
auaaaaccugugccucag

SEQ ID NO: 100917 - RNA, 21 nt, Human adenovirus A
acacccccuuuuacuucuucc

SEQ ID NO: 100918 - RNA, 22 nt, Human adenovirus A
acacccccuuuuacuucuucca

SEQ ID NO: 100919 - RNA, 23 nt, Human adenovirus A
acacccccuuuuacuucuuccaa

SEQ ID NO: 100920 - RNA, 15 nt, Human adenovirus A
acaacugcacuugaa

SEQ ID NO: 100921 - RNA, 10 nt, Human adenovirus A
acaaauugcg

SEQ ID NO: 100922 - RNA, 13 nt, Human adenovirus A
acacgcugcccac

SEQ ID NO: 100923 - RNA, 20 nt, Human adenovirus A
acaccugcuccagaaacugu

SEQ ID NO: 100924 - RNA, 13 nt, Human adenovirus A
acauaaaccaugg

SEQ ID NO: 100925 - RNA, 16 nt, Human adenovirus A
acauaaaccauggaau

SEQ ID NO: 100926 - RNA, 12 nt, Human adenovirus A
acagaggcuccu

SEQ ID NO: 100927 - RNA, 14 nt, Human adenovirus A
acagcuggcgcaca

SEQ ID NO: 100928 - RNA, 19 nt, Human adenovirus A
acagcuggcgcacaaguug

SEQ ID NO: 100929 - RNA, 22 nt, Human adenovirus A
acaugaagauuucugcugucau

SEQ ID NO: 100930 - RNA, 14 nt, Human adenovirus A
acaugaauguuaaa

SEQ ID NO: 100931 - RNA, 16 nt, Human adenovirus A
acauaauguaagugag

SEQ ID NO: 100932 - RNA, 23 nt, Human adenovirus A
acauaggcuggguuuauggaauu

SEQ ID NO: 100933 - RNA, 22 nt, Human adenovirus A
accaguggucguacgugguuuu

SEQ ID NO: 100934 - RNA, 12 nt, Human adenovirus A
accccaguaagu

SEQ ID NO: 100935 - RNA, 19 nt, Human adenovirus A
accccauuguaacugaaaa

SEQ ID NO: 100936 - RNA, 14 nt, Human adenovirus A
acccccaggaugau

SEQ ID NO: 100937 - RNA, 14 nt, Human adenovirus A
acccauuugacaca

SEQ ID NO: 100938 - RNA, 18 nt, Human adenovirus A
acccaguaugcugaagaa

SEQ ID NO: 100939 - RNA, 19 nt, Human adenovirus A
acccaguaugcugaagaaa

SEQ ID NO: 100940 - RNA, 19 nt, Human adenovirus A
accuaauagcacuuuggau

SEQ ID NO: 100941 - RNA, 16 nt, Human adenovirus A
acccuucgcuaugaau

SEQ ID NO: 100942 - RNA, 13 nt, Human adenovirus A
accugcuccagaa

SEQ ID NO: 100943 - RNA, 16 nt, Human adenovirus A
acgagcucccggagga

SEQ ID NO: 100944 - RNA, 22 nt, Human adenovirus A
acuaaagaaacaaacuacauag

SEQ ID NO: 100945 - RNA, 18 nt, Human adenovirus A
acuaaauggaagacauca

SEQ ID NO: 100946 - RNA, 21 nt, Human adenovirus A
acuaacgcuggggcacagcuu

SEQ ID NO: 100947 - RNA, 19 nt, Human adenovirus A
acguuuauuugaguccauu

SEQ ID NO: 100948 - RNA, 22 nt, Human adenovirus A
acuacacaaagaaaacaucacu

SEQ ID NO: 100949 - RNA, 13 nt, Human adenovirus A
acuaccgcugcuc

SEQ ID NO: 100950 - RNA, 14 nt, Human adenovirus A
acuaccgcugcuca

SEQ ID NO: 100951 - RNA, 14 nt, Human adenovirus A
acuacaguguaugu

SEQ ID NO: 100952 - RNA, 17 nt, Human adenovirus A
acuacaguguaugucag

SEQ ID NO: 100953 - RNA, 17 nt, Human adenovirus A
acugucauccgcauuua

SEQ ID NO: 100954 - RNA, 16 nt, Human adenovirus A
acuggcauuuggucua

SEQ ID NO: 100955 - RNA, 14 nt, Human adenovirus A
acuggccaagcaaa

SEQ ID NO: 100956 - RNA, 18 nt, Human adenovirus A
acugauuggccuugucua

SEQ ID NO: 100957 - RNA, 17 nt, Human adenovirus A
acugcagccugucuuaa

SEQ ID NO: 100958 - RNA, 21 nt, Human adenovirus A
acuaugacuguuuuaugcaga

SEQ ID NO: 100959 - RNA, 14 nt, Human adenovirus A
acuuccaacuuauu

SEQ ID NO: 100960 - RNA, 13 nt, Human adenovirus A
acuuauuacuggu

SEQ ID NO: 100961 - RNA, 13 nt, Human adenovirus A
acuucaaccccgu

SEQ ID NO: 100962 - RNA, 21 nt, Human adenovirus A
acuucaaccccguuuacccuu

SEQ ID NO: 100963 - RNA, 14 nt, Human adenovirus A
agacaucugugucu

SEQ ID NO: 100964 - RNA, 18 nt, Human adenovirus A
agacaucugugucuuuac

SEQ ID NO: 100965 - RNA, 15 nt, Human adenovirus A
agaccauugguaaca

SEQ ID NO: 100966 - RNA, 16 nt, Human adenovirus A
agaaucggcaacagca

SEQ ID NO: 100967 - RNA, 18 nt, Human adenovirus A
agagugguuguacuuugc

SEQ ID NO: 100968 - RNA, 18 nt, Human adenovirus A
agagccaugggaggauau

SEQ ID NO: 100969 - RNA, 16 nt, Human adenovirus A
agaccugaccacauga

SEQ ID NO: 100970 - RNA, 23 nt, Human adenovirus A
acaaauacaguuuugaacaauua

SEQ ID NO: 100971 - RNA, 22 nt, Human adenovirus A
acaaaaaggacgaggugcgaua

SEQ ID NO: 100972 - RNA, 15 nt, Human adenovirus A
aauuggaacaguauc

SEQ ID NO: 100973 - RNA, 18 nt, Human adenovirus A
aauugauacacaccucau

SEQ ID NO: 100974 - RNA, 14 nt, Human adenovirus A
aauuauuacauggu

SEQ ID NO: 100975 - RNA, 13 nt, Human adenovirus A
aauagcacuuugg

SEQ ID NO: 100976 - RNA, 21 nt, Human adenovirus A
aauagucugacuuuacauaau

SEQ ID NO: 100977 - RNA, 16 nt, Human adenovirus A
aaucgcacacuugcua

SEQ ID NO: 100978 - RNA, 14 nt, Human adenovirus A
aaucggcaacagca

SEQ ID NO: 100979 - RNA, 23 nt, Human adenovirus A
aaugcuuuguuggauagcaaagc

SEQ ID NO: 100980 - RNA, 17 nt, Human adenovirus A
aauggaaggucagauuc

SEQ ID NO: 100981 - RNA, 17 nt, Human adenovirus A
aaugggaaggaggcagu

SEQ ID NO: 100982 - RNA, 20 nt, Human adenovirus A
aaugggaaggaggcaguuua

SEQ ID NO: 100983 - RNA, 12 nt, Human adenovirus A
aauggucuucaa

SEQ ID NO: 100984 - RNA, 15 nt, Human adenovirus A
aaugcgccugcuuaa

SEQ ID NO: 100985 - RNA, 20 nt, Human adenovirus A
aaugccauuaaaugcaacuu

SEQ ID NO: 100986 - RNA, 22 nt, Human adenovirus A
aaugccgcuugagugacugugc

SEQ ID NO: 100987 - RNA, 16 nt, Human adenovirus A
aacuuuacaaaccacu

SEQ ID NO: 100988 - RNA, 18 nt, Human adenovirus A
aagaaccuaacugucauc

SEQ ID NO: 100989 - RNA, 15 nt, Human adenovirus A
aagaauuuauacaau

SEQ ID NO: 100990 - RNA, 18 nt, Human adenovirus A
aagaauuuauacaauuca

SEQ ID NO: 100991 - RNA, 12 nt, Human adenovirus A
aagcagugaaaa

SEQ ID NO: 100992 - RNA, 24 nt, Human adenovirus A
aagcauaacagucagaauguccuc

SEQ ID NO: 100993 - RNA, 19 nt, Human adenovirus A
aagcgcagcagaacccagu

SEQ ID NO: 100994 - RNA, 18 nt, Human adenovirus A
aagcauuuuggauuugau

SEQ ID NO: 100995 - RNA, 20 nt, Human adenovirus A
aagcauuuuggauuugauuc

SEQ ID NO: 100996 - RNA, 21 nt, Human adenovirus A
aagcuacccuucgcuaugaau

SEQ ID NO: 100997 - RNA, 14 nt, Human adenovirus A
aagcuaauugcuaa

SEQ ID NO: 100998 - RNA, 20 nt, Human adenovirus A
aagcugggugggaugcaucc

SEQ ID NO: 100999 - RNA, 16 nt, Human adenovirus A
aagcuuggcaagcaua

SEQ ID NO: 101000 - RNA, 14 nt, Human adenovirus A
aaguuuaaacuaca

SEQ ID NO: 101001 - RNA, 14 nt, Human adenovirus A
aaguuaaaagacca

SEQ ID NO: 101002 - RNA, 19 nt, Human adenovirus A
aaguuacucaauuauuaca

SEQ ID NO: 101003 - RNA, 16 nt, Human adenovirus A
aauacaugaguguaug

SEQ ID NO: 101004 - RNA, 17 nt, Human adenovirus A
aauacaugaguguaugu

SEQ ID NO: 101005 - RNA, 18 nt, Human adenovirus A
aaggagcaggauggugua

SEQ ID NO: 101006 - RNA, 13 nt, Human adenovirus A
aaggcugauuuau

SEQ ID NO: 101007 - RNA, 22 nt, Human adenovirus A
aaggcugauuuauauaguuuga

SEQ ID NO: 101008 - RNA, 16 nt, Human adenovirus A
aaauggaacccuuaca

SEQ ID NO: 101009 - RNA, 21 nt, Human adenovirus A
aaauggaacccuuacacucaa

SEQ ID NO: 101010 - RNA, 15 nt, Human adenovirus A
aaaugaugacuucaa

SEQ ID NO: 101011 - RNA, 19 nt, Human adenovirus A
aaaucuuuuaccaaugaau

SEQ ID NO: 101012 - RNA, 16 nt, Human adenovirus A
aaaucuggacaugcag

SEQ ID NO: 101013 - RNA, 15 nt, Human adenovirus A
aaaucuuaaauggaa

SEQ ID NO: 101014 - RNA, 12 nt, Human adenovirus A
aaaucuccugaa

SEQ ID NO: 101015 - RNA, 22 nt, Human adenovirus A
aaaggaauugauacacaccuca

SEQ ID NO: 101016 - RNA, 17 nt, Human adenovirus A
aaaggacuuuuuugccu

SEQ ID NO: 101017 - RNA, 16 nt, Human adenovirus A
aaauacaugaguguau

SEQ ID NO: 101018 - RNA, 16 nt, Human adenovirus A
aaaaugaugacuucaa

SEQ ID NO: 101019 - RNA, 17 nt, Human adenovirus A
aaaaugggaaggaggca

SEQ ID NO: 101020 - RNA, 13 nt, Human adenovirus A
aaaauggaacccu

SEQ ID NO: 101021 - RNA, 15 nt, Human adenovirus A
aaagaccccauugua

SEQ ID NO: 101022 - RNA, 22 nt, Human adenovirus A
aaagaccccauuguaacugaaa

SEQ ID NO: 101023 - RNA, 15 nt, Human adenovirus A
aaagaguauccauuu

SEQ ID NO: 101024 - RNA, 16 nt, Human adenovirus A
aaagauguagcuuuuu

SEQ ID NO: 101025 - RNA, 19 nt, Human adenovirus A
aaauuucccucuucccaac

SEQ ID NO: 101026 - RNA, 20 nt, Human adenovirus A
aacaaacacggauacuuaau

SEQ ID NO: 101027 - RNA, 12 nt, Human adenovirus A
aacagccaaacc

SEQ ID NO: 101028 - RNA, 18 nt, Human adenovirus A
aacagcagcaacaaggaa

SEQ ID NO: 101029 - RNA, 19 nt, Human adenovirus A
aacagcaaacuuucuccaa

SEQ ID NO: 101030 - RNA, 20 nt, Human adenovirus A
aacagcaaacuuucuccaaa

SEQ ID NO: 101031 - RNA, 23 nt, Human adenovirus A
aacagcaaacuuucuccaaaucu

SEQ ID NO: 101032 - RNA, 23 nt, Human adenovirus A
aacagaaucaaucucagugucau

SEQ ID NO: 101033 - RNA, 20 nt, Human adenovirus A
aacagcauuaguucuuuucu

SEQ ID NO: 101034 - RNA, 15 nt, Human adenovirus A
aacagcugcugucac

SEQ ID NO: 101035 - RNA, 15 nt, Human adenovirus A
aacaucaacugugcu

SEQ ID NO: 101036 - RNA, 20 nt, Human adenovirus A
aacuaucacuugcaaccugu

SEQ ID NO: 101037 - RNA, 18 nt, Human adenovirus A
aacuaccgcccugugagg

SEQ ID NO: 101038 - RNA, 21 nt, Human adenovirus A
aacuacauaaaccauggaauu

SEQ ID NO: 101039 - RNA, 14 nt, Human adenovirus A
aaccuaacugucau

SEQ ID NO: 101040 - RNA, 15 nt, Human adenovirus A
aaccuaauagcacuu

SEQ ID NO: 101041 - RNA, 20 nt, Human adenovirus A
aaccuaauagcacuuuggau

SEQ ID NO: 101042 - RNA, 13 nt, Human adenovirus A
aaccuuuugcgau

SEQ ID NO: 101043 - RNA, 15 nt, Human adenovirus A
aacgcugaugccacu

SEQ ID NO: 101044 - RNA, 20 nt, Human adenovirus A
aaaaccauuuuauuagcuca

SEQ ID NO: 101045 - RNA, 22 nt, Human adenovirus A
aaaacccacugguuagagccau

SEQ ID NO: 101046 - RNA, 16 nt, Human adenovirus A
aaaaccuagaccauug

SEQ ID NO: 101047 - RNA, 13 nt, Human adenovirus A
aaaacacugugcg

SEQ ID NO: 101048 - RNA, 13 nt, Human adenovirus A
aaaaauacaugag

SEQ ID NO: 101049 - RNA, 14 nt, Human adenovirus A
aaaaaaauugccaa

SEQ ID NO: 101050 - RNA, 17 nt, Human adenovirus A
uuucuuaagcagugaaa

SEQ ID NO: 101051 - RNA, 16 nt, Human adenovirus A
uuugacggaacgccaa

SEQ ID NO: 101052 - RNA, 19 nt, Human adenovirus A
uuugccugguaaaacaagc

SEQ ID NO: 101053 - RNA, 20 nt, Human adenovirus A
uugggcuaguucuugucaac

SEQ ID NO: 101054 - RNA, 21 nt, Human adenovirus A
uugucuccucuguaguuucuu

SEQ ID NO: 101055 - RNA, 17 nt, Human adenovirus A
uuguguacacguuuauu

SEQ ID NO: 101056 - RNA, 15 nt, Human adenovirus A
uuuaagcaacauuaa

SEQ ID NO: 101057 - RNA, 16 nt, Human adenovirus A
uuuaagcaacauuaaa

SEQ ID NO: 101058 - RNA, 14 nt, Human adenovirus A
uuucgaucccucau

SEQ ID NO: 101059 - RNA, 12 nt, Human adenovirus A
uuucaaacuuua

SEQ ID NO: 101060 - RNA, 13 nt, Human adenovirus A
uuucaaccuauua

SEQ ID NO: 101061 - RNA, 18 nt, Human adenovirus A
uuuaguauagguauugau

SEQ ID NO: 101062 - RNA, 15 nt, Human adenovirus A
uuuauuaaaaaucaa

SEQ ID NO: 101063 - RNA, 15 nt, Human adenovirus A
uuuauugauacuugu

SEQ ID NO: 101064 - RNA, 22 nt, Human adenovirus A
uucuacggcucgcaguauggca

SEQ ID NO: 101065 - RNA, 15 nt, Human adenovirus A
uucgaagccaaguga

SEQ ID NO: 101066 - RNA, 23 nt, Human adenovirus A
uucgaagccaagugauuguagaa

SEQ ID NO: 101067 - RNA, 14 nt, Human adenovirus A
uuccccauccaaaa

SEQ ID NO: 101068 - RNA, 18 nt, Human adenovirus A
uuccgcggccgcuucuac

SEQ ID NO: 101069 - RNA, 13 nt, Human adenovirus A
uuccuaauuccac

SEQ ID NO: 101070 - RNA, 21 nt, Human adenovirus A
uucagaugacuggacagcggc

SEQ ID NO: 101071 - RNA, 17 nt, Human adenovirus A
uucagcggggugauaug

SEQ ID NO: 101072 - RNA, 17 nt, Human adenovirus A
uucuccccacagcuggc

SEQ ID NO: 101073 - RNA, 14 nt, Human adenovirus A
uucuagcaaaauga

SEQ ID NO: 101074 - RNA, 22 nt, Human adenovirus A
uugaaaaaauacaugaguguau

SEQ ID NO: 101075 - RNA, 22 nt, Human adenovirus A
uugaauuaccagaaugaucaca

SEQ ID NO: 101076 - RNA, 22 nt, Human adenovirus A
uugacacaucagacguacccuu

SEQ ID NO: 101077 - RNA, 22 nt, Human adenovirus A
uugacuuccagguuaccauauu

SEQ ID NO: 101078 - RNA, 15 nt, Human adenovirus A
uugacggaacgccaa

SEQ ID NO: 101079 - RNA, 21 nt, Human adenovirus A
uugagaugguguuaugaaucu

SEQ ID NO: 101080 - RNA, 13 nt, Human adenovirus A
uugagauuggcaa

SEQ ID NO: 101081 - RNA, 14 nt, Human adenovirus A
uugagauuggcaau

SEQ ID NO: 101082 - RNA, 17 nt, Human adenovirus A
uggcuccgcuucuccac

SEQ ID NO: 101083 - RNA, 18 nt, Human adenovirus A
uggcaagcauaacaguca

SEQ ID NO: 101084 - RNA, 14 nt, Human adenovirus A
uggcaccauacaac

SEQ ID NO: 101085 - RNA, 23 nt, Human adenovirus A
uggcuugguuuagcccaugcauc

SEQ ID NO: 101086 - RNA, 16 nt, Human adenovirus A
uggcugugggugacaa

SEQ ID NO: 101087 - RNA, 17 nt, Human adenovirus A
ugggcuaguucuuguca

SEQ ID NO: 101088 - RNA, 20 nt, Human adenovirus A
uguaggauaaaaucauggac

SEQ ID NO: 101089 - RNA, 23 nt, Human adenovirus A
uguagcugaaaacaacugcacuu

SEQ ID NO: 101090 - RNA, 14 nt, Human adenovirus A
ugguaaaacaagcu

SEQ ID NO: 101091 - RNA, 16 nt, Human adenovirus A
uguaucucccuguaag

SEQ ID NO: 101092 - RNA, 17 nt, Human adenovirus A
uuacugguacuaugacu

SEQ ID NO: 101093 - RNA, 12 nt, Human adenovirus A
uuacuucuucca

SEQ ID NO: 101094 - RNA, 14 nt, Human adenovirus A
uuacuucuuccaau

SEQ ID NO: 101095 - RNA, 22 nt, Human adenovirus A
uuaggggaacuggccaagcaaa

SEQ ID NO: 101096 - RNA, 16 nt, Human adenovirus A
uuaaagcuuuugcuaa

SEQ ID NO: 101097 - RNA, 15 nt, Human adenovirus A
uuaaacuaucacuug

SEQ ID NO: 101098 - RNA, 18 nt, Human adenovirus A
uuaaacuaucacuugcaa

SEQ ID NO: 101099 - RNA, 12 nt, Human adenovirus A
uuaaauugagau

SEQ ID NO: 101100 - RNA, 17 nt, Human adenovirus A
uuaaauugagauggugu

SEQ ID NO: 101101 - RNA, 19 nt, Human adenovirus A
uuaaauugagaugguguua

SEQ ID NO: 101102 - RNA, 12 nt, Human adenovirus A
uuaaauuguucc

SEQ ID NO: 101103 - RNA, 20 nt, Human adenovirus A
uuaaccacgcguauagugua

SEQ ID NO: 101104 - RNA, 20 nt, Human adenovirus A
uuaaccugggauacuaccgc

SEQ ID NO: 101105 - RNA, 21 nt, Human adenovirus A
uuaaaauaaaauaaaacuucc

SEQ ID NO: 101106 - RNA, 23 nt, Human adenovirus A
uuaaaauaaaauaaaacuuccaa

SEQ ID NO: 101107 - RNA, 16 nt, Human adenovirus A
uguuuuaugcagacua

SEQ ID NO: 101108 - RNA, 15 nt, Human adenovirus A
uguuguuuugaaccu

SEQ ID NO: 101109 - RNA, 22 nt, Human adenovirus A
uguuuaagaauuuauacaauuc

SEQ ID NO: 101110 - RNA, 21 nt, Human adenovirus A
uguuuccgauaaugagccuga

SEQ ID NO: 101111 - RNA, 19 nt, Human adenovirus A
ugugauuaaucuucccugu

SEQ ID NO: 101112 - RNA, 18 nt, Human adenovirus A
uguuacacccccuuuuac

SEQ ID NO: 101113 - RNA, 22 nt, Human adenovirus A
uguuacacccccuuuuacuucu

SEQ ID NO: 101114 - RNA, 17 nt, Human adenovirus A
uguuaggggaacuggcc

SEQ ID NO: 101115 - RNA, 20 nt, Human adenovirus A
uguuaugaaucuuuauugau

SEQ ID NO: 101116 - RNA, 21 nt, Human adenovirus A
uguuaugaaucuuuauugaua

SEQ ID NO: 101117 - RNA, 14 nt, Human adenovirus A
ucugcugucauuug

SEQ ID NO: 101118 - RNA, 20 nt, Human adenovirus A
ucugcugucauuugugugcu

SEQ ID NO: 101119 - RNA, 20 nt, Human adenovirus A
ucugauugcguugcaaugug

SEQ ID NO: 101120 - RNA, 14 nt, Human adenovirus A
ucugccaacggcac

SEQ ID NO: 101121 - RNA, 21 nt, Human adenovirus A
ucuauugcgugaaguauucca

SEQ ID NO: 101122 - RNA, 15 nt, Human adenovirus A
uccugagacaccacc

SEQ ID NO: 101123 - RNA, 12 nt, Human adenovirus A
ucgcuugcaacu

SEQ ID NO: 101124 - RNA, 18 nt, Human adenovirus A
uccgcaaguggacaugau

SEQ ID NO: 101125 - RNA, 12 nt, Human adenovirus A
ucaugugcuauu

SEQ ID NO: 101126 - RNA, 22 nt, Human adenovirus A
ucauguguagguuuuacagugc

SEQ ID NO: 101127 - RNA, 21 nt, Human adenovirus A
ucauggcgggcucaccaaagu

SEQ ID NO: 101128 - RNA, 14 nt, Human adenovirus A
uccaauaguugcau

SEQ ID NO: 101129 - RNA, 18 nt, Human adenovirus A
uccaauaguugcauaggu

SEQ ID NO: 101130 - RNA, 18 nt, Human adenovirus A
uccaaugcgccugcuuaa

SEQ ID NO: 101131 - RNA, 15 nt, Human adenovirus A
uccaauggucuucaa

SEQ ID NO: 101132 - RNA, 18 nt, Human adenovirus A
uccaacuuauuacuggua

SEQ ID NO: 101133 - RNA, 16 nt, Human adenovirus A
ucauggaauacuucac

SEQ ID NO: 101134 - RNA, 17 nt, Human adenovirus A
ucaucuguaguggcgcu

SEQ ID NO: 101135 - RNA, 12 nt, Human adenovirus A
ucugucagugaa

SEQ ID NO: 101136 - RNA, 15 nt, Human adenovirus A
ucuuuuaccaaugaa

SEQ ID NO: 101137 - RNA, 13 nt, Human adenovirus A
ucuuuucuuuaug

SEQ ID NO: 101138 - RNA, 14 nt, Human adenovirus A
ugaaaacaacugca

SEQ ID NO: 101139 - RNA, 18 nt, Human adenovirus A
ugaaucuuuaccaggcaa

SEQ ID NO: 101140 - RNA, 14 nt, Human adenovirus A
ugaaaucuggacau

SEQ ID NO: 101141 - RNA, 20 nt, Human adenovirus A
ugaaaucuggacaugcaggu

SEQ ID NO: 101142 - RNA, 23 nt, Human adenovirus A
ugagcuaauaaaaugguuuuauu

SEQ ID NO: 101143 - RNA, 14 nt, Human adenovirus A
ugaggaacagucaa

SEQ ID NO: 101144 - RNA, 20 nt, Human adenovirus A
ugaggacuuuguagcauaca

SEQ ID NO: 101145 - RNA, 21 nt, Human adenovirus A
ugaggacuuuguagcauacaa

SEQ ID NO: 101146 - RNA, 22 nt, Human adenovirus A
ugauuuaccccuaaauauugua

SEQ ID NO: 101147 - RNA, 18 nt, Human adenovirus A
ugauugcguugcaaugug

SEQ ID NO: 101148 - RNA, 17 nt, Human adenovirus A
ugauucccccaucugaa

SEQ ID NO: 101149 - RNA, 15 nt, Human adenovirus A
ugauagagauaagca

SEQ ID NO: 101150 - RNA, 18 nt, Human adenovirus A
ugauagagauaagcagga

SEQ ID NO: 101151 - RNA, 16 nt, Human adenovirus A
ugauuauaaucuccaa

SEQ ID NO: 101152 - RNA, 15 nt, Human adenovirus A
ugauacacaccucau

SEQ ID NO: 101153 - RNA, 18 nt, Human adenovirus A
ugauaccauggacagcuc

SEQ ID NO: 101154 - RNA, 20 nt, Human adenovirus A
ugagucccggucuggugcaa

SEQ ID NO: 101155 - RNA, 23 nt, Human adenovirus A
ugcccuuccuaauuccacuuauu

SEQ ID NO: 101156 - RNA, 15 nt, Human adenovirus A
ugcccugauauauca

SEQ ID NO: 101157 - RNA, 18 nt, Human adenovirus A
ugccucaguagccuugca

SEQ ID NO: 101158 - RNA, 19 nt, Human adenovirus A
ugccucaguagccuugcag

SEQ ID NO: 101159 - RNA, 16 nt, Human adenovirus A
ugccucggaguaccug

SEQ ID NO: 101160 - RNA, 11 nt, Human adenovirus A
ugcgacauuua

SEQ ID NO: 101161 - RNA, 18 nt, Human adenovirus A
ugcgcacugaaaaaccaa

SEQ ID NO: 101162 - RNA, 18 nt, Human adenovirus A
ugcgcauacccauuccag

SEQ ID NO: 101163 - RNA, 13 nt, Human adenovirus A
ugcgccugcuuaa

SEQ ID NO: 101164 - RNA, 14 nt, Human adenovirus A
ugauuuauauaguu

SEQ ID NO: 101165 - RNA, 15 nt, Human adenovirus A
ugauuucagcuucua

SEQ ID NO: 101166 - RNA, 22 nt, Human adenovirus A
ugauuuccagggugaauggggu

SEQ ID NO: 101167 - RNA, 16 nt, Human adenovirus A
ugcaaaauaaugacua

SEQ ID NO: 101168 - RNA, 24 nt, Human adenovirus A
ugcaaacagcaaacuuucuccaaa

SEQ ID NO: 101169 - RNA, 23 nt, Human adenovirus A
ugcaguuuuuuuuccacacaucu

SEQ ID NO: 101170 - RNA, 18 nt, Human adenovirus A
ugcaggugccacaggucg

SEQ ID NO: 101171 - RNA, 23 nt, Human adenovirus A
ugccaagugguauugauuuuccc

SEQ ID NO: 101172 - RNA, 21 nt, Human adenovirus A
ugcauuaauaauaaaaccauu

SEQ ID NO: 101173 - RNA, 12 nt, Human adenovirus A
ccucacuggcau

SEQ ID NO: 101174 - RNA, 15 nt, Human adenovirus A
ccucacuggcauuug

SEQ ID NO: 101175 - RNA, 19 nt, Human adenovirus A
ccucgccuuuggauaccgc

SEQ ID NO: 101176 - RNA, 15 nt, Human adenovirus A
ccucuuggccagcug

SEQ ID NO: 101177 - RNA, 23 nt, Human adenovirus A
ccugaucuagaaauugauggaag

SEQ ID NO: 101178 - RNA, 20 nt, Human adenovirus A
ccugaauguuuguacacuuu

SEQ ID NO: 101179 - RNA, 17 nt, Human adenovirus A
ccugacagacuugcaaa

SEQ ID NO: 101180 - RNA, 22 nt, Human adenovirus A
ccugagucccggucuggugcaa

SEQ ID NO: 101181 - RNA, 22 nt, Human adenovirus A
ccugcgagagugguuguacuuu

SEQ ID NO: 101182 - RNA, 19 nt, Human adenovirus A
ccugcuccgacaacagcug

SEQ ID NO: 101183 - RNA, 18 nt, Human adenovirus A
ccugugaggaacagucaa

SEQ ID NO: 101184 - RNA, 20 nt, Human adenovirus A
ccuucccauuuuaccuugua

SEQ ID NO: 101185 - RNA, 16 nt, Human adenovirus A
ccuuucgaucccucau

SEQ ID NO: 101186 - RNA, 18 nt, Human adenovirus A
ccuuuaacggaaaacacg

SEQ ID NO: 101187 - RNA, 20 nt, Human adenovirus A
ccuuuaacggaaaacacguu

SEQ ID NO: 101188 - RNA, 23 nt, Human adenovirus A
cgaaacugggggcguacacuggc

SEQ ID NO: 101189 - RNA, 19 nt, Human adenovirus A
cgaaauauucaagugcagu

SEQ ID NO: 101190 - RNA, 19 nt, Human adenovirus A
ccgcguguuagacauggcu

SEQ ID NO: 101191 - RNA, 14 nt, Human adenovirus A
cccuuuagcaguug

SEQ ID NO: 101192 - RNA, 19 nt, Human adenovirus A
ccuaugugauaacccugaa

SEQ ID NO: 101193 - RNA, 13 nt, Human adenovirus A
ccgggcucaugga

SEQ ID NO: 101194 - RNA, 21 nt, Human adenovirus A
ccggguuaguguuguagauaa

SEQ ID NO: 101195 - RNA, 21 nt, Human adenovirus A
ccggguucacuacaguguaug

SEQ ID NO: 101196 - RNA, 16 nt, Human adenovirus A
ccguacaugggcaccu

SEQ ID NO: 101197 - RNA, 21 nt, Human adenovirus A
ccuagauguaauuaauggacu

SEQ ID NO: 101198 - RNA, 19 nt, Human adenovirus A
cccucuuacgaaaccguga

SEQ ID NO: 101199 - RNA, 21 nt, Human adenovirus A
cccucgaugaugccgcagugg

SEQ ID NO: 101200 - RNA, 23 nt, Human adenovirus A
caugagcgguggcuuauucauug

SEQ ID NO: 101201 - RNA, 19 nt, Human adenovirus A
cauguauaauaaaacuggu

SEQ ID NO: 101202 - RNA, 22 nt, Human adenovirus A
caugugcuauuguuaacacugc

SEQ ID NO: 101203 - RNA, 16 nt, Human adenovirus A
cauguggagcuuucaa

SEQ ID NO: 101204 - RNA, 21 nt, Human adenovirus A
cauguguagguuuuacagugc

SEQ ID NO: 101205 - RNA, 13 nt, Human adenovirus A
caguguaugucag

SEQ ID NO: 101206 - RNA, 12 nt, Human adenovirus A
caguguccauca

SEQ ID NO: 101207 - RNA, 14 nt, Human adenovirus A
cagccaaaccggcc

SEQ ID NO: 101208 - RNA, 16 nt, Human adenovirus A
cagcagcaacaaggaa

SEQ ID NO: 101209 - RNA, 23 nt, Human adenovirus A
cagcagccccaagcuaaccgcuu

SEQ ID NO: 101210 - RNA, 20 nt, Human adenovirus A
cagcaacuuuuuaaccacug

SEQ ID NO: 101211 - RNA, 16 nt, Human adenovirus A
cagauucuucuuccca

SEQ ID NO: 101212 - RNA, 18 nt, Human adenovirus A
cagauuggcaccauacaa

SEQ ID NO: 101213 - RNA, 20 nt, Human adenovirus A
cauuccccauccaaaaccag

SEQ ID NO: 101214 - RNA, 17 nt, Human adenovirus A
cauugaauuaccagaau

SEQ ID NO: 101215 - RNA, 14 nt, Human adenovirus A
cauuuaagcaacau

SEQ ID NO: 101216 - RNA, 17 nt, Human adenovirus A
cauugcgauaaacugga

SEQ ID NO: 101217 - RNA, 22 nt, Human adenovirus A
cauuggauggucaggccaguga

SEQ ID NO: 101218 - RNA, 19 nt, Human adenovirus A
cauuguaacugaaaaugga

SEQ ID NO: 101219 - RNA, 20 nt, Human adenovirus A
cauuguaacugaaaauggaa

SEQ ID NO: 101220 - RNA, 19 nt, Human adenovirus A
ccaacugucaaaccugaca

SEQ ID NO: 101221 - RNA, 13 nt, Human adenovirus A
ccaaaaccagguc

SEQ ID NO: 101222 - RNA, 20 nt, Human adenovirus A
ccagcugguuacaccugcuc

SEQ ID NO: 101223 - RNA, 12 nt, Human adenovirus A
ccagaaugauca

SEQ ID NO: 101224 - RNA, 13 nt, Human adenovirus A
ccagaaugaucac

SEQ ID NO: 101225 - RNA, 18 nt, Human adenovirus A
ccacucagcgacaaaccu

SEQ ID NO: 101226 - RNA, 20 nt, Human adenovirus A
ccacucagcgacaaaccuuu

SEQ ID NO: 101227 - RNA, 21 nt, Human adenovirus A
ccacccuguacgcaagcauuu

SEQ ID NO: 101228 - RNA, 19 nt, Human adenovirus A
ccaccguucccuaucauua

SEQ ID NO: 101229 - RNA, 16 nt, Human adenovirus A
ccacgauuaagacaua

SEQ ID NO: 101230 - RNA, 17 nt, Human adenovirus A
ccacgauuaagacauau

SEQ ID NO: 101231 - RNA, 19 nt, Human adenovirus A
auucuaacugauuaugaga

SEQ ID NO: 101232 - RNA, 19 nt, Human adenovirus A
auugcucgaugaugcauaa

SEQ ID NO: 101233 - RNA, 16 nt, Human adenovirus A
auuggcaggaguugca

SEQ ID NO: 101234 - RNA, 15 nt, Human adenovirus A
auuggaguacaagcu

SEQ ID NO: 101235 - RNA, 16 nt, Human adenovirus A
auuaccugcaccucca

SEQ ID NO: 101236 - RNA, 21 nt, Human adenovirus A
auuagcucauuggaguacaag

SEQ ID NO: 101237 - RNA, 21 nt, Human adenovirus A
auuagcacuuaauuacaaaga

SEQ ID NO: 101238 - RNA, 17 nt, Human adenovirus A
auucauugucauugcca

SEQ ID NO: 101239 - RNA, 20 nt, Human adenovirus A
auuccuccuccuccuguaag

SEQ ID NO: 101240 - RNA, 18 nt, Human adenovirus A
auuaccagaaugaucaca

SEQ ID NO: 101241 - RNA, 18 nt, Human adenovirus A
auuacaaagaccccauug

SEQ ID NO: 101242 - RNA, 13 nt, Human adenovirus A
auguguuccagua

SEQ ID NO: 101243 - RNA, 15 nt, Human adenovirus A
augugauaacccuga

SEQ ID NO: 101244 - RNA, 18 nt, Human adenovirus A
augugauaacccugaaug

SEQ ID NO: 101245 - RNA, 15 nt, Human adenovirus A
auguguagguuuuac

SEQ ID NO: 101246 - RNA, 23 nt, Human adenovirus A
augguuuuauuauuaaugcauug

SEQ ID NO: 101247 - RNA, 14 nt, Human adenovirus A
aucugucagugaaa

SEQ ID NO: 101248 - RNA, 17 nt, Human adenovirus A
auggucaggccagugag

SEQ ID NO: 101249 - RNA, 23 nt, Human adenovirus A
auuguguacuuuucaaacuuuac

SEQ ID NO: 101250 - RNA, 14 nt, Human adenovirus A
auuguuaacacugc

SEQ ID NO: 101251 - RNA, 23 nt, Human adenovirus A
auuguagaagcugaaaucagcug

SEQ ID NO: 101252 - RNA, 16 nt, Human adenovirus A
auuguagcuacagaau

SEQ ID NO: 101253 - RNA, 20 nt, Human adenovirus A
auuuagcgacguaaugccau

SEQ ID NO: 101254 - RNA, 20 nt, Human adenovirus A
auuuauacaauucauucuga

SEQ ID NO: 101255 - RNA, 21 nt, Human adenovirus A
auuugcgcacugaaaaaccaa

SEQ ID NO: 101256 - RNA, 22 nt, Human adenovirus A
auuugcaaggcgguauuugcua

SEQ ID NO: 101257 - RNA, 18 nt, Human adenovirus A
caaaccacuuaguuuuaa

SEQ ID NO: 101258 - RNA, 12 nt, Human adenovirus A
caaaucuaucag

SEQ ID NO: 101259 - RNA, 15 nt, Human adenovirus A
caaaucuuaaaugga

SEQ ID NO: 101260 - RNA, 20 nt, Human adenovirus A
caaacgguaguggcaaugca

SEQ ID NO: 101261 - RNA, 16 nt, Human adenovirus A
caaacgcccugcuccg

SEQ ID NO: 101262 - RNA, 17 nt, Human adenovirus A
caaacgcccugcuccga

SEQ ID NO: 101263 - RNA, 22 nt, Human adenovirus A
cacccccuuuuacuucuuccaa

SEQ ID NO: 101264 - RNA, 18 nt, Human adenovirus A
cacaucagacguacccuu

SEQ ID NO: 101265 - RNA, 20 nt, Human adenovirus A
caauguuauccacauugcug

SEQ ID NO: 101266 - RNA, 20 nt, Human adenovirus A
caauuagggccagcauugcc

SEQ ID NO: 101267 - RNA, 22 nt, Human adenovirus A
caaugcauuaauaauaaaacca

SEQ ID NO: 101268 - RNA, 23 nt, Human adenovirus A
caaugcauuaauaauaaaaccau

SEQ ID NO: 101269 - RNA, 15 nt, Human adenovirus A
caaugugcaggcuaa

SEQ ID NO: 101270 - RNA, 16 nt, Human adenovirus A
caagauggccacuccc

SEQ ID NO: 101271 - RNA, 14 nt, Human adenovirus A
caagcuaaccgcuu

SEQ ID NO: 101272 - RNA, 19 nt, Human adenovirus A
caaggaaauacuauauuaa

SEQ ID NO: 101273 - RNA, 20 nt, Human adenovirus A
caaggucuagccaacaucca

SEQ ID NO: 101274 - RNA, 18 nt, Human adenovirus A
caauaaguacgcaauuug

SEQ ID NO: 101275 - RNA, 22 nt, Human adenovirus A
caauacagauauaaaguuuaaa

SEQ ID NO: 101276 - RNA, 16 nt, Human adenovirus A
cacuuuauaugcuauu

SEQ ID NO: 101277 - RNA, 16 nt, Human adenovirus A
cacuuuaauaaaaaca

SEQ ID NO: 101278 - RNA, 16 nt, Human adenovirus A
cagaaaaaaauugcca

SEQ ID NO: 101279 - RNA, 23 nt, Human adenovirus A
cagaggaaauuguguacuuuuca

SEQ ID NO: 101280 - RNA, 16 nt, Human adenovirus A
cacuuaauuacaaaga

SEQ ID NO: 101281 - RNA, 15 nt, Human adenovirus A
cacuugaauucugga

SEQ ID NO: 101282 - RNA, 16 nt, Human adenovirus A
cacugagcacaucacc

SEQ ID NO: 101283 - RNA, 17 nt, Human adenovirus A
cacuggucgcaccacug

SEQ ID NO: 101284 - RNA, 20 nt, Human adenovirus A
cacuguagauccuaccacau

SEQ ID NO: 101285 - RNA, 17 nt, Human adenovirus A
cacucuucgcugcaguu

SEQ ID NO: 101286 - RNA, 12 nt, Human adenovirus A
cacuacagugua

SEQ ID NO: 101287 - RNA, 13 nt, Human adenovirus A
caccgaacagagg

SEQ ID NO: 101288 - RNA, 17 nt, Human adenovirus A
caccgcuacaccacgua

SEQ ID NO: 101289 - RNA, 14 nt, Human adenovirus A
caccugcaaauuca

SEQ ID NO: 101290 - RNA, 15 nt, Human adenovirus A
caccugaagcugaau

SEQ ID NO: 101291 - RNA, 16 nt, Human adenovirus A
cacgauuaagacauau

SEQ ID NO: 101292 - RNA, 23 nt, Human adenovirus A
cacgauuaagacauauggcacca

SEQ ID NO: 101293 - RNA, 15 nt, Human adenovirus A
agcugggugggaugc

SEQ ID NO: 101294 - RNA, 20 nt, Human adenovirus A
agcugcuguucuuaguaggc

SEQ ID NO: 101295 - RNA, 14 nt, Human adenovirus A
agcugcugucacug

SEQ ID NO: 101296 - RNA, 15 nt, Human adenovirus A
agcuggcgcacaagu

SEQ ID NO: 101297 - RNA, 11 nt, Human adenovirus A
agcugggaugc

SEQ ID NO: 101298 - RNA, 14 nt, Human adenovirus A
agcugggaugcuuu

SEQ ID NO: 101299 - RNA, 16 nt, Human adenovirus A
agcugccaagugguau

SEQ ID NO: 101300 - RNA, 15 nt, Human adenovirus A
aggcgguauuugcua

SEQ ID NO: 101301 - RNA, 23 nt, Human adenovirus A
aggcugguuuaauauacaacgcu

SEQ ID NO: 101302 - RNA, 19 nt, Human adenovirus A
agcccgcgcgcggacuuuc

SEQ ID NO: 101303 - RNA, 17 nt, Human adenovirus A
agcccggggacuaacca

SEQ ID NO: 101304 - RNA, 15 nt, Human adenovirus A
agcugaaaucagcug

SEQ ID NO: 101305 - RNA, 21 nt, Human adenovirus A
agcucauuggaguacaagcuu

SEQ ID NO: 101306 - RNA, 17 nt, Human adenovirus A
aguaaagauauucccac

SEQ ID NO: 101307 - RNA, 19 nt, Human adenovirus A
aggucagauucuucuuccc

SEQ ID NO: 101308 - RNA, 21 nt, Human adenovirus A
aggucuagccaacauccagug

SEQ ID NO: 101309 - RNA, 17 nt, Human adenovirus A
aguaacaacacgggcug

SEQ ID NO: 101310 - RNA, 15 nt, Human adenovirus A
aguaacaacagucag

SEQ ID NO: 101311 - RNA, 17 nt, Human adenovirus A
aguaaggggacagauug

SEQ ID NO: 101312 - RNA, 23 nt, Human adenovirus A
aguaauaaaaccugugccucagc

SEQ ID NO: 101313 - RNA, 15 nt, Human adenovirus A
agggccagcauugcc

SEQ ID NO: 101314 - RNA, 17 nt, Human adenovirus A
aggguccaauaguugca

SEQ ID NO: 101315 - RNA, 22 nt, Human adenovirus A
aguugcagggcgcccauaacau

SEQ ID NO: 101316 - RNA, 22 nt, Human adenovirus A
aguuuugauuguauuuugagau

SEQ ID NO: 101317 - RNA, 12 nt, Human adenovirus A
aguguaauaguc

SEQ ID NO: 101318 - RNA, 16 nt, Human adenovirus A
aguucaccggugaaga

SEQ ID NO: 101319 - RNA, 20 nt, Human adenovirus A
aguucaccggugaagaugau

SEQ ID NO: 101320 - RNA, 15 nt, Human adenovirus A
aguauccauuuagcg

SEQ ID NO: 101321 - RNA, 22 nt, Human adenovirus A
aguaucuggagcggucuuaaaa

SEQ ID NO: 101322 - RNA, 15 nt, Human adenovirus A
aguauuccaugagcc

SEQ ID NO: 101323 - RNA, 13 nt, Human adenovirus A
agugacgucacaa

SEQ ID NO: 101324 - RNA, 22 nt, Human adenovirus A
agugcaaaauaaugacuauucc

SEQ ID NO: 101325 - RNA, 17 nt, Human adenovirus A
aguauugguagacacug

SEQ ID NO: 101326 - RNA, 21 nt, Human adenovirus A
agugaguaaaagcguguaaga

SEQ ID NO: 101327 - RNA, 19 nt, Human adenovirus A
aguggcuuuuccugagaca

SEQ ID NO: 101328 - RNA, 20 nt, Human adenovirus A
agugggauuuuuauccauug

SEQ ID NO: 101329 - RNA, 17 nt, Human adenovirus A
agugcaguuguuuucag

SEQ ID NO: 101330 - RNA, 13 nt, Human adenovirus A
agugccuguugau

SEQ ID NO: 101331 - RNA, 20 nt, Human adenovirus A
aucgggaagauacuaccuac

SEQ ID NO: 101332 - RNA, 18 nt, Human adenovirus A
aucucuacagccccuuug

SEQ ID NO: 101333 - RNA, 19 nt, Human adenovirus A
aucucaccuggaccuuuaa

SEQ ID NO: 101334 - RNA, 22 nt, Human adenovirus A
aucugaaaauacaucauggucu

SEQ ID NO: 101335 - RNA, 23 nt, Human adenovirus A
auccauuuggauuuucugaucaa

SEQ ID NO: 101336 - RNA, 15 nt, Human adenovirus A
auccgaggugacaug

SEQ ID NO: 101337 - RNA, 17 nt, Human adenovirus A
auccgaggugacaugau

SEQ ID NO: 101338 - RNA, 20 nt, Human adenovirus A
auccgcauuuaagcaacauu

SEQ ID NO: 101339 - RNA, 15 nt, Human adenovirus A
aucauuaagaacacg

SEQ ID NO: 101340 - RNA, 17 nt, Human adenovirus A
auccaaaaccaggucca

SEQ ID NO: 101341 - RNA, 21 nt, Human adenovirus A
aucacucuauuucaaccuauu

SEQ ID NO: 101342 - RNA, 17 nt, Human adenovirus A
aucacuugcaaccugua

SEQ ID NO: 101343 - RNA, 15 nt, Human adenovirus A
auauuguauuuccag

SEQ ID NO: 101344 - RNA, 18 nt, Human adenovirus A
aucaccgaggcaguuucu

SEQ ID NO: 101345 - RNA, 16 nt, Human adenovirus A
auagcucuuccagcug

SEQ ID NO: 101346 - RNA, 15 nt, Human adenovirus A
auacaucauggucuc

SEQ ID NO: 101347 - RNA, 19 nt, Human adenovirus A
auacagauauaaaguuuaa

SEQ ID NO: 101348 - RNA, 18 nt, Human adenovirus A
auacuaccgcugcucagc

SEQ ID NO: 101349 - RNA, 23 nt, Human adenovirus A
auacuuguuuuuucugacauggu

SEQ ID NO: 101350 - RNA, 17 nt, Human adenovirus A
auagagauaagcaggaa

SEQ ID NO: 101351 - RNA, 12 nt, Human adenovirus A
auagcaaagcca

SEQ ID NO: 101352 - RNA, 13 nt, Human adenovirus A
auagcaaagccau

SEQ ID NO: 101353 - RNA, 13 nt, Human adenovirus A
acgguaguggcaa

SEQ ID NO: 101354 - RNA, 16 nt, Human adenovirus A
acuauauuaacuuuau

SEQ ID NO: 101355 - RNA, 16 nt, Human adenovirus A
acuagaaucggcaaca

SEQ ID NO: 101356 - RNA, 19 nt, Human adenovirus A
acuagaaucggcaacagca

SEQ ID NO: 101357 - RNA, 13 nt, Human adenovirus A
acugaaaaaccaa

SEQ ID NO: 101358 - RNA, 14 nt, Human adenovirus A
acugaaaaaccaac

SEQ ID NO: 101359 - RNA, 23 nt, Human adenovirus A
acucaagcggcauuccccaucca

SEQ ID NO: 101360 - RNA, 14 nt, Human adenovirus A
acucacauuaggca

SEQ ID NO: 101361 - RNA, 13 nt, Human adenovirus A
acuuuauaugcua

SEQ ID NO: 101362 - RNA, 18 nt, Human adenovirus A
acuuuauauugcauuugu

SEQ ID NO: 101363 - RNA, 22 nt, Human adenovirus A
acuuguuuuuucugacauggua

SEQ ID NO: 101364 - RNA, 16 nt, Human adenovirus A
acuuuacaaaccacuu

SEQ ID NO: 101365 - RNA, 16 nt, Human adenovirus A
agaaaacaucacucua

SEQ ID NO: 101366 - RNA, 21 nt, Human adenovirus A
agaaaacaucacucuauuuca

SEQ ID NO: 101367 - RNA, 23 nt, Human adenovirus A
agaaaacgguccuuguacaguuu

SEQ ID NO: 101368 - RNA, 17 nt, Human adenovirus A
acugaaaauggaacccu

SEQ ID NO: 101369 - RNA, 15 nt, Human adenovirus A
acugagcacaucacc

SEQ ID NO: 101370 - RNA, 19 nt, Human adenovirus A
acugggggcguacacuggc

SEQ ID NO: 101371 - RNA, 21 nt, Human adenovirus A
acugggugccgcccgcaugua

SEQ ID NO: 101372 - RNA, 18 nt, Human adenovirus A
acuggucgcaccacugua

SEQ ID NO: 101373 - RNA, 15 nt, Human adenovirus A
agacauagccaauca

SEQ ID NO: 101374 - RNA, 12 nt, Human adenovirus A
agacaccaccuc

SEQ ID NO: 101375 - RNA, 15 nt, Human adenovirus A
agaauuuauacaauu

SEQ ID NO: 101376 - RNA, 22 nt, Human adenovirus A
agaggaaauuguguacuuuuca

SEQ ID NO: 101377 - RNA, 18 nt, Human adenovirus A
agacucugccaacggcac

SEQ ID NO: 101378 - RNA, 17 nt, Human adenovirus A
agacuuaccauuuggcu

SEQ ID NO: 101379 - RNA, 20 nt, Human adenovirus A
agacuaaauggaagacauca

SEQ ID NO: 101380 - RNA, 17 nt, Human adenovirus A
agaacaucaacugugcu

SEQ ID NO: 101381 - RNA, 18 nt, Human adenovirus A
agaacaucaacugugcua

SEQ ID NO: 101382 - RNA, 19 nt, Human adenovirus A
agaacacggugaauguguu

SEQ ID NO: 101383 - RNA, 20 nt, Human adenovirus A
agaaaucuuuuaccaaugaa

SEQ ID NO: 101384 - RNA, 15 nt, Human adenovirus A
aauuucccucuuccc

SEQ ID NO: 101385 - RNA, 17 nt, Human adenovirus A
aauuucccucuucccaa

SEQ ID NO: 101386 - RNA, 15 nt, Human adenovirus A
acacggauacuuaau

SEQ ID NO: 101387 - RNA, 14 nt, Human adenovirus A
acagaauuacuaaa

SEQ ID NO: 101388 - RNA, 12 nt, Human adenovirus A
acagucacucaa

SEQ ID NO: 101389 - RNA, 17 nt, Human adenovirus A
acauaaaccauggaauu

SEQ ID NO: 101390 - RNA, 23 nt, Human adenovirus A
acaugggcaccuggaacgagauc

SEQ ID NO: 101391 - RNA, 16 nt, Human adenovirus A
acauguggagcuuuca

SEQ ID NO: 101392 - RNA, 17 nt, Human adenovirus A
acauguggagcuuucaa

SEQ ID NO: 101393 - RNA, 15 nt, Human adenovirus A
acauuaaccuaugca

SEQ ID NO: 101394 - RNA, 19 nt, Human adenovirus A
accacguaaucaacuuaac

SEQ ID NO: 101395 - RNA, 19 nt, Human adenovirus A
accacugucgccaaccuca

SEQ ID NO: 101396 - RNA, 22 nt, Human adenovirus A
acauuuuagcaagccugcgaga

SEQ ID NO: 101397 - RNA, 15 nt, Human adenovirus A
accaacaaacacgga

SEQ ID NO: 101398 - RNA, 13 nt, Human adenovirus A
accugcaacagcc

SEQ ID NO: 101399 - RNA, 18 nt, Human adenovirus A
accuuuaguauagguauu

SEQ ID NO: 101400 - RNA, 22 nt, Human adenovirus A
accuaacugucauccgcauuua

SEQ ID NO: 101401 - RNA, 17 nt, Human adenovirus A
acgcccugauuucccgu

SEQ ID NO: 101402 - RNA, 19 nt, Human adenovirus A
acgcugaugccacuugaau

SEQ ID NO: 101403 - RNA, 14 nt, Human adenovirus A
accagguccaugau

SEQ ID NO: 101404 - RNA, 21 nt, Human adenovirus A
accagguguauuagcacuuaa

SEQ ID NO: 101405 - RNA, 19 nt, Human adenovirus A
accauacaacaaguaccaa

SEQ ID NO: 101406 - RNA, 19 nt, Human adenovirus A
accauugguaacaguauug

SEQ ID NO: 101407 - RNA, 15 nt, Human adenovirus A
acccaguaugcugaa

SEQ ID NO: 101408 - RNA, 16 nt, Human adenovirus A
acccauuugacacauc

SEQ ID NO: 101409 - RNA, 16 nt, Human adenovirus A
accccacaugauuucc

SEQ ID NO: 101410 - RNA, 22 nt, Human adenovirus A
acccugaauguuuguacacuuu

SEQ ID NO: 101411 - RNA, 18 nt, Human adenovirus A
cucauuggaguacaagcu

SEQ ID NO: 101412 - RNA, 12 nt, Human adenovirus A
cuccccacagcu

SEQ ID NO: 101413 - RNA, 13 nt, Human adenovirus A
cucugcgcuuuau

SEQ ID NO: 101414 - RNA, 22 nt, Human adenovirus A
cucugcgcuuuauuaaacauca

SEQ ID NO: 101415 - RNA, 14 nt, Human adenovirus A
cugaaaaaccaaca

SEQ ID NO: 101416 - RNA, 17 nt, Human adenovirus A
cugaaacagcagggucu

SEQ ID NO: 101417 - RNA, 15 nt, Human adenovirus A
cugaagaagaaccua

SEQ ID NO: 101418 - RNA, 18 nt, Human adenovirus A
cugacuuuacauaaugua

SEQ ID NO: 101419 - RNA, 17 nt, Human adenovirus A
cugcggugcgugucaca

SEQ ID NO: 101420 - RNA, 19 nt, Human adenovirus A
cugcagcgugcggccuguu

SEQ ID NO: 101421 - RNA, 16 nt, Human adenovirus A
cugcaggaauggccaa

SEQ ID NO: 101422 - RNA, 13 nt, Human adenovirus A
cugcagcuuccgc

SEQ ID NO: 101423 - RNA, 15 nt, Human adenovirus A
cuggguuuauggaau

SEQ ID NO: 101424 - RNA, 18 nt, Human adenovirus A
cugucacugagcacauca

SEQ ID NO: 101425 - RNA, 18 nt, Human adenovirus A
cuggauuugcgcacugaa

SEQ ID NO: 101426 - RNA, 19 nt, Human adenovirus A
cuggauuugcgcacugaaa

SEQ ID NO: 101427 - RNA, 20 nt, Human adenovirus A
cuguugaucugucagugaaa

SEQ ID NO: 101428 - RNA, 20 nt, Human adenovirus A
cuguuguuuugaaccugaaa

SEQ ID NO: 101429 - RNA, 19 nt, Human adenovirus A
cuguuuuauuaaaaaucaa

SEQ ID NO: 101430 - RNA, 14 nt, Human adenovirus A
cuuaaauugagaug

SEQ ID NO: 101431 - RNA, 21 nt, Human adenovirus A
cuuacauguggagcuuucaac

SEQ ID NO: 101432 - RNA, 13 nt, Human adenovirus A
cuucuuccaaugg

SEQ ID NO: 101433 - RNA, 19 nt, Human adenovirus A
cuucuuccaauggucuuca

SEQ ID NO: 101434 - RNA, 14 nt, Human adenovirus A
cuaccgucaucucu

SEQ ID NO: 101435 - RNA, 14 nt, Human adenovirus A
cuaccgcugcucag

SEQ ID NO: 101436 - RNA, 13 nt, Human adenovirus A
cuaccuacuccua

SEQ ID NO: 101437 - RNA, 22 nt, Human adenovirus A
cuacggagggaagaaacaguau

SEQ ID NO: 101438 - RNA, 17 nt, Human adenovirus A
cuaggugggauuauaaa

SEQ ID NO: 101439 - RNA, 11 nt, Human adenovirus A
cuaccacugua

SEQ ID NO: 101440 - RNA, 16 nt, Human adenovirus A
cuacccaccaucuuca

SEQ ID NO: 101441 - RNA, 21 nt, Human adenovirus A
cuauauuaacuuuauauugca

SEQ ID NO: 101442 - RNA, 14 nt, Human adenovirus A
cuaucacuugcaac

SEQ ID NO: 101443 - RNA, 17 nt, Human adenovirus A
cuauuguuaacacugcc

SEQ ID NO: 101444 - RNA, 20 nt, Human adenovirus A
cuaguucuugucaacuacau

SEQ ID NO: 101445 - RNA, 22 nt, Human adenovirus A
cuaguucuugucaacuacauaa

SEQ ID NO: 101446 - RNA, 15 nt, Human adenovirus A
cucaagacuauucua

SEQ ID NO: 101447 - RNA, 11 nt, Human adenovirus A
cucauaucacu

SEQ ID NO: 101448 - RNA, 10 nt, Human adenovirus A
cucaguguca

SEQ ID NO: 101449 - RNA, 21 nt, Human adenovirus A
cucaguuguugcguaauuugc

SEQ ID NO: 101450 - RNA, 15 nt, Human adenovirus A
cuaaauggaagacau

SEQ ID NO: 101451 - RNA, 13 nt, Human adenovirus A
cgugucacagcau

SEQ ID NO: 101452 - RNA, 17 nt, Human adenovirus A
cggggugauaugcauuu

SEQ ID NO: 101453 - RNA, 15 nt, Human adenovirus A
cgaaugcugugacac

SEQ ID NO: 101454 - RNA, 13 nt, Human adenovirus A
cgacaaaugauga

SEQ ID NO: 101455 - RNA, 16 nt, Human adenovirus A
cgacaaaccuuuacug

SEQ ID NO: 101456 - RNA, 14 nt, Human adenovirus A
cgcuuuacgcuggc

SEQ ID NO: 101457 - RNA, 21 nt, Human adenovirus A
cggaacgccaacgcugcaaac

SEQ ID NO: 101458 - RNA, 13 nt, Human adenovirus A
cggauuacaugaa

SEQ ID NO: 101459 - RNA, 22 nt, Human adenovirus A
cggcaacagcagcaacaaggaa

SEQ ID NO: 101460 - RNA, 22 nt, Human adenovirus A
cgggcgagggauucguuuccau

SEQ ID NO: 101461 - RNA, 15 nt, Human adenovirus A
gcaguauggcagcug

SEQ ID NO: 101462 - RNA, 19 nt, Human adenovirus A
gcaguagggguugauguga

SEQ ID NO: 101463 - RNA, 10 nt, Human adenovirus A
gcagugaaaa

SEQ ID NO: 101464 - RNA, 22 nt, Human adenovirus A
gcagggucuacuguugaugcag

SEQ ID NO: 101465 - RNA, 16 nt, Human adenovirus A
gcagggauauguuucu

SEQ ID NO: 101466 - RNA, 12 nt, Human adenovirus A
gcaggaugaauu

SEQ ID NO: 101467 - RNA, 23 nt, Human adenovirus A
gcagcuuccgcggccgcuucuac

SEQ ID NO: 101468 - RNA, 18 nt, Human adenovirus A
gcauacccauuccaggau

SEQ ID NO: 101469 - RNA, 22 nt, Human adenovirus A
gcaguggucuuacaugcacauc

SEQ ID NO: 101470 - RNA, 12 nt, Human adenovirus A
gcauaacaguca

SEQ ID NO: 101471 - RNA, 21 nt, Human adenovirus A
gcauuccccauccaaaaccag

SEQ ID NO: 101472 - RNA, 18 nt, Human adenovirus A
gcauuaauaauaaaacca

SEQ ID NO: 101473 - RNA, 20 nt, Human adenovirus A
gcauuaauaauaaaaccauu

SEQ ID NO: 101474 - RNA, 14 nt, Human adenovirus A
gccaacauccagug

SEQ ID NO: 101475 - RNA, 15 nt, Human adenovirus A
gccaacauccagugc

SEQ ID NO: 101476 - RNA, 19 nt, Human adenovirus A
gccacaggucgaccgucca

SEQ ID NO: 101477 - RNA, 13 nt, Human adenovirus A
gccacggacaccu

SEQ ID NO: 101478 - RNA, 17 nt, Human adenovirus A
gccacuuaaaaauuuca

SEQ ID NO: 101479 - RNA, 19 nt, Human adenovirus A
gccauacugcgagccguag

SEQ ID NO: 101480 - RNA, 12 nt, Human adenovirus A
gcaacagccaag

SEQ ID NO: 101481 - RNA, 19 nt, Human adenovirus A
gcaacagcagcaacaagga

SEQ ID NO: 101482 - RNA, 22 nt, Human adenovirus A
gcaaacagcaaacuuucuccaa

SEQ ID NO: 101483 - RNA, 23 nt, Human adenovirus A
gcaaacagcaaacuuucuccaaa

SEQ ID NO: 101484 - RNA, 18 nt, Human adenovirus A
gauuauaaucuccaaaua

SEQ ID NO: 101485 - RNA, 22 nt, Human adenovirus A
gauucaagaggaagaaagagaa

SEQ ID NO: 101486 - RNA, 14 nt, Human adenovirus A
gauuugauucaaga

SEQ ID NO: 101487 - RNA, 18 nt, Human adenovirus A
gauuuuauccuacaaaaa

SEQ ID NO: 101488 - RNA, 20 nt, Human adenovirus A
gcacaucaccgaggcaguuu

SEQ ID NO: 101489 - RNA, 19 nt, Human adenovirus A
gcaccaaggcguggaacag

SEQ ID NO: 101490 - RNA, 19 nt, Human adenovirus A
gcaacuuuuuaaccacugu

SEQ ID NO: 101491 - RNA, 19 nt, Human adenovirus A
gcacccucccagacugcug

SEQ ID NO: 101492 - RNA, 22 nt, Human adenovirus A
gcacugaaaaaccaacaaacac

SEQ ID NO: 101493 - RNA, 22 nt, Human adenovirus A
gcacugcggggggaauaucuca

SEQ ID NO: 101494 - RNA, 23 nt, Human adenovirus A
gcacugcggggggaauaucucau

SEQ ID NO: 101495 - RNA, 15 nt, Human adenovirus A
gauagcaaagccauc

SEQ ID NO: 101496 - RNA, 15 nt, Human adenovirus A
gaugauugaaccuga

SEQ ID NO: 101497 - RNA, 15 nt, Human adenovirus A
gaugccacuugaauu

SEQ ID NO: 101498 - RNA, 14 nt, Human adenovirus A
gauggaaccccaaa

SEQ ID NO: 101499 - RNA, 15 nt, Human adenovirus A
gauuaagacauaugg

SEQ ID NO: 101500 - RNA, 18 nt, Human adenovirus A
gaucgcuugcaacugcug

SEQ ID NO: 101501 - RNA, 22 nt, Human adenovirus A
gaugaucuucccgaauauccaa

SEQ ID NO: 101502 - RNA, 13 nt, Human adenovirus A
gacuacccggcga

SEQ ID NO: 101503 - RNA, 20 nt, Human adenovirus A
gaccacugucgccaaccuca

SEQ ID NO: 101504 - RNA, 14 nt, Human adenovirus A
gacauagccaauca

SEQ ID NO: 101505 - RNA, 15 nt, Human adenovirus A
gacauagccaaucag

SEQ ID NO: 101506 - RNA, 18 nt, Human adenovirus A
gacauuuagaccacuguc

SEQ ID NO: 101507 - RNA, 19 nt, Human adenovirus A
gacauuuagaccacugucg

SEQ ID NO: 101508 - RNA, 20 nt, Human adenovirus A
gacauuuagaccacugucgc

SEQ ID NO: 101509 - RNA, 23 nt, Human adenovirus A
gagcugacggccauuguucgaga

SEQ ID NO: 101510 - RNA, 22 nt, Human adenovirus A
gagccugaaccuaauagcacuu

SEQ ID NO: 101511 - RNA, 13 nt, Human adenovirus A
gagcgucuguuag

SEQ ID NO: 101512 - RNA, 22 nt, Human adenovirus A
gagcuaugggaucgcuugcaac

SEQ ID NO: 101513 - RNA, 15 nt, Human adenovirus A
gacuuugagcaccug

SEQ ID NO: 101514 - RNA, 17 nt, Human adenovirus A
gacuuuguagcauacaa

SEQ ID NO: 101515 - RNA, 15 nt, Human adenovirus A
cuugcaaacagcaaa

SEQ ID NO: 101516 - RNA, 20 nt, Human adenovirus A
cuuggcaagcauaacaguca

SEQ ID NO: 101517 - RNA, 16 nt, Human adenovirus A
gaaaguguuaaccauu

SEQ ID NO: 101518 - RNA, 23 nt, Human adenovirus A
gaaaguuuaaaggaagcugcugu

SEQ ID NO: 101519 - RNA, 18 nt, Human adenovirus A
gaaauauucaagugcagu

SEQ ID NO: 101520 - RNA, 20 nt, Human adenovirus A
gaacugcggugcgugucaca

SEQ ID NO: 101521 - RNA, 12 nt, Human adenovirus A
gaacagccaaac

SEQ ID NO: 101522 - RNA, 16 nt, Human adenovirus A
gaauguuaaagaguau

SEQ ID NO: 101523 - RNA, 18 nt, Human adenovirus A
gaauugauacacaccuca

SEQ ID NO: 101524 - RNA, 18 nt, Human adenovirus A
gaagaaucaccgaacaga

SEQ ID NO: 101525 - RNA, 20 nt, Human adenovirus A
gaagaagaaccuaacuguca

SEQ ID NO: 101526 - RNA, 15 nt, Human adenovirus A
gaagagcucgacaag

SEQ ID NO: 101527 - RNA, 21 nt, Human adenovirus A
gaagaggacgaacggcagcug

SEQ ID NO: 101528 - RNA, 15 nt, Human adenovirus A
gaaguuuugauugua

SEQ ID NO: 101529 - RNA, 12 nt, Human adenovirus A
gaauaacaagcc

SEQ ID NO: 101530 - RNA, 14 nt, Human adenovirus A
gcccauaacaucag

SEQ ID NO: 101531 - RNA, 17 nt, Human adenovirus A
gcggccgcggaagcugc

SEQ ID NO: 101532 - RNA, 18 nt, Human adenovirus A
gcggccgcggaagcugca

SEQ ID NO: 101533 - RNA, 15 nt, Human adenovirus A
gcggggugauaugca

SEQ ID NO: 101534 - RNA, 19 nt, Human adenovirus A
gcguggcacgcuauaacag

SEQ ID NO: 101535 - RNA, 18 nt, Human adenovirus A
gcuauuguuaacacugcc

SEQ ID NO: 101536 - RNA, 22 nt, Human adenovirus A
gcuacaaagggggaaagggagg

SEQ ID NO: 101537 - RNA, 13 nt, Human adenovirus A
gcugaagcaaacc

SEQ ID NO: 101538 - RNA, 19 nt, Human adenovirus A
gcugaaaucuggacaugca

SEQ ID NO: 101539 - RNA, 20 nt, Human adenovirus A
gcugcaaacaaaaaggacga

SEQ ID NO: 101540 - RNA, 14 nt, Human adenovirus A
gcuugcaacugcug

SEQ ID NO: 101541 - RNA, 15 nt, Human adenovirus A
gcuugcaacugcuga

SEQ ID NO: 101542 - RNA, 19 nt, Human adenovirus A
gcuuccgcggccgcuucua

SEQ ID NO: 101543 - RNA, 13 nt, Human adenovirus A
gcuucuccacgaa

SEQ ID NO: 101544 - RNA, 17 nt, Human adenovirus A
gcugguuuaauauacaa

SEQ ID NO: 101545 - RNA, 21 nt, Human adenovirus A
gcugucacugagcacaucacc

SEQ ID NO: 101546 - RNA, 17 nt, Human adenovirus A
gcuucauugaauuacca

SEQ ID NO: 101547 - RNA, 20 nt, Human adenovirus A
ggacgaacggcagcugccaa

SEQ ID NO: 101548 - RNA, 21 nt, Human adenovirus A
ggaaaucugaaaauacaucau

SEQ ID NO: 101549 - RNA, 22 nt, Human adenovirus A
ggaaggucagauucuucuuccc

SEQ ID NO: 101550 - RNA, 13 nt, Human adenovirus A
ggaaggaggcagu

SEQ ID NO: 101551 - RNA, 19 nt, Human adenovirus A
ggaauaucucauuugcaag

SEQ ID NO: 101552 - RNA, 21 nt, Human adenovirus A
ggaggauauggagugugcuau

SEQ ID NO: 101553 - RNA, 19 nt, Human adenovirus A
ggagccgucaaaauuuucu

SEQ ID NO: 101554 - RNA, 14 nt, Human adenovirus A
ggaguacgucagaa

SEQ ID NO: 101555 - RNA, 21 nt, Human adenovirus A
ggcaguagggguugaugugau

SEQ ID NO: 101556 - RNA, 19 nt, Human adenovirus A
ggcagcugccaagugguau

SEQ ID NO: 101557 - RNA, 12 nt, Human adenovirus A
ggagugugcuau

SEQ ID NO: 101558 - RNA, 21 nt, Human adenovirus A
ggcacccucccagacugcugu

SEQ ID NO: 101559 - RNA, 18 nt, Human adenovirus A
ggccugacgcucuggcag

SEQ ID NO: 101560 - RNA, 16 nt, Human adenovirus A
ggccaugcaaagccag

SEQ ID NO: 101561 - RNA, 23 nt, Human adenovirus A
ggccauuggagccguucccggaa

SEQ ID NO: 101562 - RNA, 16 nt, Human adenovirus A
ggccguauauggcgcc

SEQ ID NO: 101563 - RNA, 12 nt, Human adenovirus A
guacaagcuuga

SEQ ID NO: 101564 - RNA, 20 nt, Human adenovirus A
guaacggggcaauaguugag

SEQ ID NO: 101565 - RNA, 24 nt, Human adenovirus A
guaauuuauggacccacuggcugu

SEQ ID NO: 101566 - RNA, 24 nt, Human adenovirus A
guaauuugcuuucugcccagcugg

SEQ ID NO: 101567 - RNA, 15 nt, Human adenovirus A
guagacauagccaau

SEQ ID NO: 101568 - RNA, 16 nt, Human adenovirus A
guagacauagccaauc

SEQ ID NO: 101569 - RNA, 22 nt, Human adenovirus A
guaccaacuaccgcccugugag

SEQ ID NO: 101570 - RNA, 18 nt, Human adenovirus A
gucacugagcacaucacc

SEQ ID NO: 101571 - RNA, 18 nt, Human adenovirus A
gucagauucuucuuccca

SEQ ID NO: 101572 - RNA, 14 nt, Human adenovirus A
guauuagcacuuaa

SEQ ID NO: 101573 - RNA, 19 nt, Human adenovirus A
gucacaacaagaugaguaa

SEQ ID NO: 101574 - RNA, 15 nt, Human adenovirus A
guagccugcuuucag

SEQ ID NO: 101575 - RNA, 10 nt, Human adenovirus A
ggcuccucac

SEQ ID NO: 101576 - RNA, 22 nt, Human adenovirus A
ggcuaguucuugucaacuacau

SEQ ID NO: 101577 - RNA, 17 nt, Human adenovirus A
gguauugauuuucccau

SEQ ID NO: 101578 - RNA, 13 nt, Human adenovirus A
ggugauaugcauu

SEQ ID NO: 101579 - RNA, 15 nt, Human adenovirus A
guaaagaaacugugu

SEQ ID NO: 101580 - RNA, 15 nt, Human adenovirus A
gucauccgcauuuaa

SEQ ID NO: 101581 - RNA, 18 nt, Human adenovirus A
gucaugagcgguggcuua

SEQ ID NO: 101582 - RNA, 16 nt, Human adenovirus A
gucauuuacugcagcc

SEQ ID NO: 101583 - RNA, 16 nt, Human adenovirus A
guccuuguacaguuug

SEQ ID NO: 101584 - RNA, 21 nt, Human adenovirus A
gucgaaauauucaagugcagu

SEQ ID NO: 101585 - RNA, 15 nt, Human adenovirus A
gucgcaccacuguag

SEQ ID NO: 101586 - RNA, 23 nt, Human adenovirus A
gucuaauggagcggcugacagag

SEQ ID NO: 101587 - RNA, 16 nt, Human adenovirus A
gucugacuuuacauaa

SEQ ID NO: 101588 - RNA, 19 nt, Human adenovirus A
gugcacuuuuccaaugcgc

SEQ ID NO: 101589 - RNA, 21 nt, Human adenovirus A
gugcugaauuuaaucaucugu

SEQ ID NO: 101590 - RNA, 23 nt, Human adenovirus A
gucuguuaggggaacuggccaag

SEQ ID NO: 101591 - RNA, 16 nt, Human adenovirus A
gugagacuuaccauuu

SEQ ID NO: 101592 - RNA, 20 nt, Human adenovirus A
gugagacuuaccauuuggcu

SEQ ID NO: 101593 - RNA, 18 nt, Human adenovirus A
ucaacauuaaccuaugca

SEQ ID NO: 101594 - RNA, 14 nt, Human adenovirus A
ucaacccaaacugu

SEQ ID NO: 101595 - RNA, 19 nt, Human adenovirus A
ucaagauggccacucccuc

SEQ ID NO: 101596 - RNA, 23 nt, Human adenovirus A
ucaagcggcauuccccauccaaa

SEQ ID NO: 101597 - RNA, 21 nt, Human adenovirus A
ucaagcuuguacuccaaugag

SEQ ID NO: 101598 - RNA, 20 nt, Human adenovirus A
ucaaaaaaauaaagaguuaa

SEQ ID NO: 101599 - RNA, 21 nt, Human adenovirus A
uauuuugaaaaaauacaugag

SEQ ID NO: 101600 - RNA, 23 nt, Human adenovirus A
ucaaaauuuucuccccacagcug

SEQ ID NO: 101601 - RNA, 21 nt, Human adenovirus A
ucaaaagcuacguugaguacu

SEQ ID NO: 101602 - RNA, 16 nt, Human adenovirus A
ucaaaccugacagacu

SEQ ID NO: 101603 - RNA, 19 nt, Human adenovirus A
ucaaaccugacagacuugc

SEQ ID NO: 101604 - RNA, 14 nt, Human adenovirus A
uauucaagugcagu

SEQ ID NO: 101605 - RNA, 13 nt, Human adenovirus A
uauucauugucau

SEQ ID NO: 101606 - RNA, 15 nt, Human adenovirus A
uauuaaugcauugug

SEQ ID NO: 101607 - RNA, 18 nt, Human adenovirus A
uauuacauggucaugagc

SEQ ID NO: 101608 - RNA, 22 nt, Human adenovirus A
uauuacauggucaugagcggug

SEQ ID NO: 101609 - RNA, 23 nt, Human adenovirus A
uauugguagacacugauuggccu

SEQ ID NO: 101610 - RNA, 22 nt, Human adenovirus A
uauugcgugaaguauuccauga

SEQ ID NO: 101611 - RNA, 23 nt, Human adenovirus A
uauugacaaacgcccugcuccga

SEQ ID NO: 101612 - RNA, 22 nt, Human adenovirus A
uaucaauguuauccacauugcu

SEQ ID NO: 101613 - RNA, 15 nt, Human adenovirus A
uauacaacgcuuugc

SEQ ID NO: 101614 - RNA, 16 nt, Human adenovirus A
uauuaaagugucccaa

SEQ ID NO: 101615 - RNA, 22 nt, Human adenovirus A
uauuaaagugucccaacaagca

SEQ ID NO: 101616 - RNA, 18 nt, Human adenovirus A
uaugcagacuaaauggaa

SEQ ID NO: 101617 - RNA, 20 nt, Human adenovirus A
uaugaaucuuuaccaggcaa

SEQ ID NO: 101618 - RNA, 15 nt, Human adenovirus A
uaugagauguuuauu

SEQ ID NO: 101619 - RNA, 14 nt, Human adenovirus A
uacugaugaucuuc

SEQ ID NO: 101620 - RNA, 11 nt, Human adenovirus A
uagcauacaau

SEQ ID NO: 101621 - RNA, 18 nt, Human adenovirus A
uacucaauuauuacaugg

SEQ ID NO: 101622 - RNA, 22 nt, Human adenovirus A
uacucaauuauuacauggucau

SEQ ID NO: 101623 - RNA, 12 nt, Human adenovirus A
uagcccaugcau

SEQ ID NO: 101624 - RNA, 18 nt, Human adenovirus A
uagccucacuggcauuug

SEQ ID NO: 101625 - RNA, 23 nt, Human adenovirus A
uaguuggaauaaguauacugaug

SEQ ID NO: 101626 - RNA, 13 nt, Human adenovirus A
uaguucuugucaa

SEQ ID NO: 101627 - RNA, 22 nt, Human adenovirus A
uauaaauguugaaguuacucaa

SEQ ID NO: 101628 - RNA, 14 nt, Human adenovirus A
uaauagcacuuugg

SEQ ID NO: 101629 - RNA, 12 nt, Human adenovirus A
uaauccagucau

SEQ ID NO: 101630 - RNA, 20 nt, Human adenovirus A
uaaugagccugaaccuaaua

SEQ ID NO: 101631 - RNA, 20 nt, Human adenovirus A
uacaaaccgugcaucagugu

SEQ ID NO: 101632 - RNA, 18 nt, Human adenovirus A
uacaaagggggaaaggga

SEQ ID NO: 101633 - RNA, 17 nt, Human adenovirus A
uacaacaaaacaggccg

SEQ ID NO: 101634 - RNA, 23 nt, Human adenovirus A
uaccgccugaagaagaaccuaac

SEQ ID NO: 101635 - RNA, 17 nt, Human adenovirus A
uacccuucgcuaugaau

SEQ ID NO: 101636 - RNA, 18 nt, Human adenovirus A
uaccauggacagcuccag

SEQ ID NO: 101637 - RNA, 21 nt, Human adenovirus A
uacccgccugugcgaagucaa

SEQ ID NO: 101638 - RNA, 14 nt, Human adenovirus A
uacgcccugauuuc

SEQ ID NO: 101639 - RNA, 21 nt, Human adenovirus A
uacaccugcuccagaaacugu

SEQ ID NO: 101640 - RNA, 22 nt, Human adenovirus A
uacagaggaaauuguguacuuu

SEQ ID NO: 101641 - RNA, 16 nt, Human adenovirus A
uacaccacguaaucaa

SEQ ID NO: 101642 - RNA, 12 nt, Human adenovirus A
uacauuuuagca

SEQ ID NO: 101643 - RNA, 14 nt, Human adenovirus A
uaccaaugaauuaa

SEQ ID NO: 101644 - RNA, 14 nt, Human adenovirus A
uaccagaaugauca

SEQ ID NO: 101645 - RNA, 10 nt, Human adenovirus A
uaaaauugcu

SEQ ID NO: 101646 - RNA, 14 nt, Human adenovirus A
uaaagaguauccau

SEQ ID NO: 101647 - RNA, 23 nt, Human adenovirus A
uaaacuacacaaagaaaacauca

SEQ ID NO: 101648 - RNA, 16 nt, Human adenovirus A
uaaacuaucacuugca

SEQ ID NO: 101649 - RNA, 22 nt, Human adenovirus A
gugggauuauaaaaggcuggaa

SEQ ID NO: 101650 - RNA, 21 nt, Human adenovirus A
uaacccuacucacgagaaagu

SEQ ID NO: 101651 - RNA, 16 nt, Human adenovirus A
uaagaggcauuccuuc

SEQ ID NO: 101652 - RNA, 14 nt, Human adenovirus A
uaagaacauacaac

SEQ ID NO: 101653 - RNA, 18 nt, Human adenovirus A
uaagaauuuauacaauuc

SEQ ID NO: 101654 - RNA, 17 nt, Human adenovirus A
uuuagccucacuggcau

SEQ ID NO: 101655 - RNA, 24 nt, Human adenovirus A
uuuaagcaacauuaaaaucaaccu

SEQ ID NO: 101656 - RNA, 15 nt, Human adenovirus A
uuuccacacaucuca

SEQ ID NO: 101657 - RNA, 13 nt, Human adenovirus A
uuucagcuucuac

SEQ ID NO: 101658 - RNA, 15 nt, Human adenovirus A
uuuaaacuacacaaa

SEQ ID NO: 101659 - RNA, 22 nt, Human adenovirus A
uuugacuuccagguuaccauau

SEQ ID NO: 101660 - RNA, 15 nt, Human adenovirus A
uuugcaggugccaca

SEQ ID NO: 101661 - RNA, 20 nt, Human adenovirus A
uuugccugguaaaacaagcu

SEQ ID NO: 101662 - RNA, 14 nt, Human adenovirus A
uuucccucuuccca

SEQ ID NO: 101663 - RNA, 20 nt, Human adenovirus A
uuucccacuuuauaugcuau

SEQ ID NO: 101664 - RNA, 16 nt, Human adenovirus A
uuucuuaagcagugaa

SEQ ID NO: 101665 - RNA, 15 nt, Human adenovirus A
uuuucuuuauguuaa

SEQ ID NO: 101666 - RNA, 19 nt, Human adenovirus A
aacagaggcuccucacuga

SEQ ID NO: 101667 - RNA, 17 nt, Human adenovirus A
aaccuagaccauuggua

SEQ ID NO: 101668 - RNA, 14 nt, Human adenovirus A
aaccuaugcaacua

SEQ ID NO: 101669 - RNA, 16 nt, Human adenovirus A
aacuaucacuugcaac

SEQ ID NO: 101670 - RNA, 23 nt, Human adenovirus A
aacuacacaaagaaaacaucacu

SEQ ID NO: 101671 - RNA, 17 nt, Human adenovirus A
aagaaaaaccaccaggu

SEQ ID NO: 101672 - RNA, 14 nt, Human adenovirus A
aagaaaaugaugac

SEQ ID NO: 101673 - RNA, 15 nt, Human adenovirus A
aagaaaaugaugacu

SEQ ID NO: 101674 - RNA, 12 nt, Human adenovirus A
aagaaacugugu

SEQ ID NO: 101675 - RNA, 18 nt, Human adenovirus A
aagaaaucuuuuaccaau

SEQ ID NO: 101676 - RNA, 21 nt, Human adenovirus A
aagaaaucuuuuaccaaugaa

SEQ ID NO: 101677 - RNA, 18 nt, Human adenovirus A
aacagcaaacuuucucca

SEQ ID NO: 101678 - RNA, 17 nt, Human adenovirus A
uuuugcuaaauuggccu

SEQ ID NO: 101679 - RNA, 17 nt, Human adenovirus A
aaccauuguaaaugcuu

SEQ ID NO: 101680 - RNA, 22 nt, Human adenovirus A
aacccucccucuuggccagcug

SEQ ID NO: 101681 - RNA, 18 nt, Human adenovirus A
aacccuggaccacaugcc

SEQ ID NO: 101682 - RNA, 14 nt, Human adenovirus A
aacccuuacacuca

SEQ ID NO: 101683 - RNA, 15 nt, Human adenovirus A
aacccuuacacucaa

SEQ ID NO: 101684 - RNA, 18 nt, Human adenovirus A
aaccgaccugcaacagcc

SEQ ID NO: 101685 - RNA, 17 nt, Human adenovirus A
aaguagguccauagugg

SEQ ID NO: 101686 - RNA, 22 nt, Human adenovirus A
aaguacgugagacuuaccauuu

SEQ ID NO: 101687 - RNA, 21 nt, Human adenovirus A
aaguucaccggugaagaugau

SEQ ID NO: 101688 - RNA, 14 nt, Human adenovirus A
aaguauacugauga

SEQ ID NO: 101689 - RNA, 13 nt, Human adenovirus A
aaguauuaccugc

SEQ ID NO: 101690 - RNA, 19 nt, Human adenovirus A
aaguauuaccugcaccucc

SEQ ID NO: 101691 - RNA, 20 nt, Human adenovirus A
aaguauuaccugcaccucca

SEQ ID NO: 101692 - RNA, 13 nt, Human adenovirus A
aaguauuccauga

SEQ ID NO: 101693 - RNA, 22 nt, Human adenovirus A
aaguauuccaugagcccgggga

SEQ ID NO: 101694 - RNA, 16 nt, Human adenovirus A
aagcuacguugaguac

SEQ ID NO: 101695 - RNA, 20 nt, Human adenovirus A
aagcuacguugaguacuucg

SEQ ID NO: 101696 - RNA, 17 nt, Human adenovirus A
aagcgcagcagaaccca

SEQ ID NO: 101697 - RNA, 19 nt, Human adenovirus A
aauacuauauuaacuuuau

SEQ ID NO: 101698 - RNA, 14 nt, Human adenovirus A
aaguugacuggcau

SEQ ID NO: 101699 - RNA, 15 nt, Human adenovirus A
aaguuuugauuguau

SEQ ID NO: 101700 - RNA, 15 nt, Human adenovirus A
aauguguuccaguau

SEQ ID NO: 101701 - RNA, 21 nt, Human adenovirus A
aauguugaugaauuugcaggu

SEQ ID NO: 101702 - RNA, 12 nt, Human adenovirus A
aauguuuguaca

SEQ ID NO: 101703 - RNA, 18 nt, Human adenovirus A
aauuaacaaaagguguuu

SEQ ID NO: 101704 - RNA, 17 nt, Human adenovirus A
aauuauuacauggucau

SEQ ID NO: 101705 - RNA, 16 nt, Human adenovirus A
aauuacuaaaacagua

SEQ ID NO: 101706 - RNA, 17 nt, Human adenovirus A
aauuaauggacuuugag

SEQ ID NO: 101707 - RNA, 22 nt, Human adenovirus A
aauuaauggacuuugagcaccu

SEQ ID NO: 101708 - RNA, 14 nt, Human adenovirus A
aauugcguacuuau

SEQ ID NO: 101709 - RNA, 23 nt, Human adenovirus A
aauugcuaauggaagaccuuuag

SEQ ID NO: 101710 - RNA, 23 nt, Human adenovirus A
aauugagaugguguuaugaaucu

SEQ ID NO: 101711 - RNA, 19 nt, Human adenovirus A
aauucuggaauaacaagcc

SEQ ID NO: 101712 - RNA, 15 nt, Human adenovirus A
aauucuuuauggccu

SEQ ID NO: 101713 - RNA, 21 nt, Human adenovirus A
aauguaagaaaaggagcagga

SEQ ID NO: 101714 - RNA, 16 nt, Human adenovirus A
aaugcgccugcuuaaa

SEQ ID NO: 101715 - RNA, 18 nt, Human adenovirus A
aauggaacccuuacacuc

SEQ ID NO: 101716 - RNA, 19 nt, Human adenovirus A
aauggaguuguagacauag

SEQ ID NO: 101717 - RNA, 23 nt, Human adenovirus A
aauggaguuguagacauagccaa

SEQ ID NO: 101718 - RNA, 13 nt, Human adenovirus A
aauggacuuugag

SEQ ID NO: 101719 - RNA, 14 nt, Human adenovirus A
aaucuuaaauggaa

SEQ ID NO: 101720 - RNA, 20 nt, Human adenovirus A
aaucuuaaauggaaggucag

SEQ ID NO: 101721 - RNA, 12 nt, Human adenovirus A
aaugcauugugu

SEQ ID NO: 101722 - RNA, 17 nt, Human adenovirus A
aaucugaaaauacauca

SEQ ID NO: 101723 - RNA, 14 nt, Human adenovirus A
uuccgcggccgcuu

SEQ ID NO: 101724 - RNA, 14 nt, Human adenovirus A
uucccaucugcuuu

SEQ ID NO: 101725 - RNA, 17 nt, Human adenovirus A
uuccagggugaaugggg

SEQ ID NO: 101726 - RNA, 20 nt, Human adenovirus A
uucccacgccuuacaugugg

SEQ ID NO: 101727 - RNA, 12 nt, Human adenovirus A
uuccacacaucu

SEQ ID NO: 101728 - RNA, 17 nt, Human adenovirus A
uuccacgauuaagacau

SEQ ID NO: 101729 - RNA, 17 nt, Human adenovirus A
uuccaguauuuuguaaa

SEQ ID NO: 101730 - RNA, 13 nt, Human adenovirus A
uucugcugucauu

SEQ ID NO: 101731 - RNA, 14 nt, Human adenovirus A
uucuggaauaacaa

SEQ ID NO: 101732 - RNA, 20 nt, Human adenovirus A
uucgaagccaagugauugua

SEQ ID NO: 101733 - RNA, 21 nt, Human adenovirus A
uuccucaaccuuuugcgauag

SEQ ID NO: 101734 - RNA, 19 nt, Human adenovirus A
uuaccggaaaucugaaaau

SEQ ID NO: 101735 - RNA, 17 nt, Human adenovirus A
uuaggcaccccaguaag

SEQ ID NO: 101736 - RNA, 13 nt, Human adenovirus A
uuagcccaugcau

SEQ ID NO: 101737 - RNA, 13 nt, Human adenovirus A
uuagaguuucaag

SEQ ID NO: 101738 - RNA, 16 nt, Human adenovirus A
uuagauuguuauacua

SEQ ID NO: 101739 - RNA, 19 nt, Human adenovirus A
uuaugccucuaccuuguau

SEQ ID NO: 101740 - RNA, 13 nt, Human adenovirus A
uuauggaauuaug

SEQ ID NO: 101741 - RNA, 23 nt, Human adenovirus A
uuaaguauuaccugcaccuccag

SEQ ID NO: 101742 - RNA, 17 nt, Human adenovirus A
uuaagguacauuggcau

SEQ ID NO: 101743 - RNA, 16 nt, Human adenovirus A
uuaauaauaaaaccau

SEQ ID NO: 101744 - RNA, 11 nt, Human adenovirus A
uuaaauggaag

SEQ ID NO: 101745 - RNA, 14 nt, Human adenovirus A
uuaagcagugaaaa

SEQ ID NO: 101746 - RNA, 18 nt, Human adenovirus A
ugucagaauaacaguuga

SEQ ID NO: 101747 - RNA, 23 nt, Human adenovirus A
uggcucccacccaugauguuacc

SEQ ID NO: 101748 - RNA, 18 nt, Human adenovirus A
uggcuuauucauugucau

SEQ ID NO: 101749 - RNA, 14 nt, Human adenovirus A
ugggaucgcuugca

SEQ ID NO: 101750 - RNA, 14 nt, Human adenovirus A
uggaguacaagcuu

SEQ ID NO: 101751 - RNA, 17 nt, Human adenovirus A
uggaguuguagacauag

SEQ ID NO: 101752 - RNA, 16 nt, Human adenovirus A
uggauagcaaagccau

SEQ ID NO: 101753 - RNA, 17 nt, Human adenovirus A
uggcaggaguugcagga

SEQ ID NO: 101754 - RNA, 13 nt, Human adenovirus A
uggccaagcaaaa

SEQ ID NO: 101755 - RNA, 14 nt, Human adenovirus A
uggccaagcaaaac

SEQ ID NO: 101756 - RNA, 13 nt, Human adenovirus A
uggccacucccuc

SEQ ID NO: 101757 - RNA, 22 nt, Human adenovirus A
uggccacucccucgaugaugcc

SEQ ID NO: 101758 - RNA, 15 nt, Human adenovirus A
uggguuuauggaauu

SEQ ID NO: 101759 - RNA, 13 nt, Human adenovirus A
uggguaauguaag

SEQ ID NO: 101760 - RNA, 20 nt, Human adenovirus A
uggguaauguaagaaaagga

SEQ ID NO: 101761 - RNA, 12 nt, Human adenovirus A
ugggaugcaucc

SEQ ID NO: 101762 - RNA, 16 nt, Human adenovirus A
uguauaauaaaacugg

SEQ ID NO: 101763 - RNA, 15 nt, Human adenovirus A
uguauacgccuccua

SEQ ID NO: 101764 - RNA, 13 nt, Human adenovirus A
uguacuuggugga

SEQ ID NO: 101765 - RNA, 17 nt, Human adenovirus A
uguaacugaaaauggaa

SEQ ID NO: 101766 - RNA, 11 nt, Human adenovirus A
uguagacauag

SEQ ID NO: 101767 - RNA, 14 nt, Human adenovirus A
uguaaaugcuuugu

SEQ ID NO: 101768 - RNA, 21 nt, Human adenovirus A
ugcgcuagcggccacuaaaga

SEQ ID NO: 101769 - RNA, 18 nt, Human adenovirus A
ugcuauuguuaacacugc

SEQ ID NO: 101770 - RNA, 23 nt, Human adenovirus A
uggaacagccaaaccggccagau

SEQ ID NO: 101771 - RNA, 20 nt, Human adenovirus A
uggaacaacaggugcaagaa

SEQ ID NO: 101772 - RNA, 22 nt, Human adenovirus A
uggacuuugagcaccugggcaa

SEQ ID NO: 101773 - RNA, 16 nt, Human adenovirus A
uggaacgagaucggca

SEQ ID NO: 101774 - RNA, 15 nt, Human adenovirus A
ugccgcccgcaugua

SEQ ID NO: 101775 - RNA, 21 nt, Human adenovirus A
ugcauuuacaguacaaauaca

SEQ ID NO: 101776 - RNA, 17 nt, Human adenovirus A
ugcauccuguguggaua

SEQ ID NO: 101777 - RNA, 21 nt, Human adenovirus A
ugccgucucguacuaacccua

SEQ ID NO: 101778 - RNA, 21 nt, Human adenovirus A
ugccuaugugauaacccugaa

SEQ ID NO: 101779 - RNA, 22 nt, Human adenovirus A
ugccuguugaucugucagugaa

SEQ ID NO: 101780 - RNA, 17 nt, Human adenovirus A
ugacuguuuuaugcaga

SEQ ID NO: 101781 - RNA, 14 nt, Human adenovirus A
ugcaggcuaacuua

SEQ ID NO: 101782 - RNA, 15 nt, Human adenovirus A
ugcagccugucuuaa

SEQ ID NO: 101783 - RNA, 16 nt, Human adenovirus A
uacccuucgcuaugaa

SEQ ID NO: 101784 - RNA, 15 nt, Human adenovirus A
uaccagaaugaucac

SEQ ID NO: 101785 - RNA, 22 nt, Human adenovirus A
uacacuuuaauaaaaacacugu

SEQ ID NO: 101786 - RNA, 14 nt, Human adenovirus A
uacagaauuacuaa

SEQ ID NO: 101787 - RNA, 16 nt, Human adenovirus A
uacagaauuacuaaaa

SEQ ID NO: 101788 - RNA, 20 nt, Human adenovirus A
uacauuggcauuaggccauc

SEQ ID NO: 101789 - RNA, 21 nt, Human adenovirus A
uaccaacuaccgcccugugag

SEQ ID NO: 101790 - RNA, 20 nt, Human adenovirus A
uaccacucgaguguacuugg

SEQ ID NO: 101791 - RNA, 17 nt, Human adenovirus A
uacuaaaacaguaacca

SEQ ID NO: 101792 - RNA, 22 nt, Human adenovirus A
uacuaaagaaacaaacuacaua

SEQ ID NO: 101793 - RNA, 14 nt, Human adenovirus A
uaccgcugcucagc

SEQ ID NO: 101794 - RNA, 17 nt, Human adenovirus A
uaccggaaaucugaaaa

SEQ ID NO: 101795 - RNA, 13 nt, Human adenovirus A
uaccgucaucucu

SEQ ID NO: 101796 - RNA, 19 nt, Human adenovirus A
aacaagcaggagaacaaga

SEQ ID NO: 101797 - RNA, 16 nt, Human adenovirus A
aacaagucuucugaca

SEQ ID NO: 101798 - RNA, 14 nt, Human adenovirus A
uaauggacuuugag

SEQ ID NO: 101799 - RNA, 22 nt, Human adenovirus A
uacaaaccgugcaucaguguaa

SEQ ID NO: 101800 - RNA, 12 nt, Human adenovirus A
uacacaccucau

SEQ ID NO: 101801 - RNA, 23 nt, Human adenovirus A
uacacccccuuuuacuucuucca

SEQ ID NO: 101802 - RNA, 20 nt, Human adenovirus A
uaaccauuguaaaugcuuug

SEQ ID NO: 101803 - RNA, 19 nt, Human adenovirus A
uaauagucugacuuuacau

SEQ ID NO: 101804 - RNA, 12 nt, Human adenovirus A
uacuucuuccaa

SEQ ID NO: 101805 - RNA, 13 nt, Human adenovirus A
uacuucuuccaau

SEQ ID NO: 101806 - RNA, 23 nt, Human adenovirus A
uagaccacugucgccaaccucac

SEQ ID NO: 101807 - RNA, 17 nt, Human adenovirus A
uagauguaucucccugu

SEQ ID NO: 101808 - RNA, 12 nt, Human adenovirus A
uagcaaagccau

SEQ ID NO: 101809 - RNA, 21 nt, Human adenovirus A
uagcauggcuugguuuagccc

SEQ ID NO: 101810 - RNA, 13 nt, Human adenovirus A
uagccaacaucca

SEQ ID NO: 101811 - RNA, 19 nt, Human adenovirus A
uagcccaugcauccugugu

SEQ ID NO: 101812 - RNA, 21 nt, Human adenovirus A
uaguaaaagauguagcuuuuu

SEQ ID NO: 101813 - RNA, 17 nt, Human adenovirus A
uaguauagguauugaua

SEQ ID NO: 101814 - RNA, 17 nt, Human adenovirus A
uaguucuugucaacuac

SEQ ID NO: 101815 - RNA, 14 nt, Human adenovirus A
uagguccauagugg

SEQ ID NO: 101816 - RNA, 21 nt, Human adenovirus A
uagcucauuggaguacaagcu

SEQ ID NO: 101817 - RNA, 22 nt, Human adenovirus A
uagcucauuggaguacaagcuu

SEQ ID NO: 101818 - RNA, 20 nt, Human adenovirus A
uagcugaaaacaacugcacu

SEQ ID NO: 101819 - RNA, 14 nt, Human adenovirus A
guuguagacauagc

SEQ ID NO: 101820 - RNA, 21 nt, Human adenovirus A
guuuaagaaaucuuuuaccaa

SEQ ID NO: 101821 - RNA, 17 nt, Human adenovirus A
guuuuaugcagacuaaa

SEQ ID NO: 101822 - RNA, 21 nt, Human adenovirus A
guuugaguacgaaagucuguu

SEQ ID NO: 101823 - RNA, 22 nt, Human adenovirus A
guuuggaaacuguauauuggca

SEQ ID NO: 101824 - RNA, 19 nt, Human adenovirus A
uaaaauuucccucuuccca

SEQ ID NO: 101825 - RNA, 20 nt, Human adenovirus A
uaaaauuucccucuucccaa

SEQ ID NO: 101826 - RNA, 15 nt, Human adenovirus A
uaaaaugguuuuauu

SEQ ID NO: 101827 - RNA, 22 nt, Human adenovirus A
uaaacaucaugauuugaagaua

SEQ ID NO: 101828 - RNA, 21 nt, Human adenovirus A
guacagaaaaaaauugccaac

SEQ ID NO: 101829 - RNA, 16 nt, Human adenovirus A
gucuauauccccacga

SEQ ID NO: 101830 - RNA, 16 nt, Human adenovirus A
gucuagccaacaucca

SEQ ID NO: 101831 - RNA, 18 nt, Human adenovirus A
gucggggcuacugcucau

SEQ ID NO: 101832 - RNA, 15 nt, Human adenovirus A
gugguaacaugucca

SEQ ID NO: 101833 - RNA, 20 nt, Human adenovirus A
gugggaugcauccgagguga

SEQ ID NO: 101834 - RNA, 19 nt, Human adenovirus A
guggcuuauucauugucau

SEQ ID NO: 101835 - RNA, 23 nt, Human adenovirus A
guggcuccgcuucuccacgaaga

SEQ ID NO: 101836 - RNA, 21 nt, Human adenovirus A
uauaaaauuucccucuuccca

SEQ ID NO: 101837 - RNA, 18 nt, Human adenovirus A
uauaaaguuuaaacuaca

SEQ ID NO: 101838 - RNA, 18 nt, Human adenovirus A
uauucggugccuauguga

SEQ ID NO: 101839 - RNA, 12 nt, Human adenovirus A
uauuuugagauu

SEQ ID NO: 101840 - RNA, 22 nt, Human adenovirus A
uauuugaguccauuuugcauuu

SEQ ID NO: 101841 - RNA, 19 nt, Human adenovirus A
ucagcagagucgaggucaa

SEQ ID NO: 101842 - RNA, 22 nt, Human adenovirus A
ucacgagaaaguguuaaccauu

SEQ ID NO: 101843 - RNA, 11 nt, Human adenovirus A
ucaagugcagu

SEQ ID NO: 101844 - RNA, 19 nt, Human adenovirus A
uccacggugcacuuuucca

SEQ ID NO: 101845 - RNA, 21 nt, Human adenovirus A
uccaugauuuuauccuacaaa

SEQ ID NO: 101846 - RNA, 12 nt, Human adenovirus A
uccagaaggagu

SEQ ID NO: 101847 - RNA, 13 nt, Human adenovirus A
uccauuuugguuu

SEQ ID NO: 101848 - RNA, 21 nt, Human adenovirus A
uccauuuagcgacguaaugcc

SEQ ID NO: 101849 - RNA, 16 nt, Human adenovirus A
uccccgggcucaugga

SEQ ID NO: 101850 - RNA, 20 nt, Human adenovirus A
uccgcauuuaagcaacauua

SEQ ID NO: 101851 - RNA, 20 nt, Human adenovirus A
ucagugucauuuacugcagc

SEQ ID NO: 101852 - RNA, 17 nt, Human adenovirus A
ucaugagcgguggcuua

SEQ ID NO: 101853 - RNA, 20 nt, Human adenovirus A
uccaaaaccagguccaugau

SEQ ID NO: 101854 - RNA, 18 nt, Human adenovirus A
uccaaaucuuaaauggaa

SEQ ID NO: 101855 - RNA, 16 nt, Human adenovirus A
ucauugaauuaccaga

SEQ ID NO: 101856 - RNA, 15 nt, Human adenovirus A
ucauuguuauagguu

SEQ ID NO: 101857 - RNA, 19 nt, Human adenovirus A
ucauggcgggcucaccaaa

SEQ ID NO: 101858 - RNA, 13 nt, Human adenovirus A
ucaugugcuauug

SEQ ID NO: 101859 - RNA, 23 nt, Human adenovirus A
ucauguguagguuuuacagugcu

SEQ ID NO: 101860 - RNA, 19 nt, Human adenovirus A
ugaaucgcagucaccacca

SEQ ID NO: 101861 - RNA, 17 nt, Human adenovirus A
ugaauguguuccaguau

SEQ ID NO: 101862 - RNA, 19 nt, Human adenovirus A
ugaauuugcaggugccaca

SEQ ID NO: 101863 - RNA, 23 nt, Human adenovirus A
ugaauuugcaggugccacagguc

SEQ ID NO: 101864 - RNA, 22 nt, Human adenovirus A
ugaauaaaagcauacuuaccaa

SEQ ID NO: 101865 - RNA, 18 nt, Human adenovirus A
ugaagagcucgacaagga

SEQ ID NO: 101866 - RNA, 20 nt, Human adenovirus A
ugaagauuucugcugucauu

SEQ ID NO: 101867 - RNA, 21 nt, Human adenovirus A
ugacacaucagacguacccuu

SEQ ID NO: 101868 - RNA, 17 nt, Human adenovirus A
ugacccauuugacacau

SEQ ID NO: 101869 - RNA, 17 nt, Human adenovirus A
ucuuuaccuacuuugag

SEQ ID NO: 101870 - RNA, 21 nt, Human adenovirus A
ugaaacagcagggucuacugu

SEQ ID NO: 101871 - RNA, 13 nt, Human adenovirus A
ucuuggguaaugu

SEQ ID NO: 101872 - RNA, 20 nt, Human adenovirus A
ugaagaagaaccuaacuguc

SEQ ID NO: 101873 - RNA, 23 nt, Human adenovirus A
ugaagaagaaccuaacugucauc

SEQ ID NO: 101874 - RNA, 17 nt, Human adenovirus A
ugaaaucagcugccaua

SEQ ID NO: 101875 - RNA, 22 nt, Human adenovirus A
ugaaaugaggcgcgcgguggaa

SEQ ID NO: 101876 - RNA, 15 nt, Human adenovirus A
uccuaaccuggaucc

SEQ ID NO: 101877 - RNA, 16 nt, Human adenovirus A
ucgcuaugaaucuuua

SEQ ID NO: 101878 - RNA, 18 nt, Human adenovirus A
ucgcuugcaacugcugaa

SEQ ID NO: 101879 - RNA, 20 nt, Human adenovirus A
ucguuaaacuaucacuugca

SEQ ID NO: 101880 - RNA, 17 nt, Human adenovirus A
ucuucccaaucccuacc

SEQ ID NO: 101881 - RNA, 20 nt, Human adenovirus A
ccggguucacuacaguguau

SEQ ID NO: 101882 - RNA, 18 nt, Human adenovirus A
ccuauuuuuugggaaccu

SEQ ID NO: 101883 - RNA, 23 nt, Human adenovirus A
ccugaggacuuuguagcauacaa

SEQ ID NO: 101884 - RNA, 13 nt, Human adenovirus A
ccugaguguaaua

SEQ ID NO: 101885 - RNA, 22 nt, Human adenovirus A
ccugauuguagcuacagaauua

SEQ ID NO: 101886 - RNA, 16 nt, Human adenovirus A
ccugaauguuuguaca

SEQ ID NO: 101887 - RNA, 13 nt, Human adenovirus A
ccugaccacauga

SEQ ID NO: 101888 - RNA, 22 nt, Human adenovirus A
ccugaccacaugaauguuaaag

SEQ ID NO: 101889 - RNA, 13 nt, Human adenovirus A
ccucacuggcauu

SEQ ID NO: 101890 - RNA, 20 nt, Human adenovirus A
ccgacaacagcugcugucac

SEQ ID NO: 101891 - RNA, 18 nt, Human adenovirus A
ccgcgcgcggacuuucaa

SEQ ID NO: 101892 - RNA, 19 nt, Human adenovirus A
ccgcgcgcggacuuucaac

SEQ ID NO: 101893 - RNA, 17 nt, Human adenovirus A
ccgcauuuaagcaacau

SEQ ID NO: 101894 - RNA, 20 nt, Human adenovirus A
ccgcauuuaagcaacauuaa

SEQ ID NO: 101895 - RNA, 21 nt, Human adenovirus A
ccgcauuuaagcaacauuaaa

SEQ ID NO: 101896 - RNA, 22 nt, Human adenovirus A
ccgcauuuaagcaacauuaaaa

SEQ ID NO: 101897 - RNA, 15 nt, Human adenovirus A
ccgcggaagcugcag

SEQ ID NO: 101898 - RNA, 14 nt, Human adenovirus A
ccgcugaaacagca

SEQ ID NO: 101899 - RNA, 14 nt, Human adenovirus A
ccuucgcuaugaau

SEQ ID NO: 101900 - RNA, 18 nt, Human adenovirus A
ccugggauacuaccgcug

SEQ ID NO: 101901 - RNA, 16 nt, Human adenovirus A
ccugguaaaacaagcu

SEQ ID NO: 101902 - RNA, 16 nt, Human adenovirus A
ccuuucccccuuugua

SEQ ID NO: 101903 - RNA, 18 nt, Human adenovirus A
cgaacggcagcugccaag

SEQ ID NO: 101904 - RNA, 15 nt, Human adenovirus A
cgacaaggaaccgac

SEQ ID NO: 101905 - RNA, 20 nt, Human adenovirus A
cgaccgcuuaucaugugcua

SEQ ID NO: 101906 - RNA, 21 nt, Human adenovirus A
ccacucagcgacaaaccuuua

SEQ ID NO: 101907 - RNA, 15 nt, Human adenovirus A
ccaucuuugggauga

SEQ ID NO: 101908 - RNA, 15 nt, Human adenovirus A
ccaguuauugacaaa

SEQ ID NO: 101909 - RNA, 21 nt, Human adenovirus A
ccaacgcgugaaucgcaguca

SEQ ID NO: 101910 - RNA, 17 nt, Human adenovirus A
ccaacgcugcaaacaaa

SEQ ID NO: 101911 - RNA, 20 nt, Human adenovirus A
ccaacuaccgcccugugagg

SEQ ID NO: 101912 - RNA, 22 nt, Human adenovirus A
ccaaaucgcacacuugcuauuu

SEQ ID NO: 101913 - RNA, 17 nt, Human adenovirus A
ccaaaucuuaaauggaa

SEQ ID NO: 101914 - RNA, 11 nt, Human adenovirus A
ccaacaagcag

SEQ ID NO: 101915 - RNA, 15 nt, Human adenovirus A
cauuuuggauuugau

SEQ ID NO: 101916 - RNA, 23 nt, Human adenovirus A
aaaaucaaccuuucgaucccuca

SEQ ID NO: 101917 - RNA, 19 nt, Human adenovirus A
aaaauagggguaauguggu

SEQ ID NO: 101918 - RNA, 17 nt, Human adenovirus A
aaaauacaugaguguau

SEQ ID NO: 101919 - RNA, 22 nt, Human adenovirus A
aaaauggaacccuuacacucaa

SEQ ID NO: 101920 - RNA, 14 nt, Human adenovirus A
aaaaugaugacuuc

SEQ ID NO: 101921 - RNA, 17 nt, Human adenovirus A
ccaccagcgcuuucaag

SEQ ID NO: 101922 - RNA, 20 nt, Human adenovirus A
caggaucaaaaaaauaaaga

SEQ ID NO: 101923 - RNA, 13 nt, Human adenovirus A
caggagaacaaga

SEQ ID NO: 101924 - RNA, 21 nt, Human adenovirus A
caggaugccucggaguaccug

SEQ ID NO: 101925 - RNA, 23 nt, Human adenovirus A
caucaggagcagaaaucuugaag

SEQ ID NO: 101926 - RNA, 15 nt, Human adenovirus A
caucaacugugcuac

SEQ ID NO: 101927 - RNA, 16 nt, Human adenovirus A
caucaccgaggcaguu

SEQ ID NO: 101928 - RNA, 12 nt, Human adenovirus A
cauccgcauuua

SEQ ID NO: 101929 - RNA, 15 nt, Human adenovirus A
cauccgcauuuaagc

SEQ ID NO: 101930 - RNA, 23 nt, Human adenovirus A
cauccgcauuuaagcaacauuaa

SEQ ID NO: 101931 - RNA, 16 nt, Human adenovirus A
cauuggaaaagugcac

SEQ ID NO: 101932 - RNA, 17 nt, Human adenovirus A
cauuggaguacaagcuu

SEQ ID NO: 101933 - RNA, 15 nt, Human adenovirus A
cauugguaacaguau

SEQ ID NO: 101934 - RNA, 15 nt, Human adenovirus A
cauuguaacugaaaa

SEQ ID NO: 101935 - RNA, 14 nt, Human adenovirus A
cauuuuaguaaaag

SEQ ID NO: 101936 - RNA, 15 nt, Human adenovirus A
cauuccccauccaaa

SEQ ID NO: 101937 - RNA, 16 nt, Human adenovirus A
cauuccccauccaaaa

SEQ ID NO: 101938 - RNA, 17 nt, Human adenovirus A
caugagcccggggacua

SEQ ID NO: 101939 - RNA, 21 nt, Human adenovirus A
caugaguguauguauguguug

SEQ ID NO: 101940 - RNA, 13 nt, Human adenovirus A
caugcaaagccag

SEQ ID NO: 101941 - RNA, 17 nt, Human adenovirus A
caugauuuuauccuaca

SEQ ID NO: 101942 - RNA, 21 nt, Human adenovirus A
caugauuuuauccuacaaaaa

SEQ ID NO: 101943 - RNA, 17 nt, Human adenovirus A
cauggugauuaaauaua

SEQ ID NO: 101944 - RNA, 23 nt, Human adenovirus A
cugaugaucuucccgaauaucca

SEQ ID NO: 101945 - RNA, 15 nt, Human adenovirus A
cugaugccacuugaa

SEQ ID NO: 101946 - RNA, 17 nt, Human adenovirus A
cugaucaacgacuaaaa

SEQ ID NO: 101947 - RNA, 17 nt, Human adenovirus A
cugaucgcgcuaggcga

SEQ ID NO: 101948 - RNA, 18 nt, Human adenovirus A
cugaucuagaaauugaug

SEQ ID NO: 101949 - RNA, 16 nt, Human adenovirus A
cugcagccugucuuaa

SEQ ID NO: 101950 - RNA, 19 nt, Human adenovirus A
cugcugucacugagcacau

SEQ ID NO: 101951 - RNA, 21 nt, Human adenovirus A
cugcugucacugagcacauca

SEQ ID NO: 101952 - RNA, 16 nt, Human adenovirus A
cugcuuucuggugcga

SEQ ID NO: 101953 - RNA, 23 nt, Human adenovirus A
cuggaacgagaucggcacgagcc

SEQ ID NO: 101954 - RNA, 17 nt, Human adenovirus A
cuggaagucaacuaaaa

SEQ ID NO: 101955 - RNA, 13 nt, Human adenovirus A
cuguaguggcgcu

SEQ ID NO: 101956 - RNA, 17 nt, Human adenovirus A
cuguaguuucuuuacaa

SEQ ID NO: 101957 - RNA, 13 nt, Human adenovirus A
cuggccaagcaaa

SEQ ID NO: 101958 - RNA, 20 nt, Human adenovirus A
cuggcuuuuggauggaaccc

SEQ ID NO: 101959 - RNA, 19 nt, Human adenovirus A
cucuuccagcugagcaguu

SEQ ID NO: 101960 - RNA, 22 nt, Human adenovirus A
cugaaaaaccaacaaacacgga

SEQ ID NO: 101961 - RNA, 16 nt, Human adenovirus A
cugaagcugaauacau

SEQ ID NO: 101962 - RNA, 22 nt, Human adenovirus A
cugaaccuaauagcacuuugga

SEQ ID NO: 101963 - RNA, 15 nt, Human adenovirus A
cugacagacuugcaa

SEQ ID NO: 101964 - RNA, 22 nt, Human adenovirus A
cugaggacuuuguagcauacaa

SEQ ID NO: 101965 - RNA, 21 nt, Human adenovirus A
cuucuuccguuagcugugaaa

SEQ ID NO: 101966 - RNA, 16 nt, Human adenovirus A
cuucgcuaugaaucuu

SEQ ID NO: 101967 - RNA, 13 nt, Human adenovirus A
cuucgcugcaguu

SEQ ID NO: 101968 - RNA, 15 nt, Human adenovirus A
cuucgcugcaguuuu

SEQ ID NO: 101969 - RNA, 14 nt, Human adenovirus A
cuugcaaacagcaa

SEQ ID NO: 101970 - RNA, 21 nt, Human adenovirus A
cuugagcgcguggcacgcuau

SEQ ID NO: 101971 - RNA, 19 nt, Human adenovirus A
cuugaauucuggaauaaca

SEQ ID NO: 101972 - RNA, 21 nt, Human adenovirus A
cuuggcaagcauaacagucag

SEQ ID NO: 101973 - RNA, 19 nt, Human adenovirus A
cuuacuugccgaaugcgca

SEQ ID NO: 101974 - RNA, 16 nt, Human adenovirus A
cugucacugagcacau

SEQ ID NO: 101975 - RNA, 17 nt, Human adenovirus A
cugucacugagcacauc

SEQ ID NO: 101976 - RNA, 17 nt, Human adenovirus A
cugucauccgcauuuaa

SEQ ID NO: 101977 - RNA, 16 nt, Human adenovirus A
cugucauuugugugcu

SEQ ID NO: 101978 - RNA, 14 nt, Human adenovirus A
cuuaucaugugcua

SEQ ID NO: 101979 - RNA, 16 nt, Human adenovirus A
cuuaucaugugcuauu

SEQ ID NO: 101980 - RNA, 22 nt, Human adenovirus A
cuucacgcaauagacucugcca

SEQ ID NO: 101981 - RNA, 17 nt, Human adenovirus A
cuucagaugacuggaca

SEQ ID NO: 101982 - RNA, 20 nt, Human adenovirus A
cuucaucuuuucuagaugaa

SEQ ID NO: 101983 - RNA, 21 nt, Human adenovirus A
cuucauguguagguuuuacag

SEQ ID NO: 101984 - RNA, 15 nt, Human adenovirus A
cuucccaacugucaa

SEQ ID NO: 101985 - RNA, 16 nt, Human adenovirus A
cuucccaacugucaaa

SEQ ID NO: 101986 - RNA, 18 nt, Human adenovirus A
cuaaauauuguauuucca

SEQ ID NO: 101987 - RNA, 21 nt, Human adenovirus A
cgguuacuucguugauaucaa

SEQ ID NO: 101988 - RNA, 18 nt, Human adenovirus A
cgguuccacggugcacuu

SEQ ID NO: 101989 - RNA, 11 nt, Human adenovirus A
cguacacuggc

SEQ ID NO: 101990 - RNA, 23 nt, Human adenovirus A
cggggggaauaucucauuugcaa

SEQ ID NO: 101991 - RNA, 20 nt, Human adenovirus A
cgggaagauacuaccuacuc

SEQ ID NO: 101992 - RNA, 14 nt, Human adenovirus A
cggcagcugccaag

SEQ ID NO: 101993 - RNA, 17 nt, Human adenovirus A
cggccaugcaaagccag

SEQ ID NO: 101994 - RNA, 13 nt, Human adenovirus A
cggccgcuucuac

SEQ ID NO: 101995 - RNA, 13 nt, Human adenovirus A
cuaguucuuguca

SEQ ID NO: 101996 - RNA, 14 nt, Human adenovirus A
cuaguucuugucaa

SEQ ID NO: 101997 - RNA, 18 nt, Human adenovirus A
cuagaaucggcaacagca

SEQ ID NO: 101998 - RNA, 16 nt, Human adenovirus A
cuacaaaaaguaacaa

SEQ ID NO: 101999 - RNA, 20 nt, Human adenovirus A
cuacaaagggggaaagggag

SEQ ID NO: 102000 - RNA, 18 nt, Human adenovirus A
cuccaaaucuuaaaugga

SEQ ID NO: 102001 - RNA, 20 nt, Human adenovirus A
cucacccccgaaacuaggaa

SEQ ID NO: 102002 - RNA, 13 nt, Human adenovirus A
cuaucacuugcaa

SEQ ID NO: 102003 - RNA, 21 nt, Human adenovirus A
cuaucauuaagaacacgguga

SEQ ID NO: 102004 - RNA, 15 nt, Human adenovirus A
cuauauuaacuuuau

SEQ ID NO: 102005 - RNA, 14 nt, Human adenovirus A
gaugguguuaugaa

SEQ ID NO: 102006 - RNA, 13 nt, Human adenovirus A
gaugccgcagugg

SEQ ID NO: 102007 - RNA, 16 nt, Human adenovirus A
gaucugucagugaaac

SEQ ID NO: 102008 - RNA, 19 nt, Human adenovirus A
gaucuucccgaauauccaa

SEQ ID NO: 102009 - RNA, 22 nt, Human adenovirus A
gcaaacgcgcgggcuuaugcaa

SEQ ID NO: 102010 - RNA, 20 nt, Human adenovirus A
gauuuacaaaccgugcauca

SEQ ID NO: 102011 - RNA, 16 nt, Human adenovirus A
gauuucugcugucauu

SEQ ID NO: 102012 - RNA, 13 nt, Human adenovirus A
gauuaagacauau

SEQ ID NO: 102013 - RNA, 22 nt, Human adenovirus A
gacuugcaaacagcaaacuuuc

SEQ ID NO: 102014 - RNA, 22 nt, Human adenovirus A
gacugcuguaauggguucaagc

SEQ ID NO: 102015 - RNA, 23 nt, Human adenovirus A
gacuggcggccggcgcggcucaa

SEQ ID NO: 102016 - RNA, 12 nt, Human adenovirus A
gacucugccaac

SEQ ID NO: 102017 - RNA, 18 nt, Human adenovirus A
gacucuggcgaagggccu

SEQ ID NO: 102018 - RNA, 22 nt, Human adenovirus A
gacuaacgcuggggcacagcuu

SEQ ID NO: 102019 - RNA, 19 nt, Human adenovirus A
aaauggaacccuuacacuc

SEQ ID NO: 102020 - RNA, 22 nt, Human adenovirus A
aaauggaaggucagauucuucu

SEQ ID NO: 102021 - RNA, 19 nt, Human adenovirus A
aaaugggaaggaggcaguu

SEQ ID NO: 102022 - RNA, 21 nt, Human adenovirus A
gagcguugguucgacgggcca

SEQ ID NO: 102023 - RNA, 15 nt, Human adenovirus A
gagcucgacaaggaa

SEQ ID NO: 102024 - RNA, 23 nt, Human adenovirus A
gaggacgaacggcagcugccaag

SEQ ID NO: 102025 - RNA, 22 nt, Human adenovirus A
gaggcuggcacgcaaacuauua

SEQ ID NO: 102026 - RNA, 15 nt, Human adenovirus A
gaggcgcgcggugga

SEQ ID NO: 102027 - RNA, 18 nt, Human adenovirus A
gaggcguagaugugcugu

SEQ ID NO: 102028 - RNA, 16 nt, Human adenovirus A
gacuuuguagcauaca

SEQ ID NO: 102029 - RNA, 18 nt, Human adenovirus A
gagaaaguguuaaccauu

SEQ ID NO: 102030 - RNA, 15 nt, Human adenovirus A
gagacuuaccauuug

SEQ ID NO: 102031 - RNA, 17 nt, Human adenovirus A
gaccauugguaacagua

SEQ ID NO: 102032 - RNA, 13 nt, Human adenovirus A
gacccacuggcug

SEQ ID NO: 102033 - RNA, 19 nt, Human adenovirus A
gacccauuugacacaucag

SEQ ID NO: 102034 - RNA, 14 nt, Human adenovirus A
gaccugcaacagcc

SEQ ID NO: 102035 - RNA, 17 nt, Human adenovirus A
gaccgcuuaucaugugc

SEQ ID NO: 102036 - RNA, 13 nt, Human adenovirus A
gacaccuacuuca

SEQ ID NO: 102037 - RNA, 22 nt, Human adenovirus A
aaacgguaguggcaaugcagca

SEQ ID NO: 102038 - RNA, 17 nt, Human adenovirus A
aaacuauuaacuuugau

SEQ ID NO: 102039 - RNA, 20 nt, Human adenovirus A
aaacuguacaaggaccguuu

SEQ ID NO: 102040 - RNA, 15 nt, Human adenovirus A
aaagcauacuuacca

SEQ ID NO: 102041 - RNA, 23 nt, Human adenovirus A
aaagcccgcgcgcggacuuucaa

SEQ ID NO: 102042 - RNA, 18 nt, Human adenovirus A
aaagucaacccaaacugu

SEQ ID NO: 102043 - RNA, 19 nt, Human adenovirus A
aaaguuuaaacuacacaaa

SEQ ID NO: 102044 - RNA, 17 nt, Human adenovirus A
aaagcuacguugaguac

SEQ ID NO: 102045 - RNA, 13 nt, Human adenovirus A
cuuuacugcaaug

SEQ ID NO: 102046 - RNA, 23 nt, Human adenovirus A
cuuuacauaauguaagugaggua

SEQ ID NO: 102047 - RNA, 21 nt, Human adenovirus A
cuuuaccaggcaaagaacauc

SEQ ID NO: 102048 - RNA, 13 nt, Human adenovirus A
cuuuagcaguugc

SEQ ID NO: 102049 - RNA, 21 nt, Human adenovirus A
cuuuacaagaguuacuuuccu

SEQ ID NO: 102050 - RNA, 16 nt, Human adenovirus A
cuuuaacggaaaacac

SEQ ID NO: 102051 - RNA, 17 nt, Human adenovirus A
gaaccuaauagcacuuu

SEQ ID NO: 102052 - RNA, 20 nt, Human adenovirus A
gaaccuaauagcacuuugga

SEQ ID NO: 102053 - RNA, 18 nt, Human adenovirus A
gaacaaacagugccuguu

SEQ ID NO: 102054 - RNA, 16 nt, Human adenovirus A
gaacggaacuacucag

SEQ ID NO: 102055 - RNA, 12 nt, Human adenovirus A
gaacggcagcug

SEQ ID NO: 102056 - RNA, 17 nt, Human adenovirus A
gaagauuucugcuguca

SEQ ID NO: 102057 - RNA, 15 nt, Human adenovirus A
aaaccuagaccauug

SEQ ID NO: 102058 - RNA, 13 nt, Human adenovirus A
gaaucaaucucag

SEQ ID NO: 102059 - RNA, 23 nt, Human adenovirus A
aaacgcccugcuccgacaacagc

SEQ ID NO: 102060 - RNA, 22 nt, Human adenovirus A
gcccauaacaucaggagcagaa

SEQ ID NO: 102061 - RNA, 19 nt, Human adenovirus A
gcccgaaguugacuggcau

SEQ ID NO: 102062 - RNA, 20 nt, Human adenovirus A
gccaucuuugggaugaaggu

SEQ ID NO: 102063 - RNA, 20 nt, Human adenovirus A
gccuaguugcgcagaugaua

SEQ ID NO: 102064 - RNA, 12 nt, Human adenovirus A
gccucacuggca

SEQ ID NO: 102065 - RNA, 19 nt, Human adenovirus A
gccucaguagccuugcagg

SEQ ID NO: 102066 - RNA, 17 nt, Human adenovirus A
gccugguaaaacaagcu

SEQ ID NO: 102067 - RNA, 13 nt, Human adenovirus A
gccgauggccuaa

SEQ ID NO: 102068 - RNA, 12 nt, Human adenovirus A
gccgaaugcgca

SEQ ID NO: 102069 - RNA, 19 nt, Human adenovirus A
gccgaaugcgcauacccau

SEQ ID NO: 102070 - RNA, 16 nt, Human adenovirus A
gccgccgcugcagcuu

SEQ ID NO: 102071 - RNA, 23 nt, Human adenovirus A
gcaacaacgcugggcauggugau

SEQ ID NO: 102072 - RNA, 18 nt, Human adenovirus A
gcaacugcugaagcaaac

SEQ ID NO: 102073 - RNA, 22 nt, Human adenovirus A
gcaacuauuggacccucgccuu

SEQ ID NO: 102074 - RNA, 20 nt, Human adenovirus A
gcauccgaggugacaugaua

SEQ ID NO: 102075 - RNA, 17 nt, Human adenovirus A
gcaugggcgacuacccg

SEQ ID NO: 102076 - RNA, 13 nt, Human adenovirus A
gcauggugauuaa

SEQ ID NO: 102077 - RNA, 16 nt, Human adenovirus A
gcguuuggaaacugua

SEQ ID NO: 102078 - RNA, 20 nt, Human adenovirus A
gcuacaaagggggaaaggga

SEQ ID NO: 102079 - RNA, 13 nt, Human adenovirus A
gcuacaccacgua

SEQ ID NO: 102080 - RNA, 16 nt, Human adenovirus A
gcucaagacuauucua

SEQ ID NO: 102081 - RNA, 13 nt, Human adenovirus A
gcucgcaaguacc

SEQ ID NO: 102082 - RNA, 19 nt, Human adenovirus A
gcucgagacaucugugucu

SEQ ID NO: 102083 - RNA, 19 nt, Human adenovirus A
gcgcggcugcgacauuuag

SEQ ID NO: 102084 - RNA, 22 nt, Human adenovirus A
gcgcgucggggcuacugcucau

SEQ ID NO: 102085 - RNA, 18 nt, Human adenovirus A
gccugucuuaaaaucucc

SEQ ID NO: 102086 - RNA, 22 nt, Human adenovirus A
gccugucuuaaaaucuccugaa

SEQ ID NO: 102087 - RNA, 13 nt, Human adenovirus A
gccuguugaucug

SEQ ID NO: 102088 - RNA, 23 nt, Human adenovirus A
gccuguugaucugucagugaaac

SEQ ID NO: 102089 - RNA, 17 nt, Human adenovirus A
gccuuacauguggagcu

SEQ ID NO: 102090 - RNA, 18 nt, Human adenovirus A
gcggccaugcaaagccag

SEQ ID NO: 102091 - RNA, 19 nt, Human adenovirus A
gcgggcggugcacgucaca

SEQ ID NO: 102092 - RNA, 20 nt, Human adenovirus A
ggagcugacggccauuguuc

SEQ ID NO: 102093 - RNA, 23 nt, Human adenovirus A
ggaggcguagaugugcuguggaa

SEQ ID NO: 102094 - RNA, 15 nt, Human adenovirus A
ggauagcaaagccau

SEQ ID NO: 102095 - RNA, 16 nt, Human adenovirus A
ggauagcaaagccauc

SEQ ID NO: 102096 - RNA, 20 nt, Human adenovirus A
ggauauguuucuguacugca

SEQ ID NO: 102097 - RNA, 19 nt, Human adenovirus A
ggauacuuaauacuggcua

SEQ ID NO: 102098 - RNA, 16 nt, Human adenovirus A
gcuggcgcacaaguug

SEQ ID NO: 102099 - RNA, 17 nt, Human adenovirus A
gcuggcgcacaaguugc

SEQ ID NO: 102100 - RNA, 19 nt, Human adenovirus A
gcugguuuaauauacaacg

SEQ ID NO: 102101 - RNA, 19 nt, Human adenovirus A
gcuuaucaugugcuauugu

SEQ ID NO: 102102 - RNA, 18 nt, Human adenovirus A
gcuucgaaugcugugaca

SEQ ID NO: 102103 - RNA, 14 nt, Human adenovirus A
gcuugagugacugu

SEQ ID NO: 102104 - RNA, 21 nt, Human adenovirus A
gcuugcaacugcugaagcaaa

SEQ ID NO: 102105 - RNA, 10 nt, Human adenovirus A
ggacuuucaa

SEQ ID NO: 102106 - RNA, 14 nt, Human adenovirus A
ggacuuuuuugccu

SEQ ID NO: 102107 - RNA, 13 nt, Human adenovirus A
ggcaccccaguaa

SEQ ID NO: 102108 - RNA, 15 nt, Human adenovirus A
ggccguacaugggca

SEQ ID NO: 102109 - RNA, 16 nt, Human adenovirus A
ggcucaagacuauucu

SEQ ID NO: 102110 - RNA, 21 nt, Human adenovirus A
ggcgcgcaguccugaugcuuu

SEQ ID NO: 102111 - RNA, 16 nt, Human adenovirus A
ggcggugcacgucaca

SEQ ID NO: 102112 - RNA, 20 nt, Human adenovirus A
ggcguaaccaaauacugcua

SEQ ID NO: 102113 - RNA, 15 nt, Human adenovirus A
ggcguaguaugcgca

SEQ ID NO: 102114 - RNA, 13 nt, Human adenovirus A
gguaauguaagaa

SEQ ID NO: 102115 - RNA, 12 nt, Human adenovirus A
ggugaauguguu

SEQ ID NO: 102116 - RNA, 15 nt, Human adenovirus A
ggucgcgaaacuggg

SEQ ID NO: 102117 - RNA, 20 nt, Human adenovirus A
ggucuacuguugaugcagua

SEQ ID NO: 102118 - RNA, 21 nt, Human adenovirus A
ggucagauucuucuucccaau

SEQ ID NO: 102119 - RNA, 15 nt, Human adenovirus A
ggucaggccagugag

SEQ ID NO: 102120 - RNA, 21 nt, Human adenovirus A
guaaugccauuaaaugcaacu

SEQ ID NO: 102121 - RNA, 19 nt, Human adenovirus A
guaauuaauggacuuugag

SEQ ID NO: 102122 - RNA, 20 nt, Human adenovirus A
guaauuuauggacccacugg

SEQ ID NO: 102123 - RNA, 13 nt, Human adenovirus A
guaagaacauaca

SEQ ID NO: 102124 - RNA, 14 nt, Human adenovirus A
guaacaacagucag

SEQ ID NO: 102125 - RNA, 16 nt, Human adenovirus A
guaacugaaaauggaa

SEQ ID NO: 102126 - RNA, 21 nt, Human adenovirus A
gguuuuggcggccaugcaaag

SEQ ID NO: 102127 - RNA, 17 nt, Human adenovirus A
guaaaaugggaaggagg

SEQ ID NO: 102128 - RNA, 19 nt, Human adenovirus A
aaacaucacucuauuucaa

SEQ ID NO: 102129 - RNA, 17 nt, Human adenovirus A
aaacagugccuguugau

SEQ ID NO: 102130 - RNA, 15 nt, Human adenovirus A
aaacccuggaccaca

SEQ ID NO: 102131 - RNA, 19 nt, Human adenovirus A
aaaccauuuuauuagcuca

SEQ ID NO: 102132 - RNA, 21 nt, Human adenovirus A
aaacccacugguuagagccau

SEQ ID NO: 102133 - RNA, 18 nt, Human adenovirus A
aaacacugugcgguuuaa

SEQ ID NO: 102134 - RNA, 15 nt, Human adenovirus A
aaaagucaacccaaa

SEQ ID NO: 102135 - RNA, 16 nt, Human adenovirus A
aaaauaaaacuuccaa

SEQ ID NO: 102136 - RNA, 15 nt, Human adenovirus A
aaaagcauacuuacc

SEQ ID NO: 102137 - RNA, 21 nt, Human adenovirus A
aaaagcuacguugaguacuuc

SEQ ID NO: 102138 - RNA, 11 nt, Human adenovirus A
aaaacaagcua

SEQ ID NO: 102139 - RNA, 24 nt, Human adenovirus A
aaaaaggaauugauacacaccuca

SEQ ID NO: 102140 - RNA, 12 nt, Human adenovirus A
aaaaacacugug

SEQ ID NO: 102141 - RNA, 22 nt, Human adenovirus A
auuucccucuucccaacuguca

SEQ ID NO: 102142 - RNA, 21 nt, Human adenovirus A
auuuacugcagccugucuuaa

SEQ ID NO: 102143 - RNA, 15 nt, Human adenovirus A
auucuggaauaacaa

SEQ ID NO: 102144 - RNA, 16 nt, Human adenovirus A
auucuggaauaacaag

SEQ ID NO: 102145 - RNA, 18 nt, Human adenovirus A
auucuggaauaacaagcc

SEQ ID NO: 102146 - RNA, 17 nt, Human adenovirus A
auuguauuuugagauug

SEQ ID NO: 102147 - RNA, 14 nt, Human adenovirus A
auuaugagauguuu

SEQ ID NO: 102148 - RNA, 16 nt, Human adenovirus A
auuaugagauguuuau

SEQ ID NO: 102149 - RNA, 15 nt, Human adenovirus A
auggacccacuggcu

SEQ ID NO: 102150 - RNA, 15 nt, Human adenovirus A
auuccccauccaaaa

SEQ ID NO: 102151 - RNA, 16 nt, Human adenovirus A
auuccccauccaaaac

SEQ ID NO: 102152 - RNA, 20 nt, Human adenovirus A
auuuuagcaagccugcgaga

SEQ ID NO: 102153 - RNA, 21 nt, Human adenovirus A
auuuuuuagauuguuauacua

SEQ ID NO: 102154 - RNA, 20 nt, Human adenovirus A
auuuuuuuuuuuuuuuacac

SEQ ID NO: 102155 - RNA, 19 nt, Human adenovirus A
caaacccccaggaugauuu

SEQ ID NO: 102156 - RNA, 20 nt, Human adenovirus A
caaacccuggaccacaugcc

SEQ ID NO: 102157 - RNA, 16 nt, Human adenovirus A
caaaccggccagaugc

SEQ ID NO: 102158 - RNA, 20 nt, Human adenovirus A
caaaccugacagacuugcaa

SEQ ID NO: 102159 - RNA, 12 nt, Human adenovirus A
caaacuacauag

SEQ ID NO: 102160 - RNA, 18 nt, Human adenovirus A
caaagaacaucaacugug

SEQ ID NO: 102161 - RNA, 17 nt, Human adenovirus A
caaagaccccauuguaa

SEQ ID NO: 102162 - RNA, 19 nt, Human adenovirus A
caaagaugaggcugguuua

SEQ ID NO: 102163 - RNA, 16 nt, Human adenovirus A
caaaucgcacacuugc

SEQ ID NO: 102164 - RNA, 20 nt, Human adenovirus A
caaaucgcacacuugcuauu

SEQ ID NO: 102165 - RNA, 16 nt, Human adenovirus A
caaaucuuaaauggaa

SEQ ID NO: 102166 - RNA, 17 nt, Human adenovirus A
caaaucuuaaauggaag

SEQ ID NO: 102167 - RNA, 14 nt, Human adenovirus A
caaauaaaauugcu

SEQ ID NO: 102168 - RNA, 21 nt, Human adenovirus A
caaaugaugaaugaaguggcu

SEQ ID NO: 102169 - RNA, 17 nt, Human adenovirus A
caacuuuuuaaccacug

SEQ ID NO: 102170 - RNA, 14 nt, Human adenovirus A
caacagcugcuguc

SEQ ID NO: 102171 - RNA, 14 nt, Human adenovirus A
caacagucaguguc

SEQ ID NO: 102172 - RNA, 22 nt, Human adenovirus A
cacuugaauucuggaauaacaa

SEQ ID NO: 102173 - RNA, 23 nt, Human adenovirus A
cacuuuggauggcgaugagcgac

SEQ ID NO: 102174 - RNA, 14 nt, Human adenovirus A
cagauucuucuucc

SEQ ID NO: 102175 - RNA, 18 nt, Human adenovirus A
cagcaaacuuucuccaaa

SEQ ID NO: 102176 - RNA, 15 nt, Human adenovirus A
cagcuucuacaauca

SEQ ID NO: 102177 - RNA, 20 nt, Human adenovirus A
cagcugauuucagcuucuac

SEQ ID NO: 102178 - RNA, 12 nt, Human adenovirus A
cagcugccaagu

SEQ ID NO: 102179 - RNA, 19 nt, Human adenovirus A
cagcagggucuacuguuga

SEQ ID NO: 102180 - RNA, 21 nt, Human adenovirus A
cagcagagucgaggucaagaa

SEQ ID NO: 102181 - RNA, 20 nt, Human adenovirus A
caccgaacagaggcuccuca

SEQ ID NO: 102182 - RNA, 22 nt, Human adenovirus A
caccguuguacgauaccacucg

SEQ ID NO: 102183 - RNA, 17 nt, Human adenovirus A
cacucagcgacaaaccu

SEQ ID NO: 102184 - RNA, 20 nt, Human adenovirus A
cacucagcgacaaaccuuua

SEQ ID NO: 102185 - RNA, 23 nt, Human adenovirus A
cacucagcgacaaaccuuuacug

SEQ ID NO: 102186 - RNA, 18 nt, Human adenovirus A
cacgcguauaguguaaaa

SEQ ID NO: 102187 - RNA, 17 nt, Human adenovirus A
cacggacaccuacuuca

SEQ ID NO: 102188 - RNA, 19 nt, Human adenovirus A
cacgggcuggggacugggu

SEQ ID NO: 102189 - RNA, 20 nt, Human adenovirus A
caagcuuguacuccaaugag

SEQ ID NO: 102190 - RNA, 17 nt, Human adenovirus A
caagcggcccacuagaa

SEQ ID NO: 102191 - RNA, 18 nt, Human adenovirus A
caauuauuacauggucau

SEQ ID NO: 102192 - RNA, 21 nt, Human adenovirus A
caauuauuacauggucaugag

SEQ ID NO: 102193 - RNA, 14 nt, Human adenovirus A
caauguuauccaca

SEQ ID NO: 102194 - RNA, 19 nt, Human adenovirus A
cacaaaacacaaauugcgu

SEQ ID NO: 102195 - RNA, 20 nt, Human adenovirus A
augcugaagaaacagaagaa

SEQ ID NO: 102196 - RNA, 14 nt, Human adenovirus A
augaugcauaauua

SEQ ID NO: 102197 - RNA, 23 nt, Human adenovirus A
augcaggucgaggggcaccguca

SEQ ID NO: 102198 - RNA, 18 nt, Human adenovirus A
augcaacuuucauuguua

SEQ ID NO: 102199 - RNA, 13 nt, Human adenovirus A
aucuuuauugaua

SEQ ID NO: 102200 - RNA, 17 nt, Human adenovirus A
aucggcacgagccagcu

SEQ ID NO: 102201 - RNA, 18 nt, Human adenovirus A
augaaguuuugauuguau

SEQ ID NO: 102202 - RNA, 19 nt, Human adenovirus A
augaagauuucugcuguca

SEQ ID NO: 102203 - RNA, 20 nt, Human adenovirus A
augagcccggggacuaacca

SEQ ID NO: 102204 - RNA, 18 nt, Human adenovirus A
aucauuaagaacacggug

SEQ ID NO: 102205 - RNA, 20 nt, Human adenovirus A
aucccuacccaccaucuuca

SEQ ID NO: 102206 - RNA, 21 nt, Human adenovirus A
aucccuacccaccaucuucau

SEQ ID NO: 102207 - RNA, 21 nt, Human adenovirus A
aucccucgcccgcacagucac

SEQ ID NO: 102208 - RNA, 23 nt, Human adenovirus A
aucaccgaacagaggcuccucac

SEQ ID NO: 102209 - RNA, 17 nt, Human adenovirus A
aucaccgaggcaguuuc

SEQ ID NO: 102210 - RNA, 15 nt, Human adenovirus A
auaaugagccugaac

SEQ ID NO: 102211 - RNA, 13 nt, Human adenovirus A
auaauccagucau

SEQ ID NO: 102212 - RNA, 22 nt, Human adenovirus A
auauccaaacccccaggaugau

SEQ ID NO: 102213 - RNA, 11 nt, Human adenovirus A
auaucacucuu

SEQ ID NO: 102214 - RNA, 22 nt, Human adenovirus A
agggucuacuguugaugcagua

SEQ ID NO: 102215 - RNA, 15 nt, Human adenovirus A
agggguugaugugau

SEQ ID NO: 102216 - RNA, 14 nt, Human adenovirus A
aggucuagccaaca

SEQ ID NO: 102217 - RNA, 14 nt, Human adenovirus A
aggugacaugauau

SEQ ID NO: 102218 - RNA, 14 nt, Human adenovirus A
agguuuuacagugc

SEQ ID NO: 102219 - RNA, 21 nt, Human adenovirus A
aggcguggaacagccaaaccg

SEQ ID NO: 102220 - RNA, 19 nt, Human adenovirus A
aggcuggguuuauggaauu

SEQ ID NO: 102221 - RNA, 21 nt, Human adenovirus A
aggcuguacgcccugauuucc

SEQ ID NO: 102222 - RNA, 22 nt, Human adenovirus A
aggauccaaacgguaguggcaa

SEQ ID NO: 102223 - RNA, 22 nt, Human adenovirus A
aggcgggaaaagugacgucaca

SEQ ID NO: 102224 - RNA, 10 nt, Human adenovirus A
agcagugaaa

SEQ ID NO: 102225 - RNA, 23 nt, Human adenovirus A
agcugcugucacugagcacauca

SEQ ID NO: 102226 - RNA, 22 nt, Human adenovirus A
agcugcuguucuuaguaggcua

SEQ ID NO: 102227 - RNA, 20 nt, Human adenovirus A
aggaaauuguguacuuuuca

SEQ ID NO: 102228 - RNA, 15 nt, Human adenovirus A
aggaaccgaccugca

SEQ ID NO: 102229 - RNA, 21 nt, Human adenovirus A
aggaaccgaccugcaacagcc

SEQ ID NO: 102230 - RNA, 17 nt, Human adenovirus A
agcuuguacuccaauga

SEQ ID NO: 102231 - RNA, 21 nt, Human adenovirus A
agcuuccgcggccgcuucuac

SEQ ID NO: 102232 - RNA, 22 nt, Human adenovirus A
aguaugcugaagaaacagaaga

SEQ ID NO: 102233 - RNA, 12 nt, Human adenovirus A
agugacugugcg

SEQ ID NO: 102234 - RNA, 21 nt, Human adenovirus A
aguaacaacagucagugucca

SEQ ID NO: 102235 - RNA, 14 nt, Human adenovirus A
aguagcaucagcua

SEQ ID NO: 102236 - RNA, 16 nt, Human adenovirus A
aguagcaucagcuaau

SEQ ID NO: 102237 - RNA, 17 nt, Human adenovirus A
agugguauugauuuucc

SEQ ID NO: 102238 - RNA, 21 nt, Human adenovirus A
aguguaauagucugacuuuac

SEQ ID NO: 102239 - RNA, 14 nt, Human adenovirus A
agugcgguuccaga

SEQ ID NO: 102240 - RNA, 15 nt, Human adenovirus A
agugcugcaggaaug

SEQ ID NO: 102241 - RNA, 22 nt, Human adenovirus A
aguguuguagauaauccaguca

SEQ ID NO: 102242 - RNA, 16 nt, Human adenovirus A
aguuaaaagaccaaaa

SEQ ID NO: 102243 - RNA, 21 nt, Human adenovirus A
aguuaauugauuuacaaaccg

SEQ ID NO: 102244 - RNA, 23 nt, Human adenovirus A
aguuacucaauuauuacaugguc

SEQ ID NO: 102245 - RNA, 20 nt, Human adenovirus A
aguuaucuugguaggcaauu

SEQ ID NO: 102246 - RNA, 13 nt, Human adenovirus A
aguuauugacaaa

SEQ ID NO: 102247 - RNA, 14 nt, Human adenovirus A
aguugcaggaugaa

SEQ ID NO: 102248 - RNA, 19 nt, Human adenovirus A
aguuguagauggucuggcu

SEQ ID NO: 102249 - RNA, 17 nt, Human adenovirus A
aguuuaaacuacacaaa

SEQ ID NO: 102250 - RNA, 20 nt, Human adenovirus A
aguucuugucaacuacauaa

SEQ ID NO: 102251 - RNA, 22 nt, Human adenovirus A
auaacaccugaagcugaauaca

SEQ ID NO: 102252 - RNA, 14 nt, Human adenovirus A
auaacagucagaau

SEQ ID NO: 102253 - RNA, 13 nt, Human adenovirus A
auaacccugaaug

SEQ ID NO: 102254 - RNA, 14 nt, Human adenovirus A
auaacccugaaugu

SEQ ID NO: 102255 - RNA, 19 nt, Human adenovirus A
auaaaauuucccucuuccc

SEQ ID NO: 102256 - RNA, 20 nt, Human adenovirus A
auaaaauuucccucuuccca

SEQ ID NO: 102257 - RNA, 21 nt, Human adenovirus A
auaaaauuucccucuucccaa

SEQ ID NO: 102258 - RNA, 22 nt, Human adenovirus A
auaaaauuucccucuucccaac

SEQ ID NO: 102259 - RNA, 15 nt, Human adenovirus A
acccaaacuguacaa

SEQ ID NO: 102260 - RNA, 12 nt, Human adenovirus A
accacuguagac

SEQ ID NO: 102261 - RNA, 15 nt, Human adenovirus A
accacugucgccaac

SEQ ID NO: 102262 - RNA, 21 nt, Human adenovirus A
accacugucgccaaccucacu

SEQ ID NO: 102263 - RNA, 13 nt, Human adenovirus A
accaaauacugcu

SEQ ID NO: 102264 - RNA, 19 nt, Human adenovirus A
acaucaugauuugaagaua

SEQ ID NO: 102265 - RNA, 14 nt, Human adenovirus A
acaugauaugaagu

SEQ ID NO: 102266 - RNA, 14 nt, Human adenovirus A
acagcaacuuuuua

SEQ ID NO: 102267 - RNA, 22 nt, Human adenovirus A
acagcaacuuuuuaaccacugu

SEQ ID NO: 102268 - RNA, 19 nt, Human adenovirus A
acaucagacguacccuuug

SEQ ID NO: 102269 - RNA, 22 nt, Human adenovirus A
acaucaacugugcuacacgcug

SEQ ID NO: 102270 - RNA, 22 nt, Human adenovirus A
acagugcugcaggaauggccaa

SEQ ID NO: 102271 - RNA, 23 nt, Human adenovirus A
accucauuaaauuuuucaccaaa

SEQ ID NO: 102272 - RNA, 22 nt, Human adenovirus A
accuuuaguauagguauugaua

SEQ ID NO: 102273 - RNA, 17 nt, Human adenovirus A
acgaacggcagcugcca

SEQ ID NO: 102274 - RNA, 19 nt, Human adenovirus A
acccacugguuagagccau

SEQ ID NO: 102275 - RNA, 13 nt, Human adenovirus A
accgccugaagaa

SEQ ID NO: 102276 - RNA, 12 nt, Human adenovirus A
accgcugcucag

SEQ ID NO: 102277 - RNA, 15 nt, Human adenovirus A
accggaaaucugaaa

SEQ ID NO: 102278 - RNA, 20 nt, Human adenovirus A
accggugaagaugauugaac

SEQ ID NO: 102279 - RNA, 20 nt, Human adenovirus A
acgcaaacuauuaacuuuga

SEQ ID NO: 102280 - RNA, 18 nt, Human adenovirus A
acgcugaugccacuugaa

SEQ ID NO: 102281 - RNA, 23 nt, Human adenovirus A
acgcugcguuuugugcccgugga

SEQ ID NO: 102282 - RNA, 17 nt, Human adenovirus A
acgcugggcauggugau

SEQ ID NO: 102283 - RNA, 17 nt, Human adenovirus A
acggcagcugccaagug

SEQ ID NO: 102284 - RNA, 16 nt, Human adenovirus A
acgguccuuguacagu

SEQ ID NO: 102285 - RNA, 14 nt, Human adenovirus A
acuuuauaugcuau

SEQ ID NO: 102286 - RNA, 17 nt, Human adenovirus A
agaaaaugaugacuuca

SEQ ID NO: 102287 - RNA, 16 nt, Human adenovirus A
agaaacaaacuacaua

SEQ ID NO: 102288 - RNA, 18 nt, Human adenovirus A
agaagaaccuaacuguca

SEQ ID NO: 102289 - RNA, 19 nt, Human adenovirus A
agaagaaccuaacugucau

SEQ ID NO: 102290 - RNA, 17 nt, Human adenovirus A
agaacacggugaaugug

SEQ ID NO: 102291 - RNA, 15 nt, Human adenovirus A
agaaccuaacuguca

SEQ ID NO: 102292 - RNA, 15 nt, Human adenovirus A
agaacaucaacugug

SEQ ID NO: 102293 - RNA, 18 nt, Human adenovirus A
acucuucgcugcaguuuu

SEQ ID NO: 102294 - RNA, 17 nt, Human adenovirus A
acuguuaaucugauguc

SEQ ID NO: 102295 - RNA, 13 nt, Human adenovirus A
acugauaccaugg

SEQ ID NO: 102296 - RNA, 15 nt, Human adenovirus A
acuuaaauugagaug

SEQ ID NO: 102297 - RNA, 11 nt, Human adenovirus A
acuucuuccaa

SEQ ID NO: 102298 - RNA, 18 nt, Human adenovirus A
acuucuuccaauggucuu

SEQ ID NO: 102299 - RNA, 22 nt, Human adenovirus A
agaggcauuccuucauguguag

SEQ ID NO: 102300 - RNA, 14 nt, Human adenovirus A
agacuuaccauuug

SEQ ID NO: 102301 - RNA, 22 nt, Human adenovirus A
agacguacccuuuguuacaccc

SEQ ID NO: 102302 - RNA, 23 nt, Human adenovirus A
agcaaacccuggaccacaugccu

SEQ ID NO: 102303 - RNA, 14 nt, Human adenovirus A
agauuggcaauguu

SEQ ID NO: 102304 - RNA, 22 nt, Human adenovirus A
agaugguguuaugaaucuuuau

SEQ ID NO: 102305 - RNA, 15 nt, Human adenovirus A
agaugugcuguggaa

SEQ ID NO: 102306 - RNA, 16 nt, Human adenovirus A
agauucuucuucccaa

SEQ ID NO: 102307 - RNA, 15 nt, Human adenovirus A
agcagaaaucuugaa

SEQ ID NO: 102308 - RNA, 17 nt, Human adenovirus A
agcagaacccaguaugc

SEQ ID NO: 102309 - RNA, 15 nt, Human adenovirus A
agcagcaacaaggaa

SEQ ID NO: 102310 - RNA, 13 nt, Human adenovirus A
agcacucacauua

SEQ ID NO: 102311 - RNA, 20 nt, Human adenovirus A
agcaacuuuuuaaccacugu

SEQ ID NO: 102312 - RNA, 22 nt, Human adenovirus A
aaggucuagccaacauccagug

SEQ ID NO: 102313 - RNA, 18 nt, Human adenovirus A
aagucaacccaaacugua

SEQ ID NO: 102314 - RNA, 13 nt, Human adenovirus A
aaguagguccaua

SEQ ID NO: 102315 - RNA, 23 nt, Human adenovirus A
aauaaacaauaaguacgcaauuu

SEQ ID NO: 102316 - RNA, 23 nt, Human adenovirus A
aauaaagaguuaauugauuuaca

SEQ ID NO: 102317 - RNA, 16 nt, Human adenovirus A
aagauuucugcuguca

SEQ ID NO: 102318 - RNA, 15 nt, Human adenovirus A
aaggucagauucuuc

SEQ ID NO: 102319 - RNA, 20 nt, Human adenovirus A
aaucagcugccauacugcga

SEQ ID NO: 102320 - RNA, 14 nt, Human adenovirus A
aauaaguauacuga

SEQ ID NO: 102321 - RNA, 19 nt, Human adenovirus A
aauaaguauacugaugauc

SEQ ID NO: 102322 - RNA, 14 nt, Human adenovirus A
aauaauaaaaccau

SEQ ID NO: 102323 - RNA, 15 nt, Human adenovirus A
aauuuauacaauuca

SEQ ID NO: 102324 - RNA, 16 nt, Human adenovirus A
aauuucccucuuccca

SEQ ID NO: 102325 - RNA, 22 nt, Human adenovirus A
aaucccucgcccgcacagucac

SEQ ID NO: 102326 - RNA, 18 nt, Human adenovirus A
aaucugaaaauacaucau

SEQ ID NO: 102327 - RNA, 17 nt, Human adenovirus A
aaucuggacaugcaggu

SEQ ID NO: 102328 - RNA, 18 nt, Human adenovirus A
aauguuauccacauugcu

SEQ ID NO: 102329 - RNA, 14 nt, Human adenovirus A
acaaacagugccug

SEQ ID NO: 102330 - RNA, 12 nt, Human adenovirus A
acaaacuacaua

SEQ ID NO: 102331 - RNA, 14 nt, Human adenovirus A
acaaaccgugcauc

SEQ ID NO: 102332 - RNA, 16 nt, Human adenovirus A
acaacagcugcuguca

SEQ ID NO: 102333 - RNA, 18 nt, Human adenovirus A
acaacagucaguguccau

SEQ ID NO: 102334 - RNA, 21 nt, Human adenovirus A
acaagcuugacuguuuuauua

SEQ ID NO: 102335 - RNA, 17 nt, Human adenovirus A
acacaaagaaaacauca

SEQ ID NO: 102336 - RNA, 13 nt, Human adenovirus A
acaaugcauuaau

SEQ ID NO: 102337 - RNA, 15 nt, Human adenovirus A
acaaucacuuggcuu

SEQ ID NO: 102338 - RNA, 15 nt, Human adenovirus A
aagaccgaugcguua

SEQ ID NO: 102339 - RNA, 17 nt, Human adenovirus A
aagagcucgacaaggaa

SEQ ID NO: 102340 - RNA, 15 nt, Human adenovirus A
aagaggcauuccuuc

SEQ ID NO: 102341 - RNA, 14 nt, Human adenovirus A
aagaguauccauuu

SEQ ID NO: 102342 - RNA, 21 nt, Human adenovirus A
aacugauuaugagauguuuau

SEQ ID NO: 102343 - RNA, 19 nt, Human adenovirus A
aagaaaaaccaccaggugu

SEQ ID NO: 102344 - RNA, 18 nt, Human adenovirus A
aagaaacaaacuacauag

SEQ ID NO: 102345 - RNA, 16 nt, Human adenovirus A
aagaacacgaacugaa

SEQ ID NO: 102346 - RNA, 20 nt, Human adenovirus A
aacacuaccggcccuguugu

SEQ ID NO: 102347 - RNA, 16 nt, Human adenovirus A
aacccaguaugcugaa

SEQ ID NO: 102348 - RNA, 14 nt, Human adenovirus A
aacugaaaauggaa

SEQ ID NO: 102349 - RNA, 16 nt, Human adenovirus A
aacuauuaacuuugau

SEQ ID NO: 102350 - RNA, 18 nt, Human adenovirus A
aaauauucaagugcaguu

SEQ ID NO: 102351 - RNA, 17 nt, Human adenovirus A
aaauauuguauuuccag

SEQ ID NO: 102352 - RNA, 15 nt, Human adenovirus A
aaaguguuaaccauu

SEQ ID NO: 102353 - RNA, 14 nt, Human adenovirus A
aaacuacacaaaga

SEQ ID NO: 102354 - RNA, 21 nt, Human adenovirus A
aaacgcugaugccacuugaau

SEQ ID NO: 102355 - RNA, 20 nt, Human adenovirus A
aaacgguccuuguacaguuu

SEQ ID NO: 102356 - RNA, 21 nt, Human adenovirus A
aaacgguccuuguacaguuug

SEQ ID NO: 102357 - RNA, 17 nt, Human adenovirus A
aaaccuuuacugcaaug

SEQ ID NO: 102358 - RNA, 18 nt, Human adenovirus A
aaaguaaggggacagauu

SEQ ID NO: 102359 - RNA, 14 nt, Human adenovirus A
aaacuaucacuugc

SEQ ID NO: 102360 - RNA, 15 nt, Human adenovirus A
aaacuaucacuugca

SEQ ID NO: 102361 - RNA, 16 nt, Human adenovirus A
aacacggauacuuaau

SEQ ID NO: 102362 - RNA, 14 nt, Human adenovirus A
aacacguuaccaau

SEQ ID NO: 102363 - RNA, 13 nt, Human adenovirus A
aacaccaucucaa

SEQ ID NO: 102364 - RNA, 19 nt, Human adenovirus A
aacaaguuuagaaacccca

SEQ ID NO: 102365 - RNA, 17 nt, Human adenovirus A
aacaacugcacuugaau

SEQ ID NO: 102366 - RNA, 12 nt, Human adenovirus A
aacaacaagcua

SEQ ID NO: 102367 - RNA, 16 nt, Human adenovirus A
aaaucgcacacuugcu

SEQ ID NO: 102368 - RNA, 19 nt, Human adenovirus A
aagcucuugaccaccguuc

SEQ ID NO: 102369 - RNA, 15 nt, Human adenovirus A
aagggcuucauguuc

SEQ ID NO: 102370 - RNA, 18 nt, Human adenovirus A
cauccagugcgcguacgc

SEQ ID NO: 102371 - RNA, 14 nt, Human adenovirus A
augcaaggcgccgc

SEQ ID NO: 102372 - RNA, 17 nt, Homo sapiens
acagggccagugcaguu

SEQ ID NO: 102373 - RNA, 20 nt, Homo sapiens
agugcaguuugguguguccu

SEQ ID NO: 102374 - RNA, 16 nt, Homo sapiens
cgucgguccuggugcc

SEQ ID NO: 102375 - RNA, 14 nt, Homo sapiens
augucaagagucgc

SEQ ID NO: 102376 - RNA, 13 nt, Homo sapiens
gagccugguccca

SEQ ID NO: 102377 - RNA, 13 nt, Homo sapiens
gggaggcagggga

SEQ ID NO: 102378 - RNA, 16 nt, Homo sapiens
ggucccacgagggugc

SEQ ID NO: 102379 - RNA, 23 nt, Homo sapiens
ccacgggcccggguugggucacc

SEQ ID NO: 102380 - RNA, 12 nt, Homo sapiens
acagggccagug

SEQ ID NO: 102381 - RNA, 21 nt, Homo sapiens
agccuggucccacgagggugc

SEQ ID NO: 102382 - RNA, 23 nt, Homo sapiens
aggggugcggcggucccagcucc

SEQ ID NO: 102383 - RNA, 21 nt, Homo sapiens
cccugacagggccagugcagu

SEQ ID NO: 102384 - RNA, 17 nt, Homo sapiens
gcugagccuggucccac

SEQ ID NO: 102385 - RNA, 14 nt, Homo sapiens
gcaggggaggggug

SEQ ID NO: 102386 - RNA, 20 nt, Homo sapiens
agcccaggggccggccagug

SEQ ID NO: 102387 - RNA, 17 nt, Homo sapiens
uccccugacagggccag

SEQ ID NO: 102388 - RNA, 15 nt, Homo sapiens
gugcggcggucccag

SEQ ID NO: 102389 - RNA, 14 nt, Homo sapiens
guguggggccaugc

SEQ ID NO: 102390 - RNA, 19 nt, Homo sapiens
cccaggggccggccagugg

SEQ ID NO: 102391 - RNA, 18 nt, Homo sapiens
cccaggggccggccagug

SEQ ID NO: 102392 - RNA, 21 nt, Homo sapiens
cgggcaggguguggggccaug

SEQ ID NO: 102393 - RNA, 22 nt, Homo sapiens
aagcccaggggccggccagugg

SEQ ID NO: 102394 - RNA, 16 nt, Homo sapiens
ccacgagggugccgug

SEQ ID NO: 102395 - RNA, 14 nt, Homo sapiens
gccuuaccaggaga

SEQ ID NO: 102396 - RNA, 15 nt, Homo sapiens
agucgcugugccaca

SEQ ID NO: 102397 - RNA, 17 nt, Homo sapiens
agagucgcugugccaca

SEQ ID NO: 102398 - RNA, 13 nt, Homo sapiens
ccacgagggugcc

SEQ ID NO: 102399 - RNA, 12 nt, Homo sapiens
cagggccagugc

SEQ ID NO: 102400 - RNA, 21 nt, Homo sapiens
ucauuugacuaagagucucca

SEQ ID NO: 102401 - RNA, 17 nt, Homo sapiens
cccacgagggugccgug

SEQ ID NO: 102402 - RNA, 14 nt, Homo sapiens
caggggaggggugc

SEQ ID NO: 102403 - RNA, 20 nt, Homo sapiens
uccccugacagggccagugc

SEQ ID NO: 102404 - RNA, 14 nt, Homo sapiens
uggggccaugccuc

SEQ ID NO: 102405 - RNA, 17 nt, Homo sapiens
auuugacuaagagucuc

SEQ ID NO: 102406 - RNA, 18 nt, Homo sapiens
cccugacagggccagugc

SEQ ID NO: 102407 - RNA, 16 nt, Homo sapiens
uguccccugacagggc

SEQ ID NO: 102408 - RNA, 15 nt, Homo sapiens
ugacagggccagugc

SEQ ID NO: 102409 - RNA, 20 nt, Homo sapiens
ccugacagggccagugcagu

SEQ ID NO: 102410 - RNA, 18 nt, Homo sapiens
gacagggccagugcaguu

SEQ ID NO: 102411 - RNA, 16 nt, Homo sapiens
caugccuccucaggag

SEQ ID NO: 102412 - RNA, 15 nt, Homo sapiens
ucccacgagggugcc

SEQ ID NO: 102413 - RNA, 19 nt, Homo sapiens
gcccuggaugcccaggaau

SEQ ID NO: 102414 - RNA, 12 nt, Homo sapiens
gggccaugccuc

SEQ ID NO: 102415 - RNA, 13 nt, Homo sapiens
cccacgagggugc

SEQ ID NO: 102416 - RNA, 22 nt, Homo sapiens
uccccugacagggccagugcag

SEQ ID NO: 102417 - RNA, 15 nt, Homo sapiens
cuggaugcccaggaa

SEQ ID NO: 102418 - RNA, 22 nt, Homo sapiens
ccccaggagggaggcaggggag

SEQ ID NO: 102419 - RNA, 19 nt, Homo sapiens
auuuauggccgggcagggu

SEQ ID NO: 102420 - RNA, 13 nt, Homo sapiens
cggguugggucac

SEQ ID NO: 102421 - RNA, 19 nt, Homo sapiens
cugacagggccagugcagu

SEQ ID NO: 102422 - RNA, 22 nt, Homo sapiens
auugguuuuccaaucauuugac

SEQ ID NO: 102423 - RNA, 18 nt, Homo sapiens
cugagccuggucccacga

SEQ ID NO: 102424 - RNA, 16 nt, Homo sapiens
aggggccggccagugg

SEQ ID NO: 102425 - RNA, 13 nt, Homo sapiens
gguccuggugccc

SEQ ID NO: 102426 - RNA, 12 nt, Homo sapiens
ggccaguggccu

SEQ ID NO: 102427 - RNA, 16 nt, Homo sapiens
cugacagggccagugc

SEQ ID NO: 102428 - RNA, 18 nt, Homo sapiens
caggggccggccaguggc

SEQ ID NO: 102429 - RNA, 17 nt, Homo sapiens
ggcucccaugucaagag

SEQ ID NO: 102430 - RNA, 19 nt, Homo sapiens
ugcaggaccucgugccacc

SEQ ID NO: 102431 - RNA, 23 nt, Homo sapiens
guguccccugacagggccagugc

SEQ ID NO: 102432 - RNA, 19 nt, Homo sapiens
cucugcgucgguccuggug

SEQ ID NO: 102433 - RNA, 14 nt, Homo sapiens
uggccgggcagggu

SEQ ID NO: 102434 - RNA, 14 nt, Homo sapiens
ucgguccuggugcc

SEQ ID NO: 102435 - RNA, 15 nt, Homo sapiens
gcgucgguccuggug

SEQ ID NO: 102436 - RNA, 13 nt, Homo sapiens
cuggcucccaugu

SEQ ID NO: 102437 - RNA, 14 nt, Homo sapiens
ugacagggccagug

SEQ ID NO: 102438 - RNA, 18 nt, Homo sapiens
gcucugcgucgguccugg

SEQ ID NO: 102439 - RNA, 17 nt, Homo sapiens
gacagggccagugcagu

SEQ ID NO: 102440 - RNA, 16 nt, Homo sapiens
ccugcaggaccucgug

SEQ ID NO: 102441 - RNA, 18 nt, Homo sapiens
gccaugccuccucaggag

SEQ ID NO: 102442 - RNA, 23 nt, Homo sapiens
gguccugcagccugcaggaccuc

SEQ ID NO: 102443 - RNA, 15 nt, Homo sapiens
ugacuaagagucucc

SEQ ID NO: 102444 - RNA, 13 nt, Homo sapiens
ucgcugugccaca

SEQ ID NO: 102445 - RNA, 14 nt, Homo sapiens
gagucgcugugcca

SEQ ID NO: 102446 - RNA, 15 nt, Homo sapiens
ggaccucgugccacc

SEQ ID NO: 102447 - RNA, 14 nt, Homo sapiens
gggccggccagugg

SEQ ID NO: 102448 - RNA, 15 nt, Homo sapiens
cugacagggccagug

SEQ ID NO: 102449 - RNA, 19 nt, Homo sapiens
caguuugguguguccuccg

SEQ ID NO: 102450 - RNA, 16 nt, Homo sapiens
acaggaccccagcucu

SEQ ID NO: 102451 - RNA, 19 nt, Homo sapiens
cugcagccugcaggaccuc

SEQ ID NO: 102452 - RNA, 21 nt, Homo sapiens
gccuggucccacgagggugcc

SEQ ID NO: 102453 - RNA, 19 nt, Homo sapiens
uguccccugacagggccag

SEQ ID NO: 102454 - RNA, 16 nt, Homo sapiens
agagucgcugugccac

SEQ ID NO: 102455 - RNA, 13 nt, Homo sapiens
accucgugccacc

SEQ ID NO: 102456 - RNA, 15 nt, Homo sapiens
aucauuugacuaaga

SEQ ID NO: 102457 - RNA, 13 nt, Homo sapiens
gggccagugcagu

SEQ ID NO: 102458 - RNA, 17 nt, Homo sapiens
gccugcaggaccucgug

SEQ ID NO: 102459 - RNA, 21 nt, Homo sapiens
uguccccugacagggccagug

SEQ ID NO: 102460 - RNA, 21 nt, Homo sapiens
agggaggcaggggaggggugc

SEQ ID NO: 102461 - RNA, 13 nt, Homo sapiens
ggaccucgugcca

SEQ ID NO: 102462 - RNA, 18 nt, Homo sapiens
gcccuggaugcccaggaa

SEQ ID NO: 102463 - RNA, 22 nt, Homo sapiens
ggcuggagugugaggguccugc

SEQ ID NO: 102464 - RNA, 15 nt, Homo sapiens
ggccgggcagggugu

SEQ ID NO: 102465 - RNA, 16 nt, Homo sapiens
gagucgcugugccaca

SEQ ID NO: 102466 - RNA, 16 nt, Homo sapiens
ccugacagggccagug

SEQ ID NO: 102467 - RNA, 16 nt, Homo sapiens
caccccgagggcugag

SEQ ID NO: 102468 - RNA, 17 nt, Homo sapiens
ccaggggccggccagug

SEQ ID NO: 102469 - RNA, 20 nt, Homo sapiens
gccgggcaggguguggggcc

SEQ ID NO: 102470 - RNA, 24 nt, Homo sapiens
ggcucccaugucaagagucgcugu

SEQ ID NO: 102471 - RNA, 14 nt, Homo sapiens
ugucaagagucgcu

SEQ ID NO: 102472 - RNA, 12 nt, Homo sapiens
ggcagggugugg

SEQ ID NO: 102473 - RNA, 16 nt, Homo sapiens
gugcaguuuggugugu

SEQ ID NO: 102474 - RNA, 20 nt, Human adenovirus B (HAdV-B)
aaaaacuuuuccucacuaca

SEQ ID NO: 102475 - RNA, 15 nt, Human adenovirus B (HAdV-B)
aaaaauacaauggac

SEQ ID NO: 102476 - RNA, 20 nt, Human adenovirus B (HAdV-B)
aaaacauacgggaacaaagc

SEQ ID NO: 102477 - RNA, 18 nt, Human adenovirus B (HAdV-B)
aaaacaagccaagauauc

SEQ ID NO: 102478 - RNA, 17 nt, Human adenovirus B (HAdV-B)
aaaaaucuacccagacc

SEQ ID NO: 102479 - RNA, 18 nt, Human adenovirus B (HAdV-B)
aaaaaucacuuacuugaa

SEQ ID NO: 102480 - RNA, 19 nt, Human adenovirus B (HAdV-B)
aaaaaucacuuacuugaaa

SEQ ID NO: 102481 - RNA, 21 nt, Human adenovirus B (HAdV-B)
aaaaauauguuaacuguucac

SEQ ID NO: 102482 - RNA, 22 nt, Human adenovirus B (HAdV-B)
aaaaauuuguuuuuucugucuu

SEQ ID NO: 102483 - RNA, 15 nt, Human adenovirus B (HAdV-B)
aaaacguauaaauaa

SEQ ID NO: 102484 - RNA, 19 nt, Human adenovirus B (HAdV-B)
aaaacuuuggggugggauu

SEQ ID NO: 102485 - RNA, 12 nt, Human adenovirus B (HAdV-B)
aaaacaugcaac

SEQ ID NO: 102486 - RNA, 13 nt, Human adenovirus B (HAdV-B)
aaaacaugcaaca

SEQ ID NO: 102487 - RNA, 11 nt, Human adenovirus B (HAdV-B)
aaaacuugagg

SEQ ID NO: 102488 - RNA, 21 nt, Human adenovirus B (HAdV-B)
aaaacuugaggacuuguuaca

SEQ ID NO: 102489 - RNA, 18 nt, Human adenovirus B (HAdV-B)
aaaagaaaaauuugccaa

SEQ ID NO: 102490 - RNA, 22 nt, Human adenovirus B (HAdV-B)
aaccuguggaaaucaaguacca

SEQ ID NO: 102491 - RNA, 16 nt, Human adenovirus B (HAdV-B)
aaccugaaagagaguu

SEQ ID NO: 102492 - RNA, 12 nt, Human adenovirus B (HAdV-B)
aacccaaccagc

SEQ ID NO: 102493 - RNA, 13 nt, Human adenovirus B (HAdV-B)
aacccaaccagcg

SEQ ID NO: 102494 - RNA, 22 nt, Human adenovirus B (HAdV-B)
aaccaugcaggcuauacuacca

SEQ ID NO: 102495 - RNA, 20 nt, Human adenovirus B (HAdV-B)
aaccacgaaaaugccaaaua

SEQ ID NO: 102496 - RNA, 21 nt, Human adenovirus B (HAdV-B)
aaccacgaaaaugccaaauau

SEQ ID NO: 102497 - RNA, 18 nt, Human adenovirus B (HAdV-B)
aaccagcagcggcaguua

SEQ ID NO: 102498 - RNA, 12 nt, Human adenovirus B (HAdV-B)
aaccaggcugug

SEQ ID NO: 102499 - RNA, 14 nt, Human adenovirus B (HAdV-B)
aaccaggcugugca

SEQ ID NO: 102500 - RNA, 23 nt, Human adenovirus B (HAdV-B)
aacuauaggcucaaacugcacac

SEQ ID NO: 102501 - RNA, 16 nt, Human adenovirus B (HAdV-B)
aacuuauagacuggau

SEQ ID NO: 102502 - RNA, 21 nt, Human adenovirus B (HAdV-B)
aacgugacagcaaaugacaaa

SEQ ID NO: 102503 - RNA, 19 nt, Human adenovirus B (HAdV-B)
aacaucguaacguucucca

SEQ ID NO: 102504 - RNA, 15 nt, Human adenovirus B (HAdV-B)
aacaugcaacaucca

SEQ ID NO: 102505 - RNA, 16 nt, Human adenovirus B (HAdV-B)
aacaugcaacauccaa

SEQ ID NO: 102506 - RNA, 13 nt, Human adenovirus B (HAdV-B)
aaccaauuuggac

SEQ ID NO: 102507 - RNA, 18 nt, Human adenovirus B (HAdV-B)
aaccaccgucgaugaugu

SEQ ID NO: 102508 - RNA, 13 nt, Human adenovirus B (HAdV-B)
aacauuauuguac

SEQ ID NO: 102509 - RNA, 14 nt, Human adenovirus B (HAdV-B)
aacagaaaaccagc

SEQ ID NO: 102510 - RNA, 15 nt, Human adenovirus B (HAdV-B)
aacagaaaaccagca

SEQ ID NO: 102511 - RNA, 16 nt, Human adenovirus B (HAdV-B)
aacagaaaaccagcag

SEQ ID NO: 102512 - RNA, 15 nt, Human adenovirus B (HAdV-B)
aacagcaguacagga

SEQ ID NO: 102513 - RNA, 16 nt, Human adenovirus B (HAdV-B)
aacaaaacaaaaccaa

SEQ ID NO: 102514 - RNA, 16 nt, Human adenovirus B (HAdV-B)
aacaaaaccaauaaua

SEQ ID NO: 102515 - RNA, 18 nt, Human adenovirus B (HAdV-B)
aaauuuuagcuccucucc

SEQ ID NO: 102516 - RNA, 15 nt, Human adenovirus B (HAdV-B)
aaagauuacagccaa

SEQ ID NO: 102517 - RNA, 20 nt, Human adenovirus B (HAdV-B)
aaagauuacagccaacgagc

SEQ ID NO: 102518 - RNA, 21 nt, Human adenovirus B (HAdV-B)
aaagauucgauccgaugacaa

SEQ ID NO: 102519 - RNA, 19 nt, Human adenovirus B (HAdV-B)
aaagagggaagggaugaag

SEQ ID NO: 102520 - RNA, 19 nt, Human adenovirus B (HAdV-B)
aaacuugaggacuuguuac

SEQ ID NO: 102521 - RNA, 21 nt, Human adenovirus B (HAdV-B)
aaacuugaggacuuguuacag

SEQ ID NO: 102522 - RNA, 12 nt, Human adenovirus B (HAdV-B)
aaaaugccaaau

SEQ ID NO: 102523 - RNA, 16 nt, Human adenovirus B (HAdV-B)
aaaaucuuacauugau

SEQ ID NO: 102524 - RNA, 18 nt, Human adenovirus B (HAdV-B)
aaaaucacuuacuugaaa

SEQ ID NO: 102525 - RNA, 12 nt, Human adenovirus B (HAdV-B)
aaauagacucuc

SEQ ID NO: 102526 - RNA, 23 nt, Human adenovirus B (HAdV-B)
aaauagcagcugcaaccauggcc

SEQ ID NO: 102527 - RNA, 13 nt, Human adenovirus B (HAdV-B)
aaagcagugcgau

SEQ ID NO: 102528 - RNA, 13 nt, Human adenovirus B (HAdV-B)
aaagcgcuuuaaa

SEQ ID NO: 102529 - RNA, 18 nt, Human adenovirus B (HAdV-B)
aaagcgcuuucacagucc

SEQ ID NO: 102530 - RNA, 19 nt, Human adenovirus B (HAdV-B)
aaagcgcuuucacagucca

SEQ ID NO: 102531 - RNA, 16 nt, Human adenovirus B (HAdV-B)
aaaucucaauugcuca

SEQ ID NO: 102532 - RNA, 12 nt, Human adenovirus B (HAdV-B)
aaauauaaucag

SEQ ID NO: 102533 - RNA, 21 nt, Human adenovirus B (HAdV-B)
aaauuaugagaagaugcaugc

SEQ ID NO: 102534 - RNA, 17 nt, Human adenovirus B (HAdV-B)
aaauuaugugcauuuug

SEQ ID NO: 102535 - RNA, 15 nt, Human adenovirus B (HAdV-B)
aaaugcaaauuccaa

SEQ ID NO: 102536 - RNA, 17 nt, Human adenovirus B (HAdV-B)
aagugauguuuauugaa

SEQ ID NO: 102537 - RNA, 17 nt, Human adenovirus B (HAdV-B)
aagucccgcucccacca

SEQ ID NO: 102538 - RNA, 20 nt, Human adenovirus B (HAdV-B)
aaggaucggcagggauacaa

SEQ ID NO: 102539 - RNA, 23 nt, Human adenovirus B (HAdV-B)
aauaaaaaaaaaacucaccaagg

SEQ ID NO: 102540 - RNA, 15 nt, Human adenovirus B (HAdV-B)
aauacaaggaagaaa

SEQ ID NO: 102541 - RNA, 20 nt, Human adenovirus B (HAdV-B)
aagcucuuaauuugggccau

SEQ ID NO: 102542 - RNA, 17 nt, Human adenovirus B (HAdV-B)
aagcguugauuacuuug

SEQ ID NO: 102543 - RNA, 19 nt, Human adenovirus B (HAdV-B)
aagcguugauuacuuugau

SEQ ID NO: 102544 - RNA, 13 nt, Human adenovirus B (HAdV-B)
aagccaagauauc

SEQ ID NO: 102545 - RNA, 12 nt, Human adenovirus B (HAdV-B)
aagcauuuuccc

SEQ ID NO: 102546 - RNA, 18 nt, Human adenovirus B (HAdV-B)
aagcauuuucccuacuaa

SEQ ID NO: 102547 - RNA, 21 nt, Human adenovirus B (HAdV-B)
aagcauuuucccuacuaauac

SEQ ID NO: 102548 - RNA, 18 nt, Human adenovirus B (HAdV-B)
aagccauugacgucucua

SEQ ID NO: 102549 - RNA, 13 nt, Human adenovirus B (HAdV-B)
aagcgcuuucaca

SEQ ID NO: 102550 - RNA, 20 nt, Human adenovirus B (HAdV-B)
aagcgcuuucacaguccaac

SEQ ID NO: 102551 - RNA, 14 nt, Human adenovirus B (HAdV-B)
aagccguacauggg

SEQ ID NO: 102552 - RNA, 16 nt, Human adenovirus B (HAdV-B)
aagcaguuuggugaua

SEQ ID NO: 102553 - RNA, 19 nt, Human adenovirus B (HAdV-B)
aagaacgaugggaaucaua

SEQ ID NO: 102554 - RNA, 13 nt, Human adenovirus B (HAdV-B)
aagaagagugugu

SEQ ID NO: 102555 - RNA, 16 nt, Human adenovirus B (HAdV-B)
aagaacuuaaaguagc

SEQ ID NO: 102556 - RNA, 18 nt, Human adenovirus B (HAdV-B)
aacuuggcccccaacgac

SEQ ID NO: 102557 - RNA, 22 nt, Human adenovirus B (HAdV-B)
aaugcaaaaaaggcauauucug

SEQ ID NO: 102558 - RNA, 17 nt, Human adenovirus B (HAdV-B)
aaugguagagugcuuuu

SEQ ID NO: 102559 - RNA, 16 nt, Human adenovirus B (HAdV-B)
aaugggcauacaugca

SEQ ID NO: 102560 - RNA, 22 nt, Human adenovirus B (HAdV-B)
aauggagugguagauuuggcua

SEQ ID NO: 102561 - RNA, 14 nt, Human adenovirus B (HAdV-B)
aauggcaacaucaa

SEQ ID NO: 102562 - RNA, 21 nt, Human adenovirus B (HAdV-B)
aauggcuucacacaaagccca

SEQ ID NO: 102563 - RNA, 13 nt, Human adenovirus B (HAdV-B)
aauggacucugac

SEQ ID NO: 102564 - RNA, 23 nt, Human adenovirus B (HAdV-B)
aaugcuuguuacauaucuggaaa

SEQ ID NO: 102565 - RNA, 18 nt, Human adenovirus B (HAdV-B)
aaugcucccaaugcacau

SEQ ID NO: 102566 - RNA, 23 nt, Human adenovirus B (HAdV-B)
aaucgcauuucuuuugaucuagc

SEQ ID NO: 102567 - RNA, 16 nt, Human adenovirus B (HAdV-B)
aaucggaucuuuccaa

SEQ ID NO: 102568 - RNA, 13 nt, Human adenovirus B (HAdV-B)
aauauaugacaau

SEQ ID NO: 102569 - RNA, 17 nt, Human adenovirus B (HAdV-B)
aauaguaacuugcaaca

SEQ ID NO: 102570 - RNA, 18 nt, Human adenovirus B (HAdV-B)
aauuaugagaagaugcau

SEQ ID NO: 102571 - RNA, 19 nt, Human adenovirus B (HAdV-B)
aauuaugagaagaugcaug

SEQ ID NO: 102572 - RNA, 20 nt, Human adenovirus B (HAdV-B)
aauuaugagaagaugcaugc

SEQ ID NO: 102573 - RNA, 12 nt, Human adenovirus B (HAdV-B)
aauuaugccaag

SEQ ID NO: 102574 - RNA, 19 nt, Human adenovirus B (HAdV-B)
aauuggguucuucauuguc

SEQ ID NO: 102575 - RNA, 22 nt, Human adenovirus B (HAdV-B)
aauuuguuuuuucugucuugca

SEQ ID NO: 102576 - RNA, 23 nt, Human adenovirus B (HAdV-B)
aauuuguuuuuucugucuugcag

SEQ ID NO: 102577 - RNA, 14 nt, Human adenovirus B (HAdV-B)
acaaaacaaaacca

SEQ ID NO: 102578 - RNA, 15 nt, Human adenovirus B (HAdV-B)
acaaaacaaaaccaa

SEQ ID NO: 102579 - RNA, 12 nt, Human adenovirus B (HAdV-B)
aauuuuggcuca

SEQ ID NO: 102580 - RNA, 20 nt, Human adenovirus B (HAdV-B)
aauuuuucauccuuggcucc

SEQ ID NO: 102581 - RNA, 15 nt, Human adenovirus B (HAdV-B)
acaaaaccaugugac

SEQ ID NO: 102582 - RNA, 13 nt, Human adenovirus B (HAdV-B)
agaccugcuacca

SEQ ID NO: 102583 - RNA, 17 nt, Human adenovirus B (HAdV-B)
agaccugcuaccaauga

SEQ ID NO: 102584 - RNA, 19 nt, Human adenovirus B (HAdV-B)
agagccaccaccgaucaaa

SEQ ID NO: 102585 - RNA, 15 nt, Human adenovirus B (HAdV-B)
agagcucagagccau

SEQ ID NO: 102586 - RNA, 14 nt, Human adenovirus B (HAdV-B)
agagugugguugua

SEQ ID NO: 102587 - RNA, 17 nt, Human adenovirus B (HAdV-B)
agaguccggcucaguga

SEQ ID NO: 102588 - RNA, 21 nt, Human adenovirus B (HAdV-B)
agagugcuuuuugauugucac

SEQ ID NO: 102589 - RNA, 14 nt, Human adenovirus B (HAdV-B)
agaaugaagcaugu

SEQ ID NO: 102590 - RNA, 17 nt, Human adenovirus B (HAdV-B)
agaaugccaucaucucc

SEQ ID NO: 102591 - RNA, 16 nt, Human adenovirus B (HAdV-B)
agaauguuaugggauc

SEQ ID NO: 102592 - RNA, 14 nt, Human adenovirus B (HAdV-B)
agacagauuguuaa

SEQ ID NO: 102593 - RNA, 21 nt, Human adenovirus B (HAdV-B)
agacagcggcggcgaccucca

SEQ ID NO: 102594 - RNA, 20 nt, Human adenovirus B (HAdV-B)
agaccagggaaacaccacgg

SEQ ID NO: 102595 - RNA, 15 nt, Human adenovirus B (HAdV-B)
acuucccucuuccca

SEQ ID NO: 102596 - RNA, 16 nt, Human adenovirus B (HAdV-B)
acuucccucuucccaa

SEQ ID NO: 102597 - RNA, 20 nt, Human adenovirus B (HAdV-B)
acuucgaacuccccaaggau

SEQ ID NO: 102598 - RNA, 13 nt, Human adenovirus B (HAdV-B)
acuucaccuuucc

SEQ ID NO: 102599 - RNA, 15 nt, Human adenovirus B (HAdV-B)
acuuuuccucacuac

SEQ ID NO: 102600 - RNA, 15 nt, Human adenovirus B (HAdV-B)
agaaaaauuugccaa

SEQ ID NO: 102601 - RNA, 17 nt, Human adenovirus B (HAdV-B)
agaaaacugcacacuua

SEQ ID NO: 102602 - RNA, 13 nt, Human adenovirus B (HAdV-B)
agaagaugcaugc

SEQ ID NO: 102603 - RNA, 17 nt, Human adenovirus B (HAdV-B)
agaagauuaacuugcau

SEQ ID NO: 102604 - RNA, 14 nt, Human adenovirus B (HAdV-B)
agaagcauuuuccc

SEQ ID NO: 102605 - RNA, 19 nt, Human adenovirus B (HAdV-B)
agaagcauuuucccuacua

SEQ ID NO: 102606 - RNA, 22 nt, Human adenovirus B (HAdV-B)
agaagcauuuucccuacuaaua

SEQ ID NO: 102607 - RNA, 12 nt, Human adenovirus B (HAdV-B)
agaaauuacuug

SEQ ID NO: 102608 - RNA, 13 nt, Human adenovirus B (HAdV-B)
agaaauaaacuua

SEQ ID NO: 102609 - RNA, 19 nt, Human adenovirus B (HAdV-B)
agaaaucggaucuuuccaa

SEQ ID NO: 102610 - RNA, 15 nt, Human adenovirus B (HAdV-B)
acuaugacuaugcau

SEQ ID NO: 102611 - RNA, 19 nt, Human adenovirus B (HAdV-B)
acucggauuuugugaauug

SEQ ID NO: 102612 - RNA, 22 nt, Human adenovirus B (HAdV-B)
acucuccuacggacugccgcuu

SEQ ID NO: 102613 - RNA, 19 nt, Human adenovirus B (HAdV-B)
acucucgccugcaacgaau

SEQ ID NO: 102614 - RNA, 21 nt, Human adenovirus B (HAdV-B)
acugcacacuuacuuuugcac

SEQ ID NO: 102615 - RNA, 14 nt, Human adenovirus B (HAdV-B)
acucuggacagcuc

SEQ ID NO: 102616 - RNA, 16 nt, Human adenovirus B (HAdV-B)
acugaugcuagaucug

SEQ ID NO: 102617 - RNA, 15 nt, Human adenovirus B (HAdV-B)
acugcgcucugagaa

SEQ ID NO: 102618 - RNA, 21 nt, Human adenovirus B (HAdV-B)
acuggaucuacguccacugga

SEQ ID NO: 102619 - RNA, 22 nt, Human adenovirus B (HAdV-B)
acuggaucuacguccacuggac

SEQ ID NO: 102620 - RNA, 18 nt, Human adenovirus B (HAdV-B)
acuggcaccucaguacga

SEQ ID NO: 102621 - RNA, 23 nt, Human adenovirus B (HAdV-B)
acuaccaauauuuuugcuucuau

SEQ ID NO: 102622 - RNA, 19 nt, Human adenovirus B (HAdV-B)
acuacaagaacuucuauca

SEQ ID NO: 102623 - RNA, 21 nt, Human adenovirus B (HAdV-B)
acuaaggguugcauucacugc

SEQ ID NO: 102624 - RNA, 22 nt, Human adenovirus B (HAdV-B)
acuaaggguugcauucacugcu

SEQ ID NO: 102625 - RNA, 14 nt, Human adenovirus B (HAdV-B)
acuagaagcucaac

SEQ ID NO: 102626 - RNA, 15 nt, Human adenovirus B (HAdV-B)
acuaggcaacuguua

SEQ ID NO: 102627 - RNA, 13 nt, Human adenovirus B (HAdV-B)
acuauagccagca

SEQ ID NO: 102628 - RNA, 18 nt, Human adenovirus B (HAdV-B)
acuaucagaaugaccaca

SEQ ID NO: 102629 - RNA, 23 nt, Human adenovirus B (HAdV-B)
acguguucaauaaacaucacuuu

SEQ ID NO: 102630 - RNA, 21 nt, Human adenovirus B (HAdV-B)
acgagagcgugaugcagcagc

SEQ ID NO: 102631 - RNA, 22 nt, Human adenovirus B (HAdV-B)
accuguggaaaucaaguaccau

SEQ ID NO: 102632 - RNA, 17 nt, Human adenovirus B (HAdV-B)
accgaaaccaaauacuu

SEQ ID NO: 102633 - RNA, 23 nt, Human adenovirus B (HAdV-B)
acccugcaagccauugacgucuc

SEQ ID NO: 102634 - RNA, 19 nt, Human adenovirus B (HAdV-B)
acccucaagguccggccca

SEQ ID NO: 102635 - RNA, 18 nt, Human adenovirus B (HAdV-B)
accuauacacaccuugcu

SEQ ID NO: 102636 - RNA, 14 nt, Human adenovirus B (HAdV-B)
acccagucauaaca

SEQ ID NO: 102637 - RNA, 15 nt, Human adenovirus B (HAdV-B)
accccagacuguaua

SEQ ID NO: 102638 - RNA, 23 nt, Human adenovirus B (HAdV-B)
accaugcaggcuauacuaccaau

SEQ ID NO: 102639 - RNA, 20 nt, Human adenovirus B (HAdV-B)
accauggggugaacuuuccg

SEQ ID NO: 102640 - RNA, 14 nt, Human adenovirus B (HAdV-B)
acccgcuguugcca

SEQ ID NO: 102641 - RNA, 21 nt, Human adenovirus B (HAdV-B)
accacgccccgccaacaccuu

SEQ ID NO: 102642 - RNA, 14 nt, Human adenovirus B (HAdV-B)
accacgguggugca

SEQ ID NO: 102643 - RNA, 18 nt, Human adenovirus B (HAdV-B)
accacaggcggaucucua

SEQ ID NO: 102644 - RNA, 17 nt, Human adenovirus B (HAdV-B)
accacccgcuguugcca

SEQ ID NO: 102645 - RNA, 17 nt, Human adenovirus B (HAdV-B)
accaccgaucucuauca

SEQ ID NO: 102646 - RNA, 17 nt, Human adenovirus B (HAdV-B)
acauaauuacacucuca

SEQ ID NO: 102647 - RNA, 18 nt, Human adenovirus B (HAdV-B)
acauacaaaaucuuacau

SEQ ID NO: 102648 - RNA, 13 nt, Human adenovirus B (HAdV-B)
acauguggaguua

SEQ ID NO: 102649 - RNA, 14 nt, Human adenovirus B (HAdV-B)
acauguggaguuau

SEQ ID NO: 102650 - RNA, 23 nt, Human adenovirus B (HAdV-B)
acagcaaaugacaaaggcuucua

SEQ ID NO: 102651 - RNA, 19 nt, Human adenovirus B (HAdV-B)
acagauaagcccuuggugu

SEQ ID NO: 102652 - RNA, 20 nt, Human adenovirus B (HAdV-B)
acagauacaguagucaauau

SEQ ID NO: 102653 - RNA, 16 nt, Human adenovirus B (HAdV-B)
acagacaccuacuuca

SEQ ID NO: 102654 - RNA, 22 nt, Human adenovirus B (HAdV-B)
acagacauggcuucucuuacau

SEQ ID NO: 102655 - RNA, 15 nt, Human adenovirus B (HAdV-B)
acaguagucaauaua

SEQ ID NO: 102656 - RNA, 21 nt, Human adenovirus B (HAdV-B)
acaggcgacggcgugcuaucc

SEQ ID NO: 102657 - RNA, 22 nt, Human adenovirus B (HAdV-B)
acaccggauugcagcacugaaa

SEQ ID NO: 102658 - RNA, 21 nt, Human adenovirus B (HAdV-B)
acaccuugcuucacuuucuua

SEQ ID NO: 102659 - RNA, 13 nt, Human adenovirus B (HAdV-B)
acaccugcuaccu

SEQ ID NO: 102660 - RNA, 14 nt, Human adenovirus B (HAdV-B)
acagaaaaccagca

SEQ ID NO: 102661 - RNA, 16 nt, Human adenovirus B (HAdV-B)
acacuuacuuuugcac

SEQ ID NO: 102662 - RNA, 17 nt, Human adenovirus B (HAdV-B)
acaacguguucaauaaa

SEQ ID NO: 102663 - RNA, 18 nt, Human adenovirus B (HAdV-B)
agucuuuuaaagcgcuuu

SEQ ID NO: 102664 - RNA, 22 nt, Human adenovirus B (HAdV-B)
agucuuuuaaagcgcuuucaca

SEQ ID NO: 102665 - RNA, 13 nt, Human adenovirus B (HAdV-B)
auaaguguuccau

SEQ ID NO: 102666 - RNA, 22 nt, Human adenovirus B (HAdV-B)
auaagcccuugguguagguguu

SEQ ID NO: 102667 - RNA, 22 nt, Human adenovirus B (HAdV-B)
auacuaaggguugcauucacug

SEQ ID NO: 102668 - RNA, 17 nt, Human adenovirus B (HAdV-B)
auacuuggguugccacu

SEQ ID NO: 102669 - RNA, 17 nt, Human adenovirus B (HAdV-B)
auagacguagaugggau

SEQ ID NO: 102670 - RNA, 22 nt, Human adenovirus B (HAdV-B)
auacaugccacagaugucauag

SEQ ID NO: 102671 - RNA, 18 nt, Human adenovirus B (HAdV-B)
auacaauggacucugaca

SEQ ID NO: 102672 - RNA, 15 nt, Human adenovirus B (HAdV-B)
auacaaaaucuuaca

SEQ ID NO: 102673 - RNA, 15 nt, Human adenovirus B (HAdV-B)
auacagccaugguuu

SEQ ID NO: 102674 - RNA, 18 nt, Human adenovirus B (HAdV-B)
auacagccaugguuucca

SEQ ID NO: 102675 - RNA, 16 nt, Human adenovirus B (HAdV-B)
auccacaagacccaga

SEQ ID NO: 102676 - RNA, 12 nt, Human adenovirus B (HAdV-B)
auccacaguaga

SEQ ID NO: 102677 - RNA, 19 nt, Human adenovirus B (HAdV-B)
auccacaguagaucccaua

SEQ ID NO: 102678 - RNA, 20 nt, Human adenovirus B (HAdV-B)
auccuacgagaucaccgcua

SEQ ID NO: 102679 - RNA, 15 nt, Human adenovirus B (HAdV-B)
auccucgacaugagu

SEQ ID NO: 102680 - RNA, 11 nt, Human adenovirus B (HAdV-B)
aucuacugugg

SEQ ID NO: 102681 - RNA, 16 nt, Human adenovirus B (HAdV-B)
aucugaguuggcuuua

SEQ ID NO: 102682 - RNA, 17 nt, Human adenovirus B (HAdV-B)
aucugaguuggcuuuaa

SEQ ID NO: 102683 - RNA, 16 nt, Human adenovirus B (HAdV-B)
aucaaguaccaucuga

SEQ ID NO: 102684 - RNA, 14 nt, Human adenovirus B (HAdV-B)
aucaacgugacagc

SEQ ID NO: 102685 - RNA, 21 nt, Human adenovirus B (HAdV-B)
aucagaaauucccccaaauuu

SEQ ID NO: 102686 - RNA, 20 nt, Human adenovirus B (HAdV-B)
aucagaaugaccacagcaac

SEQ ID NO: 102687 - RNA, 16 nt, Human adenovirus B (HAdV-B)
auaugaugucucguca

SEQ ID NO: 102688 - RNA, 21 nt, Human adenovirus B (HAdV-B)
auauuggguugcaugauuaac

SEQ ID NO: 102689 - RNA, 16 nt, Human adenovirus B (HAdV-B)
auaugcuuauuccaau

SEQ ID NO: 102690 - RNA, 18 nt, Human adenovirus B (HAdV-B)
auauuugugugacagugc

SEQ ID NO: 102691 - RNA, 21 nt, Human adenovirus B (HAdV-B)
agcgcucuugcuaccaaggac

SEQ ID NO: 102692 - RNA, 18 nt, Human adenovirus B (HAdV-B)
agcgcuuucacaguccaa

SEQ ID NO: 102693 - RNA, 19 nt, Human adenovirus B (HAdV-B)
agcuccucuccuguaccca

SEQ ID NO: 102694 - RNA, 21 nt, Human adenovirus B (HAdV-B)
agcucaacgacuacaccgcuu

SEQ ID NO: 102695 - RNA, 18 nt, Human adenovirus B (HAdV-B)
agcguuccuaugaugagg

SEQ ID NO: 102696 - RNA, 14 nt, Human adenovirus B (HAdV-B)
agcauuugcuuccu

SEQ ID NO: 102697 - RNA, 20 nt, Human adenovirus B (HAdV-B)
agccuccagcugggccaaaa

SEQ ID NO: 102698 - RNA, 21 nt, Human adenovirus B (HAdV-B)
agccaugguuuccacuaccac

SEQ ID NO: 102699 - RNA, 20 nt, Human adenovirus B (HAdV-B)
agccauguuuuguccugauu

SEQ ID NO: 102700 - RNA, 22 nt, Human adenovirus B (HAdV-B)
agccauguuuuguccugauuua

SEQ ID NO: 102701 - RNA, 17 nt, Human adenovirus B (HAdV-B)
agccagcgcaaacccga

SEQ ID NO: 102702 - RNA, 23 nt, Human adenovirus B (HAdV-B)
agccagcgcaaacccgagaguua

SEQ ID NO: 102703 - RNA, 17 nt, Human adenovirus B (HAdV-B)
agccccccagguggaca

SEQ ID NO: 102704 - RNA, 21 nt, Human adenovirus B (HAdV-B)
agccccccagguggacaugau

SEQ ID NO: 102705 - RNA, 14 nt, Human adenovirus B (HAdV-B)
aggucgcagugcau

SEQ ID NO: 102706 - RNA, 20 nt, Human adenovirus B (HAdV-B)
aggggacugccccauggcau

SEQ ID NO: 102707 - RNA, 14 nt, Human adenovirus B (HAdV-B)
agucauaacaaggu

SEQ ID NO: 102708 - RNA, 15 nt, Human adenovirus B (HAdV-B)
agucauuauugaaca

SEQ ID NO: 102709 - RNA, 17 nt, Human adenovirus B (HAdV-B)
aggauuaaagauuacag

SEQ ID NO: 102710 - RNA, 18 nt, Human adenovirus B (HAdV-B)
aggacccccaaucacuuc

SEQ ID NO: 102711 - RNA, 17 nt, Human adenovirus B (HAdV-B)
aggacuuguuacagggu

SEQ ID NO: 102712 - RNA, 16 nt, Human adenovirus B (HAdV-B)
agcugccuauaguacu

SEQ ID NO: 102713 - RNA, 16 nt, Human adenovirus B (HAdV-B)
aggcgacggcgugcua

SEQ ID NO: 102714 - RNA, 16 nt, Human adenovirus B (HAdV-B)
aggccucggcuuccca

SEQ ID NO: 102715 - RNA, 20 nt, Human adenovirus B (HAdV-B)
agggcaucuagugguacuga

SEQ ID NO: 102716 - RNA, 21 nt, Human adenovirus B (HAdV-B)
agggcaucuagugguacugau

SEQ ID NO: 102717 - RNA, 14 nt, Human adenovirus B (HAdV-B)
aggccagugcacaa

SEQ ID NO: 102718 - RNA, 17 nt, Human adenovirus B (HAdV-B)
caccuuaaucccagaaa

SEQ ID NO: 102719 - RNA, 18 nt, Human adenovirus B (HAdV-B)
caccuuagaaaaugcaaa

SEQ ID NO: 102720 - RNA, 20 nt, Human adenovirus B (HAdV-B)
caccuuagaaaaugcaaauu

SEQ ID NO: 102721 - RNA, 15 nt, Human adenovirus B (HAdV-B)
cacuacaagaacuuc

SEQ ID NO: 102722 - RNA, 16 nt, Human adenovirus B (HAdV-B)
cacguuguuuacauga

SEQ ID NO: 102723 - RNA, 16 nt, Human adenovirus B (HAdV-B)
cagaaauuugcuauca

SEQ ID NO: 102724 - RNA, 22 nt, Human adenovirus B (HAdV-B)
cagaagccccccgggaacaaga

SEQ ID NO: 102725 - RNA, 20 nt, Human adenovirus B (HAdV-B)
cagaagaacgaaacuuuucc

SEQ ID NO: 102726 - RNA, 14 nt, Human adenovirus B (HAdV-B)
cagaagcauuuucc

SEQ ID NO: 102727 - RNA, 21 nt, Human adenovirus B (HAdV-B)
cagaagcauuuucccuacuaa

SEQ ID NO: 102728 - RNA, 23 nt, Human adenovirus B (HAdV-B)
cagaagcauuuucccuacuaaua

SEQ ID NO: 102729 - RNA, 13 nt, Human adenovirus B (HAdV-B)
caccauaauuuca

SEQ ID NO: 102730 - RNA, 18 nt, Human adenovirus B (HAdV-B)
caccaucgaaacagaaga

SEQ ID NO: 102731 - RNA, 17 nt, Human adenovirus B (HAdV-B)
caauggaugguuuacaa

SEQ ID NO: 102732 - RNA, 16 nt, Human adenovirus B (HAdV-B)
caauggcuugcagggu

SEQ ID NO: 102733 - RNA, 21 nt, Human adenovirus B (HAdV-B)
cacaccuugcuucacuuucuu

SEQ ID NO: 102734 - RNA, 17 nt, Human adenovirus B (HAdV-B)
caaugcacaugaucauc

SEQ ID NO: 102735 - RNA, 23 nt, Human adenovirus B (HAdV-B)
caagcaccggaucccgcaaugcg

SEQ ID NO: 102736 - RNA, 18 nt, Human adenovirus B (HAdV-B)
caaggucuuccuacagaa

SEQ ID NO: 102737 - RNA, 21 nt, Human adenovirus B (HAdV-B)
caagagaguccggcucaguga

SEQ ID NO: 102738 - RNA, 21 nt, Human adenovirus B (HAdV-B)
caagauauccuacgagaucac

SEQ ID NO: 102739 - RNA, 14 nt, Human adenovirus B (HAdV-B)
caagauuggaauaa

SEQ ID NO: 102740 - RNA, 21 nt, Human adenovirus B (HAdV-B)
caagugcagcaacaggaggau

SEQ ID NO: 102741 - RNA, 21 nt, Human adenovirus B (HAdV-B)
caaguuggugcgauuggguuu

SEQ ID NO: 102742 - RNA, 19 nt, Human adenovirus B (HAdV-B)
caauacauacucuuacaaa

SEQ ID NO: 102743 - RNA, 18 nt, Human adenovirus B (HAdV-B)
caauauagaaauuacuug

SEQ ID NO: 102744 - RNA, 17 nt, Human adenovirus B (HAdV-B)
caauaugcuuauuccaa

SEQ ID NO: 102745 - RNA, 23 nt, Human adenovirus B (HAdV-B)
caauauuugugugacagugcaau

SEQ ID NO: 102746 - RNA, 16 nt, Human adenovirus B (HAdV-B)
caacccugucuacccc

SEQ ID NO: 102747 - RNA, 18 nt, Human adenovirus B (HAdV-B)
caaccccagcugccuaua

SEQ ID NO: 102748 - RNA, 16 nt, Human adenovirus B (HAdV-B)
caacccccacuacucc

SEQ ID NO: 102749 - RNA, 18 nt, Human adenovirus B (HAdV-B)
caacccgccaauucuuca

SEQ ID NO: 102750 - RNA, 13 nt, Human adenovirus B (HAdV-B)
caaaaucuuacau

SEQ ID NO: 102751 - RNA, 15 nt, Human adenovirus B (HAdV-B)
caaaaucuuacauug

SEQ ID NO: 102752 - RNA, 18 nt, Human adenovirus B (HAdV-B)
caaaaggacaaguaacuu

SEQ ID NO: 102753 - RNA, 13 nt, Human adenovirus B (HAdV-B)
caaaaugcccaug

SEQ ID NO: 102754 - RNA, 15 nt, Human adenovirus B (HAdV-B)
caaauucaccaaugc

SEQ ID NO: 102755 - RNA, 18 nt, Human adenovirus B (HAdV-B)
caaauucaccaaugcaaa

SEQ ID NO: 102756 - RNA, 12 nt, Human adenovirus B (HAdV-B)
caaauuccaaca

SEQ ID NO: 102757 - RNA, 17 nt, Human adenovirus B (HAdV-B)
auucucaagugauucac

SEQ ID NO: 102758 - RNA, 12 nt, Human adenovirus B (HAdV-B)
auugccacagau

SEQ ID NO: 102759 - RNA, 14 nt, Human adenovirus B (HAdV-B)
auugccacagauaa

SEQ ID NO: 102760 - RNA, 16 nt, Human adenovirus B (HAdV-B)
auuggacccaggccau

SEQ ID NO: 102761 - RNA, 14 nt, Human adenovirus B (HAdV-B)
auugcuuuuugggc

SEQ ID NO: 102762 - RNA, 19 nt, Human adenovirus B (HAdV-B)
auuggacccaggccaugca

SEQ ID NO: 102763 - RNA, 23 nt, Human adenovirus B (HAdV-B)
auuaguaauggcaccaguagcca

SEQ ID NO: 102764 - RNA, 17 nt, Human adenovirus B (HAdV-B)
auuacuggcgguuccca

SEQ ID NO: 102765 - RNA, 23 nt, Human adenovirus B (HAdV-B)
auuacuggcgguucccaauaugc

SEQ ID NO: 102766 - RNA, 20 nt, Human adenovirus B (HAdV-B)
auuacuugguucguguuacc

SEQ ID NO: 102767 - RNA, 19 nt, Human adenovirus B (HAdV-B)
auuacgaaagugaaccaca

SEQ ID NO: 102768 - RNA, 21 nt, Human adenovirus B (HAdV-B)
auuuaacagaauacaccaauc

SEQ ID NO: 102769 - RNA, 17 nt, Human adenovirus B (HAdV-B)
auuggcucgcucugaaa

SEQ ID NO: 102770 - RNA, 12 nt, Human adenovirus B (HAdV-B)
auuuacaguaug

SEQ ID NO: 102771 - RNA, 20 nt, Human adenovirus B (HAdV-B)
auuugcuuccuaugcacuuu

SEQ ID NO: 102772 - RNA, 17 nt, Human adenovirus B (HAdV-B)
auuugaaaaucaauuca

SEQ ID NO: 102773 - RNA, 19 nt, Human adenovirus B (HAdV-B)
auuucuucuucaccauacu

SEQ ID NO: 102774 - RNA, 16 nt, Human adenovirus B (HAdV-B)
caaaaccaugugacca

SEQ ID NO: 102775 - RNA, 21 nt, Human adenovirus B (HAdV-B)
caaaaccggaggugagcucca

SEQ ID NO: 102776 - RNA, 22 nt, Human adenovirus B (HAdV-B)
caaaaccucugggaugcaaaug

SEQ ID NO: 102777 - RNA, 14 nt, Human adenovirus B (HAdV-B)
caaaaccuggaaca

SEQ ID NO: 102778 - RNA, 23 nt, Human adenovirus B (HAdV-B)
caaaacggcuccagcgagcaaga

SEQ ID NO: 102779 - RNA, 23 nt, Human adenovirus B (HAdV-B)
auuuggugcgggaaaauaugcau

SEQ ID NO: 102780 - RNA, 13 nt, Human adenovirus B (HAdV-B)
auuuucccuacua

SEQ ID NO: 102781 - RNA, 17 nt, Human adenovirus B (HAdV-B)
auuuucccuacuaauac

SEQ ID NO: 102782 - RNA, 22 nt, Human adenovirus B (HAdV-B)
auuuucccuacuaauacuacuu

SEQ ID NO: 102783 - RNA, 14 nt, Human adenovirus B (HAdV-B)
augggcaccuggag

SEQ ID NO: 102784 - RNA, 21 nt, Human adenovirus B (HAdV-B)
augggaucuacuguggaugga

SEQ ID NO: 102785 - RNA, 13 nt, Human adenovirus B (HAdV-B)
auggcaacaucaa

SEQ ID NO: 102786 - RNA, 17 nt, Human adenovirus B (HAdV-B)
auggcaccaguagccau

SEQ ID NO: 102787 - RNA, 20 nt, Human adenovirus B (HAdV-B)
aucuucaugucuuucuuccc

SEQ ID NO: 102788 - RNA, 16 nt, Human adenovirus B (HAdV-B)
aucuguugcaccauaa

SEQ ID NO: 102789 - RNA, 20 nt, Human adenovirus B (HAdV-B)
auggugggucuuugaaaaau

SEQ ID NO: 102790 - RNA, 22 nt, Human adenovirus B (HAdV-B)
augguuuccacuaccacauucc

SEQ ID NO: 102791 - RNA, 17 nt, Human adenovirus B (HAdV-B)
augguuuuagauuccac

SEQ ID NO: 102792 - RNA, 16 nt, Human adenovirus B (HAdV-B)
auguaaacaacguguu

SEQ ID NO: 102793 - RNA, 23 nt, Human adenovirus B (HAdV-B)
auguaguaaaagguaaaugggga

SEQ ID NO: 102794 - RNA, 13 nt, Human adenovirus B (HAdV-B)
auuacaacugaag

SEQ ID NO: 102795 - RNA, 18 nt, Human adenovirus B (HAdV-B)
auuacacacaauaacaaa

SEQ ID NO: 102796 - RNA, 15 nt, Human adenovirus B (HAdV-B)
auuaagaaaauggua

SEQ ID NO: 102797 - RNA, 14 nt, Human adenovirus B (HAdV-B)
auuaagacucuccu

SEQ ID NO: 102798 - RNA, 17 nt, Human adenovirus B (HAdV-B)
auguguacugaguuuaa

SEQ ID NO: 102799 - RNA, 16 nt, Human adenovirus B (HAdV-B)
auguugccauucucaa

SEQ ID NO: 102800 - RNA, 13 nt, Human adenovirus B (HAdV-B)
augucaaugggaa

SEQ ID NO: 102801 - RNA, 19 nt, Human adenovirus B (HAdV-B)
augucaaauuuuagcuccu

SEQ ID NO: 102802 - RNA, 23 nt, Human adenovirus B (HAdV-B)
augucauccaaauucaccaaugc

SEQ ID NO: 102803 - RNA, 17 nt, Human adenovirus B (HAdV-B)
augucuauguugugcca

SEQ ID NO: 102804 - RNA, 16 nt, Human adenovirus B (HAdV-B)
augucuuucuucccag

SEQ ID NO: 102805 - RNA, 21 nt, Human adenovirus B (HAdV-B)
cucuguuaacuucaccuuucc

SEQ ID NO: 102806 - RNA, 20 nt, Human adenovirus B (HAdV-B)
cucugggaugcaaaugcaau

SEQ ID NO: 102807 - RNA, 21 nt, Human adenovirus B (HAdV-B)
cucugggaugcaaaugcaaua

SEQ ID NO: 102808 - RNA, 13 nt, Human adenovirus B (HAdV-B)
cugcaacaaaaca

SEQ ID NO: 102809 - RNA, 22 nt, Human adenovirus B (HAdV-B)
cugcaacaaaacaaaaccaaua

SEQ ID NO: 102810 - RNA, 18 nt, Human adenovirus B (HAdV-B)
cugcaacgggugcuuacu

SEQ ID NO: 102811 - RNA, 15 nt, Human adenovirus B (HAdV-B)
cugcaagagcuuccu

SEQ ID NO: 102812 - RNA, 22 nt, Human adenovirus B (HAdV-B)
cugcacacuaaaaggaccucaa

SEQ ID NO: 102813 - RNA, 20 nt, Human adenovirus B (HAdV-B)
cugccgcucauggacaaaca

SEQ ID NO: 102814 - RNA, 15 nt, Human adenovirus B (HAdV-B)
cugccgcuucuucaa

SEQ ID NO: 102815 - RNA, 17 nt, Human adenovirus B (HAdV-B)
cugccuauaguacucca

SEQ ID NO: 102816 - RNA, 18 nt, Human adenovirus B (HAdV-B)
cugcucgcucacaccuca

SEQ ID NO: 102817 - RNA, 12 nt, Human adenovirus B (HAdV-B)
cugcucuuguuc

SEQ ID NO: 102818 - RNA, 18 nt, Human adenovirus B (HAdV-B)
cuggagcgggcuuaaaaa

SEQ ID NO: 102819 - RNA, 21 nt, Human adenovirus B (HAdV-B)
cuggaucuacguccacuggac

SEQ ID NO: 102820 - RNA, 14 nt, Human adenovirus B (HAdV-B)
cugcggaucccaaa

SEQ ID NO: 102821 - RNA, 15 nt, Human adenovirus B (HAdV-B)
cugcgccaccauccc

SEQ ID NO: 102822 - RNA, 17 nt, Human adenovirus B (HAdV-B)
cugguucgcuagugaau

SEQ ID NO: 102823 - RNA, 17 nt, Human adenovirus B (HAdV-B)
cuggcaccucaguacga

SEQ ID NO: 102824 - RNA, 16 nt, Human adenovirus B (HAdV-B)
cugucucaaccccagc

SEQ ID NO: 102825 - RNA, 24 nt, Human adenovirus B (HAdV-B)
cugucucaaccccagcugccuaua

SEQ ID NO: 102826 - RNA, 13 nt, Human adenovirus B (HAdV-B)
cugucucuguccg

SEQ ID NO: 102827 - RNA, 23 nt, Human adenovirus B (HAdV-B)
cuguggaaaucaaguaccaucug

SEQ ID NO: 102828 - RNA, 14 nt, Human adenovirus B (HAdV-B)
cuguguaguaacaa

SEQ ID NO: 102829 - RNA, 17 nt, Human adenovirus B (HAdV-B)
cuguguuccaggaccaa

SEQ ID NO: 102830 - RNA, 18 nt, Human adenovirus B (HAdV-B)
cuguuaacuucaccuuuc

SEQ ID NO: 102831 - RNA, 14 nt, Human adenovirus B (HAdV-B)
cuuaaaguagcaua

SEQ ID NO: 102832 - RNA, 15 nt, Human adenovirus B (HAdV-B)
cuguuuggaaugugg

SEQ ID NO: 102833 - RNA, 21 nt, Human adenovirus B (HAdV-B)
cuguuugguaaaacaagccaa

SEQ ID NO: 102834 - RNA, 13 nt, Human adenovirus B (HAdV-B)
cuccugcuugaaa

SEQ ID NO: 102835 - RNA, 15 nt, Human adenovirus B (HAdV-B)
cuccugcuugcauga

SEQ ID NO: 102836 - RNA, 16 nt, Human adenovirus B (HAdV-B)
cuccccaauuggcucc

SEQ ID NO: 102837 - RNA, 18 nt, Human adenovirus B (HAdV-B)
cucccccuucccauuuaa

SEQ ID NO: 102838 - RNA, 14 nt, Human adenovirus B (HAdV-B)
cucgcaacuaugcu

SEQ ID NO: 102839 - RNA, 22 nt, Human adenovirus B (HAdV-B)
cucgucagcaugaccaccaucg

SEQ ID NO: 102840 - RNA, 22 nt, Human adenovirus B (HAdV-B)
cucuacaaacgaaccuguggaa

SEQ ID NO: 102841 - RNA, 16 nt, Human adenovirus B (HAdV-B)
cucuagaauuaucauu

SEQ ID NO: 102842 - RNA, 19 nt, Human adenovirus B (HAdV-B)
cucuagaauuaucauugaa

SEQ ID NO: 102843 - RNA, 22 nt, Human adenovirus B (HAdV-B)
cucuaggacauaauuacacucu

SEQ ID NO: 102844 - RNA, 15 nt, Human adenovirus B (HAdV-B)
cucugauguaguaaa

SEQ ID NO: 102845 - RNA, 20 nt, Human adenovirus B (HAdV-B)
cucugaacuaucagaaugac

SEQ ID NO: 102846 - RNA, 16 nt, Human adenovirus B (HAdV-B)
cuacuaauacuacuuu

SEQ ID NO: 102847 - RNA, 18 nt, Human adenovirus B (HAdV-B)
cuaccuauacacaccuug

SEQ ID NO: 102848 - RNA, 22 nt, Human adenovirus B (HAdV-B)
cuauucccugggauauguuucu

SEQ ID NO: 102849 - RNA, 21 nt, Human adenovirus B (HAdV-B)
cuauuaugguuaugacagaua

SEQ ID NO: 102850 - RNA, 15 nt, Human adenovirus B (HAdV-B)
cuauuaguuacuuca

SEQ ID NO: 102851 - RNA, 16 nt, Human adenovirus B (HAdV-B)
cuauuaguuacuucaa

SEQ ID NO: 102852 - RNA, 13 nt, Human adenovirus B (HAdV-B)
cuauguugugcca

SEQ ID NO: 102853 - RNA, 16 nt, Human adenovirus B (HAdV-B)
cuauguugugccacua

SEQ ID NO: 102854 - RNA, 17 nt, Human adenovirus B (HAdV-B)
cucacaccucacuguaa

SEQ ID NO: 102855 - RNA, 14 nt, Human adenovirus B (HAdV-B)
cucccaaugcacau

SEQ ID NO: 102856 - RNA, 17 nt, Human adenovirus B (HAdV-B)
ccuuagaaaaugcaaau

SEQ ID NO: 102857 - RNA, 21 nt, Human adenovirus B (HAdV-B)
ccuuagaaaaugcaaauucca

SEQ ID NO: 102858 - RNA, 16 nt, Human adenovirus B (HAdV-B)
cgcacgggcagguucu

SEQ ID NO: 102859 - RNA, 13 nt, Human adenovirus B (HAdV-B)
cgcacauagucau

SEQ ID NO: 102860 - RNA, 13 nt, Human adenovirus B (HAdV-B)
cgcagacguccug

SEQ ID NO: 102861 - RNA, 19 nt, Human adenovirus B (HAdV-B)
cgcagcaguuggacuguga

SEQ ID NO: 102862 - RNA, 19 nt, Human adenovirus B (HAdV-B)
aaacagucgucucuauccc

SEQ ID NO: 102863 - RNA, 13 nt, Human adenovirus B (HAdV-B)
aaacaugcaacau

SEQ ID NO: 102864 - RNA, 13 nt, Human adenovirus B (HAdV-B)
cgcugcagagcca

SEQ ID NO: 102865 - RNA, 16 nt, Human adenovirus B (HAdV-B)
cgcugaguuacuuuca

SEQ ID NO: 102866 - RNA, 16 nt, Human adenovirus B (HAdV-B)
cgcugcugcaauuggc

SEQ ID NO: 102867 - RNA, 18 nt, Human adenovirus B (HAdV-B)
cuaaggguugcauucacu

SEQ ID NO: 102868 - RNA, 21 nt, Human adenovirus B (HAdV-B)
cgucuaucggccaucauggaa

SEQ ID NO: 102869 - RNA, 23 nt, Human adenovirus B (HAdV-B)
cgucucagaacagcgacucgccc

SEQ ID NO: 102870 - RNA, 15 nt, Human adenovirus B (HAdV-B)
cgucucuacaaacga

SEQ ID NO: 102871 - RNA, 16 nt, Human adenovirus B (HAdV-B)
cgucucuaucccucua

SEQ ID NO: 102872 - RNA, 20 nt, Human adenovirus B (HAdV-B)
cgucacagcagcagaggaaa

SEQ ID NO: 102873 - RNA, 19 nt, Human adenovirus B (HAdV-B)
cgguaaccuauugcauuug

SEQ ID NO: 102874 - RNA, 13 nt, Human adenovirus B (HAdV-B)
cgguaagaaggau

SEQ ID NO: 102875 - RNA, 15 nt, Human adenovirus B (HAdV-B)
cgcuuucacagucca

SEQ ID NO: 102876 - RNA, 22 nt, Human adenovirus B (HAdV-B)
cggaacccugcaagccauugac

SEQ ID NO: 102877 - RNA, 16 nt, Human adenovirus B (HAdV-B)
cggaaugcuuguuaca

SEQ ID NO: 102878 - RNA, 21 nt, Human adenovirus B (HAdV-B)
cggaccuuuggacuugaguac

SEQ ID NO: 102879 - RNA, 15 nt, Human adenovirus B (HAdV-B)
cggacugguauacaa

SEQ ID NO: 102880 - RNA, 15 nt, Human adenovirus B (HAdV-B)
caguccaacugcugc

SEQ ID NO: 102881 - RNA, 22 nt, Human adenovirus B (HAdV-B)
cagugauacguugcggaacuga

SEQ ID NO: 102882 - RNA, 19 nt, Human adenovirus B (HAdV-B)
cagugauagauaaaaaucc

SEQ ID NO: 102883 - RNA, 12 nt, Human adenovirus B (HAdV-B)
cagugcaaugua

SEQ ID NO: 102884 - RNA, 19 nt, Human adenovirus B (HAdV-B)
caguugaaaaccacgaaaa

SEQ ID NO: 102885 - RNA, 14 nt, Human adenovirus B (HAdV-B)
caguuggacuguga

SEQ ID NO: 102886 - RNA, 22 nt, Human adenovirus B (HAdV-B)
cauacucuuacaaagugcggua

SEQ ID NO: 102887 - RNA, 19 nt, Human adenovirus B (HAdV-B)
cauacucauuugugcauuu

SEQ ID NO: 102888 - RNA, 20 nt, Human adenovirus B (HAdV-B)
cauacucauuugugcauuua

SEQ ID NO: 102889 - RNA, 13 nt, Human adenovirus B (HAdV-B)
cauaauuacacuc

SEQ ID NO: 102890 - RNA, 17 nt, Human adenovirus B (HAdV-B)
cauaauuacacucucau

SEQ ID NO: 102891 - RNA, 20 nt, Human adenovirus B (HAdV-B)
cagacauggcuucucuuaca

SEQ ID NO: 102892 - RNA, 13 nt, Human adenovirus B (HAdV-B)
cagacuaauucaa

SEQ ID NO: 102893 - RNA, 14 nt, Human adenovirus B (HAdV-B)
cagacuagaacuuu

SEQ ID NO: 102894 - RNA, 20 nt, Human adenovirus B (HAdV-B)
caggcgacggcggugaugca

SEQ ID NO: 102895 - RNA, 14 nt, Human adenovirus B (HAdV-B)
caggccaugcaacg

SEQ ID NO: 102896 - RNA, 21 nt, Human adenovirus B (HAdV-B)
caggggacgcuacagugcagu

SEQ ID NO: 102897 - RNA, 22 nt, Human adenovirus B (HAdV-B)
caggggacgcuacagugcagua

SEQ ID NO: 102898 - RNA, 23 nt, Human adenovirus B (HAdV-B)
caggguuuauuuccccaaauggc

SEQ ID NO: 102899 - RNA, 15 nt, Human adenovirus B (HAdV-B)
caggcuauacuacca

SEQ ID NO: 102900 - RNA, 19 nt, Human adenovirus B (HAdV-B)
caggcuauacuaccaauau

SEQ ID NO: 102901 - RNA, 19 nt, Human adenovirus B (HAdV-B)
caggcugugcagaaaaaga

SEQ ID NO: 102902 - RNA, 12 nt, Human adenovirus B (HAdV-B)
cagguucacuuu

SEQ ID NO: 102903 - RNA, 14 nt, Human adenovirus B (HAdV-B)
cagguucacuuuaa

SEQ ID NO: 102904 - RNA, 18 nt, Human adenovirus B (HAdV-B)
ccaaugggcauacaugca

SEQ ID NO: 102905 - RNA, 17 nt, Human adenovirus B (HAdV-B)
ccaauaugcuuauucca

SEQ ID NO: 102906 - RNA, 12 nt, Human adenovirus B (HAdV-B)
ccaagauauccu

SEQ ID NO: 102907 - RNA, 22 nt, Human adenovirus B (HAdV-B)
ccaagauauccuacgagaucac

SEQ ID NO: 102908 - RNA, 17 nt, Human adenovirus B (HAdV-B)
ccaaaggugaagaacuu

SEQ ID NO: 102909 - RNA, 22 nt, Human adenovirus B (HAdV-B)
ccaaacggaguucuuacuuuaa

SEQ ID NO: 102910 - RNA, 20 nt, Human adenovirus B (HAdV-B)
ccaagacaauaaguguucca

SEQ ID NO: 102911 - RNA, 17 nt, Human adenovirus B (HAdV-B)
cauuucuuuugaucuag

SEQ ID NO: 102912 - RNA, 14 nt, Human adenovirus B (HAdV-B)
cauuaguaacaaca

SEQ ID NO: 102913 - RNA, 16 nt, Human adenovirus B (HAdV-B)
cauuaguaacaacacu

SEQ ID NO: 102914 - RNA, 17 nt, Human adenovirus B (HAdV-B)
cauuaguaacaacacuu

SEQ ID NO: 102915 - RNA, 21 nt, Human adenovirus B (HAdV-B)
cauuuaauguuugcgcuacuu

SEQ ID NO: 102916 - RNA, 17 nt, Human adenovirus B (HAdV-B)
cauagucauauaguuca

SEQ ID NO: 102917 - RNA, 22 nt, Human adenovirus B (HAdV-B)
cauacuuuaaaggggaugucaa

SEQ ID NO: 102918 - RNA, 18 nt, Human adenovirus B (HAdV-B)
cauauccguguuuacuua

SEQ ID NO: 102919 - RNA, 20 nt, Human adenovirus B (HAdV-B)
caucuacuucgaacucccca

SEQ ID NO: 102920 - RNA, 17 nt, Human adenovirus B (HAdV-B)
caucugcgcgaucuaca

SEQ ID NO: 102921 - RNA, 18 nt, Human adenovirus B (HAdV-B)
caucugcguauguagcau

SEQ ID NO: 102922 - RNA, 22 nt, Human adenovirus B (HAdV-B)
caugcuccgggguaguguugua

SEQ ID NO: 102923 - RNA, 17 nt, Human adenovirus B (HAdV-B)
ccauuaucaacgugaca

SEQ ID NO: 102924 - RNA, 21 nt, Human adenovirus B (HAdV-B)
ccaucagcgacggaugucuca

SEQ ID NO: 102925 - RNA, 18 nt, Human adenovirus B (HAdV-B)
ccaucagguucacuuuaa

SEQ ID NO: 102926 - RNA, 12 nt, Human adenovirus B (HAdV-B)
ccauccacagua

SEQ ID NO: 102927 - RNA, 13 nt, Human adenovirus B (HAdV-B)
ccaguaauaucau

SEQ ID NO: 102928 - RNA, 18 nt, Human adenovirus B (HAdV-B)
ccauacggucgaacgcag

SEQ ID NO: 102929 - RNA, 11 nt, Human adenovirus B (HAdV-B)
ccauacuuuaa

SEQ ID NO: 102930 - RNA, 18 nt, Human adenovirus B (HAdV-B)
ccacaaucuucaugucuu

SEQ ID NO: 102931 - RNA, 12 nt, Human adenovirus B (HAdV-B)
ccaauucuucaa

SEQ ID NO: 102932 - RNA, 23 nt, Human adenovirus B (HAdV-B)
ccagacaucacccuuacaccaga

SEQ ID NO: 102933 - RNA, 20 nt, Human adenovirus B (HAdV-B)
ccagaaaacugcacacuuac

SEQ ID NO: 102934 - RNA, 22 nt, Human adenovirus B (HAdV-B)
ccagcugggccaaaaggacaag

SEQ ID NO: 102935 - RNA, 18 nt, Human adenovirus B (HAdV-B)
ccagaggaacacauuccc

SEQ ID NO: 102936 - RNA, 19 nt, Human adenovirus B (HAdV-B)
ccagaagcauuuucccuac

SEQ ID NO: 102937 - RNA, 14 nt, Human adenovirus B (HAdV-B)
ccaggacuacucca

SEQ ID NO: 102938 - RNA, 20 nt, Human adenovirus B (HAdV-B)
cccauaguuaucacccagca

SEQ ID NO: 102939 - RNA, 17 nt, Human adenovirus B (HAdV-B)
cccauggcaugggaugg

SEQ ID NO: 102940 - RNA, 14 nt, Human adenovirus B (HAdV-B)
ccccacgcacagcu

SEQ ID NO: 102941 - RNA, 14 nt, Human adenovirus B (HAdV-B)
cccaggccaugcaa

SEQ ID NO: 102942 - RNA, 17 nt, Human adenovirus B (HAdV-B)
cccaggccaugcaacgu

SEQ ID NO: 102943 - RNA, 22 nt, Human adenovirus B (HAdV-B)
cccaaacggaguucuuacuuua

SEQ ID NO: 102944 - RNA, 17 nt, Human adenovirus B (HAdV-B)
cccagaccgugcagggu

SEQ ID NO: 102945 - RNA, 18 nt, Human adenovirus B (HAdV-B)
cccgcuguugccagauug

SEQ ID NO: 102946 - RNA, 21 nt, Human adenovirus B (HAdV-B)
cccuacaaaacaugcaacauc

SEQ ID NO: 102947 - RNA, 22 nt, Human adenovirus B (HAdV-B)
cccuacuaauacuacuuucaaa

SEQ ID NO: 102948 - RNA, 20 nt, Human adenovirus B (HAdV-B)
cccuagaccaccgaucucua

SEQ ID NO: 102949 - RNA, 13 nt, Human adenovirus B (HAdV-B)
ccccggacccaag

SEQ ID NO: 102950 - RNA, 17 nt, Human adenovirus B (HAdV-B)
cccgaacccaaccagcg

SEQ ID NO: 102951 - RNA, 18 nt, Human adenovirus B (HAdV-B)
ccuguagcgaauugagaa

SEQ ID NO: 102952 - RNA, 13 nt, Human adenovirus B (HAdV-B)
ccuguacccacaa

SEQ ID NO: 102953 - RNA, 12 nt, Human adenovirus B (HAdV-B)
aaacaaaaccaa

SEQ ID NO: 102954 - RNA, 20 nt, Human adenovirus B (HAdV-B)
ccugcugaagacccuaugcg

SEQ ID NO: 102955 - RNA, 23 nt, Human adenovirus B (HAdV-B)
ccugcgccgcagcgcucuugcua

SEQ ID NO: 102956 - RNA, 19 nt, Human adenovirus B (HAdV-B)
ccugcacggucuggguaga

SEQ ID NO: 102957 - RNA, 13 nt, Human adenovirus B (HAdV-B)
ccuccuaauggau

SEQ ID NO: 102958 - RNA, 18 nt, Human adenovirus B (HAdV-B)
ccuaguguaccaggaaag

SEQ ID NO: 102959 - RNA, 22 nt, Human adenovirus B (HAdV-B)
ccucaguacgauaccaccaggu

SEQ ID NO: 102960 - RNA, 15 nt, Human adenovirus B (HAdV-B)
ccuaagagaccugcu

SEQ ID NO: 102961 - RNA, 19 nt, Human adenovirus B (HAdV-B)
ccuaagagaccugcuacca

SEQ ID NO: 102962 - RNA, 16 nt, Human adenovirus B (HAdV-B)
ccggcauuaacuccuc

SEQ ID NO: 102963 - RNA, 16 nt, Human adenovirus B (HAdV-B)
ccuacaaaacaugcaa

SEQ ID NO: 102964 - RNA, 17 nt, Human adenovirus B (HAdV-B)
ccuacaaaacaugcaac

SEQ ID NO: 102965 - RNA, 18 nt, Human adenovirus B (HAdV-B)
ccuacagagucucugaca

SEQ ID NO: 102966 - RNA, 21 nt, Human adenovirus B (HAdV-B)
ccuacagagucucugacaaag

SEQ ID NO: 102967 - RNA, 18 nt, Human adenovirus B (HAdV-B)
ccuaccgaaaccaaauac

SEQ ID NO: 102968 - RNA, 18 nt, Human adenovirus B (HAdV-B)
ccuacuaauacuacuuuc

SEQ ID NO: 102969 - RNA, 19 nt, Human adenovirus B (HAdV-B)
ccuacuaauacuacuuuca

SEQ ID NO: 102970 - RNA, 18 nt, Human adenovirus B (HAdV-B)
ccuacuauagccagcaaa

SEQ ID NO: 102971 - RNA, 23 nt, Human adenovirus B (HAdV-B)
cccugacucaggacaaguuacuu

SEQ ID NO: 102972 - RNA, 16 nt, Human adenovirus B (HAdV-B)
ccgcuuucgcugcuuu

SEQ ID NO: 102973 - RNA, 13 nt, Human adenovirus B (HAdV-B)
ccggauguggcaa

SEQ ID NO: 102974 - RNA, 14 nt, Human adenovirus B (HAdV-B)
ccgcuguugccaga

SEQ ID NO: 102975 - RNA, 16 nt, Human adenovirus B (HAdV-B)
ccgcuguugccagauu

SEQ ID NO: 102976 - RNA, 21 nt, Human adenovirus B (HAdV-B)
ggacagaagauuaacuugcau

SEQ ID NO: 102977 - RNA, 21 nt, Human adenovirus B (HAdV-B)
ggacaauacauacucuuacaa

SEQ ID NO: 102978 - RNA, 14 nt, Human adenovirus B (HAdV-B)
ggacauaauuacac

SEQ ID NO: 102979 - RNA, 13 nt, Human adenovirus B (HAdV-B)
ggaccuuuggacu

SEQ ID NO: 102980 - RNA, 20 nt, Human adenovirus B (HAdV-B)
ggauugcaugaaagccuuug

SEQ ID NO: 102981 - RNA, 20 nt, Human adenovirus B (HAdV-B)
ggaugucucacgcuugccag

SEQ ID NO: 102982 - RNA, 21 nt, Human adenovirus B (HAdV-B)
ggacgauuggacccaggccau

SEQ ID NO: 102983 - RNA, 17 nt, Human adenovirus B (HAdV-B)
ggacgcagcugcagcug

SEQ ID NO: 102984 - RNA, 17 nt, Human adenovirus B (HAdV-B)
ggacgcuacagugcagu

SEQ ID NO: 102985 - RNA, 18 nt, Human adenovirus B (HAdV-B)
ggacgcuacagugcagua

SEQ ID NO: 102986 - RNA, 16 nt, Human adenovirus B (HAdV-B)
ggccaaagagcucaga

SEQ ID NO: 102987 - RNA, 18 nt, Human adenovirus B (HAdV-B)
ggcaugucaauugauguu

SEQ ID NO: 102988 - RNA, 14 nt, Human adenovirus B (HAdV-B)
ggccauguucauga

SEQ ID NO: 102989 - RNA, 14 nt, Human adenovirus B (HAdV-B)
ggcccauacuaguc

SEQ ID NO: 102990 - RNA, 16 nt, Human adenovirus B (HAdV-B)
ggauuuugugaauuga

SEQ ID NO: 102991 - RNA, 17 nt, Human adenovirus B (HAdV-B)
ggcugugcagaaaaaga

SEQ ID NO: 102992 - RNA, 18 nt, Human adenovirus B (HAdV-B)
ggcugaggugguaauaga

SEQ ID NO: 102993 - RNA, 17 nt, Human adenovirus B (HAdV-B)
ggccuaagagaccugcu

SEQ ID NO: 102994 - RNA, 14 nt, Human adenovirus B (HAdV-B)
ggcgaugaugggcu

SEQ ID NO: 102995 - RNA, 19 nt, Human adenovirus B (HAdV-B)
ggcuccagcaaaaacaaga

SEQ ID NO: 102996 - RNA, 13 nt, Human adenovirus B (HAdV-B)
gggaucugcaauc

SEQ ID NO: 102997 - RNA, 18 nt, Human adenovirus B (HAdV-B)
gggcaugagguagaccua

SEQ ID NO: 102998 - RNA, 14 nt, Human adenovirus B (HAdV-B)
gggcaggaugucac

SEQ ID NO: 102999 - RNA, 15 nt, Human adenovirus B (HAdV-B)
ggggcaucuccugug

SEQ ID NO: 103000 - RNA, 11 nt, Human adenovirus B (HAdV-B)
ggaacuggcac

SEQ ID NO: 103001 - RNA, 16 nt, Human adenovirus B (HAdV-B)
ggaacuggcaccucag

SEQ ID NO: 103002 - RNA, 18 nt, Human adenovirus B (HAdV-B)
ggaacgcgcggccaaaga

SEQ ID NO: 103003 - RNA, 23 nt, Human adenovirus B (HAdV-B)
ggaacucauugaguucaucuacu

SEQ ID NO: 103004 - RNA, 13 nt, Human adenovirus B (HAdV-B)
ggaacacauuccc

SEQ ID NO: 103005 - RNA, 20 nt, Human adenovirus B (HAdV-B)
ggaaugcucccaaugcacau

SEQ ID NO: 103006 - RNA, 18 nt, Human adenovirus B (HAdV-B)
ggaauggguuacuaugga

SEQ ID NO: 103007 - RNA, 17 nt, Human adenovirus B (HAdV-B)
ggaaucaccaacuuggg

SEQ ID NO: 103008 - RNA, 19 nt, Human adenovirus B (HAdV-B)
ggaaucuaaaaccaugucu

SEQ ID NO: 103009 - RNA, 15 nt, Human adenovirus B (HAdV-B)
gcuuguacugcacug

SEQ ID NO: 103010 - RNA, 13 nt, Human adenovirus B (HAdV-B)
gcuguugccagau

SEQ ID NO: 103011 - RNA, 18 nt, Human adenovirus B (HAdV-B)
gcuuucgguuggaaccca

SEQ ID NO: 103012 - RNA, 14 nt, Human adenovirus B (HAdV-B)
gcuuucacagucca

SEQ ID NO: 103013 - RNA, 12 nt, Human adenovirus B (HAdV-B)
gcuauacuacca

SEQ ID NO: 103014 - RNA, 13 nt, Human adenovirus B (HAdV-B)
gcuaucaucacaa

SEQ ID NO: 103015 - RNA, 17 nt, Human adenovirus B (HAdV-B)
gcuacuugcuauuccac

SEQ ID NO: 103016 - RNA, 21 nt, Human adenovirus B (HAdV-B)
gcuaggcggagcgguggugua

SEQ ID NO: 103017 - RNA, 22 nt, Human adenovirus B (HAdV-B)
gcgccuucaauuggagcaguau

SEQ ID NO: 103018 - RNA, 15 nt, Human adenovirus B (HAdV-B)
gcugaggugguaaua

SEQ ID NO: 103019 - RNA, 23 nt, Human adenovirus B (HAdV-B)
gcugucaugaguggaaacgcuuc

SEQ ID NO: 103020 - RNA, 21 nt, Human adenovirus B (HAdV-B)
gcccuccgggaccuguuugua

SEQ ID NO: 103021 - RNA, 17 nt, Human adenovirus B (HAdV-B)
gcccacggagugcggau

SEQ ID NO: 103022 - RNA, 11 nt, Human adenovirus B (HAdV-B)
gccagcuuuac

SEQ ID NO: 103023 - RNA, 14 nt, Human adenovirus B (HAdV-B)
gccaugcaacguau

SEQ ID NO: 103024 - RNA, 22 nt, Human adenovirus B (HAdV-B)
gccaugcgagccgcaagagcuc

SEQ ID NO: 103025 - RNA, 21 nt, Human adenovirus B (HAdV-B)
gccaugaugcuuccauaguaa

SEQ ID NO: 103026 - RNA, 15 nt, Human adenovirus B (HAdV-B)
gcauacaugccacag

SEQ ID NO: 103027 - RNA, 22 nt, Human adenovirus B (HAdV-B)
gcauacuuucuccauacuuuaa

SEQ ID NO: 103028 - RNA, 17 nt, Human adenovirus B (HAdV-B)
gccaaaaggacaaguaa

SEQ ID NO: 103029 - RNA, 17 nt, Human adenovirus B (HAdV-B)
gccagauugugauacua

SEQ ID NO: 103030 - RNA, 20 nt, Human adenovirus B (HAdV-B)
gccagauugugauacuauga

SEQ ID NO: 103031 - RNA, 19 nt, Human adenovirus B (HAdV-B)
gccaauuacgauccauguc

SEQ ID NO: 103032 - RNA, 15 nt, Human adenovirus B (HAdV-B)
gccaagauagcuuug

SEQ ID NO: 103033 - RNA, 18 nt, Human adenovirus B (HAdV-B)
gccaagggcaugucaauu

SEQ ID NO: 103034 - RNA, 22 nt, Human adenovirus B (HAdV-B)
gccuccuugcagauauggcccu

SEQ ID NO: 103035 - RNA, 22 nt, Human adenovirus B (HAdV-B)
gcgcaaaguucgacauguguug

SEQ ID NO: 103036 - RNA, 14 nt, Human adenovirus B (HAdV-B)
gcgagagaugccau

SEQ ID NO: 103037 - RNA, 14 nt, Human adenovirus B (HAdV-B)
gccugcggauccca

SEQ ID NO: 103038 - RNA, 13 nt, Human adenovirus B (HAdV-B)
gcaagagagccac

SEQ ID NO: 103039 - RNA, 12 nt, Human adenovirus B (HAdV-B)
gaucauccacaa

SEQ ID NO: 103040 - RNA, 17 nt, Human adenovirus B (HAdV-B)
gcacacuuacuuuugca

SEQ ID NO: 103041 - RNA, 19 nt, Human adenovirus B (HAdV-B)
gcacagcuuuaaacauuug

SEQ ID NO: 103042 - RNA, 16 nt, Human adenovirus B (HAdV-B)
gcaccuacacccugcu

SEQ ID NO: 103043 - RNA, 22 nt, Human adenovirus B (HAdV-B)
gcaccucaguacgauaccacca

SEQ ID NO: 103044 - RNA, 20 nt, Human adenovirus B (HAdV-B)
gcacgagccaacugaacggg

SEQ ID NO: 103045 - RNA, 17 nt, Human adenovirus B (HAdV-B)
gcacggugggaucugca

SEQ ID NO: 103046 - RNA, 19 nt, Human adenovirus B (HAdV-B)
gcagacucaguuuguacuc

SEQ ID NO: 103047 - RNA, 15 nt, Human adenovirus B (HAdV-B)
gcagacguccugaaa

SEQ ID NO: 103048 - RNA, 20 nt, Human adenovirus B (HAdV-B)
gcaggaugucacuccacagc

SEQ ID NO: 103049 - RNA, 22 nt, Human adenovirus B (HAdV-B)
gcaggaguucgucagaauguua

SEQ ID NO: 103050 - RNA, 13 nt, Human adenovirus B (HAdV-B)
gcagcugcagcug

SEQ ID NO: 103051 - RNA, 16 nt, Human adenovirus B (HAdV-B)
gcaggcgacggcggug

SEQ ID NO: 103052 - RNA, 18 nt, Human adenovirus B (HAdV-B)
gcaggcgacggcggugau

SEQ ID NO: 103053 - RNA, 14 nt, Human adenovirus B (HAdV-B)
gcagugucgcuaac

SEQ ID NO: 103054 - RNA, 13 nt, Human adenovirus B (HAdV-B)
gcaguagccacag

SEQ ID NO: 103055 - RNA, 22 nt, Human adenovirus B (HAdV-B)
gcaguagccacagcaaccccag

SEQ ID NO: 103056 - RNA, 21 nt, Human adenovirus B (HAdV-B)
gcaguaucuggagcgggcuua

SEQ ID NO: 103057 - RNA, 18 nt, Human adenovirus B (HAdV-B)
gagaucguuuggaauaaa

SEQ ID NO: 103058 - RNA, 23 nt, Human adenovirus B (HAdV-B)
gagauggugggucuuugaaaaau

SEQ ID NO: 103059 - RNA, 21 nt, Human adenovirus B (HAdV-B)
gacgucaauggcuugcagggu

SEQ ID NO: 103060 - RNA, 12 nt, Human adenovirus B (HAdV-B)
aacaaagcuauu

SEQ ID NO: 103061 - RNA, 15 nt, Human adenovirus B (HAdV-B)
gacggcggugaugca

SEQ ID NO: 103062 - RNA, 21 nt, Human adenovirus B (HAdV-B)
gauauuacuggcgguucccaa

SEQ ID NO: 103063 - RNA, 20 nt, Human adenovirus B (HAdV-B)
gaucaaaagaaaaaacaaag

SEQ ID NO: 103064 - RNA, 14 nt, Human adenovirus B (HAdV-B)
gauauaaucugcaa

SEQ ID NO: 103065 - RNA, 15 nt, Human adenovirus B (HAdV-B)
gauauaaucugcaac

SEQ ID NO: 103066 - RNA, 16 nt, Human adenovirus B (HAdV-B)
gaguuuugagggauga

SEQ ID NO: 103067 - RNA, 16 nt, Human adenovirus B (HAdV-B)
gaguucaucuacuucg

SEQ ID NO: 103068 - RNA, 20 nt, Human adenovirus B (HAdV-B)
gagugcgggggcaacauauc

SEQ ID NO: 103069 - RNA, 23 nt, Human adenovirus B (HAdV-B)
gagugcuuuuugauugucacaca

SEQ ID NO: 103070 - RNA, 11 nt, Human adenovirus B (HAdV-B)
gaggaacacau

SEQ ID NO: 103071 - RNA, 14 nt, Human adenovirus B (HAdV-B)
gaggaacacauucc

SEQ ID NO: 103072 - RNA, 14 nt, Human adenovirus B (HAdV-B)
gaguaaagaaauuc

SEQ ID NO: 103073 - RNA, 15 nt, Human adenovirus B (HAdV-B)
gagcugccagugcgc

SEQ ID NO: 103074 - RNA, 19 nt, Human adenovirus B (HAdV-B)
aaauuuguuuuuucugucu

SEQ ID NO: 103075 - RNA, 20 nt, Human adenovirus B (HAdV-B)
aaauuuuggcucaaccauaa

SEQ ID NO: 103076 - RNA, 20 nt, Human adenovirus B (HAdV-B)
gacgauuggacccaggccau

SEQ ID NO: 103077 - RNA, 16 nt, Human adenovirus B (HAdV-B)
gacgcagcugcagcug

SEQ ID NO: 103078 - RNA, 20 nt, Human adenovirus B (HAdV-B)
gaccugugugguuagcucau

SEQ ID NO: 103079 - RNA, 13 nt, Human adenovirus B (HAdV-B)
aaauucaccaaug

SEQ ID NO: 103080 - RNA, 14 nt, Human adenovirus B (HAdV-B)
aaauucaccaaugc

SEQ ID NO: 103081 - RNA, 13 nt, Human adenovirus B (HAdV-B)
aaauuaugugcau

SEQ ID NO: 103082 - RNA, 19 nt, Human adenovirus B (HAdV-B)
aaaugugcgaucuggccau

SEQ ID NO: 103083 - RNA, 13 nt, Human adenovirus B (HAdV-B)
aaauacaauggac

SEQ ID NO: 103084 - RNA, 13 nt, Human adenovirus B (HAdV-B)
aaaucaacaacaa

SEQ ID NO: 103085 - RNA, 14 nt, Human adenovirus B (HAdV-B)
aaaucaaguaccau

SEQ ID NO: 103086 - RNA, 16 nt, Human adenovirus B (HAdV-B)
aaaucaaguaccaucu

SEQ ID NO: 103087 - RNA, 18 nt, Human adenovirus B (HAdV-B)
aaaucaaguaccaucuga

SEQ ID NO: 103088 - RNA, 12 nt, Human adenovirus B (HAdV-B)
aaaucaaguguu

SEQ ID NO: 103089 - RNA, 16 nt, Human adenovirus B (HAdV-B)
aaaucagaaauucccc

SEQ ID NO: 103090 - RNA, 21 nt, Human adenovirus B (HAdV-B)
aaaucagcaauaaggucucug

SEQ ID NO: 103091 - RNA, 12 nt, Human adenovirus B (HAdV-B)
gaccacugccgc

SEQ ID NO: 103092 - RNA, 20 nt, Human adenovirus B (HAdV-B)
gaccagaacuuccaacaaaa

SEQ ID NO: 103093 - RNA, 21 nt, Human adenovirus B (HAdV-B)
gaccagaacuuccaacaaaaa

SEQ ID NO: 103094 - RNA, 23 nt, Human adenovirus B (HAdV-B)
aaauaaagugauguuuauugaac

SEQ ID NO: 103095 - RNA, 17 nt, Human adenovirus B (HAdV-B)
gacaucuagaccacugc

SEQ ID NO: 103096 - RNA, 21 nt, Human adenovirus B (HAdV-B)
gacaucacccuuacaccagag

SEQ ID NO: 103097 - RNA, 21 nt, Human adenovirus B (HAdV-B)
gaauuuucucccagcggcccg

SEQ ID NO: 103098 - RNA, 14 nt, Human adenovirus B (HAdV-B)
gacaaagugggcau

SEQ ID NO: 103099 - RNA, 18 nt, Human adenovirus B (HAdV-B)
gaaaucggaucuuuccaa

SEQ ID NO: 103100 - RNA, 16 nt, Human adenovirus B (HAdV-B)
gaacugacacgaauaa

SEQ ID NO: 103101 - RNA, 21 nt, Human adenovirus B (HAdV-B)
gaacugcaacgggugcuuacu

SEQ ID NO: 103102 - RNA, 22 nt, Human adenovirus B (HAdV-B)
gaacuuuugcagcaaacucucu

SEQ ID NO: 103103 - RNA, 18 nt, Human adenovirus B (HAdV-B)
gaagacuaggcaacuguu

SEQ ID NO: 103104 - RNA, 18 nt, Human adenovirus B (HAdV-B)
gaagcguugauuacuuug

SEQ ID NO: 103105 - RNA, 21 nt, Human adenovirus B (HAdV-B)
gaagagauggugggucuuuga

SEQ ID NO: 103106 - RNA, 23 nt, Human adenovirus B (HAdV-B)
aaacccaggguuuauuuccccaa

SEQ ID NO: 103107 - RNA, 16 nt, Human adenovirus B (HAdV-B)
gaauguuuuuuuggca

SEQ ID NO: 103108 - RNA, 14 nt, Human adenovirus B (HAdV-B)
gaauuaagacucuc

SEQ ID NO: 103109 - RNA, 17 nt, Human adenovirus B (HAdV-B)
gaauuaagacucuccua

SEQ ID NO: 103110 - RNA, 19 nt, Human adenovirus B (HAdV-B)
gaaugcucccaaugcacau

SEQ ID NO: 103111 - RNA, 18 nt, Human adenovirus B (HAdV-B)
gaaugcuuguuacauauc

SEQ ID NO: 103112 - RNA, 15 nt, Human adenovirus B (HAdV-B)
gaaugccaucaucuc

SEQ ID NO: 103113 - RNA, 16 nt, Human adenovirus B (HAdV-B)
aaagaaaaaacaaagg

SEQ ID NO: 103114 - RNA, 15 nt, Human adenovirus B (HAdV-B)
cuuuuugaagcucuu

SEQ ID NO: 103115 - RNA, 16 nt, Human adenovirus B (HAdV-B)
gaaaaaucuacccaga

SEQ ID NO: 103116 - RNA, 22 nt, Human adenovirus B (HAdV-B)
gaaaaaucuacccagaccgugc

SEQ ID NO: 103117 - RNA, 16 nt, Human adenovirus B (HAdV-B)
gaaaaacuuuuccuca

SEQ ID NO: 103118 - RNA, 20 nt, Human adenovirus B (HAdV-B)
gaaaauacacaacaagugca

SEQ ID NO: 103119 - RNA, 24 nt, Human adenovirus B (HAdV-B)
gaaaacugcacacuuacuuuugca

SEQ ID NO: 103120 - RNA, 14 nt, Human adenovirus B (HAdV-B)
gaaaaugccaaaua

SEQ ID NO: 103121 - RNA, 22 nt, Human adenovirus B (HAdV-B)
gaaaaucaauucacaaaauccg

SEQ ID NO: 103122 - RNA, 16 nt, Human adenovirus B (HAdV-B)
gaaaaugaaacccgag

SEQ ID NO: 103123 - RNA, 18 nt, Human adenovirus B (HAdV-B)
gaaacacaauccaguugc

SEQ ID NO: 103124 - RNA, 17 nt, Human adenovirus B (HAdV-B)
gaaacguccaagacaau

SEQ ID NO: 103125 - RNA, 20 nt, Human adenovirus B (HAdV-B)
gaaacuuuuccugucgucca

SEQ ID NO: 103126 - RNA, 13 nt, Human adenovirus B (HAdV-B)
gaaagcaccuccc

SEQ ID NO: 103127 - RNA, 21 nt, Human adenovirus B (HAdV-B)
cuuuuggaaccggguucugcc

SEQ ID NO: 103128 - RNA, 22 nt, Human adenovirus B (HAdV-B)
cuuuuggaaccggguucugcca

SEQ ID NO: 103129 - RNA, 12 nt, Human adenovirus B (HAdV-B)
cuuuuguuacuu

SEQ ID NO: 103130 - RNA, 19 nt, Human adenovirus B (HAdV-B)
cuuuuguuacuugcaucug

SEQ ID NO: 103131 - RNA, 21 nt, Human adenovirus B (HAdV-B)
cuuuuaaggggggagucuuca

SEQ ID NO: 103132 - RNA, 14 nt, Human adenovirus B (HAdV-B)
cuuuggacuugagu

SEQ ID NO: 103133 - RNA, 15 nt, Human adenovirus B (HAdV-B)
cuuugcuaccuauac

SEQ ID NO: 103134 - RNA, 17 nt, Human adenovirus B (HAdV-B)
cuuaaggugacgucaau

SEQ ID NO: 103135 - RNA, 15 nt, Human adenovirus B (HAdV-B)
cuuacgaacuuggcc

SEQ ID NO: 103136 - RNA, 22 nt, Human adenovirus B (HAdV-B)
cuuucacagcaguagccacagc

SEQ ID NO: 103137 - RNA, 19 nt, Human adenovirus B (HAdV-B)
cuuucacaguccaacugcu

SEQ ID NO: 103138 - RNA, 18 nt, Human adenovirus B (HAdV-B)
cuuucauuuuuucugaaa

SEQ ID NO: 103139 - RNA, 21 nt, Human adenovirus B (HAdV-B)
cuuucucuagcagcagugucg

SEQ ID NO: 103140 - RNA, 22 nt, Human adenovirus B (HAdV-B)
cuuucuuagugguguuguggua

SEQ ID NO: 103141 - RNA, 19 nt, Human adenovirus B (HAdV-B)
cuuucuggucagcugcaaa

SEQ ID NO: 103142 - RNA, 17 nt, Human adenovirus B (HAdV-B)
ggguugcauucacugcu

SEQ ID NO: 103143 - RNA, 19 nt, Human adenovirus B (HAdV-B)
gggucuuccauccacagua

SEQ ID NO: 103144 - RNA, 18 nt, Human adenovirus B (HAdV-B)
gggugaaauuaugugcau

SEQ ID NO: 103145 - RNA, 16 nt, Human adenovirus B (HAdV-B)
guacuccaccagaaca

SEQ ID NO: 103146 - RNA, 14 nt, Human adenovirus B (HAdV-B)
guacugaguuuaau

SEQ ID NO: 103147 - RNA, 16 nt, Human adenovirus B (HAdV-B)
guaggcugauugccac

SEQ ID NO: 103148 - RNA, 23 nt, Human adenovirus B (HAdV-B)
guauaaugaggcgagucgugcua

SEQ ID NO: 103149 - RNA, 17 nt, Human adenovirus B (HAdV-B)
guacuugaacuaucaca

SEQ ID NO: 103150 - RNA, 15 nt, Human adenovirus B (HAdV-B)
guagcagagguuugc

SEQ ID NO: 103151 - RNA, 17 nt, Human adenovirus B (HAdV-B)
guagcagagguuugcac

SEQ ID NO: 103152 - RNA, 22 nt, Human adenovirus B (HAdV-B)
guagcauagucugccugguuau

SEQ ID NO: 103153 - RNA, 16 nt, Human adenovirus B (HAdV-B)
guagccauguuuuguc

SEQ ID NO: 103154 - RNA, 15 nt, Human adenovirus B (HAdV-B)
guagauuuuucugca

SEQ ID NO: 103155 - RNA, 16 nt, Human adenovirus B (HAdV-B)
guagauuuuucugcaa

SEQ ID NO: 103156 - RNA, 14 nt, Human adenovirus B (HAdV-B)
guaugauaacagau

SEQ ID NO: 103157 - RNA, 21 nt, Human adenovirus B (HAdV-B)
guauaugugucauuacacgcc

SEQ ID NO: 103158 - RNA, 18 nt, Human adenovirus B (HAdV-B)
guaucaaggcucugcauu

SEQ ID NO: 103159 - RNA, 23 nt, Human adenovirus B (HAdV-B)
guaucaaggcucugcauuacuua

SEQ ID NO: 103160 - RNA, 13 nt, Human adenovirus B (HAdV-B)
gucaauugauguu

SEQ ID NO: 103161 - RNA, 18 nt, Human adenovirus B (HAdV-B)
gucaauugauguugccau

SEQ ID NO: 103162 - RNA, 18 nt, Human adenovirus B (HAdV-B)
gucaauauagaaauuacu

SEQ ID NO: 103163 - RNA, 11 nt, Human adenovirus B (HAdV-B)
guccacuggac

SEQ ID NO: 103164 - RNA, 18 nt, Human adenovirus B (HAdV-B)
gucauuauugaacaucca

SEQ ID NO: 103165 - RNA, 21 nt, Human adenovirus B (HAdV-B)
guccaacccgccaauucuuca

SEQ ID NO: 103166 - RNA, 21 nt, Human adenovirus B (HAdV-B)
gucauccaaauucaccaaugc

SEQ ID NO: 103167 - RNA, 18 nt, Human adenovirus B (HAdV-B)
guuaaacuuuauuuguca

SEQ ID NO: 103168 - RNA, 16 nt, Human adenovirus B (HAdV-B)
guucacuucaaugcau

SEQ ID NO: 103169 - RNA, 20 nt, Human adenovirus B (HAdV-B)
guuaugggaucuacugugga

SEQ ID NO: 103170 - RNA, 13 nt, Human adenovirus B (HAdV-B)
guuaacuguucac

SEQ ID NO: 103171 - RNA, 17 nt, Human adenovirus B (HAdV-B)
guucccaauaugcuuau

SEQ ID NO: 103172 - RNA, 15 nt, Human adenovirus B (HAdV-B)
guucagaugguacuu

SEQ ID NO: 103173 - RNA, 21 nt, Human adenovirus B (HAdV-B)
guucauggcccccgauaagcu

SEQ ID NO: 103174 - RNA, 16 nt, Human adenovirus B (HAdV-B)
guggaauuagccauga

SEQ ID NO: 103175 - RNA, 13 nt, Human adenovirus B (HAdV-B)
gugcgacugcugu

SEQ ID NO: 103176 - RNA, 18 nt, Human adenovirus B (HAdV-B)
gugccuccgcgauaccug

SEQ ID NO: 103177 - RNA, 20 nt, Human adenovirus B (HAdV-B)
gugcagaggcauacaugcca

SEQ ID NO: 103178 - RNA, 11 nt, Human adenovirus B (HAdV-B)
gugauggcgcu

SEQ ID NO: 103179 - RNA, 14 nt, Human adenovirus B (HAdV-B)
gugauacuaugacu

SEQ ID NO: 103180 - RNA, 22 nt, Human adenovirus B (HAdV-B)
gugauacuaugacuaugcauag

SEQ ID NO: 103181 - RNA, 20 nt, Human adenovirus B (HAdV-B)
gucuuccuuguucugccagc

SEQ ID NO: 103182 - RNA, 12 nt, Human adenovirus B (HAdV-B)
gucuugcagcug

SEQ ID NO: 103183 - RNA, 21 nt, Human adenovirus B (HAdV-B)
guugaccgggaggacaauaca

SEQ ID NO: 103184 - RNA, 20 nt, Human adenovirus B (HAdV-B)
guucugcaagagcuuccuau

SEQ ID NO: 103185 - RNA, 15 nt, Human adenovirus B (HAdV-B)
guugccacuugaauu

SEQ ID NO: 103186 - RNA, 20 nt, Human adenovirus B (HAdV-B)
guugccagauugugauacua

SEQ ID NO: 103187 - RNA, 15 nt, Human adenovirus B (HAdV-B)
uaaagaaauucccac

SEQ ID NO: 103188 - RNA, 19 nt, Human adenovirus B (HAdV-B)
uaaaccccguucagcggca

SEQ ID NO: 103189 - RNA, 12 nt, Human adenovirus B (HAdV-B)
uaacacugugcu

SEQ ID NO: 103190 - RNA, 18 nt, Human adenovirus B (HAdV-B)
uaacacugugcuuggaau

SEQ ID NO: 103191 - RNA, 15 nt, Human adenovirus B (HAdV-B)
uaacuugcaacauac

SEQ ID NO: 103192 - RNA, 18 nt, Human adenovirus B (HAdV-B)
uaacuugccuaucugugu

SEQ ID NO: 103193 - RNA, 14 nt, Human adenovirus B (HAdV-B)
uaagagaccugcua

SEQ ID NO: 103194 - RNA, 17 nt, Human adenovirus B (HAdV-B)
uacgagagcgugaugca

SEQ ID NO: 103195 - RNA, 14 nt, Human adenovirus B (HAdV-B)
uaccuggcaccuac

SEQ ID NO: 103196 - RNA, 13 nt, Human adenovirus B (HAdV-B)
uacaucucucaua

SEQ ID NO: 103197 - RNA, 14 nt, Human adenovirus B (HAdV-B)
uacaucucucauau

SEQ ID NO: 103198 - RNA, 21 nt, Human adenovirus B (HAdV-B)
uacauugauuaauguuagcaa

SEQ ID NO: 103199 - RNA, 15 nt, Human adenovirus B (HAdV-B)
uacucauuugugcau

SEQ ID NO: 103200 - RNA, 17 nt, Human adenovirus B (HAdV-B)
uacucauuugugcauuu

SEQ ID NO: 103201 - RNA, 20 nt, Human adenovirus B (HAdV-B)
uacgcugucucaaccccagc

SEQ ID NO: 103202 - RNA, 19 nt, Human adenovirus B (HAdV-B)
aacaaccguggucauuucu

SEQ ID NO: 103203 - RNA, 20 nt, Human adenovirus B (HAdV-B)
uacagccaugguuuccacua

SEQ ID NO: 103204 - RNA, 22 nt, Human adenovirus B (HAdV-B)
uacagacauggcuucucuuaca

SEQ ID NO: 103205 - RNA, 23 nt, Human adenovirus B (HAdV-B)
uacaggacaggcgcuuagaaaua

SEQ ID NO: 103206 - RNA, 23 nt, Human adenovirus B (HAdV-B)
uacaguauggugaacaccaauca

SEQ ID NO: 103207 - RNA, 14 nt, Human adenovirus B (HAdV-B)
uacagagucucuga

SEQ ID NO: 103208 - RNA, 19 nt, Human adenovirus B (HAdV-B)
uacagagucucugacaaag

SEQ ID NO: 103209 - RNA, 17 nt, Human adenovirus B (HAdV-B)
uaaggggacugccccau

SEQ ID NO: 103210 - RNA, 17 nt, Human adenovirus B (HAdV-B)
uaaggggggagucuuca

SEQ ID NO: 103211 - RNA, 17 nt, Human adenovirus B (HAdV-B)
uaauucaaggcuggaaa

SEQ ID NO: 103212 - RNA, 15 nt, Human adenovirus B (HAdV-B)
uaauucaaaacuaac

SEQ ID NO: 103213 - RNA, 17 nt, Human adenovirus B (HAdV-B)
uaauuacacucucauag

SEQ ID NO: 103214 - RNA, 15 nt, Human adenovirus B (HAdV-B)
uaucaccaaacugcu

SEQ ID NO: 103215 - RNA, 22 nt, Human adenovirus B (HAdV-B)
uaucaccaaacugcuuagccag

SEQ ID NO: 103216 - RNA, 16 nt, Human adenovirus B (HAdV-B)
uauccgcaagcaauug

SEQ ID NO: 103217 - RNA, 18 nt, Human adenovirus B (HAdV-B)
uauccguguuuacuuaag

SEQ ID NO: 103218 - RNA, 17 nt, Human adenovirus B (HAdV-B)
uaucgcugcugcaauug

SEQ ID NO: 103219 - RNA, 18 nt, Human adenovirus B (HAdV-B)
uaucgcugcugcaauugg

SEQ ID NO: 103220 - RNA, 16 nt, Human adenovirus B (HAdV-B)
uaucggccaucaugga

SEQ ID NO: 103221 - RNA, 19 nt, Human adenovirus B (HAdV-B)
uaugaagaugaaagcaccu

SEQ ID NO: 103222 - RNA, 17 nt, Human adenovirus B (HAdV-B)
uaugagaagaugcaugc

SEQ ID NO: 103223 - RNA, 18 nt, Human adenovirus B (HAdV-B)
uaugagaagaugcaugca

SEQ ID NO: 103224 - RNA, 22 nt, Human adenovirus B (HAdV-B)
uaugagagaguuuuuacaacua

SEQ ID NO: 103225 - RNA, 20 nt, Human adenovirus B (HAdV-B)
uaugcccuagaccaccgauc

SEQ ID NO: 103226 - RNA, 23 nt, Human adenovirus B (HAdV-B)
uaugcuaccguggaugauuuccu

SEQ ID NO: 103227 - RNA, 21 nt, Human adenovirus B (HAdV-B)
uacuggcgguucccaauaugc

SEQ ID NO: 103228 - RNA, 13 nt, Human adenovirus B (HAdV-B)
uagaaaaugcaaa

SEQ ID NO: 103229 - RNA, 15 nt, Human adenovirus B (HAdV-B)
uagaaaaugcaaauu

SEQ ID NO: 103230 - RNA, 18 nt, Human adenovirus B (HAdV-B)
uagaaaaugcaaauucca

SEQ ID NO: 103231 - RNA, 19 nt, Human adenovirus B (HAdV-B)
uagaaaaugcaaauuccaa

SEQ ID NO: 103232 - RNA, 19 nt, Human adenovirus B (HAdV-B)
uagaaauuucuucuucacc

SEQ ID NO: 103233 - RNA, 22 nt, Human adenovirus B (HAdV-B)
uagaaauuucuucuucaccaua

SEQ ID NO: 103234 - RNA, 22 nt, Human adenovirus B (HAdV-B)
uagaaguaggcugauugccaca

SEQ ID NO: 103235 - RNA, 24 nt, Human adenovirus B (HAdV-B)
uagaaguaggcugauugccacaga

SEQ ID NO: 103236 - RNA, 20 nt, Human adenovirus B (HAdV-B)
uauacagccaugguuuccac

SEQ ID NO: 103237 - RNA, 20 nt, Human adenovirus B (HAdV-B)
uauacgaauacaauaugaug

SEQ ID NO: 103238 - RNA, 11 nt, Human adenovirus B (HAdV-B)
uauaguacucc

SEQ ID NO: 103239 - RNA, 19 nt, Human adenovirus B (HAdV-B)
uauaguacuccaccagaac

SEQ ID NO: 103240 - RNA, 16 nt, Human adenovirus B (HAdV-B)
uauaguucaugugaug

SEQ ID NO: 103241 - RNA, 11 nt, Human adenovirus B (HAdV-B)
uauagccagca

SEQ ID NO: 103242 - RNA, 13 nt, Human adenovirus B (HAdV-B)
uauaggagcauuu

SEQ ID NO: 103243 - RNA, 17 nt, Human adenovirus B (HAdV-B)
uauauuggguugcauga

SEQ ID NO: 103244 - RNA, 18 nt, Human adenovirus B (HAdV-B)
uauauuggguugcaugau

SEQ ID NO: 103245 - RNA, 19 nt, Human adenovirus B (HAdV-B)
uauguagguuggauagcau

SEQ ID NO: 103246 - RNA, 19 nt, Human adenovirus B (HAdV-B)
uaugucuauguugugccac

SEQ ID NO: 103247 - RNA, 11 nt, Human adenovirus B (HAdV-B)
uaugugcauuu

SEQ ID NO: 103248 - RNA, 23 nt, Human adenovirus B (HAdV-B)
uauuaugguuaugacagauacag

SEQ ID NO: 103249 - RNA, 18 nt, Human adenovirus B (HAdV-B)
ucaacgcugaccuaugcu

SEQ ID NO: 103250 - RNA, 15 nt, Human adenovirus B (HAdV-B)
ucaaacugcacacua

SEQ ID NO: 103251 - RNA, 14 nt, Human adenovirus B (HAdV-B)
uauuugaaaaucaa

SEQ ID NO: 103252 - RNA, 18 nt, Human adenovirus B (HAdV-B)
ucaccauacucauuugug

SEQ ID NO: 103253 - RNA, 19 nt, Human adenovirus B (HAdV-B)
ucaauuuuucauccuuggc

SEQ ID NO: 103254 - RNA, 14 nt, Human adenovirus B (HAdV-B)
ucaauugauguugc

SEQ ID NO: 103255 - RNA, 17 nt, Human adenovirus B (HAdV-B)
ucaauugauguugccau

SEQ ID NO: 103256 - RNA, 22 nt, Human adenovirus B (HAdV-B)
ucaauugcucagaaauuugcua

SEQ ID NO: 103257 - RNA, 16 nt, Human adenovirus B (HAdV-B)
ucaauuggagcaguau

SEQ ID NO: 103258 - RNA, 14 nt, Human adenovirus B (HAdV-B)
ucaauggcuugcag

SEQ ID NO: 103259 - RNA, 17 nt, Human adenovirus B (HAdV-B)
ucaauggcuugcagggu

SEQ ID NO: 103260 - RNA, 21 nt, Human adenovirus B (HAdV-B)
ucaaugggaaaagcagugcga

SEQ ID NO: 103261 - RNA, 14 nt, Human adenovirus B (HAdV-B)
ucaaucugggaaau

SEQ ID NO: 103262 - RNA, 16 nt, Human adenovirus B (HAdV-B)
ucaggaagcaacucca

SEQ ID NO: 103263 - RNA, 23 nt, Human adenovirus B (HAdV-B)
ucaggcagaguuucuuguaaaaa

SEQ ID NO: 103264 - RNA, 19 nt, Human adenovirus B (HAdV-B)
ucauccaaauucaccaaug

SEQ ID NO: 103265 - RNA, 19 nt, Human adenovirus B (HAdV-B)
ucacuucagaggucaucug

SEQ ID NO: 103266 - RNA, 18 nt, Human adenovirus B (HAdV-B)
ucagaauguuaugggauc

SEQ ID NO: 103267 - RNA, 14 nt, Human adenovirus B (HAdV-B)
ucaucgaaguugcu

SEQ ID NO: 103268 - RNA, 11 nt, Human adenovirus B (HAdV-B)
ucaucuaaggc

SEQ ID NO: 103269 - RNA, 17 nt, Human adenovirus B (HAdV-B)
uccacccucggaacuga

SEQ ID NO: 103270 - RNA, 22 nt, Human adenovirus B (HAdV-B)
uccagcugggccaaaaggacaa

SEQ ID NO: 103271 - RNA, 12 nt, Human adenovirus B (HAdV-B)
uccacagguucg

SEQ ID NO: 103272 - RNA, 18 nt, Human adenovirus B (HAdV-B)
uccacaguagaucccaua

SEQ ID NO: 103273 - RNA, 19 nt, Human adenovirus B (HAdV-B)
uccacauuccaaacaguuu

SEQ ID NO: 103274 - RNA, 13 nt, Human adenovirus B (HAdV-B)
uccaauccaaccu

SEQ ID NO: 103275 - RNA, 21 nt, Human adenovirus B (HAdV-B)
ucccugggauauguuucuaaa

SEQ ID NO: 103276 - RNA, 15 nt, Human adenovirus B (HAdV-B)
ucccagcagcaccuc

SEQ ID NO: 103277 - RNA, 22 nt, Human adenovirus B (HAdV-B)
ucccagcagcaccucacuuccc

SEQ ID NO: 103278 - RNA, 19 nt, Human adenovirus B (HAdV-B)
uccccacgcacagcuuuaa

SEQ ID NO: 103279 - RNA, 22 nt, Human adenovirus B (HAdV-B)
uccccacgcacagcuuuaaaca

SEQ ID NO: 103280 - RNA, 15 nt, Human adenovirus B (HAdV-B)
uccccaaauggcuuc

SEQ ID NO: 103281 - RNA, 16 nt, Human adenovirus B (HAdV-B)
uccauccacaguagau

SEQ ID NO: 103282 - RNA, 13 nt, Human adenovirus B (HAdV-B)
ucccaacaccccu

SEQ ID NO: 103283 - RNA, 14 nt, Human adenovirus B (HAdV-B)
ucccaaugcacaug

SEQ ID NO: 103284 - RNA, 12 nt, Human adenovirus B (HAdV-B)
ucgacaucaugc

SEQ ID NO: 103285 - RNA, 21 nt, Human adenovirus B (HAdV-B)
ucgacgcugaguuacuuucaa

SEQ ID NO: 103286 - RNA, 17 nt, Human adenovirus B (HAdV-B)
ucgagaaaaaucagaaa

SEQ ID NO: 103287 - RNA, 20 nt, Human adenovirus B (HAdV-B)
ucgagaaaaaucagaaauuc

SEQ ID NO: 103288 - RNA, 22 nt, Human adenovirus B (HAdV-B)
uccuucaacccugucuaccccu

SEQ ID NO: 103289 - RNA, 15 nt, Human adenovirus B (HAdV-B)
uccuuguucugccag

SEQ ID NO: 103290 - RNA, 15 nt, Human adenovirus B (HAdV-B)
ucuaggacauaauua

SEQ ID NO: 103291 - RNA, 14 nt, Human adenovirus B (HAdV-B)
ucuaguuguaaaaa

SEQ ID NO: 103292 - RNA, 14 nt, Human adenovirus B (HAdV-B)
ucuagugguacuga

SEQ ID NO: 103293 - RNA, 14 nt, Human adenovirus B (HAdV-B)
ucggccaucaugga

SEQ ID NO: 103294 - RNA, 15 nt, Human adenovirus B (HAdV-B)
ucgcacauagucaua

SEQ ID NO: 103295 - RNA, 19 nt, Human adenovirus B (HAdV-B)
ucgcacauagucauauagu

SEQ ID NO: 103296 - RNA, 15 nt, Human adenovirus B (HAdV-B)
ucgccccccucugau

SEQ ID NO: 103297 - RNA, 17 nt, Human adenovirus B (HAdV-B)
ucuuaauuugggccauc

SEQ ID NO: 103298 - RNA, 19 nt, Human adenovirus B (HAdV-B)
ucuucaacccggauuuuac

SEQ ID NO: 103299 - RNA, 14 nt, Human adenovirus B (HAdV-B)
ucuccugcuugcau

SEQ ID NO: 103300 - RNA, 14 nt, Human adenovirus B (HAdV-B)
ucuccauacuuuaa

SEQ ID NO: 103301 - RNA, 18 nt, Human adenovirus B (HAdV-B)
ucucccagcagcaccuca

SEQ ID NO: 103302 - RNA, 13 nt, Human adenovirus B (HAdV-B)
ucuccuguaccca

SEQ ID NO: 103303 - RNA, 17 nt, Human adenovirus B (HAdV-B)
ucucuaucccucuagga

SEQ ID NO: 103304 - RNA, 12 nt, Human adenovirus B (HAdV-B)
ucucuauggccu

SEQ ID NO: 103305 - RNA, 22 nt, Human adenovirus B (HAdV-B)
ucucugauguaguaaaagguaa

SEQ ID NO: 103306 - RNA, 22 nt, Human adenovirus B (HAdV-B)
uugagcugggaugggugcauuc

SEQ ID NO: 103307 - RNA, 18 nt, Human adenovirus B (HAdV-B)
uugagaacucgguggauu

SEQ ID NO: 103308 - RNA, 15 nt, Human adenovirus B (HAdV-B)
uugaauucgggaauc

SEQ ID NO: 103309 - RNA, 18 nt, Human adenovirus B (HAdV-B)
uugaaaggauaggcaguc

SEQ ID NO: 103310 - RNA, 23 nt, Human adenovirus B (HAdV-B)
uugaaaggauaggcagucgugcu

SEQ ID NO: 103311 - RNA, 17 nt, Human adenovirus B (HAdV-B)
uucagaugguacuugau

SEQ ID NO: 103312 - RNA, 22 nt, Human adenovirus B (HAdV-B)
uucacgcggcgcuacuugcuau

SEQ ID NO: 103313 - RNA, 14 nt, Human adenovirus B (HAdV-B)
uucacuucaaugca

SEQ ID NO: 103314 - RNA, 22 nt, Human adenovirus B (HAdV-B)
uugcauucacugcuccugcgau

SEQ ID NO: 103315 - RNA, 21 nt, Human adenovirus B (HAdV-B)
uugcaggagaaauauucacug

SEQ ID NO: 103316 - RNA, 17 nt, Human adenovirus B (HAdV-B)
uugccagauugugauac

SEQ ID NO: 103317 - RNA, 20 nt, Human adenovirus B (HAdV-B)
uugcaccucuggggcaucuc

SEQ ID NO: 103318 - RNA, 20 nt, Human adenovirus B (HAdV-B)
aacaccuuagaaaaugcaaa

SEQ ID NO: 103319 - RNA, 12 nt, Human adenovirus B (HAdV-B)
aacacauucccc

SEQ ID NO: 103320 - RNA, 22 nt, Human adenovirus B (HAdV-B)
aacacugugcuuggaauggguu

SEQ ID NO: 103321 - RNA, 21 nt, Human adenovirus B (HAdV-B)
aacacucaccaccuccaauuc

SEQ ID NO: 103322 - RNA, 19 nt, Human adenovirus B (HAdV-B)
uugccucccccuucccauu

SEQ ID NO: 103323 - RNA, 13 nt, Human adenovirus B (HAdV-B)
uugcuggagccaa

SEQ ID NO: 103324 - RNA, 19 nt, Human adenovirus B (HAdV-B)
uuggaaccggguucugcca

SEQ ID NO: 103325 - RNA, 20 nt, Human adenovirus B (HAdV-B)
uuggaaccggguucugccaa

SEQ ID NO: 103326 - RNA, 14 nt, Human adenovirus B (HAdV-B)
uuggagccugagga

SEQ ID NO: 103327 - RNA, 17 nt, Human adenovirus B (HAdV-B)
uuggacgggucuuccau

SEQ ID NO: 103328 - RNA, 13 nt, Human adenovirus B (HAdV-B)
uuggacugugaaa

SEQ ID NO: 103329 - RNA, 19 nt, Human adenovirus B (HAdV-B)
uuuguccugauuuaugauu

SEQ ID NO: 103330 - RNA, 19 nt, Human adenovirus B (HAdV-B)
uuuuagauuccacauucca

SEQ ID NO: 103331 - RNA, 18 nt, Human adenovirus B (HAdV-B)
aacagucagcucuuacca

SEQ ID NO: 103332 - RNA, 21 nt, Human adenovirus B (HAdV-B)
uuugcuucuauugcuucccua

SEQ ID NO: 103333 - RNA, 21 nt, Human adenovirus B (HAdV-B)
uuuggaaccggguucugccaa

SEQ ID NO: 103334 - RNA, 18 nt, Human adenovirus B (HAdV-B)
uuucucccagcagcaccu

SEQ ID NO: 103335 - RNA, 19 nt, Human adenovirus B (HAdV-B)
uuucucccagcagcaccuc

SEQ ID NO: 103336 - RNA, 21 nt, Human adenovirus B (HAdV-B)
uuucucccagcagcaccucac

SEQ ID NO: 103337 - RNA, 12 nt, Human adenovirus B (HAdV-B)
uuucacagucca

SEQ ID NO: 103338 - RNA, 13 nt, Human adenovirus B (HAdV-B)
uuucacaguccaa

SEQ ID NO: 103339 - RNA, 22 nt, Human adenovirus B (HAdV-B)
uugugauacuaugacuaugcau

SEQ ID NO: 103340 - RNA, 16 nt, Human adenovirus B (HAdV-B)
uugugcgcgaguuugc

SEQ ID NO: 103341 - RNA, 21 nt, Human adenovirus B (HAdV-B)
uuggcccccaacgacaaaaau

SEQ ID NO: 103342 - RNA, 15 nt, Human adenovirus B (HAdV-B)
uuggcuccagcaaaa

SEQ ID NO: 103343 - RNA, 22 nt, Human adenovirus B (HAdV-B)
uuggcucuaaguucuucuuuaa

SEQ ID NO: 103344 - RNA, 19 nt, Human adenovirus B (HAdV-B)
uuggcuggaaugcucccaa

SEQ ID NO: 103345 - RNA, 22 nt, Human adenovirus B (HAdV-B)
uugguggagaauauaugacaau

SEQ ID NO: 103346 - RNA, 11 nt, Human adenovirus B (HAdV-B)
uugguggcaug

SEQ ID NO: 103347 - RNA, 23 nt, Human adenovirus B (HAdV-B)
uugguguauucuguuaaauggga

SEQ ID NO: 103348 - RNA, 17 nt, Human adenovirus B (HAdV-B)
uuuauuaucugugucua

SEQ ID NO: 103349 - RNA, 15 nt, Human adenovirus B (HAdV-B)
uuuauuuccccaaau

SEQ ID NO: 103350 - RNA, 14 nt, Human adenovirus B (HAdV-B)
uuucaaaaccggag

SEQ ID NO: 103351 - RNA, 21 nt, Human adenovirus B (HAdV-B)
uuuacaagaaacucugccuga

SEQ ID NO: 103352 - RNA, 16 nt, Human adenovirus B (HAdV-B)
aagguccuggccaucg

SEQ ID NO: 103353 - RNA, 13 nt, Human adenovirus B (HAdV-B)
aaggucuuccuac

SEQ ID NO: 103354 - RNA, 15 nt, Human adenovirus B (HAdV-B)
aaggaacaugcagca

SEQ ID NO: 103355 - RNA, 16 nt, Human adenovirus B (HAdV-B)
aaggacacggaacccu

SEQ ID NO: 103356 - RNA, 13 nt, Human adenovirus B (HAdV-B)
aaggguugcauuc

SEQ ID NO: 103357 - RNA, 16 nt, Human adenovirus B (HAdV-B)
aagccaagauauccua

SEQ ID NO: 103358 - RNA, 16 nt, Human adenovirus B (HAdV-B)
aagccguacaugggca

SEQ ID NO: 103359 - RNA, 14 nt, Human adenovirus B (HAdV-B)
aagcuguagugccu

SEQ ID NO: 103360 - RNA, 16 nt, Human adenovirus B (HAdV-B)
aauauuugugugacag

SEQ ID NO: 103361 - RNA, 22 nt, Human adenovirus B (HAdV-B)
aauauuugugugacagugcaau

SEQ ID NO: 103362 - RNA, 14 nt, Human adenovirus B (HAdV-B)
aauauucacuggaa

SEQ ID NO: 103363 - RNA, 15 nt, Human adenovirus B (HAdV-B)
aaucaaguaccaucu

SEQ ID NO: 103364 - RNA, 12 nt, Human adenovirus B (HAdV-B)
aaucaauucaca

SEQ ID NO: 103365 - RNA, 14 nt, Human adenovirus B (HAdV-B)
aaucuugaaaucac

SEQ ID NO: 103366 - RNA, 18 nt, Human adenovirus B (HAdV-B)
aaguggaauuagccauga

SEQ ID NO: 103367 - RNA, 15 nt, Human adenovirus B (HAdV-B)
aagaugaaagcaccu

SEQ ID NO: 103368 - RNA, 20 nt, Human adenovirus B (HAdV-B)
aagauauccuacgagaucac

SEQ ID NO: 103369 - RNA, 16 nt, Human adenovirus B (HAdV-B)
aagagcucagagccau

SEQ ID NO: 103370 - RNA, 15 nt, Human adenovirus B (HAdV-B)
aacuuaagagugugg

SEQ ID NO: 103371 - RNA, 20 nt, Human adenovirus B (HAdV-B)
aacuucaccuuuccuacuca

SEQ ID NO: 103372 - RNA, 19 nt, Human adenovirus B (HAdV-B)
aacuugaggacuuguuaca

SEQ ID NO: 103373 - RNA, 16 nt, Human adenovirus B (HAdV-B)
aacuugcaacauacaa

SEQ ID NO: 103374 - RNA, 17 nt, Human adenovirus B (HAdV-B)
aacuuguccugagucag

SEQ ID NO: 103375 - RNA, 23 nt, Human adenovirus B (HAdV-B)
aacuuguuuauuugaaaaucaau

SEQ ID NO: 103376 - RNA, 16 nt, Human adenovirus B (HAdV-B)
aacgcgcggccaaaga

SEQ ID NO: 103377 - RNA, 17 nt, Human adenovirus B (HAdV-B)
aacgcgcggccaaagag

SEQ ID NO: 103378 - RNA, 18 nt, Human adenovirus B (HAdV-B)
aacguccagcaguggaaa

SEQ ID NO: 103379 - RNA, 23 nt, Human adenovirus B (HAdV-B)
aacucugguauucuaaaccccgu

SEQ ID NO: 103380 - RNA, 23 nt, Human adenovirus B (HAdV-B)
aacuuaaagaccagaacuuccaa

SEQ ID NO: 103381 - RNA, 23 nt, Human adenovirus B (HAdV-B)
aacauacaaaaucuuacauugau

SEQ ID NO: 103382 - RNA, 14 nt, Human adenovirus B (HAdV-B)
aacauauccuucac

SEQ ID NO: 103383 - RNA, 15 nt, Human adenovirus B (HAdV-B)
uuuuugauugucaca

SEQ ID NO: 103384 - RNA, 12 nt, Human adenovirus B (HAdV-B)
aacgacauugac

SEQ ID NO: 103385 - RNA, 22 nt, Human adenovirus B (HAdV-B)
aacgacuacaccgcuuuuccag

SEQ ID NO: 103386 - RNA, 14 nt, Human adenovirus B (HAdV-B)
aacaugcaacaucc

SEQ ID NO: 103387 - RNA, 23 nt, Human adenovirus B (HAdV-B)
aacgacaaaaauuuaccugcaug

SEQ ID NO: 103388 - RNA, 21 nt, Human adenovirus B (HAdV-B)
ugaggugguaauagauacuca

SEQ ID NO: 103389 - RNA, 13 nt, Human adenovirus B (HAdV-B)
ugaguacacggaa

SEQ ID NO: 103390 - RNA, 21 nt, Human adenovirus B (HAdV-B)
ugagucauuauugaacaucca

SEQ ID NO: 103391 - RNA, 22 nt, Human adenovirus B (HAdV-B)
ugagcuccaaggucuuccuaca

SEQ ID NO: 103392 - RNA, 21 nt, Human adenovirus B (HAdV-B)
ugagcugggaugggugcauuc

SEQ ID NO: 103393 - RNA, 19 nt, Human adenovirus B (HAdV-B)
ugauacguugcggaacuga

SEQ ID NO: 103394 - RNA, 22 nt, Human adenovirus B (HAdV-B)
ugauacuugcucgcacauaguc

SEQ ID NO: 103395 - RNA, 18 nt, Human adenovirus B (HAdV-B)
ugauacuuggguugccac

SEQ ID NO: 103396 - RNA, 14 nt, Human adenovirus B (HAdV-B)
ugauaacagaugua

SEQ ID NO: 103397 - RNA, 20 nt, Human adenovirus B (HAdV-B)
ugaguccgcagcgucucagg

SEQ ID NO: 103398 - RNA, 21 nt, Human adenovirus B (HAdV-B)
ugagugcgggggcaacauauc

SEQ ID NO: 103399 - RNA, 15 nt, Human adenovirus B (HAdV-B)
ugaguucaucuacuu

SEQ ID NO: 103400 - RNA, 22 nt, Human adenovirus B (HAdV-B)
ugaguuacuuucaagauggcca

SEQ ID NO: 103401 - RNA, 17 nt, Human adenovirus B (HAdV-B)
ugagaagaugcaugcau

SEQ ID NO: 103402 - RNA, 17 nt, Human adenovirus B (HAdV-B)
ugagaauggcaacauca

SEQ ID NO: 103403 - RNA, 18 nt, Human adenovirus B (HAdV-B)
ugagaauggcaacaucaa

SEQ ID NO: 103404 - RNA, 23 nt, Human adenovirus B (HAdV-B)
ugcaagccauugacgucucuaca

SEQ ID NO: 103405 - RNA, 15 nt, Human adenovirus B (HAdV-B)
ugcaaauagcagcug

SEQ ID NO: 103406 - RNA, 21 nt, Human adenovirus B (HAdV-B)
ugcaacaaaacaaaaccaaua

SEQ ID NO: 103407 - RNA, 13 nt, Human adenovirus B (HAdV-B)
ugcaacauacaaa

SEQ ID NO: 103408 - RNA, 21 nt, Human adenovirus B (HAdV-B)
ugcaacauacaaaaucuuaca

SEQ ID NO: 103409 - RNA, 17 nt, Human adenovirus B (HAdV-B)
ugcaacguaucauggcg

SEQ ID NO: 103410 - RNA, 16 nt, Human adenovirus B (HAdV-B)
ugauuuuggcuggaau

SEQ ID NO: 103411 - RNA, 14 nt, Human adenovirus B (HAdV-B)
ugcaaaacaaugac

SEQ ID NO: 103412 - RNA, 15 nt, Human adenovirus B (HAdV-B)
ugauugccacagaua

SEQ ID NO: 103413 - RNA, 13 nt, Human adenovirus B (HAdV-B)
ugauuauauuucc

SEQ ID NO: 103414 - RNA, 13 nt, Human adenovirus B (HAdV-B)
ugauuacuuugau

SEQ ID NO: 103415 - RNA, 23 nt, Human adenovirus B (HAdV-B)
ugauauuacuggcgguucccaau

SEQ ID NO: 103416 - RNA, 12 nt, Human adenovirus B (HAdV-B)
ugauauaaucug

SEQ ID NO: 103417 - RNA, 14 nt, Human adenovirus B (HAdV-B)
ugauguuuauugaa

SEQ ID NO: 103418 - RNA, 16 nt, Human adenovirus B (HAdV-B)
ugauguuuauugaaca

SEQ ID NO: 103419 - RNA, 15 nt, Human adenovirus B (HAdV-B)
ugaugcuagaucuga

SEQ ID NO: 103420 - RNA, 18 nt, Human adenovirus B (HAdV-B)
ugaugagguguacgggga

SEQ ID NO: 103421 - RNA, 21 nt, Human adenovirus B (HAdV-B)
ugcauaguguaaguuguguuc

SEQ ID NO: 103422 - RNA, 18 nt, Human adenovirus B (HAdV-B)
ugcaguacaagcgcagac

SEQ ID NO: 103423 - RNA, 21 nt, Human adenovirus B (HAdV-B)
ugcccauggcugacggucuga

SEQ ID NO: 103424 - RNA, 15 nt, Human adenovirus B (HAdV-B)
ugccccaaugggcau

SEQ ID NO: 103425 - RNA, 18 nt, Human adenovirus B (HAdV-B)
ugcccuagaccaccgauc

SEQ ID NO: 103426 - RNA, 23 nt, Human adenovirus B (HAdV-B)
ugccagauugugauacuaugacu

SEQ ID NO: 103427 - RNA, 16 nt, Human adenovirus B (HAdV-B)
ugccacagaugucaua

SEQ ID NO: 103428 - RNA, 22 nt, Human adenovirus B (HAdV-B)
ugccaucaucuccugcuugcau

SEQ ID NO: 103429 - RNA, 21 nt, Human adenovirus B (HAdV-B)
ugccagugcgcgcucauaugg

SEQ ID NO: 103430 - RNA, 22 nt, Human adenovirus B (HAdV-B)
ugccagggccgcguuuugcuau

SEQ ID NO: 103431 - RNA, 17 nt, Human adenovirus B (HAdV-B)
ugcccaggacuuuuuga

SEQ ID NO: 103432 - RNA, 17 nt, Human adenovirus B (HAdV-B)
ugcuuccuaugcacuuu

SEQ ID NO: 103433 - RNA, 18 nt, Human adenovirus B (HAdV-B)
ugcuucuauugcuucccu

SEQ ID NO: 103434 - RNA, 18 nt, Human adenovirus B (HAdV-B)
ugcuugaaacacaaucca

SEQ ID NO: 103435 - RNA, 14 nt, Human adenovirus B (HAdV-B)
uggaaugcucccaa

SEQ ID NO: 103436 - RNA, 21 nt, Human adenovirus B (HAdV-B)
uggaaugcucccaaugcacau

SEQ ID NO: 103437 - RNA, 14 nt, Human adenovirus B (HAdV-B)
uggaauuagccaug

SEQ ID NO: 103438 - RNA, 12 nt, Human adenovirus B (HAdV-B)
ugcgacugcugu

SEQ ID NO: 103439 - RNA, 16 nt, Human adenovirus B (HAdV-B)
ugcgacugcuguuuau

SEQ ID NO: 103440 - RNA, 22 nt, Human adenovirus B (HAdV-B)
uguugauuuaaaaucaaguguu

SEQ ID NO: 103441 - RNA, 15 nt, Human adenovirus B (HAdV-B)
uguugccauucucaa

SEQ ID NO: 103442 - RNA, 14 nt, Human adenovirus B (HAdV-B)
uuaaaaauuuuggc

SEQ ID NO: 103443 - RNA, 20 nt, Human adenovirus B (HAdV-B)
uuacaagaaacucugccuga

SEQ ID NO: 103444 - RNA, 18 nt, Human adenovirus B (HAdV-B)
uuacuuucgcuuuuggaa

SEQ ID NO: 103445 - RNA, 19 nt, Human adenovirus B (HAdV-B)
uuagaaaaugcaaauucca

SEQ ID NO: 103446 - RNA, 12 nt, Human adenovirus B (HAdV-B)
uucaaaaccucu

SEQ ID NO: 103447 - RNA, 20 nt, Human adenovirus B (HAdV-B)
uuauacagccaugguuucca

SEQ ID NO: 103448 - RNA, 23 nt, Human adenovirus B (HAdV-B)
uuauacgaauacaauaugauguc

SEQ ID NO: 103449 - RNA, 18 nt, Human adenovirus B (HAdV-B)
ugucauccaaauucacca

SEQ ID NO: 103450 - RNA, 18 nt, Human adenovirus B (HAdV-B)
ugucaggaagcaacucca

SEQ ID NO: 103451 - RNA, 19 nt, Human adenovirus B (HAdV-B)
uguacugccaucuaccacu

SEQ ID NO: 103452 - RNA, 20 nt, Human adenovirus B (HAdV-B)
uguacugccaucuaccacuc

SEQ ID NO: 103453 - RNA, 15 nt, Human adenovirus B (HAdV-B)
ugugcgcgaguuugc

SEQ ID NO: 103454 - RNA, 16 nt, Human adenovirus B (HAdV-B)
ugugccauuguaaaua

SEQ ID NO: 103455 - RNA, 19 nt, Human adenovirus B (HAdV-B)
ugugauuauucuuugcuac

SEQ ID NO: 103456 - RNA, 15 nt, Human adenovirus B (HAdV-B)
ugugauacuaugacu

SEQ ID NO: 103457 - RNA, 14 nt, Human adenovirus B (HAdV-B)
ugugacagugcaau

SEQ ID NO: 103458 - RNA, 13 nt, Human adenovirus B (HAdV-B)
uguggaaucuaaa

SEQ ID NO: 103459 - RNA, 20 nt, Human adenovirus B (HAdV-B)
uggaucuacguccacuggac

SEQ ID NO: 103460 - RNA, 20 nt, Human adenovirus B (HAdV-B)
ugggggcgagagaugccauc

SEQ ID NO: 103461 - RNA, 17 nt, Human adenovirus B (HAdV-B)
ugguguauucuguuaaa

SEQ ID NO: 103462 - RNA, 14 nt, Human adenovirus B (HAdV-B)
uguaauaugaugau

SEQ ID NO: 103463 - RNA, 13 nt, Human adenovirus B (HAdV-B)
ugguccugugacu

SEQ ID NO: 103464 - RNA, 12 nt, Human adenovirus B (HAdV-B)
uuguacuugaac

SEQ ID NO: 103465 - RNA, 14 nt, Human adenovirus B (HAdV-B)
uuguacugcacugu

SEQ ID NO: 103466 - RNA, 23 nt, Human adenovirus B (HAdV-B)
uuguagugcuaggaauucuugcg

SEQ ID NO: 103467 - RNA, 18 nt, Human adenovirus B (HAdV-B)
uuggcggguuggacgggu

SEQ ID NO: 103468 - RNA, 15 nt, Human adenovirus B (HAdV-B)
uuggcucgcucugaa

SEQ ID NO: 103469 - RNA, 20 nt, Human adenovirus B (HAdV-B)
uuugggcggggacucaggua

SEQ ID NO: 103470 - RNA, 17 nt, Human adenovirus B (HAdV-B)
uuugucagucgucuucu

SEQ ID NO: 103471 - RNA, 18 nt, Human adenovirus B (HAdV-B)
uuuggaagaccuuaggaa

SEQ ID NO: 103472 - RNA, 17 nt, Human adenovirus B (HAdV-B)
uuguccugagucagggu

SEQ ID NO: 103473 - RNA, 22 nt, Human adenovirus B (HAdV-B)
uuugcuuuuguuacuugcaucu

SEQ ID NO: 103474 - RNA, 20 nt, Human adenovirus B (HAdV-B)
uugucacugccgcucaugga

SEQ ID NO: 103475 - RNA, 14 nt, Human adenovirus B (HAdV-B)
uuuugaccaacuua

SEQ ID NO: 103476 - RNA, 16 nt, Human adenovirus B (HAdV-B)
uuuucccuacuaauac

SEQ ID NO: 103477 - RNA, 23 nt, Human adenovirus B (HAdV-B)
uuuucccuacuaauacuacuuuc

SEQ ID NO: 103478 - RNA, 18 nt, Human adenovirus B (HAdV-B)
uuugugaauugauuuuca

SEQ ID NO: 103479 - RNA, 22 nt, Human adenovirus B (HAdV-B)
uuuuuacaagaaacucugccug

SEQ ID NO: 103480 - RNA, 22 nt, Human adenovirus B (HAdV-B)
uuuugggaaccuacgauaagcg

SEQ ID NO: 103481 - RNA, 17 nt, Human adenovirus B (HAdV-B)
uuagauuccacauucca

SEQ ID NO: 103482 - RNA, 19 nt, Human adenovirus B (HAdV-B)
uuagccaugaugcuuccau

SEQ ID NO: 103483 - RNA, 12 nt, Human adenovirus B (HAdV-B)
uuaucaccaaac

SEQ ID NO: 103484 - RNA, 23 nt, Human adenovirus B (HAdV-B)
uuauuuccccaaauggcuucaca

SEQ ID NO: 103485 - RNA, 16 nt, Human adenovirus B (HAdV-B)
uuaugauuaaguggag

SEQ ID NO: 103486 - RNA, 20 nt, Human adenovirus B (HAdV-B)
uuaugggaucuacuguggau

SEQ ID NO: 103487 - RNA, 12 nt, Human adenovirus B (HAdV-B)
uuaugugcauuu

SEQ ID NO: 103488 - RNA, 19 nt, Human adenovirus B (HAdV-B)
uuauguguacugaguuuaa

SEQ ID NO: 103489 - RNA, 18 nt, Human adenovirus B (HAdV-B)
uuaugagaagaugcaugc

SEQ ID NO: 103490 - RNA, 21 nt, Human adenovirus B (HAdV-B)
uguuaacuucaccuuuccuac

SEQ ID NO: 103491 - RNA, 23 nt, Human adenovirus B (HAdV-B)
uuaacuucaccuuuccuacucac

SEQ ID NO: 103492 - RNA, 12 nt, Human adenovirus B (HAdV-B)
uuaacuugcaug

SEQ ID NO: 103493 - RNA, 13 nt, Human adenovirus B (HAdV-B)
uuaacuugcauga

SEQ ID NO: 103494 - RNA, 14 nt, Human adenovirus B (HAdV-B)
uuaagaaugguggu

SEQ ID NO: 103495 - RNA, 17 nt, Human adenovirus B (HAdV-B)
uguguaguaacaaguuc

SEQ ID NO: 103496 - RNA, 16 nt, Human adenovirus B (HAdV-B)
ugugguuguacuugaa

SEQ ID NO: 103497 - RNA, 17 nt, Human adenovirus B (HAdV-B)
uguggaguuaucaaccc

SEQ ID NO: 103498 - RNA, 22 nt, Human adenovirus B (HAdV-B)
uuaaggggacugccccauggca

SEQ ID NO: 103499 - RNA, 20 nt, Human adenovirus B (HAdV-B)
uuaagcaugacagauauguc

SEQ ID NO: 103500 - RNA, 14 nt, Human adenovirus B (HAdV-B)
uuaauguuugcgcu

SEQ ID NO: 103501 - RNA, 15 nt, Human adenovirus B (HAdV-B)
uuaauguuugcgcua

SEQ ID NO: 103502 - RNA, 15 nt, Human adenovirus B (HAdV-B)
uuccaaacaguuuca

SEQ ID NO: 103503 - RNA, 17 nt, Human adenovirus B (HAdV-B)
uucaccaaugcaaaaaa

SEQ ID NO: 103504 - RNA, 17 nt, Human adenovirus B (HAdV-B)
uucaauuggagcaguau

SEQ ID NO: 103505 - RNA, 14 nt, Human adenovirus B (HAdV-B)
uucaauaaacauca

SEQ ID NO: 103506 - RNA, 20 nt, Human adenovirus B (HAdV-B)
uucccacgccuuacaugugg

SEQ ID NO: 103507 - RNA, 22 nt, Human adenovirus B (HAdV-B)
uucccacgccuuacauguggag

SEQ ID NO: 103508 - RNA, 20 nt, Human adenovirus B (HAdV-B)
uuccccaaauggcuucacac

SEQ ID NO: 103509 - RNA, 19 nt, Human adenovirus B (HAdV-B)
uucggaacuggcaccucag

SEQ ID NO: 103510 - RNA, 13 nt, Human adenovirus B (HAdV-B)
uucgcuuuuggaa

SEQ ID NO: 103511 - RNA, 14 nt, Human adenovirus B (HAdV-B)
uuccauauccgugu

SEQ ID NO: 103512 - RNA, 23 nt, Human adenovirus B (HAdV-B)
uucugaaaugugcgaucuggcca

SEQ ID NO: 103513 - RNA, 14 nt, Human adenovirus B (HAdV-B)
uuggacccaggcca

SEQ ID NO: 103514 - RNA, 14 nt, Human adenovirus B (HAdV-B)
uugcgcuacuuuca

SEQ ID NO: 103515 - RNA, 19 nt, Human adenovirus B (HAdV-B)
uugcuagauggaacagcaa

SEQ ID NO: 103516 - RNA, 17 nt, Human adenovirus B (HAdV-B)
uugcucagaaauuugcu

SEQ ID NO: 103517 - RNA, 13 nt, Human adenovirus B (HAdV-B)
uugauuacuuuga

SEQ ID NO: 103518 - RNA, 20 nt, Human adenovirus B (HAdV-B)
uugcaaauagcagcugcaac

SEQ ID NO: 103519 - RNA, 19 nt, Human adenovirus B (HAdV-B)
uugccgcuaacacugugcu

SEQ ID NO: 103520 - RNA, 13 nt, Human adenovirus B (HAdV-B)
uucuuaguggugu

SEQ ID NO: 103521 - RNA, 22 nt, Human adenovirus B (HAdV-B)
uucuucaacgcugaccuaugcu

SEQ ID NO: 103522 - RNA, 16 nt, Human adenovirus B (HAdV-B)
uucuucaccauacuca

SEQ ID NO: 103523 - RNA, 17 nt, Human adenovirus B (HAdV-B)
uucuucaccauacucau

SEQ ID NO: 103524 - RNA, 21 nt, Human adenovirus B (HAdV-B)
uugauauaaucugcaacaaaa

SEQ ID NO: 103525 - RNA, 12 nt, Human adenovirus B (HAdV-B)
uucuuagacuca

SEQ ID NO: 103526 - RNA, 13 nt, Human adenovirus B (HAdV-B)
uucuuagacucau

SEQ ID NO: 103527 - RNA, 18 nt, Human adenovirus B (HAdV-B)
uucuuagagauggaagac

SEQ ID NO: 103528 - RNA, 20 nt, Human adenovirus B (HAdV-B)
uucugcucgcucacaccuca

SEQ ID NO: 103529 - RNA, 16 nt, Human adenovirus B (HAdV-B)
uucugacgagaaucag

SEQ ID NO: 103530 - RNA, 18 nt, Human adenovirus B (HAdV-B)
uggaggcuuugcuggaag

SEQ ID NO: 103531 - RNA, 16 nt, Human adenovirus B (HAdV-B)
uggagcgacaucggca

SEQ ID NO: 103532 - RNA, 16 nt, Human adenovirus B (HAdV-B)
uggagaauauaugaca

SEQ ID NO: 103533 - RNA, 16 nt, Human adenovirus B (HAdV-B)
uggacucugacacucc

SEQ ID NO: 103534 - RNA, 13 nt, Human adenovirus B (HAdV-B)
uggacccaggcca

SEQ ID NO: 103535 - RNA, 22 nt, Human adenovirus B (HAdV-B)
uggaauggguuacuauggaagc

SEQ ID NO: 103536 - RNA, 19 nt, Human adenovirus B (HAdV-B)
uggaaaaaaacguauaaau

SEQ ID NO: 103537 - RNA, 18 nt, Human adenovirus B (HAdV-B)
ugcuuuuguuacuugcau

SEQ ID NO: 103538 - RNA, 19 nt, Human adenovirus B (HAdV-B)
ugcuuuuugauugucacac

SEQ ID NO: 103539 - RNA, 18 nt, Human adenovirus B (HAdV-B)
uggaaccggguucugcca

SEQ ID NO: 103540 - RNA, 22 nt, Human adenovirus B (HAdV-B)
uggaacagucagcucuuaccac

SEQ ID NO: 103541 - RNA, 20 nt, Human adenovirus B (HAdV-B)
uggaacaauaccuuauccac

SEQ ID NO: 103542 - RNA, 14 nt, Human adenovirus B (HAdV-B)
ugcugggcaugaaa

SEQ ID NO: 103543 - RNA, 14 nt, Human adenovirus B (HAdV-B)
ugcuucuauugcuu

SEQ ID NO: 103544 - RNA, 22 nt, Human adenovirus B (HAdV-B)
ugcuucuugcaaauagcagcug

SEQ ID NO: 103545 - RNA, 15 nt, Human adenovirus B (HAdV-B)
ugcuucuugcaugcu

SEQ ID NO: 103546 - RNA, 17 nt, Human adenovirus B (HAdV-B)
ugcuugaaacacaaucc

SEQ ID NO: 103547 - RNA, 17 nt, Human adenovirus B (HAdV-B)
ugcucgcucacaccuca

SEQ ID NO: 103548 - RNA, 17 nt, Human adenovirus B (HAdV-B)
ugcuauuaguuacuuca

SEQ ID NO: 103549 - RNA, 16 nt, Human adenovirus B (HAdV-B)
ugcuauccgcaagcaa

SEQ ID NO: 103550 - RNA, 20 nt, Human adenovirus B (HAdV-B)
ugcaccuacacccugcugaa

SEQ ID NO: 103551 - RNA, 15 nt, Human adenovirus B (HAdV-B)
ugcagaggcauacau

SEQ ID NO: 103552 - RNA, 19 nt, Human adenovirus B (HAdV-B)
ugcagaggcauacaugcca

SEQ ID NO: 103553 - RNA, 23 nt, Human adenovirus B (HAdV-B)
ugcagaggcauacaugccacaga

SEQ ID NO: 103554 - RNA, 16 nt, Human adenovirus B (HAdV-B)
ugcuaggaauucuugc

SEQ ID NO: 103555 - RNA, 17 nt, Human adenovirus B (HAdV-B)
ugucuauguugugccac

SEQ ID NO: 103556 - RNA, 22 nt, Human adenovirus B (HAdV-B)
uguccaagcgcaaauacaagga

SEQ ID NO: 103557 - RNA, 23 nt, Human adenovirus B (HAdV-B)
uguggaaaucaaguaccaucuga

SEQ ID NO: 103558 - RNA, 14 nt, Human adenovirus B (HAdV-B)
ugucuuucuuccca

SEQ ID NO: 103559 - RNA, 16 nt, Human adenovirus B (HAdV-B)
ugugcgaucuggccau

SEQ ID NO: 103560 - RNA, 10 nt, Human adenovirus B (HAdV-B)
ugugaccaac

SEQ ID NO: 103561 - RNA, 14 nt, Human adenovirus B (HAdV-B)
ugugaccaaccugg

SEQ ID NO: 103562 - RNA, 20 nt, Human adenovirus B (HAdV-B)
uguaaaaaaauaaagugaug

SEQ ID NO: 103563 - RNA, 14 nt, Human adenovirus B (HAdV-B)
uguaaaaacucucu

SEQ ID NO: 103564 - RNA, 22 nt, Human adenovirus B (HAdV-B)
ugucauagacguagaugggauc

SEQ ID NO: 103565 - RNA, 23 nt, Human adenovirus B (HAdV-B)
uguagagacgucaauggcuugca

SEQ ID NO: 103566 - RNA, 19 nt, Human adenovirus B (HAdV-B)
ugucacugccgcucaugga

SEQ ID NO: 103567 - RNA, 13 nt, Human adenovirus B (HAdV-B)
uguacugcacugu

SEQ ID NO: 103568 - RNA, 21 nt, Human adenovirus B (HAdV-B)
uggucauuucuugcuugcuau

SEQ ID NO: 103569 - RNA, 13 nt, Human adenovirus B (HAdV-B)
uggugaacaccaa

SEQ ID NO: 103570 - RNA, 15 nt, Human adenovirus B (HAdV-B)
ugguuuaaaaaaugg

SEQ ID NO: 103571 - RNA, 17 nt, Human adenovirus B (HAdV-B)
ugguuuccacuaccaca

SEQ ID NO: 103572 - RNA, 22 nt, Human adenovirus B (HAdV-B)
ugguuuuagauuccacauucca

SEQ ID NO: 103573 - RNA, 15 nt, Human adenovirus B (HAdV-B)
ugggaugcaaaugca

SEQ ID NO: 103574 - RNA, 17 nt, Human adenovirus B (HAdV-B)
ugggaugcaaaugcaau

SEQ ID NO: 103575 - RNA, 15 nt, Human adenovirus B (HAdV-B)
ugggaugggugcauu

SEQ ID NO: 103576 - RNA, 16 nt, Human adenovirus B (HAdV-B)
ugggauuugcauaugc

SEQ ID NO: 103577 - RNA, 19 nt, Human adenovirus B (HAdV-B)
ugguacacugucucugucc

SEQ ID NO: 103578 - RNA, 17 nt, Human adenovirus B (HAdV-B)
ugguacugcgcucugag

SEQ ID NO: 103579 - RNA, 16 nt, Human adenovirus B (HAdV-B)
uggcgaugaugggcug

SEQ ID NO: 103580 - RNA, 21 nt, Human adenovirus B (HAdV-B)
uggcgcccaaaggacacggaa

SEQ ID NO: 103581 - RNA, 16 nt, Human adenovirus B (HAdV-B)
uggcaccucaguacga

SEQ ID NO: 103582 - RNA, 16 nt, Human adenovirus B (HAdV-B)
ugaacuaucagaauga

SEQ ID NO: 103583 - RNA, 18 nt, Human adenovirus B (HAdV-B)
ugaagaugaaagcaccuc

SEQ ID NO: 103584 - RNA, 19 nt, Human adenovirus B (HAdV-B)
ugaagaugaaagcaccucc

SEQ ID NO: 103585 - RNA, 20 nt, Human adenovirus B (HAdV-B)
ugaaaugugcgaucuggcca

SEQ ID NO: 103586 - RNA, 21 nt, Human adenovirus B (HAdV-B)
ugaaauuuucucccagcagca

SEQ ID NO: 103587 - RNA, 17 nt, Human adenovirus B (HAdV-B)
ugaaauuaugugcauuu

SEQ ID NO: 103588 - RNA, 17 nt, Human adenovirus B (HAdV-B)
ugaacacguuguuuaca

SEQ ID NO: 103589 - RNA, 18 nt, Human adenovirus B (HAdV-B)
ugacuucugcucgcucac

SEQ ID NO: 103590 - RNA, 13 nt, Human adenovirus B (HAdV-B)
ugacuaugcauag

SEQ ID NO: 103591 - RNA, 17 nt, Human adenovirus B (HAdV-B)
ugacuccuucaacccug

SEQ ID NO: 103592 - RNA, 18 nt, Human adenovirus B (HAdV-B)
ugacagauacaguaguca

SEQ ID NO: 103593 - RNA, 15 nt, Human adenovirus B (HAdV-B)
ugacagcaaaugaca

SEQ ID NO: 103594 - RNA, 21 nt, Human adenovirus B (HAdV-B)
ugacacuccugguccugugac

SEQ ID NO: 103595 - RNA, 24 nt, Human adenovirus B (HAdV-B)
ugacacuccugguccugugacuau

SEQ ID NO: 103596 - RNA, 14 nt, Human adenovirus B (HAdV-B)
ugaaggaacaugca

SEQ ID NO: 103597 - RNA, 21 nt, Human adenovirus B (HAdV-B)
ugauauuacuggcgguuccca

SEQ ID NO: 103598 - RNA, 18 nt, Human adenovirus B (HAdV-B)
ugagaacucgguggauuu

SEQ ID NO: 103599 - RNA, 14 nt, Human adenovirus B (HAdV-B)
ugagaagacuugcg

SEQ ID NO: 103600 - RNA, 14 nt, Human adenovirus B (HAdV-B)
ugcaagagcuuccu

SEQ ID NO: 103601 - RNA, 13 nt, Human adenovirus B (HAdV-B)
ucucuuacaucuc

SEQ ID NO: 103602 - RNA, 13 nt, Human adenovirus B (HAdV-B)
ucucuagaauuau

SEQ ID NO: 103603 - RNA, 19 nt, Human adenovirus B (HAdV-B)
ucucuagaauuaucauuga

SEQ ID NO: 103604 - RNA, 19 nt, Human adenovirus B (HAdV-B)
ucucuagcagcagugucgc

SEQ ID NO: 103605 - RNA, 18 nt, Human adenovirus B (HAdV-B)
ucuaucggccaucaugga

SEQ ID NO: 103606 - RNA, 20 nt, Human adenovirus B (HAdV-B)
ucuaggacauaauuacacuc

SEQ ID NO: 103607 - RNA, 18 nt, Human adenovirus B (HAdV-B)
ucuaguuguaaaaacucu

SEQ ID NO: 103608 - RNA, 20 nt, Human adenovirus B (HAdV-B)
ucgcagacguccugaaacca

SEQ ID NO: 103609 - RNA, 15 nt, Human adenovirus B (HAdV-B)
ucuaccccuaugaag

SEQ ID NO: 103610 - RNA, 20 nt, Human adenovirus B (HAdV-B)
ucuucgguuaagcaugacag

SEQ ID NO: 103611 - RNA, 16 nt, Human adenovirus B (HAdV-B)
ucuuauguguacugag

SEQ ID NO: 103612 - RNA, 22 nt, Human adenovirus B (HAdV-B)
ucuucaacgcugaccuaugcua

SEQ ID NO: 103613 - RNA, 15 nt, Human adenovirus B (HAdV-B)
ucuucugucccuacc

SEQ ID NO: 103614 - RNA, 18 nt, Human adenovirus B (HAdV-B)
ucuugcgggugggcuugu

SEQ ID NO: 103615 - RNA, 11 nt, Human adenovirus B (HAdV-B)
ucuuguaaaaa

SEQ ID NO: 103616 - RNA, 17 nt, Human adenovirus B (HAdV-B)
ucuuguaaaaauugaau

SEQ ID NO: 103617 - RNA, 17 nt, Human adenovirus B (HAdV-B)
ucuguuaacuucaccuu

SEQ ID NO: 103618 - RNA, 16 nt, Human adenovirus B (HAdV-B)
ucugaguuggcuuuaa

SEQ ID NO: 103619 - RNA, 22 nt, Human adenovirus B (HAdV-B)
ucugaaaugugcgaucuggcca

SEQ ID NO: 103620 - RNA, 15 nt, Human adenovirus B (HAdV-B)
ucuguugcaccauaa

SEQ ID NO: 103621 - RNA, 15 nt, Human adenovirus B (HAdV-B)
ucuuacaucucucau

SEQ ID NO: 103622 - RNA, 13 nt, Human adenovirus B (HAdV-B)
ucuuaccaccacg

SEQ ID NO: 103623 - RNA, 19 nt, Human adenovirus B (HAdV-B)
ucuuagagauggaagacau

SEQ ID NO: 103624 - RNA, 15 nt, Human adenovirus B (HAdV-B)
ucagugacuccuuca

SEQ ID NO: 103625 - RNA, 21 nt, Human adenovirus B (HAdV-B)
ucaggcagaguuucuuguaaa

SEQ ID NO: 103626 - RNA, 18 nt, Human adenovirus B (HAdV-B)
ucaggacaaguuacuugu

SEQ ID NO: 103627 - RNA, 17 nt, Human adenovirus B (HAdV-B)
ucagcaggguucacuuc

SEQ ID NO: 103628 - RNA, 18 nt, Human adenovirus B (HAdV-B)
ucagagaugucauccaaa

SEQ ID NO: 103629 - RNA, 17 nt, Human adenovirus B (HAdV-B)
ucagagccauuguccaa

SEQ ID NO: 103630 - RNA, 21 nt, Human adenovirus B (HAdV-B)
ucagaugguacuugauuucca

SEQ ID NO: 103631 - RNA, 16 nt, Human adenovirus B (HAdV-B)
ucagaaugaccacagc

SEQ ID NO: 103632 - RNA, 23 nt, Human adenovirus B (HAdV-B)
ucagaaugacccgcaggcaguga

SEQ ID NO: 103633 - RNA, 23 nt, Human adenovirus B (HAdV-B)
ucacuacaagaacuucuaucacu

SEQ ID NO: 103634 - RNA, 12 nt, Human adenovirus B (HAdV-B)
ucaccuuuccua

SEQ ID NO: 103635 - RNA, 19 nt, Human adenovirus B (HAdV-B)
ucaccuuuccuacucacaa

SEQ ID NO: 103636 - RNA, 14 nt, Human adenovirus B (HAdV-B)
ucaccaaugcaaaa

SEQ ID NO: 103637 - RNA, 23 nt, Human adenovirus B (HAdV-B)
ucaccauacucauuugugcauuu

SEQ ID NO: 103638 - RNA, 18 nt, Human adenovirus B (HAdV-B)
ucacaguccaacugcugc

SEQ ID NO: 103639 - RNA, 22 nt, Human adenovirus B (HAdV-B)
uaugcggccuaagagaccugcu

SEQ ID NO: 103640 - RNA, 19 nt, Human adenovirus B (HAdV-B)
uaugcccuagaccaccgau

SEQ ID NO: 103641 - RNA, 17 nt, Human adenovirus B (HAdV-B)
uauccgcaagcaauugc

SEQ ID NO: 103642 - RNA, 21 nt, Human adenovirus B (HAdV-B)
uaucccucuaggacauaauua

SEQ ID NO: 103643 - RNA, 14 nt, Human adenovirus B (HAdV-B)
uauccguguuuacu

SEQ ID NO: 103644 - RNA, 16 nt, Human adenovirus B (HAdV-B)
uauccguguuuacuua

SEQ ID NO: 103645 - RNA, 14 nt, Human adenovirus B (HAdV-B)
uaugcuuauuccaa

SEQ ID NO: 103646 - RNA, 22 nt, Human adenovirus B (HAdV-B)
uauggacggccgcgucucagaa

SEQ ID NO: 103647 - RNA, 16 nt, Human adenovirus B (HAdV-B)
uccaugucuagacuuc

SEQ ID NO: 103648 - RNA, 12 nt, Human adenovirus B (HAdV-B)
uccaucuacugc

SEQ ID NO: 103649 - RNA, 23 nt, Human adenovirus B (HAdV-B)
uccauacuuuaaaggggauguca

SEQ ID NO: 103650 - RNA, 16 nt, Human adenovirus B (HAdV-B)
uccauaguaacccauu

SEQ ID NO: 103651 - RNA, 22 nt, Human adenovirus B (HAdV-B)
uccaggacucuguuaacuucac

SEQ ID NO: 103652 - RNA, 19 nt, Human adenovirus B (HAdV-B)
uccacuaccacauuccuua

SEQ ID NO: 103653 - RNA, 18 nt, Human adenovirus B (HAdV-B)
uccaaaggugaagaacuu

SEQ ID NO: 103654 - RNA, 19 nt, Human adenovirus B (HAdV-B)
uccaaauucaccaaugcaa

SEQ ID NO: 103655 - RNA, 18 nt, Human adenovirus B (HAdV-B)
uccaacaaccguggucau

SEQ ID NO: 103656 - RNA, 20 nt, Human adenovirus B (HAdV-B)
uccaacagaaaaccagcagc

SEQ ID NO: 103657 - RNA, 16 nt, Human adenovirus B (HAdV-B)
ucauuguaaucagcag

SEQ ID NO: 103658 - RNA, 16 nt, Human adenovirus B (HAdV-B)
ucauauggguuaaggg

SEQ ID NO: 103659 - RNA, 18 nt, Human adenovirus B (HAdV-B)
ucauuucuugcuugcuau

SEQ ID NO: 103660 - RNA, 22 nt, Human adenovirus B (HAdV-B)
ucauaggacccccaaucacuuc

SEQ ID NO: 103661 - RNA, 15 nt, Human adenovirus B (HAdV-B)
ucgauccgaugacaa

SEQ ID NO: 103662 - RNA, 21 nt, Human adenovirus B (HAdV-B)
uccugucguccaggacucugu

SEQ ID NO: 103663 - RNA, 16 nt, Human adenovirus B (HAdV-B)
uccucaaagaugccua

SEQ ID NO: 103664 - RNA, 19 nt, Human adenovirus B (HAdV-B)
uccucacuacaagaacuuc

SEQ ID NO: 103665 - RNA, 23 nt, Human adenovirus B (HAdV-B)
uccuaugcacuuuuugcuuuugu

SEQ ID NO: 103666 - RNA, 23 nt, Human adenovirus B (HAdV-B)
ucccucuaggacauaauuacacu

SEQ ID NO: 103667 - RNA, 21 nt, Human adenovirus B (HAdV-B)
ucccugcuauuaguuacuuca

SEQ ID NO: 103668 - RNA, 15 nt, Human adenovirus B (HAdV-B)
uccauugaagggauu

SEQ ID NO: 103669 - RNA, 13 nt, Human adenovirus B (HAdV-B)
cucuuacaucucu

SEQ ID NO: 103670 - RNA, 21 nt, Human adenovirus B (HAdV-B)
cucuaaucccacucaugagaa

SEQ ID NO: 103671 - RNA, 20 nt, Human adenovirus B (HAdV-B)
cucuagaaacuuuuacaucu

SEQ ID NO: 103672 - RNA, 19 nt, Human adenovirus B (HAdV-B)
cucuguuaacuucaccuuu

SEQ ID NO: 103673 - RNA, 23 nt, Human adenovirus B (HAdV-B)
cucgucagcaugaccaccaucga

SEQ ID NO: 103674 - RNA, 21 nt, Human adenovirus B (HAdV-B)
cuggaaaaaucuacccagacc

SEQ ID NO: 103675 - RNA, 13 nt, Human adenovirus B (HAdV-B)
cugcgccuacauc

SEQ ID NO: 103676 - RNA, 22 nt, Human adenovirus B (HAdV-B)
cugcgccuacaucuacugugga

SEQ ID NO: 103677 - RNA, 19 nt, Human adenovirus B (HAdV-B)
cugcgacaucuagaccacu

SEQ ID NO: 103678 - RNA, 20 nt, Human adenovirus B (HAdV-B)
cugcaacaaaacaaaaccaa

SEQ ID NO: 103679 - RNA, 24 nt, Human adenovirus B (HAdV-B)
cugcaacaaaacaaaaccaauaau

SEQ ID NO: 103680 - RNA, 16 nt, Human adenovirus B (HAdV-B)
cugccccauggcaugg

SEQ ID NO: 103681 - RNA, 13 nt, Human adenovirus B (HAdV-B)
cucauuugugcau

SEQ ID NO: 103682 - RNA, 15 nt, Human adenovirus B (HAdV-B)
cucauuugugcauuu

SEQ ID NO: 103683 - RNA, 15 nt, Human adenovirus B (HAdV-B)
cucacgcuugccagc

SEQ ID NO: 103684 - RNA, 19 nt, Human adenovirus B (HAdV-B)
cuccaauuccgccgaggau

SEQ ID NO: 103685 - RNA, 17 nt, Human adenovirus B (HAdV-B)
cuccacccgcaugaauu

SEQ ID NO: 103686 - RNA, 12 nt, Human adenovirus B (HAdV-B)
cuauugcuuccc

SEQ ID NO: 103687 - RNA, 19 nt, Human adenovirus B (HAdV-B)
cuauugcauuugcauccca

SEQ ID NO: 103688 - RNA, 22 nt, Human adenovirus B (HAdV-B)
cucgcaacucugacuucugcuc

SEQ ID NO: 103689 - RNA, 20 nt, Human adenovirus B (HAdV-B)
cucgccugcaacgaauuuuc

SEQ ID NO: 103690 - RNA, 22 nt, Human adenovirus B (HAdV-B)
cucgcucugaaacuguuuggaa

SEQ ID NO: 103691 - RNA, 17 nt, Human adenovirus B (HAdV-B)
cucgacagauaaagaca

SEQ ID NO: 103692 - RNA, 14 nt, Human adenovirus B (HAdV-B)
cuccauacuuuaaa

SEQ ID NO: 103693 - RNA, 11 nt, Human adenovirus B (HAdV-B)
cuccauugaag

SEQ ID NO: 103694 - RNA, 12 nt, Human adenovirus B (HAdV-B)
cucccaaugcac

SEQ ID NO: 103695 - RNA, 15 nt, Human adenovirus B (HAdV-B)
cuaaaaggaccucaa

SEQ ID NO: 103696 - RNA, 14 nt, Human adenovirus B (HAdV-B)
cuaagagaccugcu

SEQ ID NO: 103697 - RNA, 21 nt, Human adenovirus B (HAdV-B)
cuaugcuacuuuaaguucuuc

SEQ ID NO: 103698 - RNA, 22 nt, Human adenovirus B (HAdV-B)
cuauuauggaaccgacuauaaa

SEQ ID NO: 103699 - RNA, 17 nt, Human adenovirus B (HAdV-B)
cuaucgagaaaaaucag

SEQ ID NO: 103700 - RNA, 20 nt, Human adenovirus B (HAdV-B)
cuagaucugaguuggcuuua

SEQ ID NO: 103701 - RNA, 14 nt, Human adenovirus B (HAdV-B)
cgcuccaacauugu

SEQ ID NO: 103702 - RNA, 16 nt, Human adenovirus B (HAdV-B)
cgcuacaacaguagca

SEQ ID NO: 103703 - RNA, 15 nt, Human adenovirus B (HAdV-B)
cgcgcggccaaagag

SEQ ID NO: 103704 - RNA, 16 nt, Human adenovirus B (HAdV-B)
cgcgcucauauggguu

SEQ ID NO: 103705 - RNA, 18 nt, Human adenovirus B (HAdV-B)
cgcggccaaagagcucag

SEQ ID NO: 103706 - RNA, 12 nt, Human adenovirus B (HAdV-B)
cgggaacaaagc

SEQ ID NO: 103707 - RNA, 20 nt, Human adenovirus B (HAdV-B)
cggccaaagagcucagagau

SEQ ID NO: 103708 - RNA, 10 nt, Human adenovirus B (HAdV-B)
cggugaugca

SEQ ID NO: 103709 - RNA, 15 nt, Human adenovirus B (HAdV-B)
cgggugcuuacugga

SEQ ID NO: 103710 - RNA, 21 nt, Human adenovirus B (HAdV-B)
cgugcuauccgcaagcaauug

SEQ ID NO: 103711 - RNA, 23 nt, Human adenovirus B (HAdV-B)
cgugcugaucgagcgagaccagg

SEQ ID NO: 103712 - RNA, 13 nt, Human adenovirus B (HAdV-B)
cguucuacccaac

SEQ ID NO: 103713 - RNA, 22 nt, Human adenovirus B (HAdV-B)
cgagguccugacgguuccaucc

SEQ ID NO: 103714 - RNA, 22 nt, Human adenovirus B (HAdV-B)
cgauaagcucgccugugccauu

SEQ ID NO: 103715 - RNA, 20 nt, Human adenovirus B (HAdV-B)
cgagcuucuaugacugaaga

SEQ ID NO: 103716 - RNA, 18 nt, Human adenovirus B (HAdV-B)
cgaucucuaucauugaga

SEQ ID NO: 103717 - RNA, 18 nt, Human adenovirus B (HAdV-B)
ccuacaaaacaugcaaca

SEQ ID NO: 103718 - RNA, 19 nt, Human adenovirus B (HAdV-B)
ccuacaaaacaugcaacau

SEQ ID NO: 103719 - RNA, 16 nt, Human adenovirus B (HAdV-B)
ccuaagagaccugcua

SEQ ID NO: 103720 - RNA, 21 nt, Human adenovirus B (HAdV-B)
ccuaccgaaaccaaauacuuu

SEQ ID NO: 103721 - RNA, 18 nt, Human adenovirus B (HAdV-B)
ccuacgagaucaccgcua

SEQ ID NO: 103722 - RNA, 22 nt, Human adenovirus B (HAdV-B)
ccuacgagaucaccgcuacuga

SEQ ID NO: 103723 - RNA, 15 nt, Human adenovirus B (HAdV-B)
ccuacuauagccagc

SEQ ID NO: 103724 - RNA, 21 nt, Human adenovirus B (HAdV-B)
cgagaaaaaucagaaauuccc

SEQ ID NO: 103725 - RNA, 16 nt, Human adenovirus B (HAdV-B)
cgagagcgugaugcag

SEQ ID NO: 103726 - RNA, 21 nt, Human adenovirus B (HAdV-B)
cgagaucaccgcuacugacca

SEQ ID NO: 103727 - RNA, 15 nt, Human adenovirus B (HAdV-B)
cgcaguggcccuuuc

SEQ ID NO: 103728 - RNA, 21 nt, Human adenovirus B (HAdV-B)
cgcagcaguuggacugugaaa

SEQ ID NO: 103729 - RNA, 17 nt, Human adenovirus B (HAdV-B)
cgcaauguuuugcauua

SEQ ID NO: 103730 - RNA, 16 nt, Human adenovirus B (HAdV-B)
cgcaacuaugcucgac

SEQ ID NO: 103731 - RNA, 14 nt, Human adenovirus B (HAdV-B)
cgccgcgcacgggc

SEQ ID NO: 103732 - RNA, 19 nt, Human adenovirus B (HAdV-B)
gacuguauaggagcauuug

SEQ ID NO: 103733 - RNA, 16 nt, Human adenovirus B (HAdV-B)
gagaauauaugacaau

SEQ ID NO: 103734 - RNA, 19 nt, Human adenovirus B (HAdV-B)
gagaauauaugacaaugga

SEQ ID NO: 103735 - RNA, 21 nt, Human adenovirus B (HAdV-B)
gacucugacacuccugguccu

SEQ ID NO: 103736 - RNA, 16 nt, Human adenovirus B (HAdV-B)
gacugccgcuucuuca

SEQ ID NO: 103737 - RNA, 15 nt, Human adenovirus B (HAdV-B)
gacgcugaguuacuu

SEQ ID NO: 103738 - RNA, 14 nt, Human adenovirus B (HAdV-B)
gacaccuacuucaa

SEQ ID NO: 103739 - RNA, 16 nt, Human adenovirus B (HAdV-B)
gacacgaauaauucaa

SEQ ID NO: 103740 - RNA, 15 nt, Human adenovirus B (HAdV-B)
gacaauucucuagaa

SEQ ID NO: 103741 - RNA, 21 nt, Human adenovirus B (HAdV-B)
gaggaguuagaaaaugcuccu

SEQ ID NO: 103742 - RNA, 19 nt, Human adenovirus B (HAdV-B)
gagccgcaagagcucugcu

SEQ ID NO: 103743 - RNA, 18 nt, Human adenovirus B (HAdV-B)
gagccagccguccggcau

SEQ ID NO: 103744 - RNA, 22 nt, Human adenovirus B (HAdV-B)
gagagaauuggguucuucauug

SEQ ID NO: 103745 - RNA, 15 nt, Human adenovirus B (HAdV-B)
gaguucuuacuuuaa

SEQ ID NO: 103746 - RNA, 18 nt, Human adenovirus B (HAdV-B)
gaguuuuuacaacuagaa

SEQ ID NO: 103747 - RNA, 20 nt, Human adenovirus B (HAdV-B)
gaggcuuugcuggaagccac

SEQ ID NO: 103748 - RNA, 13 nt, Human adenovirus B (HAdV-B)
gauacuugcucgc

SEQ ID NO: 103749 - RNA, 22 nt, Human adenovirus B (HAdV-B)
gauacuuggguugccacuugaa

SEQ ID NO: 103750 - RNA, 19 nt, Human adenovirus B (HAdV-B)
gauacuaugacuaugcaua

SEQ ID NO: 103751 - RNA, 15 nt, Human adenovirus B (HAdV-B)
gauacaguagucaau

SEQ ID NO: 103752 - RNA, 20 nt, Human adenovirus B (HAdV-B)
gauauuuuucauucucaagu

SEQ ID NO: 103753 - RNA, 19 nt, Human adenovirus B (HAdV-B)
gaucaccgcuacugaccau

SEQ ID NO: 103754 - RNA, 13 nt, Human adenovirus B (HAdV-B)
gaucauccacaag

SEQ ID NO: 103755 - RNA, 15 nt, Human adenovirus B (HAdV-B)
gaucauccacaagac

SEQ ID NO: 103756 - RNA, 18 nt, Human adenovirus B (HAdV-B)
gaucauccacaagaccca

SEQ ID NO: 103757 - RNA, 15 nt, Human adenovirus B (HAdV-B)
gaugucauagacgua

SEQ ID NO: 103758 - RNA, 16 nt, Human adenovirus B (HAdV-B)
gauguugccauucuca

SEQ ID NO: 103759 - RNA, 21 nt, Human adenovirus B (HAdV-B)
gauucugguucgcuagugaau

SEQ ID NO: 103760 - RNA, 18 nt, Human adenovirus B (HAdV-B)
gauugugauacuaugacu

SEQ ID NO: 103761 - RNA, 19 nt, Human adenovirus B (HAdV-B)
gauugguguauucuguuaa

SEQ ID NO: 103762 - RNA, 13 nt, Human adenovirus B (HAdV-B)
gcaaaugacaaag

SEQ ID NO: 103763 - RNA, 23 nt, Human adenovirus B (HAdV-B)
gcaaauuuuucuuuuauucaauu

SEQ ID NO: 103764 - RNA, 23 nt, Human adenovirus B (HAdV-B)
gcaacaaaacaaaaccaauaaua

SEQ ID NO: 103765 - RNA, 14 nt, Human adenovirus B (HAdV-B)
gcaaauuccaacaa

SEQ ID NO: 103766 - RNA, 21 nt, Human adenovirus B (HAdV-B)
gcaauaaggucucuguugaaa

SEQ ID NO: 103767 - RNA, 22 nt, Human adenovirus B (HAdV-B)
gcaccucacuucccucuuccca

SEQ ID NO: 103768 - RNA, 13 nt, Human adenovirus B (HAdV-B)
gaaacaccaucag

SEQ ID NO: 103769 - RNA, 20 nt, Human adenovirus B (HAdV-B)
gaaaaugccaaauauggcaa

SEQ ID NO: 103770 - RNA, 12 nt, Human adenovirus B (HAdV-B)
gaaaccaaauac

SEQ ID NO: 103771 - RNA, 20 nt, Human adenovirus B (HAdV-B)
gaaaccgcugaaaaacuuuu

SEQ ID NO: 103772 - RNA, 16 nt, Human adenovirus B (HAdV-B)
gaaccggguucugcca

SEQ ID NO: 103773 - RNA, 12 nt, Human adenovirus B (HAdV-B)
gaacaccaauca

SEQ ID NO: 103774 - RNA, 21 nt, Human adenovirus B (HAdV-B)
gaacaccuuagaaaaugcaaa

SEQ ID NO: 103775 - RNA, 22 nt, Human adenovirus B (HAdV-B)
gaacaccuuagaaaaugcaaau

SEQ ID NO: 103776 - RNA, 16 nt, Human adenovirus B (HAdV-B)
gaacacguuguuuaca

SEQ ID NO: 103777 - RNA, 19 nt, Human adenovirus B (HAdV-B)
gaaagccuuugcugucuua

SEQ ID NO: 103778 - RNA, 21 nt, Human adenovirus B (HAdV-B)
gaaagcgcuuuaaaagacuau

SEQ ID NO: 103779 - RNA, 16 nt, Human adenovirus B (HAdV-B)
gaaaugggcaugaggu

SEQ ID NO: 103780 - RNA, 15 nt, Human adenovirus B (HAdV-B)
gacaaagugggcaua

SEQ ID NO: 103781 - RNA, 22 nt, Human adenovirus B (HAdV-B)
gaaucagaaugacccgcaggca

SEQ ID NO: 103782 - RNA, 15 nt, Human adenovirus B (HAdV-B)
gaagguccuggccau

SEQ ID NO: 103783 - RNA, 14 nt, Human adenovirus B (HAdV-B)
gaaguaggcugauu

SEQ ID NO: 103784 - RNA, 14 nt, Human adenovirus B (HAdV-B)
gaaguccaaaugac

SEQ ID NO: 103785 - RNA, 17 nt, Human adenovirus B (HAdV-B)
gaagcguugauuacuuu

SEQ ID NO: 103786 - RNA, 20 nt, Human adenovirus B (HAdV-B)
gaagccccccgggaacaaga

SEQ ID NO: 103787 - RNA, 22 nt, Human adenovirus B (HAdV-B)
gaaggaugaaaaaaaaccccgc

SEQ ID NO: 103788 - RNA, 21 nt, Human adenovirus B (HAdV-B)
gaagcucuuaauuugggccau

SEQ ID NO: 103789 - RNA, 12 nt, Human adenovirus B (HAdV-B)
cuugcuugcuau

SEQ ID NO: 103790 - RNA, 20 nt, Human adenovirus B (HAdV-B)
cuuguuuauuugaaaaucaa

SEQ ID NO: 103791 - RNA, 19 nt, Human adenovirus B (HAdV-B)
cuuguuacauaucuggaaa

SEQ ID NO: 103792 - RNA, 15 nt, Human adenovirus B (HAdV-B)
cuuuagcauuaguaa

SEQ ID NO: 103793 - RNA, 19 nt, Human adenovirus B (HAdV-B)
cuuuaggagaaugaagcau

SEQ ID NO: 103794 - RNA, 22 nt, Human adenovirus B (HAdV-B)
cuguggaaaucaaguaccaucu

SEQ ID NO: 103795 - RNA, 21 nt, Human adenovirus B (HAdV-B)
cuguggaugcaguuauugaca

SEQ ID NO: 103796 - RNA, 14 nt, Human adenovirus B (HAdV-B)
cugucuugcagcug

SEQ ID NO: 103797 - RNA, 17 nt, Human adenovirus B (HAdV-B)
cugucuugcagcuguca

SEQ ID NO: 103798 - RNA, 13 nt, Human adenovirus B (HAdV-B)
cuugcagcuguca

SEQ ID NO: 103799 - RNA, 16 nt, Human adenovirus B (HAdV-B)
cuuuuguuacuugcau

SEQ ID NO: 103800 - RNA, 12 nt, Human adenovirus B (HAdV-B)
cuuuuggaaccg

SEQ ID NO: 103801 - RNA, 23 nt, Human adenovirus B (HAdV-B)
cuuuuggaaccggguucugccaa

SEQ ID NO: 103802 - RNA, 19 nt, Human adenovirus B (HAdV-B)
gaaaaccacgaaaaugcca

SEQ ID NO: 103803 - RNA, 11 nt, Human adenovirus B (HAdV-B)
gaaaaccagca

SEQ ID NO: 103804 - RNA, 14 nt, Human adenovirus B (HAdV-B)
gaaaaauuugccaa

SEQ ID NO: 103805 - RNA, 17 nt, Human adenovirus B (HAdV-B)
cuuuggacgcagcugca

SEQ ID NO: 103806 - RNA, 21 nt, Human adenovirus B (HAdV-B)
cuuuggacgcagcugcagcug

SEQ ID NO: 103807 - RNA, 17 nt, Human adenovirus B (HAdV-B)
cuuucuccauacuuuaa

SEQ ID NO: 103808 - RNA, 18 nt, Human adenovirus B (HAdV-B)
cuuucuccauacuuuaaa

SEQ ID NO: 103809 - RNA, 15 nt, Human adenovirus B (HAdV-B)
cuuucgcuuuuggaa

SEQ ID NO: 103810 - RNA, 16 nt, Human adenovirus B (HAdV-B)
cuuucgguuggaaccc

SEQ ID NO: 103811 - RNA, 13 nt, Human adenovirus B (HAdV-B)
cuuugcuaccuau

SEQ ID NO: 103812 - RNA, 14 nt, Human adenovirus B (HAdV-B)
cuuugcuaccuaua

SEQ ID NO: 103813 - RNA, 23 nt, Human adenovirus B (HAdV-B)
uagacaugguuuuagauuccaca

SEQ ID NO: 103814 - RNA, 17 nt, Human adenovirus B (HAdV-B)
uagaauuaucauugaaa

SEQ ID NO: 103815 - RNA, 21 nt, Human adenovirus B (HAdV-B)
uagaagagcacgagauacaau

SEQ ID NO: 103816 - RNA, 13 nt, Human adenovirus B (HAdV-B)
uagaaauuacuug

SEQ ID NO: 103817 - RNA, 17 nt, Human adenovirus B (HAdV-B)
uagaaauuucuucuuca

SEQ ID NO: 103818 - RNA, 15 nt, Human adenovirus B (HAdV-B)
uacuugaacuaucac

SEQ ID NO: 103819 - RNA, 16 nt, Human adenovirus B (HAdV-B)
uacuugaacuaucaca

SEQ ID NO: 103820 - RNA, 15 nt, Human adenovirus B (HAdV-B)
uacuugcaucugcgu

SEQ ID NO: 103821 - RNA, 22 nt, Human adenovirus B (HAdV-B)
uacuugcaucugcguauguagc

SEQ ID NO: 103822 - RNA, 22 nt, Human adenovirus B (HAdV-B)
uacuugcucgcacauagucaua

SEQ ID NO: 103823 - RNA, 20 nt, Human adenovirus B (HAdV-B)
uacuuggguugccacuugaa

SEQ ID NO: 103824 - RNA, 23 nt, Human adenovirus B (HAdV-B)
uacuuucacagcaguagccacag

SEQ ID NO: 103825 - RNA, 22 nt, Human adenovirus B (HAdV-B)
uacuuucgcuuuuggaaccggg

SEQ ID NO: 103826 - RNA, 15 nt, Human adenovirus B (HAdV-B)
uacuuucucuagcag

SEQ ID NO: 103827 - RNA, 18 nt, Human adenovirus B (HAdV-B)
uagcagagguuugcaccu

SEQ ID NO: 103828 - RNA, 16 nt, Human adenovirus B (HAdV-B)
uagauuuggcuaacca

SEQ ID NO: 103829 - RNA, 15 nt, Human adenovirus B (HAdV-B)
uagauaaaaauccau

SEQ ID NO: 103830 - RNA, 16 nt, Human adenovirus B (HAdV-B)
uauagaaauuacuugg

SEQ ID NO: 103831 - RNA, 14 nt, Human adenovirus B (HAdV-B)
uauaggagcauuug

SEQ ID NO: 103832 - RNA, 17 nt, Human adenovirus B (HAdV-B)
uauaggagcauuugcuu

SEQ ID NO: 103833 - RNA, 22 nt, Human adenovirus B (HAdV-B)
uauaggcucaaacugcacacua

SEQ ID NO: 103834 - RNA, 17 nt, Human adenovirus B (HAdV-B)
uaucccgauggauuuuu

SEQ ID NO: 103835 - RNA, 22 nt, Human adenovirus B (HAdV-B)
uaggaagacuaggcaacuguua

SEQ ID NO: 103836 - RNA, 20 nt, Human adenovirus B (HAdV-B)
uagugcuaggaauucuugcg

SEQ ID NO: 103837 - RNA, 21 nt, Human adenovirus B (HAdV-B)
uauacagccaugguuuccacu

SEQ ID NO: 103838 - RNA, 22 nt, Human adenovirus B (HAdV-B)
uauacagccaugguuuccacua

SEQ ID NO: 103839 - RNA, 21 nt, Human adenovirus B (HAdV-B)
uacaugagucauuauugaaca

SEQ ID NO: 103840 - RNA, 16 nt, Human adenovirus B (HAdV-B)
uaccuauacacaccuu

SEQ ID NO: 103841 - RNA, 19 nt, Human adenovirus B (HAdV-B)
uaccuauacacaccuugcu

SEQ ID NO: 103842 - RNA, 17 nt, Human adenovirus B (HAdV-B)
uaccguggaugauuucc

SEQ ID NO: 103843 - RNA, 17 nt, Human adenovirus B (HAdV-B)
uaccugcgccaccaucc

SEQ ID NO: 103844 - RNA, 17 nt, Human adenovirus B (HAdV-B)
uacugcgcucugagaag

SEQ ID NO: 103845 - RNA, 16 nt, Human adenovirus B (HAdV-B)
uacuguucugcaagag

SEQ ID NO: 103846 - RNA, 20 nt, Human adenovirus B (HAdV-B)
uacuagucucgcaacucuga

SEQ ID NO: 103847 - RNA, 13 nt, Human adenovirus B (HAdV-B)
uacuaauacuacu

SEQ ID NO: 103848 - RNA, 14 nt, Human adenovirus B (HAdV-B)
uacaaaacaugcaa

SEQ ID NO: 103849 - RNA, 15 nt, Human adenovirus B (HAdV-B)
uacaaaacaugcaac

SEQ ID NO: 103850 - RNA, 17 nt, Human adenovirus B (HAdV-B)
uacaauuuccaauccaa

SEQ ID NO: 103851 - RNA, 10 nt, Human adenovirus B (HAdV-B)
uacaauggac

SEQ ID NO: 103852 - RNA, 17 nt, Human adenovirus B (HAdV-B)
uacacacaauaacaaaa

SEQ ID NO: 103853 - RNA, 22 nt, Human adenovirus B (HAdV-B)
uacacacaauaacaaaaccugg

SEQ ID NO: 103854 - RNA, 17 nt, Human adenovirus B (HAdV-B)
uacacaccuugcuucac

SEQ ID NO: 103855 - RNA, 23 nt, Human adenovirus B (HAdV-B)
uacagugcaguacaagcgcagac

SEQ ID NO: 103856 - RNA, 12 nt, Human adenovirus B (HAdV-B)
uaacuguucacu

SEQ ID NO: 103857 - RNA, 13 nt, Human adenovirus B (HAdV-B)
uaacuugcaacau

SEQ ID NO: 103858 - RNA, 17 nt, Human adenovirus B (HAdV-B)
uaacuugcaacauacaa

SEQ ID NO: 103859 - RNA, 20 nt, Human adenovirus B (HAdV-B)
uaacuugcaacauacaaaau

SEQ ID NO: 103860 - RNA, 18 nt, Human adenovirus B (HAdV-B)
uaacuucaccuuuccuac

SEQ ID NO: 103861 - RNA, 21 nt, Human adenovirus B (HAdV-B)
uaacuucaccuuuccuacuca

SEQ ID NO: 103862 - RNA, 16 nt, Human adenovirus B (HAdV-B)
uaaggcgaauggguau

SEQ ID NO: 103863 - RNA, 19 nt, Human adenovirus B (HAdV-B)
uaaggcgaauggguauuaa

SEQ ID NO: 103864 - RNA, 16 nt, Human adenovirus B (HAdV-B)
uaauucaaaacuaaca

SEQ ID NO: 103865 - RNA, 13 nt, Human adenovirus B (HAdV-B)
uaacaaaaccugg

SEQ ID NO: 103866 - RNA, 13 nt, Human adenovirus B (HAdV-B)
uaacaaccacagg

SEQ ID NO: 103867 - RNA, 22 nt, Human adenovirus B (HAdV-B)
uaacaaccacaggcggaucucu

SEQ ID NO: 103868 - RNA, 21 nt, Human adenovirus B (HAdV-B)
uaacuauaggcucaaacugca

SEQ ID NO: 103869 - RNA, 22 nt, Human adenovirus B (HAdV-B)
uaacaaguuccguaaauguagu

SEQ ID NO: 103870 - RNA, 18 nt, Human adenovirus B (HAdV-B)
uaacaauacaauuuccaa

SEQ ID NO: 103871 - RNA, 18 nt, Human adenovirus B (HAdV-B)
uaaacauuuggauaccau

SEQ ID NO: 103872 - RNA, 20 nt, Human adenovirus B (HAdV-B)
uaaaagaaaaauuugccaaa

SEQ ID NO: 103873 - RNA, 20 nt, Human adenovirus B (HAdV-B)
uaaaaccaugucuauaucua

SEQ ID NO: 103874 - RNA, 20 nt, Human adenovirus B (HAdV-B)
guugccgcuaacacugugcu

SEQ ID NO: 103875 - RNA, 15 nt, Human adenovirus B (HAdV-B)
guuggagccugagga

SEQ ID NO: 103876 - RNA, 13 nt, Human adenovirus B (HAdV-B)
guugcaugauuaa

SEQ ID NO: 103877 - RNA, 23 nt, Human adenovirus B (HAdV-B)
guugauuuaaaaucaaguguuuu

SEQ ID NO: 103878 - RNA, 14 nt, Human adenovirus B (HAdV-B)
guuguuuacaugag

SEQ ID NO: 103879 - RNA, 21 nt, Human adenovirus B (HAdV-B)
uaaaaauauguuaacuguuca

SEQ ID NO: 103880 - RNA, 15 nt, Human adenovirus B (HAdV-B)
guuuccacuaccaca

SEQ ID NO: 103881 - RNA, 11 nt, Human adenovirus B (HAdV-B)
guuucuuguaa

SEQ ID NO: 103882 - RNA, 13 nt, Human adenovirus B (HAdV-B)
guuuggaaugugg

SEQ ID NO: 103883 - RNA, 12 nt, Human adenovirus B (HAdV-B)
guucaugugaug

SEQ ID NO: 103884 - RNA, 19 nt, Human adenovirus B (HAdV-B)
guucaugugauggcgcuag

SEQ ID NO: 103885 - RNA, 21 nt, Human adenovirus B (HAdV-B)
guucccgagugguacacuguc

SEQ ID NO: 103886 - RNA, 17 nt, Human adenovirus B (HAdV-B)
guucaauaaacaucacu

SEQ ID NO: 103887 - RNA, 14 nt, Human adenovirus B (HAdV-B)
guugaaaugggcau

SEQ ID NO: 103888 - RNA, 15 nt, Human adenovirus B (HAdV-B)
guugaaaugggcaug

SEQ ID NO: 103889 - RNA, 14 nt, Human adenovirus B (HAdV-B)
guucuuacuuuaaa

SEQ ID NO: 103890 - RNA, 19 nt, Human adenovirus B (HAdV-B)
guuauauuggguugcauga

SEQ ID NO: 103891 - RNA, 21 nt, Human adenovirus B (HAdV-B)
guuaucaaccccaaaugggau

SEQ ID NO: 103892 - RNA, 14 nt, Human adenovirus B (HAdV-B)
guuaacuguucacu

SEQ ID NO: 103893 - RNA, 18 nt, Human adenovirus B (HAdV-B)
guuaacuguucacugguu

SEQ ID NO: 103894 - RNA, 20 nt, Human adenovirus B (HAdV-B)
guuaagcaugacagauaugu

SEQ ID NO: 103895 - RNA, 12 nt, Human adenovirus B (HAdV-B)
guccaugguaca

SEQ ID NO: 103896 - RNA, 21 nt, Human adenovirus B (HAdV-B)
guccaugguacagacagauug

SEQ ID NO: 103897 - RNA, 17 nt, Human adenovirus B (HAdV-B)
gucaauugauguugcca

SEQ ID NO: 103898 - RNA, 15 nt, Human adenovirus B (HAdV-B)
guccagcaguggaaa

SEQ ID NO: 103899 - RNA, 23 nt, Human adenovirus B (HAdV-B)
gucaauauuugugugacagugca

SEQ ID NO: 103900 - RNA, 21 nt, Human adenovirus B (HAdV-B)
guggacaacaagucggcggac

SEQ ID NO: 103901 - RNA, 19 nt, Human adenovirus B (HAdV-B)
guguauaugugucauuaca

SEQ ID NO: 103902 - RNA, 22 nt, Human adenovirus B (HAdV-B)
gcuuaagccugggaaacgucca

SEQ ID NO: 103903 - RNA, 19 nt, Human adenovirus B (HAdV-B)
gcuguguaguaacaaguuc

SEQ ID NO: 103904 - RNA, 17 nt, Human adenovirus B (HAdV-B)
gcugccuccuugcagau

SEQ ID NO: 103905 - RNA, 18 nt, Human adenovirus B (HAdV-B)
gcugugcuuuuucaccaa

SEQ ID NO: 103906 - RNA, 20 nt, Human adenovirus B (HAdV-B)
gcuccagcgagcaagagcuc

SEQ ID NO: 103907 - RNA, 22 nt, Human adenovirus B (HAdV-B)
gcucauaggagcuggcuuucau

SEQ ID NO: 103908 - RNA, 17 nt, Human adenovirus B (HAdV-B)
gcucgcacauagucaua

SEQ ID NO: 103909 - RNA, 18 nt, Human adenovirus B (HAdV-B)
gcgguucaggccucgcaa

SEQ ID NO: 103910 - RNA, 22 nt, Human adenovirus B (HAdV-B)
gcuacaggcgacggcgugcuau

SEQ ID NO: 103911 - RNA, 12 nt, Human adenovirus B (HAdV-B)
gcgccaccaucc

SEQ ID NO: 103912 - RNA, 18 nt, Human adenovirus B (HAdV-B)
gcgcaauguuuugcauua

SEQ ID NO: 103913 - RNA, 22 nt, Human adenovirus B (HAdV-B)
gccggacugguauacaacgcuc

SEQ ID NO: 103914 - RNA, 17 nt, Human adenovirus B (HAdV-B)
gccuaccgaaaccaaau

SEQ ID NO: 103915 - RNA, 18 nt, Human adenovirus B (HAdV-B)
gcgaaggcgcauugccag

SEQ ID NO: 103916 - RNA, 19 nt, Human adenovirus B (HAdV-B)
gcgacaucuagaccacugc

SEQ ID NO: 103917 - RNA, 17 nt, Human adenovirus B (HAdV-B)
gccgcugccuccuugca

SEQ ID NO: 103918 - RNA, 12 nt, Human adenovirus B (HAdV-B)
gccgcucaugga

SEQ ID NO: 103919 - RNA, 23 nt, Human adenovirus B (HAdV-B)
gccgcucauggacaaacagucgu

SEQ ID NO: 103920 - RNA, 17 nt, Human adenovirus B (HAdV-B)
gccgcaagagcucugcu

SEQ ID NO: 103921 - RNA, 12 nt, Human adenovirus B (HAdV-B)
gcccgugcugau

SEQ ID NO: 103922 - RNA, 18 nt, Human adenovirus B (HAdV-B)
gcccuaguguaccaggaa

SEQ ID NO: 103923 - RNA, 17 nt, Human adenovirus B (HAdV-B)
gccccuacuauagccag

SEQ ID NO: 103924 - RNA, 12 nt, Human adenovirus B (HAdV-B)
gccccgugagcu

SEQ ID NO: 103925 - RNA, 17 nt, Human adenovirus B (HAdV-B)
gcagcaccucacuuccc

SEQ ID NO: 103926 - RNA, 21 nt, Human adenovirus B (HAdV-B)
gcagaccugugugguuagcuc

SEQ ID NO: 103927 - RNA, 20 nt, Human adenovirus B (HAdV-B)
gcacggugggaucugcaauc

SEQ ID NO: 103928 - RNA, 14 nt, Human adenovirus B (HAdV-B)
ggggaggugacuag

SEQ ID NO: 103929 - RNA, 17 nt, Human adenovirus B (HAdV-B)
gggugcauucgggguga

SEQ ID NO: 103930 - RNA, 23 nt, Human adenovirus B (HAdV-B)
ggguuguagcagagguuugcacc

SEQ ID NO: 103931 - RNA, 20 nt, Human adenovirus B (HAdV-B)
ggggacugccccauggcaug

SEQ ID NO: 103932 - RNA, 13 nt, Human adenovirus B (HAdV-B)
ggucuggugcagu

SEQ ID NO: 103933 - RNA, 16 nt, Human adenovirus B (HAdV-B)
ggugaaauuaugugca

SEQ ID NO: 103934 - RNA, 12 nt, Human adenovirus B (HAdV-B)
ggugaacaccaa

SEQ ID NO: 103935 - RNA, 15 nt, Human adenovirus B (HAdV-B)
ggucagugauagaua

SEQ ID NO: 103936 - RNA, 13 nt, Human adenovirus B (HAdV-B)
gguuacuauggaa

SEQ ID NO: 103937 - RNA, 16 nt, Human adenovirus B (HAdV-B)
gguucagaugguacuu

SEQ ID NO: 103938 - RNA, 23 nt, Human adenovirus B (HAdV-B)
gguucauggcccccgauaagcuc

SEQ ID NO: 103939 - RNA, 21 nt, Human adenovirus B (HAdV-B)
gguucgcuagugaauuagcua

SEQ ID NO: 103940 - RNA, 13 nt, Human adenovirus B (HAdV-B)
gguucugguacug

SEQ ID NO: 103941 - RNA, 22 nt, Human adenovirus B (HAdV-B)
guaguuuucuuuuucucuagaa

SEQ ID NO: 103942 - RNA, 18 nt, Human adenovirus B (HAdV-B)
guacugccaucuaccacu

SEQ ID NO: 103943 - RNA, 19 nt, Human adenovirus B (HAdV-B)
guauugggaaaacuuuggg

SEQ ID NO: 103944 - RNA, 23 nt, Human adenovirus B (HAdV-B)
gcuuugcccgggaacucauugag

SEQ ID NO: 103945 - RNA, 22 nt, Human adenovirus B (HAdV-B)
gcuuucacaguccaacugcugc

SEQ ID NO: 103946 - RNA, 14 nt, Human adenovirus B (HAdV-B)
gcuuguuacauauc

SEQ ID NO: 103947 - RNA, 19 nt, Human adenovirus B (HAdV-B)
gcuuguuacauaucuggaa

SEQ ID NO: 103948 - RNA, 15 nt, Human adenovirus B (HAdV-B)
ggaacugauacuugg

SEQ ID NO: 103949 - RNA, 16 nt, Human adenovirus B (HAdV-B)
ggaacugauacuuggg

SEQ ID NO: 103950 - RNA, 13 nt, Human adenovirus B (HAdV-B)
ggaguucuuauua

SEQ ID NO: 103951 - RNA, 18 nt, Human adenovirus B (HAdV-B)
ggaagcguugauuacuuu

SEQ ID NO: 103952 - RNA, 20 nt, Human adenovirus B (HAdV-B)
ggauauguuucuaaauccug

SEQ ID NO: 103953 - RNA, 15 nt, Human adenovirus B (HAdV-B)
ggauaccauuagaua

SEQ ID NO: 103954 - RNA, 13 nt, Human adenovirus B (HAdV-B)
ggaucuacugugg

SEQ ID NO: 103955 - RNA, 21 nt, Human adenovirus B (HAdV-B)
ggaugaaguuucuguauugca

SEQ ID NO: 103956 - RNA, 14 nt, Human adenovirus B (HAdV-B)
ggaugagagucuag

SEQ ID NO: 103957 - RNA, 12 nt, Human adenovirus B (HAdV-B)
ggaugauuuccu

SEQ ID NO: 103958 - RNA, 16 nt, Human adenovirus B (HAdV-B)
ggaugcaaaugcaaua

SEQ ID NO: 103959 - RNA, 22 nt, Human adenovirus B (HAdV-B)
ggaugggugagugcagaggcau

SEQ ID NO: 103960 - RNA, 14 nt, Human adenovirus B (HAdV-B)
ggauugaauguuua

SEQ ID NO: 103961 - RNA, 23 nt, Human adenovirus B (HAdV-B)
ggcaaagauucgauccgaugaca

SEQ ID NO: 103962 - RNA, 23 nt, Human adenovirus B (HAdV-B)
ggcauacuuucuccauacuuuaa

SEQ ID NO: 103963 - RNA, 14 nt, Human adenovirus B (HAdV-B)
ggcaucaauggagu

SEQ ID NO: 103964 - RNA, 20 nt, Human adenovirus B (HAdV-B)
ggcucucuugcuucuugcau

SEQ ID NO: 103965 - RNA, 21 nt, Human adenovirus B (HAdV-B)
ggccaaccgucuaucggccau

SEQ ID NO: 103966 - RNA, 24 nt, Human adenovirus B (HAdV-B)
gggacggucaggccagugcacaaa

SEQ ID NO: 103967 - RNA, 16 nt, Human adenovirus B (HAdV-B)
ggcuucuauuauggaa

SEQ ID NO: 103968 - RNA, 17 nt, Human adenovirus B (HAdV-B)
gggacugccccauggca

SEQ ID NO: 103969 - RNA, 18 nt, Human adenovirus B (HAdV-B)
gggaugggugagugcaga

SEQ ID NO: 103970 - RNA, 19 nt, Human adenovirus B (HAdV-B)
aggccgaaguccaaaugac

SEQ ID NO: 103971 - RNA, 16 nt, Human adenovirus B (HAdV-B)
aggccgauacagcgaa

SEQ ID NO: 103972 - RNA, 22 nt, Human adenovirus B (HAdV-B)
aggccucggcuucccacugaaa

SEQ ID NO: 103973 - RNA, 22 nt, Human adenovirus B (HAdV-B)
aggauccuauagaggugggauu

SEQ ID NO: 103974 - RNA, 14 nt, Human adenovirus B (HAdV-B)
aggacaaguaacuu

SEQ ID NO: 103975 - RNA, 16 nt, Human adenovirus B (HAdV-B)
aggacaauacauacuc

SEQ ID NO: 103976 - RNA, 13 nt, Human adenovirus B (HAdV-B)
agcgguguuggca

SEQ ID NO: 103977 - RNA, 23 nt, Human adenovirus B (HAdV-B)
agcgcuuucacaguccaacugcu

SEQ ID NO: 103978 - RNA, 16 nt, Human adenovirus B (HAdV-B)
agcuugaaccugaaag

SEQ ID NO: 103979 - RNA, 18 nt, Human adenovirus B (HAdV-B)
agcguugauuacuuugau

SEQ ID NO: 103980 - RNA, 19 nt, Human adenovirus B (HAdV-B)
aggaaagucccgcucccac

SEQ ID NO: 103981 - RNA, 19 nt, Human adenovirus B (HAdV-B)
aggaacgcgcggccaaaga

SEQ ID NO: 103982 - RNA, 11 nt, Human adenovirus B (HAdV-B)
agcagcaccuc

SEQ ID NO: 103983 - RNA, 14 nt, Human adenovirus B (HAdV-B)
agcagccgcugucu

SEQ ID NO: 103984 - RNA, 18 nt, Human adenovirus B (HAdV-B)
agcaugaccaccaucgaa

SEQ ID NO: 103985 - RNA, 16 nt, Human adenovirus B (HAdV-B)
agcaguuggacuguga

SEQ ID NO: 103986 - RNA, 22 nt, Human adenovirus B (HAdV-B)
agcaggcgacggcggugaugca

SEQ ID NO: 103987 - RNA, 23 nt, Human adenovirus B (HAdV-B)
agcaggggacgcuacagugcagu

SEQ ID NO: 103988 - RNA, 12 nt, Human adenovirus B (HAdV-B)
agcaggucagga

SEQ ID NO: 103989 - RNA, 17 nt, Human adenovirus B (HAdV-B)
agcauguuguuuggcac

SEQ ID NO: 103990 - RNA, 16 nt, Human adenovirus B (HAdV-B)
agcauuaguaauggca

SEQ ID NO: 103991 - RNA, 16 nt, Human adenovirus B (HAdV-B)
agccaugaugcuucca

SEQ ID NO: 103992 - RNA, 15 nt, Human adenovirus B (HAdV-B)
agccaugguuuccac

SEQ ID NO: 103993 - RNA, 15 nt, Human adenovirus B (HAdV-B)
agaugaaagcaccuc

SEQ ID NO: 103994 - RNA, 16 nt, Human adenovirus B (HAdV-B)
agaugaaagcaccucc

SEQ ID NO: 103995 - RNA, 20 nt, Human adenovirus B (HAdV-B)
agauggcgugagaauuggaa

SEQ ID NO: 103996 - RNA, 16 nt, Human adenovirus B (HAdV-B)
agauuccacauuccaa

SEQ ID NO: 103997 - RNA, 21 nt, Human adenovirus B (HAdV-B)
agauuaacuugcaugaucuuu

SEQ ID NO: 103998 - RNA, 22 nt, Human adenovirus B (HAdV-B)
agauuacgaaagugaaccacaa

SEQ ID NO: 103999 - RNA, 15 nt, Human adenovirus B (HAdV-B)
agcaauaaggucucu

SEQ ID NO: 104000 - RNA, 16 nt, Human adenovirus B (HAdV-B)
agcaauaaggucucug

SEQ ID NO: 104001 - RNA, 23 nt, Human adenovirus B (HAdV-B)
agcaccucacuucccucuuccca

SEQ ID NO: 104002 - RNA, 13 nt, Human adenovirus B (HAdV-B)
agcaaaguuuaca

SEQ ID NO: 104003 - RNA, 16 nt, Human adenovirus B (HAdV-B)
agcaaaugacaaaggc

SEQ ID NO: 104004 - RNA, 18 nt, Human adenovirus B (HAdV-B)
agcaaccccagacuguau

SEQ ID NO: 104005 - RNA, 16 nt, Human adenovirus B (HAdV-B)
agagucucugacaaag

SEQ ID NO: 104006 - RNA, 18 nt, Human adenovirus B (HAdV-B)
agagccuugauacaugua

SEQ ID NO: 104007 - RNA, 17 nt, Human adenovirus B (HAdV-B)
acuuuuccucacuacaa

SEQ ID NO: 104008 - RNA, 13 nt, Human adenovirus B (HAdV-B)
acuuucuccauac

SEQ ID NO: 104009 - RNA, 21 nt, Human adenovirus B (HAdV-B)
acuuuugcagcaaacucucuc

SEQ ID NO: 104010 - RNA, 16 nt, Human adenovirus B (HAdV-B)
agauacaguagucaau

SEQ ID NO: 104011 - RNA, 12 nt, Human adenovirus B (HAdV-B)
agaguuuuuaca

SEQ ID NO: 104012 - RNA, 16 nt, Human adenovirus B (HAdV-B)
agauaaagacagcggc

SEQ ID NO: 104013 - RNA, 19 nt, Human adenovirus B (HAdV-B)
agauauuuuucauucucaa

SEQ ID NO: 104014 - RNA, 18 nt, Human adenovirus B (HAdV-B)
agaucaccgcuacugacc

SEQ ID NO: 104015 - RNA, 23 nt, Human adenovirus B (HAdV-B)
aguuaagaaaucggaucuuucca

SEQ ID NO: 104016 - RNA, 24 nt, Human adenovirus B (HAdV-B)
agugucgcuaacaauacaauuucc

SEQ ID NO: 104017 - RNA, 19 nt, Human adenovirus B (HAdV-B)
agucuggaucacggucauc

SEQ ID NO: 104018 - RNA, 23 nt, Human adenovirus B (HAdV-B)
agucuacggccaaccguugaagg

SEQ ID NO: 104019 - RNA, 14 nt, Human adenovirus B (HAdV-B)
agucucugacaaag

SEQ ID NO: 104020 - RNA, 22 nt, Human adenovirus B (HAdV-B)
agucuugcuuguuuuacuuucg

SEQ ID NO: 104021 - RNA, 15 nt, Human adenovirus B (HAdV-B)
agugaaccacaaccc

SEQ ID NO: 104022 - RNA, 16 nt, Human adenovirus B (HAdV-B)
aguuggacugugaaag

SEQ ID NO: 104023 - RNA, 21 nt, Human adenovirus B (HAdV-B)
aguuucagagcgagccaaucu

SEQ ID NO: 104024 - RNA, 12 nt, Human adenovirus B (HAdV-B)
auaaacaaguua

SEQ ID NO: 104025 - RNA, 20 nt, Human adenovirus B (HAdV-B)
auaacauuauuguacugcca

SEQ ID NO: 104026 - RNA, 23 nt, Human adenovirus B (HAdV-B)
aggcgagucgugcuaggcggagc

SEQ ID NO: 104027 - RNA, 14 nt, Human adenovirus B (HAdV-B)
aggcgcauugccag

SEQ ID NO: 104028 - RNA, 17 nt, Human adenovirus B (HAdV-B)
aggcggagcgguggugu

SEQ ID NO: 104029 - RNA, 18 nt, Human adenovirus B (HAdV-B)
aggugguaauagauacuc

SEQ ID NO: 104030 - RNA, 19 nt, Human adenovirus B (HAdV-B)
aggugguaauagauacuca

SEQ ID NO: 104031 - RNA, 19 nt, Human adenovirus B (HAdV-B)
aguaccaucugaaccuccc

SEQ ID NO: 104032 - RNA, 14 nt, Human adenovirus B (HAdV-B)
aguacgauaccacc

SEQ ID NO: 104033 - RNA, 15 nt, Human adenovirus B (HAdV-B)
aguacgauaccacca

SEQ ID NO: 104034 - RNA, 13 nt, Human adenovirus B (HAdV-B)
agucauuauugaa

SEQ ID NO: 104035 - RNA, 14 nt, Human adenovirus B (HAdV-B)
aguccaacugcugc

SEQ ID NO: 104036 - RNA, 17 nt, Human adenovirus B (HAdV-B)
agucgucuucucugaug

SEQ ID NO: 104037 - RNA, 14 nt, Human adenovirus B (HAdV-B)
aguacuccaccaga

SEQ ID NO: 104038 - RNA, 16 nt, Human adenovirus B (HAdV-B)
auacaauaugaugucu

SEQ ID NO: 104039 - RNA, 13 nt, Human adenovirus B (HAdV-B)
auacaugccacag

SEQ ID NO: 104040 - RNA, 13 nt, Human adenovirus B (HAdV-B)
auaaucugcaaca

SEQ ID NO: 104041 - RNA, 17 nt, Human adenovirus B (HAdV-B)
auaaucugcaacaaaac

SEQ ID NO: 104042 - RNA, 17 nt, Human adenovirus B (HAdV-B)
auaaucuguugcaccau

SEQ ID NO: 104043 - RNA, 15 nt, Human adenovirus B (HAdV-B)
auaauuacacucuca

SEQ ID NO: 104044 - RNA, 19 nt, Human adenovirus B (HAdV-B)
auaagcucgccugugccau

SEQ ID NO: 104045 - RNA, 16 nt, Human adenovirus B (HAdV-B)
auaauaguaacuugca

SEQ ID NO: 104046 - RNA, 19 nt, Human adenovirus B (HAdV-B)
auaugacaauggaugguuu

SEQ ID NO: 104047 - RNA, 22 nt, Human adenovirus B (HAdV-B)
auaugacaauggaugguuuaca

SEQ ID NO: 104048 - RNA, 22 nt, Human adenovirus B (HAdV-B)
auagucauauaguucaugugau

SEQ ID NO: 104049 - RNA, 14 nt, Human adenovirus B (HAdV-B)
auaguucaugugau

SEQ ID NO: 104050 - RNA, 20 nt, Human adenovirus B (HAdV-B)
auaguuaucacccagcaaag

SEQ ID NO: 104051 - RNA, 19 nt, Human adenovirus B (HAdV-B)
auaguaacuugcaacauac

SEQ ID NO: 104052 - RNA, 20 nt, Human adenovirus B (HAdV-B)
auaccauuagauauagacau

SEQ ID NO: 104053 - RNA, 16 nt, Human adenovirus B (HAdV-B)
auaucgcggcacuucu

SEQ ID NO: 104054 - RNA, 20 nt, Human adenovirus B (HAdV-B)
auaucgggcaggaugucacu

SEQ ID NO: 104055 - RNA, 15 nt, Human adenovirus B (HAdV-B)
aaugacuuuaccccu

SEQ ID NO: 104056 - RNA, 21 nt, Human adenovirus B (HAdV-B)
acaaaaccaugugaccaaccu

SEQ ID NO: 104057 - RNA, 21 nt, Human adenovirus B (HAdV-B)
aauuuucucccagcagcaccu

SEQ ID NO: 104058 - RNA, 21 nt, Human adenovirus B (HAdV-B)
acaaaccgguugagcugggau

SEQ ID NO: 104059 - RNA, 21 nt, Human adenovirus B (HAdV-B)
acaaaggcuucuauuauggaa

SEQ ID NO: 104060 - RNA, 19 nt, Human adenovirus B (HAdV-B)
acaaaacaugcaacaucca

SEQ ID NO: 104061 - RNA, 22 nt, Human adenovirus B (HAdV-B)
acaaaacaugcaacauccaaua

SEQ ID NO: 104062 - RNA, 13 nt, Human adenovirus B (HAdV-B)
acaaaaucuuaca

SEQ ID NO: 104063 - RNA, 18 nt, Human adenovirus B (HAdV-B)
acaaacagucgucucuau

SEQ ID NO: 104064 - RNA, 13 nt, Human adenovirus B (HAdV-B)
acaaagugggcau

SEQ ID NO: 104065 - RNA, 18 nt, Human adenovirus B (HAdV-B)
acaaagugggcauaagau

SEQ ID NO: 104066 - RNA, 22 nt, Human adenovirus B (HAdV-B)
acaaggucgcagugcauggugu

SEQ ID NO: 104067 - RNA, 15 nt, Human adenovirus B (HAdV-B)
acaagugcagcaaca

SEQ ID NO: 104068 - RNA, 17 nt, Human adenovirus B (HAdV-B)
acaauaacaaaaccugg

SEQ ID NO: 104069 - RNA, 15 nt, Human adenovirus B (HAdV-B)
acaauacaauuucca

SEQ ID NO: 104070 - RNA, 21 nt, Human adenovirus B (HAdV-B)
acaauacaauuuccaauccaa

SEQ ID NO: 104071 - RNA, 20 nt, Human adenovirus B (HAdV-B)
acaacaguagcaaugugcaa

SEQ ID NO: 104072 - RNA, 12 nt, Human adenovirus B (HAdV-B)
acaacacuuuca

SEQ ID NO: 104073 - RNA, 21 nt, Human adenovirus B (HAdV-B)
acaacugaagccagcauucuu

SEQ ID NO: 104074 - RNA, 21 nt, Human adenovirus B (HAdV-B)
acaagauuggaauaagcauau

SEQ ID NO: 104075 - RNA, 17 nt, Human adenovirus B (HAdV-B)
acaguagucaauauaga

SEQ ID NO: 104076 - RNA, 22 nt, Human adenovirus B (HAdV-B)
acauaauuacacucucauagga

SEQ ID NO: 104077 - RNA, 17 nt, Human adenovirus B (HAdV-B)
acauacgggaacaaagc

SEQ ID NO: 104078 - RNA, 15 nt, Human adenovirus B (HAdV-B)
acagggcgucuccca

SEQ ID NO: 104079 - RNA, 18 nt, Human adenovirus B (HAdV-B)
acagcaaccccagacugu

SEQ ID NO: 104080 - RNA, 18 nt, Human adenovirus B (HAdV-B)
acagcaaccccaggccaa

SEQ ID NO: 104081 - RNA, 15 nt, Human adenovirus B (HAdV-B)
acagcaguagccaca

SEQ ID NO: 104082 - RNA, 23 nt, Human adenovirus B (HAdV-B)
acauugauuaauguuagcaaagu

SEQ ID NO: 104083 - RNA, 17 nt, Human adenovirus B (HAdV-B)
acauuccaaacaguuuc

SEQ ID NO: 104084 - RNA, 18 nt, Human adenovirus B (HAdV-B)
acauuccccuacaaaaca

SEQ ID NO: 104085 - RNA, 13 nt, Human adenovirus B (HAdV-B)
acaucuagaccac

SEQ ID NO: 104086 - RNA, 13 nt, Human adenovirus B (HAdV-B)
acacaagccgcau

SEQ ID NO: 104087 - RNA, 16 nt, Human adenovirus B (HAdV-B)
acaauuuccaauccaa

SEQ ID NO: 104088 - RNA, 13 nt, Human adenovirus B (HAdV-B)
acaccaaucaugg

SEQ ID NO: 104089 - RNA, 17 nt, Human adenovirus B (HAdV-B)
acaccaaucaugguacc

SEQ ID NO: 104090 - RNA, 20 nt, Human adenovirus B (HAdV-B)
acacauuccccuacaaaaca

SEQ ID NO: 104091 - RNA, 14 nt, Human adenovirus B (HAdV-B)
acagauaugucaau

SEQ ID NO: 104092 - RNA, 13 nt, Human adenovirus B (HAdV-B)
acacucucauagg

SEQ ID NO: 104093 - RNA, 15 nt, Human adenovirus B (HAdV-B)
acacucucauaggac

SEQ ID NO: 104094 - RNA, 14 nt, Human adenovirus B (HAdV-B)
acaccuuaauccca

SEQ ID NO: 104095 - RNA, 19 nt, Human adenovirus B (HAdV-B)
acaccuuagaaaaugcaaa

SEQ ID NO: 104096 - RNA, 17 nt, Human adenovirus B (HAdV-B)
acacuccugguccugug

SEQ ID NO: 104097 - RNA, 23 nt, Human adenovirus B (HAdV-B)
acaccgcuuuuccagaagcauuu

SEQ ID NO: 104098 - RNA, 12 nt, Human adenovirus B (HAdV-B)
acgggucuucca

SEQ ID NO: 104099 - RNA, 14 nt, Human adenovirus B (HAdV-B)
acggcggugaugca

SEQ ID NO: 104100 - RNA, 15 nt, Human adenovirus B (HAdV-B)
acggcggugaugcaa

SEQ ID NO: 104101 - RNA, 21 nt, Human adenovirus B (HAdV-B)
acggcuccagcgagcaagagc

SEQ ID NO: 104102 - RNA, 20 nt, Human adenovirus B (HAdV-B)
acgugacagcaaaugacaaa

SEQ ID NO: 104103 - RNA, 18 nt, Human adenovirus B (HAdV-B)
acuaugacuaugcauagu

SEQ ID NO: 104104 - RNA, 16 nt, Human adenovirus B (HAdV-B)
acuaugcauaguguaa

SEQ ID NO: 104105 - RNA, 19 nt, Human adenovirus B (HAdV-B)
acuaauucaaaacuaacaa

SEQ ID NO: 104106 - RNA, 23 nt, Human adenovirus B (HAdV-B)
acuccagcaccccgcacaacuac

SEQ ID NO: 104107 - RNA, 19 nt, Human adenovirus B (HAdV-B)
acuucaccuuuccuacuca

SEQ ID NO: 104108 - RNA, 18 nt, Human adenovirus B (HAdV-B)
acuucagaggucaucugg

SEQ ID NO: 104109 - RNA, 14 nt, Human adenovirus B (HAdV-B)
acuugaaaucagca

SEQ ID NO: 104110 - RNA, 15 nt, Human adenovirus B (HAdV-B)
acuugaguacacgga

SEQ ID NO: 104111 - RNA, 15 nt, Human adenovirus B (HAdV-B)
acuucuuagacucau

SEQ ID NO: 104112 - RNA, 19 nt, Human adenovirus B (HAdV-B)
acuucuuagacucaucuaa

SEQ ID NO: 104113 - RNA, 14 nt, Human adenovirus B (HAdV-B)
acuucuugaccacg

SEQ ID NO: 104114 - RNA, 19 nt, Human adenovirus B (HAdV-B)
acuggcaccucaguacgau

SEQ ID NO: 104115 - RNA, 17 nt, Human adenovirus B (HAdV-B)
acuggaucuacguccac

SEQ ID NO: 104116 - RNA, 13 nt, Human adenovirus B (HAdV-B)
acugugcuuggaa

SEQ ID NO: 104117 - RNA, 14 nt, Human adenovirus B (HAdV-B)
accuacacccugcu

SEQ ID NO: 104118 - RNA, 18 nt, Human adenovirus B (HAdV-B)
accuacgauaagcgcuuc

SEQ ID NO: 104119 - RNA, 16 nt, Human adenovirus B (HAdV-B)
accuauugcauuugca

SEQ ID NO: 104120 - RNA, 16 nt, Human adenovirus B (HAdV-B)
accgagcuaccacugc

SEQ ID NO: 104121 - RNA, 17 nt, Human adenovirus B (HAdV-B)
accacaggcggaucucu

SEQ ID NO: 104122 - RNA, 18 nt, Human adenovirus B (HAdV-B)
accccuuuauaaacccag

SEQ ID NO: 104123 - RNA, 23 nt, Human adenovirus B (HAdV-B)
accaagagaguccggcucaguga

SEQ ID NO: 104124 - RNA, 20 nt, Human adenovirus B (HAdV-B)
accaauaauaguaacuugca

SEQ ID NO: 104125 - RNA, 16 nt, Human adenovirus B (HAdV-B)
accuuaaucccagaaa

SEQ ID NO: 104126 - RNA, 15 nt, Human adenovirus B (HAdV-B)
accugcuaccaauga

SEQ ID NO: 104127 - RNA, 17 nt, Human adenovirus B (HAdV-B)
accuuagaaaaugcaaa

SEQ ID NO: 104128 - RNA, 21 nt, Human adenovirus B (HAdV-B)
acgacaaaaauuuaccugcau

SEQ ID NO: 104129 - RNA, 13 nt, Human adenovirus B (HAdV-B)
acgagagcgugau

SEQ ID NO: 104130 - RNA, 16 nt, Human adenovirus B (HAdV-B)
acgagagcgugaugca

SEQ ID NO: 104131 - RNA, 21 nt, Human adenovirus B (HAdV-B)
acgcacagcuuuaaacauuug

SEQ ID NO: 104132 - RNA, 15 nt, Human adenovirus B (HAdV-B)
acgaugggagcgaaa

SEQ ID NO: 104133 - RNA, 23 nt, Human adenovirus B (HAdV-B)
acgcgccuaccgaaaccaaauac

SEQ ID NO: 104134 - RNA, 15 nt, Human adenovirus B (HAdV-B)
acgcgcggccaaaga

SEQ ID NO: 104135 - RNA, 16 nt, Human adenovirus B (HAdV-B)
acgcgcggccaaagag

SEQ ID NO: 104136 - RNA, 22 nt, Human adenovirus B (HAdV-B)
caaaauagacucucgccugcaa

SEQ ID NO: 104137 - RNA, 12 nt, Human adenovirus B (HAdV-B)
caaagagcucag

SEQ ID NO: 104138 - RNA, 20 nt, Human adenovirus B (HAdV-B)
caaagagcucagagauguca

SEQ ID NO: 104139 - RNA, 19 nt, Human adenovirus B (HAdV-B)
caaagaugccuauguaggu

SEQ ID NO: 104140 - RNA, 23 nt, Human adenovirus B (HAdV-B)
caaaggcgugaaggaacaugcag

SEQ ID NO: 104141 - RNA, 18 nt, Human adenovirus B (HAdV-B)
caacaggaggauuaaaga

SEQ ID NO: 104142 - RNA, 16 nt, Human adenovirus B (HAdV-B)
caacagaaaaccagca

SEQ ID NO: 104143 - RNA, 23 nt, Human adenovirus B (HAdV-B)
caaauaaacaaguuaaacuuuau

SEQ ID NO: 104144 - RNA, 14 nt, Human adenovirus B (HAdV-B)
caacaguagcaaug

SEQ ID NO: 104145 - RNA, 19 nt, Human adenovirus B (HAdV-B)
caacauacaaaaucuuaca

SEQ ID NO: 104146 - RNA, 20 nt, Human adenovirus B (HAdV-B)
caaccacaggcggaucucua

SEQ ID NO: 104147 - RNA, 22 nt, Human adenovirus B (HAdV-B)
caaccacaggcggaucucuaca

SEQ ID NO: 104148 - RNA, 20 nt, Human adenovirus B (HAdV-B)
auugauguugccauucucaa

SEQ ID NO: 104149 - RNA, 15 nt, Human adenovirus B (HAdV-B)
auugcccaggacuuu

SEQ ID NO: 104150 - RNA, 23 nt, Human adenovirus B (HAdV-B)
auugccuaccugcgccaccaucc

SEQ ID NO: 104151 - RNA, 21 nt, Human adenovirus B (HAdV-B)
auuucuucuucaccauacuca

SEQ ID NO: 104152 - RNA, 15 nt, Human adenovirus B (HAdV-B)
auuuucccuacuaau

SEQ ID NO: 104153 - RNA, 16 nt, Human adenovirus B (HAdV-B)
auuuucccuacuaaua

SEQ ID NO: 104154 - RNA, 21 nt, Human adenovirus B (HAdV-B)
auuuucucccagcagcaccuc

SEQ ID NO: 104155 - RNA, 17 nt, Human adenovirus B (HAdV-B)
auuuucaaauaaacaag

SEQ ID NO: 104156 - RNA, 13 nt, Human adenovirus B (HAdV-B)
caaaacuaacaau

SEQ ID NO: 104157 - RNA, 20 nt, Human adenovirus B (HAdV-B)
auuuuugcagacuaauucaa

SEQ ID NO: 104158 - RNA, 17 nt, Human adenovirus B (HAdV-B)
cacaugaucauccacaa

SEQ ID NO: 104159 - RNA, 13 nt, Human adenovirus B (HAdV-B)
cacagaugucaua

SEQ ID NO: 104160 - RNA, 17 nt, Human adenovirus B (HAdV-B)
cacagacaccuacuuca

SEQ ID NO: 104161 - RNA, 18 nt, Human adenovirus B (HAdV-B)
cacaaaggcgugaaggaa

SEQ ID NO: 104162 - RNA, 11 nt, Human adenovirus B (HAdV-B)
caauuuuuaca

SEQ ID NO: 104163 - RNA, 21 nt, Human adenovirus B (HAdV-B)
cacaauccaguugcauugcuu

SEQ ID NO: 104164 - RNA, 16 nt, Human adenovirus B (HAdV-B)
caauauagaaauuacu

SEQ ID NO: 104165 - RNA, 22 nt, Human adenovirus B (HAdV-B)
caauaugcuuauuccaaucuug

SEQ ID NO: 104166 - RNA, 14 nt, Human adenovirus B (HAdV-B)
caauugcucagaaa

SEQ ID NO: 104167 - RNA, 11 nt, Human adenovirus B (HAdV-B)
caauugauguu

SEQ ID NO: 104168 - RNA, 21 nt, Human adenovirus B (HAdV-B)
caauugauguugccauucuca

SEQ ID NO: 104169 - RNA, 22 nt, Human adenovirus B (HAdV-B)
caauugauguugccauucucaa

SEQ ID NO: 104170 - RNA, 15 nt, Human adenovirus B (HAdV-B)
caauuuccaauccaa

SEQ ID NO: 104171 - RNA, 15 nt, Human adenovirus B (HAdV-B)
caauucacaaaaucc

SEQ ID NO: 104172 - RNA, 22 nt, Human adenovirus B (HAdV-B)
caauugacaugcccuuggcucu

SEQ ID NO: 104173 - RNA, 16 nt, Human adenovirus B (HAdV-B)
caacccggauuuuaca

SEQ ID NO: 104174 - RNA, 19 nt, Human adenovirus B (HAdV-B)
caacccguaaucggaauca

SEQ ID NO: 104175 - RNA, 22 nt, Human adenovirus B (HAdV-B)
caacccugucuaccccuaugaa

SEQ ID NO: 104176 - RNA, 23 nt, Human adenovirus B (HAdV-B)
caacccugucuaccccuaugaag

SEQ ID NO: 104177 - RNA, 13 nt, Human adenovirus B (HAdV-B)
caacuagaacuua

SEQ ID NO: 104178 - RNA, 18 nt, Human adenovirus B (HAdV-B)
caacgugacagcaaauga

SEQ ID NO: 104179 - RNA, 17 nt, Human adenovirus B (HAdV-B)
caacucugguauucuaa

SEQ ID NO: 104180 - RNA, 13 nt, Human adenovirus B (HAdV-B)
caaguuacuuguc

SEQ ID NO: 104181 - RNA, 19 nt, Human adenovirus B (HAdV-B)
caaguuauacgaauacaau

SEQ ID NO: 104182 - RNA, 20 nt, Human adenovirus B (HAdV-B)
caagaccuggguugcggacc

SEQ ID NO: 104183 - RNA, 23 nt, Human adenovirus B (HAdV-B)
caagaccuggguugcggacccua

SEQ ID NO: 104184 - RNA, 15 nt, Human adenovirus B (HAdV-B)
caagaacuucuauca

SEQ ID NO: 104185 - RNA, 17 nt, Human adenovirus B (HAdV-B)
caacuucgaugauauua

SEQ ID NO: 104186 - RNA, 22 nt, Human adenovirus B (HAdV-B)
caagaaacucugccugauuaua

SEQ ID NO: 104187 - RNA, 12 nt, Human adenovirus B (HAdV-B)
augggaaucaua

SEQ ID NO: 104188 - RNA, 15 nt, Human adenovirus B (HAdV-B)
augggaucuacugug

SEQ ID NO: 104189 - RNA, 17 nt, Human adenovirus B (HAdV-B)
augggaucuacugugga

SEQ ID NO: 104190 - RNA, 18 nt, Human adenovirus B (HAdV-B)
auggccugcggaucccaa

SEQ ID NO: 104191 - RNA, 12 nt, Human adenovirus B (HAdV-B)
auggcaugggau

SEQ ID NO: 104192 - RNA, 20 nt, Human adenovirus B (HAdV-B)
auggacagauugaguaaaaa

SEQ ID NO: 104193 - RNA, 22 nt, Human adenovirus B (HAdV-B)
augucauagacguagaugggau

SEQ ID NO: 104194 - RNA, 15 nt, Human adenovirus B (HAdV-B)
auguugaaaugggca

SEQ ID NO: 104195 - RNA, 16 nt, Human adenovirus B (HAdV-B)
augggcauacaugcac

SEQ ID NO: 104196 - RNA, 22 nt, Human adenovirus B (HAdV-B)
auugacaugcccuuggcucuaa

SEQ ID NO: 104197 - RNA, 20 nt, Human adenovirus B (HAdV-B)
auugagaauggcaacaucaa

SEQ ID NO: 104198 - RNA, 22 nt, Human adenovirus B (HAdV-B)
auugagaauggcaacaucaauu

SEQ ID NO: 104199 - RNA, 16 nt, Human adenovirus B (HAdV-B)
auucuguuaaauggga

SEQ ID NO: 104200 - RNA, 21 nt, Human adenovirus B (HAdV-B)
auuaauguuagcaaaguuuac

SEQ ID NO: 104201 - RNA, 13 nt, Human adenovirus B (HAdV-B)
auuaucaacguga

SEQ ID NO: 104202 - RNA, 17 nt, Human adenovirus B (HAdV-B)
auuaugguuaugacaga

SEQ ID NO: 104203 - RNA, 13 nt, Human adenovirus B (HAdV-B)
augacaauucucu

SEQ ID NO: 104204 - RNA, 16 nt, Human adenovirus B (HAdV-B)
augacaauucucuaga

SEQ ID NO: 104205 - RNA, 17 nt, Human adenovirus B (HAdV-B)
augacagauacaguagu

SEQ ID NO: 104206 - RNA, 17 nt, Human adenovirus B (HAdV-B)
augaggcgagucgugcu

SEQ ID NO: 104207 - RNA, 20 nt, Human adenovirus B (HAdV-B)
augaguaaagaaauucccac

SEQ ID NO: 104208 - RNA, 22 nt, Human adenovirus B (HAdV-B)
augagucgcagacguccugaaa

SEQ ID NO: 104209 - RNA, 12 nt, Human adenovirus B (HAdV-B)
augaaagcaccu

SEQ ID NO: 104210 - RNA, 21 nt, Human adenovirus B (HAdV-B)
aucuucaugucuuucuuccca

SEQ ID NO: 104211 - RNA, 15 nt, Human adenovirus B (HAdV-B)
aucuucugucccuac

SEQ ID NO: 104212 - RNA, 15 nt, Human adenovirus B (HAdV-B)
aucuugaaaucacaa

SEQ ID NO: 104213 - RNA, 22 nt, Human adenovirus B (HAdV-B)
augcggccuaagagaccugcua

SEQ ID NO: 104214 - RNA, 19 nt, Human adenovirus B (HAdV-B)
augcuaccguggaugauuu

SEQ ID NO: 104215 - RNA, 21 nt, Human adenovirus B (HAdV-B)
augcuuauuccaaucuuguuu

SEQ ID NO: 104216 - RNA, 18 nt, Human adenovirus B (HAdV-B)
augcauguaagggaaaug

SEQ ID NO: 104217 - RNA, 13 nt, Human adenovirus B (HAdV-B)
augccaucugcgc

SEQ ID NO: 104218 - RNA, 23 nt, Human adenovirus B (HAdV-B)
augauugggagguggccauuaaa

SEQ ID NO: 104219 - RNA, 18 nt, Human adenovirus B (HAdV-B)
augcaacguaucauggcg

SEQ ID NO: 104220 - RNA, 13 nt, Human adenovirus B (HAdV-B)
augcaaaugcaau

SEQ ID NO: 104221 - RNA, 13 nt, Human adenovirus B (HAdV-B)
augcaaauuccaa

SEQ ID NO: 104222 - RNA, 22 nt, Human adenovirus B (HAdV-B)
augcagagccuugauacaugua

SEQ ID NO: 104223 - RNA, 14 nt, Human adenovirus B (HAdV-B)
augcauaguguaag

SEQ ID NO: 104224 - RNA, 22 nt, Human adenovirus B (HAdV-B)
caggauccuauagaggugggau

SEQ ID NO: 104225 - RNA, 21 nt, Human adenovirus B (HAdV-B)
caggaguucgucagaauguua

SEQ ID NO: 104226 - RNA, 22 nt, Human adenovirus B (HAdV-B)
caggaugcuucggaguaccuga

SEQ ID NO: 104227 - RNA, 20 nt, Human adenovirus B (HAdV-B)
caggaugucacuccacagcu

SEQ ID NO: 104228 - RNA, 14 nt, Human adenovirus B (HAdV-B)
caggaauguaauau

SEQ ID NO: 104229 - RNA, 13 nt, Human adenovirus B (HAdV-B)
caggacucuggac

SEQ ID NO: 104230 - RNA, 16 nt, Human adenovirus B (HAdV-B)
caggagaaauauucac

SEQ ID NO: 104231 - RNA, 20 nt, Human adenovirus B (HAdV-B)
caggagaaauauucacugga

SEQ ID NO: 104232 - RNA, 20 nt, Human adenovirus B (HAdV-B)
caggccucgcaacgacauug

SEQ ID NO: 104233 - RNA, 22 nt, Human adenovirus B (HAdV-B)
caggccucggcuucccacugaa

SEQ ID NO: 104234 - RNA, 17 nt, Human adenovirus B (HAdV-B)
caggcgccucccaggac

SEQ ID NO: 104235 - RNA, 13 nt, Human adenovirus B (HAdV-B)
caggcugugcaga

SEQ ID NO: 104236 - RNA, 15 nt, Human adenovirus B (HAdV-B)
cagggaaacaccacg

SEQ ID NO: 104237 - RNA, 15 nt, Human adenovirus B (HAdV-B)
cagcuuucuggucag

SEQ ID NO: 104238 - RNA, 22 nt, Human adenovirus B (HAdV-B)
cagcuuuacuguucugcaagag

SEQ ID NO: 104239 - RNA, 19 nt, Human adenovirus B (HAdV-B)
cagcggcggcgaccuccaa

SEQ ID NO: 104240 - RNA, 14 nt, Human adenovirus B (HAdV-B)
cagaaugaccacag

SEQ ID NO: 104241 - RNA, 18 nt, Human adenovirus B (HAdV-B)
cagaauacaccaaucucu

SEQ ID NO: 104242 - RNA, 17 nt, Human adenovirus B (HAdV-B)
cagacaccuacuucaau

SEQ ID NO: 104243 - RNA, 21 nt, Human adenovirus B (HAdV-B)
cagaacaccuuagaaaaugca

SEQ ID NO: 104244 - RNA, 22 nt, Human adenovirus B (HAdV-B)
cagacuaauucaaaacuaacaa

SEQ ID NO: 104245 - RNA, 14 nt, Human adenovirus B (HAdV-B)
cagacuguauagga

SEQ ID NO: 104246 - RNA, 20 nt, Human adenovirus B (HAdV-B)
cagacuguauaggagcauuu

SEQ ID NO: 104247 - RNA, 21 nt, Human adenovirus B (HAdV-B)
cagacuguauaggagcauuug

SEQ ID NO: 104248 - RNA, 21 nt, Human adenovirus B (HAdV-B)
cagacauggcuucucuuacau

SEQ ID NO: 104249 - RNA, 23 nt, Human adenovirus B (HAdV-B)
cagaccuccccaauuggcuccag

SEQ ID NO: 104250 - RNA, 20 nt, Human adenovirus B (HAdV-B)
cagauaagcccuugguguag

SEQ ID NO: 104251 - RNA, 18 nt, Human adenovirus B (HAdV-B)
cagauacaguagucaaua

SEQ ID NO: 104252 - RNA, 18 nt, Human adenovirus B (HAdV-B)
caucgccccccucugaua

SEQ ID NO: 104253 - RNA, 18 nt, Human adenovirus B (HAdV-B)
cauauaguucaugugaug

SEQ ID NO: 104254 - RNA, 19 nt, Human adenovirus B (HAdV-B)
cauauaguucaugugaugg

SEQ ID NO: 104255 - RNA, 20 nt, Human adenovirus B (HAdV-B)
cauaguuaucacccagcaaa

SEQ ID NO: 104256 - RNA, 13 nt, Human adenovirus B (HAdV-B)
cauacaugccaca

SEQ ID NO: 104257 - RNA, 15 nt, Human adenovirus B (HAdV-B)
cauacaugccacaga

SEQ ID NO: 104258 - RNA, 15 nt, Human adenovirus B (HAdV-B)
cauccaaauucacca

SEQ ID NO: 104259 - RNA, 19 nt, Human adenovirus B (HAdV-B)
cauccaaauucaccaaugc

SEQ ID NO: 104260 - RNA, 21 nt, Human adenovirus B (HAdV-B)
caucaucuccugcuugcauga

SEQ ID NO: 104261 - RNA, 21 nt, Human adenovirus B (HAdV-B)
cauauccguguuuacuuaagg

SEQ ID NO: 104262 - RNA, 21 nt, Human adenovirus B (HAdV-B)
cagugauagauaaaaauccau

SEQ ID NO: 104263 - RNA, 17 nt, Human adenovirus B (HAdV-B)
cagugcaugguguugca

SEQ ID NO: 104264 - RNA, 23 nt, Human adenovirus B (HAdV-B)
cagucgucuucucugauguagua

SEQ ID NO: 104265 - RNA, 16 nt, Human adenovirus B (HAdV-B)
cauaauuacacucuca

SEQ ID NO: 104266 - RNA, 21 nt, Human adenovirus B (HAdV-B)
cauaauuucauuuuugauaua

SEQ ID NO: 104267 - RNA, 17 nt, Human adenovirus B (HAdV-B)
cauacaaaaucuuacau

SEQ ID NO: 104268 - RNA, 22 nt, Human adenovirus B (HAdV-B)
caguucgcccgcgccacagaca

SEQ ID NO: 104269 - RNA, 14 nt, Human adenovirus B (HAdV-B)
caguugaaaaccac

SEQ ID NO: 104270 - RNA, 15 nt, Human adenovirus B (HAdV-B)
caguuggacugugaa

SEQ ID NO: 104271 - RNA, 19 nt, Human adenovirus B (HAdV-B)
caguuuggugauaauauga

SEQ ID NO: 104272 - RNA, 18 nt, Human adenovirus B (HAdV-B)
caguauggugaacaccaa

SEQ ID NO: 104273 - RNA, 17 nt, Human adenovirus B (HAdV-B)
caguacgauaccaccag

SEQ ID NO: 104274 - RNA, 13 nt, Human adenovirus B (HAdV-B)
caguagcaaugug

SEQ ID NO: 104275 - RNA, 15 nt, Human adenovirus B (HAdV-B)
caggucaggagccga

SEQ ID NO: 104276 - RNA, 22 nt, Human adenovirus B (HAdV-B)
cagggccgcguuuugcuauaca

SEQ ID NO: 104277 - RNA, 17 nt, Human adenovirus B (HAdV-B)
ccaacgagccagcgcaa

SEQ ID NO: 104278 - RNA, 17 nt, Human adenovirus B (HAdV-B)
ccaaauucaccaaugca

SEQ ID NO: 104279 - RNA, 19 nt, Human adenovirus B (HAdV-B)
ccaaauucaccaaugcaaa

SEQ ID NO: 104280 - RNA, 20 nt, Human adenovirus B (HAdV-B)
cauuugcuuccuaugcacuu

SEQ ID NO: 104281 - RNA, 14 nt, Human adenovirus B (HAdV-B)
cauuugugcauuua

SEQ ID NO: 104282 - RNA, 17 nt, Human adenovirus B (HAdV-B)
cauggggugaacuuucc

SEQ ID NO: 104283 - RNA, 23 nt, Human adenovirus B (HAdV-B)
cauggcuucucuuacaucucuca

SEQ ID NO: 104284 - RNA, 19 nt, Human adenovirus B (HAdV-B)
caugggaugggugagugca

SEQ ID NO: 104285 - RNA, 21 nt, Human adenovirus B (HAdV-B)
caugggaugggugagugcaga

SEQ ID NO: 104286 - RNA, 18 nt, Human adenovirus B (HAdV-B)
cauggcccccgauaagcu

SEQ ID NO: 104287 - RNA, 20 nt, Human adenovirus B (HAdV-B)
caugcaggcuauacuaccaa

SEQ ID NO: 104288 - RNA, 23 nt, Human adenovirus B (HAdV-B)
caugcaggcuauacuaccaauau

SEQ ID NO: 104289 - RNA, 17 nt, Human adenovirus B (HAdV-B)
caugccacagaugucau

SEQ ID NO: 104290 - RNA, 19 nt, Human adenovirus B (HAdV-B)
ccagagguuuugaauguuu

SEQ ID NO: 104291 - RNA, 14 nt, Human adenovirus B (HAdV-B)
ccagaugaccaaga

SEQ ID NO: 104292 - RNA, 18 nt, Human adenovirus B (HAdV-B)
ccacauuccaaacaguuu

SEQ ID NO: 104293 - RNA, 19 nt, Human adenovirus B (HAdV-B)
ccacauuccaaacaguuuc

SEQ ID NO: 104294 - RNA, 17 nt, Human adenovirus B (HAdV-B)
ccaccaccgaucaaaag

SEQ ID NO: 104295 - RNA, 18 nt, Human adenovirus B (HAdV-B)
ccaccaccgaucaaaaga

SEQ ID NO: 104296 - RNA, 17 nt, Human adenovirus B (HAdV-B)
ccaauuacgauccaugu

SEQ ID NO: 104297 - RNA, 20 nt, Human adenovirus B (HAdV-B)
ccaauucuucaacgcugacc

SEQ ID NO: 104298 - RNA, 19 nt, Human adenovirus B (HAdV-B)
ccaugcaacguaucauggc

SEQ ID NO: 104299 - RNA, 15 nt, Human adenovirus B (HAdV-B)
ccaguuugaauauga

SEQ ID NO: 104300 - RNA, 19 nt, Human adenovirus B (HAdV-B)
ccaguuugaauaugagggu

SEQ ID NO: 104301 - RNA, 18 nt, Human adenovirus B (HAdV-B)
ccagcauucuuuugacca

SEQ ID NO: 104302 - RNA, 15 nt, Human adenovirus B (HAdV-B)
ccaguuagcaauuuc

SEQ ID NO: 104303 - RNA, 15 nt, Human adenovirus B (HAdV-B)
ccagugcgcgcucau

SEQ ID NO: 104304 - RNA, 17 nt, Human adenovirus B (HAdV-B)
ccagucauaacaagguc

SEQ ID NO: 104305 - RNA, 20 nt, Human adenovirus B (HAdV-B)
cccaaccagcgcuuccaaga

SEQ ID NO: 104306 - RNA, 15 nt, Human adenovirus B (HAdV-B)
cccaaugcacaugau

SEQ ID NO: 104307 - RNA, 20 nt, Human adenovirus B (HAdV-B)
cccaaugcacaugaucaucc

SEQ ID NO: 104308 - RNA, 21 nt, Human adenovirus B (HAdV-B)
ccauuaaaaauuaugccaaga

SEQ ID NO: 104309 - RNA, 20 nt, Human adenovirus B (HAdV-B)
ccauggagguuugggccauu

SEQ ID NO: 104310 - RNA, 18 nt, Human adenovirus B (HAdV-B)
ccaugguacagacagauu

SEQ ID NO: 104311 - RNA, 17 nt, Human adenovirus B (HAdV-B)
ccaugugaccaaccugg

SEQ ID NO: 104312 - RNA, 15 nt, Human adenovirus B (HAdV-B)
cccagaaaacugcac

SEQ ID NO: 104313 - RNA, 21 nt, Human adenovirus B (HAdV-B)
cccagacguugggucaaagcc

SEQ ID NO: 104314 - RNA, 22 nt, Human adenovirus B (HAdV-B)
cccagauuggcucgcucugaaa

SEQ ID NO: 104315 - RNA, 19 nt, Human adenovirus B (HAdV-B)
cccagcaaaguggagauac

SEQ ID NO: 104316 - RNA, 15 nt, Human adenovirus B (HAdV-B)
cccagaugaccaaga

SEQ ID NO: 104317 - RNA, 22 nt, Human adenovirus B (HAdV-B)
ccccagauuggcucgcucugaa

SEQ ID NO: 104318 - RNA, 16 nt, Human adenovirus B (HAdV-B)
cccccaaauuuaauaa

SEQ ID NO: 104319 - RNA, 12 nt, Human adenovirus B (HAdV-B)
cccccucugaua

SEQ ID NO: 104320 - RNA, 19 nt, Human adenovirus B (HAdV-B)
cccguucagcggcauacuu

SEQ ID NO: 104321 - RNA, 20 nt, Human adenovirus B (HAdV-B)
cccuacuaauacuacuuuca

SEQ ID NO: 104322 - RNA, 23 nt, Human adenovirus B (HAdV-B)
cccguccaacccgccaauucuuc

SEQ ID NO: 104323 - RNA, 18 nt, Human adenovirus B (HAdV-B)
cccuaguguaccaggaaa

SEQ ID NO: 104324 - RNA, 22 nt, Human adenovirus B (HAdV-B)
cccuauuugauuuuggcuggaa

SEQ ID NO: 104325 - RNA, 19 nt, Human adenovirus B (HAdV-B)
ccgacuauaaaaguaguuu

SEQ ID NO: 104326 - RNA, 18 nt, Human adenovirus B (HAdV-B)
ccgagcuucuaugacuga

SEQ ID NO: 104327 - RNA, 15 nt, Human adenovirus B (HAdV-B)
ccgcaagagcucugc

SEQ ID NO: 104328 - RNA, 18 nt, Human adenovirus B (HAdV-B)
ccgcauuaguaacaacac

SEQ ID NO: 104329 - RNA, 20 nt, Human adenovirus B (HAdV-B)
ccgggaccuguuuguaaugu

SEQ ID NO: 104330 - RNA, 13 nt, Human adenovirus B (HAdV-B)
ccgccaauucuuc

SEQ ID NO: 104331 - RNA, 21 nt, Human adenovirus B (HAdV-B)
ccgcgcaauguuuugcauuac

SEQ ID NO: 104332 - RNA, 18 nt, Human adenovirus B (HAdV-B)
ccggauugcagcacugaa

SEQ ID NO: 104333 - RNA, 15 nt, Human adenovirus B (HAdV-B)
ccggcaucaauggag

SEQ ID NO: 104334 - RNA, 14 nt, Human adenovirus B (HAdV-B)
uuugcuaccuauac

SEQ ID NO: 104335 - RNA, 18 nt, Human adenovirus B (HAdV-B)
uuugcagacuaauucaaa

SEQ ID NO: 104336 - RNA, 13 nt, Human adenovirus B (HAdV-B)
uuugauuacaacu

SEQ ID NO: 104337 - RNA, 20 nt, Human adenovirus B (HAdV-B)
uuucuucuucaccauacuca

SEQ ID NO: 104338 - RNA, 22 nt, Human adenovirus B (HAdV-B)
ugcauuacuaccgucaccucca

SEQ ID NO: 104339 - RNA, 13 nt, Human adenovirus B (HAdV-B)
ugcaugcucagaa

SEQ ID NO: 104340 - RNA, 12 nt, Human adenovirus B (HAdV-B)
ugcauaugcuac

SEQ ID NO: 104341 - RNA, 16 nt, Human adenovirus B (HAdV-B)
ugcaugaucuuuucca

SEQ ID NO: 104342 - RNA, 18 nt, Human adenovirus B (HAdV-B)
ugcauuuaugucuauguu

SEQ ID NO: 104343 - RNA, 18 nt, Human adenovirus B (HAdV-B)
ugccaaaaaaacauucaa

SEQ ID NO: 104344 - RNA, 14 nt, Human adenovirus B (HAdV-B)
ugccaucuaccacu

SEQ ID NO: 104345 - RNA, 22 nt, Human adenovirus B (HAdV-B)
ugccaugcgagccgcaagagcu

SEQ ID NO: 104346 - RNA, 16 nt, Human adenovirus B (HAdV-B)
ugccagauugugauac

SEQ ID NO: 104347 - RNA, 15 nt, Human adenovirus B (HAdV-B)
ugcaacgggugcuua

SEQ ID NO: 104348 - RNA, 14 nt, Human adenovirus B (HAdV-B)
ugcgccagacauca

SEQ ID NO: 104349 - RNA, 20 nt, Human adenovirus B (HAdV-B)
ugcgcgcucauauggguuaa

SEQ ID NO: 104350 - RNA, 15 nt, Human adenovirus B (HAdV-B)
ugcgcuacuuucaca

SEQ ID NO: 104351 - RNA, 13 nt, Human adenovirus B (HAdV-B)
ugcgacaucuaga

SEQ ID NO: 104352 - RNA, 16 nt, Human adenovirus B (HAdV-B)
ugcguauguagcauag

SEQ ID NO: 104353 - RNA, 19 nt, Human adenovirus B (HAdV-B)
ugcgguacaccggauugca

SEQ ID NO: 104354 - RNA, 16 nt, Human adenovirus B (HAdV-B)
ugccuauaguacucca

SEQ ID NO: 104355 - RNA, 22 nt, Human adenovirus B (HAdV-B)
ugccuauaguacuccaccagaa

SEQ ID NO: 104356 - RNA, 13 nt, Human adenovirus B (HAdV-B)
ugccgcuucuuca

SEQ ID NO: 104357 - RNA, 19 nt, Human adenovirus B (HAdV-B)
ugccccauggcaugggaug

SEQ ID NO: 104358 - RNA, 23 nt, Human adenovirus B (HAdV-B)
ugaguccgggucuggugcaguuc

SEQ ID NO: 104359 - RNA, 15 nt, Human adenovirus B (HAdV-B)
ugagucauuauugaa

SEQ ID NO: 104360 - RNA, 18 nt, Human adenovirus B (HAdV-B)
ugagucauuauugaacau

SEQ ID NO: 104361 - RNA, 21 nt, Human adenovirus B (HAdV-B)
ugauuauauuuccagcaacuu

SEQ ID NO: 104362 - RNA, 14 nt, Human adenovirus B (HAdV-B)
ugauuauucuuugc

SEQ ID NO: 104363 - RNA, 17 nt, Human adenovirus B (HAdV-B)
ugauuccacccucggaa

SEQ ID NO: 104364 - RNA, 18 nt, Human adenovirus B (HAdV-B)
ugauacuaugacuaugca

SEQ ID NO: 104365 - RNA, 21 nt, Human adenovirus B (HAdV-B)
ugauugggagguggccauuaa

SEQ ID NO: 104366 - RNA, 17 nt, Human adenovirus B (HAdV-B)
ugacgucuuguaucuga

SEQ ID NO: 104367 - RNA, 15 nt, Human adenovirus B (HAdV-B)
ugaccacgguggugc

SEQ ID NO: 104368 - RNA, 19 nt, Human adenovirus B (HAdV-B)
ugaauaaauaaacaagcuu

SEQ ID NO: 104369 - RNA, 18 nt, Human adenovirus B (HAdV-B)
ugaauuaagacucuccua

SEQ ID NO: 104370 - RNA, 14 nt, Human adenovirus B (HAdV-B)
ugaaaaucaauuca

SEQ ID NO: 104371 - RNA, 14 nt, Human adenovirus B (HAdV-B)
ugaaacacaaucca

SEQ ID NO: 104372 - RNA, 20 nt, Human adenovirus B (HAdV-B)
ucuuuuaaagcgcuuucaca

SEQ ID NO: 104373 - RNA, 21 nt, Human adenovirus B (HAdV-B)
ucuggaaauggggcugaggug

SEQ ID NO: 104374 - RNA, 22 nt, Human adenovirus B (HAdV-B)
ucaugagaagguccuggccauc

SEQ ID NO: 104375 - RNA, 12 nt, Human adenovirus B (HAdV-B)
ucaugagcaaac

SEQ ID NO: 104376 - RNA, 14 nt, Human adenovirus B (HAdV-B)
ucacacaaagccca

SEQ ID NO: 104377 - RNA, 19 nt, Human adenovirus B (HAdV-B)
ucacaccucacuguaacua

SEQ ID NO: 104378 - RNA, 23 nt, Human adenovirus B (HAdV-B)
ucauccauggagguuugggccau

SEQ ID NO: 104379 - RNA, 20 nt, Human adenovirus B (HAdV-B)
ucauugaaaggauaggcagu

SEQ ID NO: 104380 - RNA, 21 nt, Human adenovirus B (HAdV-B)
uccaacuuauagacuggaucc

SEQ ID NO: 104381 - RNA, 21 nt, Human adenovirus B (HAdV-B)
uccaagacaauaaguguucca

SEQ ID NO: 104382 - RNA, 23 nt, Human adenovirus B (HAdV-B)
uccaauuccgccgaggaucugcu

SEQ ID NO: 104383 - RNA, 22 nt, Human adenovirus B (HAdV-B)
ucauggaagcuguagugccuuc

SEQ ID NO: 104384 - RNA, 13 nt, Human adenovirus B (HAdV-B)
ucauuauugaaca

SEQ ID NO: 104385 - RNA, 14 nt, Human adenovirus B (HAdV-B)
ucauuauugaacau

SEQ ID NO: 104386 - RNA, 18 nt, Human adenovirus B (HAdV-B)
uccgccgaggaucugcuc

SEQ ID NO: 104387 - RNA, 19 nt, Human adenovirus B (HAdV-B)
uccgcgauaccuggcaccu

SEQ ID NO: 104388 - RNA, 19 nt, Human adenovirus B (HAdV-B)
uccgcgcaauguuuugcau

SEQ ID NO: 104389 - RNA, 16 nt, Human adenovirus B (HAdV-B)
uccguguuuacuuaag

SEQ ID NO: 104390 - RNA, 16 nt, Human adenovirus B (HAdV-B)
uccgugcgacugcugu

SEQ ID NO: 104391 - RNA, 19 nt, Human adenovirus B (HAdV-B)
uccccuacaaaacaugcaa

SEQ ID NO: 104392 - RNA, 15 nt, Human adenovirus B (HAdV-B)
ucccgauggauuuuu

SEQ ID NO: 104393 - RNA, 16 nt, Human adenovirus B (HAdV-B)
ucccgcucccaccacu

SEQ ID NO: 104394 - RNA, 13 nt, Human adenovirus B (HAdV-B)
ucccaaugcacau

SEQ ID NO: 104395 - RNA, 19 nt, Human adenovirus B (HAdV-B)
ucccaaugcacaugaucau

SEQ ID NO: 104396 - RNA, 16 nt, Human adenovirus B (HAdV-B)
ucccagaugaccaaga

SEQ ID NO: 104397 - RNA, 21 nt, Human adenovirus B (HAdV-B)
ucccagcagcaccucacuucc

SEQ ID NO: 104398 - RNA, 12 nt, Human adenovirus B (HAdV-B)
ucccauuuaaca

SEQ ID NO: 104399 - RNA, 15 nt, Human adenovirus B (HAdV-B)
ucggaacuggcaccu

SEQ ID NO: 104400 - RNA, 20 nt, Human adenovirus B (HAdV-B)
ucgguggucuuuacacccgg

SEQ ID NO: 104401 - RNA, 18 nt, Human adenovirus B (HAdV-B)
ucgucauuuauugcucuu

SEQ ID NO: 104402 - RNA, 13 nt, Human adenovirus B (HAdV-B)
ucguccagaugag

SEQ ID NO: 104403 - RNA, 22 nt, Human adenovirus B (HAdV-B)
ucguccaggacucuguuaacuu

SEQ ID NO: 104404 - RNA, 23 nt, Human adenovirus B (HAdV-B)
ucgucucuaucccucuaggacau

SEQ ID NO: 104405 - RNA, 18 nt, Human adenovirus B (HAdV-B)
ucgugcugggcaugaaac

SEQ ID NO: 104406 - RNA, 22 nt, Human adenovirus B (HAdV-B)
uccugggcaggaguucgucaga

SEQ ID NO: 104407 - RNA, 13 nt, Human adenovirus B (HAdV-B)
ucgaacuccccaa

SEQ ID NO: 104408 - RNA, 18 nt, Human adenovirus B (HAdV-B)
ucgacagauaaagacagc

SEQ ID NO: 104409 - RNA, 17 nt, Human adenovirus B (HAdV-B)
ucgacccagaaaacugc

SEQ ID NO: 104410 - RNA, 15 nt, Human adenovirus B (HAdV-B)
ucgcugcugcaauug

SEQ ID NO: 104411 - RNA, 14 nt, Human adenovirus B (HAdV-B)
ucuauugcuucccu

SEQ ID NO: 104412 - RNA, 17 nt, Human adenovirus B (HAdV-B)
ucucaaccccagcugcc

SEQ ID NO: 104413 - RNA, 13 nt, Human adenovirus B (HAdV-B)
ucucaagugauuc

SEQ ID NO: 104414 - RNA, 17 nt, Human adenovirus B (HAdV-B)
ucucaauugcucagaaa

SEQ ID NO: 104415 - RNA, 16 nt, Human adenovirus B (HAdV-B)
ucucacgcuugccagc

SEQ ID NO: 104416 - RNA, 18 nt, Human adenovirus B (HAdV-B)
ucugcucgcucacaccuc

SEQ ID NO: 104417 - RNA, 21 nt, Human adenovirus B (HAdV-B)
ucuccuguacccacaaucuuc

SEQ ID NO: 104418 - RNA, 13 nt, Human adenovirus B (HAdV-B)
ucuccauacuuua

SEQ ID NO: 104419 - RNA, 20 nt, Human adenovirus B (HAdV-B)
ucuccauacuuuaaagggga

SEQ ID NO: 104420 - RNA, 20 nt, Human adenovirus B (HAdV-B)
ucucccagcagcaccucacu

SEQ ID NO: 104421 - RNA, 22 nt, Human adenovirus B (HAdV-B)
uguucaugagcaaacaguauuc

SEQ ID NO: 104422 - RNA, 16 nt, Human adenovirus B (HAdV-B)
uguucguggucuuccu

SEQ ID NO: 104423 - RNA, 19 nt, Human adenovirus B (HAdV-B)
uguucugcaagagcuuccu

SEQ ID NO: 104424 - RNA, 17 nt, Human adenovirus B (HAdV-B)
uguuuaagaaugguggu

SEQ ID NO: 104425 - RNA, 15 nt, Human adenovirus B (HAdV-B)
uguuuaaagcugugc

SEQ ID NO: 104426 - RNA, 21 nt, Human adenovirus B (HAdV-B)
uguugccgcuaacacugugcu

SEQ ID NO: 104427 - RNA, 19 nt, Human adenovirus B (HAdV-B)
uguuuuuucugucuugcag

SEQ ID NO: 104428 - RNA, 18 nt, Human adenovirus B (HAdV-B)
uuaaaaauuuuggcucaa

SEQ ID NO: 104429 - RNA, 15 nt, Human adenovirus B (HAdV-B)
uuaauuugggccauc

SEQ ID NO: 104430 - RNA, 13 nt, Human adenovirus B (HAdV-B)
uuacacucucaua

SEQ ID NO: 104431 - RNA, 16 nt, Human adenovirus B (HAdV-B)
uuaaaugggaaggggg

SEQ ID NO: 104432 - RNA, 21 nt, Human adenovirus B (HAdV-B)
uuaaagcgcuuucacagucca

SEQ ID NO: 104433 - RNA, 14 nt, Human adenovirus B (HAdV-B)
uuaggcgaguuugc

SEQ ID NO: 104434 - RNA, 17 nt, Human adenovirus B (HAdV-B)
uuagaaaaugcaaauuc

SEQ ID NO: 104435 - RNA, 17 nt, Human adenovirus B (HAdV-B)
uuagugguguuguggua

SEQ ID NO: 104436 - RNA, 12 nt, Human adenovirus B (HAdV-B)
uuacuauggaag

SEQ ID NO: 104437 - RNA, 16 nt, Human adenovirus B (HAdV-B)
ugucuaccccuaugaa

SEQ ID NO: 104438 - RNA, 22 nt, Human adenovirus B (HAdV-B)
ugucuaccccuaugaagaugaa

SEQ ID NO: 104439 - RNA, 16 nt, Human adenovirus B (HAdV-B)
ugugauacuaugacua

SEQ ID NO: 104440 - RNA, 14 nt, Human adenovirus B (HAdV-B)
uggugauaauauga

SEQ ID NO: 104441 - RNA, 21 nt, Human adenovirus B (HAdV-B)
ugguggagaauauaugacaau

SEQ ID NO: 104442 - RNA, 16 nt, Human adenovirus B (HAdV-B)
ugguucgcuagugaau

SEQ ID NO: 104443 - RNA, 13 nt, Human adenovirus B (HAdV-B)
ugguguugcacaa

SEQ ID NO: 104444 - RNA, 18 nt, Human adenovirus B (HAdV-B)
ugguugggauuugcauau

SEQ ID NO: 104445 - RNA, 13 nt, Human adenovirus B (HAdV-B)
uguauauguguca

SEQ ID NO: 104446 - RNA, 19 nt, Human adenovirus B (HAdV-B)
uguauaugugucauuacac

SEQ ID NO: 104447 - RNA, 23 nt, Human adenovirus B (HAdV-B)
uguauaggagcauuugcuuccua

SEQ ID NO: 104448 - RNA, 14 nt, Human adenovirus B (HAdV-B)
ugggccauuuugga

SEQ ID NO: 104449 - RNA, 15 nt, Human adenovirus B (HAdV-B)
ugggccauuuuggaa

SEQ ID NO: 104450 - RNA, 20 nt, Human adenovirus B (HAdV-B)
uggcuuuaaguuuaaugagu

SEQ ID NO: 104451 - RNA, 22 nt, Human adenovirus B (HAdV-B)
uggggcccauacuagucuugcu

SEQ ID NO: 104452 - RNA, 14 nt, Human adenovirus B (HAdV-B)
ugcuacgaagagcu

SEQ ID NO: 104453 - RNA, 21 nt, Human adenovirus B (HAdV-B)
uugagcugggaugggugcauu

SEQ ID NO: 104454 - RNA, 17 nt, Human adenovirus B (HAdV-B)
uugcagacuaauucaaa

SEQ ID NO: 104455 - RNA, 12 nt, Human adenovirus B (HAdV-B)
uugcagcacuga

SEQ ID NO: 104456 - RNA, 14 nt, Human adenovirus B (HAdV-B)
uugacgucuuguau

SEQ ID NO: 104457 - RNA, 15 nt, Human adenovirus B (HAdV-B)
uugcuucuauugcuu

SEQ ID NO: 104458 - RNA, 20 nt, Human adenovirus B (HAdV-B)
uugcuucuauugcuucccua

SEQ ID NO: 104459 - RNA, 14 nt, Human adenovirus B (HAdV-B)
uugcuucuugcaug

SEQ ID NO: 104460 - RNA, 13 nt, Human adenovirus B (HAdV-B)
uugccauucucaa

SEQ ID NO: 104461 - RNA, 12 nt, Human adenovirus B (HAdV-B)
uugcagcuguca

SEQ ID NO: 104462 - RNA, 14 nt, Human adenovirus B (HAdV-B)
uugaaguacugcga

SEQ ID NO: 104463 - RNA, 16 nt, Human adenovirus B (HAdV-B)
uugaaaaccacgaaaa

SEQ ID NO: 104464 - RNA, 16 nt, Human adenovirus B (HAdV-B)
uucuaugacugaagac

SEQ ID NO: 104465 - RNA, 23 nt, Human adenovirus B (HAdV-B)
uucuauugcuucccuacgcuguc

SEQ ID NO: 104466 - RNA, 17 nt, Human adenovirus B (HAdV-B)
uucucuagaaacuuuua

SEQ ID NO: 104467 - RNA, 11 nt, Human adenovirus B (HAdV-B)
uucacuggaac

SEQ ID NO: 104468 - RNA, 20 nt, Human adenovirus B (HAdV-B)
uucagaaagagggaagggau

SEQ ID NO: 104469 - RNA, 11 nt, Human adenovirus B (HAdV-B)
uucauccaugg

SEQ ID NO: 104470 - RNA, 19 nt, Human adenovirus B (HAdV-B)
uucauucucaagugauuca

SEQ ID NO: 104471 - RNA, 23 nt, Human adenovirus B (HAdV-B)
uucccuacuaauacuacuuucaa

SEQ ID NO: 104472 - RNA, 19 nt, Human adenovirus B (HAdV-B)
uucccgaacccaaccagcg

SEQ ID NO: 104473 - RNA, 12 nt, Human adenovirus B (HAdV-B)
uuuauugaacac

SEQ ID NO: 104474 - RNA, 16 nt, Human adenovirus B (HAdV-B)
uuuaugucuauguugu

SEQ ID NO: 104475 - RNA, 17 nt, Human adenovirus B (HAdV-B)
uuuacuguucugcaaga

SEQ ID NO: 104476 - RNA, 12 nt, Human adenovirus B (HAdV-B)
uuuagacagcaa

SEQ ID NO: 104477 - RNA, 13 nt, Human adenovirus B (HAdV-B)
uuuacaaccagaa

SEQ ID NO: 104478 - RNA, 19 nt, Human adenovirus B (HAdV-B)
uuuacagcgguuacuauua

SEQ ID NO: 104479 - RNA, 16 nt, Human adenovirus B (HAdV-B)
uuuaccaguuugaaua

SEQ ID NO: 104480 - RNA, 20 nt, Human adenovirus B (HAdV-B)
uuucacaguccaacugcugc

SEQ ID NO: 104481 - RNA, 18 nt, Human adenovirus B (HAdV-B)
uuucagagcgagccaauc

SEQ ID NO: 104482 - RNA, 21 nt, Human adenovirus B (HAdV-B)
uuuccagaagcauuuucccua

SEQ ID NO: 104483 - RNA, 16 nt, Human adenovirus B (HAdV-B)
uuucauccuuggcucc

SEQ ID NO: 104484 - RNA, 21 nt, Human adenovirus B (HAdV-B)
uuuccccaaauggcuucacac

SEQ ID NO: 104485 - RNA, 14 nt, Human adenovirus B (HAdV-B)
uuuacaaaaccaug

SEQ ID NO: 104486 - RNA, 16 nt, Human adenovirus B (HAdV-B)
uuuaauguuugcgcua

SEQ ID NO: 104487 - RNA, 15 nt, Human adenovirus B (HAdV-B)
uuguucugccagcuu

SEQ ID NO: 104488 - RNA, 20 nt, Human adenovirus B (HAdV-B)
uuggugcgggaaaauaugca

SEQ ID NO: 104489 - RNA, 20 nt, Human adenovirus B (HAdV-B)
uugguggcaugagguucaga

SEQ ID NO: 104490 - RNA, 16 nt, Human adenovirus B (HAdV-B)
uugggccauuuuggaa

SEQ ID NO: 104491 - RNA, 16 nt, Human adenovirus B (HAdV-B)
uugggagguggccauu

SEQ ID NO: 104492 - RNA, 18 nt, Human adenovirus B (HAdV-B)
uugggagguggccauuaa

SEQ ID NO: 104493 - RNA, 17 nt, Human adenovirus B (HAdV-B)
uuggguugcaugauuaa

SEQ ID NO: 104494 - RNA, 15 nt, Human adenovirus B (HAdV-B)
uugcuuguuuuacuu

SEQ ID NO: 104495 - RNA, 20 nt, Human adenovirus B (HAdV-B)
uugcuugguugggauuugca

SEQ ID NO: 104496 - RNA, 18 nt, Human adenovirus B (HAdV-B)
uugcuuuuguuacuugca

SEQ ID NO: 104497 - RNA, 16 nt, Human adenovirus B (HAdV-B)
uuggaaaaaaacguau

SEQ ID NO: 104498 - RNA, 18 nt, Human adenovirus B (HAdV-B)
uuggaaccggguucugcc

SEQ ID NO: 104499 - RNA, 16 nt, Human adenovirus B (HAdV-B)
uaagaaugccaucauc

SEQ ID NO: 104500 - RNA, 11 nt, Human adenovirus B (HAdV-B)
uaagacucucc

SEQ ID NO: 104501 - RNA, 19 nt, Human adenovirus B (HAdV-B)
uaagacucuccuacggacu

SEQ ID NO: 104502 - RNA, 17 nt, Human adenovirus B (HAdV-B)
uaaccuauugcauuugc

SEQ ID NO: 104503 - RNA, 18 nt, Human adenovirus B (HAdV-B)
uaagagaccugcuaccaa

SEQ ID NO: 104504 - RNA, 21 nt, Human adenovirus B (HAdV-B)
uaagagaccugcuaccaauga

SEQ ID NO: 104505 - RNA, 22 nt, Human adenovirus B (HAdV-B)
uaaggggacugccccauggcau

SEQ ID NO: 104506 - RNA, 16 nt, Human adenovirus B (HAdV-B)
uaaccccacuaacaac

SEQ ID NO: 104507 - RNA, 17 nt, Human adenovirus B (HAdV-B)
uaaccaacguuguccau

SEQ ID NO: 104508 - RNA, 19 nt, Human adenovirus B (HAdV-B)
uaacauuauuguacugcca

SEQ ID NO: 104509 - RNA, 14 nt, Human adenovirus B (HAdV-B)
uaaauaaacaagcu

SEQ ID NO: 104510 - RNA, 22 nt, Human adenovirus B (HAdV-B)
uaaagugauguuuauugaacac

SEQ ID NO: 104511 - RNA, 11 nt, Human adenovirus B (HAdV-B)
uaaaguagcau

SEQ ID NO: 104512 - RNA, 17 nt, Human adenovirus B (HAdV-B)
guggaaaaacuugagga

SEQ ID NO: 104513 - RNA, 18 nt, Human adenovirus B (HAdV-B)
guggcucgcuacaacagu

SEQ ID NO: 104514 - RNA, 17 nt, Human adenovirus B (HAdV-B)
guggugcaaaacaauga

SEQ ID NO: 104515 - RNA, 18 nt, Human adenovirus B (HAdV-B)
gugguagauuuggcuaac

SEQ ID NO: 104516 - RNA, 19 nt, Human adenovirus B (HAdV-B)
uaaaaacauacgggaacaa

SEQ ID NO: 104517 - RNA, 16 nt, Human adenovirus B (HAdV-B)
uaaaagguaaaugggg

SEQ ID NO: 104518 - RNA, 16 nt, Human adenovirus B (HAdV-B)
uaccacguugugagga

SEQ ID NO: 104519 - RNA, 15 nt, Human adenovirus B (HAdV-B)
uacagagucucugac

SEQ ID NO: 104520 - RNA, 15 nt, Human adenovirus B (HAdV-B)
uaccaauauuuuugc

SEQ ID NO: 104521 - RNA, 20 nt, Human adenovirus B (HAdV-B)
uaccaauauuuuugcuucua

SEQ ID NO: 104522 - RNA, 20 nt, Human adenovirus B (HAdV-B)
uacaccggauugcagcacug

SEQ ID NO: 104523 - RNA, 21 nt, Human adenovirus B (HAdV-B)
uacaccggauugcagcacuga

SEQ ID NO: 104524 - RNA, 19 nt, Human adenovirus B (HAdV-B)
uacaagaacuucuaucacu

SEQ ID NO: 104525 - RNA, 17 nt, Human adenovirus B (HAdV-B)
uacacugucucuguccg

SEQ ID NO: 104526 - RNA, 18 nt, Human adenovirus B (HAdV-B)
uacgcugucucaacccca

SEQ ID NO: 104527 - RNA, 13 nt, Human adenovirus B (HAdV-B)
uacggacugccgc

SEQ ID NO: 104528 - RNA, 19 nt, Human adenovirus B (HAdV-B)
uacggacugccgcuucuuc

SEQ ID NO: 104529 - RNA, 14 nt, Human adenovirus B (HAdV-B)
uacguccacuggac

SEQ ID NO: 104530 - RNA, 22 nt, Human adenovirus B (HAdV-B)
uacccacaaucuucaugucuuu

SEQ ID NO: 104531 - RNA, 18 nt, Human adenovirus B (HAdV-B)
uacccaguugaaaaccac

SEQ ID NO: 104532 - RNA, 21 nt, Human adenovirus B (HAdV-B)
uacgaauacaauaugaugucu

SEQ ID NO: 104533 - RNA, 18 nt, Human adenovirus B (HAdV-B)
uacgagagcgugaugcag

SEQ ID NO: 104534 - RNA, 17 nt, Human adenovirus B (HAdV-B)
uacaaaaucuuacauug

SEQ ID NO: 104535 - RNA, 22 nt, Human adenovirus B (HAdV-B)
uacaaaaucuuacauugauuaa

SEQ ID NO: 104536 - RNA, 15 nt, Human adenovirus B (HAdV-B)
uaauuacacucucau

SEQ ID NO: 104537 - RNA, 16 nt, Human adenovirus B (HAdV-B)
uaauuacacucucaua

SEQ ID NO: 104538 - RNA, 22 nt, Human adenovirus B (HAdV-B)
uaaucuguugcaccauaauuuc

SEQ ID NO: 104539 - RNA, 22 nt, Human adenovirus B (HAdV-B)
uaauguguggauuggauuuacc

SEQ ID NO: 104540 - RNA, 21 nt, Human adenovirus B (HAdV-B)
uaauguuugcgcuacuuucac

SEQ ID NO: 104541 - RNA, 14 nt, Human adenovirus B (HAdV-B)
uaauuaauauaauc

SEQ ID NO: 104542 - RNA, 17 nt, Human adenovirus B (HAdV-B)
uaaucccacucaugaga

SEQ ID NO: 104543 - RNA, 21 nt, Human adenovirus B (HAdV-B)
uaauacuacuuucaaaaccgg

SEQ ID NO: 104544 - RNA, 13 nt, Human adenovirus B (HAdV-B)
uaaguucuucacc

SEQ ID NO: 104545 - RNA, 15 nt, Human adenovirus B (HAdV-B)
uauaaacaagaauuu

SEQ ID NO: 104546 - RNA, 21 nt, Human adenovirus B (HAdV-B)
uagccccccagguggacauga

SEQ ID NO: 104547 - RNA, 17 nt, Human adenovirus B (HAdV-B)
uagccaugaugcuucca

SEQ ID NO: 104548 - RNA, 19 nt, Human adenovirus B (HAdV-B)
uagccacagcaaccccaga

SEQ ID NO: 104549 - RNA, 20 nt, Human adenovirus B (HAdV-B)
uagcgcuaauagauuacgaa

SEQ ID NO: 104550 - RNA, 18 nt, Human adenovirus B (HAdV-B)
uacucauuugugcauuua

SEQ ID NO: 104551 - RNA, 19 nt, Human adenovirus B (HAdV-B)
uacucauuugugcauuuaa

SEQ ID NO: 104552 - RNA, 15 nt, Human adenovirus B (HAdV-B)
uagcauagucugccu

SEQ ID NO: 104553 - RNA, 21 nt, Human adenovirus B (HAdV-B)
uagcaucgccccccucugaua

SEQ ID NO: 104554 - RNA, 18 nt, Human adenovirus B (HAdV-B)
uacugccaucuaccacuc

SEQ ID NO: 104555 - RNA, 16 nt, Human adenovirus B (HAdV-B)
uaugauuaaguggagu

SEQ ID NO: 104556 - RNA, 19 nt, Human adenovirus B (HAdV-B)
uaugacaauggaugguuua

SEQ ID NO: 104557 - RNA, 14 nt, Human adenovirus B (HAdV-B)
uaugcacuuuuugc

SEQ ID NO: 104558 - RNA, 15 nt, Human adenovirus B (HAdV-B)
uaucaaggcucugca

SEQ ID NO: 104559 - RNA, 12 nt, Human adenovirus B (HAdV-B)
uaucggccauca

SEQ ID NO: 104560 - RNA, 14 nt, Human adenovirus B (HAdV-B)
uauugaacauccau

SEQ ID NO: 104561 - RNA, 18 nt, Human adenovirus B (HAdV-B)
uauucuguuaaaugggaa

SEQ ID NO: 104562 - RNA, 20 nt, Human adenovirus B (HAdV-B)
uauucuuugcuaccuauaca

SEQ ID NO: 104563 - RNA, 12 nt, Human adenovirus B (HAdV-B)
uauucacuggaa

SEQ ID NO: 104564 - RNA, 22 nt, Human adenovirus B (HAdV-B)
uauuuugccucccccuucccau

SEQ ID NO: 104565 - RNA, 17 nt, Human adenovirus B (HAdV-B)
uauuuuuuuacauguau

SEQ ID NO: 104566 - RNA, 20 nt, Human adenovirus B (HAdV-B)
uauuugaaaaucaauucaca

SEQ ID NO: 104567 - RNA, 21 nt, Human adenovirus B (HAdV-B)
uauuugaaaaucaauucacaa

SEQ ID NO: 104568 - RNA, 19 nt, Human adenovirus B (HAdV-B)
uauuugauuuuggcuggaa

SEQ ID NO: 104569 - RNA, 15 nt, Human adenovirus B (HAdV-B)
ucaauugauguugcc

SEQ ID NO: 104570 - RNA, 14 nt, Human adenovirus B (HAdV-B)
ucaauugcucagaa

SEQ ID NO: 104571 - RNA, 12 nt, Human adenovirus B (HAdV-B)
ucaaugcauggc

SEQ ID NO: 104572 - RNA, 17 nt, Human adenovirus B (HAdV-B)
ucaaugggaaaagcagu

SEQ ID NO: 104573 - RNA, 19 nt, Human adenovirus B (HAdV-B)
ucaauauagaaauuacuug

SEQ ID NO: 104574 - RNA, 14 nt, Human adenovirus B (HAdV-B)
ucaaccccaaaugg

SEQ ID NO: 104575 - RNA, 16 nt, Human adenovirus B (HAdV-B)
ucaaccccagcugccu

SEQ ID NO: 104576 - RNA, 18 nt, Human adenovirus B (HAdV-B)
ucaaccccagcugccuau

SEQ ID NO: 104577 - RNA, 15 nt, Human adenovirus B (HAdV-B)
ucaacccugucuacc

SEQ ID NO: 104578 - RNA, 13 nt, Human adenovirus B (HAdV-B)
ucaacgacuacac

SEQ ID NO: 104579 - RNA, 23 nt, Human adenovirus B (HAdV-B)
ucaaauuuuagcuccucuccugu

SEQ ID NO: 104580 - RNA, 12 nt, Human adenovirus B (HAdV-B)
ucaaagaugccu

SEQ ID NO: 104581 - RNA, 10 nt, Human adenovirus B (HAdV-B)
gugacuaugu

SEQ ID NO: 104582 - RNA, 17 nt, Human adenovirus B (HAdV-B)
gucuuauguguacugag

SEQ ID NO: 104583 - RNA, 15 nt, Human adenovirus B (HAdV-B)
gucuucucugaugua

SEQ ID NO: 104584 - RNA, 15 nt, Human adenovirus B (HAdV-B)
gugcgcgaguuugcc

SEQ ID NO: 104585 - RNA, 17 nt, Human adenovirus B (HAdV-B)
gugauguuuauugaaca

SEQ ID NO: 104586 - RNA, 13 nt, Human adenovirus B (HAdV-B)
gucuggugcaguu

SEQ ID NO: 104587 - RNA, 22 nt, Human adenovirus B (HAdV-B)
gucuccugcgccgcagcgcucu

SEQ ID NO: 104588 - RNA, 15 nt, Human adenovirus B (HAdV-B)
gucucgcaacucuga

SEQ ID NO: 104589 - RNA, 17 nt, Human adenovirus B (HAdV-B)
gucucugggugaaagcu

SEQ ID NO: 104590 - RNA, 18 nt, Human adenovirus B (HAdV-B)
gucucuguccgagguccu

SEQ ID NO: 104591 - RNA, 20 nt, Human adenovirus B (HAdV-B)
gucucuguccgagguccuga

SEQ ID NO: 104592 - RNA, 14 nt, Human adenovirus B (HAdV-B)
gucucaaccccagc

SEQ ID NO: 104593 - RNA, 19 nt, Human adenovirus B (HAdV-B)
guccuggccaucgugaacg

SEQ ID NO: 104594 - RNA, 13 nt, Human adenovirus B (HAdV-B)
guccaacugcugc

SEQ ID NO: 104595 - RNA, 19 nt, Human adenovirus B (HAdV-B)
gucauccaaauucaccaau

SEQ ID NO: 104596 - RNA, 19 nt, Human adenovirus B (HAdV-B)
gucagucgucuucucugau

SEQ ID NO: 104597 - RNA, 21 nt, Human adenovirus B (HAdV-B)
guaaaacaagccaagauaucc

SEQ ID NO: 104598 - RNA, 14 nt, Human adenovirus B (HAdV-B)
ggcuaagcaguuug

SEQ ID NO: 104599 - RNA, 23 nt, Human adenovirus B (HAdV-B)
ggcuauacuaccaauauuuuugc

SEQ ID NO: 104600 - RNA, 12 nt, Human adenovirus B (HAdV-B)
ggggagucuuca

SEQ ID NO: 104601 - RNA, 23 nt, Human adenovirus B (HAdV-B)
gguagaccuacagagucucugac

SEQ ID NO: 104602 - RNA, 21 nt, Human adenovirus B (HAdV-B)
guagccauguuuuguccugau

SEQ ID NO: 104603 - RNA, 24 nt, Human adenovirus B (HAdV-B)
guagagugcuuuuugauugucaca

SEQ ID NO: 104604 - RNA, 16 nt, Human adenovirus B (HAdV-B)
guaaccuauugcauuu

SEQ ID NO: 104605 - RNA, 18 nt, Human adenovirus B (HAdV-B)
ggccuaagagaccugcua

SEQ ID NO: 104606 - RNA, 22 nt, Human adenovirus B (HAdV-B)
ggccuaagagaccugcuaccaa

SEQ ID NO: 104607 - RNA, 14 nt, Human adenovirus B (HAdV-B)
ggccgcgucucaga

SEQ ID NO: 104608 - RNA, 14 nt, Human adenovirus B (HAdV-B)
ggccggacgugaga

SEQ ID NO: 104609 - RNA, 19 nt, Human adenovirus B (HAdV-B)
ggccauuugccauucucga

SEQ ID NO: 104610 - RNA, 22 nt, Human adenovirus B (HAdV-B)
ggccaugcaacguaucauggcg

SEQ ID NO: 104611 - RNA, 13 nt, Human adenovirus B (HAdV-B)
ggccaucauggaa

SEQ ID NO: 104612 - RNA, 15 nt, Human adenovirus B (HAdV-B)
ggcgaaagauggcgu

SEQ ID NO: 104613 - RNA, 20 nt, Human adenovirus B (HAdV-B)
ggcgacgcgugcaauggcgu

SEQ ID NO: 104614 - RNA, 18 nt, Human adenovirus B (HAdV-B)
ggcgacggcggugaugca

SEQ ID NO: 104615 - RNA, 23 nt, Human adenovirus B (HAdV-B)
ggcgaccuccaacagaaaaccag

SEQ ID NO: 104616 - RNA, 16 nt, Human adenovirus B (HAdV-B)
ggaguucuuacuuuaa

SEQ ID NO: 104617 - RNA, 17 nt, Human adenovirus B (HAdV-B)
ggcagguucugguacug

SEQ ID NO: 104618 - RNA, 13 nt, Human adenovirus B (HAdV-B)
ggcauacaugcca

SEQ ID NO: 104619 - RNA, 23 nt, Human adenovirus B (HAdV-B)
ggcauacaugccacagaugucau

SEQ ID NO: 104620 - RNA, 22 nt, Human adenovirus B (HAdV-B)
ggaggugacuaggguuguagca

SEQ ID NO: 104621 - RNA, 21 nt, Human adenovirus B (HAdV-B)
ggagguucagaugguacuuga

SEQ ID NO: 104622 - RNA, 15 nt, Human adenovirus B (HAdV-B)
ggagguuugggccau

SEQ ID NO: 104623 - RNA, 22 nt, Human adenovirus B (HAdV-B)
ggagccgaaaucuugaaaucac

SEQ ID NO: 104624 - RNA, 22 nt, Human adenovirus B (HAdV-B)
ggaaucaaccccauaguuauca

SEQ ID NO: 104625 - RNA, 23 nt, Human adenovirus B (HAdV-B)
ggaaucaaccccauaguuaucac

SEQ ID NO: 104626 - RNA, 16 nt, Human adenovirus B (HAdV-B)
ggaaucaccaacuugg

SEQ ID NO: 104627 - RNA, 20 nt, Human adenovirus B (HAdV-B)
ggaauggugcaggaauguaa

SEQ ID NO: 104628 - RNA, 16 nt, Human adenovirus B (HAdV-B)
ggaauuacaucauccu

SEQ ID NO: 104629 - RNA, 15 nt, Human adenovirus B (HAdV-B)
ggacaaguuacuugu

SEQ ID NO: 104630 - RNA, 22 nt, Human adenovirus B (HAdV-B)
ggaccucaagguggucaugucu

SEQ ID NO: 104631 - RNA, 23 nt, Human adenovirus B (HAdV-B)
ggacgcuucccgaacccaaccag

SEQ ID NO: 104632 - RNA, 18 nt, Human adenovirus B (HAdV-B)
gcugggccaaaaggacaa

SEQ ID NO: 104633 - RNA, 15 nt, Human adenovirus B (HAdV-B)
gcugggaugggugca

SEQ ID NO: 104634 - RNA, 12 nt, Human adenovirus B (HAdV-B)
gcuucuaugacu

SEQ ID NO: 104635 - RNA, 19 nt, Human adenovirus B (HAdV-B)
gcuucuugcaugcucagaa

SEQ ID NO: 104636 - RNA, 21 nt, Human adenovirus B (HAdV-B)
gcuucccgaacccaaccagcg

SEQ ID NO: 104637 - RNA, 20 nt, Human adenovirus B (HAdV-B)
gcugagaaaguucacccaga

SEQ ID NO: 104638 - RNA, 16 nt, Human adenovirus B (HAdV-B)
gcugaguuacuuucaa

SEQ ID NO: 104639 - RNA, 20 nt, Human adenovirus B (HAdV-B)
gcugacgcucgcaacuaugc

SEQ ID NO: 104640 - RNA, 21 nt, Human adenovirus B (HAdV-B)
gcucuucgguuaagcaugaca

SEQ ID NO: 104641 - RNA, 16 nt, Human adenovirus B (HAdV-B)
gcucuugcuaccaagg

SEQ ID NO: 104642 - RNA, 13 nt, Human adenovirus B (HAdV-B)
gcuacaacaguag

SEQ ID NO: 104643 - RNA, 21 nt, Human adenovirus B (HAdV-B)
gcuacaacaguagcaaugugc

SEQ ID NO: 104644 - RNA, 22 nt, Human adenovirus B (HAdV-B)
gcuaagcaguuuggugauaaua

SEQ ID NO: 104645 - RNA, 15 nt, Human adenovirus B (HAdV-B)
gcggagcgguggugu

SEQ ID NO: 104646 - RNA, 16 nt, Human adenovirus B (HAdV-B)
gcggagcgguggugua

SEQ ID NO: 104647 - RNA, 14 nt, Human adenovirus B (HAdV-B)
gcggcacuucuuag

SEQ ID NO: 104648 - RNA, 14 nt, Human adenovirus B (HAdV-B)
gcccaguaauaaca

SEQ ID NO: 104649 - RNA, 14 nt, Human adenovirus B (HAdV-B)
gccaugguuuccac

SEQ ID NO: 104650 - RNA, 22 nt, Human adenovirus B (HAdV-B)
gccaugguuuccacuaccacau

SEQ ID NO: 104651 - RNA, 19 nt, Human adenovirus B (HAdV-B)
gccauucucgagcugccag

SEQ ID NO: 104652 - RNA, 22 nt, Human adenovirus B (HAdV-B)
gaauaaaaauuaacaugguucu

SEQ ID NO: 104653 - RNA, 17 nt, Human adenovirus B (HAdV-B)
gaaguuucuguauugca

SEQ ID NO: 104654 - RNA, 14 nt, Human adenovirus B (HAdV-B)
gaagagcacgagau

SEQ ID NO: 104655 - RNA, 23 nt, Human adenovirus B (HAdV-B)
gaagacccuaugcggccuaagag

SEQ ID NO: 104656 - RNA, 18 nt, Human adenovirus B (HAdV-B)
gaagaacuuagagccaag

SEQ ID NO: 104657 - RNA, 21 nt, Human adenovirus B (HAdV-B)
gaauguggaaucuaaaaccau

SEQ ID NO: 104658 - RNA, 22 nt, Human adenovirus B (HAdV-B)
gacagauacaguagucaauaua

SEQ ID NO: 104659 - RNA, 23 nt, Human adenovirus B (HAdV-B)
gacaggcgcuuagaaauaaacuu

SEQ ID NO: 104660 - RNA, 12 nt, Human adenovirus B (HAdV-B)
gaacagcaguac

SEQ ID NO: 104661 - RNA, 17 nt, Human adenovirus B (HAdV-B)
gaaaucuugaaaucaca

SEQ ID NO: 104662 - RNA, 15 nt, Human adenovirus B (HAdV-B)
gaacuuccaacaaaa

SEQ ID NO: 104663 - RNA, 14 nt, Human adenovirus B (HAdV-B)
gaacccaaccagcg

SEQ ID NO: 104664 - RNA, 16 nt, Human adenovirus B (HAdV-B)
gaaauauucacuggaa

SEQ ID NO: 104665 - RNA, 18 nt, Human adenovirus B (HAdV-B)
gaaaucaaguaccaucug

SEQ ID NO: 104666 - RNA, 16 nt, Human adenovirus B (HAdV-B)
gaaagugaaccacaac

SEQ ID NO: 104667 - RNA, 18 nt, Human adenovirus B (HAdV-B)
cuuggguugccacuugaa

SEQ ID NO: 104668 - RNA, 23 nt, Human adenovirus B (HAdV-B)
cuugaguacacggaaacguccaa

SEQ ID NO: 104669 - RNA, 17 nt, Human adenovirus B (HAdV-B)
cuugaccacgguggugc

SEQ ID NO: 104670 - RNA, 17 nt, Human adenovirus B (HAdV-B)
gacuucugcucgcucac

SEQ ID NO: 104671 - RNA, 21 nt, Human adenovirus B (HAdV-B)
gacuucugcucgcucacaccu

SEQ ID NO: 104672 - RNA, 12 nt, Human adenovirus B (HAdV-B)
gacuugccuccc

SEQ ID NO: 104673 - RNA, 21 nt, Human adenovirus B (HAdV-B)
gacuucgacccagaaaacugc

SEQ ID NO: 104674 - RNA, 17 nt, Human adenovirus B (HAdV-B)
gagaagaugcaugcauu

SEQ ID NO: 104675 - RNA, 22 nt, Human adenovirus B (HAdV-B)
gagcaagagcucagagccauug

SEQ ID NO: 104676 - RNA, 14 nt, Human adenovirus B (HAdV-B)
gagcuucuaugacu

SEQ ID NO: 104677 - RNA, 19 nt, Human adenovirus B (HAdV-B)
gacauaauuacacucucau

SEQ ID NO: 104678 - RNA, 23 nt, Human adenovirus B (HAdV-B)
gacaucaugcgccagacaucacc

SEQ ID NO: 104679 - RNA, 22 nt, Human adenovirus B (HAdV-B)
gacaucggcacgagccaacuga

SEQ ID NO: 104680 - RNA, 22 nt, Human adenovirus B (HAdV-B)
gacaugaguaaagaaauuccca

SEQ ID NO: 104681 - RNA, 15 nt, Human adenovirus B (HAdV-B)
gaccacgguggugca

SEQ ID NO: 104682 - RNA, 13 nt, Human adenovirus B (HAdV-B)
gaccaccaucgaa

SEQ ID NO: 104683 - RNA, 20 nt, Human adenovirus B (HAdV-B)
gaccaccaucgaaacagaag

SEQ ID NO: 104684 - RNA, 20 nt, Human adenovirus B (HAdV-B)
gaccagggaaacaccacggu

SEQ ID NO: 104685 - RNA, 17 nt, Human adenovirus B (HAdV-B)
gacuaggcaacuguuag

SEQ ID NO: 104686 - RNA, 20 nt, Human adenovirus B (HAdV-B)
gacuaauucaaaacuaacaa

SEQ ID NO: 104687 - RNA, 19 nt, Human adenovirus B (HAdV-B)
gaccuacagagucucugac

SEQ ID NO: 104688 - RNA, 23 nt, Human adenovirus B (HAdV-B)
gaccuacagagucucugacaaag

SEQ ID NO: 104689 - RNA, 17 nt, Human adenovirus B (HAdV-B)
gaccugcuaccaaugaa

SEQ ID NO: 104690 - RNA, 18 nt, Human adenovirus B (HAdV-B)
gaccugcuaccaaugaau

SEQ ID NO: 104691 - RNA, 22 nt, Human adenovirus B (HAdV-B)
gauccuugugcgaauugccuac

SEQ ID NO: 104692 - RNA, 22 nt, Human adenovirus B (HAdV-B)
gauuacuagacggauuaauauc

SEQ ID NO: 104693 - RNA, 15 nt, Human adenovirus B (HAdV-B)
gaugcaaaugcaaua

SEQ ID NO: 104694 - RNA, 17 nt, Human adenovirus B (HAdV-B)
gaggugacuaggguugu

SEQ ID NO: 104695 - RNA, 16 nt, Human adenovirus B (HAdV-B)
gauauuuuucauucuc

SEQ ID NO: 104696 - RNA, 13 nt, Human adenovirus B (HAdV-B)
gcacaugaucauc

SEQ ID NO: 104697 - RNA, 21 nt, Human adenovirus B (HAdV-B)
gcacauagucauauaguucau

SEQ ID NO: 104698 - RNA, 17 nt, Human adenovirus B (HAdV-B)
gauucaugcuccggggu

SEQ ID NO: 104699 - RNA, 13 nt, Human adenovirus B (HAdV-B)
gauuuuuaucuau

SEQ ID NO: 104700 - RNA, 21 nt, Human adenovirus B (HAdV-B)
gcaacauacaaaaucuuacau

SEQ ID NO: 104701 - RNA, 17 nt, Human adenovirus B (HAdV-B)
gcaacaucaauugacau

SEQ ID NO: 104702 - RNA, 16 nt, Human adenovirus B (HAdV-B)
gcaacgacauugacau

SEQ ID NO: 104703 - RNA, 18 nt, Human adenovirus B (HAdV-B)
gccaucauggaagcugua

SEQ ID NO: 104704 - RNA, 13 nt, Human adenovirus B (HAdV-B)
gccaucuaccacu

SEQ ID NO: 104705 - RNA, 22 nt, Human adenovirus B (HAdV-B)
gccagaagccccccgggaacaa

SEQ ID NO: 104706 - RNA, 14 nt, Human adenovirus B (HAdV-B)
gcauuugcauccca

SEQ ID NO: 104707 - RNA, 14 nt, Human adenovirus B (HAdV-B)
gcauuuucccuacu

SEQ ID NO: 104708 - RNA, 17 nt, Human adenovirus B (HAdV-B)
gccaaaaaaacauucaa

SEQ ID NO: 104709 - RNA, 16 nt, Human adenovirus B (HAdV-B)
gccacagcaaccccag

SEQ ID NO: 104710 - RNA, 22 nt, Human adenovirus B (HAdV-B)
gcauuacuaccgucaccuccac

SEQ ID NO: 104711 - RNA, 13 nt, Human adenovirus B (HAdV-B)
gcaugucaauuga

SEQ ID NO: 104712 - RNA, 15 nt, Human adenovirus B (HAdV-B)
gcauuuaauguuugc

SEQ ID NO: 104713 - RNA, 13 nt, Human adenovirus B (HAdV-B)
gcaguuauugaca

SEQ ID NO: 104714 - RNA, 15 nt, Human adenovirus B (HAdV-B)
gcauaagaaugccau

SEQ ID NO: 104715 - RNA, 19 nt, Human adenovirus B (HAdV-B)
gcauaagaaugccaucauc

SEQ ID NO: 104716 - RNA, 23 nt, Human adenovirus B (HAdV-B)
gcaucccagagguuuugaauguu

SEQ ID NO: 104717 - RNA, 18 nt, Human adenovirus B (HAdV-B)
gcaucgccccccucugau

SEQ ID NO: 104718 - RNA, 16 nt, Human adenovirus B (HAdV-B)
gcaucuagugguacug

SEQ ID NO: 104719 - RNA, 12 nt, Human adenovirus B (HAdV-B)
gcagcugucaug

SEQ ID NO: 104720 - RNA, 19 nt, Human adenovirus B (HAdV-B)
gcaggaacgcgcggccaaa

SEQ ID NO: 104721 - RNA, 22 nt, Human adenovirus B (HAdV-B)
gcaggaacgcgcggccaaagag

SEQ ID NO: 104722 - RNA, 17 nt, Human adenovirus B (HAdV-B)
gcagcgcucuugcuacc

SEQ ID NO: 104723 - RNA, 13 nt, Human adenovirus B (HAdV-B)
gcagcggcaguua

SEQ ID NO: 104724 - RNA, 12 nt, Human adenovirus B (HAdV-B)
gcagcgucucag

SEQ ID NO: 104725 - RNA, 18 nt, Human adenovirus B (HAdV-B)
gcagcaguuggacuguga

SEQ ID NO: 104726 - RNA, 22 nt, Human adenovirus B (HAdV-B)
gcaggggacgcuacagugcagu

SEQ ID NO: 104727 - RNA, 23 nt, Human adenovirus B (HAdV-B)
gcaggggacgcuacagugcagua

SEQ ID NO: 104728 - RNA, 21 nt, Human adenovirus B (HAdV-B)
gcaguacaggacaggcgcuua

SEQ ID NO: 104729 - RNA, 17 nt, Human adenovirus B (HAdV-B)
cggaugaucgucucaaa

SEQ ID NO: 104730 - RNA, 21 nt, Human adenovirus B (HAdV-B)
cggaugucucacgcuugccag

SEQ ID NO: 104731 - RNA, 17 nt, Human adenovirus B (HAdV-B)
cgacggcggugaugcaa

SEQ ID NO: 104732 - RNA, 13 nt, Human adenovirus B (HAdV-B)
cgacagauaaaga

SEQ ID NO: 104733 - RNA, 16 nt, Human adenovirus B (HAdV-B)
cgacaucggcacgagc

SEQ ID NO: 104734 - RNA, 17 nt, Human adenovirus B (HAdV-B)
cgacacggcacgaagcc

SEQ ID NO: 104735 - RNA, 20 nt, Human adenovirus B (HAdV-B)
cgacaaaaauuuaccugcau

SEQ ID NO: 104736 - RNA, 16 nt, Human adenovirus B (HAdV-B)
cgaaggcgcauugcca

SEQ ID NO: 104737 - RNA, 14 nt, Human adenovirus B (HAdV-B)
cgaaguccaaauga

SEQ ID NO: 104738 - RNA, 16 nt, Human adenovirus B (HAdV-B)
cgaauaccgcaaccaa

SEQ ID NO: 104739 - RNA, 19 nt, Human adenovirus B (HAdV-B)
cgaauaccgcaaccaaaau

SEQ ID NO: 104740 - RNA, 14 nt, Human adenovirus B (HAdV-B)
cgucuucucugaug

SEQ ID NO: 104741 - RNA, 15 nt, Human adenovirus B (HAdV-B)
cuaacaccugcuacc

SEQ ID NO: 104742 - RNA, 14 nt, Human adenovirus B (HAdV-B)
cuaaauccugagga

SEQ ID NO: 104743 - RNA, 17 nt, Human adenovirus B (HAdV-B)
cucagugacuccuucaa

SEQ ID NO: 104744 - RNA, 19 nt, Human adenovirus B (HAdV-B)
cucagugacuccuucaacc

SEQ ID NO: 104745 - RNA, 19 nt, Human adenovirus B (HAdV-B)
cucaucaaacccacaagca

SEQ ID NO: 104746 - RNA, 21 nt, Human adenovirus B (HAdV-B)
cucaucaaacccacaagcagc

SEQ ID NO: 104747 - RNA, 18 nt, Human adenovirus B (HAdV-B)
cucaucuaaaaccaugca

SEQ ID NO: 104748 - RNA, 18 nt, Human adenovirus B (HAdV-B)
cucacuucccucuuccca

SEQ ID NO: 104749 - RNA, 13 nt, Human adenovirus B (HAdV-B)
cuauaguacucca

SEQ ID NO: 104750 - RNA, 19 nt, Human adenovirus B (HAdV-B)
cucaaacugcacacuaaaa

SEQ ID NO: 104751 - RNA, 14 nt, Human adenovirus B (HAdV-B)
cucaaccauaaaaa

SEQ ID NO: 104752 - RNA, 22 nt, Human adenovirus B (HAdV-B)
cuauuugauuuuggcuggaaug

SEQ ID NO: 104753 - RNA, 14 nt, Human adenovirus B (HAdV-B)
cuacaucuacugug

SEQ ID NO: 104754 - RNA, 16 nt, Human adenovirus B (HAdV-B)
cuacagaaaacccuug

SEQ ID NO: 104755 - RNA, 17 nt, Human adenovirus B (HAdV-B)
cuacagagucucugaca

SEQ ID NO: 104756 - RNA, 23 nt, Human adenovirus B (HAdV-B)
cuaauucaaaacuaacaauguug

SEQ ID NO: 104757 - RNA, 15 nt, Human adenovirus B (HAdV-B)
cuaaugguauccaaa

SEQ ID NO: 104758 - RNA, 16 nt, Human adenovirus B (HAdV-B)
cuacaaaacaugcaac

SEQ ID NO: 104759 - RNA, 13 nt, Human adenovirus B (HAdV-B)
cuacaagaacuuc

SEQ ID NO: 104760 - RNA, 19 nt, Human adenovirus B (HAdV-B)
cuaggcggagcgguggugu

SEQ ID NO: 104761 - RNA, 20 nt, Human adenovirus B (HAdV-B)
cuaggcggagcgguggugua

SEQ ID NO: 104762 - RNA, 16 nt, Human adenovirus B (HAdV-B)
cuaggacauaauuaca

SEQ ID NO: 104763 - RNA, 14 nt, Human adenovirus B (HAdV-B)
cuacucggauuuug

SEQ ID NO: 104764 - RNA, 18 nt, Human adenovirus B (HAdV-B)
cuacuucgaacuccccaa

SEQ ID NO: 104765 - RNA, 20 nt, Human adenovirus B (HAdV-B)
cuacuuucacagcaguagcc

SEQ ID NO: 104766 - RNA, 21 nt, Human adenovirus B (HAdV-B)
cuacggacugccgcuucuuca

SEQ ID NO: 104767 - RNA, 16 nt, Human adenovirus B (HAdV-B)
cuaccgucaccuccac

SEQ ID NO: 104768 - RNA, 15 nt, Human adenovirus B (HAdV-B)
cuacucccugcuauu

SEQ ID NO: 104769 - RNA, 16 nt, Human adenovirus B (HAdV-B)
cuacuauagccagcaa

SEQ ID NO: 104770 - RNA, 20 nt, Human adenovirus B (HAdV-B)
cuucuucaacccggauuuua

SEQ ID NO: 104771 - RNA, 23 nt, Human adenovirus B (HAdV-B)
cuucuucaacccggauuuuacaa

SEQ ID NO: 104772 - RNA, 16 nt, Human adenovirus B (HAdV-B)
cuucuugcaaauagca

SEQ ID NO: 104773 - RNA, 14 nt, Human adenovirus B (HAdV-B)
cuugaaaucacaau

SEQ ID NO: 104774 - RNA, 16 nt, Human adenovirus B (HAdV-B)
cuugaaaucacaauua

SEQ ID NO: 104775 - RNA, 21 nt, Human adenovirus B (HAdV-B)
cuugaauucgggaaucaccaa

SEQ ID NO: 104776 - RNA, 24 nt, Human adenovirus B (HAdV-B)
cuugaauucgggaaucaccaacuu

SEQ ID NO: 104777 - RNA, 14 nt, Human adenovirus B (HAdV-B)
cuucucuuacaucu

SEQ ID NO: 104778 - RNA, 21 nt, Human adenovirus B (HAdV-B)
cuucugcucgcucacaccuca

SEQ ID NO: 104779 - RNA, 19 nt, Human adenovirus B (HAdV-B)
cuuccuauucccugggaua

SEQ ID NO: 104780 - RNA, 15 nt, Human adenovirus B (HAdV-B)
cuucuauugcuuccc

SEQ ID NO: 104781 - RNA, 21 nt, Human adenovirus B (HAdV-B)
cuucaaugcauggcuggggga

SEQ ID NO: 104782 - RNA, 15 nt, Human adenovirus B (HAdV-B)
cuucaccauacucau

SEQ ID NO: 104783 - RNA, 19 nt, Human adenovirus B (HAdV-B)
cuucaccauacucauuugu

SEQ ID NO: 104784 - RNA, 20 nt, Human adenovirus B (HAdV-B)
cuucaccuuuccuacucaca

SEQ ID NO: 104785 - RNA, 19 nt, Human adenovirus B (HAdV-B)
cuucaugucuuucuuccca

SEQ ID NO: 104786 - RNA, 15 nt, Human adenovirus B (HAdV-B)
cuuccauccacagua

SEQ ID NO: 104787 - RNA, 15 nt, Human adenovirus B (HAdV-B)
cuucccucuucccaa

SEQ ID NO: 104788 - RNA, 13 nt, Human adenovirus B (HAdV-B)
cuuacaucucuca

SEQ ID NO: 104789 - RNA, 16 nt, Human adenovirus B (HAdV-B)
cuuaauuugggccauc

SEQ ID NO: 104790 - RNA, 23 nt, Human adenovirus B (HAdV-B)
cuuagacucaucuaaaaccaugc

SEQ ID NO: 104791 - RNA, 20 nt, Human adenovirus B (HAdV-B)
cuuagaaaaugcaaauucca

SEQ ID NO: 104792 - RNA, 21 nt, Human adenovirus B (HAdV-B)
cuuagaaaaugcaaauuccaa

SEQ ID NO: 104793 - RNA, 18 nt, Human adenovirus B (HAdV-B)
cuuaaaaauuuuggcuca

SEQ ID NO: 104794 - RNA, 12 nt, Human adenovirus B (HAdV-B)
cuuaaagaccag

SEQ ID NO: 104795 - RNA, 19 nt, Human adenovirus B (HAdV-B)
cuguugccagauugugaua

SEQ ID NO: 104796 - RNA, 17 nt, Human adenovirus B (HAdV-B)
cugugugguuagcucau

SEQ ID NO: 104797 - RNA, 22 nt, Human adenovirus B (HAdV-B)
cugucucaaccccagcugccua

SEQ ID NO: 104798 - RNA, 19 nt, Human adenovirus B (HAdV-B)
cugggaugcaaaugcaaua

SEQ ID NO: 104799 - RNA, 20 nt, Human adenovirus B (HAdV-B)
cuggaucuacguccacugga

SEQ ID NO: 104800 - RNA, 17 nt, Human adenovirus B (HAdV-B)
cugggaugggugcauuc

SEQ ID NO: 104801 - RNA, 22 nt, Human adenovirus B (HAdV-B)
cuggacgggauaggggcguuaa

SEQ ID NO: 104802 - RNA, 15 nt, Human adenovirus B (HAdV-B)
cuggacuuuaggaga

SEQ ID NO: 104803 - RNA, 15 nt, Human adenovirus B (HAdV-B)
cuguauuacgcugga

SEQ ID NO: 104804 - RNA, 16 nt, Human adenovirus B (HAdV-B)
cugguacugcgcucug

SEQ ID NO: 104805 - RNA, 18 nt, Human adenovirus B (HAdV-B)
cugguagauuuuucugca

SEQ ID NO: 104806 - RNA, 19 nt, Human adenovirus B (HAdV-B)
cugguagauuuuucugcaa

SEQ ID NO: 104807 - RNA, 15 nt, Human adenovirus B (HAdV-B)
cuggaaugcucccaa

SEQ ID NO: 104808 - RNA, 13 nt, Human adenovirus B (HAdV-B)
cugagucagggua

SEQ ID NO: 104809 - RNA, 15 nt, Human adenovirus B (HAdV-B)
cugaguuggcuuuaa

SEQ ID NO: 104810 - RNA, 17 nt, Human adenovirus B (HAdV-B)
cugaacuaucagaauga

SEQ ID NO: 104811 - RNA, 22 nt, Human adenovirus B (HAdV-B)
cugaaacuguuuggaaugugga

SEQ ID NO: 104812 - RNA, 17 nt, Human adenovirus B (HAdV-B)
cugaaaauuaucuggga

SEQ ID NO: 104813 - RNA, 14 nt, Human adenovirus B (HAdV-B)
cugaaacaccauca

SEQ ID NO: 104814 - RNA, 16 nt, Human adenovirus B (HAdV-B)
cugaaacaccaucagc

SEQ ID NO: 104815 - RNA, 16 nt, Human adenovirus B (HAdV-B)
cuccccacgcacagcu

SEQ ID NO: 104816 - RNA, 20 nt, Human adenovirus B (HAdV-B)
cuccccacgcacagcuuuaa

SEQ ID NO: 104817 - RNA, 17 nt, Human adenovirus B (HAdV-B)
cucccaggacuacucca

SEQ ID NO: 104818 - RNA, 22 nt, Human adenovirus B (HAdV-B)
cucccugcuauuaguuacuuca

SEQ ID NO: 104819 - RNA, 19 nt, Human adenovirus B (HAdV-B)
acccuaugcggccuaagag

SEQ ID NO: 104820 - RNA, 20 nt, Human adenovirus B (HAdV-B)
accccacuaacaaccacagg

SEQ ID NO: 104821 - RNA, 18 nt, Human adenovirus B (HAdV-B)
accggauugcagcacuga

SEQ ID NO: 104822 - RNA, 21 nt, Human adenovirus B (HAdV-B)
accauuugguggcaugagguu

SEQ ID NO: 104823 - RNA, 19 nt, Human adenovirus B (HAdV-B)
acccaaguuggugcgauug

SEQ ID NO: 104824 - RNA, 14 nt, Human adenovirus B (HAdV-B)
acccagaaaacugc

SEQ ID NO: 104825 - RNA, 19 nt, Human adenovirus B (HAdV-B)
accagggaaacaccacggu

SEQ ID NO: 104826 - RNA, 17 nt, Human adenovirus B (HAdV-B)
accaugugaccaaccug

SEQ ID NO: 104827 - RNA, 20 nt, Human adenovirus B (HAdV-B)
accaucugaaccucccgcac

SEQ ID NO: 104828 - RNA, 18 nt, Human adenovirus B (HAdV-B)
acgcugaguuacuuucaa

SEQ ID NO: 104829 - RNA, 23 nt, Human adenovirus B (HAdV-B)
acgcuucccgaacccaaccagcg

SEQ ID NO: 104830 - RNA, 17 nt, Human adenovirus B (HAdV-B)
acgcuugccagcacggu

SEQ ID NO: 104831 - RNA, 18 nt, Human adenovirus B (HAdV-B)
acggaacccugcaagcca

SEQ ID NO: 104832 - RNA, 14 nt, Human adenovirus B (HAdV-B)
acggaccuuuggac

SEQ ID NO: 104833 - RNA, 22 nt, Human adenovirus B (HAdV-B)
acggagucuccgguuuuuggag

SEQ ID NO: 104834 - RNA, 20 nt, Human adenovirus B (HAdV-B)
acgaacuuggcccccaacga

SEQ ID NO: 104835 - RNA, 15 nt, Human adenovirus B (HAdV-B)
acgcagcugcagcug

SEQ ID NO: 104836 - RNA, 15 nt, Human adenovirus B (HAdV-B)
accuaaccauuauca

SEQ ID NO: 104837 - RNA, 15 nt, Human adenovirus B (HAdV-B)
accuuuccuacucac

SEQ ID NO: 104838 - RNA, 14 nt, Human adenovirus B (HAdV-B)
accuuuagcauuag

SEQ ID NO: 104839 - RNA, 16 nt, Human adenovirus B (HAdV-B)
accuuuggacuugagu

SEQ ID NO: 104840 - RNA, 14 nt, Human adenovirus B (HAdV-B)
acgaaaaugccaaa

SEQ ID NO: 104841 - RNA, 20 nt, Human adenovirus B (HAdV-B)
accaccaucgaaacagaaga

SEQ ID NO: 104842 - RNA, 16 nt, Human adenovirus B (HAdV-B)
accagaacaccuuaga

SEQ ID NO: 104843 - RNA, 23 nt, Human adenovirus B (HAdV-B)
acauguaucaaggcucugcauua

SEQ ID NO: 104844 - RNA, 21 nt, Human adenovirus B (HAdV-B)
acaugguuuuagauuccacau

SEQ ID NO: 104845 - RNA, 18 nt, Human adenovirus B (HAdV-B)
acauggcuucucuuacau

SEQ ID NO: 104846 - RNA, 22 nt, Human adenovirus B (HAdV-B)
acauggcuucucuuacaucucu

SEQ ID NO: 104847 - RNA, 14 nt, Human adenovirus B (HAdV-B)
acaucucucauauu

SEQ ID NO: 104848 - RNA, 19 nt, Human adenovirus B (HAdV-B)
acaugagucauuauugaac

SEQ ID NO: 104849 - RNA, 13 nt, Human adenovirus B (HAdV-B)
acaugaucaucca

SEQ ID NO: 104850 - RNA, 13 nt, Human adenovirus B (HAdV-B)
acaugcagcagaa

SEQ ID NO: 104851 - RNA, 17 nt, Human adenovirus B (HAdV-B)
acaugcccuuggcucua

SEQ ID NO: 104852 - RNA, 17 nt, Human adenovirus B (HAdV-B)
acagucagcucuuacca

SEQ ID NO: 104853 - RNA, 15 nt, Human adenovirus B (HAdV-B)
acaggcggaucucua

SEQ ID NO: 104854 - RNA, 16 nt, Human adenovirus B (HAdV-B)
acagacuagaacuuuu

SEQ ID NO: 104855 - RNA, 21 nt, Human adenovirus B (HAdV-B)
acacggaacccugcaagccau

SEQ ID NO: 104856 - RNA, 22 nt, Human adenovirus B (HAdV-B)
aauuucuucuucaccauacuca

SEQ ID NO: 104857 - RNA, 14 nt, Human adenovirus B (HAdV-B)
aauuuaauaaugau

SEQ ID NO: 104858 - RNA, 15 nt, Human adenovirus B (HAdV-B)
aauuuccaauccaac

SEQ ID NO: 104859 - RNA, 17 nt, Human adenovirus B (HAdV-B)
agaaaucggaucuuucc

SEQ ID NO: 104860 - RNA, 18 nt, Human adenovirus B (HAdV-B)
agaaaucggaucuuucca

SEQ ID NO: 104861 - RNA, 23 nt, Human adenovirus B (HAdV-B)
agaaauuucuucuucaccauacu

SEQ ID NO: 104862 - RNA, 23 nt, Human adenovirus B (HAdV-B)
agaagcaagagagccaccaccga

SEQ ID NO: 104863 - RNA, 12 nt, Human adenovirus B (HAdV-B)
agaagaugcaug

SEQ ID NO: 104864 - RNA, 23 nt, Human adenovirus B (HAdV-B)
agaagacuugcgugcgccaccac

SEQ ID NO: 104865 - RNA, 14 nt, Human adenovirus B (HAdV-B)
agaacucgguggau

SEQ ID NO: 104866 - RNA, 16 nt, Human adenovirus B (HAdV-B)
agaaugccaucaucuc

SEQ ID NO: 104867 - RNA, 17 nt, Human adenovirus B (HAdV-B)
agaaugacccgcaggca

SEQ ID NO: 104868 - RNA, 13 nt, Human adenovirus B (HAdV-B)
agaauauaugaca

SEQ ID NO: 104869 - RNA, 18 nt, Human adenovirus B (HAdV-B)
agacuaggcaacuguuag

SEQ ID NO: 104870 - RNA, 19 nt, Human adenovirus B (HAdV-B)
agaccugcuaccaaugaau

SEQ ID NO: 104871 - RNA, 16 nt, Human adenovirus B (HAdV-B)
agacguagaugggauc

SEQ ID NO: 104872 - RNA, 13 nt, Human adenovirus B (HAdV-B)
agacaauaagugu

SEQ ID NO: 104873 - RNA, 21 nt, Human adenovirus B (HAdV-B)
agaccuccccaauuggcucca

SEQ ID NO: 104874 - RNA, 22 nt, Human adenovirus B (HAdV-B)
acuuagagccaagggcauguca

SEQ ID NO: 104875 - RNA, 11 nt, Human adenovirus B (HAdV-B)
acuuacuugaa

SEQ ID NO: 104876 - RNA, 21 nt, Human adenovirus B (HAdV-B)
acuuaaggugacgucaauauu

SEQ ID NO: 104877 - RNA, 15 nt, Human adenovirus B (HAdV-B)
acugaccccagauug

SEQ ID NO: 104878 - RNA, 17 nt, Human adenovirus B (HAdV-B)
acugaaacaccaucagc

SEQ ID NO: 104879 - RNA, 17 nt, Human adenovirus B (HAdV-B)
acugaauuaagacucuc

SEQ ID NO: 104880 - RNA, 20 nt, Human adenovirus B (HAdV-B)
acugaauuaagacucuccua

SEQ ID NO: 104881 - RNA, 23 nt, Human adenovirus B (HAdV-B)
acugcacacuaaaaggaccucaa

SEQ ID NO: 104882 - RNA, 12 nt, Human adenovirus B (HAdV-B)
agaaaaccagca

SEQ ID NO: 104883 - RNA, 14 nt, Human adenovirus B (HAdV-B)
agaaaaccagcagc

SEQ ID NO: 104884 - RNA, 22 nt, Human adenovirus B (HAdV-B)
agaaaaugcaaauuccaacaac

SEQ ID NO: 104885 - RNA, 19 nt, Human adenovirus B (HAdV-B)
acuuuaggagaaugaagca

SEQ ID NO: 104886 - RNA, 16 nt, Human adenovirus B (HAdV-B)
acuuggguugccacuu

SEQ ID NO: 104887 - RNA, 20 nt, Human adenovirus B (HAdV-B)
acuuggguugccacuugaau

SEQ ID NO: 104888 - RNA, 13 nt, Human adenovirus B (HAdV-B)
acuucaaugcaug

SEQ ID NO: 104889 - RNA, 14 nt, Human adenovirus B (HAdV-B)
acuucaaugcaugg

SEQ ID NO: 104890 - RNA, 15 nt, Human adenovirus B (HAdV-B)
acucacaaacuagaa

SEQ ID NO: 104891 - RNA, 21 nt, Human adenovirus B (HAdV-B)
acucauugaguucaucuacuu

SEQ ID NO: 104892 - RNA, 17 nt, Human adenovirus B (HAdV-B)
acucauuugugcauuua

SEQ ID NO: 104893 - RNA, 18 nt, Human adenovirus B (HAdV-B)
acucuuacaaagugcggu

SEQ ID NO: 104894 - RNA, 22 nt, Human adenovirus B (HAdV-B)
acucucucauauuaucaccaaa

SEQ ID NO: 104895 - RNA, 11 nt, Human adenovirus B (HAdV-B)
acuagaacuuu

SEQ ID NO: 104896 - RNA, 15 nt, Human adenovirus B (HAdV-B)
acuacucccugcuau

SEQ ID NO: 104897 - RNA, 23 nt, Human adenovirus B (HAdV-B)
acuagacggauuaauauccggaa

SEQ ID NO: 104898 - RNA, 16 nt, Human adenovirus B (HAdV-B)
acuaggcaacuguuag

SEQ ID NO: 104899 - RNA, 15 nt, Human adenovirus B (HAdV-B)
acuaggguuguagca

SEQ ID NO: 104900 - RNA, 15 nt, Human adenovirus B (HAdV-B)
acuagucuugcuugu

SEQ ID NO: 104901 - RNA, 13 nt, Human adenovirus B (HAdV-B)
acgguaugcccua

SEQ ID NO: 104902 - RNA, 18 nt, Human adenovirus B (HAdV-B)
acggucaggccagugcac

SEQ ID NO: 104903 - RNA, 24 nt, Human adenovirus B (HAdV-B)
acggaugucucacgcuugccagca

SEQ ID NO: 104904 - RNA, 13 nt, Human adenovirus B (HAdV-B)
acguccacuggac

SEQ ID NO: 104905 - RNA, 18 nt, Human adenovirus B (HAdV-B)
acgucaauggcuugcagg

SEQ ID NO: 104906 - RNA, 19 nt, Human adenovirus B (HAdV-B)
auagauauuuuucauucuc

SEQ ID NO: 104907 - RNA, 22 nt, Human adenovirus B (HAdV-B)
auagauauuuuucauucucaag

SEQ ID NO: 104908 - RNA, 17 nt, Human adenovirus B (HAdV-B)
auagauaaaaauccauc

SEQ ID NO: 104909 - RNA, 18 nt, Human adenovirus B (HAdV-B)
auacuugcucgcacauag

SEQ ID NO: 104910 - RNA, 13 nt, Human adenovirus B (HAdV-B)
auacuaccaauau

SEQ ID NO: 104911 - RNA, 19 nt, Human adenovirus B (HAdV-B)
auacucauuugugcauuua

SEQ ID NO: 104912 - RNA, 14 nt, Human adenovirus B (HAdV-B)
auacuccuacugcg

SEQ ID NO: 104913 - RNA, 16 nt, Human adenovirus B (HAdV-B)
auacauacucuuacaa

SEQ ID NO: 104914 - RNA, 15 nt, Human adenovirus B (HAdV-B)
auaccuggcaccuac

SEQ ID NO: 104915 - RNA, 13 nt, Human adenovirus B (HAdV-B)
auacaauuuccaa

SEQ ID NO: 104916 - RNA, 21 nt, Human adenovirus B (HAdV-B)
auacaauuuccaauccaaccu

SEQ ID NO: 104917 - RNA, 17 nt, Human adenovirus B (HAdV-B)
auacacaccuugcuuca

SEQ ID NO: 104918 - RNA, 12 nt, Human adenovirus B (HAdV-B)
auaaaacaggac

SEQ ID NO: 104919 - RNA, 15 nt, Human adenovirus B (HAdV-B)
auaaaacaggacuau

SEQ ID NO: 104920 - RNA, 20 nt, Human adenovirus B (HAdV-B)
auaaaguuuaacuuguuuau

SEQ ID NO: 104921 - RNA, 21 nt, Human adenovirus B (HAdV-B)
auagccccccagguggacaug

SEQ ID NO: 104922 - RNA, 18 nt, Human adenovirus B (HAdV-B)
auaggagcuggcuuucau

SEQ ID NO: 104923 - RNA, 21 nt, Human adenovirus B (HAdV-B)
auauaaucuguugcaccauaa

SEQ ID NO: 104924 - RNA, 13 nt, Human adenovirus B (HAdV-B)
auauucacuggaa

SEQ ID NO: 104925 - RNA, 16 nt, Human adenovirus B (HAdV-B)
auauaguucaugugau

SEQ ID NO: 104926 - RNA, 12 nt, Human adenovirus B (HAdV-B)
auauaugacaau

SEQ ID NO: 104927 - RNA, 22 nt, Human adenovirus B (HAdV-B)
aucaacgugacagcaaaugaca

SEQ ID NO: 104928 - RNA, 17 nt, Human adenovirus B (HAdV-B)
auauuugucagcauugu

SEQ ID NO: 104929 - RNA, 13 nt, Human adenovirus B (HAdV-B)
aucagaaauuccc

SEQ ID NO: 104930 - RNA, 16 nt, Human adenovirus B (HAdV-B)
aucagguucacuuuaa

SEQ ID NO: 104931 - RNA, 19 nt, Human adenovirus B (HAdV-B)
aucaugcgccagacaucac

SEQ ID NO: 104932 - RNA, 19 nt, Human adenovirus B (HAdV-B)
aucauccacaagacccaga

SEQ ID NO: 104933 - RNA, 12 nt, Human adenovirus B (HAdV-B)
auccgaugacaa

SEQ ID NO: 104934 - RNA, 20 nt, Human adenovirus B (HAdV-B)
aucccucuaggacauaauua

SEQ ID NO: 104935 - RNA, 21 nt, Human adenovirus B (HAdV-B)
auccauggagguuugggccau

SEQ ID NO: 104936 - RNA, 16 nt, Human adenovirus B (HAdV-B)
aucugcaacaaaacaa

SEQ ID NO: 104937 - RNA, 12 nt, Human adenovirus B (HAdV-B)
aucugcaaucau

SEQ ID NO: 104938 - RNA, 15 nt, Human adenovirus B (HAdV-B)
aucucaauugcucag

SEQ ID NO: 104939 - RNA, 20 nt, Human adenovirus B (HAdV-B)
aucucuccccacgcacagcu

SEQ ID NO: 104940 - RNA, 21 nt, Human adenovirus B (HAdV-B)
aucuaaggccauuugccauuc

SEQ ID NO: 104941 - RNA, 17 nt, Human adenovirus B (HAdV-B)
aucuacguccacuggac

SEQ ID NO: 104942 - RNA, 19 nt, Human adenovirus B (HAdV-B)
aucuaccacuccagcaccc

SEQ ID NO: 104943 - RNA, 14 nt, Human adenovirus B (HAdV-B)
aucuagaccacugc

SEQ ID NO: 104944 - RNA, 22 nt, Human adenovirus B (HAdV-B)
aucuagaccacugccgccgcuu

SEQ ID NO: 104945 - RNA, 19 nt, Human adenovirus B (HAdV-B)
aucgcauuucuuuugaucu

SEQ ID NO: 104946 - RNA, 13 nt, Human adenovirus B (HAdV-B)
aucgaucaggugg

SEQ ID NO: 104947 - RNA, 14 nt, Human adenovirus B (HAdV-B)
agugguacacuguc

SEQ ID NO: 104948 - RNA, 20 nt, Human adenovirus B (HAdV-B)
agugauagauaaaaauccau

SEQ ID NO: 104949 - RNA, 18 nt, Human adenovirus B (HAdV-B)
agugauguuuauugaaca

SEQ ID NO: 104950 - RNA, 22 nt, Human adenovirus B (HAdV-B)
agugcaccuacacccugcugaa

SEQ ID NO: 104951 - RNA, 14 nt, Human adenovirus B (HAdV-B)
aguucacccagacg

SEQ ID NO: 104952 - RNA, 22 nt, Human adenovirus B (HAdV-B)
aguucccgagugguacacuguc

SEQ ID NO: 104953 - RNA, 22 nt, Human adenovirus B (HAdV-B)
aguucuucaccuuuggacgcag

SEQ ID NO: 104954 - RNA, 13 nt, Human adenovirus B (HAdV-B)
aguugaaaaccac

SEQ ID NO: 104955 - RNA, 15 nt, Human adenovirus B (HAdV-B)
aguuuugauuacaac

SEQ ID NO: 104956 - RNA, 22 nt, Human adenovirus B (HAdV-B)
aguuuuuaggauaaaacaggac

SEQ ID NO: 104957 - RNA, 13 nt, Human adenovirus B (HAdV-B)
auaaaaacauacg

SEQ ID NO: 104958 - RNA, 23 nt, Human adenovirus B (HAdV-B)
aggguuauuagaggaaguggaau

SEQ ID NO: 104959 - RNA, 20 nt, Human adenovirus B (HAdV-B)
aggguucacuucaaugcaug

SEQ ID NO: 104960 - RNA, 14 nt, Human adenovirus B (HAdV-B)
aguaacaacacuuu

SEQ ID NO: 104961 - RNA, 15 nt, Human adenovirus B (HAdV-B)
aguaacaacacuuuc

SEQ ID NO: 104962 - RNA, 14 nt, Human adenovirus B (HAdV-B)
aguaacuugcaaca

SEQ ID NO: 104963 - RNA, 19 nt, Human adenovirus B (HAdV-B)
aggucaucugggccaaacu

SEQ ID NO: 104964 - RNA, 18 nt, Human adenovirus B (HAdV-B)
agguagaccuacagaguc

SEQ ID NO: 104965 - RNA, 23 nt, Human adenovirus B (HAdV-B)
aggugaagaacuuaaaguagcau

SEQ ID NO: 104966 - RNA, 15 nt, Human adenovirus B (HAdV-B)
agcugaaaauuaucu

SEQ ID NO: 104967 - RNA, 18 nt, Human adenovirus B (HAdV-B)
agcucgccugugccauug

SEQ ID NO: 104968 - RNA, 22 nt, Human adenovirus B (HAdV-B)
agcuaggguaguuuuuaggaua

SEQ ID NO: 104969 - RNA, 15 nt, Human adenovirus B (HAdV-B)
agcuaccacugccau

SEQ ID NO: 104970 - RNA, 17 nt, Human adenovirus B (HAdV-B)
agcuaccacugccaugc

SEQ ID NO: 104971 - RNA, 21 nt, Human adenovirus B (HAdV-B)
agcgacggaugucucacgcuu

SEQ ID NO: 104972 - RNA, 21 nt, Human adenovirus B (HAdV-B)
agccauuguccaagaccuggg

SEQ ID NO: 104973 - RNA, 21 nt, Human adenovirus B (HAdV-B)
agcccaguuaccacguuguga

SEQ ID NO: 104974 - RNA, 22 nt, Human adenovirus B (HAdV-B)
agagggcaucuagugguacuga

SEQ ID NO: 104975 - RNA, 17 nt, Human adenovirus B (HAdV-B)
aggagcauuugcuuccu

SEQ ID NO: 104976 - RNA, 22 nt, Human adenovirus B (HAdV-B)
aggagcauuugcuuccuaugca

SEQ ID NO: 104977 - RNA, 12 nt, Human adenovirus B (HAdV-B)
agcugcaaccau

SEQ ID NO: 104978 - RNA, 16 nt, Human adenovirus B (HAdV-B)
agcugggaugggugca

SEQ ID NO: 104979 - RNA, 19 nt, Human adenovirus B (HAdV-B)
aggacucuguuaacuucac

SEQ ID NO: 104980 - RNA, 20 nt, Human adenovirus B (HAdV-B)
aggagaaauauucacuggaa

SEQ ID NO: 104981 - RNA, 22 nt, Human adenovirus B (HAdV-B)
aggagaaauauucacuggaaca

SEQ ID NO: 104982 - RNA, 20 nt, Human adenovirus B (HAdV-B)
aggagaaugaagcauguugu

SEQ ID NO: 104983 - RNA, 19 nt, Human adenovirus B (HAdV-B)
aggacauaauuacacucuc

SEQ ID NO: 104984 - RNA, 17 nt, Human adenovirus B (HAdV-B)
cacgaaaaugccaaaua

SEQ ID NO: 104985 - RNA, 20 nt, Human adenovirus B (HAdV-B)
caccuguagcgaauugagaa

SEQ ID NO: 104986 - RNA, 20 nt, Human adenovirus B (HAdV-B)
caccgagcuaccacugccau

SEQ ID NO: 104987 - RNA, 22 nt, Human adenovirus B (HAdV-B)
caccgagcuaccacugccaugc

SEQ ID NO: 104988 - RNA, 12 nt, Human adenovirus B (HAdV-B)
caccuacuucaa

SEQ ID NO: 104989 - RNA, 19 nt, Human adenovirus B (HAdV-B)
caccggauugcagcacuga

SEQ ID NO: 104990 - RNA, 21 nt, Human adenovirus B (HAdV-B)
caccggauugcagcacugaaa

SEQ ID NO: 104991 - RNA, 16 nt, Human adenovirus B (HAdV-B)
cacuacucccugcuau

SEQ ID NO: 104992 - RNA, 17 nt, Human adenovirus B (HAdV-B)
cacggugggaucugcaa

SEQ ID NO: 104993 - RNA, 18 nt, Human adenovirus B (HAdV-B)
cacggugggaucugcaau

SEQ ID NO: 104994 - RNA, 15 nt, Human adenovirus B (HAdV-B)
cacggaaacguccaa

SEQ ID NO: 104995 - RNA, 17 nt, Human adenovirus B (HAdV-B)
cacgcuugccagcacgg

SEQ ID NO: 104996 - RNA, 13 nt, Human adenovirus B (HAdV-B)
cacugaaacacca

SEQ ID NO: 104997 - RNA, 20 nt, Human adenovirus B (HAdV-B)
cacuagcuguguaguaacaa

SEQ ID NO: 104998 - RNA, 15 nt, Human adenovirus B (HAdV-B)
cagaggaacacauuc

SEQ ID NO: 104999 - RNA, 16 nt, Human adenovirus B (HAdV-B)
cagaggaacacauucc

SEQ ID NO: 105000 - RNA, 17 nt, Human adenovirus B (HAdV-B)
cagagaccuaaccauua

SEQ ID NO: 105001 - RNA, 21 nt, Human adenovirus B (HAdV-B)
cagagaccuaaccauuaucaa

SEQ ID NO: 105002 - RNA, 19 nt, Human adenovirus B (HAdV-B)
cagagccauuguccaagac

SEQ ID NO: 105003 - RNA, 13 nt, Human adenovirus B (HAdV-B)
cagaaaaccagca

SEQ ID NO: 105004 - RNA, 19 nt, Human adenovirus B (HAdV-B)
cagaaauuugcuaucauca

SEQ ID NO: 105005 - RNA, 13 nt, Human adenovirus B (HAdV-B)
caauaaggucucu

SEQ ID NO: 105006 - RNA, 19 nt, Human adenovirus B (HAdV-B)
caauaaggucucuguugaa

SEQ ID NO: 105007 - RNA, 21 nt, Human adenovirus B (HAdV-B)
caauacaauuuccaauccaac

SEQ ID NO: 105008 - RNA, 13 nt, Human adenovirus B (HAdV-B)
caaggcucugcau

SEQ ID NO: 105009 - RNA, 16 nt, Human adenovirus B (HAdV-B)
caauaaacaucacuuu

SEQ ID NO: 105010 - RNA, 17 nt, Human adenovirus B (HAdV-B)
caagcuuguuguugauu

SEQ ID NO: 105011 - RNA, 15 nt, Human adenovirus B (HAdV-B)
caagccaagauaucc

SEQ ID NO: 105012 - RNA, 14 nt, Human adenovirus B (HAdV-B)
caagcacaguguua

SEQ ID NO: 105013 - RNA, 13 nt, Human adenovirus B (HAdV-B)
caagauagcuuug

SEQ ID NO: 105014 - RNA, 18 nt, Human adenovirus B (HAdV-B)
caagagcucagagccauu

SEQ ID NO: 105015 - RNA, 17 nt, Human adenovirus B (HAdV-B)
caaugggcauacaugca

SEQ ID NO: 105016 - RNA, 14 nt, Human adenovirus B (HAdV-B)
cacaaucuucaugu

SEQ ID NO: 105017 - RNA, 18 nt, Human adenovirus B (HAdV-B)
caauuacgauccaugucu

SEQ ID NO: 105018 - RNA, 20 nt, Human adenovirus B (HAdV-B)
caccagagcccaguuaccac

SEQ ID NO: 105019 - RNA, 22 nt, Human adenovirus B (HAdV-B)
cacaucacugaacuguggaaca

SEQ ID NO: 105020 - RNA, 19 nt, Human adenovirus B (HAdV-B)
caccacuguauuacuuccu

SEQ ID NO: 105021 - RNA, 15 nt, Human adenovirus B (HAdV-B)
caccccuuuauaaac

SEQ ID NO: 105022 - RNA, 15 nt, Human adenovirus B (HAdV-B)
cacccgcuguugcca

SEQ ID NO: 105023 - RNA, 23 nt, Human adenovirus B (HAdV-B)
caccauaauuucauuuuugauau

SEQ ID NO: 105024 - RNA, 15 nt, Human adenovirus B (HAdV-B)
caaacggaguucuua

SEQ ID NO: 105025 - RNA, 17 nt, Human adenovirus B (HAdV-B)
caaaucucaauugcuca

SEQ ID NO: 105026 - RNA, 22 nt, Human adenovirus B (HAdV-B)
caaacucucuccaaaaugccca

SEQ ID NO: 105027 - RNA, 19 nt, Human adenovirus B (HAdV-B)
caaauagcagcugcaacca

SEQ ID NO: 105028 - RNA, 20 nt, Human adenovirus B (HAdV-B)
caaauuuuucuuuuauucaa

SEQ ID NO: 105029 - RNA, 23 nt, Human adenovirus B (HAdV-B)
caaacagucgucucuaucccucu

SEQ ID NO: 105030 - RNA, 17 nt, Human adenovirus B (HAdV-B)
caaaacaaaaccaauaa

SEQ ID NO: 105031 - RNA, 19 nt, Human adenovirus B (HAdV-B)
caaaacaugcaacauccaa

SEQ ID NO: 105032 - RNA, 20 nt, Human adenovirus B (HAdV-B)
caaaaccucugggaugcaaa

SEQ ID NO: 105033 - RNA, 14 nt, Human adenovirus B (HAdV-B)
caaaaucuuacauu

SEQ ID NO: 105034 - RNA, 21 nt, Human adenovirus B (HAdV-B)
auuugccaaaaaaacauucaa

SEQ ID NO: 105035 - RNA, 22 nt, Human adenovirus B (HAdV-B)
auuugccauucucgagcugcca

SEQ ID NO: 105036 - RNA, 12 nt, Human adenovirus B (HAdV-B)
auuugcuaucau

SEQ ID NO: 105037 - RNA, 16 nt, Human adenovirus B (HAdV-B)
auuugugugacagugc

SEQ ID NO: 105038 - RNA, 13 nt, Human adenovirus B (HAdV-B)
auuguacugccau

SEQ ID NO: 105039 - RNA, 22 nt, Human adenovirus B (HAdV-B)
auugucacugccgcucauggac

SEQ ID NO: 105040 - RNA, 24 nt, Human adenovirus B (HAdV-B)
auugucacugccgcucauggacaa

SEQ ID NO: 105041 - RNA, 15 nt, Human adenovirus B (HAdV-B)
auugugauacuauga

SEQ ID NO: 105042 - RNA, 17 nt, Human adenovirus B (HAdV-B)
auugugauacuaugacu

SEQ ID NO: 105043 - RNA, 19 nt, Human adenovirus B (HAdV-B)
auggguuacuauggaagca

SEQ ID NO: 105044 - RNA, 18 nt, Human adenovirus B (HAdV-B)
aucugugucuaguauaau

SEQ ID NO: 105045 - RNA, 14 nt, Human adenovirus B (HAdV-B)
auguaagggaaaug

SEQ ID NO: 105046 - RNA, 16 nt, Human adenovirus B (HAdV-B)
augucuauguugugcc

SEQ ID NO: 105047 - RNA, 20 nt, Human adenovirus B (HAdV-B)
augucucacgcuugccagca

SEQ ID NO: 105048 - RNA, 14 nt, Human adenovirus B (HAdV-B)
auguguacugaguu

SEQ ID NO: 105049 - RNA, 15 nt, Human adenovirus B (HAdV-B)
augucuuucuuccca

SEQ ID NO: 105050 - RNA, 18 nt, Human adenovirus B (HAdV-B)
auguguggauuggauuua

SEQ ID NO: 105051 - RNA, 16 nt, Human adenovirus B (HAdV-B)
auguuaacuguucacu

SEQ ID NO: 105052 - RNA, 22 nt, Human adenovirus B (HAdV-B)
auguuaugggaucuacugugga

SEQ ID NO: 105053 - RNA, 21 nt, Human adenovirus B (HAdV-B)
auuacagccaacgagccagcg

SEQ ID NO: 105054 - RNA, 23 nt, Human adenovirus B (HAdV-B)
auuccccuacaaaacaugcaaca

SEQ ID NO: 105055 - RNA, 20 nt, Human adenovirus B (HAdV-B)
auuccacccucggaacugaa

SEQ ID NO: 105056 - RNA, 18 nt, Human adenovirus B (HAdV-B)
auuccaucgagugcaccu

SEQ ID NO: 105057 - RNA, 13 nt, Human adenovirus B (HAdV-B)
auuauacuccuac

SEQ ID NO: 105058 - RNA, 15 nt, Human adenovirus B (HAdV-B)
auuccaaacaguuuc

SEQ ID NO: 105059 - RNA, 18 nt, Human adenovirus B (HAdV-B)
auuccaaacaguuucaga

SEQ ID NO: 105060 - RNA, 13 nt, Human adenovirus B (HAdV-B)
auuccaagcacag

SEQ ID NO: 105061 - RNA, 14 nt, Human adenovirus B (HAdV-B)
auuccaagcacagu

SEQ ID NO: 105062 - RNA, 19 nt, Human adenovirus B (HAdV-B)
auuccaauuaucgcugcug

SEQ ID NO: 105063 - RNA, 14 nt, Human adenovirus B (HAdV-B)
auuccacauuccaa

SEQ ID NO: 105064 - RNA, 11 nt, Human adenovirus B (HAdV-B)
auuacuuugau

SEQ ID NO: 105065 - RNA, 19 nt, Human adenovirus B (HAdV-B)
auuacuuugauauaaucug

SEQ ID NO: 105066 - RNA, 19 nt, Human adenovirus B (HAdV-B)
auuggagcaguaucuggag

SEQ ID NO: 105067 - RNA, 13 nt, Human adenovirus B (HAdV-B)
auucucaagugau

SEQ ID NO: 105068 - RNA, 16 nt, Human adenovirus B (HAdV-B)
auucucaagugauuca

SEQ ID NO: 105069 - RNA, 18 nt, Human adenovirus B (HAdV-B)
auucgauccgaugacaau

SEQ ID NO: 105070 - RNA, 17 nt, Human adenovirus B (HAdV-B)
auucggaacuggcaccu

SEQ ID NO: 105071 - RNA, 24 nt, Human adenovirus B (HAdV-B)
ccaccugcaacccguaaucggaau

SEQ ID NO: 105072 - RNA, 13 nt, Human adenovirus B (HAdV-B)
ccacgguggugca

SEQ ID NO: 105073 - RNA, 23 nt, Human adenovirus B (HAdV-B)
ccaauaauaguaacuugcaacau

SEQ ID NO: 105074 - RNA, 19 nt, Human adenovirus B (HAdV-B)
ccaccaucgaaacagaaga

SEQ ID NO: 105075 - RNA, 13 nt, Human adenovirus B (HAdV-B)
ccaagcaggucag

SEQ ID NO: 105076 - RNA, 15 nt, Human adenovirus B (HAdV-B)
ccacuaacaaccaca

SEQ ID NO: 105077 - RNA, 21 nt, Human adenovirus B (HAdV-B)
ccagacaucacccuuacacca

SEQ ID NO: 105078 - RNA, 21 nt, Human adenovirus B (HAdV-B)
ccagaagaacgaaacuuuucc

SEQ ID NO: 105079 - RNA, 15 nt, Human adenovirus B (HAdV-B)
ccaggacuacuccac

SEQ ID NO: 105080 - RNA, 15 nt, Human adenovirus B (HAdV-B)
ccaggccaugcaacg

SEQ ID NO: 105081 - RNA, 21 nt, Human adenovirus B (HAdV-B)
ccagacuguauaggagcauuu

SEQ ID NO: 105082 - RNA, 18 nt, Human adenovirus B (HAdV-B)
ccagacguugggucaaag

SEQ ID NO: 105083 - RNA, 18 nt, Human adenovirus B (HAdV-B)
ccaacuuauagacuggau

SEQ ID NO: 105084 - RNA, 17 nt, Human adenovirus B (HAdV-B)
ccaaacugcuuagccag

SEQ ID NO: 105085 - RNA, 23 nt, Human adenovirus B (HAdV-B)
ccaaacggaguucuuacuuuaaa

SEQ ID NO: 105086 - RNA, 15 nt, Human adenovirus B (HAdV-B)
cauugucauuguaau

SEQ ID NO: 105087 - RNA, 17 nt, Human adenovirus B (HAdV-B)
cauugucauuguaauca

SEQ ID NO: 105088 - RNA, 15 nt, Human adenovirus B (HAdV-B)
cauugcuuauugcuu

SEQ ID NO: 105089 - RNA, 20 nt, Human adenovirus B (HAdV-B)
cauugaguucaucuacuucg

SEQ ID NO: 105090 - RNA, 18 nt, Human adenovirus B (HAdV-B)
cauuuucgcgcuccaugg

SEQ ID NO: 105091 - RNA, 16 nt, Human adenovirus B (HAdV-B)
cauugacgucucuaca

SEQ ID NO: 105092 - RNA, 17 nt, Human adenovirus B (HAdV-B)
cauuccaagcacagugu

SEQ ID NO: 105093 - RNA, 19 nt, Human adenovirus B (HAdV-B)
cauucaaaaccucugggau

SEQ ID NO: 105094 - RNA, 15 nt, Human adenovirus B (HAdV-B)
cauuauugaacaucc

SEQ ID NO: 105095 - RNA, 16 nt, Human adenovirus B (HAdV-B)
cagcaaacucucucca

SEQ ID NO: 105096 - RNA, 13 nt, Human adenovirus B (HAdV-B)
cagcaaccccaga

SEQ ID NO: 105097 - RNA, 23 nt, Human adenovirus B (HAdV-B)
cagcaggaacgcgcggccaaaga

SEQ ID NO: 105098 - RNA, 23 nt, Human adenovirus B (HAdV-B)
cagcaggcgacggcggugaugca

SEQ ID NO: 105099 - RNA, 18 nt, Human adenovirus B (HAdV-B)
cagcaguagccacagcaa

SEQ ID NO: 105100 - RNA, 17 nt, Human adenovirus B (HAdV-B)
cagugcuuugagcgcga

SEQ ID NO: 105101 - RNA, 17 nt, Human adenovirus B (HAdV-B)
caguggaaaaacuugag

SEQ ID NO: 105102 - RNA, 18 nt, Human adenovirus B (HAdV-B)
caguggaaaaacuugagg

SEQ ID NO: 105103 - RNA, 22 nt, Human adenovirus B (HAdV-B)
cagugcgaucacuagcugugua

SEQ ID NO: 105104 - RNA, 19 nt, Human adenovirus B (HAdV-B)
cauaagaaugccaucaucu

SEQ ID NO: 105105 - RNA, 14 nt, Human adenovirus B (HAdV-B)
cauaagauucuuga

SEQ ID NO: 105106 - RNA, 22 nt, Human adenovirus B (HAdV-B)
cauacucauuugugcauuuaau

SEQ ID NO: 105107 - RNA, 18 nt, Human adenovirus B (HAdV-B)
cauacuagucuugcuugu

SEQ ID NO: 105108 - RNA, 20 nt, Human adenovirus B (HAdV-B)
cauacuuucuccauacuuua

SEQ ID NO: 105109 - RNA, 19 nt, Human adenovirus B (HAdV-B)
cauagacguagaugggauc

SEQ ID NO: 105110 - RNA, 22 nt, Human adenovirus B (HAdV-B)
cauagccccccagguggacaug

SEQ ID NO: 105111 - RNA, 20 nt, Human adenovirus B (HAdV-B)
caugucaauugauguugcca

SEQ ID NO: 105112 - RNA, 16 nt, Human adenovirus B (HAdV-B)
caugucuuucuuccca

SEQ ID NO: 105113 - RNA, 22 nt, Human adenovirus B (HAdV-B)
caugagugcgggggcaacauau

SEQ ID NO: 105114 - RNA, 24 nt, Human adenovirus B (HAdV-B)
caugagugcgggggcaacauaucc

SEQ ID NO: 105115 - RNA, 14 nt, Human adenovirus B (HAdV-B)
caugcaacauccaa

SEQ ID NO: 105116 - RNA, 17 nt, Human adenovirus B (HAdV-B)
caugcaacauccaauag

SEQ ID NO: 105117 - RNA, 16 nt, Human adenovirus B (HAdV-B)
caucuccugcuugcau

SEQ ID NO: 105118 - RNA, 14 nt, Human adenovirus B (HAdV-B)
caucuccuguguuc

SEQ ID NO: 105119 - RNA, 23 nt, Human adenovirus B (HAdV-B)
caucuagugguacugaugcuaga

SEQ ID NO: 105120 - RNA, 15 nt, Human adenovirus B (HAdV-B)
caucuaccacuccag

SEQ ID NO: 105121 - RNA, 16 nt, Human adenovirus B (HAdV-B)
caucuaccacuccagc

SEQ ID NO: 105122 - RNA, 20 nt, Human adenovirus B (HAdV-B)
cauauuugucagcauuguca

SEQ ID NO: 105123 - RNA, 23 nt, Human adenovirus B (HAdV-B)
ccccuaugaagaugaaagcaccu

SEQ ID NO: 105124 - RNA, 17 nt, Human adenovirus B (HAdV-B)
cccgcacgcccuggaaa

SEQ ID NO: 105125 - RNA, 23 nt, Human adenovirus B (HAdV-B)
ccauaauuucauuuuugauauac

SEQ ID NO: 105126 - RNA, 20 nt, Human adenovirus B (HAdV-B)
ccauacucauuugugcauuu

SEQ ID NO: 105127 - RNA, 21 nt, Human adenovirus B (HAdV-B)
ccauauccguguuuacuuaag

SEQ ID NO: 105128 - RNA, 15 nt, Human adenovirus B (HAdV-B)
ccaucaucuccugcu

SEQ ID NO: 105129 - RNA, 22 nt, Human adenovirus B (HAdV-B)
ccaucaucuccugcuugcauga

SEQ ID NO: 105130 - RNA, 16 nt, Human adenovirus B (HAdV-B)
cccaggccaugcaacg

SEQ ID NO: 105131 - RNA, 17 nt, Human adenovirus B (HAdV-B)
cccaggguuuauuuccc

SEQ ID NO: 105132 - RNA, 12 nt, Human adenovirus B (HAdV-B)
cccagguggaca

SEQ ID NO: 105133 - RNA, 21 nt, Human adenovirus B (HAdV-B)
cccauaguuaucacccagcaa

SEQ ID NO: 105134 - RNA, 13 nt, Human adenovirus B (HAdV-B)
cccauuccaagca

SEQ ID NO: 105135 - RNA, 13 nt, Human adenovirus B (HAdV-B)
ccuaugcacuuuu

SEQ ID NO: 105136 - RNA, 14 nt, Human adenovirus B (HAdV-B)
ccuaugcuacuuua

SEQ ID NO: 105137 - RNA, 21 nt, Human adenovirus B (HAdV-B)
ccuauugcauuugcaucccag

SEQ ID NO: 105138 - RNA, 21 nt, Human adenovirus B (HAdV-B)
ccuaugaagaugaaagcaccu

SEQ ID NO: 105139 - RNA, 21 nt, Human adenovirus B (HAdV-B)
ccuauagaggugggauugaau

SEQ ID NO: 105140 - RNA, 14 nt, Human adenovirus B (HAdV-B)
ccuauaguacucca

SEQ ID NO: 105141 - RNA, 15 nt, Human adenovirus B (HAdV-B)
ccgaaguccaaauga

SEQ ID NO: 105142 - RNA, 19 nt, Human adenovirus B (HAdV-B)
ccgcguuuugcuauacaaa

SEQ ID NO: 105143 - RNA, 18 nt, Human adenovirus B (HAdV-B)
ccgcuucuguugccgcua

SEQ ID NO: 105144 - RNA, 23 nt, Human adenovirus B (HAdV-B)
ccggaguccauccgcagcaguug

SEQ ID NO: 105145 - RNA, 16 nt, Human adenovirus B (HAdV-B)
cgaaagugaaccacaa

SEQ ID NO: 105146 - RNA, 17 nt, Human adenovirus B (HAdV-B)
cgaaaucuugaaaucac

SEQ ID NO: 105147 - RNA, 15 nt, Human adenovirus B (HAdV-B)
cgaacccaaccagcg

SEQ ID NO: 105148 - RNA, 13 nt, Human adenovirus B (HAdV-B)
ccuuguucugcca

SEQ ID NO: 105149 - RNA, 15 nt, Human adenovirus B (HAdV-B)
ccuuguucugccagc

SEQ ID NO: 105150 - RNA, 14 nt, Human adenovirus B (HAdV-B)
ccuuuagacagcaa

SEQ ID NO: 105151 - RNA, 16 nt, Human adenovirus B (HAdV-B)
ccuuuauaaacccagg

SEQ ID NO: 105152 - RNA, 15 nt, Human adenovirus B (HAdV-B)
ccuuagaaaaugcaa

SEQ ID NO: 105153 - RNA, 13 nt, Human adenovirus B (HAdV-B)
ccuucaacccugu

SEQ ID NO: 105154 - RNA, 18 nt, Human adenovirus B (HAdV-B)
ccuggagcgacaucggca

SEQ ID NO: 105155 - RNA, 17 nt, Human adenovirus B (HAdV-B)
ccuggccaucgugaacg

SEQ ID NO: 105156 - RNA, 17 nt, Human adenovirus B (HAdV-B)
ccugauuauauuuccag

SEQ ID NO: 105157 - RNA, 23 nt, Human adenovirus B (HAdV-B)
ccucuaggacauaauuacacucu

SEQ ID NO: 105158 - RNA, 19 nt, Human adenovirus B (HAdV-B)
ccucacuucccucuuccca

SEQ ID NO: 105159 - RNA, 21 nt, Human adenovirus B (HAdV-B)
aaaaaauacaauggacucuga

SEQ ID NO: 105160 - RNA, 12 nt, Human adenovirus B (HAdV-B)
aaaaacuugagg

SEQ ID NO: 105161 - RNA, 19 nt, Human adenovirus B (HAdV-B)
aaaaaggcgggaauuacau

SEQ ID NO: 105162 - RNA, 22 nt, Human adenovirus B (HAdV-B)
aaaaacucucucauauuaucac

SEQ ID NO: 105163 - RNA, 14 nt, Human adenovirus B (HAdV-B)
aaaacaagccaaga

SEQ ID NO: 105164 - RNA, 18 nt, Human adenovirus B (HAdV-B)
aaaaauauguuaacuguu

SEQ ID NO: 105165 - RNA, 14 nt, Human adenovirus B (HAdV-B)
aaaaaucacuuacu

SEQ ID NO: 105166 - RNA, 22 nt, Human adenovirus B (HAdV-B)
aaaaauggggcccauacuaguc

SEQ ID NO: 105167 - RNA, 19 nt, Human adenovirus B (HAdV-B)
aaaaccacgaaaaugccaa

SEQ ID NO: 105168 - RNA, 14 nt, Human adenovirus B (HAdV-B)
aaaagguaaauggg

SEQ ID NO: 105169 - RNA, 20 nt, Human adenovirus B (HAdV-B)
aaaaguaguuuagauuauaa

SEQ ID NO: 105170 - RNA, 20 nt, Human adenovirus B (HAdV-B)
aaacaagcuuguuguugauu

SEQ ID NO: 105171 - RNA, 22 nt, Human adenovirus B (HAdV-B)
aaaauuugccaaaaaaacauuc

SEQ ID NO: 105172 - RNA, 16 nt, Human adenovirus B (HAdV-B)
aaaccaugcaggcuau

SEQ ID NO: 105173 - RNA, 19 nt, Human adenovirus B (HAdV-B)
aaaccgcugaaaaacuuuu

SEQ ID NO: 105174 - RNA, 20 nt, Human adenovirus B (HAdV-B)
aaaccaugugaccaaccugg

SEQ ID NO: 105175 - RNA, 18 nt, Human adenovirus B (HAdV-B)
aaaccaauaauaguaacu

SEQ ID NO: 105176 - RNA, 18 nt, Human adenovirus B (HAdV-B)
aaaccacgaaaaugccaa

SEQ ID NO: 105177 - RNA, 15 nt, Human adenovirus B (HAdV-B)
aaacagucgucucua

SEQ ID NO: 105178 - RNA, 16 nt, Human adenovirus B (HAdV-B)
aaacaugcaacaucca

SEQ ID NO: 105179 - RNA, 18 nt, Human adenovirus B (HAdV-B)
aaauguugaaaugggcau

SEQ ID NO: 105180 - RNA, 17 nt, Human adenovirus B (HAdV-B)
aacaauaccuuauccac

SEQ ID NO: 105181 - RNA, 19 nt, Human adenovirus B (HAdV-B)
aacaauaccuuauccacca

SEQ ID NO: 105182 - RNA, 14 nt, Human adenovirus B (HAdV-B)
aaaggggaugucaa

SEQ ID NO: 105183 - RNA, 19 nt, Human adenovirus B (HAdV-B)
aaacggaguucuuacuuua

SEQ ID NO: 105184 - RNA, 16 nt, Human adenovirus B (HAdV-B)
aaacuaccaccugcaa

SEQ ID NO: 105185 - RNA, 18 nt, Human adenovirus B (HAdV-B)
aaagucccgcucccacca

SEQ ID NO: 105186 - RNA, 14 nt, Human adenovirus B (HAdV-B)
aaagugauguuuau

SEQ ID NO: 105187 - RNA, 14 nt, Human adenovirus B (HAdV-B)
aaaucaauucacaa

SEQ ID NO: 105188 - RNA, 15 nt, Human adenovirus B (HAdV-B)
aaaucacuuacuuga

SEQ ID NO: 105189 - RNA, 14 nt, Human adenovirus B (HAdV-B)
aaaucagaaauucc

SEQ ID NO: 105190 - RNA, 22 nt, Human adenovirus B (HAdV-B)
aaaucagcaauaaggucucugu

SEQ ID NO: 105191 - RNA, 16 nt, Human adenovirus B (HAdV-B)
aacucauugaguucau

SEQ ID NO: 105192 - RNA, 18 nt, Human adenovirus B (HAdV-B)
aacccauuccaagcacag

SEQ ID NO: 105193 - RNA, 22 nt, Human adenovirus B (HAdV-B)
aacccggauuuuacaaccagaa

SEQ ID NO: 105194 - RNA, 19 nt, Human adenovirus B (HAdV-B)
aacccguaaucggaaucau

SEQ ID NO: 105195 - RNA, 15 nt, Human adenovirus B (HAdV-B)
aacccugucuacccc

SEQ ID NO: 105196 - RNA, 22 nt, Human adenovirus B (HAdV-B)
aacaggugaaaacauguugguu

SEQ ID NO: 105197 - RNA, 16 nt, Human adenovirus B (HAdV-B)
aagaaacucugccuga

SEQ ID NO: 105198 - RNA, 21 nt, Human adenovirus B (HAdV-B)
aagaaacucugccugauuaua

SEQ ID NO: 105199 - RNA, 22 nt, Human adenovirus B (HAdV-B)
aacugcacacuuacuuuugcac

SEQ ID NO: 105200 - RNA, 16 nt, Human adenovirus B (HAdV-B)
aacugcuuagccagaa

SEQ ID NO: 105201 - RNA, 18 nt, Human adenovirus B (HAdV-B)
aacugcugcggauggacu

SEQ ID NO: 105202 - RNA, 11 nt, Human adenovirus B (HAdV-B)
aacuguucacu

SEQ ID NO: 105203 - RNA, 18 nt, Human adenovirus B (HAdV-B)
aacuguuuggaaugugga

SEQ ID NO: 105204 - RNA, 17 nt, Human adenovirus B (HAdV-B)
aacuuaaaguagcauag

SEQ ID NO: 105205 - RNA, 18 nt, Human adenovirus B (HAdV-B)
aacuuaaaguagcauagg

SEQ ID NO: 105206 - RNA, 16 nt, Human adenovirus B (HAdV-B)
aagagcacgagauaca

SEQ ID NO: 105207 - RNA, 13 nt, Human adenovirus B (HAdV-B)
aagagaccugcua

SEQ ID NO: 105208 - RNA, 20 nt, Human adenovirus B (HAdV-B)
aagagaccugcuaccaauga

SEQ ID NO: 105209 - RNA, 21 nt, Human adenovirus B (HAdV-B)
aagagaccugcuaccaaugaa

SEQ ID NO: 105210 - RNA, 22 nt, Human adenovirus B (HAdV-B)
aagagaguccggcucagugacu

SEQ ID NO: 105211 - RNA, 21 nt, Human adenovirus B (HAdV-B)
acaauaccuuauccaccacau

SEQ ID NO: 105212 - RNA, 17 nt, Human adenovirus B (HAdV-B)
acaaggucgcagugcau

SEQ ID NO: 105213 - RNA, 19 nt, Human adenovirus B (HAdV-B)
acaaguuccguaaauguag

SEQ ID NO: 105214 - RNA, 18 nt, Human adenovirus B (HAdV-B)
acaauggaugguuuacaa

SEQ ID NO: 105215 - RNA, 23 nt, Human adenovirus B (HAdV-B)
acaaccagaagaacgaaacuuuu

SEQ ID NO: 105216 - RNA, 12 nt, Human adenovirus B (HAdV-B)
aauuaagacucu

SEQ ID NO: 105217 - RNA, 24 nt, Human adenovirus B (HAdV-B)
aaucucuccccacgcacagcuuua

SEQ ID NO: 105218 - RNA, 20 nt, Human adenovirus B (HAdV-B)
aaugaaacccgagcuucuau

SEQ ID NO: 105219 - RNA, 18 nt, Human adenovirus B (HAdV-B)
aauuugcuaucaucacaa

SEQ ID NO: 105220 - RNA, 23 nt, Human adenovirus B (HAdV-B)
aauuuggaccguaugauaacaga

SEQ ID NO: 105221 - RNA, 13 nt, Human adenovirus B (HAdV-B)
aauuugggccauc

SEQ ID NO: 105222 - RNA, 23 nt, Human adenovirus B (HAdV-B)
acaaaaccuggaacaauaccuua

SEQ ID NO: 105223 - RNA, 14 nt, Human adenovirus B (HAdV-B)
aauucaccaaugca

SEQ ID NO: 105224 - RNA, 14 nt, Human adenovirus B (HAdV-B)
aauucgggaaucac

SEQ ID NO: 105225 - RNA, 21 nt, Human adenovirus B (HAdV-B)
aauugacaugcccuuggcucu

SEQ ID NO: 105226 - RNA, 13 nt, Human adenovirus B (HAdV-B)
aauaaguguucca

SEQ ID NO: 105227 - RNA, 17 nt, Human adenovirus B (HAdV-B)
aauaaguguuccauauc

SEQ ID NO: 105228 - RNA, 16 nt, Human adenovirus B (HAdV-B)
aauaugcuuauuccaa

SEQ ID NO: 105229 - RNA, 17 nt, Human adenovirus B (HAdV-B)
aauaucgcggcacuucu

SEQ ID NO: 105230 - RNA, 18 nt, Human adenovirus B (HAdV-B)
aaucaaguaccaucugaa

SEQ ID NO: 105231 - RNA, 21 nt, Human adenovirus B (HAdV-B)
aaucagcaauaaggucucugu

SEQ ID NO: 105232 - RNA, 12 nt, Human adenovirus B (HAdV-B)
aauaaacaucac

SEQ ID NO: 105233 - RNA, 13 nt, Human adenovirus B (HAdV-B)
aauaaacaagcuu

SEQ ID NO: 105234 - RNA, 21 nt, Human adenovirus B (HAdV-B)
aauaaaagaaaaauuugccaa

SEQ ID NO: 105235 - RNA, 14 nt, Human adenovirus B (HAdV-B)
aaggucucuguuga

SEQ ID NO: 105236 - RNA, 20 nt, Human adenovirus B (HAdV-B)
aagguccggcccacggagug

SEQ ID NO: 105237 - RNA, 22 nt, Human adenovirus B (HAdV-B)
aagguuauauuggguugcauga

SEQ ID NO: 105238 - RNA, 21 nt, Human adenovirus B (HAdV-B)
agcaagagcucagagccauug

SEQ ID NO: 105239 - RNA, 19 nt, Human adenovirus B (HAdV-B)
agcaaccccagacuguaua

SEQ ID NO: 105240 - RNA, 16 nt, Human adenovirus B (HAdV-B)
agcaauuucauggugg

SEQ ID NO: 105241 - RNA, 15 nt, Human adenovirus B (HAdV-B)
agcacgagauacaau

SEQ ID NO: 105242 - RNA, 12 nt, Human adenovirus B (HAdV-B)
agcagcaccuca

SEQ ID NO: 105243 - RNA, 14 nt, Human adenovirus B (HAdV-B)
agauuccacauucc

SEQ ID NO: 105244 - RNA, 15 nt, Human adenovirus B (HAdV-B)
agauuccacauucca

SEQ ID NO: 105245 - RNA, 17 nt, Human adenovirus B (HAdV-B)
agaugguacuugauuuc

SEQ ID NO: 105246 - RNA, 19 nt, Human adenovirus B (HAdV-B)
agaugucauccaaauucac

SEQ ID NO: 105247 - RNA, 17 nt, Human adenovirus B (HAdV-B)
agauuggaauaagcaua

SEQ ID NO: 105248 - RNA, 13 nt, Human adenovirus B (HAdV-B)
agacuagaacuuu

SEQ ID NO: 105249 - RNA, 17 nt, Human adenovirus B (HAdV-B)
agacuaggcaacuguua

SEQ ID NO: 105250 - RNA, 21 nt, Human adenovirus B (HAdV-B)
agacucaucuaaaaccaugca

SEQ ID NO: 105251 - RNA, 16 nt, Human adenovirus B (HAdV-B)
agagaccugcuaccaa

SEQ ID NO: 105252 - RNA, 19 nt, Human adenovirus B (HAdV-B)
agagaccugcuaccaauga

SEQ ID NO: 105253 - RNA, 15 nt, Human adenovirus B (HAdV-B)
agagagccaccaccg

SEQ ID NO: 105254 - RNA, 20 nt, Human adenovirus B (HAdV-B)
agagggcaucuagugguacu

SEQ ID NO: 105255 - RNA, 19 nt, Human adenovirus B (HAdV-B)
agauauccuacgagaucac

SEQ ID NO: 105256 - RNA, 22 nt, Human adenovirus B (HAdV-B)
agauauccuacgagaucaccgc

SEQ ID NO: 105257 - RNA, 16 nt, Human adenovirus B (HAdV-B)
agaucaccgcuacuga

SEQ ID NO: 105258 - RNA, 20 nt, Human adenovirus B (HAdV-B)
agaucaccgcuacugaccau

SEQ ID NO: 105259 - RNA, 15 nt, Human adenovirus B (HAdV-B)
agaugcaugcauuua

SEQ ID NO: 105260 - RNA, 14 nt, Human adenovirus B (HAdV-B)
acuugaacuaucac

SEQ ID NO: 105261 - RNA, 18 nt, Human adenovirus B (HAdV-B)
acuugaggacuuguuaca

SEQ ID NO: 105262 - RNA, 17 nt, Human adenovirus B (HAdV-B)
acuguuuggaaugugga

SEQ ID NO: 105263 - RNA, 18 nt, Human adenovirus B (HAdV-B)
acuguuuggaauguggaa

SEQ ID NO: 105264 - RNA, 13 nt, Human adenovirus B (HAdV-B)
acuguucugcaag

SEQ ID NO: 105265 - RNA, 15 nt, Human adenovirus B (HAdV-B)
acuccuucaacccug

SEQ ID NO: 105266 - RNA, 19 nt, Human adenovirus B (HAdV-B)
acuccucggacgauuggac

SEQ ID NO: 105267 - RNA, 19 nt, Human adenovirus B (HAdV-B)
acuccuacugcgccuacau

SEQ ID NO: 105268 - RNA, 17 nt, Human adenovirus B (HAdV-B)
acuccacccgcaugaau

SEQ ID NO: 105269 - RNA, 17 nt, Human adenovirus B (HAdV-B)
acucaugagaagguccu

SEQ ID NO: 105270 - RNA, 18 nt, Human adenovirus B (HAdV-B)
acucauuugugcauuuaa

SEQ ID NO: 105271 - RNA, 15 nt, Human adenovirus B (HAdV-B)
agaaacuuuuacauc

SEQ ID NO: 105272 - RNA, 17 nt, Human adenovirus B (HAdV-B)
agaacuuaaaguagcau

SEQ ID NO: 105273 - RNA, 17 nt, Human adenovirus B (HAdV-B)
agaaaaugcaaauucca

SEQ ID NO: 105274 - RNA, 18 nt, Human adenovirus B (HAdV-B)
acuugauuuccacagguu

SEQ ID NO: 105275 - RNA, 21 nt, Human adenovirus B (HAdV-B)
acuugcaugaucuuuuccagg

SEQ ID NO: 105276 - RNA, 20 nt, Human adenovirus B (HAdV-B)
acuugcucgcacauagucau

SEQ ID NO: 105277 - RNA, 14 nt, Human adenovirus B (HAdV-B)
acuuguuacagggu

SEQ ID NO: 105278 - RNA, 22 nt, Human adenovirus B (HAdV-B)
acuuguuuauuugaaaaucaau

SEQ ID NO: 105279 - RNA, 18 nt, Human adenovirus B (HAdV-B)
acuuuaaaggggauguca

SEQ ID NO: 105280 - RNA, 14 nt, Human adenovirus B (HAdV-B)
acguagaugggauc

SEQ ID NO: 105281 - RNA, 15 nt, Human adenovirus B (HAdV-B)
acggggacccugcac

SEQ ID NO: 105282 - RNA, 14 nt, Human adenovirus B (HAdV-B)
acggggaugaugau

SEQ ID NO: 105283 - RNA, 19 nt, Human adenovirus B (HAdV-B)
acggaguucuuacuuuaaa

SEQ ID NO: 105284 - RNA, 20 nt, Human adenovirus B (HAdV-B)
acggaccuuuggacuugagu

SEQ ID NO: 105285 - RNA, 23 nt, Human adenovirus B (HAdV-B)
acggcuccagcgagcaagagcuc

SEQ ID NO: 105286 - RNA, 21 nt, Human adenovirus B (HAdV-B)
acgcugaccuaugcuacuuua

SEQ ID NO: 105287 - RNA, 18 nt, Human adenovirus B (HAdV-B)
acgcugucucaaccccag

SEQ ID NO: 105288 - RNA, 14 nt, Human adenovirus B (HAdV-B)
acggaaacguccaa

SEQ ID NO: 105289 - RNA, 22 nt, Human adenovirus B (HAdV-B)
acggaacccugcaagccauuga

SEQ ID NO: 105290 - RNA, 22 nt, Human adenovirus B (HAdV-B)
acgcguggcucgcuacaacagu

SEQ ID NO: 105291 - RNA, 14 nt, Human adenovirus B (HAdV-B)
acgcucgacaucau

SEQ ID NO: 105292 - RNA, 22 nt, Human adenovirus B (HAdV-B)
acgcaaacguucuacccaacau

SEQ ID NO: 105293 - RNA, 15 nt, Human adenovirus B (HAdV-B)
acgaugggaaucaua

SEQ ID NO: 105294 - RNA, 13 nt, Human adenovirus B (HAdV-B)
acgauaagcgcuu

SEQ ID NO: 105295 - RNA, 21 nt, Human adenovirus B (HAdV-B)
accgcuacugaccaucgccuc

SEQ ID NO: 105296 - RNA, 22 nt, Human adenovirus B (HAdV-B)
accggacgcuucccgaacccaa

SEQ ID NO: 105297 - RNA, 14 nt, Human adenovirus B (HAdV-B)
accggauguggcaa

SEQ ID NO: 105298 - RNA, 14 nt, Human adenovirus B (HAdV-B)
accggauugcagca

SEQ ID NO: 105299 - RNA, 20 nt, Human adenovirus B (HAdV-B)
accggccccgugagcuugaa

SEQ ID NO: 105300 - RNA, 23 nt, Human adenovirus B (HAdV-B)
acccagaaaacugcacacuuacu

SEQ ID NO: 105301 - RNA, 22 nt, Human adenovirus B (HAdV-B)
acccagcaaaguggagauacua

SEQ ID NO: 105302 - RNA, 14 nt, Human adenovirus B (HAdV-B)
acgaaccuguggaa

SEQ ID NO: 105303 - RNA, 16 nt, Human adenovirus B (HAdV-B)
accuuagaaaaugcaa

SEQ ID NO: 105304 - RNA, 20 nt, Human adenovirus B (HAdV-B)
accuccaacagaaaaccagc

SEQ ID NO: 105305 - RNA, 21 nt, Human adenovirus B (HAdV-B)
accuccaacagaaaaccagca

SEQ ID NO: 105306 - RNA, 22 nt, Human adenovirus B (HAdV-B)
accuccaacagaaaaccagcag

SEQ ID NO: 105307 - RNA, 12 nt, Human adenovirus B (HAdV-B)
accucacuuccc

SEQ ID NO: 105308 - RNA, 19 nt, Human adenovirus B (HAdV-B)
accucacuucccucuuccc

SEQ ID NO: 105309 - RNA, 20 nt, Human adenovirus B (HAdV-B)
accucacuucccucuuccca

SEQ ID NO: 105310 - RNA, 16 nt, Human adenovirus B (HAdV-B)
acaguccaacugcugc

SEQ ID NO: 105311 - RNA, 15 nt, Human adenovirus B (HAdV-B)
acaguauaagauuac

SEQ ID NO: 105312 - RNA, 17 nt, Human adenovirus B (HAdV-B)
acaguauaagauuacua

SEQ ID NO: 105313 - RNA, 22 nt, Human adenovirus B (HAdV-B)
acaguauggugaacaccaauca

SEQ ID NO: 105314 - RNA, 23 nt, Human adenovirus B (HAdV-B)
acaguauggugaacaccaaucau

SEQ ID NO: 105315 - RNA, 18 nt, Human adenovirus B (HAdV-B)
acaucaauugacaugccc

SEQ ID NO: 105316 - RNA, 17 nt, Human adenovirus B (HAdV-B)
acaucaauuuuucaucc

SEQ ID NO: 105317 - RNA, 19 nt, Human adenovirus B (HAdV-B)
acaucauccucgacaugag

SEQ ID NO: 105318 - RNA, 15 nt, Human adenovirus B (HAdV-B)
acagcaguacaggac

SEQ ID NO: 105319 - RNA, 16 nt, Human adenovirus B (HAdV-B)
acagccaugguuucca

SEQ ID NO: 105320 - RNA, 21 nt, Human adenovirus B (HAdV-B)
acaugagucauuauugaacau

SEQ ID NO: 105321 - RNA, 14 nt, Human adenovirus B (HAdV-B)
acaugcaacaucca

SEQ ID NO: 105322 - RNA, 16 nt, Human adenovirus B (HAdV-B)
acaugcaacauccaau

SEQ ID NO: 105323 - RNA, 17 nt, Human adenovirus B (HAdV-B)
acaugccacagauguca

SEQ ID NO: 105324 - RNA, 18 nt, Human adenovirus B (HAdV-B)
acaugccacagaugucau

SEQ ID NO: 105325 - RNA, 17 nt, Human adenovirus B (HAdV-B)
acauggcuucucuuaca

SEQ ID NO: 105326 - RNA, 21 nt, Human adenovirus B (HAdV-B)
acauggcuucucuuacaucuc

SEQ ID NO: 105327 - RNA, 21 nt, Human adenovirus B (HAdV-B)
acauugauuaauguuagcaaa

SEQ ID NO: 105328 - RNA, 18 nt, Human adenovirus B (HAdV-B)
accaauauuuuugcuucu

SEQ ID NO: 105329 - RNA, 22 nt, Human adenovirus B (HAdV-B)
accaaguuauacgaauacaaua

SEQ ID NO: 105330 - RNA, 15 nt, Human adenovirus B (HAdV-B)
accagaacaccuuag

SEQ ID NO: 105331 - RNA, 13 nt, Human adenovirus B (HAdV-B)
accagcgcuucca

SEQ ID NO: 105332 - RNA, 14 nt, Human adenovirus B (HAdV-B)
accagcgcuuccaa

SEQ ID NO: 105333 - RNA, 21 nt, Human adenovirus B (HAdV-B)
accaggcugugcagaaaaaga

SEQ ID NO: 105334 - RNA, 13 nt, Human adenovirus B (HAdV-B)
auaaacaucacuu

SEQ ID NO: 105335 - RNA, 18 nt, Human adenovirus B (HAdV-B)
auaauaguaacuugcaac

SEQ ID NO: 105336 - RNA, 20 nt, Human adenovirus B (HAdV-B)
auaauaguaacuugcaacau

SEQ ID NO: 105337 - RNA, 23 nt, Human adenovirus B (HAdV-B)
auaauaugagagaguuuuuacaa

SEQ ID NO: 105338 - RNA, 14 nt, Human adenovirus B (HAdV-B)
aguucuuacuuuaa

SEQ ID NO: 105339 - RNA, 17 nt, Human adenovirus B (HAdV-B)
aguucacccagacguug

SEQ ID NO: 105340 - RNA, 15 nt, Human adenovirus B (HAdV-B)
aguuggacugugaaa

SEQ ID NO: 105341 - RNA, 22 nt, Human adenovirus B (HAdV-B)
aguuauacgaauacaauaugau

SEQ ID NO: 105342 - RNA, 18 nt, Human adenovirus B (HAdV-B)
aguguuagcggcaacaga

SEQ ID NO: 105343 - RNA, 17 nt, Human adenovirus B (HAdV-B)
aguggaaaaacuugagg

SEQ ID NO: 105344 - RNA, 17 nt, Human adenovirus B (HAdV-B)
aguguaccaggaaaguc

SEQ ID NO: 105345 - RNA, 12 nt, Human adenovirus B (HAdV-B)
agugguacugau

SEQ ID NO: 105346 - RNA, 20 nt, Human adenovirus B (HAdV-B)
aguaaaagguaaauggggag

SEQ ID NO: 105347 - RNA, 16 nt, Human adenovirus B (HAdV-B)
agugauguuuauugaa

SEQ ID NO: 105348 - RNA, 19 nt, Human adenovirus B (HAdV-B)
agugauguuuauugaacac

SEQ ID NO: 105349 - RNA, 16 nt, Human adenovirus B (HAdV-B)
agugcaugguguugca

SEQ ID NO: 105350 - RNA, 13 nt, Human adenovirus B (HAdV-B)
agugcagaggcau

SEQ ID NO: 105351 - RNA, 19 nt, Human adenovirus B (HAdV-B)
agcuuccggcaucaaugga

SEQ ID NO: 105352 - RNA, 22 nt, Human adenovirus B (HAdV-B)
agcuuccuauucccugggauau

SEQ ID NO: 105353 - RNA, 13 nt, Human adenovirus B (HAdV-B)
agcuucuaugacu

SEQ ID NO: 105354 - RNA, 15 nt, Human adenovirus B (HAdV-B)
agcuucuaugacuga

SEQ ID NO: 105355 - RNA, 16 nt, Human adenovirus B (HAdV-B)
agcuucuaugacugaa

SEQ ID NO: 105356 - RNA, 18 nt, Human adenovirus B (HAdV-B)
agcuucuugcuucuugca

SEQ ID NO: 105357 - RNA, 20 nt, Human adenovirus B (HAdV-B)
agcuucuugcuucuugcaaa

SEQ ID NO: 105358 - RNA, 14 nt, Human adenovirus B (HAdV-B)
aggaacaugcagca

SEQ ID NO: 105359 - RNA, 14 nt, Human adenovirus B (HAdV-B)
aggaacacauuccc

SEQ ID NO: 105360 - RNA, 23 nt, Human adenovirus B (HAdV-B)
aggaacgcgcggccaaagagcuc

SEQ ID NO: 105361 - RNA, 21 nt, Human adenovirus B (HAdV-B)
aggaagacuaggcaacuguua

SEQ ID NO: 105362 - RNA, 16 nt, Human adenovirus B (HAdV-B)
agcauguuguuuggca

SEQ ID NO: 105363 - RNA, 14 nt, Human adenovirus B (HAdV-B)
agcaguacaggaca

SEQ ID NO: 105364 - RNA, 23 nt, Human adenovirus B (HAdV-B)
agcaguagccacagcaaccccag

SEQ ID NO: 105365 - RNA, 18 nt, Human adenovirus B (HAdV-B)
agcaugacagauauguca

SEQ ID NO: 105366 - RNA, 16 nt, Human adenovirus B (HAdV-B)
agcaugaccaccaucg

SEQ ID NO: 105367 - RNA, 19 nt, Human adenovirus B (HAdV-B)
agcaugaccaccaucgaaa

SEQ ID NO: 105368 - RNA, 14 nt, Human adenovirus B (HAdV-B)
aggaucugcucgau

SEQ ID NO: 105369 - RNA, 19 nt, Human adenovirus B (HAdV-B)
aggauaaaacaggacuaua

SEQ ID NO: 105370 - RNA, 12 nt, Human adenovirus B (HAdV-B)
aggauaggcagu

SEQ ID NO: 105371 - RNA, 14 nt, Human adenovirus B (HAdV-B)
aggcucaaacugca

SEQ ID NO: 105372 - RNA, 15 nt, Human adenovirus B (HAdV-B)
aggcucaaacugcac

SEQ ID NO: 105373 - RNA, 20 nt, Human adenovirus B (HAdV-B)
agguguacggggaugaugau

SEQ ID NO: 105374 - RNA, 19 nt, Human adenovirus B (HAdV-B)
aggguugcauucacugcuc

SEQ ID NO: 105375 - RNA, 21 nt, Human adenovirus B (HAdV-B)
aggguugcauucacugcuccu

SEQ ID NO: 105376 - RNA, 21 nt, Human adenovirus B (HAdV-B)
auauccggaaugcuuguuaca

SEQ ID NO: 105377 - RNA, 18 nt, Human adenovirus B (HAdV-B)
auauguuaacuguucacu

SEQ ID NO: 105378 - RNA, 18 nt, Human adenovirus B (HAdV-B)
auauaaucugcaacaaaa

SEQ ID NO: 105379 - RNA, 17 nt, Human adenovirus B (HAdV-B)
auauaguucaugugaug

SEQ ID NO: 105380 - RNA, 14 nt, Human adenovirus B (HAdV-B)
auaaucugcaacaa

SEQ ID NO: 105381 - RNA, 17 nt, Human adenovirus B (HAdV-B)
auaauuacacucucaua

SEQ ID NO: 105382 - RNA, 20 nt, Human adenovirus B (HAdV-B)
auaguaacuugcaacauaca

SEQ ID NO: 105383 - RNA, 12 nt, Human adenovirus B (HAdV-B)
auaguacuccac

SEQ ID NO: 105384 - RNA, 17 nt, Human adenovirus B (HAdV-B)
auaguacuccaccagaa

SEQ ID NO: 105385 - RNA, 15 nt, Human adenovirus B (HAdV-B)
aucacccagucauaa

SEQ ID NO: 105386 - RNA, 14 nt, Human adenovirus B (HAdV-B)
aucacaauuaauca

SEQ ID NO: 105387 - RNA, 18 nt, Human adenovirus B (HAdV-B)
aucacugaacuguggaac

SEQ ID NO: 105388 - RNA, 14 nt, Human adenovirus B (HAdV-B)
aucacccucaaggu

SEQ ID NO: 105389 - RNA, 23 nt, Human adenovirus B (HAdV-B)
aucacuagcuguguaguaacaag

SEQ ID NO: 105390 - RNA, 14 nt, Human adenovirus B (HAdV-B)
aucacuuacuugaa

SEQ ID NO: 105391 - RNA, 15 nt, Human adenovirus B (HAdV-B)
aucacuuacuugaaa

SEQ ID NO: 105392 - RNA, 15 nt, Human adenovirus B (HAdV-B)
aucauccacaagacc

SEQ ID NO: 105393 - RNA, 21 nt, Human adenovirus B (HAdV-B)
aucauccucgacaugaguaaa

SEQ ID NO: 105394 - RNA, 19 nt, Human adenovirus B (HAdV-B)
auccgcauuaguaacaaca

SEQ ID NO: 105395 - RNA, 19 nt, Human adenovirus B (HAdV-B)
auccuugugcgaauugccu

SEQ ID NO: 105396 - RNA, 21 nt, Human adenovirus B (HAdV-B)
aucgaaggcaaaauagacucu

SEQ ID NO: 105397 - RNA, 21 nt, Human adenovirus B (HAdV-B)
aucgagaaaaaucagaaauuc

SEQ ID NO: 105398 - RNA, 22 nt, Human adenovirus B (HAdV-B)
aucgagaaaaaucagaaauucc

SEQ ID NO: 105399 - RNA, 21 nt, Human adenovirus B (HAdV-B)
augagucgcagacguccugaa

SEQ ID NO: 105400 - RNA, 12 nt, Human adenovirus B (HAdV-B)
augacuaugcau

SEQ ID NO: 105401 - RNA, 20 nt, Human adenovirus B (HAdV-B)
augaagaugaaagcaccucc

SEQ ID NO: 105402 - RNA, 15 nt, Human adenovirus B (HAdV-B)
augacagauauguca

SEQ ID NO: 105403 - RNA, 21 nt, Human adenovirus B (HAdV-B)
augacagauaugucaauggga

SEQ ID NO: 105404 - RNA, 22 nt, Human adenovirus B (HAdV-B)
aucggccaucauggaagcugua

SEQ ID NO: 105405 - RNA, 14 nt, Human adenovirus B (HAdV-B)
aucggaucuuucca

SEQ ID NO: 105406 - RNA, 22 nt, Human adenovirus B (HAdV-B)
aucgcggcacuucuuagacuca

SEQ ID NO: 105407 - RNA, 15 nt, Human adenovirus B (HAdV-B)
augaaaccuuuagca

SEQ ID NO: 105408 - RNA, 16 nt, Human adenovirus B (HAdV-B)
augauuucucgaguua

SEQ ID NO: 105409 - RNA, 17 nt, Human adenovirus B (HAdV-B)
augauuucucgaguuaa

SEQ ID NO: 105410 - RNA, 18 nt, Human adenovirus B (HAdV-B)
augauuucucgaguuaau

SEQ ID NO: 105411 - RNA, 20 nt, Human adenovirus B (HAdV-B)
augcaaaaaaggcauauucu

SEQ ID NO: 105412 - RNA, 19 nt, Human adenovirus B (HAdV-B)
augcacaugaucauccaca

SEQ ID NO: 105413 - RNA, 20 nt, Human adenovirus B (HAdV-B)
augcacaugaucauccacaa

SEQ ID NO: 105414 - RNA, 15 nt, Human adenovirus B (HAdV-B)
augauugaggaguua

SEQ ID NO: 105415 - RNA, 15 nt, Human adenovirus B (HAdV-B)
augcucccaaugcac

SEQ ID NO: 105416 - RNA, 13 nt, Human adenovirus B (HAdV-B)
augcgauggaguu

SEQ ID NO: 105417 - RNA, 20 nt, Human adenovirus B (HAdV-B)
augccaucugcgcgaucuac

SEQ ID NO: 105418 - RNA, 21 nt, Human adenovirus B (HAdV-B)
augcaguuauugacaguguag

SEQ ID NO: 105419 - RNA, 23 nt, Human adenovirus B (HAdV-B)
cacaacaagugcagcaacaggag

SEQ ID NO: 105420 - RNA, 14 nt, Human adenovirus B (HAdV-B)
cacaugaucaucca

SEQ ID NO: 105421 - RNA, 15 nt, Human adenovirus B (HAdV-B)
caauuaaucaccccc

SEQ ID NO: 105422 - RNA, 21 nt, Human adenovirus B (HAdV-B)
caauucucuagaaacuuuuac

SEQ ID NO: 105423 - RNA, 15 nt, Human adenovirus B (HAdV-B)
caauugauguugcca

SEQ ID NO: 105424 - RNA, 23 nt, Human adenovirus B (HAdV-B)
caauugauguugccauucucaau

SEQ ID NO: 105425 - RNA, 14 nt, Human adenovirus B (HAdV-B)
caauuggagcagua

SEQ ID NO: 105426 - RNA, 23 nt, Human adenovirus B (HAdV-B)
caagacccagaggaacacauucc

SEQ ID NO: 105427 - RNA, 14 nt, Human adenovirus B (HAdV-B)
caaggacaacaucg

SEQ ID NO: 105428 - RNA, 18 nt, Human adenovirus B (HAdV-B)
cacgcacagcuuuaaaca

SEQ ID NO: 105429 - RNA, 17 nt, Human adenovirus B (HAdV-B)
cacgcccuggaaaagau

SEQ ID NO: 105430 - RNA, 22 nt, Human adenovirus B (HAdV-B)
cacgguggugcaaaacaaugac

SEQ ID NO: 105431 - RNA, 15 nt, Human adenovirus B (HAdV-B)
cacauuccaaacagu

SEQ ID NO: 105432 - RNA, 22 nt, Human adenovirus B (HAdV-B)
cacauuccccuacaaaacaugc

SEQ ID NO: 105433 - RNA, 21 nt, Human adenovirus B (HAdV-B)
caccaaacugcuuagccagaa

SEQ ID NO: 105434 - RNA, 23 nt, Human adenovirus B (HAdV-B)
cagcaggguucacuucaaugcau

SEQ ID NO: 105435 - RNA, 21 nt, Human adenovirus B (HAdV-B)
cagcagugucgcuaacaauac

SEQ ID NO: 105436 - RNA, 13 nt, Human adenovirus B (HAdV-B)
cagccccuacuau

SEQ ID NO: 105437 - RNA, 13 nt, Human adenovirus B (HAdV-B)
cagcugcaaagcu

SEQ ID NO: 105438 - RNA, 15 nt, Human adenovirus B (HAdV-B)
cagcugccuauagua

SEQ ID NO: 105439 - RNA, 15 nt, Human adenovirus B (HAdV-B)
cagcuuuaaacauuu

SEQ ID NO: 105440 - RNA, 20 nt, Human adenovirus B (HAdV-B)
caggaacgcgcggccaaaga

SEQ ID NO: 105441 - RNA, 13 nt, Human adenovirus B (HAdV-B)
cagcucuuaccac

SEQ ID NO: 105442 - RNA, 18 nt, Human adenovirus B (HAdV-B)
cagcgcucuugcuaccaa

SEQ ID NO: 105443 - RNA, 14 nt, Human adenovirus B (HAdV-B)
cagcaaaaacaaga

SEQ ID NO: 105444 - RNA, 17 nt, Human adenovirus B (HAdV-B)
cagcaacuucgaugaua

SEQ ID NO: 105445 - RNA, 21 nt, Human adenovirus B (HAdV-B)
cagauugugauacuaugacua

SEQ ID NO: 105446 - RNA, 20 nt, Human adenovirus B (HAdV-B)
cagauuuaccaguuugaaua

SEQ ID NO: 105447 - RNA, 19 nt, Human adenovirus B (HAdV-B)
cagaguuucuuguaaaaau

SEQ ID NO: 105448 - RNA, 21 nt, Human adenovirus B (HAdV-B)
cacuucuuagacucaucuaaa

SEQ ID NO: 105449 - RNA, 18 nt, Human adenovirus B (HAdV-B)
cacuccugguccugugac

SEQ ID NO: 105450 - RNA, 13 nt, Human adenovirus B (HAdV-B)
cacuuacuugaaa

SEQ ID NO: 105451 - RNA, 12 nt, Human adenovirus B (HAdV-B)
cacuucaaugca

SEQ ID NO: 105452 - RNA, 13 nt, Human adenovirus B (HAdV-B)
cacuucaaugcau

SEQ ID NO: 105453 - RNA, 15 nt, Human adenovirus B (HAdV-B)
cacuucaaugcaugg

SEQ ID NO: 105454 - RNA, 17 nt, Human adenovirus B (HAdV-B)
cagaaaacugcacacuu

SEQ ID NO: 105455 - RNA, 15 nt, Human adenovirus B (HAdV-B)
cagaaaaccagcagc

SEQ ID NO: 105456 - RNA, 15 nt, Human adenovirus B (HAdV-B)
cagagaccuaaccau

SEQ ID NO: 105457 - RNA, 18 nt, Human adenovirus B (HAdV-B)
cagagccauuguccaaga

SEQ ID NO: 105458 - RNA, 19 nt, Human adenovirus B (HAdV-B)
cagagccuugauacaugua

SEQ ID NO: 105459 - RNA, 21 nt, Human adenovirus B (HAdV-B)
cagagccuugauacauguaaa

SEQ ID NO: 105460 - RNA, 16 nt, Human adenovirus B (HAdV-B)
caaccguggucauuuc

SEQ ID NO: 105461 - RNA, 22 nt, Human adenovirus B (HAdV-B)
caacgacaaaaauuuaccugca

SEQ ID NO: 105462 - RNA, 23 nt, Human adenovirus B (HAdV-B)
caacgacaaaaauuuaccugcau

SEQ ID NO: 105463 - RNA, 22 nt, Human adenovirus B (HAdV-B)
caacgacuacaccgcuuuucca

SEQ ID NO: 105464 - RNA, 17 nt, Human adenovirus B (HAdV-B)
caagaacuucuaucacu

SEQ ID NO: 105465 - RNA, 21 nt, Human adenovirus B (HAdV-B)
caacaagugcagcaacaggag

SEQ ID NO: 105466 - RNA, 15 nt, Human adenovirus B (HAdV-B)
caacagagugcugga

SEQ ID NO: 105467 - RNA, 15 nt, Human adenovirus B (HAdV-B)
caaauaaacaaguua

SEQ ID NO: 105468 - RNA, 14 nt, Human adenovirus B (HAdV-B)
caaaguggagauac

SEQ ID NO: 105469 - RNA, 17 nt, Human adenovirus B (HAdV-B)
caaaucccggcagucuc

SEQ ID NO: 105470 - RNA, 20 nt, Human adenovirus B (HAdV-B)
caaauacuuuuggaacaguc

SEQ ID NO: 105471 - RNA, 22 nt, Human adenovirus B (HAdV-B)
caaagauucgauccgaugacaa

SEQ ID NO: 105472 - RNA, 15 nt, Human adenovirus B (HAdV-B)
caaagcccaaacgga

SEQ ID NO: 105473 - RNA, 20 nt, Human adenovirus B (HAdV-B)
caaacggaguucuuacuuua

SEQ ID NO: 105474 - RNA, 14 nt, Human adenovirus B (HAdV-B)
caaacucucuccaa

SEQ ID NO: 105475 - RNA, 15 nt, Human adenovirus B (HAdV-B)
caaacucucuccaaa

SEQ ID NO: 105476 - RNA, 21 nt, Human adenovirus B (HAdV-B)
auuuuagcuccucuccuguac

SEQ ID NO: 105477 - RNA, 16 nt, Human adenovirus B (HAdV-B)
auuccaagcacagugu

SEQ ID NO: 105478 - RNA, 15 nt, Human adenovirus B (HAdV-B)
auuccacauuccaaa

SEQ ID NO: 105479 - RNA, 22 nt, Human adenovirus B (HAdV-B)
auuccccuacaaaacaugcaac

SEQ ID NO: 105480 - RNA, 15 nt, Human adenovirus B (HAdV-B)
auucaauuuuuacaa

SEQ ID NO: 105481 - RNA, 14 nt, Human adenovirus B (HAdV-B)
auucaccaaugcaa

SEQ ID NO: 105482 - RNA, 16 nt, Human adenovirus B (HAdV-B)
auggacaaacagucgu

SEQ ID NO: 105483 - RNA, 21 nt, Human adenovirus B (HAdV-B)
augcuuccauaguaacccauu

SEQ ID NO: 105484 - RNA, 21 nt, Human adenovirus B (HAdV-B)
augcuuguuacauaucuggaa

SEQ ID NO: 105485 - RNA, 23 nt, Human adenovirus B (HAdV-B)
augcuuguuacauaucuggaaau

SEQ ID NO: 105486 - RNA, 20 nt, Human adenovirus B (HAdV-B)
augcuuacuagucucgcaac

SEQ ID NO: 105487 - RNA, 23 nt, Human adenovirus B (HAdV-B)
auugugucucaucaaacccacaa

SEQ ID NO: 105488 - RNA, 20 nt, Human adenovirus B (HAdV-B)
auuguacugccaucuaccac

SEQ ID NO: 105489 - RNA, 20 nt, Human adenovirus B (HAdV-B)
auucugguucgcuagugaau

SEQ ID NO: 105490 - RNA, 15 nt, Human adenovirus B (HAdV-B)
auucuuugcuaccua

SEQ ID NO: 105491 - RNA, 18 nt, Human adenovirus B (HAdV-B)
auucuuugcuaccuauac

SEQ ID NO: 105492 - RNA, 14 nt, Human adenovirus B (HAdV-B)
auuuaugucuaugu

SEQ ID NO: 105493 - RNA, 22 nt, Human adenovirus B (HAdV-B)
auuugucagucgucuucucuga

SEQ ID NO: 105494 - RNA, 19 nt, Human adenovirus B (HAdV-B)
auuugugugacagugcaau

SEQ ID NO: 105495 - RNA, 14 nt, Human adenovirus B (HAdV-B)
guaaaacaagccaa

SEQ ID NO: 105496 - RNA, 18 nt, Human adenovirus B (HAdV-B)
guaaaacaagccaagaua

SEQ ID NO: 105497 - RNA, 15 nt, Human adenovirus B (HAdV-B)
gguugggauuugcau

SEQ ID NO: 105498 - RNA, 21 nt, Human adenovirus B (HAdV-B)
gguuguacuugaacuaucaca

SEQ ID NO: 105499 - RNA, 16 nt, Human adenovirus B (HAdV-B)
gguuaugacagauaca

SEQ ID NO: 105500 - RNA, 18 nt, Human adenovirus B (HAdV-B)
gguucacuucaaugcaug

SEQ ID NO: 105501 - RNA, 19 nt, Human adenovirus B (HAdV-B)
gguucagaugguacuugau

SEQ ID NO: 105502 - RNA, 19 nt, Human adenovirus B (HAdV-B)
gguuccauccgcauuagua

SEQ ID NO: 105503 - RNA, 16 nt, Human adenovirus B (HAdV-B)
gguucccaauaugcuu

SEQ ID NO: 105504 - RNA, 14 nt, Human adenovirus B (HAdV-B)
gguucuucauuguc

SEQ ID NO: 105505 - RNA, 17 nt, Human adenovirus B (HAdV-B)
gguucuucauugucauu

SEQ ID NO: 105506 - RNA, 17 nt, Human adenovirus B (HAdV-B)
gguugcauucacugcuc

SEQ ID NO: 105507 - RNA, 20 nt, Human adenovirus B (HAdV-B)
guaacccauuccaagcacag

SEQ ID NO: 105508 - RNA, 13 nt, Human adenovirus B (HAdV-B)
guaaccuauugca

SEQ ID NO: 105509 - RNA, 14 nt, Human adenovirus B (HAdV-B)
guaacaacacuuuc

SEQ ID NO: 105510 - RNA, 15 nt, Human adenovirus B (HAdV-B)
guaacaacacuuuca

SEQ ID NO: 105511 - RNA, 20 nt, Human adenovirus B (HAdV-B)
guaaucagcaggguucacuu

SEQ ID NO: 105512 - RNA, 17 nt, Human adenovirus B (HAdV-B)
ggugagugcagaggcau

SEQ ID NO: 105513 - RNA, 12 nt, Human adenovirus B (HAdV-B)
gguauacaacgc

SEQ ID NO: 105514 - RNA, 16 nt, Human adenovirus B (HAdV-B)
gggacgcuacagugca

SEQ ID NO: 105515 - RNA, 17 nt, Human adenovirus B (HAdV-B)
ggcggagcgguggugua

SEQ ID NO: 105516 - RNA, 12 nt, Human adenovirus B (HAdV-B)
ggcggaucucua

SEQ ID NO: 105517 - RNA, 13 nt, Human adenovirus B (HAdV-B)
ggcucaaacugca

SEQ ID NO: 105518 - RNA, 14 nt, Human adenovirus B (HAdV-B)
ggcuucucuuacau

SEQ ID NO: 105519 - RNA, 17 nt, Human adenovirus B (HAdV-B)
ggcuucuggcuaagcag

SEQ ID NO: 105520 - RNA, 21 nt, Human adenovirus B (HAdV-B)
ggcaccucaguacgauaccac

SEQ ID NO: 105521 - RNA, 13 nt, Human adenovirus B (HAdV-B)
ggcaacaucaauu

SEQ ID NO: 105522 - RNA, 16 nt, Human adenovirus B (HAdV-B)
ggaucccgcaaugcgg

SEQ ID NO: 105523 - RNA, 19 nt, Human adenovirus B (HAdV-B)
ggauccuauagagguggga

SEQ ID NO: 105524 - RNA, 16 nt, Human adenovirus B (HAdV-B)
ggacuuuuugaagcuc

SEQ ID NO: 105525 - RNA, 19 nt, Human adenovirus B (HAdV-B)
ggacuuuuugaagcucuua

SEQ ID NO: 105526 - RNA, 12 nt, Human adenovirus B (HAdV-B)
ggacuuguuaca

SEQ ID NO: 105527 - RNA, 17 nt, Human adenovirus B (HAdV-B)
ggacucuggacagcucc

SEQ ID NO: 105528 - RNA, 19 nt, Human adenovirus B (HAdV-B)
ggacugccccauggcaugg

SEQ ID NO: 105529 - RNA, 17 nt, Human adenovirus B (HAdV-B)
gcuuccuaugcacuuuu

SEQ ID NO: 105530 - RNA, 23 nt, Human adenovirus B (HAdV-B)
ggauagcaucgccccccucugau

SEQ ID NO: 105531 - RNA, 14 nt, Human adenovirus B (HAdV-B)
gcggcgaccuccaa

SEQ ID NO: 105532 - RNA, 21 nt, Human adenovirus B (HAdV-B)
gcgucgauugacgucuuguau

SEQ ID NO: 105533 - RNA, 20 nt, Human adenovirus B (HAdV-B)
gcggccaaagagcucagaga

SEQ ID NO: 105534 - RNA, 15 nt, Human adenovirus B (HAdV-B)
gcgcugcagagccag

SEQ ID NO: 105535 - RNA, 13 nt, Human adenovirus B (HAdV-B)
gccugugccauug

SEQ ID NO: 105536 - RNA, 15 nt, Human adenovirus B (HAdV-B)
gcuccgcgacacggc

SEQ ID NO: 105537 - RNA, 22 nt, Human adenovirus B (HAdV-B)
gcuccaaggucuuccuacagaa

SEQ ID NO: 105538 - RNA, 13 nt, Human adenovirus B (HAdV-B)
gcucccaaugcac

SEQ ID NO: 105539 - RNA, 12 nt, Human adenovirus B (HAdV-B)
gcuggagccaau

SEQ ID NO: 105540 - RNA, 13 nt, Human adenovirus B (HAdV-B)
gcugcguccaaag

SEQ ID NO: 105541 - RNA, 18 nt, Human adenovirus B (HAdV-B)
gcugccuauaguacucca

SEQ ID NO: 105542 - RNA, 17 nt, Human adenovirus B (HAdV-B)
gcucaaccauaaaaaca

SEQ ID NO: 105543 - RNA, 14 nt, Human adenovirus B (HAdV-B)
gcuacgaagagcua

SEQ ID NO: 105544 - RNA, 23 nt, Human adenovirus B (HAdV-B)
gcuacaacaguagcaaugugcaa

SEQ ID NO: 105545 - RNA, 20 nt, Human adenovirus B (HAdV-B)
gcuaacaauacaauuuccaa

SEQ ID NO: 105546 - RNA, 19 nt, Human adenovirus B (HAdV-B)
gcaugaucuuuuccagggc

SEQ ID NO: 105547 - RNA, 17 nt, Human adenovirus B (HAdV-B)
gcauugcuugguuggga

SEQ ID NO: 105548 - RNA, 20 nt, Human adenovirus B (HAdV-B)
gcauuacuaccgucaccucc

SEQ ID NO: 105549 - RNA, 17 nt, Human adenovirus B (HAdV-B)
gccacagacaccuacuu

SEQ ID NO: 105550 - RNA, 17 nt, Human adenovirus B (HAdV-B)
gccacagcaaccccaga

SEQ ID NO: 105551 - RNA, 13 nt, Human adenovirus B (HAdV-B)
gccaauucuucaa

SEQ ID NO: 105552 - RNA, 23 nt, Human adenovirus B (HAdV-B)
gcaucuccuguguuccaggacca

SEQ ID NO: 105553 - RNA, 15 nt, Human adenovirus B (HAdV-B)
gcaugaaaccuuuag

SEQ ID NO: 105554 - RNA, 20 nt, Human adenovirus B (HAdV-B)
gcaaagcuccaagcagguca

SEQ ID NO: 105555 - RNA, 12 nt, Human adenovirus B (HAdV-B)
gcaaaugcaaua

SEQ ID NO: 105556 - RNA, 22 nt, Human adenovirus B (HAdV-B)
gcaaauuuuucuuuuauucaau

SEQ ID NO: 105557 - RNA, 13 nt, Human adenovirus B (HAdV-B)
gccuacaucuacu

SEQ ID NO: 105558 - RNA, 19 nt, Human adenovirus B (HAdV-B)
gccaucagguucacuuuaa

SEQ ID NO: 105559 - RNA, 13 nt, Human adenovirus B (HAdV-B)
gccaucaucuccu

SEQ ID NO: 105560 - RNA, 15 nt, Human adenovirus B (HAdV-B)
gccgaaaucuugaaa

SEQ ID NO: 105561 - RNA, 19 nt, Human adenovirus B (HAdV-B)
gccccaccggauguggcaa

SEQ ID NO: 105562 - RNA, 17 nt, Human adenovirus B (HAdV-B)
gcccccaacgacaaaaa

SEQ ID NO: 105563 - RNA, 17 nt, Human adenovirus B (HAdV-B)
gaauaccgcaaccaaaa

SEQ ID NO: 105564 - RNA, 17 nt, Human adenovirus B (HAdV-B)
gaacucauugaguucau

SEQ ID NO: 105565 - RNA, 13 nt, Human adenovirus B (HAdV-B)
gaacaaagcuauu

SEQ ID NO: 105566 - RNA, 20 nt, Human adenovirus B (HAdV-B)
gaaauucccacgccuuacau

SEQ ID NO: 105567 - RNA, 21 nt, Human adenovirus B (HAdV-B)
gaacacauuccccuacaaaac

SEQ ID NO: 105568 - RNA, 15 nt, Human adenovirus B (HAdV-B)
gaaccggguucugcc

SEQ ID NO: 105569 - RNA, 15 nt, Human adenovirus B (HAdV-B)
gaaccacaaccccca

SEQ ID NO: 105570 - RNA, 21 nt, Human adenovirus B (HAdV-B)
gaacccaaccagcgcuuccaa

SEQ ID NO: 105571 - RNA, 19 nt, Human adenovirus B (HAdV-B)
cuuguaucugacgucucug

SEQ ID NO: 105572 - RNA, 19 nt, Human adenovirus B (HAdV-B)
gaaaugugcgaucuggcca

SEQ ID NO: 105573 - RNA, 12 nt, Human adenovirus B (HAdV-B)
aaagcgcuuuca

SEQ ID NO: 105574 - RNA, 19 nt, Human adenovirus B (HAdV-B)
aaagcaccucccaacaccc

SEQ ID NO: 105575 - RNA, 13 nt, Human adenovirus B (HAdV-B)
aaacucaccaagg

SEQ ID NO: 105576 - RNA, 22 nt, Human adenovirus B (HAdV-B)
gacacggaacccugcaagccau

SEQ ID NO: 105577 - RNA, 19 nt, Human adenovirus B (HAdV-B)
gacagcaaccccaggccaa

SEQ ID NO: 105578 - RNA, 21 nt, Human adenovirus B (HAdV-B)
aaauacuuuuggaacagucag

SEQ ID NO: 105579 - RNA, 16 nt, Human adenovirus B (HAdV-B)
gaccugcuaccaauga

SEQ ID NO: 105580 - RNA, 21 nt, Human adenovirus B (HAdV-B)
gacccagaggaacacauuccc

SEQ ID NO: 105581 - RNA, 16 nt, Human adenovirus B (HAdV-B)
gacccccaaucacuuc

SEQ ID NO: 105582 - RNA, 18 nt, Human adenovirus B (HAdV-B)
gacccccaaucacuucag

SEQ ID NO: 105583 - RNA, 20 nt, Human adenovirus B (HAdV-B)
gaccgcuguauuacgcugga

SEQ ID NO: 105584 - RNA, 16 nt, Human adenovirus B (HAdV-B)
gagagccaccaccgau

SEQ ID NO: 105585 - RNA, 14 nt, Human adenovirus B (HAdV-B)
gagagcgugaugca

SEQ ID NO: 105586 - RNA, 22 nt, Human adenovirus B (HAdV-B)
gagaaaguucacccagacguug

SEQ ID NO: 105587 - RNA, 12 nt, Human adenovirus B (HAdV-B)
gacuuuaccccu

SEQ ID NO: 105588 - RNA, 18 nt, Human adenovirus B (HAdV-B)
gagaaauauucacuggaa

SEQ ID NO: 105589 - RNA, 18 nt, Human adenovirus B (HAdV-B)
gagaccugcuaccaauga

SEQ ID NO: 105590 - RNA, 23 nt, Human adenovirus B (HAdV-B)
gaggcgagucgugcuaggcggag

SEQ ID NO: 105591 - RNA, 14 nt, Human adenovirus B (HAdV-B)
gaggugagcuccaa

SEQ ID NO: 105592 - RNA, 23 nt, Human adenovirus B (HAdV-B)
gagcucagagaugucauccaaau

SEQ ID NO: 105593 - RNA, 16 nt, Human adenovirus B (HAdV-B)
gagcuaccacugccau

SEQ ID NO: 105594 - RNA, 22 nt, Human adenovirus B (HAdV-B)
aaaugauuaauaaaaaaucacu

SEQ ID NO: 105595 - RNA, 21 nt, Human adenovirus B (HAdV-B)
aaauggggcugaggugguaau

SEQ ID NO: 105596 - RNA, 18 nt, Human adenovirus B (HAdV-B)
aaauauguuaacuguuca

SEQ ID NO: 105597 - RNA, 18 nt, Human adenovirus B (HAdV-B)
gacuaggcaacuguuaga

SEQ ID NO: 105598 - RNA, 19 nt, Human adenovirus B (HAdV-B)
gacuaugcauaguguaagu

SEQ ID NO: 105599 - RNA, 22 nt, Human adenovirus B (HAdV-B)
gacugccccauggcaugggaug

SEQ ID NO: 105600 - RNA, 16 nt, Human adenovirus B (HAdV-B)
gacuggauccuugugc

SEQ ID NO: 105601 - RNA, 15 nt, Human adenovirus B (HAdV-B)
gacugguauacaacg

SEQ ID NO: 105602 - RNA, 20 nt, Human adenovirus B (HAdV-B)
gacuguauaggagcauuugc

SEQ ID NO: 105603 - RNA, 22 nt, Human adenovirus B (HAdV-B)
gauuaauaaaaaaucacuuacu

SEQ ID NO: 105604 - RNA, 22 nt, Human adenovirus B (HAdV-B)
gauuacagccaacgagccagcg

SEQ ID NO: 105605 - RNA, 17 nt, Human adenovirus B (HAdV-B)
gaugucauccaaauuca

SEQ ID NO: 105606 - RNA, 17 nt, Human adenovirus B (HAdV-B)
gauguggcaaaucucaa

SEQ ID NO: 105607 - RNA, 17 nt, Human adenovirus B (HAdV-B)
gauguugccauucucaa

SEQ ID NO: 105608 - RNA, 24 nt, Human adenovirus B (HAdV-B)
gauuccacauuccaaacaguuuca

SEQ ID NO: 105609 - RNA, 13 nt, Human adenovirus B (HAdV-B)
gauugcuggaaua

SEQ ID NO: 105610 - RNA, 15 nt, Human adenovirus B (HAdV-B)
gauuggcucgcucug

SEQ ID NO: 105611 - RNA, 14 nt, Human adenovirus B (HAdV-B)
gauugugucucauc

SEQ ID NO: 105612 - RNA, 15 nt, Human adenovirus B (HAdV-B)
gauuuuuuccaggau

SEQ ID NO: 105613 - RNA, 21 nt, Human adenovirus B (HAdV-B)
gauuuuuuuauuuagacuuug

SEQ ID NO: 105614 - RNA, 14 nt, Human adenovirus B (HAdV-B)
gcaaaaaaggcaua

SEQ ID NO: 105615 - RNA, 17 nt, Human adenovirus B (HAdV-B)
gaucuacguccacugga

SEQ ID NO: 105616 - RNA, 18 nt, Human adenovirus B (HAdV-B)
gaucuacguccacuggac

SEQ ID NO: 105617 - RNA, 16 nt, Human adenovirus B (HAdV-B)
gauagauaaaaaucca

SEQ ID NO: 105618 - RNA, 22 nt, Human adenovirus B (HAdV-B)
gauccaugucuagacuucgacc

SEQ ID NO: 105619 - RNA, 17 nt, Human adenovirus B (HAdV-B)
gauaagcucgccugugc

SEQ ID NO: 105620 - RNA, 22 nt, Human adenovirus B (HAdV-B)
gauaagcucgccugugccauug

SEQ ID NO: 105621 - RNA, 11 nt, Human adenovirus B (HAdV-B)
gauacaagucc

SEQ ID NO: 105622 - RNA, 18 nt, Human adenovirus B (HAdV-B)
gauacaguagucaauaua

SEQ ID NO: 105623 - RNA, 18 nt, Human adenovirus B (HAdV-B)
gauacuaugacuaugcau

SEQ ID NO: 105624 - RNA, 13 nt, Human adenovirus B (HAdV-B)
gaugcaugcauuu

SEQ ID NO: 105625 - RNA, 21 nt, Human adenovirus B (HAdV-B)
gauggaacagcaagcaccgga

SEQ ID NO: 105626 - RNA, 19 nt, Human adenovirus B (HAdV-B)
gaugcaauccccacuggag

SEQ ID NO: 105627 - RNA, 14 nt, Human adenovirus B (HAdV-B)
gaugaucgucucaa

SEQ ID NO: 105628 - RNA, 21 nt, Human adenovirus B (HAdV-B)
cuaugaagaugaaagcaccuc

SEQ ID NO: 105629 - RNA, 16 nt, Human adenovirus B (HAdV-B)
cuaucgagaaaaauca

SEQ ID NO: 105630 - RNA, 18 nt, Human adenovirus B (HAdV-B)
cuaucggccaucauggaa

SEQ ID NO: 105631 - RNA, 22 nt, Human adenovirus B (HAdV-B)
cuauugcuucccuacgcugucu

SEQ ID NO: 105632 - RNA, 23 nt, Human adenovirus B (HAdV-B)
cuaugcggccuaagagaccugcu

SEQ ID NO: 105633 - RNA, 16 nt, Human adenovirus B (HAdV-B)
cucaaccauaaaaaca

SEQ ID NO: 105634 - RNA, 19 nt, Human adenovirus B (HAdV-B)
cucacgcuugccagcacgg

SEQ ID NO: 105635 - RNA, 20 nt, Human adenovirus B (HAdV-B)
cucacgcuugccagcacggu

SEQ ID NO: 105636 - RNA, 20 nt, Human adenovirus B (HAdV-B)
cuccaacagaaaaccagcag

SEQ ID NO: 105637 - RNA, 16 nt, Human adenovirus B (HAdV-B)
cucauuugugcauuua

SEQ ID NO: 105638 - RNA, 17 nt, Human adenovirus B (HAdV-B)
cuccaaggucuuccuac

SEQ ID NO: 105639 - RNA, 15 nt, Human adenovirus B (HAdV-B)
cuacaaaacaugcaa

SEQ ID NO: 105640 - RNA, 18 nt, Human adenovirus B (HAdV-B)
cuacucggauuuugugaa

SEQ ID NO: 105641 - RNA, 22 nt, Human adenovirus B (HAdV-B)
cuacuuucucuagcagcagugu

SEQ ID NO: 105642 - RNA, 18 nt, Human adenovirus B (HAdV-B)
cuagugguacugaugcua

SEQ ID NO: 105643 - RNA, 14 nt, Human adenovirus B (HAdV-B)
cuaguuguaaaaac

SEQ ID NO: 105644 - RNA, 13 nt, Human adenovirus B (HAdV-B)
cuauagccagcaa

SEQ ID NO: 105645 - RNA, 12 nt, Human adenovirus B (HAdV-B)
cuauacuaccaa

SEQ ID NO: 105646 - RNA, 15 nt, Human adenovirus B (HAdV-B)
cuauacuaccaauau

SEQ ID NO: 105647 - RNA, 16 nt, Human adenovirus B (HAdV-B)
cuauagauauuuuuca

SEQ ID NO: 105648 - RNA, 15 nt, Human adenovirus B (HAdV-B)
cuagucuugcuuguu

SEQ ID NO: 105649 - RNA, 18 nt, Human adenovirus B (HAdV-B)
cuaggacauaauuacacu

SEQ ID NO: 105650 - RNA, 22 nt, Human adenovirus B (HAdV-B)
cuaggacauaauuacacucuca

SEQ ID NO: 105651 - RNA, 14 nt, Human adenovirus B (HAdV-B)
cggccgcgucucag

SEQ ID NO: 105652 - RNA, 14 nt, Human adenovirus B (HAdV-B)
cggcaucaauggag

SEQ ID NO: 105653 - RNA, 17 nt, Human adenovirus B (HAdV-B)
cggaguucuuacuuuaa

SEQ ID NO: 105654 - RNA, 15 nt, Human adenovirus B (HAdV-B)
cgggaaucaccaacu

SEQ ID NO: 105655 - RNA, 17 nt, Human adenovirus B (HAdV-B)
cggugggaucugcaauc

SEQ ID NO: 105656 - RNA, 16 nt, Human adenovirus B (HAdV-B)
cgugaaggaacaugca

SEQ ID NO: 105657 - RNA, 22 nt, Human adenovirus B (HAdV-B)
cgugcuauccgcaagcaauugc

SEQ ID NO: 105658 - RNA, 13 nt, Human adenovirus B (HAdV-B)
cuaacaaccacag

SEQ ID NO: 105659 - RNA, 14 nt, Human adenovirus B (HAdV-B)
cuaacaaccacagg

SEQ ID NO: 105660 - RNA, 15 nt, Human adenovirus B (HAdV-B)
cuaaccaggcugugc

SEQ ID NO: 105661 - RNA, 21 nt, Human adenovirus B (HAdV-B)
cuaaccauuaucaacgugaca

SEQ ID NO: 105662 - RNA, 16 nt, Human adenovirus B (HAdV-B)
cguucuacccaacauc

SEQ ID NO: 105663 - RNA, 13 nt, Human adenovirus B (HAdV-B)
cguugauuacuuu

SEQ ID NO: 105664 - RNA, 18 nt, Human adenovirus B (HAdV-B)
cuucccagaugaccaaga

SEQ ID NO: 105665 - RNA, 24 nt, Human adenovirus B (HAdV-B)
cuucaugucuuucuucccagauga

SEQ ID NO: 105666 - RNA, 15 nt, Human adenovirus B (HAdV-B)
cuucaaucugggaaa

SEQ ID NO: 105667 - RNA, 13 nt, Human adenovirus B (HAdV-B)
cuucaaugcaugg

SEQ ID NO: 105668 - RNA, 15 nt, Human adenovirus B (HAdV-B)
cuuagaaaaugcaaa

SEQ ID NO: 105669 - RNA, 11 nt, Human adenovirus B (HAdV-B)
cuuacuuuaaa

SEQ ID NO: 105670 - RNA, 20 nt, Human adenovirus B (HAdV-B)
cugucguccaggacucuguu

SEQ ID NO: 105671 - RNA, 16 nt, Human adenovirus B (HAdV-B)
cugucccuaccuacua

SEQ ID NO: 105672 - RNA, 15 nt, Human adenovirus B (HAdV-B)
cuuguacugcacugu

SEQ ID NO: 105673 - RNA, 13 nt, Human adenovirus B (HAdV-B)
cuugcuucuugca

SEQ ID NO: 105674 - RNA, 18 nt, Human adenovirus B (HAdV-B)
cuugaccacgguggugca

SEQ ID NO: 105675 - RNA, 13 nt, Human adenovirus B (HAdV-B)
cuugauacaugua

SEQ ID NO: 105676 - RNA, 22 nt, Human adenovirus B (HAdV-B)
cuucguacgagagcgugaugca

SEQ ID NO: 105677 - RNA, 11 nt, Human adenovirus B (HAdV-B)
cuucuaugacu

SEQ ID NO: 105678 - RNA, 17 nt, Human adenovirus B (HAdV-B)
cuucuucaccauacuca

SEQ ID NO: 105679 - RNA, 20 nt, Human adenovirus B (HAdV-B)
cuucuugaccacgguggugc

SEQ ID NO: 105680 - RNA, 14 nt, Human adenovirus B (HAdV-B)
cuugaacuaucaca

SEQ ID NO: 105681 - RNA, 16 nt, Human adenovirus B (HAdV-B)
cuugaaacacaaucca

SEQ ID NO: 105682 - RNA, 23 nt, Human adenovirus B (HAdV-B)
cuugaaacacaauccaguugcau

SEQ ID NO: 105683 - RNA, 15 nt, Human adenovirus B (HAdV-B)
cuucuggcuaagcag

SEQ ID NO: 105684 - RNA, 16 nt, Human adenovirus B (HAdV-B)
cuucucuuacaucucu

SEQ ID NO: 105685 - RNA, 15 nt, Human adenovirus B (HAdV-B)
cugauaaacaguaua

SEQ ID NO: 105686 - RNA, 19 nt, Human adenovirus B (HAdV-B)
cugauacuuggguugccac

SEQ ID NO: 105687 - RNA, 22 nt, Human adenovirus B (HAdV-B)
cugacacuccugguccugugac

SEQ ID NO: 105688 - RNA, 23 nt, Human adenovirus B (HAdV-B)
cugaccgauuaggcgaguuugcu

SEQ ID NO: 105689 - RNA, 21 nt, Human adenovirus B (HAdV-B)
cugaaaugugcgaucuggcca

SEQ ID NO: 105690 - RNA, 19 nt, Human adenovirus B (HAdV-B)
cucuuucuguuuacagaca

SEQ ID NO: 105691 - RNA, 18 nt, Human adenovirus B (HAdV-B)
cucuugcuucuugcaugc

SEQ ID NO: 105692 - RNA, 15 nt, Human adenovirus B (HAdV-B)
cugggaaacguccag

SEQ ID NO: 105693 - RNA, 22 nt, Human adenovirus B (HAdV-B)
cuggcgaaagauggcgugagaa

SEQ ID NO: 105694 - RNA, 22 nt, Human adenovirus B (HAdV-B)
cuggaaugcucccaaugcacau

SEQ ID NO: 105695 - RNA, 14 nt, Human adenovirus B (HAdV-B)
cugguauucuaaac

SEQ ID NO: 105696 - RNA, 18 nt, Human adenovirus B (HAdV-B)
cugggaugcaaaugcaau

SEQ ID NO: 105697 - RNA, 15 nt, Human adenovirus B (HAdV-B)
cugggaugggugcau

SEQ ID NO: 105698 - RNA, 15 nt, Human adenovirus B (HAdV-B)
cugcuuugcccggga

SEQ ID NO: 105699 - RNA, 22 nt, Human adenovirus B (HAdV-B)
cugaucgagcgagaccagggaa

SEQ ID NO: 105700 - RNA, 18 nt, Human adenovirus B (HAdV-B)
caugguuuccacuaccac

SEQ ID NO: 105701 - RNA, 23 nt, Human adenovirus B (HAdV-B)
caugguuuuagauuccacauucc

SEQ ID NO: 105702 - RNA, 21 nt, Human adenovirus B (HAdV-B)
cauguaaacaacguguucaau

SEQ ID NO: 105703 - RNA, 22 nt, Human adenovirus B (HAdV-B)
cauguaucaaggcucugcauua

SEQ ID NO: 105704 - RNA, 19 nt, Human adenovirus B (HAdV-B)
cauuaucaacgugacagca

SEQ ID NO: 105705 - RNA, 17 nt, Human adenovirus B (HAdV-B)
cauuauuguacugccau

SEQ ID NO: 105706 - RNA, 14 nt, Human adenovirus B (HAdV-B)
cauggcaugggaug

SEQ ID NO: 105707 - RNA, 21 nt, Human adenovirus B (HAdV-B)
cauggcuaauuccacuuccuc

SEQ ID NO: 105708 - RNA, 20 nt, Human adenovirus B (HAdV-B)
cauggcuucucuuacaucuc

SEQ ID NO: 105709 - RNA, 18 nt, Human adenovirus B (HAdV-B)
cauggggugaacuuuccg

SEQ ID NO: 105710 - RNA, 13 nt, Human adenovirus B (HAdV-B)
caugcaacaucca

SEQ ID NO: 105711 - RNA, 15 nt, Human adenovirus B (HAdV-B)
caugcaacguaucau

SEQ ID NO: 105712 - RNA, 18 nt, Human adenovirus B (HAdV-B)
caugaucuuuuccagggc

SEQ ID NO: 105713 - RNA, 16 nt, Human adenovirus B (HAdV-B)
caugauuccacccucg

SEQ ID NO: 105714 - RNA, 19 nt, Human adenovirus B (HAdV-B)
caugagguagaccuacaga

SEQ ID NO: 105715 - RNA, 14 nt, Human adenovirus B (HAdV-B)
caugaccaccaucg

SEQ ID NO: 105716 - RNA, 21 nt, Human adenovirus B (HAdV-B)
caugagcaaacaguauucucu

SEQ ID NO: 105717 - RNA, 17 nt, Human adenovirus B (HAdV-B)
cauuccccuacaaaaca

SEQ ID NO: 105718 - RNA, 15 nt, Human adenovirus B (HAdV-B)
cauucacugcuccug

SEQ ID NO: 105719 - RNA, 14 nt, Human adenovirus B (HAdV-B)
cauucucaagugau

SEQ ID NO: 105720 - RNA, 17 nt, Human adenovirus B (HAdV-B)
cauuuuggaagaccuua

SEQ ID NO: 105721 - RNA, 14 nt, Human adenovirus B (HAdV-B)
cauuuggauaccau

SEQ ID NO: 105722 - RNA, 15 nt, Human adenovirus B (HAdV-B)
cauuugguggcauga

SEQ ID NO: 105723 - RNA, 13 nt, Human adenovirus B (HAdV-B)
cauuugugcauuu

SEQ ID NO: 105724 - RNA, 18 nt, Human adenovirus B (HAdV-B)
cauuugcuuccuaugcac

SEQ ID NO: 105725 - RNA, 22 nt, Human adenovirus B (HAdV-B)
caucccagagguuuugaauguu

SEQ ID NO: 105726 - RNA, 15 nt, Human adenovirus B (HAdV-B)
caucaucuccugcuu

SEQ ID NO: 105727 - RNA, 18 nt, Human adenovirus B (HAdV-B)
cauccuuggcuccgcgac

SEQ ID NO: 105728 - RNA, 14 nt, Human adenovirus B (HAdV-B)
caucaauugacaug

SEQ ID NO: 105729 - RNA, 16 nt, Human adenovirus B (HAdV-B)
caggaugucacuccac

SEQ ID NO: 105730 - RNA, 22 nt, Human adenovirus B (HAdV-B)
caggaugucacuccacagcuuu

SEQ ID NO: 105731 - RNA, 21 nt, Human adenovirus B (HAdV-B)
caggacuuuuugaagcucuua

SEQ ID NO: 105732 - RNA, 18 nt, Human adenovirus B (HAdV-B)
caggagaaauauucacug

SEQ ID NO: 105733 - RNA, 22 nt, Human adenovirus B (HAdV-B)
caggagaaauauucacuggaac

SEQ ID NO: 105734 - RNA, 12 nt, Human adenovirus B (HAdV-B)
caggacuauaaa

SEQ ID NO: 105735 - RNA, 12 nt, Human adenovirus B (HAdV-B)
caggacaaguua

SEQ ID NO: 105736 - RNA, 20 nt, Human adenovirus B (HAdV-B)
caggacaggcgcuuagaaau

SEQ ID NO: 105737 - RNA, 18 nt, Human adenovirus B (HAdV-B)
caggaggauuaaagauua

SEQ ID NO: 105738 - RNA, 15 nt, Human adenovirus B (HAdV-B)
ccaccaucgaaacag

SEQ ID NO: 105739 - RNA, 20 nt, Human adenovirus B (HAdV-B)
ccaccaucgaaacagaagau

SEQ ID NO: 105740 - RNA, 19 nt, Human adenovirus B (HAdV-B)
aaaauguugaaaugggcau

SEQ ID NO: 105741 - RNA, 21 nt, Human adenovirus B (HAdV-B)
ccaccacuguauuacuuccuc

SEQ ID NO: 105742 - RNA, 12 nt, Human adenovirus B (HAdV-B)
aaaaucuuacau

SEQ ID NO: 105743 - RNA, 14 nt, Human adenovirus B (HAdV-B)
aaaaugcaaauucc

SEQ ID NO: 105744 - RNA, 15 nt, Human adenovirus B (HAdV-B)
aaaaugcaaauucca

SEQ ID NO: 105745 - RNA, 13 nt, Human adenovirus B (HAdV-B)
aaaauagacucuc

SEQ ID NO: 105746 - RNA, 17 nt, Human adenovirus B (HAdV-B)
ccaaauuuaauaaugau

SEQ ID NO: 105747 - RNA, 22 nt, Human adenovirus B (HAdV-B)
ccaacaccuuaaucccagaaau

SEQ ID NO: 105748 - RNA, 16 nt, Human adenovirus B (HAdV-B)
ccaaaugacuaaugca

SEQ ID NO: 105749 - RNA, 13 nt, Human adenovirus B (HAdV-B)
ccaaauguuuaaa

SEQ ID NO: 105750 - RNA, 18 nt, Human adenovirus B (HAdV-B)
ccaacagaaaaccagcag

SEQ ID NO: 105751 - RNA, 23 nt, Human adenovirus B (HAdV-B)
ccaacagaaaaccagcagcggca

SEQ ID NO: 105752 - RNA, 13 nt, Human adenovirus B (HAdV-B)
ccaacguugucca

SEQ ID NO: 105753 - RNA, 17 nt, Human adenovirus B (HAdV-B)
ccaacgacaaaaauuua

SEQ ID NO: 105754 - RNA, 22 nt, Human adenovirus B (HAdV-B)
ccacagcaaccccagacuguau

SEQ ID NO: 105755 - RNA, 23 nt, Human adenovirus B (HAdV-B)
ccacagcaaccccagacuguaua

SEQ ID NO: 105756 - RNA, 18 nt, Human adenovirus B (HAdV-B)
ccacagcuuucuggucag

SEQ ID NO: 105757 - RNA, 14 nt, Human adenovirus B (HAdV-B)
ccacagaugucaua

SEQ ID NO: 105758 - RNA, 16 nt, Human adenovirus B (HAdV-B)
ccaucgagugcaccua

SEQ ID NO: 105759 - RNA, 15 nt, Human adenovirus B (HAdV-B)
ccaucuacugcauuu

SEQ ID NO: 105760 - RNA, 19 nt, Human adenovirus B (HAdV-B)
ccaucuacugcauuuguaa

SEQ ID NO: 105761 - RNA, 20 nt, Human adenovirus B (HAdV-B)
ccaugcaggcuauacuacca

SEQ ID NO: 105762 - RNA, 15 nt, Human adenovirus B (HAdV-B)
ccauggcaugggaug

SEQ ID NO: 105763 - RNA, 20 nt, Human adenovirus B (HAdV-B)
ccauggccugcggaucccaa

SEQ ID NO: 105764 - RNA, 21 nt, Human adenovirus B (HAdV-B)
cccaaccagcgcuuccaagac

SEQ ID NO: 105765 - RNA, 22 nt, Human adenovirus B (HAdV-B)
ccacggcgacgcgugcaauggc

SEQ ID NO: 105766 - RNA, 16 nt, Human adenovirus B (HAdV-B)
ccacuaacaaccacag

SEQ ID NO: 105767 - RNA, 23 nt, Human adenovirus B (HAdV-B)
ccaccgaucucuaucauugagaa

SEQ ID NO: 105768 - RNA, 21 nt, Human adenovirus B (HAdV-B)
ccaccguugagcaccuugaaa

SEQ ID NO: 105769 - RNA, 16 nt, Human adenovirus B (HAdV-B)
ccagcgagcaagagcu

SEQ ID NO: 105770 - RNA, 21 nt, Human adenovirus B (HAdV-B)
ccagcaguggaaaaacuugag

SEQ ID NO: 105771 - RNA, 20 nt, Human adenovirus B (HAdV-B)
ccagcagcaccucacuuccc

SEQ ID NO: 105772 - RNA, 22 nt, Human adenovirus B (HAdV-B)
ccagcaaaaacaagauuggaau

SEQ ID NO: 105773 - RNA, 15 nt, Human adenovirus B (HAdV-B)
cgagagcgugaugca

SEQ ID NO: 105774 - RNA, 21 nt, Human adenovirus B (HAdV-B)
cgauccgaugacaauucucua

SEQ ID NO: 105775 - RNA, 17 nt, Human adenovirus B (HAdV-B)
cgaucacuagcugugua

SEQ ID NO: 105776 - RNA, 17 nt, Human adenovirus B (HAdV-B)
cgagugguacacugucu

SEQ ID NO: 105777 - RNA, 19 nt, Human adenovirus B (HAdV-B)
cgaaggcgcauugccagac

SEQ ID NO: 105778 - RNA, 20 nt, Human adenovirus B (HAdV-B)
ccuuuggacgcagcugcagc

SEQ ID NO: 105779 - RNA, 15 nt, Human adenovirus B (HAdV-B)
cgaaagugaaccaca

SEQ ID NO: 105780 - RNA, 15 nt, Human adenovirus B (HAdV-B)
cgaaagauggcguga

SEQ ID NO: 105781 - RNA, 22 nt, Human adenovirus B (HAdV-B)
ccuucacgcggcgcuacuugcu

SEQ ID NO: 105782 - RNA, 16 nt, Human adenovirus B (HAdV-B)
ccugggauauguuucu

SEQ ID NO: 105783 - RNA, 16 nt, Human adenovirus B (HAdV-B)
ccugggaaacguccag

SEQ ID NO: 105784 - RNA, 14 nt, Human adenovirus B (HAdV-B)
ccugcuugcaugag

SEQ ID NO: 105785 - RNA, 17 nt, Human adenovirus B (HAdV-B)
ccuugcuucacuuucuu

SEQ ID NO: 105786 - RNA, 21 nt, Human adenovirus B (HAdV-B)
ccuuggcuccgcgacacggca

SEQ ID NO: 105787 - RNA, 15 nt, Human adenovirus B (HAdV-B)
ccgcacaacuacuuu

SEQ ID NO: 105788 - RNA, 14 nt, Human adenovirus B (HAdV-B)
ccgcaggcagugau

SEQ ID NO: 105789 - RNA, 20 nt, Human adenovirus B (HAdV-B)
ccgcccuaguguaccaggaa

SEQ ID NO: 105790 - RNA, 13 nt, Human adenovirus B (HAdV-B)
cccacucaugaga

SEQ ID NO: 105791 - RNA, 19 nt, Human adenovirus B (HAdV-B)
cccaauaugcuuauuccaa

SEQ ID NO: 105792 - RNA, 19 nt, Human adenovirus B (HAdV-B)
cccaaugcacaugaucauc

SEQ ID NO: 105793 - RNA, 16 nt, Human adenovirus B (HAdV-B)
ccgagcuucuaugacu

SEQ ID NO: 105794 - RNA, 17 nt, Human adenovirus B (HAdV-B)
ccgagcuucuaugacug

SEQ ID NO: 105795 - RNA, 14 nt, Human adenovirus B (HAdV-B)
ccugauuuaugauu

SEQ ID NO: 105796 - RNA, 16 nt, Human adenovirus B (HAdV-B)
ccugauuauauuucca

SEQ ID NO: 105797 - RNA, 14 nt, Human adenovirus B (HAdV-B)
ccucuccugcuuga

SEQ ID NO: 105798 - RNA, 14 nt, Human adenovirus B (HAdV-B)
ccucugauacuugc

SEQ ID NO: 105799 - RNA, 21 nt, Human adenovirus B (HAdV-B)
ccucuuucuguuuacagacau

SEQ ID NO: 105800 - RNA, 23 nt, Human adenovirus B (HAdV-B)
ccguguccuuugggcgccacuac

SEQ ID NO: 105801 - RNA, 15 nt, Human adenovirus B (HAdV-B)
ccgugcgacugcugu

SEQ ID NO: 105802 - RNA, 17 nt, Human adenovirus B (HAdV-B)
ccgucaccuccacagcc

SEQ ID NO: 105803 - RNA, 14 nt, Human adenovirus B (HAdV-B)
ucuucccagaugac

SEQ ID NO: 105804 - RNA, 16 nt, Human adenovirus B (HAdV-B)
ucuucaccauacucau

SEQ ID NO: 105805 - RNA, 15 nt, Human adenovirus B (HAdV-B)
ucuguugaaauuuuc

SEQ ID NO: 105806 - RNA, 13 nt, Human adenovirus B (HAdV-B)
ucuguugcaccau

SEQ ID NO: 105807 - RNA, 15 nt, Human adenovirus B (HAdV-B)
ucuguuuacagacau

SEQ ID NO: 105808 - RNA, 21 nt, Human adenovirus B (HAdV-B)
ucugcaacggcagagaccuaa

SEQ ID NO: 105809 - RNA, 17 nt, Human adenovirus B (HAdV-B)
ucugcucgcucacaccu

SEQ ID NO: 105810 - RNA, 19 nt, Human adenovirus B (HAdV-B)
ucugcucgcucacaccuca

SEQ ID NO: 105811 - RNA, 17 nt, Human adenovirus B (HAdV-B)
ucucuugcuucuugcau

SEQ ID NO: 105812 - RNA, 20 nt, Human adenovirus B (HAdV-B)
ucugacgagaaucagaauga

SEQ ID NO: 105813 - RNA, 19 nt, Human adenovirus B (HAdV-B)
ucucaaccccagcugccua

SEQ ID NO: 105814 - RNA, 21 nt, Human adenovirus B (HAdV-B)
ucucacgcuugccagcacggu

SEQ ID NO: 105815 - RNA, 15 nt, Human adenovirus B (HAdV-B)
ucuaccacuccagca

SEQ ID NO: 105816 - RNA, 17 nt, Human adenovirus B (HAdV-B)
ucuagaaacuuuuacau

SEQ ID NO: 105817 - RNA, 16 nt, Human adenovirus B (HAdV-B)
ucuacuguggauggaa

SEQ ID NO: 105818 - RNA, 22 nt, Human adenovirus B (HAdV-B)
ucuacuucgaacuccccaagga

SEQ ID NO: 105819 - RNA, 14 nt, Human adenovirus B (HAdV-B)
ucggaguaccugag

SEQ ID NO: 105820 - RNA, 15 nt, Human adenovirus B (HAdV-B)
ucguaacguucucca

SEQ ID NO: 105821 - RNA, 20 nt, Human adenovirus B (HAdV-B)
ucguacgagagcgugaugca

SEQ ID NO: 105822 - RNA, 20 nt, Human adenovirus B (HAdV-B)
ucgucagaauguuaugggau

SEQ ID NO: 105823 - RNA, 13 nt, Human adenovirus B (HAdV-B)
ucgucuucucuga

SEQ ID NO: 105824 - RNA, 18 nt, Human adenovirus B (HAdV-B)
ucgugcgucgacgcugag

SEQ ID NO: 105825 - RNA, 16 nt, Human adenovirus B (HAdV-B)
ucgcugcugcaauugg

SEQ ID NO: 105826 - RNA, 20 nt, Human adenovirus B (HAdV-B)
ucgcuccgugcgacugcugu

SEQ ID NO: 105827 - RNA, 22 nt, Human adenovirus B (HAdV-B)
ucgcggcacuucuuagacucau

SEQ ID NO: 105828 - RNA, 16 nt, Human adenovirus B (HAdV-B)
uccuagcaaggacaac

SEQ ID NO: 105829 - RNA, 14 nt, Human adenovirus B (HAdV-B)
uccguguuuacuua

SEQ ID NO: 105830 - RNA, 15 nt, Human adenovirus B (HAdV-B)
ugaaaucacaauuag

SEQ ID NO: 105831 - RNA, 23 nt, Human adenovirus B (HAdV-B)
ugaaaugugcgaucuggccaugu

SEQ ID NO: 105832 - RNA, 13 nt, Human adenovirus B (HAdV-B)
ugaaauuacacac

SEQ ID NO: 105833 - RNA, 16 nt, Human adenovirus B (HAdV-B)
ugaaauuaugugcauu

SEQ ID NO: 105834 - RNA, 15 nt, Human adenovirus B (HAdV-B)
ugaaacuguuuggaa

SEQ ID NO: 105835 - RNA, 16 nt, Human adenovirus B (HAdV-B)
ugaaacccgagcuucu

SEQ ID NO: 105836 - RNA, 21 nt, Human adenovirus B (HAdV-B)
ugaaacccgagcuucuaugac

SEQ ID NO: 105837 - RNA, 11 nt, Human adenovirus B (HAdV-B)
ugaacuuuccg

SEQ ID NO: 105838 - RNA, 17 nt, Human adenovirus B (HAdV-B)
ugaacuguggaacagac

SEQ ID NO: 105839 - RNA, 18 nt, Human adenovirus B (HAdV-B)
ucuugcuuguuuuacuuu

SEQ ID NO: 105840 - RNA, 15 nt, Human adenovirus B (HAdV-B)
ucuugcgggugggcu

SEQ ID NO: 105841 - RNA, 11 nt, Human adenovirus B (HAdV-B)
ucuugcuacca

SEQ ID NO: 105842 - RNA, 18 nt, Human adenovirus B (HAdV-B)
ucuugaaaucacaauuag

SEQ ID NO: 105843 - RNA, 18 nt, Human adenovirus B (HAdV-B)
ucuuccuuguucugccag

SEQ ID NO: 105844 - RNA, 14 nt, Human adenovirus B (HAdV-B)
ugaaacaccaucag

SEQ ID NO: 105845 - RNA, 16 nt, Human adenovirus B (HAdV-B)
ugaaaaucaauucaca

SEQ ID NO: 105846 - RNA, 16 nt, Human adenovirus B (HAdV-B)
ugaaaauuaucuggga

SEQ ID NO: 105847 - RNA, 16 nt, Human adenovirus B (HAdV-B)
ugaccacgguggugca

SEQ ID NO: 105848 - RNA, 19 nt, Human adenovirus B (HAdV-B)
ugacaauggaugguuuaca

SEQ ID NO: 105849 - RNA, 14 nt, Human adenovirus B (HAdV-B)
ugacagauauguca

SEQ ID NO: 105850 - RNA, 16 nt, Human adenovirus B (HAdV-B)
ugacagcaaaugacaa

SEQ ID NO: 105851 - RNA, 17 nt, Human adenovirus B (HAdV-B)
ugacagcaaaugacaaa

SEQ ID NO: 105852 - RNA, 18 nt, Human adenovirus B (HAdV-B)
ugacagcaaaugacaaag

SEQ ID NO: 105853 - RNA, 19 nt, Human adenovirus B (HAdV-B)
ugaagcucuuaauuugggc

SEQ ID NO: 105854 - RNA, 22 nt, Human adenovirus B (HAdV-B)
ugaagcucuuaauuugggccau

SEQ ID NO: 105855 - RNA, 12 nt, Human adenovirus B (HAdV-B)
ugaaggaugaaa

SEQ ID NO: 105856 - RNA, 15 nt, Human adenovirus B (HAdV-B)
ugacaaagugggcau

SEQ ID NO: 105857 - RNA, 17 nt, Human adenovirus B (HAdV-B)
ugacaaagugggcauaa

SEQ ID NO: 105858 - RNA, 16 nt, Human adenovirus B (HAdV-B)
ugaauuaagacucucc

SEQ ID NO: 105859 - RNA, 17 nt, Human adenovirus B (HAdV-B)
ugaauucgggaaucacc

SEQ ID NO: 105860 - RNA, 14 nt, Human adenovirus B (HAdV-B)
ucauguugcgcuuc

SEQ ID NO: 105861 - RNA, 13 nt, Human adenovirus B (HAdV-B)
ucauugaguucau

SEQ ID NO: 105862 - RNA, 15 nt, Human adenovirus B (HAdV-B)
ucauuugugcauuua

SEQ ID NO: 105863 - RNA, 22 nt, Human adenovirus B (HAdV-B)
ucagugauagauaaaaauccau

SEQ ID NO: 105864 - RNA, 17 nt, Human adenovirus B (HAdV-B)
ucaguacgauaccacca

SEQ ID NO: 105865 - RNA, 19 nt, Human adenovirus B (HAdV-B)
ucaguacgauaccaccagg

SEQ ID NO: 105866 - RNA, 22 nt, Human adenovirus B (HAdV-B)
ucauaacaaggucgcagugcau

SEQ ID NO: 105867 - RNA, 15 nt, Human adenovirus B (HAdV-B)
uccgcaagcaauugc

SEQ ID NO: 105868 - RNA, 22 nt, Human adenovirus B (HAdV-B)
ucccuacuaauacuacuuucaa

SEQ ID NO: 105869 - RNA, 21 nt, Human adenovirus B (HAdV-B)
uccccuacaaaacaugcaaca

SEQ ID NO: 105870 - RNA, 22 nt, Human adenovirus B (HAdV-B)
uccccuacaaaacaugcaacau

SEQ ID NO: 105871 - RNA, 19 nt, Human adenovirus B (HAdV-B)
uccccugcucuuguucccg

SEQ ID NO: 105872 - RNA, 18 nt, Human adenovirus B (HAdV-B)
ucccgaacccaaccagcg

SEQ ID NO: 105873 - RNA, 23 nt, Human adenovirus B (HAdV-B)
uccauugcuuauugcuugugcgc

SEQ ID NO: 105874 - RNA, 22 nt, Human adenovirus B (HAdV-B)
uccagaagcauuuucccuacua

SEQ ID NO: 105875 - RNA, 21 nt, Human adenovirus B (HAdV-B)
uccauggagguuugggccauu

SEQ ID NO: 105876 - RNA, 13 nt, Human adenovirus B (HAdV-B)
uccacuaccacau

SEQ ID NO: 105877 - RNA, 15 nt, Human adenovirus B (HAdV-B)
uccaaggucuuccua

SEQ ID NO: 105878 - RNA, 20 nt, Human adenovirus B (HAdV-B)
uccaacuuauagacuggauc

SEQ ID NO: 105879 - RNA, 17 nt, Human adenovirus B (HAdV-B)
ucaagugauucacgguc

SEQ ID NO: 105880 - RNA, 23 nt, Human adenovirus B (HAdV-B)
ucaaccccauaguuaucacccag

SEQ ID NO: 105881 - RNA, 16 nt, Human adenovirus B (HAdV-B)
ucaagguggucauguc

SEQ ID NO: 105882 - RNA, 15 nt, Human adenovirus B (HAdV-B)
ucacaccucacugua

SEQ ID NO: 105883 - RNA, 16 nt, Human adenovirus B (HAdV-B)
ucaccuuuccuacuca

SEQ ID NO: 105884 - RNA, 18 nt, Human adenovirus B (HAdV-B)
ucacuagcuguguaguaa

SEQ ID NO: 105885 - RNA, 16 nt, Human adenovirus B (HAdV-B)
ucacuacaagaacuuc

SEQ ID NO: 105886 - RNA, 13 nt, Human adenovirus B (HAdV-B)
ucagguucacuuu

SEQ ID NO: 105887 - RNA, 16 nt, Human adenovirus B (HAdV-B)
ucagguucacuuuaaa

SEQ ID NO: 105888 - RNA, 16 nt, Human adenovirus B (HAdV-B)
ucagcauugucacugc

SEQ ID NO: 105889 - RNA, 20 nt, Human adenovirus B (HAdV-B)
ucacugaccccagauuggcu

SEQ ID NO: 105890 - RNA, 20 nt, Human adenovirus B (HAdV-B)
uauugcuugugcgcuugccu

SEQ ID NO: 105891 - RNA, 13 nt, Human adenovirus B (HAdV-B)
uauugcuuuuugg

SEQ ID NO: 105892 - RNA, 14 nt, Human adenovirus B (HAdV-B)
uauugcaggagaaa

SEQ ID NO: 105893 - RNA, 14 nt, Human adenovirus B (HAdV-B)
uauugcauuugcau

SEQ ID NO: 105894 - RNA, 21 nt, Human adenovirus B (HAdV-B)
uauucggaacuggcaccucag

SEQ ID NO: 105895 - RNA, 15 nt, Human adenovirus B (HAdV-B)
uauaaaaguaguuua

SEQ ID NO: 105896 - RNA, 13 nt, Human adenovirus B (HAdV-B)
gugacagugcaau

SEQ ID NO: 105897 - RNA, 15 nt, Human adenovirus B (HAdV-B)
gugaaggaacaugca

SEQ ID NO: 105898 - RNA, 13 nt, Human adenovirus B (HAdV-B)
gugggaucugcaa

SEQ ID NO: 105899 - RNA, 16 nt, Human adenovirus B (HAdV-B)
gugucuaguauaauga

SEQ ID NO: 105900 - RNA, 20 nt, Human adenovirus B (HAdV-B)
guguggauuggauuuaccac

SEQ ID NO: 105901 - RNA, 14 nt, Human adenovirus B (HAdV-B)
gugugguuagcuca

SEQ ID NO: 105902 - RNA, 18 nt, Human adenovirus B (HAdV-B)
guguucaauaaacaucac

SEQ ID NO: 105903 - RNA, 22 nt, Human adenovirus B (HAdV-B)
guuagcucauaggagcuggcuu

SEQ ID NO: 105904 - RNA, 21 nt, Human adenovirus B (HAdV-B)
gucgcuccgugcgacugcugu

SEQ ID NO: 105905 - RNA, 13 nt, Human adenovirus B (HAdV-B)
gucuauaucuaau

SEQ ID NO: 105906 - RNA, 13 nt, Human adenovirus B (HAdV-B)
gucucaaccccag

SEQ ID NO: 105907 - RNA, 23 nt, Human adenovirus B (HAdV-B)
guacaccggauugcagcacugaa

SEQ ID NO: 105908 - RNA, 12 nt, Human adenovirus B (HAdV-B)
guaccaucugaa

SEQ ID NO: 105909 - RNA, 16 nt, Human adenovirus B (HAdV-B)
guccuggccaucguga

SEQ ID NO: 105910 - RNA, 15 nt, Human adenovirus B (HAdV-B)
uaaacaucacuuuau

SEQ ID NO: 105911 - RNA, 20 nt, Human adenovirus B (HAdV-B)
uaaacaguauaagauuacua

SEQ ID NO: 105912 - RNA, 16 nt, Human adenovirus B (HAdV-B)
uaaaaacauacgggaa

SEQ ID NO: 105913 - RNA, 23 nt, Human adenovirus B (HAdV-B)
uaaaaauccaucgggauagucuu

SEQ ID NO: 105914 - RNA, 16 nt, Human adenovirus B (HAdV-B)
uaaaacaagccaagau

SEQ ID NO: 105915 - RNA, 15 nt, Human adenovirus B (HAdV-B)
uaaagaccagaacuu

SEQ ID NO: 105916 - RNA, 13 nt, Human adenovirus B (HAdV-B)
guuuuagauucca

SEQ ID NO: 105917 - RNA, 16 nt, Human adenovirus B (HAdV-B)
uaaaaaaucacuuacu

SEQ ID NO: 105918 - RNA, 17 nt, Human adenovirus B (HAdV-B)
guuguuuggcacuccag

SEQ ID NO: 105919 - RNA, 17 nt, Human adenovirus B (HAdV-B)
guuuaaccccacuaaca

SEQ ID NO: 105920 - RNA, 13 nt, Human adenovirus B (HAdV-B)
guuggacugugaa

SEQ ID NO: 105921 - RNA, 16 nt, Human adenovirus B (HAdV-B)
guuaucacccagcaaa

SEQ ID NO: 105922 - RNA, 22 nt, Human adenovirus B (HAdV-B)
uagcuccauugaagggauucau

SEQ ID NO: 105923 - RNA, 22 nt, Human adenovirus B (HAdV-B)
uagcuuugaggccugauaaaca

SEQ ID NO: 105924 - RNA, 14 nt, Human adenovirus B (HAdV-B)
uaggaauucuugcg

SEQ ID NO: 105925 - RNA, 21 nt, Human adenovirus B (HAdV-B)
uaggacauaauuacacucuca

SEQ ID NO: 105926 - RNA, 20 nt, Human adenovirus B (HAdV-B)
uaggacccccaaucacuuca

SEQ ID NO: 105927 - RNA, 19 nt, Human adenovirus B (HAdV-B)
uaggagcauuugcuuccua

SEQ ID NO: 105928 - RNA, 20 nt, Human adenovirus B (HAdV-B)
uaggcugauugccacagaua

SEQ ID NO: 105929 - RNA, 13 nt, Human adenovirus B (HAdV-B)
uaguuacuucaac

SEQ ID NO: 105930 - RNA, 21 nt, Human adenovirus B (HAdV-B)
uagucauauaguucaugugau

SEQ ID NO: 105931 - RNA, 16 nt, Human adenovirus B (HAdV-B)
uaguaacaacacuuuc

SEQ ID NO: 105932 - RNA, 21 nt, Human adenovirus B (HAdV-B)
uaguacuccaccagaacaccu

SEQ ID NO: 105933 - RNA, 17 nt, Human adenovirus B (HAdV-B)
uagccacagcaacccca

SEQ ID NO: 105934 - RNA, 16 nt, Human adenovirus B (HAdV-B)
uagauaaaaauccauc

SEQ ID NO: 105935 - RNA, 21 nt, Human adenovirus B (HAdV-B)
uagauaaaaauccaucgggau

SEQ ID NO: 105936 - RNA, 18 nt, Human adenovirus B (HAdV-B)
uagauacaugggcauuag

SEQ ID NO: 105937 - RNA, 18 nt, Human adenovirus B (HAdV-B)
uagaccaccgaucucuau

SEQ ID NO: 105938 - RNA, 17 nt, Human adenovirus B (HAdV-B)
uagaccuacagagucuc

SEQ ID NO: 105939 - RNA, 20 nt, Human adenovirus B (HAdV-B)
uagacagcaaccccaggcca

SEQ ID NO: 105940 - RNA, 22 nt, Human adenovirus B (HAdV-B)
uagagauggaagacaucaauuu

SEQ ID NO: 105941 - RNA, 22 nt, Human adenovirus B (HAdV-B)
uagacucaucuaaaaccaugca

SEQ ID NO: 105942 - RNA, 10 nt, Human adenovirus B (HAdV-B)
uagacucucg

SEQ ID NO: 105943 - RNA, 14 nt, Human adenovirus B (HAdV-B)
uagacucucgccug

SEQ ID NO: 105944 - RNA, 17 nt, Human adenovirus B (HAdV-B)
uacuuucaaaaccggag

SEQ ID NO: 105945 - RNA, 19 nt, Human adenovirus B (HAdV-B)
uacuuuaaaggggauguca

SEQ ID NO: 105946 - RNA, 13 nt, Human adenovirus B (HAdV-B)
uacuucaaccuaa

SEQ ID NO: 105947 - RNA, 15 nt, Human adenovirus B (HAdV-B)
uacuucaaucuggga

SEQ ID NO: 105948 - RNA, 16 nt, Human adenovirus B (HAdV-B)
uacuucgaacucccca

SEQ ID NO: 105949 - RNA, 15 nt, Human adenovirus B (HAdV-B)
uaauagauacucaag

SEQ ID NO: 105950 - RNA, 13 nt, Human adenovirus B (HAdV-B)
uaaccauuaucaa

SEQ ID NO: 105951 - RNA, 20 nt, Human adenovirus B (HAdV-B)
uaaccauuaucaacgugaca

SEQ ID NO: 105952 - RNA, 13 nt, Human adenovirus B (HAdV-B)
uaacccauuccaa

SEQ ID NO: 105953 - RNA, 20 nt, Human adenovirus B (HAdV-B)
uaaucacccccgccccagaa

SEQ ID NO: 105954 - RNA, 13 nt, Human adenovirus B (HAdV-B)
uaaucugcaacaa

SEQ ID NO: 105955 - RNA, 14 nt, Human adenovirus B (HAdV-B)
uaaucugcaacaaa

SEQ ID NO: 105956 - RNA, 18 nt, Human adenovirus B (HAdV-B)
uaaucuguugcaccauaa

SEQ ID NO: 105957 - RNA, 21 nt, Human adenovirus B (HAdV-B)
uacaaaacaugcaacauccaa

SEQ ID NO: 105958 - RNA, 18 nt, Human adenovirus B (HAdV-B)
uaauggcaccaguagcca

SEQ ID NO: 105959 - RNA, 15 nt, Human adenovirus B (HAdV-B)
uaaugauugcuggaa

SEQ ID NO: 105960 - RNA, 16 nt, Human adenovirus B (HAdV-B)
uaaugauugcuggaau

SEQ ID NO: 105961 - RNA, 15 nt, Human adenovirus B (HAdV-B)
uacuaugacuaugca

SEQ ID NO: 105962 - RNA, 16 nt, Human adenovirus B (HAdV-B)
uacuaugacuaugcau

SEQ ID NO: 105963 - RNA, 19 nt, Human adenovirus B (HAdV-B)
uacuaugacuaugcauagu

SEQ ID NO: 105964 - RNA, 13 nt, Human adenovirus B (HAdV-B)
aacaagauuggaa

SEQ ID NO: 105965 - RNA, 12 nt, Human adenovirus B (HAdV-B)
uaccguggauga

SEQ ID NO: 105966 - RNA, 16 nt, Human adenovirus B (HAdV-B)
uacuaccgucaccucc

SEQ ID NO: 105967 - RNA, 13 nt, Human adenovirus B (HAdV-B)
uacuagucuugcu

SEQ ID NO: 105968 - RNA, 14 nt, Human adenovirus B (HAdV-B)
uacuagucuugcuu

SEQ ID NO: 105969 - RNA, 21 nt, Human adenovirus B (HAdV-B)
uaccaauauuuuugcuucuau

SEQ ID NO: 105970 - RNA, 20 nt, Human adenovirus B (HAdV-B)
ugcagcugucaugaguggaa

SEQ ID NO: 105971 - RNA, 23 nt, Human adenovirus B (HAdV-B)
ugcaggagaaauauucacuggaa

SEQ ID NO: 105972 - RNA, 18 nt, Human adenovirus B (HAdV-B)
ugcaggcuauacuaccaa

SEQ ID NO: 105973 - RNA, 14 nt, Human adenovirus B (HAdV-B)
ugacuuuaccccua

SEQ ID NO: 105974 - RNA, 12 nt, Human adenovirus B (HAdV-B)
ugacuucugcuc

SEQ ID NO: 105975 - RNA, 18 nt, Human adenovirus B (HAdV-B)
ugcagaaaaagauaaaca

SEQ ID NO: 105976 - RNA, 15 nt, Human adenovirus B (HAdV-B)
ugacgguuccauccg

SEQ ID NO: 105977 - RNA, 15 nt, Human adenovirus B (HAdV-B)
ugcgccuacaucuac

SEQ ID NO: 105978 - RNA, 20 nt, Human adenovirus B (HAdV-B)
ugcgcgcacgcucgacauca

SEQ ID NO: 105979 - RNA, 23 nt, Human adenovirus B (HAdV-B)
ugcgcgcuccaagcaagauguac

SEQ ID NO: 105980 - RNA, 20 nt, Human adenovirus B (HAdV-B)
ugcaucugcguauguagcau

SEQ ID NO: 105981 - RNA, 22 nt, Human adenovirus B (HAdV-B)
ugcaucugcguauguagcauag

SEQ ID NO: 105982 - RNA, 19 nt, Human adenovirus B (HAdV-B)
ugcaugcauuuaugucuau

SEQ ID NO: 105983 - RNA, 17 nt, Human adenovirus B (HAdV-B)
ugccaaaaaaacauuca

SEQ ID NO: 105984 - RNA, 14 nt, Human adenovirus B (HAdV-B)
ugccaaauauggca

SEQ ID NO: 105985 - RNA, 15 nt, Human adenovirus B (HAdV-B)
ugcauuugcauccca

SEQ ID NO: 105986 - RNA, 21 nt, Human adenovirus B (HAdV-B)
ugcauuuaauguuugcgcuac

SEQ ID NO: 105987 - RNA, 23 nt, Human adenovirus B (HAdV-B)
uggaacccacguucuaacaccug

SEQ ID NO: 105988 - RNA, 14 nt, Human adenovirus B (HAdV-B)
uggaacagcaguac

SEQ ID NO: 105989 - RNA, 12 nt, Human adenovirus B (HAdV-B)
uggacugugaaa

SEQ ID NO: 105990 - RNA, 15 nt, Human adenovirus B (HAdV-B)
uggacgggucuucca

SEQ ID NO: 105991 - RNA, 13 nt, Human adenovirus B (HAdV-B)
ugcuuagccagaa

SEQ ID NO: 105992 - RNA, 12 nt, Human adenovirus B (HAdV-B)
ugcuuacuggau

SEQ ID NO: 105993 - RNA, 21 nt, Human adenovirus B (HAdV-B)
ugcucagaaauuugcuaucau

SEQ ID NO: 105994 - RNA, 23 nt, Human adenovirus B (HAdV-B)
ugcucagaaauuugcuaucauca

SEQ ID NO: 105995 - RNA, 16 nt, Human adenovirus B (HAdV-B)
ugcucccaaugcacau

SEQ ID NO: 105996 - RNA, 23 nt, Human adenovirus B (HAdV-B)
ugcgcguggaggcuuugcuggaa

SEQ ID NO: 105997 - RNA, 18 nt, Human adenovirus B (HAdV-B)
ugcuagauggaacagcaa

SEQ ID NO: 105998 - RNA, 18 nt, Human adenovirus B (HAdV-B)
ugcuaccaaggaccgcug

SEQ ID NO: 105999 - RNA, 16 nt, Human adenovirus B (HAdV-B)
ugggaugggugcauuc

SEQ ID NO: 106000 - RNA, 16 nt, Human adenovirus B (HAdV-B)
ugggcauaagauucuu

SEQ ID NO: 106001 - RNA, 23 nt, Human adenovirus B (HAdV-B)
ugggcaugagguagaccuacaga

SEQ ID NO: 106002 - RNA, 19 nt, Human adenovirus B (HAdV-B)
ugggccaaaaggacaagua

SEQ ID NO: 106003 - RNA, 12 nt, Human adenovirus B (HAdV-B)
ugguacacuguc

SEQ ID NO: 106004 - RNA, 18 nt, Human adenovirus B (HAdV-B)
ugguuguacuugaacuau

SEQ ID NO: 106005 - RNA, 23 nt, Human adenovirus B (HAdV-B)
ugguuuuagauuccacauuccaa

SEQ ID NO: 106006 - RNA, 19 nt, Human adenovirus B (HAdV-B)
uggcccuuucgaugugugu

SEQ ID NO: 106007 - RNA, 20 nt, Human adenovirus B (HAdV-B)
uggaucacggucaucuggaa

SEQ ID NO: 106008 - RNA, 23 nt, Human adenovirus B (HAdV-B)
uggaguuaucaaccccaaauggg

SEQ ID NO: 106009 - RNA, 23 nt, Human adenovirus B (HAdV-B)
uggaguuuugauuacaacugaag

SEQ ID NO: 106010 - RNA, 21 nt, Human adenovirus B (HAdV-B)
uggaggcucccuuugugccuc

SEQ ID NO: 106011 - RNA, 16 nt, Human adenovirus B (HAdV-B)
uggagcaguaucugga

SEQ ID NO: 106012 - RNA, 22 nt, Human adenovirus B (HAdV-B)
ugggaaacguccagcaguggaa

SEQ ID NO: 106013 - RNA, 13 nt, Human adenovirus B (HAdV-B)
ugggaauggugca

SEQ ID NO: 106014 - RNA, 16 nt, Human adenovirus B (HAdV-B)
uggcucgcuacaacag

SEQ ID NO: 106015 - RNA, 14 nt, Human adenovirus B (HAdV-B)
uggcucucuugcuu

SEQ ID NO: 106016 - RNA, 21 nt, Human adenovirus B (HAdV-B)
uggcuaauuccacuuccucua

SEQ ID NO: 106017 - RNA, 19 nt, Human adenovirus B (HAdV-B)
uggcgguucccaauaugcu

SEQ ID NO: 106018 - RNA, 18 nt, Human adenovirus B (HAdV-B)
uggcgaaagauggcguga

SEQ ID NO: 106019 - RNA, 16 nt, Human adenovirus B (HAdV-B)
ugucacuccacagcuu

SEQ ID NO: 106020 - RNA, 18 nt, Human adenovirus B (HAdV-B)
ugucaaauuuuagcuccu

SEQ ID NO: 106021 - RNA, 19 nt, Human adenovirus B (HAdV-B)
ugucuugcagcugucauga

SEQ ID NO: 106022 - RNA, 14 nt, Human adenovirus B (HAdV-B)
uguuguuuggcacu

SEQ ID NO: 106023 - RNA, 19 nt, Human adenovirus B (HAdV-B)
uguuuacaaaccgguugag

SEQ ID NO: 106024 - RNA, 15 nt, Human adenovirus B (HAdV-B)
uuaaggggacugccc

SEQ ID NO: 106025 - RNA, 18 nt, Human adenovirus B (HAdV-B)
uuaaggggggagucuuca

SEQ ID NO: 106026 - RNA, 19 nt, Human adenovirus B (HAdV-B)
uuaauaaugauugcuggaa

SEQ ID NO: 106027 - RNA, 20 nt, Human adenovirus B (HAdV-B)
uuaaacauuuggauaccauu

SEQ ID NO: 106028 - RNA, 22 nt, Human adenovirus B (HAdV-B)
uuaaagaagaacuuagagccaa

SEQ ID NO: 106029 - RNA, 18 nt, Human adenovirus B (HAdV-B)
uuaaagaccagaacuucc

SEQ ID NO: 106030 - RNA, 21 nt, Human adenovirus B (HAdV-B)
uuaugucuauguugugccacu

SEQ ID NO: 106031 - RNA, 13 nt, Human adenovirus B (HAdV-B)
uuauucuuugcua

SEQ ID NO: 106032 - RNA, 11 nt, Human adenovirus B (HAdV-B)
uuauugaacac

SEQ ID NO: 106033 - RNA, 16 nt, Human adenovirus B (HAdV-B)
uuagcaaaguuuacag

SEQ ID NO: 106034 - RNA, 21 nt, Human adenovirus B (HAdV-B)
uuagagccaagggcaugucaa

SEQ ID NO: 106035 - RNA, 19 nt, Human adenovirus B (HAdV-B)
uuacccaguugaaaaccac

SEQ ID NO: 106036 - RNA, 14 nt, Human adenovirus B (HAdV-B)
uuacaucucucaua

SEQ ID NO: 106037 - RNA, 23 nt, Human adenovirus B (HAdV-B)
uuacaugagucauuauugaacau

SEQ ID NO: 106038 - RNA, 16 nt, Human adenovirus B (HAdV-B)
uucuaacaccugcuac

SEQ ID NO: 106039 - RNA, 16 nt, Human adenovirus B (HAdV-B)
uucuacccaacauccu

SEQ ID NO: 106040 - RNA, 13 nt, Human adenovirus B (HAdV-B)
uucugcaagagcu

SEQ ID NO: 106041 - RNA, 12 nt, Human adenovirus B (HAdV-B)
uucuuacuuuaa

SEQ ID NO: 106042 - RNA, 16 nt, Human adenovirus B (HAdV-B)
uucucugauguaguaa

SEQ ID NO: 106043 - RNA, 16 nt, Human adenovirus B (HAdV-B)
uuccauaguaacccau

SEQ ID NO: 106044 - RNA, 20 nt, Human adenovirus B (HAdV-B)
uuccagcguaauacagcggu

SEQ ID NO: 106045 - RNA, 15 nt, Human adenovirus B (HAdV-B)
uuccaauccaaccuu

SEQ ID NO: 106046 - RNA, 21 nt, Human adenovirus B (HAdV-B)
uuccaauuaucgcugcugcaa

SEQ ID NO: 106047 - RNA, 11 nt, Human adenovirus B (HAdV-B)
uucccacugaa

SEQ ID NO: 106048 - RNA, 22 nt, Human adenovirus B (HAdV-B)
uuccauccacaguagaucccau

SEQ ID NO: 106049 - RNA, 18 nt, Human adenovirus B (HAdV-B)
uuccaucgagugcaccua

SEQ ID NO: 106050 - RNA, 13 nt, Human adenovirus B (HAdV-B)
uuccaucuacugc

SEQ ID NO: 106051 - RNA, 23 nt, Human adenovirus B (HAdV-B)
uucccucuccucuccugcuugaa

SEQ ID NO: 106052 - RNA, 22 nt, Human adenovirus B (HAdV-B)
uucaccuuuggacgcagcugca

SEQ ID NO: 106053 - RNA, 20 nt, Human adenovirus B (HAdV-B)
uucaggccucgcaacgacau

SEQ ID NO: 106054 - RNA, 12 nt, Human adenovirus B (HAdV-B)
uucauucucaag

SEQ ID NO: 106055 - RNA, 20 nt, Human adenovirus B (HAdV-B)
uucauccuuggcuccgcgac

SEQ ID NO: 106056 - RNA, 22 nt, Human adenovirus B (HAdV-B)
aaucucaauugcucagaaauuu

SEQ ID NO: 106057 - RNA, 17 nt, Human adenovirus B (HAdV-B)
aaucugcaacaaaacaa

SEQ ID NO: 106058 - RNA, 23 nt, Human adenovirus B (HAdV-B)
aaucugcaacaaaacaaaaccaa

SEQ ID NO: 106059 - RNA, 22 nt, Human adenovirus B (HAdV-B)
aaugcagagccuugauacaugu

SEQ ID NO: 106060 - RNA, 14 nt, Human adenovirus B (HAdV-B)
aaucuuacauugau

SEQ ID NO: 106061 - RNA, 22 nt, Human adenovirus B (HAdV-B)
aaucuucaugucuuucuuccca

SEQ ID NO: 106062 - RNA, 22 nt, Human adenovirus B (HAdV-B)
aaugagucgcagacguccugaa

SEQ ID NO: 106063 - RNA, 22 nt, Human adenovirus B (HAdV-B)
aaugcuuguuacauaucuggaa

SEQ ID NO: 106064 - RNA, 21 nt, Human adenovirus B (HAdV-B)
aaugcucccaaugcacaugau

SEQ ID NO: 106065 - RNA, 12 nt, Human adenovirus B (HAdV-B)
aauugcucagaa

SEQ ID NO: 106066 - RNA, 21 nt, Human adenovirus B (HAdV-B)
aauugauguugccauucucaa

SEQ ID NO: 106067 - RNA, 10 nt, Human adenovirus B (HAdV-B)
aauuggcucc

SEQ ID NO: 106068 - RNA, 21 nt, Human adenovirus B (HAdV-B)
aauuggguucuucauugucau

SEQ ID NO: 106069 - RNA, 22 nt, Human adenovirus B (HAdV-B)
aauuaugagaagaugcaugcau

SEQ ID NO: 106070 - RNA, 22 nt, Human adenovirus B (HAdV-B)
aauuaugccaagauagcuuuga

SEQ ID NO: 106071 - RNA, 21 nt, Human adenovirus B (HAdV-B)
aauguuuagauacaugggcau

SEQ ID NO: 106072 - RNA, 17 nt, Human adenovirus B (HAdV-B)
aauguugaaaugggcau

SEQ ID NO: 106073 - RNA, 20 nt, Human adenovirus B (HAdV-B)
aauaaaaaaaaaaaaauaca

SEQ ID NO: 106074 - RNA, 22 nt, Human adenovirus B (HAdV-B)
aaguuguguucguggucuuccu

SEQ ID NO: 106075 - RNA, 14 nt, Human adenovirus B (HAdV-B)
aauacaauuuccaa

SEQ ID NO: 106076 - RNA, 14 nt, Human adenovirus B (HAdV-B)
aauacacaacaagu

SEQ ID NO: 106077 - RNA, 13 nt, Human adenovirus B (HAdV-B)
aauacuacuuuca

SEQ ID NO: 106078 - RNA, 22 nt, Human adenovirus B (HAdV-B)
aauacuacuuucaaaaccggag

SEQ ID NO: 106079 - RNA, 13 nt, Human adenovirus B (HAdV-B)
aauaccuuaucca

SEQ ID NO: 106080 - RNA, 22 nt, Human adenovirus B (HAdV-B)
aauauccggaaugcuuguuaca

SEQ ID NO: 106081 - RNA, 15 nt, Human adenovirus B (HAdV-B)
aaucagcaggguuca

SEQ ID NO: 106082 - RNA, 23 nt, Human adenovirus B (HAdV-B)
aauaugcauguaagggaaaugau

SEQ ID NO: 106083 - RNA, 12 nt, Human adenovirus B (HAdV-B)
aauauguuaacu

SEQ ID NO: 106084 - RNA, 17 nt, Human adenovirus B (HAdV-B)
aauauguuaacuguuca

SEQ ID NO: 106085 - RNA, 16 nt, Human adenovirus B (HAdV-B)
aagcguugauuacuuu

SEQ ID NO: 106086 - RNA, 18 nt, Human adenovirus B (HAdV-B)
aagcguuccuaugaugag

SEQ ID NO: 106087 - RNA, 17 nt, Human adenovirus B (HAdV-B)
aagaagcaagagagcca

SEQ ID NO: 106088 - RNA, 18 nt, Human adenovirus B (HAdV-B)
aagacaauaaguguucca

SEQ ID NO: 106089 - RNA, 16 nt, Human adenovirus B (HAdV-B)
aaguagcauaggucag

SEQ ID NO: 106090 - RNA, 12 nt, Human adenovirus B (HAdV-B)
aaguaaugcaga

SEQ ID NO: 106091 - RNA, 19 nt, Human adenovirus B (HAdV-B)
aaggcaaaauagacucucg

SEQ ID NO: 106092 - RNA, 21 nt, Human adenovirus B (HAdV-B)
aacccuucuacccugacucag

SEQ ID NO: 106093 - RNA, 15 nt, Human adenovirus B (HAdV-B)
aacccggauuuuaca

SEQ ID NO: 106094 - RNA, 12 nt, Human adenovirus B (HAdV-B)
aaccccagcugc

SEQ ID NO: 106095 - RNA, 17 nt, Human adenovirus B (HAdV-B)
aaccccagcugccuaua

SEQ ID NO: 106096 - RNA, 21 nt, Human adenovirus B (HAdV-B)
aaccacaacccccacuacucc

SEQ ID NO: 106097 - RNA, 15 nt, Human adenovirus B (HAdV-B)
aaccagcgcuuccaa

SEQ ID NO: 106098 - RNA, 21 nt, Human adenovirus B (HAdV-B)
uuuuggaaccggguucugcca

SEQ ID NO: 106099 - RNA, 11 nt, Human adenovirus B (HAdV-B)
aacagcaguac

SEQ ID NO: 106100 - RNA, 17 nt, Human adenovirus B (HAdV-B)
uuuugauuacaacugaa

SEQ ID NO: 106101 - RNA, 19 nt, Human adenovirus B (HAdV-B)
uuuugcagacuaauucaaa

SEQ ID NO: 106102 - RNA, 19 nt, Human adenovirus B (HAdV-B)
aacuauaggcucaaacugc

SEQ ID NO: 106103 - RNA, 21 nt, Human adenovirus B (HAdV-B)
aacuuuuccucacuacaagaa

SEQ ID NO: 106104 - RNA, 13 nt, Human adenovirus B (HAdV-B)
aacuacucggauu

SEQ ID NO: 106105 - RNA, 15 nt, Human adenovirus B (HAdV-B)
aacuaucagaaugac

SEQ ID NO: 106106 - RNA, 19 nt, Human adenovirus B (HAdV-B)
aacuaucagaaugaccaca

SEQ ID NO: 106107 - RNA, 20 nt, Human adenovirus B (HAdV-B)
aaccgguugagcugggaugg

SEQ ID NO: 106108 - RNA, 24 nt, Human adenovirus B (HAdV-B)
aaccguggucauuucuugcuugcu

SEQ ID NO: 106109 - RNA, 12 nt, Human adenovirus B (HAdV-B)
aaccgccaguaa

SEQ ID NO: 106110 - RNA, 22 nt, Human adenovirus B (HAdV-B)
aaccugaguccgcagcgucuca

SEQ ID NO: 106111 - RNA, 14 nt, Human adenovirus B (HAdV-B)
aaccuuuagcauua

SEQ ID NO: 106112 - RNA, 14 nt, Human adenovirus B (HAdV-B)
uuuuacaaccagaa

SEQ ID NO: 106113 - RNA, 14 nt, Human adenovirus B (HAdV-B)
uuuuacaacuagaa

SEQ ID NO: 106114 - RNA, 15 nt, Human adenovirus B (HAdV-B)
uuugcuauacaaaau

SEQ ID NO: 106115 - RNA, 19 nt, Human adenovirus B (HAdV-B)
uuugugaauugauuuucaa

SEQ ID NO: 106116 - RNA, 21 nt, Human adenovirus B (HAdV-B)
uuuuaaggggggagucuucag

SEQ ID NO: 106117 - RNA, 14 nt, Human adenovirus B (HAdV-B)
uuucuucuucacca

SEQ ID NO: 106118 - RNA, 20 nt, Human adenovirus B (HAdV-B)
uuugaaaaucaauucacaaa

SEQ ID NO: 106119 - RNA, 21 nt, Human adenovirus B (HAdV-B)
uuuccuacucacaaacuagaa

SEQ ID NO: 106120 - RNA, 16 nt, Human adenovirus B (HAdV-B)
uuugccgugccgacag

SEQ ID NO: 106121 - RNA, 15 nt, Human adenovirus B (HAdV-B)
uuugaagcucuuaau

SEQ ID NO: 106122 - RNA, 20 nt, Human adenovirus B (HAdV-B)
uucuugaccacgguggugca

SEQ ID NO: 106123 - RNA, 14 nt, Human adenovirus B (HAdV-B)
uugucacacagggu

SEQ ID NO: 106124 - RNA, 20 nt, Human adenovirus B (HAdV-B)
uuguccugagucaggguaga

SEQ ID NO: 106125 - RNA, 15 nt, Human adenovirus B (HAdV-B)
uuuaucuaucacuga

SEQ ID NO: 106126 - RNA, 20 nt, Human adenovirus B (HAdV-B)
uuuccacuaccacauuccuu

SEQ ID NO: 106127 - RNA, 22 nt, Human adenovirus B (HAdV-B)
uuuaaguuuaaugagucgcaga

SEQ ID NO: 106128 - RNA, 20 nt, Human adenovirus B (HAdV-B)
uuuagauuccacauuccaaa

SEQ ID NO: 106129 - RNA, 20 nt, Human adenovirus B (HAdV-B)
uuccauaguaacccauucca

SEQ ID NO: 106130 - RNA, 19 nt, Human adenovirus B (HAdV-B)
gaaggguuauuagaggaag

SEQ ID NO: 106131 - RNA, 15 nt, Human adenovirus B (HAdV-B)
aaucagaaauucccc

SEQ ID NO: 106132 - RNA, 22 nt, Human adenovirus B (HAdV-B)
uggaguuaucaaccccaaaugg

SEQ ID NO: 106133 - RNA, 19 nt, Human adenovirus B (HAdV-B)
caggccgaaguccaaauga

SEQ ID NO: 106134 - RNA, 20 nt, Human adenovirus B (HAdV-B)
gagguucagaaagagggaag

SEQ ID NO: 106135 - RNA, 21 nt, Human adenovirus B (HAdV-B)
gauaggggcguuaagagggag

SEQ ID NO: 106136 - RNA, 17 nt, Human adenovirus B (HAdV-B)
aaaaugcaaauuccaac

SEQ ID NO: 106137 - RNA, 14 nt, Homo sapiens
uggggccaugccuc

SEQ ID NO: 106138 - RNA, 19 nt, Homo sapiens
auuuauggccgggcagggu

SEQ ID NO: 106139 - RNA, 14 nt, Homo sapiens
gcaggggaggggug

SEQ ID NO: 106140 - RNA, 13 nt, Homo sapiens
gguccuggugccc

SEQ ID NO: 106141 - RNA, 19 nt, Homo sapiens
cucugcgucgguccuggug

SEQ ID NO: 106142 - RNA, 20 nt, Homo sapiens
agcccaggggccggccagug

SEQ ID NO: 106143 - RNA, 16 nt, Homo sapiens
ccugacagggccagug

SEQ ID NO: 106144 - RNA, 13 nt, Homo sapiens
gggaggcagggga

SEQ ID NO: 106145 - RNA, 23 nt, Homo sapiens
ccacgggcccggguugggucacc

SEQ ID NO: 106146 - RNA, 16 nt, Homo sapiens
agagucgcugugccac

SEQ ID NO: 106147 - RNA, 16 nt, Homo sapiens
caccccgagggcugag

SEQ ID NO: 106148 - RNA, 15 nt, Homo sapiens
gugcggcggucccag

SEQ ID NO: 106149 - RNA, 21 nt, Homo sapiens
ucauuugacuaagagucucca

SEQ ID NO: 106150 - RNA, 23 nt, Homo sapiens
aggggugcggcggucccagcucc

SEQ ID NO: 106151 - RNA, 17 nt, Homo sapiens
acagggccagugcaguu

SEQ ID NO: 106152 - RNA, 13 nt, Homo sapiens
cuggcucccaugu

SEQ ID NO: 106153 - RNA, 16 nt, Homo sapiens
caugccuccucaggag

SEQ ID NO: 106154 - RNA, 21 nt, Homo sapiens
gccuggucccacgagggugcc

SEQ ID NO: 106155 - RNA, 14 nt, Homo sapiens
ugucaagagucgcu

SEQ ID NO: 106156 - RNA, 14 nt, Homo sapiens
ucgguccuggugcc

SEQ ID NO: 106157 - RNA, 22 nt, Homo sapiens
ggcuggagugugaggguccugc

SEQ ID NO: 106158 - RNA, 18 nt, Homo sapiens
gcccuggaugcccaggaa

SEQ ID NO: 106159 - RNA, 13 nt, Homo sapiens
ccacgagggugcc

SEQ ID NO: 106160 - RNA, 14 nt, Homo sapiens
gccuuaccaggaga

SEQ ID NO: 106161 - RNA, 15 nt, Homo sapiens
ggaccucgugccacc

SEQ ID NO: 106162 - RNA, 16 nt, Homo sapiens
ggucccacgagggugc

SEQ ID NO: 106163 - RNA, 14 nt, Homo sapiens
caggggaggggugc

SEQ ID NO: 106164 - RNA, 22 nt, Homo sapiens
aagcccaggggccggccagugg

SEQ ID NO: 106165 - RNA, 20 nt, Homo sapiens
agugcaguuugguguguccu

SEQ ID NO: 106166 - RNA, 21 nt, Homo sapiens
cccugacagggccagugcagu

SEQ ID NO: 106167 - RNA, 21 nt, Homo sapiens
uguccccugacagggccagug

SEQ ID NO: 106168 - RNA, 18 nt, Homo sapiens
caggggccggccaguggc

SEQ ID NO: 106169 - RNA, 19 nt, Homo sapiens
ugcaggaccucgugccacc

SEQ ID NO: 106170 - RNA, 13 nt, Homo sapiens
gagccugguccca

SEQ ID NO: 106171 - RNA, 23 nt, Homo sapiens
guguccccugacagggccagugc

SEQ ID NO: 106172 - RNA, 18 nt, Homo sapiens
gcucugcgucgguccugg

SEQ ID NO: 106173 - RNA, 17 nt, Homo sapiens
uccccugacagggccag

SEQ ID NO: 106174 - RNA, 15 nt, Homo sapiens
gcgucgguccuggug

SEQ ID NO: 106175 - RNA, 14 nt, Homo sapiens
ugacagggccagug

SEQ ID NO: 106176 - RNA, 15 nt, Homo sapiens
ugacuaagagucucc

SEQ ID NO: 106177 - RNA, 16 nt, Homo sapiens
ccugcaggaccucgug

SEQ ID NO: 106178 - RNA, 15 nt, Homo sapiens
aucauuugacuaaga

SEQ ID NO: 106179 - RNA, 15 nt, Homo sapiens
ucccacgagggugcc

SEQ ID NO: 106180 - RNA, 14 nt, Homo sapiens
gggccggccagugg

SEQ ID NO: 106181 - RNA, 12 nt, Homo sapiens
acagggccagug

SEQ ID NO: 106182 - RNA, 18 nt, Homo sapiens
cccugacagggccagugc

SEQ ID NO: 106183 - RNA, 13 nt, Homo sapiens
ggaccucgugcca

SEQ ID NO: 106184 - RNA, 16 nt, Homo sapiens
cgucgguccuggugcc

SEQ ID NO: 106185 - RNA, 19 nt, Homo sapiens
cugcagccugcaggaccuc

SEQ ID NO: 106186 - RNA, 19 nt, Homo sapiens
caguuugguguguccuccg

SEQ ID NO: 106187 - RNA, 20 nt, Homo sapiens
ccugacagggccagugcagu

SEQ ID NO: 106188 - RNA, 18 nt, Homo sapiens
cccaggggccggccagug

SEQ ID NO: 106189 - RNA, 13 nt, Homo sapiens
cggguugggucac

SEQ ID NO: 106190 - RNA, 12 nt, Homo sapiens
gggccaugccuc

SEQ ID NO: 106191 - RNA, 16 nt, Homo sapiens
gagucgcugugccaca

SEQ ID NO: 106192 - RNA, 16 nt, Homo sapiens
aggggccggccagugg

SEQ ID NO: 106193 - RNA, 22 nt, Homo sapiens
ccccaggagggaggcaggggag

SEQ ID NO: 106194 - RNA, 16 nt, Homo sapiens
acaggaccccagcucu

SEQ ID NO: 106195 - RNA, 19 nt, Homo sapiens
cugacagggccagugcagu

SEQ ID NO: 106196 - RNA, 18 nt, Homo sapiens
gacagggccagugcaguu

SEQ ID NO: 106197 - RNA, 13 nt, Homo sapiens
accucgugccacc

SEQ ID NO: 106198 - RNA, 15 nt, Homo sapiens
cuggaugcccaggaa

SEQ ID NO: 106199 - RNA, 17 nt, Homo sapiens
agagucgcugugccaca

SEQ ID NO: 106200 - RNA, 21 nt, Homo sapiens
agggaggcaggggaggggugc

SEQ ID NO: 106201 - RNA, 16 nt, Homo sapiens
ccacgagggugccgug

SEQ ID NO: 106202 - RNA, 14 nt, Homo sapiens
augucaagagucgc

SEQ ID NO: 106203 - RNA, 22 nt, Homo sapiens
auugguuuuccaaucauuugac

SEQ ID NO: 106204 - RNA, 12 nt, Homo sapiens
ggccaguggccu

SEQ ID NO: 106205 - RNA, 17 nt, Homo sapiens
ccaggggccggccagug

SEQ ID NO: 106206 - RNA, 14 nt, Homo sapiens
guguggggccaugc

SEQ ID NO: 106207 - RNA, 19 nt, Homo sapiens
uguccccugacagggccag

SEQ ID NO: 106208 - RNA, 20 nt, Homo sapiens
uccccugacagggccagugc

SEQ ID NO: 106209 - RNA, 15 nt, Homo sapiens
ugacagggccagugc

SEQ ID NO: 106210 - RNA, 17 nt, Homo sapiens
auuugacuaagagucuc

SEQ ID NO: 106211 - RNA, 20 nt, Homo sapiens
gccgggcaggguguggggcc

SEQ ID NO: 106212 - RNA, 16 nt, Homo sapiens
uguccccugacagggc

SEQ ID NO: 106213 - RNA, 15 nt, Homo sapiens
ggccgggcagggugu

SEQ ID NO: 106214 - RNA, 22 nt, Homo sapiens
uccccugacagggccagugcag

SEQ ID NO: 106215 - RNA, 13 nt, Homo sapiens
gggccagugcagu

SEQ ID NO: 106216 - RNA, 13 nt, Homo sapiens
ucgcugugccaca

SEQ ID NO: 106217 - RNA, 17 nt, Homo sapiens
gccugcaggaccucgug

SEQ ID NO: 106218 - RNA, 21 nt, Homo sapiens
agccuggucccacgagggugc

SEQ ID NO: 106219 - RNA, 12 nt, Homo sapiens
cagggccagugc

SEQ ID NO: 106220 - RNA, 18 nt, Homo sapiens
cugagccuggucccacga

SEQ ID NO: 106221 - RNA, 18 nt, Homo sapiens
gccaugccuccucaggag

SEQ ID NO: 106222 - RNA, 17 nt, Homo sapiens
gcugagccuggucccac

SEQ ID NO: 106223 - RNA, 17 nt, Homo sapiens
ggcucccaugucaagag

SEQ ID NO: 106224 - RNA, 15 nt, Homo sapiens
cugacagggccagug

SEQ ID NO: 106225 - RNA, 13 nt, Homo sapiens
cccacgagggugc

SEQ ID NO: 106226 - RNA, 17 nt, Homo sapiens
gacagggccagugcagu

SEQ ID NO: 106227 - RNA, 14 nt, Homo sapiens
uggccgggcagggu

SEQ ID NO: 106228 - RNA, 23 nt, Homo sapiens
gguccugcagccugcaggaccuc

SEQ ID NO: 106229 - RNA, 19 nt, Homo sapiens
cccaggggccggccagugg

SEQ ID NO: 106230 - RNA, 24 nt, Homo sapiens
ggcucccaugucaagagucgcugu

SEQ ID NO: 106231 - RNA, 19 nt, Homo sapiens
gcccuggaugcccaggaau

SEQ ID NO: 106232 - RNA, 14 nt, Homo sapiens
gagucgcugugcca

SEQ ID NO: 106233 - RNA, 16 nt, Homo sapiens
cugacagggccagugc

SEQ ID NO: 106234 - RNA, 17 nt, Homo sapiens
cccacgagggugccgug

SEQ ID NO: 106235 - RNA, 21 nt, Homo sapiens
cgggcaggguguggggccaug

SEQ ID NO: 106236 - RNA, 15 nt, Homo sapiens
agucgcugugccaca

SEQ ID NO: 106237 - RNA, 23 nt, Homo sapiens
ggucaccagacggggcuggagug

SEQ ID NO: 106238 - RNA, 13 nt, Homo sapiens
ggugcccuggaug

SEQ ID NO: 106239 - RNA, 19 nt, Human adenovirus C
aaaaagaaguggcgcuccu

SEQ ID NO: 106240 - RNA, 12 nt, Human adenovirus C
aaaagagccguc

SEQ ID NO: 106241 - RNA, 17 nt, Human adenovirus C
aaaacuacgucaucucc

SEQ ID NO: 106242 - RNA, 17 nt, Human adenovirus C
aaaagaaagaugaugau

SEQ ID NO: 106243 - RNA, 15 nt, Human adenovirus C
aaaacaugcuaccuc

SEQ ID NO: 106244 - RNA, 13 nt, Human adenovirus C
aaaaaacucacca

SEQ ID NO: 106245 - RNA, 14 nt, Human adenovirus C
augucgcuguccag

SEQ ID NO: 106246 - RNA, 19 nt, Human adenovirus C
auguggcuuauuuguugcc

SEQ ID NO: 106247 - RNA, 21 nt, Human adenovirus C
auuacaagccccgaaagcuaa

SEQ ID NO: 106248 - RNA, 18 nt, Human adenovirus C
auguaucgaggacuugcu

SEQ ID NO: 106249 - RNA, 21 nt, Human adenovirus C
auguaucgaggacuugcuuaa

SEQ ID NO: 106250 - RNA, 19 nt, Human adenovirus C
auguacuaggagacacuuu

SEQ ID NO: 106251 - RNA, 12 nt, Human adenovirus C
auguaaguuuaa

SEQ ID NO: 106252 - RNA, 20 nt, Human adenovirus C
auggucgccccguccugccc

SEQ ID NO: 106253 - RNA, 20 nt, Human adenovirus C
aucuucauauuguugcagau

SEQ ID NO: 106254 - RNA, 17 nt, Human adenovirus C
augggcuccagcauuga

SEQ ID NO: 106255 - RNA, 14 nt, Human adenovirus C
auuuggucagggaa

SEQ ID NO: 106256 - RNA, 13 nt, Human adenovirus C
caaaagacauauu

SEQ ID NO: 106257 - RNA, 18 nt, Human adenovirus C
caaaagauaccucuuuua

SEQ ID NO: 106258 - RNA, 17 nt, Human adenovirus C
caaaacaaugacuacag

SEQ ID NO: 106259 - RNA, 22 nt, Human adenovirus C
auuagaaucuacuggggcuccu

SEQ ID NO: 106260 - RNA, 20 nt, Human adenovirus C
auuacuaccgucaucucuac

SEQ ID NO: 106261 - RNA, 18 nt, Human adenovirus C
auuauacccacaaccuuc

SEQ ID NO: 106262 - RNA, 13 nt, Human adenovirus C
caagacucugaca

SEQ ID NO: 106263 - RNA, 17 nt, Human adenovirus C
caagacugugggggcaa

SEQ ID NO: 106264 - RNA, 12 nt, Human adenovirus C
caagacuacuca

SEQ ID NO: 106265 - RNA, 16 nt, Human adenovirus C
caacucugguaucuca

SEQ ID NO: 106266 - RNA, 13 nt, Human adenovirus C
caagugucuugcu

SEQ ID NO: 106267 - RNA, 14 nt, Human adenovirus C
caaguugcaugugg

SEQ ID NO: 106268 - RNA, 17 nt, Human adenovirus C
caaguugcauguggaaa

SEQ ID NO: 106269 - RNA, 12 nt, Human adenovirus C
caagucagggac

SEQ ID NO: 106270 - RNA, 19 nt, Human adenovirus C
caagucagggacaugcuua

SEQ ID NO: 106271 - RNA, 18 nt, Human adenovirus C
caagucauuuuucauuca

SEQ ID NO: 106272 - RNA, 21 nt, Human adenovirus C
caagucauuuuucauucagua

SEQ ID NO: 106273 - RNA, 14 nt, Human adenovirus C
caagcaagugucuu

SEQ ID NO: 106274 - RNA, 16 nt, Human adenovirus C
caagagcaacaacagc

SEQ ID NO: 106275 - RNA, 16 nt, Human adenovirus C
cacacgguuuccuguc

SEQ ID NO: 106276 - RNA, 21 nt, Human adenovirus C
cacagaacccuaguauucaac

SEQ ID NO: 106277 - RNA, 18 nt, Human adenovirus C
caccauccgcaauacaga

SEQ ID NO: 106278 - RNA, 20 nt, Human adenovirus C
cacaucgaaguagauugcau

SEQ ID NO: 106279 - RNA, 24 nt, Human adenovirus C
cacaucgaaguagauugcauccca

SEQ ID NO: 106280 - RNA, 12 nt, Human adenovirus C
cacauagcuuau

SEQ ID NO: 106281 - RNA, 23 nt, Human adenovirus C
cacagcggcggcagcagcaggag

SEQ ID NO: 106282 - RNA, 19 nt, Human adenovirus C
cacaggguugcagcacugg

SEQ ID NO: 106283 - RNA, 14 nt, Human adenovirus C
cagaacgaccacag

SEQ ID NO: 106284 - RNA, 20 nt, Human adenovirus C
cacugcaaauuugaucaaac

SEQ ID NO: 106285 - RNA, 19 nt, Human adenovirus C
cacugauuaaaaacaaguu

SEQ ID NO: 106286 - RNA, 21 nt, Human adenovirus C
caccuggguucgacacgcggg

SEQ ID NO: 106287 - RNA, 20 nt, Human adenovirus C
caccuccuuuccuuccuccc

SEQ ID NO: 106288 - RNA, 20 nt, Human adenovirus C
aggccgaaguucagaugacu

SEQ ID NO: 106289 - RNA, 18 nt, Human adenovirus C
aggccgcauccccgcggc

SEQ ID NO: 106290 - RNA, 22 nt, Human adenovirus C
agggcagaaaccugcuggcgca

SEQ ID NO: 106291 - RNA, 16 nt, Human adenovirus C
agcugcaaacuuucuc

SEQ ID NO: 106292 - RNA, 19 nt, Human adenovirus C
agcugcaaacuuucuccaa

SEQ ID NO: 106293 - RNA, 17 nt, Human adenovirus C
agcugcagcucucuuaa

SEQ ID NO: 106294 - RNA, 23 nt, Human adenovirus C
aggaaucuaacuuuuagcuuaau

SEQ ID NO: 106295 - RNA, 15 nt, Human adenovirus C
agucgcagcugcuca

SEQ ID NO: 106296 - RNA, 18 nt, Human adenovirus C
agucagggacaugcuuaa

SEQ ID NO: 106297 - RNA, 12 nt, Human adenovirus C
agucacaauccc

SEQ ID NO: 106298 - RNA, 14 nt, Human adenovirus C
agguacggugauca

SEQ ID NO: 106299 - RNA, 15 nt, Human adenovirus C
agguacggugaucaa

SEQ ID NO: 106300 - RNA, 16 nt, Human adenovirus C
agguacggugaucaau

SEQ ID NO: 106301 - RNA, 14 nt, Human adenovirus C
aggggaagugcagg

SEQ ID NO: 106302 - RNA, 15 nt, Human adenovirus C
agguaucaccuggac

SEQ ID NO: 106303 - RNA, 21 nt, Human adenovirus C
aguacauuauuuuuacauguu

SEQ ID NO: 106304 - RNA, 22 nt, Human adenovirus C
agccagacggucaaggacaagc

SEQ ID NO: 106305 - RNA, 14 nt, Human adenovirus C
agccauugucaaag

SEQ ID NO: 106306 - RNA, 20 nt, Human adenovirus C
agcccaagagcaacaacagc

SEQ ID NO: 106307 - RNA, 16 nt, Human adenovirus C
agccacaaaugggacu

SEQ ID NO: 106308 - RNA, 19 nt, Human adenovirus C
agaugauccagucguagca

SEQ ID NO: 106309 - RNA, 16 nt, Human adenovirus C
agaucucuaauaccac

SEQ ID NO: 106310 - RNA, 18 nt, Human adenovirus C
agaucuggaaggugcuga

SEQ ID NO: 106311 - RNA, 14 nt, Human adenovirus C
agaucuguuuguca

SEQ ID NO: 106312 - RNA, 18 nt, Human adenovirus C
agcuaaagcgggucaaaa

SEQ ID NO: 106313 - RNA, 20 nt, Human adenovirus C
agcuauguccaagcgcaaaa

SEQ ID NO: 106314 - RNA, 20 nt, Human adenovirus C
agcuccagaccauggacagc

SEQ ID NO: 106315 - RNA, 21 nt, Human adenovirus C
agcucgcuuaaguucaugucg

SEQ ID NO: 106316 - RNA, 22 nt, Human adenovirus C
agcucggugaaguuuucacucc

SEQ ID NO: 106317 - RNA, 15 nt, Human adenovirus C
agcucauauuugaca

SEQ ID NO: 106318 - RNA, 18 nt, Human adenovirus C
agcgccugauuucugcca

SEQ ID NO: 106319 - RNA, 16 nt, Human adenovirus C
agcggcagcaacagca

SEQ ID NO: 106320 - RNA, 16 nt, Human adenovirus C
agcggggucccugugu

SEQ ID NO: 106321 - RNA, 17 nt, Human adenovirus C
agccugugaugcuggau

SEQ ID NO: 106322 - RNA, 23 nt, Human adenovirus C
agccuucagggcagaaaccugcu

SEQ ID NO: 106323 - RNA, 13 nt, Human adenovirus C
agcgccauugcuu

SEQ ID NO: 106324 - RNA, 13 nt, Human adenovirus C
aucaaaauccaaa

SEQ ID NO: 106325 - RNA, 13 nt, Human adenovirus C
auauggcuuccac

SEQ ID NO: 106326 - RNA, 20 nt, Human adenovirus C
auauuuccugcagauucacu

SEQ ID NO: 106327 - RNA, 14 nt, Human adenovirus C
aucaacaacagcug

SEQ ID NO: 106328 - RNA, 16 nt, Human adenovirus C
aucaacaacagcugcc

SEQ ID NO: 106329 - RNA, 15 nt, Human adenovirus C
aucugaacucaaagc

SEQ ID NO: 106330 - RNA, 22 nt, Human adenovirus C
aucucuaauaccacacaugguu

SEQ ID NO: 106331 - RNA, 22 nt, Human adenovirus C
auccguuacucugaguuggcac

SEQ ID NO: 106332 - RNA, 16 nt, Human adenovirus C
auccaccagaccacgg

SEQ ID NO: 106333 - RNA, 21 nt, Human adenovirus C
auccacagcggcggcagcagc

SEQ ID NO: 106334 - RNA, 17 nt, Human adenovirus C
auccaauucuagaucua

SEQ ID NO: 106335 - RNA, 15 nt, Human adenovirus C
auccaauugugccaa

SEQ ID NO: 106336 - RNA, 16 nt, Human adenovirus C
auccaauugugccaaa

SEQ ID NO: 106337 - RNA, 21 nt, Human adenovirus C
auccaauugugccaaaagagc

SEQ ID NO: 106338 - RNA, 11 nt, Human adenovirus C
auacacagggu

SEQ ID NO: 106339 - RNA, 18 nt, Human adenovirus C
auacuaggguucugugag

SEQ ID NO: 106340 - RNA, 19 nt, Human adenovirus C
auaaggugggggucucaug

SEQ ID NO: 106341 - RNA, 19 nt, Human adenovirus C
auaagguucaugguggggu

SEQ ID NO: 106342 - RNA, 12 nt, Human adenovirus C
auaauugcgcua

SEQ ID NO: 106343 - RNA, 23 nt, Human adenovirus C
auaauugcgcuaaugagcuugau

SEQ ID NO: 106344 - RNA, 15 nt, Human adenovirus C
auaaagggugagaua

SEQ ID NO: 106345 - RNA, 21 nt, Human adenovirus C
aguuugcgggcaggacggggc

SEQ ID NO: 106346 - RNA, 13 nt, Human adenovirus C
acaccacugcuac

SEQ ID NO: 106347 - RNA, 15 nt, Human adenovirus C
acacuuucaauaaag

SEQ ID NO: 106348 - RNA, 23 nt, Human adenovirus C
acacguugaaacauaacaugcaa

SEQ ID NO: 106349 - RNA, 21 nt, Human adenovirus C
acaggcggcuauuaccaccac

SEQ ID NO: 106350 - RNA, 18 nt, Human adenovirus C
acagcaacuuucuaacca

SEQ ID NO: 106351 - RNA, 18 nt, Human adenovirus C
acagauugagguacugaa

SEQ ID NO: 106352 - RNA, 12 nt, Human adenovirus C
acaucugcccua

SEQ ID NO: 106353 - RNA, 20 nt, Human adenovirus C
acaucuggacuuugggcucg

SEQ ID NO: 106354 - RNA, 20 nt, Human adenovirus C
acaucgaaguagauugcauc

SEQ ID NO: 106355 - RNA, 17 nt, Human adenovirus C
accaccgccgccggcau

SEQ ID NO: 106356 - RNA, 21 nt, Human adenovirus C
accacaccucguaauaaccuu

SEQ ID NO: 106357 - RNA, 21 nt, Human adenovirus C
accauccgcaauacagagaca

SEQ ID NO: 106358 - RNA, 22 nt, Human adenovirus C
accaucgcgcccacaacggacu

SEQ ID NO: 106359 - RNA, 17 nt, Human adenovirus C
acccggcuaugcgaggu

SEQ ID NO: 106360 - RNA, 19 nt, Human adenovirus C
acccgaauaaacuacauga

SEQ ID NO: 106361 - RNA, 17 nt, Human adenovirus C
acccgcaccuacaagcg

SEQ ID NO: 106362 - RNA, 17 nt, Human adenovirus C
accauggacagcuccca

SEQ ID NO: 106363 - RNA, 19 nt, Human adenovirus C
accauggagcacuuuuugc

SEQ ID NO: 106364 - RNA, 15 nt, Human adenovirus C
acccagugcgcgugc

SEQ ID NO: 106365 - RNA, 21 nt, Human adenovirus C
acccguguguaccuuguggac

SEQ ID NO: 106366 - RNA, 22 nt, Human adenovirus C
accugucgccgcgggagcucca

SEQ ID NO: 106367 - RNA, 23 nt, Human adenovirus C
acgaaguggccccccugcucagg

SEQ ID NO: 106368 - RNA, 19 nt, Human adenovirus C
accugcuggcgcagaucca

SEQ ID NO: 106369 - RNA, 18 nt, Human adenovirus C
accucuuuuacacuggug

SEQ ID NO: 106370 - RNA, 17 nt, Human adenovirus C
accugauuuccaggggc

SEQ ID NO: 106371 - RNA, 14 nt, Human adenovirus C
acgaggaccugcuu

SEQ ID NO: 106372 - RNA, 15 nt, Human adenovirus C
acguugaaacauaac

SEQ ID NO: 106373 - RNA, 13 nt, Human adenovirus C
acuaacaucugcc

SEQ ID NO: 106374 - RNA, 18 nt, Human adenovirus C
acuaacaucugcccuaaa

SEQ ID NO: 106375 - RNA, 19 nt, Human adenovirus C
acgccaccguuuuuaccca

SEQ ID NO: 106376 - RNA, 16 nt, Human adenovirus C
acuacgucaucuccag

SEQ ID NO: 106377 - RNA, 17 nt, Human adenovirus C
acuaggguucugugagu

SEQ ID NO: 106378 - RNA, 16 nt, Human adenovirus C
acuaggagacacuuuc

SEQ ID NO: 106379 - RNA, 17 nt, Human adenovirus C
acuaggagacacuuuca

SEQ ID NO: 106380 - RNA, 20 nt, Human adenovirus C
acuacaacuacuacacagag

SEQ ID NO: 106381 - RNA, 21 nt, Human adenovirus C
acugcuuggucaaacgcucaa

SEQ ID NO: 106382 - RNA, 15 nt, Human adenovirus C
acuggaacacuauca

SEQ ID NO: 106383 - RNA, 15 nt, Human adenovirus C
acucugguaucucag

SEQ ID NO: 106384 - RNA, 21 nt, Human adenovirus C
acucuaugugggauaugcucc

SEQ ID NO: 106385 - RNA, 15 nt, Human adenovirus C
acuaucgcaacacca

SEQ ID NO: 106386 - RNA, 21 nt, Human adenovirus C
acuaucuucauauuguugcag

SEQ ID NO: 106387 - RNA, 13 nt, Human adenovirus C
agaaaggacugug

SEQ ID NO: 106388 - RNA, 19 nt, Human adenovirus C
acuuugcuuccuugcaaga

SEQ ID NO: 106389 - RNA, 19 nt, Human adenovirus C
acuucagccugaauaacaa

SEQ ID NO: 106390 - RNA, 15 nt, Human adenovirus C
agaccaccagccaaa

SEQ ID NO: 106391 - RNA, 14 nt, Human adenovirus C
agaccauggacagc

SEQ ID NO: 106392 - RNA, 12 nt, Human adenovirus C
agagcuucaugc

SEQ ID NO: 106393 - RNA, 10 nt, Human adenovirus C
agaguguaca

SEQ ID NO: 106394 - RNA, 19 nt, Human adenovirus C
agagcauguccaaggugaa

SEQ ID NO: 106395 - RNA, 22 nt, Human adenovirus C
acaaagcccaagaaauccacag

SEQ ID NO: 106396 - RNA, 21 nt, Human adenovirus C
aauuaugaaacggagugucau

SEQ ID NO: 106397 - RNA, 22 nt, Human adenovirus C
aauugcauccguggccuugcag

SEQ ID NO: 106398 - RNA, 22 nt, Human adenovirus C
aauguacuaggagacacuuuca

SEQ ID NO: 106399 - RNA, 23 nt, Human adenovirus C
aauguacuaggagacacuuucaa

SEQ ID NO: 106400 - RNA, 19 nt, Human adenovirus C
aauccuguggugagcuguu

SEQ ID NO: 106401 - RNA, 20 nt, Human adenovirus C
aaugcuggagcccaucacau

SEQ ID NO: 106402 - RNA, 23 nt, Human adenovirus C
aacuugcuggaacagagcucuaa

SEQ ID NO: 106403 - RNA, 18 nt, Human adenovirus C
aagcgagcugcccgggga

SEQ ID NO: 106404 - RNA, 20 nt, Human adenovirus C
aagcggcggcggaggcugca

SEQ ID NO: 106405 - RNA, 22 nt, Human adenovirus C
aagccggucuuugugguucuug

SEQ ID NO: 106406 - RNA, 19 nt, Human adenovirus C
aauaaaaaacucaccaagg

SEQ ID NO: 106407 - RNA, 19 nt, Human adenovirus C
aaguggccccccugcucag

SEQ ID NO: 106408 - RNA, 23 nt, Human adenovirus C
aaguggccccccugcucagggau

SEQ ID NO: 106409 - RNA, 14 nt, Human adenovirus C
aagugcuuugcccg

SEQ ID NO: 106410 - RNA, 20 nt, Human adenovirus C
aaguucaugucgcuguccag

SEQ ID NO: 106411 - RNA, 20 nt, Human adenovirus C
aaguucccgggucaaagaau

SEQ ID NO: 106412 - RNA, 15 nt, Human adenovirus C
aagucgcagcugcuc

SEQ ID NO: 106413 - RNA, 16 nt, Human adenovirus C
aagucgcagcugcuca

SEQ ID NO: 106414 - RNA, 18 nt, Human adenovirus C
aagucgcagcugcucagg

SEQ ID NO: 106415 - RNA, 11 nt, Human adenovirus C
aagugacaaaa

SEQ ID NO: 106416 - RNA, 17 nt, Human adenovirus C
aagucauuuuucauuca

SEQ ID NO: 106417 - RNA, 17 nt, Human adenovirus C
aagucagggacaugcuu

SEQ ID NO: 106418 - RNA, 17 nt, Human adenovirus C
aagucagucacaauccc

SEQ ID NO: 106419 - RNA, 22 nt, Human adenovirus C
aaauucccacgcccuacaugug

SEQ ID NO: 106420 - RNA, 24 nt, Human adenovirus C
aaauucccacgcccuacaugugga

SEQ ID NO: 106421 - RNA, 20 nt, Human adenovirus C
aaauaucaggaauuguugcu

SEQ ID NO: 106422 - RNA, 15 nt, Human adenovirus C
aaaggacuguguacu

SEQ ID NO: 106423 - RNA, 13 nt, Human adenovirus C
aaaagauaccucu

SEQ ID NO: 106424 - RNA, 12 nt, Human adenovirus C
aaagaugaugau

SEQ ID NO: 106425 - RNA, 18 nt, Human adenovirus C
aaagcaaagucagucaca

SEQ ID NO: 106426 - RNA, 22 nt, Human adenovirus C
aaagacauauuuccugcagauu

SEQ ID NO: 106427 - RNA, 20 nt, Human adenovirus C
aacgugucguaugugucaug

SEQ ID NO: 106428 - RNA, 20 nt, Human adenovirus C
aacuuaccugccuuuaucug

SEQ ID NO: 106429 - RNA, 17 nt, Human adenovirus C
aaccagccugugaugcu

SEQ ID NO: 106430 - RNA, 18 nt, Human adenovirus C
aaccagccugugaugcug

SEQ ID NO: 106431 - RNA, 23 nt, Human adenovirus C
aaccagacucuguuuggauuuug

SEQ ID NO: 106432 - RNA, 16 nt, Human adenovirus C
aaccacggucauucaa

SEQ ID NO: 106433 - RNA, 19 nt, Human adenovirus C
aacccagcuucagcuugcc

SEQ ID NO: 106434 - RNA, 22 nt, Human adenovirus C
aaccugaacgggguguuugaca

SEQ ID NO: 106435 - RNA, 15 nt, Human adenovirus C
aaccuggaccggcug

SEQ ID NO: 106436 - RNA, 14 nt, Human adenovirus C
uggucccgcugugc

SEQ ID NO: 106437 - RNA, 11 nt, Human adenovirus C
uggucagggaa

SEQ ID NO: 106438 - RNA, 19 nt, Human adenovirus C
uggucagggaaaacaugca

SEQ ID NO: 106439 - RNA, 20 nt, Human adenovirus C
uggucagggaaaacaugcaa

SEQ ID NO: 106440 - RNA, 17 nt, Human adenovirus C
uggucuuacaugcacau

SEQ ID NO: 106441 - RNA, 21 nt, Human adenovirus C
uggucaaacgcucaaaagcau

SEQ ID NO: 106442 - RNA, 18 nt, Human adenovirus C
uggauggccuuugccugg

SEQ ID NO: 106443 - RNA, 16 nt, Human adenovirus C
uggacagcgacaugaa

SEQ ID NO: 106444 - RNA, 17 nt, Human adenovirus C
uggacagcgacaugaac

SEQ ID NO: 106445 - RNA, 22 nt, Human adenovirus C
uggcaccccuauucgacaccac

SEQ ID NO: 106446 - RNA, 23 nt, Human adenovirus C
ugugugcgcauugcguaccucag

SEQ ID NO: 106447 - RNA, 14 nt, Human adenovirus C
ugugaugcuggaug

SEQ ID NO: 106448 - RNA, 18 nt, Human adenovirus C
ugucauuuuuguuuugcu

SEQ ID NO: 106449 - RNA, 23 nt, Human adenovirus C
uguccuaacccuggauuacauca

SEQ ID NO: 106450 - RNA, 23 nt, Human adenovirus C
ugucuuucaguagcaagcugauu

SEQ ID NO: 106451 - RNA, 14 nt, Human adenovirus C
uuacuuuucagcag

SEQ ID NO: 106452 - RNA, 23 nt, Human adenovirus C
uuacuuaaaaucagucagcaaau

SEQ ID NO: 106453 - RNA, 17 nt, Human adenovirus C
uuacuggcugcagccag

SEQ ID NO: 106454 - RNA, 21 nt, Human adenovirus C
uuacaggcucuccuuuugcac

SEQ ID NO: 106455 - RNA, 22 nt, Human adenovirus C
uuaacuugcauggcguguuaaa

SEQ ID NO: 106456 - RNA, 18 nt, Human adenovirus C
uguuuuucaagugacaaa

SEQ ID NO: 106457 - RNA, 21 nt, Human adenovirus C
uguucugaccgugguuugcaa

SEQ ID NO: 106458 - RNA, 14 nt, Human adenovirus C
uguuauauuccaca

SEQ ID NO: 106459 - RNA, 22 nt, Human adenovirus C
uguguuacuuuucagcagauua

SEQ ID NO: 106460 - RNA, 23 nt, Human adenovirus C
uguuaaauggggcggggcuuaaa

SEQ ID NO: 106461 - RNA, 18 nt, Human adenovirus C
ugcgggcggcgcugcaga

SEQ ID NO: 106462 - RNA, 15 nt, Human adenovirus C
ugcuuugcucccaaa

SEQ ID NO: 106463 - RNA, 22 nt, Human adenovirus C
ugcuuugcucccaaaccucagc

SEQ ID NO: 106464 - RNA, 12 nt, Human adenovirus C
uggaagcauugu

SEQ ID NO: 106465 - RNA, 16 nt, Human adenovirus C
uggaagcauugugagc

SEQ ID NO: 106466 - RNA, 13 nt, Human adenovirus C
ugcuugcaagacu

SEQ ID NO: 106467 - RNA, 21 nt, Human adenovirus C
ugcuuggucaaacgcucaaaa

SEQ ID NO: 106468 - RNA, 20 nt, Human adenovirus C
ugccagcgccugcacugcaa

SEQ ID NO: 106469 - RNA, 23 nt, Human adenovirus C
ugccaccucccucccaacacaca

SEQ ID NO: 106470 - RNA, 15 nt, Human adenovirus C
ugccuuuaucugcau

SEQ ID NO: 106471 - RNA, 15 nt, Human adenovirus C
ugcacgcuggccagc

SEQ ID NO: 106472 - RNA, 17 nt, Human adenovirus C
ugauguuucugaucaga

SEQ ID NO: 106473 - RNA, 22 nt, Human adenovirus C
ugauguaaguuuaauaaagggu

SEQ ID NO: 106474 - RNA, 19 nt, Human adenovirus C
ugaucaaaauccaaacaga

SEQ ID NO: 106475 - RNA, 14 nt, Human adenovirus C
ugcaagaacugcua

SEQ ID NO: 106476 - RNA, 22 nt, Human adenovirus C
ugcaaguacaagauuagcaaac

SEQ ID NO: 106477 - RNA, 14 nt, Human adenovirus C
ugcaagucagggac

SEQ ID NO: 106478 - RNA, 16 nt, Human adenovirus C
ugaaaaaugacuugaa

SEQ ID NO: 106479 - RNA, 11 nt, Human adenovirus C
ucuuuguccag

SEQ ID NO: 106480 - RNA, 22 nt, Human adenovirus C
ugagcagcaccuugcauuuuau

SEQ ID NO: 106481 - RNA, 22 nt, Human adenovirus C
ugagcaugacuacgaugugcuu

SEQ ID NO: 106482 - RNA, 22 nt, Human adenovirus C
ugagagaguggauauacuacaa

SEQ ID NO: 106483 - RNA, 22 nt, Human adenovirus C
ugagauaauguuuaacuugcau

SEQ ID NO: 106484 - RNA, 20 nt, Human adenovirus C
ugaguuuuguuacuuugaau

SEQ ID NO: 106485 - RNA, 20 nt, Human adenovirus C
ugagguacgaugagacccgc

SEQ ID NO: 106486 - RNA, 12 nt, Human adenovirus C
aacgaagcuaug

SEQ ID NO: 106487 - RNA, 23 nt, Human adenovirus C
aacgaaguggccccccugcucag

SEQ ID NO: 106488 - RNA, 23 nt, Human adenovirus C
aacaugcaagucagggacaugcu

SEQ ID NO: 106489 - RNA, 15 nt, Human adenovirus C
aacgccguuggagac

SEQ ID NO: 106490 - RNA, 18 nt, Human adenovirus C
uuuuucuguggugguucc

SEQ ID NO: 106491 - RNA, 13 nt, Human adenovirus C
aacugaaagccau

SEQ ID NO: 106492 - RNA, 22 nt, Human adenovirus C
aagaccaccagccaaacccgcc

SEQ ID NO: 106493 - RNA, 18 nt, Human adenovirus C
aagaucucuaauaccaca

SEQ ID NO: 106494 - RNA, 11 nt, Human adenovirus C
aagagugcaga

SEQ ID NO: 106495 - RNA, 22 nt, Human adenovirus C
aagaucuggaaggugcugaggu

SEQ ID NO: 106496 - RNA, 21 nt, Human adenovirus C
aagaucuugguugugggccau

SEQ ID NO: 106497 - RNA, 17 nt, Human adenovirus C
aagcaaagucagucaca

SEQ ID NO: 106498 - RNA, 23 nt, Human adenovirus C
aauaguaguacggauagcuguga

SEQ ID NO: 106499 - RNA, 12 nt, Human adenovirus C
aauccuguggug

SEQ ID NO: 106500 - RNA, 21 nt, Human adenovirus C
aaucacccgagaguguacaaa

SEQ ID NO: 106501 - RNA, 13 nt, Human adenovirus C
aagcugcacugcu

SEQ ID NO: 106502 - RNA, 12 nt, Human adenovirus C
aagcauugugag

SEQ ID NO: 106503 - RNA, 13 nt, Human adenovirus C
aagcauugugagc

SEQ ID NO: 106504 - RNA, 14 nt, Human adenovirus C
aagcauugugagcu

SEQ ID NO: 106505 - RNA, 18 nt, Human adenovirus C
aagcauugugagcucaua

SEQ ID NO: 106506 - RNA, 13 nt, Human adenovirus C
aagcaucauauca

SEQ ID NO: 106507 - RNA, 17 nt, Human adenovirus C
aagucgcagcugcucag

SEQ ID NO: 106508 - RNA, 11 nt, Human adenovirus C
aagucagggac

SEQ ID NO: 106509 - RNA, 19 nt, Human adenovirus C
aagucagggacaugcuuaa

SEQ ID NO: 106510 - RNA, 13 nt, Human adenovirus C
aagucagucacaa

SEQ ID NO: 106511 - RNA, 16 nt, Human adenovirus C
aagucccgcucccacc

SEQ ID NO: 106512 - RNA, 17 nt, Human adenovirus C
uuguguuuaaugcagga

SEQ ID NO: 106513 - RNA, 14 nt, Human adenovirus C
uuucaagugacaaa

SEQ ID NO: 106514 - RNA, 16 nt, Human adenovirus C
uuuacccacccaaagc

SEQ ID NO: 106515 - RNA, 12 nt, Human adenovirus C
uuggucagggaa

SEQ ID NO: 106516 - RNA, 15 nt, Human adenovirus C
uugugguucuugcag

SEQ ID NO: 106517 - RNA, 20 nt, Human adenovirus C
uuucacccaaugguuuccaa

SEQ ID NO: 106518 - RNA, 16 nt, Human adenovirus C
uuucacuccacaggcu

SEQ ID NO: 106519 - RNA, 13 nt, Human adenovirus C
uuucagcagauua

SEQ ID NO: 106520 - RNA, 19 nt, Human adenovirus C
uuuggacuugagcuguaaa

SEQ ID NO: 106521 - RNA, 19 nt, Human adenovirus C
uuuggggccaguuggcaaa

SEQ ID NO: 106522 - RNA, 20 nt, Human adenovirus C
uuugggcaccuaugacaagc

SEQ ID NO: 106523 - RNA, 22 nt, Human adenovirus C
uuuggcaugacacuacgaccaa

SEQ ID NO: 106524 - RNA, 16 nt, Human adenovirus C
aacauaacaugcaaca

SEQ ID NO: 106525 - RNA, 20 nt, Human adenovirus C
aacagcugcugagaaacgac

SEQ ID NO: 106526 - RNA, 14 nt, Human adenovirus C
aacagcgccaaggc

SEQ ID NO: 106527 - RNA, 18 nt, Human adenovirus C
uugcuugaucaaaaucca

SEQ ID NO: 106528 - RNA, 17 nt, Human adenovirus C
uugcgcuuaaaaugggc

SEQ ID NO: 106529 - RNA, 17 nt, Human adenovirus C
uucagauacaugggcau

SEQ ID NO: 106530 - RNA, 21 nt, Human adenovirus C
uucaggaaauaugacuacguc

SEQ ID NO: 106531 - RNA, 20 nt, Human adenovirus C
uugacgcugcgguucauccc

SEQ ID NO: 106532 - RNA, 17 nt, Human adenovirus C
uugagcccgagagcaug

SEQ ID NO: 106533 - RNA, 13 nt, Human adenovirus C
uugaggaggcuau

SEQ ID NO: 106534 - RNA, 19 nt, Human adenovirus C
aacacaccuccugagauac

SEQ ID NO: 106535 - RNA, 16 nt, Human adenovirus C
ucuccagcggccacac

SEQ ID NO: 106536 - RNA, 14 nt, Human adenovirus C
ucuccacacaagcu

SEQ ID NO: 106537 - RNA, 13 nt, Human adenovirus C
ucuuacaugcaca

SEQ ID NO: 106538 - RNA, 15 nt, Human adenovirus C
ucuggaaggugcuga

SEQ ID NO: 106539 - RNA, 18 nt, Human adenovirus C
ucuggacccugauagggg

SEQ ID NO: 106540 - RNA, 21 nt, Human adenovirus C
ucuggcgcauuuggucaggga

SEQ ID NO: 106541 - RNA, 13 nt, Human adenovirus C
ucgcagcugcuca

SEQ ID NO: 106542 - RNA, 14 nt, Human adenovirus C
ucgcagcugcucag

SEQ ID NO: 106543 - RNA, 15 nt, Human adenovirus C
ucgcagcugcucagg

SEQ ID NO: 106544 - RNA, 14 nt, Human adenovirus C
ucgccuucauucag

SEQ ID NO: 106545 - RNA, 17 nt, Human adenovirus C
ucguuacaacagcggca

SEQ ID NO: 106546 - RNA, 16 nt, Human adenovirus C
ucuaacuuuuagcuua

SEQ ID NO: 106547 - RNA, 19 nt, Human adenovirus C
uccuugcaagaacugcuau

SEQ ID NO: 106548 - RNA, 23 nt, Human adenovirus C
uccuucuaacacaccuccugaga

SEQ ID NO: 106549 - RNA, 14 nt, Human adenovirus C
uccuuuugagacag

SEQ ID NO: 106550 - RNA, 22 nt, Human adenovirus C
ucgacgccgccaccaaccagcc

SEQ ID NO: 106551 - RNA, 17 nt, Human adenovirus C
ucgaaguagauugcauc

SEQ ID NO: 106552 - RNA, 13 nt, Human adenovirus C
ucgagcagccaga

SEQ ID NO: 106553 - RNA, 19 nt, Human adenovirus C
uccgaguaugcgugucaua

SEQ ID NO: 106554 - RNA, 19 nt, Human adenovirus C
uccugucgccauccuguga

SEQ ID NO: 106555 - RNA, 14 nt, Human adenovirus C
ucccaaaccucagc

SEQ ID NO: 106556 - RNA, 14 nt, Human adenovirus C
ucccaacacacaga

SEQ ID NO: 106557 - RNA, 15 nt, Human adenovirus C
uccagcuuauucagc

SEQ ID NO: 106558 - RNA, 22 nt, Human adenovirus C
ucccacggcaugcuugcgcuua

SEQ ID NO: 106559 - RNA, 16 nt, Human adenovirus C
ucaucgccuucauuca

SEQ ID NO: 106560 - RNA, 13 nt, Human adenovirus C
ucagggaaaacau

SEQ ID NO: 106561 - RNA, 15 nt, Human adenovirus C
ucagggaaaacaugc

SEQ ID NO: 106562 - RNA, 18 nt, Human adenovirus C
ucagcuugccugcuccag

SEQ ID NO: 106563 - RNA, 23 nt, Human adenovirus C
ucaggaaagcaaagucagucaca

SEQ ID NO: 106564 - RNA, 16 nt, Human adenovirus C
ucaagcagguuuacca

SEQ ID NO: 106565 - RNA, 21 nt, Human adenovirus C
ucaaugcuggagcccaucaca

SEQ ID NO: 106566 - RNA, 23 nt, Human adenovirus C
ucaauugcagaaaauuucaaguc

SEQ ID NO: 106567 - RNA, 13 nt, Human adenovirus C
ucaccuggauguc

SEQ ID NO: 106568 - RNA, 21 nt, Human adenovirus C
uauuuccugcagauucacuca

SEQ ID NO: 106569 - RNA, 12 nt, Human adenovirus C
ucaacuugucau

SEQ ID NO: 106570 - RNA, 16 nt, Human adenovirus C
ucaaaucaaacuuucc

SEQ ID NO: 106571 - RNA, 23 nt, Human adenovirus C
ucaaagaauccaauugugccaaa

SEQ ID NO: 106572 - RNA, 13 nt, Human adenovirus C
uauuaccaccaca

SEQ ID NO: 106573 - RNA, 18 nt, Human adenovirus C
uauguuuguuugccuuau

SEQ ID NO: 106574 - RNA, 23 nt, Human adenovirus C
uauagccccaccaccacauagcu

SEQ ID NO: 106575 - RNA, 20 nt, Human adenovirus C
uagaaucuacuggggcuccu

SEQ ID NO: 106576 - RNA, 22 nt, Human adenovirus C
uaugcgccacuggcagggacac

SEQ ID NO: 106577 - RNA, 15 nt, Human adenovirus C
uaucgaggacuugcu

SEQ ID NO: 106578 - RNA, 18 nt, Human adenovirus C
uaucgcaacaccacugcu

SEQ ID NO: 106579 - RNA, 15 nt, Human adenovirus C
uauccucaucugcag

SEQ ID NO: 106580 - RNA, 16 nt, Human adenovirus C
uaauguuuaacuugca

SEQ ID NO: 106581 - RNA, 19 nt, Human adenovirus C
uaauguuuaacuugcaugg

SEQ ID NO: 106582 - RNA, 18 nt, Human adenovirus C
uaaguuuaauaaagggug

SEQ ID NO: 106583 - RNA, 17 nt, Human adenovirus C
uaauaaagggugagaua

SEQ ID NO: 106584 - RNA, 15 nt, Human adenovirus C
uaauaagagugcaga

SEQ ID NO: 106585 - RNA, 18 nt, Human adenovirus C
uacaggcucuccuuuugc

SEQ ID NO: 106586 - RNA, 22 nt, Human adenovirus C
aacaacagcugccgccaugggc

SEQ ID NO: 106587 - RNA, 15 nt, Human adenovirus C
uacucuaugugggau

SEQ ID NO: 106588 - RNA, 22 nt, Human adenovirus C
uacugaaugaaaaaugacuuga

SEQ ID NO: 106589 - RNA, 21 nt, Human adenovirus C
uacauguuuuucaagugacaa

SEQ ID NO: 106590 - RNA, 18 nt, Human adenovirus C
uacaucugaccucaugga

SEQ ID NO: 106591 - RNA, 22 nt, Human adenovirus C
uacaugagcgcgggaccccaca

SEQ ID NO: 106592 - RNA, 16 nt, Human adenovirus C
uaccuccuuuugagac

SEQ ID NO: 106593 - RNA, 21 nt, Human adenovirus C
uaccugcuuuacggauuuguc

SEQ ID NO: 106594 - RNA, 12 nt, Human adenovirus C
uaagagugcaga

SEQ ID NO: 106595 - RNA, 12 nt, Human adenovirus C
uaagguguaaac

SEQ ID NO: 106596 - RNA, 18 nt, Human adenovirus C
uaagguguaaaccuguga

SEQ ID NO: 106597 - RNA, 19 nt, Human adenovirus C
uaagguguaaaccugugau

SEQ ID NO: 106598 - RNA, 19 nt, Human adenovirus C
uaacaccuaagaauauguc

SEQ ID NO: 106599 - RNA, 22 nt, Human adenovirus C
uaacuccccucgagcagccaga

SEQ ID NO: 106600 - RNA, 21 nt, Human adenovirus C
uaaauaaaaaccagacucugu

SEQ ID NO: 106601 - RNA, 14 nt, Human adenovirus C
uaaagggugagaua

SEQ ID NO: 106602 - RNA, 20 nt, Human adenovirus C
guucuugcagauauggcccu

SEQ ID NO: 106603 - RNA, 12 nt, Human adenovirus C
guccggcucacc

SEQ ID NO: 106604 - RNA, 24 nt, Human adenovirus C
gucccuccgcacccacuaucuuca

SEQ ID NO: 106605 - RNA, 14 nt, Human adenovirus C
gugcagaccugcac

SEQ ID NO: 106606 - RNA, 19 nt, Human adenovirus C
guucagauacaugggcaua

SEQ ID NO: 106607 - RNA, 14 nt, Human adenovirus C
guucagaugacuaa

SEQ ID NO: 106608 - RNA, 17 nt, Human adenovirus C
guucagaugacuaacuc

SEQ ID NO: 106609 - RNA, 20 nt, Human adenovirus C
guucauugacuggguuugug

SEQ ID NO: 106610 - RNA, 14 nt, Human adenovirus C
guuaagcugggaug

SEQ ID NO: 106611 - RNA, 23 nt, Human adenovirus C
guuaagcugggaugggugcauac

SEQ ID NO: 106612 - RNA, 18 nt, Human adenovirus C
guguuuauguuaguugaa

SEQ ID NO: 106613 - RNA, 16 nt, Human adenovirus C
guguaaaccugugauu

SEQ ID NO: 106614 - RNA, 17 nt, Human adenovirus C
gugguacuucccagaga

SEQ ID NO: 106615 - RNA, 19 nt, Human adenovirus C
guggacuuuuccagcguua

SEQ ID NO: 106616 - RNA, 21 nt, Human adenovirus C
gucauuuuuguuuugcugauu

SEQ ID NO: 106617 - RNA, 20 nt, Human adenovirus C
gucaaggacaagcagccgaa

SEQ ID NO: 106618 - RNA, 15 nt, Human adenovirus C
guagauugcauccca

SEQ ID NO: 106619 - RNA, 19 nt, Human adenovirus C
guagaagaccaccagccaa

SEQ ID NO: 106620 - RNA, 21 nt, Human adenovirus C
guagaagaccaccagccaaac

SEQ ID NO: 106621 - RNA, 14 nt, Human adenovirus C
guauauaaugcgcc

SEQ ID NO: 106622 - RNA, 15 nt, Human adenovirus C
guacuaggagacacu

SEQ ID NO: 106623 - RNA, 16 nt, Human adenovirus C
guaccuggggacuguu

SEQ ID NO: 106624 - RNA, 12 nt, Human adenovirus C
ggguguuugaca

SEQ ID NO: 106625 - RNA, 13 nt, Human adenovirus C
ggggcuaaagggg

SEQ ID NO: 106626 - RNA, 22 nt, Human adenovirus C
ggggcuucugaggcuacagagg

SEQ ID NO: 106627 - RNA, 21 nt, Human adenovirus C
cuuucuucccagcugaucucc

SEQ ID NO: 106628 - RNA, 15 nt, Human adenovirus C
cuuaaguucaugucg

SEQ ID NO: 106629 - RNA, 15 nt, Human adenovirus C
cuuaaugaccagaca

SEQ ID NO: 106630 - RNA, 23 nt, Human adenovirus C
cuuugccuggaacccgcgcucaa

SEQ ID NO: 106631 - RNA, 19 nt, Human adenovirus C
cuuuuacacugguguaggu

SEQ ID NO: 106632 - RNA, 22 nt, Human adenovirus C
cuuuguuugcugaaugaguuga

SEQ ID NO: 106633 - RNA, 19 nt, Human adenovirus C
cuuuugaaauccuguggug

SEQ ID NO: 106634 - RNA, 14 nt, Human adenovirus C
cuuuuagcugcaaa

SEQ ID NO: 106635 - RNA, 22 nt, Human adenovirus C
cuuuuagcugcaaacuuucucc

SEQ ID NO: 106636 - RNA, 21 nt, Human adenovirus C
gaaaccguguggaauauaaca

SEQ ID NO: 106637 - RNA, 20 nt, Human adenovirus C
gaaaacaugcaagucaggga

SEQ ID NO: 106638 - RNA, 15 nt, Human adenovirus C
gaaaaauggugucuu

SEQ ID NO: 106639 - RNA, 13 nt, Human adenovirus C
gaaaaaugacuug

SEQ ID NO: 106640 - RNA, 15 nt, Human adenovirus C
gaaaaaugacuugaa

SEQ ID NO: 106641 - RNA, 16 nt, Human adenovirus C
aaagaaagaugaugau

SEQ ID NO: 106642 - RNA, 14 nt, Human adenovirus C
aaaccgaauucucc

SEQ ID NO: 106643 - RNA, 22 nt, Human adenovirus C
aaaccguguggaauauaacacc

SEQ ID NO: 106644 - RNA, 13 nt, Human adenovirus C
aaacuuucuccaa

SEQ ID NO: 106645 - RNA, 14 nt, Human adenovirus C
aaagaagagaugcu

SEQ ID NO: 106646 - RNA, 22 nt, Human adenovirus C
aaagaagagaugcuccagguca

SEQ ID NO: 106647 - RNA, 16 nt, Human adenovirus C
aaagcaaagucaguca

SEQ ID NO: 106648 - RNA, 20 nt, Human adenovirus C
gaaugaaaaaugacuugaaa

SEQ ID NO: 106649 - RNA, 19 nt, Human adenovirus C
gaaguagaagaccaccagc

SEQ ID NO: 106650 - RNA, 16 nt, Human adenovirus C
gaagguccuccucccu

SEQ ID NO: 106651 - RNA, 21 nt, Human adenovirus C
aaacccagcuucagcuugccu

SEQ ID NO: 106652 - RNA, 18 nt, Human adenovirus C
gaaggaguuuacauagaa

SEQ ID NO: 106653 - RNA, 21 nt, Human adenovirus C
gaacugaaagccauugucaaa

SEQ ID NO: 106654 - RNA, 14 nt, Human adenovirus C
gaaauccuguggug

SEQ ID NO: 106655 - RNA, 13 nt, Human adenovirus C
gaaaggacugugu

SEQ ID NO: 106656 - RNA, 22 nt, Human adenovirus C
gaaaggacuguguacucugugu

SEQ ID NO: 106657 - RNA, 21 nt, Human adenovirus C
gacauauucuuagguguuaua

SEQ ID NO: 106658 - RNA, 14 nt, Human adenovirus C
gacaugaacuuaag

SEQ ID NO: 106659 - RNA, 19 nt, Human adenovirus C
gaccaaccuggaccggcug

SEQ ID NO: 106660 - RNA, 19 nt, Human adenovirus C
aaaucaaagaagagaugcu

SEQ ID NO: 106661 - RNA, 19 nt, Human adenovirus C
gacgcaacggacccggcgg

SEQ ID NO: 106662 - RNA, 23 nt, Human adenovirus C
aaauuuaccccaaguucaugccu

SEQ ID NO: 106663 - RNA, 20 nt, Human adenovirus C
gagcugcccaagacuacuca

SEQ ID NO: 106664 - RNA, 13 nt, Human adenovirus C
gagucugggcaac

SEQ ID NO: 106665 - RNA, 16 nt, Human adenovirus C
gaguaugcgugucaua

SEQ ID NO: 106666 - RNA, 21 nt, Human adenovirus C
gaguuuauuaauaucacugau

SEQ ID NO: 106667 - RNA, 16 nt, Human adenovirus C
gauagcaagacucuga

SEQ ID NO: 106668 - RNA, 12 nt, Human adenovirus C
gauagcugugac

SEQ ID NO: 106669 - RNA, 18 nt, Human adenovirus C
gagauacacccggugguc

SEQ ID NO: 106670 - RNA, 23 nt, Human adenovirus C
gagacccgcaccaggugcagacc

SEQ ID NO: 106671 - RNA, 14 nt, Human adenovirus C
gagcaacaacagcg

SEQ ID NO: 106672 - RNA, 17 nt, Human adenovirus C
gagcauguccaagguga

SEQ ID NO: 106673 - RNA, 13 nt, Human adenovirus C
gagccccggccac

SEQ ID NO: 106674 - RNA, 21 nt, Human adenovirus C
gcaguggucuuacaugcacau

SEQ ID NO: 106675 - RNA, 22 nt, Human adenovirus C
gcagcggucacacagaagcaaa

SEQ ID NO: 106676 - RNA, 20 nt, Human adenovirus C
gcagcucgcuuaaguucaug

SEQ ID NO: 106677 - RNA, 20 nt, Human adenovirus C
gcagcucggugaaguuuuca

SEQ ID NO: 106678 - RNA, 15 nt, Human adenovirus C
gcagccgcaggccaa

SEQ ID NO: 106679 - RNA, 13 nt, Human adenovirus C
gcaggagcuggug

SEQ ID NO: 106680 - RNA, 15 nt, Human adenovirus C
gcagcugcucaggaa

SEQ ID NO: 106681 - RNA, 14 nt, Human adenovirus C
gcagauccaacagc

SEQ ID NO: 106682 - RNA, 14 nt, Human adenovirus C
gcagcaacagcagc

SEQ ID NO: 106683 - RNA, 13 nt, Human adenovirus C
gcagaaaauuuca

SEQ ID NO: 106684 - RNA, 17 nt, Human adenovirus C
gcagaaguauuccauag

SEQ ID NO: 106685 - RNA, 14 nt, Human adenovirus C
gcacccacuaucuu

SEQ ID NO: 106686 - RNA, 14 nt, Human adenovirus C
gcacaaacgcggcc

SEQ ID NO: 106687 - RNA, 14 nt, Human adenovirus C
gcacaaccauccgc

SEQ ID NO: 106688 - RNA, 22 nt, Human adenovirus C
gcaagacucugacaaagcccaa

SEQ ID NO: 106689 - RNA, 19 nt, Human adenovirus C
gauccaacagcugcugaga

SEQ ID NO: 106690 - RNA, 21 nt, Human adenovirus C
gcaagugucuugcugucuuua

SEQ ID NO: 106691 - RNA, 21 nt, Human adenovirus C
gccugcgcuucccaagcaaga

SEQ ID NO: 106692 - RNA, 15 nt, Human adenovirus C
gcgaaaacuacguca

SEQ ID NO: 106693 - RNA, 16 nt, Human adenovirus C
gcgaaaacuacgucau

SEQ ID NO: 106694 - RNA, 19 nt, Human adenovirus C
gcgacugcgccugacacac

SEQ ID NO: 106695 - RNA, 17 nt, Human adenovirus C
gcgaguggcgcuccagg

SEQ ID NO: 106696 - RNA, 16 nt, Human adenovirus C
gcgaggccguggcgca

SEQ ID NO: 106697 - RNA, 16 nt, Human adenovirus C
gcgaggcuuugccuga

SEQ ID NO: 106698 - RNA, 20 nt, Human adenovirus C
gcgcacgccucaccggccag

SEQ ID NO: 106699 - RNA, 16 nt, Human adenovirus C
gcgcagaaguauucca

SEQ ID NO: 106700 - RNA, 20 nt, Human adenovirus C
gcccugacccggcuaugcga

SEQ ID NO: 106701 - RNA, 15 nt, Human adenovirus C
gccaaggcuaccgcu

SEQ ID NO: 106702 - RNA, 22 nt, Human adenovirus C
gccagagcgucccgaccaugga

SEQ ID NO: 106703 - RNA, 19 nt, Human adenovirus C
gccauuaugagcaaggaaa

SEQ ID NO: 106704 - RNA, 18 nt, Human adenovirus C
gcccacaacggacuaucg

SEQ ID NO: 106705 - RNA, 19 nt, Human adenovirus C
gcccgaugaggccggccug

SEQ ID NO: 106706 - RNA, 15 nt, Human adenovirus C
gcccaagacuacuca

SEQ ID NO: 106707 - RNA, 20 nt, Human adenovirus C
gccauugacgcgguggugga

SEQ ID NO: 106708 - RNA, 22 nt, Human adenovirus C
gcugaguauaauaaauacagaa

SEQ ID NO: 106709 - RNA, 15 nt, Human adenovirus C
gcugaacuguuucca

SEQ ID NO: 106710 - RNA, 14 nt, Human adenovirus C
gcgcgaaaacuacg

SEQ ID NO: 106711 - RNA, 19 nt, Human adenovirus C
gcgcaugaaggaguuuaca

SEQ ID NO: 106712 - RNA, 17 nt, Human adenovirus C
gcgcauuuggucaggga

SEQ ID NO: 106713 - RNA, 18 nt, Human adenovirus C
gcgcauuuggucagggaa

SEQ ID NO: 106714 - RNA, 16 nt, Human adenovirus C
gcgccauagucaauac

SEQ ID NO: 106715 - RNA, 20 nt, Human adenovirus C
gcgccauuaugagcaaggaa

SEQ ID NO: 106716 - RNA, 16 nt, Human adenovirus C
gcgcccugacccggcu

SEQ ID NO: 106717 - RNA, 20 nt, Human adenovirus C
gcuaggaaucuaacuuuuag

SEQ ID NO: 106718 - RNA, 14 nt, Human adenovirus C
gcuauacuacugaa

SEQ ID NO: 106719 - RNA, 13 nt, Human adenovirus C
gcuuucuucccag

SEQ ID NO: 106720 - RNA, 22 nt, Human adenovirus C
ggaaaccguguggaauauaaca

SEQ ID NO: 106721 - RNA, 13 nt, Human adenovirus C
gcuuaaaggguau

SEQ ID NO: 106722 - RNA, 16 nt, Human adenovirus C
ggaagcauugugagcu

SEQ ID NO: 106723 - RNA, 23 nt, Human adenovirus C
ggaacgccguuggagacugcagc

SEQ ID NO: 106724 - RNA, 15 nt, Human adenovirus C
ggaaccugcuuucuu

SEQ ID NO: 106725 - RNA, 22 nt, Human adenovirus C
ggggaggaagccuucagggcag

SEQ ID NO: 106726 - RNA, 13 nt, Human adenovirus C
ggggaagugcagg

SEQ ID NO: 106727 - RNA, 14 nt, Human adenovirus C
gggcgguggcugca

SEQ ID NO: 106728 - RNA, 19 nt, Human adenovirus C
gggaugacggcagcugcag

SEQ ID NO: 106729 - RNA, 14 nt, Human adenovirus C
ggcuccagcauuga

SEQ ID NO: 106730 - RNA, 19 nt, Human adenovirus C
ggcgaccaucaaugcugga

SEQ ID NO: 106731 - RNA, 13 nt, Human adenovirus C
ggcgaguggcgcu

SEQ ID NO: 106732 - RNA, 21 nt, Human adenovirus C
ggccugacgggcggcaugcgu

SEQ ID NO: 106733 - RNA, 23 nt, Human adenovirus C
ggccugcuugaccacacaaaaga

SEQ ID NO: 106734 - RNA, 21 nt, Human adenovirus C
ggauuuugaucaagcaagugu

SEQ ID NO: 106735 - RNA, 19 nt, Human adenovirus C
ggcacuuaggccagauugc

SEQ ID NO: 106736 - RNA, 17 nt, Human adenovirus C
ggcagcugcagcucucu

SEQ ID NO: 106737 - RNA, 18 nt, Human adenovirus C
ggcauaagcccgucucug

SEQ ID NO: 106738 - RNA, 21 nt, Human adenovirus C
ggaugaacgggaagcugcacu

SEQ ID NO: 106739 - RNA, 21 nt, Human adenovirus C
ccgcuucagccgcugcagcca

SEQ ID NO: 106740 - RNA, 17 nt, Human adenovirus C
cccuccauuuguuucac

SEQ ID NO: 106741 - RNA, 21 nt, Human adenovirus C
cccuccauuuguuucacccaa

SEQ ID NO: 106742 - RNA, 15 nt, Human adenovirus C
cccucccaacacaca

SEQ ID NO: 106743 - RNA, 17 nt, Human adenovirus C
cccuggggcgcgcacaa

SEQ ID NO: 106744 - RNA, 13 nt, Human adenovirus C
cccugcucaggga

SEQ ID NO: 106745 - RNA, 21 nt, Human adenovirus C
cccugauaggggaagugcagg

SEQ ID NO: 106746 - RNA, 20 nt, Human adenovirus C
ccuacggcggacggccucaa

SEQ ID NO: 106747 - RNA, 21 nt, Human adenovirus C
ccggcagcagccgcaggccaa

SEQ ID NO: 106748 - RNA, 12 nt, Human adenovirus C
ccggccuggucu

SEQ ID NO: 106749 - RNA, 20 nt, Human adenovirus C
ccggcgcgcgcaaaccccac

SEQ ID NO: 106750 - RNA, 13 nt, Human adenovirus C
ccguuagcccaag

SEQ ID NO: 106751 - RNA, 16 nt, Human adenovirus C
ccguuagcccaagagc

SEQ ID NO: 106752 - RNA, 20 nt, Human adenovirus C
ccucagcgccucccaaaaga

SEQ ID NO: 106753 - RNA, 12 nt, Human adenovirus C
ccuccaacugug

SEQ ID NO: 106754 - RNA, 14 nt, Human adenovirus C
ccucccaaaagaca

SEQ ID NO: 106755 - RNA, 13 nt, Human adenovirus C
ccucccaacucug

SEQ ID NO: 106756 - RNA, 22 nt, Human adenovirus C
ccugcacgcuuuggguggacuu

SEQ ID NO: 106757 - RNA, 14 nt, Human adenovirus C
ccugcaggagcucc

SEQ ID NO: 106758 - RNA, 17 nt, Human adenovirus C
ccugcaggagcucccgc

SEQ ID NO: 106759 - RNA, 21 nt, Human adenovirus C
aaacacacaauaaauuacuua

SEQ ID NO: 106760 - RNA, 20 nt, Human adenovirus C
ccugucgccgcgggagcucc

SEQ ID NO: 106761 - RNA, 22 nt, Human adenovirus C
ccugugauugcgugugugguua

SEQ ID NO: 106762 - RNA, 17 nt, Human adenovirus C
ccugugcuuugcuccca

SEQ ID NO: 106763 - RNA, 20 nt, Human adenovirus C
cccgaccauggagcacuuuu

SEQ ID NO: 106764 - RNA, 17 nt, Human adenovirus C
cccaaagcagaccaaag

SEQ ID NO: 106765 - RNA, 16 nt, Human adenovirus C
cccagguagagcuuac

SEQ ID NO: 106766 - RNA, 18 nt, Human adenovirus C
ccaggccauaagguguaa

SEQ ID NO: 106767 - RNA, 16 nt, Human adenovirus C
ccagcugcugagccac

SEQ ID NO: 106768 - RNA, 14 nt, Human adenovirus C
ccaauugugccaaa

SEQ ID NO: 106769 - RNA, 17 nt, Human adenovirus C
ccaauugugccaaaaga

SEQ ID NO: 106770 - RNA, 12 nt, Human adenovirus C
ccacacaagcuc

SEQ ID NO: 106771 - RNA, 14 nt, Human adenovirus C
ccauucagaccgug

SEQ ID NO: 106772 - RNA, 20 nt, Human adenovirus C
ccauccgcaauacagagaca

SEQ ID NO: 106773 - RNA, 13 nt, Human adenovirus C
cccaaaagacaua

SEQ ID NO: 106774 - RNA, 17 nt, Human adenovirus C
caugcuaccucuuugag

SEQ ID NO: 106775 - RNA, 22 nt, Human adenovirus C
cauggaccgcaucaugucgcug

SEQ ID NO: 106776 - RNA, 22 nt, Human adenovirus C
caucuggaaccgcguccgcgac

SEQ ID NO: 106777 - RNA, 23 nt, Human adenovirus C
caugccuacggcggacggccuca

SEQ ID NO: 106778 - RNA, 15 nt, Human adenovirus C
caugucgcuguccag

SEQ ID NO: 106779 - RNA, 18 nt, Human adenovirus C
cauguuuuucaagugaca

SEQ ID NO: 106780 - RNA, 18 nt, Human adenovirus C
cauagaacccgaagccag

SEQ ID NO: 106781 - RNA, 15 nt, Human adenovirus C
cauagcuuauauuga

SEQ ID NO: 106782 - RNA, 12 nt, Human adenovirus C
ccaaaccucagc

SEQ ID NO: 106783 - RNA, 20 nt, Human adenovirus C
ccaaacgcucaucagugaua

SEQ ID NO: 106784 - RNA, 16 nt, Human adenovirus C
ccaacucguuugaugg

SEQ ID NO: 106785 - RNA, 18 nt, Human adenovirus C
ccaacucugguaucucag

SEQ ID NO: 106786 - RNA, 22 nt, Human adenovirus C
ccaaaguuuaaaugggauguca

SEQ ID NO: 106787 - RNA, 18 nt, Human adenovirus C
ccaagagcaacaacagcg

SEQ ID NO: 106788 - RNA, 13 nt, Human adenovirus C
ccaagacuacuca

SEQ ID NO: 106789 - RNA, 15 nt, Human adenovirus C
ccaaggugaaccuga

SEQ ID NO: 106790 - RNA, 15 nt, Human adenovirus C
ccaauucuagaucua

SEQ ID NO: 106791 - RNA, 13 nt, Human adenovirus C
cagucacaauccc

SEQ ID NO: 106792 - RNA, 21 nt, Human adenovirus C
caguagggaucgccuaccucc

SEQ ID NO: 106793 - RNA, 18 nt, Human adenovirus C
caggcugcuguccaacuu

SEQ ID NO: 106794 - RNA, 19 nt, Human adenovirus C
cagggacacguugcgauac

SEQ ID NO: 106795 - RNA, 18 nt, Human adenovirus C
cagggacaugcuuaacga

SEQ ID NO: 106796 - RNA, 16 nt, Human adenovirus C
cagggcagaaaccugc

SEQ ID NO: 106797 - RNA, 19 nt, Human adenovirus C
cagggcagcggcgcaugaa

SEQ ID NO: 106798 - RNA, 17 nt, Human adenovirus C
caggguugcagcacugg

SEQ ID NO: 106799 - RNA, 14 nt, Human adenovirus C
caggauuacaagcc

SEQ ID NO: 106800 - RNA, 20 nt, Human adenovirus C
cauaagguguaaaccuguga

SEQ ID NO: 106801 - RNA, 13 nt, Human adenovirus C
caguucauugacu

SEQ ID NO: 106802 - RNA, 13 nt, Human adenovirus C
cggaauugcaucc

SEQ ID NO: 106803 - RNA, 16 nt, Human adenovirus C
cggaaacgguuuucuu

SEQ ID NO: 106804 - RNA, 18 nt, Human adenovirus C
cgguaaccgcauggauca

SEQ ID NO: 106805 - RNA, 16 nt, Human adenovirus C
cggugaguuuuguuac

SEQ ID NO: 106806 - RNA, 21 nt, Human adenovirus C
cggugaguuuuguuacuuuga

SEQ ID NO: 106807 - RNA, 14 nt, Human adenovirus C
cguccgccaugaua

SEQ ID NO: 106808 - RNA, 14 nt, Human adenovirus C
cuacacagagcgag

SEQ ID NO: 106809 - RNA, 19 nt, Human adenovirus C
cuacagaggaggcuaggaa

SEQ ID NO: 106810 - RNA, 21 nt, Human adenovirus C
cguggggauaugagaugcauc

SEQ ID NO: 106811 - RNA, 16 nt, Human adenovirus C
cguggcgcgggcacaa

SEQ ID NO: 106812 - RNA, 16 nt, Human adenovirus C
cgcugggcguggugcc

SEQ ID NO: 106813 - RNA, 18 nt, Human adenovirus C
cgcugcccugguguacca

SEQ ID NO: 106814 - RNA, 16 nt, Human adenovirus C
cgcuaaugagcuugau

SEQ ID NO: 106815 - RNA, 13 nt, Human adenovirus C
aaacauaacaugc

SEQ ID NO: 106816 - RNA, 11 nt, Human adenovirus C
cgcgcaacuac

SEQ ID NO: 106817 - RNA, 18 nt, Human adenovirus C
cgccucggaguaccugag

SEQ ID NO: 106818 - RNA, 15 nt, Human adenovirus C
cgccuggaacugcuu

SEQ ID NO: 106819 - RNA, 15 nt, Human adenovirus C
cgcgaaaacuacguc

SEQ ID NO: 106820 - RNA, 21 nt, Human adenovirus C
cgcgaaaacuacgucaucucc

SEQ ID NO: 106821 - RNA, 17 nt, Human adenovirus C
cgcagcugcucaggaac

SEQ ID NO: 106822 - RNA, 19 nt, Human adenovirus C
cgcaguggucuuacaugca

SEQ ID NO: 106823 - RNA, 14 nt, Human adenovirus C
ccuucaaaucaaac

SEQ ID NO: 106824 - RNA, 17 nt, Human adenovirus C
ccuuaaaaagcaucaua

SEQ ID NO: 106825 - RNA, 16 nt, Human adenovirus C
cgcauuuggucaggga

SEQ ID NO: 106826 - RNA, 17 nt, Human adenovirus C
cgcauuuggucagggaa

SEQ ID NO: 106827 - RNA, 23 nt, Human adenovirus C
cgcaucgcuaugcgccacuggca

SEQ ID NO: 106828 - RNA, 13 nt, Human adenovirus C
cgccaccaguguc

SEQ ID NO: 106829 - RNA, 15 nt, Human adenovirus C
cgccaugauacccuu

SEQ ID NO: 106830 - RNA, 13 nt, Human adenovirus C
cgcccgcuuucca

SEQ ID NO: 106831 - RNA, 15 nt, Human adenovirus C
cgcccuacaugugga

SEQ ID NO: 106832 - RNA, 21 nt, Human adenovirus C
cgcccuaccugugcuuugcuc

SEQ ID NO: 106833 - RNA, 16 nt, Human adenovirus C
cgcccgccgcuuucuu

SEQ ID NO: 106834 - RNA, 14 nt, Human adenovirus C
cgccgccaccagug

SEQ ID NO: 106835 - RNA, 19 nt, Human adenovirus C
cgccgcuucagccgcugca

SEQ ID NO: 106836 - RNA, 18 nt, Human adenovirus C
cgccguuagcccaagagc

SEQ ID NO: 106837 - RNA, 19 nt, Human adenovirus C
cgccguuuaaaaaucaaag

SEQ ID NO: 106838 - RNA, 19 nt, Human adenovirus C
cucccaacucugguaucuc

SEQ ID NO: 106839 - RNA, 20 nt, Human adenovirus C
cucccaacucugguaucuca

SEQ ID NO: 106840 - RNA, 14 nt, Human adenovirus C
cuccauuuguuuca

SEQ ID NO: 106841 - RNA, 15 nt, Human adenovirus C
cucccaaaccucagc

SEQ ID NO: 106842 - RNA, 21 nt, Human adenovirus C
cuccacuuaaacucaggcaca

SEQ ID NO: 106843 - RNA, 19 nt, Human adenovirus C
cucacagaacccuaguauu

SEQ ID NO: 106844 - RNA, 23 nt, Human adenovirus C
cucaagcagguuuaccaguuuga

SEQ ID NO: 106845 - RNA, 20 nt, Human adenovirus C
cuaccucuuugagcccuuug

SEQ ID NO: 106846 - RNA, 16 nt, Human adenovirus C
cucugacaaagcccaa

SEQ ID NO: 106847 - RNA, 21 nt, Human adenovirus C
cucuaugugggauaugcucca

SEQ ID NO: 106848 - RNA, 17 nt, Human adenovirus C
cucggugaaguuuucac

SEQ ID NO: 106849 - RNA, 16 nt, Human adenovirus C
cucguaggucaaggua

SEQ ID NO: 106850 - RNA, 18 nt, Human adenovirus C
cucccacggcaugcuugc

SEQ ID NO: 106851 - RNA, 20 nt, Human adenovirus C
cucccaccauaagcaccagu

SEQ ID NO: 106852 - RNA, 18 nt, Human adenovirus C
cuccuuuugcacggucua

SEQ ID NO: 106853 - RNA, 19 nt, Human adenovirus C
cuuaaaaagcaucauauca

SEQ ID NO: 106854 - RNA, 19 nt, Human adenovirus C
cuguuacccaugauaugau

SEQ ID NO: 106855 - RNA, 19 nt, Human adenovirus C
cugugguacuucccagaga

SEQ ID NO: 106856 - RNA, 18 nt, Human adenovirus C
cugugggaccgccuggaa

SEQ ID NO: 106857 - RNA, 18 nt, Human adenovirus C
cuguggugagcuguuuga

SEQ ID NO: 106858 - RNA, 19 nt, Human adenovirus C
cuguggugagcuguuugau

SEQ ID NO: 106859 - RNA, 13 nt, Human adenovirus C
cugugaguuugau

SEQ ID NO: 106860 - RNA, 22 nt, Human adenovirus C
cuggauuacaucaagaucuuug

SEQ ID NO: 106861 - RNA, 14 nt, Human adenovirus C
cugguguaccagga

SEQ ID NO: 106862 - RNA, 21 nt, Human adenovirus C
cugguugguggcggcgucgau

SEQ ID NO: 106863 - RNA, 21 nt, Human adenovirus C
cuguaaacgccccaggccaua

SEQ ID NO: 106864 - RNA, 19 nt, Human adenovirus C
cugccuuuaucugcaugag

SEQ ID NO: 106865 - RNA, 14 nt, Human adenovirus C
cuggauggccuuug

SEQ ID NO: 106866 - RNA, 15 nt, Human adenovirus C
cuggagcccaucaca

SEQ ID NO: 106867 - RNA, 16 nt, Human adenovirus C
cuggagcccaucacau

SEQ ID NO: 106868 - RNA, 17 nt, Human adenovirus C
cuggagcccaucacauu

SEQ ID NO: 106869 - RNA, 12 nt, Human adenovirus C
cugcucagggau

SEQ ID NO: 106870 - RNA, 20 nt, Human adenovirus C
cugcaaacuuucuccaaagu

SEQ ID NO: 106871 - RNA, 12 nt, Human adenovirus C
cucuggggugga

SEQ ID NO: 106872 - RNA, 18 nt, Human adenovirus C
uuuuuugggcaccuauga

SEQ ID NO: 106873 - RNA, 14 nt, Human adenovirus C
uuuuugcgcccuac

SEQ ID NO: 106874 - RNA, 15 nt, Human adenovirus C
uuuguuucacccaau

SEQ ID NO: 106875 - RNA, 23 nt, Human adenovirus C
uuugugugcgcauugcguaccuc

SEQ ID NO: 106876 - RNA, 19 nt, Human adenovirus C
uuuucugugcgugcucuac

SEQ ID NO: 106877 - RNA, 17 nt, Human adenovirus C
uugucacccuuauccuc

SEQ ID NO: 106878 - RNA, 19 nt, Human adenovirus C
uuuggcuuuucugaccaac

SEQ ID NO: 106879 - RNA, 18 nt, Human adenovirus C
uuugggcaccuaugacaa

SEQ ID NO: 106880 - RNA, 20 nt, Human adenovirus C
uuguacagguggcugaacug

SEQ ID NO: 106881 - RNA, 18 nt, Human adenovirus C
uccugucgccauccugug

SEQ ID NO: 106882 - RNA, 16 nt, Human adenovirus C
uccucccgugugugac

SEQ ID NO: 106883 - RNA, 18 nt, Human adenovirus C
uccaaaguuuaaauggga

SEQ ID NO: 106884 - RNA, 23 nt, Human adenovirus C
uccauagagcagcugaccacuua

SEQ ID NO: 106885 - RNA, 14 nt, Human adenovirus C
uccagguacaucua

SEQ ID NO: 106886 - RNA, 22 nt, Human adenovirus C
uccaggacgugguaaaggugac

SEQ ID NO: 106887 - RNA, 22 nt, Human adenovirus C
ucacccaaugguuuccaagaaa

SEQ ID NO: 106888 - RNA, 15 nt, Human adenovirus C
ucaccuccuuuccuu

SEQ ID NO: 106889 - RNA, 17 nt, Human adenovirus C
ucagaugacuaacucag

SEQ ID NO: 106890 - RNA, 12 nt, Human adenovirus C
ucaggaaccugc

SEQ ID NO: 106891 - RNA, 16 nt, Human adenovirus C
ucagcuugccugcucc

SEQ ID NO: 106892 - RNA, 24 nt, Human adenovirus C
ucaggaaagcaaagucagucacaa

SEQ ID NO: 106893 - RNA, 19 nt, Human adenovirus C
ucagcgccggguggugcac

SEQ ID NO: 106894 - RNA, 23 nt, Human adenovirus C
ucaguguggguucuuuugucaug

SEQ ID NO: 106895 - RNA, 16 nt, Human adenovirus C
ucaguagcaagcugau

SEQ ID NO: 106896 - RNA, 14 nt, Human adenovirus C
ucagucacaauccc

SEQ ID NO: 106897 - RNA, 18 nt, Human adenovirus C
ucugacaaagcccaagaa

SEQ ID NO: 106898 - RNA, 17 nt, Human adenovirus C
ucuugguuuuggagguu

SEQ ID NO: 106899 - RNA, 22 nt, Human adenovirus C
ucuaccaucacggcguggccuu

SEQ ID NO: 106900 - RNA, 11 nt, Human adenovirus C
ucgcagcugcu

SEQ ID NO: 106901 - RNA, 18 nt, Human adenovirus C
ucgcagaacgaaugugua

SEQ ID NO: 106902 - RNA, 14 nt, Human adenovirus C
ucgcccagcaauaa

SEQ ID NO: 106903 - RNA, 18 nt, Human adenovirus C
ucucuuaacuaccaguug

SEQ ID NO: 106904 - RNA, 21 nt, Human adenovirus C
ugcaaguacaagauuagcaaa

SEQ ID NO: 106905 - RNA, 13 nt, Human adenovirus C
ugcaagucaggga

SEQ ID NO: 106906 - RNA, 21 nt, Human adenovirus C
ugagauaauguuuaacuugca

SEQ ID NO: 106907 - RNA, 18 nt, Human adenovirus C
ugagcagcaccuugcauu

SEQ ID NO: 106908 - RNA, 14 nt, Human adenovirus C
ugagcaggaacuga

SEQ ID NO: 106909 - RNA, 23 nt, Human adenovirus C
ugagcaggaacugaaagccauug

SEQ ID NO: 106910 - RNA, 20 nt, Human adenovirus C
ugagcccgagagcaugucca

SEQ ID NO: 106911 - RNA, 18 nt, Human adenovirus C
ugauaggggaagugcagg

SEQ ID NO: 106912 - RNA, 16 nt, Human adenovirus C
ugaucaauauaagcua

SEQ ID NO: 106913 - RNA, 23 nt, Human adenovirus C
ugaucaauauaagcuauguggug

SEQ ID NO: 106914 - RNA, 17 nt, Human adenovirus C
ugaucaccguaccuuaa

SEQ ID NO: 106915 - RNA, 17 nt, Human adenovirus C
ugacaaagcccaagaaa

SEQ ID NO: 106916 - RNA, 20 nt, Human adenovirus C
ugacugggcgagcuuggaca

SEQ ID NO: 106917 - RNA, 14 nt, Human adenovirus C
ugacucuggauguu

SEQ ID NO: 106918 - RNA, 18 nt, Human adenovirus C
ugaaauuuucugcaauug

SEQ ID NO: 106919 - RNA, 16 nt, Human adenovirus C
ucuuugaaucuggguc

SEQ ID NO: 106920 - RNA, 17 nt, Human adenovirus C
ugaacgggaagcugcac

SEQ ID NO: 106921 - RNA, 22 nt, Human adenovirus C
uggcacuuaggccagauugcaa

SEQ ID NO: 106922 - RNA, 17 nt, Human adenovirus C
uggcgcgggcacaagaa

SEQ ID NO: 106923 - RNA, 20 nt, Human adenovirus C
uggcgcauuuggucagggaa

SEQ ID NO: 106924 - RNA, 13 nt, Human adenovirus C
uggccuuugccug

SEQ ID NO: 106925 - RNA, 16 nt, Human adenovirus C
uggccuuaaaaagcau

SEQ ID NO: 106926 - RNA, 16 nt, Human adenovirus C
uggucagggaaaacau

SEQ ID NO: 106927 - RNA, 22 nt, Human adenovirus C
uguacacucucgggugauuauu

SEQ ID NO: 106928 - RNA, 14 nt, Human adenovirus C
ugugcgcauugcgu

SEQ ID NO: 106929 - RNA, 15 nt, Human adenovirus C
ugugcuuugcuccca

SEQ ID NO: 106930 - RNA, 23 nt, Human adenovirus C
ugugcuuugcucccaaaccucag

SEQ ID NO: 106931 - RNA, 20 nt, Human adenovirus C
uguggaguuaccagccacaa

SEQ ID NO: 106932 - RNA, 23 nt, Human adenovirus C
ugcagccgguaauaggugugauu

SEQ ID NO: 106933 - RNA, 14 nt, Human adenovirus C
ugcagauucacuca

SEQ ID NO: 106934 - RNA, 19 nt, Human adenovirus C
ugcacugcaaauuugauca

SEQ ID NO: 106935 - RNA, 14 nt, Human adenovirus C
ugcacugcuugcaa

SEQ ID NO: 106936 - RNA, 11 nt, Human adenovirus C
ugcucagggau

SEQ ID NO: 106937 - RNA, 13 nt, Human adenovirus C
ugcuuccuugcaa

SEQ ID NO: 106938 - RNA, 21 nt, Human adenovirus C
ugcuuccuugcaagaacugcu

SEQ ID NO: 106939 - RNA, 11 nt, Human adenovirus C
ugcuuggucaa

SEQ ID NO: 106940 - RNA, 18 nt, Human adenovirus C
ugcugugcguaacuugcu

SEQ ID NO: 106941 - RNA, 20 nt, Human adenovirus C
ugcuuaacgagucugggcaa

SEQ ID NO: 106942 - RNA, 21 nt, Human adenovirus C
ugcuggcgcagauccaacagc

SEQ ID NO: 106943 - RNA, 16 nt, Human adenovirus C
ugcugagccacaggcu

SEQ ID NO: 106944 - RNA, 13 nt, Human adenovirus C
ugcugaaugaguu

SEQ ID NO: 106945 - RNA, 16 nt, Human adenovirus C
ugcugaaugaguugau

SEQ ID NO: 106946 - RNA, 19 nt, Human adenovirus C
ugcuuucuucccagcugau

SEQ ID NO: 106947 - RNA, 15 nt, Human adenovirus C
uggacaacaagucaa

SEQ ID NO: 106948 - RNA, 13 nt, Human adenovirus C
uggacaauuuacu

SEQ ID NO: 106949 - RNA, 16 nt, Human adenovirus C
uggacagcagccugug

SEQ ID NO: 106950 - RNA, 21 nt, Human adenovirus C
uggacagcgacaugaacuuaa

SEQ ID NO: 106951 - RNA, 22 nt, Human adenovirus C
uggaauauaacaccuaagaaua

SEQ ID NO: 106952 - RNA, 13 nt, Human adenovirus C
uggaaggugcuga

SEQ ID NO: 106953 - RNA, 17 nt, Human adenovirus C
uggaacugcuuggucaa

SEQ ID NO: 106954 - RNA, 20 nt, Human adenovirus C
uucugcugugcguaacuugc

SEQ ID NO: 106955 - RNA, 23 nt, Human adenovirus C
uucugccagcgccugcacugcaa

SEQ ID NO: 106956 - RNA, 19 nt, Human adenovirus C
uugccuuuauugaaagugu

SEQ ID NO: 106957 - RNA, 16 nt, Human adenovirus C
uugcgugugugguuaa

SEQ ID NO: 106958 - RNA, 22 nt, Human adenovirus C
uucuaacacaccuccugagaua

SEQ ID NO: 106959 - RNA, 22 nt, Human adenovirus C
uuccaggacgugguaaagguga

SEQ ID NO: 106960 - RNA, 15 nt, Human adenovirus C
uucaauaaaggcaaa

SEQ ID NO: 106961 - RNA, 22 nt, Human adenovirus C
uuaagcugggaugggugcauac

SEQ ID NO: 106962 - RNA, 19 nt, Human adenovirus C
uuaauaaagggugagauaa

SEQ ID NO: 106963 - RNA, 15 nt, Human adenovirus C
uuacccacccaaagc

SEQ ID NO: 106964 - RNA, 21 nt, Human adenovirus C
uuaccccuccauuuguuucac

SEQ ID NO: 106965 - RNA, 21 nt, Human adenovirus C
uuaccugcuuuacggauuugu

SEQ ID NO: 106966 - RNA, 23 nt, Human adenovirus C
uuacauguuuuucaagugacaaa

SEQ ID NO: 106967 - RNA, 17 nt, Human adenovirus C
ugugggauaugcuccag

SEQ ID NO: 106968 - RNA, 15 nt, Human adenovirus C
uguguuacuuuucag

SEQ ID NO: 106969 - RNA, 21 nt, Human adenovirus C
uuaacuugcauggcguguuaa

SEQ ID NO: 106970 - RNA, 19 nt, Human adenovirus C
uuaugaaacggagugucau

SEQ ID NO: 106971 - RNA, 22 nt, Human adenovirus C
uuauauugaucaccguaccuua

SEQ ID NO: 106972 - RNA, 16 nt, Human adenovirus C
uuagcugcaaacuuuc

SEQ ID NO: 106973 - RNA, 21 nt, Human adenovirus C
uuagcugcaaacuuucuccaa

SEQ ID NO: 106974 - RNA, 16 nt, Human adenovirus C
ccggccuuaacuccac

SEQ ID NO: 106975 - RNA, 18 nt, Human adenovirus C
ccgccguuagcccaagag

SEQ ID NO: 106976 - RNA, 16 nt, Human adenovirus C
ccgccaccaaccagcc

SEQ ID NO: 106977 - RNA, 23 nt, Human adenovirus C
ccggcguuccauuuggcaugaca

SEQ ID NO: 106978 - RNA, 19 nt, Human adenovirus C
ccgucugaagacaccuuca

SEQ ID NO: 106979 - RNA, 15 nt, Human adenovirus C
ccgcaccuacaagcg

SEQ ID NO: 106980 - RNA, 21 nt, Human adenovirus C
cccuaguauucaaccugccac

SEQ ID NO: 106981 - RNA, 20 nt, Human adenovirus C
cccuacauguggaguuacca

SEQ ID NO: 106982 - RNA, 18 nt, Human adenovirus C
cccgggucaaagaaucca

SEQ ID NO: 106983 - RNA, 11 nt, Human adenovirus C
ccccaucugaa

SEQ ID NO: 106984 - RNA, 13 nt, Human adenovirus C
ccccccugcucag

SEQ ID NO: 106985 - RNA, 23 nt, Human adenovirus C
cccccguaacauccugcauuacu

SEQ ID NO: 106986 - RNA, 17 nt, Human adenovirus C
cccagcguuugacgcug

SEQ ID NO: 106987 - RNA, 14 nt, Human adenovirus C
cccaccaccacaua

SEQ ID NO: 106988 - RNA, 20 nt, Human adenovirus C
cccaccaccacauagcuuau

SEQ ID NO: 106989 - RNA, 12 nt, Human adenovirus C
cccaacacacag

SEQ ID NO: 106990 - RNA, 14 nt, Human adenovirus C
cccaaaagacauau

SEQ ID NO: 106991 - RNA, 23 nt, Human adenovirus C
ccagugcgcgugcgcgggcacua

SEQ ID NO: 106992 - RNA, 14 nt, Human adenovirus C
ccagccugugaugc

SEQ ID NO: 106993 - RNA, 20 nt, Human adenovirus C
ccaugcaacaagcuuacaua

SEQ ID NO: 106994 - RNA, 14 nt, Human adenovirus C
ccacaccucguaau

SEQ ID NO: 106995 - RNA, 19 nt, Human adenovirus C
ccacagcggcggcagcagc

SEQ ID NO: 106996 - RNA, 23 nt, Human adenovirus C
caugaagaucuggaaggugcuga

SEQ ID NO: 106997 - RNA, 16 nt, Human adenovirus C
caugcaagucagggac

SEQ ID NO: 106998 - RNA, 15 nt, Human adenovirus C
cauuuguuucaccca

SEQ ID NO: 106999 - RNA, 20 nt, Human adenovirus C
ccaaagcgugcaggggccca

SEQ ID NO: 107000 - RNA, 18 nt, Human adenovirus C
ccaacggcguuccagaca

SEQ ID NO: 107001 - RNA, 20 nt, Human adenovirus C
cagucagcaaaucuuugucc

SEQ ID NO: 107002 - RNA, 13 nt, Human adenovirus C
caguuuaccugcu

SEQ ID NO: 107003 - RNA, 19 nt, Human adenovirus C
cagugagcaggaacugaaa

SEQ ID NO: 107004 - RNA, 19 nt, Human adenovirus C
caucgcuaugcgccacugg

SEQ ID NO: 107005 - RNA, 23 nt, Human adenovirus C
caucugcgcgauguugucaucaa

SEQ ID NO: 107006 - RNA, 17 nt, Human adenovirus C
cagccgccgccaugagc

SEQ ID NO: 107007 - RNA, 14 nt, Human adenovirus C
cagacauauucuua

SEQ ID NO: 107008 - RNA, 21 nt, Human adenovirus C
cagacauauucuuagguguua

SEQ ID NO: 107009 - RNA, 13 nt, Human adenovirus C
cagaaugugaugg

SEQ ID NO: 107010 - RNA, 21 nt, Human adenovirus C
cagcggcaacgugcagaccaa

SEQ ID NO: 107011 - RNA, 18 nt, Human adenovirus C
cagcggucacacagaagc

SEQ ID NO: 107012 - RNA, 13 nt, Human adenovirus C
caggaaccugcuu

SEQ ID NO: 107013 - RNA, 17 nt, Human adenovirus C
cagcuugccugcuccag

SEQ ID NO: 107014 - RNA, 23 nt, Human adenovirus C
cagcuucagcuugccugcuccag

SEQ ID NO: 107015 - RNA, 17 nt, Human adenovirus C
cagggcagaaaccugcu

SEQ ID NO: 107016 - RNA, 22 nt, Human adenovirus C
caggacgccucggaguaccuga

SEQ ID NO: 107017 - RNA, 22 nt, Human adenovirus C
caggagcgcugggcguggugcc

SEQ ID NO: 107018 - RNA, 14 nt, Human adenovirus C
augcaagucaggga

SEQ ID NO: 107019 - RNA, 20 nt, Human adenovirus C
augcaagucagggacaugcu

SEQ ID NO: 107020 - RNA, 18 nt, Human adenovirus C
augcuggagcccaucaca

SEQ ID NO: 107021 - RNA, 20 nt, Human adenovirus C
augcuaccucuuugagcccu

SEQ ID NO: 107022 - RNA, 14 nt, Human adenovirus C
augagcuugaucug

SEQ ID NO: 107023 - RNA, 22 nt, Human adenovirus C
augagcuugaucugcuggcgca

SEQ ID NO: 107024 - RNA, 18 nt, Human adenovirus C
augagcgcgggaccccac

SEQ ID NO: 107025 - RNA, 20 nt, Human adenovirus C
auuaugaaacggagugucau

SEQ ID NO: 107026 - RNA, 12 nt, Human adenovirus C
auuaauaucacu

SEQ ID NO: 107027 - RNA, 22 nt, Human adenovirus C
auucuuagguguuauauuccac

SEQ ID NO: 107028 - RNA, 16 nt, Human adenovirus C
auugaaagugucuccu

SEQ ID NO: 107029 - RNA, 14 nt, Human adenovirus C
auguaugcguccau

SEQ ID NO: 107030 - RNA, 15 nt, Human adenovirus C
auguuuaacuugcau

SEQ ID NO: 107031 - RNA, 15 nt, Human adenovirus C
auguuuguuugccuu

SEQ ID NO: 107032 - RNA, 21 nt, Human adenovirus C
auggaagcauugugagcucau

SEQ ID NO: 107033 - RNA, 16 nt, Human adenovirus C
auggaauaagaucucu

SEQ ID NO: 107034 - RNA, 13 nt, Human adenovirus C
augcuuugagaga

SEQ ID NO: 107035 - RNA, 14 nt, Human adenovirus C
auggccuuugccug

SEQ ID NO: 107036 - RNA, 20 nt, Human adenovirus C
caagaacgccauaguugcuu

SEQ ID NO: 107037 - RNA, 16 nt, Human adenovirus C
caagacacuugcuuga

SEQ ID NO: 107038 - RNA, 14 nt, Human adenovirus C
caagacuacucaac

SEQ ID NO: 107039 - RNA, 17 nt, Human adenovirus C
caagacucugacaaagc

SEQ ID NO: 107040 - RNA, 15 nt, Human adenovirus C
caagagcaacaacag

SEQ ID NO: 107041 - RNA, 11 nt, Human adenovirus C
caagugacaaa

SEQ ID NO: 107042 - RNA, 19 nt, Human adenovirus C
caagucauuuuucauucag

SEQ ID NO: 107043 - RNA, 23 nt, Human adenovirus C
caagucagggacaugcuuaacga

SEQ ID NO: 107044 - RNA, 22 nt, Human adenovirus C
caacgcgcaugcccccaugggc

SEQ ID NO: 107045 - RNA, 23 nt, Human adenovirus C
caauugcagaaaauuucaaguca

SEQ ID NO: 107046 - RNA, 16 nt, Human adenovirus C
caaguugcauguggaa

SEQ ID NO: 107047 - RNA, 16 nt, Human adenovirus C
cacaaaagauaccucu

SEQ ID NO: 107048 - RNA, 13 nt, Human adenovirus C
auuuuaaccauua

SEQ ID NO: 107049 - RNA, 14 nt, Human adenovirus C
auuuguugccuaaa

SEQ ID NO: 107050 - RNA, 20 nt, Human adenovirus C
auuuccugcagauucacuca

SEQ ID NO: 107051 - RNA, 18 nt, Human adenovirus C
auugcaucccaccuuuca

SEQ ID NO: 107052 - RNA, 21 nt, Human adenovirus C
auugcagaaaauuucaaguca

SEQ ID NO: 107053 - RNA, 21 nt, Human adenovirus C
caaagucagucacaaucccgc

SEQ ID NO: 107054 - RNA, 16 nt, Human adenovirus C
caaaauccaaacagag

SEQ ID NO: 107055 - RNA, 23 nt, Human adenovirus C
caaaagagccgucaacuugucau

SEQ ID NO: 107056 - RNA, 14 nt, Human adenovirus C
caaaagauaccucu

SEQ ID NO: 107057 - RNA, 19 nt, Human adenovirus C
acgccgccaccaaccagcc

SEQ ID NO: 107058 - RNA, 20 nt, Human adenovirus C
accugccuuuaucugcauga

SEQ ID NO: 107059 - RNA, 18 nt, Human adenovirus C
accccuucgaugaugccg

SEQ ID NO: 107060 - RNA, 16 nt, Human adenovirus C
acccgagaguguacaa

SEQ ID NO: 107061 - RNA, 18 nt, Human adenovirus C
accccuccauuuguuuca

SEQ ID NO: 107062 - RNA, 23 nt, Human adenovirus C
accccuccauuuguuucacccaa

SEQ ID NO: 107063 - RNA, 14 nt, Human adenovirus C
accaccacaccucg

SEQ ID NO: 107064 - RNA, 16 nt, Human adenovirus C
accgccgccggcauca

SEQ ID NO: 107065 - RNA, 20 nt, Human adenovirus C
accgcccgcgggauugugac

SEQ ID NO: 107066 - RNA, 22 nt, Human adenovirus C
acccgccaggcgaggggcucaa

SEQ ID NO: 107067 - RNA, 16 nt, Human adenovirus C
accuacaagcgcgugu

SEQ ID NO: 107068 - RNA, 19 nt, Human adenovirus C
acugugggggcaacaucuc

SEQ ID NO: 107069 - RNA, 14 nt, Human adenovirus C
acuguguacucugu

SEQ ID NO: 107070 - RNA, 16 nt, Human adenovirus C
acuguguacucugugu

SEQ ID NO: 107071 - RNA, 15 nt, Human adenovirus C
acuuaaaaucaguca

SEQ ID NO: 107072 - RNA, 14 nt, Human adenovirus C
acugcuaccggacu

SEQ ID NO: 107073 - RNA, 13 nt, Human adenovirus C
acugcuuggucaa

SEQ ID NO: 107074 - RNA, 16 nt, Human adenovirus C
acuggaacacuaucag

SEQ ID NO: 107075 - RNA, 22 nt, Human adenovirus C
acuacucaacccgaauaaacua

SEQ ID NO: 107076 - RNA, 15 nt, Human adenovirus C
acuaccgucaucucu

SEQ ID NO: 107077 - RNA, 18 nt, Human adenovirus C
acuaccgucaucucuaca

SEQ ID NO: 107078 - RNA, 22 nt, Human adenovirus C
acguuagcgccugauuucugcc

SEQ ID NO: 107079 - RNA, 21 nt, Human adenovirus C
acguugaaacauaacaugcaa

SEQ ID NO: 107080 - RNA, 13 nt, Human adenovirus C
acgggaagcugca

SEQ ID NO: 107081 - RNA, 16 nt, Human adenovirus C
acgggguguuugacau

SEQ ID NO: 107082 - RNA, 15 nt, Human adenovirus C
acaccuccugagaua

SEQ ID NO: 107083 - RNA, 18 nt, Human adenovirus C
acagaguacacaguccuu

SEQ ID NO: 107084 - RNA, 13 nt, Human adenovirus C
acacagaagcaaa

SEQ ID NO: 107085 - RNA, 19 nt, Human adenovirus C
acacaaaagauaccucuuu

SEQ ID NO: 107086 - RNA, 16 nt, Human adenovirus C
acaucuacggauauca

SEQ ID NO: 107087 - RNA, 14 nt, Human adenovirus C
acagauugagguac

SEQ ID NO: 107088 - RNA, 16 nt, Human adenovirus C
acaggcugcuguccaa

SEQ ID NO: 107089 - RNA, 21 nt, Human adenovirus C
acaguagggaucgccuaccuc

SEQ ID NO: 107090 - RNA, 15 nt, Human adenovirus C
acaagauuagcaaac

SEQ ID NO: 107091 - RNA, 20 nt, Human adenovirus C
acaagauuagcaaacuugua

SEQ ID NO: 107092 - RNA, 23 nt, Human adenovirus C
acaaccuucaaaucaaacuuucc

SEQ ID NO: 107093 - RNA, 23 nt, Human adenovirus C
acaacagcgccaaggcuaccgcu

SEQ ID NO: 107094 - RNA, 15 nt, Human adenovirus C
aauuugaagagcuuu

SEQ ID NO: 107095 - RNA, 17 nt, Human adenovirus C
aaucuuuguccagcuua

SEQ ID NO: 107096 - RNA, 16 nt, Human adenovirus C
auaggggaagugcagg

SEQ ID NO: 107097 - RNA, 18 nt, Human adenovirus C
aucaauauaagcuaugug

SEQ ID NO: 107098 - RNA, 18 nt, Human adenovirus C
auaaggugggggucucau

SEQ ID NO: 107099 - RNA, 12 nt, Human adenovirus C
auaagagugcag

SEQ ID NO: 107100 - RNA, 13 nt, Human adenovirus C
auaagagugcaga

SEQ ID NO: 107101 - RNA, 20 nt, Human adenovirus C
auaagaucucuaauaccaca

SEQ ID NO: 107102 - RNA, 18 nt, Human adenovirus C
agucaucgccuucauuca

SEQ ID NO: 107103 - RNA, 16 nt, Human adenovirus C
agucgcagcugcucag

SEQ ID NO: 107104 - RNA, 17 nt, Human adenovirus C
agucgcagcugcucagg

SEQ ID NO: 107105 - RNA, 17 nt, Human adenovirus C
agguguaaaccugugau

SEQ ID NO: 107106 - RNA, 15 nt, Human adenovirus C
agguggcugaacugu

SEQ ID NO: 107107 - RNA, 14 nt, Human adenovirus C
aggugcugagguac

SEQ ID NO: 107108 - RNA, 13 nt, Human adenovirus C
auaaacacguuga

SEQ ID NO: 107109 - RNA, 12 nt, Human adenovirus C
aguuuaccugcu

SEQ ID NO: 107110 - RNA, 21 nt, Human adenovirus C
agugacaaaaagaaguggcgc

SEQ ID NO: 107111 - RNA, 13 nt, Human adenovirus C
agucuccaacggc

SEQ ID NO: 107112 - RNA, 15 nt, Human adenovirus C
agucugcagaauuaa

SEQ ID NO: 107113 - RNA, 13 nt, Human adenovirus C
agauccaacagcu

SEQ ID NO: 107114 - RNA, 22 nt, Human adenovirus C
agauacagauugagguacugaa

SEQ ID NO: 107115 - RNA, 14 nt, Human adenovirus C
agaaaaaugguguc

SEQ ID NO: 107116 - RNA, 10 nt, Human adenovirus C
agagugcaga

SEQ ID NO: 107117 - RNA, 14 nt, Human adenovirus C
agagcaacaacagc

SEQ ID NO: 107118 - RNA, 15 nt, Human adenovirus C
agagcaacaacagcg

SEQ ID NO: 107119 - RNA, 13 nt, Human adenovirus C
agcaacagcagcg

SEQ ID NO: 107120 - RNA, 13 nt, Human adenovirus C
agcaacaacagcg

SEQ ID NO: 107121 - RNA, 20 nt, Human adenovirus C
agauuuuucugcugugcgua

SEQ ID NO: 107122 - RNA, 24 nt, Human adenovirus C
agcaagacucugacaaagcccaag

SEQ ID NO: 107123 - RNA, 15 nt, Human adenovirus C
agaucuugguugugg

SEQ ID NO: 107124 - RNA, 20 nt, Human adenovirus C
agaucuugguugugggccau

SEQ ID NO: 107125 - RNA, 23 nt, Human adenovirus C
agaugauccagucguagcaggag

SEQ ID NO: 107126 - RNA, 23 nt, Human adenovirus C
agccugauucgggaguuuaccaa

SEQ ID NO: 107127 - RNA, 13 nt, Human adenovirus C
agccauugucaaa

SEQ ID NO: 107128 - RNA, 18 nt, Human adenovirus C
agcagguuuaccaguuug

SEQ ID NO: 107129 - RNA, 13 nt, Human adenovirus C
agcaucauaucau

SEQ ID NO: 107130 - RNA, 16 nt, Human adenovirus C
agcaucaccuccuuuc

SEQ ID NO: 107131 - RNA, 16 nt, Human adenovirus C
agcaggauuacaagcc

SEQ ID NO: 107132 - RNA, 16 nt, Human adenovirus C
agcacuggaacacuau

SEQ ID NO: 107133 - RNA, 19 nt, Human adenovirus C
aggaaagucccgcucccac

SEQ ID NO: 107134 - RNA, 22 nt, Human adenovirus C
aggaaauucccacgcccuacau

SEQ ID NO: 107135 - RNA, 18 nt, Human adenovirus C
aggaaagcaaagucaguc

SEQ ID NO: 107136 - RNA, 21 nt, Human adenovirus C
aggaaagcaaagucagucaca

SEQ ID NO: 107137 - RNA, 20 nt, Human adenovirus C
agcguuuggcucgacaggaa

SEQ ID NO: 107138 - RNA, 21 nt, Human adenovirus C
agcgcuuauguuuguuugccu

SEQ ID NO: 107139 - RNA, 16 nt, Human adenovirus C
agcggcggcagcagca

SEQ ID NO: 107140 - RNA, 20 nt, Human adenovirus C
agcgucaacgacugcgcacg

SEQ ID NO: 107141 - RNA, 16 nt, Human adenovirus C
aggaaucuaacuuuua

SEQ ID NO: 107142 - RNA, 14 nt, Human adenovirus C
aggaagaaugcacc

SEQ ID NO: 107143 - RNA, 19 nt, Human adenovirus C
aggcccuugguguaagugu

SEQ ID NO: 107144 - RNA, 20 nt, Human adenovirus C
gggaugacggcagcugcagc

SEQ ID NO: 107145 - RNA, 21 nt, Human adenovirus C
gggcagcucgcuuaaguucau

SEQ ID NO: 107146 - RNA, 12 nt, Human adenovirus C
gggaagugcagg

SEQ ID NO: 107147 - RNA, 22 nt, Human adenovirus C
ggccagagcgucccgaccaugg

SEQ ID NO: 107148 - RNA, 14 nt, Human adenovirus C
ggccagauugcaag

SEQ ID NO: 107149 - RNA, 13 nt, Human adenovirus C
ggccacggccuga

SEQ ID NO: 107150 - RNA, 16 nt, Human adenovirus C
ggcgccucugcgugaa

SEQ ID NO: 107151 - RNA, 19 nt, Human adenovirus C
ggcugcgguaagucgcagc

SEQ ID NO: 107152 - RNA, 13 nt, Human adenovirus C
ggcggaggcugca

SEQ ID NO: 107153 - RNA, 16 nt, Human adenovirus C
ggcgcugcagagccag

SEQ ID NO: 107154 - RNA, 18 nt, Human adenovirus C
ggcaucccugaacuacca

SEQ ID NO: 107155 - RNA, 19 nt, Human adenovirus C
ggaaccagccugugaugcu

SEQ ID NO: 107156 - RNA, 21 nt, Human adenovirus C
ggaaccagccugugaugcugg

SEQ ID NO: 107157 - RNA, 21 nt, Human adenovirus C
guauagccccaccaccacaua

SEQ ID NO: 107158 - RNA, 16 nt, Human adenovirus C
guacggauagcuguga

SEQ ID NO: 107159 - RNA, 12 nt, Human adenovirus C
guacuuugacau

SEQ ID NO: 107160 - RNA, 21 nt, Human adenovirus C
guagguuaaccaugucuucaa

SEQ ID NO: 107161 - RNA, 15 nt, Human adenovirus C
gguugcagcacugga

SEQ ID NO: 107162 - RNA, 22 nt, Human adenovirus C
guaccuuaaucaaacucacaga

SEQ ID NO: 107163 - RNA, 16 nt, Human adenovirus C
guaagucgcagcugcu

SEQ ID NO: 107164 - RNA, 17 nt, Human adenovirus C
gguguaaaccugugauu

SEQ ID NO: 107165 - RNA, 12 nt, Human adenovirus C
gguguagguuaa

SEQ ID NO: 107166 - RNA, 13 nt, Human adenovirus C
gguggcugcagcg

SEQ ID NO: 107167 - RNA, 15 nt, Human adenovirus C
ggguugugauccaug

SEQ ID NO: 107168 - RNA, 20 nt, Human adenovirus C
gguaagucgcagcugcucag

SEQ ID NO: 107169 - RNA, 14 nt, Human adenovirus C
gcagaccugcacga

SEQ ID NO: 107170 - RNA, 19 nt, Human adenovirus C
gcagcacuggaacacuauc

SEQ ID NO: 107171 - RNA, 13 nt, Human adenovirus C
gcagcaacagcag

SEQ ID NO: 107172 - RNA, 20 nt, Human adenovirus C
gccccgggcuggugcaguuu

SEQ ID NO: 107173 - RNA, 12 nt, Human adenovirus C
gcagcagccgcc

SEQ ID NO: 107174 - RNA, 21 nt, Human adenovirus C
gccccuccuuauuccacugau

SEQ ID NO: 107175 - RNA, 15 nt, Human adenovirus C
gccccuggaaaucag

SEQ ID NO: 107176 - RNA, 19 nt, Human adenovirus C
gcccgacaucaccuguguc

SEQ ID NO: 107177 - RNA, 22 nt, Human adenovirus C
gcccgucucugggguggaggua

SEQ ID NO: 107178 - RNA, 19 nt, Human adenovirus C
gcccugguguaccaggaaa

SEQ ID NO: 107179 - RNA, 20 nt, Human adenovirus C
gcccuugguguaaguguuua

SEQ ID NO: 107180 - RNA, 16 nt, Human adenovirus C
gccgaaguucagauga

SEQ ID NO: 107181 - RNA, 24 nt, Human adenovirus C
gccgaaguucagaugacuaacuca

SEQ ID NO: 107182 - RNA, 18 nt, Human adenovirus C
gccgacccggcacugccg

SEQ ID NO: 107183 - RNA, 18 nt, Human adenovirus C
gccgcacugggcgcacca

SEQ ID NO: 107184 - RNA, 15 nt, Human adenovirus C
gccgcuucagccgcu

SEQ ID NO: 107185 - RNA, 14 nt, Human adenovirus C
gccgccgacccggc

SEQ ID NO: 107186 - RNA, 14 nt, Human adenovirus C
gccgcgggagcucc

SEQ ID NO: 107187 - RNA, 15 nt, Human adenovirus C
gccgcggucgcucac

SEQ ID NO: 107188 - RNA, 18 nt, Human adenovirus C
gcgaccaucaaugcugga

SEQ ID NO: 107189 - RNA, 13 nt, Human adenovirus C
gccugugaugcug

SEQ ID NO: 107190 - RNA, 18 nt, Human adenovirus C
gccuuauuauuauguggc

SEQ ID NO: 107191 - RNA, 14 nt, Human adenovirus C
gccuggaacugcuu

SEQ ID NO: 107192 - RNA, 13 nt, Human adenovirus C
gccguccggccuu

SEQ ID NO: 107193 - RNA, 15 nt, Human adenovirus C
gccucccaaaagaca

SEQ ID NO: 107194 - RNA, 18 nt, Human adenovirus C
gccuccgcgguaccugcg

SEQ ID NO: 107195 - RNA, 17 nt, Human adenovirus C
gcgaguugcgauacaca

SEQ ID NO: 107196 - RNA, 16 nt, Human adenovirus C
gcgcagagacacugau

SEQ ID NO: 107197 - RNA, 16 nt, Human adenovirus C
gcgccauuaugagcaa

SEQ ID NO: 107198 - RNA, 12 nt, Human adenovirus C
gcgcccuaccug

SEQ ID NO: 107199 - RNA, 19 nt, Human adenovirus C
gcuaccggacuaacaucug

SEQ ID NO: 107200 - RNA, 19 nt, Human adenovirus C
gcgugcgcgggcacuaccg

SEQ ID NO: 107201 - RNA, 22 nt, Human adenovirus C
gcuagguccaggugauaccuga

SEQ ID NO: 107202 - RNA, 22 nt, Human adenovirus C
gcguagcacgucgccaccgccg

SEQ ID NO: 107203 - RNA, 16 nt, Human adenovirus C
gcggucacacagaagc

SEQ ID NO: 107204 - RNA, 19 nt, Human adenovirus C
gcucguggcgcgggcacaa

SEQ ID NO: 107205 - RNA, 22 nt, Human adenovirus C
gcucguggcgcgggcacaagaa

SEQ ID NO: 107206 - RNA, 16 nt, Human adenovirus C
gcuaugcgccacuggc

SEQ ID NO: 107207 - RNA, 20 nt, Human adenovirus C
gcucccaccacugugguacu

SEQ ID NO: 107208 - RNA, 19 nt, Human adenovirus C
gcuccugucgccauccugu

SEQ ID NO: 107209 - RNA, 12 nt, Human adenovirus C
gcugcucaggaa

SEQ ID NO: 107210 - RNA, 12 nt, Human adenovirus C
gcuuaaagggua

SEQ ID NO: 107211 - RNA, 21 nt, Human adenovirus C
gcuuauguuuguuugccuuau

SEQ ID NO: 107212 - RNA, 13 nt, Human adenovirus C
gcuuguagcugag

SEQ ID NO: 107213 - RNA, 18 nt, Human adenovirus C
guggccccccugcucagg

SEQ ID NO: 107214 - RNA, 21 nt, Human adenovirus C
guggccccccugcucagggau

SEQ ID NO: 107215 - RNA, 12 nt, Human adenovirus C
guguaccaggaa

SEQ ID NO: 107216 - RNA, 16 nt, Human adenovirus C
guguguuacuuuucag

SEQ ID NO: 107217 - RNA, 13 nt, Human adenovirus C
guguuaauuccau

SEQ ID NO: 107218 - RNA, 17 nt, Human adenovirus C
gucccgcucccaccacu

SEQ ID NO: 107219 - RNA, 12 nt, Human adenovirus C
guuauauuccac

SEQ ID NO: 107220 - RNA, 22 nt, Human adenovirus C
guuacuuugaauugcccgaaga

SEQ ID NO: 107221 - RNA, 15 nt, Human adenovirus C
guucagauacauggg

SEQ ID NO: 107222 - RNA, 22 nt, Human adenovirus C
guucccgggucaaagaauccaa

SEQ ID NO: 107223 - RNA, 22 nt, Human adenovirus C
guucaugccuuugucaaugacu

SEQ ID NO: 107224 - RNA, 17 nt, Human adenovirus C
guuuggcucgacaggaa

SEQ ID NO: 107225 - RNA, 20 nt, Human adenovirus C
guuugauuaagguacgguga

SEQ ID NO: 107226 - RNA, 15 nt, Human adenovirus C
guuugauucuuugaa

SEQ ID NO: 107227 - RNA, 20 nt, Human adenovirus C
guuugacgcugcgguucauc

SEQ ID NO: 107228 - RNA, 22 nt, Human adenovirus C
guuuuguaucuguuuugcagca

SEQ ID NO: 107229 - RNA, 16 nt, Human adenovirus C
guuuaauaaaggguga

SEQ ID NO: 107230 - RNA, 20 nt, Human adenovirus C
guuuaauaaagggugagaua

SEQ ID NO: 107231 - RNA, 22 nt, Human adenovirus C
guuuauuaauaucacugaugag

SEQ ID NO: 107232 - RNA, 15 nt, Human adenovirus C
guucuuuugucaugg

SEQ ID NO: 107233 - RNA, 20 nt, Human adenovirus C
guugcauguggaaaaaucaa

SEQ ID NO: 107234 - RNA, 17 nt, Human adenovirus C
guugcgauacacagggu

SEQ ID NO: 107235 - RNA, 22 nt, Human adenovirus C
guugcgauacacaggguugcag

SEQ ID NO: 107236 - RNA, 16 nt, Human adenovirus C
guugcgauacuggugu

SEQ ID NO: 107237 - RNA, 14 nt, Human adenovirus C
guugcgcuuuucug

SEQ ID NO: 107238 - RNA, 20 nt, Human adenovirus C
uaaacacguugaaacauaac

SEQ ID NO: 107239 - RNA, 21 nt, Human adenovirus C
uaaacacguugaaacauaaca

SEQ ID NO: 107240 - RNA, 22 nt, Human adenovirus C
uaaauaucaggaauuguugcua

SEQ ID NO: 107241 - RNA, 20 nt, Human adenovirus C
uaacacaccuccugagauac

SEQ ID NO: 107242 - RNA, 14 nt, Human adenovirus C
uaaauuacuuacuu

SEQ ID NO: 107243 - RNA, 21 nt, Human adenovirus C
uaauugcgcuaaugagcuuga

SEQ ID NO: 107244 - RNA, 21 nt, Human adenovirus C
uaagcugggaugggugcauac

SEQ ID NO: 107245 - RNA, 16 nt, Human adenovirus C
uacacaggguugcagc

SEQ ID NO: 107246 - RNA, 15 nt, Human adenovirus C
uacagauugagguac

SEQ ID NO: 107247 - RNA, 11 nt, Human adenovirus C
uacuggcugca

SEQ ID NO: 107248 - RNA, 13 nt, Human adenovirus C
uaccugccuuuau

SEQ ID NO: 107249 - RNA, 13 nt, Human adenovirus C
uaccugugcuuug

SEQ ID NO: 107250 - RNA, 22 nt, Human adenovirus C
uaccuccuuuugagacagagac

SEQ ID NO: 107251 - RNA, 15 nt, Human adenovirus C
uauacuacugaauga

SEQ ID NO: 107252 - RNA, 22 nt, Human adenovirus C
uauacccacaaccuucaaauca

SEQ ID NO: 107253 - RNA, 15 nt, Human adenovirus C
uagcugaucuucuca

SEQ ID NO: 107254 - RNA, 21 nt, Human adenovirus C
uagagcagcugaccacuuacu

SEQ ID NO: 107255 - RNA, 22 nt, Human adenovirus C
uagaaaccccacgguggcaccu

SEQ ID NO: 107256 - RNA, 16 nt, Human adenovirus C
uagaagaccaccagcc

SEQ ID NO: 107257 - RNA, 17 nt, Human adenovirus C
uagacucguacuguugu

SEQ ID NO: 107258 - RNA, 19 nt, Human adenovirus C
cuuugcucccaaaccucag

SEQ ID NO: 107259 - RNA, 21 nt, Human adenovirus C
cuuugcgucucuggccccgcg

SEQ ID NO: 107260 - RNA, 18 nt, Human adenovirus C
cuuugaauugcccgaaga

SEQ ID NO: 107261 - RNA, 12 nt, Human adenovirus C
cuuuccuggacg

SEQ ID NO: 107262 - RNA, 14 nt, Human adenovirus C
cuuuguuugcugaa

SEQ ID NO: 107263 - RNA, 12 nt, Human adenovirus C
cuuuuagcuuaa

SEQ ID NO: 107264 - RNA, 19 nt, Human adenovirus C
gaaaaauaaacacguugaa

SEQ ID NO: 107265 - RNA, 16 nt, Human adenovirus C
gaaaaacuuugcuucc

SEQ ID NO: 107266 - RNA, 19 nt, Human adenovirus C
gaaaacaugcaagucaggg

SEQ ID NO: 107267 - RNA, 15 nt, Human adenovirus C
cuuuugagacagaga

SEQ ID NO: 107268 - RNA, 19 nt, Human adenovirus C
cuuuucugugcgugcucua

SEQ ID NO: 107269 - RNA, 20 nt, Human adenovirus C
cuugcaagcgggcucaggaa

SEQ ID NO: 107270 - RNA, 17 nt, Human adenovirus C
cuuuacggauuugucac

SEQ ID NO: 107271 - RNA, 14 nt, Human adenovirus C
cuuucacaguuuac

SEQ ID NO: 107272 - RNA, 17 nt, Human adenovirus C
cuuuauugaaagugucu

SEQ ID NO: 107273 - RNA, 22 nt, Human adenovirus C
cuugcuuaacgagucugggcaa

SEQ ID NO: 107274 - RNA, 21 nt, Human adenovirus C
cuugcuugaucaaaauccaaa

SEQ ID NO: 107275 - RNA, 20 nt, Human adenovirus C
gaagaucuggaaggugcuga

SEQ ID NO: 107276 - RNA, 17 nt, Human adenovirus C
gaacgggguguuugaca

SEQ ID NO: 107277 - RNA, 23 nt, Human adenovirus C
gaacgggguguuugacaugacca

SEQ ID NO: 107278 - RNA, 14 nt, Human adenovirus C
gaagcaaaggcgac

SEQ ID NO: 107279 - RNA, 20 nt, Human adenovirus C
gaaguagaagaccaccagcc

SEQ ID NO: 107280 - RNA, 13 nt, Human adenovirus C
gaauccgcgccca

SEQ ID NO: 107281 - RNA, 18 nt, Human adenovirus C
gaaugaaaaaugacuuga

SEQ ID NO: 107282 - RNA, 15 nt, Human adenovirus C
gaaaggacuguguac

SEQ ID NO: 107283 - RNA, 23 nt, Human adenovirus C
gaaauucccacgcccuacaugug

SEQ ID NO: 107284 - RNA, 16 nt, Human adenovirus C
gaaccugcuuucuucc

SEQ ID NO: 107285 - RNA, 18 nt, Human adenovirus C
gaaccuuuggacaccucc

SEQ ID NO: 107286 - RNA, 15 nt, Human adenovirus C
gaaacggagugucau

SEQ ID NO: 107287 - RNA, 20 nt, Human adenovirus C
gaaacagcauccguuacucu

SEQ ID NO: 107288 - RNA, 12 nt, Human adenovirus C
gcaagucaggga

SEQ ID NO: 107289 - RNA, 18 nt, Human adenovirus C
gcaagugucuugcugucu

SEQ ID NO: 107290 - RNA, 14 nt, Human adenovirus C
gcaagcagugcagc

SEQ ID NO: 107291 - RNA, 14 nt, Human adenovirus C
gcaaagucagucac

SEQ ID NO: 107292 - RNA, 22 nt, Human adenovirus C
gcaaacuuguaaauaucaggaa

SEQ ID NO: 107293 - RNA, 19 nt, Human adenovirus C
gauucuuugaaucuggguc

SEQ ID NO: 107294 - RNA, 17 nt, Human adenovirus C
gauucgggaguuuacca

SEQ ID NO: 107295 - RNA, 13 nt, Human adenovirus C
gaugugcuugcuu

SEQ ID NO: 107296 - RNA, 20 nt, Human adenovirus C
gaugacggcagcugcagcuc

SEQ ID NO: 107297 - RNA, 13 nt, Human adenovirus C
gaucaaaauccaa

SEQ ID NO: 107298 - RNA, 14 nt, Human adenovirus C
gaucaaaauccaaa

SEQ ID NO: 107299 - RNA, 15 nt, Human adenovirus C
gaucaauauaagcua

SEQ ID NO: 107300 - RNA, 22 nt, Human adenovirus C
gaucaauauaagcuauguggug

SEQ ID NO: 107301 - RNA, 22 nt, Human adenovirus C
gagaggcagagcgacugcgccu

SEQ ID NO: 107302 - RNA, 14 nt, Human adenovirus C
gagaguguacaaau

SEQ ID NO: 107303 - RNA, 18 nt, Human adenovirus C
gagccagccguccggccu

SEQ ID NO: 107304 - RNA, 21 nt, Human adenovirus C
gagccacaggcugcuguccaa

SEQ ID NO: 107305 - RNA, 21 nt, Human adenovirus C
gagcaggaacugaaagccauu

SEQ ID NO: 107306 - RNA, 19 nt, Human adenovirus C
gagcccgagagcaugucca

SEQ ID NO: 107307 - RNA, 20 nt, Human adenovirus C
gacaccacccguguguaccu

SEQ ID NO: 107308 - RNA, 14 nt, Human adenovirus C
gacgcgguggugga

SEQ ID NO: 107309 - RNA, 22 nt, Human adenovirus C
gacucugacaaagcccaagaaa

SEQ ID NO: 107310 - RNA, 15 nt, Human adenovirus C
gacucuggauguuca

SEQ ID NO: 107311 - RNA, 20 nt, Human adenovirus C
gacugugggggcaacaucuc

SEQ ID NO: 107312 - RNA, 17 nt, Human adenovirus C
gacuggcgccaggucau

SEQ ID NO: 107313 - RNA, 13 nt, Human adenovirus C
cgccgugggcuaa

SEQ ID NO: 107314 - RNA, 17 nt, Human adenovirus C
cgccuucauucaguuca

SEQ ID NO: 107315 - RNA, 15 nt, Human adenovirus C
cgcgaguugcgauac

SEQ ID NO: 107316 - RNA, 18 nt, Human adenovirus C
cgccauaguugcuugcuu

SEQ ID NO: 107317 - RNA, 14 nt, Human adenovirus C
cgccaccaaccagc

SEQ ID NO: 107318 - RNA, 21 nt, Human adenovirus C
cgcccugacccggcuaugcga

SEQ ID NO: 107319 - RNA, 17 nt, Human adenovirus C
cgcccgcgggauuguga

SEQ ID NO: 107320 - RNA, 17 nt, Human adenovirus C
cgcacccacuaucuuca

SEQ ID NO: 107321 - RNA, 15 nt, Human adenovirus C
cgcagauccaacagc

SEQ ID NO: 107322 - RNA, 13 nt, Human adenovirus C
cgcagcugcucag

SEQ ID NO: 107323 - RNA, 18 nt, Human adenovirus C
cgcauuuggucagggaaa

SEQ ID NO: 107324 - RNA, 19 nt, Human adenovirus C
cgcauccccgcggcgcgac

SEQ ID NO: 107325 - RNA, 15 nt, Human adenovirus C
cgcaugcccccaugg

SEQ ID NO: 107326 - RNA, 21 nt, Human adenovirus C
ccuaccugugcuuugcuccca

SEQ ID NO: 107327 - RNA, 12 nt, Human adenovirus C
ccuaaauuuacc

SEQ ID NO: 107328 - RNA, 20 nt, Human adenovirus C
cgaggaugggcaggggcuaa

SEQ ID NO: 107329 - RNA, 11 nt, Human adenovirus C
cguugagcaac

SEQ ID NO: 107330 - RNA, 18 nt, Human adenovirus C
cgugcagaccugcacgau

SEQ ID NO: 107331 - RNA, 23 nt, Human adenovirus C
cgguaaacauauuaggaaccagc

SEQ ID NO: 107332 - RNA, 13 nt, Human adenovirus C
cggugauagguuu

SEQ ID NO: 107333 - RNA, 14 nt, Human adenovirus C
cguacucguacaaa

SEQ ID NO: 107334 - RNA, 23 nt, Human adenovirus C
cggcagcucggugaaguuuucac

SEQ ID NO: 107335 - RNA, 19 nt, Human adenovirus C
cggcagcugcagcucucuu

SEQ ID NO: 107336 - RNA, 13 nt, Human adenovirus C
cggccucuugcaa

SEQ ID NO: 107337 - RNA, 13 nt, Human adenovirus C
cgcuguccagcug

SEQ ID NO: 107338 - RNA, 17 nt, Human adenovirus C
cggcgcugcagagccag

SEQ ID NO: 107339 - RNA, 16 nt, Human adenovirus C
cgcguccgcgacuuuc

SEQ ID NO: 107340 - RNA, 18 nt, Human adenovirus C
cgcucaaaagcaugccua

SEQ ID NO: 107341 - RNA, 17 nt, Human adenovirus C
cuauuaggguauaugca

SEQ ID NO: 107342 - RNA, 20 nt, Human adenovirus C
cuaugugggauaugcuccag

SEQ ID NO: 107343 - RNA, 20 nt, Human adenovirus C
cuaugcgagguaaaccugca

SEQ ID NO: 107344 - RNA, 21 nt, Human adenovirus C
cguuugauggaagcauuguga

SEQ ID NO: 107345 - RNA, 20 nt, Human adenovirus C
cuaagcgacgagaccggaga

SEQ ID NO: 107346 - RNA, 22 nt, Human adenovirus C
cucacagaacccuaguauucaa

SEQ ID NO: 107347 - RNA, 18 nt, Human adenovirus C
cuccaacggcguuccaga

SEQ ID NO: 107348 - RNA, 20 nt, Human adenovirus C
cugcccugguguaccaggaa

SEQ ID NO: 107349 - RNA, 18 nt, Human adenovirus C
cugcugagaaacgacauu

SEQ ID NO: 107350 - RNA, 19 nt, Human adenovirus C
cugcuugaccacacaaaag

SEQ ID NO: 107351 - RNA, 20 nt, Human adenovirus C
cugcuuucuucccagcugau

SEQ ID NO: 107352 - RNA, 19 nt, Human adenovirus C
cugcuggcgcagauccaac

SEQ ID NO: 107353 - RNA, 18 nt, Human adenovirus C
cuggcugugggugacaac

SEQ ID NO: 107354 - RNA, 16 nt, Human adenovirus C
cugggaacggggccga

SEQ ID NO: 107355 - RNA, 20 nt, Human adenovirus C
cuguaacuauuuuguagaau

SEQ ID NO: 107356 - RNA, 22 nt, Human adenovirus C
cucguggcgcgggcacaagaac

SEQ ID NO: 107357 - RNA, 16 nt, Human adenovirus C
cucgcuugguccugua

SEQ ID NO: 107358 - RNA, 17 nt, Human adenovirus C
cucgggugauuauuuac

SEQ ID NO: 107359 - RNA, 13 nt, Human adenovirus C
cucuaauaccaca

SEQ ID NO: 107360 - RNA, 14 nt, Human adenovirus C
cugacaaagcccaa

SEQ ID NO: 107361 - RNA, 18 nt, Human adenovirus C
cugacaaagcccaagaaa

SEQ ID NO: 107362 - RNA, 12 nt, Human adenovirus C
cugauuucugcc

SEQ ID NO: 107363 - RNA, 21 nt, Human adenovirus C
cugauuaaaaacaaguugcau

SEQ ID NO: 107364 - RNA, 15 nt, Human adenovirus C
cugaucgccgcggcg

SEQ ID NO: 107365 - RNA, 17 nt, Human adenovirus C
uuucugugcgugcucua

SEQ ID NO: 107366 - RNA, 12 nt, Human adenovirus C
uuucuucucuac

SEQ ID NO: 107367 - RNA, 18 nt, Human adenovirus C
uuucuucucuaccaucac

SEQ ID NO: 107368 - RNA, 21 nt, Human adenovirus C
uuugaaucugggucaccaggc

SEQ ID NO: 107369 - RNA, 17 nt, Human adenovirus C
uuugaucaagcaagugu

SEQ ID NO: 107370 - RNA, 15 nt, Human adenovirus C
uuugcgcccuaccug

SEQ ID NO: 107371 - RNA, 16 nt, Human adenovirus C
uuugcgcccuaccugu

SEQ ID NO: 107372 - RNA, 23 nt, Human adenovirus C
uugggagggagguggcagguuga

SEQ ID NO: 107373 - RNA, 10 nt, Human adenovirus C
uuggugcugg

SEQ ID NO: 107374 - RNA, 14 nt, Human adenovirus C
uuguuucacccaau

SEQ ID NO: 107375 - RNA, 19 nt, Human adenovirus C
uuuaagcgcgaaaacuacg

SEQ ID NO: 107376 - RNA, 14 nt, Human adenovirus C
uuuccaggggcugg

SEQ ID NO: 107377 - RNA, 16 nt, Human adenovirus C
uuuccugcagauucac

SEQ ID NO: 107378 - RNA, 20 nt, Human adenovirus C
uuuagcuuaaugaccagaca

SEQ ID NO: 107379 - RNA, 17 nt, Human adenovirus C
uuccucauguucuuguc

SEQ ID NO: 107380 - RNA, 20 nt, Human adenovirus C
uuccuugcaagaacugcuau

SEQ ID NO: 107381 - RNA, 18 nt, Human adenovirus C
uuccugcagauucacuca

SEQ ID NO: 107382 - RNA, 18 nt, Human adenovirus C
uucauucaguucauugac

SEQ ID NO: 107383 - RNA, 18 nt, Human adenovirus C
uucagauacaugggcaua

SEQ ID NO: 107384 - RNA, 16 nt, Human adenovirus C
uucaguagcaagcuga

SEQ ID NO: 107385 - RNA, 18 nt, Human adenovirus C
uugaaacauaacaugcaa

SEQ ID NO: 107386 - RNA, 20 nt, Human adenovirus C
uugaaauuuucugcaauuga

SEQ ID NO: 107387 - RNA, 14 nt, Human adenovirus C
uugacaugaccaug

SEQ ID NO: 107388 - RNA, 15 nt, Human adenovirus C
uugcuggaacagagc

SEQ ID NO: 107389 - RNA, 19 nt, Human adenovirus C
uugcuggaacagagcucua

SEQ ID NO: 107390 - RNA, 21 nt, Human adenovirus C
ugcuaccucuuugagcccuuu

SEQ ID NO: 107391 - RNA, 16 nt, Human adenovirus C
ugggggcaacaucucc

SEQ ID NO: 107392 - RNA, 23 nt, Human adenovirus C
ugggguugugauccaugggaguu

SEQ ID NO: 107393 - RNA, 14 nt, Human adenovirus C
uggguaacagacau

SEQ ID NO: 107394 - RNA, 19 nt, Human adenovirus C
uggcuuauuuguugccuaa

SEQ ID NO: 107395 - RNA, 15 nt, Human adenovirus C
ugggcuaaucuuggu

SEQ ID NO: 107396 - RNA, 19 nt, Human adenovirus C
ugggcuaaucuugguuaca

SEQ ID NO: 107397 - RNA, 18 nt, Human adenovirus C
uguaucgaggacuugcuu

SEQ ID NO: 107398 - RNA, 14 nt, Human adenovirus C
uguauccauaugac

SEQ ID NO: 107399 - RNA, 23 nt, Human adenovirus C
ugguuccggaacuuaccugccuu

SEQ ID NO: 107400 - RNA, 23 nt, Human adenovirus C
uggugguggggcuauacuacuga

SEQ ID NO: 107401 - RNA, 16 nt, Human adenovirus C
uguauuccccuggaca

SEQ ID NO: 107402 - RNA, 12 nt, Human adenovirus C
ugucaaugacug

SEQ ID NO: 107403 - RNA, 13 nt, Human adenovirus C
uuagucugcagaa

SEQ ID NO: 107404 - RNA, 19 nt, Human adenovirus C
uuaggccagauugcaagua

SEQ ID NO: 107405 - RNA, 22 nt, Human adenovirus C
uuaaacucaggcacaaccaucc

SEQ ID NO: 107406 - RNA, 19 nt, Human adenovirus C
uguugcuacauuucuggga

SEQ ID NO: 107407 - RNA, 22 nt, Human adenovirus C
uguuguagaugauccagucgua

SEQ ID NO: 107408 - RNA, 14 nt, Human adenovirus C
uguuuaacuugcau

SEQ ID NO: 107409 - RNA, 21 nt, Human adenovirus C
ugugaugggcuccagcauuga

SEQ ID NO: 107410 - RNA, 19 nt, Human adenovirus C
ucugcggugguggauguua

SEQ ID NO: 107411 - RNA, 19 nt, Human adenovirus C
ucugccagcgccugcacug

SEQ ID NO: 107412 - RNA, 23 nt, Human adenovirus C
ucguuugauggaagcauugugag

SEQ ID NO: 107413 - RNA, 22 nt, Human adenovirus C
ucuaacacaccuccugagauac

SEQ ID NO: 107414 - RNA, 22 nt, Human adenovirus C
ucgaacaggcggcuauuaccac

SEQ ID NO: 107415 - RNA, 18 nt, Human adenovirus C
uccugaguguguuacuuu

SEQ ID NO: 107416 - RNA, 23 nt, Human adenovirus C
uccugcauuacuaccgucaucuc

SEQ ID NO: 107417 - RNA, 22 nt, Human adenovirus C
ucguacaaagcgcgguucaccc

SEQ ID NO: 107418 - RNA, 14 nt, Human adenovirus C
ucccaccacugugg

SEQ ID NO: 107419 - RNA, 16 nt, Human adenovirus C
uccaccagaccacgga

SEQ ID NO: 107420 - RNA, 19 nt, Human adenovirus C
ucccaacucugguaucuca

SEQ ID NO: 107421 - RNA, 16 nt, Human adenovirus C
ucccgcucccaccacu

SEQ ID NO: 107422 - RNA, 19 nt, Human adenovirus C
uccccuggacaauuuacuc

SEQ ID NO: 107423 - RNA, 20 nt, Human adenovirus C
uccccgggcagcucgcuuaa

SEQ ID NO: 107424 - RNA, 17 nt, Human adenovirus C
uccccggcuggccuuaa

SEQ ID NO: 107425 - RNA, 17 nt, Human adenovirus C
uccuaacccuggauuac

SEQ ID NO: 107426 - RNA, 22 nt, Human adenovirus C
uccggcagcagccgcaggccaa

SEQ ID NO: 107427 - RNA, 13 nt, Human adenovirus C
ucaugucgcuguc

SEQ ID NO: 107428 - RNA, 19 nt, Human adenovirus C
uccaauugugccaaaagag

SEQ ID NO: 107429 - RNA, 22 nt, Human adenovirus C
uccacaggcugcgcaccaucac

SEQ ID NO: 107430 - RNA, 20 nt, Human adenovirus C
uccaacuugcgguugcucaa

SEQ ID NO: 107431 - RNA, 14 nt, Human adenovirus C
uccaaggacacccc

SEQ ID NO: 107432 - RNA, 13 nt, Human adenovirus C
ucauucaguucau

SEQ ID NO: 107433 - RNA, 22 nt, Human adenovirus C
ucaucgccuuauguuggaagac

SEQ ID NO: 107434 - RNA, 14 nt, Human adenovirus C
ucugguaucucagc

SEQ ID NO: 107435 - RNA, 15 nt, Human adenovirus C
ugaaaaaugacuuga

SEQ ID NO: 107436 - RNA, 22 nt, Human adenovirus C
ugaauacuaggguucugugagu

SEQ ID NO: 107437 - RNA, 17 nt, Human adenovirus C
ugaaagccauugucaaa

SEQ ID NO: 107438 - RNA, 23 nt, Human adenovirus C
ugaccacacaaaagauaccucuu

SEQ ID NO: 107439 - RNA, 15 nt, Human adenovirus C
ugaccggcucaacca

SEQ ID NO: 107440 - RNA, 17 nt, Human adenovirus C
ugaccgugguuugcaac

SEQ ID NO: 107441 - RNA, 20 nt, Human adenovirus C
ugaccgugguuugcaacugu

SEQ ID NO: 107442 - RNA, 22 nt, Human adenovirus C
ugacgacgagguggaacugcug

SEQ ID NO: 107443 - RNA, 20 nt, Human adenovirus C
ugagcuugaaccugaaagag

SEQ ID NO: 107444 - RNA, 21 nt, Human adenovirus C
ugacgcguuccggcagcagcc

SEQ ID NO: 107445 - RNA, 14 nt, Human adenovirus C
ugacggcagcugca

SEQ ID NO: 107446 - RNA, 17 nt, Human adenovirus C
ugaggcccgaucacuug

SEQ ID NO: 107447 - RNA, 15 nt, Human adenovirus C
ugagguacgaugaga

SEQ ID NO: 107448 - RNA, 22 nt, Human adenovirus C
ugauuuacgggcccaccggcug

SEQ ID NO: 107449 - RNA, 19 nt, Human adenovirus C
ugauucgggaguuuaccaa

SEQ ID NO: 107450 - RNA, 13 nt, Human adenovirus C
ugauucuuugaau

SEQ ID NO: 107451 - RNA, 23 nt, Human adenovirus C
ugaguguguuacuuuucagcaga

SEQ ID NO: 107452 - RNA, 15 nt, Human adenovirus C
ugcccggggaguuua

SEQ ID NO: 107453 - RNA, 16 nt, Human adenovirus C
ugcccuaaauuuaccc

SEQ ID NO: 107454 - RNA, 19 nt, Human adenovirus C
ugcccugguguaccaggaa

SEQ ID NO: 107455 - RNA, 20 nt, Human adenovirus C
ugccuuauuauuauguggcu

SEQ ID NO: 107456 - RNA, 14 nt, Human adenovirus C
ugcggccucuugca

SEQ ID NO: 107457 - RNA, 22 nt, Human adenovirus C
ugcggccucuugcaagucaucg

SEQ ID NO: 107458 - RNA, 13 nt, Human adenovirus C
ugcguaccucagg

SEQ ID NO: 107459 - RNA, 15 nt, Human adenovirus C
ugcgcgauguuguca

SEQ ID NO: 107460 - RNA, 15 nt, Human adenovirus C
ugcgccauagucaau

SEQ ID NO: 107461 - RNA, 14 nt, Human adenovirus C
ugcagccuccgccg

SEQ ID NO: 107462 - RNA, 22 nt, Human adenovirus C
ugcagccucgucacuguaguca

SEQ ID NO: 107463 - RNA, 22 nt, Human adenovirus C
ugcauuacuaccgucaucucua

SEQ ID NO: 107464 - RNA, 16 nt, Human adenovirus C
ugcauuacuaccguca

SEQ ID NO: 107465 - RNA, 18 nt, Human adenovirus C
ccugauucgggaguuuac

SEQ ID NO: 107466 - RNA, 15 nt, Human adenovirus C
ccugcagauucacuc

SEQ ID NO: 107467 - RNA, 12 nt, Human adenovirus C
ccugcucaggga

SEQ ID NO: 107468 - RNA, 13 nt, Human adenovirus C
ccugcucagggau

SEQ ID NO: 107469 - RNA, 20 nt, Human adenovirus C
ccuuauaucgcccagcaaua

SEQ ID NO: 107470 - RNA, 16 nt, Human adenovirus C
ccuuaaaaagcaucau

SEQ ID NO: 107471 - RNA, 13 nt, Human adenovirus C
ccuucauucaguu

SEQ ID NO: 107472 - RNA, 23 nt, Human adenovirus C
ccuucaaccccguguauccauau

SEQ ID NO: 107473 - RNA, 17 nt, Human adenovirus C
ccuucgaugaugccgca

SEQ ID NO: 107474 - RNA, 19 nt, Human adenovirus C
ccugucgccauccugugaa

SEQ ID NO: 107475 - RNA, 16 nt, Human adenovirus C
ccuguggugagcuguu

SEQ ID NO: 107476 - RNA, 15 nt, Human adenovirus C
ccuggcuguggguga

SEQ ID NO: 107477 - RNA, 15 nt, Human adenovirus C
ccuuucuuaccccuc

SEQ ID NO: 107478 - RNA, 14 nt, Human adenovirus C
ccuuuggacaccuc

SEQ ID NO: 107479 - RNA, 17 nt, Human adenovirus C
ccuuuggacaccuccca

SEQ ID NO: 107480 - RNA, 16 nt, Human adenovirus C
ccuugguguaaguguu

SEQ ID NO: 107481 - RNA, 15 nt, Human adenovirus C
ccuuuuagcugcaaa

SEQ ID NO: 107482 - RNA, 14 nt, Human adenovirus C
ccuuuguuugcuga

SEQ ID NO: 107483 - RNA, 14 nt, Human adenovirus C
ccggaacuuaccug

SEQ ID NO: 107484 - RNA, 19 nt, Human adenovirus C
ccggaacuuaccugccuuu

SEQ ID NO: 107485 - RNA, 12 nt, Human adenovirus C
ccggaauugcau

SEQ ID NO: 107486 - RNA, 22 nt, Human adenovirus C
ccgcuugcaagcagugcagcuu

SEQ ID NO: 107487 - RNA, 19 nt, Human adenovirus C
ccgcgcugguccgugcaga

SEQ ID NO: 107488 - RNA, 22 nt, Human adenovirus C
ccgaaguagaagaccaccagcc

SEQ ID NO: 107489 - RNA, 16 nt, Human adenovirus C
ccgacaucaccugugu

SEQ ID NO: 107490 - RNA, 18 nt, Human adenovirus C
ccgaccauggagcacuuu

SEQ ID NO: 107491 - RNA, 19 nt, Human adenovirus C
ccauccaauucuagaucua

SEQ ID NO: 107492 - RNA, 19 nt, Human adenovirus C
ccauauuuuuugggcaccu

SEQ ID NO: 107493 - RNA, 12 nt, Human adenovirus C
ccaucaaugcug

SEQ ID NO: 107494 - RNA, 20 nt, Human adenovirus C
ccauagagcagcugaccacu

SEQ ID NO: 107495 - RNA, 20 nt, Human adenovirus C
ccccuccauuuguuucaccc

SEQ ID NO: 107496 - RNA, 14 nt, Human adenovirus C
ccccaccaccacau

SEQ ID NO: 107497 - RNA, 18 nt, Human adenovirus C
cccuccuuauuccacuga

SEQ ID NO: 107498 - RNA, 16 nt, Human adenovirus C
cccuccgcacccacua

SEQ ID NO: 107499 - RNA, 16 nt, Human adenovirus C
cccgcgggauugugac

SEQ ID NO: 107500 - RNA, 14 nt, Human adenovirus C
cccugcucagggau

SEQ ID NO: 107501 - RNA, 17 nt, Human adenovirus C
cccuggaaaucagguau

SEQ ID NO: 107502 - RNA, 16 nt, Human adenovirus C
cauauuuccugcagau

SEQ ID NO: 107503 - RNA, 13 nt, Human adenovirus C
caucucuacagcc

SEQ ID NO: 107504 - RNA, 23 nt, Human adenovirus C
caugauccccccaucugaacuca

SEQ ID NO: 107505 - RNA, 21 nt, Human adenovirus C
caucugaccucauggaggcuu

SEQ ID NO: 107506 - RNA, 13 nt, Human adenovirus C
cagccaaacccgc

SEQ ID NO: 107507 - RNA, 19 nt, Human adenovirus C
cagcauccguuacucugag

SEQ ID NO: 107508 - RNA, 15 nt, Human adenovirus C
cagcaccuugcauuu

SEQ ID NO: 107509 - RNA, 15 nt, Human adenovirus C
cagcagccgccgcca

SEQ ID NO: 107510 - RNA, 17 nt, Human adenovirus C
cagcagccgccgccaug

SEQ ID NO: 107511 - RNA, 14 nt, Human adenovirus C
cauuacuaccguca

SEQ ID NO: 107512 - RNA, 13 nt, Human adenovirus C
cauuuuucauuca

SEQ ID NO: 107513 - RNA, 14 nt, Human adenovirus C
cauugcguaccuca

SEQ ID NO: 107514 - RNA, 15 nt, Human adenovirus C
cauugcguaccucag

SEQ ID NO: 107515 - RNA, 16 nt, Human adenovirus C
cauugcguaccucagg

SEQ ID NO: 107516 - RNA, 23 nt, Human adenovirus C
cauugugagcucauauuugacaa

SEQ ID NO: 107517 - RNA, 20 nt, Human adenovirus C
cauuggccgcggucgcucac

SEQ ID NO: 107518 - RNA, 13 nt, Human adenovirus C
ccaaacgcucauc

SEQ ID NO: 107519 - RNA, 17 nt, Human adenovirus C
ccaaacgcucaucagug

SEQ ID NO: 107520 - RNA, 21 nt, Human adenovirus C
ccaaaagacauauuuccugca

SEQ ID NO: 107521 - RNA, 23 nt, Human adenovirus C
ccagaccgucugaagacaccuuc

SEQ ID NO: 107522 - RNA, 13 nt, Human adenovirus C
ccagcuuauucag

SEQ ID NO: 107523 - RNA, 19 nt, Human adenovirus C
ccagaacugagacgcauuu

SEQ ID NO: 107524 - RNA, 19 nt, Human adenovirus C
ccacugccgccgccacaag

SEQ ID NO: 107525 - RNA, 22 nt, Human adenovirus C
ccacugugguacuucccagaga

SEQ ID NO: 107526 - RNA, 16 nt, Human adenovirus C
ccaagagcaacaacag

SEQ ID NO: 107527 - RNA, 17 nt, Human adenovirus C
ccacgcccuacaugugg

SEQ ID NO: 107528 - RNA, 15 nt, Human adenovirus C
ccacguacuuugaca

SEQ ID NO: 107529 - RNA, 22 nt, Human adenovirus C
ccaccucccucccaacacacag

SEQ ID NO: 107530 - RNA, 14 nt, Human adenovirus C
auuccucauguucu

SEQ ID NO: 107531 - RNA, 15 nt, Human adenovirus C
auugcguaccucagg

SEQ ID NO: 107532 - RNA, 19 nt, Human adenovirus C
auuauacccacaaccuuca

SEQ ID NO: 107533 - RNA, 15 nt, Human adenovirus C
augugaugggcucca

SEQ ID NO: 107534 - RNA, 20 nt, Human adenovirus C
auguccaaggugaaccugaa

SEQ ID NO: 107535 - RNA, 22 nt, Human adenovirus C
auugugagcucauauuugacaa

SEQ ID NO: 107536 - RNA, 13 nt, Human adenovirus C
auuuggucaggga

SEQ ID NO: 107537 - RNA, 20 nt, Human adenovirus C
auuuauguuuuaaaccgcau

SEQ ID NO: 107538 - RNA, 20 nt, Human adenovirus C
auuugacaacgcgcaugccc

SEQ ID NO: 107539 - RNA, 20 nt, Human adenovirus C
caccaucaccaacgcguuua

SEQ ID NO: 107540 - RNA, 22 nt, Human adenovirus C
caccacugcuaccggacuaaca

SEQ ID NO: 107541 - RNA, 15 nt, Human adenovirus C
caccacugugguacu

SEQ ID NO: 107542 - RNA, 21 nt, Human adenovirus C
cacaggguugcagcacuggaa

SEQ ID NO: 107543 - RNA, 14 nt, Human adenovirus C
caacaccacugcua

SEQ ID NO: 107544 - RNA, 22 nt, Human adenovirus C
caagcagguuuaccaguuugag

SEQ ID NO: 107545 - RNA, 17 nt, Human adenovirus C
caagauuauacccacaa

SEQ ID NO: 107546 - RNA, 18 nt, Human adenovirus C
caagcgcguguaugauga

SEQ ID NO: 107547 - RNA, 19 nt, Human adenovirus C
caagcgcguguaugaugag

SEQ ID NO: 107548 - RNA, 21 nt, Human adenovirus C
caagcgggcucaggaaagcaa

SEQ ID NO: 107549 - RNA, 13 nt, Human adenovirus C
caagggugggggg

SEQ ID NO: 107550 - RNA, 21 nt, Human adenovirus C
caauacagagacaggacuaua

SEQ ID NO: 107551 - RNA, 13 nt, Human adenovirus C
cacuuggugcugg

SEQ ID NO: 107552 - RNA, 23 nt, Human adenovirus C
cagagcgucccgaccauggagca

SEQ ID NO: 107553 - RNA, 14 nt, Human adenovirus C
cagagacacugauu

SEQ ID NO: 107554 - RNA, 14 nt, Human adenovirus C
cacuaucuucauau

SEQ ID NO: 107555 - RNA, 12 nt, Human adenovirus C
cacugcuugcaa

SEQ ID NO: 107556 - RNA, 17 nt, Human adenovirus C
cacugugguacuuccca

SEQ ID NO: 107557 - RNA, 16 nt, Human adenovirus C
cacgccgccaccagug

SEQ ID NO: 107558 - RNA, 23 nt, Human adenovirus C
cacgcgggcgguaaccgcaugga

SEQ ID NO: 107559 - RNA, 22 nt, Human adenovirus C
caccgaaaccgaauucuccucg

SEQ ID NO: 107560 - RNA, 16 nt, Human adenovirus C
caccuuucacaguuua

SEQ ID NO: 107561 - RNA, 16 nt, Human adenovirus C
agcuucagcuugccug

SEQ ID NO: 107562 - RNA, 16 nt, Human adenovirus C
agcuuauucagcauca

SEQ ID NO: 107563 - RNA, 22 nt, Human adenovirus C
aggacuauagcugaucuucuca

SEQ ID NO: 107564 - RNA, 19 nt, Human adenovirus C
agcuggacagcgacaugaa

SEQ ID NO: 107565 - RNA, 19 nt, Human adenovirus C
agcugcugagaaacgacau

SEQ ID NO: 107566 - RNA, 12 nt, Human adenovirus C
agcuggugcugc

SEQ ID NO: 107567 - RNA, 18 nt, Human adenovirus C
agcuguuccugguugcga

SEQ ID NO: 107568 - RNA, 14 nt, Human adenovirus C
agcugccgccaugg

SEQ ID NO: 107569 - RNA, 16 nt, Human adenovirus C
aggcaaauguuuuuau

SEQ ID NO: 107570 - RNA, 16 nt, Human adenovirus C
agcccaagagcaacaa

SEQ ID NO: 107571 - RNA, 21 nt, Human adenovirus C
agcccaagagcaacaacagcg

SEQ ID NO: 107572 - RNA, 20 nt, Human adenovirus C
agccgcaggccaaccggcuc

SEQ ID NO: 107573 - RNA, 14 nt, Human adenovirus C
agcgcguguaugau

SEQ ID NO: 107574 - RNA, 17 nt, Human adenovirus C
agcgcguguaugaugag

SEQ ID NO: 107575 - RNA, 17 nt, Human adenovirus C
agcucgcuuaaguucau

SEQ ID NO: 107576 - RNA, 16 nt, Human adenovirus C
agcucgccugcgccau

SEQ ID NO: 107577 - RNA, 22 nt, Human adenovirus C
agcuccgaguaugcgugucaua

SEQ ID NO: 107578 - RNA, 17 nt, Human adenovirus C
aguagggcgaguggcgc

SEQ ID NO: 107579 - RNA, 18 nt, Human adenovirus C
aguagggcgaguggcgcu

SEQ ID NO: 107580 - RNA, 22 nt, Human adenovirus C
aggguucugugaguuugauuaa

SEQ ID NO: 107581 - RNA, 12 nt, Human adenovirus C
agggugagauaa

SEQ ID NO: 107582 - RNA, 23 nt, Human adenovirus C
aggggaagugcaggcagcccucu

SEQ ID NO: 107583 - RNA, 15 nt, Human adenovirus C
aggggcugguuggug

SEQ ID NO: 107584 - RNA, 12 nt, Human adenovirus C
agggagguggca

SEQ ID NO: 107585 - RNA, 19 nt, Human adenovirus C
aguuuucacuccacaggcu

SEQ ID NO: 107586 - RNA, 22 nt, Human adenovirus C
aguugaauggaauaagaucucu

SEQ ID NO: 107587 - RNA, 22 nt, Human adenovirus C
aguucccgggucaaagaaucca

SEQ ID NO: 107588 - RNA, 17 nt, Human adenovirus C
aguggccccccugcuca

SEQ ID NO: 107589 - RNA, 18 nt, Human adenovirus C
aguggccccccugcucag

SEQ ID NO: 107590 - RNA, 19 nt, Human adenovirus C
aguggccccccugcucagg

SEQ ID NO: 107591 - RNA, 21 nt, Human adenovirus C
aguggccccccugcucaggga

SEQ ID NO: 107592 - RNA, 15 nt, Human adenovirus C
aguggagaggcagag

SEQ ID NO: 107593 - RNA, 15 nt, Human adenovirus C
aucgcccagcaauaa

SEQ ID NO: 107594 - RNA, 23 nt, Human adenovirus C
aucgccccgcagguagacaugau

SEQ ID NO: 107595 - RNA, 19 nt, Human adenovirus C
aucuaacuuuuagcuuaau

SEQ ID NO: 107596 - RNA, 16 nt, Human adenovirus C
aucugcagccucguca

SEQ ID NO: 107597 - RNA, 18 nt, Human adenovirus C
auccaauucuagaucuag

SEQ ID NO: 107598 - RNA, 22 nt, Human adenovirus C
aucauggguaacagacauauuc

SEQ ID NO: 107599 - RNA, 15 nt, Human adenovirus C
aucacuuggugcugg

SEQ ID NO: 107600 - RNA, 12 nt, Human adenovirus C
aucaaacuuucc

SEQ ID NO: 107601 - RNA, 22 nt, Human adenovirus C
auauuuccugcagauucacuca

SEQ ID NO: 107602 - RNA, 14 nt, Human adenovirus C
aucaagaucuuugu

SEQ ID NO: 107603 - RNA, 16 nt, Human adenovirus C
auauucuuagguguua

SEQ ID NO: 107604 - RNA, 19 nt, Human adenovirus C
auauaaggugggggucuca

SEQ ID NO: 107605 - RNA, 19 nt, Human adenovirus C
auauacuacaacuacuaca

SEQ ID NO: 107606 - RNA, 16 nt, Human adenovirus C
auagcugaucuucuca

SEQ ID NO: 107607 - RNA, 22 nt, Human adenovirus C
auacacaggguugcagcacugg

SEQ ID NO: 107608 - RNA, 20 nt, Human adenovirus C
auagagcagcugaccacuua

SEQ ID NO: 107609 - RNA, 15 nt, Human adenovirus C
acucguuugauggaa

SEQ ID NO: 107610 - RNA, 17 nt, Human adenovirus C
acucugacaaagcccaa

SEQ ID NO: 107611 - RNA, 12 nt, Human adenovirus C
acucaggcacaa

SEQ ID NO: 107612 - RNA, 20 nt, Human adenovirus C
acuugcuugaucaaaaucca

SEQ ID NO: 107613 - RNA, 22 nt, Human adenovirus C
acuugcuugaucaaaauccaaa

SEQ ID NO: 107614 - RNA, 12 nt, Human adenovirus C
acuuggugcugg

SEQ ID NO: 107615 - RNA, 16 nt, Human adenovirus C
acugcaaauuugauca

SEQ ID NO: 107616 - RNA, 12 nt, Human adenovirus C
acuguagucauc

SEQ ID NO: 107617 - RNA, 18 nt, Human adenovirus C
agacccgcaccaggugca

SEQ ID NO: 107618 - RNA, 21 nt, Human adenovirus C
agacaugauuccucgaguucu

SEQ ID NO: 107619 - RNA, 20 nt, Human adenovirus C
agacugggggcguacacugg

SEQ ID NO: 107620 - RNA, 23 nt, Human adenovirus C
agacugggggcguacacuggaug

SEQ ID NO: 107621 - RNA, 17 nt, Human adenovirus C
agaggaggcuaggaauc

SEQ ID NO: 107622 - RNA, 16 nt, Human adenovirus C
agaaauccacagcggc

SEQ ID NO: 107623 - RNA, 14 nt, Human adenovirus C
agaaaggacugugu

SEQ ID NO: 107624 - RNA, 17 nt, Human adenovirus C
agaaaggacuguguacu

SEQ ID NO: 107625 - RNA, 22 nt, Human adenovirus C
agaaaggacuguguacucugug

SEQ ID NO: 107626 - RNA, 21 nt, Human adenovirus C
aauuuaccccaaguucaugcc

SEQ ID NO: 107627 - RNA, 18 nt, Human adenovirus C
acagaacccuaguauuca

SEQ ID NO: 107628 - RNA, 19 nt, Human adenovirus C
acagaaaccgggccuccaa

SEQ ID NO: 107629 - RNA, 20 nt, Human adenovirus C
acagaaauuagaaucuacug

SEQ ID NO: 107630 - RNA, 18 nt, Human adenovirus C
acacguugaaacauaaca

SEQ ID NO: 107631 - RNA, 15 nt, Human adenovirus C
acagcgacaugaacu

SEQ ID NO: 107632 - RNA, 19 nt, Human adenovirus C
acaugauuccucgaguucu

SEQ ID NO: 107633 - RNA, 10 nt, Human adenovirus C
acaugcaagu

SEQ ID NO: 107634 - RNA, 18 nt, Human adenovirus C
acauguggaguuaccagc

SEQ ID NO: 107635 - RNA, 13 nt, Human adenovirus C
accagacucuguu

SEQ ID NO: 107636 - RNA, 20 nt, Human adenovirus C
accuuuggacaccucccacg

SEQ ID NO: 107637 - RNA, 12 nt, Human adenovirus C
accuucaaauca

SEQ ID NO: 107638 - RNA, 22 nt, Human adenovirus C
accuucaaccccguguauccau

SEQ ID NO: 107639 - RNA, 17 nt, Human adenovirus C
accuugcauuuuauauc

SEQ ID NO: 107640 - RNA, 14 nt, Human adenovirus C
accgugguuugcaa

SEQ ID NO: 107641 - RNA, 18 nt, Human adenovirus C
accuaagaauaugucugu

SEQ ID NO: 107642 - RNA, 14 nt, Human adenovirus C
accuccugagauac

SEQ ID NO: 107643 - RNA, 14 nt, Human adenovirus C
acgcagggugggcu

SEQ ID NO: 107644 - RNA, 16 nt, Human adenovirus C
acgcucaucagugaua

SEQ ID NO: 107645 - RNA, 20 nt, Human adenovirus C
accauccgcggcagcucggu

SEQ ID NO: 107646 - RNA, 12 nt, Human adenovirus C
accauaacuccc

SEQ ID NO: 107647 - RNA, 17 nt, Human adenovirus C
accauaagcaccaguuu

SEQ ID NO: 107648 - RNA, 16 nt, Human adenovirus C
accauggacagcuccc

SEQ ID NO: 107649 - RNA, 23 nt, Human adenovirus C
acccuugccgucugcgccguuua

SEQ ID NO: 107650 - RNA, 13 nt, Human adenovirus C
acccuuguugcgc

SEQ ID NO: 107651 - RNA, 22 nt, Human adenovirus C
acccugauaggggaagugcagg

SEQ ID NO: 107652 - RNA, 20 nt, Human adenovirus C
accgucugaagacaccuuca

SEQ ID NO: 107653 - RNA, 15 nt, Human adenovirus C
cucccaccacugugg

SEQ ID NO: 107654 - RNA, 11 nt, Human adenovirus C
cugaaagccau

SEQ ID NO: 107655 - RNA, 12 nt, Human adenovirus C
cugaacuaccag

SEQ ID NO: 107656 - RNA, 14 nt, Human adenovirus C
cugaagacaccuuc

SEQ ID NO: 107657 - RNA, 12 nt, Human adenovirus C
cugcagagccag

SEQ ID NO: 107658 - RNA, 19 nt, Human adenovirus C
cugcgcgauguugucauca

SEQ ID NO: 107659 - RNA, 15 nt, Human adenovirus C
cugggcgcaccaccg

SEQ ID NO: 107660 - RNA, 16 nt, Human adenovirus C
cuggagcugcccaaga

SEQ ID NO: 107661 - RNA, 17 nt, Human adenovirus C
cuggacagcgacaugaa

SEQ ID NO: 107662 - RNA, 18 nt, Human adenovirus C
cuggaugcuuugagagag

SEQ ID NO: 107663 - RNA, 14 nt, Human adenovirus C
cuggauuacaucaa

SEQ ID NO: 107664 - RNA, 17 nt, Human adenovirus C
cuguuaagcauggaguu

SEQ ID NO: 107665 - RNA, 10 nt, Human adenovirus C
cuuaaagggu

SEQ ID NO: 107666 - RNA, 14 nt, Human adenovirus C
cuuagguguuauau

SEQ ID NO: 107667 - RNA, 18 nt, Human adenovirus C
cuuagguguuauauucca

SEQ ID NO: 107668 - RNA, 16 nt, Human adenovirus C
cuuaccccuccauuug

SEQ ID NO: 107669 - RNA, 17 nt, Human adenovirus C
cuuaaucaaacucacag

SEQ ID NO: 107670 - RNA, 14 nt, Human adenovirus C
cuucauauuguugc

SEQ ID NO: 107671 - RNA, 22 nt, Human adenovirus C
cuucaaccccguguauccauau

SEQ ID NO: 107672 - RNA, 15 nt, Human adenovirus C
cuuauuccacugauc

SEQ ID NO: 107673 - RNA, 16 nt, Human adenovirus C
cuuauccucaucugca

SEQ ID NO: 107674 - RNA, 14 nt, Human adenovirus C
cuucucuaccauca

SEQ ID NO: 107675 - RNA, 13 nt, Human adenovirus C
cuacuacacagag

SEQ ID NO: 107676 - RNA, 18 nt, Human adenovirus C
cuaccuccuuuugagaca

SEQ ID NO: 107677 - RNA, 20 nt, Human adenovirus C
cuaccugugcuuugcuccca

SEQ ID NO: 107678 - RNA, 16 nt, Human adenovirus C
cuacgaccaacacgau

SEQ ID NO: 107679 - RNA, 20 nt, Human adenovirus C
cuaaucuugguuacaucuga

SEQ ID NO: 107680 - RNA, 14 nt, Human adenovirus C
cuaaugagcuugau

SEQ ID NO: 107681 - RNA, 19 nt, Human adenovirus C
cuaccagaacgaccacagc

SEQ ID NO: 107682 - RNA, 14 nt, Human adenovirus C
cucaaaaacaugcu

SEQ ID NO: 107683 - RNA, 16 nt, Human adenovirus C
cgugggcuaaucuugg

SEQ ID NO: 107684 - RNA, 21 nt, Human adenovirus C
cguggugccuaaaaaugucuu

SEQ ID NO: 107685 - RNA, 17 nt, Human adenovirus C
cgggucaaagaauccaa

SEQ ID NO: 107686 - RNA, 12 nt, Human adenovirus C
cguaagacgugu

SEQ ID NO: 107687 - RNA, 15 nt, Human adenovirus C
cgucccgaccaugga

SEQ ID NO: 107688 - RNA, 22 nt, Human adenovirus C
cgucucuggccccgcgacacgg

SEQ ID NO: 107689 - RNA, 13 nt, Human adenovirus C
cgaauaaacuaca

SEQ ID NO: 107690 - RNA, 15 nt, Human adenovirus C
cgacaucaccugugu

SEQ ID NO: 107691 - RNA, 15 nt, Human adenovirus C
gcagggacacguugc

SEQ ID NO: 107692 - RNA, 14 nt, Human adenovirus C
gcagccuguggcuc

SEQ ID NO: 107693 - RNA, 22 nt, Human adenovirus C
gcaggaacugaaagccauuguc

SEQ ID NO: 107694 - RNA, 12 nt, Human adenovirus C
gcagcugcucag

SEQ ID NO: 107695 - RNA, 22 nt, Human adenovirus C
gcaugaaggaguuuacauagaa

SEQ ID NO: 107696 - RNA, 18 nt, Human adenovirus C
gccaccguuuuuacccac

SEQ ID NO: 107697 - RNA, 14 nt, Human adenovirus C
gccagcacgcucuu

SEQ ID NO: 107698 - RNA, 18 nt, Human adenovirus C
gcaacggacccggcggug

SEQ ID NO: 107699 - RNA, 14 nt, Human adenovirus C
gcaacgaagcuaug

SEQ ID NO: 107700 - RNA, 12 nt, Human adenovirus C
gcaacagcagcg

SEQ ID NO: 107701 - RNA, 13 nt, Human adenovirus C
gcaagaacugcua

SEQ ID NO: 107702 - RNA, 18 nt, Human adenovirus C
gcaagacucugacaaagc

SEQ ID NO: 107703 - RNA, 16 nt, Human adenovirus C
gauaugagaugcaucu

SEQ ID NO: 107704 - RNA, 12 nt, Human adenovirus C
gauaugcuccag

SEQ ID NO: 107705 - RNA, 17 nt, Human adenovirus C
gauaggggaagugcagg

SEQ ID NO: 107706 - RNA, 17 nt, Human adenovirus C
gagguuucuguggggcu

SEQ ID NO: 107707 - RNA, 15 nt, Human adenovirus C
gagguaaaccugcag

SEQ ID NO: 107708 - RNA, 23 nt, Human adenovirus C
gaugcaaaauaaaaaacucacca

SEQ ID NO: 107709 - RNA, 19 nt, Human adenovirus C
gaugcaucuaaaagcggug

SEQ ID NO: 107710 - RNA, 20 nt, Human adenovirus C
gaugcaucuaaaagcgguga

SEQ ID NO: 107711 - RNA, 22 nt, Human adenovirus C
gauuacaagccccgaaagcuaa

SEQ ID NO: 107712 - RNA, 20 nt, Human adenovirus C
gauggaagcauugugagcuc

SEQ ID NO: 107713 - RNA, 12 nt, Human adenovirus C
gaugaugaugaa

SEQ ID NO: 107714 - RNA, 22 nt, Human adenovirus C
gaccgugguuugcaacuguccu

SEQ ID NO: 107715 - RNA, 23 nt, Human adenovirus C
gacccugauaggggaagugcagg

SEQ ID NO: 107716 - RNA, 13 nt, Human adenovirus C
gacccggcacugc

SEQ ID NO: 107717 - RNA, 16 nt, Human adenovirus C
gacccgcaccaggugc

SEQ ID NO: 107718 - RNA, 20 nt, Human adenovirus C
gacgugguaaaggugacucu

SEQ ID NO: 107719 - RNA, 19 nt, Human adenovirus C
gacgccgccaccaaccagc

SEQ ID NO: 107720 - RNA, 19 nt, Human adenovirus C
gaccaugaagaucuggaag

SEQ ID NO: 107721 - RNA, 15 nt, Human adenovirus C
gacaucaccuguguc

SEQ ID NO: 107722 - RNA, 23 nt, Human adenovirus C
gagcuugaucugcuggcgcagaa

SEQ ID NO: 107723 - RNA, 16 nt, Human adenovirus C
gagcuguaaacgcccc

SEQ ID NO: 107724 - RNA, 22 nt, Human adenovirus C
gagcuguuugauucuuugaauc

SEQ ID NO: 107725 - RNA, 16 nt, Human adenovirus C
gagcucauauuugaca

SEQ ID NO: 107726 - RNA, 21 nt, Human adenovirus C
gagcguuuggcucgacaggaa

SEQ ID NO: 107727 - RNA, 22 nt, Human adenovirus C
gagcgcugggcguggugccuaa

SEQ ID NO: 107728 - RNA, 12 nt, Human adenovirus C
gagcagccagac

SEQ ID NO: 107729 - RNA, 13 nt, Human adenovirus C
gagcaacaacagc

SEQ ID NO: 107730 - RNA, 20 nt, Human adenovirus C
gacucaagcagguuuaccag

SEQ ID NO: 107731 - RNA, 14 nt, Human adenovirus C
gacuugagcuguaa

SEQ ID NO: 107732 - RNA, 17 nt, Human adenovirus C
cuuguaaauaucaggaa

SEQ ID NO: 107733 - RNA, 19 nt, Human adenovirus C
gaaaggacuguguacucug

SEQ ID NO: 107734 - RNA, 20 nt, Human adenovirus C
gaaagugucuccuaguacau

SEQ ID NO: 107735 - RNA, 15 nt, Human adenovirus C
gaacuguuuccagaa

SEQ ID NO: 107736 - RNA, 11 nt, Human adenovirus C
gaacucaaagc

SEQ ID NO: 107737 - RNA, 19 nt, Human adenovirus C
gaagacgacgggcccggug

SEQ ID NO: 107738 - RNA, 22 nt, Human adenovirus C
gaaguuuucacuccacaggcug

SEQ ID NO: 107739 - RNA, 20 nt, Human adenovirus C
gaauacuaggguucugugag

SEQ ID NO: 107740 - RNA, 22 nt, Human adenovirus C
gaauaagaucucuaauaccaca

SEQ ID NO: 107741 - RNA, 15 nt, Human adenovirus C
gaauauaacaccuaa

SEQ ID NO: 107742 - RNA, 20 nt, Human adenovirus C
gaauauaacaccuaagaaua

SEQ ID NO: 107743 - RNA, 20 nt, Human adenovirus C
gccauucagaccguggugcg

SEQ ID NO: 107744 - RNA, 16 nt, Human adenovirus C
gcccacgccgccacca

SEQ ID NO: 107745 - RNA, 19 nt, Human adenovirus C
gccccaccaccacauagcu

SEQ ID NO: 107746 - RNA, 15 nt, Human adenovirus C
gccccccugcucagg

SEQ ID NO: 107747 - RNA, 15 nt, Human adenovirus C
gcggcagcggcagca

SEQ ID NO: 107748 - RNA, 16 nt, Human adenovirus C
gcggaugaacgggaag

SEQ ID NO: 107749 - RNA, 22 nt, Human adenovirus C
gcggccgaguugggccccugca

SEQ ID NO: 107750 - RNA, 23 nt, Human adenovirus C
gcggccauucagaccguggugcg

SEQ ID NO: 107751 - RNA, 13 nt, Human adenovirus C
gcgggcacaagaa

SEQ ID NO: 107752 - RNA, 15 nt, Human adenovirus C
gcgggcccccggagg

SEQ ID NO: 107753 - RNA, 21 nt, Human adenovirus C
gcucaaccaucgcgcccacaa

SEQ ID NO: 107754 - RNA, 22 nt, Human adenovirus C
gcucaaccaucgcgcccacaac

SEQ ID NO: 107755 - RNA, 15 nt, Human adenovirus C
gcucaggaaagcaaa

SEQ ID NO: 107756 - RNA, 16 nt, Human adenovirus C
gcuugcaagacugugg

SEQ ID NO: 107757 - RNA, 15 nt, Human adenovirus C
gcugggaugggugca

SEQ ID NO: 107758 - RNA, 13 nt, Human adenovirus C
gcuggaugugacc

SEQ ID NO: 107759 - RNA, 20 nt, Human adenovirus C
gcuguaccuggggacuguua

SEQ ID NO: 107760 - RNA, 15 nt, Human adenovirus C
gcuguagagcuguuc

SEQ ID NO: 107761 - RNA, 17 nt, Human adenovirus C
gcuguauaacgcuggaa

SEQ ID NO: 107762 - RNA, 16 nt, Human adenovirus C
ggacuaacaucugccc

SEQ ID NO: 107763 - RNA, 13 nt, Human adenovirus C
ggacuguguacuc

SEQ ID NO: 107764 - RNA, 16 nt, Human adenovirus C
ggacuguguacucugu

SEQ ID NO: 107765 - RNA, 19 nt, Human adenovirus C
ggacuguguacucugugug

SEQ ID NO: 107766 - RNA, 14 nt, Human adenovirus C
ggagaaacagcauc

SEQ ID NO: 107767 - RNA, 17 nt, Human adenovirus C
ggagaaaggacugugua

SEQ ID NO: 107768 - RNA, 17 nt, Human adenovirus C
ggaaggugcugagguac

SEQ ID NO: 107769 - RNA, 14 nt, Human adenovirus C
ggaauaagaucucu

SEQ ID NO: 107770 - RNA, 14 nt, Human adenovirus C
ggaggcugcagucu

SEQ ID NO: 107771 - RNA, 13 nt, Human adenovirus C
ggcagcaacagca

SEQ ID NO: 107772 - RNA, 19 nt, Human adenovirus C
ggcagcagccgcaggccaa

SEQ ID NO: 107773 - RNA, 22 nt, Human adenovirus C
ggcacuuaggccagauugcaag

SEQ ID NO: 107774 - RNA, 15 nt, Human adenovirus C
ggcgaggggcucaaa

SEQ ID NO: 107775 - RNA, 18 nt, Human adenovirus C
ggcggugcgggcggcgcu

SEQ ID NO: 107776 - RNA, 18 nt, Human adenovirus C
ggcgguugaucuccugaa

SEQ ID NO: 107777 - RNA, 20 nt, Human adenovirus C
ggcgucgccaggcuguggaa

SEQ ID NO: 107778 - RNA, 23 nt, Human adenovirus C
ggccuuaaaaagcaucauaucau

SEQ ID NO: 107779 - RNA, 14 nt, Human adenovirus C
ggcccggugagcuu

SEQ ID NO: 107780 - RNA, 18 nt, Human adenovirus C
guagaagaccaccagcca

SEQ ID NO: 107781 - RNA, 20 nt, Human adenovirus C
guagaagaccaccagccaaa

SEQ ID NO: 107782 - RNA, 19 nt, Human adenovirus C
guaucgaggacuugcuuaa

SEQ ID NO: 107783 - RNA, 15 nt, Human adenovirus C
guauuccccuggaca

SEQ ID NO: 107784 - RNA, 22 nt, Human adenovirus C
gggggaugugcgcgaggccgug

SEQ ID NO: 107785 - RNA, 21 nt, Human adenovirus C
ggcuauuaggguauaugcaaa

SEQ ID NO: 107786 - RNA, 22 nt, Human adenovirus C
ggcuauuaggguauaugcaaag

SEQ ID NO: 107787 - RNA, 13 nt, Human adenovirus C
ggcucaaccaucg

SEQ ID NO: 107788 - RNA, 19 nt, Human adenovirus C
gguggcacuuaggccagau

SEQ ID NO: 107789 - RNA, 19 nt, Human adenovirus C
guaaaggugacucuggaug

SEQ ID NO: 107790 - RNA, 20 nt, Human adenovirus C
ggugacucuggauguucaga

SEQ ID NO: 107791 - RNA, 16 nt, Human adenovirus C
ggucaaacgcucaaaa

SEQ ID NO: 107792 - RNA, 16 nt, Human adenovirus C
ggucaaggacaagcag

SEQ ID NO: 107793 - RNA, 17 nt, Human adenovirus C
gucaucgccuucauuca

SEQ ID NO: 107794 - RNA, 17 nt, Human adenovirus C
gucaucuccagcggcca

SEQ ID NO: 107795 - RNA, 20 nt, Human adenovirus C
guccacaguggacgcggcca

SEQ ID NO: 107796 - RNA, 21 nt, Human adenovirus C
gucucacgcucgcuugguccu

SEQ ID NO: 107797 - RNA, 23 nt, Human adenovirus C
gucucacgcucgcuugguccugu

SEQ ID NO: 107798 - RNA, 13 nt, Human adenovirus C
gucuccgaaccuu

SEQ ID NO: 107799 - RNA, 14 nt, Human adenovirus C
gugcauacgugggg

SEQ ID NO: 107800 - RNA, 15 nt, Human adenovirus C
gugcccuuucuuacc

SEQ ID NO: 107801 - RNA, 16 nt, Human adenovirus C
gugagauaauguuuaa

SEQ ID NO: 107802 - RNA, 18 nt, Human adenovirus C
ucaaacgcucaaaagcau

SEQ ID NO: 107803 - RNA, 14 nt, Human adenovirus C
ucaauauaagcuau

SEQ ID NO: 107804 - RNA, 17 nt, Human adenovirus C
uauuuccugcagauuca

SEQ ID NO: 107805 - RNA, 23 nt, Human adenovirus C
uauuuccugcagauucacucaaa

SEQ ID NO: 107806 - RNA, 22 nt, Human adenovirus C
ucaaacccagcuucagcuugcc

SEQ ID NO: 107807 - RNA, 12 nt, Human adenovirus C
ucaaaauccaaa

SEQ ID NO: 107808 - RNA, 17 nt, Human adenovirus C
ucaaaauccaaacagag

SEQ ID NO: 107809 - RNA, 17 nt, Human adenovirus C
uauuaggguauaugcaa

SEQ ID NO: 107810 - RNA, 19 nt, Human adenovirus C
uaugcaaagguggcacuua

SEQ ID NO: 107811 - RNA, 19 nt, Human adenovirus C
uaugacaagcgcuuuccag

SEQ ID NO: 107812 - RNA, 14 nt, Human adenovirus C
uaugagaugcaucu

SEQ ID NO: 107813 - RNA, 22 nt, Human adenovirus C
uacucugaguuggcaccccuau

SEQ ID NO: 107814 - RNA, 16 nt, Human adenovirus C
uaggguauaugcaaag

SEQ ID NO: 107815 - RNA, 22 nt, Human adenovirus C
uagcccaagagcaacaacagcg

SEQ ID NO: 107816 - RNA, 23 nt, Human adenovirus C
uaguugaauggaauaagaucucu

SEQ ID NO: 107817 - RNA, 15 nt, Human adenovirus C
uagguccaggugaua

SEQ ID NO: 107818 - RNA, 13 nt, Human adenovirus C
uaaguucaugucg

SEQ ID NO: 107819 - RNA, 18 nt, Human adenovirus C
uaauguacuaggagacac

SEQ ID NO: 107820 - RNA, 22 nt, Human adenovirus C
uaauuaugaaacggagugucau

SEQ ID NO: 107821 - RNA, 18 nt, Human adenovirus C
uaccccaaguucaugccu

SEQ ID NO: 107822 - RNA, 15 nt, Human adenovirus C
uacggauuugucacc

SEQ ID NO: 107823 - RNA, 23 nt, Human adenovirus C
uacucaacccgaauaaacuacau

SEQ ID NO: 107824 - RNA, 16 nt, Human adenovirus C
uacggauagcugugac

SEQ ID NO: 107825 - RNA, 13 nt, Human adenovirus C
uaaaccugugauu

SEQ ID NO: 107826 - RNA, 12 nt, Human adenovirus C
uaaacuacauga

SEQ ID NO: 107827 - RNA, 23 nt, Human adenovirus C
guuuuuacccacccaaagcagac

SEQ ID NO: 107828 - RNA, 19 nt, Human adenovirus C
guuuuuauuuguacacucu

SEQ ID NO: 107829 - RNA, 14 nt, Human adenovirus C
gugguacuucccag

SEQ ID NO: 107830 - RNA, 18 nt, Human adenovirus C
gugggggcaacaucuccu

SEQ ID NO: 107831 - RNA, 19 nt, Human adenovirus C
guggguucuuuugucaugg

SEQ ID NO: 107832 - RNA, 19 nt, Human adenovirus C
gugguaaaggugacucugg

SEQ ID NO: 107833 - RNA, 13 nt, Human adenovirus C
gugggaauuugaa

SEQ ID NO: 107834 - RNA, 22 nt, Human adenovirus C
gugggcgucgccaggcugugga

SEQ ID NO: 107835 - RNA, 15 nt, Human adenovirus C
uaacaucugcccuaa

SEQ ID NO: 107836 - RNA, 16 nt, Human adenovirus C
uaagucgcagcugcuc

SEQ ID NO: 107837 - RNA, 19 nt, Human adenovirus C
uaagucgcagcugcucagg

SEQ ID NO: 107838 - RNA, 21 nt, Human adenovirus C
uaagucgcagcugcucaggaa

SEQ ID NO: 107839 - RNA, 19 nt, Human adenovirus C
uaacgcuggaaaaguccac

SEQ ID NO: 107840 - RNA, 14 nt, Human adenovirus C
uaagaauaugucug

SEQ ID NO: 107841 - RNA, 18 nt, Human adenovirus C
aaaaacaugguucuucca

SEQ ID NO: 107842 - RNA, 22 nt, Human adenovirus C
aaacauauuaggaaccagccug

SEQ ID NO: 107843 - RNA, 22 nt, Human adenovirus C
aaacccgccaggcgaggggcuc

SEQ ID NO: 107844 - RNA, 23 nt, Human adenovirus C
aaacccgccaggcgaggggcuca

SEQ ID NO: 107845 - RNA, 13 nt, Human adenovirus C
aaaaugucuuuca

SEQ ID NO: 107846 - RNA, 12 nt, Human adenovirus C
aaaacucaccaa

SEQ ID NO: 107847 - RNA, 14 nt, Human adenovirus C
aaaaaugucuuuca

SEQ ID NO: 107848 - RNA, 20 nt, Human adenovirus C
aaaaaugucuuucaguagca

SEQ ID NO: 107849 - RNA, 14 nt, Human adenovirus C
augcuugcgcuuaa

SEQ ID NO: 107850 - RNA, 15 nt, Human adenovirus C
auggaagcauuguga

SEQ ID NO: 107851 - RNA, 14 nt, Human adenovirus C
auggaagacaucaa

SEQ ID NO: 107852 - RNA, 22 nt, Human adenovirus C
auuauguggcuuauuuguugcc

SEQ ID NO: 107853 - RNA, 15 nt, Human adenovirus C
auucagcaucaccuc

SEQ ID NO: 107854 - RNA, 16 nt, Human adenovirus C
auucagcaucaccucc

SEQ ID NO: 107855 - RNA, 14 nt, Human adenovirus C
auucaguucauuga

SEQ ID NO: 107856 - RNA, 18 nt, Human adenovirus C
caaacgcucaaaagcaug

SEQ ID NO: 107857 - RNA, 13 nt, Human adenovirus C
caaagcccaagaa

SEQ ID NO: 107858 - RNA, 12 nt, Human adenovirus C
caaagucaguca

SEQ ID NO: 107859 - RNA, 15 nt, Human adenovirus C
caacacccagugcgc

SEQ ID NO: 107860 - RNA, 12 nt, Human adenovirus C
caagaacugcua

SEQ ID NO: 107861 - RNA, 16 nt, Human adenovirus C
caaccuggaccggcug

SEQ ID NO: 107862 - RNA, 23 nt, Human adenovirus C
caaccuuuggacuugagcuguaa

SEQ ID NO: 107863 - RNA, 21 nt, Human adenovirus C
caacagcugcugagaaacgac

SEQ ID NO: 107864 - RNA, 15 nt, Human adenovirus C
cagaugacuaacuca

SEQ ID NO: 107865 - RNA, 15 nt, Human adenovirus C
cagauccaacagcug

SEQ ID NO: 107866 - RNA, 17 nt, Human adenovirus C
cagauccaacagcugcu

SEQ ID NO: 107867 - RNA, 16 nt, Human adenovirus C
cagauugagguacuga

SEQ ID NO: 107868 - RNA, 11 nt, Human adenovirus C
cagcaacagca

SEQ ID NO: 107869 - RNA, 12 nt, Human adenovirus C
cagcaacagcag

SEQ ID NO: 107870 - RNA, 17 nt, Human adenovirus C
cagcaaaucuuugucca

SEQ ID NO: 107871 - RNA, 15 nt, Human adenovirus C
cagcucucuuaacua

SEQ ID NO: 107872 - RNA, 18 nt, Human adenovirus C
cagcucgcuuaaguucau

SEQ ID NO: 107873 - RNA, 16 nt, Human adenovirus C
cagcuugccugcucca

SEQ ID NO: 107874 - RNA, 23 nt, Human adenovirus C
caggaaagcaaagucagucacaa

SEQ ID NO: 107875 - RNA, 17 nt, Human adenovirus C
caggaaauaugacuacg

SEQ ID NO: 107876 - RNA, 21 nt, Human adenovirus C
cagcugccgccaugggcucca

SEQ ID NO: 107877 - RNA, 15 nt, Human adenovirus C
cagcugcagcucucu

SEQ ID NO: 107878 - RNA, 16 nt, Human adenovirus C
cagccccuggaaauca

SEQ ID NO: 107879 - RNA, 14 nt, Human adenovirus C
cagccaaacccgcc

SEQ ID NO: 107880 - RNA, 17 nt, Human adenovirus C
cagccacaaaugggacu

SEQ ID NO: 107881 - RNA, 22 nt, Human adenovirus C
cagccgguaauaggugugauuu

SEQ ID NO: 107882 - RNA, 18 nt, Human adenovirus C
cagcagccgccgccauga

SEQ ID NO: 107883 - RNA, 15 nt, Human adenovirus C
cagcagccuguggcu

SEQ ID NO: 107884 - RNA, 13 nt, Human adenovirus C
cacccuacgcugg

SEQ ID NO: 107885 - RNA, 18 nt, Human adenovirus C
cacccgagaguguacaaa

SEQ ID NO: 107886 - RNA, 21 nt, Human adenovirus C
caccgcccgcgggauugugac

SEQ ID NO: 107887 - RNA, 21 nt, Human adenovirus C
caccggccagagcgucccgac

SEQ ID NO: 107888 - RNA, 22 nt, Human adenovirus C
cacuaucuucauauuguugcag

SEQ ID NO: 107889 - RNA, 19 nt, Human adenovirus C
cacgcacgagaaggugcug

SEQ ID NO: 107890 - RNA, 17 nt, Human adenovirus C
cacgcuggccagcacgc

SEQ ID NO: 107891 - RNA, 21 nt, Human adenovirus C
caagacgcaacggacccggcg

SEQ ID NO: 107892 - RNA, 18 nt, Human adenovirus C
caagcgcaaaaucaaaga

SEQ ID NO: 107893 - RNA, 18 nt, Human adenovirus C
augcgagguaaaccugca

SEQ ID NO: 107894 - RNA, 18 nt, Human adenovirus C
augcggccucuugcaagu

SEQ ID NO: 107895 - RNA, 20 nt, Human adenovirus C
augauuuugaggaggcuauu

SEQ ID NO: 107896 - RNA, 18 nt, Human adenovirus C
augcaaagguggcacuua

SEQ ID NO: 107897 - RNA, 20 nt, Human adenovirus C
aucgccuucauucaguucau

SEQ ID NO: 107898 - RNA, 20 nt, Human adenovirus C
augaccaugaagaucuggaa

SEQ ID NO: 107899 - RNA, 18 nt, Human adenovirus C
augaccggcucaaccauc

SEQ ID NO: 107900 - RNA, 14 nt, Human adenovirus C
augacuugcaagag

SEQ ID NO: 107901 - RNA, 20 nt, Human adenovirus C
augaguugauguaaguuuaa

SEQ ID NO: 107902 - RNA, 23 nt, Human adenovirus C
aucgacgccgccaccaaccagcc

SEQ ID NO: 107903 - RNA, 15 nt, Human adenovirus C
aucccaccuuucaca

SEQ ID NO: 107904 - RNA, 21 nt, Human adenovirus C
aucccaccuuucacaguuuac

SEQ ID NO: 107905 - RNA, 18 nt, Human adenovirus C
aucauggguaacagacau

SEQ ID NO: 107906 - RNA, 19 nt, Human adenovirus C
aucaccuggauguccaggu

SEQ ID NO: 107907 - RNA, 16 nt, Human adenovirus C
aucaccaacgcguuua

SEQ ID NO: 107908 - RNA, 15 nt, Human adenovirus C
auaggggaagugcag

SEQ ID NO: 107909 - RNA, 22 nt, Human adenovirus C
auaaucacccgagaguguacaa

SEQ ID NO: 107910 - RNA, 13 nt, Human adenovirus C
auaucacugauga

SEQ ID NO: 107911 - RNA, 12 nt, Human adenovirus C
auaucaggaauu

SEQ ID NO: 107912 - RNA, 16 nt, Human adenovirus C
agguguuauauuccac

SEQ ID NO: 107913 - RNA, 15 nt, Human adenovirus C
aggugggggucucau

SEQ ID NO: 107914 - RNA, 14 nt, Human adenovirus C
aggcugcagucucc

SEQ ID NO: 107915 - RNA, 16 nt, Human adenovirus C
aggggcugguuggugg

SEQ ID NO: 107916 - RNA, 19 nt, Human adenovirus C
agcagccgccgccaugagc

SEQ ID NO: 107917 - RNA, 20 nt, Human adenovirus C
agcuggacagcgacaugaac

SEQ ID NO: 107918 - RNA, 16 nt, Human adenovirus C
agcugggaugggugca

SEQ ID NO: 107919 - RNA, 15 nt, Human adenovirus C
agcuuaaugaccaga

SEQ ID NO: 107920 - RNA, 17 nt, Human adenovirus C
agcuuaaugaccagaca

SEQ ID NO: 107921 - RNA, 21 nt, Human adenovirus C
agcuuaaugaccagacaccgu

SEQ ID NO: 107922 - RNA, 22 nt, Human adenovirus C
agcuucagcuugccugcuccag

SEQ ID NO: 107923 - RNA, 17 nt, Human adenovirus C
agcuuggacauguggug

SEQ ID NO: 107924 - RNA, 19 nt, Human adenovirus C
agugagcaggaacugaaag

SEQ ID NO: 107925 - RNA, 14 nt, Human adenovirus C
aguagaagaccacc

SEQ ID NO: 107926 - RNA, 21 nt, Human adenovirus C
aguagaagaccaccagccaaa

SEQ ID NO: 107927 - RNA, 21 nt, Human adenovirus C
aguguacaaauaaaaacauuu

SEQ ID NO: 107928 - RNA, 16 nt, Human adenovirus C
aguuggcccgcugccc

SEQ ID NO: 107929 - RNA, 18 nt, Human adenovirus C
aguugcgauacacagggu

SEQ ID NO: 107930 - RNA, 19 nt, Human adenovirus C
aguucagaugacuaacuca

SEQ ID NO: 107931 - RNA, 20 nt, Human adenovirus C
aguucagaugacuaacucag

SEQ ID NO: 107932 - RNA, 23 nt, Human adenovirus C
aguucccgggucaaagaauccaa

SEQ ID NO: 107933 - RNA, 14 nt, Human adenovirus C
auaaccuuaauccc

SEQ ID NO: 107934 - RNA, 11 nt, Human adenovirus C
auaacaugcaa

SEQ ID NO: 107935 - RNA, 21 nt, Human adenovirus C
auaaacacguugaaacauaac

SEQ ID NO: 107936 - RNA, 13 nt, Human adenovirus C
auaaacuacauga

SEQ ID NO: 107937 - RNA, 19 nt, Human adenovirus C
acccaaagcgugcaggggc

SEQ ID NO: 107938 - RNA, 20 nt, Human adenovirus C
accagaacgaccacagcaac

SEQ ID NO: 107939 - RNA, 11 nt, Human adenovirus C
accacuguggu

SEQ ID NO: 107940 - RNA, 14 nt, Human adenovirus C
accacuuacuggcu

SEQ ID NO: 107941 - RNA, 18 nt, Human adenovirus C
accagacaccguccugag

SEQ ID NO: 107942 - RNA, 16 nt, Human adenovirus C
acaugcuaccucuuug

SEQ ID NO: 107943 - RNA, 23 nt, Human adenovirus C
acaugcuaccucuuugagcccuu

SEQ ID NO: 107944 - RNA, 13 nt, Human adenovirus C
acagcgacaugaa

SEQ ID NO: 107945 - RNA, 14 nt, Human adenovirus C
acagcgacaugaac

SEQ ID NO: 107946 - RNA, 17 nt, Human adenovirus C
acagcaagacacuugcu

SEQ ID NO: 107947 - RNA, 12 nt, Human adenovirus C
acacacaauaaa

SEQ ID NO: 107948 - RNA, 17 nt, Human adenovirus C
acacaccuccugagaua

SEQ ID NO: 107949 - RNA, 14 nt, Human adenovirus C
acacagaagcaaag

SEQ ID NO: 107950 - RNA, 19 nt, Human adenovirus C
acacaggguugcagcacug

SEQ ID NO: 107951 - RNA, 20 nt, Human adenovirus C
acaucaacuuugcgucucug

SEQ ID NO: 107952 - RNA, 16 nt, Human adenovirus C
acagcugccgccaugg

SEQ ID NO: 107953 - RNA, 16 nt, Human adenovirus C
acagcgccaaggcuac

SEQ ID NO: 107954 - RNA, 17 nt, Human adenovirus C
accguguggaauauaac

SEQ ID NO: 107955 - RNA, 14 nt, Human adenovirus C
accguuuuuaccca

SEQ ID NO: 107956 - RNA, 16 nt, Human adenovirus C
accuuuggacaccucc

SEQ ID NO: 107957 - RNA, 20 nt, Human adenovirus C
acccaaugguuuccaagaaa

SEQ ID NO: 107958 - RNA, 16 nt, Human adenovirus C
accgaggagcugaggc

SEQ ID NO: 107959 - RNA, 17 nt, Human adenovirus C
accgccuggaacugcuu

SEQ ID NO: 107960 - RNA, 18 nt, Human adenovirus C
accgcuguauaacgcugg

SEQ ID NO: 107961 - RNA, 15 nt, Human adenovirus C
acgagucacuccugc

SEQ ID NO: 107962 - RNA, 16 nt, Human adenovirus C
acgcuggccagcacgc

SEQ ID NO: 107963 - RNA, 17 nt, Human adenovirus C
acgcuggaaaaguccac

SEQ ID NO: 107964 - RNA, 15 nt, Human adenovirus C
acggcguuccagaca

SEQ ID NO: 107965 - RNA, 17 nt, Human adenovirus C
acggcggacggccucaa

SEQ ID NO: 107966 - RNA, 16 nt, Human adenovirus C
acggauagcugugacu

SEQ ID NO: 107967 - RNA, 18 nt, Human adenovirus C
acuuguaaauaucaggaa

SEQ ID NO: 107968 - RNA, 20 nt, Human adenovirus C
acuugcuggaacagagcucu

SEQ ID NO: 107969 - RNA, 18 nt, Human adenovirus C
acuuucaauaaaggcaaa

SEQ ID NO: 107970 - RNA, 18 nt, Human adenovirus C
acuuugcuuccuugcaag

SEQ ID NO: 107971 - RNA, 14 nt, Human adenovirus C
agaaagaugaugau

SEQ ID NO: 107972 - RNA, 24 nt, Human adenovirus C
agaaaccugcuggcgcagauccaa

SEQ ID NO: 107973 - RNA, 17 nt, Human adenovirus C
agaacccuaguauucaa

SEQ ID NO: 107974 - RNA, 14 nt, Human adenovirus C
acugaaagccauug

SEQ ID NO: 107975 - RNA, 14 nt, Human adenovirus C
acuuaaaaucaguc

SEQ ID NO: 107976 - RNA, 14 nt, Human adenovirus C
agagcuuuugaaau

SEQ ID NO: 107977 - RNA, 15 nt, Human adenovirus C
agagcuuuugaaauc

SEQ ID NO: 107978 - RNA, 15 nt, Human adenovirus C
agacucugacaaagc

SEQ ID NO: 107979 - RNA, 20 nt, Human adenovirus C
agacugugggggcaacaucu

SEQ ID NO: 107980 - RNA, 22 nt, Human adenovirus C
agcacuuuuugccgcugcgcaa

SEQ ID NO: 107981 - RNA, 16 nt, Human adenovirus C
agcaaggaaauuccca

SEQ ID NO: 107982 - RNA, 22 nt, Human adenovirus C
agcaagacacuugcuugaucaa

SEQ ID NO: 107983 - RNA, 12 nt, Human adenovirus C
agcaacagcagc

SEQ ID NO: 107984 - RNA, 20 nt, Human adenovirus C
aaggugggggucucauguag

SEQ ID NO: 107985 - RNA, 17 nt, Human adenovirus C
aagguguaaaccuguga

SEQ ID NO: 107986 - RNA, 17 nt, Human adenovirus C
aagguacggugaucaau

SEQ ID NO: 107987 - RNA, 13 nt, Human adenovirus C
aagggugagauaa

SEQ ID NO: 107988 - RNA, 21 nt, Human adenovirus C
aagggugggaaagaauauaua

SEQ ID NO: 107989 - RNA, 15 nt, Human adenovirus C
aagcaagugucuugc

SEQ ID NO: 107990 - RNA, 16 nt, Human adenovirus C
aagcaagugucuugcu

SEQ ID NO: 107991 - RNA, 14 nt, Human adenovirus C
aagauuauacccac

SEQ ID NO: 107992 - RNA, 13 nt, Human adenovirus C
aagaugaugauga

SEQ ID NO: 107993 - RNA, 11 nt, Human adenovirus C
aaucaaagggg

SEQ ID NO: 107994 - RNA, 17 nt, Human adenovirus C
aauccaauugugccaaa

SEQ ID NO: 107995 - RNA, 23 nt, Human adenovirus C
aauccacagcggcggcagcagca

SEQ ID NO: 107996 - RNA, 12 nt, Human adenovirus C
aauaugacuacg

SEQ ID NO: 107997 - RNA, 17 nt, Human adenovirus C
aauaagguucauggugg

SEQ ID NO: 107998 - RNA, 14 nt, Human adenovirus C
aauaagagugcaga

SEQ ID NO: 107999 - RNA, 16 nt, Human adenovirus C
aauaagaucucuaaua

SEQ ID NO: 108000 - RNA, 17 nt, Human adenovirus C
aauaaagggugagauaa

SEQ ID NO: 108001 - RNA, 12 nt, Human adenovirus C
aauuuaccccaa

SEQ ID NO: 108002 - RNA, 18 nt, Human adenovirus C
aaugaaaaaugacuugaa

SEQ ID NO: 108003 - RNA, 19 nt, Human adenovirus C
aaugaaaaaugacuugaaa

SEQ ID NO: 108004 - RNA, 16 nt, Human adenovirus C
aaucugcgcacugugg

SEQ ID NO: 108005 - RNA, 22 nt, Human adenovirus C
aauguuuuuauuuguacacucu

SEQ ID NO: 108006 - RNA, 21 nt, Human adenovirus C
acaagucaacggauguggcau

SEQ ID NO: 108007 - RNA, 23 nt, Human adenovirus C
acaagugggaauuugaagagcuu

SEQ ID NO: 108008 - RNA, 23 nt, Human adenovirus C
aagacugugggggcaacaucucc

SEQ ID NO: 108009 - RNA, 17 nt, Human adenovirus C
aagacauauuuccugca

SEQ ID NO: 108010 - RNA, 20 nt, Human adenovirus C
aagacacuugcuugaucaaa

SEQ ID NO: 108011 - RNA, 15 nt, Human adenovirus C
aacccuaguauucaa

SEQ ID NO: 108012 - RNA, 23 nt, Human adenovirus C
aacccuaguauucaaccugccac

SEQ ID NO: 108013 - RNA, 16 nt, Human adenovirus C
aacaucaacaacagcu

SEQ ID NO: 108014 - RNA, 19 nt, Human adenovirus C
aacuccccgggcagcucgc

SEQ ID NO: 108015 - RNA, 22 nt, Human adenovirus C
aacucacagaacccuaguauuc

SEQ ID NO: 108016 - RNA, 12 nt, Human adenovirus C
aacucguuugau

SEQ ID NO: 108017 - RNA, 13 nt, Human adenovirus C
aacgcucaaaagc

SEQ ID NO: 108018 - RNA, 13 nt, Human adenovirus C
aaaucaaaggggu

SEQ ID NO: 108019 - RNA, 10 nt, Human adenovirus C
aaaccucagc

SEQ ID NO: 108020 - RNA, 16 nt, Human adenovirus C
aaaccugcaggagcuc

SEQ ID NO: 108021 - RNA, 12 nt, Human adenovirus C
aaaggguauaua

SEQ ID NO: 108022 - RNA, 14 nt, Human adenovirus C
aaaggugacucugg

SEQ ID NO: 108023 - RNA, 20 nt, Human adenovirus C
aaaggugacucuggauguuc

SEQ ID NO: 108024 - RNA, 22 nt, Human adenovirus C
aaacuccccgggcagcucgcuu

SEQ ID NO: 108025 - RNA, 15 nt, Human adenovirus C
uuuaauaaaggguga

SEQ ID NO: 108026 - RNA, 21 nt, Human adenovirus C
uugucccuccgcacccacuau

SEQ ID NO: 108027 - RNA, 13 nt, Human adenovirus C
uucuucccagcug

SEQ ID NO: 108028 - RNA, 21 nt, Human adenovirus C
uucuucccccgaccgcuguau

SEQ ID NO: 108029 - RNA, 23 nt, Human adenovirus C
aaccugaacgggguguuugacau

SEQ ID NO: 108030 - RNA, 15 nt, Human adenovirus C
aacuacgucaucucc

SEQ ID NO: 108031 - RNA, 16 nt, Human adenovirus C
aacuguuuccagaacu

SEQ ID NO: 108032 - RNA, 21 nt, Human adenovirus C
aacagcagcggucacacagaa

SEQ ID NO: 108033 - RNA, 23 nt, Human adenovirus C
uuuuguagaauggaagacaucaa

SEQ ID NO: 108034 - RNA, 23 nt, Human adenovirus C
uuuugcgcccuaccugugcuuug

SEQ ID NO: 108035 - RNA, 18 nt, Human adenovirus C
uuuuuccaggacguggua

SEQ ID NO: 108036 - RNA, 23 nt, Human adenovirus C
aaccaucgcgcccacaacggacu

SEQ ID NO: 108037 - RNA, 18 nt, Human adenovirus C
aaccgcauugggagggga

SEQ ID NO: 108038 - RNA, 15 nt, Human adenovirus C
aaggccagccgggga

SEQ ID NO: 108039 - RNA, 22 nt, Human adenovirus C
aaguggccccccugcucaggga

SEQ ID NO: 108040 - RNA, 15 nt, Human adenovirus C
aaggauaauugcgcu

SEQ ID NO: 108041 - RNA, 17 nt, Human adenovirus C
aaggauaauugcgcuaa

SEQ ID NO: 108042 - RNA, 19 nt, Human adenovirus C
aagcuauguccaagcgcaa

SEQ ID NO: 108043 - RNA, 20 nt, Human adenovirus C
aaggacuguguacucugugu

SEQ ID NO: 108044 - RNA, 20 nt, Human adenovirus C
aauacuaggguucugugagu

SEQ ID NO: 108045 - RNA, 23 nt, Human adenovirus C
aaguugcauguggaaaaaucaaa

SEQ ID NO: 108046 - RNA, 13 nt, Human adenovirus C
aaguucaugucgc

SEQ ID NO: 108047 - RNA, 12 nt, Human adenovirus C
aauaagaucucu

SEQ ID NO: 108048 - RNA, 15 nt, Human adenovirus C
aauguuuaacuugca

SEQ ID NO: 108049 - RNA, 22 nt, Human adenovirus C
aauuaugaaacggagugucauu

SEQ ID NO: 108050 - RNA, 18 nt, Human adenovirus C
aauggaagacaucaacuu

SEQ ID NO: 108051 - RNA, 20 nt, Human adenovirus C
aauguaucgaggacuugcuu

SEQ ID NO: 108052 - RNA, 16 nt, Human adenovirus C
uucaugccuuugucaa

SEQ ID NO: 108053 - RNA, 14 nt, Human adenovirus C
uucauucaguucau

SEQ ID NO: 108054 - RNA, 19 nt, Human adenovirus C
uucauucaguucauugacu

SEQ ID NO: 108055 - RNA, 19 nt, Human adenovirus C
uucaugucgcuguccagcu

SEQ ID NO: 108056 - RNA, 17 nt, Human adenovirus C
uucaguagcaagcugau

SEQ ID NO: 108057 - RNA, 15 nt, Human adenovirus C
uucacccaaugguuu

SEQ ID NO: 108058 - RNA, 18 nt, Human adenovirus C
uucccacgcccuacaugu

SEQ ID NO: 108059 - RNA, 20 nt, Human adenovirus C
uucccacgcccuacaugugg

SEQ ID NO: 108060 - RNA, 22 nt, Human adenovirus C
uucccgggucaaagaauccaau

SEQ ID NO: 108061 - RNA, 21 nt, Human adenovirus C
uuccagaacugagacgcauuu

SEQ ID NO: 108062 - RNA, 19 nt, Human adenovirus C
uucuccccggcuggccuua

SEQ ID NO: 108063 - RNA, 21 nt, Human adenovirus C
uucuccccggcuggccuuaaa

SEQ ID NO: 108064 - RNA, 15 nt, Human adenovirus C
uucucccaccauaag

SEQ ID NO: 108065 - RNA, 21 nt, Human adenovirus C
uucugcugugcguaacuugcu

SEQ ID NO: 108066 - RNA, 23 nt, Human adenovirus C
uucuaacacaccuccugagauac

SEQ ID NO: 108067 - RNA, 22 nt, Human adenovirus C
uuccugagcccgcuugcaagca

SEQ ID NO: 108068 - RNA, 19 nt, Human adenovirus C
uuccuugcaagaacugcua

SEQ ID NO: 108069 - RNA, 14 nt, Human adenovirus C
uuccuuccucccaa

SEQ ID NO: 108070 - RNA, 12 nt, Human adenovirus C
uuaccaccacac

SEQ ID NO: 108071 - RNA, 12 nt, Human adenovirus C
uuagcccaagag

SEQ ID NO: 108072 - RNA, 14 nt, Human adenovirus C
uuagcccaagagca

SEQ ID NO: 108073 - RNA, 20 nt, Human adenovirus C
uuaggccagauugcaaguac

SEQ ID NO: 108074 - RNA, 13 nt, Human adenovirus C
uuauauugaucac

SEQ ID NO: 108075 - RNA, 11 nt, Human adenovirus C
uuaaaggguau

SEQ ID NO: 108076 - RNA, 15 nt, Human adenovirus C
uguuugacaugacca

SEQ ID NO: 108077 - RNA, 20 nt, Human adenovirus C
uuaagcgcgaaaacuacguc

SEQ ID NO: 108078 - RNA, 21 nt, Human adenovirus C
uuaagcugggaugggugcaua

SEQ ID NO: 108079 - RNA, 21 nt, Human adenovirus C
uguuuauuuuucaauugcaga

SEQ ID NO: 108080 - RNA, 17 nt, Human adenovirus C
ugucacccuuauccuca

SEQ ID NO: 108081 - RNA, 21 nt, Human adenovirus C
uggccuucccccguaacaucc

SEQ ID NO: 108082 - RNA, 16 nt, Human adenovirus C
uggcgcauuuggucag

SEQ ID NO: 108083 - RNA, 16 nt, Human adenovirus C
uggagcacuuuuugcc

SEQ ID NO: 108084 - RNA, 13 nt, Human adenovirus C
uggauauacuaca

SEQ ID NO: 108085 - RNA, 16 nt, Human adenovirus C
uggcaugacacuacga

SEQ ID NO: 108086 - RNA, 20 nt, Human adenovirus C
uggccccccugcucagggau

SEQ ID NO: 108087 - RNA, 17 nt, Human adenovirus C
ugguugugggccauauu

SEQ ID NO: 108088 - RNA, 23 nt, Human adenovirus C
ugggcaccuaugacaagcgcuuu

SEQ ID NO: 108089 - RNA, 13 nt, Human adenovirus C
uguaaaccuguga

SEQ ID NO: 108090 - RNA, 14 nt, Human adenovirus C
ugcuaccucuuuga

SEQ ID NO: 108091 - RNA, 13 nt, Human adenovirus C
ugcgcuaaugagc

SEQ ID NO: 108092 - RNA, 16 nt, Human adenovirus C
ugcucaggaaccugcu

SEQ ID NO: 108093 - RNA, 17 nt, Human adenovirus C
ugcuggccugcacccgc

SEQ ID NO: 108094 - RNA, 14 nt, Human adenovirus C
ugcuuaacgagucu

SEQ ID NO: 108095 - RNA, 18 nt, Human adenovirus C
uggaacgccguuggagac

SEQ ID NO: 108096 - RNA, 18 nt, Human adenovirus C
ugcauguuauguuucaac

SEQ ID NO: 108097 - RNA, 16 nt, Human adenovirus C
ugcgccgugggcuaau

SEQ ID NO: 108098 - RNA, 21 nt, Human adenovirus C
ugccuggaacccgcgcucaaa

SEQ ID NO: 108099 - RNA, 17 nt, Human adenovirus C
ugcgcauugcguaccuc

SEQ ID NO: 108100 - RNA, 18 nt, Human adenovirus C
ugcgcauugcguaccuca

SEQ ID NO: 108101 - RNA, 10 nt, Human adenovirus C
ugacuacagc

SEQ ID NO: 108102 - RNA, 21 nt, Human adenovirus C
ugacuacguccggcguuccau

SEQ ID NO: 108103 - RNA, 16 nt, Human adenovirus C
ugcagaaaauuucaag

SEQ ID NO: 108104 - RNA, 16 nt, Human adenovirus C
ugcagcacuggaacac

SEQ ID NO: 108105 - RNA, 21 nt, Human adenovirus C
ugcagcacuggaacacuauca

SEQ ID NO: 108106 - RNA, 17 nt, Human adenovirus C
ugcagcagccgccgcca

SEQ ID NO: 108107 - RNA, 13 nt, Human adenovirus C
uacuaggagacac

SEQ ID NO: 108108 - RNA, 22 nt, Human adenovirus C
uacuaggguucugugaguuuga

SEQ ID NO: 108109 - RNA, 22 nt, Human adenovirus C
uaaucacccgagaguguacaaa

SEQ ID NO: 108110 - RNA, 14 nt, Human adenovirus C
uagaugauccaguc

SEQ ID NO: 108111 - RNA, 20 nt, Human adenovirus C
uaguacggauagcugugacu

SEQ ID NO: 108112 - RNA, 21 nt, Human adenovirus C
uagucaucgccuucauucagu

SEQ ID NO: 108113 - RNA, 15 nt, Human adenovirus C
uaggagacacuuuca

SEQ ID NO: 108114 - RNA, 19 nt, Human adenovirus C
uagggaucgccuaccuccu

SEQ ID NO: 108115 - RNA, 15 nt, Human adenovirus C
uaggggaagugcagg

SEQ ID NO: 108116 - RNA, 23 nt, Human adenovirus C
uaggaaucuaacuuuuagcuuaa

SEQ ID NO: 108117 - RNA, 19 nt, Human adenovirus C
guugcuacauuucugggaa

SEQ ID NO: 108118 - RNA, 21 nt, Human adenovirus C
guuuaauaaagggugagauaa

SEQ ID NO: 108119 - RNA, 21 nt, Human adenovirus C
guuuauuaauaucacugauga

SEQ ID NO: 108120 - RNA, 20 nt, Human adenovirus C
guuuuuauuuguacacucuc

SEQ ID NO: 108121 - RNA, 19 nt, Human adenovirus C
guuugauggaagcauugug

SEQ ID NO: 108122 - RNA, 14 nt, Human adenovirus C
uaaauuuaccccaa

SEQ ID NO: 108123 - RNA, 22 nt, Human adenovirus C
uaacaucugcccuaaauuuacc

SEQ ID NO: 108124 - RNA, 15 nt, Human adenovirus C
uaaaaaacucaccaa

SEQ ID NO: 108125 - RNA, 17 nt, Human adenovirus C
uaaaaagcaucauauca

SEQ ID NO: 108126 - RNA, 21 nt, Human adenovirus C
guacauuauuuuuacauguuu

SEQ ID NO: 108127 - RNA, 10 nt, Human adenovirus C
guacacucuc

SEQ ID NO: 108128 - RNA, 23 nt, Human adenovirus C
guacaguagggaucgccuaccuc

SEQ ID NO: 108129 - RNA, 15 nt, Human adenovirus C
gucugaagacaccuu

SEQ ID NO: 108130 - RNA, 20 nt, Human adenovirus C
guuacuuuucagcagauuaa

SEQ ID NO: 108131 - RNA, 15 nt, Human adenovirus C
guguuaaauggggcg

SEQ ID NO: 108132 - RNA, 19 nt, Human adenovirus C
guguuauauuccacacggu

SEQ ID NO: 108133 - RNA, 13 nt, Human adenovirus C
gugucuccuagua

SEQ ID NO: 108134 - RNA, 23 nt, Human adenovirus C
guggggcuauacuacugaaugaa

SEQ ID NO: 108135 - RNA, 21 nt, Human adenovirus C
gugacaaaaagaaguggcgcu

SEQ ID NO: 108136 - RNA, 16 nt, Human adenovirus C
gugaccgaggagcuga

SEQ ID NO: 108137 - RNA, 18 nt, Human adenovirus C
gugcgcauugcguaccuc

SEQ ID NO: 108138 - RNA, 15 nt, Human adenovirus C
gugcguaacuugcug

SEQ ID NO: 108139 - RNA, 22 nt, Human adenovirus C
gugcugcgcgcggagguugcug

SEQ ID NO: 108140 - RNA, 23 nt, Human adenovirus C
gugcugcgcgcggagguugcugg

SEQ ID NO: 108141 - RNA, 16 nt, Human adenovirus C
uauaacaccuaagaau

SEQ ID NO: 108142 - RNA, 14 nt, Human adenovirus C
ucagcaaaucuuug

SEQ ID NO: 108143 - RNA, 20 nt, Human adenovirus C
ucaacccgaauaaacuacau

SEQ ID NO: 108144 - RNA, 22 nt, Human adenovirus C
ucaacccgaauaaacuacauga

SEQ ID NO: 108145 - RNA, 16 nt, Human adenovirus C
uccaacugugcccuuu

SEQ ID NO: 108146 - RNA, 14 nt, Human adenovirus C
uccaagauggcuac

SEQ ID NO: 108147 - RNA, 13 nt, Human adenovirus C
uccaacagcugcu

SEQ ID NO: 108148 - RNA, 13 nt, Human adenovirus C
ucccgaccaugga

SEQ ID NO: 108149 - RNA, 16 nt, Human adenovirus C
uccccucgagcagcca

SEQ ID NO: 108150 - RNA, 19 nt, Human adenovirus C
uccccucgagcagccagac

SEQ ID NO: 108151 - RNA, 23 nt, Human adenovirus C
ucauucaaaacaaugacuacagc

SEQ ID NO: 108152 - RNA, 16 nt, Human adenovirus C
ucauggguaacagaca

SEQ ID NO: 108153 - RNA, 14 nt, Human adenovirus C
ucaugccuuuguca

SEQ ID NO: 108154 - RNA, 15 nt, Human adenovirus C
ugaaggaguuuacau

SEQ ID NO: 108155 - RNA, 19 nt, Human adenovirus C
ugaaggaguuuacauagaa

SEQ ID NO: 108156 - RNA, 14 nt, Human adenovirus C
ugaagaucuggaag

SEQ ID NO: 108157 - RNA, 15 nt, Human adenovirus C
ucuucucuaccauca

SEQ ID NO: 108158 - RNA, 18 nt, Human adenovirus C
ugaacuguuuccagaacu

SEQ ID NO: 108159 - RNA, 22 nt, Human adenovirus C
ugaacuguuuccagaacugaga

SEQ ID NO: 108160 - RNA, 22 nt, Human adenovirus C
ugaacgccaccguuuuuaccca

SEQ ID NO: 108161 - RNA, 16 nt, Human adenovirus C
ugaacgggaagcugca

SEQ ID NO: 108162 - RNA, 13 nt, Human adenovirus C
uccuaacccugga

SEQ ID NO: 108163 - RNA, 17 nt, Human adenovirus C
ucgcuuaaguucauguc

SEQ ID NO: 108164 - RNA, 16 nt, Human adenovirus C
ucuagagaaugcaaua

SEQ ID NO: 108165 - RNA, 23 nt, Human adenovirus C
ucugaggcuacagaggaggcuag

SEQ ID NO: 108166 - RNA, 19 nt, Human adenovirus C
ucugaccucauggaggcuu

SEQ ID NO: 108167 - RNA, 14 nt, Human adenovirus C
ucugaacucaaagc

SEQ ID NO: 108168 - RNA, 20 nt, Human adenovirus C
ucugcugugcguaacuugcu

SEQ ID NO: 108169 - RNA, 13 nt, Human adenovirus C
ucugcgcacugug

SEQ ID NO: 108170 - RNA, 19 nt, Human adenovirus C
ucugugcgugcucuacauu

SEQ ID NO: 108171 - RNA, 14 nt, Human adenovirus C
ucuguuuugcagca

SEQ ID NO: 108172 - RNA, 22 nt, Human adenovirus C
ucuucauauuguugcagaugaa

SEQ ID NO: 108173 - RNA, 23 nt, Human adenovirus C
ccggugaguuuuguuacuuugaa

SEQ ID NO: 108174 - RNA, 20 nt, Human adenovirus C
ccuaugacaagcgcuuucca

SEQ ID NO: 108175 - RNA, 22 nt, Human adenovirus C
ccugaacuaccagaacgaccac

SEQ ID NO: 108176 - RNA, 20 nt, Human adenovirus C
ccugauucgggaguuuacca

SEQ ID NO: 108177 - RNA, 19 nt, Human adenovirus C
ccugauuuuuugagcagca

SEQ ID NO: 108178 - RNA, 20 nt, Human adenovirus C
ccugauaggggaagugcagg

SEQ ID NO: 108179 - RNA, 13 nt, Human adenovirus C
ccuccugagauac

SEQ ID NO: 108180 - RNA, 13 nt, Human adenovirus C
ccgagaguguaca

SEQ ID NO: 108181 - RNA, 15 nt, Human adenovirus C
ccgaguaugcguguc

SEQ ID NO: 108182 - RNA, 17 nt, Human adenovirus C
cccaaugguuuccaaga

SEQ ID NO: 108183 - RNA, 19 nt, Human adenovirus C
ccgaaccuuuggacaccuc

SEQ ID NO: 108184 - RNA, 16 nt, Human adenovirus C
ccgccuggaacugcuu

SEQ ID NO: 108185 - RNA, 15 nt, Human adenovirus C
ccgcagguagacaug

SEQ ID NO: 108186 - RNA, 15 nt, Human adenovirus C
ccgcaguggucuuac

SEQ ID NO: 108187 - RNA, 21 nt, Human adenovirus C
ccgccacaagugcuuugcccg

SEQ ID NO: 108188 - RNA, 12 nt, Human adenovirus C
ccgccgcuuucu

SEQ ID NO: 108189 - RNA, 12 nt, Human adenovirus C
ccgcgcucaaaa

SEQ ID NO: 108190 - RNA, 17 nt, Human adenovirus C
ccuugcaagaacugcua

SEQ ID NO: 108191 - RNA, 22 nt, Human adenovirus C
ccuugcaggcgcagagacacug

SEQ ID NO: 108192 - RNA, 16 nt, Human adenovirus C
ccuucauucaguucau

SEQ ID NO: 108193 - RNA, 19 nt, Human adenovirus C
ccugcuggcgcagauccaa

SEQ ID NO: 108194 - RNA, 14 nt, Human adenovirus C
ccuggaacugcuug

SEQ ID NO: 108195 - RNA, 16 nt, Human adenovirus C
ccuggacaauuuacuc

SEQ ID NO: 108196 - RNA, 20 nt, Human adenovirus C
ccuuuuagcugcaaacuuuc

SEQ ID NO: 108197 - RNA, 15 nt, Human adenovirus C
cgaaaacagggccau

SEQ ID NO: 108198 - RNA, 13 nt, Human adenovirus C
cgauacacagggu

SEQ ID NO: 108199 - RNA, 21 nt, Human adenovirus C
cgagcgccuucuggcgcauuu

SEQ ID NO: 108200 - RNA, 19 nt, Human adenovirus C
cgagaccggagacgcagau

SEQ ID NO: 108201 - RNA, 14 nt, Human adenovirus C
cgagacguacuuca

SEQ ID NO: 108202 - RNA, 22 nt, Human adenovirus C
cgaccgccgcgcgcggacaucu

SEQ ID NO: 108203 - RNA, 21 nt, Human adenovirus C
cgacucaagcagguuuaccag

SEQ ID NO: 108204 - RNA, 17 nt, Human adenovirus C
cgacaucaccugugucu

SEQ ID NO: 108205 - RNA, 19 nt, Human adenovirus C
cgaccacagcaacuuucua

SEQ ID NO: 108206 - RNA, 16 nt, Human adenovirus C
ccaccguuuuuaccca

SEQ ID NO: 108207 - RNA, 17 nt, Human adenovirus C
ccacgccgccaccagug

SEQ ID NO: 108208 - RNA, 17 nt, Human adenovirus C
ccacugcagagcuucau

SEQ ID NO: 108209 - RNA, 15 nt, Human adenovirus C
ccacuggaaccaggg

SEQ ID NO: 108210 - RNA, 18 nt, Human adenovirus C
cccaacucugguaucuca

SEQ ID NO: 108211 - RNA, 13 nt, Human adenovirus C
cccaagacuacuc

SEQ ID NO: 108212 - RNA, 14 nt, Human adenovirus C
ccaucugaacucaa

SEQ ID NO: 108213 - RNA, 21 nt, Human adenovirus C
ccauaagguguaaaccuguga

SEQ ID NO: 108214 - RNA, 22 nt, Human adenovirus C
ccacagaccggucccagcguuu

SEQ ID NO: 108215 - RNA, 17 nt, Human adenovirus C
ccacagcggcggcagca

SEQ ID NO: 108216 - RNA, 21 nt, Human adenovirus C
ccacagcggcggcagcagcag

SEQ ID NO: 108217 - RNA, 15 nt, Human adenovirus C
ccaacgacucaagca

SEQ ID NO: 108218 - RNA, 13 nt, Human adenovirus C
ccaacacccagug

SEQ ID NO: 108219 - RNA, 14 nt, Human adenovirus C
ccaacacccagugc

SEQ ID NO: 108220 - RNA, 18 nt, Human adenovirus C
cauuuuuguuuugcugau

SEQ ID NO: 108221 - RNA, 23 nt, Human adenovirus C
ccaccacaccucguaauaaccuu

SEQ ID NO: 108222 - RNA, 13 nt, Human adenovirus C
ccacaugauaucc

SEQ ID NO: 108223 - RNA, 13 nt, Human adenovirus C
ccaccacuguggu

SEQ ID NO: 108224 - RNA, 11 nt, Human adenovirus C
ccacccaaagc

SEQ ID NO: 108225 - RNA, 20 nt, Human adenovirus C
ccacccaaagcagaccaaag

SEQ ID NO: 108226 - RNA, 22 nt, Human adenovirus C
caucgaaguagauugcauccca

SEQ ID NO: 108227 - RNA, 18 nt, Human adenovirus C
caucgacgccgccaccaa

SEQ ID NO: 108228 - RNA, 14 nt, Human adenovirus C
cauugugagcucau

SEQ ID NO: 108229 - RNA, 18 nt, Human adenovirus C
caugagcaugacuacgau

SEQ ID NO: 108230 - RNA, 23 nt, Human adenovirus C
caugguuuuaauaagagugcaga

SEQ ID NO: 108231 - RNA, 16 nt, Human adenovirus C
cauggugggguuguga

SEQ ID NO: 108232 - RNA, 14 nt, Human adenovirus C
cugcagauucacuc

SEQ ID NO: 108233 - RNA, 15 nt, Human adenovirus C
cugcagauucacuca

SEQ ID NO: 108234 - RNA, 18 nt, Human adenovirus C
cugcagcucucuuaacua

SEQ ID NO: 108235 - RNA, 13 nt, Human adenovirus C
cugcaggagcucc

SEQ ID NO: 108236 - RNA, 15 nt, Human adenovirus C
cugcagccaggggau

SEQ ID NO: 108237 - RNA, 16 nt, Human adenovirus C
cuggaacacuaucagc

SEQ ID NO: 108238 - RNA, 18 nt, Human adenovirus C
cugcuuucuucccagcug

SEQ ID NO: 108239 - RNA, 23 nt, Human adenovirus C
cuggaaaucagguaucaccugga

SEQ ID NO: 108240 - RNA, 19 nt, Human adenovirus C
cugcugugcguaacuugcu

SEQ ID NO: 108241 - RNA, 17 nt, Human adenovirus C
cugcccggggaguuuau

SEQ ID NO: 108242 - RNA, 21 nt, Human adenovirus C
cugccagcgccugcacugcaa

SEQ ID NO: 108243 - RNA, 22 nt, Human adenovirus C
cugccagcgccugcacugcaaa

SEQ ID NO: 108244 - RNA, 14 nt, Human adenovirus C
cugggaugggugca

SEQ ID NO: 108245 - RNA, 22 nt, Human adenovirus C
cuguagucaucgccuucauuca

SEQ ID NO: 108246 - RNA, 18 nt, Human adenovirus C
cuggaacugcuuggucaa

SEQ ID NO: 108247 - RNA, 17 nt, Human adenovirus C
cuggcgcauuuggucag

SEQ ID NO: 108248 - RNA, 15 nt, Human adenovirus C
cuggcgccaggucau

SEQ ID NO: 108249 - RNA, 23 nt, Human adenovirus C
cuccgcacccacuaucuucauau

SEQ ID NO: 108250 - RNA, 20 nt, Human adenovirus C
cugacacaccucgaccacug

SEQ ID NO: 108251 - RNA, 17 nt, Human adenovirus C
cugacaaagcccaagaa

SEQ ID NO: 108252 - RNA, 21 nt, Human adenovirus C
cugaaugaaaaaugacuugaa

SEQ ID NO: 108253 - RNA, 19 nt, Human adenovirus C
cugauaggggaagugcagg

SEQ ID NO: 108254 - RNA, 20 nt, Human adenovirus C
cugauaggggaagugcaggc

SEQ ID NO: 108255 - RNA, 21 nt, Human adenovirus C
cuucuaacacaccuccugaga

SEQ ID NO: 108256 - RNA, 23 nt, Human adenovirus C
cuucuaacacaccuccugagaua

SEQ ID NO: 108257 - RNA, 16 nt, Human adenovirus C
cuugaucaaaauccaa

SEQ ID NO: 108258 - RNA, 21 nt, Human adenovirus C
cuugaucaaaauccaaacaga

SEQ ID NO: 108259 - RNA, 16 nt, Human adenovirus C
cuugcaagaacugcua

SEQ ID NO: 108260 - RNA, 20 nt, Human adenovirus C
cuugccgucugcgccguuua

SEQ ID NO: 108261 - RNA, 14 nt, Human adenovirus C
cuugcaagcagugc

SEQ ID NO: 108262 - RNA, 20 nt, Human adenovirus C
cuugcuugaucaaaauccaa

SEQ ID NO: 108263 - RNA, 22 nt, Human adenovirus C
cuugcuugaucaaaauccaaac

SEQ ID NO: 108264 - RNA, 20 nt, Human adenovirus C
cuugcuggaacagagcucua

SEQ ID NO: 108265 - RNA, 14 nt, Human adenovirus C
cuguccuaacccug

SEQ ID NO: 108266 - RNA, 23 nt, Human adenovirus C
cuuacuuaaaaucagucagcaaa

SEQ ID NO: 108267 - RNA, 16 nt, Human adenovirus C
cuuaggccagauugca

SEQ ID NO: 108268 - RNA, 18 nt, Human adenovirus C
cuucaaccccguguaucc

SEQ ID NO: 108269 - RNA, 19 nt, Human adenovirus C
cuuauguuuguuugccuua

SEQ ID NO: 108270 - RNA, 18 nt, Human adenovirus C
cuuauucagcaucaccuc

SEQ ID NO: 108271 - RNA, 13 nt, Human adenovirus C
cuuauuuguugcc

SEQ ID NO: 108272 - RNA, 15 nt, Human adenovirus C
cuuauuuguugccua

SEQ ID NO: 108273 - RNA, 20 nt, Human adenovirus C
cuucaugcugcgggguggug

SEQ ID NO: 108274 - RNA, 19 nt, Human adenovirus C
cuucagcuugccugcucca

SEQ ID NO: 108275 - RNA, 20 nt, Human adenovirus C
cuucagggcagaaaccugcu

SEQ ID NO: 108276 - RNA, 14 nt, Human adenovirus C
cguuagcccaagag

SEQ ID NO: 108277 - RNA, 19 nt, Human adenovirus C
cuaacccuggauuacauca

SEQ ID NO: 108278 - RNA, 20 nt, Human adenovirus C
cuaacaguaccucuugguuu

SEQ ID NO: 108279 - RNA, 17 nt, Human adenovirus C
cgugcgcaccaccggcg

SEQ ID NO: 108280 - RNA, 17 nt, Human adenovirus C
cgggaagcugcacugcu

SEQ ID NO: 108281 - RNA, 22 nt, Human adenovirus C
cgggagcggggucccuguguuc

SEQ ID NO: 108282 - RNA, 15 nt, Human adenovirus C
cgggguguuugacau

SEQ ID NO: 108283 - RNA, 15 nt, Human adenovirus C
cggauagcugugacu

SEQ ID NO: 108284 - RNA, 24 nt, Human adenovirus C
cggauuugucacccuuauccucau

SEQ ID NO: 108285 - RNA, 14 nt, Human adenovirus C
cggcagcaacagca

SEQ ID NO: 108286 - RNA, 16 nt, Human adenovirus C
cuaggagacacuuuca

SEQ ID NO: 108287 - RNA, 12 nt, Human adenovirus C
cuauacuacuga

SEQ ID NO: 108288 - RNA, 18 nt, Human adenovirus C
cuauagcugaucuucuca

SEQ ID NO: 108289 - RNA, 19 nt, Human adenovirus C
cuauagcugaucuucucag

SEQ ID NO: 108290 - RNA, 21 nt, Human adenovirus C
cuacucaacccgaauaaacua

SEQ ID NO: 108291 - RNA, 18 nt, Human adenovirus C
cucccucccaacacacag

SEQ ID NO: 108292 - RNA, 15 nt, Human adenovirus C
cucaucagugauauu

SEQ ID NO: 108293 - RNA, 15 nt, Human adenovirus C
cucaaaagcaugccu

SEQ ID NO: 108294 - RNA, 13 nt, Human adenovirus C
cuauuuuguagaa

SEQ ID NO: 108295 - RNA, 17 nt, Human adenovirus C
cucaaaaacaugcuacc

SEQ ID NO: 108296 - RNA, 17 nt, Human adenovirus C
gaucuucucagaauucu

SEQ ID NO: 108297 - RNA, 23 nt, Human adenovirus C
gaugggcuccagcauugaugguc

SEQ ID NO: 108298 - RNA, 10 nt, Human adenovirus C
gaugcucccc

SEQ ID NO: 108299 - RNA, 22 nt, Human adenovirus C
gauaccucuuuuacacuggugu

SEQ ID NO: 108300 - RNA, 22 nt, Human adenovirus C
gaucuggaaggugcugagguac

SEQ ID NO: 108301 - RNA, 21 nt, Human adenovirus C
gauuuuuugcgcccuaccugu

SEQ ID NO: 108302 - RNA, 14 nt, Human adenovirus C
gauuauacccacaa

SEQ ID NO: 108303 - RNA, 15 nt, Human adenovirus C
gauuauacccacaac

SEQ ID NO: 108304 - RNA, 20 nt, Human adenovirus C
gauuauacccacaaccuuca

SEQ ID NO: 108305 - RNA, 16 nt, Human adenovirus C
gauuaagguacgguga

SEQ ID NO: 108306 - RNA, 14 nt, Human adenovirus C
gacucugacaaagc

SEQ ID NO: 108307 - RNA, 21 nt, Human adenovirus C
gacucugacaaagcccaagaa

SEQ ID NO: 108308 - RNA, 23 nt, Human adenovirus C
gacuaucgcaacaccacugcuac

SEQ ID NO: 108309 - RNA, 22 nt, Human adenovirus C
gacuacgaugugcuugcuuuuu

SEQ ID NO: 108310 - RNA, 15 nt, Human adenovirus C
aaauaugacuacguc

SEQ ID NO: 108311 - RNA, 16 nt, Human adenovirus C
aaauaugacuacgucc

SEQ ID NO: 108312 - RNA, 21 nt, Human adenovirus C
gacgugguaaaggugacucug

SEQ ID NO: 108313 - RNA, 19 nt, Human adenovirus C
gaggaugggcaggggcuaa

SEQ ID NO: 108314 - RNA, 16 nt, Human adenovirus C
gagguggaacugcugc

SEQ ID NO: 108315 - RNA, 14 nt, Human adenovirus C
gaggcugcagucuc

SEQ ID NO: 108316 - RNA, 15 nt, Human adenovirus C
gaggcugcagucucc

SEQ ID NO: 108317 - RNA, 21 nt, Human adenovirus C
gagagaguggauauacuacaa

SEQ ID NO: 108318 - RNA, 20 nt, Human adenovirus C
gaccgcuguauaacgcugga

SEQ ID NO: 108319 - RNA, 19 nt, Human adenovirus C
gacccggcacugccgccca

SEQ ID NO: 108320 - RNA, 21 nt, Human adenovirus C
gaccgucugaagacaccuuca

SEQ ID NO: 108321 - RNA, 15 nt, Human adenovirus C
gacaauuuacucuau

SEQ ID NO: 108322 - RNA, 16 nt, Human adenovirus C
gacaagcgcuuuccag

SEQ ID NO: 108323 - RNA, 17 nt, Human adenovirus C
aaagcgggucaaaaaga

SEQ ID NO: 108324 - RNA, 18 nt, Human adenovirus C
aaagcuaaagcgggucaa

SEQ ID NO: 108325 - RNA, 22 nt, Human adenovirus C
aaaggacuguguacucugugug

SEQ ID NO: 108326 - RNA, 13 nt, Human adenovirus C
aaagucagucaca

SEQ ID NO: 108327 - RNA, 15 nt, Human adenovirus C
aaagucccgcuccca

SEQ ID NO: 108328 - RNA, 13 nt, Human adenovirus C
aaagggugagaua

SEQ ID NO: 108329 - RNA, 20 nt, Human adenovirus C
gaaccccggucguccgccau

SEQ ID NO: 108330 - RNA, 16 nt, Human adenovirus C
gaaccagccugugaug

SEQ ID NO: 108331 - RNA, 14 nt, Human adenovirus C
gaaccuguugcaug

SEQ ID NO: 108332 - RNA, 20 nt, Human adenovirus C
gaaccuguugcauguuaugu

SEQ ID NO: 108333 - RNA, 11 nt, Human adenovirus C
gaacacuauca

SEQ ID NO: 108334 - RNA, 20 nt, Human adenovirus C
gaacgggaagcugcacugcu

SEQ ID NO: 108335 - RNA, 19 nt, Human adenovirus C
gaaguggccccccugcuca

SEQ ID NO: 108336 - RNA, 22 nt, Human adenovirus C
gaaguggccccccugcucaggg

SEQ ID NO: 108337 - RNA, 23 nt, Human adenovirus C
gaaguggccccccugcucaggga

SEQ ID NO: 108338 - RNA, 12 nt, Human adenovirus C
gaauaaacuaca

SEQ ID NO: 108339 - RNA, 15 nt, Human adenovirus C
gaauaaacuacauga

SEQ ID NO: 108340 - RNA, 15 nt, Human adenovirus C
gaauaugucuguuac

SEQ ID NO: 108341 - RNA, 18 nt, Human adenovirus C
gaauacuaggguucugug

SEQ ID NO: 108342 - RNA, 23 nt, Human adenovirus C
gcccaggcggcggguacagugga

SEQ ID NO: 108343 - RNA, 17 nt, Human adenovirus C
gccccccugcucaggga

SEQ ID NO: 108344 - RNA, 12 nt, Human adenovirus C
gccauagucaau

SEQ ID NO: 108345 - RNA, 18 nt, Human adenovirus C
gccguuagcccaagagca

SEQ ID NO: 108346 - RNA, 18 nt, Human adenovirus C
gccuaaaaaugucuuuca

SEQ ID NO: 108347 - RNA, 18 nt, Human adenovirus C
gccgccaccaaccagccc

SEQ ID NO: 108348 - RNA, 15 nt, Human adenovirus C
gccgccaccaguguc

SEQ ID NO: 108349 - RNA, 12 nt, Human adenovirus C
gcaacaacagcg

SEQ ID NO: 108350 - RNA, 16 nt, Human adenovirus C
gcaacaccacugcuac

SEQ ID NO: 108351 - RNA, 19 nt, Human adenovirus C
gcauccguggccuugcagg

SEQ ID NO: 108352 - RNA, 22 nt, Human adenovirus C
gcaucgcuaugcgccacuggca

SEQ ID NO: 108353 - RNA, 19 nt, Human adenovirus C
gcaucccugaacuaccaga

SEQ ID NO: 108354 - RNA, 13 nt, Human adenovirus C
gcauugugagcuc

SEQ ID NO: 108355 - RNA, 15 nt, Human adenovirus C
gcauuacuaccguca

SEQ ID NO: 108356 - RNA, 16 nt, Human adenovirus C
gcuaaucuugguuaca

SEQ ID NO: 108357 - RNA, 12 nt, Human adenovirus C
gcuacagaggag

SEQ ID NO: 108358 - RNA, 22 nt, Human adenovirus C
gcucagcagcuggacagcgaca

SEQ ID NO: 108359 - RNA, 15 nt, Human adenovirus C
gcuggagcccaucac

SEQ ID NO: 108360 - RNA, 18 nt, Human adenovirus C
gcuggacagcgacaugaa

SEQ ID NO: 108361 - RNA, 15 nt, Human adenovirus C
gcuccagaccaugga

SEQ ID NO: 108362 - RNA, 17 nt, Human adenovirus C
gcgcgggcacaagaacg

SEQ ID NO: 108363 - RNA, 13 nt, Human adenovirus C
gcguacacuggau

SEQ ID NO: 108364 - RNA, 15 nt, Human adenovirus C
gcggcgggcgguggg

SEQ ID NO: 108365 - RNA, 18 nt, Human adenovirus C
gcgggagcuccagaccau

SEQ ID NO: 108366 - RNA, 20 nt, Human adenovirus C
gcgggcuagguccaggugau

SEQ ID NO: 108367 - RNA, 21 nt, Human adenovirus C
gcgguaagucgcagcugcuca

SEQ ID NO: 108368 - RNA, 14 nt, Human adenovirus C
gcggucacacagaa

SEQ ID NO: 108369 - RNA, 22 nt, Human adenovirus C
ggaguuuggggccaguuggcaa

SEQ ID NO: 108370 - RNA, 19 nt, Human adenovirus C
ggaggcuaggaaucuaacu

SEQ ID NO: 108371 - RNA, 13 nt, Human adenovirus C
ggaguuaccagcc

SEQ ID NO: 108372 - RNA, 13 nt, Human adenovirus C
ggagacugcagcc

SEQ ID NO: 108373 - RNA, 12 nt, Human adenovirus C
gcuugaaccuga

SEQ ID NO: 108374 - RNA, 15 nt, Human adenovirus C
ggacuugagcuguaa

SEQ ID NO: 108375 - RNA, 22 nt, Human adenovirus C
ggagaaaggacuguguacucug

SEQ ID NO: 108376 - RNA, 18 nt, Human adenovirus C
gcuucagccgcugcagcc

SEQ ID NO: 108377 - RNA, 15 nt, Human adenovirus C
gcugggcguggugcc

SEQ ID NO: 108378 - RNA, 15 nt, Human adenovirus C
gcugggugacgguga

SEQ ID NO: 108379 - RNA, 16 nt, Human adenovirus C
gcugguccgugcagac

SEQ ID NO: 108380 - RNA, 19 nt, Human adenovirus C
ggcccgaugaggccggccu

SEQ ID NO: 108381 - RNA, 21 nt, Human adenovirus C
ggcccgaugaggccggccugg

SEQ ID NO: 108382 - RNA, 14 nt, Human adenovirus C
ggccggucgcgaga

SEQ ID NO: 108383 - RNA, 20 nt, Human adenovirus C
ggcuuccacguacuuugaca

SEQ ID NO: 108384 - RNA, 16 nt, Human adenovirus C
ggcuuauuuguugccu

SEQ ID NO: 108385 - RNA, 22 nt, Human adenovirus C
ggcucaggaaagcaaagucagu

SEQ ID NO: 108386 - RNA, 14 nt, Human adenovirus C
ggcuauuaccacca

SEQ ID NO: 108387 - RNA, 22 nt, Human adenovirus C
ggcggaugaacgggaagcugca

SEQ ID NO: 108388 - RNA, 20 nt, Human adenovirus C
ggcgcgcaacgaagcuaugu

SEQ ID NO: 108389 - RNA, 13 nt, Human adenovirus C
ggcgcuccuaauc

SEQ ID NO: 108390 - RNA, 15 nt, Human adenovirus C
gggaccccacaugau

SEQ ID NO: 108391 - RNA, 12 nt, Human adenovirus C
gguaaacauauu

SEQ ID NO: 108392 - RNA, 23 nt, Human adenovirus C
gguaggcccgggaccagcggucu

SEQ ID NO: 108393 - RNA, 17 nt, Human adenovirus C
ggugaaguuuucacucc

SEQ ID NO: 108394 - RNA, 14 nt, Human adenovirus C
ggucaaggacaagc

SEQ ID NO: 108395 - RNA, 17 nt, Human adenovirus C
ggucccagcguuugacg

SEQ ID NO: 108396 - RNA, 20 nt, Human adenovirus C
guaagucgcagcugcucagg

SEQ ID NO: 108397 - RNA, 23 nt, Human adenovirus C
guaaaccugcaggagcucccgcc

SEQ ID NO: 108398 - RNA, 12 nt, Human adenovirus C
gguucuugcaga

SEQ ID NO: 108399 - RNA, 21 nt, Human adenovirus C
gguuaagcugggaugggugca

SEQ ID NO: 108400 - RNA, 14 nt, Human adenovirus C
gguggugcacgcug

SEQ ID NO: 108401 - RNA, 20 nt, Human adenovirus C
gguguccuuggaugaugcau

SEQ ID NO: 108402 - RNA, 13 nt, Human adenovirus C
gguuuaccaguuu

SEQ ID NO: 108403 - RNA, 20 nt, Human adenovirus C
gguuuuaauaagagugcaga

SEQ ID NO: 108404 - RNA, 22 nt, Human adenovirus C
uguccagcuuauucagcaucac

SEQ ID NO: 108405 - RNA, 17 nt, Human adenovirus C
ugucccuccgcacccac

SEQ ID NO: 108406 - RNA, 13 nt, Human adenovirus C
uucgaaccccggu

SEQ ID NO: 108407 - RNA, 14 nt, Human adenovirus C
ugacugcgcguaac

SEQ ID NO: 108408 - RNA, 16 nt, Human adenovirus C
ucuccccuaccccgga

SEQ ID NO: 108409 - RNA, 19 nt, Human adenovirus C
gguaucaccuggaccuagc

SEQ ID NO: 108410 - RNA, 16 nt, Human adenovirus C
uccaccagaccacgga

SEQ ID NO: 108411 - RNA, 19 nt, Human adenovirus C
ggugcagacccugcgagug

SEQ ID NO: 108412 - RNA, 19 nt, Human adenovirus C
ggugcaguuugcccgcgcc

SEQ ID NO: 108413 - RNA, 21 nt, Human adenovirus C
cuugcauuuuauaucgccgcc

SEQ ID NO: 108414 - RNA, 23 nt, Human adenovirus C
gagcugcugagccgccgugcgcc

SEQ ID NO: 108415 - RNA, 19 nt, Human adenovirus C
gagcgcugcgucuggcgcc

SEQ ID NO: 108416 - RNA, 20 nt, Human adenovirus C
cuaugcgagguaaaccugca

SEQ ID NO: 108417 - RNA, 20 nt, Human adenovirus C
cucccaacucugguaucuca

SEQ ID NO: 108418 - RNA, 14 nt, Human adenovirus C
cuccgaccgccgcg

SEQ ID NO: 108419 - RNA, 22 nt, Human adenovirus C
cuguuuugcagcagccgccgcc

SEQ ID NO: 108420 - RNA, 18 nt, Human adenovirus C
ccugaccugucgccgcgg

SEQ ID NO: 108421 - RNA, 16 nt, Human adenovirus C
ccuuauaucgcccagc

SEQ ID NO: 108422 - RNA, 15 nt, Human adenovirus C
ccuucgcccgccgcu

SEQ ID NO: 108423 - RNA, 12 nt, Human adenovirus C
cggucguccgcc

SEQ ID NO: 108424 - RNA, 19 nt, Human adenovirus C
cggucguccgccaugauac

SEQ ID NO: 108425 - RNA, 14 nt, Human adenovirus C
cggugacgcgggcg

SEQ ID NO: 108426 - RNA, 15 nt, Human adenovirus C
cggugacgcgggcgg

SEQ ID NO: 108427 - RNA, 18 nt, Human adenovirus C
cgugcgcaccaccggcgg

SEQ ID NO: 108428 - RNA, 17 nt, Human adenovirus C
gcaccggcggcagcggc

SEQ ID NO: 108429 - RNA, 15 nt, Human adenovirus C
gcacugccgcccaac

SEQ ID NO: 108430 - RNA, 20 nt, Human adenovirus C
gcgcugcagagccagccguc

SEQ ID NO: 108431 - RNA, 14 nt, Human adenovirus C
gcggcgcgacuacg

SEQ ID NO: 108432 - RNA, 17 nt, Human adenovirus C
gcgguggcugcagcggc

SEQ ID NO: 108433 - RNA, 18 nt, Human adenovirus C
gcucguuacaacagcggc

SEQ ID NO: 108434 - RNA, 16 nt, Human adenovirus C
aaggccagccggggag

SEQ ID NO: 108435 - RNA, 19 nt, Human adenovirus C
aagcgagcugcccggggag

SEQ ID NO: 108436 - RNA, 15 nt, Human adenovirus C
acaugcacaucucgg

SEQ ID NO: 108437 - RNA, 13 nt, Human adenovirus C
agcagccgccgcc

SEQ ID NO: 108438 - RNA, 20 nt, Human adenovirus C
aaccugcuggcgcagaucca

SEQ ID NO: 108439 - RNA, 21 nt, Human adenovirus C
aacgaaguggccccccugcuc

SEQ ID NO: 108440 - RNA, 20 nt, Human adenovirus C
ccccgcagguagacaugauc

SEQ ID NO: 108441 - RNA, 20 nt, Human adenovirus C
cccgaauaaacuacaugagc

SEQ ID NO: 108442 - RNA, 12 nt, Human adenovirus C
ccccacaugaua

SEQ ID NO: 108443 - RNA, 16 nt, Human adenovirus C
ccgcauccccgcggcg

SEQ ID NO: 108444 - RNA, 15 nt, Human adenovirus C
ccgccagccgccgcc

SEQ ID NO: 108445 - RNA, 15 nt, Human adenovirus C
ccgcgcggcgggcgg

SEQ ID NO: 108446 - RNA, 22 nt, Human adenovirus C
ccgcugcagccaccgcccgcgg

SEQ ID NO: 108447 - RNA, 17 nt, Human adenovirus C
ccguagucgcgccgcgg

SEQ ID NO: 108448 - RNA, 18 nt, Human adenovirus C
ccgucgcaugcgcggcgg

SEQ ID NO: 108449 - RNA, 15 nt, Human adenovirus C
caagucauuuuucau

SEQ ID NO: 108450 - RNA, 16 nt, Human adenovirus C
cacaaucccgcgggcg

SEQ ID NO: 108451 - RNA, 14 nt, Human adenovirus C
cagcagccgccgcc

SEQ ID NO: 108452 - RNA, 17 nt, Human adenovirus C
ccaacucugguaucuca

SEQ ID NO: 108453 - RNA, 14 nt, Human adenovirus C
ccaccaccgccgcc

SEQ ID NO: 108454 - RNA, 15 nt, Human adenovirus C
ccaccgcccgccgcg

SEQ ID NO: 108455 - RNA, 13 nt, Human adenovirus C
ccaugggccgggg

SEQ ID NO: 108456 - RNA, 19 nt, Human adenovirus C
uggucccggcgcgcgcaaa

SEQ ID NO: 108457 - RNA, 17 nt, Human adenovirus C
uggucuacgacgcgcug

SEQ ID NO: 108458 - RNA, 20 nt, Human adenovirus C
uggcgaucguaaacgcgcug

SEQ ID NO: 108459 - RNA, 13 nt, Human adenovirus C
ugggccgcggggg

SEQ ID NO: 108460 - RNA, 12 nt, Human adenovirus C
ugggcucgcgcg

SEQ ID NO: 108461 - RNA, 18 nt, Human adenovirus C
ugcggccuaccgggggga

SEQ ID NO: 108462 - RNA, 19 nt, Human adenovirus C
uggaacugcugcacgcaac

SEQ ID NO: 108463 - RNA, 12 nt, Human adenovirus C
gcgccgcgggga

SEQ ID NO: 108464 - RNA, 16 nt, Human adenovirus C
gcgccgcgcgcgggca

SEQ ID NO: 108465 - RNA, 20 nt, Human adenovirus C
gcgcgcaacuacacgcccac

SEQ ID NO: 108466 - RNA, 22 nt, Human adenovirus C
ggagcuggugcugcgcgcggag

SEQ ID NO: 108467 - RNA, 19 nt, Human adenovirus C
ggcagcaacagcagcgguc

SEQ ID NO: 108468 - RNA, 13 nt, Human adenovirus C
ggcggcgcgcaac

SEQ ID NO: 108469 - RNA, 15 nt, Human adenovirus C
ggcgggcccccggag

SEQ ID NO: 108470 - RNA, 18 nt, Human adenovirus C
ggcguuccagacacgguc

SEQ ID NO: 108471 - RNA, 22 nt, Human adenovirus C
guaagucuaagcagccgccgcc

SEQ ID NO: 108472 - RNA, 22 nt, Human adenovirus C
guagcacgucgccaccgccgcc

SEQ ID NO: 108473 - RNA, 13 nt, Human adenovirus C
gugaugcuggaug

SEQ ID NO: 108474 - RNA, 23 nt, Human adenovirus C
gugcgcgggcacuaccgcgcgcc

SEQ ID NO: 108475 - RNA, 19 nt, Human adenovirus C
guggggcuccucccaggca

SEQ ID NO: 108476 - RNA, 20 nt, Human adenovirus C
guuuugcagcagccgccgcc

SEQ ID NO: 108477 - RNA, 15 nt, Human adenovirus C
uacugcaccggcggc

SEQ ID NO: 108478 - RNA, 19 nt, Human adenovirus C
ucaacguguuuauuuuuca

SEQ ID NO: 108479 - RNA, 15 nt, Human adenovirus C
ucaagucauuuuuca

SEQ ID NO: 108480 - RNA, 19 nt, Human adenovirus C
gacugcagccuccgccgcc

SEQ ID NO: 108481 - RNA, 12 nt, Human adenovirus C
gagacgcccagg

SEQ ID NO: 108482 - RNA, 20 nt, Human adenovirus C
gaucacggcggacggccgga

SEQ ID NO: 108483 - RNA, 15 nt, Human adenovirus C
gcgaacgcgacgacg

SEQ ID NO: 108484 - RNA, 20 nt, Human adenovirus C
cuggaacagagcucuaacag

SEQ ID NO: 108485 - RNA, 17 nt, Human adenovirus C
cuggaaccgcguccgcg

SEQ ID NO: 108486 - RNA, 16 nt, Human adenovirus C
cggggaaguggccgcg

SEQ ID NO: 108487 - RNA, 19 nt, Human adenovirus C
cggggggagaaacagcauc

SEQ ID NO: 108488 - RNA, 16 nt, Human adenovirus C
cugaccugucgccgcg

SEQ ID NO: 108489 - RNA, 15 nt, Human adenovirus C
cgccgcgcgcgggca

SEQ ID NO: 108490 - RNA, 19 nt, Human adenovirus C
cgccguuugugccuccgcg

SEQ ID NO: 108491 - RNA, 15 nt, Human adenovirus C
accgccgcgcgcgga

SEQ ID NO: 108492 - RNA, 15 nt, Human adenovirus C
acugcagccuccgcc

SEQ ID NO: 108493 - RNA, 15 nt, Human adenovirus C
acuuugacauccgcg

SEQ ID NO: 108494 - RNA, 19 nt, Human adenovirus C
agaaacgacauuaaguucc

SEQ ID NO: 108495 - RNA, 16 nt, Human adenovirus C
agcgcagacgcgccag

SEQ ID NO: 108496 - RNA, 19 nt, Human adenovirus C
agcgccugauuucugccag

SEQ ID NO: 108497 - RNA, 16 nt, Human adenovirus C
augcagcgcgcggcga

SEQ ID NO: 108498 - RNA, 23 nt, Human adenovirus C
auugauggucgccccguccugcc

SEQ ID NO: 108499 - RNA, 20 nt, Human adenovirus C
caaacuuucuccaaaguuua

SEQ ID NO: 108500 - RNA, 12 nt, Human adenovirus C
aggaaccugcuu

SEQ ID NO: 108501 - RNA, 19 nt, Human adenovirus C
caacggaauccgcgcccac

SEQ ID NO: 108502 - RNA, 19 nt, Human adenovirus C
caacguguuuauuuuucaa

SEQ ID NO: 108503 - RNA, 19 nt, Human adenovirus C
caacuugucaucgcgggcg

SEQ ID NO: 108504 - RNA, 14 nt, Human adenovirus C
cagccuccgccgcc

SEQ ID NO: 108505 - RNA, 23 nt, Homo sapiens
ccacgggcccggguugggucacc

SEQ ID NO: 108506 - RNA, 19 nt, Homo sapiens
cucugcgucgguccuggug

SEQ ID NO: 108507 - RNA, 17 nt, Homo sapiens
auuugacuaagagucuc

SEQ ID NO: 108508 - RNA, 16 nt, Homo sapiens
aggggccggccagugg

SEQ ID NO: 108509 - RNA, 13 nt, Homo sapiens
cggguugggucac

SEQ ID NO: 108510 - RNA, 13 nt, Homo sapiens
cuggcucccaugu

SEQ ID NO: 108511 - RNA, 16 nt, Homo sapiens
ccugacagggccagug

SEQ ID NO: 108512 - RNA, 21 nt, Homo sapiens
ucauuugacuaagagucucca

SEQ ID NO: 108513 - RNA, 16 nt, Homo sapiens
caccccgagggcugag

SEQ ID NO: 108514 - RNA, 19 nt, Homo sapiens
ugcaggaccucgugccacc

SEQ ID NO: 108515 - RNA, 22 nt, Homo sapiens
auugguuuuccaaucauuugac

SEQ ID NO: 108516 - RNA, 14 nt, Homo sapiens
gcaggggaggggug

SEQ ID NO: 108517 - RNA, 14 nt, Homo sapiens
ucgguccuggugcc

SEQ ID NO: 108518 - RNA, 20 nt, Homo sapiens
agcccaggggccggccagug

SEQ ID NO: 108519 - RNA, 16 nt, Homo sapiens
uguccccugacagggc

SEQ ID NO: 108520 - RNA, 13 nt, Homo sapiens
ccacgagggugcc

SEQ ID NO: 108521 - RNA, 19 nt, Homo sapiens
cugacagggccagugcagu

SEQ ID NO: 108522 - RNA, 21 nt, Homo sapiens
agggaggcaggggaggggugc

SEQ ID NO: 108523 - RNA, 17 nt, Homo sapiens
agagucgcugugccaca

SEQ ID NO: 108524 - RNA, 14 nt, Homo sapiens
augucaagagucgc

SEQ ID NO: 108525 - RNA, 23 nt, Homo sapiens
aggggugcggcggucccagcucc

SEQ ID NO: 108526 - RNA, 14 nt, Homo sapiens
ugucaagagucgcu

SEQ ID NO: 108527 - RNA, 15 nt, Homo sapiens
gugcggcggucccag

SEQ ID NO: 108528 - RNA, 19 nt, Homo sapiens
cccaggggccggccagugg

SEQ ID NO: 108529 - RNA, 16 nt, Homo sapiens
cgucgguccuggugcc

SEQ ID NO: 108530 - RNA, 13 nt, Homo sapiens
ggaccucgugcca

SEQ ID NO: 108531 - RNA, 15 nt, Homo sapiens
ucccacgagggugcc

SEQ ID NO: 108532 - RNA, 14 nt, Homo sapiens
gggccggccagugg

SEQ ID NO: 108533 - RNA, 20 nt, Homo sapiens
ccugacagggccagugcagu

SEQ ID NO: 108534 - RNA, 19 nt, Homo sapiens
cugcagccugcaggaccuc

SEQ ID NO: 108535 - RNA, 15 nt, Homo sapiens
aucauuugacuaaga

SEQ ID NO: 108536 - RNA, 17 nt, Homo sapiens
uccccugacagggccag

SEQ ID NO: 108537 - RNA, 15 nt, Homo sapiens
gcgucgguccuggug

SEQ ID NO: 108538 - RNA, 20 nt, Homo sapiens
uccccugacagggccagugc

SEQ ID NO: 108539 - RNA, 17 nt, Homo sapiens
ccaggggccggccagug

SEQ ID NO: 108540 - RNA, 18 nt, Homo sapiens
cugagccuggucccacga

SEQ ID NO: 108541 - RNA, 16 nt, Homo sapiens
gagucgcugugccaca

SEQ ID NO: 108542 - RNA, 17 nt, Homo sapiens
gcugagccuggucccac

SEQ ID NO: 108543 - RNA, 20 nt, Homo sapiens
agugcaguuugguguguccu

SEQ ID NO: 108544 - RNA, 18 nt, Homo sapiens
gcucugcgucgguccugg

SEQ ID NO: 108545 - RNA, 17 nt, Homo sapiens
gccugcaggaccucgug

SEQ ID NO: 108546 - RNA, 21 nt, Homo sapiens
agccuggucccacgagggugc

SEQ ID NO: 108547 - RNA, 16 nt, Homo sapiens
ccugcaggaccucgug

SEQ ID NO: 108548 - RNA, 21 nt, Homo sapiens
uguccccugacagggccagug

SEQ ID NO: 108549 - RNA, 15 nt, Homo sapiens
cugacagggccagug

SEQ ID NO: 108550 - RNA, 22 nt, Homo sapiens
aagcccaggggccggccagugg

SEQ ID NO: 108551 - RNA, 20 nt, Homo sapiens
gccgggcaggguguggggcc

SEQ ID NO: 108552 - RNA, 14 nt, Homo sapiens
gagucgcugugcca

SEQ ID NO: 108553 - RNA, 13 nt, Homo sapiens
ucgcugugccaca

SEQ ID NO: 108554 - RNA, 24 nt, Homo sapiens
ggcucccaugucaagagucgcugu

SEQ ID NO: 108555 - RNA, 15 nt, Homo sapiens
ggccgggcagggugu

SEQ ID NO: 108556 - RNA, 15 nt, Homo sapiens
ugacagggccagugc

SEQ ID NO: 108557 - RNA, 16 nt, Homo sapiens
caugccuccucaggag

SEQ ID NO: 108558 - RNA, 22 nt, Homo sapiens
uccccugacagggccagugcag

SEQ ID NO: 108559 - RNA, 18 nt, Homo sapiens
cccaggggccggccagug

SEQ ID NO: 108560 - RNA, 13 nt, Homo sapiens
accucgugccacc

SEQ ID NO: 108561 - RNA, 18 nt, Homo sapiens
gacagggccagugcaguu

SEQ ID NO: 108562 - RNA, 13 nt, Homo sapiens
gggaggcagggga

SEQ ID NO: 108563 - RNA, 14 nt, Homo sapiens
guguggggccaugc

SEQ ID NO: 108564 - RNA, 21 nt, Homo sapiens
gccuggucccacgagggugcc

SEQ ID NO: 108565 - RNA, 14 nt, Homo sapiens
uggggccaugccuc

SEQ ID NO: 108566 - RNA, 22 nt, Homo sapiens
ggcuggagugugaggguccugc

SEQ ID NO: 108567 - RNA, 16 nt, Homo sapiens
agagucgcugugccac

SEQ ID NO: 108568 - RNA, 18 nt, Homo sapiens
gcccuggaugcccaggaa

SEQ ID NO: 108569 - RNA, 23 nt, Homo sapiens
guguccccugacagggccagugc

SEQ ID NO: 108570 - RNA, 17 nt, Homo sapiens
gacagggccagugcagu

SEQ ID NO: 108571 - RNA, 17 nt, Homo sapiens
acagggccagugcaguu

SEQ ID NO: 108572 - RNA, 22 nt, Homo sapiens
ccccaggagggaggcaggggag

SEQ ID NO: 108573 - RNA, 19 nt, Homo sapiens
gcccuggaugcccaggaau

SEQ ID NO: 108574 - RNA, 16 nt, Homo sapiens
ccacgagggugccgug

SEQ ID NO: 108575 - RNA, 12 nt, Homo sapiens
gggccaugccuc

SEQ ID NO: 108576 - RNA, 18 nt, Homo sapiens
gccaugccuccucaggag

SEQ ID NO: 108577 - RNA, 12 nt, Homo sapiens
ggccaguggccu

SEQ ID NO: 108578 - RNA, 13 nt, Homo sapiens
gguccuggugccc

SEQ ID NO: 108579 - RNA, 19 nt, Homo sapiens
auuuauggccgggcagggu

SEQ ID NO: 108580 - RNA, 16 nt, Homo sapiens
cugacagggccagugc

SEQ ID NO: 108581 - RNA, 12 nt, Homo sapiens
acagggccagug

SEQ ID NO: 108582 - RNA, 15 nt, Homo sapiens
agucgcugugccaca

SEQ ID NO: 108583 - RNA, 14 nt, Homo sapiens
caggggaggggugc

SEQ ID NO: 108584 - RNA, 18 nt, Homo sapiens
cccugacagggccagugc

SEQ ID NO: 108585 - RNA, 15 nt, Homo sapiens
cuggaugcccaggaa

SEQ ID NO: 108586 - RNA, 19 nt, Homo sapiens
caguuugguguguccuccg

SEQ ID NO: 108587 - RNA, 19 nt, Homo sapiens
uguccccugacagggccag

SEQ ID NO: 108588 - RNA, 18 nt, Homo sapiens
caggggccggccaguggc

SEQ ID NO: 108589 - RNA, 15 nt, Homo sapiens
ugacuaagagucucc

SEQ ID NO: 108590 - RNA, 14 nt, Homo sapiens
ugacagggccagug

SEQ ID NO: 108591 - RNA, 21 nt, Homo sapiens
cgggcaggguguggggccaug

SEQ ID NO: 108592 - RNA, 14 nt, Homo sapiens
gccuuaccaggaga

SEQ ID NO: 108593 - RNA, 16 nt, Homo sapiens
ggucccacgagggugc

SEQ ID NO: 108594 - RNA, 15 nt, Homo sapiens
ggaccucgugccacc

SEQ ID NO: 108595 - RNA, 17 nt, Homo sapiens
cccacgagggugccgug

SEQ ID NO: 108596 - RNA, 14 nt, Homo sapiens
uggccgggcagggu

SEQ ID NO: 108597 - RNA, 17 nt, Homo sapiens
ggcucccaugucaagag

SEQ ID NO: 108598 - RNA, 12 nt, Homo sapiens
cagggccagugc

SEQ ID NO: 108599 - RNA, 13 nt, Homo sapiens
cccacgagggugc

SEQ ID NO: 108600 - RNA, 21 nt, Homo sapiens
cccugacagggccagugcagu

SEQ ID NO: 108601 - RNA, 13 nt, Homo sapiens
gagccugguccca

SEQ ID NO: 108602 - RNA, 23 nt, Homo sapiens
gguccugcagccugcaggaccuc

SEQ ID NO: 108603 - RNA, 16 nt, Homo sapiens
acaggaccccagcucu

SEQ ID NO: 108604 - RNA, 13 nt, Homo sapiens
gggccagugcagu

SEQ ID NO: 108605 - RNA, 14 nt, Human adenovirus D
uuugcccugcucac

SEQ ID NO: 108606 - RNA, 22 nt, Human adenovirus D
uuugaagucaugugugauauca

SEQ ID NO: 108607 - RNA, 21 nt, Human adenovirus D
uuucuguugcauguucuugca

SEQ ID NO: 108608 - RNA, 22 nt, Human adenovirus D
ugcaugggugggcgacugggaa

SEQ ID NO: 108609 - RNA, 14 nt, Human adenovirus D
ugcauguucuugca

SEQ ID NO: 108610 - RNA, 19 nt, Human adenovirus D
ugccacuugaacucgggga

SEQ ID NO: 108611 - RNA, 20 nt, Human adenovirus D
ugccaacauuacuucuggca

SEQ ID NO: 108612 - RNA, 21 nt, Human adenovirus D
ugcauauacuccagugcaugu

SEQ ID NO: 108613 - RNA, 21 nt, Human adenovirus D
ugcaguuuuugggugcuagcu

SEQ ID NO: 108614 - RNA, 21 nt, Human adenovirus D
ugcaaauuggcggacauaugg

SEQ ID NO: 108615 - RNA, 17 nt, Human adenovirus D
ugauuuuuacaccagcg

SEQ ID NO: 108616 - RNA, 23 nt, Human adenovirus D
ugcguggacacggccaccaacuc

SEQ ID NO: 108617 - RNA, 14 nt, Human adenovirus D
ugcgguacacgggg

SEQ ID NO: 108618 - RNA, 13 nt, Human adenovirus D
ugcgggaacugga

SEQ ID NO: 108619 - RNA, 18 nt, Human adenovirus D
ugccuguuugaccaggca

SEQ ID NO: 108620 - RNA, 15 nt, Human adenovirus D
ugccucuccaucagc

SEQ ID NO: 108621 - RNA, 17 nt, Human adenovirus D
ugcccugcucaccugca

SEQ ID NO: 108622 - RNA, 19 nt, Human adenovirus D
ugcccucucaacaucacau

SEQ ID NO: 108623 - RNA, 19 nt, Human adenovirus D
ugcccuucuugcacuggug

SEQ ID NO: 108624 - RNA, 14 nt, Human adenovirus D
ugcccgauugugau

SEQ ID NO: 108625 - RNA, 18 nt, Human adenovirus D
ugaguugggccugaugca

SEQ ID NO: 108626 - RNA, 21 nt, Human adenovirus D
ugaguugggccugaugcagga

SEQ ID NO: 108627 - RNA, 19 nt, Human adenovirus D
ugauuccuaguucuuccua

SEQ ID NO: 108628 - RNA, 13 nt, Human adenovirus D
ugauagacaaggc

SEQ ID NO: 108629 - RNA, 20 nt, Human adenovirus D
ugauuagcauagucacacuu

SEQ ID NO: 108630 - RNA, 18 nt, Human adenovirus D
ugauucaugugaacaaaa

SEQ ID NO: 108631 - RNA, 19 nt, Human adenovirus D
ugauucaugugaacaaaac

SEQ ID NO: 108632 - RNA, 23 nt, Human adenovirus D
ugacgcaugcaaggugugguuua

SEQ ID NO: 108633 - RNA, 15 nt, Human adenovirus D
ugaccacgguggugc

SEQ ID NO: 108634 - RNA, 21 nt, Human adenovirus D
ugaccaugcagacucugcuca

SEQ ID NO: 108635 - RNA, 23 nt, Human adenovirus D
ugaccaugcagacucugcucaua

SEQ ID NO: 108636 - RNA, 13 nt, Human adenovirus D
ugaaagcuauaaa

SEQ ID NO: 108637 - RNA, 14 nt, Human adenovirus D
ugaaagaacauaca

SEQ ID NO: 108638 - RNA, 22 nt, Human adenovirus D
ugaaauaaaaaacacguuuauu

SEQ ID NO: 108639 - RNA, 20 nt, Human adenovirus D
ugacauccauggccagggga

SEQ ID NO: 108640 - RNA, 21 nt, Human adenovirus D
ugacauccauggccaggggag

SEQ ID NO: 108641 - RNA, 16 nt, Human adenovirus D
ugaauggaauguuacu

SEQ ID NO: 108642 - RNA, 14 nt, Human adenovirus D
ugaaaaccaccagc

SEQ ID NO: 108643 - RNA, 15 nt, Human adenovirus D
ucuggcacauacaaa

SEQ ID NO: 108644 - RNA, 14 nt, Human adenovirus D
ucaucgacuggugc

SEQ ID NO: 108645 - RNA, 17 nt, Human adenovirus D
ucaucgacuggugcugc

SEQ ID NO: 108646 - RNA, 18 nt, Human adenovirus D
ucaucgacuggugcugcg

SEQ ID NO: 108647 - RNA, 15 nt, Human adenovirus D
ucaucucgcccagca

SEQ ID NO: 108648 - RNA, 22 nt, Human adenovirus D
ucaucucuacuaaccaugcuuu

SEQ ID NO: 108649 - RNA, 17 nt, Human adenovirus D
ucaucagaugcagagga

SEQ ID NO: 108650 - RNA, 17 nt, Human adenovirus D
uccaagcgggccucaca

SEQ ID NO: 108651 - RNA, 11 nt, Human adenovirus D
uccacagauca

SEQ ID NO: 108652 - RNA, 12 nt, Human adenovirus D
uccacagaucag

SEQ ID NO: 108653 - RNA, 18 nt, Human adenovirus D
uccacaaacuacauggac

SEQ ID NO: 108654 - RNA, 18 nt, Human adenovirus D
ucaugugaacaaaaccca

SEQ ID NO: 108655 - RNA, 23 nt, Human adenovirus D
ucaugugaacaaaacccaugaaa

SEQ ID NO: 108656 - RNA, 20 nt, Human adenovirus D
ucauggccugugcaauguca

SEQ ID NO: 108657 - RNA, 17 nt, Human adenovirus D
ucaugggcaccuggaac

SEQ ID NO: 108658 - RNA, 22 nt, Human adenovirus D
uccggcgggcggcgaacuuucu

SEQ ID NO: 108659 - RNA, 14 nt, Human adenovirus D
uccgcgaccuccuc

SEQ ID NO: 108660 - RNA, 19 nt, Human adenovirus D
uccgauggauucaaaaacu

SEQ ID NO: 108661 - RNA, 14 nt, Human adenovirus D
uccucgcagcucau

SEQ ID NO: 108662 - RNA, 16 nt, Human adenovirus D
uccucggcgagcucgu

SEQ ID NO: 108663 - RNA, 23 nt, Human adenovirus D
uccucggcgagcucguccgggaa

SEQ ID NO: 108664 - RNA, 19 nt, Human adenovirus D
uccucugaaaagucaucca

SEQ ID NO: 108665 - RNA, 20 nt, Human adenovirus D
uccccaugaacugauguuga

SEQ ID NO: 108666 - RNA, 15 nt, Human adenovirus D
uccccugggauauga

SEQ ID NO: 108667 - RNA, 19 nt, Human adenovirus D
uccccugguaccgccagau

SEQ ID NO: 108668 - RNA, 14 nt, Human adenovirus D
uccccuguugcccg

SEQ ID NO: 108669 - RNA, 17 nt, Human adenovirus D
ucccgggcuuucuugcc

SEQ ID NO: 108670 - RNA, 15 nt, Human adenovirus D
ucccgcgcgggcucg

SEQ ID NO: 108671 - RNA, 14 nt, Human adenovirus D
uccaccagugcaag

SEQ ID NO: 108672 - RNA, 17 nt, Human adenovirus D
uccaccagugcaagaag

SEQ ID NO: 108673 - RNA, 21 nt, Human adenovirus D
ucccaugcccucgcuacugcu

SEQ ID NO: 108674 - RNA, 23 nt, Human adenovirus D
ucccaugcccucgcuacugcuga

SEQ ID NO: 108675 - RNA, 13 nt, Human adenovirus D
ucccaccaccagc

SEQ ID NO: 108676 - RNA, 18 nt, Human adenovirus D
ucggucgggccagugcac

SEQ ID NO: 108677 - RNA, 16 nt, Human adenovirus D
ucggugauugaaauga

SEQ ID NO: 108678 - RNA, 16 nt, Human adenovirus D
uccugcauugccacug

SEQ ID NO: 108679 - RNA, 19 nt, Human adenovirus D
uccucuuugcccugcucac

SEQ ID NO: 108680 - RNA, 18 nt, Human adenovirus D
uccugaaguuccuccuca

SEQ ID NO: 108681 - RNA, 18 nt, Human adenovirus D
uccuggcugaugugauga

SEQ ID NO: 108682 - RNA, 13 nt, Human adenovirus D
ucgcuacugcuga

SEQ ID NO: 108683 - RNA, 14 nt, Human adenovirus D
ucgcuacugcugau

SEQ ID NO: 108684 - RNA, 21 nt, Human adenovirus D
ucgcuacugcugauuacucua

SEQ ID NO: 108685 - RNA, 15 nt, Human adenovirus D
ucgacuggugcugcg

SEQ ID NO: 108686 - RNA, 13 nt, Human adenovirus D
ucgaagggguucu

SEQ ID NO: 108687 - RNA, 23 nt, Human adenovirus D
ucucaagcacgcccucacccgcc

SEQ ID NO: 108688 - RNA, 14 nt, Human adenovirus D
ucucaacaucacau

SEQ ID NO: 108689 - RNA, 15 nt, Human adenovirus D
ucugcaucucaagca

SEQ ID NO: 108690 - RNA, 20 nt, Human adenovirus D
ucugauuagcauagucacac

SEQ ID NO: 108691 - RNA, 14 nt, Human adenovirus D
ucugauucauguga

SEQ ID NO: 108692 - RNA, 16 nt, Human adenovirus D
ucugcucauacugcua

SEQ ID NO: 108693 - RNA, 18 nt, Human adenovirus D
ucugcucauacugcuauc

SEQ ID NO: 108694 - RNA, 24 nt, Human adenovirus D
ucugcucauacugcuaucgcucuu

SEQ ID NO: 108695 - RNA, 14 nt, Human adenovirus D
ucucaucucuacua

SEQ ID NO: 108696 - RNA, 12 nt, Human adenovirus D
ugugaucauggc

SEQ ID NO: 108697 - RNA, 20 nt, Human adenovirus D
ugugaucauggccugugcaa

SEQ ID NO: 108698 - RNA, 14 nt, Human adenovirus D
uguuaauaugggag

SEQ ID NO: 108699 - RNA, 18 nt, Human adenovirus D
ugugccccgcuacccugg

SEQ ID NO: 108700 - RNA, 17 nt, Human adenovirus D
uguugacaauaauugaa

SEQ ID NO: 108701 - RNA, 17 nt, Human adenovirus D
uuaaaguuuucccucac

SEQ ID NO: 108702 - RNA, 20 nt, Human adenovirus D
uuacuucuggcacauacaaa

SEQ ID NO: 108703 - RNA, 17 nt, Human adenovirus D
uuagucaggcaggauuc

SEQ ID NO: 108704 - RNA, 21 nt, Human adenovirus D
uuagugggaccucagauauuc

SEQ ID NO: 108705 - RNA, 16 nt, Human adenovirus D
uuaguucagcugcaau

SEQ ID NO: 108706 - RNA, 13 nt, Human adenovirus D
uuacugcauacaa

SEQ ID NO: 108707 - RNA, 14 nt, Human adenovirus D
uuacucuaaaugca

SEQ ID NO: 108708 - RNA, 17 nt, Human adenovirus D
ugugauaucacacugca

SEQ ID NO: 108709 - RNA, 11 nt, Human adenovirus D
ugugauaugca

SEQ ID NO: 108710 - RNA, 13 nt, Human adenovirus D
ugugauaugcaca

SEQ ID NO: 108711 - RNA, 20 nt, Human adenovirus D
ugguugaacccagaugagga

SEQ ID NO: 108712 - RNA, 13 nt, Human adenovirus D
uguaguuguucag

SEQ ID NO: 108713 - RNA, 18 nt, Human adenovirus D
ugggcuaauauaacuuua

SEQ ID NO: 108714 - RNA, 16 nt, Human adenovirus D
ugggcugccacuugaa

SEQ ID NO: 108715 - RNA, 17 nt, Human adenovirus D
ugggcugccacuugaac

SEQ ID NO: 108716 - RNA, 13 nt, Human adenovirus D
ugggcacuggggu

SEQ ID NO: 108717 - RNA, 17 nt, Human adenovirus D
uggaugagguacagccc

SEQ ID NO: 108718 - RNA, 16 nt, Human adenovirus D
ugcuacaucucgggga

SEQ ID NO: 108719 - RNA, 15 nt, Human adenovirus D
uggcacauacaaagc

SEQ ID NO: 108720 - RNA, 15 nt, Human adenovirus D
uggcucccugcagug

SEQ ID NO: 108721 - RNA, 16 nt, Human adenovirus D
uggcugaugugaugag

SEQ ID NO: 108722 - RNA, 18 nt, Human adenovirus D
uggcuagacuucauggcu

SEQ ID NO: 108723 - RNA, 21 nt, Human adenovirus D
uugcccgauugugaucaugca

SEQ ID NO: 108724 - RNA, 12 nt, Human adenovirus D
uugcagcacugg

SEQ ID NO: 108725 - RNA, 18 nt, Human adenovirus D
uugaagucaugugugaua

SEQ ID NO: 108726 - RNA, 14 nt, Human adenovirus D
uugaaaaaauugag

SEQ ID NO: 108727 - RNA, 23 nt, Human adenovirus D
uucagcugcaaugauuaauguua

SEQ ID NO: 108728 - RNA, 14 nt, Human adenovirus D
uucaugugaacaaa

SEQ ID NO: 108729 - RNA, 21 nt, Human adenovirus D
uucaugugaacaaaacccaug

SEQ ID NO: 108730 - RNA, 16 nt, Human adenovirus D
uucauaccaucaaugc

SEQ ID NO: 108731 - RNA, 13 nt, Human adenovirus D
uucaucagaugca

SEQ ID NO: 108732 - RNA, 16 nt, Human adenovirus D
uucgcagaaccaugaa

SEQ ID NO: 108733 - RNA, 15 nt, Human adenovirus D
uucgagaauggaugu

SEQ ID NO: 108734 - RNA, 16 nt, Human adenovirus D
uuccucgaccaugacc

SEQ ID NO: 108735 - RNA, 17 nt, Human adenovirus D
uucccucacgcuugcca

SEQ ID NO: 108736 - RNA, 18 nt, Human adenovirus D
uucccgggcuuucuugcc

SEQ ID NO: 108737 - RNA, 19 nt, Human adenovirus D
uucccgggcuuucuugccg

SEQ ID NO: 108738 - RNA, 17 nt, Human adenovirus D
uuuacaugcacuggagu

SEQ ID NO: 108739 - RNA, 21 nt, Human adenovirus D
uuuaccacgaucugaugauga

SEQ ID NO: 108740 - RNA, 12 nt, Human adenovirus D
uuuaucacucac

SEQ ID NO: 108741 - RNA, 16 nt, Human adenovirus D
uuuccccaccuacucc

SEQ ID NO: 108742 - RNA, 13 nt, Human adenovirus D
uuguuacaugaca

SEQ ID NO: 108743 - RNA, 20 nt, Human adenovirus D
uugugaauggaauguuacug

SEQ ID NO: 108744 - RNA, 23 nt, Human adenovirus D
uugugaauggaauguuacugcau

SEQ ID NO: 108745 - RNA, 18 nt, Human adenovirus D
uugggcaauauaggagaa

SEQ ID NO: 108746 - RNA, 17 nt, Human adenovirus D
uuggggucuauaaucca

SEQ ID NO: 108747 - RNA, 14 nt, Human adenovirus D
uugcuucccugcaa

SEQ ID NO: 108748 - RNA, 17 nt, Human adenovirus D
uaagaauccacagauca

SEQ ID NO: 108749 - RNA, 15 nt, Human adenovirus D
uaaccuauaaaaaca

SEQ ID NO: 108750 - RNA, 13 nt, Human adenovirus D
uaagugacuuuuu

SEQ ID NO: 108751 - RNA, 18 nt, Human adenovirus D
uaagagcucagaugguga

SEQ ID NO: 108752 - RNA, 14 nt, Human adenovirus D
uaaagucacaguua

SEQ ID NO: 108753 - RNA, 20 nt, Human adenovirus D
uaaagucacaguuauaccac

SEQ ID NO: 108754 - RNA, 16 nt, Human adenovirus D
gugggcguacaugcac

SEQ ID NO: 108755 - RNA, 14 nt, Human adenovirus D
guggcuagacuuca

SEQ ID NO: 108756 - RNA, 22 nt, Human adenovirus D
guuuuuaaucaacaucaguuca

SEQ ID NO: 108757 - RNA, 23 nt, Human adenovirus D
guuuuuaaucaacaucaguucau

SEQ ID NO: 108758 - RNA, 21 nt, Human adenovirus D
uaaaaaccaaaaaaaacaauc

SEQ ID NO: 108759 - RNA, 13 nt, Human adenovirus D
uaaagaagacuau

SEQ ID NO: 108760 - RNA, 18 nt, Human adenovirus D
uaaagaucacuuacuuga

SEQ ID NO: 108761 - RNA, 22 nt, Human adenovirus D
uaaagccucuuuagacucugac

SEQ ID NO: 108762 - RNA, 15 nt, Human adenovirus D
uaaaauuacauugaa

SEQ ID NO: 108763 - RNA, 22 nt, Human adenovirus D
uaaaauuacauugaaugggacu

SEQ ID NO: 108764 - RNA, 13 nt, Human adenovirus D
uacgggugcaugu

SEQ ID NO: 108765 - RNA, 11 nt, Human adenovirus D
uacacugugaa

SEQ ID NO: 108766 - RNA, 21 nt, Human adenovirus D
uacacgggguugcagcacugg

SEQ ID NO: 108767 - RNA, 23 nt, Human adenovirus D
uacacgggguugcagcacuggaa

SEQ ID NO: 108768 - RNA, 18 nt, Human adenovirus D
uacacgguucucucagca

SEQ ID NO: 108769 - RNA, 18 nt, Human adenovirus D
uacacgcaguuguuucau

SEQ ID NO: 108770 - RNA, 15 nt, Human adenovirus D
uaccaaggauaacau

SEQ ID NO: 108771 - RNA, 16 nt, Human adenovirus D
uaccacgaucugauga

SEQ ID NO: 108772 - RNA, 14 nt, Human adenovirus D
uaccacauuguggu

SEQ ID NO: 108773 - RNA, 16 nt, Human adenovirus D
uaccaucugcaucuca

SEQ ID NO: 108774 - RNA, 15 nt, Human adenovirus D
uaauguuaaugucac

SEQ ID NO: 108775 - RNA, 17 nt, Human adenovirus D
uaauguuaaugucacua

SEQ ID NO: 108776 - RNA, 17 nt, Human adenovirus D
uaauggaagcauuacua

SEQ ID NO: 108777 - RNA, 19 nt, Human adenovirus D
uaaucauuuaauaaagauc

SEQ ID NO: 108778 - RNA, 18 nt, Human adenovirus D
uaaucaacaucaguucau

SEQ ID NO: 108779 - RNA, 14 nt, Human adenovirus D
uaauauaacuuuag

SEQ ID NO: 108780 - RNA, 17 nt, Human adenovirus D
uaguuguaaugaucaaa

SEQ ID NO: 108781 - RNA, 18 nt, Human adenovirus D
uaguucuauauaaguggc

SEQ ID NO: 108782 - RNA, 14 nt, Human adenovirus D
uauaaaaacaacaa

SEQ ID NO: 108783 - RNA, 17 nt, Human adenovirus D
uauaaaaacaacaaaac

SEQ ID NO: 108784 - RNA, 17 nt, Human adenovirus D
uacucuaaaugcaaauu

SEQ ID NO: 108785 - RNA, 19 nt, Human adenovirus D
uacucauaaagaagacuau

SEQ ID NO: 108786 - RNA, 12 nt, Human adenovirus D
uacugcauacaa

SEQ ID NO: 108787 - RNA, 22 nt, Human adenovirus D
uacugcauacaaaugcuucaau

SEQ ID NO: 108788 - RNA, 16 nt, Human adenovirus D
uagcauagucacacuu

SEQ ID NO: 108789 - RNA, 22 nt, Human adenovirus D
uagcauagucacacuuaguuca

SEQ ID NO: 108790 - RNA, 16 nt, Human adenovirus D
uaugugacgcaugcaa

SEQ ID NO: 108791 - RNA, 18 nt, Human adenovirus D
uauaauccacacaguuuc

SEQ ID NO: 108792 - RNA, 20 nt, Human adenovirus D
uauuacuaggcccagcagca

SEQ ID NO: 108793 - RNA, 13 nt, Human adenovirus D
uauuccauacaaa

SEQ ID NO: 108794 - RNA, 19 nt, Human adenovirus D
uauuccagaucacauggua

SEQ ID NO: 108795 - RNA, 20 nt, Human adenovirus D
uauugauuuuuacaccagcg

SEQ ID NO: 108796 - RNA, 20 nt, Human adenovirus D
ucaaucucccaccaccagcc

SEQ ID NO: 108797 - RNA, 14 nt, Human adenovirus D
ucaaguaccaucug

SEQ ID NO: 108798 - RNA, 19 nt, Human adenovirus D
ucaauaaagauacauaaaa

SEQ ID NO: 108799 - RNA, 18 nt, Human adenovirus D
ucaauaauggaagcauua

SEQ ID NO: 108800 - RNA, 15 nt, Human adenovirus D
ucaacagcugugcua

SEQ ID NO: 108801 - RNA, 16 nt, Human adenovirus D
ucaacaucacauucaa

SEQ ID NO: 108802 - RNA, 16 nt, Human adenovirus D
gugauaucacacugca

SEQ ID NO: 108803 - RNA, 23 nt, Human adenovirus D
gugaucauggccugugcaauguc

SEQ ID NO: 108804 - RNA, 23 nt, Human adenovirus D
gugaacgcgcuggcggagaacaa

SEQ ID NO: 108805 - RNA, 12 nt, Human adenovirus D
gugcgguggugu

SEQ ID NO: 108806 - RNA, 15 nt, Human adenovirus D
gugcaguccaaccug

SEQ ID NO: 108807 - RNA, 12 nt, Human adenovirus D
gugauugaaaug

SEQ ID NO: 108808 - RNA, 16 nt, Human adenovirus D
gugaucuuugccuguu

SEQ ID NO: 108809 - RNA, 19 nt, Human adenovirus D
gugaugcuucaacagcugu

SEQ ID NO: 108810 - RNA, 23 nt, Human adenovirus D
gucuccuccgauggauucaaaaa

SEQ ID NO: 108811 - RNA, 16 nt, Human adenovirus D
gucuauaauccacaca

SEQ ID NO: 108812 - RNA, 13 nt, Human adenovirus D
gucaugugugaua

SEQ ID NO: 108813 - RNA, 19 nt, Human adenovirus D
gucauccaagcgggccuca

SEQ ID NO: 108814 - RNA, 14 nt, Human adenovirus D
gucaucacccucag

SEQ ID NO: 108815 - RNA, 18 nt, Human adenovirus D
guccuggcugaugugaug

SEQ ID NO: 108816 - RNA, 13 nt, Human adenovirus D
guccuagugacuu

SEQ ID NO: 108817 - RNA, 17 nt, Human adenovirus D
ggugaucugaagaccau

SEQ ID NO: 108818 - RNA, 14 nt, Human adenovirus D
ggugcauguucaac

SEQ ID NO: 108819 - RNA, 17 nt, Human adenovirus D
gguggauguugauggca

SEQ ID NO: 108820 - RNA, 18 nt, Human adenovirus D
ggcucauaugaccaugca

SEQ ID NO: 108821 - RNA, 20 nt, Human adenovirus D
gggucuauaauccacacagu

SEQ ID NO: 108822 - RNA, 21 nt, Human adenovirus D
gguacgcaagagaauccacua

SEQ ID NO: 108823 - RNA, 15 nt, Human adenovirus D
gggguugcagcacug

SEQ ID NO: 108824 - RNA, 21 nt, Human adenovirus D
guauuacuaggcccagcagca

SEQ ID NO: 108825 - RNA, 18 nt, Human adenovirus D
gucagcagcaggagcgug

SEQ ID NO: 108826 - RNA, 23 nt, Human adenovirus D
guaggccgcuacaacagcacaaa

SEQ ID NO: 108827 - RNA, 22 nt, Human adenovirus D
guagaaaucaaguaccaucugc

SEQ ID NO: 108828 - RNA, 18 nt, Human adenovirus D
guaccaucugcaucucaa

SEQ ID NO: 108829 - RNA, 22 nt, Human adenovirus D
guacaauaaaaauuauauguga

SEQ ID NO: 108830 - RNA, 23 nt, Human adenovirus D
guacacugugaaaugggcuggug

SEQ ID NO: 108831 - RNA, 17 nt, Human adenovirus D
guacauagugaccaaga

SEQ ID NO: 108832 - RNA, 16 nt, Human adenovirus D
ggccagucugaugaau

SEQ ID NO: 108833 - RNA, 18 nt, Human adenovirus D
ggccgugugguucaggag

SEQ ID NO: 108834 - RNA, 13 nt, Human adenovirus D
ggccugugcaaug

SEQ ID NO: 108835 - RNA, 16 nt, Human adenovirus D
ggccugcgccauuguc

SEQ ID NO: 108836 - RNA, 12 nt, Human adenovirus D
ggcgaacuuucu

SEQ ID NO: 108837 - RNA, 16 nt, Human adenovirus D
ggcaggauucauacca

SEQ ID NO: 108838 - RNA, 18 nt, Human adenovirus D
ggcaggcagcggccugaa

SEQ ID NO: 108839 - RNA, 15 nt, Human adenovirus D
ggcagcggccugaac

SEQ ID NO: 108840 - RNA, 13 nt, Human adenovirus D
ggaguauaugcaa

SEQ ID NO: 108841 - RNA, 20 nt, Human adenovirus D
ggaauuucuuagacugcuau

SEQ ID NO: 108842 - RNA, 22 nt, Human adenovirus D
ggacacgagcucguaggugauc

SEQ ID NO: 108843 - RNA, 15 nt, Human adenovirus D
ggaaauuaugagcau

SEQ ID NO: 108844 - RNA, 14 nt, Human adenovirus D
gcuuuugugaucau

SEQ ID NO: 108845 - RNA, 12 nt, Human adenovirus D
ggaaacugugug

SEQ ID NO: 108846 - RNA, 22 nt, Human adenovirus D
ggagacacaaagagagcuuauu

SEQ ID NO: 108847 - RNA, 20 nt, Human adenovirus D
ggagaggcauggcaggcagc

SEQ ID NO: 108848 - RNA, 14 nt, Human adenovirus D
ggacggccgcagga

SEQ ID NO: 108849 - RNA, 20 nt, Human adenovirus D
ggacgucucgaacuccucuc

SEQ ID NO: 108850 - RNA, 19 nt, Human adenovirus D
ggacaucgcgaaccaggca

SEQ ID NO: 108851 - RNA, 19 nt, Human adenovirus D
gcugggcggggaccgccuc

SEQ ID NO: 108852 - RNA, 17 nt, Human adenovirus D
gcugguguaaaaaucaa

SEQ ID NO: 108853 - RNA, 16 nt, Human adenovirus D
gcuggcuuuacccugc

SEQ ID NO: 108854 - RNA, 15 nt, Human adenovirus D
gcuggcggagaacaa

SEQ ID NO: 108855 - RNA, 20 nt, Human adenovirus D
gcuugccagucccacgcuua

SEQ ID NO: 108856 - RNA, 20 nt, Human adenovirus D
gcuucugcuggggcaucuca

SEQ ID NO: 108857 - RNA, 21 nt, Human adenovirus D
gcucaccugcaccugcgucug

SEQ ID NO: 108858 - RNA, 17 nt, Human adenovirus D
gcucacgccgaaugggg

SEQ ID NO: 108859 - RNA, 12 nt, Human adenovirus D
gcuacaacagca

SEQ ID NO: 108860 - RNA, 19 nt, Human adenovirus D
gcucuugucgcugaucuga

SEQ ID NO: 108861 - RNA, 23 nt, Human adenovirus D
gcucauacugcuaucgcucuuau

SEQ ID NO: 108862 - RNA, 14 nt, Human adenovirus D
gcugaugugaugag

SEQ ID NO: 108863 - RNA, 21 nt, Human adenovirus D
gcgggcggacugccaccgccg

SEQ ID NO: 108864 - RNA, 23 nt, Human adenovirus D
gcggcgauaugccagacgcaaga

SEQ ID NO: 108865 - RNA, 18 nt, Human adenovirus D
gcggcgcugcaaagccag

SEQ ID NO: 108866 - RNA, 21 nt, Human adenovirus D
gcggacauauggaauuucuua

SEQ ID NO: 108867 - RNA, 20 nt, Human adenovirus D
gcgcuacaauuacuucauca

SEQ ID NO: 108868 - RNA, 15 nt, Human adenovirus D
gcgcugcaaagccag

SEQ ID NO: 108869 - RNA, 18 nt, Human adenovirus D
gccauugucaacacggcc

SEQ ID NO: 108870 - RNA, 16 nt, Human adenovirus D
gaacuuucuccacacc

SEQ ID NO: 108871 - RNA, 13 nt, Human adenovirus D
gaauggaagacau

SEQ ID NO: 108872 - RNA, 17 nt, Human adenovirus D
gaauuucuuagacugcu

SEQ ID NO: 108873 - RNA, 21 nt, Human adenovirus D
gaacucggggaucaccaguuu

SEQ ID NO: 108874 - RNA, 22 nt, Human adenovirus D
gaacuacacggucacuguccau

SEQ ID NO: 108875 - RNA, 19 nt, Human adenovirus D
gaacauuuccuuauuuaag

SEQ ID NO: 108876 - RNA, 19 nt, Human adenovirus D
gaaaugaagccguccucug

SEQ ID NO: 108877 - RNA, 14 nt, Human adenovirus D
gaacauacaugggc

SEQ ID NO: 108878 - RNA, 19 nt, Human adenovirus D
gaaauaaaaaacacguuua

SEQ ID NO: 108879 - RNA, 21 nt, Human adenovirus D
gaaauaaaaaacacguuuauu

SEQ ID NO: 108880 - RNA, 12 nt, Human adenovirus D
cuuguaacuuuu

SEQ ID NO: 108881 - RNA, 20 nt, Human adenovirus D
gacuuggggucuauaaucca

SEQ ID NO: 108882 - RNA, 15 nt, Human adenovirus D
gacuuuuugcagcug

SEQ ID NO: 108883 - RNA, 12 nt, Human adenovirus D
gagaaccgugua

SEQ ID NO: 108884 - RNA, 20 nt, Human adenovirus D
gagcagauaaaaacccauug

SEQ ID NO: 108885 - RNA, 21 nt, Human adenovirus D
gagcuuagcaaggugcugaca

SEQ ID NO: 108886 - RNA, 22 nt, Human adenovirus D
gagcuuauuccagcaugcaguu

SEQ ID NO: 108887 - RNA, 22 nt, Human adenovirus D
gagcugacggccagucugauga

SEQ ID NO: 108888 - RNA, 15 nt, Human adenovirus D
gacauccauggccag

SEQ ID NO: 108889 - RNA, 23 nt, Human adenovirus D
gaccaugcagacucugcucauac

SEQ ID NO: 108890 - RNA, 18 nt, Human adenovirus D
gaccaacggcugcaucca

SEQ ID NO: 108891 - RNA, 19 nt, Human adenovirus D
gaccaacggcugcauccac

SEQ ID NO: 108892 - RNA, 17 nt, Human adenovirus D
gaccaagaccgugaaua

SEQ ID NO: 108893 - RNA, 15 nt, Human adenovirus D
gaccacgguggugca

SEQ ID NO: 108894 - RNA, 20 nt, Human adenovirus D
gaucugaagaccauucugca

SEQ ID NO: 108895 - RNA, 21 nt, Human adenovirus D
gaucugaagaccauucugcac

SEQ ID NO: 108896 - RNA, 21 nt, Human adenovirus D
gaucggcaccagccagcugaa

SEQ ID NO: 108897 - RNA, 22 nt, Human adenovirus D
gauuaaagaaaaaacuaccacg

SEQ ID NO: 108898 - RNA, 17 nt, Human adenovirus D
gaggugguaaaauuaca

SEQ ID NO: 108899 - RNA, 13 nt, Human adenovirus D
gaguaagcacuau

SEQ ID NO: 108900 - RNA, 15 nt, Human adenovirus D
gauauuccagaucac

SEQ ID NO: 108901 - RNA, 21 nt, Human adenovirus D
gcaacuuccugaccacggugg

SEQ ID NO: 108902 - RNA, 17 nt, Human adenovirus D
gcacaguagucaucaaa

SEQ ID NO: 108903 - RNA, 17 nt, Human adenovirus D
gcacuggaguauaugca

SEQ ID NO: 108904 - RNA, 18 nt, Human adenovirus D
gcacuggggucucgggga

SEQ ID NO: 108905 - RNA, 23 nt, Human adenovirus D
gcacuuuuauuuuacaugcacug

SEQ ID NO: 108906 - RNA, 22 nt, Human adenovirus D
gcagaaccaugaauacagugau

SEQ ID NO: 108907 - RNA, 21 nt, Human adenovirus D
gcaccagccagcugaacgggg

SEQ ID NO: 108908 - RNA, 21 nt, Human adenovirus D
gauucccgggcuuucuugccg

SEQ ID NO: 108909 - RNA, 14 nt, Human adenovirus D
gccagcugaacggg

SEQ ID NO: 108910 - RNA, 14 nt, Human adenovirus D
gccagucugaugaa

SEQ ID NO: 108911 - RNA, 16 nt, Human adenovirus D
gccagucugaugaauc

SEQ ID NO: 108912 - RNA, 10 nt, Human adenovirus D
gccagugcac

SEQ ID NO: 108913 - RNA, 19 nt, Human adenovirus D
gccacgauguaacaucacc

SEQ ID NO: 108914 - RNA, 15 nt, Human adenovirus D
gccaccgacacguac

SEQ ID NO: 108915 - RNA, 12 nt, Human adenovirus D
gccacuguucau

SEQ ID NO: 108916 - RNA, 21 nt, Human adenovirus D
gccacuguucauccccuggcu

SEQ ID NO: 108917 - RNA, 13 nt, Human adenovirus D
gcauguucaacca

SEQ ID NO: 108918 - RNA, 19 nt, Human adenovirus D
gcauuacuauuacugccac

SEQ ID NO: 108919 - RNA, 12 nt, Human adenovirus D
gcauuaacgggg

SEQ ID NO: 108920 - RNA, 13 nt, Human adenovirus D
gcauuaacuggau

SEQ ID NO: 108921 - RNA, 14 nt, Human adenovirus D
gccaacauuacuuc

SEQ ID NO: 108922 - RNA, 16 nt, Human adenovirus D
gccaacauuacuucug

SEQ ID NO: 108923 - RNA, 16 nt, Human adenovirus D
gcaucuucugccuggu

SEQ ID NO: 108924 - RNA, 22 nt, Human adenovirus D
gcauacaaaugcuucaauaaug

SEQ ID NO: 108925 - RNA, 21 nt, Human adenovirus D
gcagugggcguacaugcacau

SEQ ID NO: 108926 - RNA, 22 nt, Human adenovirus D
gcagcugcgcuuagucaugugu

SEQ ID NO: 108927 - RNA, 14 nt, Human adenovirus D
gcagcgcauccugc

SEQ ID NO: 108928 - RNA, 15 nt, Human adenovirus D
gcagccgccaugaca

SEQ ID NO: 108929 - RNA, 16 nt, Human adenovirus D
gcagccgccaugacag

SEQ ID NO: 108930 - RNA, 15 nt, Human adenovirus D
gcagacaucaugaac

SEQ ID NO: 108931 - RNA, 15 nt, Human adenovirus D
gcagaagguggugga

SEQ ID NO: 108932 - RNA, 18 nt, Human adenovirus D
gcagggcgcccagcaugu

SEQ ID NO: 108933 - RNA, 14 nt, Human adenovirus D
cgaccgcugucuca

SEQ ID NO: 108934 - RNA, 19 nt, Human adenovirus D
cgcuuggaugacuuuucag

SEQ ID NO: 108935 - RNA, 14 nt, Human adenovirus D
cgacacguacuuca

SEQ ID NO: 108936 - RNA, 22 nt, Human adenovirus D
cgggcauuaacgggguggugga

SEQ ID NO: 108937 - RNA, 13 nt, Human adenovirus D
cgggccagugcac

SEQ ID NO: 108938 - RNA, 18 nt, Human adenovirus D
cggaaucagaauaucccc

SEQ ID NO: 108939 - RNA, 15 nt, Human adenovirus D
cggaccgccggcuca

SEQ ID NO: 108940 - RNA, 15 nt, Human adenovirus D
cggaccuaugggaac

SEQ ID NO: 108941 - RNA, 13 nt, Human adenovirus D
cucaacaucacau

SEQ ID NO: 108942 - RNA, 21 nt, Human adenovirus D
cuauaauaagcagaguacuca

SEQ ID NO: 108943 - RNA, 11 nt, Human adenovirus D
cuagugacuua

SEQ ID NO: 108944 - RNA, 14 nt, Human adenovirus D
cuauaaaaacaaca

SEQ ID NO: 108945 - RNA, 20 nt, Human adenovirus D
cuauaaagucacaguuauac

SEQ ID NO: 108946 - RNA, 17 nt, Human adenovirus D
cucagaagaagaccacc

SEQ ID NO: 108947 - RNA, 18 nt, Human adenovirus D
cucagauauuccagauca

SEQ ID NO: 108948 - RNA, 14 nt, Human adenovirus D
cucaucucuacuaa

SEQ ID NO: 108949 - RNA, 18 nt, Human adenovirus D
cucaucgacuggugcugc

SEQ ID NO: 108950 - RNA, 22 nt, Human adenovirus D
cucauaggugaggcgaugcugu

SEQ ID NO: 108951 - RNA, 20 nt, Human adenovirus D
cucauaaagaagacuauaaa

SEQ ID NO: 108952 - RNA, 12 nt, Human adenovirus D
cucauacugcua

SEQ ID NO: 108953 - RNA, 15 nt, Human adenovirus D
cuaccacgcuuuauc

SEQ ID NO: 108954 - RNA, 18 nt, Human adenovirus D
cuacauggacaagauauc

SEQ ID NO: 108955 - RNA, 16 nt, Human adenovirus D
cuaccaaggauaacau

SEQ ID NO: 108956 - RNA, 16 nt, Human adenovirus D
cuacaauuacuucauc

SEQ ID NO: 108957 - RNA, 16 nt, Human adenovirus D
cuacgggcucaugcaa

SEQ ID NO: 108958 - RNA, 20 nt, Human adenovirus D
cuacgagcucguguccaacg

SEQ ID NO: 108959 - RNA, 15 nt, Human adenovirus D
cuacucccuucucaa

SEQ ID NO: 108960 - RNA, 22 nt, Human adenovirus D
cuacuccucuuugcccugcuca

SEQ ID NO: 108961 - RNA, 15 nt, Human adenovirus D
cuucugccuggucaa

SEQ ID NO: 108962 - RNA, 20 nt, Human adenovirus D
cuucugccuggucaaacagg

SEQ ID NO: 108963 - RNA, 18 nt, Human adenovirus D
cuucgcagaaccaugaau

SEQ ID NO: 108964 - RNA, 16 nt, Human adenovirus D
cuuauuccagcaugca

SEQ ID NO: 108965 - RNA, 16 nt, Human adenovirus D
cuuauuuacaggacuu

SEQ ID NO: 108966 - RNA, 14 nt, Human adenovirus D
cuucaauaauggaa

SEQ ID NO: 108967 - RNA, 15 nt, Human adenovirus D
cuucaauaauggaag

SEQ ID NO: 108968 - RNA, 21 nt, Human adenovirus D
cuucaauaauggaagcauuac

SEQ ID NO: 108969 - RNA, 12 nt, Human adenovirus D
cuucaacagcug

SEQ ID NO: 108970 - RNA, 19 nt, Human adenovirus D
cuucaacaucugugcugcc

SEQ ID NO: 108971 - RNA, 22 nt, Human adenovirus D
cuucaaccccgucuaccccuau

SEQ ID NO: 108972 - RNA, 14 nt, Human adenovirus D
cuucaguuggauga

SEQ ID NO: 108973 - RNA, 13 nt, Human adenovirus D
cuuaagugacuuu

SEQ ID NO: 108974 - RNA, 13 nt, Human adenovirus D
cuuaacucugauu

SEQ ID NO: 108975 - RNA, 16 nt, Human adenovirus D
cuuaguucagcugcaa

SEQ ID NO: 108976 - RNA, 17 nt, Human adenovirus D
cuuaguucagcugcaau

SEQ ID NO: 108977 - RNA, 17 nt, Human adenovirus D
cuuauccacaaacuaca

SEQ ID NO: 108978 - RNA, 13 nt, Human adenovirus D
cuuagacugcuau

SEQ ID NO: 108979 - RNA, 22 nt, Human adenovirus D
cuuagcaaggugcugacaucca

SEQ ID NO: 108980 - RNA, 20 nt, Human adenovirus D
cuguugcccgauugugauca

SEQ ID NO: 108981 - RNA, 18 nt, Human adenovirus D
cuguucauccccuggcuc

SEQ ID NO: 108982 - RNA, 23 nt, Human adenovirus D
cugucucagccucgaacagucca

SEQ ID NO: 108983 - RNA, 15 nt, Human adenovirus D
cuggauccugcauug

SEQ ID NO: 108984 - RNA, 13 nt, Human adenovirus D
cuggucaaacagg

SEQ ID NO: 108985 - RNA, 22 nt, Human adenovirus D
cugcgcgcgcuacaauuacuuc

SEQ ID NO: 108986 - RNA, 20 nt, Human adenovirus D
cugcagggcgcccagcaugu

SEQ ID NO: 108987 - RNA, 12 nt, Human adenovirus D
cugcagcucauc

SEQ ID NO: 108988 - RNA, 15 nt, Human adenovirus D
cugcucauacugcua

SEQ ID NO: 108989 - RNA, 19 nt, Human adenovirus D
cugcgcuuagucaugugua

SEQ ID NO: 108990 - RNA, 19 nt, Human adenovirus D
cucugcucauacugcuauc

SEQ ID NO: 108991 - RNA, 16 nt, Human adenovirus D
cucuuugcccugcuca

SEQ ID NO: 108992 - RNA, 18 nt, Human adenovirus D
cugagagaaccguguaca

SEQ ID NO: 108993 - RNA, 16 nt, Human adenovirus D
cucugaaugauagaca

SEQ ID NO: 108994 - RNA, 12 nt, Human adenovirus D
cucccugcagug

SEQ ID NO: 108995 - RNA, 23 nt, Human adenovirus D
accgggaugaugaccgagcugac

SEQ ID NO: 108996 - RNA, 13 nt, Human adenovirus D
acccuggcauauu

SEQ ID NO: 108997 - RNA, 17 nt, Human adenovirus D
accggaggcgugcacug

SEQ ID NO: 108998 - RNA, 20 nt, Human adenovirus D
acccauugguugaacccaga

SEQ ID NO: 108999 - RNA, 18 nt, Human adenovirus D
acccaugaaagaacauac

SEQ ID NO: 109000 - RNA, 18 nt, Human adenovirus D
accauggacagcucccaa

SEQ ID NO: 109001 - RNA, 13 nt, Human adenovirus D
acccagaugagga

SEQ ID NO: 109002 - RNA, 14 nt, Human adenovirus D
acccagaugaggau

SEQ ID NO: 109003 - RNA, 13 nt, Human adenovirus D
accaguuugggca

SEQ ID NO: 109004 - RNA, 23 nt, Human adenovirus D
accagggcuucacugacugauca

SEQ ID NO: 109005 - RNA, 22 nt, Human adenovirus D
accaucagacugggguacuuua

SEQ ID NO: 109006 - RNA, 21 nt, Human adenovirus D
accaucaaugcuacauggugg

SEQ ID NO: 109007 - RNA, 16 nt, Human adenovirus D
accaugcuuucagcga

SEQ ID NO: 109008 - RNA, 13 nt, Human adenovirus D
acgcaugcaaggu

SEQ ID NO: 109009 - RNA, 20 nt, Human adenovirus D
accuccuccuguuacuguaa

SEQ ID NO: 109010 - RNA, 17 nt, Human adenovirus D
accguguacacugugaa

SEQ ID NO: 109011 - RNA, 17 nt, Human adenovirus D
accuuccugcagcucau

SEQ ID NO: 109012 - RNA, 11 nt, Human adenovirus D
accugagcuug

SEQ ID NO: 109013 - RNA, 22 nt, Human adenovirus D
accaccuccuccuguuacugua

SEQ ID NO: 109014 - RNA, 18 nt, Human adenovirus D
accacgaucugaugauga

SEQ ID NO: 109015 - RNA, 18 nt, Human adenovirus D
accacggaccggucccag

SEQ ID NO: 109016 - RNA, 18 nt, Human adenovirus D
accaacggcugcauccac

SEQ ID NO: 109017 - RNA, 17 nt, Human adenovirus D
accaaaaaaaacaauca

SEQ ID NO: 109018 - RNA, 19 nt, Human adenovirus D
acaugcucaacgagguggc

SEQ ID NO: 109019 - RNA, 13 nt, Human adenovirus D
acaugcugcuaca

SEQ ID NO: 109020 - RNA, 16 nt, Human adenovirus D
acauggugggcuaaua

SEQ ID NO: 109021 - RNA, 17 nt, Human adenovirus D
acauggugggcuaauau

SEQ ID NO: 109022 - RNA, 13 nt, Human adenovirus D
acaugggcuauaa

SEQ ID NO: 109023 - RNA, 23 nt, Human adenovirus D
acaugcacuggaguauaugcaag

SEQ ID NO: 109024 - RNA, 18 nt, Human adenovirus D
acauaacugggugaugcu

SEQ ID NO: 109025 - RNA, 14 nt, Human adenovirus D
acaucugugcugcc

SEQ ID NO: 109026 - RNA, 19 nt, Human adenovirus D
acaucugugcugccuuugc

SEQ ID NO: 109027 - RNA, 20 nt, Human adenovirus D
acaguccaggucacagucug

SEQ ID NO: 109028 - RNA, 15 nt, Human adenovirus D
acaggcaaagaucac

SEQ ID NO: 109029 - RNA, 23 nt, Human adenovirus D
acaguuaagaauccacagaucag

SEQ ID NO: 109030 - RNA, 21 nt, Human adenovirus D
acacgagcucguaggugaucu

SEQ ID NO: 109031 - RNA, 19 nt, Human adenovirus D
acacgggguugcagcacug

SEQ ID NO: 109032 - RNA, 18 nt, Human adenovirus D
agaaaucaaguaccaucu

SEQ ID NO: 109033 - RNA, 18 nt, Human adenovirus D
agaacauacaugggcuau

SEQ ID NO: 109034 - RNA, 23 nt, Human adenovirus D
agaacauacaugggcuauaauaa

SEQ ID NO: 109035 - RNA, 13 nt, Human adenovirus D
agaacauuuccuu

SEQ ID NO: 109036 - RNA, 18 nt, Human adenovirus D
agaauauguguauguuaa

SEQ ID NO: 109037 - RNA, 20 nt, Human adenovirus D
agaauauguguauguuaaua

SEQ ID NO: 109038 - RNA, 19 nt, Human adenovirus D
agaauccacuacaaugcaa

SEQ ID NO: 109039 - RNA, 19 nt, Human adenovirus D
agaagacuauaaagucaca

SEQ ID NO: 109040 - RNA, 17 nt, Human adenovirus D
agaaguacgacaaggua

SEQ ID NO: 109041 - RNA, 22 nt, Human adenovirus D
agagcuuagcaaggugcugaca

SEQ ID NO: 109042 - RNA, 19 nt, Human adenovirus D
agagaaccguguacacugu

SEQ ID NO: 109043 - RNA, 17 nt, Human adenovirus D
agacugggguacuuuac

SEQ ID NO: 109044 - RNA, 18 nt, Human adenovirus D
agacucucaucucuacua

SEQ ID NO: 109045 - RNA, 16 nt, Human adenovirus D
agacuauaaagucaca

SEQ ID NO: 109046 - RNA, 18 nt, Human adenovirus D
agacuauaaagucacagu

SEQ ID NO: 109047 - RNA, 14 nt, Human adenovirus D
agacaucaugaacg

SEQ ID NO: 109048 - RNA, 21 nt, Human adenovirus D
agacauaguuguaaugaucaa

SEQ ID NO: 109049 - RNA, 12 nt, Human adenovirus D
agacauggccag

SEQ ID NO: 109050 - RNA, 20 nt, Human adenovirus D
agacaacagccgcaggccaa

SEQ ID NO: 109051 - RNA, 14 nt, Human adenovirus D
acugggugaugcuu

SEQ ID NO: 109052 - RNA, 12 nt, Human adenovirus D
acuuacuugaaa

SEQ ID NO: 109053 - RNA, 19 nt, Human adenovirus D
acugggaaccaggagauga

SEQ ID NO: 109054 - RNA, 17 nt, Human adenovirus D
acuuuagugggaccuca

SEQ ID NO: 109055 - RNA, 19 nt, Human adenovirus D
acuuuagugggaccucaga

SEQ ID NO: 109056 - RNA, 23 nt, Human adenovirus D
acuugcauauacuccagugcaug

SEQ ID NO: 109057 - RNA, 20 nt, Human adenovirus D
acucagucacucucauuuca

SEQ ID NO: 109058 - RNA, 17 nt, Human adenovirus D
acucugauucaugugaa

SEQ ID NO: 109059 - RNA, 19 nt, Human adenovirus D
acucugauucaugugaaca

SEQ ID NO: 109060 - RNA, 20 nt, Human adenovirus D
acucugcucauacugcuauc

SEQ ID NO: 109061 - RNA, 16 nt, Human adenovirus D
acucucaucucuacua

SEQ ID NO: 109062 - RNA, 20 nt, Human adenovirus D
acuaggcgcagcugcgcuua

SEQ ID NO: 109063 - RNA, 16 nt, Human adenovirus D
auacugcuaucgcucu

SEQ ID NO: 109064 - RNA, 17 nt, Human adenovirus D
auaaaaauuauauguga

SEQ ID NO: 109065 - RNA, 22 nt, Human adenovirus D
auagcgugcguucucuuccuug

SEQ ID NO: 109066 - RNA, 16 nt, Human adenovirus D
aucaacaucaguucau

SEQ ID NO: 109067 - RNA, 14 nt, Human adenovirus D
aucaacauccacca

SEQ ID NO: 109068 - RNA, 21 nt, Human adenovirus D
aucaccaguuugggcacuggg

SEQ ID NO: 109069 - RNA, 21 nt, Human adenovirus D
aucacccagcagucgggcgag

SEQ ID NO: 109070 - RNA, 14 nt, Human adenovirus D
aucaccuuccugca

SEQ ID NO: 109071 - RNA, 21 nt, Human adenovirus D
auauucuuuauuccauacaaa

SEQ ID NO: 109072 - RNA, 13 nt, Human adenovirus D
aucaaaacuuaac

SEQ ID NO: 109073 - RNA, 14 nt, Human adenovirus D
aucagacaugcugc

SEQ ID NO: 109074 - RNA, 23 nt, Human adenovirus D
aucagacaugcugcuacaucucg

SEQ ID NO: 109075 - RNA, 20 nt, Human adenovirus D
aucauaaagauggauggaaa

SEQ ID NO: 109076 - RNA, 17 nt, Human adenovirus D
aucagcgcccucagcag

SEQ ID NO: 109077 - RNA, 22 nt, Human adenovirus D
aucagcgcccucagcagucucu

SEQ ID NO: 109078 - RNA, 18 nt, Human adenovirus D
aucauggccugugcaaug

SEQ ID NO: 109079 - RNA, 15 nt, Human adenovirus D
aucauuuaauaaaga

SEQ ID NO: 109080 - RNA, 15 nt, Human adenovirus D
aucauccauaucgca

SEQ ID NO: 109081 - RNA, 16 nt, Human adenovirus D
auccacaaacuacaug

SEQ ID NO: 109082 - RNA, 19 nt, Human adenovirus D
auccacaaacuacauggac

SEQ ID NO: 109083 - RNA, 16 nt, Human adenovirus D
auccauggccagggga

SEQ ID NO: 109084 - RNA, 13 nt, Human adenovirus D
auccacugcuccu

SEQ ID NO: 109085 - RNA, 23 nt, Human adenovirus D
aucccaugcccucgcuacugcug

SEQ ID NO: 109086 - RNA, 17 nt, Human adenovirus D
auccccuguugcccgau

SEQ ID NO: 109087 - RNA, 13 nt, Human adenovirus D
aucugcaucucaa

SEQ ID NO: 109088 - RNA, 13 nt, Human adenovirus D
aucugaugaugaa

SEQ ID NO: 109089 - RNA, 14 nt, Human adenovirus D
aucucuacuaacca

SEQ ID NO: 109090 - RNA, 15 nt, Human adenovirus D
aucgcgaggacacca

SEQ ID NO: 109091 - RNA, 20 nt, Human adenovirus D
aucgcucuuaucccaugccc

SEQ ID NO: 109092 - RNA, 15 nt, Human adenovirus D
auccugcauugccac

SEQ ID NO: 109093 - RNA, 16 nt, Human adenovirus D
aguggcaacaccuggg

SEQ ID NO: 109094 - RNA, 17 nt, Human adenovirus D
aguggcccaggacuuaa

SEQ ID NO: 109095 - RNA, 14 nt, Human adenovirus D
aguuccaaugauuu

SEQ ID NO: 109096 - RNA, 13 nt, Human adenovirus D
aguuccuccucaa

SEQ ID NO: 109097 - RNA, 16 nt, Human adenovirus D
aguuccuccucaaggg

SEQ ID NO: 109098 - RNA, 13 nt, Human adenovirus D
aguuuucccucac

SEQ ID NO: 109099 - RNA, 23 nt, Human adenovirus D
aguuuucccucacgcuugccagu

SEQ ID NO: 109100 - RNA, 18 nt, Human adenovirus D
aguugcgguacacggggu

SEQ ID NO: 109101 - RNA, 16 nt, Human adenovirus D
auaaaaacaacaaaac

SEQ ID NO: 109102 - RNA, 19 nt, Human adenovirus D
aguuuuugggugcuagcuu

SEQ ID NO: 109103 - RNA, 13 nt, Human adenovirus D
aguaagcacuauc

SEQ ID NO: 109104 - RNA, 19 nt, Human adenovirus D
agcucaucgacuggugcug

SEQ ID NO: 109105 - RNA, 15 nt, Human adenovirus D
agcugaaagcuauaa

SEQ ID NO: 109106 - RNA, 17 nt, Human adenovirus D
agcucguaggugaucuu

SEQ ID NO: 109107 - RNA, 20 nt, Human adenovirus D
agcuccucgaugccaucaac

SEQ ID NO: 109108 - RNA, 17 nt, Human adenovirus D
agcgcgggcggacugcc

SEQ ID NO: 109109 - RNA, 17 nt, Human adenovirus D
agcgcauccugcaacug

SEQ ID NO: 109110 - RNA, 23 nt, Human adenovirus D
agcgauucccgggcuuucuugcc

SEQ ID NO: 109111 - RNA, 15 nt, Human adenovirus D
agcgcccagagcgcc

SEQ ID NO: 109112 - RNA, 19 nt, Human adenovirus D
agcgcccucagcagucucu

SEQ ID NO: 109113 - RNA, 13 nt, Human adenovirus D
agccgcagccgcc

SEQ ID NO: 109114 - RNA, 19 nt, Human adenovirus D
agccccgaguguaucuacu

SEQ ID NO: 109115 - RNA, 14 nt, Human adenovirus D
agaguaagcacuau

SEQ ID NO: 109116 - RNA, 16 nt, Human adenovirus D
agaguaagcacuaucu

SEQ ID NO: 109117 - RNA, 23 nt, Human adenovirus D
aggcaaugagaggagugugauau

SEQ ID NO: 109118 - RNA, 16 nt, Human adenovirus D
aggcugcgaugcaacg

SEQ ID NO: 109119 - RNA, 16 nt, Human adenovirus D
aggcgugcgguggugu

SEQ ID NO: 109120 - RNA, 12 nt, Human adenovirus D
aggcucauauga

SEQ ID NO: 109121 - RNA, 23 nt, Human adenovirus D
agcugacauugaggcgcgagcuc

SEQ ID NO: 109122 - RNA, 19 nt, Human adenovirus D
agcugacggccagucugau

SEQ ID NO: 109123 - RNA, 21 nt, Human adenovirus D
agcugacggccagucugauga

SEQ ID NO: 109124 - RNA, 21 nt, Human adenovirus D
agcuuauuccagcaugcaguu

SEQ ID NO: 109125 - RNA, 16 nt, Human adenovirus D
agcuguugagaaaccu

SEQ ID NO: 109126 - RNA, 16 nt, Human adenovirus D
caccuuccugcagcuc

SEQ ID NO: 109127 - RNA, 21 nt, Human adenovirus D
caccuccuccuguuacuguaa

SEQ ID NO: 109128 - RNA, 16 nt, Human adenovirus D
cacgauguaacaucac

SEQ ID NO: 109129 - RNA, 16 nt, Human adenovirus D
cacuguucauccccug

SEQ ID NO: 109130 - RNA, 13 nt, Human adenovirus D
cacuuacuugaaa

SEQ ID NO: 109131 - RNA, 17 nt, Human adenovirus D
cacugacugaucaacau

SEQ ID NO: 109132 - RNA, 18 nt, Human adenovirus D
cacugccaacauuacuuc

SEQ ID NO: 109133 - RNA, 14 nt, Human adenovirus D
cacucucauuucag

SEQ ID NO: 109134 - RNA, 13 nt, Human adenovirus D
cagaggaugguca

SEQ ID NO: 109135 - RNA, 21 nt, Human adenovirus D
cacuuuugguuucaaauucau

SEQ ID NO: 109136 - RNA, 20 nt, Human adenovirus D
caauaauggaagcauuacua

SEQ ID NO: 109137 - RNA, 21 nt, Human adenovirus D
caauaauggaagcauuacuau

SEQ ID NO: 109138 - RNA, 13 nt, Human adenovirus D
caaggugugguuu

SEQ ID NO: 109139 - RNA, 14 nt, Human adenovirus D
caaggugugguuua

SEQ ID NO: 109140 - RNA, 20 nt, Human adenovirus D
caaugagaggagugugauau

SEQ ID NO: 109141 - RNA, 23 nt, Human adenovirus D
caaugagaggagugugauaugca

SEQ ID NO: 109142 - RNA, 21 nt, Human adenovirus D
caaggcagcauuaacuggaug

SEQ ID NO: 109143 - RNA, 13 nt, Human adenovirus D
caagccccugaaa

SEQ ID NO: 109144 - RNA, 12 nt, Human adenovirus D
cacaguccaggu

SEQ ID NO: 109145 - RNA, 22 nt, Human adenovirus D
cacauacgccggcucaucugca

SEQ ID NO: 109146 - RNA, 23 nt, Human adenovirus D
cacaccuugaaagggaugucaaa

SEQ ID NO: 109147 - RNA, 17 nt, Human adenovirus D
auuucaucagaugcaga

SEQ ID NO: 109148 - RNA, 19 nt, Human adenovirus D
auuucaucagaugcagagg

SEQ ID NO: 109149 - RNA, 22 nt, Human adenovirus D
auuugugaauggaauguuacug

SEQ ID NO: 109150 - RNA, 22 nt, Human adenovirus D
auuguggucccugggguccuag

SEQ ID NO: 109151 - RNA, 16 nt, Human adenovirus D
auugguugaacccaga

SEQ ID NO: 109152 - RNA, 14 nt, Human adenovirus D
caaaacccaugaaa

SEQ ID NO: 109153 - RNA, 16 nt, Human adenovirus D
caaaaccacauuugaa

SEQ ID NO: 109154 - RNA, 14 nt, Human adenovirus D
caaaaauuaucuuu

SEQ ID NO: 109155 - RNA, 12 nt, Human adenovirus D
caaacagcaucg

SEQ ID NO: 109156 - RNA, 22 nt, Human adenovirus D
caaacagcaucgccucaccuau

SEQ ID NO: 109157 - RNA, 20 nt, Human adenovirus D
caaaugcgagcauacaugcc

SEQ ID NO: 109158 - RNA, 21 nt, Human adenovirus D
caaaugcgagcauacaugccc

SEQ ID NO: 109159 - RNA, 20 nt, Human adenovirus D
caaauuccucgaccaugacc

SEQ ID NO: 109160 - RNA, 13 nt, Human adenovirus D
caaacuacaugga

SEQ ID NO: 109161 - RNA, 20 nt, Human adenovirus D
auguaacaucaccacaggca

SEQ ID NO: 109162 - RNA, 12 nt, Human adenovirus D
aucugugcugcc

SEQ ID NO: 109163 - RNA, 14 nt, Human adenovirus D
aucugcuucuucau

SEQ ID NO: 109164 - RNA, 15 nt, Human adenovirus D
augguaugauagcac

SEQ ID NO: 109165 - RNA, 15 nt, Human adenovirus D
augugacgcaugcaa

SEQ ID NO: 109166 - RNA, 21 nt, Human adenovirus D
augugaacaaaacccaugaaa

SEQ ID NO: 109167 - RNA, 21 nt, Human adenovirus D
auguggcuagacuucauggcu

SEQ ID NO: 109168 - RNA, 18 nt, Human adenovirus D
augugcugcuggcuuuac

SEQ ID NO: 109169 - RNA, 21 nt, Human adenovirus D
auguuauagaguaagcacuau

SEQ ID NO: 109170 - RNA, 12 nt, Human adenovirus D
augugugauauc

SEQ ID NO: 109171 - RNA, 14 nt, Human adenovirus D
augugugauaucac

SEQ ID NO: 109172 - RNA, 19 nt, Human adenovirus D
auucccgggcuuucuugcc

SEQ ID NO: 109173 - RNA, 20 nt, Human adenovirus D
auucccgggcuuucuugccg

SEQ ID NO: 109174 - RNA, 17 nt, Human adenovirus D
auuccucgaccaugacc

SEQ ID NO: 109175 - RNA, 23 nt, Human adenovirus D
auuacugccacugccaacauuac

SEQ ID NO: 109176 - RNA, 19 nt, Human adenovirus D
auuacuucuggcacauaca

SEQ ID NO: 109177 - RNA, 17 nt, Human adenovirus D
auuacuauuacugccac

SEQ ID NO: 109178 - RNA, 16 nt, Human adenovirus D
ccacgauguaacauca

SEQ ID NO: 109179 - RNA, 13 nt, Human adenovirus D
ccacgacacagcg

SEQ ID NO: 109180 - RNA, 20 nt, Human adenovirus D
ccacguugcgguacugguac

SEQ ID NO: 109181 - RNA, 15 nt, Human adenovirus D
ccaagaccgugaaua

SEQ ID NO: 109182 - RNA, 22 nt, Human adenovirus D
ccaggagaugagcagaacuaca

SEQ ID NO: 109183 - RNA, 14 nt, Human adenovirus D
ccaacggcugcauc

SEQ ID NO: 109184 - RNA, 18 nt, Human adenovirus D
ccaacggcugcauccacu

SEQ ID NO: 109185 - RNA, 20 nt, Human adenovirus D
cauuacuauuacugccacug

SEQ ID NO: 109186 - RNA, 20 nt, Human adenovirus D
cauuacuucuggcacauaca

SEQ ID NO: 109187 - RNA, 17 nt, Human adenovirus D
cauuaacgggguggugg

SEQ ID NO: 109188 - RNA, 15 nt, Human adenovirus D
cagcacguacuuuga

SEQ ID NO: 109189 - RNA, 23 nt, Human adenovirus D
cagcauguacggaggagccaaga

SEQ ID NO: 109190 - RNA, 16 nt, Human adenovirus D
cagccacgauguaaca

SEQ ID NO: 109191 - RNA, 21 nt, Human adenovirus D
cagccacgauguaacaucacc

SEQ ID NO: 109192 - RNA, 16 nt, Human adenovirus D
cagugcuuccagcaaa

SEQ ID NO: 109193 - RNA, 18 nt, Human adenovirus D
cauacucggaaaacagga

SEQ ID NO: 109194 - RNA, 22 nt, Human adenovirus D
cagugucuggagcgggcuuaaa

SEQ ID NO: 109195 - RNA, 17 nt, Human adenovirus D
caguuaagaauccacag

SEQ ID NO: 109196 - RNA, 22 nt, Human adenovirus D
caguuaagaauccacagaucag

SEQ ID NO: 109197 - RNA, 18 nt, Human adenovirus D
cauaaagaagacuauaaa

SEQ ID NO: 109198 - RNA, 22 nt, Human adenovirus D
cauguccuugaacuaccaccug

SEQ ID NO: 109199 - RNA, 16 nt, Human adenovirus D
caugugugauaucaca

SEQ ID NO: 109200 - RNA, 12 nt, Human adenovirus D
cauguucuugca

SEQ ID NO: 109201 - RNA, 12 nt, Human adenovirus D
caucacccagca

SEQ ID NO: 109202 - RNA, 20 nt, Human adenovirus D
caucacccccgccccggaaa

SEQ ID NO: 109203 - RNA, 18 nt, Human adenovirus D
caucaccuuccugcagcu

SEQ ID NO: 109204 - RNA, 20 nt, Human adenovirus D
cauauucuuuauuccauaca

SEQ ID NO: 109205 - RNA, 15 nt, Human adenovirus D
caucaaugcuacaug

SEQ ID NO: 109206 - RNA, 15 nt, Human adenovirus D
cccugcgcccagauu

SEQ ID NO: 109207 - RNA, 19 nt, Human adenovirus D
ccccugguaccgccagauu

SEQ ID NO: 109208 - RNA, 21 nt, Human adenovirus D
cccgccgcgccgagaucugga

SEQ ID NO: 109209 - RNA, 23 nt, Human adenovirus D
cccgcaauaaucagaacauuucc

SEQ ID NO: 109210 - RNA, 21 nt, Human adenovirus D
cccgacugcugggugaugacu

SEQ ID NO: 109211 - RNA, 21 nt, Human adenovirus D
ccauagucaucacccagcagu

SEQ ID NO: 109212 - RNA, 15 nt, Human adenovirus D
ccaucaacauccacc

SEQ ID NO: 109213 - RNA, 14 nt, Human adenovirus D
ccauacaaauucaa

SEQ ID NO: 109214 - RNA, 19 nt, Human adenovirus D
ccagggcuucacugacuga

SEQ ID NO: 109215 - RNA, 13 nt, Human adenovirus D
ccaggggagugaa

SEQ ID NO: 109216 - RNA, 17 nt, Human adenovirus D
cccagggugagucccac

SEQ ID NO: 109217 - RNA, 16 nt, Human adenovirus D
cccagugcuuccagca

SEQ ID NO: 109218 - RNA, 21 nt, Human adenovirus D
cccauugguugaacccagaug

SEQ ID NO: 109219 - RNA, 17 nt, Human adenovirus D
cccaugaaagaacauac

SEQ ID NO: 109220 - RNA, 21 nt, Human adenovirus D
cccaugaaagaacauacaugg

SEQ ID NO: 109221 - RNA, 22 nt, Human adenovirus D
cccaugaaagaacauacauggg

SEQ ID NO: 109222 - RNA, 16 nt, Human adenovirus D
ccgcgcgggcucguca

SEQ ID NO: 109223 - RNA, 22 nt, Human adenovirus D
cccuucuugcacugguggaugu

SEQ ID NO: 109224 - RNA, 23 nt, Human adenovirus D
ccgcgcucgcgcaccugcuacau

SEQ ID NO: 109225 - RNA, 14 nt, Human adenovirus D
ccgcuacaacagca

SEQ ID NO: 109226 - RNA, 19 nt, Human adenovirus D
ccgcuuggaugacuuuuca

SEQ ID NO: 109227 - RNA, 16 nt, Human adenovirus D
ccggaccuggaucucc

SEQ ID NO: 109228 - RNA, 16 nt, Human adenovirus D
ccggaggcgugcacug

SEQ ID NO: 109229 - RNA, 18 nt, Human adenovirus D
ccgggcuaguguacaacg

SEQ ID NO: 109230 - RNA, 19 nt, Human adenovirus D
ccgggcuaguguacaacgc

SEQ ID NO: 109231 - RNA, 23 nt, Human adenovirus D
ccgggugcggcaagucccagcug

SEQ ID NO: 109232 - RNA, 19 nt, Human adenovirus D
ccgggugcuagacauggcc

SEQ ID NO: 109233 - RNA, 19 nt, Human adenovirus D
ccuugaaagggaugucaaa

SEQ ID NO: 109234 - RNA, 18 nt, Human adenovirus D
ccuuccccuaucccaaau

SEQ ID NO: 109235 - RNA, 14 nt, Human adenovirus D
ccugcucaccugca

SEQ ID NO: 109236 - RNA, 15 nt, Human adenovirus D
ccuggcugaugugau

SEQ ID NO: 109237 - RNA, 17 nt, Human adenovirus D
ccuggcugaugugauga

SEQ ID NO: 109238 - RNA, 22 nt, Human adenovirus D
ccugcggacuuuucuguugcau

SEQ ID NO: 109239 - RNA, 15 nt, Human adenovirus D
ccugcaagagcuccu

SEQ ID NO: 109240 - RNA, 18 nt, Human adenovirus D
ccugaaguuccuccucaa

SEQ ID NO: 109241 - RNA, 18 nt, Human adenovirus D
ccucuuugcccugcucac

SEQ ID NO: 109242 - RNA, 12 nt, Human adenovirus D
ccucacagucca

SEQ ID NO: 109243 - RNA, 13 nt, Human adenovirus D
ccucacaguccag

SEQ ID NO: 109244 - RNA, 14 nt, Human adenovirus D
ccucagcagucucu

SEQ ID NO: 109245 - RNA, 17 nt, Human adenovirus D
ccucacgcuugccaguc

SEQ ID NO: 109246 - RNA, 16 nt, Human adenovirus D
ccucggcguugcucac

SEQ ID NO: 109247 - RNA, 16 nt, Human adenovirus D
ccucgaugaugccgca

SEQ ID NO: 109248 - RNA, 15 nt, Human adenovirus D
ccucugugcccaguu

SEQ ID NO: 109249 - RNA, 19 nt, Human adenovirus D
ccucucaacaucacauuca

SEQ ID NO: 109250 - RNA, 20 nt, Human adenovirus D
ccucucaacaucacauucaa

SEQ ID NO: 109251 - RNA, 19 nt, Human adenovirus D
ccucugaaaagucauccaa

SEQ ID NO: 109252 - RNA, 19 nt, Human adenovirus D
aaaaacuaccacgcuuuau

SEQ ID NO: 109253 - RNA, 12 nt, Human adenovirus D
aaaaaaacaauc

SEQ ID NO: 109254 - RNA, 16 nt, Human adenovirus D
aaaaaccguaccaugg

SEQ ID NO: 109255 - RNA, 13 nt, Human adenovirus D
aaaacccaugaaa

SEQ ID NO: 109256 - RNA, 21 nt, Human adenovirus D
aaaacccaugaaagaacauac

SEQ ID NO: 109257 - RNA, 23 nt, Human adenovirus D
aaaagucauccaagcgggccuca

SEQ ID NO: 109258 - RNA, 12 nt, Human adenovirus D
aaacccaugaaa

SEQ ID NO: 109259 - RNA, 19 nt, Human adenovirus D
aaaccacauuugaagauuc

SEQ ID NO: 109260 - RNA, 16 nt, Human adenovirus D
aaacaggaugggucug

SEQ ID NO: 109261 - RNA, 11 nt, Human adenovirus D
aaaauuugaaa

SEQ ID NO: 109262 - RNA, 15 nt, Human adenovirus D
aaacaacaaaaccac

SEQ ID NO: 109263 - RNA, 23 nt, Human adenovirus D
aaaauugaggacuuguuacauga

SEQ ID NO: 109264 - RNA, 20 nt, Human adenovirus D
aaacagcaucgccucaccua

SEQ ID NO: 109265 - RNA, 14 nt, Human adenovirus D
aaacuacauggaca

SEQ ID NO: 109266 - RNA, 15 nt, Human adenovirus D
aaacgugcaguccaa

SEQ ID NO: 109267 - RNA, 20 nt, Human adenovirus D
aaacguguuuuuuauuucaa

SEQ ID NO: 109268 - RNA, 20 nt, Human adenovirus D
aaauauuugugaauggaaug

SEQ ID NO: 109269 - RNA, 14 nt, Human adenovirus D
aacaaucagccccu

SEQ ID NO: 109270 - RNA, 16 nt, Human adenovirus D
aacaccaucagacugg

SEQ ID NO: 109271 - RNA, 23 nt, Human adenovirus D
aaauuaaccuauaaaaacaacaa

SEQ ID NO: 109272 - RNA, 19 nt, Human adenovirus D
aacgcaucauggcccugac

SEQ ID NO: 109273 - RNA, 13 nt, Human adenovirus D
aacucugauucau

SEQ ID NO: 109274 - RNA, 21 nt, Human adenovirus D
aacucagucacucucauuuca

SEQ ID NO: 109275 - RNA, 22 nt, Human adenovirus D
aacucagucacucucauuucag

SEQ ID NO: 109276 - RNA, 17 nt, Human adenovirus D
aacccaugaaagaacau

SEQ ID NO: 109277 - RNA, 13 nt, Human adenovirus D
aaccguaccaugg

SEQ ID NO: 109278 - RNA, 14 nt, Human adenovirus D
aagacauaacuggg

SEQ ID NO: 109279 - RNA, 21 nt, Human adenovirus D
aagacuauaaagucacaguua

SEQ ID NO: 109280 - RNA, 22 nt, Human adenovirus D
aagacuauaaagucacaguuau

SEQ ID NO: 109281 - RNA, 14 nt, Human adenovirus D
acaauaauugaacu

SEQ ID NO: 109282 - RNA, 21 nt, Human adenovirus D
acaauaaaaauuauaugugac

SEQ ID NO: 109283 - RNA, 17 nt, Human adenovirus D
acaauuacuucaucaua

SEQ ID NO: 109284 - RNA, 19 nt, Human adenovirus D
acaaccagagccagaauau

SEQ ID NO: 109285 - RNA, 14 nt, Human adenovirus D
acaaacuacaugga

SEQ ID NO: 109286 - RNA, 23 nt, Human adenovirus D
acaaacuacauggacaagauauc

SEQ ID NO: 109287 - RNA, 11 nt, Human adenovirus D
acaaacuacau

SEQ ID NO: 109288 - RNA, 21 nt, Human adenovirus D
aauuaaccuauaaaaacaaca

SEQ ID NO: 109289 - RNA, 17 nt, Human adenovirus D
aauguuacugcauacaa

SEQ ID NO: 109290 - RNA, 18 nt, Human adenovirus D
aauguuacugcauacaaa

SEQ ID NO: 109291 - RNA, 17 nt, Human adenovirus D
aauuucuuagacugcua

SEQ ID NO: 109292 - RNA, 19 nt, Human adenovirus D
aauuccucgaccaugaccu

SEQ ID NO: 109293 - RNA, 15 nt, Human adenovirus D
aauaaaucauuggaa

SEQ ID NO: 109294 - RNA, 17 nt, Human adenovirus D
aauauggccuggagcag

SEQ ID NO: 109295 - RNA, 16 nt, Human adenovirus D
aauaauggaagcauua

SEQ ID NO: 109296 - RNA, 17 nt, Human adenovirus D
aauccacuacaaugcaa

SEQ ID NO: 109297 - RNA, 16 nt, Human adenovirus D
aaucagccccuucccc

SEQ ID NO: 109298 - RNA, 18 nt, Human adenovirus D
aaucauuuaauaaagauc

SEQ ID NO: 109299 - RNA, 13 nt, Human adenovirus D
aagaugacuucaa

SEQ ID NO: 109300 - RNA, 13 nt, Human adenovirus D
aagcacgcccuca

SEQ ID NO: 109301 - RNA, 14 nt, Human adenovirus D
aagcacgcccucac

SEQ ID NO: 109302 - RNA, 17 nt, Human adenovirus D
aagcacgcccucacccg

SEQ ID NO: 109303 - RNA, 19 nt, Human adenovirus D
aagcacgcccucacccgcc

SEQ ID NO: 109304 - RNA, 21 nt, Human adenovirus D
aaguacaguuaagaauccaca

SEQ ID NO: 109305 - RNA, 17 nt, Human adenovirus D
aaguacauagugaccaa

SEQ ID NO: 109306 - RNA, 18 nt, Human adenovirus D
aaguaccaucugcaucuc

SEQ ID NO: 109307 - RNA, 12 nt, Human adenovirus D
agcaacuuccug

SEQ ID NO: 109308 - RNA, 14 nt, Human adenovirus D
agcaaggugcugac

SEQ ID NO: 109309 - RNA, 19 nt, Human adenovirus D
agcaaggugcugacaucca

SEQ ID NO: 109310 - RNA, 15 nt, Human adenovirus D
agcaauggaaaucac

SEQ ID NO: 109311 - RNA, 18 nt, Human adenovirus D
agcaccgccgcagccgcg

SEQ ID NO: 109312 - RNA, 23 nt, Human adenovirus D
agcacgcccucacccgccucuac

SEQ ID NO: 109313 - RNA, 20 nt, Human adenovirus D
agcaaauuccucgaccauga

SEQ ID NO: 109314 - RNA, 22 nt, Human adenovirus D
agcaaauuccucgaccaugacc

SEQ ID NO: 109315 - RNA, 15 nt, Human adenovirus D
agauucaauccagcu

SEQ ID NO: 109316 - RNA, 14 nt, Human adenovirus D
agacucugcucaua

SEQ ID NO: 109317 - RNA, 15 nt, Human adenovirus D
agacucugcucauac

SEQ ID NO: 109318 - RNA, 18 nt, Human adenovirus D
agacucugcucauacugc

SEQ ID NO: 109319 - RNA, 20 nt, Human adenovirus D
agacucugcucauacugcua

SEQ ID NO: 109320 - RNA, 21 nt, Human adenovirus D
agacucugcucauacugcuau

SEQ ID NO: 109321 - RNA, 17 nt, Human adenovirus D
agacuauaaagucacag

SEQ ID NO: 109322 - RNA, 21 nt, Human adenovirus D
agacuauaaagucacaguuau

SEQ ID NO: 109323 - RNA, 18 nt, Human adenovirus D
agagagcuuauuccagca

SEQ ID NO: 109324 - RNA, 20 nt, Human adenovirus D
agagaauccacuacaaugca

SEQ ID NO: 109325 - RNA, 23 nt, Human adenovirus D
agagaacgcgcgaagauggccac

SEQ ID NO: 109326 - RNA, 20 nt, Human adenovirus D
agagaaccguguacacugug

SEQ ID NO: 109327 - RNA, 15 nt, Human adenovirus D
agaggagugugauau

SEQ ID NO: 109328 - RNA, 22 nt, Human adenovirus D
agaggugguaaaauuacauuga

SEQ ID NO: 109329 - RNA, 15 nt, Human adenovirus D
agagguggucauuga

SEQ ID NO: 109330 - RNA, 13 nt, Human adenovirus D
agaucacauggua

SEQ ID NO: 109331 - RNA, 16 nt, Human adenovirus D
agaucacuuacuugaa

SEQ ID NO: 109332 - RNA, 16 nt, Human adenovirus D
agauauuccagaucac

SEQ ID NO: 109333 - RNA, 13 nt, Human adenovirus D
agauaucauaaag

SEQ ID NO: 109334 - RNA, 17 nt, Human adenovirus D
acuuaacucugauucau

SEQ ID NO: 109335 - RNA, 14 nt, Human adenovirus D
acuuaagugacuuu

SEQ ID NO: 109336 - RNA, 19 nt, Human adenovirus D
acuucuggcacauacaaag

SEQ ID NO: 109337 - RNA, 21 nt, Human adenovirus D
acuucuggcacauacaaagcu

SEQ ID NO: 109338 - RNA, 23 nt, Human adenovirus D
acuuaguucagcugcaaugauua

SEQ ID NO: 109339 - RNA, 14 nt, Human adenovirus D
acugacugaucaac

SEQ ID NO: 109340 - RNA, 15 nt, Human adenovirus D
acuccucuuugcccu

SEQ ID NO: 109341 - RNA, 22 nt, Human adenovirus D
acuccugaaguuccuccucaag

SEQ ID NO: 109342 - RNA, 12 nt, Human adenovirus D
agaaccaugaau

SEQ ID NO: 109343 - RNA, 18 nt, Human adenovirus D
agaaacgucccagcagca

SEQ ID NO: 109344 - RNA, 22 nt, Human adenovirus D
agaacaaggccauccgucccga

SEQ ID NO: 109345 - RNA, 14 nt, Human adenovirus D
agaacuuccagcag

SEQ ID NO: 109346 - RNA, 11 nt, Human adenovirus D
agacaacagcc

SEQ ID NO: 109347 - RNA, 21 nt, Human adenovirus D
agaauuuuaaggcucauauga

SEQ ID NO: 109348 - RNA, 19 nt, Human adenovirus D
agacacaaagagagcuuau

SEQ ID NO: 109349 - RNA, 20 nt, Human adenovirus D
acuugggcugccacuugaac

SEQ ID NO: 109350 - RNA, 18 nt, Human adenovirus D
acggccagucugaugaau

SEQ ID NO: 109351 - RNA, 21 nt, Human adenovirus D
acgggguugcagcacuggaac

SEQ ID NO: 109352 - RNA, 16 nt, Human adenovirus D
acgguucucucagcac

SEQ ID NO: 109353 - RNA, 16 nt, Human adenovirus D
acgcuggccagcacgc

SEQ ID NO: 109354 - RNA, 13 nt, Human adenovirus D
acgcuugccaguc

SEQ ID NO: 109355 - RNA, 15 nt, Human adenovirus D
acgcuuuaucacuca

SEQ ID NO: 109356 - RNA, 16 nt, Human adenovirus D
acgcuuuaucacucac

SEQ ID NO: 109357 - RNA, 22 nt, Human adenovirus D
acgcggccguucaugggcaccu

SEQ ID NO: 109358 - RNA, 19 nt, Human adenovirus D
acgaucugaugaugaaacc

SEQ ID NO: 109359 - RNA, 20 nt, Human adenovirus D
accguaccaugggaaaugca

SEQ ID NO: 109360 - RNA, 16 nt, Human adenovirus D
acccagaccgugcagg

SEQ ID NO: 109361 - RNA, 16 nt, Human adenovirus D
accuccuccccaugaa

SEQ ID NO: 109362 - RNA, 18 nt, Human adenovirus D
accuccuccccaugaacu

SEQ ID NO: 109363 - RNA, 16 nt, Human adenovirus D
accuccuccuguuacu

SEQ ID NO: 109364 - RNA, 15 nt, Human adenovirus D
acaguagucaucaaa

SEQ ID NO: 109365 - RNA, 20 nt, Human adenovirus D
acaguguacacgguucucuc

SEQ ID NO: 109366 - RNA, 13 nt, Human adenovirus D
acaucacauucaa

SEQ ID NO: 109367 - RNA, 18 nt, Human adenovirus D
acauaguuguaaugauca

SEQ ID NO: 109368 - RNA, 15 nt, Human adenovirus D
acagccgcaggccaa

SEQ ID NO: 109369 - RNA, 16 nt, Human adenovirus D
acaugcugcuacaucu

SEQ ID NO: 109370 - RNA, 14 nt, Human adenovirus D
acaugggcuauaau

SEQ ID NO: 109371 - RNA, 12 nt, Human adenovirus D
acaugcacugga

SEQ ID NO: 109372 - RNA, 13 nt, Human adenovirus D
acaugcacuggag

SEQ ID NO: 109373 - RNA, 22 nt, Human adenovirus D
acaugcccucucaacaucacau

SEQ ID NO: 109374 - RNA, 17 nt, Human adenovirus D
accaacggcugcaucca

SEQ ID NO: 109375 - RNA, 22 nt, Human adenovirus D
accaacggcugcauccacugcu

SEQ ID NO: 109376 - RNA, 13 nt, Human adenovirus D
accaacucacccg

SEQ ID NO: 109377 - RNA, 13 nt, Human adenovirus D
accaugugcugcu

SEQ ID NO: 109378 - RNA, 22 nt, Human adenovirus D
accagggcuucacugacugauc

SEQ ID NO: 109379 - RNA, 22 nt, Human adenovirus D
accagcgcgaguagucaaucuc

SEQ ID NO: 109380 - RNA, 14 nt, Human adenovirus D
auaauaagcagagu

SEQ ID NO: 109381 - RNA, 19 nt, Human adenovirus D
auaauaagcagaguacuca

SEQ ID NO: 109382 - RNA, 12 nt, Human adenovirus D
aguuccuccuca

SEQ ID NO: 109383 - RNA, 14 nt, Human adenovirus D
aguucaccugcaug

SEQ ID NO: 109384 - RNA, 15 nt, Human adenovirus D
aguucagcugcaaug

SEQ ID NO: 109385 - RNA, 22 nt, Human adenovirus D
aguucuguccguggauuaccau

SEQ ID NO: 109386 - RNA, 15 nt, Human adenovirus D
aguuguaaugaucaa

SEQ ID NO: 109387 - RNA, 21 nt, Human adenovirus D
agugggaccucagauauucca

SEQ ID NO: 109388 - RNA, 16 nt, Human adenovirus D
agugugauaugcacag

SEQ ID NO: 109389 - RNA, 22 nt, Human adenovirus D
aguagccccucugugcccaguu

SEQ ID NO: 109390 - RNA, 20 nt, Human adenovirus D
agugcacagacccaccccag

SEQ ID NO: 109391 - RNA, 16 nt, Human adenovirus D
aggaaggaggacacua

SEQ ID NO: 109392 - RNA, 23 nt, Human adenovirus D
aggaaacuaggcgcagcugcgcu

SEQ ID NO: 109393 - RNA, 15 nt, Human adenovirus D
agcugugcuaagugu

SEQ ID NO: 109394 - RNA, 17 nt, Human adenovirus D
agcaucaaaaauuaucu

SEQ ID NO: 109395 - RNA, 13 nt, Human adenovirus D
aggggaguggcgc

SEQ ID NO: 109396 - RNA, 23 nt, Human adenovirus D
aggcgugcgguggugucuuccuc

SEQ ID NO: 109397 - RNA, 17 nt, Human adenovirus D
aggcugcgaugcaacgc

SEQ ID NO: 109398 - RNA, 19 nt, Human adenovirus D
aggcugcgaugcaacgcau

SEQ ID NO: 109399 - RNA, 19 nt, Human adenovirus D
aggcucauaugaccaugca

SEQ ID NO: 109400 - RNA, 14 nt, Human adenovirus D
aggagugcagggau

SEQ ID NO: 109401 - RNA, 24 nt, Human adenovirus D
agggugggcagcaccuguggcgau

SEQ ID NO: 109402 - RNA, 20 nt, Human adenovirus D
auaucauaaagauggaugga

SEQ ID NO: 109403 - RNA, 16 nt, Human adenovirus D
auauacuccagugcau

SEQ ID NO: 109404 - RNA, 19 nt, Human adenovirus D
auaggugaggcgaugcugu

SEQ ID NO: 109405 - RNA, 14 nt, Human adenovirus D
auagugaccaagac

SEQ ID NO: 109406 - RNA, 18 nt, Human adenovirus D
aucaccacaggcaaugag

SEQ ID NO: 109407 - RNA, 20 nt, Human adenovirus D
aucaccaguuugggcacugg

SEQ ID NO: 109408 - RNA, 16 nt, Human adenovirus D
aucacaugguaugaua

SEQ ID NO: 109409 - RNA, 19 nt, Human adenovirus D
aucacaugguaugauagca

SEQ ID NO: 109410 - RNA, 14 nt, Human adenovirus D
aucacacugcaugu

SEQ ID NO: 109411 - RNA, 15 nt, Human adenovirus D
aucacacugcaugug

SEQ ID NO: 109412 - RNA, 20 nt, Human adenovirus D
auauucuuuauuccauacaa

SEQ ID NO: 109413 - RNA, 16 nt, Human adenovirus D
auauuccagaucacau

SEQ ID NO: 109414 - RNA, 20 nt, Human adenovirus D
auauuccagaucacauggua

SEQ ID NO: 109415 - RNA, 15 nt, Human adenovirus D
aucacuuacuugaaa

SEQ ID NO: 109416 - RNA, 17 nt, Human adenovirus D
aucacucacauuuugga

SEQ ID NO: 109417 - RNA, 17 nt, Human adenovirus D
aucccaaauuacucgca

SEQ ID NO: 109418 - RNA, 22 nt, Human adenovirus D
aucccaugcccucgcuacugcu

SEQ ID NO: 109419 - RNA, 17 nt, Human adenovirus D
aucauuggaacuaauca

SEQ ID NO: 109420 - RNA, 23 nt, Human adenovirus D
auccauggccaggggagugaaga

SEQ ID NO: 109421 - RNA, 23 nt, Human adenovirus D
auccuuguccagauccucggcgu

SEQ ID NO: 109422 - RNA, 19 nt, Human adenovirus D
augaggcgugcgguggugu

SEQ ID NO: 109423 - RNA, 14 nt, Human adenovirus D
augagaugccccag

SEQ ID NO: 109424 - RNA, 18 nt, Human adenovirus D
augagaggagugugauau

SEQ ID NO: 109425 - RNA, 23 nt, Human adenovirus D
augagaggagugugauaugcaca

SEQ ID NO: 109426 - RNA, 16 nt, Human adenovirus D
augagcagaacuacac

SEQ ID NO: 109427 - RNA, 23 nt, Human adenovirus D
augaccaugcagacucugcucau

SEQ ID NO: 109428 - RNA, 14 nt, Human adenovirus D
augaccgagcugac

SEQ ID NO: 109429 - RNA, 18 nt, Human adenovirus D
augaaggcuuucacagcu

SEQ ID NO: 109430 - RNA, 19 nt, Human adenovirus D
augaaggcuuucacagcuu

SEQ ID NO: 109431 - RNA, 16 nt, Human adenovirus D
augaaucgcaagcgcc

SEQ ID NO: 109432 - RNA, 17 nt, Human adenovirus D
aucgccccgcaggugga

SEQ ID NO: 109433 - RNA, 23 nt, Human adenovirus D
aucgccccgcagguggacaugau

SEQ ID NO: 109434 - RNA, 23 nt, Human adenovirus D
aucuuugccuguuugaccaggca

SEQ ID NO: 109435 - RNA, 11 nt, Human adenovirus D
augcacuggag

SEQ ID NO: 109436 - RNA, 14 nt, Human adenovirus D
augcagacucugcu

SEQ ID NO: 109437 - RNA, 17 nt, Human adenovirus D
augcagacucugcucau

SEQ ID NO: 109438 - RNA, 20 nt, Human adenovirus D
augcagaggaacuucuccag

SEQ ID NO: 109439 - RNA, 18 nt, Human adenovirus D
augcgagcauacaugccc

SEQ ID NO: 109440 - RNA, 19 nt, Human adenovirus D
augcuacauggugggcuaa

SEQ ID NO: 109441 - RNA, 20 nt, Human adenovirus D
augcaguuuuugggugcuag

SEQ ID NO: 109442 - RNA, 23 nt, Human adenovirus D
augcaugggugggcgacugggaa

SEQ ID NO: 109443 - RNA, 18 nt, Human adenovirus D
augcccucgcuacugcug

SEQ ID NO: 109444 - RNA, 21 nt, Human adenovirus D
augcccucgcuacugcugauu

SEQ ID NO: 109445 - RNA, 13 nt, Human adenovirus D
augccaucaacau

SEQ ID NO: 109446 - RNA, 22 nt, Human adenovirus D
caaggagcuccucgaugccauc

SEQ ID NO: 109447 - RNA, 16 nt, Human adenovirus D
cacaaacuacauggac

SEQ ID NO: 109448 - RNA, 21 nt, Human adenovirus D
cacgccucgcccgacugucua

SEQ ID NO: 109449 - RNA, 20 nt, Human adenovirus D
cacuaucugcuucuucauua

SEQ ID NO: 109450 - RNA, 19 nt, Human adenovirus D
cacgggguugcagcacugg

SEQ ID NO: 109451 - RNA, 17 nt, Human adenovirus D
caccgacacguacuuca

SEQ ID NO: 109452 - RNA, 20 nt, Human adenovirus D
cagcaggagcgugccgccaa

SEQ ID NO: 109453 - RNA, 13 nt, Human adenovirus D
cagcaggagugca

SEQ ID NO: 109454 - RNA, 14 nt, Human adenovirus D
cagcaggagugcag

SEQ ID NO: 109455 - RNA, 20 nt, Human adenovirus D
cagcauguacggaggagcca

SEQ ID NO: 109456 - RNA, 13 nt, Human adenovirus D
cagcauuaacugg

SEQ ID NO: 109457 - RNA, 14 nt, Human adenovirus D
cagccgccaugaca

SEQ ID NO: 109458 - RNA, 15 nt, Human adenovirus D
cagccgccaugacag

SEQ ID NO: 109459 - RNA, 19 nt, Human adenovirus D
cagccacgauguaacauca

SEQ ID NO: 109460 - RNA, 13 nt, Human adenovirus D
cagcccauuucac

SEQ ID NO: 109461 - RNA, 22 nt, Human adenovirus D
cagcugcgcuuagucaugugua

SEQ ID NO: 109462 - RNA, 20 nt, Human adenovirus D
cagcuguugagaaaccugcu

SEQ ID NO: 109463 - RNA, 21 nt, Human adenovirus D
cagcugugcuaagugugguuu

SEQ ID NO: 109464 - RNA, 14 nt, Human adenovirus D
caggaaacugugug

SEQ ID NO: 109465 - RNA, 23 nt, Human adenovirus D
cagcucgcuccgccaucauccau

SEQ ID NO: 109466 - RNA, 20 nt, Human adenovirus D
cagcgcccucagcagucucu

SEQ ID NO: 109467 - RNA, 21 nt, Human adenovirus D
cagcgcccucagcagucucug

SEQ ID NO: 109468 - RNA, 20 nt, Human adenovirus D
cagcgcgaguagucaaucuc

SEQ ID NO: 109469 - RNA, 15 nt, Human adenovirus D
cagccuguacccaga

SEQ ID NO: 109470 - RNA, 12 nt, Human adenovirus D
cagauauuccag

SEQ ID NO: 109471 - RNA, 15 nt, Human adenovirus D
cagaguccuggcuga

SEQ ID NO: 109472 - RNA, 22 nt, Human adenovirus D
cagaguccuggcugaugugaug

SEQ ID NO: 109473 - RNA, 13 nt, Human adenovirus D
cagagccagaaua

SEQ ID NO: 109474 - RNA, 22 nt, Human adenovirus D
cacuuaguucagcugcaaugau

SEQ ID NO: 109475 - RNA, 23 nt, Human adenovirus D
cacuuuuauuuuacaugcacugg

SEQ ID NO: 109476 - RNA, 20 nt, Human adenovirus D
cacuuuugguuucaaauuca

SEQ ID NO: 109477 - RNA, 22 nt, Human adenovirus D
caaaugcgagcauacaugcccu

SEQ ID NO: 109478 - RNA, 20 nt, Human adenovirus D
caaaugcuucaauaauggaa

SEQ ID NO: 109479 - RNA, 21 nt, Human adenovirus D
caaagggucuugagaagggag

SEQ ID NO: 109480 - RNA, 13 nt, Human adenovirus D
caaagaucaccua

SEQ ID NO: 109481 - RNA, 15 nt, Human adenovirus D
caaacuacauggaca

SEQ ID NO: 109482 - RNA, 15 nt, Human adenovirus D
auuuuacaugcacug

SEQ ID NO: 109483 - RNA, 15 nt, Human adenovirus D
auuugugaauggaau

SEQ ID NO: 109484 - RNA, 16 nt, Human adenovirus D
auuuuaaggcucauau

SEQ ID NO: 109485 - RNA, 16 nt, Human adenovirus D
caaaaaaaacaaucag

SEQ ID NO: 109486 - RNA, 15 nt, Human adenovirus D
auucauacucggaaa

SEQ ID NO: 109487 - RNA, 14 nt, Human adenovirus D
auucaugugaacaa

SEQ ID NO: 109488 - RNA, 21 nt, Human adenovirus D
auuccugguccacaauuuuca

SEQ ID NO: 109489 - RNA, 16 nt, Human adenovirus D
auuccucgaccaugac

SEQ ID NO: 109490 - RNA, 18 nt, Human adenovirus D
auuccucgaccaugaccu

SEQ ID NO: 109491 - RNA, 13 nt, Human adenovirus D
auuccagcaugca

SEQ ID NO: 109492 - RNA, 13 nt, Human adenovirus D
auucaaaaacuuc

SEQ ID NO: 109493 - RNA, 21 nt, Human adenovirus D
auggaauuucuuagacugcua

SEQ ID NO: 109494 - RNA, 22 nt, Human adenovirus D
auggaauuucuuagacugcuau

SEQ ID NO: 109495 - RNA, 17 nt, Human adenovirus D
auggaauguuacugcau

SEQ ID NO: 109496 - RNA, 18 nt, Human adenovirus D
auggaauguuacugcaua

SEQ ID NO: 109497 - RNA, 21 nt, Human adenovirus D
auggaauguuacugcauacaa

SEQ ID NO: 109498 - RNA, 19 nt, Human adenovirus D
augcuuucuguuuuucaga

SEQ ID NO: 109499 - RNA, 20 nt, Human adenovirus D
augcuucaacagcugugcua

SEQ ID NO: 109500 - RNA, 12 nt, Human adenovirus D
auuucacagugu

SEQ ID NO: 109501 - RNA, 21 nt, Human adenovirus D
auuucaucagaugcagaggaa

SEQ ID NO: 109502 - RNA, 16 nt, Human adenovirus D
auuuacgggugcaugu

SEQ ID NO: 109503 - RNA, 22 nt, Human adenovirus D
auugaaucuuguuguuuugaac

SEQ ID NO: 109504 - RNA, 12 nt, Human adenovirus D
auugaaugggac

SEQ ID NO: 109505 - RNA, 18 nt, Human adenovirus D
auugaggcgcgagcucag

SEQ ID NO: 109506 - RNA, 17 nt, Human adenovirus D
auugucugccuggucau

SEQ ID NO: 109507 - RNA, 12 nt, Human adenovirus D
auugugaucaug

SEQ ID NO: 109508 - RNA, 13 nt, Human adenovirus D
guaaaaaucaaua

SEQ ID NO: 109509 - RNA, 13 nt, Human adenovirus D
gguguacugucau

SEQ ID NO: 109510 - RNA, 14 nt, Human adenovirus D
guaaaauuacauug

SEQ ID NO: 109511 - RNA, 17 nt, Human adenovirus D
guaaaauuacauugaau

SEQ ID NO: 109512 - RNA, 11 nt, Human adenovirus D
ggucacugucc

SEQ ID NO: 109513 - RNA, 16 nt, Human adenovirus D
ggucgggccagugcac

SEQ ID NO: 109514 - RNA, 21 nt, Human adenovirus D
ggucguggccccgcgcagcua

SEQ ID NO: 109515 - RNA, 17 nt, Human adenovirus D
ggugaggcgaugcuguu

SEQ ID NO: 109516 - RNA, 18 nt, Human adenovirus D
ggugaugacuaugggguu

SEQ ID NO: 109517 - RNA, 13 nt, Human adenovirus D
gguauauggcucc

SEQ ID NO: 109518 - RNA, 21 nt, Human adenovirus D
ggucaaacaggcaaagaucac

SEQ ID NO: 109519 - RNA, 15 nt, Human adenovirus D
gggacuuauccacaa

SEQ ID NO: 109520 - RNA, 15 nt, Human adenovirus D
ggcuuuugugaucau

SEQ ID NO: 109521 - RNA, 15 nt, Human adenovirus D
ggcuuucacagcuug

SEQ ID NO: 109522 - RNA, 20 nt, Human adenovirus D
ggcgcagcugcgcuuaguca

SEQ ID NO: 109523 - RNA, 18 nt, Human adenovirus D
ggcggagaacaaggccau

SEQ ID NO: 109524 - RNA, 23 nt, Human adenovirus D
ggcucaagcagauuuacagcuuc

SEQ ID NO: 109525 - RNA, 17 nt, Human adenovirus D
ggcuaguguacaacgcc

SEQ ID NO: 109526 - RNA, 14 nt, Human adenovirus D
ggccggccgcgaga

SEQ ID NO: 109527 - RNA, 22 nt, Human adenovirus D
ggcccgcuuggaugacuuuuca

SEQ ID NO: 109528 - RNA, 21 nt, Human adenovirus D
ggcaauaccgggaugaugacc

SEQ ID NO: 109529 - RNA, 21 nt, Human adenovirus D
gcuggugacggacgugcgcga

SEQ ID NO: 109530 - RNA, 12 nt, Human adenovirus D
gcugggugauga

SEQ ID NO: 109531 - RNA, 15 nt, Human adenovirus D
gcuucacugacugau

SEQ ID NO: 109532 - RNA, 21 nt, Human adenovirus D
gcuucaauaauggaagcauua

SEQ ID NO: 109533 - RNA, 15 nt, Human adenovirus D
gcugguggugggaga

SEQ ID NO: 109534 - RNA, 16 nt, Human adenovirus D
ggacuuguuacaugac

SEQ ID NO: 109535 - RNA, 19 nt, Human adenovirus D
ggacuuaagugacuuuuug

SEQ ID NO: 109536 - RNA, 14 nt, Human adenovirus D
gcggucgcgguggg

SEQ ID NO: 109537 - RNA, 18 nt, Human adenovirus D
gcgguguaagcuaccaca

SEQ ID NO: 109538 - RNA, 17 nt, Human adenovirus D
gcggcgauaugccagac

SEQ ID NO: 109539 - RNA, 13 nt, Human adenovirus D
gcggccacuuccg

SEQ ID NO: 109540 - RNA, 20 nt, Human adenovirus D
gcguaggccgcuacaacagc

SEQ ID NO: 109541 - RNA, 21 nt, Human adenovirus D
gcguaggccgcuacaacagca

SEQ ID NO: 109542 - RNA, 18 nt, Human adenovirus D
gcgucugcagcauugucu

SEQ ID NO: 109543 - RNA, 15 nt, Human adenovirus D
gcgcgggcucgucag

SEQ ID NO: 109544 - RNA, 13 nt, Human adenovirus D
gccugugcaaugu

SEQ ID NO: 109545 - RNA, 23 nt, Human adenovirus D
gcgcuggcggagaacaaggccau

SEQ ID NO: 109546 - RNA, 17 nt, Human adenovirus D
gcucgcguccaucgugc

SEQ ID NO: 109547 - RNA, 13 nt, Human adenovirus D
gcucauacugcua

SEQ ID NO: 109548 - RNA, 14 nt, Human adenovirus D
gcucauacugcuau

SEQ ID NO: 109549 - RNA, 14 nt, Human adenovirus D
gcuacaauuacuuc

SEQ ID NO: 109550 - RNA, 13 nt, Human adenovirus D
gcuacccuggacu

SEQ ID NO: 109551 - RNA, 13 nt, Human adenovirus D
gcauguucuugca

SEQ ID NO: 109552 - RNA, 12 nt, Human adenovirus D
gccgcgccagac

SEQ ID NO: 109553 - RNA, 15 nt, Human adenovirus D
gccaucaacauccac

SEQ ID NO: 109554 - RNA, 20 nt, Human adenovirus D
gcccagauugcaaguacaua

SEQ ID NO: 109555 - RNA, 18 nt, Human adenovirus D
gcccagcaauaacaccgg

SEQ ID NO: 109556 - RNA, 22 nt, Human adenovirus D
gcccagcagcauguacggagga

SEQ ID NO: 109557 - RNA, 15 nt, Human adenovirus D
gccagucugaugaau

SEQ ID NO: 109558 - RNA, 14 nt, Human adenovirus D
gccccgcaggugga

SEQ ID NO: 109559 - RNA, 19 nt, Human adenovirus D
gcccaggacuuaagugacu

SEQ ID NO: 109560 - RNA, 20 nt, Human adenovirus D
gcccaggacuuaagugacuu

SEQ ID NO: 109561 - RNA, 14 nt, Human adenovirus D
gccccagcagaagc

SEQ ID NO: 109562 - RNA, 20 nt, Human adenovirus D
gaauaucagacaugcugcua

SEQ ID NO: 109563 - RNA, 16 nt, Human adenovirus D
gaauauccccuuccuc

SEQ ID NO: 109564 - RNA, 22 nt, Human adenovirus D
aaacgccccugcaagugcacag

SEQ ID NO: 109565 - RNA, 19 nt, Human adenovirus D
gaagucaugugugauauca

SEQ ID NO: 109566 - RNA, 19 nt, Human adenovirus D
gaagugguuucaaauucaa

SEQ ID NO: 109567 - RNA, 22 nt, Human adenovirus D
gaacgagaagaacgcacagauu

SEQ ID NO: 109568 - RNA, 16 nt, Human adenovirus D
gaacgcacagauucau

SEQ ID NO: 109569 - RNA, 21 nt, Human adenovirus D
gaagaugcccuucuugcacug

SEQ ID NO: 109570 - RNA, 18 nt, Human adenovirus D
gaagcagaaguucaccug

SEQ ID NO: 109571 - RNA, 17 nt, Human adenovirus D
gaacaaaacccaugaaa

SEQ ID NO: 109572 - RNA, 14 nt, Human adenovirus D
gaacgagaucggca

SEQ ID NO: 109573 - RNA, 19 nt, Human adenovirus D
gaaccguguacacugugaa

SEQ ID NO: 109574 - RNA, 16 nt, Human adenovirus D
gaaccaugaauacagu

SEQ ID NO: 109575 - RNA, 22 nt, Human adenovirus D
gaaauuaaaaaauuaaccuaua

SEQ ID NO: 109576 - RNA, 18 nt, Human adenovirus D
gaaauuaugagcaucaaa

SEQ ID NO: 109577 - RNA, 14 nt, Human adenovirus D
cuuuagacaacagc

SEQ ID NO: 109578 - RNA, 15 nt, Human adenovirus D
cuuuagacaacagcc

SEQ ID NO: 109579 - RNA, 16 nt, Human adenovirus D
aaaguaugucucuggu

SEQ ID NO: 109580 - RNA, 21 nt, Human adenovirus D
aaagggaugucaaauuccugg

SEQ ID NO: 109581 - RNA, 14 nt, Human adenovirus D
aaagucacaguuau

SEQ ID NO: 109582 - RNA, 24 nt, Human adenovirus D
gacaagcuggccugcgccauuguc

SEQ ID NO: 109583 - RNA, 18 nt, Human adenovirus D
aaacuaccacgcuuuauc

SEQ ID NO: 109584 - RNA, 18 nt, Human adenovirus D
gacaccauggacagcucc

SEQ ID NO: 109585 - RNA, 18 nt, Human adenovirus D
gacacggccaccaacuca

SEQ ID NO: 109586 - RNA, 19 nt, Human adenovirus D
gacacggccaccaacucac

SEQ ID NO: 109587 - RNA, 23 nt, Human adenovirus D
gaccucagauauuccagaucaca

SEQ ID NO: 109588 - RNA, 21 nt, Human adenovirus D
gacccucgccaagaugcccau

SEQ ID NO: 109589 - RNA, 15 nt, Human adenovirus D
gaccaugcagacucu

SEQ ID NO: 109590 - RNA, 17 nt, Human adenovirus D
gagaggagugugauaug

SEQ ID NO: 109591 - RNA, 20 nt, Human adenovirus D
gagagaaccguguacacugu

SEQ ID NO: 109592 - RNA, 17 nt, Human adenovirus D
gagccggcgggcggacg

SEQ ID NO: 109593 - RNA, 14 nt, Human adenovirus D
gagaacaaggccau

SEQ ID NO: 109594 - RNA, 15 nt, Human adenovirus D
gaggcgugcgguggu

SEQ ID NO: 109595 - RNA, 15 nt, Human adenovirus D
gaggacuuguuacau

SEQ ID NO: 109596 - RNA, 14 nt, Human adenovirus D
gaggagugugauau

SEQ ID NO: 109597 - RNA, 18 nt, Human adenovirus D
gaggagugugauaugcac

SEQ ID NO: 109598 - RNA, 14 nt, Human adenovirus D
gagcuacaugccca

SEQ ID NO: 109599 - RNA, 21 nt, Human adenovirus D
gagcgugccgccaaggagcuc

SEQ ID NO: 109600 - RNA, 23 nt, Human adenovirus D
gagcucguguccaacggcaaaca

SEQ ID NO: 109601 - RNA, 16 nt, Human adenovirus D
aaaugauuaguuccaa

SEQ ID NO: 109602 - RNA, 21 nt, Human adenovirus D
aaaugcuucaauaauggaagc

SEQ ID NO: 109603 - RNA, 16 nt, Human adenovirus D
aaauauuugugaaugg

SEQ ID NO: 109604 - RNA, 15 nt, Human adenovirus D
gacuauaaagucaca

SEQ ID NO: 109605 - RNA, 21 nt, Human adenovirus D
gacugucuagggccuuucccc

SEQ ID NO: 109606 - RNA, 13 nt, Human adenovirus D
gacuggugcugcg

SEQ ID NO: 109607 - RNA, 14 nt, Human adenovirus D
gacugcuaucagga

SEQ ID NO: 109608 - RNA, 15 nt, Human adenovirus D
gacugaucaacaucc

SEQ ID NO: 109609 - RNA, 12 nt, Human adenovirus D
gacucugcucau

SEQ ID NO: 109610 - RNA, 20 nt, Human adenovirus D
gauucccgggcuuucuugcc

SEQ ID NO: 109611 - RNA, 15 nt, Human adenovirus D
gauucaauccagcuc

SEQ ID NO: 109612 - RNA, 23 nt, Human adenovirus D
gauucuggaaauuaugagcauca

SEQ ID NO: 109613 - RNA, 22 nt, Human adenovirus D
gauugacuacucgcgcuggugu

SEQ ID NO: 109614 - RNA, 22 nt, Human adenovirus D
gauugcaaguacauagugacca

SEQ ID NO: 109615 - RNA, 12 nt, Human adenovirus D
gauuuuuacacc

SEQ ID NO: 109616 - RNA, 15 nt, Human adenovirus D
gauuuuuacaccagc

SEQ ID NO: 109617 - RNA, 16 nt, Human adenovirus D
gauuuuuacaccagcg

SEQ ID NO: 109618 - RNA, 14 nt, Human adenovirus D
gaucugaugaugaa

SEQ ID NO: 109619 - RNA, 17 nt, Human adenovirus D
gauacauaaaauuugaa

SEQ ID NO: 109620 - RNA, 17 nt, Human adenovirus D
gaugccaucaacaucca

SEQ ID NO: 109621 - RNA, 18 nt, Human adenovirus D
gaugccaucaacauccac

SEQ ID NO: 109622 - RNA, 13 nt, Human adenovirus D
gauguaacaucac

SEQ ID NO: 109623 - RNA, 16 nt, Human adenovirus D
gaugcuguuugccguu

SEQ ID NO: 109624 - RNA, 16 nt, Human adenovirus D
gauggcgcaggcgacc

SEQ ID NO: 109625 - RNA, 17 nt, Human adenovirus D
gauggcggcgcgguggg

SEQ ID NO: 109626 - RNA, 14 nt, Human adenovirus D
gaucuuugccuguu

SEQ ID NO: 109627 - RNA, 22 nt, Human adenovirus D
gaugacuucaaccccgucuacc

SEQ ID NO: 109628 - RNA, 19 nt, Human adenovirus D
gaugaguugggccugaugc

SEQ ID NO: 109629 - RNA, 16 nt, Human adenovirus D
cuauuuaacauccucu

SEQ ID NO: 109630 - RNA, 16 nt, Human adenovirus D
cucauaugaccaugca

SEQ ID NO: 109631 - RNA, 22 nt, Human adenovirus D
cucaucucuacuaaccaugcuu

SEQ ID NO: 109632 - RNA, 20 nt, Human adenovirus D
cuccaaguuagagacaugcu

SEQ ID NO: 109633 - RNA, 15 nt, Human adenovirus D
cuccacaccuugaaa

SEQ ID NO: 109634 - RNA, 12 nt, Human adenovirus D
cucaacaucaca

SEQ ID NO: 109635 - RNA, 22 nt, Human adenovirus D
cucagauauuccagaucacaug

SEQ ID NO: 109636 - RNA, 22 nt, Human adenovirus D
cuacucgcgcugguguaaaaau

SEQ ID NO: 109637 - RNA, 11 nt, Human adenovirus D
cuacaacagca

SEQ ID NO: 109638 - RNA, 21 nt, Human adenovirus D
cuauauaaguggcaacaccug

SEQ ID NO: 109639 - RNA, 15 nt, Human adenovirus D
cuauaauaagcagag

SEQ ID NO: 109640 - RNA, 14 nt, Human adenovirus D
cuauaaagucacag

SEQ ID NO: 109641 - RNA, 17 nt, Human adenovirus D
cuagcuuuggagcauua

SEQ ID NO: 109642 - RNA, 13 nt, Human adenovirus D
cggccagucugau

SEQ ID NO: 109643 - RNA, 16 nt, Human adenovirus D
cggccagucugaugaa

SEQ ID NO: 109644 - RNA, 17 nt, Human adenovirus D
cgcaaagggucuugaga

SEQ ID NO: 109645 - RNA, 21 nt, Human adenovirus D
cggggcaguuguugagggaaa

SEQ ID NO: 109646 - RNA, 14 nt, Human adenovirus D
cgggccagugcacg

SEQ ID NO: 109647 - RNA, 14 nt, Human adenovirus D
cgggcgcccagugc

SEQ ID NO: 109648 - RNA, 14 nt, Human adenovirus D
cgggaaaaccucca

SEQ ID NO: 109649 - RNA, 15 nt, Human adenovirus D
cuucaguuggaugac

SEQ ID NO: 109650 - RNA, 12 nt, Human adenovirus D
cuuauuccagca

SEQ ID NO: 109651 - RNA, 17 nt, Human adenovirus D
cuucaauuggagcagug

SEQ ID NO: 109652 - RNA, 18 nt, Human adenovirus D
cuuagcccuggcucugaa

SEQ ID NO: 109653 - RNA, 12 nt, Human adenovirus D
cugucaugccac

SEQ ID NO: 109654 - RNA, 14 nt, Human adenovirus D
cuuccugcagcuca

SEQ ID NO: 109655 - RNA, 15 nt, Human adenovirus D
cuuccucacuccccc

SEQ ID NO: 109656 - RNA, 15 nt, Human adenovirus D
cuucgagaauggaug

SEQ ID NO: 109657 - RNA, 13 nt, Human adenovirus D
cuucucggaccaa

SEQ ID NO: 109658 - RNA, 13 nt, Human adenovirus D
cuucuccagaauc

SEQ ID NO: 109659 - RNA, 12 nt, Human adenovirus D
cuucucaagacc

SEQ ID NO: 109660 - RNA, 17 nt, Human adenovirus D
cuucuggcacauacaaa

SEQ ID NO: 109661 - RNA, 16 nt, Human adenovirus D
cuucugucucuucaac

SEQ ID NO: 109662 - RNA, 17 nt, Human adenovirus D
cuugaaacgucccagga

SEQ ID NO: 109663 - RNA, 18 nt, Human adenovirus D
cuugaacuaccaccugca

SEQ ID NO: 109664 - RNA, 17 nt, Human adenovirus D
cuugaacucggggauca

SEQ ID NO: 109665 - RNA, 16 nt, Human adenovirus D
cugaccacgguggugc

SEQ ID NO: 109666 - RNA, 22 nt, Human adenovirus D
cuccgagcagcgcauccugcaa

SEQ ID NO: 109667 - RNA, 17 nt, Human adenovirus D
cucuucgcagaaccaug

SEQ ID NO: 109668 - RNA, 19 nt, Human adenovirus D
cucuucgcagaaccaugaa

SEQ ID NO: 109669 - RNA, 14 nt, Human adenovirus D
cuccuccccaugaa

SEQ ID NO: 109670 - RNA, 12 nt, Human adenovirus D
cuccucaaggga

SEQ ID NO: 109671 - RNA, 19 nt, Human adenovirus D
cucuucugucucuucaaca

SEQ ID NO: 109672 - RNA, 17 nt, Human adenovirus D
cugaaguuccuccucaa

SEQ ID NO: 109673 - RNA, 20 nt, Human adenovirus D
cugaaguuccuccucaaggg

SEQ ID NO: 109674 - RNA, 18 nt, Human adenovirus D
cuggccucgggcauuaac

SEQ ID NO: 109675 - RNA, 17 nt, Human adenovirus D
cuggcuuuacccugcuc

SEQ ID NO: 109676 - RNA, 16 nt, Human adenovirus D
cuggcucccugcagug

SEQ ID NO: 109677 - RNA, 14 nt, Human adenovirus D
cuggcugaugugau

SEQ ID NO: 109678 - RNA, 16 nt, Human adenovirus D
cugggugaugcuucaa

SEQ ID NO: 109679 - RNA, 21 nt, Human adenovirus D
cuggggcaucucauaggugag

SEQ ID NO: 109680 - RNA, 20 nt, Human adenovirus D
cugccacuugaacucgggga

SEQ ID NO: 109681 - RNA, 23 nt, Human adenovirus D
cuggaacgagaucggcaccagcc

SEQ ID NO: 109682 - RNA, 15 nt, Human adenovirus D
cugcaucucaagcac

SEQ ID NO: 109683 - RNA, 19 nt, Human adenovirus D
cugcauacaaaugcuucaa

SEQ ID NO: 109684 - RNA, 20 nt, Human adenovirus D
cugcauguggcuagacuuca

SEQ ID NO: 109685 - RNA, 18 nt, Human adenovirus D
cugauuacucuaaaugca

SEQ ID NO: 109686 - RNA, 15 nt, Human adenovirus D
cugaucaacaucccc

SEQ ID NO: 109687 - RNA, 21 nt, Human adenovirus D
cauguacggaggagccaagaa

SEQ ID NO: 109688 - RNA, 15 nt, Human adenovirus D
caugguagcaaugga

SEQ ID NO: 109689 - RNA, 13 nt, Human adenovirus D
caugggcaccugg

SEQ ID NO: 109690 - RNA, 14 nt, Human adenovirus D
cauggccugugcaa

SEQ ID NO: 109691 - RNA, 17 nt, Human adenovirus D
cauggccugugcaaugu

SEQ ID NO: 109692 - RNA, 19 nt, Human adenovirus D
cauggccugugcaauguca

SEQ ID NO: 109693 - RNA, 21 nt, Human adenovirus D
caugcaaugcguggacacggc

SEQ ID NO: 109694 - RNA, 14 nt, Human adenovirus D
caugcacuggagua

SEQ ID NO: 109695 - RNA, 17 nt, Human adenovirus D
cauugguugaacccaga

SEQ ID NO: 109696 - RNA, 15 nt, Human adenovirus D
cauugccacuguuca

SEQ ID NO: 109697 - RNA, 17 nt, Human adenovirus D
caucgacuggugcugcg

SEQ ID NO: 109698 - RNA, 19 nt, Human adenovirus D
caugaaggcuuucacagcu

SEQ ID NO: 109699 - RNA, 20 nt, Human adenovirus D
caugaaggcuuucacagcuu

SEQ ID NO: 109700 - RNA, 21 nt, Human adenovirus D
cauccaagcgggccucacagu

SEQ ID NO: 109701 - RNA, 22 nt, Human adenovirus D
cauccaagcgggccucacaguc

SEQ ID NO: 109702 - RNA, 19 nt, Human adenovirus D
cauccccuggcucccugca

SEQ ID NO: 109703 - RNA, 15 nt, Human adenovirus D
cauccccuguugccc

SEQ ID NO: 109704 - RNA, 18 nt, Human adenovirus D
cauccucuucugucucuu

SEQ ID NO: 109705 - RNA, 13 nt, Human adenovirus D
caggagaugagca

SEQ ID NO: 109706 - RNA, 20 nt, Human adenovirus D
caucaaaugcgagcauacau

SEQ ID NO: 109707 - RNA, 23 nt, Human adenovirus D
caucaaaugcgagcauacaugcc

SEQ ID NO: 109708 - RNA, 13 nt, Human adenovirus D
caucacauucaaa

SEQ ID NO: 109709 - RNA, 19 nt, Human adenovirus D
caucaccacaggcaaugag

SEQ ID NO: 109710 - RNA, 13 nt, Human adenovirus D
caucauccauauc

SEQ ID NO: 109711 - RNA, 18 nt, Human adenovirus D
cauuuuugaagucaugug

SEQ ID NO: 109712 - RNA, 23 nt, Human adenovirus D
ccacaccuugaaagggaugucaa

SEQ ID NO: 109713 - RNA, 14 nt, Human adenovirus D
ccaguuccaucauc

SEQ ID NO: 109714 - RNA, 16 nt, Human adenovirus D
ccagucagacccagug

SEQ ID NO: 109715 - RNA, 16 nt, Human adenovirus D
ccaugcagacucugcu

SEQ ID NO: 109716 - RNA, 20 nt, Human adenovirus D
ccaugcccucgcuacugcug

SEQ ID NO: 109717 - RNA, 21 nt, Human adenovirus D
ccaugcccucgcuacugcuga

SEQ ID NO: 109718 - RNA, 11 nt, Human adenovirus D
ccaugcugcgc

SEQ ID NO: 109719 - RNA, 16 nt, Human adenovirus D
ccaugguagcaaugga

SEQ ID NO: 109720 - RNA, 17 nt, Human adenovirus D
ccacgcuuuaucacuca

SEQ ID NO: 109721 - RNA, 16 nt, Human adenovirus D
ccacgaucugaugaug

SEQ ID NO: 109722 - RNA, 17 nt, Human adenovirus D
ccacgaucugaugauga

SEQ ID NO: 109723 - RNA, 21 nt, Human adenovirus D
ccagcaaauuccucgaccaug

SEQ ID NO: 109724 - RNA, 19 nt, Human adenovirus D
ccagauugcaaguacauag

SEQ ID NO: 109725 - RNA, 16 nt, Human adenovirus D
ccagaucacaugguau

SEQ ID NO: 109726 - RNA, 15 nt, Human adenovirus D
ccacuguucaucccc

SEQ ID NO: 109727 - RNA, 18 nt, Human adenovirus D
ccagcagaagcagaaguu

SEQ ID NO: 109728 - RNA, 22 nt, Human adenovirus D
ccagcgcuuccccugguaccgc

SEQ ID NO: 109729 - RNA, 11 nt, Human adenovirus D
cgaccaugacc

SEQ ID NO: 109730 - RNA, 17 nt, Human adenovirus D
cgacccacgaugugacc

SEQ ID NO: 109731 - RNA, 21 nt, Human adenovirus D
cgagaccggaggcgugcacug

SEQ ID NO: 109732 - RNA, 14 nt, Human adenovirus D
cgacuggugcugcg

SEQ ID NO: 109733 - RNA, 17 nt, Human adenovirus D
cgagcucguaggugauc

SEQ ID NO: 109734 - RNA, 23 nt, Human adenovirus D
cgagcucguaggugaucuuugcc

SEQ ID NO: 109735 - RNA, 23 nt, Human adenovirus D
cgagcugacggccagucugauga

SEQ ID NO: 109736 - RNA, 19 nt, Human adenovirus D
cgaguacgaggccaugcug

SEQ ID NO: 109737 - RNA, 20 nt, Human adenovirus D
cgaguacgaggccaugcugc

SEQ ID NO: 109738 - RNA, 14 nt, Human adenovirus D
cgaucugaugauga

SEQ ID NO: 109739 - RNA, 14 nt, Human adenovirus D
cgaugcuguuugcc

SEQ ID NO: 109740 - RNA, 14 nt, Human adenovirus D
cgauguaacaucac

SEQ ID NO: 109741 - RNA, 16 nt, Human adenovirus D
ccuuuccccaccuacu

SEQ ID NO: 109742 - RNA, 14 nt, Human adenovirus D
ccuggcugauguga

SEQ ID NO: 109743 - RNA, 22 nt, Human adenovirus D
ccuggugggggguguacuguca

SEQ ID NO: 109744 - RNA, 21 nt, Human adenovirus D
ccuggucaucaccuuccugca

SEQ ID NO: 109745 - RNA, 20 nt, Human adenovirus D
ccuugaacuaccaccugcaa

SEQ ID NO: 109746 - RNA, 15 nt, Human adenovirus D
ccgggcuuucuugcc

SEQ ID NO: 109747 - RNA, 12 nt, Human adenovirus D
ccgccaugacag

SEQ ID NO: 109748 - RNA, 21 nt, Human adenovirus D
ccgcaggagggguauaugcug

SEQ ID NO: 109749 - RNA, 16 nt, Human adenovirus D
ccgagaugaaagccug

SEQ ID NO: 109750 - RNA, 16 nt, Human adenovirus D
ccucacgcuugccagu

SEQ ID NO: 109751 - RNA, 16 nt, Human adenovirus D
ccucucagaugucaaa

SEQ ID NO: 109752 - RNA, 15 nt, Human adenovirus D
ccucggcgagcucgu

SEQ ID NO: 109753 - RNA, 12 nt, Human adenovirus D
ccugaugcagga

SEQ ID NO: 109754 - RNA, 22 nt, Human adenovirus D
ccugaacuaucaaaacgaccac

SEQ ID NO: 109755 - RNA, 21 nt, Human adenovirus D
ccucugugcccaguuccauca

SEQ ID NO: 109756 - RNA, 16 nt, Human adenovirus D
ccguguacacugugaa

SEQ ID NO: 109757 - RNA, 21 nt, Human adenovirus D
ccgugucccccugaucuguca

SEQ ID NO: 109758 - RNA, 17 nt, Human adenovirus D
ccguagaaaucaaguac

SEQ ID NO: 109759 - RNA, 23 nt, Human adenovirus D
ucuucccucucagaugucaaaga

SEQ ID NO: 109760 - RNA, 19 nt, Human adenovirus D
ucuuccuauuuaacauccu

SEQ ID NO: 109761 - RNA, 22 nt, Human adenovirus D
ucuuccuauuuaacauccucuu

SEQ ID NO: 109762 - RNA, 18 nt, Human adenovirus D
ucugucucuucaacaucu

SEQ ID NO: 109763 - RNA, 16 nt, Human adenovirus D
ucugccuggucaaaca

SEQ ID NO: 109764 - RNA, 17 nt, Human adenovirus D
ucugccuggucaaacag

SEQ ID NO: 109765 - RNA, 18 nt, Human adenovirus D
ucugcagacaucaugaac

SEQ ID NO: 109766 - RNA, 19 nt, Human adenovirus D
ucugcagcauugucugccu

SEQ ID NO: 109767 - RNA, 21 nt, Human adenovirus D
ucugcagggcgcccagcaugu

SEQ ID NO: 109768 - RNA, 17 nt, Human adenovirus D
ucugcucauacugcuau

SEQ ID NO: 109769 - RNA, 13 nt, Human adenovirus D
ucucagaugucaa

SEQ ID NO: 109770 - RNA, 13 nt, Human adenovirus D
ucucaacaucaca

SEQ ID NO: 109771 - RNA, 18 nt, Human adenovirus D
ucuacuaaccaugcuuuc

SEQ ID NO: 109772 - RNA, 16 nt, Human adenovirus D
ucguccgggaaaaccu

SEQ ID NO: 109773 - RNA, 15 nt, Human adenovirus D
ucgcgcugguguaaa

SEQ ID NO: 109774 - RNA, 21 nt, Human adenovirus D
ugaaacgucccaggaaacuag

SEQ ID NO: 109775 - RNA, 23 nt, Human adenovirus D
ugaaaucugaaaguaugucucug

SEQ ID NO: 109776 - RNA, 17 nt, Human adenovirus D
ucuucgcccgaccgcug

SEQ ID NO: 109777 - RNA, 20 nt, Human adenovirus D
ucuugagaagggaguagaua

SEQ ID NO: 109778 - RNA, 17 nt, Human adenovirus D
ucuugucgcugaucuga

SEQ ID NO: 109779 - RNA, 17 nt, Human adenovirus D
ugaaggcuuucacagcu

SEQ ID NO: 109780 - RNA, 16 nt, Human adenovirus D
ugaagucaugugugau

SEQ ID NO: 109781 - RNA, 17 nt, Human adenovirus D
ugaagucaugugugaua

SEQ ID NO: 109782 - RNA, 18 nt, Human adenovirus D
ugaagucaugugugauau

SEQ ID NO: 109783 - RNA, 22 nt, Human adenovirus D
ugaagucaugugugauaucaca

SEQ ID NO: 109784 - RNA, 15 nt, Human adenovirus D
ugaaguuccuccuca

SEQ ID NO: 109785 - RNA, 16 nt, Human adenovirus D
ugaaguuccuccucaa

SEQ ID NO: 109786 - RNA, 16 nt, Human adenovirus D
ugacauggguggggau

SEQ ID NO: 109787 - RNA, 17 nt, Human adenovirus D
ucauggccugugcaaug

SEQ ID NO: 109788 - RNA, 19 nt, Human adenovirus D
ucauggccugugcaauguc

SEQ ID NO: 109789 - RNA, 20 nt, Human adenovirus D
ucauggcccugacgacccgc

SEQ ID NO: 109790 - RNA, 22 nt, Human adenovirus D
ucaugugugauaucacacugca

SEQ ID NO: 109791 - RNA, 17 nt, Human adenovirus D
ucauuggaacuaaucau

SEQ ID NO: 109792 - RNA, 22 nt, Human adenovirus D
ucagccucuccguccucgagga

SEQ ID NO: 109793 - RNA, 19 nt, Human adenovirus D
ucagucacucucauuucag

SEQ ID NO: 109794 - RNA, 21 nt, Human adenovirus D
ucaucauagucccgaauacag

SEQ ID NO: 109795 - RNA, 12 nt, Human adenovirus D
ucauacugcuau

SEQ ID NO: 109796 - RNA, 22 nt, Human adenovirus D
ucauaggugaggcgaugcuguu

SEQ ID NO: 109797 - RNA, 23 nt, Human adenovirus D
uccccuggcucccugcagugucg

SEQ ID NO: 109798 - RNA, 20 nt, Human adenovirus D
uccccugguaccgccagauu

SEQ ID NO: 109799 - RNA, 17 nt, Human adenovirus D
uccccuguugcccgauu

SEQ ID NO: 109800 - RNA, 17 nt, Human adenovirus D
uccaaccuggaccggcu

SEQ ID NO: 109801 - RNA, 15 nt, Human adenovirus D
uccaacggcaaacag

SEQ ID NO: 109802 - RNA, 21 nt, Human adenovirus D
uccagaucacaugguaugaua

SEQ ID NO: 109803 - RNA, 17 nt, Human adenovirus D
ucaauaauggaagcauu

SEQ ID NO: 109804 - RNA, 13 nt, Human adenovirus D
ucacacugcaugu

SEQ ID NO: 109805 - RNA, 14 nt, Human adenovirus D
ucacacuuaguuca

SEQ ID NO: 109806 - RNA, 13 nt, Human adenovirus D
ucagcaaguucau

SEQ ID NO: 109807 - RNA, 14 nt, Human adenovirus D
ucacugacugauca

SEQ ID NO: 109808 - RNA, 18 nt, Human adenovirus D
ucagauauuccagaucac

SEQ ID NO: 109809 - RNA, 23 nt, Human adenovirus D
ucacuagaggugguaaaauuaca

SEQ ID NO: 109810 - RNA, 14 nt, Human adenovirus D
ucacaugguaugau

SEQ ID NO: 109811 - RNA, 18 nt, Human adenovirus D
uauuccagaucacauggu

SEQ ID NO: 109812 - RNA, 17 nt, Human adenovirus D
uauuccagcaugcaguu

SEQ ID NO: 109813 - RNA, 18 nt, Human adenovirus D
ucaaaugcgagcauacau

SEQ ID NO: 109814 - RNA, 21 nt, Human adenovirus D
ucaaauucauuuuugaaguca

SEQ ID NO: 109815 - RNA, 16 nt, Human adenovirus D
ucaacagcugugcuaa

SEQ ID NO: 109816 - RNA, 14 nt, Human adenovirus D
ucaacaucugugcu

SEQ ID NO: 109817 - RNA, 17 nt, Human adenovirus D
ucaacaucugugcugcc

SEQ ID NO: 109818 - RNA, 22 nt, Human adenovirus D
ucaacauccaccagugcaagaa

SEQ ID NO: 109819 - RNA, 18 nt, Human adenovirus D
gugacgcaugcaaggugu

SEQ ID NO: 109820 - RNA, 15 nt, Human adenovirus D
gugggggguguacug

SEQ ID NO: 109821 - RNA, 15 nt, Human adenovirus D
guggcuagacuucau

SEQ ID NO: 109822 - RNA, 19 nt, Human adenovirus D
gugguaaaauuacauugaa

SEQ ID NO: 109823 - RNA, 24 nt, Human adenovirus D
gugugguucaggagagucauuuac

SEQ ID NO: 109824 - RNA, 17 nt, Human adenovirus D
guuacuguaaagccaca

SEQ ID NO: 109825 - RNA, 22 nt, Human adenovirus D
gucucggggaaggucucgcucc

SEQ ID NO: 109826 - RNA, 18 nt, Human adenovirus D
gucugccuggucaucacc

SEQ ID NO: 109827 - RNA, 15 nt, Human adenovirus D
gugaacaaaacccau

SEQ ID NO: 109828 - RNA, 19 nt, Human adenovirus D
guacaguuaagaauccaca

SEQ ID NO: 109829 - RNA, 15 nt, Human adenovirus D
guacacgguucucuc

SEQ ID NO: 109830 - RNA, 22 nt, Human adenovirus D
guacaaggcgcgcuucacucug

SEQ ID NO: 109831 - RNA, 20 nt, Human adenovirus D
guccucugaaaagucaucca

SEQ ID NO: 109832 - RNA, 23 nt, Human adenovirus D
guccucugaaaagucauccaagc

SEQ ID NO: 109833 - RNA, 17 nt, Human adenovirus D
guccuuuagacaacagc

SEQ ID NO: 109834 - RNA, 12 nt, Human adenovirus D
uaaaaagaugua

SEQ ID NO: 109835 - RNA, 19 nt, Human adenovirus D
uaaaaaauuaaccuauaaa

SEQ ID NO: 109836 - RNA, 18 nt, Human adenovirus D
uaacaucaccacaggcaa

SEQ ID NO: 109837 - RNA, 20 nt, Human adenovirus D
uaaagggagagcuuaacuug

SEQ ID NO: 109838 - RNA, 16 nt, Human adenovirus D
guuugggcacuggggu

SEQ ID NO: 109839 - RNA, 21 nt, Human adenovirus D
guuucuagguccggugucaga

SEQ ID NO: 109840 - RNA, 21 nt, Human adenovirus D
guuuuucagacucucaucucu

SEQ ID NO: 109841 - RNA, 13 nt, Human adenovirus D
guuggaugacuga

SEQ ID NO: 109842 - RNA, 18 nt, Human adenovirus D
guugggcaauauaggaga

SEQ ID NO: 109843 - RNA, 16 nt, Human adenovirus D
guugcgguacugguac

SEQ ID NO: 109844 - RNA, 17 nt, Human adenovirus D
uaggccgcuacaacagc

SEQ ID NO: 109845 - RNA, 17 nt, Human adenovirus D
uagucaggcaggauuca

SEQ ID NO: 109846 - RNA, 17 nt, Human adenovirus D
uagucaucacccagcag

SEQ ID NO: 109847 - RNA, 23 nt, Human adenovirus D
uagucaaucucccaccaccagcc

SEQ ID NO: 109848 - RNA, 18 nt, Human adenovirus D
uaguuguaaugaucaaaa

SEQ ID NO: 109849 - RNA, 21 nt, Human adenovirus D
uauaaaaacaacaaaaccaca

SEQ ID NO: 109850 - RNA, 22 nt, Human adenovirus D
uacuucuggcacauacaaagcu

SEQ ID NO: 109851 - RNA, 14 nt, Human adenovirus D
uagacaaggcagca

SEQ ID NO: 109852 - RNA, 13 nt, Human adenovirus D
uaaccaugcuuuc

SEQ ID NO: 109853 - RNA, 13 nt, Human adenovirus D
uacaaaugcuuca

SEQ ID NO: 109854 - RNA, 15 nt, Human adenovirus D
uacaaaugcuucaau

SEQ ID NO: 109855 - RNA, 16 nt, Human adenovirus D
uaccgccagauuguaa

SEQ ID NO: 109856 - RNA, 17 nt, Human adenovirus D
uacuauuacugccacug

SEQ ID NO: 109857 - RNA, 18 nt, Human adenovirus D
aacaaucagccccuuccc

SEQ ID NO: 109858 - RNA, 13 nt, Human adenovirus D
uaccacauugugg

SEQ ID NO: 109859 - RNA, 14 nt, Human adenovirus D
uaccacgcuuuauc

SEQ ID NO: 109860 - RNA, 20 nt, Human adenovirus D
uacacgggguugcagcacug

SEQ ID NO: 109861 - RNA, 20 nt, Human adenovirus D
uaccaugggaaaugcauggg

SEQ ID NO: 109862 - RNA, 16 nt, Human adenovirus D
ugcagacucugcucau

SEQ ID NO: 109863 - RNA, 23 nt, Human adenovirus D
ugcagacucugcucauacugcua

SEQ ID NO: 109864 - RNA, 14 nt, Human adenovirus D
ugcauccacugcuc

SEQ ID NO: 109865 - RNA, 19 nt, Human adenovirus D
ugacggccagucugaugaa

SEQ ID NO: 109866 - RNA, 16 nt, Human adenovirus D
ugcgccauugucaaca

SEQ ID NO: 109867 - RNA, 23 nt, Human adenovirus D
ugccgcagugggcguacaugcac

SEQ ID NO: 109868 - RNA, 15 nt, Human adenovirus D
ugccaacauuacuuc

SEQ ID NO: 109869 - RNA, 22 nt, Human adenovirus D
uggacuugguaagagcucagau

SEQ ID NO: 109870 - RNA, 23 nt, Human adenovirus D
ugcuuuucugcagacaucaugaa

SEQ ID NO: 109871 - RNA, 15 nt, Human adenovirus D
ugcucauacugcuau

SEQ ID NO: 109872 - RNA, 19 nt, Human adenovirus D
ugcgcuuagucauguguaa

SEQ ID NO: 109873 - RNA, 19 nt, Human adenovirus D
uguaaagccacaaccagag

SEQ ID NO: 109874 - RNA, 22 nt, Human adenovirus D
uguaaagccacaaccagagcca

SEQ ID NO: 109875 - RNA, 15 nt, Human adenovirus D
uguacugucaugcca

SEQ ID NO: 109876 - RNA, 15 nt, Human adenovirus D
ugggcacuggggucu

SEQ ID NO: 109877 - RNA, 19 nt, Human adenovirus D
ugggugaugacuauggggu

SEQ ID NO: 109878 - RNA, 16 nt, Human adenovirus D
uggcccccuaccaagg

SEQ ID NO: 109879 - RNA, 17 nt, Human adenovirus D
uggcccccuaccaagga

SEQ ID NO: 109880 - RNA, 14 nt, Human adenovirus D
uggcccaggacuua

SEQ ID NO: 109881 - RNA, 20 nt, Human adenovirus D
uggccucgagcuacaugccc

SEQ ID NO: 109882 - RNA, 19 nt, Human adenovirus D
ugggauaggggaaggggcu

SEQ ID NO: 109883 - RNA, 14 nt, Human adenovirus D
ugggaggcugcgau

SEQ ID NO: 109884 - RNA, 21 nt, Human adenovirus D
ugucaaauuccugguccacaa

SEQ ID NO: 109885 - RNA, 21 nt, Human adenovirus D
ugucucagccucgaacagucc

SEQ ID NO: 109886 - RNA, 22 nt, Human adenovirus D
uuaaggcucauaugaccaugca

SEQ ID NO: 109887 - RNA, 18 nt, Human adenovirus D
uuauuccauacaaauuca

SEQ ID NO: 109888 - RNA, 12 nt, Human adenovirus D
uuagucaugugu

SEQ ID NO: 109889 - RNA, 14 nt, Human adenovirus D
uuagucauguguaa

SEQ ID NO: 109890 - RNA, 13 nt, Human adenovirus D
uuacauugaaugg

SEQ ID NO: 109891 - RNA, 19 nt, Human adenovirus D
uuaaucaacaucaguucau

SEQ ID NO: 109892 - RNA, 16 nt, Human adenovirus D
uuaccacgaucugaug

SEQ ID NO: 109893 - RNA, 18 nt, Human adenovirus D
uuaccacgaucugaugau

SEQ ID NO: 109894 - RNA, 20 nt, Human adenovirus D
uuaccacgaucugaugauga

SEQ ID NO: 109895 - RNA, 17 nt, Human adenovirus D
uuccucgaccaugaccu

SEQ ID NO: 109896 - RNA, 17 nt, Human adenovirus D
uucugcuggcagaagua

SEQ ID NO: 109897 - RNA, 14 nt, Human adenovirus D
uucuuagacugcua

SEQ ID NO: 109898 - RNA, 15 nt, Human adenovirus D
uucuuagacugcuau

SEQ ID NO: 109899 - RNA, 21 nt, Human adenovirus D
uucuguugcauguucuugcau

SEQ ID NO: 109900 - RNA, 20 nt, Human adenovirus D
uucuguccguggauuaccau

SEQ ID NO: 109901 - RNA, 22 nt, Human adenovirus D
uucucuucgcagaaccaugaau

SEQ ID NO: 109902 - RNA, 11 nt, Human adenovirus D
uuccagaucac

SEQ ID NO: 109903 - RNA, 19 nt, Human adenovirus D
uuccagcagaagguggugg

SEQ ID NO: 109904 - RNA, 21 nt, Human adenovirus D
uucacaguguacacgguucuc

SEQ ID NO: 109905 - RNA, 19 nt, Human adenovirus D
uucaauuggagcagugucu

SEQ ID NO: 109906 - RNA, 17 nt, Human adenovirus D
uucaguuggaugacuga

SEQ ID NO: 109907 - RNA, 14 nt, Human adenovirus D
uucauaccaucaau

SEQ ID NO: 109908 - RNA, 17 nt, Human adenovirus D
uucauaccaucaaugcu

SEQ ID NO: 109909 - RNA, 18 nt, Human adenovirus D
aaugggacuuauccacaa

SEQ ID NO: 109910 - RNA, 13 nt, Human adenovirus D
aauggaauguuac

SEQ ID NO: 109911 - RNA, 19 nt, Human adenovirus D
aauggaauguuacugcaua

SEQ ID NO: 109912 - RNA, 18 nt, Human adenovirus D
aaugcuucaauaauggaa

SEQ ID NO: 109913 - RNA, 13 nt, Human adenovirus D
aaugcuacauggu

SEQ ID NO: 109914 - RNA, 20 nt, Human adenovirus D
aaugcuacauggugggcuaa

SEQ ID NO: 109915 - RNA, 17 nt, Human adenovirus D
aaugcgagcauacaugc

SEQ ID NO: 109916 - RNA, 17 nt, Human adenovirus D
aaugauagacaaggcag

SEQ ID NO: 109917 - RNA, 23 nt, Human adenovirus D
aaugaucaaaacuuaacucugau

SEQ ID NO: 109918 - RNA, 17 nt, Human adenovirus D
aaucucccaccaccagc

SEQ ID NO: 109919 - RNA, 18 nt, Human adenovirus D
aaucucccaccaccagcc

SEQ ID NO: 109920 - RNA, 12 nt, Human adenovirus D
aauccacacagu

SEQ ID NO: 109921 - RNA, 13 nt, Human adenovirus D
aauccacacaguu

SEQ ID NO: 109922 - RNA, 23 nt, Human adenovirus D
aauuaucuuuuuauauguugaca

SEQ ID NO: 109923 - RNA, 15 nt, Human adenovirus D
aauuaaccuauaaaa

SEQ ID NO: 109924 - RNA, 13 nt, Human adenovirus D
aauguuacugcau

SEQ ID NO: 109925 - RNA, 16 nt, Human adenovirus D
aauguuacugcauaca

SEQ ID NO: 109926 - RNA, 14 nt, Human adenovirus D
aauguuaaugucac

SEQ ID NO: 109927 - RNA, 14 nt, Human adenovirus D
aaguuccuccucaa

SEQ ID NO: 109928 - RNA, 14 nt, Human adenovirus D
aauaccgggaugau

SEQ ID NO: 109929 - RNA, 17 nt, Human adenovirus D
aauaccgggaugaugac

SEQ ID NO: 109930 - RNA, 17 nt, Human adenovirus D
aauauccccuuccucac

SEQ ID NO: 109931 - RNA, 18 nt, Human adenovirus D
aauauguguauguuaaua

SEQ ID NO: 109932 - RNA, 17 nt, Human adenovirus D
aauaugggagagaacaa

SEQ ID NO: 109933 - RNA, 13 nt, Human adenovirus D
aagccguccucug

SEQ ID NO: 109934 - RNA, 17 nt, Human adenovirus D
aagaagaccacccgugu

SEQ ID NO: 109935 - RNA, 20 nt, Human adenovirus D
aaguucaccugcaugguggg

SEQ ID NO: 109936 - RNA, 19 nt, Human adenovirus D
aaguuagagacaugcucaa

SEQ ID NO: 109937 - RNA, 15 nt, Human adenovirus D
aagucacaguuauac

SEQ ID NO: 109938 - RNA, 21 nt, Human adenovirus D
aagggacgcgcuguguaucuc

SEQ ID NO: 109939 - RNA, 20 nt, Human adenovirus D
aaguacauagugaccaagac

SEQ ID NO: 109940 - RNA, 20 nt, Human adenovirus D
aaguaccaucugcaucucaa

SEQ ID NO: 109941 - RNA, 17 nt, Human adenovirus D
aaccgagauucaaucca

SEQ ID NO: 109942 - RNA, 22 nt, Human adenovirus D
aacccauugguugaacccagau

SEQ ID NO: 109943 - RNA, 15 nt, Human adenovirus D
aaccccgucuacccc

SEQ ID NO: 109944 - RNA, 14 nt, Human adenovirus D
aacccagaugagga

SEQ ID NO: 109945 - RNA, 18 nt, Human adenovirus D
aaccaugaauacagugau

SEQ ID NO: 109946 - RNA, 14 nt, Human adenovirus D
aaccacauuugaag

SEQ ID NO: 109947 - RNA, 11 nt, Human adenovirus D
aacauuacuuc

SEQ ID NO: 109948 - RNA, 22 nt, Human adenovirus D
aacauuacuucuggcacauaca

SEQ ID NO: 109949 - RNA, 15 nt, Human adenovirus D
aagaacauacauggg

SEQ ID NO: 109950 - RNA, 12 nt, Human adenovirus D
aagaacaugcaa

SEQ ID NO: 109951 - RNA, 21 nt, Human adenovirus D
aacuacauggacaagauauca

SEQ ID NO: 109952 - RNA, 15 nt, Human adenovirus D
aacuaccacgcuuua

SEQ ID NO: 109953 - RNA, 17 nt, Human adenovirus D
aacuaccacgcuuuauc

SEQ ID NO: 109954 - RNA, 22 nt, Human adenovirus D
aacuacacggucacuguccaug

SEQ ID NO: 109955 - RNA, 23 nt, Human adenovirus D
aaccuccaaguuagagacaugcu

SEQ ID NO: 109956 - RNA, 18 nt, Human adenovirus D
aaccuuuggaccugagcu

SEQ ID NO: 109957 - RNA, 20 nt, Human adenovirus D
uucuugccggcgacaagcug

SEQ ID NO: 109958 - RNA, 13 nt, Human adenovirus D
uuuagacaacagc

SEQ ID NO: 109959 - RNA, 19 nt, Human adenovirus D
uuuagugggaccucagaua

SEQ ID NO: 109960 - RNA, 19 nt, Human adenovirus D
uuugaagucaugugugaua

SEQ ID NO: 109961 - RNA, 14 nt, Human adenovirus D
uuugaacacgcugc

SEQ ID NO: 109962 - RNA, 19 nt, Human adenovirus D
uuugccuguuugaccaggc

SEQ ID NO: 109963 - RNA, 17 nt, Human adenovirus D
uuucccucacgcuugcc

SEQ ID NO: 109964 - RNA, 14 nt, Human adenovirus D
uuucuuagacugcu

SEQ ID NO: 109965 - RNA, 15 nt, Human adenovirus D
uuucuuagacugcua

SEQ ID NO: 109966 - RNA, 15 nt, Human adenovirus D
uuugugaucauggcc

SEQ ID NO: 109967 - RNA, 18 nt, Human adenovirus D
uuugugaauggaauguua

SEQ ID NO: 109968 - RNA, 21 nt, Human adenovirus D
uuggcucgucaggaaacugug

SEQ ID NO: 109969 - RNA, 17 nt, Human adenovirus D
uuuggcucgucaggaaa

SEQ ID NO: 109970 - RNA, 19 nt, Human adenovirus D
uuuugugaucauggccugu

SEQ ID NO: 109971 - RNA, 19 nt, Human adenovirus D
uuauaugugacgcaugcaa

SEQ ID NO: 109972 - RNA, 19 nt, Human adenovirus D
uuagcauagucacacuuag

SEQ ID NO: 109973 - RNA, 13 nt, Human adenovirus D
uuagaugcagcaa

SEQ ID NO: 109974 - RNA, 13 nt, Human adenovirus D
uuagacugcuauc

SEQ ID NO: 109975 - RNA, 13 nt, Human adenovirus D
uuaugacucaugg

SEQ ID NO: 109976 - RNA, 13 nt, Human adenovirus D
uuaucccaugccc

SEQ ID NO: 109977 - RNA, 22 nt, Human adenovirus D
uuauuaaaugauuaguuccaau

SEQ ID NO: 109978 - RNA, 21 nt, Human adenovirus D
uuauugauuuuuacaccagcg

SEQ ID NO: 109979 - RNA, 17 nt, Human adenovirus D
uuaagaauccacagauc

SEQ ID NO: 109980 - RNA, 21 nt, Human adenovirus D
uuaacggggugguggacaucg

SEQ ID NO: 109981 - RNA, 15 nt, Human adenovirus D
ugugugauaucacac

SEQ ID NO: 109982 - RNA, 21 nt, Human adenovirus D
ugugguucaggagagucauuu

SEQ ID NO: 109983 - RNA, 20 nt, Human adenovirus D
uguggcuagacuucauggcu

SEQ ID NO: 109984 - RNA, 13 nt, Human adenovirus D
uuaaugucacuag

SEQ ID NO: 109985 - RNA, 19 nt, Human adenovirus D
uucaacaucugugcugccu

SEQ ID NO: 109986 - RNA, 12 nt, Human adenovirus D
uucaaauucaac

SEQ ID NO: 109987 - RNA, 15 nt, Human adenovirus D
uuccagaucacaugg

SEQ ID NO: 109988 - RNA, 19 nt, Human adenovirus D
uucucuucgcagaaccaug

SEQ ID NO: 109989 - RNA, 23 nt, Human adenovirus D
uugcucacgccgaauggggucau

SEQ ID NO: 109990 - RNA, 17 nt, Human adenovirus D
uugcccugcucaccugc

SEQ ID NO: 109991 - RNA, 19 nt, Human adenovirus D
uucugcuggggcaucucau

SEQ ID NO: 109992 - RNA, 15 nt, Human adenovirus D
uucuggcacauacaa

SEQ ID NO: 109993 - RNA, 16 nt, Human adenovirus D
uucuggcacauacaaa

SEQ ID NO: 109994 - RNA, 14 nt, Human adenovirus D
uucugucucuucaa

SEQ ID NO: 109995 - RNA, 21 nt, Human adenovirus D
uggaacgagaucggcaccagc

SEQ ID NO: 109996 - RNA, 15 nt, Human adenovirus D
uggaagaugacuuca

SEQ ID NO: 109997 - RNA, 14 nt, Human adenovirus D
uggacagcucccaa

SEQ ID NO: 109998 - RNA, 20 nt, Human adenovirus D
uggaauguuacugcauacaa

SEQ ID NO: 109999 - RNA, 12 nt, Human adenovirus D
uggaaguacagu

SEQ ID NO: 110000 - RNA, 22 nt, Human adenovirus D
uggaacaccaucagacuggggu

SEQ ID NO: 110001 - RNA, 22 nt, Human adenovirus D
uggaccucgagauggacggcca

SEQ ID NO: 110002 - RNA, 13 nt, Human adenovirus D
uggaccugagcuu

SEQ ID NO: 110003 - RNA, 21 nt, Human adenovirus D
uggacaucgcgaaccaggcag

SEQ ID NO: 110004 - RNA, 17 nt, Human adenovirus D
uggacgggcgcccagug

SEQ ID NO: 110005 - RNA, 18 nt, Human adenovirus D
ugcugcuacaucucgggg

SEQ ID NO: 110006 - RNA, 16 nt, Human adenovirus D
ugcuucaacagcugug

SEQ ID NO: 110007 - RNA, 12 nt, Human adenovirus D
ugcuucaauaau

SEQ ID NO: 110008 - RNA, 10 nt, Human adenovirus D
ugcuuccagc

SEQ ID NO: 110009 - RNA, 22 nt, Human adenovirus D
ugcuucugcuggggcaucucau

SEQ ID NO: 110010 - RNA, 13 nt, Human adenovirus D
ugcucauacugcu

SEQ ID NO: 110011 - RNA, 14 nt, Human adenovirus D
ugcucauacugcua

SEQ ID NO: 110012 - RNA, 16 nt, Human adenovirus D
ugcaccugcgucugca

SEQ ID NO: 110013 - RNA, 12 nt, Human adenovirus D
ugcagcacugga

SEQ ID NO: 110014 - RNA, 18 nt, Human adenovirus D
ugugcuaagugugguuua

SEQ ID NO: 110015 - RNA, 21 nt, Human adenovirus D
uguccaugguagcaauggaaa

SEQ ID NO: 110016 - RNA, 19 nt, Human adenovirus D
ugucuggagcgggcuuaaa

SEQ ID NO: 110017 - RNA, 12 nt, Human adenovirus D
uguacacuguga

SEQ ID NO: 110018 - RNA, 18 nt, Human adenovirus D
uguacacgguucucucag

SEQ ID NO: 110019 - RNA, 14 nt, Human adenovirus D
uggucaaacaggca

SEQ ID NO: 110020 - RNA, 20 nt, Human adenovirus D
uggugacggacgugcgcgaa

SEQ ID NO: 110021 - RNA, 14 nt, Human adenovirus D
ugguaccgccagau

SEQ ID NO: 110022 - RNA, 13 nt, Human adenovirus D
ugguagcaaugga

SEQ ID NO: 110023 - RNA, 13 nt, Human adenovirus D
ugggaaaugcaug

SEQ ID NO: 110024 - RNA, 14 nt, Human adenovirus D
ugggaccucagaua

SEQ ID NO: 110025 - RNA, 17 nt, Human adenovirus D
uggccuggagcagauaa

SEQ ID NO: 110026 - RNA, 15 nt, Human adenovirus D
uggccugugcaaugu

SEQ ID NO: 110027 - RNA, 14 nt, Human adenovirus D
uggcuuuacccugc

SEQ ID NO: 110028 - RNA, 15 nt, Human adenovirus D
uggcuuuacccugcu

SEQ ID NO: 110029 - RNA, 16 nt, Human adenovirus D
uggcuuuugugaucau

SEQ ID NO: 110030 - RNA, 14 nt, Human adenovirus D
uggauccugcauug

SEQ ID NO: 110031 - RNA, 16 nt, Human adenovirus D
uggcauauucuuuauu

SEQ ID NO: 110032 - RNA, 18 nt, Human adenovirus D
uggccagcacguacuuug

SEQ ID NO: 110033 - RNA, 21 nt, Human adenovirus D
ugaaccuuuggaccugagcuu

SEQ ID NO: 110034 - RNA, 21 nt, Human adenovirus D
ugaagauucuggaaauuauga

SEQ ID NO: 110035 - RNA, 21 nt, Human adenovirus D
ugaaaugggcuggugguggga

SEQ ID NO: 110036 - RNA, 14 nt, Human adenovirus D
ugaacaaaacccau

SEQ ID NO: 110037 - RNA, 17 nt, Human adenovirus D
ugaacaaaacccaugaa

SEQ ID NO: 110038 - RNA, 21 nt, Human adenovirus D
ugacuacucgcgcugguguaa

SEQ ID NO: 110039 - RNA, 12 nt, Human adenovirus D
ugaauugucagc

SEQ ID NO: 110040 - RNA, 18 nt, Human adenovirus D
ugacaauaauugaacugc

SEQ ID NO: 110041 - RNA, 15 nt, Human adenovirus D
ugauaugcacaguag

SEQ ID NO: 110042 - RNA, 18 nt, Human adenovirus D
ugauaugcacaguaguca

SEQ ID NO: 110043 - RNA, 20 nt, Human adenovirus D
ugagcagaacuacacgguca

SEQ ID NO: 110044 - RNA, 19 nt, Human adenovirus D
ugagaugccccagcagaag

SEQ ID NO: 110045 - RNA, 14 nt, Human adenovirus D
ugagaggaguguga

SEQ ID NO: 110046 - RNA, 15 nt, Human adenovirus D
ugagaggagugugau

SEQ ID NO: 110047 - RNA, 23 nt, Human adenovirus D
ugauuaaagaaaaaacuaccacg

SEQ ID NO: 110048 - RNA, 21 nt, Human adenovirus D
ugcaaugucaggucugcuggu

SEQ ID NO: 110049 - RNA, 22 nt, Human adenovirus D
ucucucuucuuguaacuuuuag

SEQ ID NO: 110050 - RNA, 14 nt, Human adenovirus D
ucgcccagcaauaa

SEQ ID NO: 110051 - RNA, 14 nt, Human adenovirus D
ucgcccgacugucu

SEQ ID NO: 110052 - RNA, 20 nt, Human adenovirus D
ucgccgacgcgcgcaacuau

SEQ ID NO: 110053 - RNA, 18 nt, Human adenovirus D
ucgcaggagcaguggaug

SEQ ID NO: 110054 - RNA, 20 nt, Human adenovirus D
ucgcaggagcaguggaugca

SEQ ID NO: 110055 - RNA, 12 nt, Human adenovirus D
ucgcagaaccau

SEQ ID NO: 110056 - RNA, 18 nt, Human adenovirus D
ucuacgaggucaaccuca

SEQ ID NO: 110057 - RNA, 17 nt, Human adenovirus D
ucgcgcugguguaaaaa

SEQ ID NO: 110058 - RNA, 15 nt, Human adenovirus D
ucuucgcagaaccau

SEQ ID NO: 110059 - RNA, 22 nt, Human adenovirus D
ucuucgcccgaccgcugucuca

SEQ ID NO: 110060 - RNA, 13 nt, Human adenovirus D
ucuuagacugcua

SEQ ID NO: 110061 - RNA, 15 nt, Human adenovirus D
ucuuagacugcuauc

SEQ ID NO: 110062 - RNA, 13 nt, Human adenovirus D
ucaguucaugggg

SEQ ID NO: 110063 - RNA, 15 nt, Human adenovirus D
ucagcgcccucagca

SEQ ID NO: 110064 - RNA, 15 nt, Human adenovirus D
ucagcugcaaugauu

SEQ ID NO: 110065 - RNA, 20 nt, Human adenovirus D
ucaggcaggauucauaccau

SEQ ID NO: 110066 - RNA, 13 nt, Human adenovirus D
ucagaugucaaag

SEQ ID NO: 110067 - RNA, 20 nt, Human adenovirus D
ucagauauuccagaucacau

SEQ ID NO: 110068 - RNA, 17 nt, Human adenovirus D
ucagcagcaccucggua

SEQ ID NO: 110069 - RNA, 22 nt, Human adenovirus D
ucagacaugcugcuacaucucg

SEQ ID NO: 110070 - RNA, 19 nt, Human adenovirus D
ucacuguccaugguagcaa

SEQ ID NO: 110071 - RNA, 23 nt, Human adenovirus D
ucacuguccaugguagcaaugga

SEQ ID NO: 110072 - RNA, 21 nt, Human adenovirus D
ucacuuacuugaaaucugaaa

SEQ ID NO: 110073 - RNA, 23 nt, Human adenovirus D
ucaccuaugagaugccccagcag

SEQ ID NO: 110074 - RNA, 13 nt, Human adenovirus D
ucaccugcaccug

SEQ ID NO: 110075 - RNA, 17 nt, Human adenovirus D
ucaccacaggcaaugag

SEQ ID NO: 110076 - RNA, 18 nt, Human adenovirus D
ucaccacaggcaaugaga

SEQ ID NO: 110077 - RNA, 15 nt, Human adenovirus D
ucacugacugaucaa

SEQ ID NO: 110078 - RNA, 16 nt, Human adenovirus D
ucacaguuauaccacc

SEQ ID NO: 110079 - RNA, 15 nt, Human adenovirus D
uccaugguagcaaug

SEQ ID NO: 110080 - RNA, 17 nt, Human adenovirus D
uccaugguagcaaugga

SEQ ID NO: 110081 - RNA, 23 nt, Human adenovirus D
uccaugguagcaauggaaaucac

SEQ ID NO: 110082 - RNA, 14 nt, Human adenovirus D
uccauggccagggg

SEQ ID NO: 110083 - RNA, 15 nt, Human adenovirus D
uccagaucacauggu

SEQ ID NO: 110084 - RNA, 16 nt, Human adenovirus D
uccagaucacauggua

SEQ ID NO: 110085 - RNA, 15 nt, Human adenovirus D
ucauuuuugaaguca

SEQ ID NO: 110086 - RNA, 13 nt, Human adenovirus D
ucauacugcuauc

SEQ ID NO: 110087 - RNA, 21 nt, Human adenovirus D
ucauaugaccaugcagacucu

SEQ ID NO: 110088 - RNA, 22 nt, Human adenovirus D
ucauaugaccaugcagacucug

SEQ ID NO: 110089 - RNA, 15 nt, Human adenovirus D
uccucgaccaugacc

SEQ ID NO: 110090 - RNA, 16 nt, Human adenovirus D
uccucgaccaugaccu

SEQ ID NO: 110091 - RNA, 13 nt, Human adenovirus D
uccuccucaaggg

SEQ ID NO: 110092 - RNA, 22 nt, Human adenovirus D
uccucgaggagccccaggguga

SEQ ID NO: 110093 - RNA, 17 nt, Human adenovirus D
uccucgaugccaucaac

SEQ ID NO: 110094 - RNA, 15 nt, Human adenovirus D
uccuguuacuguaaa

SEQ ID NO: 110095 - RNA, 17 nt, Human adenovirus D
uccuuuagacaacagcc

SEQ ID NO: 110096 - RNA, 17 nt, Human adenovirus D
uccuugaacuaccaccu

SEQ ID NO: 110097 - RNA, 17 nt, Human adenovirus D
ucgagcuacaugcccag

SEQ ID NO: 110098 - RNA, 18 nt, Human adenovirus D
ucccaaauuacucgcaaa

SEQ ID NO: 110099 - RNA, 17 nt, Human adenovirus D
ucccucucagaugucaa

SEQ ID NO: 110100 - RNA, 14 nt, Human adenovirus D
ucccucacgcuugc

SEQ ID NO: 110101 - RNA, 13 nt, Human adenovirus D
uccuagugacuua

SEQ ID NO: 110102 - RNA, 14 nt, Human adenovirus D
uccuccccaugaac

SEQ ID NO: 110103 - RNA, 14 nt, Human adenovirus D
cugacugaucaaca

SEQ ID NO: 110104 - RNA, 17 nt, Human adenovirus D
cugaccacgguggugca

SEQ ID NO: 110105 - RNA, 17 nt, Human adenovirus D
cugauuagcauagucac

SEQ ID NO: 110106 - RNA, 22 nt, Human adenovirus D
cugaaugauagacaaggcagca

SEQ ID NO: 110107 - RNA, 17 nt, Human adenovirus D
cucuucgcccgaccgcu

SEQ ID NO: 110108 - RNA, 17 nt, Human adenovirus D
cucuucugucucuucaa

SEQ ID NO: 110109 - RNA, 12 nt, Human adenovirus D
cucucaacauca

SEQ ID NO: 110110 - RNA, 15 nt, Human adenovirus D
cucucagaugucaaa

SEQ ID NO: 110111 - RNA, 18 nt, Human adenovirus D
cucgucaggaaacugugu

SEQ ID NO: 110112 - RNA, 20 nt, Human adenovirus D
cuggugcugcgcgcgcuaca

SEQ ID NO: 110113 - RNA, 17 nt, Human adenovirus D
cuguaaagccacaacca

SEQ ID NO: 110114 - RNA, 21 nt, Human adenovirus D
cugggacgucucgaacuccuc

SEQ ID NO: 110115 - RNA, 19 nt, Human adenovirus D
cugggaggcugcgaugcaa

SEQ ID NO: 110116 - RNA, 14 nt, Human adenovirus D
cugggauaugaucc

SEQ ID NO: 110117 - RNA, 23 nt, Human adenovirus D
cuggcuccguuguacgacaccac

SEQ ID NO: 110118 - RNA, 23 nt, Human adenovirus D
cuggcucugaauugucagcugua

SEQ ID NO: 110119 - RNA, 15 nt, Human adenovirus D
cuggcugaugugaug

SEQ ID NO: 110120 - RNA, 22 nt, Human adenovirus D
cuggaaauuaugagcaucaaaa

SEQ ID NO: 110121 - RNA, 14 nt, Human adenovirus D
cuggcacauacaaa

SEQ ID NO: 110122 - RNA, 19 nt, Human adenovirus D
cugcugcgccgcgccagac

SEQ ID NO: 110123 - RNA, 16 nt, Human adenovirus D
cugcuucuucauuaaa

SEQ ID NO: 110124 - RNA, 15 nt, Human adenovirus D
cugcaagagcuccuc

SEQ ID NO: 110125 - RNA, 12 nt, Human adenovirus D
cuccagugcaug

SEQ ID NO: 110126 - RNA, 15 nt, Human adenovirus D
cucccaccaccagcc

SEQ ID NO: 110127 - RNA, 15 nt, Human adenovirus D
cucccaacucuggua

SEQ ID NO: 110128 - RNA, 18 nt, Human adenovirus D
cuccuccuguuacuguaa

SEQ ID NO: 110129 - RNA, 17 nt, Human adenovirus D
cuccucgaugccaucaa

SEQ ID NO: 110130 - RNA, 21 nt, Human adenovirus D
cuccuguuacuguaaagccac

SEQ ID NO: 110131 - RNA, 13 nt, Human adenovirus D
cucgcuacugcug

SEQ ID NO: 110132 - RNA, 13 nt, Human adenovirus D
cucgcagcucauc

SEQ ID NO: 110133 - RNA, 15 nt, Human adenovirus D
cuaagugugguuuau

SEQ ID NO: 110134 - RNA, 23 nt, Human adenovirus D
cuaucccaaauuacucgcaaaaa

SEQ ID NO: 110135 - RNA, 14 nt, Human adenovirus D
cgcugcaaagccag

SEQ ID NO: 110136 - RNA, 20 nt, Human adenovirus D
cgcgcuguguaucucgugga

SEQ ID NO: 110137 - RNA, 23 nt, Human adenovirus D
cgcuggcggagaacaaggccauc

SEQ ID NO: 110138 - RNA, 17 nt, Human adenovirus D
cgcuuagucauguguaa

SEQ ID NO: 110139 - RNA, 18 nt, Human adenovirus D
cggccaucggcacgaucc

SEQ ID NO: 110140 - RNA, 22 nt, Human adenovirus D
cggccaucggcacgaucccggg

SEQ ID NO: 110141 - RNA, 16 nt, Human adenovirus D
cguccaucgugcgcga

SEQ ID NO: 110142 - RNA, 15 nt, Human adenovirus D
cgucaccgagcucug

SEQ ID NO: 110143 - RNA, 18 nt, Human adenovirus D
cgggugcauguucaacca

SEQ ID NO: 110144 - RNA, 16 nt, Human adenovirus D
cguugcgguacuggua

SEQ ID NO: 110145 - RNA, 14 nt, Human adenovirus D
cgagcgcuggaucc

SEQ ID NO: 110146 - RNA, 21 nt, Human adenovirus D
cgagcgcuggauccugcauug

SEQ ID NO: 110147 - RNA, 16 nt, Human adenovirus D
cgagcggucgcggugg

SEQ ID NO: 110148 - RNA, 14 nt, Human adenovirus D
cgaucgugaacgcg

SEQ ID NO: 110149 - RNA, 12 nt, Human adenovirus D
cgauggauucaa

SEQ ID NO: 110150 - RNA, 21 nt, Human adenovirus D
cgauucccgggcuuucuugcc

SEQ ID NO: 110151 - RNA, 14 nt, Human adenovirus D
cgcccagauugcaa

SEQ ID NO: 110152 - RNA, 13 nt, Human adenovirus D
cgcgcaccugcua

SEQ ID NO: 110153 - RNA, 14 nt, Human adenovirus D
cgcgaaccaggcag

SEQ ID NO: 110154 - RNA, 19 nt, Human adenovirus D
gacuuauccacaaacuaca

SEQ ID NO: 110155 - RNA, 18 nt, Human adenovirus D
gacucugcucauacugcu

SEQ ID NO: 110156 - RNA, 20 nt, Human adenovirus D
gacucugcucauacugcuau

SEQ ID NO: 110157 - RNA, 12 nt, Human adenovirus D
gacugaucaaca

SEQ ID NO: 110158 - RNA, 18 nt, Human adenovirus D
gacugcugggugaugacu

SEQ ID NO: 110159 - RNA, 16 nt, Human adenovirus D
gacugggaggcugcga

SEQ ID NO: 110160 - RNA, 18 nt, Human adenovirus D
gagaccaacggcugcauc

SEQ ID NO: 110161 - RNA, 21 nt, Human adenovirus D
gagaccaacggcugcauccac

SEQ ID NO: 110162 - RNA, 19 nt, Human adenovirus D
gacacaaagagagcuuauu

SEQ ID NO: 110163 - RNA, 17 nt, Human adenovirus D
gacacaccugguccugu

SEQ ID NO: 110164 - RNA, 15 nt, Human adenovirus D
gacaauaauugaacu

SEQ ID NO: 110165 - RNA, 16 nt, Human adenovirus D
gagaggagugugauau

SEQ ID NO: 110166 - RNA, 17 nt, Human adenovirus D
gagagcgugauggcgca

SEQ ID NO: 110167 - RNA, 19 nt, Human adenovirus D
gaguccuuuagacaacagc

SEQ ID NO: 110168 - RNA, 15 nt, Human adenovirus D
gagugugauaugcac

SEQ ID NO: 110169 - RNA, 17 nt, Human adenovirus D
gaguugggccugaugca

SEQ ID NO: 110170 - RNA, 16 nt, Human adenovirus D
gaucaccuacgagcuc

SEQ ID NO: 110171 - RNA, 20 nt, Human adenovirus D
gaucacaugguaugauagca

SEQ ID NO: 110172 - RNA, 19 nt, Human adenovirus D
gaucauggccugugcaaug

SEQ ID NO: 110173 - RNA, 22 nt, Human adenovirus D
gaucauggccugugcaauguca

SEQ ID NO: 110174 - RNA, 20 nt, Human adenovirus D
gaugaggcgugcgguggugu

SEQ ID NO: 110175 - RNA, 21 nt, Human adenovirus D
gauggauucaaaaacuucccc

SEQ ID NO: 110176 - RNA, 21 nt, Human adenovirus D
gauugacuacucgcgcuggug

SEQ ID NO: 110177 - RNA, 21 nt, Human adenovirus D
gcaaauuccucgaccaugacc

SEQ ID NO: 110178 - RNA, 18 nt, Human adenovirus D
gcaagccccggaccccgc

SEQ ID NO: 110179 - RNA, 20 nt, Human adenovirus D
gcaauaaucagaacauuucc

SEQ ID NO: 110180 - RNA, 19 nt, Human adenovirus D
gcaauaccgggaugaugac

SEQ ID NO: 110181 - RNA, 24 nt, Human adenovirus D
gcaaugagaggagugugauaugca

SEQ ID NO: 110182 - RNA, 19 nt, Human adenovirus D
gcacgccucgcccgacugu

SEQ ID NO: 110183 - RNA, 15 nt, Human adenovirus D
gaaaccugcucuccu

SEQ ID NO: 110184 - RNA, 21 nt, Human adenovirus D
gaacccugcccccggaccugg

SEQ ID NO: 110185 - RNA, 20 nt, Human adenovirus D
gaacaccaucagacuggggu

SEQ ID NO: 110186 - RNA, 16 nt, Human adenovirus D
gaacaaaacccaugaa

SEQ ID NO: 110187 - RNA, 18 nt, Human adenovirus D
gaaucuucgagaauggau

SEQ ID NO: 110188 - RNA, 18 nt, Human adenovirus D
gaauauccccuuccucac

SEQ ID NO: 110189 - RNA, 14 nt, Human adenovirus D
gaaguaugccaaga

SEQ ID NO: 110190 - RNA, 21 nt, Human adenovirus D
gaagucaugugugauaucaca

SEQ ID NO: 110191 - RNA, 12 nt, Human adenovirus D
gaagauggccac

SEQ ID NO: 110192 - RNA, 13 nt, Human adenovirus D
gaacgcacagauu

SEQ ID NO: 110193 - RNA, 23 nt, Human adenovirus D
gaagccguccucugaaaagucau

SEQ ID NO: 110194 - RNA, 12 nt, Human adenovirus D
cuuguaugugcc

SEQ ID NO: 110195 - RNA, 12 nt, Human adenovirus D
cuuuaucacuca

SEQ ID NO: 110196 - RNA, 19 nt, Human adenovirus D
cugugccucuccaucagcg

SEQ ID NO: 110197 - RNA, 15 nt, Human adenovirus D
cugugcuaagugugg

SEQ ID NO: 110198 - RNA, 22 nt, Human adenovirus D
cuuuuuauauguugacaauaau

SEQ ID NO: 110199 - RNA, 18 nt, Human adenovirus D
gaaaagcucaaagaccag

SEQ ID NO: 110200 - RNA, 18 nt, Human adenovirus D
gaaaaacuuugcuucccu

SEQ ID NO: 110201 - RNA, 22 nt, Human adenovirus D
gaaaaaacuaccacgcuuuauc

SEQ ID NO: 110202 - RNA, 16 nt, Human adenovirus D
cuuugcuucccugcaa

SEQ ID NO: 110203 - RNA, 21 nt, Human adenovirus D
cuuucuugccggcgacaagcu

SEQ ID NO: 110204 - RNA, 12 nt, Human adenovirus D
uagacugcuauc

SEQ ID NO: 110205 - RNA, 12 nt, Human adenovirus D
uagacaacagcc

SEQ ID NO: 110206 - RNA, 15 nt, Human adenovirus D
uagcaaggugcugac

SEQ ID NO: 110207 - RNA, 20 nt, Human adenovirus D
uagcaaggugcugacaucca

SEQ ID NO: 110208 - RNA, 16 nt, Human adenovirus D
uagcaauggaaaucac

SEQ ID NO: 110209 - RNA, 15 nt, Human adenovirus D
uagucaaucucccac

SEQ ID NO: 110210 - RNA, 14 nt, Human adenovirus D
uagucauguguaaa

SEQ ID NO: 110211 - RNA, 18 nt, Human adenovirus D
uaguggcccaggacuuaa

SEQ ID NO: 110212 - RNA, 23 nt, Human adenovirus D
uagugacuuauuuacaggacuuu

SEQ ID NO: 110213 - RNA, 22 nt, Human adenovirus D
uaucauaaagauggauggaaaa

SEQ ID NO: 110214 - RNA, 16 nt, Human adenovirus D
uaccgggaugaugacc

SEQ ID NO: 110215 - RNA, 14 nt, Human adenovirus D
uacaugcacuggag

SEQ ID NO: 110216 - RNA, 22 nt, Human adenovirus D
uacaugcacuggaguauaugca

SEQ ID NO: 110217 - RNA, 18 nt, Human adenovirus D
uacauggacaagauauca

SEQ ID NO: 110218 - RNA, 14 nt, Human adenovirus D
uacuguaaagccac

SEQ ID NO: 110219 - RNA, 17 nt, Human adenovirus D
uacuucuggcacauaca

SEQ ID NO: 110220 - RNA, 19 nt, Human adenovirus D
uacuucuggcacauacaaa

SEQ ID NO: 110221 - RNA, 13 nt, Human adenovirus D
uaaggcucauaug

SEQ ID NO: 110222 - RNA, 15 nt, Human adenovirus D
uaacgggguggugga

SEQ ID NO: 110223 - RNA, 16 nt, Human adenovirus D
guugcgguacacgggg

SEQ ID NO: 110224 - RNA, 15 nt, Human adenovirus D
guugcagcacuggaa

SEQ ID NO: 110225 - RNA, 22 nt, Human adenovirus D
guuggucucgcccgacugcugg

SEQ ID NO: 110226 - RNA, 19 nt, Human adenovirus D
guuguuuugaacacgcugc

SEQ ID NO: 110227 - RNA, 15 nt, Human adenovirus D
guuugggcacugggg

SEQ ID NO: 110228 - RNA, 15 nt, Human adenovirus D
guucagcagcaccuc

SEQ ID NO: 110229 - RNA, 23 nt, Human adenovirus D
guucucucagcacgguggccuua

SEQ ID NO: 110230 - RNA, 23 nt, Human adenovirus D
guucuauauaaguggcaacaccu

SEQ ID NO: 110231 - RNA, 16 nt, Human adenovirus D
guuacuguaaagccac

SEQ ID NO: 110232 - RNA, 20 nt, Human adenovirus D
guuaagaauccacagaucag

SEQ ID NO: 110233 - RNA, 15 nt, Human adenovirus D
gucaaaagcgguggc

SEQ ID NO: 110234 - RNA, 21 nt, Human adenovirus D
gucaaacaggcaaagaucacc

SEQ ID NO: 110235 - RNA, 16 nt, Human adenovirus D
guccaugguagcaaug

SEQ ID NO: 110236 - RNA, 12 nt, Human adenovirus D
gugugauaugca

SEQ ID NO: 110237 - RNA, 15 nt, Human adenovirus D
gugguuucaaauuca

SEQ ID NO: 110238 - RNA, 16 nt, Human adenovirus D
guguacugucaugcca

SEQ ID NO: 110239 - RNA, 21 nt, Human adenovirus D
gugucccccugaucugucagg

SEQ ID NO: 110240 - RNA, 20 nt, Human adenovirus D
gcuuauuccagcaugcaguu

SEQ ID NO: 110241 - RNA, 18 nt, Human adenovirus D
gcuuagcaaggugcugac

SEQ ID NO: 110242 - RNA, 16 nt, Human adenovirus D
gcuucaauaauggaag

SEQ ID NO: 110243 - RNA, 16 nt, Human adenovirus D
gcugcauccacugcuc

SEQ ID NO: 110244 - RNA, 20 nt, Human adenovirus D
gcucccgcgcgggcucguca

SEQ ID NO: 110245 - RNA, 19 nt, Human adenovirus D
gcuauuaagaaguaugcca

SEQ ID NO: 110246 - RNA, 14 nt, Human adenovirus D
gcucguaggugauc

SEQ ID NO: 110247 - RNA, 23 nt, Human adenovirus D
gcucggugcggcugcugcaaaug

SEQ ID NO: 110248 - RNA, 21 nt, Human adenovirus D
gcggucgcgguggggcgguga

SEQ ID NO: 110249 - RNA, 13 nt, Human adenovirus D
gcgcgggcggacu

SEQ ID NO: 110250 - RNA, 14 nt, Human adenovirus D
gcuagacauggcca

SEQ ID NO: 110251 - RNA, 23 nt, Human adenovirus D
gcuaucgcucuuaucccaugccc

SEQ ID NO: 110252 - RNA, 13 nt, Human adenovirus D
gcuacaauuacuu

SEQ ID NO: 110253 - RNA, 18 nt, Human adenovirus D
gcuacugcugauuacucu

SEQ ID NO: 110254 - RNA, 16 nt, Human adenovirus D
gcgaguagucaaucuc

SEQ ID NO: 110255 - RNA, 20 nt, Human adenovirus D
gcgaccuccuccccaugaac

SEQ ID NO: 110256 - RNA, 23 nt, Human adenovirus D
gcgauucccgggcuuucuugccg

SEQ ID NO: 110257 - RNA, 17 nt, Human adenovirus D
gccucgagcuacaugcc

SEQ ID NO: 110258 - RNA, 19 nt, Human adenovirus D
gccgggcuaguguacaacg

SEQ ID NO: 110259 - RNA, 21 nt, Human adenovirus D
gccuggucaaacaggcaaaga

SEQ ID NO: 110260 - RNA, 13 nt, Human adenovirus D
gccgcuacaacag

SEQ ID NO: 110261 - RNA, 14 nt, Human adenovirus D
gccgcuacaacagc

SEQ ID NO: 110262 - RNA, 15 nt, Human adenovirus D
gccgcuacaacagca

SEQ ID NO: 110263 - RNA, 18 nt, Human adenovirus D
gccgcagccgccaugaca

SEQ ID NO: 110264 - RNA, 12 nt, Human adenovirus D
gccgccaugaca

SEQ ID NO: 110265 - RNA, 16 nt, Human adenovirus D
gcccucgcuacugcug

SEQ ID NO: 110266 - RNA, 17 nt, Human adenovirus D
gcccucgcuacugcuga

SEQ ID NO: 110267 - RNA, 17 nt, Human adenovirus D
gcccucucaacaucaca

SEQ ID NO: 110268 - RNA, 11 nt, Human adenovirus D
gcccugcucac

SEQ ID NO: 110269 - RNA, 20 nt, Human adenovirus D
gcccgauugugaucaugcag

SEQ ID NO: 110270 - RNA, 17 nt, Human adenovirus D
gccccuucgaccgugga

SEQ ID NO: 110271 - RNA, 12 nt, Human adenovirus D
gcagcacuggaa

SEQ ID NO: 110272 - RNA, 16 nt, Human adenovirus D
gcagacucugcucaua

SEQ ID NO: 110273 - RNA, 22 nt, Human adenovirus D
gcagacucugcucauacugcua

SEQ ID NO: 110274 - RNA, 23 nt, Human adenovirus D
gcagacucugcucauacugcuau

SEQ ID NO: 110275 - RNA, 16 nt, Human adenovirus D
gcacguacuuugacau

SEQ ID NO: 110276 - RNA, 23 nt, Human adenovirus D
gguacacgggguugcagcacugg

SEQ ID NO: 110277 - RNA, 17 nt, Human adenovirus D
ggguugcagcacuggaa

SEQ ID NO: 110278 - RNA, 18 nt, Human adenovirus D
ggguugcagcacuggaac

SEQ ID NO: 110279 - RNA, 21 nt, Human adenovirus D
gggugagucccacgcaggcga

SEQ ID NO: 110280 - RNA, 17 nt, Human adenovirus D
gggugcuagacauggcc

SEQ ID NO: 110281 - RNA, 13 nt, Human adenovirus D
gggcuuucuugcc

SEQ ID NO: 110282 - RNA, 13 nt, Human adenovirus D
gggcggacugcca

SEQ ID NO: 110283 - RNA, 21 nt, Human adenovirus D
ggucaucaccuuccugcagcu

SEQ ID NO: 110284 - RNA, 23 nt, Human adenovirus D
ggucacuguccaugguagcaaug

SEQ ID NO: 110285 - RNA, 16 nt, Human adenovirus D
gguccuagugacuuau

SEQ ID NO: 110286 - RNA, 15 nt, Human adenovirus D
gguguacugucaugc

SEQ ID NO: 110287 - RNA, 17 nt, Human adenovirus D
gguguacugucaugcca

SEQ ID NO: 110288 - RNA, 18 nt, Human adenovirus D
gguguaaaaaucaauaaa

SEQ ID NO: 110289 - RNA, 15 nt, Human adenovirus D
ggugugguuuaugac

SEQ ID NO: 110290 - RNA, 14 nt, Human adenovirus D
guacgaggccaugc

SEQ ID NO: 110291 - RNA, 15 nt, Human adenovirus D
gguugcagcacugga

SEQ ID NO: 110292 - RNA, 21 nt, Human adenovirus D
guacuugggcugccacuugaa

SEQ ID NO: 110293 - RNA, 14 nt, Human adenovirus D
guacugguacuugg

SEQ ID NO: 110294 - RNA, 14 nt, Human adenovirus D
guacuccagucucc

SEQ ID NO: 110295 - RNA, 15 nt, Human adenovirus D
ggcauauucuuuauu

SEQ ID NO: 110296 - RNA, 18 nt, Human adenovirus D
ggcaccagccagcugaac

SEQ ID NO: 110297 - RNA, 20 nt, Human adenovirus D
ggcaauaccgggaugaugac

SEQ ID NO: 110298 - RNA, 14 nt, Human adenovirus D
ggcggacauaugga

SEQ ID NO: 110299 - RNA, 15 nt, Human adenovirus D
ggcggacauauggaa

SEQ ID NO: 110300 - RNA, 16 nt, Human adenovirus D
ggcggagaacaaggcc

SEQ ID NO: 110301 - RNA, 15 nt, Human adenovirus D
ggcggcgauaugcca

SEQ ID NO: 110302 - RNA, 17 nt, Human adenovirus D
ggcgggaggcacccugc

SEQ ID NO: 110303 - RNA, 12 nt, Human adenovirus D
ggcugaugugau

SEQ ID NO: 110304 - RNA, 21 nt, Human adenovirus D
ggccaacagacucucggccau

SEQ ID NO: 110305 - RNA, 13 nt, Human adenovirus D
ggcuuuugugauc

SEQ ID NO: 110306 - RNA, 20 nt, Human adenovirus D
ggcuucacugacugaucaac

SEQ ID NO: 110307 - RNA, 12 nt, Human adenovirus D
gggcacuggggu

SEQ ID NO: 110308 - RNA, 20 nt, Human adenovirus D
gggcauuaacgggguggugg

SEQ ID NO: 110309 - RNA, 20 nt, Human adenovirus D
gggcaauaccgggaugauga

SEQ ID NO: 110310 - RNA, 13 nt, Human adenovirus D
gggaugaugaccg

SEQ ID NO: 110311 - RNA, 15 nt, Human adenovirus D
aggccgcuacaacag

SEQ ID NO: 110312 - RNA, 18 nt, Human adenovirus D
aggccgcuacaacagcac

SEQ ID NO: 110313 - RNA, 14 nt, Human adenovirus D
aggagugugauaug

SEQ ID NO: 110314 - RNA, 17 nt, Human adenovirus D
aggagugugauaugcac

SEQ ID NO: 110315 - RNA, 22 nt, Human adenovirus D
agcagaaguucaccugcauggu

SEQ ID NO: 110316 - RNA, 16 nt, Human adenovirus D
agcauagucacacuua

SEQ ID NO: 110317 - RNA, 13 nt, Human adenovirus D
agcauacaugccc

SEQ ID NO: 110318 - RNA, 14 nt, Human adenovirus D
agccuguacccaga

SEQ ID NO: 110319 - RNA, 17 nt, Human adenovirus D
agccucuccguccucga

SEQ ID NO: 110320 - RNA, 17 nt, Human adenovirus D
agccagggccgccacuc

SEQ ID NO: 110321 - RNA, 20 nt, Human adenovirus D
agcauugucugccuggucau

SEQ ID NO: 110322 - RNA, 19 nt, Human adenovirus D
agaugaggauugggaggag

SEQ ID NO: 110323 - RNA, 21 nt, Human adenovirus D
agaugaggcgugcgguggugu

SEQ ID NO: 110324 - RNA, 13 nt, Human adenovirus D
agauucaauccag

SEQ ID NO: 110325 - RNA, 14 nt, Human adenovirus D
agauugacuacucg

SEQ ID NO: 110326 - RNA, 18 nt, Human adenovirus D
agcaauggaaaucacacu

SEQ ID NO: 110327 - RNA, 20 nt, Human adenovirus D
agagauggcucucacuugcc

SEQ ID NO: 110328 - RNA, 14 nt, Human adenovirus D
agagaauccacuac

SEQ ID NO: 110329 - RNA, 13 nt, Human adenovirus D
acuuuuugcagcu

SEQ ID NO: 110330 - RNA, 15 nt, Human adenovirus D
acuugaacucgggga

SEQ ID NO: 110331 - RNA, 12 nt, Human adenovirus D
agaucacauggu

SEQ ID NO: 110332 - RNA, 18 nt, Human adenovirus D
agaucacaugguaugaua

SEQ ID NO: 110333 - RNA, 15 nt, Human adenovirus D
agaucuggaccuggc

SEQ ID NO: 110334 - RNA, 17 nt, Human adenovirus D
agauauuccagaucaca

SEQ ID NO: 110335 - RNA, 21 nt, Human adenovirus D
agauauuccagaucacauggu

SEQ ID NO: 110336 - RNA, 21 nt, Human adenovirus D
aguuaagaauccacagaucag

SEQ ID NO: 110337 - RNA, 18 nt, Human adenovirus D
aguuagagacaugcucaa

SEQ ID NO: 110338 - RNA, 16 nt, Human adenovirus D
aguuggaugacugagc

SEQ ID NO: 110339 - RNA, 23 nt, Human adenovirus D
aguuguaaugaucaaaacuuaac

SEQ ID NO: 110340 - RNA, 15 nt, Human adenovirus D
aguugggccugaugc

SEQ ID NO: 110341 - RNA, 18 nt, Human adenovirus D
aguuguucagcagcaccu

SEQ ID NO: 110342 - RNA, 15 nt, Human adenovirus D
auaaagauacauaaa

SEQ ID NO: 110343 - RNA, 22 nt, Human adenovirus D
aggugcugacauccauggccag

SEQ ID NO: 110344 - RNA, 23 nt, Human adenovirus D
aggcgaaacgccccugcaagugc

SEQ ID NO: 110345 - RNA, 19 nt, Human adenovirus D
aguaccaucugcaucucaa

SEQ ID NO: 110346 - RNA, 22 nt, Human adenovirus D
aguacaguuaagaauccacaga

SEQ ID NO: 110347 - RNA, 17 nt, Human adenovirus D
agucaggcaggauucau

SEQ ID NO: 110348 - RNA, 15 nt, Human adenovirus D
agucagacccagugg

SEQ ID NO: 110349 - RNA, 23 nt, Human adenovirus D
aguacucauaaagaagacuauaa

SEQ ID NO: 110350 - RNA, 17 nt, Human adenovirus D
auaaggaaauguucuga

SEQ ID NO: 110351 - RNA, 16 nt, Human adenovirus D
auaauggaagcauuac

SEQ ID NO: 110352 - RNA, 22 nt, Human adenovirus D
auacaugcccucucaacaucac

SEQ ID NO: 110353 - RNA, 13 nt, Human adenovirus D
auacaugggcuau

SEQ ID NO: 110354 - RNA, 17 nt, Human adenovirus D
auacaugggcuauaaua

SEQ ID NO: 110355 - RNA, 20 nt, Human adenovirus D
auacaugggcuauaauaagc

SEQ ID NO: 110356 - RNA, 23 nt, Human adenovirus D
auacaaagcugaaagcuauaaaa

SEQ ID NO: 110357 - RNA, 17 nt, Human adenovirus D
aucaaugcuacauggug

SEQ ID NO: 110358 - RNA, 21 nt, Human adenovirus D
auaugaccaugcagacucugc

SEQ ID NO: 110359 - RNA, 23 nt, Human adenovirus D
auauggaauuucuuagacugcua

SEQ ID NO: 110360 - RNA, 18 nt, Human adenovirus D
auagucacacuuaguuca

SEQ ID NO: 110361 - RNA, 20 nt, Human adenovirus D
auagucaucacccagcaguc

SEQ ID NO: 110362 - RNA, 14 nt, Human adenovirus D
auaucagacaugcu

SEQ ID NO: 110363 - RNA, 18 nt, Human adenovirus D
aaugagaggagugugaua

SEQ ID NO: 110364 - RNA, 20 nt, Human adenovirus D
aaugagaggagugugauaug

SEQ ID NO: 110365 - RNA, 16 nt, Human adenovirus D
aauuuuaaggcucaua

SEQ ID NO: 110366 - RNA, 20 nt, Human adenovirus D
aauuuuaaggcucauaugac

SEQ ID NO: 110367 - RNA, 20 nt, Human adenovirus D
aauuuugugauggaaguaca

SEQ ID NO: 110368 - RNA, 22 nt, Human adenovirus D
aauuuugugauggaaguacagu

SEQ ID NO: 110369 - RNA, 19 nt, Human adenovirus D
acaacaaaaccacauuuga

SEQ ID NO: 110370 - RNA, 16 nt, Human adenovirus D
acaaaaccacauuuga

SEQ ID NO: 110371 - RNA, 16 nt, Human adenovirus D
acaaacuacauggaca

SEQ ID NO: 110372 - RNA, 18 nt, Human adenovirus D
acaacagccgcaggccaa

SEQ ID NO: 110373 - RNA, 15 nt, Human adenovirus D
acaaccgggugcuag

SEQ ID NO: 110374 - RNA, 22 nt, Human adenovirus D
acaagguacgcaagagaaucca

SEQ ID NO: 110375 - RNA, 22 nt, Human adenovirus D
acauacaaagcugaaagcuaua

SEQ ID NO: 110376 - RNA, 22 nt, Human adenovirus D
acauacgccggcucaucugcag

SEQ ID NO: 110377 - RNA, 19 nt, Human adenovirus D
acauaguuguaaugaucaa

SEQ ID NO: 110378 - RNA, 21 nt, Human adenovirus D
acagccacgauguaacaucac

SEQ ID NO: 110379 - RNA, 13 nt, Human adenovirus D
acagcaucgccuc

SEQ ID NO: 110380 - RNA, 19 nt, Human adenovirus D
acagcaucgccucaccuau

SEQ ID NO: 110381 - RNA, 21 nt, Human adenovirus D
acagcaucgccucaccuauga

SEQ ID NO: 110382 - RNA, 12 nt, Human adenovirus D
acaucacauuca

SEQ ID NO: 110383 - RNA, 19 nt, Human adenovirus D
acaucaccacaggcaauga

SEQ ID NO: 110384 - RNA, 14 nt, Human adenovirus D
acauccauggccag

SEQ ID NO: 110385 - RNA, 21 nt, Human adenovirus D
acaccuugaaagggaugucaa

SEQ ID NO: 110386 - RNA, 22 nt, Human adenovirus D
acaccuugaaagggaugucaaa

SEQ ID NO: 110387 - RNA, 19 nt, Human adenovirus D
acgggguugcagcacugga

SEQ ID NO: 110388 - RNA, 15 nt, Human adenovirus D
acggcuucauuucaa

SEQ ID NO: 110389 - RNA, 19 nt, Human adenovirus D
acguuuauuggucuuuuau

SEQ ID NO: 110390 - RNA, 15 nt, Human adenovirus D
acugcugauuacucu

SEQ ID NO: 110391 - RNA, 21 nt, Human adenovirus D
acugcauguggcuagacuuca

SEQ ID NO: 110392 - RNA, 13 nt, Human adenovirus D
acugcauacaaau

SEQ ID NO: 110393 - RNA, 21 nt, Human adenovirus D
acuccucuuugcccugcucac

SEQ ID NO: 110394 - RNA, 23 nt, Human adenovirus D
acuccgcgaccuccuccccauga

SEQ ID NO: 110395 - RNA, 21 nt, Human adenovirus D
acugucuagggccuuucccca

SEQ ID NO: 110396 - RNA, 15 nt, Human adenovirus D
acuggaguauaugca

SEQ ID NO: 110397 - RNA, 13 nt, Human adenovirus D
acuggauggggau

SEQ ID NO: 110398 - RNA, 14 nt, Human adenovirus D
acuucuggcacaua

SEQ ID NO: 110399 - RNA, 17 nt, Human adenovirus D
acuucuggcacauacaa

SEQ ID NO: 110400 - RNA, 18 nt, Human adenovirus D
acuucuggcacauacaaa

SEQ ID NO: 110401 - RNA, 14 nt, Human adenovirus D
acuugaaaucugaa

SEQ ID NO: 110402 - RNA, 15 nt, Human adenovirus D
acuucaucauagucc

SEQ ID NO: 110403 - RNA, 14 nt, Human adenovirus D
acuuccugaccacg

SEQ ID NO: 110404 - RNA, 16 nt, Human adenovirus D
accuacuccucuuugc

SEQ ID NO: 110405 - RNA, 22 nt, Human adenovirus D
acccguagaaaucaaguaccau

SEQ ID NO: 110406 - RNA, 9 nt, Human adenovirus D
acauuugaa

SEQ ID NO: 110407 - RNA, 21 nt, Human adenovirus D
accucagauauuccagaucac

SEQ ID NO: 110408 - RNA, 22 nt, Human adenovirus D
accugcgucugcagcauugucu

SEQ ID NO: 110409 - RNA, 12 nt, Human adenovirus D
accuggaucucc

SEQ ID NO: 110410 - RNA, 15 nt, Human adenovirus D
acgaaggcaugcaag

SEQ ID NO: 110411 - RNA, 17 nt, Human adenovirus D
acgccggcucaucugca

SEQ ID NO: 110412 - RNA, 15 nt, Human adenovirus D
acgcaagagaaucca

SEQ ID NO: 110413 - RNA, 20 nt, Human adenovirus D
acgauguaacaucaccacag

SEQ ID NO: 110414 - RNA, 12 nt, Human adenovirus D
acgaucugauga

SEQ ID NO: 110415 - RNA, 12 nt, Human adenovirus D
acgaggccaugc

SEQ ID NO: 110416 - RNA, 18 nt, Human adenovirus D
acgcgcgaagauggccac

SEQ ID NO: 110417 - RNA, 20 nt, Human adenovirus D
acggccuggccucgggcauu

SEQ ID NO: 110418 - RNA, 22 nt, Human adenovirus D
caaaacuuaacucugauucaug

SEQ ID NO: 110419 - RNA, 15 nt, Human adenovirus D
caaagagagcuuauu

SEQ ID NO: 110420 - RNA, 14 nt, Human adenovirus D
caacagcugugcua

SEQ ID NO: 110421 - RNA, 14 nt, Human adenovirus D
caaccagagccaga

SEQ ID NO: 110422 - RNA, 18 nt, Human adenovirus D
auuucuuagacugcuauc

SEQ ID NO: 110423 - RNA, 17 nt, Human adenovirus D
auuucugcuggcagaag

SEQ ID NO: 110424 - RNA, 17 nt, Human adenovirus D
auuuuacaugcacugga

SEQ ID NO: 110425 - RNA, 22 nt, Human adenovirus D
auuuuugaagucaugugugaua

SEQ ID NO: 110426 - RNA, 15 nt, Human adenovirus D
auuuuuacaccagcg

SEQ ID NO: 110427 - RNA, 23 nt, Human adenovirus D
caauuuugugauggaaguacagu

SEQ ID NO: 110428 - RNA, 17 nt, Human adenovirus D
cacaaagagagcuuauu

SEQ ID NO: 110429 - RNA, 18 nt, Human adenovirus D
cacaaacgugcaguccaa

SEQ ID NO: 110430 - RNA, 16 nt, Human adenovirus D
cacacuuaguucagcu

SEQ ID NO: 110431 - RNA, 18 nt, Human adenovirus D
cacagcuugcguucugau

SEQ ID NO: 110432 - RNA, 13 nt, Human adenovirus D
caacggcugcauc

SEQ ID NO: 110433 - RNA, 18 nt, Human adenovirus D
caacccuggcauauucuu

SEQ ID NO: 110434 - RNA, 23 nt, Human adenovirus D
caacccuggcauauucuuuauuc

SEQ ID NO: 110435 - RNA, 23 nt, Human adenovirus D
caacugcgcguccgucagcagca

SEQ ID NO: 110436 - RNA, 19 nt, Human adenovirus D
caaguacauagugaccaag

SEQ ID NO: 110437 - RNA, 13 nt, Human adenovirus D
auggccuggagca

SEQ ID NO: 110438 - RNA, 16 nt, Human adenovirus D
auggccugugcaaugu

SEQ ID NO: 110439 - RNA, 17 nt, Human adenovirus D
auggccugugcaauguc

SEQ ID NO: 110440 - RNA, 15 nt, Human adenovirus D
auggauguacuucag

SEQ ID NO: 110441 - RNA, 22 nt, Human adenovirus D
auggaauguuacugcauacaaa

SEQ ID NO: 110442 - RNA, 23 nt, Human adenovirus D
auggaaguacaguuaagaaucca

SEQ ID NO: 110443 - RNA, 11 nt, Human adenovirus D
auguucuugca

SEQ ID NO: 110444 - RNA, 20 nt, Human adenovirus D
auguaugucagugugccugu

SEQ ID NO: 110445 - RNA, 15 nt, Human adenovirus D
augggcaccuggaac

SEQ ID NO: 110446 - RNA, 17 nt, Human adenovirus D
auucaugugaacaaaac

SEQ ID NO: 110447 - RNA, 22 nt, Human adenovirus D
auucaugugaacaaaacccaug

SEQ ID NO: 110448 - RNA, 20 nt, Human adenovirus D
auucaaaaaccguaccaugg

SEQ ID NO: 110449 - RNA, 14 nt, Human adenovirus D
auuaugagcaucaa

SEQ ID NO: 110450 - RNA, 20 nt, Human adenovirus D
auuaagaaguaugccaagau

SEQ ID NO: 110451 - RNA, 23 nt, Human adenovirus D
auuaaaaaccaaaaaaaacaauc

SEQ ID NO: 110452 - RNA, 17 nt, Human adenovirus D
augagaggagugugaua

SEQ ID NO: 110453 - RNA, 19 nt, Human adenovirus D
augaguugggccugaugca

SEQ ID NO: 110454 - RNA, 22 nt, Human adenovirus D
augaguugggccugaugcagga

SEQ ID NO: 110455 - RNA, 24 nt, Human adenovirus D
augaguugggccugaugcaggaua

SEQ ID NO: 110456 - RNA, 11 nt, Human adenovirus D
augacuucaac

SEQ ID NO: 110457 - RNA, 17 nt, Human adenovirus D
augaagccguccucuga

SEQ ID NO: 110458 - RNA, 13 nt, Human adenovirus D
augaauacaguga

SEQ ID NO: 110459 - RNA, 14 nt, Human adenovirus D
augaauacagugau

SEQ ID NO: 110460 - RNA, 17 nt, Human adenovirus D
augaaaaccaccagcca

SEQ ID NO: 110461 - RNA, 14 nt, Human adenovirus D
augcuucaacagcu

SEQ ID NO: 110462 - RNA, 17 nt, Human adenovirus D
augcuucaauaauggaa

SEQ ID NO: 110463 - RNA, 18 nt, Human adenovirus D
augcuucaauaauggaag

SEQ ID NO: 110464 - RNA, 20 nt, Human adenovirus D
augcuucaauaauggaagca

SEQ ID NO: 110465 - RNA, 17 nt, Human adenovirus D
augcccucgcuacugcu

SEQ ID NO: 110466 - RNA, 19 nt, Human adenovirus D
augcccucgcuacugcuga

SEQ ID NO: 110467 - RNA, 18 nt, Human adenovirus D
augcccucucaacaucac

SEQ ID NO: 110468 - RNA, 19 nt, Human adenovirus D
augcccucucaacaucaca

SEQ ID NO: 110469 - RNA, 17 nt, Human adenovirus D
augcaaggugugguuua

SEQ ID NO: 110470 - RNA, 17 nt, Human adenovirus D
augcaaaccgagauuca

SEQ ID NO: 110471 - RNA, 20 nt, Human adenovirus D
augaugaaaccagggcuuca

SEQ ID NO: 110472 - RNA, 22 nt, Human adenovirus D
caggacgccucggaguaccuga

SEQ ID NO: 110473 - RNA, 22 nt, Human adenovirus D
caggagggguauaugcuguuca

SEQ ID NO: 110474 - RNA, 14 nt, Human adenovirus D
caggauucauacca

SEQ ID NO: 110475 - RNA, 19 nt, Human adenovirus D
cagggcccguuuaccacga

SEQ ID NO: 110476 - RNA, 18 nt, Human adenovirus D
caggcgccauucggagca

SEQ ID NO: 110477 - RNA, 21 nt, Human adenovirus D
caggcgccauucggagcacgc

SEQ ID NO: 110478 - RNA, 22 nt, Human adenovirus D
caggcaggauucauaccaucaa

SEQ ID NO: 110479 - RNA, 17 nt, Human adenovirus D
caggaaacuguguggau

SEQ ID NO: 110480 - RNA, 21 nt, Human adenovirus D
cagcugcauguccuugaacua

SEQ ID NO: 110481 - RNA, 23 nt, Human adenovirus D
cagcugcgcuuagucauguguaa

SEQ ID NO: 110482 - RNA, 18 nt, Human adenovirus D
cagcucaucgacuggugc

SEQ ID NO: 110483 - RNA, 19 nt, Human adenovirus D
cagcgcccucagcagucuc

SEQ ID NO: 110484 - RNA, 15 nt, Human adenovirus D
cagcgacgcggugua

SEQ ID NO: 110485 - RNA, 21 nt, Human adenovirus D
cagccucuccguccucgagga

SEQ ID NO: 110486 - RNA, 15 nt, Human adenovirus D
cagaacauuuccuua

SEQ ID NO: 110487 - RNA, 23 nt, Human adenovirus D
cagaagcagaaguucaccugcau

SEQ ID NO: 110488 - RNA, 18 nt, Human adenovirus D
cagaaguucaccugcaug

SEQ ID NO: 110489 - RNA, 13 nt, Human adenovirus D
cagaaccaugaau

SEQ ID NO: 110490 - RNA, 15 nt, Human adenovirus D
caccacaggcaauga

SEQ ID NO: 110491 - RNA, 19 nt, Human adenovirus D
caccaccagcccauuucac

SEQ ID NO: 110492 - RNA, 19 nt, Human adenovirus D
cacaugguaugauagcacu

SEQ ID NO: 110493 - RNA, 12 nt, Human adenovirus D
cagacccagugg

SEQ ID NO: 110494 - RNA, 15 nt, Human adenovirus D
cagacucucaucucu

SEQ ID NO: 110495 - RNA, 17 nt, Human adenovirus D
cagacugggguacuuua

SEQ ID NO: 110496 - RNA, 17 nt, Human adenovirus D
cagaguacucauaaaga

SEQ ID NO: 110497 - RNA, 21 nt, Human adenovirus D
cagccccuuccccuaucccaa

SEQ ID NO: 110498 - RNA, 19 nt, Human adenovirus D
cagccgcagccgccaugac

SEQ ID NO: 110499 - RNA, 20 nt, Human adenovirus D
cagccgcagccgccaugaca

SEQ ID NO: 110500 - RNA, 14 nt, Human adenovirus D
cagcccauuucaca

SEQ ID NO: 110501 - RNA, 14 nt, Human adenovirus D
cagaucagacauag

SEQ ID NO: 110502 - RNA, 19 nt, Human adenovirus D
cagauauuccagaucacau

SEQ ID NO: 110503 - RNA, 13 nt, Human adenovirus D
caucugugcugcc

SEQ ID NO: 110504 - RNA, 16 nt, Human adenovirus D
caugaaagaacauaca

SEQ ID NO: 110505 - RNA, 22 nt, Human adenovirus D
cauccauggccaggggagugaa

SEQ ID NO: 110506 - RNA, 18 nt, Human adenovirus D
cauccgcggcguccugga

SEQ ID NO: 110507 - RNA, 15 nt, Human adenovirus D
cauccugcaacugcg

SEQ ID NO: 110508 - RNA, 16 nt, Human adenovirus D
cauauggaauuucuua

SEQ ID NO: 110509 - RNA, 14 nt, Human adenovirus D
caucagaugcagag

SEQ ID NO: 110510 - RNA, 14 nt, Human adenovirus D
caucauggcccuga

SEQ ID NO: 110511 - RNA, 22 nt, Human adenovirus D
cauacaugggcuauaauaagca

SEQ ID NO: 110512 - RNA, 19 nt, Human adenovirus D
cauacgccggcucaucugc

SEQ ID NO: 110513 - RNA, 18 nt, Human adenovirus D
cagucugguggaacgaga

SEQ ID NO: 110514 - RNA, 15 nt, Human adenovirus D
caguuggaugacuga

SEQ ID NO: 110515 - RNA, 14 nt, Human adenovirus D
cauacaaauucaaa

SEQ ID NO: 110516 - RNA, 22 nt, Human adenovirus D
caguagucaucaaaugcgagca

SEQ ID NO: 110517 - RNA, 19 nt, Human adenovirus D
ccaaauuacucgcaaaaau

SEQ ID NO: 110518 - RNA, 14 nt, Human adenovirus D
cauuucacagugua

SEQ ID NO: 110519 - RNA, 18 nt, Human adenovirus D
caugcagacucugcucau

SEQ ID NO: 110520 - RNA, 16 nt, Human adenovirus D
caugccacgaacagcc

SEQ ID NO: 110521 - RNA, 19 nt, Human adenovirus D
caugcccucgcuacugcug

SEQ ID NO: 110522 - RNA, 17 nt, Human adenovirus D
caugcgcaggcgccuga

SEQ ID NO: 110523 - RNA, 16 nt, Human adenovirus D
cauggccugugcaaug

SEQ ID NO: 110524 - RNA, 18 nt, Human adenovirus D
cauggccugugcaauguc

SEQ ID NO: 110525 - RNA, 16 nt, Human adenovirus D
cauggacaagauauca

SEQ ID NO: 110526 - RNA, 18 nt, Human adenovirus D
cauggguggggaugaacc

SEQ ID NO: 110527 - RNA, 17 nt, Human adenovirus D
ccacagaucagacauag

SEQ ID NO: 110528 - RNA, 13 nt, Human adenovirus D
ccacacaguuucc

SEQ ID NO: 110529 - RNA, 17 nt, Human adenovirus D
ccacaaacuacauggac

SEQ ID NO: 110530 - RNA, 20 nt, Human adenovirus D
ccaccagcccauuucacagu

SEQ ID NO: 110531 - RNA, 16 nt, Human adenovirus D
ccacauuugaagauuc

SEQ ID NO: 110532 - RNA, 15 nt, Human adenovirus D
ccaugcagacucugc

SEQ ID NO: 110533 - RNA, 13 nt, Human adenovirus D
ccaugcaggugaa

SEQ ID NO: 110534 - RNA, 20 nt, Human adenovirus D
ccaugcaggugaacuucugc

SEQ ID NO: 110535 - RNA, 20 nt, Human adenovirus D
ccaugaaagaacauacaugg

SEQ ID NO: 110536 - RNA, 15 nt, Human adenovirus D
ccaugaauacaguga

SEQ ID NO: 110537 - RNA, 16 nt, Human adenovirus D
ccagccuguacccaga

SEQ ID NO: 110538 - RNA, 13 nt, Human adenovirus D
ccagcccauuuca

SEQ ID NO: 110539 - RNA, 18 nt, Human adenovirus D
ccagcagaagguggugga

SEQ ID NO: 110540 - RNA, 15 nt, Human adenovirus D
ccagugcuuccagca

SEQ ID NO: 110541 - RNA, 14 nt, Human adenovirus D
ccaugggaaaugca

SEQ ID NO: 110542 - RNA, 15 nt, Human adenovirus D
ccaugggaaaugcau

SEQ ID NO: 110543 - RNA, 19 nt, Human adenovirus D
ccaugcccucgcuacugcu

SEQ ID NO: 110544 - RNA, 16 nt, Human adenovirus D
cccaggacuuaaguga

SEQ ID NO: 110545 - RNA, 15 nt, Human adenovirus D
cccagaccgugcagg

SEQ ID NO: 110546 - RNA, 17 nt, Human adenovirus D
cccagcgucugacgcug

SEQ ID NO: 110547 - RNA, 20 nt, Human adenovirus D
cccguuuaccacgaucugau

SEQ ID NO: 110548 - RNA, 17 nt, Human adenovirus D
ccgagaucuggaccugg

SEQ ID NO: 110549 - RNA, 17 nt, Human adenovirus D
ccgcagccgccaugaca

SEQ ID NO: 110550 - RNA, 18 nt, Human adenovirus D
ccgcagccgccaugacag

SEQ ID NO: 110551 - RNA, 16 nt, Human adenovirus D
ccguggccucuucgcc

SEQ ID NO: 110552 - RNA, 18 nt, Human adenovirus D
ccgccugcgcauccccgu

SEQ ID NO: 110553 - RNA, 12 nt, Human adenovirus D
aaaaaacacguu

SEQ ID NO: 110554 - RNA, 17 nt, Human adenovirus D
aaaaauuaaccuauaaa

SEQ ID NO: 110555 - RNA, 13 nt, Human adenovirus D
aaaaauuauaugu

SEQ ID NO: 110556 - RNA, 15 nt, Human adenovirus D
aaaaccacauuugaa

SEQ ID NO: 110557 - RNA, 20 nt, Human adenovirus D
aaaaccacauuugaagauuc

SEQ ID NO: 110558 - RNA, 13 nt, Human adenovirus D
aaaaccaccagcc

SEQ ID NO: 110559 - RNA, 10 nt, Human adenovirus D
aaccaugcuu

SEQ ID NO: 110560 - RNA, 17 nt, Human adenovirus D
aaccaugaaggcuuuca

SEQ ID NO: 110561 - RNA, 13 nt, Human adenovirus D
aaccaugaauaca

SEQ ID NO: 110562 - RNA, 17 nt, Human adenovirus D
aaccaugaauacaguga

SEQ ID NO: 110563 - RNA, 22 nt, Human adenovirus D
aaccagggcuucacugacugau

SEQ ID NO: 110564 - RNA, 12 nt, Human adenovirus D
aacuacauggac

SEQ ID NO: 110565 - RNA, 14 nt, Human adenovirus D
aacuacauggacaa

SEQ ID NO: 110566 - RNA, 18 nt, Human adenovirus D
aaauuggcggacauaugg

SEQ ID NO: 110567 - RNA, 22 nt, Human adenovirus D
aacagccacgauguaacaucac

SEQ ID NO: 110568 - RNA, 23 nt, Human adenovirus D
aacagccacgauguaacaucacc

SEQ ID NO: 110569 - RNA, 12 nt, Human adenovirus D
aacauuacuucu

SEQ ID NO: 110570 - RNA, 15 nt, Human adenovirus D
aacaucugugcugcc

SEQ ID NO: 110571 - RNA, 16 nt, Human adenovirus D
aacauccaccagugca

SEQ ID NO: 110572 - RNA, 15 nt, Human adenovirus D
aacagcugugcuaag

SEQ ID NO: 110573 - RNA, 19 nt, Human adenovirus D
aaagaucaccuacgagcuc

SEQ ID NO: 110574 - RNA, 18 nt, Human adenovirus D
aaagaucacuuacuugaa

SEQ ID NO: 110575 - RNA, 19 nt, Human adenovirus D
aaagaacauacaugggcua

SEQ ID NO: 110576 - RNA, 23 nt, Human adenovirus D
aaaggaagugguuucaaauucaa

SEQ ID NO: 110577 - RNA, 16 nt, Human adenovirus D
aaagcugaaagcuaua

SEQ ID NO: 110578 - RNA, 19 nt, Human adenovirus D
aaauauggccuggagcaga

SEQ ID NO: 110579 - RNA, 19 nt, Human adenovirus D
aaauuccucgaccaugacc

SEQ ID NO: 110580 - RNA, 18 nt, Human adenovirus D
aaauuaugagcaucaaaa

SEQ ID NO: 110581 - RNA, 15 nt, Human adenovirus D
aagucaugugugaua

SEQ ID NO: 110582 - RNA, 17 nt, Human adenovirus D
aagucaugugugauauc

SEQ ID NO: 110583 - RNA, 18 nt, Human adenovirus D
aagugacuuuuugcagcu

SEQ ID NO: 110584 - RNA, 19 nt, Human adenovirus D
aagugacuuuuugcagcug

SEQ ID NO: 110585 - RNA, 18 nt, Human adenovirus D
aaggccauccgucccgac

SEQ ID NO: 110586 - RNA, 12 nt, Human adenovirus D
aaggccuggaau

SEQ ID NO: 110587 - RNA, 13 nt, Human adenovirus D
aaguucaccugca

SEQ ID NO: 110588 - RNA, 17 nt, Human adenovirus D
aagugcacagacccacc

SEQ ID NO: 110589 - RNA, 18 nt, Human adenovirus D
aagcauuacuauuacugc

SEQ ID NO: 110590 - RNA, 19 nt, Human adenovirus D
aagcgggccucacagucca

SEQ ID NO: 110591 - RNA, 16 nt, Human adenovirus D
aagcuaccacauugug

SEQ ID NO: 110592 - RNA, 23 nt, Human adenovirus D
aacuuccugaccacgguggugca

SEQ ID NO: 110593 - RNA, 16 nt, Human adenovirus D
aacuuucuccacaccu

SEQ ID NO: 110594 - RNA, 20 nt, Human adenovirus D
aacuuucuccacaccuugaa

SEQ ID NO: 110595 - RNA, 14 nt, Human adenovirus D
aagaaguaugccaa

SEQ ID NO: 110596 - RNA, 22 nt, Human adenovirus D
aaugcuacauggugggcuaaua

SEQ ID NO: 110597 - RNA, 22 nt, Human adenovirus D
aaugagaggagugugauaugca

SEQ ID NO: 110598 - RNA, 15 nt, Human adenovirus D
aauuacuucaucaua

SEQ ID NO: 110599 - RNA, 18 nt, Human adenovirus D
aauugaggacuuguuaca

SEQ ID NO: 110600 - RNA, 15 nt, Human adenovirus D
aauuaugagcaucaa

SEQ ID NO: 110601 - RNA, 22 nt, Human adenovirus D
aauuuucauugucuucccucuc

SEQ ID NO: 110602 - RNA, 14 nt, Human adenovirus D
aauugucagcugua

SEQ ID NO: 110603 - RNA, 13 nt, Human adenovirus D
aauuggagcagug

SEQ ID NO: 110604 - RNA, 17 nt, Human adenovirus D
agagccagaauaugugu

SEQ ID NO: 110605 - RNA, 23 nt, Human adenovirus D
agagccagaauauguguauguua

SEQ ID NO: 110606 - RNA, 19 nt, Human adenovirus D
agacauaguuguaaugauc

SEQ ID NO: 110607 - RNA, 17 nt, Human adenovirus D
agaauggauguacuuca

SEQ ID NO: 110608 - RNA, 16 nt, Human adenovirus D
agaauccacagaucag

SEQ ID NO: 110609 - RNA, 14 nt, Human adenovirus D
acuucaucauaguc

SEQ ID NO: 110610 - RNA, 12 nt, Human adenovirus D
acuucauggcuu

SEQ ID NO: 110611 - RNA, 16 nt, Human adenovirus D
acuucauggcuugugg

SEQ ID NO: 110612 - RNA, 15 nt, Human adenovirus D
acuuauccacaaacu

SEQ ID NO: 110613 - RNA, 21 nt, Human adenovirus D
acuguccaugguagcaaugga

SEQ ID NO: 110614 - RNA, 16 nt, Human adenovirus D
agaacaacgauuucac

SEQ ID NO: 110615 - RNA, 13 nt, Human adenovirus D
agaacaaggccau

SEQ ID NO: 110616 - RNA, 17 nt, Human adenovirus D
agaagacuauaaaguca

SEQ ID NO: 110617 - RNA, 13 nt, Human adenovirus D
agaagguggugga

SEQ ID NO: 110618 - RNA, 21 nt, Human adenovirus D
agaaguacgacaagguacgca

SEQ ID NO: 110619 - RNA, 13 nt, Human adenovirus D
agaaguaugccaa

SEQ ID NO: 110620 - RNA, 15 nt, Human adenovirus D
agaaguucaccugca

SEQ ID NO: 110621 - RNA, 23 nt, Human adenovirus D
agaauauccccuuccucacuccc

SEQ ID NO: 110622 - RNA, 14 nt, Human adenovirus D
acuauuacugccac

SEQ ID NO: 110623 - RNA, 15 nt, Human adenovirus D
acucacauuuuggaa

SEQ ID NO: 110624 - RNA, 17 nt, Human adenovirus D
acucugcucauacugcu

SEQ ID NO: 110625 - RNA, 18 nt, Human adenovirus D
acucugcucauacugcua

SEQ ID NO: 110626 - RNA, 19 nt, Human adenovirus D
acucugcucauacugcuau

SEQ ID NO: 110627 - RNA, 14 nt, Human adenovirus D
acugcuaucgcucu

SEQ ID NO: 110628 - RNA, 14 nt, Human adenovirus D
acugcgcgcccucg

SEQ ID NO: 110629 - RNA, 21 nt, Human adenovirus D
acugcgcguccgucagcagca

SEQ ID NO: 110630 - RNA, 12 nt, Human adenovirus D
acugcauacaaa

SEQ ID NO: 110631 - RNA, 14 nt, Human adenovirus D
acugggaaccagga

SEQ ID NO: 110632 - RNA, 20 nt, Human adenovirus D
acugggaggcugcgaugcaa

SEQ ID NO: 110633 - RNA, 24 nt, Human adenovirus D
acugggaggcugcgaugcaacgca

SEQ ID NO: 110634 - RNA, 23 nt, Human adenovirus D
acugggugaugcuucaacagcug

SEQ ID NO: 110635 - RNA, 12 nt, Human adenovirus D
acugucaugcca

SEQ ID NO: 110636 - RNA, 13 nt, Human adenovirus D
acugucaugccac

SEQ ID NO: 110637 - RNA, 22 nt, Human adenovirus D
acugucaugccacgaacagcca

SEQ ID NO: 110638 - RNA, 13 nt, Human adenovirus D
acuguaaagccac

SEQ ID NO: 110639 - RNA, 18 nt, Human adenovirus D
acuguaaagccacaacca

SEQ ID NO: 110640 - RNA, 21 nt, Human adenovirus D
acuaccacgcuuuaucacuca

SEQ ID NO: 110641 - RNA, 18 nt, Human adenovirus D
acuaucaaaacgaccaca

SEQ ID NO: 110642 - RNA, 15 nt, Human adenovirus D
acuauaaagucacag

SEQ ID NO: 110643 - RNA, 19 nt, Human adenovirus D
acgccucgcccgacugucu

SEQ ID NO: 110644 - RNA, 17 nt, Human adenovirus D
acgagcucguaggugau

SEQ ID NO: 110645 - RNA, 13 nt, Human adenovirus D
acgagcuacagca

SEQ ID NO: 110646 - RNA, 13 nt, Human adenovirus D
accugcaccugcg

SEQ ID NO: 110647 - RNA, 15 nt, Human adenovirus D
acccugcuccaagag

SEQ ID NO: 110648 - RNA, 22 nt, Human adenovirus D
accuacuccucuuugcccugcu

SEQ ID NO: 110649 - RNA, 23 nt, Human adenovirus D
acccauugguugaacccagauga

SEQ ID NO: 110650 - RNA, 19 nt, Human adenovirus D
accaugcagacucugcuca

SEQ ID NO: 110651 - RNA, 20 nt, Human adenovirus D
accaugcagacucugcucau

SEQ ID NO: 110652 - RNA, 20 nt, Human adenovirus D
acccgugucccccugaucug

SEQ ID NO: 110653 - RNA, 18 nt, Human adenovirus D
acccccucgaugaugccg

SEQ ID NO: 110654 - RNA, 17 nt, Human adenovirus D
accaucugcaucucaag

SEQ ID NO: 110655 - RNA, 21 nt, Human adenovirus D
accaugaaggcuuucacagcu

SEQ ID NO: 110656 - RNA, 18 nt, Human adenovirus D
accaguuugggcacuggg

SEQ ID NO: 110657 - RNA, 19 nt, Human adenovirus D
accaucaaugcuacauggu

SEQ ID NO: 110658 - RNA, 20 nt, Human adenovirus D
accaucaaugcuacauggug

SEQ ID NO: 110659 - RNA, 14 nt, Human adenovirus D
accacgguggugca

SEQ ID NO: 110660 - RNA, 13 nt, Human adenovirus D
accacaggcaaug

SEQ ID NO: 110661 - RNA, 15 nt, Human adenovirus D
accacgaucugauga

SEQ ID NO: 110662 - RNA, 17 nt, Human adenovirus D
accacgaucugaugaug

SEQ ID NO: 110663 - RNA, 21 nt, Human adenovirus D
acauucaaaaaccguaccaug

SEQ ID NO: 110664 - RNA, 14 nt, Human adenovirus D
acauugaaugggac

SEQ ID NO: 110665 - RNA, 20 nt, Human adenovirus D
acaucgcgaaccaggcagug

SEQ ID NO: 110666 - RNA, 13 nt, Human adenovirus D
acauagugaccaa

SEQ ID NO: 110667 - RNA, 13 nt, Human adenovirus D
acaucugugcugc

SEQ ID NO: 110668 - RNA, 21 nt, Human adenovirus D
acauuacuucuggcacauaca

SEQ ID NO: 110669 - RNA, 14 nt, Human adenovirus D
acagauucauacuc

SEQ ID NO: 110670 - RNA, 15 nt, Human adenovirus D
acagaucagacauag

SEQ ID NO: 110671 - RNA, 15 nt, Human adenovirus D
acagcaacuuccuga

SEQ ID NO: 110672 - RNA, 21 nt, Human adenovirus D
acaggcaaagaucaccuacga

SEQ ID NO: 110673 - RNA, 12 nt, Human adenovirus D
acaggcaaugag

SEQ ID NO: 110674 - RNA, 13 nt, Human adenovirus D
acaggcaaugaga

SEQ ID NO: 110675 - RNA, 21 nt, Human adenovirus D
acauaacugggugaugcuuca

SEQ ID NO: 110676 - RNA, 21 nt, Human adenovirus D
acacgggguugcagcacugga

SEQ ID NO: 110677 - RNA, 22 nt, Human adenovirus D
acacgggguugcagcacuggaa

SEQ ID NO: 110678 - RNA, 17 nt, Human adenovirus D
acacggucacuguccau

SEQ ID NO: 110679 - RNA, 15 nt, Human adenovirus D
acaccugguccugua

SEQ ID NO: 110680 - RNA, 19 nt, Human adenovirus D
acaaauucaaauguuauag

SEQ ID NO: 110681 - RNA, 16 nt, Human adenovirus D
aguuugggcacugggg

SEQ ID NO: 110682 - RNA, 17 nt, Human adenovirus D
aguuugggcacuggggu

SEQ ID NO: 110683 - RNA, 23 nt, Human adenovirus D
auaaagaagacuauaaagucaca

SEQ ID NO: 110684 - RNA, 15 nt, Human adenovirus D
auaaaaacaacaaaa

SEQ ID NO: 110685 - RNA, 11 nt, Human adenovirus D
auacugcuauc

SEQ ID NO: 110686 - RNA, 14 nt, Human adenovirus D
auacuccagugcau

SEQ ID NO: 110687 - RNA, 15 nt, Human adenovirus D
auagaguaagcacua

SEQ ID NO: 110688 - RNA, 19 nt, Human adenovirus D
auacacgcaguuguuucau

SEQ ID NO: 110689 - RNA, 22 nt, Human adenovirus D
auacaaagcugaaagcuauaaa

SEQ ID NO: 110690 - RNA, 16 nt, Human adenovirus D
auaccaucaaugcuac

SEQ ID NO: 110691 - RNA, 18 nt, Human adenovirus D
auaccaucaaugcuacau

SEQ ID NO: 110692 - RNA, 20 nt, Human adenovirus D
auccacaaacuacauggaca

SEQ ID NO: 110693 - RNA, 12 nt, Human adenovirus D
auccacacaguu

SEQ ID NO: 110694 - RNA, 18 nt, Human adenovirus D
auccagccuguacccaga

SEQ ID NO: 110695 - RNA, 19 nt, Human adenovirus D
auccagccuguacccagag

SEQ ID NO: 110696 - RNA, 15 nt, Human adenovirus D
auccucaccacagag

SEQ ID NO: 110697 - RNA, 23 nt, Human adenovirus D
auccugcauugccacuguucauc

SEQ ID NO: 110698 - RNA, 16 nt, Human adenovirus D
aucugcaucucaagca

SEQ ID NO: 110699 - RNA, 16 nt, Human adenovirus D
aucucccaccaccagc

SEQ ID NO: 110700 - RNA, 15 nt, Human adenovirus D
aucaacaucaguuca

SEQ ID NO: 110701 - RNA, 12 nt, Human adenovirus D
aucaacauccac

SEQ ID NO: 110702 - RNA, 22 nt, Human adenovirus D
aucaaugcuacauggugggcua

SEQ ID NO: 110703 - RNA, 23 nt, Human adenovirus D
aucaaugcuacauggugggcuaa

SEQ ID NO: 110704 - RNA, 17 nt, Human adenovirus D
aucagacauaguuguaa

SEQ ID NO: 110705 - RNA, 14 nt, Human adenovirus D
aucagaacauuucc

SEQ ID NO: 110706 - RNA, 17 nt, Human adenovirus D
auauuugugaauggaau

SEQ ID NO: 110707 - RNA, 13 nt, Human adenovirus D
agcgcauccugca

SEQ ID NO: 110708 - RNA, 23 nt, Human adenovirus D
agcgaugggggcaauaccgggau

SEQ ID NO: 110709 - RNA, 15 nt, Human adenovirus D
agccuguacccagag

SEQ ID NO: 110710 - RNA, 21 nt, Human adenovirus D
agccuguacccagagcuuagc

SEQ ID NO: 110711 - RNA, 18 nt, Human adenovirus D
agcgguggcguguucgau

SEQ ID NO: 110712 - RNA, 18 nt, Human adenovirus D
agcgggccucacagucca

SEQ ID NO: 110713 - RNA, 15 nt, Human adenovirus D
agcucaucgacuggu

SEQ ID NO: 110714 - RNA, 17 nt, Human adenovirus D
agcucaucgacuggugc

SEQ ID NO: 110715 - RNA, 18 nt, Human adenovirus D
agcucaucgacuggugcu

SEQ ID NO: 110716 - RNA, 21 nt, Human adenovirus D
agcucaucgacuggugcugcg

SEQ ID NO: 110717 - RNA, 21 nt, Human adenovirus D
agcucguccgggaaaaccucc

SEQ ID NO: 110718 - RNA, 21 nt, Human adenovirus D
agcuccucgaugccaucaaca

SEQ ID NO: 110719 - RNA, 17 nt, Human adenovirus D
agcauugucugccuggu

SEQ ID NO: 110720 - RNA, 18 nt, Human adenovirus D
agccacgauguaacauca

SEQ ID NO: 110721 - RNA, 19 nt, Human adenovirus D
agccacgauguaacaucac

SEQ ID NO: 110722 - RNA, 18 nt, Human adenovirus D
agccccggaccccgccau

SEQ ID NO: 110723 - RNA, 13 nt, Human adenovirus D
agcccauuucaca

SEQ ID NO: 110724 - RNA, 17 nt, Human adenovirus D
agccgcagccgccauga

SEQ ID NO: 110725 - RNA, 13 nt, Human adenovirus D
agccgccaugaca

SEQ ID NO: 110726 - RNA, 14 nt, Human adenovirus D
agccgccaugacag

SEQ ID NO: 110727 - RNA, 16 nt, Human adenovirus D
aguacauagugaccaa

SEQ ID NO: 110728 - RNA, 18 nt, Human adenovirus D
aguacauagugaccaaga

SEQ ID NO: 110729 - RNA, 20 nt, Human adenovirus D
aguacauagugaccaagacc

SEQ ID NO: 110730 - RNA, 18 nt, Human adenovirus D
aguaccaucugcaucuca

SEQ ID NO: 110731 - RNA, 18 nt, Human adenovirus D
agguacgcaagagaaucc

SEQ ID NO: 110732 - RNA, 21 nt, Human adenovirus D
agguacgcaagagaauccacu

SEQ ID NO: 110733 - RNA, 16 nt, Human adenovirus D
agucaggcaggauuca

SEQ ID NO: 110734 - RNA, 17 nt, Human adenovirus D
aguccuuuagacaacag

SEQ ID NO: 110735 - RNA, 19 nt, Human adenovirus D
aguccuuuagacaacagcc

SEQ ID NO: 110736 - RNA, 15 nt, Human adenovirus D
agucaugugugauau

SEQ ID NO: 110737 - RNA, 18 nt, Human adenovirus D
agucaugugugauaucac

SEQ ID NO: 110738 - RNA, 21 nt, Human adenovirus D
agucaugugugauaucacacu

SEQ ID NO: 110739 - RNA, 18 nt, Human adenovirus D
aggacuuguuacaugaca

SEQ ID NO: 110740 - RNA, 17 nt, Human adenovirus D
aggcaaagaucaccuac

SEQ ID NO: 110741 - RNA, 14 nt, Human adenovirus D
aggcaaugagagga

SEQ ID NO: 110742 - RNA, 19 nt, Human adenovirus D
agggcaucuucugccuggu

SEQ ID NO: 110743 - RNA, 15 nt, Human adenovirus D
aggcgagcagcuguu

SEQ ID NO: 110744 - RNA, 14 nt, Human adenovirus D
aggcgcgagcucag

SEQ ID NO: 110745 - RNA, 14 nt, Human adenovirus D
aggcuuucacagcu

SEQ ID NO: 110746 - RNA, 23 nt, Human adenovirus D
aggcccgcuuggaugacuuuuca

SEQ ID NO: 110747 - RNA, 18 nt, Human adenovirus D
aggcagaagaugcccuuc

SEQ ID NO: 110748 - RNA, 21 nt, Human adenovirus D
caccuaugagaugccccagca

SEQ ID NO: 110749 - RNA, 19 nt, Human adenovirus D
caccugcgucugcagcauu

SEQ ID NO: 110750 - RNA, 19 nt, Human adenovirus D
caccuugaaagggauguca

SEQ ID NO: 110751 - RNA, 21 nt, Human adenovirus D
caccuugaaagggaugucaaa

SEQ ID NO: 110752 - RNA, 22 nt, Human adenovirus D
caccuugaaagggaugucaaau

SEQ ID NO: 110753 - RNA, 22 nt, Human adenovirus D
cacgaacagccacgauguaaca

SEQ ID NO: 110754 - RNA, 11 nt, Human adenovirus D
cacguuuauug

SEQ ID NO: 110755 - RNA, 20 nt, Human adenovirus D
cacguuuauuggucuuuuau

SEQ ID NO: 110756 - RNA, 22 nt, Human adenovirus D
cacugcauguggcuagacuuca

SEQ ID NO: 110757 - RNA, 23 nt, Human adenovirus D
cacugacugaucaacauccccug

SEQ ID NO: 110758 - RNA, 16 nt, Human adenovirus D
cacugguggauguuga

SEQ ID NO: 110759 - RNA, 21 nt, Human adenovirus D
cacuguccaugguagcaaugg

SEQ ID NO: 110760 - RNA, 22 nt, Human adenovirus D
cacuguccaugguagcaaugga

SEQ ID NO: 110761 - RNA, 15 nt, Human adenovirus D
cagaacuuccagcag

SEQ ID NO: 110762 - RNA, 19 nt, Human adenovirus D
cagaagaagaccacccgug

SEQ ID NO: 110763 - RNA, 17 nt, Human adenovirus D
cagaagcagaaguucac

SEQ ID NO: 110764 - RNA, 13 nt, Human adenovirus D
cagaagguggugg

SEQ ID NO: 110765 - RNA, 18 nt, Human adenovirus D
cagaaguacgacaaggua

SEQ ID NO: 110766 - RNA, 21 nt, Human adenovirus D
cagaaucuucgagaauggaug

SEQ ID NO: 110767 - RNA, 16 nt, Human adenovirus D
cacaguagucaucaaa

SEQ ID NO: 110768 - RNA, 14 nt, Human adenovirus D
cacaguuauaccac

SEQ ID NO: 110769 - RNA, 23 nt, Human adenovirus D
caccaucagacugggguacuuua

SEQ ID NO: 110770 - RNA, 15 nt, Human adenovirus D
caccaugcaggugaa

SEQ ID NO: 110771 - RNA, 22 nt, Human adenovirus D
caccaguuugggcacugggguc

SEQ ID NO: 110772 - RNA, 21 nt, Human adenovirus D
caccagcccauuucacagugu

SEQ ID NO: 110773 - RNA, 16 nt, Human adenovirus D
cacacuuuugguuuca

SEQ ID NO: 110774 - RNA, 22 nt, Human adenovirus D
cacacuuuugguuucaaauuca

SEQ ID NO: 110775 - RNA, 23 nt, Human adenovirus D
cacacuuuugguuucaaauucau

SEQ ID NO: 110776 - RNA, 19 nt, Human adenovirus D
cacacuuaguucagcugca

SEQ ID NO: 110777 - RNA, 19 nt, Human adenovirus D
caaugagaggagugugaua

SEQ ID NO: 110778 - RNA, 19 nt, Human adenovirus D
caaucucccaccaccagcc

SEQ ID NO: 110779 - RNA, 17 nt, Human adenovirus D
caaggugcugacaucca

SEQ ID NO: 110780 - RNA, 20 nt, Human adenovirus D
caaggugugguuuaugacuc

SEQ ID NO: 110781 - RNA, 21 nt, Human adenovirus D
caaguaccaucugcaucucaa

SEQ ID NO: 110782 - RNA, 20 nt, Human adenovirus D
caaucagccccuuccccuau

SEQ ID NO: 110783 - RNA, 13 nt, Human adenovirus D
caaccagagccag

SEQ ID NO: 110784 - RNA, 16 nt, Human adenovirus D
caaccagagccagaau

SEQ ID NO: 110785 - RNA, 23 nt, Human adenovirus D
caacauccaccagugcaagaagg

SEQ ID NO: 110786 - RNA, 15 nt, Human adenovirus D
caacaucacauucaa

SEQ ID NO: 110787 - RNA, 15 nt, Human adenovirus D
caacaucugugcugc

SEQ ID NO: 110788 - RNA, 16 nt, Human adenovirus D
caacaucugugcugcc

SEQ ID NO: 110789 - RNA, 24 nt, Human adenovirus D
caacauuacuucuggcacauacaa

SEQ ID NO: 110790 - RNA, 18 nt, Human adenovirus D
caacaaaaccacauuuga

SEQ ID NO: 110791 - RNA, 20 nt, Human adenovirus D
auuacuucuggcacauacaa

SEQ ID NO: 110792 - RNA, 17 nt, Human adenovirus D
auugauacccuggacaa

SEQ ID NO: 110793 - RNA, 19 nt, Human adenovirus D
caaaacccaugaaagaaca

SEQ ID NO: 110794 - RNA, 15 nt, Human adenovirus D
caaaaccacauuuga

SEQ ID NO: 110795 - RNA, 23 nt, Human adenovirus D
auuuuugaagucaugugugauau

SEQ ID NO: 110796 - RNA, 14 nt, Human adenovirus D
auuuuuacaccagc

SEQ ID NO: 110797 - RNA, 16 nt, Human adenovirus D
auuuacaggacuuuuc

SEQ ID NO: 110798 - RNA, 19 nt, Human adenovirus D
auuucugcuggcagaagua

SEQ ID NO: 110799 - RNA, 16 nt, Human adenovirus D
auuucuuagacugcua

SEQ ID NO: 110800 - RNA, 17 nt, Human adenovirus D
auuucuuagacugcuau

SEQ ID NO: 110801 - RNA, 23 nt, Human adenovirus D
auggggcgccgcccgagcucugc

SEQ ID NO: 110802 - RNA, 20 nt, Human adenovirus D
augggacuuauccacaaacu

SEQ ID NO: 110803 - RNA, 23 nt, Human adenovirus D
augggacuuauccacaaacuaca

SEQ ID NO: 110804 - RNA, 15 nt, Human adenovirus D
augggaaaugcaugg

SEQ ID NO: 110805 - RNA, 21 nt, Human adenovirus D
auggcaucgaggagcuccuug

SEQ ID NO: 110806 - RNA, 20 nt, Human adenovirus D
augguaugauagcacuggau

SEQ ID NO: 110807 - RNA, 15 nt, Human adenovirus D
augguagcaauggaa

SEQ ID NO: 110808 - RNA, 23 nt, Human adenovirus D
augggucggucgggccagugcac

SEQ ID NO: 110809 - RNA, 16 nt, Human adenovirus D
augggucugugccucu

SEQ ID NO: 110810 - RNA, 23 nt, Human adenovirus D
augggguugacgcccaccaugca

SEQ ID NO: 110811 - RNA, 12 nt, Human adenovirus D
auuaaccuauaa

SEQ ID NO: 110812 - RNA, 19 nt, Human adenovirus D
auuaaagaaaaaacuacca

SEQ ID NO: 110813 - RNA, 18 nt, Human adenovirus D
auuaaaugauuaguucca

SEQ ID NO: 110814 - RNA, 19 nt, Human adenovirus D
auuaaaaaauuaaccuaua

SEQ ID NO: 110815 - RNA, 15 nt, Human adenovirus D
auguuaaugucacua

SEQ ID NO: 110816 - RNA, 13 nt, Human adenovirus D
augugugauauca

SEQ ID NO: 110817 - RNA, 16 nt, Human adenovirus D
auguuacugcauacaa

SEQ ID NO: 110818 - RNA, 22 nt, Human adenovirus D
auguggcuagacuucauggcuu

SEQ ID NO: 110819 - RNA, 20 nt, Human adenovirus D
cugcaccugcgucugcagca

SEQ ID NO: 110820 - RNA, 21 nt, Human adenovirus D
cugcuaucaggagaaaauuga

SEQ ID NO: 110821 - RNA, 17 nt, Human adenovirus D
cuggcacauacaaagcu

SEQ ID NO: 110822 - RNA, 18 nt, Human adenovirus D
cuggcagaaguacgacaa

SEQ ID NO: 110823 - RNA, 12 nt, Human adenovirus D
cuguguaucucg

SEQ ID NO: 110824 - RNA, 23 nt, Human adenovirus D
cuguuuuucagacucucaucucu

SEQ ID NO: 110825 - RNA, 18 nt, Human adenovirus D
cuguugcauguucuugca

SEQ ID NO: 110826 - RNA, 21 nt, Human adenovirus D
cuguugcauguucuugcaugc

SEQ ID NO: 110827 - RNA, 14 nt, Human adenovirus D
cucgaugccaucaa

SEQ ID NO: 110828 - RNA, 16 nt, Human adenovirus D
cuccuguuacuguaaa

SEQ ID NO: 110829 - RNA, 13 nt, Human adenovirus D
cucgcagacccuc

SEQ ID NO: 110830 - RNA, 21 nt, Human adenovirus D
cucgcguguacuugguggaca

SEQ ID NO: 110831 - RNA, 21 nt, Human adenovirus D
cucguaggugaucuuugccug

SEQ ID NO: 110832 - RNA, 23 nt, Human adenovirus D
cucggugcggcugcugcaaaugg

SEQ ID NO: 110833 - RNA, 19 nt, Human adenovirus D
cucguccgggaaaaccucc

SEQ ID NO: 110834 - RNA, 22 nt, Human adenovirus D
cucguguccaacggcaaacagc

SEQ ID NO: 110835 - RNA, 17 nt, Human adenovirus D
cucugcucauacugcua

SEQ ID NO: 110836 - RNA, 18 nt, Human adenovirus D
cucucagaugucaaagag

SEQ ID NO: 110837 - RNA, 13 nt, Human adenovirus D
cuacgcgaccgug

SEQ ID NO: 110838 - RNA, 23 nt, Human adenovirus D
cuauggcuacgcgcggaaucaga

SEQ ID NO: 110839 - RNA, 18 nt, Human adenovirus D
cucacaguccaggucaca

SEQ ID NO: 110840 - RNA, 14 nt, Human adenovirus D
cucaccaaggccau

SEQ ID NO: 110841 - RNA, 22 nt, Human adenovirus D
cucccaccaccagcccauuuca

SEQ ID NO: 110842 - RNA, 19 nt, Human adenovirus D
cucauaaagaagacuauaa

SEQ ID NO: 110843 - RNA, 13 nt, Human adenovirus D
cucauacugcuau

SEQ ID NO: 110844 - RNA, 17 nt, Human adenovirus D
cgccucggaguaccuga

SEQ ID NO: 110845 - RNA, 20 nt, Human adenovirus D
cgcccagauugcaaguacau

SEQ ID NO: 110846 - RNA, 19 nt, Human adenovirus D
cgcagugggcguacaugca

SEQ ID NO: 110847 - RNA, 15 nt, Human adenovirus D
cgccaaggagcuccu

SEQ ID NO: 110848 - RNA, 20 nt, Human adenovirus D
ccuguugcccgauugugauc

SEQ ID NO: 110849 - RNA, 13 nt, Human adenovirus D
cgcaguugggacc

SEQ ID NO: 110850 - RNA, 16 nt, Human adenovirus D
cgcagccgccaugaca

SEQ ID NO: 110851 - RNA, 16 nt, Human adenovirus D
cgcgaaccaggcagug

SEQ ID NO: 110852 - RNA, 23 nt, Human adenovirus D
cgcgagaccggaggcgugcacug

SEQ ID NO: 110853 - RNA, 18 nt, Human adenovirus D
cgccucggaguaccugag

SEQ ID NO: 110854 - RNA, 20 nt, Human adenovirus D
aaacaggcaaagaucaccua

SEQ ID NO: 110855 - RNA, 21 nt, Human adenovirus D
cgcguaggccgcuacaacagc

SEQ ID NO: 110856 - RNA, 22 nt, Human adenovirus D
cgcuggcggagaacaaggccau

SEQ ID NO: 110857 - RNA, 13 nt, Human adenovirus D
cgcuguguaucuc

SEQ ID NO: 110858 - RNA, 15 nt, Human adenovirus D
cgcuacaauuacuuc

SEQ ID NO: 110859 - RNA, 17 nt, Human adenovirus D
cgcuacaauuacuucau

SEQ ID NO: 110860 - RNA, 14 nt, Human adenovirus D
cguggaugagguac

SEQ ID NO: 110861 - RNA, 17 nt, Human adenovirus D
cguguacacugugaaau

SEQ ID NO: 110862 - RNA, 16 nt, Human adenovirus D
cuacacggucacuguc

SEQ ID NO: 110863 - RNA, 16 nt, Human adenovirus D
cuacauggugggcuaa

SEQ ID NO: 110864 - RNA, 23 nt, Human adenovirus D
cuacauggugggcuaauauaacu

SEQ ID NO: 110865 - RNA, 15 nt, Human adenovirus D
cuaccaaggauaaca

SEQ ID NO: 110866 - RNA, 13 nt, Human adenovirus D
cuacaaugcaaac

SEQ ID NO: 110867 - RNA, 12 nt, Human adenovirus D
cguccucugaaa

SEQ ID NO: 110868 - RNA, 16 nt, Human adenovirus D
cgguacugguacuugg

SEQ ID NO: 110869 - RNA, 18 nt, Human adenovirus D
cggacggaucgcccaggc

SEQ ID NO: 110870 - RNA, 17 nt, Human adenovirus D
caguuugggcacugggg

SEQ ID NO: 110871 - RNA, 16 nt, Human adenovirus D
cagugugccugugccc

SEQ ID NO: 110872 - RNA, 23 nt, Human adenovirus D
caguggcgagaggcgagcagcug

SEQ ID NO: 110873 - RNA, 17 nt, Human adenovirus D
cagugggcguacaugca

SEQ ID NO: 110874 - RNA, 17 nt, Human adenovirus D
cagucacucucauuuca

SEQ ID NO: 110875 - RNA, 14 nt, Human adenovirus D
caguccaggucaca

SEQ ID NO: 110876 - RNA, 20 nt, Human adenovirus D
cauaagggcggcgcugcaaa

SEQ ID NO: 110877 - RNA, 22 nt, Human adenovirus D
cauaaagaagacuauaaaguca

SEQ ID NO: 110878 - RNA, 13 nt, Human adenovirus D
cauacaaagcuga

SEQ ID NO: 110879 - RNA, 17 nt, Human adenovirus D
cauaauguaaguucugu

SEQ ID NO: 110880 - RNA, 14 nt, Human adenovirus D
cauacaugggcuau

SEQ ID NO: 110881 - RNA, 14 nt, Human adenovirus D
caggcaggauucau

SEQ ID NO: 110882 - RNA, 15 nt, Human adenovirus D
caggcaggauucaua

SEQ ID NO: 110883 - RNA, 20 nt, Human adenovirus D
cagacucugcucauacugcu

SEQ ID NO: 110884 - RNA, 21 nt, Human adenovirus D
cagacucugcucauacugcua

SEQ ID NO: 110885 - RNA, 15 nt, Human adenovirus D
cagacauaguuguaa

SEQ ID NO: 110886 - RNA, 22 nt, Human adenovirus D
cagacauaguuguaaugaucaa

SEQ ID NO: 110887 - RNA, 11 nt, Human adenovirus D
cagacaucaug

SEQ ID NO: 110888 - RNA, 21 nt, Human adenovirus D
cagacaugcugcuacaucucg

SEQ ID NO: 110889 - RNA, 21 nt, Human adenovirus D
cagggaugaguugggccugau

SEQ ID NO: 110890 - RNA, 14 nt, Human adenovirus D
cagggcuucacuga

SEQ ID NO: 110891 - RNA, 15 nt, Human adenovirus D
cagggcuucacugac

SEQ ID NO: 110892 - RNA, 20 nt, Human adenovirus D
ccaacugcgcgcccucgucu

SEQ ID NO: 110893 - RNA, 23 nt, Human adenovirus D
cauuugaagauucuggaaauuau

SEQ ID NO: 110894 - RNA, 14 nt, Human adenovirus D
cauuucagaaccau

SEQ ID NO: 110895 - RNA, 17 nt, Human adenovirus D
cauuacuauuacugcca

SEQ ID NO: 110896 - RNA, 14 nt, Human adenovirus D
cauagugaccaaga

SEQ ID NO: 110897 - RNA, 23 nt, Human adenovirus D
cauagugaccaagaccgugaaua

SEQ ID NO: 110898 - RNA, 17 nt, Human adenovirus D
cauauacuccagugcau

SEQ ID NO: 110899 - RNA, 18 nt, Human adenovirus D
cauuaaaguuuucccuca

SEQ ID NO: 110900 - RNA, 17 nt, Human adenovirus D
caugugugauaucacac

SEQ ID NO: 110901 - RNA, 20 nt, Human adenovirus D
caugugugauaucacacugc

SEQ ID NO: 110902 - RNA, 18 nt, Human adenovirus D
caugugaacaaaacccau

SEQ ID NO: 110903 - RNA, 21 nt, Human adenovirus D
caugugaacaaaacccaugaa

SEQ ID NO: 110904 - RNA, 22 nt, Human adenovirus D
caugugaacaaaacccaugaaa

SEQ ID NO: 110905 - RNA, 13 nt, Human adenovirus D
caucugcaucuca

SEQ ID NO: 110906 - RNA, 20 nt, Human adenovirus D
caugcccucgcuacugcuga

SEQ ID NO: 110907 - RNA, 18 nt, Human adenovirus D
caugcccucucaacauca

SEQ ID NO: 110908 - RNA, 19 nt, Human adenovirus D
caugcccucucaacaucac

SEQ ID NO: 110909 - RNA, 20 nt, Human adenovirus D
caugcccagcagcagcagua

SEQ ID NO: 110910 - RNA, 17 nt, Human adenovirus D
cauggacaagauaucau

SEQ ID NO: 110911 - RNA, 15 nt, Human adenovirus D
ccauagucaucaccc

SEQ ID NO: 110912 - RNA, 19 nt, Human adenovirus D
ccaucagacugggguacuu

SEQ ID NO: 110913 - RNA, 15 nt, Human adenovirus D
ccaucaaugcuacau

SEQ ID NO: 110914 - RNA, 14 nt, Human adenovirus D
ccagaccgugcagg

SEQ ID NO: 110915 - RNA, 15 nt, Human adenovirus D
ccagagccagaauau

SEQ ID NO: 110916 - RNA, 13 nt, Human adenovirus D
cccaguuccauca

SEQ ID NO: 110917 - RNA, 20 nt, Human adenovirus D
cccagcuguugagaaaccug

SEQ ID NO: 110918 - RNA, 22 nt, Human adenovirus D
cccagcuguugagaaaccugcu

SEQ ID NO: 110919 - RNA, 21 nt, Human adenovirus D
cccaugcccucgcuacugcug

SEQ ID NO: 110920 - RNA, 19 nt, Human adenovirus D
cccauugguugaacccaga

SEQ ID NO: 110921 - RNA, 19 nt, Human adenovirus D
cccaugaaagaacauacau

SEQ ID NO: 110922 - RNA, 13 nt, Human adenovirus D
cccauagucauca

SEQ ID NO: 110923 - RNA, 16 nt, Human adenovirus D
cccgauugugaucaug

SEQ ID NO: 110924 - RNA, 22 nt, Human adenovirus D
cccgauugugaucaugcagauu

SEQ ID NO: 110925 - RNA, 13 nt, Human adenovirus D
ccccucugaauga

SEQ ID NO: 110926 - RNA, 15 nt, Human adenovirus D
ccccucugaaugaua

SEQ ID NO: 110927 - RNA, 21 nt, Human adenovirus D
cccgcgcagcuacgggcucau

SEQ ID NO: 110928 - RNA, 13 nt, Human adenovirus D
aaaauuacauuga

SEQ ID NO: 110929 - RNA, 14 nt, Human adenovirus D
aaaauuacauugaa

SEQ ID NO: 110930 - RNA, 14 nt, Human adenovirus D
ccugugcaauguca

SEQ ID NO: 110931 - RNA, 15 nt, Human adenovirus D
ccugugcaaugucag

SEQ ID NO: 110932 - RNA, 17 nt, Human adenovirus D
ccugugccccgcuaccc

SEQ ID NO: 110933 - RNA, 16 nt, Human adenovirus D
aaacaaucagccccuu

SEQ ID NO: 110934 - RNA, 17 nt, Human adenovirus D
ccugcccccggaccugg

SEQ ID NO: 110935 - RNA, 22 nt, Human adenovirus D
ccugcccccggaccuggaucuc

SEQ ID NO: 110936 - RNA, 18 nt, Human adenovirus D
ccuccccaugaacugaug

SEQ ID NO: 110937 - RNA, 16 nt, Human adenovirus D
ccuccgauggauucaa

SEQ ID NO: 110938 - RNA, 20 nt, Human adenovirus D
ccuaguucuuccuauuuaac

SEQ ID NO: 110939 - RNA, 22 nt, Human adenovirus D
ccguuuaccacgaucugaugau

SEQ ID NO: 110940 - RNA, 22 nt, Human adenovirus D
ccuacagaguccuggcugaugu

SEQ ID NO: 110941 - RNA, 19 nt, Human adenovirus D
cccugcccccggaccugga

SEQ ID NO: 110942 - RNA, 19 nt, Human adenovirus D
cccugcgcccagauugcaa

SEQ ID NO: 110943 - RNA, 17 nt, Human adenovirus D
cccucucaacaucacau

SEQ ID NO: 110944 - RNA, 17 nt, Human adenovirus D
cccucucagaugucaaa

SEQ ID NO: 110945 - RNA, 13 nt, Human adenovirus D
cccucugaaugau

SEQ ID NO: 110946 - RNA, 18 nt, Human adenovirus D
cccuuccccuaucccaaa

SEQ ID NO: 110947 - RNA, 14 nt, Human adenovirus D
cccuucuugcacug

SEQ ID NO: 110948 - RNA, 23 nt, Human adenovirus D
ggaugacugagcggcagcagcga

SEQ ID NO: 110949 - RNA, 16 nt, Human adenovirus D
ggauucaaaaacuucc

SEQ ID NO: 110950 - RNA, 14 nt, Human adenovirus D
ggaccucagauauu

SEQ ID NO: 110951 - RNA, 23 nt, Human adenovirus D
ggaccucagauauuccagaucac

SEQ ID NO: 110952 - RNA, 18 nt, Human adenovirus D
ggacauauggaauuucuu

SEQ ID NO: 110953 - RNA, 14 nt, Human adenovirus D
ggacaagauaucau

SEQ ID NO: 110954 - RNA, 13 nt, Human adenovirus D
ggacagcucccaa

SEQ ID NO: 110955 - RNA, 13 nt, Human adenovirus D
ggcagcggccuga

SEQ ID NO: 110956 - RNA, 18 nt, Human adenovirus D
ggcagcaccuguggcgau

SEQ ID NO: 110957 - RNA, 22 nt, Human adenovirus D
ggcagccgcagccgccaugaca

SEQ ID NO: 110958 - RNA, 20 nt, Human adenovirus D
ggcauuaacgggguggugga

SEQ ID NO: 110959 - RNA, 21 nt, Human adenovirus D
ggcgaacuuucuccacaccuu

SEQ ID NO: 110960 - RNA, 14 nt, Human adenovirus D
ggcugaugugauga

SEQ ID NO: 110961 - RNA, 13 nt, Human adenovirus D
ggcucaucugcag

SEQ ID NO: 110962 - RNA, 21 nt, Human adenovirus D
gggacuuauccacaaacuaca

SEQ ID NO: 110963 - RNA, 22 nt, Human adenovirus D
gggaugaguugggccugaugca

SEQ ID NO: 110964 - RNA, 12 nt, Human adenovirus D
gggaugucaaau

SEQ ID NO: 110965 - RNA, 19 nt, Human adenovirus D
gggcaucucauaggugagg

SEQ ID NO: 110966 - RNA, 13 nt, Human adenovirus D
gggccgccacucc

SEQ ID NO: 110967 - RNA, 12 nt, Human adenovirus D
gggcguacaugc

SEQ ID NO: 110968 - RNA, 12 nt, Human adenovirus D
gggcgcccagug

SEQ ID NO: 110969 - RNA, 13 nt, Human adenovirus D
gggcgccuucaau

SEQ ID NO: 110970 - RNA, 18 nt, Human adenovirus D
gggcucgucagccucucc

SEQ ID NO: 110971 - RNA, 14 nt, Human adenovirus D
gggcguacaugcac

SEQ ID NO: 110972 - RNA, 14 nt, Human adenovirus D
gggcuaguguacaa

SEQ ID NO: 110973 - RNA, 13 nt, Human adenovirus D
ggggaguggcgcg

SEQ ID NO: 110974 - RNA, 17 nt, Human adenovirus D
ggaacaaggccuggaau

SEQ ID NO: 110975 - RNA, 16 nt, Human adenovirus D
ggaagaugacuucaac

SEQ ID NO: 110976 - RNA, 12 nt, Human adenovirus D
ggaaguacaguu

SEQ ID NO: 110977 - RNA, 18 nt, Human adenovirus D
gcuuuugugaucauggcc

SEQ ID NO: 110978 - RNA, 12 nt, Human adenovirus D
gcuuucuugccg

SEQ ID NO: 110979 - RNA, 13 nt, Human adenovirus D
gcuuuaucacuca

SEQ ID NO: 110980 - RNA, 14 nt, Human adenovirus D
gcuaucgcucuuau

SEQ ID NO: 110981 - RNA, 15 nt, Human adenovirus D
gcuagacauggccag

SEQ ID NO: 110982 - RNA, 19 nt, Human adenovirus D
gcgcauccugcaacugcgc

SEQ ID NO: 110983 - RNA, 13 nt, Human adenovirus D
gcugaaagcuaua

SEQ ID NO: 110984 - RNA, 20 nt, Human adenovirus D
gcugauuacucuaaaugcaa

SEQ ID NO: 110985 - RNA, 18 nt, Human adenovirus D
gcugacggccagucugau

SEQ ID NO: 110986 - RNA, 21 nt, Human adenovirus D
gcugacggccagucugaugaa

SEQ ID NO: 110987 - RNA, 12 nt, Human adenovirus D
gcccaccaugca

SEQ ID NO: 110988 - RNA, 22 nt, Human adenovirus D
gcccgacugcugggugaugacu

SEQ ID NO: 110989 - RNA, 14 nt, Human adenovirus D
gccaggggagugaa

SEQ ID NO: 110990 - RNA, 18 nt, Human adenovirus D
gccagacgcaagagccgg

SEQ ID NO: 110991 - RNA, 22 nt, Human adenovirus D
gccagaauuuuaaggcucauau

SEQ ID NO: 110992 - RNA, 12 nt, Human adenovirus D
gccaaggagcuc

SEQ ID NO: 110993 - RNA, 15 nt, Human adenovirus D
gcauagucacacuua

SEQ ID NO: 110994 - RNA, 16 nt, Human adenovirus D
gcccucucaacaucac

SEQ ID NO: 110995 - RNA, 19 nt, Human adenovirus D
gccucuccguccucgagga

SEQ ID NO: 110996 - RNA, 15 nt, Human adenovirus D
gcgaugggggcaaua

SEQ ID NO: 110997 - RNA, 22 nt, Human adenovirus D
gcgauucccgggcuuucuugcc

SEQ ID NO: 110998 - RNA, 23 nt, Human adenovirus D
gcgagcucguccgggaaaaccuc

SEQ ID NO: 110999 - RNA, 17 nt, Human adenovirus D
gcgacaagcuggccugc

SEQ ID NO: 111000 - RNA, 20 nt, Human adenovirus D
gccuggaauaguagcacggg

SEQ ID NO: 111001 - RNA, 21 nt, Human adenovirus D
gcgaacaugaaaaccaccagc

SEQ ID NO: 111002 - RNA, 21 nt, Human adenovirus D
gcaaguacauagugaccaaga

SEQ ID NO: 111003 - RNA, 22 nt, Human adenovirus D
gcaagcgcccagagcgccuuac

SEQ ID NO: 111004 - RNA, 20 nt, Human adenovirus D
gcaauaccgggaugaugacc

SEQ ID NO: 111005 - RNA, 20 nt, Human adenovirus D
gcaaugagaggagugugaua

SEQ ID NO: 111006 - RNA, 15 nt, Human adenovirus D
gcaauggaaaucaca

SEQ ID NO: 111007 - RNA, 15 nt, Human adenovirus D
gcaagagcuccucuc

SEQ ID NO: 111008 - RNA, 16 nt, Human adenovirus D
gcaacuuccugaccac

SEQ ID NO: 111009 - RNA, 21 nt, Human adenovirus D
gcaccucgguacccuccuccc

SEQ ID NO: 111010 - RNA, 18 nt, Human adenovirus D
gcaccugcgucugcagca

SEQ ID NO: 111011 - RNA, 19 nt, Human adenovirus D
gcaccugcgucugcagcau

SEQ ID NO: 111012 - RNA, 21 nt, Human adenovirus D
gcagaaguucaccugcauggu

SEQ ID NO: 111013 - RNA, 14 nt, Human adenovirus D
gcagaaccaugaau

SEQ ID NO: 111014 - RNA, 21 nt, Human adenovirus D
gcagaagaugcccuucuugca

SEQ ID NO: 111015 - RNA, 15 nt, Human adenovirus D
gcagaggaacuucuc

SEQ ID NO: 111016 - RNA, 13 nt, Human adenovirus D
gcagaguacucau

SEQ ID NO: 111017 - RNA, 22 nt, Human adenovirus D
gcacugguggauguugauggca

SEQ ID NO: 111018 - RNA, 12 nt, Human adenovirus D
gcaggagugcag

SEQ ID NO: 111019 - RNA, 18 nt, Human adenovirus D
gcaggagcaguggaugca

SEQ ID NO: 111020 - RNA, 17 nt, Human adenovirus D
gcagcgcauccugcaac

SEQ ID NO: 111021 - RNA, 14 nt, Human adenovirus D
gagcauacaugccc

SEQ ID NO: 111022 - RNA, 19 nt, Human adenovirus D
gagcagaacuacacgguca

SEQ ID NO: 111023 - RNA, 15 nt, Human adenovirus D
gagaucuggaccugg

SEQ ID NO: 111024 - RNA, 16 nt, Human adenovirus D
aacaacaaaaccacau

SEQ ID NO: 111025 - RNA, 16 nt, Human adenovirus D
gauauuccagaucaca

SEQ ID NO: 111026 - RNA, 15 nt, Human adenovirus D
gagugcagggaugag

SEQ ID NO: 111027 - RNA, 23 nt, Human adenovirus D
gagcucugggacgucucgaacuc

SEQ ID NO: 111028 - RNA, 23 nt, Human adenovirus D
gagcccgggucuggugcaguuug

SEQ ID NO: 111029 - RNA, 21 nt, Human adenovirus D
gacgcgguguaagcuaccaca

SEQ ID NO: 111030 - RNA, 13 nt, Human adenovirus D
aacaaaaccacau

SEQ ID NO: 111031 - RNA, 14 nt, Human adenovirus D
aacaaaacccauga

SEQ ID NO: 111032 - RNA, 16 nt, Human adenovirus D
aacaaaacccaugaaa

SEQ ID NO: 111033 - RNA, 21 nt, Human adenovirus D
gacgcccaccaugcaggugaa

SEQ ID NO: 111034 - RNA, 16 nt, Human adenovirus D
aaauguuauagaguaa

SEQ ID NO: 111035 - RNA, 13 nt, Human adenovirus D
aaauuaaccuaua

SEQ ID NO: 111036 - RNA, 13 nt, Human adenovirus D
aaauuacauugaa

SEQ ID NO: 111037 - RNA, 15 nt, Human adenovirus D
aaauuacauugaaug

SEQ ID NO: 111038 - RNA, 13 nt, Human adenovirus D
aaauuacucgcaa

SEQ ID NO: 111039 - RNA, 19 nt, Human adenovirus D
aaauugaggacuuguuaca

SEQ ID NO: 111040 - RNA, 22 nt, Human adenovirus D
aaaucauuggaacuaaucauuu

SEQ ID NO: 111041 - RNA, 22 nt, Human adenovirus D
gaccaacggcugcauccacugc

SEQ ID NO: 111042 - RNA, 14 nt, Human adenovirus D
gacaugcugcuaca

SEQ ID NO: 111043 - RNA, 20 nt, Human adenovirus D
gacauaguuguaaugaucaa

SEQ ID NO: 111044 - RNA, 20 nt, Human adenovirus D
gacauaacugggugaugcuu

SEQ ID NO: 111045 - RNA, 19 nt, Human adenovirus D
gaauuucuuagacugcuau

SEQ ID NO: 111046 - RNA, 20 nt, Human adenovirus D
gaauuucuuagacugcuauc

SEQ ID NO: 111047 - RNA, 17 nt, Human adenovirus D
gaaaugggcugguggug

SEQ ID NO: 111048 - RNA, 19 nt, Human adenovirus D
gaacuggacuuggggucua

SEQ ID NO: 111049 - RNA, 23 nt, Human adenovirus D
gaagacuauaaagucacaguuau

SEQ ID NO: 111050 - RNA, 22 nt, Human adenovirus D
gaacuuucuccacaccuugaaa

SEQ ID NO: 111051 - RNA, 17 nt, Human adenovirus D
aaacccaugaaagaaca

SEQ ID NO: 111052 - RNA, 13 nt, Human adenovirus D
gaaggugguggac

SEQ ID NO: 111053 - RNA, 12 nt, Human adenovirus D
gaaguaugccaa

SEQ ID NO: 111054 - RNA, 13 nt, Human adenovirus D
aaagagagcuuau

SEQ ID NO: 111055 - RNA, 19 nt, Human adenovirus D
aaagagagcuuauuccagc

SEQ ID NO: 111056 - RNA, 15 nt, Human adenovirus D
aaagaggcuccgggu

SEQ ID NO: 111057 - RNA, 12 nt, Human adenovirus D
aaagauacauaa

SEQ ID NO: 111058 - RNA, 12 nt, Human adenovirus D
aaagaucacuua

SEQ ID NO: 111059 - RNA, 18 nt, Human adenovirus D
gaaaaaacuaccacgcuu

SEQ ID NO: 111060 - RNA, 12 nt, Human adenovirus D
gaaaacaggaug

SEQ ID NO: 111061 - RNA, 14 nt, Human adenovirus D
gaaaaccaccagcc

SEQ ID NO: 111062 - RNA, 19 nt, Human adenovirus D
gaaaagcucaaagaccaga

SEQ ID NO: 111063 - RNA, 23 nt, Human adenovirus D
gaaagaacauacaugggcuauaa

SEQ ID NO: 111064 - RNA, 17 nt, Human adenovirus D
gaaacgucccagcagca

SEQ ID NO: 111065 - RNA, 21 nt, Human adenovirus D
cuuuuagucaggcaggauuca

SEQ ID NO: 111066 - RNA, 22 nt, Human adenovirus D
cuuuuauuuuacaugcacugga

SEQ ID NO: 111067 - RNA, 23 nt, Human adenovirus D
cuuuuauuuuacaugcacuggag

SEQ ID NO: 111068 - RNA, 19 nt, Human adenovirus D
cuuuugguuucaaauucau

SEQ ID NO: 111069 - RNA, 20 nt, Human adenovirus D
cuuaagugacuuuuugcagc

SEQ ID NO: 111070 - RNA, 21 nt, Human adenovirus D
cuuaagugacuuuuugcagcu

SEQ ID NO: 111071 - RNA, 15 nt, Human adenovirus D
cuuaacucugauuca

SEQ ID NO: 111072 - RNA, 17 nt, Human adenovirus D
cuuaacucugauucaug

SEQ ID NO: 111073 - RNA, 14 nt, Human adenovirus D
cuuucacagcuugc

SEQ ID NO: 111074 - RNA, 14 nt, Human adenovirus D
gggguguacuguca

SEQ ID NO: 111075 - RNA, 15 nt, Human adenovirus D
gggguguacugucau

SEQ ID NO: 111076 - RNA, 23 nt, Human adenovirus D
gggucugugccucuccaucagcg

SEQ ID NO: 111077 - RNA, 23 nt, Human adenovirus D
guacucauaaagaagacuauaaa

SEQ ID NO: 111078 - RNA, 13 nt, Human adenovirus D
guaggugaucuuu

SEQ ID NO: 111079 - RNA, 14 nt, Human adenovirus D
guagucaucaaaug

SEQ ID NO: 111080 - RNA, 18 nt, Human adenovirus D
guagccccucugugccca

SEQ ID NO: 111081 - RNA, 21 nt, Human adenovirus D
guagccccucugugcccaguu

SEQ ID NO: 111082 - RNA, 21 nt, Human adenovirus D
gucaaucucccaccaccagcc

SEQ ID NO: 111083 - RNA, 15 nt, Human adenovirus D
gucaugugugauauc

SEQ ID NO: 111084 - RNA, 16 nt, Human adenovirus D
gucaugugugauauca

SEQ ID NO: 111085 - RNA, 17 nt, Human adenovirus D
gucaugugugauaucac

SEQ ID NO: 111086 - RNA, 12 nt, Human adenovirus D
guauaugcuguu

SEQ ID NO: 111087 - RNA, 20 nt, Human adenovirus D
guauccagccuguacccaga

SEQ ID NO: 111088 - RNA, 24 nt, Human adenovirus D
gucaaaagcgguggcguguucgau

SEQ ID NO: 111089 - RNA, 14 nt, Human adenovirus D
gucaaacaggcaaa

SEQ ID NO: 111090 - RNA, 21 nt, Human adenovirus D
gucaaccccauagucaucacc

SEQ ID NO: 111091 - RNA, 19 nt, Human adenovirus D
guggacaucgcgaaccagg

SEQ ID NO: 111092 - RNA, 20 nt, Human adenovirus D
guguaaauaaaguuguacaa

SEQ ID NO: 111093 - RNA, 14 nt, Human adenovirus D
guguacacugugaa

SEQ ID NO: 111094 - RNA, 10 nt, Human adenovirus D
gugcaagaag

SEQ ID NO: 111095 - RNA, 15 nt, Human adenovirus D
gugaggcgaugcugu

SEQ ID NO: 111096 - RNA, 16 nt, Human adenovirus D
gugagucccacgcagg

SEQ ID NO: 111097 - RNA, 23 nt, Human adenovirus D
gugauaugcacaguagucaucaa

SEQ ID NO: 111098 - RNA, 21 nt, Human adenovirus D
gugaucauggccugugcaaug

SEQ ID NO: 111099 - RNA, 17 nt, Human adenovirus D
gugaucugaagaccauu

SEQ ID NO: 111100 - RNA, 21 nt, Human adenovirus D
guggacaacaagucggcggac

SEQ ID NO: 111101 - RNA, 20 nt, Human adenovirus D
gucccuucucggaccaaccc

SEQ ID NO: 111102 - RNA, 23 nt, Human adenovirus D
guccguggauuaccaugugcugc

SEQ ID NO: 111103 - RNA, 20 nt, Human adenovirus D
guccaguucccgcaauaauc

SEQ ID NO: 111104 - RNA, 20 nt, Human adenovirus D
gucuucccucucagauguca

SEQ ID NO: 111105 - RNA, 22 nt, Human adenovirus D
gucuucccucucagaugucaaa

SEQ ID NO: 111106 - RNA, 13 nt, Human adenovirus D
guugaacccagau

SEQ ID NO: 111107 - RNA, 13 nt, Human adenovirus D
guugacaauaauu

SEQ ID NO: 111108 - RNA, 15 nt, Human adenovirus D
guucugauuagcaua

SEQ ID NO: 111109 - RNA, 16 nt, Human adenovirus D
guugcccgauugugau

SEQ ID NO: 111110 - RNA, 16 nt, Human adenovirus D
guugcauguucuugca

SEQ ID NO: 111111 - RNA, 15 nt, Human adenovirus D
uaaagaagacuauaa

SEQ ID NO: 111112 - RNA, 22 nt, Human adenovirus D
uaaauauggccuggagcagaua

SEQ ID NO: 111113 - RNA, 14 nt, Human adenovirus D
uaacgggguggugg

SEQ ID NO: 111114 - RNA, 14 nt, Human adenovirus D
uaacaucaccacag

SEQ ID NO: 111115 - RNA, 21 nt, Human adenovirus D
uaaggcucauaugaccaugca

SEQ ID NO: 111116 - RNA, 17 nt, Human adenovirus D
uaagcuaccacauugug

SEQ ID NO: 111117 - RNA, 19 nt, Human adenovirus D
uaagacauaacugggugau

SEQ ID NO: 111118 - RNA, 15 nt, Human adenovirus D
uacgagcuacagcag

SEQ ID NO: 111119 - RNA, 16 nt, Human adenovirus D
uacgcaagagaaucca

SEQ ID NO: 111120 - RNA, 15 nt, Human adenovirus D
uacauggacaagaua

SEQ ID NO: 111121 - RNA, 21 nt, Human adenovirus D
uacauggugggcuaauauaac

SEQ ID NO: 111122 - RNA, 21 nt, Human adenovirus D
uacaugcccucucaacaucac

SEQ ID NO: 111123 - RNA, 17 nt, Human adenovirus D
uacuccucuuugcccug

SEQ ID NO: 111124 - RNA, 16 nt, Human adenovirus D
uacucggaaaacagga

SEQ ID NO: 111125 - RNA, 13 nt, Human adenovirus D
uacaggacuuuuc

SEQ ID NO: 111126 - RNA, 20 nt, Human adenovirus D
uacagcaggagugcagggau

SEQ ID NO: 111127 - RNA, 14 nt, Human adenovirus D
uacaacgcccugcu

SEQ ID NO: 111128 - RNA, 19 nt, Human adenovirus D
uaauaagcagaguacucau

SEQ ID NO: 111129 - RNA, 13 nt, Human adenovirus D
uaagugugguuua

SEQ ID NO: 111130 - RNA, 14 nt, Human adenovirus D
uauccuuucccugg

SEQ ID NO: 111131 - RNA, 21 nt, Human adenovirus D
uaucgcucuuaucccaugccc

SEQ ID NO: 111132 - RNA, 17 nt, Human adenovirus D
uaucacacugcaugugg

SEQ ID NO: 111133 - RNA, 17 nt, Human adenovirus D
uaucacucacauuuugg

SEQ ID NO: 111134 - RNA, 23 nt, Human adenovirus D
uauccacaaacuacauggacaag

SEQ ID NO: 111135 - RNA, 24 nt, Human adenovirus D
uauggaauuucuuagacugcuauc

SEQ ID NO: 111136 - RNA, 19 nt, Human adenovirus D
uaugcuguucaagggccca

SEQ ID NO: 111137 - RNA, 21 nt, Human adenovirus D
uaugggaacaaggccuggaau

SEQ ID NO: 111138 - RNA, 15 nt, Human adenovirus D
uaugauagcacugga

SEQ ID NO: 111139 - RNA, 16 nt, Human adenovirus D
uaugcacaguagucau

SEQ ID NO: 111140 - RNA, 15 nt, Human adenovirus D
uauacuccagugcau

SEQ ID NO: 111141 - RNA, 13 nt, Human adenovirus D
uacugguacuugg

SEQ ID NO: 111142 - RNA, 11 nt, Human adenovirus D
uacugucaugc

SEQ ID NO: 111143 - RNA, 19 nt, Human adenovirus D
uacugcuaucgcucuuauc

SEQ ID NO: 111144 - RNA, 16 nt, Human adenovirus D
uacugcugauuacucu

SEQ ID NO: 111145 - RNA, 13 nt, Human adenovirus D
uacugcauacaaa

SEQ ID NO: 111146 - RNA, 21 nt, Human adenovirus D
uacugccacugccaacauuac

SEQ ID NO: 111147 - RNA, 16 nt, Human adenovirus D
uauaugugacgcaugc

SEQ ID NO: 111148 - RNA, 22 nt, Human adenovirus D
uauguugacaauaauugaacug

SEQ ID NO: 111149 - RNA, 13 nt, Human adenovirus D
uaugucagugugc

SEQ ID NO: 111150 - RNA, 13 nt, Human adenovirus D
uauuccagaucac

SEQ ID NO: 111151 - RNA, 15 nt, Human adenovirus D
uauuccagaucacau

SEQ ID NO: 111152 - RNA, 18 nt, Human adenovirus D
uauuuaaggccaccgugc

SEQ ID NO: 111153 - RNA, 15 nt, Human adenovirus D
ucaaacaggcaaaga

SEQ ID NO: 111154 - RNA, 16 nt, Human adenovirus D
ucaccgagcucuggga

SEQ ID NO: 111155 - RNA, 15 nt, Human adenovirus D
ucaccacaggcaaug

SEQ ID NO: 111156 - RNA, 13 nt, Human adenovirus D
ucaccaaggccau

SEQ ID NO: 111157 - RNA, 14 nt, Human adenovirus D
ucaccaaggccaua

SEQ ID NO: 111158 - RNA, 15 nt, Human adenovirus D
ucaaugcuacauggu

SEQ ID NO: 111159 - RNA, 19 nt, Human adenovirus D
ucaagccccugaaaaacuu

SEQ ID NO: 111160 - RNA, 13 nt, Human adenovirus D
ucaggaaacugug

SEQ ID NO: 111161 - RNA, 18 nt, Human adenovirus D
ucagacauaguuguaaug

SEQ ID NO: 111162 - RNA, 20 nt, Human adenovirus D
ucagacauaguuguaaugau

SEQ ID NO: 111163 - RNA, 13 nt, Human adenovirus D
ucagacccagugg

SEQ ID NO: 111164 - RNA, 21 nt, Human adenovirus D
ucagcgcccucagcagucucu

SEQ ID NO: 111165 - RNA, 16 nt, Human adenovirus D
ucacuguccaugguag

SEQ ID NO: 111166 - RNA, 21 nt, Human adenovirus D
ucacuguccaugguagcaaug

SEQ ID NO: 111167 - RNA, 15 nt, Human adenovirus D
ucaucgacuggugcu

SEQ ID NO: 111168 - RNA, 17 nt, Human adenovirus D
ucaucggggucaucuac

SEQ ID NO: 111169 - RNA, 15 nt, Human adenovirus D
uccacaccuugaaag

SEQ ID NO: 111170 - RNA, 20 nt, Human adenovirus D
ucccugggguccuagugacu

SEQ ID NO: 111171 - RNA, 19 nt, Human adenovirus D
ucccucucagaugucaaag

SEQ ID NO: 111172 - RNA, 18 nt, Human adenovirus D
uccaguucccgcaauaau

SEQ ID NO: 111173 - RNA, 19 nt, Human adenovirus D
ucccaacucugguacucca

SEQ ID NO: 111174 - RNA, 15 nt, Human adenovirus D
uccuggcugauguga

SEQ ID NO: 111175 - RNA, 13 nt, Human adenovirus D
uccuguuacugua

SEQ ID NO: 111176 - RNA, 14 nt, Human adenovirus D
uccugcaacugcgc

SEQ ID NO: 111177 - RNA, 14 nt, Human adenovirus D
uccugcauugccac

SEQ ID NO: 111178 - RNA, 19 nt, Human adenovirus D
uccugaaguuccuccucaa

SEQ ID NO: 111179 - RNA, 17 nt, Human adenovirus D
uccuccuguuacuguaa

SEQ ID NO: 111180 - RNA, 14 nt, Human adenovirus D
uccucgaccaugac

SEQ ID NO: 111181 - RNA, 17 nt, Human adenovirus D
uccucgcagcucaucac

SEQ ID NO: 111182 - RNA, 18 nt, Human adenovirus D
uccuugaacuaccaccug

SEQ ID NO: 111183 - RNA, 21 nt, Human adenovirus D
ucguugugcgccgcgcugggg

SEQ ID NO: 111184 - RNA, 21 nt, Human adenovirus D
ucgggcgggaggcacccugcu

SEQ ID NO: 111185 - RNA, 16 nt, Human adenovirus D
ucgcagaaccaugaau

SEQ ID NO: 111186 - RNA, 21 nt, Human adenovirus D
ucgcagaaccaugaauacagu

SEQ ID NO: 111187 - RNA, 15 nt, Human adenovirus D
ucgcccgacugcugg

SEQ ID NO: 111188 - RNA, 22 nt, Human adenovirus D
ucuggaaauuaugagcaucaaa

SEQ ID NO: 111189 - RNA, 14 nt, Human adenovirus D
ucuuagacugcuau

SEQ ID NO: 111190 - RNA, 21 nt, Human adenovirus D
ucuuugcccugcucaccugca

SEQ ID NO: 111191 - RNA, 14 nt, Human adenovirus D
ucuucaacaucugu

SEQ ID NO: 111192 - RNA, 20 nt, Human adenovirus D
ucuucaacaucugugcugcc

SEQ ID NO: 111193 - RNA, 19 nt, Human adenovirus D
ucugcuucuucauuaaaag

SEQ ID NO: 111194 - RNA, 22 nt, Human adenovirus D
ucucucagcacgguggccuuaa

SEQ ID NO: 111195 - RNA, 18 nt, Human adenovirus D
uugauuuuuacaccagcg

SEQ ID NO: 111196 - RNA, 20 nt, Human adenovirus D
uugacaacccgccugccagg

SEQ ID NO: 111197 - RNA, 16 nt, Human adenovirus D
uugaagucauguguga

SEQ ID NO: 111198 - RNA, 22 nt, Human adenovirus D
uugaagucaugugugauaucac

SEQ ID NO: 111199 - RNA, 20 nt, Human adenovirus D
uugaaugggacuuauccaca

SEQ ID NO: 111200 - RNA, 12 nt, Human adenovirus D
uugcgguacugg

SEQ ID NO: 111201 - RNA, 20 nt, Human adenovirus D
uugcaauuuugugauggaag

SEQ ID NO: 111202 - RNA, 15 nt, Human adenovirus D
uugcagcacuggaac

SEQ ID NO: 111203 - RNA, 12 nt, Human adenovirus D
aacagcugugcu

SEQ ID NO: 111204 - RNA, 19 nt, Human adenovirus D
uuuuagcccuuauuugaca

SEQ ID NO: 111205 - RNA, 20 nt, Human adenovirus D
uuuuagaauggaagacauca

SEQ ID NO: 111206 - RNA, 22 nt, Human adenovirus D
uuuggcuuuugugaucauggcc

SEQ ID NO: 111207 - RNA, 14 nt, Human adenovirus D
uugugaucauggcc

SEQ ID NO: 111208 - RNA, 15 nt, Human adenovirus D
uuguaaugaucaaaa

SEQ ID NO: 111209 - RNA, 21 nt, Human adenovirus D
uugguugaacccagaugagga

SEQ ID NO: 111210 - RNA, 22 nt, Human adenovirus D
uuggcucgucaggaaacugugu

SEQ ID NO: 111211 - RNA, 16 nt, Human adenovirus D
aagucaugugugauau

SEQ ID NO: 111212 - RNA, 17 nt, Human adenovirus D
aagugacuuuuugcagc

SEQ ID NO: 111213 - RNA, 22 nt, Human adenovirus D
aagugacuuuuugcagcugaca

SEQ ID NO: 111214 - RNA, 17 nt, Human adenovirus D
aaggugugguuuaugac

SEQ ID NO: 111215 - RNA, 14 nt, Human adenovirus D
aauaaaguuguaca

SEQ ID NO: 111216 - RNA, 15 nt, Human adenovirus D
aauaaaacucaccaa

SEQ ID NO: 111217 - RNA, 17 nt, Human adenovirus D
aauaaaacucaccaagg

SEQ ID NO: 111218 - RNA, 20 nt, Human adenovirus D
aacucgucgcuugacagcac

SEQ ID NO: 111219 - RNA, 19 nt, Human adenovirus D
uuuuugcagcugacauuga

SEQ ID NO: 111220 - RNA, 19 nt, Human adenovirus D
aacauccaccagugcaaga

SEQ ID NO: 111221 - RNA, 20 nt, Human adenovirus D
aacauccccuguugcccgau

SEQ ID NO: 111222 - RNA, 21 nt, Human adenovirus D
aacgagaucggcaccagccag

SEQ ID NO: 111223 - RNA, 21 nt, Human adenovirus D
ugagcuugaaacgucccagga

SEQ ID NO: 111224 - RNA, 12 nt, Human adenovirus D
ugagcggcagca

SEQ ID NO: 111225 - RNA, 16 nt, Human adenovirus D
ugagaggagugugaua

SEQ ID NO: 111226 - RNA, 17 nt, Human adenovirus D
ugagaggagugugauau

SEQ ID NO: 111227 - RNA, 18 nt, Human adenovirus D
ugagaggagugugauaug

SEQ ID NO: 111228 - RNA, 22 nt, Human adenovirus D
ugagagaaccguguacacugug

SEQ ID NO: 111229 - RNA, 19 nt, Human adenovirus D
ugagcagaacuacacgguc

SEQ ID NO: 111230 - RNA, 14 nt, Human adenovirus D
ugcaaugucagguc

SEQ ID NO: 111231 - RNA, 18 nt, Human adenovirus D
ugauaucacacugcaugu

SEQ ID NO: 111232 - RNA, 15 nt, Human adenovirus D
ugaucugaagaccau

SEQ ID NO: 111233 - RNA, 20 nt, Human adenovirus D
ugauuaauguuaaugucacu

SEQ ID NO: 111234 - RNA, 21 nt, Human adenovirus D
ugauuagcauagucacacuua

SEQ ID NO: 111235 - RNA, 16 nt, Human adenovirus D
ugcacugguggauguu

SEQ ID NO: 111236 - RNA, 17 nt, Human adenovirus D
ugcaaggugugguuuau

SEQ ID NO: 111237 - RNA, 21 nt, Human adenovirus D
ugcacagacccaccccaguca

SEQ ID NO: 111238 - RNA, 19 nt, Human adenovirus D
ugcauauacuccagugcau

SEQ ID NO: 111239 - RNA, 18 nt, Human adenovirus D
ugcccucgcuacugcuga

SEQ ID NO: 111240 - RNA, 20 nt, Human adenovirus D
ugcccgauugugaucaugca

SEQ ID NO: 111241 - RNA, 15 nt, Human adenovirus D
ugccacgaacagcca

SEQ ID NO: 111242 - RNA, 18 nt, Human adenovirus D
ugccacugccaacauuac

SEQ ID NO: 111243 - RNA, 23 nt, Human adenovirus D
ugcugacauccauggccagggga

SEQ ID NO: 111244 - RNA, 14 nt, Human adenovirus D
uggaagcauuacua

SEQ ID NO: 111245 - RNA, 18 nt, Human adenovirus D
uggaauuucuuagacugc

SEQ ID NO: 111246 - RNA, 21 nt, Human adenovirus D
uggaauuucuuagacugcuau

SEQ ID NO: 111247 - RNA, 15 nt, Human adenovirus D
uggaauguuacugca

SEQ ID NO: 111248 - RNA, 21 nt, Human adenovirus D
uggaauguuacugcauacaaa

SEQ ID NO: 111249 - RNA, 13 nt, Human adenovirus D
ugcgagcauacau

SEQ ID NO: 111250 - RNA, 20 nt, Human adenovirus D
uguuaauaugggagagaaca

SEQ ID NO: 111251 - RNA, 15 nt, Human adenovirus D
uguuacugcauacaa

SEQ ID NO: 111252 - RNA, 13 nt, Human adenovirus D
uguugacaauaau

SEQ ID NO: 111253 - RNA, 20 nt, Human adenovirus D
uguugagggaaaagcucaaa

SEQ ID NO: 111254 - RNA, 23 nt, Human adenovirus D
uguucaaccagcgcuuccccugg

SEQ ID NO: 111255 - RNA, 14 nt, Human adenovirus D
uguucauccccugg

SEQ ID NO: 111256 - RNA, 17 nt, Human adenovirus D
uguugcauguucuugca

SEQ ID NO: 111257 - RNA, 17 nt, Human adenovirus D
uuaacggggugguggac

SEQ ID NO: 111258 - RNA, 18 nt, Human adenovirus D
uuaauguuaaugucacua

SEQ ID NO: 111259 - RNA, 15 nt, Human adenovirus D
uuacuaggcccagca

SEQ ID NO: 111260 - RNA, 15 nt, Human adenovirus D
uuacuauuacugcca

SEQ ID NO: 111261 - RNA, 20 nt, Human adenovirus D
uuacuauuacugccacugcc

SEQ ID NO: 111262 - RNA, 12 nt, Human adenovirus D
uuacugcauaca

SEQ ID NO: 111263 - RNA, 14 nt, Human adenovirus D
uuacugcauacaaa

SEQ ID NO: 111264 - RNA, 18 nt, Human adenovirus D
uuacuucuggcacauaca

SEQ ID NO: 111265 - RNA, 15 nt, Human adenovirus D
uuagaauggaagaca

SEQ ID NO: 111266 - RNA, 14 nt, Human adenovirus D
uuaguucagcugca

SEQ ID NO: 111267 - RNA, 17 nt, Human adenovirus D
uucaacagcugugcuaa

SEQ ID NO: 111268 - RNA, 19 nt, Human adenovirus D
ugugaaaugggcugguggu

SEQ ID NO: 111269 - RNA, 12 nt, Human adenovirus D
ugugaauggaau

SEQ ID NO: 111270 - RNA, 13 nt, Human adenovirus D
ugugaauggaaug

SEQ ID NO: 111271 - RNA, 21 nt, Human adenovirus D
ugugaauggaauguuacugca

SEQ ID NO: 111272 - RNA, 14 nt, Human adenovirus D
ugugauaugcacag

SEQ ID NO: 111273 - RNA, 19 nt, Human adenovirus D
uguggcuagacuucauggc

SEQ ID NO: 111274 - RNA, 12 nt, Human adenovirus D
uggcacauacaa

SEQ ID NO: 111275 - RNA, 12 nt, Human adenovirus D
uggauugcaauu

SEQ ID NO: 111276 - RNA, 13 nt, Human adenovirus D
ugggccugaugca

SEQ ID NO: 111277 - RNA, 19 nt, Human adenovirus D
ugggccugaugcaggauaa

SEQ ID NO: 111278 - RNA, 15 nt, Human adenovirus D
ugggcugccacuuga

SEQ ID NO: 111279 - RNA, 18 nt, Human adenovirus D
ugguaugauagcacugga

SEQ ID NO: 111280 - RNA, 19 nt, Human adenovirus D
gucgggcgaagaggccacg

SEQ ID NO: 111281 - RNA, 13 nt, Human adenovirus D
gggaucaccaguu

SEQ ID NO: 111282 - RNA, 15 nt, Human adenovirus D
gcgcccucagcaguc

SEQ ID NO: 111283 - RNA, 15 nt, Human adenovirus D
cucggaccaacccca

SEQ ID NO: 111284 - RNA, 14 nt, Human adenovirus D
gacgagacuggccu

SEQ ID NO: 111285 - RNA, 16 nt, Human adenovirus D
gacggccuggccucgg

SEQ ID NO: 111286 - RNA, 19 nt, Human adenovirus D
gcagcacuggaacaccauc

SEQ ID NO: 111287 - RNA, 19 nt, Human adenovirus D
gaggagaacugcuggcccu

SEQ ID NO: 111288 - RNA, 17 nt, Human adenovirus D
ugcaagagcuccucucg

SEQ ID NO: 111289 - RNA, 15 nt, Human adenovirus D
gcgggccucacaguc

SEQ ID NO: 111290 - RNA, 14 nt, Human adenovirus D
gcggccgcccacgg

SEQ ID NO: 111291 - RNA, 20 nt, Human adenovirus D
ccugacgacccgcaaccccg

SEQ ID NO: 111292 - RNA, 12 nt, Human adenovirus D
gaacuccucucg

SEQ ID NO: 111293 - RNA, 16 nt, Homo sapiens
gagucgcugugccaca

SEQ ID NO: 111294 - RNA, 18 nt, Homo sapiens
cugagccuggucccacga

SEQ ID NO: 111295 - RNA, 23 nt, Homo sapiens
aggggugcggcggucccagcucc

SEQ ID NO: 111296 - RNA, 16 nt, Homo sapiens
uguccccugacagggc

SEQ ID NO: 111297 - RNA, 19 nt, Homo sapiens
uguccccugacagggccag

SEQ ID NO: 111298 - RNA, 20 nt, Homo sapiens
uccccugacagggccagugc

SEQ ID NO: 111299 - RNA, 13 nt, Homo sapiens
accucgugccacc

SEQ ID NO: 111300 - RNA, 15 nt, Homo sapiens
cuggaugcccaggaa

SEQ ID NO: 111301 - RNA, 16 nt, Homo sapiens
agagucgcugugccac

SEQ ID NO: 111302 - RNA, 15 nt, Homo sapiens
agucgcugugccaca

SEQ ID NO: 111303 - RNA, 16 nt, Homo sapiens
caugccuccucaggag

SEQ ID NO: 111304 - RNA, 15 nt, Homo sapiens
ucccacgagggugcc

SEQ ID NO: 111305 - RNA, 22 nt, Homo sapiens
ccccaggagggaggcaggggag

SEQ ID NO: 111306 - RNA, 17 nt, Homo sapiens
acagggccagugcaguu

SEQ ID NO: 111307 - RNA, 15 nt, Homo sapiens
gugcggcggucccag

SEQ ID NO: 111308 - RNA, 16 nt, Homo sapiens
acaggaccccagcucu

SEQ ID NO: 111309 - RNA, 14 nt, Homo sapiens
uggggccaugccuc

SEQ ID NO: 111310 - RNA, 21 nt, Homo sapiens
cccugacagggccagugcagu

SEQ ID NO: 111311 - RNA, 13 nt, Homo sapiens
gggccagugcagu

SEQ ID NO: 111312 - RNA, 21 nt, Homo sapiens
agccuggucccacgagggugc

SEQ ID NO: 111313 - RNA, 13 nt, Homo sapiens
gagccugguccca

SEQ ID NO: 111314 - RNA, 15 nt, Homo sapiens
cugacagggccagug

SEQ ID NO: 111315 - RNA, 22 nt, Homo sapiens
aagcccaggggccggccagugg

SEQ ID NO: 111316 - RNA, 15 nt, Homo sapiens
ggaccucgugccacc

SEQ ID NO: 111317 - RNA, 13 nt, Homo sapiens
ucgcugugccaca

SEQ ID NO: 111318 - RNA, 16 nt, Homo sapiens
ggucccacgagggugc

SEQ ID NO: 111319 - RNA, 14 nt, Homo sapiens
guguggggccaugc

SEQ ID NO: 111320 - RNA, 16 nt, Homo sapiens
ccugcaggaccucgug

SEQ ID NO: 111321 - RNA, 12 nt, Homo sapiens
ggccaguggccu

SEQ ID NO: 111322 - RNA, 21 nt, Homo sapiens
cgggcaggguguggggccaug

SEQ ID NO: 111323 - RNA, 21 nt, Homo sapiens
gccuggucccacgagggugcc

SEQ ID NO: 111324 - RNA, 18 nt, Homo sapiens
cccugacagggccagugc

SEQ ID NO: 111325 - RNA, 22 nt, Homo sapiens
uccccugacagggccagugcag

SEQ ID NO: 111326 - RNA, 20 nt, Homo sapiens
agcccaggggccggccagug

SEQ ID NO: 111327 - RNA, 16 nt, Homo sapiens
aggggccggccagugg

SEQ ID NO: 111328 - RNA, 13 nt, Homo sapiens
ggaccucgugcca

SEQ ID NO: 111329 - RNA, 19 nt, Homo sapiens
cucugcgucgguccuggug

SEQ ID NO: 111330 - RNA, 14 nt, Homo sapiens
caggggaggggugc

SEQ ID NO: 111331 - RNA, 16 nt, Homo sapiens
cgucgguccuggugcc

SEQ ID NO: 111332 - RNA, 17 nt, Homo sapiens
uccccugacagggccag

SEQ ID NO: 111333 - RNA, 19 nt, Homo sapiens
ugcaggaccucgugccacc

SEQ ID NO: 111334 - RNA, 14 nt, Homo sapiens
uggccgggcagggu

SEQ ID NO: 111335 - RNA, 18 nt, Homo sapiens
gcccuggaugcccaggaa

SEQ ID NO: 111336 - RNA, 23 nt, Homo sapiens
gguccugcagccugcaggaccuc

SEQ ID NO: 111337 - RNA, 14 nt, Homo sapiens
ugacagggccagug

SEQ ID NO: 111338 - RNA, 22 nt, Homo sapiens
ggcuggagugugaggguccugc

SEQ ID NO: 111339 - RNA, 17 nt, Homo sapiens
agagucgcugugccaca

SEQ ID NO: 111340 - RNA, 21 nt, Homo sapiens
agggaggcaggggaggggugc

SEQ ID NO: 111341 - RNA, 13 nt, Homo sapiens
ccacgagggugcc

SEQ ID NO: 111342 - RNA, 16 nt, Homo sapiens
caccccgagggcugag

SEQ ID NO: 111343 - RNA, 18 nt, Homo sapiens
gccaugccuccucaggag

SEQ ID NO: 111344 - RNA, 17 nt, Homo sapiens
ggcucccaugucaagag

SEQ ID NO: 111345 - RNA, 20 nt, Homo sapiens
agugcaguuugguguguccu

SEQ ID NO: 111346 - RNA, 17 nt, Homo sapiens
gcugagccuggucccac

SEQ ID NO: 111347 - RNA, 12 nt, Homo sapiens
gggccaugccuc

SEQ ID NO: 111348 - RNA, 16 nt, Homo sapiens
ccugacagggccagug

SEQ ID NO: 111349 - RNA, 22 nt, Homo sapiens
auugguuuuccaaucauuugac

SEQ ID NO: 111350 - RNA, 13 nt, Homo sapiens
cuggcucccaugu

SEQ ID NO: 111351 - RNA, 14 nt, Homo sapiens
ucgguccuggugcc

SEQ ID NO: 111352 - RNA, 18 nt, Homo sapiens
caggggccggccaguggc

SEQ ID NO: 111353 - RNA, 14 nt, Homo sapiens
augucaagagucgc

SEQ ID NO: 111354 - RNA, 15 nt, Homo sapiens
aucauuugacuaaga

SEQ ID NO: 111355 - RNA, 13 nt, Homo sapiens
gguccuggugccc

SEQ ID NO: 111356 - RNA, 17 nt, Homo sapiens
cccacgagggugccgug

SEQ ID NO: 111357 - RNA, 14 nt, Homo sapiens
gggccggccagugg

SEQ ID NO: 111358 - RNA, 14 nt, Homo sapiens
ugucaagagucgcu

SEQ ID NO: 111359 - RNA, 19 nt, Homo sapiens
auuuauggccgggcagggu

SEQ ID NO: 111360 - RNA, 17 nt, Homo sapiens
ccaggggccggccagug

SEQ ID NO: 111361 - RNA, 19 nt, Homo sapiens
gcccuggaugcccaggaau

SEQ ID NO: 111362 - RNA, 18 nt, Homo sapiens
gacagggccagugcaguu

SEQ ID NO: 111363 - RNA, 20 nt, Homo sapiens
gccgggcaggguguggggcc

SEQ ID NO: 111364 - RNA, 18 nt, Homo sapiens
cccaggggccggccagug

SEQ ID NO: 111365 - RNA, 13 nt, Homo sapiens
cggguugggucac

SEQ ID NO: 111366 - RNA, 13 nt, Homo sapiens
cccacgagggugc

SEQ ID NO: 111367 - RNA, 19 nt, Homo sapiens
cugacagggccagugcagu

SEQ ID NO: 111368 - RNA, 15 nt, Homo sapiens
ggccgggcagggugu

SEQ ID NO: 111369 - RNA, 23 nt, Homo sapiens
ccacgggcccggguugggucacc

SEQ ID NO: 111370 - RNA, 17 nt, Homo sapiens
auuugacuaagagucuc

SEQ ID NO: 111371 - RNA, 15 nt, Homo sapiens
ugacagggccagugc

SEQ ID NO: 111372 - RNA, 12 nt, Homo sapiens
acagggccagug

SEQ ID NO: 111373 - RNA, 14 nt, Homo sapiens
gcaggggaggggug

SEQ ID NO: 111374 - RNA, 17 nt, Homo sapiens
gccugcaggaccucgug

SEQ ID NO: 111375 - RNA, 21 nt, Homo sapiens
uguccccugacagggccagug

SEQ ID NO: 111376 - RNA, 17 nt, Homo sapiens
gacagggccagugcagu

SEQ ID NO: 111377 - RNA, 13 nt, Homo sapiens
gggaggcagggga

SEQ ID NO: 111378 - RNA, 19 nt, Homo sapiens
caguuugguguguccuccg

SEQ ID NO: 111379 - RNA, 16 nt, Homo sapiens
cugacagggccagugc

SEQ ID NO: 111380 - RNA, 19 nt, Homo sapiens
cccaggggccggccagugg

SEQ ID NO: 111381 - RNA, 15 nt, Homo sapiens
gcgucgguccuggug

SEQ ID NO: 111382 - RNA, 15 nt, Homo sapiens
ugacuaagagucucc

SEQ ID NO: 111383 - RNA, 14 nt, Homo sapiens
gccuuaccaggaga

SEQ ID NO: 111384 - RNA, 20 nt, Homo sapiens
ccugacagggccagugcagu

SEQ ID NO: 111385 - RNA, 19 nt, Homo sapiens
cugcagccugcaggaccuc

SEQ ID NO: 111386 - RNA, 24 nt, Homo sapiens
ggcucccaugucaagagucgcugu

SEQ ID NO: 111387 - RNA, 14 nt, Homo sapiens
gagucgcugugcca

SEQ ID NO: 111388 - RNA, 12 nt, Homo sapiens
cagggccagugc

SEQ ID NO: 111389 - RNA, 23 nt, Homo sapiens
guguccccugacagggccagugc

SEQ ID NO: 111390 - RNA, 21 nt, Homo sapiens
ucauuugacuaagagucucca

SEQ ID NO: 111391 - RNA, 16 nt, Homo sapiens
ccacgagggugccgug

SEQ ID NO: 111392 - RNA, 18 nt, Homo sapiens
gcucugcgucgguccugg

SEQ ID NO: 111393 - RNA, 14 nt, Human adenovirus E
uuuuggaucugaca

SEQ ID NO: 111394 - RNA, 12 nt, Human adenovirus E
uuuuuucuauca

SEQ ID NO: 111395 - RNA, 12 nt, Human adenovirus E
uuuuucagacca

SEQ ID NO: 111396 - RNA, 18 nt, Human adenovirus E
uuuuucuaucauuaccuc

SEQ ID NO: 111397 - RNA, 14 nt, Human adenovirus E
uuugguguaggugu

SEQ ID NO: 111398 - RNA, 15 nt, Human adenovirus E
uuuucugccaacacc

SEQ ID NO: 111399 - RNA, 14 nt, Human adenovirus E
uccuccauugccau

SEQ ID NO: 111400 - RNA, 20 nt, Human adenovirus E
uccucaaaugcuaccgccaa

SEQ ID NO: 111401 - RNA, 19 nt, Human adenovirus E
uccgagaccguuuggauua

SEQ ID NO: 111402 - RNA, 20 nt, Human adenovirus E
uccgaaagcaacugcaucau

SEQ ID NO: 111403 - RNA, 22 nt, Human adenovirus E
uccgaaagcaacugcaucauga

SEQ ID NO: 111404 - RNA, 17 nt, Human adenovirus E
ucccggggguggaggua

SEQ ID NO: 111405 - RNA, 23 nt, Human adenovirus E
uccauucucaucucgcccaguaa

SEQ ID NO: 111406 - RNA, 15 nt, Human adenovirus E
ucgaguggucgggag

SEQ ID NO: 111407 - RNA, 17 nt, Human adenovirus E
uccuguaaaacuguuga

SEQ ID NO: 111408 - RNA, 23 nt, Human adenovirus E
  unsure 8..8: n is a, c, g, or t
ucauaugnuggcaguuacaccug

SEQ ID NO: 111409 - RNA, 14 nt, Human adenovirus E
ucauuugauuugaa

SEQ ID NO: 111410 - RNA, 13 nt, Human adenovirus E
uccaaacgaccau

SEQ ID NO: 111411 - RNA, 16 nt, Human adenovirus E
uccaaacgaccaucgc

SEQ ID NO: 111412 - RNA, 16 nt, Human adenovirus E
uccacgcaacaccccg

SEQ ID NO: 111413 - RNA, 22 nt, Human adenovirus E
uccacgguggucgaugugauca

SEQ ID NO: 111414 - RNA, 22 nt, Human adenovirus E
uccacccucccaggacauggaa

SEQ ID NO: 111415 - RNA, 17 nt, Human adenovirus E
uccacguuccacacagu

SEQ ID NO: 111416 - RNA, 16 nt, Human adenovirus E
uccagaaaaagccaca

SEQ ID NO: 111417 - RNA, 18 nt, Human adenovirus E
uccagaaaaagccacaga

SEQ ID NO: 111418 - RNA, 21 nt, Human adenovirus E
uccagcggggaagaaucugac

SEQ ID NO: 111419 - RNA, 19 nt, Human adenovirus E
  unsure 8..8: n is a, c, g, or t
uccagcunuuccaacccuu

SEQ ID NO: 111420 - RNA, 11 nt, Human adenovirus E
uccauguccug

SEQ ID NO: 111421 - RNA, 18 nt, Human adenovirus E
uccaucaaccagucuuug

SEQ ID NO: 111422 - RNA, 17 nt, Human adenovirus E
ucacagaacugaacuga

SEQ ID NO: 111423 - RNA, 21 nt, Human adenovirus E
uaugcuuucgugguauugcua

SEQ ID NO: 111424 - RNA, 22 nt, Human adenovirus E
ucaccugccuggucggagucaa

SEQ ID NO: 111425 - RNA, 15 nt, Human adenovirus E
ucacccggugcugcc

SEQ ID NO: 111426 - RNA, 14 nt, Human adenovirus E
ucagcaaguucaug

SEQ ID NO: 111427 - RNA, 13 nt, Human adenovirus E
ucagauguccaaa

SEQ ID NO: 111428 - RNA, 13 nt, Human adenovirus E
ucagauguucaag

SEQ ID NO: 111429 - RNA, 16 nt, Human adenovirus E
ucagagccaucaggca

SEQ ID NO: 111430 - RNA, 18 nt, Human adenovirus E
ucagcuguugagcuguga

SEQ ID NO: 111431 - RNA, 22 nt, Human adenovirus E
ucagggguggggacugugagua

SEQ ID NO: 111432 - RNA, 12 nt, Human adenovirus E
ucuuaccugugg

SEQ ID NO: 111433 - RNA, 18 nt, Human adenovirus E
ucuuaacuugggccauca

SEQ ID NO: 111434 - RNA, 16 nt, Human adenovirus E
ucugacuagagugagu

SEQ ID NO: 111435 - RNA, 16 nt, Human adenovirus E
ucugacucuguacugc

SEQ ID NO: 111436 - RNA, 16 nt, Human adenovirus E
ucugaaucuaauacua

SEQ ID NO: 111437 - RNA, 13 nt, Human adenovirus E
ucugaaugccauu

SEQ ID NO: 111438 - RNA, 15 nt, Human adenovirus E
ucugaggccagacaa

SEQ ID NO: 111439 - RNA, 16 nt, Human adenovirus E
ucugacuuaacccuaa

SEQ ID NO: 111440 - RNA, 19 nt, Human adenovirus E
ucuguggaacaaacucuga

SEQ ID NO: 111441 - RNA, 13 nt, Human adenovirus E
ucuucuaucagau

SEQ ID NO: 111442 - RNA, 13 nt, Human adenovirus E
ucuacagggccaa

SEQ ID NO: 111443 - RNA, 14 nt, Human adenovirus E
ucuacagggccaaa

SEQ ID NO: 111444 - RNA, 12 nt, Human adenovirus E
ucgccagcagca

SEQ ID NO: 111445 - RNA, 15 nt, Human adenovirus E
ucucuucgcugcaug

SEQ ID NO: 111446 - RNA, 18 nt, Human adenovirus E
ucucggucaugaacugcu

SEQ ID NO: 111447 - RNA, 22 nt, Human adenovirus E
ucuaugcaauucugacaaugag

SEQ ID NO: 111448 - RNA, 14 nt, Human adenovirus E
ucucgaucauugag

SEQ ID NO: 111449 - RNA, 22 nt, Human adenovirus E
ugcaagaguuccccgugcccug

SEQ ID NO: 111450 - RNA, 19 nt, Human adenovirus E
ugaugagacuaaucacaga

SEQ ID NO: 111451 - RNA, 12 nt, Human adenovirus E
ugaugauuugag

SEQ ID NO: 111452 - RNA, 20 nt, Human adenovirus E
ugaugggaucuucaucacuc

SEQ ID NO: 111453 - RNA, 23 nt, Human adenovirus E
ugagacuaaucacagaacugaac

SEQ ID NO: 111454 - RNA, 20 nt, Human adenovirus E
ugagccaccugcugggucag

SEQ ID NO: 111455 - RNA, 20 nt, Human adenovirus E
ugaucaagugcggaugggaa

SEQ ID NO: 111456 - RNA, 19 nt, Human adenovirus E
ugaucgaccaggugguggc

SEQ ID NO: 111457 - RNA, 14 nt, Human adenovirus E
ugaucccauacucc

SEQ ID NO: 111458 - RNA, 18 nt, Human adenovirus E
ugaucccgaauaccacag

SEQ ID NO: 111459 - RNA, 24 nt, Human adenovirus E
ugacuuaacccuaauuaacaucac

SEQ ID NO: 111460 - RNA, 22 nt, Human adenovirus E
uggccaccccaucgaugcugcc

SEQ ID NO: 111461 - RNA, 13 nt, Human adenovirus E
uggcacuaaucac

SEQ ID NO: 111462 - RNA, 21 nt, Human adenovirus E
uggcacuaaucacacauugaa

SEQ ID NO: 111463 - RNA, 15 nt, Human adenovirus E
uggccugcacccuca

SEQ ID NO: 111464 - RNA, 20 nt, Human adenovirus E
ugguacugaucugauacucc

SEQ ID NO: 111465 - RNA, 16 nt, Human adenovirus E
uggugaaacaggccaa

SEQ ID NO: 111466 - RNA, 16 nt, Human adenovirus E
ugguuuaugacucagg

SEQ ID NO: 111467 - RNA, 21 nt, Human adenovirus E
ugguauuguuauuuuaaugaa

SEQ ID NO: 111468 - RNA, 23 nt, Human adenovirus E
ugucccaugguggcgcagcugac

SEQ ID NO: 111469 - RNA, 14 nt, Human adenovirus E
uguggaaacaauaa

SEQ ID NO: 111470 - RNA, 14 nt, Human adenovirus E
uguggagauucugc

SEQ ID NO: 111471 - RNA, 19 nt, Human adenovirus E
ugucuuguuucuggaugug

SEQ ID NO: 111472 - RNA, 16 nt, Human adenovirus E
ugcaccucacagcuca

SEQ ID NO: 111473 - RNA, 19 nt, Human adenovirus E
ugcuauuuuggaucugaca

SEQ ID NO: 111474 - RNA, 18 nt, Human adenovirus E
ugcugaagagaugcauga

SEQ ID NO: 111475 - RNA, 12 nt, Human adenovirus E
ugcugcaucugc

SEQ ID NO: 111476 - RNA, 15 nt, Human adenovirus E
uggagaacaaggcca

SEQ ID NO: 111477 - RNA, 18 nt, Human adenovirus E
uggagaacaaggccaucc

SEQ ID NO: 111478 - RNA, 21 nt, Human adenovirus E
ugcuuucgugguauugcuauu

SEQ ID NO: 111479 - RNA, 16 nt, Human adenovirus E
ugcuuuuggucuccac

SEQ ID NO: 111480 - RNA, 17 nt, Human adenovirus E
uggaaugaguaaugaga

SEQ ID NO: 111481 - RNA, 12 nt, Human adenovirus E
uucugugucuga

SEQ ID NO: 111482 - RNA, 15 nt, Human adenovirus E
uucuguguguugcag

SEQ ID NO: 111483 - RNA, 19 nt, Human adenovirus E
uucuguguguugcagcagc

SEQ ID NO: 111484 - RNA, 20 nt, Human adenovirus E
uucugugcgaggauugcccu

SEQ ID NO: 111485 - RNA, 17 nt, Human adenovirus E
uugaggugaugucagua

SEQ ID NO: 111486 - RNA, 15 nt, Human adenovirus E
uucuugcaagccaug

SEQ ID NO: 111487 - RNA, 18 nt, Human adenovirus E
uucuugggcgauguauga

SEQ ID NO: 111488 - RNA, 16 nt, Human adenovirus E
uugaucccauacucca

SEQ ID NO: 111489 - RNA, 19 nt, Human adenovirus E
uugcuauuuuggaucugac

SEQ ID NO: 111490 - RNA, 22 nt, Human adenovirus E
uugcgauacccuguccaugcac

SEQ ID NO: 111491 - RNA, 12 nt, Human adenovirus E
uucugaaucuaa

SEQ ID NO: 111492 - RNA, 21 nt, Human adenovirus E
uucugaaucuaauacuaccac

SEQ ID NO: 111493 - RNA, 18 nt, Human adenovirus E
uucgucguuggacgcagc

SEQ ID NO: 111494 - RNA, 20 nt, Human adenovirus E
uuccaggacccgguagaggu

SEQ ID NO: 111495 - RNA, 15 nt, Human adenovirus E
uuccccagcccacga

SEQ ID NO: 111496 - RNA, 13 nt, Human adenovirus E
uucaauguggauc

SEQ ID NO: 111497 - RNA, 16 nt, Human adenovirus E
uucaauguggaucuga

SEQ ID NO: 111498 - RNA, 22 nt, Human adenovirus E
uuccaccugaucccgaauacca

SEQ ID NO: 111499 - RNA, 23 nt, Human adenovirus E
uuaagugcgugguuuaugacuca

SEQ ID NO: 111500 - RNA, 19 nt, Human adenovirus E
uguguuccugaauccauca

SEQ ID NO: 111501 - RNA, 22 nt, Human adenovirus E
uuaacuugggccaucagucuca

SEQ ID NO: 111502 - RNA, 17 nt, Human adenovirus E
uuauuugccagucucau

SEQ ID NO: 111503 - RNA, 18 nt, Human adenovirus E
uuaucuggggauggugca

SEQ ID NO: 111504 - RNA, 22 nt, Human adenovirus E
ccgcgaccuccuccccaugaac

SEQ ID NO: 111505 - RNA, 20 nt, Human adenovirus E
ccgcgaggacaacaccuacu

SEQ ID NO: 111506 - RNA, 19 nt, Human adenovirus E
ccggccugguguacaacgc

SEQ ID NO: 111507 - RNA, 21 nt, Human adenovirus E
ccggcaccaccguggucuuca

SEQ ID NO: 111508 - RNA, 15 nt, Human adenovirus E
ccggcaccgcuucca

SEQ ID NO: 111509 - RNA, 17 nt, Human adenovirus E
ccguggaucccaucaca

SEQ ID NO: 111510 - RNA, 18 nt, Human adenovirus E
ccgugaauaauacuuuca

SEQ ID NO: 111511 - RNA, 21 nt, Human adenovirus E
ccgugcagcccgcgaacucuu

SEQ ID NO: 111512 - RNA, 13 nt, Human adenovirus E
ccgcauggugacc

SEQ ID NO: 111513 - RNA, 22 nt, Human adenovirus E
ccgcacagccuugaacaucuga

SEQ ID NO: 111514 - RNA, 21 nt, Human adenovirus E
ccgcagaagcaagcuccagcu

SEQ ID NO: 111515 - RNA, 13 nt, Human adenovirus E
ccgcaagaucucu

SEQ ID NO: 111516 - RNA, 14 nt, Human adenovirus E
ccgagcuccagcuc

SEQ ID NO: 111517 - RNA, 16 nt, Human adenovirus E
cccaggacauggaaua

SEQ ID NO: 111518 - RNA, 18 nt, Human adenovirus E
cccacgaccguacuacuu

SEQ ID NO: 111519 - RNA, 21 nt, Human adenovirus E
cccaccugcuucggaucuuca

SEQ ID NO: 111520 - RNA, 18 nt, Human adenovirus E
ccccggucccccacccag

SEQ ID NO: 111521 - RNA, 11 nt, Human adenovirus E
ccaugcucccc

SEQ ID NO: 111522 - RNA, 22 nt, Human adenovirus E
ccauuccgcgcacggcgcuggc

SEQ ID NO: 111523 - RNA, 21 nt, Human adenovirus E
cccaccccacucuguggaaca

SEQ ID NO: 111524 - RNA, 13 nt, Human adenovirus E
cccaccacaauua

SEQ ID NO: 111525 - RNA, 13 nt, Human adenovirus E
ccagccaacugaa

SEQ ID NO: 111526 - RNA, 15 nt, Human adenovirus E
ccaucgccucuccua

SEQ ID NO: 111527 - RNA, 14 nt, Human adenovirus E
ccaucgugaacgcg

SEQ ID NO: 111528 - RNA, 13 nt, Human adenovirus E
ccagauacuccua

SEQ ID NO: 111529 - RNA, 21 nt, Human adenovirus E
ccacacucugaucaagacccu

SEQ ID NO: 111530 - RNA, 15 nt, Human adenovirus E
ccacagaaguuucau

SEQ ID NO: 111531 - RNA, 20 nt, Human adenovirus E
ccacagcaaccucaggcaca

SEQ ID NO: 111532 - RNA, 14 nt, Human adenovirus E
ccacacacacagau

SEQ ID NO: 111533 - RNA, 19 nt, Human adenovirus E
caugguggcgcagcugacc

SEQ ID NO: 111534 - RNA, 14 nt, Human adenovirus E
cauggagauuugga

SEQ ID NO: 111535 - RNA, 20 nt, Human adenovirus E
cauggaaugaguaaugagaa

SEQ ID NO: 111536 - RNA, 19 nt, Human adenovirus E
cauggccccgcacaagcug

SEQ ID NO: 111537 - RNA, 15 nt, Human adenovirus E
caugcagggugggau

SEQ ID NO: 111538 - RNA, 16 nt, Human adenovirus E
cauuucggacauggaa

SEQ ID NO: 111539 - RNA, 13 nt, Human adenovirus E
cauuugauuugaa

SEQ ID NO: 111540 - RNA, 15 nt, Human adenovirus E
cauuugguguugccc

SEQ ID NO: 111541 - RNA, 21 nt, Human adenovirus E
ccaacaaaauugcaucaucug

SEQ ID NO: 111542 - RNA, 19 nt, Human adenovirus E
ccaacaccacuucacuccc

SEQ ID NO: 111543 - RNA, 22 nt, Human adenovirus E
caguuugcccgcgccacagaca

SEQ ID NO: 111544 - RNA, 14 nt, Human adenovirus E
cagucucacuuuaa

SEQ ID NO: 111545 - RNA, 19 nt, Human adenovirus E
caucaggcaugaugggauc

SEQ ID NO: 111546 - RNA, 20 nt, Human adenovirus E
caucagucucacuuuaacca

SEQ ID NO: 111547 - RNA, 17 nt, Human adenovirus E
cauauuagacuaugagg

SEQ ID NO: 111548 - RNA, 17 nt, Human adenovirus E
cauaugccugugcugug

SEQ ID NO: 111549 - RNA, 15 nt, Human adenovirus E
cauccggggcugcau

SEQ ID NO: 111550 - RNA, 15 nt, Human adenovirus E
cauccaccagugcaa

SEQ ID NO: 111551 - RNA, 22 nt, Human adenovirus E
cagaugaggugucggugaugca

SEQ ID NO: 111552 - RNA, 15 nt, Human adenovirus E
cagaguuuguuccac

SEQ ID NO: 111553 - RNA, 16 nt, Human adenovirus E
cagacaugcaucccag

SEQ ID NO: 111554 - RNA, 16 nt, Human adenovirus E
cagaccugugugguua

SEQ ID NO: 111555 - RNA, 16 nt, Human adenovirus E
caccaccgucgacgac

SEQ ID NO: 111556 - RNA, 18 nt, Human adenovirus E
caccacgccuagaaugac

SEQ ID NO: 111557 - RNA, 16 nt, Human adenovirus E
cagaagcaagcuccag

SEQ ID NO: 111558 - RNA, 14 nt, Human adenovirus E
cagaacugaacuga

SEQ ID NO: 111559 - RNA, 16 nt, Human adenovirus E
cagaacugaacugacu

SEQ ID NO: 111560 - RNA, 16 nt, Human adenovirus E
cagcccuuaucugacg

SEQ ID NO: 111561 - RNA, 17 nt, Human adenovirus E
cagcgacccaugcuccc

SEQ ID NO: 111562 - RNA, 16 nt, Human adenovirus E
cagcgcucaccgccac

SEQ ID NO: 111563 - RNA, 15 nt, Human adenovirus E
cagcucaacagcuga

SEQ ID NO: 111564 - RNA, 20 nt, Human adenovirus E
caggcauuucggacauggaa

SEQ ID NO: 111565 - RNA, 17 nt, Human adenovirus E
caggauucgagcaguua

SEQ ID NO: 111566 - RNA, 22 nt, Human adenovirus E
caggcacacgcacuaccaccac

SEQ ID NO: 111567 - RNA, 23 nt, Human adenovirus E
caggcacacgcacuaccaccacu

SEQ ID NO: 111568 - RNA, 21 nt, Human adenovirus E
caggaugcgguggccauccac

SEQ ID NO: 111569 - RNA, 22 nt, Human adenovirus E
caggacgcuucggaguaccuga

SEQ ID NO: 111570 - RNA, 21 nt, Human adenovirus E
caggacauggaauacaccacc

SEQ ID NO: 111571 - RNA, 21 nt, Human adenovirus E
caggaauuaugccaagcuggc

SEQ ID NO: 111572 - RNA, 22 nt, Human adenovirus E
caggaauuaugccaagcuggcu

SEQ ID NO: 111573 - RNA, 22 nt, Human adenovirus E
augaugagacuaaucacagaac

SEQ ID NO: 111574 - RNA, 16 nt, Human adenovirus E
augcaacaacaacagc

SEQ ID NO: 111575 - RNA, 21 nt, Human adenovirus E
augcaacaacaacagccaccu

SEQ ID NO: 111576 - RNA, 19 nt, Human adenovirus E
augcaacccugagcucuuc

SEQ ID NO: 111577 - RNA, 20 nt, Human adenovirus E
augcaucccagcuggaucau

SEQ ID NO: 111578 - RNA, 17 nt, Human adenovirus E
augcauguguaacauga

SEQ ID NO: 111579 - RNA, 17 nt, Human adenovirus E
augcaugcggggggaga

SEQ ID NO: 111580 - RNA, 17 nt, Human adenovirus E
augcggcccaugagcug

SEQ ID NO: 111581 - RNA, 13 nt, Human adenovirus E
aucacaccuucca

SEQ ID NO: 111582 - RNA, 19 nt, Human adenovirus E
augagaaaauuacuauuua

SEQ ID NO: 111583 - RNA, 12 nt, Human adenovirus E
augagagcauua

SEQ ID NO: 111584 - RNA, 19 nt, Human adenovirus E
augagagcauuacucucau

SEQ ID NO: 111585 - RNA, 22 nt, Human adenovirus E
augagagcauuacucucaucaa

SEQ ID NO: 111586 - RNA, 21 nt, Human adenovirus E
auuaacaauuauauaugcaau

SEQ ID NO: 111587 - RNA, 23 nt, Human adenovirus E
auuaacaauuauauaugcaaugg

SEQ ID NO: 111588 - RNA, 13 nt, Human adenovirus E
auuauagugaaca

SEQ ID NO: 111589 - RNA, 14 nt, Human adenovirus E
auuauauaugcaau

SEQ ID NO: 111590 - RNA, 13 nt, Human adenovirus E
auucaacaguuuu

SEQ ID NO: 111591 - RNA, 16 nt, Human adenovirus E
auucaacaguuuuaca

SEQ ID NO: 111592 - RNA, 23 nt, Human adenovirus E
auucauggaaugaguaaugagaa

SEQ ID NO: 111593 - RNA, 14 nt, Human adenovirus E
auugagcacccggu

SEQ ID NO: 111594 - RNA, 14 nt, Human adenovirus E
auguaucuacugaa

SEQ ID NO: 111595 - RNA, 16 nt, Human adenovirus E
auguaucuacugaacu

SEQ ID NO: 111596 - RNA, 22 nt, Human adenovirus E
auggcaaucggugcgcgguacu

SEQ ID NO: 111597 - RNA, 18 nt, Human adenovirus E
auggcauucagauguuca

SEQ ID NO: 111598 - RNA, 15 nt, Human adenovirus E
caagucaagacuugu

SEQ ID NO: 111599 - RNA, 13 nt, Human adenovirus E
caacugcaucaug

SEQ ID NO: 111600 - RNA, 13 nt, Human adenovirus E
caacgucaacgac

SEQ ID NO: 111601 - RNA, 14 nt, Human adenovirus E
cacagcaaccucag

SEQ ID NO: 111602 - RNA, 17 nt, Human adenovirus E
cacagccuugaacaucu

SEQ ID NO: 111603 - RNA, 19 nt, Human adenovirus E
cacagccuugaacaucuga

SEQ ID NO: 111604 - RNA, 17 nt, Human adenovirus E
cacagacaccuacuuca

SEQ ID NO: 111605 - RNA, 18 nt, Human adenovirus E
cacacgguuuacaugucu

SEQ ID NO: 111606 - RNA, 16 nt, Human adenovirus E
cacaagaaguaccuca

SEQ ID NO: 111607 - RNA, 21 nt, Human adenovirus E
cacaagacuagacagcugcua

SEQ ID NO: 111608 - RNA, 14 nt, Human adenovirus E
caaucauauugaug

SEQ ID NO: 111609 - RNA, 20 nt, Human adenovirus E
caaucauauugaugauuuga

SEQ ID NO: 111610 - RNA, 16 nt, Human adenovirus E
caauuauauaugcaau

SEQ ID NO: 111611 - RNA, 17 nt, Human adenovirus E
caauuauauaugcaaug

SEQ ID NO: 111612 - RNA, 18 nt, Human adenovirus E
caauuauauaugcaaugg

SEQ ID NO: 111613 - RNA, 13 nt, Human adenovirus E
auuuuuccuccac

SEQ ID NO: 111614 - RNA, 15 nt, Human adenovirus E
auuucgagagcccuu

SEQ ID NO: 111615 - RNA, 21 nt, Human adenovirus E
auugccgucauucauggaaug

SEQ ID NO: 111616 - RNA, 17 nt, Human adenovirus E
caaccaaacuaaccucc

SEQ ID NO: 111617 - RNA, 14 nt, Human adenovirus E
caacagcugaggau

SEQ ID NO: 111618 - RNA, 20 nt, Human adenovirus E
caacauagacuuguucagcu

SEQ ID NO: 111619 - RNA, 22 nt, Human adenovirus E
caacauagacuuguucagcucc

SEQ ID NO: 111620 - RNA, 18 nt, Human adenovirus E
caaaaucaagcgggucaa

SEQ ID NO: 111621 - RNA, 17 nt, Human adenovirus E
acgagaccgagcuccag

SEQ ID NO: 111622 - RNA, 12 nt, Human adenovirus E
accucaggcaca

SEQ ID NO: 111623 - RNA, 22 nt, Human adenovirus E
accugcaugagggccagaauaa

SEQ ID NO: 111624 - RNA, 18 nt, Human adenovirus E
accuggcuguuccagggc

SEQ ID NO: 111625 - RNA, 22 nt, Human adenovirus E
accaaggggugcauccacugcu

SEQ ID NO: 111626 - RNA, 13 nt, Human adenovirus E
accacaaccacaa

SEQ ID NO: 111627 - RNA, 14 nt, Human adenovirus E
accacaauuacuca

SEQ ID NO: 111628 - RNA, 15 nt, Human adenovirus E
accacagcaaccuca

SEQ ID NO: 111629 - RNA, 19 nt, Human adenovirus E
accacagcaaccucaggca

SEQ ID NO: 111630 - RNA, 15 nt, Human adenovirus E
accccgagugguaca

SEQ ID NO: 111631 - RNA, 15 nt, Human adenovirus E
accccaucgaugcug

SEQ ID NO: 111632 - RNA, 15 nt, Human adenovirus E
accccaucgucauca

SEQ ID NO: 111633 - RNA, 14 nt, Human adenovirus E
acccgaucauuugg

SEQ ID NO: 111634 - RNA, 22 nt, Human adenovirus E
acccggggucucuucgcugcau

SEQ ID NO: 111635 - RNA, 20 nt, Human adenovirus E
acccgcagaagcaagcucca

SEQ ID NO: 111636 - RNA, 21 nt, Human adenovirus E
accgcgaggacaacaccuacu

SEQ ID NO: 111637 - RNA, 23 nt, Human adenovirus E
accgcagccagcggcugacgcug

SEQ ID NO: 111638 - RNA, 19 nt, Human adenovirus E
accucacagcucaacagcu

SEQ ID NO: 111639 - RNA, 22 nt, Human adenovirus E
accuagcucggcuucgacaccu

SEQ ID NO: 111640 - RNA, 16 nt, Human adenovirus E
accuaugcaacccuga

SEQ ID NO: 111641 - RNA, 15 nt, Human adenovirus E
acuugaggugauguc

SEQ ID NO: 111642 - RNA, 17 nt, Human adenovirus E
acuugaggugaugucag

SEQ ID NO: 111643 - RNA, 16 nt, Human adenovirus E
acuuaacccuaauuaa

SEQ ID NO: 111644 - RNA, 21 nt, Human adenovirus E
acuauuuacacuggcacuaau

SEQ ID NO: 111645 - RNA, 18 nt, Human adenovirus E
acugcguccacacucuga

SEQ ID NO: 111646 - RNA, 17 nt, Human adenovirus E
acgggacgcagggccau

SEQ ID NO: 111647 - RNA, 13 nt, Human adenovirus E
acuaccaccacua

SEQ ID NO: 111648 - RNA, 19 nt, Human adenovirus E
acuaugaggccgagccaca

SEQ ID NO: 111649 - RNA, 15 nt, Human adenovirus E
acuacagccuaggcc

SEQ ID NO: 111650 - RNA, 16 nt, Human adenovirus E
acuacagaaacugaau

SEQ ID NO: 111651 - RNA, 16 nt, Human adenovirus E
acacucugaucaagac

SEQ ID NO: 111652 - RNA, 17 nt, Human adenovirus E
acacuggcacuaaucac

SEQ ID NO: 111653 - RNA, 19 nt, Human adenovirus E
acacacacgguuuacaugu

SEQ ID NO: 111654 - RNA, 22 nt, Human adenovirus E
acacacacgguuuacaugucuu

SEQ ID NO: 111655 - RNA, 21 nt, Human adenovirus E
acacauugaaagguccagaaa

SEQ ID NO: 111656 - RNA, 23 nt, Human adenovirus E
acaucucagggaauggggcugaa

SEQ ID NO: 111657 - RNA, 21 nt, Human adenovirus E
acauucuggccugcacccuca

SEQ ID NO: 111658 - RNA, 18 nt, Human adenovirus E
acagcagccccaggccaa

SEQ ID NO: 111659 - RNA, 12 nt, Human adenovirus E
acagcaaccuca

SEQ ID NO: 111660 - RNA, 16 nt, Human adenovirus E
acagcaaccucaggca

SEQ ID NO: 111661 - RNA, 16 nt, Human adenovirus E
acagauggaagacauc

SEQ ID NO: 111662 - RNA, 20 nt, Human adenovirus E
acauacacacacgguuuaca

SEQ ID NO: 111663 - RNA, 17 nt, Human adenovirus E
acaaucauauugaugau

SEQ ID NO: 111664 - RNA, 21 nt, Human adenovirus E
acaaucauauugaugauuuga

SEQ ID NO: 111665 - RNA, 19 nt, Human adenovirus E
acaacgucaacgaccuucu

SEQ ID NO: 111666 - RNA, 16 nt, Human adenovirus E
acaagaaguaccucac

SEQ ID NO: 111667 - RNA, 18 nt, Human adenovirus E
acaagacucggaacaaua

SEQ ID NO: 111668 - RNA, 14 nt, Human adenovirus E
acaaaguaacuguu

SEQ ID NO: 111669 - RNA, 17 nt, Human adenovirus E
acaacaacgucaacgac

SEQ ID NO: 111670 - RNA, 16 nt, Human adenovirus E
acaaaaaaaaugagag

SEQ ID NO: 111671 - RNA, 23 nt, Human adenovirus E
acaaaaaaauaaagaaucacuua

SEQ ID NO: 111672 - RNA, 13 nt, Human adenovirus E
aaugagagcauua

SEQ ID NO: 111673 - RNA, 22 nt, Human adenovirus E
aaugagagcauuacucucauca

SEQ ID NO: 111674 - RNA, 20 nt, Human adenovirus E
aaugaaucagauguaucuac

SEQ ID NO: 111675 - RNA, 23 nt, Human adenovirus E
aaugaaucagauguaucuacuga

SEQ ID NO: 111676 - RNA, 20 nt, Human adenovirus E
auaggguguggagugcaaua

SEQ ID NO: 111677 - RNA, 24 nt, Human adenovirus E
auacaugcccauauuagacuauga

SEQ ID NO: 111678 - RNA, 15 nt, Human adenovirus E
auaaucccgccagcc

SEQ ID NO: 111679 - RNA, 18 nt, Human adenovirus E
agucauagcaggggcgca

SEQ ID NO: 111680 - RNA, 15 nt, Human adenovirus E
agucuacagggccaa

SEQ ID NO: 111681 - RNA, 22 nt, Human adenovirus E
aguaccucaccuggcuguucca

SEQ ID NO: 111682 - RNA, 14 nt, Human adenovirus E
aggugaugucagua

SEQ ID NO: 111683 - RNA, 11 nt, Human adenovirus E
agguggugaac

SEQ ID NO: 111684 - RNA, 23 nt, Human adenovirus E
aguuguccugguaugcgaucucg

SEQ ID NO: 111685 - RNA, 17 nt, Human adenovirus E
  unsure 7..7: n is a, c, g, or t
aguugcnagauggccac

SEQ ID NO: 111686 - RNA, 17 nt, Human adenovirus E
agugaaauaaagaucau

SEQ ID NO: 111687 - RNA, 16 nt, Human adenovirus E
agaucugucuccagga

SEQ ID NO: 111688 - RNA, 12 nt, Human adenovirus E
agaucucuugca

SEQ ID NO: 111689 - RNA, 15 nt, Human adenovirus E
agauacaaucauauu

SEQ ID NO: 111690 - RNA, 17 nt, Human adenovirus E
agauacaaucauauuga

SEQ ID NO: 111691 - RNA, 19 nt, Human adenovirus E
agaguggggugggaagggu

SEQ ID NO: 111692 - RNA, 17 nt, Human adenovirus E
acuuucacaagacuaga

SEQ ID NO: 111693 - RNA, 22 nt, Human adenovirus E
agagcccuugauuuuacuacuc

SEQ ID NO: 111694 - RNA, 20 nt, Human adenovirus E
agagacuauguagguaugua

SEQ ID NO: 111695 - RNA, 15 nt, Human adenovirus E
agagccgucaaggag

SEQ ID NO: 111696 - RNA, 12 nt, Human adenovirus E
agcaaguucaug

SEQ ID NO: 111697 - RNA, 22 nt, Human adenovirus E
agauuuggacggucuuggaaga

SEQ ID NO: 111698 - RNA, 15 nt, Human adenovirus E
agauguucaaggcug

SEQ ID NO: 111699 - RNA, 10 nt, Human adenovirus E
agauggccac

SEQ ID NO: 111700 - RNA, 15 nt, Human adenovirus E
agauggaagacauca

SEQ ID NO: 111701 - RNA, 18 nt, Human adenovirus E
agaugcaacaacaacagc

SEQ ID NO: 111702 - RNA, 16 nt, Human adenovirus E
agaugcauguguaaca

SEQ ID NO: 111703 - RNA, 13 nt, Human adenovirus E
agaugcagcagcu

SEQ ID NO: 111704 - RNA, 12 nt, Human adenovirus E
agccagcggcug

SEQ ID NO: 111705 - RNA, 17 nt, Human adenovirus E
agccaccugcuggguca

SEQ ID NO: 111706 - RNA, 15 nt, Human adenovirus E
agcgcuccggcaccg

SEQ ID NO: 111707 - RNA, 22 nt, Human adenovirus E
agccuaggccacaauacaugcc

SEQ ID NO: 111708 - RNA, 18 nt, Human adenovirus E
agcaguuauuuuuccucc

SEQ ID NO: 111709 - RNA, 18 nt, Human adenovirus E
agcauaugccugugcugu

SEQ ID NO: 111710 - RNA, 15 nt, Human adenovirus E
aggaauuaugccaag

SEQ ID NO: 111711 - RNA, 20 nt, Human adenovirus E
aggaucacccggugcugccu

SEQ ID NO: 111712 - RNA, 20 nt, Human adenovirus E
aggaucauccggggcugcau

SEQ ID NO: 111713 - RNA, 17 nt, Human adenovirus E
aggauuauagugaacaa

SEQ ID NO: 111714 - RNA, 19 nt, Human adenovirus E
agcgggagaggcaugauga

SEQ ID NO: 111715 - RNA, 14 nt, Human adenovirus E
agcguccgauccug

SEQ ID NO: 111716 - RNA, 15 nt, Human adenovirus E
gggagaggcaugaug

SEQ ID NO: 111717 - RNA, 20 nt, Human adenovirus E
gggaucacgguuaucuggaa

SEQ ID NO: 111718 - RNA, 13 nt, Human adenovirus E
gggaagaaucuga

SEQ ID NO: 111719 - RNA, 21 nt, Human adenovirus E
ggccaaccggcucucggccau

SEQ ID NO: 111720 - RNA, 18 nt, Human adenovirus E
ggcauuucggacauggaa

SEQ ID NO: 111721 - RNA, 18 nt, Human adenovirus E
ggcgcagggcaugguguu

SEQ ID NO: 111722 - RNA, 21 nt, Human adenovirus E
ggcgcagggcaugguguugca

SEQ ID NO: 111723 - RNA, 23 nt, Human adenovirus E
ggcgcccauggccauuccgcgca

SEQ ID NO: 111724 - RNA, 13 nt, Human adenovirus E
ggcugacgcugcg

SEQ ID NO: 111725 - RNA, 16 nt, Human adenovirus E
ggcucugaggccagac

SEQ ID NO: 111726 - RNA, 14 nt, Human adenovirus E
ggcggaaggugcaa

SEQ ID NO: 111727 - RNA, 17 nt, Human adenovirus E
ggauuucaccguggcaa

SEQ ID NO: 111728 - RNA, 18 nt, Human adenovirus E
ggcauucagauguucaag

SEQ ID NO: 111729 - RNA, 16 nt, Human adenovirus E
ggaugcgucgccacca

SEQ ID NO: 111730 - RNA, 13 nt, Human adenovirus E
ggaacaucucgag

SEQ ID NO: 111731 - RNA, 20 nt, Human adenovirus E
ggaacgagaccgagcuccag

SEQ ID NO: 111732 - RNA, 16 nt, Human adenovirus E
guacugaucugauacu

SEQ ID NO: 111733 - RNA, 15 nt, Human adenovirus E
guacgcccgcgccaa

SEQ ID NO: 111734 - RNA, 17 nt, Human adenovirus E
guauauaagcaggugca

SEQ ID NO: 111735 - RNA, 23 nt, Human adenovirus E
gucaaaaaggacaaaaaggaaga

SEQ ID NO: 111736 - RNA, 21 nt, Human adenovirus E
guaccucaccuggcuguucca

SEQ ID NO: 111737 - RNA, 23 nt, Human adenovirus E
guaagccccacaagaaguaccuc

SEQ ID NO: 111738 - RNA, 21 nt, Human adenovirus E
gguccagaaaaagccacagaa

SEQ ID NO: 111739 - RNA, 21 nt, Human adenovirus E
gguccagcgaaggguaugcuu

SEQ ID NO: 111740 - RNA, 12 nt, Human adenovirus E
ggucaugaacug

SEQ ID NO: 111741 - RNA, 15 nt, Human adenovirus E
ggucaugaacugcuc

SEQ ID NO: 111742 - RNA, 14 nt, Human adenovirus E
gggcguacaugcac

SEQ ID NO: 111743 - RNA, 13 nt, Human adenovirus E
gcagcaacagcuu

SEQ ID NO: 111744 - RNA, 15 nt, Human adenovirus E
gcagaugcagcagcu

SEQ ID NO: 111745 - RNA, 16 nt, Human adenovirus E
gcagaugcagcagcug

SEQ ID NO: 111746 - RNA, 19 nt, Human adenovirus E
gccccggcgggcugcaaac

SEQ ID NO: 111747 - RNA, 16 nt, Human adenovirus E
gcccgcgaugaucuca

SEQ ID NO: 111748 - RNA, 18 nt, Human adenovirus E
gcccggagaaaacuggcg

SEQ ID NO: 111749 - RNA, 14 nt, Human adenovirus E
gcccggcggcaccg

SEQ ID NO: 111750 - RNA, 18 nt, Human adenovirus E
gcccuggagaugaugcug

SEQ ID NO: 111751 - RNA, 23 nt, Human adenovirus E
gcccuggagaugaugcugacagu

SEQ ID NO: 111752 - RNA, 15 nt, Human adenovirus E
gcccuagaucugcug

SEQ ID NO: 111753 - RNA, 14 nt, Human adenovirus E
gcccugguguacca

SEQ ID NO: 111754 - RNA, 14 nt, Human adenovirus E
gcccuuaucugacg

SEQ ID NO: 111755 - RNA, 20 nt, Human adenovirus E
  unsure 11..11: n is a, c, g, or t
gccgaguugcnagauggcca

SEQ ID NO: 111756 - RNA, 21 nt, Human adenovirus E
gccgcgugcggucgcgcacca

SEQ ID NO: 111757 - RNA, 16 nt, Human adenovirus E
gccuggucggagucaa

SEQ ID NO: 111758 - RNA, 22 nt, Human adenovirus E
gccuggucggagucaaccccau

SEQ ID NO: 111759 - RNA, 23 nt, Human adenovirus E
gccugcgccaucgucaacacggc

SEQ ID NO: 111760 - RNA, 18 nt, Human adenovirus E
gccugcuacaucucaggg

SEQ ID NO: 111761 - RNA, 15 nt, Human adenovirus E
gccuugaacaucuga

SEQ ID NO: 111762 - RNA, 23 nt, Human adenovirus E
gccuugaacaucugaaugccauu

SEQ ID NO: 111763 - RNA, 17 nt, Human adenovirus E
gccuuacauguggagcu

SEQ ID NO: 111764 - RNA, 21 nt, Human adenovirus E
gcgacaaccgcgugcuggaca

SEQ ID NO: 111765 - RNA, 15 nt, Human adenovirus E
gcgaacacgaucagc

SEQ ID NO: 111766 - RNA, 20 nt, Human adenovirus E
gccuuguugcgcagggccag

SEQ ID NO: 111767 - RNA, 16 nt, Human adenovirus E
gccuuuagacagcagc

SEQ ID NO: 111768 - RNA, 13 nt, Human adenovirus E
gccgggugcugac

SEQ ID NO: 111769 - RNA, 17 nt, Human adenovirus E
gccguugucaaccacug

SEQ ID NO: 111770 - RNA, 17 nt, Human adenovirus E
gccucgagcugggccau

SEQ ID NO: 111771 - RNA, 15 nt, Human adenovirus E
gccucugggugaagg

SEQ ID NO: 111772 - RNA, 17 nt, Human adenovirus E
gccugaaccugacacac

SEQ ID NO: 111773 - RNA, 19 nt, Human adenovirus E
gcgauacccuguccaugca

SEQ ID NO: 111774 - RNA, 18 nt, Human adenovirus E
gcgcaaauucaaggaaga

SEQ ID NO: 111775 - RNA, 18 nt, Human adenovirus E
gcgagcaggagcucaggg

SEQ ID NO: 111776 - RNA, 17 nt, Human adenovirus E
gcgaggacaacaccuac

SEQ ID NO: 111777 - RNA, 23 nt, Human adenovirus E
gcgcccggaccagguucugcuac

SEQ ID NO: 111778 - RNA, 14 nt, Human adenovirus E
gcgcccauggccau

SEQ ID NO: 111779 - RNA, 11 nt, Human adenovirus E
gcgccaucagc

SEQ ID NO: 111780 - RNA, 16 nt, Human adenovirus E
gcuacaucucagggaa

SEQ ID NO: 111781 - RNA, 19 nt, Human adenovirus E
gcgugcaggaacaugcagc

SEQ ID NO: 111782 - RNA, 21 nt, Human adenovirus E
gcuagaugcaacaacaacagc

SEQ ID NO: 111783 - RNA, 17 nt, Human adenovirus E
gcuagucuacagggcca

SEQ ID NO: 111784 - RNA, 18 nt, Human adenovirus E
gcggucgaaggcgguggc

SEQ ID NO: 111785 - RNA, 18 nt, Human adenovirus E
gcucgcucugaaacugug

SEQ ID NO: 111786 - RNA, 18 nt, Human adenovirus E
gcucuuaacuugggccau

SEQ ID NO: 111787 - RNA, 14 nt, Human adenovirus E
gcucugaaacugug

SEQ ID NO: 111788 - RNA, 20 nt, Human adenovirus E
gcucugaggccagacaagaa

SEQ ID NO: 111789 - RNA, 21 nt, Human adenovirus E
  unsure 10..10: n is a, c, g, or t
gcuccagcunuuccaacccuu

SEQ ID NO: 111790 - RNA, 12 nt, Human adenovirus E
gcuccacggugg

SEQ ID NO: 111791 - RNA, 13 nt, Human adenovirus E
gcuccugcagcug

SEQ ID NO: 111792 - RNA, 14 nt, Human adenovirus E
gcucgaacaccugc

SEQ ID NO: 111793 - RNA, 19 nt, Human adenovirus E
gcugcaucugccgccagcg

SEQ ID NO: 111794 - RNA, 16 nt, Human adenovirus E
gcugcugcaucugccg

SEQ ID NO: 111795 - RNA, 17 nt, Human adenovirus E
gcuuacggcaagcgcag

SEQ ID NO: 111796 - RNA, 18 nt, Human adenovirus E
gugucggugaugcaugag

SEQ ID NO: 111797 - RNA, 20 nt, Human adenovirus E
guccagcgaaggguaugcuu

SEQ ID NO: 111798 - RNA, 21 nt, Human adenovirus E
guccagcgaaggguaugcuuu

SEQ ID NO: 111799 - RNA, 17 nt, Human adenovirus E
guccagcugacuaacuc

SEQ ID NO: 111800 - RNA, 16 nt, Human adenovirus E
guccccggugcugacg

SEQ ID NO: 111801 - RNA, 15 nt, Human adenovirus E
gucccgucgaccccc

SEQ ID NO: 111802 - RNA, 20 nt, Human adenovirus E
guggagaccaaaagcauguc

SEQ ID NO: 111803 - RNA, 22 nt, Human adenovirus E
guggagaccaaaagcaugucca

SEQ ID NO: 111804 - RNA, 15 nt, Human adenovirus E
guggagcuaccagcc

SEQ ID NO: 111805 - RNA, 20 nt, Human adenovirus E
guguugcacaauaucuuuga

SEQ ID NO: 111806 - RNA, 23 nt, Human adenovirus E
guguugcagcagcaugagcggaa

SEQ ID NO: 111807 - RNA, 19 nt, Human adenovirus E
guguuguaaaucacccagu

SEQ ID NO: 111808 - RNA, 14 nt, Human adenovirus E
guuccugaauccau

SEQ ID NO: 111809 - RNA, 14 nt, Human adenovirus E
guucuuguccaugg

SEQ ID NO: 111810 - RNA, 18 nt, Human adenovirus E
guuccacacaguuucaga

SEQ ID NO: 111811 - RNA, 23 nt, Human adenovirus E
guuccagcggggaagaaucugac

SEQ ID NO: 111812 - RNA, 21 nt, Human adenovirus E
guuuuacaggauucgagcagu

SEQ ID NO: 111813 - RNA, 13 nt, Human adenovirus E
guuuucugccaac

SEQ ID NO: 111814 - RNA, 18 nt, Human adenovirus E
guuucagagcgagccagu

SEQ ID NO: 111815 - RNA, 14 nt, Human adenovirus E
guuucaauguggau

SEQ ID NO: 111816 - RNA, 16 nt, Human adenovirus E
guuguugauuuuaaca

SEQ ID NO: 111817 - RNA, 17 nt, Human adenovirus E
guuggacgcagcugccg

SEQ ID NO: 111818 - RNA, 14 nt, Human adenovirus E
guugagagugcuga

SEQ ID NO: 111819 - RNA, 18 nt, Human adenovirus E
uaacaaccaaacuaaccu

SEQ ID NO: 111820 - RNA, 23 nt, Human adenovirus E
uaacaaaaaaaaugagagcauua

SEQ ID NO: 111821 - RNA, 12 nt, Human adenovirus E
uaaauaucagaa

SEQ ID NO: 111822 - RNA, 17 nt, Human adenovirus E
uaagcugauaaauauca

SEQ ID NO: 111823 - RNA, 18 nt, Human adenovirus E
uaagcgggagaggcauga

SEQ ID NO: 111824 - RNA, 14 nt, Human adenovirus E
uacagcaggcauuu

SEQ ID NO: 111825 - RNA, 15 nt, Human adenovirus E
uacaaucauauugau

SEQ ID NO: 111826 - RNA, 16 nt, Human adenovirus E
uacuugaaaucugaua

SEQ ID NO: 111827 - RNA, 15 nt, Human adenovirus E
uacuaagcugauaaa

SEQ ID NO: 111828 - RNA, 15 nt, Human adenovirus E
uacuacggcacucug

SEQ ID NO: 111829 - RNA, 17 nt, Human adenovirus E
uaccgggagguggugaa

SEQ ID NO: 111830 - RNA, 11 nt, Human adenovirus E
uauaugcaaug

SEQ ID NO: 111831 - RNA, 21 nt, Human adenovirus E
uauaggguguggagugcaaua

SEQ ID NO: 111832 - RNA, 11 nt, Human adenovirus E
uauauaugcaa

SEQ ID NO: 111833 - RNA, 13 nt, Human adenovirus E
uagucuacagggc

SEQ ID NO: 111834 - RNA, 12 nt, Human adenovirus E
uagaugcaacaa

SEQ ID NO: 111835 - RNA, 20 nt, Human adenovirus E
uagaugcaacaacaacagcc

SEQ ID NO: 111836 - RNA, 21 nt, Human adenovirus E
uagaaugaccacaaccacaaa

SEQ ID NO: 111837 - RNA, 19 nt, Human adenovirus E
cugugcccuucgcccuagc

SEQ ID NO: 111838 - RNA, 22 nt, Human adenovirus E
cugugcuuuucuguguguugca

SEQ ID NO: 111839 - RNA, 16 nt, Human adenovirus E
gaagcggcuccuuuga

SEQ ID NO: 111840 - RNA, 14 nt, Human adenovirus E
gaagcaagcuccag

SEQ ID NO: 111841 - RNA, 19 nt, Human adenovirus E
gaauccaucaaccagucuu

SEQ ID NO: 111842 - RNA, 21 nt, Human adenovirus E
gaauccaucaaccagucuuug

SEQ ID NO: 111843 - RNA, 17 nt, Human adenovirus E
gaaugaccacaaccaca

SEQ ID NO: 111844 - RNA, 14 nt, Human adenovirus E
gaacaauacucucg

SEQ ID NO: 111845 - RNA, 14 nt, Human adenovirus E
gaacaaacucugaa

SEQ ID NO: 111846 - RNA, 19 nt, Human adenovirus E
gaacccaccacgccuagaa

SEQ ID NO: 111847 - RNA, 17 nt, Human adenovirus E
gaaccugacacaccacc

SEQ ID NO: 111848 - RNA, 22 nt, Human adenovirus E
gaaaauuacuauuuacacuggc

SEQ ID NO: 111849 - RNA, 14 nt, Human adenovirus E
gcaacaacaacagc

SEQ ID NO: 111850 - RNA, 15 nt, Human adenovirus E
gcaacaacaacagcc

SEQ ID NO: 111851 - RNA, 22 nt, Human adenovirus E
  unsure 10..10: n is a, c, g, or t
gauggugcangaguguaacaug

SEQ ID NO: 111852 - RNA, 15 nt, Human adenovirus E
gaugucaaauuccuc

SEQ ID NO: 111853 - RNA, 15 nt, Human adenovirus E
gaugagcaagcagua

SEQ ID NO: 111854 - RNA, 18 nt, Human adenovirus E
gaucugucuccaggaaag

SEQ ID NO: 111855 - RNA, 19 nt, Human adenovirus E
gaucauugagcacccggug

SEQ ID NO: 111856 - RNA, 19 nt, Human adenovirus E
gaucauauugaugaugauu

SEQ ID NO: 111857 - RNA, 14 nt, Human adenovirus E
gauacaguguucau

SEQ ID NO: 111858 - RNA, 20 nt, Human adenovirus E
gaguggggugggaaggguug

SEQ ID NO: 111859 - RNA, 23 nt, Human adenovirus E
gauaaauaucagaaaugccugcu

SEQ ID NO: 111860 - RNA, 19 nt, Human adenovirus E
gagucgcaagcgcccagaa

SEQ ID NO: 111861 - RNA, 12 nt, Human adenovirus E
gagcccuugauu

SEQ ID NO: 111862 - RNA, 14 nt, Human adenovirus E
gaggcgcucgccaa

SEQ ID NO: 111863 - RNA, 18 nt, Human adenovirus E
gacacggucauguggaug

SEQ ID NO: 111864 - RNA, 21 nt, Human adenovirus E
gacgcucuuaacuugggccau

SEQ ID NO: 111865 - RNA, 17 nt, Human adenovirus E
gacgcuucggaguaccu

SEQ ID NO: 111866 - RNA, 11 nt, Human adenovirus E
gagacuaugua

SEQ ID NO: 111867 - RNA, 17 nt, Human adenovirus E
gagaaggccgaucccug

SEQ ID NO: 111868 - RNA, 22 nt, Human adenovirus E
cgccgcgcgcggguagguucug

SEQ ID NO: 111869 - RNA, 15 nt, Human adenovirus E
cgcccaggacuacuc

SEQ ID NO: 111870 - RNA, 16 nt, Human adenovirus E
cgcccaggcgcugggu

SEQ ID NO: 111871 - RNA, 16 nt, Human adenovirus E
cgccaacgcuccacgc

SEQ ID NO: 111872 - RNA, 18 nt, Human adenovirus E
cgcccaccgaaaccagau

SEQ ID NO: 111873 - RNA, 19 nt, Human adenovirus E
cgauuggacccaggccaug

SEQ ID NO: 111874 - RNA, 17 nt, Human adenovirus E
cgcaaaugcaaauucca

SEQ ID NO: 111875 - RNA, 21 nt, Human adenovirus E
cgcaaauucaaggaagagaug

SEQ ID NO: 111876 - RNA, 18 nt, Human adenovirus E
cgcagaagcaagcuccag

SEQ ID NO: 111877 - RNA, 22 nt, Human adenovirus E
cgcacagccuugaacaucugaa

SEQ ID NO: 111878 - RNA, 20 nt, Human adenovirus E
cgaucauugagcacccggug

SEQ ID NO: 111879 - RNA, 12 nt, Human adenovirus E
cgagccagucuc

SEQ ID NO: 111880 - RNA, 15 nt, Human adenovirus E
cgaggagcacccuca

SEQ ID NO: 111881 - RNA, 19 nt, Human adenovirus E
cgaggaggauguccaagcg

SEQ ID NO: 111882 - RNA, 18 nt, Human adenovirus E
cgaguucgccccccggcg

SEQ ID NO: 111883 - RNA, 13 nt, Human adenovirus E
ccguguguuccug

SEQ ID NO: 111884 - RNA, 15 nt, Human adenovirus E
cgacugcguccacac

SEQ ID NO: 111885 - RNA, 16 nt, Human adenovirus E
ccuacucguacaaagu

SEQ ID NO: 111886 - RNA, 16 nt, Human adenovirus E
cgagaccgagcuccag

SEQ ID NO: 111887 - RNA, 18 nt, Human adenovirus E
cguugucaaccacugcga

SEQ ID NO: 111888 - RNA, 18 nt, Human adenovirus E
cgugcuggacauggccag

SEQ ID NO: 111889 - RNA, 17 nt, Human adenovirus E
cgggugcugacuagguc

SEQ ID NO: 111890 - RNA, 16 nt, Human adenovirus E
cggugccgcccaggac

SEQ ID NO: 111891 - RNA, 19 nt, Human adenovirus E
cggugcuggcccugugguu

SEQ ID NO: 111892 - RNA, 21 nt, Human adenovirus E
cgugaacgcgcugguggagaa

SEQ ID NO: 111893 - RNA, 14 nt, Human adenovirus E
cgucauucauggaa

SEQ ID NO: 111894 - RNA, 17 nt, Human adenovirus E
cggcacgcggccguuca

SEQ ID NO: 111895 - RNA, 19 nt, Human adenovirus E
cgcuggccgugggcgacaa

SEQ ID NO: 111896 - RNA, 13 nt, Human adenovirus E
cggcgcggagccu

SEQ ID NO: 111897 - RNA, 18 nt, Human adenovirus E
cggcgaggaggaugucca

SEQ ID NO: 111898 - RNA, 11 nt, Human adenovirus E
cggcucggggc

SEQ ID NO: 111899 - RNA, 17 nt, Human adenovirus E
cgcggccguucaugggc

SEQ ID NO: 111900 - RNA, 14 nt, Human adenovirus E
cgcucgggaucucg

SEQ ID NO: 111901 - RNA, 12 nt, Human adenovirus E
cgcucuaucucc

SEQ ID NO: 111902 - RNA, 18 nt, Human adenovirus E
cgcucugaaacugugugg

SEQ ID NO: 111903 - RNA, 22 nt, Human adenovirus E
cgcugcuucgcucgggaucucg

SEQ ID NO: 111904 - RNA, 14 nt, Human adenovirus E
cgcuacacgcuggc

SEQ ID NO: 111905 - RNA, 14 nt, Human adenovirus E
cuaucauuaccucu

SEQ ID NO: 111906 - RNA, 15 nt, Human adenovirus E
cuagaacaagucaag

SEQ ID NO: 111907 - RNA, 21 nt, Human adenovirus E
cuagaaugaccacaaccacaa

SEQ ID NO: 111908 - RNA, 14 nt, Human adenovirus E
cuccucuugaaggu

SEQ ID NO: 111909 - RNA, 19 nt, Human adenovirus E
cuccugggcgggagugcgu

SEQ ID NO: 111910 - RNA, 14 nt, Human adenovirus E
cuccuccccaugaa

SEQ ID NO: 111911 - RNA, 20 nt, Human adenovirus E
cuccuacgaggucacuccaa

SEQ ID NO: 111912 - RNA, 16 nt, Human adenovirus E
cuccauugccauugcc

SEQ ID NO: 111913 - RNA, 13 nt, Human adenovirus E
cuccagcuccagu

SEQ ID NO: 111914 - RNA, 15 nt, Human adenovirus E
cuccagcuccagugu

SEQ ID NO: 111915 - RNA, 23 nt, Human adenovirus E
cuccacguuccacacaguuucag

SEQ ID NO: 111916 - RNA, 22 nt, Human adenovirus E
cuccacccaucaucaugagcaa

SEQ ID NO: 111917 - RNA, 17 nt, Human adenovirus E
cucacagcucaacagcu

SEQ ID NO: 111918 - RNA, 13 nt, Human adenovirus E
cucaauaucacga

SEQ ID NO: 111919 - RNA, 19 nt, Human adenovirus E
cucaauaucacgaaaucau

SEQ ID NO: 111920 - RNA, 21 nt, Human adenovirus E
cucaauaucacgaaaucauau

SEQ ID NO: 111921 - RNA, 19 nt, Human adenovirus E
cugcccuggagaugaugcu

SEQ ID NO: 111922 - RNA, 22 nt, Human adenovirus E
cugcuucgguggcgaccuagcu

SEQ ID NO: 111923 - RNA, 13 nt, Human adenovirus E
cugcuguguacug

SEQ ID NO: 111924 - RNA, 20 nt, Human adenovirus E
cugcugggucagcucgccca

SEQ ID NO: 111925 - RNA, 17 nt, Human adenovirus E
cugcgcgagcucuuuau

SEQ ID NO: 111926 - RNA, 16 nt, Human adenovirus E
cugccugauugcgaua

SEQ ID NO: 111927 - RNA, 17 nt, Human adenovirus E
cugccuggucggaguca

SEQ ID NO: 111928 - RNA, 17 nt, Human adenovirus E
cuguaaaacuguugaau

SEQ ID NO: 111929 - RNA, 21 nt, Human adenovirus E
cugguggagaacaaggccauc

SEQ ID NO: 111930 - RNA, 23 nt, Human adenovirus E
cucggacgagcgccucaagcaga

SEQ ID NO: 111931 - RNA, 16 nt, Human adenovirus E
cugacacaccaccaca

SEQ ID NO: 111932 - RNA, 24 nt, Human adenovirus E
cugaucugauacuccucaauauca

SEQ ID NO: 111933 - RNA, 21 nt, Human adenovirus E
cugaccuguuuccugaacugc

SEQ ID NO: 111934 - RNA, 13 nt, Human adenovirus E
aaaaaauaaucau

SEQ ID NO: 111935 - RNA, 15 nt, Human adenovirus E
aaaaaauaaucauuu

SEQ ID NO: 111936 - RNA, 14 nt, Human adenovirus E
aaaaauaaucauuu

SEQ ID NO: 111937 - RNA, 12 nt, Human adenovirus E
aaaaagccacag

SEQ ID NO: 111938 - RNA, 15 nt, Human adenovirus E
augucuugauucaug

SEQ ID NO: 111939 - RNA, 13 nt, Human adenovirus E
auuaaaaguuaau

SEQ ID NO: 111940 - RNA, 13 nt, Human adenovirus E
auguauuauggaa

SEQ ID NO: 111941 - RNA, 20 nt, Human adenovirus E
auggcauucagauguucaag

SEQ ID NO: 111942 - RNA, 22 nt, Human adenovirus E
auggcgggcggggcggugcugg

SEQ ID NO: 111943 - RNA, 20 nt, Human adenovirus E
auuuacacuggcacuaauca

SEQ ID NO: 111944 - RNA, 15 nt, Human adenovirus E
auuugccagucucau

SEQ ID NO: 111945 - RNA, 20 nt, Human adenovirus E
auuuuggaucugacacuaca

SEQ ID NO: 111946 - RNA, 18 nt, Human adenovirus E
auuuggauuucaccgugg

SEQ ID NO: 111947 - RNA, 12 nt, Human adenovirus E
auugaugaugau

SEQ ID NO: 111948 - RNA, 14 nt, Human adenovirus E
auugaugaugauuu

SEQ ID NO: 111949 - RNA, 15 nt, Human adenovirus E
auucucaucucgccc

SEQ ID NO: 111950 - RNA, 17 nt, Human adenovirus E
auuggacccaggccaug

SEQ ID NO: 111951 - RNA, 15 nt, Human adenovirus E
auugccgucauucau

SEQ ID NO: 111952 - RNA, 20 nt, Human adenovirus E
auugcgauacccuguccaug

SEQ ID NO: 111953 - RNA, 13 nt, Human adenovirus E
auuacucucauca

SEQ ID NO: 111954 - RNA, 21 nt, Human adenovirus E
auuaccucugcucuaugcaau

SEQ ID NO: 111955 - RNA, 23 nt, Human adenovirus E
auuaccucugcucuaugcaauuc

SEQ ID NO: 111956 - RNA, 13 nt, Human adenovirus E
auuauauaugcaa

SEQ ID NO: 111957 - RNA, 15 nt, Human adenovirus E
auuauauaugcaaug

SEQ ID NO: 111958 - RNA, 18 nt, Human adenovirus E
caacaaaauugcaucauc

SEQ ID NO: 111959 - RNA, 15 nt, Human adenovirus E
caaauuauacacuga

SEQ ID NO: 111960 - RNA, 21 nt, Human adenovirus E
caacucgaguuccaccaauaa

SEQ ID NO: 111961 - RNA, 15 nt, Human adenovirus E
caaucauauugauga

SEQ ID NO: 111962 - RNA, 21 nt, Human adenovirus E
caaucauauugaugauuugag

SEQ ID NO: 111963 - RNA, 23 nt, Human adenovirus E
caagugcggaugggaaugcgaga

SEQ ID NO: 111964 - RNA, 20 nt, Human adenovirus E
caaucggugcgcgguacuga

SEQ ID NO: 111965 - RNA, 15 nt, Human adenovirus E
cacacgguuuacaug

SEQ ID NO: 111966 - RNA, 19 nt, Human adenovirus E
caaugguacugaucugaua

SEQ ID NO: 111967 - RNA, 21 nt, Human adenovirus E
cacccaucaucaugagcaaag

SEQ ID NO: 111968 - RNA, 22 nt, Human adenovirus E
cacccccgccgcggcgccuguu

SEQ ID NO: 111969 - RNA, 15 nt, Human adenovirus E
cacagcucaacagcu

SEQ ID NO: 111970 - RNA, 14 nt, Human adenovirus E
cacagcgacccaug

SEQ ID NO: 111971 - RNA, 17 nt, Human adenovirus E
cacagcaaccucaggca

SEQ ID NO: 111972 - RNA, 12 nt, Human adenovirus E
cagaauaacuga

SEQ ID NO: 111973 - RNA, 15 nt, Human adenovirus E
cagaagcaagcucca

SEQ ID NO: 111974 - RNA, 18 nt, Human adenovirus E
cagaagcaagcuccagcu

SEQ ID NO: 111975 - RNA, 19 nt, Human adenovirus E
cacguuccacacaguuuca

SEQ ID NO: 111976 - RNA, 12 nt, Human adenovirus E
cacuaaucacac

SEQ ID NO: 111977 - RNA, 12 nt, Human adenovirus E
cacucuguggaa

SEQ ID NO: 111978 - RNA, 15 nt, Human adenovirus E
cacuacagaaacuga

SEQ ID NO: 111979 - RNA, 20 nt, Human adenovirus E
cacuacagaaacugaauuau

SEQ ID NO: 111980 - RNA, 19 nt, Human adenovirus E
cacuacagccuaggccaca

SEQ ID NO: 111981 - RNA, 24 nt, Human adenovirus E
caccugcccuggagaugaugcuga

SEQ ID NO: 111982 - RNA, 14 nt, Human adenovirus E
caccucacagcuca

SEQ ID NO: 111983 - RNA, 21 nt, Human adenovirus E
aggcaucuucugccuggugaa

SEQ ID NO: 111984 - RNA, 12 nt, Human adenovirus E
aggcaugaugag

SEQ ID NO: 111985 - RNA, 19 nt, Human adenovirus E
aggcccuagaucugcugca

SEQ ID NO: 111986 - RNA, 20 nt, Human adenovirus E
aggcuuccugcccgcgcuga

SEQ ID NO: 111987 - RNA, 20 nt, Human adenovirus E
aggcacacgcacuaccacca

SEQ ID NO: 111988 - RNA, 21 nt, Human adenovirus E
aggacaauccucagcuguuga

SEQ ID NO: 111989 - RNA, 22 nt, Human adenovirus E
aggacaauccucagcuguugag

SEQ ID NO: 111990 - RNA, 20 nt, Human adenovirus E
agcugagacagcgacuacuc

SEQ ID NO: 111991 - RNA, 21 nt, Human adenovirus E
agcugagacagcgacuacucc

SEQ ID NO: 111992 - RNA, 20 nt, Human adenovirus E
agcugagccaccugcugggu

SEQ ID NO: 111993 - RNA, 19 nt, Human adenovirus E
aguccagcugacuaacuca

SEQ ID NO: 111994 - RNA, 12 nt, Human adenovirus E
aggucaggguug

SEQ ID NO: 111995 - RNA, 16 nt, Human adenovirus E
agccgcgucccgccau

SEQ ID NO: 111996 - RNA, 13 nt, Human adenovirus E
agccuaggccaca

SEQ ID NO: 111997 - RNA, 14 nt, Human adenovirus E
agccugaggaugau

SEQ ID NO: 111998 - RNA, 21 nt, Human adenovirus E
agcccacgaccguacuacuuc

SEQ ID NO: 111999 - RNA, 19 nt, Human adenovirus E
agaugcaacaacaacagcc

SEQ ID NO: 112000 - RNA, 12 nt, Human adenovirus E
agaucugcugca

SEQ ID NO: 112001 - RNA, 19 nt, Human adenovirus E
agauacaaucauauugaug

SEQ ID NO: 112002 - RNA, 14 nt, Human adenovirus E
agaucauauugaug

SEQ ID NO: 112003 - RNA, 17 nt, Human adenovirus E
agaucauauugaugaug

SEQ ID NO: 112004 - RNA, 22 nt, Human adenovirus E
agcgguggguccuccauugcca

SEQ ID NO: 112005 - RNA, 18 nt, Human adenovirus E
agcgggggcgagaggugc

SEQ ID NO: 112006 - RNA, 23 nt, Human adenovirus E
agcgcguccggguggaugaugac

SEQ ID NO: 112007 - RNA, 16 nt, Human adenovirus E
agccuugaacaucuga

SEQ ID NO: 112008 - RNA, 16 nt, Human adenovirus E
agcgaaggguaugcuu

SEQ ID NO: 112009 - RNA, 17 nt, Human adenovirus E
agcgccacugagacaca

SEQ ID NO: 112010 - RNA, 21 nt, Human adenovirus E
agcgcccggaccagguucugc

SEQ ID NO: 112011 - RNA, 14 nt, Human adenovirus E
aucagaaaugccug

SEQ ID NO: 112012 - RNA, 19 nt, Human adenovirus E
aucagauguaucuacugaa

SEQ ID NO: 112013 - RNA, 21 nt, Human adenovirus E
aucaggaauuaugccaagcug

SEQ ID NO: 112014 - RNA, 14 nt, Human adenovirus E
aucauuugauuuga

SEQ ID NO: 112015 - RNA, 18 nt, Human adenovirus E
aucucagggaauggggcu

SEQ ID NO: 112016 - RNA, 20 nt, Human adenovirus E
aucucagggaauggggcuga

SEQ ID NO: 112017 - RNA, 17 nt, Human adenovirus E
aucuccuccucuugaag

SEQ ID NO: 112018 - RNA, 18 nt, Human adenovirus E
aucugcugcacggucuga

SEQ ID NO: 112019 - RNA, 17 nt, Human adenovirus E
aucuggaagaagcagaa

SEQ ID NO: 112020 - RNA, 15 nt, Human adenovirus E
aucuggggauggugc

SEQ ID NO: 112021 - RNA, 11 nt, Human adenovirus E
aucucuugcac

SEQ ID NO: 112022 - RNA, 16 nt, Human adenovirus E
aucugauacuccucaa

SEQ ID NO: 112023 - RNA, 13 nt, Human adenovirus E
aucugacacuaca

SEQ ID NO: 112024 - RNA, 14 nt, Human adenovirus E
aucuacugaacucu

SEQ ID NO: 112025 - RNA, 20 nt, Human adenovirus E
auacaugcccauauuagacu

SEQ ID NO: 112026 - RNA, 21 nt, Human adenovirus E
auacacacacgguuuacaugu

SEQ ID NO: 112027 - RNA, 12 nt, Human adenovirus E
auacaguguuca

SEQ ID NO: 112028 - RNA, 14 nt, Human adenovirus E
auagacuuguucag

SEQ ID NO: 112029 - RNA, 15 nt, Human adenovirus E
auagacuuguucagc

SEQ ID NO: 112030 - RNA, 14 nt, Human adenovirus E
auacuccaccucca

SEQ ID NO: 112031 - RNA, 16 nt, Human adenovirus E
agugaaauaaagauca

SEQ ID NO: 112032 - RNA, 20 nt, Human adenovirus E
agugaacaauuugagguuau

SEQ ID NO: 112033 - RNA, 20 nt, Human adenovirus E
auaaagauacaaucauauug

SEQ ID NO: 112034 - RNA, 15 nt, Human adenovirus E
auaaagaucauauug

SEQ ID NO: 112035 - RNA, 14 nt, Human adenovirus E
auaagcaggugcag

SEQ ID NO: 112036 - RNA, 17 nt, Human adenovirus E
acaagauuacuaagcug

SEQ ID NO: 112037 - RNA, 20 nt, Human adenovirus E
acagaacugaacugacugug

SEQ ID NO: 112038 - RNA, 18 nt, Human adenovirus E
acaggauuauagugaaca

SEQ ID NO: 112039 - RNA, 18 nt, Human adenovirus E
acaggccaagaucuccua

SEQ ID NO: 112040 - RNA, 17 nt, Human adenovirus E
acagacccuucugacuc

SEQ ID NO: 112041 - RNA, 15 nt, Human adenovirus E
acaugaaagugcugu

SEQ ID NO: 112042 - RNA, 13 nt, Human adenovirus E
accacaauuacuc

SEQ ID NO: 112043 - RNA, 22 nt, Human adenovirus E
accacuacagccuaggccacaa

SEQ ID NO: 112044 - RNA, 23 nt, Human adenovirus E
acccggggucucuucgcugcaug

SEQ ID NO: 112045 - RNA, 14 nt, Human adenovirus E
acccugcaugccaa

SEQ ID NO: 112046 - RNA, 21 nt, Human adenovirus E
accgaaaccagauacuccuag

SEQ ID NO: 112047 - RNA, 19 nt, Human adenovirus E
acccucccaggacauggaa

SEQ ID NO: 112048 - RNA, 23 nt, Human adenovirus E
accugcccuggagaugaugcuga

SEQ ID NO: 112049 - RNA, 16 nt, Human adenovirus E
acgagaccgagcucca

SEQ ID NO: 112050 - RNA, 19 nt, Human adenovirus E
acgccuagaaugaccacaa

SEQ ID NO: 112051 - RNA, 12 nt, Human adenovirus E
acuaacaaccaa

SEQ ID NO: 112052 - RNA, 17 nt, Human adenovirus E
acguuccacacaguuuc

SEQ ID NO: 112053 - RNA, 17 nt, Human adenovirus E
acuaguucgaaucauuc

SEQ ID NO: 112054 - RNA, 16 nt, Human adenovirus E
acuacagcaggcauuu

SEQ ID NO: 112055 - RNA, 12 nt, Human adenovirus E
acuacagccuag

SEQ ID NO: 112056 - RNA, 14 nt, Human adenovirus E
acugcucgaucucc

SEQ ID NO: 112057 - RNA, 16 nt, Human adenovirus E
acucugguggccaacu

SEQ ID NO: 112058 - RNA, 20 nt, Human adenovirus E
acuaugaggccgagccacag

SEQ ID NO: 112059 - RNA, 15 nt, Human adenovirus E
acuauuuacacuggc

SEQ ID NO: 112060 - RNA, 18 nt, Human adenovirus E
acuauuuacacuggcacu

SEQ ID NO: 112061 - RNA, 22 nt, Human adenovirus E
agaaaugccugcuacaucucag

SEQ ID NO: 112062 - RNA, 13 nt, Human adenovirus E
acugugaguauau

SEQ ID NO: 112063 - RNA, 21 nt, Human adenovirus E
acuucgcauucgccagcagca

SEQ ID NO: 112064 - RNA, 15 nt, Human adenovirus E
acuuuuccaggguga

SEQ ID NO: 112065 - RNA, 13 nt, Human adenovirus E
agaaaaagccaca

SEQ ID NO: 112066 - RNA, 12 nt, Human adenovirus E
agacauuuaaca

SEQ ID NO: 112067 - RNA, 12 nt, Human adenovirus E
agagcauuacuc

SEQ ID NO: 112068 - RNA, 18 nt, Human adenovirus E
agagaugcuccaggucau

SEQ ID NO: 112069 - RNA, 23 nt, Human adenovirus E
agaccugugugguuagcucagag

SEQ ID NO: 112070 - RNA, 15 nt, Human adenovirus E
agaccgagcuccagc

SEQ ID NO: 112071 - RNA, 11 nt, Human adenovirus E
agagugcugaa

SEQ ID NO: 112072 - RNA, 20 nt, Human adenovirus E
acaaaaaaauaaagaaucac

SEQ ID NO: 112073 - RNA, 13 nt, Human adenovirus E
aauuauacacuga

SEQ ID NO: 112074 - RNA, 12 nt, Human adenovirus E
aauugcaucauc

SEQ ID NO: 112075 - RNA, 15 nt, Human adenovirus E
aauuacucacaccac

SEQ ID NO: 112076 - RNA, 14 nt, Human adenovirus E
aauuacuauuuaca

SEQ ID NO: 112077 - RNA, 15 nt, Human adenovirus E
aauuacuauuuacac

SEQ ID NO: 112078 - RNA, 17 nt, Human adenovirus E
aaugagaaaauuacuau

SEQ ID NO: 112079 - RNA, 22 nt, Human adenovirus E
aaugagaaaauuacuauuuaca

SEQ ID NO: 112080 - RNA, 16 nt, Human adenovirus E
aaugguacugaucuga

SEQ ID NO: 112081 - RNA, 21 nt, Human adenovirus E
aaugguacugaucugauacuc

SEQ ID NO: 112082 - RNA, 19 nt, Human adenovirus E
aagaaucacuuacuugaaa

SEQ ID NO: 112083 - RNA, 17 nt, Human adenovirus E
aagaauggcaaaauuca

SEQ ID NO: 112084 - RNA, 15 nt, Human adenovirus E
aagcggcuccuuuga

SEQ ID NO: 112085 - RNA, 22 nt, Human adenovirus E
aagccaccguggaacaucucga

SEQ ID NO: 112086 - RNA, 23 nt, Human adenovirus E
aaggcugugcggggggagagggu

SEQ ID NO: 112087 - RNA, 20 nt, Human adenovirus E
aaggcgugcaggaacaugca

SEQ ID NO: 112088 - RNA, 14 nt, Human adenovirus E
aaaucugauaccag

SEQ ID NO: 112089 - RNA, 14 nt, Human adenovirus E
aaaugagagcauua

SEQ ID NO: 112090 - RNA, 21 nt, Human adenovirus E
aaagccacagaaguuucaugg

SEQ ID NO: 112091 - RNA, 14 nt, Human adenovirus E
aaagaucauauuga

SEQ ID NO: 112092 - RNA, 22 nt, Human adenovirus E
aaagaucauauugaugaugauu

SEQ ID NO: 112093 - RNA, 19 nt, Human adenovirus E
aaagauacaaucauauuga

SEQ ID NO: 112094 - RNA, 15 nt, Human adenovirus E
aaagcaacugcauca

SEQ ID NO: 112095 - RNA, 14 nt, Human adenovirus E
aaaagcauguccau

SEQ ID NO: 112096 - RNA, 21 nt, Human adenovirus E
aaaaugagagcauuacucuca

SEQ ID NO: 112097 - RNA, 21 nt, Human adenovirus E
aacauucuggccugcacccuc

SEQ ID NO: 112098 - RNA, 22 nt, Human adenovirus E
aacauucuggccugcacccuca

SEQ ID NO: 112099 - RNA, 21 nt, Human adenovirus E
aaccaccccggccugcaugaa

SEQ ID NO: 112100 - RNA, 22 nt, Human adenovirus E
aaauuuuugcuuuuauuugcca

SEQ ID NO: 112101 - RNA, 19 nt, Human adenovirus E
aaccagucuuuguucuuca

SEQ ID NO: 112102 - RNA, 17 nt, Human adenovirus E
aaccagagggugaugug

SEQ ID NO: 112103 - RNA, 14 nt, Human adenovirus E
aaccagauacuccu

SEQ ID NO: 112104 - RNA, 17 nt, Human adenovirus E
aaccugacacaccacca

SEQ ID NO: 112105 - RNA, 15 nt, Human adenovirus E
ugguacugaucugau

SEQ ID NO: 112106 - RNA, 23 nt, Human adenovirus E
ugguauugcuauuuuggaucuga

SEQ ID NO: 112107 - RNA, 18 nt, Human adenovirus E
uggucuucacgcccggcg

SEQ ID NO: 112108 - RNA, 15 nt, Human adenovirus E
uggugaaggaggaaa

SEQ ID NO: 112109 - RNA, 18 nt, Human adenovirus E
ugguguauuccauguccu

SEQ ID NO: 112110 - RNA, 22 nt, Human adenovirus E
ugguguauuccauguccuggga

SEQ ID NO: 112111 - RNA, 14 nt, Human adenovirus E
ugguggaggaucac

SEQ ID NO: 112112 - RNA, 15 nt, Human adenovirus E
ugggcuuggauguug

SEQ ID NO: 112113 - RNA, 15 nt, Human adenovirus E
ugggcgggagugcgu

SEQ ID NO: 112114 - RNA, 13 nt, Human adenovirus E
uggggacugugag

SEQ ID NO: 112115 - RNA, 15 nt, Human adenovirus E
uggggacugugagua

SEQ ID NO: 112116 - RNA, 12 nt, Human adenovirus E
uggacaugcuuu

SEQ ID NO: 112117 - RNA, 16 nt, Human adenovirus E
uggaucugacacuaca

SEQ ID NO: 112118 - RNA, 22 nt, Human adenovirus E
uggaugagcaagcaguacgaua

SEQ ID NO: 112119 - RNA, 17 nt, Human adenovirus E
ugugggucugaugaguc

SEQ ID NO: 112120 - RNA, 13 nt, Human adenovirus E
ugugguggcauga

SEQ ID NO: 112121 - RNA, 22 nt, Human adenovirus E
ugugguuccgcaggaucauccg

SEQ ID NO: 112122 - RNA, 13 nt, Human adenovirus E
uguguaacaugaa

SEQ ID NO: 112123 - RNA, 18 nt, Human adenovirus E
ugugcgaggauugcccug

SEQ ID NO: 112124 - RNA, 21 nt, Human adenovirus E
uguccugggaggguggaggaa

SEQ ID NO: 112125 - RNA, 16 nt, Human adenovirus E
uuauuuuaaugaauca

SEQ ID NO: 112126 - RNA, 15 nt, Human adenovirus E
uuauuuuuccuccac

SEQ ID NO: 112127 - RNA, 16 nt, Human adenovirus E
uuagacagcagcccca

SEQ ID NO: 112128 - RNA, 20 nt, Human adenovirus E
uguuuuauugauucaacagu

SEQ ID NO: 112129 - RNA, 24 nt, Human adenovirus E
uguucuggucuuuuugacgcucuu

SEQ ID NO: 112130 - RNA, 20 nt, Human adenovirus E
ugcgauacccuguccaugca

SEQ ID NO: 112131 - RNA, 15 nt, Human adenovirus E
ugcgcacaugugcga

SEQ ID NO: 112132 - RNA, 20 nt, Human adenovirus E
ugcguccacacucugaucaa

SEQ ID NO: 112133 - RNA, 20 nt, Human adenovirus E
ugcggggggagaggguggug

SEQ ID NO: 112134 - RNA, 13 nt, Human adenovirus E
ugcgcagggccag

SEQ ID NO: 112135 - RNA, 20 nt, Human adenovirus E
ugcuccugcagcugagccac

SEQ ID NO: 112136 - RNA, 17 nt, Human adenovirus E
ugcugaagagaugcaug

SEQ ID NO: 112137 - RNA, 19 nt, Human adenovirus E
ugcuucgcucgggaucucg

SEQ ID NO: 112138 - RNA, 15 nt, Human adenovirus E
ugcuucggaucuuca

SEQ ID NO: 112139 - RNA, 20 nt, Human adenovirus E
ugccacacauguguguuuac

SEQ ID NO: 112140 - RNA, 19 nt, Human adenovirus E
ugcccuggagaugaugcug

SEQ ID NO: 112141 - RNA, 21 nt, Human adenovirus E
ugcagucgacuggcacagaug

SEQ ID NO: 112142 - RNA, 14 nt, Human adenovirus E
  unsure 5..5: n is a, c, g, or t
ugcangaguguaac

SEQ ID NO: 112143 - RNA, 16 nt, Human adenovirus E
ugcacaauaucuuuga

SEQ ID NO: 112144 - RNA, 15 nt, Human adenovirus E
ugaucugauacuccu

SEQ ID NO: 112145 - RNA, 17 nt, Human adenovirus E
ugaucugauacuccuca

SEQ ID NO: 112146 - RNA, 15 nt, Human adenovirus E
ugaucccauacucca

SEQ ID NO: 112147 - RNA, 12 nt, Human adenovirus E
ugcaauucugac

SEQ ID NO: 112148 - RNA, 15 nt, Human adenovirus E
ugcaaauuccaagaa

SEQ ID NO: 112149 - RNA, 17 nt, Human adenovirus E
ugcaacaacaacagcca

SEQ ID NO: 112150 - RNA, 15 nt, Human adenovirus E
ugauucaacaguuuu

SEQ ID NO: 112151 - RNA, 22 nt, Human adenovirus E
ugauuuuacuacuccuggcaga

SEQ ID NO: 112152 - RNA, 16 nt, Human adenovirus E
ugagcaagcaguacga

SEQ ID NO: 112153 - RNA, 17 nt, Human adenovirus E
ugagcaagcaguacgau

SEQ ID NO: 112154 - RNA, 15 nt, Human adenovirus E
ugagagcauuacucu

SEQ ID NO: 112155 - RNA, 17 nt, Human adenovirus E
ugagagguuuucucuag

SEQ ID NO: 112156 - RNA, 17 nt, Human adenovirus E
ugagacuaaucacagaa

SEQ ID NO: 112157 - RNA, 13 nt, Human adenovirus E
ucuuuguugucug

SEQ ID NO: 112158 - RNA, 17 nt, Human adenovirus E
ugagaaucgaguacaau

SEQ ID NO: 112159 - RNA, 17 nt, Human adenovirus E
ugaggaggagacugaug

SEQ ID NO: 112160 - RNA, 18 nt, Human adenovirus E
ugaggcccuagaucugcu

SEQ ID NO: 112161 - RNA, 21 nt, Human adenovirus E
ugaggugucggugaugcauga

SEQ ID NO: 112162 - RNA, 20 nt, Human adenovirus E
ugagucgcaagcgcccagaa

SEQ ID NO: 112163 - RNA, 19 nt, Human adenovirus E
aacgagaccgagcuccagc

SEQ ID NO: 112164 - RNA, 17 nt, Human adenovirus E
aacugaacugacugugg

SEQ ID NO: 112165 - RNA, 23 nt, Human adenovirus E
aacgugagaaucgaguacaauaa

SEQ ID NO: 112166 - RNA, 17 nt, Human adenovirus E
aacggagacgguuguug

SEQ ID NO: 112167 - RNA, 20 nt, Human adenovirus E
aacggagucucuuaccugug

SEQ ID NO: 112168 - RNA, 14 nt, Human adenovirus E
aagcaagcuccagc

SEQ ID NO: 112169 - RNA, 18 nt, Human adenovirus E
aagauuacuaagcugaua

SEQ ID NO: 112170 - RNA, 16 nt, Human adenovirus E
aagauacaaucauauu

SEQ ID NO: 112171 - RNA, 17 nt, Human adenovirus E
aagaucucuugcacguc

SEQ ID NO: 112172 - RNA, 16 nt, Human adenovirus E
aagagaggcaucuucu

SEQ ID NO: 112173 - RNA, 22 nt, Human adenovirus E
aacuugcuugucugugugugua

SEQ ID NO: 112174 - RNA, 15 nt, Human adenovirus E
aagugcgugguuuau

SEQ ID NO: 112175 - RNA, 20 nt, Human adenovirus E
aagugcgugguuuaugacuc

SEQ ID NO: 112176 - RNA, 20 nt, Human adenovirus E
aauccaucaaccagucuuug

SEQ ID NO: 112177 - RNA, 14 nt, Human adenovirus E
aagcaguacgauau

SEQ ID NO: 112178 - RNA, 23 nt, Human adenovirus E
aagccccacaagaaguaccucac

SEQ ID NO: 112179 - RNA, 18 nt, Human adenovirus E
uuuaccccugcuuugacu

SEQ ID NO: 112180 - RNA, 17 nt, Human adenovirus E
uuguugcgcagggccag

SEQ ID NO: 112181 - RNA, 23 nt, Human adenovirus E
uuguugaucccauacuccaccuc

SEQ ID NO: 112182 - RNA, 19 nt, Human adenovirus E
uuguugguuagagccugag

SEQ ID NO: 112183 - RNA, 16 nt, Human adenovirus E
uuucugccaacaccac

SEQ ID NO: 112184 - RNA, 13 nt, Human adenovirus E
uuuccugaacugc

SEQ ID NO: 112185 - RNA, 16 nt, Human adenovirus E
uuuuccaggacccggu

SEQ ID NO: 112186 - RNA, 18 nt, Human adenovirus E
aacaggccaagaucuccu

SEQ ID NO: 112187 - RNA, 22 nt, Human adenovirus E
uugcccgcgccacagacaccua

SEQ ID NO: 112188 - RNA, 19 nt, Human adenovirus E
aacaccgagcguuccaagc

SEQ ID NO: 112189 - RNA, 20 nt, Human adenovirus E
uugaacaucugaaugccauu

SEQ ID NO: 112190 - RNA, 18 nt, Human adenovirus E
uugaaagguccagaaaaa

SEQ ID NO: 112191 - RNA, 16 nt, Human adenovirus E
uucagcucccagauga

SEQ ID NO: 112192 - RNA, 21 nt, Human adenovirus E
uucagauguucaaggcugugc

SEQ ID NO: 112193 - RNA, 11 nt, Human adenovirus E
uugacuuuaag

SEQ ID NO: 112194 - RNA, 22 nt, Human adenovirus E
uugaggugaugucaguauuuau

SEQ ID NO: 112195 - RNA, 19 nt, Human adenovirus E
uugauucaacaguuuuaca

SEQ ID NO: 112196 - RNA, 12 nt, Human adenovirus E
uugaugauuuga

SEQ ID NO: 112197 - RNA, 18 nt, Human adenovirus E
uugaugauuugaguuuaa

SEQ ID NO: 112198 - RNA, 23 nt, Human adenovirus E
uugaguuuaacaaaaaaauaaag

SEQ ID NO: 112199 - RNA, 17 nt, Human adenovirus E
ucucuagaacaagucaa

SEQ ID NO: 112200 - RNA, 21 nt, Human adenovirus E
ucuccuccucuugaaggucuc

SEQ ID NO: 112201 - RNA, 15 nt, Human adenovirus E
ucuggcccauuccac

SEQ ID NO: 112202 - RNA, 15 nt, Human adenovirus E
ucgccggacaggacg

SEQ ID NO: 112203 - RNA, 20 nt, Human adenovirus E
ucgccucuccuacgagcucc

SEQ ID NO: 112204 - RNA, 18 nt, Human adenovirus E
ucgcaagcgcccagaaac

SEQ ID NO: 112205 - RNA, 18 nt, Human adenovirus E
ucgccguugucaaccacu

SEQ ID NO: 112206 - RNA, 21 nt, Human adenovirus E
ucggaucaaauuauacacuga

SEQ ID NO: 112207 - RNA, 14 nt, Human adenovirus E
ucuaucucccgccu

SEQ ID NO: 112208 - RNA, 22 nt, Human adenovirus E
ucgagcugggccaucagcagca

SEQ ID NO: 112209 - RNA, 16 nt, Human adenovirus E
ucgacagcgugguggc

SEQ ID NO: 112210 - RNA, 15 nt, Human adenovirus E
ucgaccccuucgggu

SEQ ID NO: 112211 - RNA, 15 nt, Human adenovirus E
uccugaauccaucaa

SEQ ID NO: 112212 - RNA, 14 nt, Human adenovirus E
uccucguucaggcu

SEQ ID NO: 112213 - RNA, 18 nt, Human adenovirus E
uccugggcgggagugcgu

SEQ ID NO: 112214 - RNA, 19 nt, Human adenovirus E
uccaucaaccagucuuugu

SEQ ID NO: 112215 - RNA, 10 nt, Human adenovirus E
uccaggguga

SEQ ID NO: 112216 - RNA, 13 nt, Human adenovirus E
ucccugcuugcau

SEQ ID NO: 112217 - RNA, 22 nt, Human adenovirus E
ucccaccugcuucggaucuuca

SEQ ID NO: 112218 - RNA, 20 nt, Human adenovirus E
ucccaccccacucuguggaa

SEQ ID NO: 112219 - RNA, 18 nt, Human adenovirus E
ucccacccugcaugccaa

SEQ ID NO: 112220 - RNA, 17 nt, Human adenovirus E
uccagcugacuaacuca

SEQ ID NO: 112221 - RNA, 23 nt, Human adenovirus E
uccacccgcagaagcaagcucca

SEQ ID NO: 112222 - RNA, 16 nt, Human adenovirus E
uccaccagugcaagag

SEQ ID NO: 112223 - RNA, 21 nt, Human adenovirus E
uccacccagaccgugcagggu

SEQ ID NO: 112224 - RNA, 16 nt, Human adenovirus E
ucauccggggcugcau

SEQ ID NO: 112225 - RNA, 17 nt, Human adenovirus E
ucauccggggcugcaug

SEQ ID NO: 112226 - RNA, 18 nt, Human adenovirus E
ucaugagcaaagagauuc

SEQ ID NO: 112227 - RNA, 23 nt, Human adenovirus E
ucagaaaugccugcuacaucuca

SEQ ID NO: 112228 - RNA, 20 nt, Human adenovirus E
ucagggguggggacugugag

SEQ ID NO: 112229 - RNA, 21 nt, Human adenovirus E
ucacccggugcugccugauug

SEQ ID NO: 112230 - RNA, 13 nt, Human adenovirus E
ucaccguggcaac

SEQ ID NO: 112231 - RNA, 14 nt, Human adenovirus E
ucaacgaccuucuc

SEQ ID NO: 112232 - RNA, 21 nt, Human adenovirus E
ucaacgaccuucuccuggaca

SEQ ID NO: 112233 - RNA, 11 nt, Human adenovirus E
uauuauggaac

SEQ ID NO: 112234 - RNA, 19 nt, Human adenovirus E
uauaggguguggagugcaa

SEQ ID NO: 112235 - RNA, 13 nt, Human adenovirus E
uauauaugcaaug

SEQ ID NO: 112236 - RNA, 11 nt, Human adenovirus E
uauacacugaa

SEQ ID NO: 112237 - RNA, 13 nt, Human adenovirus E
uagaaugaccaca

SEQ ID NO: 112238 - RNA, 23 nt, Human adenovirus E
uagaaugaccacaaccacaaaaa

SEQ ID NO: 112239 - RNA, 12 nt, Human adenovirus E
uacuccaccucc

SEQ ID NO: 112240 - RNA, 14 nt, Human adenovirus E
uacucacaccacac

SEQ ID NO: 112241 - RNA, 14 nt, Human adenovirus E
uacaucucagggaa

SEQ ID NO: 112242 - RNA, 15 nt, Human adenovirus E
uacaucucagggaau

SEQ ID NO: 112243 - RNA, 20 nt, Human adenovirus E
uacgagcuccugcagcagcg

SEQ ID NO: 112244 - RNA, 15 nt, Human adenovirus E
uacgaggucacucca

SEQ ID NO: 112245 - RNA, 18 nt, Human adenovirus E
uaccucugcucuaugcaa

SEQ ID NO: 112246 - RNA, 17 nt, Human adenovirus E
uaagcgggagaggcaug

SEQ ID NO: 112247 - RNA, 18 nt, Human adenovirus E
uaacaauuauauaugcaa

SEQ ID NO: 112248 - RNA, 18 nt, Human adenovirus E
uaaagacauuuaacauac

SEQ ID NO: 112249 - RNA, 19 nt, Human adenovirus E
uaaagacauuuaacauaca

SEQ ID NO: 112250 - RNA, 16 nt, Human adenovirus E
guugcagcagcaugag

SEQ ID NO: 112251 - RNA, 15 nt, Human adenovirus E
uaaaacuguugaauc

SEQ ID NO: 112252 - RNA, 17 nt, Human adenovirus E
guugacuuuaagugcgu

SEQ ID NO: 112253 - RNA, 15 nt, Human adenovirus E
guugagagugcugaa

SEQ ID NO: 112254 - RNA, 14 nt, Human adenovirus E
guucugguacugcg

SEQ ID NO: 112255 - RNA, 22 nt, Human adenovirus E
guccaucaccaauggcauucag

SEQ ID NO: 112256 - RNA, 14 nt, Human adenovirus E
guccagcugacuaa

SEQ ID NO: 112257 - RNA, 20 nt, Human adenovirus E
gugcccucgcgcuccaaccc

SEQ ID NO: 112258 - RNA, 22 nt, Human adenovirus E
gugccaucuccgcgaucuucau

SEQ ID NO: 112259 - RNA, 20 nt, Human adenovirus E
gugaucagagccaucaggca

SEQ ID NO: 112260 - RNA, 20 nt, Human adenovirus E
guguuguaaaucacccaguc

SEQ ID NO: 112261 - RNA, 13 nt, Human adenovirus E
guggagugcaaua

SEQ ID NO: 112262 - RNA, 17 nt, Human adenovirus E
guggaguuugugcgcga

SEQ ID NO: 112263 - RNA, 12 nt, Human adenovirus E
gugguauugcua

SEQ ID NO: 112264 - RNA, 13 nt, Human adenovirus E
gugguggcaugag

SEQ ID NO: 112265 - RNA, 17 nt, Human adenovirus E
guucaccugccuggucg

SEQ ID NO: 112266 - RNA, 21 nt, Human adenovirus E
guuccacagagugggguggga

SEQ ID NO: 112267 - RNA, 14 nt, Human adenovirus E
gucaaaaaggacaa

SEQ ID NO: 112268 - RNA, 13 nt, Human adenovirus E
guauucagcccuu

SEQ ID NO: 112269 - RNA, 13 nt, Human adenovirus E
guaugcgaucucg

SEQ ID NO: 112270 - RNA, 13 nt, Human adenovirus E
gucauucauggaa

SEQ ID NO: 112271 - RNA, 14 nt, Human adenovirus E
gucauucauggaau

SEQ ID NO: 112272 - RNA, 12 nt, Human adenovirus E
guacugaucuga

SEQ ID NO: 112273 - RNA, 21 nt, Human adenovirus E
ggguggacuuuuccaggguga

SEQ ID NO: 112274 - RNA, 21 nt, Human adenovirus E
cuuaagaauggcaaaauucaa

SEQ ID NO: 112275 - RNA, 19 nt, Human adenovirus E
cuuuuaauuuuuucuauca

SEQ ID NO: 112276 - RNA, 18 nt, Human adenovirus E
cuuuguucuucaccggga

SEQ ID NO: 112277 - RNA, 23 nt, Human adenovirus E
cuuuguugucugcuguguacuga

SEQ ID NO: 112278 - RNA, 21 nt, Human adenovirus E
gaaacagugugguggcaugag

SEQ ID NO: 112279 - RNA, 13 nt, Human adenovirus E
cuuuuugacgcuc

SEQ ID NO: 112280 - RNA, 16 nt, Human adenovirus E
aaagcaacugcaucau

SEQ ID NO: 112281 - RNA, 12 nt, Human adenovirus E
aaagaaucacuu

SEQ ID NO: 112282 - RNA, 18 nt, Human adenovirus E
gaauccuguaaaacuguu

SEQ ID NO: 112283 - RNA, 22 nt, Human adenovirus E
gaaggugcaaccggugcugaga

SEQ ID NO: 112284 - RNA, 18 nt, Human adenovirus E
gaaucuaauacuaccacc

SEQ ID NO: 112285 - RNA, 19 nt, Human adenovirus E
gaaugaccacaaccacaaa

SEQ ID NO: 112286 - RNA, 17 nt, Human adenovirus E
gaaugaguaaugagaaa

SEQ ID NO: 112287 - RNA, 21 nt, Human adenovirus E
gaaggcgugcaggaacaugca

SEQ ID NO: 112288 - RNA, 20 nt, Human adenovirus E
gaacugcgccgggugcugac

SEQ ID NO: 112289 - RNA, 15 nt, Human adenovirus E
gaaaugccugcuaca

SEQ ID NO: 112290 - RNA, 20 nt, Human adenovirus E
gaaaugccugcuacaucuca

SEQ ID NO: 112291 - RNA, 14 nt, Human adenovirus E
gaaauaaagauaca

SEQ ID NO: 112292 - RNA, 15 nt, Human adenovirus E
gaaauaaagaucaua

SEQ ID NO: 112293 - RNA, 16 nt, Human adenovirus E
gaaauaaagaucauau

SEQ ID NO: 112294 - RNA, 15 nt, Human adenovirus E
aaauaacugcucgaa

SEQ ID NO: 112295 - RNA, 12 nt, Human adenovirus E
aaauaaucauuu

SEQ ID NO: 112296 - RNA, 13 nt, Human adenovirus E
aaaucacccaguc

SEQ ID NO: 112297 - RNA, 15 nt, Human adenovirus E
aaauuacuauuuaca

SEQ ID NO: 112298 - RNA, 18 nt, Human adenovirus E
gacgcagcugccgccgca

SEQ ID NO: 112299 - RNA, 18 nt, Human adenovirus E
gaccuuucugaaucuaau

SEQ ID NO: 112300 - RNA, 14 nt, Human adenovirus E
gacgaagagcucag

SEQ ID NO: 112301 - RNA, 14 nt, Human adenovirus E
gacgcucuuaacuu

SEQ ID NO: 112302 - RNA, 17 nt, Human adenovirus E
gagcugggccaucagca

SEQ ID NO: 112303 - RNA, 16 nt, Human adenovirus E
gaggacaauccucagc

SEQ ID NO: 112304 - RNA, 22 nt, Human adenovirus E
gaguuuucagcccgauggcaau

SEQ ID NO: 112305 - RNA, 18 nt, Human adenovirus E
  unsure 8..8: n is a, c, g, or t
gaguugcnagauggccac

SEQ ID NO: 112306 - RNA, 14 nt, Human adenovirus E
gaguuguccuggua

SEQ ID NO: 112307 - RNA, 19 nt, Human adenovirus E
gagugguacaccgucucug

SEQ ID NO: 112308 - RNA, 12 nt, Human adenovirus E
aacaacaacagc

SEQ ID NO: 112309 - RNA, 13 nt, Human adenovirus E
aacaacaacagcc

SEQ ID NO: 112310 - RNA, 21 nt, Human adenovirus E
gacggucuuggaagacuuuca

SEQ ID NO: 112311 - RNA, 14 nt, Human adenovirus E
aacaaacucugaaa

SEQ ID NO: 112312 - RNA, 18 nt, Human adenovirus E
gacgguugacguccugga

SEQ ID NO: 112313 - RNA, 22 nt, Human adenovirus E
gacgguuguugauuuuaacaca

SEQ ID NO: 112314 - RNA, 19 nt, Human adenovirus E
gagaucugucuccaggaaa

SEQ ID NO: 112315 - RNA, 12 nt, Human adenovirus E
gagaugaugcug

SEQ ID NO: 112316 - RNA, 13 nt, Human adenovirus E
gagaugaugcuga

SEQ ID NO: 112317 - RNA, 24 nt, Human adenovirus E
gagaccaaaagcauguccaucacc

SEQ ID NO: 112318 - RNA, 14 nt, Human adenovirus E
gagaggcaugauga

SEQ ID NO: 112319 - RNA, 22 nt, Human adenovirus E
gagcaagcaguacgauaugugg

SEQ ID NO: 112320 - RNA, 19 nt, Human adenovirus E
gagccacagcgacccaugc

SEQ ID NO: 112321 - RNA, 15 nt, Human adenovirus E
gcagccccaggccaa

SEQ ID NO: 112322 - RNA, 13 nt, Human adenovirus E
gcagcugagccac

SEQ ID NO: 112323 - RNA, 13 nt, Human adenovirus E
gcaggaacaugca

SEQ ID NO: 112324 - RNA, 13 nt, Human adenovirus E
gcagucuggcgau

SEQ ID NO: 112325 - RNA, 15 nt, Human adenovirus E
gcacgagaagguccu

SEQ ID NO: 112326 - RNA, 16 nt, Human adenovirus E
gcaccucacagcucaa

SEQ ID NO: 112327 - RNA, 21 nt, Human adenovirus E
gcacccucagggcccggccca

SEQ ID NO: 112328 - RNA, 23 nt, Human adenovirus E
gcaccaacgugcagaccaaccug

SEQ ID NO: 112329 - RNA, 21 nt, Human adenovirus E
gaucauugggaucgugaacau

SEQ ID NO: 112330 - RNA, 15 nt, Human adenovirus E
gaucauauugaugau

SEQ ID NO: 112331 - RNA, 23 nt, Human adenovirus E
gcaaugguacugaucugauacuc

SEQ ID NO: 112332 - RNA, 13 nt, Human adenovirus E
gcaagcuccagcu

SEQ ID NO: 112333 - RNA, 22 nt, Human adenovirus E
gcaagaguuccccgugcccugg

SEQ ID NO: 112334 - RNA, 23 nt, Human adenovirus E
gcgaacucuucaacccugaccua

SEQ ID NO: 112335 - RNA, 19 nt, Human adenovirus E
gccugcgcgcgcccagcaa

SEQ ID NO: 112336 - RNA, 19 nt, Human adenovirus E
gccugcuacaucucaggga

SEQ ID NO: 112337 - RNA, 21 nt, Human adenovirus E
gccugcuacaucucagggaau

SEQ ID NO: 112338 - RNA, 16 nt, Human adenovirus E
gcgacuacuccggacu

SEQ ID NO: 112339 - RNA, 16 nt, Human adenovirus E
gcgacccaugcucccc

SEQ ID NO: 112340 - RNA, 12 nt, Human adenovirus E
gcgauacccugu

SEQ ID NO: 112341 - RNA, 17 nt, Human adenovirus E
gcgaggauugcccuguu

SEQ ID NO: 112342 - RNA, 21 nt, Human adenovirus E
gcgcacgggacgcagggccau

SEQ ID NO: 112343 - RNA, 18 nt, Human adenovirus E
gccucucagcgccacuga

SEQ ID NO: 112344 - RNA, 19 nt, Human adenovirus E
gccugcacccucaucuccu

SEQ ID NO: 112345 - RNA, 19 nt, Human adenovirus E
gccucgacucccaccugcu

SEQ ID NO: 112346 - RNA, 21 nt, Human adenovirus E
gcccuggagaugaugcugaca

SEQ ID NO: 112347 - RNA, 16 nt, Human adenovirus E
gcccugggauaugguu

SEQ ID NO: 112348 - RNA, 18 nt, Human adenovirus E
gccggccguccaccgugg

SEQ ID NO: 112349 - RNA, 18 nt, Human adenovirus E
gccggcgcccauggccau

SEQ ID NO: 112350 - RNA, 17 nt, Human adenovirus E
gccgcuuccgcugcuuc

SEQ ID NO: 112351 - RNA, 13 nt, Human adenovirus E
gccaagaucuccu

SEQ ID NO: 112352 - RNA, 18 nt, Human adenovirus E
gccagacaagaaguacaa

SEQ ID NO: 112353 - RNA, 22 nt, Human adenovirus E
gccagaauaacugaaaucugug

SEQ ID NO: 112354 - RNA, 14 nt, Human adenovirus E
gcccuagaucugcu

SEQ ID NO: 112355 - RNA, 23 nt, Human adenovirus E
gcccgcgaacucuucaacccuga

SEQ ID NO: 112356 - RNA, 15 nt, Human adenovirus E
gcccgcuacaacagc

SEQ ID NO: 112357 - RNA, 23 nt, Human adenovirus E
gcccggcgagcgcuccggcaccg

SEQ ID NO: 112358 - RNA, 21 nt, Human adenovirus E
gcugaguuuucagcccgaugg

SEQ ID NO: 112359 - RNA, 14 nt, Human adenovirus E
gcuguccugcaaga

SEQ ID NO: 112360 - RNA, 12 nt, Human adenovirus E
gcucuaugcaau

SEQ ID NO: 112361 - RNA, 13 nt, Human adenovirus E
gcucuaugcaauu

SEQ ID NO: 112362 - RNA, 19 nt, Human adenovirus E
gcucuaugcaauucugaca

SEQ ID NO: 112363 - RNA, 21 nt, Human adenovirus E
gcucuaugcaauucugacaau

SEQ ID NO: 112364 - RNA, 14 nt, Human adenovirus E
gcgccaagagccgg

SEQ ID NO: 112365 - RNA, 16 nt, Human adenovirus E
gcgccacugagacaca

SEQ ID NO: 112366 - RNA, 19 nt, Human adenovirus E
gcgcgagcucuuuaucaug

SEQ ID NO: 112367 - RNA, 22 nt, Human adenovirus E
gcgccgugcgcggaauggccau

SEQ ID NO: 112368 - RNA, 17 nt, Human adenovirus E
gcgccucggagcagcga

SEQ ID NO: 112369 - RNA, 18 nt, Human adenovirus E
gcuagucuacagggccaa

SEQ ID NO: 112370 - RNA, 13 nt, Human adenovirus E
ggaauacaccacc

SEQ ID NO: 112371 - RNA, 20 nt, Human adenovirus E
ggaauuaugccaagcuggcu

SEQ ID NO: 112372 - RNA, 14 nt, Human adenovirus E
ggaagaaucugacu

SEQ ID NO: 112373 - RNA, 17 nt, Human adenovirus E
ggaacucgaguuggcca

SEQ ID NO: 112374 - RNA, 23 nt, Human adenovirus E
ggggauuaagcgggagaggcaug

SEQ ID NO: 112375 - RNA, 14 nt, Human adenovirus E
ggggaagaaucuga

SEQ ID NO: 112376 - RNA, 22 nt, Human adenovirus E
gggcgcagggcaugguguugca

SEQ ID NO: 112377 - RNA, 12 nt, Human adenovirus E
gggcguacaugc

SEQ ID NO: 112378 - RNA, 20 nt, Human adenovirus E
gggagugcgucagaauguga

SEQ ID NO: 112379 - RNA, 20 nt, Human adenovirus E
ggcucucggccauccuggag

SEQ ID NO: 112380 - RNA, 17 nt, Human adenovirus E
ggcgacgaggccggccu

SEQ ID NO: 112381 - RNA, 15 nt, Human adenovirus E
ggcgaucggugugca

SEQ ID NO: 112382 - RNA, 15 nt, Human adenovirus E
ggccacaauacaugc

SEQ ID NO: 112383 - RNA, 22 nt, Human adenovirus E
ggccaugcaacgcaucauggcg

SEQ ID NO: 112384 - RNA, 17 nt, Human adenovirus E
ggccauccaccagugca

SEQ ID NO: 112385 - RNA, 14 nt, Human adenovirus E
ggacgcagggccau

SEQ ID NO: 112386 - RNA, 19 nt, Human adenovirus E
ccggcaccgcuuccaagcg

SEQ ID NO: 112387 - RNA, 13 nt, Human adenovirus E
cccugcaugccaa

SEQ ID NO: 112388 - RNA, 13 nt, Human adenovirus E
cccugccaucaca

SEQ ID NO: 112389 - RNA, 18 nt, Human adenovirus E
cccuggagaugaugcuga

SEQ ID NO: 112390 - RNA, 16 nt, Human adenovirus E
ccuagaaugaccacaa

SEQ ID NO: 112391 - RNA, 16 nt, Human adenovirus E
ccuagcucggcuucga

SEQ ID NO: 112392 - RNA, 19 nt, Human adenovirus E
ccucagcuguugagcugug

SEQ ID NO: 112393 - RNA, 23 nt, Human adenovirus E
ccugcccuggagaugaugcugac

SEQ ID NO: 112394 - RNA, 13 nt, Human adenovirus E
ccuguaaaacugu

SEQ ID NO: 112395 - RNA, 20 nt, Human adenovirus E
aaaauuacuauuuacacugg

SEQ ID NO: 112396 - RNA, 15 nt, Human adenovirus E
aaaauuaacaauuau

SEQ ID NO: 112397 - RNA, 13 nt, Human adenovirus E
aaaauugcaucau

SEQ ID NO: 112398 - RNA, 12 nt, Human adenovirus E
ccccugcuuuga

SEQ ID NO: 112399 - RNA, 18 nt, Human adenovirus E
ccccugcuuugacuuugg

SEQ ID NO: 112400 - RNA, 20 nt, Human adenovirus E
cccgacugcguccacacucu

SEQ ID NO: 112401 - RNA, 14 nt, Human adenovirus E
cccgaauaccacag

SEQ ID NO: 112402 - RNA, 16 nt, Human adenovirus E
cccaucgucaucaccc

SEQ ID NO: 112403 - RNA, 18 nt, Human adenovirus E
cccauauuagacuaugag

SEQ ID NO: 112404 - RNA, 21 nt, Human adenovirus E
cccaggccgaaguccagcuga

SEQ ID NO: 112405 - RNA, 17 nt, Human adenovirus E
cccaggccaugcaacgc

SEQ ID NO: 112406 - RNA, 14 nt, Human adenovirus E
ccagaggauuucga

SEQ ID NO: 112407 - RNA, 17 nt, Human adenovirus E
ccaggccaugcaacgca

SEQ ID NO: 112408 - RNA, 20 nt, Human adenovirus E
ccagaaacagugugguggca

SEQ ID NO: 112409 - RNA, 19 nt, Human adenovirus E
ccagaaaaagccacagaag

SEQ ID NO: 112410 - RNA, 13 nt, Human adenovirus E
ccacacaguuuca

SEQ ID NO: 112411 - RNA, 15 nt, Human adenovirus E
ccacaauacaugccc

SEQ ID NO: 112412 - RNA, 16 nt, Human adenovirus E
ccauccaccagugcaa

SEQ ID NO: 112413 - RNA, 16 nt, Human adenovirus E
ccaucacaccuuccac

SEQ ID NO: 112414 - RNA, 19 nt, Human adenovirus E
ccaucagucucacuuuaac

SEQ ID NO: 112415 - RNA, 16 nt, Human adenovirus E
ccauacuccaccucca

SEQ ID NO: 112416 - RNA, 14 nt, Human adenovirus E
ccagguucugcuac

SEQ ID NO: 112417 - RNA, 15 nt, Human adenovirus E
cccaacaaaauugca

SEQ ID NO: 112418 - RNA, 16 nt, Human adenovirus E
cccaacaaaauugcau

SEQ ID NO: 112419 - RNA, 19 nt, Human adenovirus E
cccaacaaaauugcaucau

SEQ ID NO: 112420 - RNA, 20 nt, Human adenovirus E
cccaacaaaauugcaucauc

SEQ ID NO: 112421 - RNA, 21 nt, Human adenovirus E
cccaacaaaauugcaucaucu

SEQ ID NO: 112422 - RNA, 13 nt, Human adenovirus E
cauguguaacaug

SEQ ID NO: 112423 - RNA, 12 nt, Human adenovirus E
cauuacucucau

SEQ ID NO: 112424 - RNA, 22 nt, Human adenovirus E
cauuacucucaucaaguuucaa

SEQ ID NO: 112425 - RNA, 15 nt, Human adenovirus E
cauuucggacaugga

SEQ ID NO: 112426 - RNA, 17 nt, Human adenovirus E
cauuucggacauggaau

SEQ ID NO: 112427 - RNA, 18 nt, Human adenovirus E
cauuucggacauggaauu

SEQ ID NO: 112428 - RNA, 12 nt, Human adenovirus E
cauuugauuuga

SEQ ID NO: 112429 - RNA, 16 nt, Human adenovirus E
cauuugauuugaaaua

SEQ ID NO: 112430 - RNA, 16 nt, Human adenovirus E
caggggcggcaggggc

SEQ ID NO: 112431 - RNA, 18 nt, Human adenovirus E
cagggguggggacuguga

SEQ ID NO: 112432 - RNA, 21 nt, Human adenovirus E
cagggguggggacugugagua

SEQ ID NO: 112433 - RNA, 17 nt, Human adenovirus E
caggugcagaccugugu

SEQ ID NO: 112434 - RNA, 14 nt, Human adenovirus E
caggcacacgcacu

SEQ ID NO: 112435 - RNA, 20 nt, Human adenovirus E
caggccgaaguccagcugac

SEQ ID NO: 112436 - RNA, 16 nt, Human adenovirus E
caggccaagaucuccu

SEQ ID NO: 112437 - RNA, 21 nt, Human adenovirus E
caggccucucagcgccacuga

SEQ ID NO: 112438 - RNA, 22 nt, Human adenovirus E
cagucucauugccgucauucau

SEQ ID NO: 112439 - RNA, 15 nt, Human adenovirus E
cagucuggggaacaa

SEQ ID NO: 112440 - RNA, 21 nt, Human adenovirus E
cagugaaauaaagaucauauu

SEQ ID NO: 112441 - RNA, 23 nt, Human adenovirus E
caguuauuuuuccuccacccucc

SEQ ID NO: 112442 - RNA, 12 nt, Human adenovirus E
caguuacaccug

SEQ ID NO: 112443 - RNA, 13 nt, Human adenovirus E
cgcuucccgggau

SEQ ID NO: 112444 - RNA, 21 nt, Human adenovirus E
cggucagggagaugaaacccu

SEQ ID NO: 112445 - RNA, 18 nt, Human adenovirus E
cguccacacucugaucaa

SEQ ID NO: 112446 - RNA, 15 nt, Human adenovirus E
cgucagaaugugaug

SEQ ID NO: 112447 - RNA, 14 nt, Human adenovirus E
cggugcugccugau

SEQ ID NO: 112448 - RNA, 16 nt, Human adenovirus E
cggugcaggccucuca

SEQ ID NO: 112449 - RNA, 13 nt, Human adenovirus E
cguacuacuuccg

SEQ ID NO: 112450 - RNA, 15 nt, Human adenovirus E
cuaccagccccagau

SEQ ID NO: 112451 - RNA, 17 nt, Human adenovirus E
cuacagccuaggccaca

SEQ ID NO: 112452 - RNA, 18 nt, Human adenovirus E
cuacagccuaggccacaa

SEQ ID NO: 112453 - RNA, 19 nt, Human adenovirus E
cgcucuuaacuugggccau

SEQ ID NO: 112454 - RNA, 23 nt, Human adenovirus E
cgcugguggagaacaaggccauc

SEQ ID NO: 112455 - RNA, 12 nt, Human adenovirus E
cgcuacaacagc

SEQ ID NO: 112456 - RNA, 21 nt, Human adenovirus E
cgcguggcccgcuacaacagc

SEQ ID NO: 112457 - RNA, 20 nt, Human adenovirus E
aaacaggccaagaucuccua

SEQ ID NO: 112458 - RNA, 18 nt, Human adenovirus E
cgccugaaccugacacac

SEQ ID NO: 112459 - RNA, 17 nt, Human adenovirus E
cgcgaacacgaucagcc

SEQ ID NO: 112460 - RNA, 12 nt, Human adenovirus E
cgcagggccaug

SEQ ID NO: 112461 - RNA, 10 nt, Human adenovirus E
cgcagggugg

SEQ ID NO: 112462 - RNA, 16 nt, Human adenovirus E
cgcaagcgcccagaaa

SEQ ID NO: 112463 - RNA, 15 nt, Human adenovirus E
  unsure 6..6: n is a, c, g, or t
cgcaanuacaccccc

SEQ ID NO: 112464 - RNA, 17 nt, Human adenovirus E
ccuuauccagugaaaua

SEQ ID NO: 112465 - RNA, 20 nt, Human adenovirus E
ccuuauccagugaaauaaag

SEQ ID NO: 112466 - RNA, 18 nt, Human adenovirus E
cgcaucugcaccucacag

SEQ ID NO: 112467 - RNA, 16 nt, Human adenovirus E
cgccacugagacacac

SEQ ID NO: 112468 - RNA, 18 nt, Human adenovirus E
cgcccaggacuacuccac

SEQ ID NO: 112469 - RNA, 21 nt, Human adenovirus E
cgcccaggccgaaguccagcu

SEQ ID NO: 112470 - RNA, 18 nt, Human adenovirus E
cgcccaggcgcuggguca

SEQ ID NO: 112471 - RNA, 21 nt, Human adenovirus E
cgcccaccgaaaccagauacu

SEQ ID NO: 112472 - RNA, 18 nt, Human adenovirus E
cgccccgcaaucaccuca

SEQ ID NO: 112473 - RNA, 19 nt, Human adenovirus E
cgccccgcaaucaccucaa

SEQ ID NO: 112474 - RNA, 20 nt, Human adenovirus E
cgcccggcggcaccggagca

SEQ ID NO: 112475 - RNA, 12 nt, Human adenovirus E
cgccucggagca

SEQ ID NO: 112476 - RNA, 21 nt, Human adenovirus E
cgccgugcgcggaauggccau

SEQ ID NO: 112477 - RNA, 17 nt, Human adenovirus E
cgccggcuacuacggca

SEQ ID NO: 112478 - RNA, 19 nt, Human adenovirus E
cuccacccaccacaauuac

SEQ ID NO: 112479 - RNA, 11 nt, Human adenovirus E
cuccauugcag

SEQ ID NO: 112480 - RNA, 17 nt, Human adenovirus E
cuccacguuccacacag

SEQ ID NO: 112481 - RNA, 21 nt, Human adenovirus E
cuccacguuccacacaguuuc

SEQ ID NO: 112482 - RNA, 16 nt, Human adenovirus E
cucagcgccacugaga

SEQ ID NO: 112483 - RNA, 20 nt, Human adenovirus E
cucagcgccacugagacaca

SEQ ID NO: 112484 - RNA, 15 nt, Human adenovirus E
cucaggguugcauag

SEQ ID NO: 112485 - RNA, 23 nt, Human adenovirus E
cuauguagguauguauuauggaa

SEQ ID NO: 112486 - RNA, 16 nt, Human adenovirus E
cucucagcgccacuga

SEQ ID NO: 112487 - RNA, 17 nt, Human adenovirus E
cucucaucaaguuucaa

SEQ ID NO: 112488 - RNA, 17 nt, Human adenovirus E
cucugcucuaugcaauu

SEQ ID NO: 112489 - RNA, 19 nt, Human adenovirus E
cucugcucuaugcaauucu

SEQ ID NO: 112490 - RNA, 16 nt, Human adenovirus E
cucugaggccagacaa

SEQ ID NO: 112491 - RNA, 23 nt, Human adenovirus E
cucuaugcaauucugacaaugag

SEQ ID NO: 112492 - RNA, 13 nt, Human adenovirus E
cucgcgcuucugc

SEQ ID NO: 112493 - RNA, 20 nt, Human adenovirus E
cucggcuucgacaccuggac

SEQ ID NO: 112494 - RNA, 20 nt, Human adenovirus E
cuuaaaauuaacaauuauau

SEQ ID NO: 112495 - RNA, 21 nt, Human adenovirus E
cugugcugugccaacauagac

SEQ ID NO: 112496 - RNA, 22 nt, Human adenovirus E
cuggcacuaaucacacauugaa

SEQ ID NO: 112497 - RNA, 17 nt, Human adenovirus E
cuggaugugcgcgugga

SEQ ID NO: 112498 - RNA, 14 nt, Human adenovirus E
cugguguaccagga

SEQ ID NO: 112499 - RNA, 20 nt, Human adenovirus E
cugguggaggaucacccggu

SEQ ID NO: 112500 - RNA, 21 nt, Human adenovirus E
cugcuacaucucagggaaugg

SEQ ID NO: 112501 - RNA, 16 nt, Human adenovirus E
cugcgucacccuggaa

SEQ ID NO: 112502 - RNA, 15 nt, Human adenovirus E
cugcucgaauccugu

SEQ ID NO: 112503 - RNA, 13 nt, Human adenovirus E
cugcucuaugcaa

SEQ ID NO: 112504 - RNA, 23 nt, Human adenovirus E
cuggagcgacaucggcaccagcc

SEQ ID NO: 112505 - RNA, 20 nt, Human adenovirus E
cugcacgggccggccgucca

SEQ ID NO: 112506 - RNA, 20 nt, Human adenovirus E
cugccgccgcagcugcugca

SEQ ID NO: 112507 - RNA, 15 nt, Human adenovirus E
cucugggugaaggcc

SEQ ID NO: 112508 - RNA, 18 nt, Human adenovirus E
cucuguggaaacaauaac

SEQ ID NO: 112509 - RNA, 18 nt, Human adenovirus E
cucuguggaacaaacucu

SEQ ID NO: 112510 - RNA, 14 nt, Human adenovirus E
cucuguacugcauc

SEQ ID NO: 112511 - RNA, 13 nt, Human adenovirus E
cucuuaacuuggg

SEQ ID NO: 112512 - RNA, 16 nt, Human adenovirus E
uugggaucgugaacau

SEQ ID NO: 112513 - RNA, 19 nt, Human adenovirus E
uuggucuccacguuccaca

SEQ ID NO: 112514 - RNA, 14 nt, Human adenovirus E
uuguucagcuccca

SEQ ID NO: 112515 - RNA, 17 nt, Human adenovirus E
uuguugaucccauacuc

SEQ ID NO: 112516 - RNA, 17 nt, Human adenovirus E
uuuaauuuuuucuauca

SEQ ID NO: 112517 - RNA, 22 nt, Human adenovirus E
uuucauuuuugcgcacaugugc

SEQ ID NO: 112518 - RNA, 19 nt, Human adenovirus E
uuucaaucccaacaaaugc

SEQ ID NO: 112519 - RNA, 17 nt, Human adenovirus E
uuuauuugccagucuca

SEQ ID NO: 112520 - RNA, 13 nt, Human adenovirus E
uuuagacagcagc

SEQ ID NO: 112521 - RNA, 13 nt, Human adenovirus E
uuccugaauccau

SEQ ID NO: 112522 - RNA, 23 nt, Human adenovirus E
uucauggaaugaguaaugagaaa

SEQ ID NO: 112523 - RNA, 22 nt, Human adenovirus E
uugaaagguccagaaaaagcca

SEQ ID NO: 112524 - RNA, 22 nt, Human adenovirus E
uugacuuuaagugcgugguuua

SEQ ID NO: 112525 - RNA, 12 nt, Human adenovirus E
uugcaucaucug

SEQ ID NO: 112526 - RNA, 15 nt, Human adenovirus E
uugcaucaucuggcu

SEQ ID NO: 112527 - RNA, 14 nt, Human adenovirus E
ugcuagaugcaaca

SEQ ID NO: 112528 - RNA, 23 nt, Human adenovirus E
ugcuagaugcaacaacaacagcc

SEQ ID NO: 112529 - RNA, 17 nt, Human adenovirus E
ugcuacaucucagggaa

SEQ ID NO: 112530 - RNA, 15 nt, Human adenovirus E
ugcuaccgccaaaaa

SEQ ID NO: 112531 - RNA, 19 nt, Human adenovirus E
uggauuucaccguggcaac

SEQ ID NO: 112532 - RNA, 22 nt, Human adenovirus E
uggcaaaauucaaaauucuuaa

SEQ ID NO: 112533 - RNA, 14 nt, Human adenovirus E
ugggcuuggauguu

SEQ ID NO: 112534 - RNA, 17 nt, Human adenovirus E
ugguuccgcaggaucau

SEQ ID NO: 112535 - RNA, 16 nt, Human adenovirus E
ugguggaggaucaccc

SEQ ID NO: 112536 - RNA, 19 nt, Human adenovirus E
ugguggagaacaaggccau

SEQ ID NO: 112537 - RNA, 20 nt, Human adenovirus E
ugguggcaugaggugcaguc

SEQ ID NO: 112538 - RNA, 20 nt, Human adenovirus E
ugugaucagagccaucaggc

SEQ ID NO: 112539 - RNA, 16 nt, Human adenovirus E
ugugaggagaccgaga

SEQ ID NO: 112540 - RNA, 18 nt, Human adenovirus E
ugugaggagaccgagacc

SEQ ID NO: 112541 - RNA, 14 nt, Human adenovirus E
uuacucacaccaca

SEQ ID NO: 112542 - RNA, 18 nt, Human adenovirus E
uuaacaauuauauaugca

SEQ ID NO: 112543 - RNA, 19 nt, Human adenovirus E
uuacacuggcacuaaucac

SEQ ID NO: 112544 - RNA, 21 nt, Human adenovirus E
uuacaauuucaacaccgagcg

SEQ ID NO: 112545 - RNA, 14 nt, Human adenovirus E
uuaacccuaauuaa

SEQ ID NO: 112546 - RNA, 15 nt, Human adenovirus E
uguucuucaccggga

SEQ ID NO: 112547 - RNA, 15 nt, Human adenovirus E
uguucauucuugggc

SEQ ID NO: 112548 - RNA, 21 nt, Human adenovirus E
uguucagcucccagaugaucc

SEQ ID NO: 112549 - RNA, 14 nt, Human adenovirus E
uuaaaauuaacaau

SEQ ID NO: 112550 - RNA, 20 nt, Human adenovirus E
ucuccaggaaaggguggcuu

SEQ ID NO: 112551 - RNA, 15 nt, Human adenovirus E
ucugcucuaugcaau

SEQ ID NO: 112552 - RNA, 20 nt, Human adenovirus E
ucugcucuaugcaauucuga

SEQ ID NO: 112553 - RNA, 15 nt, Human adenovirus E
ucugcuguguacuga

SEQ ID NO: 112554 - RNA, 16 nt, Human adenovirus E
ucugcuguguacugag

SEQ ID NO: 112555 - RNA, 17 nt, Human adenovirus E
ucugccuggugaaacag

SEQ ID NO: 112556 - RNA, 15 nt, Human adenovirus E
ucgcucgggaucucg

SEQ ID NO: 112557 - RNA, 14 nt, Human adenovirus E
ucgaacaccugcua

SEQ ID NO: 112558 - RNA, 17 nt, Human adenovirus E
uccugcaagaguucccc

SEQ ID NO: 112559 - RNA, 22 nt, Human adenovirus E
uccugaggcccuagaucugcug

SEQ ID NO: 112560 - RNA, 14 nt, Human adenovirus E
ucggugaugcauga

SEQ ID NO: 112561 - RNA, 22 nt, Human adenovirus E
ucggagucaaccccaucgucau

SEQ ID NO: 112562 - RNA, 12 nt, Human adenovirus E
ucggcaccagcc

SEQ ID NO: 112563 - RNA, 22 nt, Human adenovirus E
ucggaucaaauuauacacugaa

SEQ ID NO: 112564 - RNA, 23 nt, Human adenovirus E
ucguagacagauggaagacauca

SEQ ID NO: 112565 - RNA, 19 nt, Human adenovirus E
ucggugcgcgguacugauc

SEQ ID NO: 112566 - RNA, 14 nt, Human adenovirus E
ucccaggacaugga

SEQ ID NO: 112567 - RNA, 17 nt, Human adenovirus E
ucccaggacauggaaua

SEQ ID NO: 112568 - RNA, 14 nt, Human adenovirus E
ucccauacuccacc

SEQ ID NO: 112569 - RNA, 18 nt, Human adenovirus E
uccccgggaccuaucagu

SEQ ID NO: 112570 - RNA, 14 nt, Human adenovirus E
uccgcgaccuccuc

SEQ ID NO: 112571 - RNA, 14 nt, Human adenovirus E
uccggggcugcaug

SEQ ID NO: 112572 - RNA, 17 nt, Human adenovirus E
ucauucaaggcuggaaa

SEQ ID NO: 112573 - RNA, 21 nt, Human adenovirus E
ucauuaccucugcucuaugca

SEQ ID NO: 112574 - RNA, 23 nt, Human adenovirus E
ucauuaccucugcucuaugcaau

SEQ ID NO: 112575 - RNA, 15 nt, Human adenovirus E
uccacacucugauca

SEQ ID NO: 112576 - RNA, 23 nt, Human adenovirus E
ucauugagcacccgguggaucuu

SEQ ID NO: 112577 - RNA, 17 nt, Human adenovirus E
ucauauugaugaugauu

SEQ ID NO: 112578 - RNA, 14 nt, Human adenovirus E
ucauauugaugauu

SEQ ID NO: 112579 - RNA, 18 nt, Human adenovirus E
ucauauugaugauuugag

SEQ ID NO: 112580 - RNA, 13 nt, Human adenovirus E
ucaucaaguuuca

SEQ ID NO: 112581 - RNA, 14 nt, Human adenovirus E
ucaucaaguuucaa

SEQ ID NO: 112582 - RNA, 15 nt, Human adenovirus E
ucauccggggcugca

SEQ ID NO: 112583 - RNA, 18 nt, Human adenovirus E
ucauccggggcugcaugu

SEQ ID NO: 112584 - RNA, 16 nt, Human adenovirus E
ucuggguggacuuuuc

SEQ ID NO: 112585 - RNA, 18 nt, Human adenovirus E
ugaaucuaauacuaccac

SEQ ID NO: 112586 - RNA, 23 nt, Human adenovirus E
ugaauccaucaaccagucuuugu

SEQ ID NO: 112587 - RNA, 15 nt, Human adenovirus E
ugaaacuguguggaa

SEQ ID NO: 112588 - RNA, 17 nt, Human adenovirus E
ugaaauaaagauacaau

SEQ ID NO: 112589 - RNA, 23 nt, Human adenovirus E
ugaaauaaagauacaaucauauu

SEQ ID NO: 112590 - RNA, 18 nt, Human adenovirus E
ugaaauaaagaucauauu

SEQ ID NO: 112591 - RNA, 21 nt, Human adenovirus E
ugaaauaaagaucauauugau

SEQ ID NO: 112592 - RNA, 14 nt, Human adenovirus E
ugaccacaaccaca

SEQ ID NO: 112593 - RNA, 22 nt, Human adenovirus E
ugaccuguuuccugaacugcgc

SEQ ID NO: 112594 - RNA, 14 nt, Human adenovirus E
ugaccgacgugcgc

SEQ ID NO: 112595 - RNA, 16 nt, Human adenovirus E
ugaggugaugucagua

SEQ ID NO: 112596 - RNA, 22 nt, Human adenovirus E
ugacgcuccugguccugugaug

SEQ ID NO: 112597 - RNA, 12 nt, Human adenovirus E
ugauucaacagu

SEQ ID NO: 112598 - RNA, 17 nt, Human adenovirus E
ugauucaacaguuuuac

SEQ ID NO: 112599 - RNA, 19 nt, Human adenovirus E
ugauacuccucaauaucac

SEQ ID NO: 112600 - RNA, 21 nt, Human adenovirus E
ugaguuuucagcccgauggca

SEQ ID NO: 112601 - RNA, 14 nt, Human adenovirus E
ugccgcaagaucuc

SEQ ID NO: 112602 - RNA, 19 nt, Human adenovirus E
ugccgcccaggacuacucc

SEQ ID NO: 112603 - RNA, 22 nt, Human adenovirus E
ugcccuggagaugaugcugaca

SEQ ID NO: 112604 - RNA, 18 nt, Human adenovirus E
ugccgucauucauggaau

SEQ ID NO: 112605 - RNA, 16 nt, Human adenovirus E
ugccugcuacaucuca

SEQ ID NO: 112606 - RNA, 20 nt, Human adenovirus E
ugcggccuccgcgaccuccu

SEQ ID NO: 112607 - RNA, 14 nt, Human adenovirus E
ugcggaugggaaug

SEQ ID NO: 112608 - RNA, 16 nt, Human adenovirus E
ugcgucagaaugugau

SEQ ID NO: 112609 - RNA, 15 nt, Human adenovirus E
ugcgucucgggaccc

SEQ ID NO: 112610 - RNA, 23 nt, Human adenovirus E
ugcgcgcggcgcggagccuuguu

SEQ ID NO: 112611 - RNA, 21 nt, Human adenovirus E
ugcgauacccuguccaugcac

SEQ ID NO: 112612 - RNA, 16 nt, Human adenovirus E
ugcaacaacaacagcc

SEQ ID NO: 112613 - RNA, 19 nt, Human adenovirus E
ugcaacaacaacagccacc

SEQ ID NO: 112614 - RNA, 15 nt, Human adenovirus E
ugcaaacuuccucca

SEQ ID NO: 112615 - RNA, 13 nt, Human adenovirus E
ugcagcugagcca

SEQ ID NO: 112616 - RNA, 14 nt, Human adenovirus E
ugcagcugagccac

SEQ ID NO: 112617 - RNA, 12 nt, Human adenovirus E
ugcauguucaac

SEQ ID NO: 112618 - RNA, 16 nt, Human adenovirus E
ugcauguguaacauga

SEQ ID NO: 112619 - RNA, 16 nt, Human adenovirus E
ugcaugaaagucuuug

SEQ ID NO: 112620 - RNA, 17 nt, Human adenovirus E
ugcaugaaagucuuugu

SEQ ID NO: 112621 - RNA, 15 nt, Human adenovirus E
ugcauccacugcucc

SEQ ID NO: 112622 - RNA, 14 nt, Human adenovirus E
ugcaucaucuggcu

SEQ ID NO: 112623 - RNA, 17 nt, Human adenovirus E
ccucugcucuaugcaau

SEQ ID NO: 112624 - RNA, 23 nt, Human adenovirus E
ccucugcucuaugcaauucugac

SEQ ID NO: 112625 - RNA, 19 nt, Human adenovirus E
ccucgcgcuccaaccccac

SEQ ID NO: 112626 - RNA, 14 nt, Human adenovirus E
ccuccugggcggga

SEQ ID NO: 112627 - RNA, 14 nt, Human adenovirus E
ccuccauugccauu

SEQ ID NO: 112628 - RNA, 19 nt, Human adenovirus E
ccucccaggacauggaaua

SEQ ID NO: 112629 - RNA, 16 nt, Human adenovirus E
ccuccaccaacgccac

SEQ ID NO: 112630 - RNA, 18 nt, Human adenovirus E
ccugaggcccuagaucug

SEQ ID NO: 112631 - RNA, 18 nt, Human adenovirus E
ccugaucccgaauaccac

SEQ ID NO: 112632 - RNA, 20 nt, Human adenovirus E
ccugaucccgaauaccacag

SEQ ID NO: 112633 - RNA, 19 nt, Human adenovirus E
ccugcagcagcgccagaag

SEQ ID NO: 112634 - RNA, 17 nt, Human adenovirus E
ccugcacccucaucucc

SEQ ID NO: 112635 - RNA, 22 nt, Human adenovirus E
ccugcacggucuggguggacuu

SEQ ID NO: 112636 - RNA, 17 nt, Human adenovirus E
ccugcaugaaagucuuu

SEQ ID NO: 112637 - RNA, 20 nt, Human adenovirus E
ccugcaugagggccagaaua

SEQ ID NO: 112638 - RNA, 17 nt, Human adenovirus E
ccugccgcaagaucucu

SEQ ID NO: 112639 - RNA, 18 nt, Human adenovirus E
ccuggccaucgugaacgc

SEQ ID NO: 112640 - RNA, 14 nt, Human adenovirus E
ccugguguacaacg

SEQ ID NO: 112641 - RNA, 22 nt, Human adenovirus E
ccuuuuaauuuuuucuaucauu

SEQ ID NO: 112642 - RNA, 18 nt, Human adenovirus E
cgaaagcaacugcaucau

SEQ ID NO: 112643 - RNA, 16 nt, Human adenovirus E
ccggguggaugaugac

SEQ ID NO: 112644 - RNA, 15 nt, Human adenovirus E
ccgggcggcaggggc

SEQ ID NO: 112645 - RNA, 20 nt, Human adenovirus E
ccgggcccgcgaugaucuca

SEQ ID NO: 112646 - RNA, 14 nt, Human adenovirus E
ccgcuacaacagca

SEQ ID NO: 112647 - RNA, 15 nt, Human adenovirus E
ccgcuacaacagcac

SEQ ID NO: 112648 - RNA, 16 nt, Human adenovirus E
ccgcggcgaucggggc

SEQ ID NO: 112649 - RNA, 12 nt, Human adenovirus E
cccuguucugcg

SEQ ID NO: 112650 - RNA, 17 nt, Human adenovirus E
ccgacccgagacuggcu

SEQ ID NO: 112651 - RNA, 21 nt, Human adenovirus E
cccaucaucaugagcaaagag

SEQ ID NO: 112652 - RNA, 17 nt, Human adenovirus E
cccagucgcagaaaaag

SEQ ID NO: 112653 - RNA, 21 nt, Human adenovirus E
ccaggcgcugggucaaggccu

SEQ ID NO: 112654 - RNA, 16 nt, Human adenovirus E
ccaucaccaauggcau

SEQ ID NO: 112655 - RNA, 18 nt, Human adenovirus E
ccaucacccguaucggcc

SEQ ID NO: 112656 - RNA, 14 nt, Human adenovirus E
cccgacugcgucca

SEQ ID NO: 112657 - RNA, 22 nt, Human adenovirus E
cccgcagaagcaagcuccagcu

SEQ ID NO: 112658 - RNA, 21 nt, Human adenovirus E
cccgcccagucgcagaaaaag

SEQ ID NO: 112659 - RNA, 20 nt, Human adenovirus E
ccccacaagaaguaccucac

SEQ ID NO: 112660 - RNA, 14 nt, Human adenovirus E
cccuggaaauuccu

SEQ ID NO: 112661 - RNA, 19 nt, Human adenovirus E
cccuggcuccgcgacacgg

SEQ ID NO: 112662 - RNA, 12 nt, Human adenovirus E
cccucaucuccu

SEQ ID NO: 112663 - RNA, 16 nt, Human adenovirus E
caucaaguuucaaugu

SEQ ID NO: 112664 - RNA, 14 nt, Human adenovirus E
caucacaccuucca

SEQ ID NO: 112665 - RNA, 14 nt, Human adenovirus E
cauauugaugauga

SEQ ID NO: 112666 - RNA, 15 nt, Human adenovirus E
cauauugaugaugau

SEQ ID NO: 112667 - RNA, 19 nt, Human adenovirus E
cauguguguuuacuugagg

SEQ ID NO: 112668 - RNA, 16 nt, Human adenovirus E
cauguggaugagcaag

SEQ ID NO: 112669 - RNA, 16 nt, Human adenovirus E
caugagcauaugccug

SEQ ID NO: 112670 - RNA, 19 nt, Human adenovirus E
caugaugagacuaaucaca

SEQ ID NO: 112671 - RNA, 21 nt, Human adenovirus E
caugaugagacuaaucacaga

SEQ ID NO: 112672 - RNA, 20 nt, Human adenovirus E
caugaugggaucuucaucac

SEQ ID NO: 112673 - RNA, 18 nt, Human adenovirus E
caguuacaccugcccugg

SEQ ID NO: 112674 - RNA, 15 nt, Human adenovirus E
cagugugguggcaug

SEQ ID NO: 112675 - RNA, 18 nt, Human adenovirus E
cagcaccaacgugcagac

SEQ ID NO: 112676 - RNA, 21 nt, Human adenovirus E
cauuaccucugcucuaugcaa

SEQ ID NO: 112677 - RNA, 16 nt, Human adenovirus E
cauucauggaaugagu

SEQ ID NO: 112678 - RNA, 18 nt, Human adenovirus E
ccaaacgaccaucgccuc

SEQ ID NO: 112679 - RNA, 15 nt, Human adenovirus E
ccaaacuaaccucca

SEQ ID NO: 112680 - RNA, 16 nt, Human adenovirus E
ccaaacuaaccuccac

SEQ ID NO: 112681 - RNA, 21 nt, Human adenovirus E
ccaacucgaguuccaccaaua

SEQ ID NO: 112682 - RNA, 16 nt, Human adenovirus E
ccaaaagcauguccau

SEQ ID NO: 112683 - RNA, 18 nt, Human adenovirus E
ccaaaaaucagacaugca

SEQ ID NO: 112684 - RNA, 19 nt, Human adenovirus E
ccaaaaaucagacaugcau

SEQ ID NO: 112685 - RNA, 18 nt, Human adenovirus E
cauugccgucauucaugg

SEQ ID NO: 112686 - RNA, 21 nt, Human adenovirus E
cauugccgucauucauggaau

SEQ ID NO: 112687 - RNA, 15 nt, Human adenovirus E
ccaggacuacuccac

SEQ ID NO: 112688 - RNA, 21 nt, Human adenovirus E
ccaggaaauuccccagcccac

SEQ ID NO: 112689 - RNA, 12 nt, Human adenovirus E
ccacugcuccug

SEQ ID NO: 112690 - RNA, 16 nt, Human adenovirus E
ccacucuguggaacaa

SEQ ID NO: 112691 - RNA, 20 nt, Human adenovirus E
ccacucuguggaacaaacuc

SEQ ID NO: 112692 - RNA, 17 nt, Human adenovirus E
ccagaaaaagccacaga

SEQ ID NO: 112693 - RNA, 16 nt, Human adenovirus E
ccaaggggugcaucca

SEQ ID NO: 112694 - RNA, 18 nt, Human adenovirus E
ccaaggggugcauccacu

SEQ ID NO: 112695 - RNA, 21 nt, Human adenovirus E
ccacgccccgcaaucaccuca

SEQ ID NO: 112696 - RNA, 16 nt, Human adenovirus E
auuacuaagcugauaa

SEQ ID NO: 112697 - RNA, 20 nt, Human adenovirus E
auuaccucugcucuaugcaa

SEQ ID NO: 112698 - RNA, 22 nt, Human adenovirus E
auuaccucugcucuaugcaauu

SEQ ID NO: 112699 - RNA, 11 nt, Human adenovirus E
auuacgggcua

SEQ ID NO: 112700 - RNA, 17 nt, Human adenovirus E
auucccacgccuuacau

SEQ ID NO: 112701 - RNA, 13 nt, Human adenovirus E
auuauacacugaa

SEQ ID NO: 112702 - RNA, 15 nt, Human adenovirus E
auguguugacuuuaa

SEQ ID NO: 112703 - RNA, 13 nt, Human adenovirus E
auguggaucugac

SEQ ID NO: 112704 - RNA, 15 nt, Human adenovirus E
augguacugaucuga

SEQ ID NO: 112705 - RNA, 18 nt, Human adenovirus E
auggugggguucuugucc

SEQ ID NO: 112706 - RNA, 22 nt, Human adenovirus E
aucugucuccaggaaagggugg

SEQ ID NO: 112707 - RNA, 13 nt, Human adenovirus E
auguaaguucugu

SEQ ID NO: 112708 - RNA, 14 nt, Human adenovirus E
caaacuaaccucca

SEQ ID NO: 112709 - RNA, 22 nt, Human adenovirus E
caaacgaccaucgccucuccua

SEQ ID NO: 112710 - RNA, 14 nt, Human adenovirus E
caaaugcaaauucc

SEQ ID NO: 112711 - RNA, 17 nt, Human adenovirus E
caacaaaauugcaucau

SEQ ID NO: 112712 - RNA, 23 nt, Human adenovirus E
caacaaaauugcaucaucuggcu

SEQ ID NO: 112713 - RNA, 14 nt, Human adenovirus E
caacaaaugccagc

SEQ ID NO: 112714 - RNA, 14 nt, Human adenovirus E
caacaaccgucucc

SEQ ID NO: 112715 - RNA, 14 nt, Human adenovirus E
caaaauucuuaaaa

SEQ ID NO: 112716 - RNA, 20 nt, Human adenovirus E
caaaauugcaucaucuggcu

SEQ ID NO: 112717 - RNA, 13 nt, Human adenovirus E
auuugguguugcc

SEQ ID NO: 112718 - RNA, 22 nt, Human adenovirus E
auuugaaauaaagauacaauca

SEQ ID NO: 112719 - RNA, 22 nt, Human adenovirus E
auuucaacaccgagcguuccaa

SEQ ID NO: 112720 - RNA, 22 nt, Human adenovirus E
auuuauaggguguggagugcaa

SEQ ID NO: 112721 - RNA, 17 nt, Human adenovirus E
cacaauguaaguucugu

SEQ ID NO: 112722 - RNA, 18 nt, Human adenovirus E
caauguggaucugacuua

SEQ ID NO: 112723 - RNA, 19 nt, Human adenovirus E
caauguggaucugacuuaa

SEQ ID NO: 112724 - RNA, 17 nt, Human adenovirus E
caaugguacugaucuga

SEQ ID NO: 112725 - RNA, 15 nt, Human adenovirus E
caccagccaacugaa

SEQ ID NO: 112726 - RNA, 15 nt, Human adenovirus E
caaggaagagaugcu

SEQ ID NO: 112727 - RNA, 15 nt, Human adenovirus E
caagauuacuaagcu

SEQ ID NO: 112728 - RNA, 20 nt, Human adenovirus E
caagaguuccccgugcccug

SEQ ID NO: 112729 - RNA, 13 nt, Human adenovirus E
caacaccuacucg

SEQ ID NO: 112730 - RNA, 16 nt, Human adenovirus E
caauccucagcuguug

SEQ ID NO: 112731 - RNA, 18 nt, Human adenovirus E
caauccucagcuguugag

SEQ ID NO: 112732 - RNA, 15 nt, Human adenovirus E
cagaaaaagccacag

SEQ ID NO: 112733 - RNA, 22 nt, Human adenovirus E
cagagcggcauggagauuugga

SEQ ID NO: 112734 - RNA, 15 nt, Human adenovirus E
cagagccaucaggca

SEQ ID NO: 112735 - RNA, 17 nt, Human adenovirus E
cagauguaucuacugaa

SEQ ID NO: 112736 - RNA, 19 nt, Human adenovirus E
cagauguaucuacugaacu

SEQ ID NO: 112737 - RNA, 16 nt, Human adenovirus E
cacuagagacuaugua

SEQ ID NO: 112738 - RNA, 13 nt, Human adenovirus E
caccuggaccacu

SEQ ID NO: 112739 - RNA, 20 nt, Human adenovirus E
caccugcuucggaucuucag

SEQ ID NO: 112740 - RNA, 19 nt, Human adenovirus E
cacgggacgcagggccaug

SEQ ID NO: 112741 - RNA, 22 nt, Human adenovirus E
aggacccgguagaggugggcuu

SEQ ID NO: 112742 - RNA, 13 nt, Human adenovirus E
agcugcgagaagg

SEQ ID NO: 112743 - RNA, 20 nt, Human adenovirus E
agcugcggcggcagcugcgu

SEQ ID NO: 112744 - RNA, 18 nt, Human adenovirus E
aggccacaauacaugccc

SEQ ID NO: 112745 - RNA, 19 nt, Human adenovirus E
aggaggagacugauggcca

SEQ ID NO: 112746 - RNA, 18 nt, Human adenovirus E
aggcauuucggacaugga

SEQ ID NO: 112747 - RNA, 17 nt, Human adenovirus E
aggccaagaucuccuac

SEQ ID NO: 112748 - RNA, 15 nt, Human adenovirus E
aggcaugaugggauc

SEQ ID NO: 112749 - RNA, 23 nt, Human adenovirus E
agaggcaugaugagacuaaucac

SEQ ID NO: 112750 - RNA, 22 nt, Human adenovirus E
agccccacaagaaguaccucac

SEQ ID NO: 112751 - RNA, 20 nt, Human adenovirus E
agccccaggccaaccggcuc

SEQ ID NO: 112752 - RNA, 14 nt, Human adenovirus E
agcccgauggcaau

SEQ ID NO: 112753 - RNA, 19 nt, Human adenovirus E
agccgccuccacccaucau

SEQ ID NO: 112754 - RNA, 21 nt, Human adenovirus E
agccuuguugcgcagggccag

SEQ ID NO: 112755 - RNA, 17 nt, Human adenovirus E
agccuuuagacagcagc

SEQ ID NO: 112756 - RNA, 23 nt, Human adenovirus E
agcgcccggaccagguucugcua

SEQ ID NO: 112757 - RNA, 15 nt, Human adenovirus E
agcgccucaagcaga

SEQ ID NO: 112758 - RNA, 18 nt, Human adenovirus E
agcuccaguguaagcccc

SEQ ID NO: 112759 - RNA, 12 nt, Human adenovirus E
agcucaacagcu

SEQ ID NO: 112760 - RNA, 13 nt, Human adenovirus E
agguucugcuaca

SEQ ID NO: 112761 - RNA, 16 nt, Human adenovirus E
agguagccaucaggaa

SEQ ID NO: 112762 - RNA, 14 nt, Human adenovirus E
agguauaagaguua

SEQ ID NO: 112763 - RNA, 17 nt, Human adenovirus E
aggggugcauccacugc

SEQ ID NO: 112764 - RNA, 15 nt, Human adenovirus E
aggguuggcaugcag

SEQ ID NO: 112765 - RNA, 14 nt, Human adenovirus E
agguacaugggcau

SEQ ID NO: 112766 - RNA, 14 nt, Human adenovirus E
aguugagagugcug

SEQ ID NO: 112767 - RNA, 17 nt, Human adenovirus E
aucugacgccucugggu

SEQ ID NO: 112768 - RNA, 17 nt, Human adenovirus E
aucugacuuaacccuaa

SEQ ID NO: 112769 - RNA, 12 nt, Human adenovirus E
aucugacacuac

SEQ ID NO: 112770 - RNA, 19 nt, Human adenovirus E
aucccacccugcaugccaa

SEQ ID NO: 112771 - RNA, 13 nt, Human adenovirus E
auccacugcuccu

SEQ ID NO: 112772 - RNA, 16 nt, Human adenovirus E
aucauuugguguugcc

SEQ ID NO: 112773 - RNA, 16 nt, Human adenovirus E
aucagucucacuuuaa

SEQ ID NO: 112774 - RNA, 15 nt, Human adenovirus E
aucagacaugcaucc

SEQ ID NO: 112775 - RNA, 13 nt, Human adenovirus E
auauugaugauuu

SEQ ID NO: 112776 - RNA, 15 nt, Human adenovirus E
aucacccggugcugc

SEQ ID NO: 112777 - RNA, 16 nt, Human adenovirus E
aucaaccagucuuugu

SEQ ID NO: 112778 - RNA, 20 nt, Human adenovirus E
auacaaucauauugaugauu

SEQ ID NO: 112779 - RNA, 15 nt, Human adenovirus E
acuagagacuaugua

SEQ ID NO: 112780 - RNA, 14 nt, Human adenovirus E
acggucauguggau

SEQ ID NO: 112781 - RNA, 18 nt, Human adenovirus E
acgguggucgaugugauc

SEQ ID NO: 112782 - RNA, 14 nt, Human adenovirus E
acucugaaacacaa

SEQ ID NO: 112783 - RNA, 18 nt, Human adenovirus E
acucuguggaaacaauaa

SEQ ID NO: 112784 - RNA, 13 nt, Human adenovirus E
acucacaccacac

SEQ ID NO: 112785 - RNA, 14 nt, Human adenovirus E
acucacaccacaca

SEQ ID NO: 112786 - RNA, 13 nt, Human adenovirus E
acuuggaaacauc

SEQ ID NO: 112787 - RNA, 18 nt, Human adenovirus E
acugaucugauacuccuc

SEQ ID NO: 112788 - RNA, 23 nt, Human adenovirus E
agacccgcgcuucucugguggag

SEQ ID NO: 112789 - RNA, 15 nt, Human adenovirus E
agaaguucaccugcc

SEQ ID NO: 112790 - RNA, 22 nt, Human adenovirus E
agaaguuucaugguauuguuau

SEQ ID NO: 112791 - RNA, 13 nt, Human adenovirus E
agaaugaccacaa

SEQ ID NO: 112792 - RNA, 19 nt, Human adenovirus E
agaaugaccacaaccacaa

SEQ ID NO: 112793 - RNA, 20 nt, Human adenovirus E
agaaugaccacaaccacaaa

SEQ ID NO: 112794 - RNA, 20 nt, Human adenovirus E
agaaaugccugcuacaucuc

SEQ ID NO: 112795 - RNA, 20 nt, Human adenovirus E
agaaacagugugguggcaug

SEQ ID NO: 112796 - RNA, 13 nt, Human adenovirus E
agaaacugaauua

SEQ ID NO: 112797 - RNA, 13 nt, Human adenovirus E
acagaaacugaau

SEQ ID NO: 112798 - RNA, 13 nt, Human adenovirus E
acagacaccuacu

SEQ ID NO: 112799 - RNA, 13 nt, Human adenovirus E
acaguguucauuc

SEQ ID NO: 112800 - RNA, 17 nt, Human adenovirus E
acagcgacccaugcucc

SEQ ID NO: 112801 - RNA, 13 nt, Human adenovirus E
acagcgacuacuc

SEQ ID NO: 112802 - RNA, 15 nt, Human adenovirus E
acagcucaacagcug

SEQ ID NO: 112803 - RNA, 16 nt, Human adenovirus E
acauggaauuuuauca

SEQ ID NO: 112804 - RNA, 15 nt, Human adenovirus E
accacuacagccuag

SEQ ID NO: 112805 - RNA, 15 nt, Human adenovirus E
accagaggauuucga

SEQ ID NO: 112806 - RNA, 15 nt, Human adenovirus E
accagagugccguag

SEQ ID NO: 112807 - RNA, 21 nt, Human adenovirus E
accugaucccgaauaccacag

SEQ ID NO: 112808 - RNA, 18 nt, Human adenovirus E
accuuccaccugaucccg

SEQ ID NO: 112809 - RNA, 21 nt, Human adenovirus E
accuccacccaccacaauuac

SEQ ID NO: 112810 - RNA, 19 nt, Human adenovirus E
accucugcucuaugcaauu

SEQ ID NO: 112811 - RNA, 12 nt, Human adenovirus E
acgcagggccau

SEQ ID NO: 112812 - RNA, 21 nt, Human adenovirus E
acggagucucuuaccugugga

SEQ ID NO: 112813 - RNA, 18 nt, Human adenovirus E
acccaggccaugcaacgc

SEQ ID NO: 112814 - RNA, 18 nt, Human adenovirus E
accccacucuguggaaca

SEQ ID NO: 112815 - RNA, 14 nt, Human adenovirus E
acccuaauuaacau

SEQ ID NO: 112816 - RNA, 18 nt, Human adenovirus E
accggcucucggccaucc

SEQ ID NO: 112817 - RNA, 16 nt, Human adenovirus E
accguggaacaucucg

SEQ ID NO: 112818 - RNA, 17 nt, Human adenovirus E
cuccccccgcacagccu

SEQ ID NO: 112819 - RNA, 16 nt, Human adenovirus E
cucugcucuaugcaau

SEQ ID NO: 112820 - RNA, 14 nt, Human adenovirus E
cugaacucugugga

SEQ ID NO: 112821 - RNA, 17 nt, Human adenovirus E
cugaagagaugcaugag

SEQ ID NO: 112822 - RNA, 17 nt, Human adenovirus E
cugaaacuguguggaac

SEQ ID NO: 112823 - RNA, 17 nt, Human adenovirus E
cugcguccacacucuga

SEQ ID NO: 112824 - RNA, 14 nt, Human adenovirus E
cugcucuaugcaau

SEQ ID NO: 112825 - RNA, 15 nt, Human adenovirus E
cugcucuaugcaauu

SEQ ID NO: 112826 - RNA, 17 nt, Human adenovirus E
cuggaagccaccgugga

SEQ ID NO: 112827 - RNA, 23 nt, Human adenovirus E
cugcacccucaucuccuuuguga

SEQ ID NO: 112828 - RNA, 14 nt, Human adenovirus E
cugccaacaccacu

SEQ ID NO: 112829 - RNA, 18 nt, Human adenovirus E
cugcaugagggccagaau

SEQ ID NO: 112830 - RNA, 11 nt, Human adenovirus E
cuggggcgggg

SEQ ID NO: 112831 - RNA, 13 nt, Human adenovirus E
cugggccaucagc

SEQ ID NO: 112832 - RNA, 20 nt, Human adenovirus E
cugggccaucagcagcaaca

SEQ ID NO: 112833 - RNA, 13 nt, Human adenovirus E
cuguccccggugc

SEQ ID NO: 112834 - RNA, 17 nt, Human adenovirus E
cuguccccggugcugac

SEQ ID NO: 112835 - RNA, 16 nt, Human adenovirus E
cugugugguuagcuca

SEQ ID NO: 112836 - RNA, 17 nt, Human adenovirus E
cuguguuaaaaucaaca

SEQ ID NO: 112837 - RNA, 22 nt, Human adenovirus E
cuuacauguggagcuaccagcc

SEQ ID NO: 112838 - RNA, 20 nt, Human adenovirus E
cuucagucuggggaacaagu

SEQ ID NO: 112839 - RNA, 15 nt, Human adenovirus E
cuuccguguguuccu

SEQ ID NO: 112840 - RNA, 21 nt, Human adenovirus E
cuucugcuguuagugcucccc

SEQ ID NO: 112841 - RNA, 17 nt, Human adenovirus E
cuucugacucuguacug

SEQ ID NO: 112842 - RNA, 13 nt, Human adenovirus E
cuugaacaucuga

SEQ ID NO: 112843 - RNA, 18 nt, Human adenovirus E
cuacgagcuccugcagca

SEQ ID NO: 112844 - RNA, 22 nt, Human adenovirus E
cuacggcacucugguggccaac

SEQ ID NO: 112845 - RNA, 14 nt, Human adenovirus E
cuaauuaacaucac

SEQ ID NO: 112846 - RNA, 11 nt, Human adenovirus E
cuaccaccacu

SEQ ID NO: 112847 - RNA, 17 nt, Human adenovirus E
cuaccaccacuacagcc

SEQ ID NO: 112848 - RNA, 21 nt, Human adenovirus E
cucaucaaguuucaaugugga

SEQ ID NO: 112849 - RNA, 17 nt, Human adenovirus E
cucagaugcauguguaa

SEQ ID NO: 112850 - RNA, 23 nt, Human adenovirus E
cucagaugcauguguaacaugaa

SEQ ID NO: 112851 - RNA, 21 nt, Human adenovirus E
cucagcuguugagcugugagg

SEQ ID NO: 112852 - RNA, 22 nt, Human adenovirus E
cuauuuacacuggcacuaauca

SEQ ID NO: 112853 - RNA, 15 nt, Human adenovirus E
cuaucagauguccaa

SEQ ID NO: 112854 - RNA, 17 nt, Human adenovirus E
cggaccagguucugcua

SEQ ID NO: 112855 - RNA, 21 nt, Human adenovirus E
cggaucaaauuauacacugaa

SEQ ID NO: 112856 - RNA, 22 nt, Human adenovirus E
cgaauccuguaaaacuguugaa

SEQ ID NO: 112857 - RNA, 12 nt, Human adenovirus E
cgaaguccagcu

SEQ ID NO: 112858 - RNA, 14 nt, Human adenovirus E
cgacccaugcuccc

SEQ ID NO: 112859 - RNA, 17 nt, Human adenovirus E
cgucgccaccaccaccg

SEQ ID NO: 112860 - RNA, 14 nt, Human adenovirus E
cggggcugcauguu

SEQ ID NO: 112861 - RNA, 17 nt, Human adenovirus E
cgguggucgaugugauc

SEQ ID NO: 112862 - RNA, 14 nt, Human adenovirus E
cgguuuacaugucu

SEQ ID NO: 112863 - RNA, 21 nt, Human adenovirus E
cguggcccgcuacaacagcac

SEQ ID NO: 112864 - RNA, 23 nt, Human adenovirus E
cguggagaccaaaagcaugucca

SEQ ID NO: 112865 - RNA, 19 nt, Human adenovirus E
gcaggugcagaccugugug

SEQ ID NO: 112866 - RNA, 18 nt, Human adenovirus E
gcagggcaugguguugca

SEQ ID NO: 112867 - RNA, 22 nt, Human adenovirus E
gcagcccggggaccccgagugg

SEQ ID NO: 112868 - RNA, 15 nt, Human adenovirus E
gcagcugagccaccu

SEQ ID NO: 112869 - RNA, 17 nt, Human adenovirus E
gcauaugccugugcugu

SEQ ID NO: 112870 - RNA, 15 nt, Human adenovirus E
gcaugaaagucuuug

SEQ ID NO: 112871 - RNA, 19 nt, Human adenovirus E
gcaugagcccgucccgggg

SEQ ID NO: 112872 - RNA, 22 nt, Human adenovirus E
gcaugagcggaagcggcuccuu

SEQ ID NO: 112873 - RNA, 19 nt, Human adenovirus E
gcaucugcaccucacagcu

SEQ ID NO: 112874 - RNA, 21 nt, Human adenovirus E
gcaucugcaccucacagcuca

SEQ ID NO: 112875 - RNA, 18 nt, Human adenovirus E
gcaucaucuggcuggguc

SEQ ID NO: 112876 - RNA, 21 nt, Human adenovirus E
gccaacccuucccaccccacu

SEQ ID NO: 112877 - RNA, 19 nt, Human adenovirus E
gccaaaaaucagacaugca

SEQ ID NO: 112878 - RNA, 21 nt, Human adenovirus E
gccacagcgacccaugcuccc

SEQ ID NO: 112879 - RNA, 13 nt, Human adenovirus E
gccacagacaccu

SEQ ID NO: 112880 - RNA, 12 nt, Human adenovirus E
gcauuacucuca

SEQ ID NO: 112881 - RNA, 15 nt, Human adenovirus E
gcaugguguugcaca

SEQ ID NO: 112882 - RNA, 17 nt, Human adenovirus E
gcauuucggacauggaa

SEQ ID NO: 112883 - RNA, 18 nt, Human adenovirus E
gcauuucggacauggaau

SEQ ID NO: 112884 - RNA, 19 nt, Human adenovirus E
gcauuucggacauggaauu

SEQ ID NO: 112885 - RNA, 16 nt, Human adenovirus E
gcauucgccagcagca

SEQ ID NO: 112886 - RNA, 22 nt, Human adenovirus E
gccagaaguucaccugccuggu

SEQ ID NO: 112887 - RNA, 20 nt, Human adenovirus E
gccaucuccgcgaucuucau

SEQ ID NO: 112888 - RNA, 15 nt, Human adenovirus E
gcaaccaccccggcc

SEQ ID NO: 112889 - RNA, 21 nt, Human adenovirus E
gcaaccucaggcacacgcacu

SEQ ID NO: 112890 - RNA, 18 nt, Human adenovirus E
gcaaaauucaaaauucuu

SEQ ID NO: 112891 - RNA, 16 nt, Human adenovirus E
gcaccagccaacugaa

SEQ ID NO: 112892 - RNA, 20 nt, Human adenovirus E
gcaccagccaacugaacggg

SEQ ID NO: 112893 - RNA, 19 nt, Human adenovirus E
gcacccucagggcccggcc

SEQ ID NO: 112894 - RNA, 20 nt, Human adenovirus E
gcacagccuugaacaucuga

SEQ ID NO: 112895 - RNA, 21 nt, Human adenovirus E
gcacagccuugaacaucugaa

SEQ ID NO: 112896 - RNA, 15 nt, Human adenovirus E
gcacaucgccggaca

SEQ ID NO: 112897 - RNA, 14 nt, Human adenovirus E
gcacaugugcgaca

SEQ ID NO: 112898 - RNA, 12 nt, Human adenovirus E
gaucccaucaca

SEQ ID NO: 112899 - RNA, 21 nt, Human adenovirus E
gaggugucggugaugcaugag

SEQ ID NO: 112900 - RNA, 23 nt, Human adenovirus E
gagguuuucucuagaacaaguca

SEQ ID NO: 112901 - RNA, 15 nt, Human adenovirus E
gaggugcaucuuggc

SEQ ID NO: 112902 - RNA, 15 nt, Human adenovirus E
gaggugccaucuccg

SEQ ID NO: 112903 - RNA, 14 nt, Human adenovirus E
gaggguuucaucuc

SEQ ID NO: 112904 - RNA, 17 nt, Human adenovirus E
gagggugguguauucca

SEQ ID NO: 112905 - RNA, 18 nt, Human adenovirus E
gagguagccaucaggaau

SEQ ID NO: 112906 - RNA, 17 nt, Human adenovirus E
gaugcaacaacaacagc

SEQ ID NO: 112907 - RNA, 17 nt, Human adenovirus E
gaugcgcgcgcgguggg

SEQ ID NO: 112908 - RNA, 20 nt, Human adenovirus E
gaucgccguugucaaccacu

SEQ ID NO: 112909 - RNA, 15 nt, Human adenovirus E
gaucugacacuacag

SEQ ID NO: 112910 - RNA, 18 nt, Human adenovirus E
gaucugacuuaacccuaa

SEQ ID NO: 112911 - RNA, 20 nt, Human adenovirus E
gaucucggucaugaacugcu

SEQ ID NO: 112912 - RNA, 15 nt, Human adenovirus E
gaugaugauuuuaca

SEQ ID NO: 112913 - RNA, 18 nt, Human adenovirus E
gacccaggccaugcaacg

SEQ ID NO: 112914 - RNA, 13 nt, Human adenovirus E
gacgcagggccau

SEQ ID NO: 112915 - RNA, 13 nt, Human adenovirus E
gacccuucugacu

SEQ ID NO: 112916 - RNA, 23 nt, Human adenovirus E
gacccuucugacucuguacugca

SEQ ID NO: 112917 - RNA, 14 nt, Human adenovirus E
gacccugccaucac

SEQ ID NO: 112918 - RNA, 16 nt, Human adenovirus E
gaccgccgccggcgau

SEQ ID NO: 112919 - RNA, 20 nt, Human adenovirus E
gaccuagcucggcuucgaca

SEQ ID NO: 112920 - RNA, 20 nt, Human adenovirus E
gagcugcccgaggagcaccc

SEQ ID NO: 112921 - RNA, 14 nt, Human adenovirus E
gagcucagggccau

SEQ ID NO: 112922 - RNA, 23 nt, Human adenovirus E
gagcucaggguugcauaggucag

SEQ ID NO: 112923 - RNA, 17 nt, Human adenovirus E
gagcuccugcagcagcg

SEQ ID NO: 112924 - RNA, 13 nt, Human adenovirus E
gagcacccggugg

SEQ ID NO: 112925 - RNA, 22 nt, Human adenovirus E
gagccuuguugcgcagggccag

SEQ ID NO: 112926 - RNA, 19 nt, Human adenovirus E
gagcggcauggagauuugg

SEQ ID NO: 112927 - RNA, 16 nt, Human adenovirus E
gagcuccagcuccagu

SEQ ID NO: 112928 - RNA, 14 nt, Human adenovirus E
gagaaaauuacuau

SEQ ID NO: 112929 - RNA, 13 nt, Human adenovirus E
gagaugaggugca

SEQ ID NO: 112930 - RNA, 18 nt, Human adenovirus E
gagaucugucuccaggaa

SEQ ID NO: 112931 - RNA, 12 nt, Human adenovirus E
gacuauguaggu

SEQ ID NO: 112932 - RNA, 18 nt, Human adenovirus E
cuuggauguugagguaca

SEQ ID NO: 112933 - RNA, 17 nt, Human adenovirus E
gaacaucugaaugccau

SEQ ID NO: 112934 - RNA, 23 nt, Human adenovirus E
gaaaugccugcuacaucucaggg

SEQ ID NO: 112935 - RNA, 21 nt, Human adenovirus E
gaaauaaagauacaaucauau

SEQ ID NO: 112936 - RNA, 18 nt, Human adenovirus E
gaacuacagcaggcauuu

SEQ ID NO: 112937 - RNA, 14 nt, Human adenovirus E
gaacucuguggaaa

SEQ ID NO: 112938 - RNA, 21 nt, Human adenovirus E
gaacugcgccgggugcugacu

SEQ ID NO: 112939 - RNA, 21 nt, Human adenovirus E
gacacuacagaaacugaauua

SEQ ID NO: 112940 - RNA, 13 nt, Human adenovirus E
gacaguaugauuu

SEQ ID NO: 112941 - RNA, 19 nt, Human adenovirus E
gacagcagccccaggccaa

SEQ ID NO: 112942 - RNA, 20 nt, Human adenovirus E
gacagacccuucugacucug

SEQ ID NO: 112943 - RNA, 12 nt, Human adenovirus E
gaagaaucugac

SEQ ID NO: 112944 - RNA, 17 nt, Human adenovirus E
gaauaacugaaaucugu

SEQ ID NO: 112945 - RNA, 23 nt, Human adenovirus E
gaaguggagaucugucuccagga

SEQ ID NO: 112946 - RNA, 14 nt, Human adenovirus E
gcccaggacuacuc

SEQ ID NO: 112947 - RNA, 17 nt, Human adenovirus E
gcccaggacuacuccac

SEQ ID NO: 112948 - RNA, 15 nt, Human adenovirus E
gcggcagaugcagca

SEQ ID NO: 112949 - RNA, 23 nt, Human adenovirus E
gcggcgcaucgcccggcggcacc

SEQ ID NO: 112950 - RNA, 21 nt, Human adenovirus E
gcggcgcgugcaguggcgcgg

SEQ ID NO: 112951 - RNA, 20 nt, Human adenovirus E
gcgggguucgcuguccugca

SEQ ID NO: 112952 - RNA, 18 nt, Human adenovirus E
gcggggaagaaucugacu

SEQ ID NO: 112953 - RNA, 20 nt, Human adenovirus E
gcggggggagaugaggugca

SEQ ID NO: 112954 - RNA, 15 nt, Human adenovirus E
gcugcaaacuuccuc

SEQ ID NO: 112955 - RNA, 16 nt, Human adenovirus E
gcugauccccaucauc

SEQ ID NO: 112956 - RNA, 17 nt, Human adenovirus E
gcugagacccggcacca

SEQ ID NO: 112957 - RNA, 21 nt, Human adenovirus E
gcugacuaacucaggugucca

SEQ ID NO: 112958 - RNA, 19 nt, Human adenovirus E
gcugaaggggaugucaaau

SEQ ID NO: 112959 - RNA, 12 nt, Human adenovirus E
gcuacaacagca

SEQ ID NO: 112960 - RNA, 20 nt, Human adenovirus E
gcuauuuuggaucugacacu

SEQ ID NO: 112961 - RNA, 11 nt, Human adenovirus E
gcuacaacagc

SEQ ID NO: 112962 - RNA, 17 nt, Human adenovirus E
gcuucgacaccuggacc

SEQ ID NO: 112963 - RNA, 13 nt, Human adenovirus E
gcuugcauuucaa

SEQ ID NO: 112964 - RNA, 15 nt, Human adenovirus E
gcuggccgugggcga

SEQ ID NO: 112965 - RNA, 15 nt, Human adenovirus E
gcugggagggaugca

SEQ ID NO: 112966 - RNA, 21 nt, Human adenovirus E
gcuggaucaugaucauuggga

SEQ ID NO: 112967 - RNA, 15 nt, Human adenovirus E
ggagaggcaugauga

SEQ ID NO: 112968 - RNA, 22 nt, Human adenovirus E
ggaauuaugccaagcuggcucu

SEQ ID NO: 112969 - RNA, 20 nt, Human adenovirus E
ggagugcccggaggguuuca

SEQ ID NO: 112970 - RNA, 17 nt, Human adenovirus E
ggagguagccaucagga

SEQ ID NO: 112971 - RNA, 19 nt, Human adenovirus E
ggcacucccgcaucugcac

SEQ ID NO: 112972 - RNA, 14 nt, Human adenovirus E
ggccggccgcgaga

SEQ ID NO: 112973 - RNA, 21 nt, Human adenovirus E
guagacagauggaagacauca

SEQ ID NO: 112974 - RNA, 20 nt, Human adenovirus E
guaggcccuggaccaccggu

SEQ ID NO: 112975 - RNA, 16 nt, Human adenovirus E
gucagcaaguucaugg

SEQ ID NO: 112976 - RNA, 16 nt, Human adenovirus E
guauuauggaacuaca

SEQ ID NO: 112977 - RNA, 20 nt, Human adenovirus E
gguagccaucaggaauuaug

SEQ ID NO: 112978 - RNA, 12 nt, Human adenovirus E
gggggagagggu

SEQ ID NO: 112979 - RNA, 17 nt, Human adenovirus E
gggggagaugaggugca

SEQ ID NO: 112980 - RNA, 21 nt, Human adenovirus E
ggggcggucgggccagugcac

SEQ ID NO: 112981 - RNA, 13 nt, Human adenovirus E
gguggcaugaggu

SEQ ID NO: 112982 - RNA, 21 nt, Human adenovirus E
ggugccgcccaggacuacucc

SEQ ID NO: 112983 - RNA, 15 nt, Human adenovirus E
guaaaacuguugaau

SEQ ID NO: 112984 - RNA, 13 nt, Human adenovirus E
ggugaugucagua

SEQ ID NO: 112985 - RNA, 14 nt, Human adenovirus E
guccuccauugcca

SEQ ID NO: 112986 - RNA, 15 nt, Human adenovirus E
guccuccauugccau

SEQ ID NO: 112987 - RNA, 21 nt, Human adenovirus E
gucuaccccuacgaugcagac

SEQ ID NO: 112988 - RNA, 23 nt, Human adenovirus E
gucggaucaaauuauacacugaa

SEQ ID NO: 112989 - RNA, 17 nt, Human adenovirus E
gucugcuccugcagcug

SEQ ID NO: 112990 - RNA, 18 nt, Human adenovirus E
gucugaaucuuuauuuga

SEQ ID NO: 112991 - RNA, 20 nt, Human adenovirus E
gucugaaucuuuauuugauu

SEQ ID NO: 112992 - RNA, 14 nt, Human adenovirus E
gugcaguggcgcgg

SEQ ID NO: 112993 - RNA, 19 nt, Human adenovirus E
gugccgcccaggacuacuc

SEQ ID NO: 112994 - RNA, 19 nt, Human adenovirus E
gugcugaagagaugcauga

SEQ ID NO: 112995 - RNA, 15 nt, Human adenovirus E
gugcuggacauggcc

SEQ ID NO: 112996 - RNA, 15 nt, Human adenovirus E
gugaaggccacggga

SEQ ID NO: 112997 - RNA, 16 nt, Human adenovirus E
gucuuuguugucugcu

SEQ ID NO: 112998 - RNA, 19 nt, Human adenovirus E
ucaaggaagagaugcucca

SEQ ID NO: 112999 - RNA, 16 nt, Human adenovirus E
ucaaggagcugcagga

SEQ ID NO: 113000 - RNA, 20 nt, Human adenovirus E
ucaauguggaucugacuuaa

SEQ ID NO: 113001 - RNA, 20 nt, Human adenovirus E
uauuuuggaucugacacuac

SEQ ID NO: 113002 - RNA, 21 nt, Human adenovirus E
uauuuuggaucugacacuaca

SEQ ID NO: 113003 - RNA, 23 nt, Human adenovirus E
uauaagcaggugcagaccugugu

SEQ ID NO: 113004 - RNA, 9 nt, Human adenovirus E
uacaacagc

SEQ ID NO: 113005 - RNA, 21 nt, Human adenovirus E
uacaacagcaccaacgugcag

SEQ ID NO: 113006 - RNA, 16 nt, Human adenovirus E
uaccacgcugugagga

SEQ ID NO: 113007 - RNA, 15 nt, Human adenovirus E
uacgagggccugcug

SEQ ID NO: 113008 - RNA, 16 nt, Human adenovirus E
uaaaaaauaaucauuu

SEQ ID NO: 113009 - RNA, 19 nt, Human adenovirus E
guggaaacaauaacaaaaa

SEQ ID NO: 113010 - RNA, 14 nt, Human adenovirus E
guggaacaucucga

SEQ ID NO: 113011 - RNA, 16 nt, Human adenovirus E
guggaacaucucgaga

SEQ ID NO: 113012 - RNA, 20 nt, Human adenovirus E
gugguaccgggaggugguga

SEQ ID NO: 113013 - RNA, 11 nt, Human adenovirus E
gugguggcaug

SEQ ID NO: 113014 - RNA, 18 nt, Human adenovirus E
uaagaauggcaaaauuca

SEQ ID NO: 113015 - RNA, 19 nt, Human adenovirus E
aaaaaauaaagaaucacuu

SEQ ID NO: 113016 - RNA, 21 nt, Human adenovirus E
aaaaagccacagaaguuucau

SEQ ID NO: 113017 - RNA, 22 nt, Human adenovirus E
aaacccaacaaaauugcaucau

SEQ ID NO: 113018 - RNA, 18 nt, Human adenovirus E
aaaauaaagaaucacuua

SEQ ID NO: 113019 - RNA, 17 nt, Human adenovirus E
aaaaaugagagcauuac

SEQ ID NO: 113020 - RNA, 20 nt, Human adenovirus E
aaaaaugagagcauuacucu

SEQ ID NO: 113021 - RNA, 18 nt, Human adenovirus E
auugaaagguccagaaaa

SEQ ID NO: 113022 - RNA, 17 nt, Human adenovirus E
auuucggacauggaauu

SEQ ID NO: 113023 - RNA, 17 nt, Human adenovirus E
augcuuuuggucuccac

SEQ ID NO: 113024 - RNA, 23 nt, Human adenovirus E
auuaugccaagcuggcucugagg

SEQ ID NO: 113025 - RNA, 15 nt, Human adenovirus E
caaaaaaaaugagag

SEQ ID NO: 113026 - RNA, 19 nt, Human adenovirus E
caaaaaaauaaagaaucac

SEQ ID NO: 113027 - RNA, 21 nt, Human adenovirus E
caaaaaaauaaagaaucacuu

SEQ ID NO: 113028 - RNA, 23 nt, Human adenovirus E
caaaaaggaagaagaaagugaug

SEQ ID NO: 113029 - RNA, 13 nt, Human adenovirus E
caaaaaucagaca

SEQ ID NO: 113030 - RNA, 18 nt, Human adenovirus E
caaaaaucagacaugcau

SEQ ID NO: 113031 - RNA, 21 nt, Human adenovirus E
caaaaaucagacaugcauccc

SEQ ID NO: 113032 - RNA, 16 nt, Human adenovirus E
auuuuaaugaaucaga

SEQ ID NO: 113033 - RNA, 16 nt, Human adenovirus E
caaacuaaccuccacc

SEQ ID NO: 113034 - RNA, 15 nt, Human adenovirus E
caaaugcaaauucca

SEQ ID NO: 113035 - RNA, 15 nt, Human adenovirus E
caaccucaggcacac

SEQ ID NO: 113036 - RNA, 13 nt, Human adenovirus E
caacgcuccacgc

SEQ ID NO: 113037 - RNA, 15 nt, Human adenovirus E
caagaaguaccucac

SEQ ID NO: 113038 - RNA, 14 nt, Human adenovirus E
cagaaaaagccaca

SEQ ID NO: 113039 - RNA, 13 nt, Human adenovirus E
cagagccaucagg

SEQ ID NO: 113040 - RNA, 17 nt, Human adenovirus E
cagagggugauguggua

SEQ ID NO: 113041 - RNA, 14 nt, Human adenovirus E
cagauacuccuaga

SEQ ID NO: 113042 - RNA, 15 nt, Human adenovirus E
cagauggaagacauc

SEQ ID NO: 113043 - RNA, 16 nt, Human adenovirus E
cagauguaucuacuga

SEQ ID NO: 113044 - RNA, 23 nt, Human adenovirus E
cagcgcccggaccagguucugcu

SEQ ID NO: 113045 - RNA, 23 nt, Human adenovirus E
cagcuggaucaugaucauuggga

SEQ ID NO: 113046 - RNA, 21 nt, Human adenovirus E
cagccagcggcugacgcugcg

SEQ ID NO: 113047 - RNA, 12 nt, Human adenovirus E
cagccugaacga

SEQ ID NO: 113048 - RNA, 22 nt, Human adenovirus E
cacccucagggcccggcccacg

SEQ ID NO: 113049 - RNA, 14 nt, Human adenovirus E
cacccucaucuccu

SEQ ID NO: 113050 - RNA, 13 nt, Human adenovirus E
cacccggugcugc

SEQ ID NO: 113051 - RNA, 14 nt, Human adenovirus E
cacccggugcugcc

SEQ ID NO: 113052 - RNA, 15 nt, Human adenovirus E
cacccgguggaucuu

SEQ ID NO: 113053 - RNA, 23 nt, Human adenovirus E
caccaauggcauucagauguuca

SEQ ID NO: 113054 - RNA, 13 nt, Human adenovirus E
caccgucgacgac

SEQ ID NO: 113055 - RNA, 17 nt, Human adenovirus E
cacgaccguacuacuuc

SEQ ID NO: 113056 - RNA, 17 nt, Human adenovirus E
cacggguacgagcggug

SEQ ID NO: 113057 - RNA, 15 nt, Human adenovirus E
cacggucauguggau

SEQ ID NO: 113058 - RNA, 17 nt, Human adenovirus E
cacgggccggccgucca

SEQ ID NO: 113059 - RNA, 19 nt, Human adenovirus E
cacggcacgcggccguuca

SEQ ID NO: 113060 - RNA, 14 nt, Human adenovirus E
cacaaccacaaaaa

SEQ ID NO: 113061 - RNA, 13 nt, Human adenovirus E
cacaauacaugcc

SEQ ID NO: 113062 - RNA, 14 nt, Human adenovirus E
cacaauacaugccc

SEQ ID NO: 113063 - RNA, 13 nt, Human adenovirus E
cacaccaccacag

SEQ ID NO: 113064 - RNA, 15 nt, Human adenovirus E
caaggagcugcagga

SEQ ID NO: 113065 - RNA, 12 nt, Human adenovirus E
caauuacucaca

SEQ ID NO: 113066 - RNA, 17 nt, Human adenovirus E
augccugcuacaucuca

SEQ ID NO: 113067 - RNA, 23 nt, Human adenovirus E
augcagggugggauacaguguuc

SEQ ID NO: 113068 - RNA, 17 nt, Human adenovirus E
augcaacaacaacagcc

SEQ ID NO: 113069 - RNA, 12 nt, Human adenovirus E
augcaauucuga

SEQ ID NO: 113070 - RNA, 13 nt, Human adenovirus E
augcaauucugac

SEQ ID NO: 113071 - RNA, 14 nt, Human adenovirus E
augaucucacgggu

SEQ ID NO: 113072 - RNA, 13 nt, Human adenovirus E
augaaagucuuug

SEQ ID NO: 113073 - RNA, 18 nt, Human adenovirus E
aucgccguugucaaccac

SEQ ID NO: 113074 - RNA, 20 nt, Human adenovirus E
aucgccguugucaaccacug

SEQ ID NO: 113075 - RNA, 20 nt, Human adenovirus E
aucgucaucacccagcaguc

SEQ ID NO: 113076 - RNA, 14 nt, Human adenovirus E
aucgugaacauucu

SEQ ID NO: 113077 - RNA, 14 nt, Human adenovirus E
aucuaauacuacca

SEQ ID NO: 113078 - RNA, 16 nt, Human adenovirus E
aucuaauacuaccacc

SEQ ID NO: 113079 - RNA, 15 nt, Human adenovirus E
augaccacaaccaca

SEQ ID NO: 113080 - RNA, 18 nt, Human adenovirus E
augaaucagauguaucua

SEQ ID NO: 113081 - RNA, 16 nt, Human adenovirus E
augagggccagaauaa

SEQ ID NO: 113082 - RNA, 14 nt, Human adenovirus E
augaggugcaucuu

SEQ ID NO: 113083 - RNA, 12 nt, Human adenovirus E
aucauuaccucu

SEQ ID NO: 113084 - RNA, 14 nt, Human adenovirus E
aucccauacuccac

SEQ ID NO: 113085 - RNA, 15 nt, Human adenovirus E
aucccugcuugcauu

SEQ ID NO: 113086 - RNA, 16 nt, Human adenovirus E
aucccgaauaccacag

SEQ ID NO: 113087 - RNA, 16 nt, Human adenovirus E
auauugaugauuugag

SEQ ID NO: 113088 - RNA, 23 nt, Human adenovirus E
auauacggcccugcgguggugaa

SEQ ID NO: 113089 - RNA, 18 nt, Human adenovirus E
aggguguggagugcaaua

SEQ ID NO: 113090 - RNA, 20 nt, Human adenovirus E
aggguguggagugcaauaaa

SEQ ID NO: 113091 - RNA, 17 nt, Human adenovirus E
agggugguguauuccau

SEQ ID NO: 113092 - RNA, 19 nt, Human adenovirus E
agggguggggacugugagu

SEQ ID NO: 113093 - RNA, 16 nt, Human adenovirus E
aggugcaucuuggccu

SEQ ID NO: 113094 - RNA, 18 nt, Human adenovirus E
aggguuggcaugcagggu

SEQ ID NO: 113095 - RNA, 20 nt, Human adenovirus E
aggucuucgaguggucggga

SEQ ID NO: 113096 - RNA, 14 nt, Human adenovirus E
aggugggcuuggau

SEQ ID NO: 113097 - RNA, 17 nt, Human adenovirus E
aggaucacccggugcug

SEQ ID NO: 113098 - RNA, 18 nt, Human adenovirus E
aggaucacccggugcugc

SEQ ID NO: 113099 - RNA, 21 nt, Human adenovirus E
aggaucauccggggcugcaug

SEQ ID NO: 113100 - RNA, 21 nt, Human adenovirus E
aggcuggcggggaacgggaug

SEQ ID NO: 113101 - RNA, 18 nt, Human adenovirus E
agcaggugcagaccugug

SEQ ID NO: 113102 - RNA, 17 nt, Human adenovirus E
agcuguugagcugugag

SEQ ID NO: 113103 - RNA, 14 nt, Human adenovirus E
aggaaaggguggcu

SEQ ID NO: 113104 - RNA, 22 nt, Human adenovirus E
aguguuuuauugauucaacagu

SEQ ID NO: 113105 - RNA, 22 nt, Human adenovirus E
aguucugugcgaggauugcccu

SEQ ID NO: 113106 - RNA, 16 nt, Human adenovirus E
aguucgaaucauucaa

SEQ ID NO: 113107 - RNA, 15 nt, Human adenovirus E
aguugagagugcuga

SEQ ID NO: 113108 - RNA, 22 nt, Human adenovirus E
aguuauuuuuccuccacccucc

SEQ ID NO: 113109 - RNA, 14 nt, Human adenovirus E
auaauacuuucauu

SEQ ID NO: 113110 - RNA, 23 nt, Human adenovirus E
auaaacggagacgguuguugauu

SEQ ID NO: 113111 - RNA, 17 nt, Human adenovirus E
accaaggggugcaucca

SEQ ID NO: 113112 - RNA, 19 nt, Human adenovirus E
accaaggggugcauccacu

SEQ ID NO: 113113 - RNA, 17 nt, Human adenovirus E
acagccuugaacaucug

SEQ ID NO: 113114 - RNA, 20 nt, Human adenovirus E
acagccuugaacaucugaau

SEQ ID NO: 113115 - RNA, 17 nt, Human adenovirus E
acacacuuggaaacauc

SEQ ID NO: 113116 - RNA, 15 nt, Human adenovirus E
acaguuuuacaggau

SEQ ID NO: 113117 - RNA, 20 nt, Human adenovirus E
accuccuccccaugaacuaa

SEQ ID NO: 113118 - RNA, 18 nt, Human adenovirus E
accuccaccaacgccacc

SEQ ID NO: 113119 - RNA, 20 nt, Human adenovirus E
accucaccuggcuguuccag

SEQ ID NO: 113120 - RNA, 12 nt, Human adenovirus E
accucacagcuc

SEQ ID NO: 113121 - RNA, 18 nt, Human adenovirus E
accucugcucuaugcaau

SEQ ID NO: 113122 - RNA, 15 nt, Human adenovirus E
acccaccacaauuac

SEQ ID NO: 113123 - RNA, 15 nt, Human adenovirus E
accguacuacuuccg

SEQ ID NO: 113124 - RNA, 11 nt, Human adenovirus E
accgcgugcug

SEQ ID NO: 113125 - RNA, 22 nt, Human adenovirus E
accgcgugcuggacauggccag

SEQ ID NO: 113126 - RNA, 20 nt, Human adenovirus E
acgauuggacccaggccaug

SEQ ID NO: 113127 - RNA, 16 nt, Human adenovirus E
acggccgcgccucgga

SEQ ID NO: 113128 - RNA, 23 nt, Human adenovirus E
acuuguugguuagagccugagga

SEQ ID NO: 113129 - RNA, 22 nt, Human adenovirus E
acuuucacaagacuagacagcu

SEQ ID NO: 113130 - RNA, 19 nt, Human adenovirus E
agaaaauuacuauuuacac

SEQ ID NO: 113131 - RNA, 18 nt, Human adenovirus E
agaaacagugugguggca

SEQ ID NO: 113132 - RNA, 13 nt, Human adenovirus E
agaacaagucaag

SEQ ID NO: 113133 - RNA, 13 nt, Human adenovirus E
agaacaaggccau

SEQ ID NO: 113134 - RNA, 16 nt, Human adenovirus E
agaaacugaauuaugc

SEQ ID NO: 113135 - RNA, 23 nt, Human adenovirus E
agaacgugagaaucgaguacaau

SEQ ID NO: 113136 - RNA, 15 nt, Human adenovirus E
acuccucaauaucac

SEQ ID NO: 113137 - RNA, 22 nt, Human adenovirus E
acuccaccuccacccaccacaa

SEQ ID NO: 113138 - RNA, 22 nt, Human adenovirus E
acucuguggaaacaauaacaaa

SEQ ID NO: 113139 - RNA, 20 nt, Human adenovirus E
acugacugugggucugauga

SEQ ID NO: 113140 - RNA, 21 nt, Human adenovirus E
acugacugugggucugaugag

SEQ ID NO: 113141 - RNA, 13 nt, Human adenovirus E
acugaacucugug

SEQ ID NO: 113142 - RNA, 22 nt, Human adenovirus E
acugaucaagugcggaugggaa

SEQ ID NO: 113143 - RNA, 15 nt, Human adenovirus E
agaggugccaucucc

SEQ ID NO: 113144 - RNA, 20 nt, Human adenovirus E
agaggugggcuuggauguug

SEQ ID NO: 113145 - RNA, 22 nt, Human adenovirus E
agaggcaugaugagacuaauca

SEQ ID NO: 113146 - RNA, 12 nt, Human adenovirus E
agagacuaugua

SEQ ID NO: 113147 - RNA, 22 nt, Human adenovirus E
agagacuauguagguauguauu

SEQ ID NO: 113148 - RNA, 22 nt, Human adenovirus E
agacuaugaggccgagccacag

SEQ ID NO: 113149 - RNA, 15 nt, Human adenovirus E
agauuacuaagcuga

SEQ ID NO: 113150 - RNA, 23 nt, Human adenovirus E
agauuacuaagcugauaaauauc

SEQ ID NO: 113151 - RNA, 12 nt, Human adenovirus E
agauguaucuac

SEQ ID NO: 113152 - RNA, 23 nt, Human adenovirus E
agauguaucuacugaacucugug

SEQ ID NO: 113153 - RNA, 16 nt, Human adenovirus E
agcagccccaggccaa

SEQ ID NO: 113154 - RNA, 21 nt, Human adenovirus E
agcaccaacgugcagaccaac

SEQ ID NO: 113155 - RNA, 15 nt, Human adenovirus E
agcaagcaguacgau

SEQ ID NO: 113156 - RNA, 20 nt, Human adenovirus E
agcaaccucaggcacacgca

SEQ ID NO: 113157 - RNA, 14 nt, Human adenovirus E
agcaacugcaucau

SEQ ID NO: 113158 - RNA, 21 nt, Human adenovirus E
aaguaacuguuguugauccca

SEQ ID NO: 113159 - RNA, 15 nt, Human adenovirus E
aauaaagaucauauu

SEQ ID NO: 113160 - RNA, 20 nt, Human adenovirus E
aaggguuggcaugcagggug

SEQ ID NO: 113161 - RNA, 23 nt, Human adenovirus E
aagauguacggaggcgcucgcca

SEQ ID NO: 113162 - RNA, 15 nt, Human adenovirus E
aagcaacugcaucau

SEQ ID NO: 113163 - RNA, 13 nt, Human adenovirus E
aagcaagcuccag

SEQ ID NO: 113164 - RNA, 12 nt, Human adenovirus E
aaucauuugauu

SEQ ID NO: 113165 - RNA, 16 nt, Human adenovirus E
aauccaucaaccaguc

SEQ ID NO: 113166 - RNA, 15 nt, Human adenovirus E
aaucagauguaucua

SEQ ID NO: 113167 - RNA, 17 nt, Human adenovirus E
aaucagauguaucuacu

SEQ ID NO: 113168 - RNA, 21 nt, Human adenovirus E
aaucagauguaucuacugaac

SEQ ID NO: 113169 - RNA, 17 nt, Human adenovirus E
aaucacagaacugaacu

SEQ ID NO: 113170 - RNA, 21 nt, Human adenovirus E
aauaacugcucgaauccugua

SEQ ID NO: 113171 - RNA, 16 nt, Human adenovirus E
aauuccucaaaugcua

SEQ ID NO: 113172 - RNA, 23 nt, Human adenovirus E
aauuucaacaccgagcguuccaa

SEQ ID NO: 113173 - RNA, 13 nt, Human adenovirus E
aauuaacaauuau

SEQ ID NO: 113174 - RNA, 14 nt, Human adenovirus E
aauuaacaucacua

SEQ ID NO: 113175 - RNA, 19 nt, Human adenovirus E
aaugaccacaaccacaaaa

SEQ ID NO: 113176 - RNA, 14 nt, Human adenovirus E
acaaaauugcauca

SEQ ID NO: 113177 - RNA, 15 nt, Human adenovirus E
acaaaauugcaucau

SEQ ID NO: 113178 - RNA, 20 nt, Human adenovirus E
acaaccaaacuaaccuccac

SEQ ID NO: 113179 - RNA, 18 nt, Human adenovirus E
acaauuauauaugcaaug

SEQ ID NO: 113180 - RNA, 15 nt, Human adenovirus E
acaauuugagguuau

SEQ ID NO: 113181 - RNA, 19 nt, Human adenovirus E
acaauaacaagacucggaa

SEQ ID NO: 113182 - RNA, 13 nt, Human adenovirus E
acaauacaugccc

SEQ ID NO: 113183 - RNA, 15 nt, Human adenovirus E
acaagucaagacuug

SEQ ID NO: 113184 - RNA, 18 nt, Human adenovirus E
aagauacaaucauauuga

SEQ ID NO: 113185 - RNA, 21 nt, Human adenovirus E
aagauacaaucauauugauga

SEQ ID NO: 113186 - RNA, 21 nt, Human adenovirus E
aagaacccuggaaauuccuca

SEQ ID NO: 113187 - RNA, 18 nt, Human adenovirus E
aacugcgccgggugcuga

SEQ ID NO: 113188 - RNA, 15 nt, Human adenovirus E
aacugcucgaucucc

SEQ ID NO: 113189 - RNA, 14 nt, Human adenovirus E
aacugcaucaugac

SEQ ID NO: 113190 - RNA, 22 nt, Human adenovirus E
aacugacugugggucugaugag

SEQ ID NO: 113191 - RNA, 22 nt, Human adenovirus E
aacccuucccaccccacucugu

SEQ ID NO: 113192 - RNA, 21 nt, Human adenovirus E
aacccuuccuccccgggaccu

SEQ ID NO: 113193 - RNA, 20 nt, Human adenovirus E
aacagugugguggcaugagg

SEQ ID NO: 113194 - RNA, 21 nt, Human adenovirus E
aacgaccaucgccucuccuac

SEQ ID NO: 113195 - RNA, 22 nt, Human adenovirus E
aacgacgaagagcucaggguug

SEQ ID NO: 113196 - RNA, 23 nt, Human adenovirus E
aaauuacuauuuacacuggcacu

SEQ ID NO: 113197 - RNA, 16 nt, Human adenovirus E
aacaacaacagccacc

SEQ ID NO: 113198 - RNA, 11 nt, Human adenovirus E
aacaccacuuc

SEQ ID NO: 113199 - RNA, 18 nt, Human adenovirus E
aacaauuauauaugcaau

SEQ ID NO: 113200 - RNA, 19 nt, Human adenovirus E
aacaauuauauaugcaaug

SEQ ID NO: 113201 - RNA, 12 nt, Human adenovirus E
aacaaggccauc

SEQ ID NO: 113202 - RNA, 17 nt, Human adenovirus E
aaaucacccagucauag

SEQ ID NO: 113203 - RNA, 19 nt, Human adenovirus E
aaauaaucauuugauuuga

SEQ ID NO: 113204 - RNA, 18 nt, Human adenovirus E
aaauaaagaucauauuga

SEQ ID NO: 113205 - RNA, 14 nt, Human adenovirus E
aaaguuaaucaugg

SEQ ID NO: 113206 - RNA, 15 nt, Human adenovirus E
aaacgaccaucgccu

SEQ ID NO: 113207 - RNA, 22 nt, Human adenovirus E
aaagguccagaaaaagccacag

SEQ ID NO: 113208 - RNA, 17 nt, Human adenovirus E
uuugaaguacuccgaga

SEQ ID NO: 113209 - RNA, 23 nt, Human adenovirus E
uuuauaggguguggagugcaaua

SEQ ID NO: 113210 - RNA, 16 nt, Human adenovirus E
uuuccacccgcagaag

SEQ ID NO: 113211 - RNA, 14 nt, Human adenovirus E
aaccgcgugcugga

SEQ ID NO: 113212 - RNA, 13 nt, Human adenovirus E
aaccggugcugag

SEQ ID NO: 113213 - RNA, 17 nt, Human adenovirus E
aacuacagcaggcauuu

SEQ ID NO: 113214 - RNA, 18 nt, Human adenovirus E
aacugacugugggucuga

SEQ ID NO: 113215 - RNA, 10 nt, Human adenovirus E
aacuguugaa

SEQ ID NO: 113216 - RNA, 19 nt, Human adenovirus E
aacugcgccgggugcugac

SEQ ID NO: 113217 - RNA, 21 nt, Human adenovirus E
aacugcgccgggugcugacua

SEQ ID NO: 113218 - RNA, 12 nt, Human adenovirus E
aacugcaucaug

SEQ ID NO: 113219 - RNA, 18 nt, Human adenovirus E
aacccuggaaauuccuca

SEQ ID NO: 113220 - RNA, 20 nt, Human adenovirus E
aaguacaagauuacuaagcu

SEQ ID NO: 113221 - RNA, 12 nt, Human adenovirus E
aaguaccucacc

SEQ ID NO: 113222 - RNA, 22 nt, Human adenovirus E
aaguacgaaaauguccgaaagc

SEQ ID NO: 113223 - RNA, 16 nt, Human adenovirus E
aagaagaaagugaugu

SEQ ID NO: 113224 - RNA, 12 nt, Human adenovirus E
aagaaucugacu

SEQ ID NO: 113225 - RNA, 13 nt, Human adenovirus E
aagcggcuccuuu

SEQ ID NO: 113226 - RNA, 13 nt, Human adenovirus E
aaucagacaugca

SEQ ID NO: 113227 - RNA, 14 nt, Human adenovirus E
aaucagacaugcau

SEQ ID NO: 113228 - RNA, 21 nt, Human adenovirus E
aaguuucugugucugaaccca

SEQ ID NO: 113229 - RNA, 15 nt, Human adenovirus E
aauacaccacccucu

SEQ ID NO: 113230 - RNA, 21 nt, Human adenovirus E
aauuacuauuuacacuggcac

SEQ ID NO: 113231 - RNA, 14 nt, Human adenovirus E
aauuacucacacca

SEQ ID NO: 113232 - RNA, 14 nt, Human adenovirus E
aauuauauaugcaa

SEQ ID NO: 113233 - RNA, 14 nt, Human adenovirus E
aauugcaucaucug

SEQ ID NO: 113234 - RNA, 16 nt, Human adenovirus E
aauugcaucaucuggc

SEQ ID NO: 113235 - RNA, 14 nt, Human adenovirus E
aaucagauguaucu

SEQ ID NO: 113236 - RNA, 12 nt, Human adenovirus E
aauggcauucag

SEQ ID NO: 113237 - RNA, 21 nt, Human adenovirus E
uucaauguggaucugacuuaa

SEQ ID NO: 113238 - RNA, 17 nt, Human adenovirus E
uuccaagcgccgagacc

SEQ ID NO: 113239 - RNA, 15 nt, Human adenovirus E
uucuaucauuaccuc

SEQ ID NO: 113240 - RNA, 13 nt, Human adenovirus E
uucugccugguga

SEQ ID NO: 113241 - RNA, 20 nt, Human adenovirus E
uuccucaaaugcuaccgcca

SEQ ID NO: 113242 - RNA, 23 nt, Human adenovirus E
uuccugaacugcgccgggugcug

SEQ ID NO: 113243 - RNA, 17 nt, Human adenovirus E
uucgcucgggaucucgc

SEQ ID NO: 113244 - RNA, 15 nt, Human adenovirus E
uucgcuguccugcaa

SEQ ID NO: 113245 - RNA, 14 nt, Human adenovirus E
uucggacauggaau

SEQ ID NO: 113246 - RNA, 14 nt, Human adenovirus E
uucggaucuucagc

SEQ ID NO: 113247 - RNA, 19 nt, Human adenovirus E
uuaccucugcucuaugcaa

SEQ ID NO: 113248 - RNA, 14 nt, Human adenovirus E
uuaaucaugguucu

SEQ ID NO: 113249 - RNA, 23 nt, Human adenovirus E
uuauuaaagacauuuaacauaca

SEQ ID NO: 113250 - RNA, 21 nt, Human adenovirus E
uuaugccaagcuggcucugag

SEQ ID NO: 113251 - RNA, 13 nt, Human adenovirus E
uuaugacucaggg

SEQ ID NO: 113252 - RNA, 14 nt, Human adenovirus E
uuaaagacauuuaa

SEQ ID NO: 113253 - RNA, 16 nt, Human adenovirus E
ugggauacaguguuca

SEQ ID NO: 113254 - RNA, 17 nt, Human adenovirus E
ugggaucuucaucacuc

SEQ ID NO: 113255 - RNA, 21 nt, Human adenovirus E
uggcgggcggggcggugcugg

SEQ ID NO: 113256 - RNA, 16 nt, Human adenovirus E
uggcccgcuacaacag

SEQ ID NO: 113257 - RNA, 19 nt, Human adenovirus E
uggccaacaacaacgucaa

SEQ ID NO: 113258 - RNA, 16 nt, Human adenovirus E
uggagaugaugcugac

SEQ ID NO: 113259 - RNA, 20 nt, Human adenovirus E
ugggguucuuguccaugggg

SEQ ID NO: 113260 - RNA, 14 nt, Human adenovirus E
ugguacugaucuga

SEQ ID NO: 113261 - RNA, 16 nt, Human adenovirus E
uggguuccaccugggg

SEQ ID NO: 113262 - RNA, 19 nt, Human adenovirus E
uguagguauguauuaugga

SEQ ID NO: 113263 - RNA, 22 nt, Human adenovirus E
uguaucccacccugcaugccaa

SEQ ID NO: 113264 - RNA, 13 nt, Human adenovirus E
uguauuauggaac

SEQ ID NO: 113265 - RNA, 13 nt, Human adenovirus E
ugcgcgguacuga

SEQ ID NO: 113266 - RNA, 15 nt, Human adenovirus E
ugcuagaugcaacaa

SEQ ID NO: 113267 - RNA, 22 nt, Human adenovirus E
ugcuagaugcaacaacaacagc

SEQ ID NO: 113268 - RNA, 18 nt, Human adenovirus E
ugcuauuuuggaucugac

SEQ ID NO: 113269 - RNA, 22 nt, Human adenovirus E
ugcuguuuauuaaagacauuua

SEQ ID NO: 113270 - RNA, 18 nt, Human adenovirus E
uggacuuuuccaggguga

SEQ ID NO: 113271 - RNA, 16 nt, Human adenovirus E
uggacucugacgcucc

SEQ ID NO: 113272 - RNA, 20 nt, Human adenovirus E
uggacccaggccaugcaacg

SEQ ID NO: 113273 - RNA, 22 nt, Human adenovirus E
uggaccgcgaggacaacaccua

SEQ ID NO: 113274 - RNA, 22 nt, Human adenovirus E
ugccaacccuucccaccccacu

SEQ ID NO: 113275 - RNA, 15 nt, Human adenovirus E
ugccgcaagaucucu

SEQ ID NO: 113276 - RNA, 19 nt, Human adenovirus E
ugcaugccaacccuuccca

SEQ ID NO: 113277 - RNA, 20 nt, Human adenovirus E
ugcaugccaacccuucccac

SEQ ID NO: 113278 - RNA, 21 nt, Human adenovirus E
ugccugcuacaucucagggaa

SEQ ID NO: 113279 - RNA, 14 nt, Human adenovirus E
ugacuagagugagu

SEQ ID NO: 113280 - RNA, 14 nt, Human adenovirus E
ugcaggaacaugca

SEQ ID NO: 113281 - RNA, 18 nt, Human adenovirus E
ugcagcccgcgaacucuu

SEQ ID NO: 113282 - RNA, 14 nt, Human adenovirus E
ugcagaccugugug

SEQ ID NO: 113283 - RNA, 18 nt, Human adenovirus E
uaccaaggggugcaucca

SEQ ID NO: 113284 - RNA, 17 nt, Human adenovirus E
uaaugagaaaauuacua

SEQ ID NO: 113285 - RNA, 20 nt, Human adenovirus E
uagacagcagccccaggcca

SEQ ID NO: 113286 - RNA, 16 nt, Human adenovirus E
uagacagcugcuagag

SEQ ID NO: 113287 - RNA, 14 nt, Human adenovirus E
uagagacuauguag

SEQ ID NO: 113288 - RNA, 13 nt, Human adenovirus E
uagaucugcugca

SEQ ID NO: 113289 - RNA, 12 nt, Human adenovirus E
uagucuacaggg

SEQ ID NO: 113290 - RNA, 21 nt, Human adenovirus E
uagguguuuacaaaucuguug

SEQ ID NO: 113291 - RNA, 14 nt, Human adenovirus E
guuaucuggaagaa

SEQ ID NO: 113292 - RNA, 20 nt, Human adenovirus E
guuugcccgcgccacagaca

SEQ ID NO: 113293 - RNA, 15 nt, Human adenovirus E
uaaaauuaacaauua

SEQ ID NO: 113294 - RNA, 23 nt, Human adenovirus E
uaaaauuaacaauuauauaugca

SEQ ID NO: 113295 - RNA, 22 nt, Human adenovirus E
gucuccacguuccacacaguuu

SEQ ID NO: 113296 - RNA, 23 nt, Human adenovirus E
gucuccacguuccacacaguuuc

SEQ ID NO: 113297 - RNA, 14 nt, Human adenovirus E
gucuacagggccaa

SEQ ID NO: 113298 - RNA, 13 nt, Human adenovirus E
guuagugcucccc

SEQ ID NO: 113299 - RNA, 23 nt, Human adenovirus E
guguggaacguggagaccaaaag

SEQ ID NO: 113300 - RNA, 14 nt, Human adenovirus E
guguggagugcaau

SEQ ID NO: 113301 - RNA, 13 nt, Human adenovirus E
guggggacuguga

SEQ ID NO: 113302 - RNA, 16 nt, Human adenovirus E
guggggacugugagua

SEQ ID NO: 113303 - RNA, 16 nt, Human adenovirus E
gugggcguacaugcac

SEQ ID NO: 113304 - RNA, 22 nt, Human adenovirus E
gugcggggggagaggguggugu

SEQ ID NO: 113305 - RNA, 14 nt, Human adenovirus E
gugcgcgguacuga

SEQ ID NO: 113306 - RNA, 18 nt, Human adenovirus E
gugaaauaaagaucauau

SEQ ID NO: 113307 - RNA, 18 nt, Human adenovirus E
guggcccgcuacaacagc

SEQ ID NO: 113308 - RNA, 20 nt, Human adenovirus E
ucaaaugcuaccgccaaaaa

SEQ ID NO: 113309 - RNA, 15 nt, Human adenovirus E
ucaaauuauacacug

SEQ ID NO: 113310 - RNA, 14 nt, Human adenovirus E
uauuuuguguuuca

SEQ ID NO: 113311 - RNA, 21 nt, Human adenovirus E
uauuuuuccuccacccuccca

SEQ ID NO: 113312 - RNA, 15 nt, Human adenovirus E
uauaagcaggugcag

SEQ ID NO: 113313 - RNA, 16 nt, Human adenovirus E
ucacgguuaucuggaa

SEQ ID NO: 113314 - RNA, 15 nt, Human adenovirus E
ucagcccgauggcaa

SEQ ID NO: 113315 - RNA, 16 nt, Human adenovirus E
ucacagcucaacagcu

SEQ ID NO: 113316 - RNA, 18 nt, Human adenovirus E
ucacagcucaacagcuga

SEQ ID NO: 113317 - RNA, 19 nt, Human adenovirus E
ucacacauugaaaggucca

SEQ ID NO: 113318 - RNA, 17 nt, Human adenovirus E
ucaaguuucaaugugga

SEQ ID NO: 113319 - RNA, 19 nt, Human adenovirus E
ucaaguuucugugucugaa

SEQ ID NO: 113320 - RNA, 16 nt, Human adenovirus E
ucaaccagagggugau

SEQ ID NO: 113321 - RNA, 22 nt, Human adenovirus E
ucaaccagagggugauguggua

SEQ ID NO: 113322 - RNA, 19 nt, Human adenovirus E
uccagaaaaagccacagaa

SEQ ID NO: 113323 - RNA, 19 nt, Human adenovirus E
uccaacgacgaagagcuca

SEQ ID NO: 113324 - RNA, 23 nt, Human adenovirus E
uccaacgacgaagagcucagggu

SEQ ID NO: 113325 - RNA, 20 nt, Human adenovirus E
uccacgguggucgaugugau

SEQ ID NO: 113326 - RNA, 14 nt, Human adenovirus E
ucccgaauaccaca

SEQ ID NO: 113327 - RNA, 13 nt, Human adenovirus E
uccccgugcccug

SEQ ID NO: 113328 - RNA, 13 nt, Human adenovirus E
uccccggugcuga

SEQ ID NO: 113329 - RNA, 19 nt, Human adenovirus E
  unsure 7..7: n is a, c, g, or t
uccccgnuacuaacaacca

SEQ ID NO: 113330 - RNA, 13 nt, Human adenovirus E
uccgcaaaugcaa

SEQ ID NO: 113331 - RNA, 13 nt, Human adenovirus E
ucauauugaugau

SEQ ID NO: 113332 - RNA, 14 nt, Human adenovirus E
ucauauugaugaug

SEQ ID NO: 113333 - RNA, 18 nt, Human adenovirus E
ucaucaaguuucaaugug

SEQ ID NO: 113334 - RNA, 16 nt, Human adenovirus E
ucaguauuuauagggu

SEQ ID NO: 113335 - RNA, 18 nt, Human adenovirus E
ucauugccgucauucaug

SEQ ID NO: 113336 - RNA, 22 nt, Human adenovirus E
ucauugccgucauucauggaau

SEQ ID NO: 113337 - RNA, 12 nt, Human adenovirus E
ucauucauggaa

SEQ ID NO: 113338 - RNA, 14 nt, Human adenovirus E
ucauucauggaaug

SEQ ID NO: 113339 - RNA, 18 nt, Human adenovirus E
ucauggugggguucuugu

SEQ ID NO: 113340 - RNA, 19 nt, Human adenovirus E
ugacauccgcgcccaccga

SEQ ID NO: 113341 - RNA, 15 nt, Human adenovirus E
ugaauaauacuuuca

SEQ ID NO: 113342 - RNA, 14 nt, Human adenovirus E
ugaaguacuccgag

SEQ ID NO: 113343 - RNA, 21 nt, Human adenovirus E
ugaagauccuaggccuuuuaa

SEQ ID NO: 113344 - RNA, 21 nt, Human adenovirus E
ugaaucagauguaucuacuga

SEQ ID NO: 113345 - RNA, 16 nt, Human adenovirus E
ucuuggccuggaucuu

SEQ ID NO: 113346 - RNA, 13 nt, Human adenovirus E
ugaaagucuuugu

SEQ ID NO: 113347 - RNA, 22 nt, Human adenovirus E
ugaaauaaagauacaaucauau

SEQ ID NO: 113348 - RNA, 16 nt, Human adenovirus E
ugaaacuguguggaac

SEQ ID NO: 113349 - RNA, 16 nt, Human adenovirus E
ugaacucuguggaaac

SEQ ID NO: 113350 - RNA, 17 nt, Human adenovirus E
ugaacugcucgaucucc

SEQ ID NO: 113351 - RNA, 13 nt, Human adenovirus E
uccucaaaugcua

SEQ ID NO: 113352 - RNA, 14 nt, Human adenovirus E
ucggacauggaauu

SEQ ID NO: 113353 - RNA, 17 nt, Human adenovirus E
ucuaugcaauucugaca

SEQ ID NO: 113354 - RNA, 14 nt, Human adenovirus E
ucucuuaccugugg

SEQ ID NO: 113355 - RNA, 14 nt, Human adenovirus E
ucucuucgcugcau

SEQ ID NO: 113356 - RNA, 20 nt, Human adenovirus E
ucugacacuacagaaacuga

SEQ ID NO: 113357 - RNA, 13 nt, Human adenovirus E
ucugaaacugugu

SEQ ID NO: 113358 - RNA, 14 nt, Human adenovirus E
ucugauacuccuca

SEQ ID NO: 113359 - RNA, 15 nt, Human adenovirus E
ucugaucaagacccu

SEQ ID NO: 113360 - RNA, 16 nt, Human adenovirus E
ucugcucuaugcaauu

SEQ ID NO: 113361 - RNA, 15 nt, Human adenovirus E
ccguacuacuuccgc

SEQ ID NO: 113362 - RNA, 19 nt, Human adenovirus E
ccgugaauaauacuuucau

SEQ ID NO: 113363 - RNA, 20 nt, Human adenovirus E
ccuaugcaacccugagcucu

SEQ ID NO: 113364 - RNA, 13 nt, Human adenovirus E
ccugacacaccac

SEQ ID NO: 113365 - RNA, 21 nt, Human adenovirus E
ccugacacaccaccacagcaa

SEQ ID NO: 113366 - RNA, 18 nt, Human adenovirus E
ccucaccuggcuguucca

SEQ ID NO: 113367 - RNA, 12 nt, Human adenovirus E
ccucacagcuca

SEQ ID NO: 113368 - RNA, 19 nt, Human adenovirus E
ccgaguuugccuacuuuga

SEQ ID NO: 113369 - RNA, 20 nt, Human adenovirus E
ccgaagccuuuagacagcag

SEQ ID NO: 113370 - RNA, 15 nt, Human adenovirus E
ccgaaagcaacugca

SEQ ID NO: 113371 - RNA, 20 nt, Human adenovirus E
ccgaaagcaacugcaucaug

SEQ ID NO: 113372 - RNA, 18 nt, Human adenovirus E
cccacaagaaguaccuca

SEQ ID NO: 113373 - RNA, 11 nt, Human adenovirus E
cccacccaguc

SEQ ID NO: 113374 - RNA, 17 nt, Human adenovirus E
ccgcccaggacuacucc

SEQ ID NO: 113375 - RNA, 19 nt, Human adenovirus E
ccgcgugcuggacauggcc

SEQ ID NO: 113376 - RNA, 16 nt, Human adenovirus E
ccuugaacaucugaau

SEQ ID NO: 113377 - RNA, 20 nt, Human adenovirus E
ccuugaacaucugaaugcca

SEQ ID NO: 113378 - RNA, 18 nt, Human adenovirus E
ccuucugacucuguacug

SEQ ID NO: 113379 - RNA, 19 nt, Human adenovirus E
ccuucugacucuguacugc

SEQ ID NO: 113380 - RNA, 15 nt, Human adenovirus E
ccuggucggagucaa

SEQ ID NO: 113381 - RNA, 21 nt, Human adenovirus E
ccugguugcggcgcagggugg

SEQ ID NO: 113382 - RNA, 14 nt, Human adenovirus E
ccugggagggugga

SEQ ID NO: 113383 - RNA, 20 nt, Human adenovirus E
ccuggcuccgcgacacggca

SEQ ID NO: 113384 - RNA, 19 nt, Human adenovirus E
ccuggaggccguggugccc

SEQ ID NO: 113385 - RNA, 21 nt, Human adenovirus E
ccuggccaccgaggaccgcug

SEQ ID NO: 113386 - RNA, 19 nt, Human adenovirus E
ccuuguugcgcagggccag

SEQ ID NO: 113387 - RNA, 17 nt, Human adenovirus E
cgaaaccagauacuccu

SEQ ID NO: 113388 - RNA, 21 nt, Human adenovirus E
cgaagggggccucgacuccca

SEQ ID NO: 113389 - RNA, 13 nt, Human adenovirus E
cgaucauuuggug

SEQ ID NO: 113390 - RNA, 14 nt, Human adenovirus E
cgaggucacuccaa

SEQ ID NO: 113391 - RNA, 12 nt, Human adenovirus E
cgagcuccagcu

SEQ ID NO: 113392 - RNA, 13 nt, Human adenovirus E
cgagcuccagcuc

SEQ ID NO: 113393 - RNA, 14 nt, Human adenovirus E
cgaggacaauccuc

SEQ ID NO: 113394 - RNA, 15 nt, Human adenovirus E
cgagaacgugagaau

SEQ ID NO: 113395 - RNA, 20 nt, Human adenovirus E
cgagacuggcucgcucugaa

SEQ ID NO: 113396 - RNA, 18 nt, Human adenovirus E
cgaccuucuccuggacau

SEQ ID NO: 113397 - RNA, 22 nt, Human adenovirus E
ccagcggggaagaaucugacua

SEQ ID NO: 113398 - RNA, 12 nt, Human adenovirus E
ccacgcugugag

SEQ ID NO: 113399 - RNA, 14 nt, Human adenovirus E
ccaccugcuucgga

SEQ ID NO: 113400 - RNA, 21 nt, Human adenovirus E
ccacgguggucgaugugauca

SEQ ID NO: 113401 - RNA, 17 nt, Human adenovirus E
ccagucuuuguucuuca

SEQ ID NO: 113402 - RNA, 18 nt, Human adenovirus E
ccagugggcguacaugca

SEQ ID NO: 113403 - RNA, 19 nt, Human adenovirus E
ccaguguaagccccacaag

SEQ ID NO: 113404 - RNA, 15 nt, Human adenovirus E
ccacacucugaucaa

SEQ ID NO: 113405 - RNA, 14 nt, Human adenovirus E
ccacagaaguuuca

SEQ ID NO: 113406 - RNA, 15 nt, Human adenovirus E
ccacagacaccuacu

SEQ ID NO: 113407 - RNA, 19 nt, Human adenovirus E
ccacagaguggggugggaa

SEQ ID NO: 113408 - RNA, 22 nt, Human adenovirus E
cauuuuugcgcacaugugcgac

SEQ ID NO: 113409 - RNA, 15 nt, Human adenovirus E
ccaaaagcaugucca

SEQ ID NO: 113410 - RNA, 16 nt, Human adenovirus E
ccaccacaauuacuca

SEQ ID NO: 113411 - RNA, 14 nt, Human adenovirus E
aaaaucagacaugc

SEQ ID NO: 113412 - RNA, 19 nt, Human adenovirus E
caucacuagagacuaugua

SEQ ID NO: 113413 - RNA, 15 nt, Human adenovirus E
caucaaccagucuuu

SEQ ID NO: 113414 - RNA, 14 nt, Human adenovirus E
caggacuacuccac

SEQ ID NO: 113415 - RNA, 14 nt, Human adenovirus E
cauccggggcugca

SEQ ID NO: 113416 - RNA, 15 nt, Human adenovirus E
cauccacugcuccug

SEQ ID NO: 113417 - RNA, 15 nt, Human adenovirus E
cauuccacggugguc

SEQ ID NO: 113418 - RNA, 22 nt, Human adenovirus E
cauucagauguucaaggcugug

SEQ ID NO: 113419 - RNA, 20 nt, Human adenovirus E
caugaugagacuaaucacag

SEQ ID NO: 113420 - RNA, 23 nt, Human adenovirus E
cauggcgggcggggcggugcugg

SEQ ID NO: 113421 - RNA, 16 nt, Human adenovirus E
cugaucccgaauacca

SEQ ID NO: 113422 - RNA, 16 nt, Human adenovirus E
cugaucaagugcggau

SEQ ID NO: 113423 - RNA, 14 nt, Human adenovirus E
cugcagagccagcc

SEQ ID NO: 113424 - RNA, 15 nt, Human adenovirus E
cugaugagucgcaag

SEQ ID NO: 113425 - RNA, 16 nt, Human adenovirus E
cugcuucggaucuuca

SEQ ID NO: 113426 - RNA, 21 nt, Human adenovirus E
cugguacugcaggccccggcg

SEQ ID NO: 113427 - RNA, 20 nt, Human adenovirus E
cuggcucgcucugaaacugu

SEQ ID NO: 113428 - RNA, 16 nt, Human adenovirus E
cugaaggggaugucaa

SEQ ID NO: 113429 - RNA, 14 nt, Human adenovirus E
cucuugaaggucuc

SEQ ID NO: 113430 - RNA, 20 nt, Human adenovirus E
cucuugcuucuugcaagcca

SEQ ID NO: 113431 - RNA, 15 nt, Human adenovirus E
cuccuacgagcuccu

SEQ ID NO: 113432 - RNA, 13 nt, Human adenovirus E
cugacacaccacc

SEQ ID NO: 113433 - RNA, 17 nt, Human adenovirus E
cugacuaacucaggugu

SEQ ID NO: 113434 - RNA, 15 nt, Human adenovirus E
cugacuagagugagu

SEQ ID NO: 113435 - RNA, 22 nt, Human adenovirus E
cugaaucuaauacuaccaccca

SEQ ID NO: 113436 - RNA, 22 nt, Human adenovirus E
  unsure 12..12: n is a, c, g, or t
cugaauuaugcnaucuuaagaa

SEQ ID NO: 113437 - RNA, 17 nt, Human adenovirus E
cugauaaauaucagaaa

SEQ ID NO: 113438 - RNA, 20 nt, Human adenovirus E
cugaguccgggucuggugca

SEQ ID NO: 113439 - RNA, 22 nt, Human adenovirus E
cugagacacacuuggaaacauc

SEQ ID NO: 113440 - RNA, 13 nt, Human adenovirus E
cuugaaggucucc

SEQ ID NO: 113441 - RNA, 14 nt, Human adenovirus E
cuuccuguucuucc

SEQ ID NO: 113442 - RNA, 22 nt, Human adenovirus E
cuuccgcugcuucgcucgggau

SEQ ID NO: 113443 - RNA, 22 nt, Human adenovirus E
cuucgacaccuggaccacugcc

SEQ ID NO: 113444 - RNA, 18 nt, Human adenovirus E
cuugaggugaugucagua

SEQ ID NO: 113445 - RNA, 16 nt, Human adenovirus E
cuguccccggugcuga

SEQ ID NO: 113446 - RNA, 21 nt, Human adenovirus E
cgggaugcgucgccaccacca

SEQ ID NO: 113447 - RNA, 15 nt, Human adenovirus E
cgggccggccgucca

SEQ ID NO: 113448 - RNA, 17 nt, Human adenovirus E
cgggcccgcgaugaucu

SEQ ID NO: 113449 - RNA, 19 nt, Human adenovirus E
cgggcccgcgaugaucuca

SEQ ID NO: 113450 - RNA, 13 nt, Human adenovirus E
cggggcggugcug

SEQ ID NO: 113451 - RNA, 14 nt, Human adenovirus E
cggaucaaauuaua

SEQ ID NO: 113452 - RNA, 16 nt, Human adenovirus E
cggaggguuucaucuc

SEQ ID NO: 113453 - RNA, 13 nt, Human adenovirus E
cggcgcagggugg

SEQ ID NO: 113454 - RNA, 15 nt, Human adenovirus E
cgguggccauccacc

SEQ ID NO: 113455 - RNA, 14 nt, Human adenovirus E
cgguuaucuggaag

SEQ ID NO: 113456 - RNA, 14 nt, Human adenovirus E
cggugggagcgaaa

SEQ ID NO: 113457 - RNA, 22 nt, Human adenovirus E
cuaacaaccaaacuaaccucca

SEQ ID NO: 113458 - RNA, 14 nt, Human adenovirus E
cuaauacuaccacc

SEQ ID NO: 113459 - RNA, 15 nt, Human adenovirus E
cuaauacuaccaccc

SEQ ID NO: 113460 - RNA, 13 nt, Human adenovirus E
cuaaucacagaac

SEQ ID NO: 113461 - RNA, 16 nt, Human adenovirus E
cuaaucacagaacuga

SEQ ID NO: 113462 - RNA, 11 nt, Human adenovirus E
cuacaacagca

SEQ ID NO: 113463 - RNA, 12 nt, Human adenovirus E
cuacugaacucu

SEQ ID NO: 113464 - RNA, 15 nt, Human adenovirus E
cuagaaugaccacaa

SEQ ID NO: 113465 - RNA, 19 nt, Human adenovirus E
cuagaaugaccacaaccac

SEQ ID NO: 113466 - RNA, 20 nt, Human adenovirus E
cuagaugcaacaacaacagc

SEQ ID NO: 113467 - RNA, 21 nt, Human adenovirus E
cucagaugcauguguaacaug

SEQ ID NO: 113468 - RNA, 14 nt, Human adenovirus E
cuccaaacgaccau

SEQ ID NO: 113469 - RNA, 20 nt, Human adenovirus E
cuaugcaauucugacaauga

SEQ ID NO: 113470 - RNA, 13 nt, Human adenovirus E
cucaaaugcuacc

SEQ ID NO: 113471 - RNA, 18 nt, Human adenovirus E
cuaugaggccgagccaca

SEQ ID NO: 113472 - RNA, 16 nt, Human adenovirus E
gaugcaacaacaacag

SEQ ID NO: 113473 - RNA, 13 nt, Human adenovirus E
gauggaagacauc

SEQ ID NO: 113474 - RNA, 18 nt, Human adenovirus E
gauacaguguucauucuu

SEQ ID NO: 113475 - RNA, 20 nt, Human adenovirus E
gauaccaaggggugcaucca

SEQ ID NO: 113476 - RNA, 21 nt, Human adenovirus E
gauacaaucauauugaugauu

SEQ ID NO: 113477 - RNA, 22 nt, Human adenovirus E
gagguguacggggaugaugaua

SEQ ID NO: 113478 - RNA, 13 nt, Human adenovirus E
gaucugacacuac

SEQ ID NO: 113479 - RNA, 17 nt, Human adenovirus E
gaucugacacuacagaa

SEQ ID NO: 113480 - RNA, 22 nt, Human adenovirus E
gaucuccuacgaggucacucca

SEQ ID NO: 113481 - RNA, 17 nt, Human adenovirus E
gaucuccuccucuugaa

SEQ ID NO: 113482 - RNA, 18 nt, Human adenovirus E
gauuggacccaggccaug

SEQ ID NO: 113483 - RNA, 22 nt, Human adenovirus E
gauuuuacuacuccuggcagaa

SEQ ID NO: 113484 - RNA, 20 nt, Human adenovirus E
gacucuguacugcaucugca

SEQ ID NO: 113485 - RNA, 22 nt, Human adenovirus E
gacuuaacccuaauuaacauca

SEQ ID NO: 113486 - RNA, 21 nt, Human adenovirus E
gacuagacagcugcuagagaa

SEQ ID NO: 113487 - RNA, 13 nt, Human adenovirus E
gacuagagugagu

SEQ ID NO: 113488 - RNA, 20 nt, Human adenovirus E
gacuaugaggccgagccaca

SEQ ID NO: 113489 - RNA, 19 nt, Human adenovirus E
aaauaucagaaaugccugc

SEQ ID NO: 113490 - RNA, 18 nt, Human adenovirus E
gagcuccagcuccagugu

SEQ ID NO: 113491 - RNA, 12 nt, Human adenovirus E
gagcuaccagcc

SEQ ID NO: 113492 - RNA, 15 nt, Human adenovirus E
gaggaccugcaugag

SEQ ID NO: 113493 - RNA, 18 nt, Human adenovirus E
gaggauguccaagcgcaa

SEQ ID NO: 113494 - RNA, 23 nt, Human adenovirus E
gaggcaugaugagacuaaucaca

SEQ ID NO: 113495 - RNA, 21 nt, Human adenovirus E
gagggugguguauuccauguc

SEQ ID NO: 113496 - RNA, 15 nt, Human adenovirus E
gagaacaaggccauc

SEQ ID NO: 113497 - RNA, 19 nt, Human adenovirus E
gagccgucaaggagcugca

SEQ ID NO: 113498 - RNA, 21 nt, Human adenovirus E
gagaggcaucuucugccuggu

SEQ ID NO: 113499 - RNA, 16 nt, Human adenovirus E
gagcgcggacccugca

SEQ ID NO: 113500 - RNA, 19 nt, Human adenovirus E
gagacuggcucgcucugaa

SEQ ID NO: 113501 - RNA, 15 nt, Human adenovirus E
gacccugccaucaca

SEQ ID NO: 113502 - RNA, 15 nt, Human adenovirus E
gacccgaucauuugg

SEQ ID NO: 113503 - RNA, 17 nt, Human adenovirus E
gaccuccuccccaugaa

SEQ ID NO: 113504 - RNA, 21 nt, Human adenovirus E
aaauaaagaucauauugauga

SEQ ID NO: 113505 - RNA, 19 nt, Human adenovirus E
gacagcgugguggcggacg

SEQ ID NO: 113506 - RNA, 13 nt, Human adenovirus E
aaacuaaccucca

SEQ ID NO: 113507 - RNA, 19 nt, Human adenovirus E
cuuguugguuagagccuga

SEQ ID NO: 113508 - RNA, 18 nt, Human adenovirus E
gaaccugacacaccacca

SEQ ID NO: 113509 - RNA, 12 nt, Human adenovirus E
gaacaaggccau

SEQ ID NO: 113510 - RNA, 19 nt, Human adenovirus E
gaacucgaguuggccacca

SEQ ID NO: 113511 - RNA, 19 nt, Human adenovirus E
gaacgagaccgagcuccag

SEQ ID NO: 113512 - RNA, 17 nt, Human adenovirus E
gaaguggagaucugucu

SEQ ID NO: 113513 - RNA, 12 nt, Human adenovirus E
aaacgaccaucg

SEQ ID NO: 113514 - RNA, 14 nt, Human adenovirus E
gaauaauacuuuca

SEQ ID NO: 113515 - RNA, 18 nt, Human adenovirus E
gaauacaccacccucucc

SEQ ID NO: 113516 - RNA, 18 nt, Human adenovirus E
gcccaguaauaacaccgg

SEQ ID NO: 113517 - RNA, 19 nt, Human adenovirus E
gccaucacaccuuccaccu

SEQ ID NO: 113518 - RNA, 13 nt, Human adenovirus E
gccaucagcagca

SEQ ID NO: 113519 - RNA, 22 nt, Human adenovirus E
gccaucaggcaugaugggaucu

SEQ ID NO: 113520 - RNA, 21 nt, Human adenovirus E
gccgcagcugcugcaucugcc

SEQ ID NO: 113521 - RNA, 19 nt, Human adenovirus E
gccgagccacagcgaccca

SEQ ID NO: 113522 - RNA, 20 nt, Human adenovirus E
gccguugucaaccacugcga

SEQ ID NO: 113523 - RNA, 15 nt, Human adenovirus E
gccugguguacaacg

SEQ ID NO: 113524 - RNA, 22 nt, Human adenovirus E
gccuccgcgaccuccuccccau

SEQ ID NO: 113525 - RNA, 17 nt, Human adenovirus E
gcauuacucucaucaag

SEQ ID NO: 113526 - RNA, 23 nt, Human adenovirus E
gcaugaugagacuaaucacagaa

SEQ ID NO: 113527 - RNA, 19 nt, Human adenovirus E
gcauguccaucaccaaugg

SEQ ID NO: 113528 - RNA, 16 nt, Human adenovirus E
gcauguguaacaugaa

SEQ ID NO: 113529 - RNA, 17 nt, Human adenovirus E
gccacagaaguuucaug

SEQ ID NO: 113530 - RNA, 15 nt, Human adenovirus E
gccacagacaccuac

SEQ ID NO: 113531 - RNA, 13 nt, Human adenovirus E
gcaacugcaucau

SEQ ID NO: 113532 - RNA, 16 nt, Human adenovirus E
gcaugagcauaugccu

SEQ ID NO: 113533 - RNA, 23 nt, Human adenovirus E
gcaugagcauaugccugugcugu

SEQ ID NO: 113534 - RNA, 13 nt, Human adenovirus E
gcaugagggccag

SEQ ID NO: 113535 - RNA, 23 nt, Human adenovirus E
gcaucugcaaccaccccggccug

SEQ ID NO: 113536 - RNA, 19 nt, Human adenovirus E
gcaucuucugccuggugaa

SEQ ID NO: 113537 - RNA, 14 nt, Human adenovirus E
gcaaauuccaagaa

SEQ ID NO: 113538 - RNA, 13 nt, Human adenovirus E
gcaacaacaacag

SEQ ID NO: 113539 - RNA, 14 nt, Human adenovirus E
gcuacaucucaggg

SEQ ID NO: 113540 - RNA, 15 nt, Human adenovirus E
gcuccuuugagggag

SEQ ID NO: 113541 - RNA, 14 nt, Human adenovirus E
gcuggacauggcca

SEQ ID NO: 113542 - RNA, 23 nt, Human adenovirus E
gcgcugguggagaacaaggccau

SEQ ID NO: 113543 - RNA, 22 nt, Human adenovirus E
gcgcguggcccgcuacaacagc

SEQ ID NO: 113544 - RNA, 22 nt, Human adenovirus E
gcgcuccuacgacgagguguac

SEQ ID NO: 113545 - RNA, 19 nt, Human adenovirus E
gcgugcuggacauggccag

SEQ ID NO: 113546 - RNA, 19 nt, Human adenovirus E
gcguggcccgcuacaacag

SEQ ID NO: 113547 - RNA, 22 nt, Human adenovirus E
gcggccgagcgcggacccugca

SEQ ID NO: 113548 - RNA, 20 nt, Human adenovirus E
  unsure 9..9: n is a, c, g, or t
gcggccgancgccugggcga

SEQ ID NO: 113549 - RNA, 18 nt, Human adenovirus E
gcggugcuggcccugugg

SEQ ID NO: 113550 - RNA, 23 nt, Human adenovirus E
gcgguggccauccaccagugcaa

SEQ ID NO: 113551 - RNA, 15 nt, Human adenovirus E
gcgggcggggcggug

SEQ ID NO: 113552 - RNA, 15 nt, Human adenovirus E
gcuucuugcaagcca

SEQ ID NO: 113553 - RNA, 21 nt, Human adenovirus E
gcuucucugguggaggaucac

SEQ ID NO: 113554 - RNA, 12 nt, Human adenovirus E
gcuggcccugug

SEQ ID NO: 113555 - RNA, 17 nt, Human adenovirus E
ggagaggcaugaugaga

SEQ ID NO: 113556 - RNA, 18 nt, Human adenovirus E
ggagaucugucuccagga

SEQ ID NO: 113557 - RNA, 17 nt, Human adenovirus E
ggacuuuuccaggguga

SEQ ID NO: 113558 - RNA, 23 nt, Human adenovirus E
ggagccuuguugcgcagggccag

SEQ ID NO: 113559 - RNA, 18 nt, Human adenovirus E
ggagcgacaucggcacca

SEQ ID NO: 113560 - RNA, 15 nt, Human adenovirus E
ggauacaguguucau

SEQ ID NO: 113561 - RNA, 19 nt, Human adenovirus E
ggaucauccggggcugcau

SEQ ID NO: 113562 - RNA, 14 nt, Human adenovirus E
ggaucacccggugc

SEQ ID NO: 113563 - RNA, 19 nt, Human adenovirus E
ggaucacccggugcugccu

SEQ ID NO: 113564 - RNA, 15 nt, Human adenovirus E
ggcccgcuacaacag

SEQ ID NO: 113565 - RNA, 12 nt, Human adenovirus E
ggcccugccaac

SEQ ID NO: 113566 - RNA, 16 nt, Human adenovirus E
ggcggcagaugcagca

SEQ ID NO: 113567 - RNA, 12 nt, Human adenovirus E
ggcgcagggugg

SEQ ID NO: 113568 - RNA, 14 nt, Human adenovirus E
ggguuucaucuccc

SEQ ID NO: 113569 - RNA, 13 nt, Human adenovirus E
gggacugugagua

SEQ ID NO: 113570 - RNA, 19 nt, Human adenovirus E
gguggccauccaccagugc

SEQ ID NO: 113571 - RNA, 21 nt, Human adenovirus E
gguggccauccaccagugcaa

SEQ ID NO: 113572 - RNA, 17 nt, Human adenovirus E
ggugggguucuugucca

SEQ ID NO: 113573 - RNA, 14 nt, Human adenovirus E
gguggacuuuucca

SEQ ID NO: 113574 - RNA, 14 nt, Human adenovirus E
ggucgaugugauca

SEQ ID NO: 113575 - RNA, 19 nt, Human adenovirus E
ggucauguggaugagcaag

SEQ ID NO: 113576 - RNA, 22 nt, Human adenovirus E
guaaugagaaaauuacuauuua

SEQ ID NO: 113577 - RNA, 23 nt, Human adenovirus E
guaaugagaaaauuacuauuuac

SEQ ID NO: 113578 - RNA, 17 nt, Human adenovirus E
gguguagguguuuacaa

SEQ ID NO: 113579 - RNA, 20 nt, Human adenovirus E
ggugcugagacccggcacca

SEQ ID NO: 113580 - RNA, 16 nt, Human adenovirus E
gguguggagugcaaua

SEQ ID NO: 113581 - RNA, 16 nt, Human adenovirus E
gguucgcuguccugca

SEQ ID NO: 113582 - RNA, 16 nt, Human adenovirus E
gguucugguacugcgc

SEQ ID NO: 113583 - RNA, 18 nt, Human adenovirus E
gguugcggcgcagggugg

SEQ ID NO: 113584 - RNA, 22 nt, Human adenovirus E
cccagcaagauguacggaggcg

SEQ ID NO: 113585 - RNA, 17 nt, Homo sapiens
ggcucccaugucaagag

SEQ ID NO: 113586 - RNA, 15 nt, Homo sapiens
gugcggcggucccag

SEQ ID NO: 113587 - RNA, 18 nt, Homo sapiens
cccaggggccggccagug

SEQ ID NO: 113588 - RNA, 23 nt, Homo sapiens
aggggugcggcggucccagcucc

SEQ ID NO: 113589 - RNA, 13 nt, Homo sapiens
cuggcucccaugu

SEQ ID NO: 113590 - RNA, 16 nt, Homo sapiens
uguccccugacagggc

SEQ ID NO: 113591 - RNA, 16 nt, Homo sapiens
gagucgcugugccaca

SEQ ID NO: 113592 - RNA, 13 nt, Homo sapiens
cggguugggucac

SEQ ID NO: 113593 - RNA, 15 nt, Homo sapiens
ggccgggcagggugu

SEQ ID NO: 113594 - RNA, 14 nt, Homo sapiens
uggggccaugccuc

SEQ ID NO: 113595 - RNA, 14 nt, Homo sapiens
guguggggccaugc

SEQ ID NO: 113596 - RNA, 17 nt, Homo sapiens
cccacgagggugccgug

SEQ ID NO: 113597 - RNA, 14 nt, Homo sapiens
gggccggccagugg

SEQ ID NO: 113598 - RNA, 13 nt, Homo sapiens
gguccuggugccc

SEQ ID NO: 113599 - RNA, 14 nt, Homo sapiens
ugucaagagucgcu

SEQ ID NO: 113600 - RNA, 15 nt, Homo sapiens
aucauuugacuaaga

SEQ ID NO: 113601 - RNA, 23 nt, Homo sapiens
ccacgggcccggguugggucacc

SEQ ID NO: 113602 - RNA, 16 nt, Homo sapiens
caugccuccucaggag

SEQ ID NO: 113603 - RNA, 17 nt, Homo sapiens
ccaggggccggccagug

SEQ ID NO: 113604 - RNA, 20 nt, Homo sapiens
uccccugacagggccagugc

SEQ ID NO: 113605 - RNA, 16 nt, Homo sapiens
agagucgcugugccac

SEQ ID NO: 113606 - RNA, 16 nt, Homo sapiens
caccccgagggcugag

SEQ ID NO: 113607 - RNA, 13 nt, Homo sapiens
ccacgagggugcc

SEQ ID NO: 113608 - RNA, 15 nt, Homo sapiens
cuggaugcccaggaa

SEQ ID NO: 113609 - RNA, 13 nt, Homo sapiens
accucgugccacc

SEQ ID NO: 113610 - RNA, 21 nt, Homo sapiens
ucauuugacuaagagucucca

SEQ ID NO: 113611 - RNA, 14 nt, Homo sapiens
gagucgcugugcca

SEQ ID NO: 113612 - RNA, 13 nt, Homo sapiens
ucgcugugccaca

SEQ ID NO: 113613 - RNA, 19 nt, Homo sapiens
gcccuggaugcccaggaau

SEQ ID NO: 113614 - RNA, 14 nt, Homo sapiens
uggccgggcagggu

SEQ ID NO: 113615 - RNA, 21 nt, Homo sapiens
agggaggcaggggaggggugc

SEQ ID NO: 113616 - RNA, 15 nt, Homo sapiens
gcgucgguccuggug

SEQ ID NO: 113617 - RNA, 16 nt, Homo sapiens
ccugcaggaccucgug

SEQ ID NO: 113618 - RNA, 22 nt, Homo sapiens
aagcccaggggccggccagugg

SEQ ID NO: 113619 - RNA, 20 nt, Homo sapiens
ccugacagggccagugcagu

SEQ ID NO: 113620 - RNA, 20 nt, Homo sapiens
agcccaggggccggccagug

SEQ ID NO: 113621 - RNA, 16 nt, Homo sapiens
cugacagggccagugc

SEQ ID NO: 113622 - RNA, 18 nt, Homo sapiens
gccaugccuccucaggag

SEQ ID NO: 113623 - RNA, 21 nt, Homo sapiens
uguccccugacagggccagug

SEQ ID NO: 113624 - RNA, 16 nt, Homo sapiens
ggucccacgagggugc

SEQ ID NO: 113625 - RNA, 13 nt, Homo sapiens
gagccugguccca

SEQ ID NO: 113626 - RNA, 19 nt, Homo sapiens
cccaggggccggccagugg

SEQ ID NO: 113627 - RNA, 15 nt, Homo sapiens
cugacagggccagug

SEQ ID NO: 113628 - RNA, 16 nt, Homo sapiens
aggggccggccagugg

SEQ ID NO: 113629 - RNA, 16 nt, Homo sapiens
cgucgguccuggugcc

SEQ ID NO: 113630 - RNA, 18 nt, Homo sapiens
caggggccggccaguggc

SEQ ID NO: 113631 - RNA, 13 nt, Homo sapiens
gggaggcagggga

SEQ ID NO: 113632 - RNA, 17 nt, Homo sapiens
gccugcaggaccucgug

SEQ ID NO: 113633 - RNA, 18 nt, Homo sapiens
cugagccuggucccacga

SEQ ID NO: 113634 - RNA, 19 nt, Homo sapiens
caguuugguguguccuccg

SEQ ID NO: 113635 - RNA, 20 nt, Homo sapiens
agugcaguuugguguguccu

SEQ ID NO: 113636 - RNA, 17 nt, Homo sapiens
acagggccagugcaguu

SEQ ID NO: 113637 - RNA, 22 nt, Homo sapiens
ccccaggagggaggcaggggag

SEQ ID NO: 113638 - RNA, 14 nt, Homo sapiens
ucgguccuggugcc

SEQ ID NO: 113639 - RNA, 19 nt, Homo sapiens
cugacagggccagugcagu

SEQ ID NO: 113640 - RNA, 12 nt, Homo sapiens
gggccaugccuc

SEQ ID NO: 113641 - RNA, 22 nt, Homo sapiens
auugguuuuccaaucauuugac

SEQ ID NO: 113642 - RNA, 16 nt, Homo sapiens
ccugacagggccagug

SEQ ID NO: 113643 - RNA, 17 nt, Homo sapiens
gcugagccuggucccac

SEQ ID NO: 113644 - RNA, 15 nt, Homo sapiens
ugacagggccagugc

SEQ ID NO: 113645 - RNA, 14 nt, Homo sapiens
gcaggggaggggug

SEQ ID NO: 113646 - RNA, 18 nt, Homo sapiens
gacagggccagugcaguu

SEQ ID NO: 113647 - RNA, 18 nt, Homo sapiens
gcccuggaugcccaggaa

SEQ ID NO: 113648 - RNA, 19 nt, Homo sapiens
uguccccugacagggccag

SEQ ID NO: 113649 - RNA, 14 nt, Homo sapiens
augucaagagucgc

SEQ ID NO: 113650 - RNA, 17 nt, Homo sapiens
auuugacuaagagucuc

SEQ ID NO: 113651 - RNA, 16 nt, Homo sapiens
acaggaccccagcucu

SEQ ID NO: 113652 - RNA, 21 nt, Homo sapiens
gccuggucccacgagggugcc

SEQ ID NO: 113653 - RNA, 19 nt, Homo sapiens
cucugcgucgguccuggug

SEQ ID NO: 113654 - RNA, 20 nt, Homo sapiens
gccgggcaggguguggggcc

SEQ ID NO: 113655 - RNA, 19 nt, Homo sapiens
auuuauggccgggcagggu

SEQ ID NO: 113656 - RNA, 15 nt, Homo sapiens
agucgcugugccaca

SEQ ID NO: 113657 - RNA, 12 nt, Homo sapiens
acagggccagug

SEQ ID NO: 113658 - RNA, 24 nt, Homo sapiens
ggcucccaugucaagagucgcugu

SEQ ID NO: 113659 - RNA, 17 nt, Homo sapiens
agagucgcugugccaca

SEQ ID NO: 113660 - RNA, 18 nt, Homo sapiens
gcucugcgucgguccugg

SEQ ID NO: 113661 - RNA, 17 nt, Homo sapiens
uccccugacagggccag

SEQ ID NO: 113662 - RNA, 23 nt, Homo sapiens
gguccugcagccugcaggaccuc

SEQ ID NO: 113663 - RNA, 16 nt, Homo sapiens
ccacgagggugccgug

SEQ ID NO: 113664 - RNA, 14 nt, Homo sapiens
gccuuaccaggaga

SEQ ID NO: 113665 - RNA, 19 nt, Homo sapiens
ugcaggaccucgugccacc

SEQ ID NO: 113666 - RNA, 14 nt, Homo sapiens
ugacagggccagug

SEQ ID NO: 113667 - RNA, 18 nt, Homo sapiens
cccugacagggccagugc

SEQ ID NO: 113668 - RNA, 22 nt, Homo sapiens
ggcuggagugugaggguccugc

SEQ ID NO: 113669 - RNA, 21 nt, Homo sapiens
cgggcaggguguggggccaug

SEQ ID NO: 113670 - RNA, 12 nt, Homo sapiens
ggccaguggccu

SEQ ID NO: 113671 - RNA, 19 nt, Homo sapiens
cugcagccugcaggaccuc

SEQ ID NO: 113672 - RNA, 23 nt, Homo sapiens
guguccccugacagggccagugc

SEQ ID NO: 113673 - RNA, 15 nt, Homo sapiens
ugacuaagagucucc

SEQ ID NO: 113674 - RNA, 17 nt, Homo sapiens
gacagggccagugcagu

SEQ ID NO: 113675 - RNA, 21 nt, Homo sapiens
agccuggucccacgagggugc

SEQ ID NO: 113676 - RNA, 21 nt, Homo sapiens
cccugacagggccagugcagu

SEQ ID NO: 113677 - RNA, 22 nt, Homo sapiens
uccccugacagggccagugcag

SEQ ID NO: 113678 - RNA, 13 nt, Homo sapiens
gggccagugcagu

SEQ ID NO: 113679 - RNA, 15 nt, Homo sapiens
ucccacgagggugcc

SEQ ID NO: 113680 - RNA, 15 nt, Homo sapiens
ggaccucgugccacc

SEQ ID NO: 113681 - RNA, 12 nt, Homo sapiens
cagggccagugc

SEQ ID NO: 113682 - RNA, 13 nt, Homo sapiens
ggaccucgugcca

SEQ ID NO: 113683 - RNA, 14 nt, Homo sapiens
caggggaggggugc

SEQ ID NO: 113684 - RNA, 13 nt, Homo sapiens
cccacgagggugc

SEQ ID NO: 113685 - RNA, 15 nt, Homo sapiens
cugcagccugcagga

SEQ ID NO: 113686 - RNA, 22 nt, Human adenovirus F
aaaaaguguagguaagagccau

SEQ ID NO: 113687 - RNA, 18 nt, Human adenovirus F
aaaagaaauccacuuacc

SEQ ID NO: 113688 - RNA, 14 nt, Human adenovirus F
aaaacggugaaaug

SEQ ID NO: 113689 - RNA, 18 nt, Human adenovirus F
aaaacccuuaacaaccuc

SEQ ID NO: 113690 - RNA, 19 nt, Human adenovirus F
aaaaccacuaaagcauuuc

SEQ ID NO: 113691 - RNA, 15 nt, Human adenovirus F
aaaaccagcauguca

SEQ ID NO: 113692 - RNA, 14 nt, Human adenovirus F
aaaaccaacaaaau

SEQ ID NO: 113693 - RNA, 14 nt, Human adenovirus F
aaaacucugugaag

SEQ ID NO: 113694 - RNA, 22 nt, Human adenovirus F
aaaacucugugaaguuaccaaa

SEQ ID NO: 113695 - RNA, 16 nt, Human adenovirus F
aaaagaaauccacuua

SEQ ID NO: 113696 - RNA, 16 nt, Human adenovirus F
aaccuucgcugcuuua

SEQ ID NO: 113697 - RNA, 16 nt, Human adenovirus F
aaccuugaguuuaaug

SEQ ID NO: 113698 - RNA, 20 nt, Human adenovirus F
aaccuuguauuuguauaauc

SEQ ID NO: 113699 - RNA, 21 nt, Human adenovirus F
aaccacgagguggcuacccuu

SEQ ID NO: 113700 - RNA, 14 nt, Human adenovirus F
aaccagcacacagg

SEQ ID NO: 113701 - RNA, 21 nt, Human adenovirus F
aacccaacagggacacgagcu

SEQ ID NO: 113702 - RNA, 18 nt, Human adenovirus F
aacgguuagaauucugua

SEQ ID NO: 113703 - RNA, 17 nt, Human adenovirus F
aacgcugugaguuuuga

SEQ ID NO: 113704 - RNA, 22 nt, Human adenovirus F
aacggcuugcaagaaaaaccuc

SEQ ID NO: 113705 - RNA, 19 nt, Human adenovirus F
aacgggcggcaaacuuucu

SEQ ID NO: 113706 - RNA, 23 nt, Human adenovirus F
aacgggcggcaaacuuucuccac

SEQ ID NO: 113707 - RNA, 22 nt, Human adenovirus F
aacagcacgguggaguccaaag

SEQ ID NO: 113708 - RNA, 22 nt, Human adenovirus F
aacagacaauuuugcaaacuau

SEQ ID NO: 113709 - RNA, 23 nt, Human adenovirus F
aacaaauacagucaagcucucca

SEQ ID NO: 113710 - RNA, 20 nt, Human adenovirus F
aaccaaaucaaucagcggcu

SEQ ID NO: 113711 - RNA, 20 nt, Human adenovirus F
aacauuugaauaugcauuau

SEQ ID NO: 113712 - RNA, 17 nt, Human adenovirus F
aaaauggagaucuuucu

SEQ ID NO: 113713 - RNA, 22 nt, Human adenovirus F
aaacucugugaaguuaccaaag

SEQ ID NO: 113714 - RNA, 23 nt, Human adenovirus F
aaacucugugaaguuaccaaaga

SEQ ID NO: 113715 - RNA, 17 nt, Human adenovirus F
aaacugcggacuaccua

SEQ ID NO: 113716 - RNA, 22 nt, Human adenovirus F
aaaaucguagguuuaaauuaca

SEQ ID NO: 113717 - RNA, 20 nt, Human adenovirus F
aaaaucugcugccaugccac

SEQ ID NO: 113718 - RNA, 15 nt, Human adenovirus F
aaaaugaugauuuau

SEQ ID NO: 113719 - RNA, 22 nt, Human adenovirus F
aaagauggaaaacgagggggag

SEQ ID NO: 113720 - RNA, 13 nt, Human adenovirus F
aaagagcuugaac

SEQ ID NO: 113721 - RNA, 19 nt, Human adenovirus F
aaagagaaagauggaaaac

SEQ ID NO: 113722 - RNA, 12 nt, Human adenovirus F
aaagaaaaccag

SEQ ID NO: 113723 - RNA, 13 nt, Human adenovirus F
aaacuugcuuucc

SEQ ID NO: 113724 - RNA, 14 nt, Human adenovirus F
aaacuugcuuucca

SEQ ID NO: 113725 - RNA, 16 nt, Human adenovirus F
aaacuugcuuuccacc

SEQ ID NO: 113726 - RNA, 17 nt, Human adenovirus F
aaacuuuuugaauuaca

SEQ ID NO: 113727 - RNA, 12 nt, Human adenovirus F
aaagcauuuccg

SEQ ID NO: 113728 - RNA, 17 nt, Human adenovirus F
aaagcauuuccgcagcu

SEQ ID NO: 113729 - RNA, 13 nt, Human adenovirus F
aaagcuuaccuua

SEQ ID NO: 113730 - RNA, 16 nt, Human adenovirus F
aaaggcaagacacuga

SEQ ID NO: 113731 - RNA, 19 nt, Human adenovirus F
aaaggcaagacacugagga

SEQ ID NO: 113732 - RNA, 18 nt, Human adenovirus F
aaaggcccauaccaaaga

SEQ ID NO: 113733 - RNA, 19 nt, Human adenovirus F
aaauaauccaaucguagca

SEQ ID NO: 113734 - RNA, 16 nt, Human adenovirus F
aaauaaugacuuuacc

SEQ ID NO: 113735 - RNA, 22 nt, Human adenovirus F
aaauacacugauccacuuacaa

SEQ ID NO: 113736 - RNA, 17 nt, Human adenovirus F
aaaugagcaacagggga

SEQ ID NO: 113737 - RNA, 14 nt, Human adenovirus F
aaaugaaaccuuca

SEQ ID NO: 113738 - RNA, 19 nt, Human adenovirus F
aaguccuggccaacugcca

SEQ ID NO: 113739 - RNA, 20 nt, Human adenovirus F
aaguccuggccaacugccac

SEQ ID NO: 113740 - RNA, 22 nt, Human adenovirus F
aaguccuggccaacugccaccu

SEQ ID NO: 113741 - RNA, 12 nt, Human adenovirus F
aaggccuggaac

SEQ ID NO: 113742 - RNA, 20 nt, Human adenovirus F
aaggcccauaccaaagagcu

SEQ ID NO: 113743 - RNA, 14 nt, Human adenovirus F
aaggaggaagcagg

SEQ ID NO: 113744 - RNA, 14 nt, Human adenovirus F
aaggaccaaaacuu

SEQ ID NO: 113745 - RNA, 14 nt, Human adenovirus F
aaguuaccaaagac

SEQ ID NO: 113746 - RNA, 20 nt, Human adenovirus F
aaguuuuuccagcagcacca

SEQ ID NO: 113747 - RNA, 20 nt, Human adenovirus F
aauacacugauccacuuaca

SEQ ID NO: 113748 - RNA, 20 nt, Human adenovirus F
aauacagucaagcucuccac

SEQ ID NO: 113749 - RNA, 22 nt, Human adenovirus F
aauaccggcuggggacuuugcu

SEQ ID NO: 113750 - RNA, 15 nt, Human adenovirus F
aagcauucuuuguca

SEQ ID NO: 113751 - RNA, 22 nt, Human adenovirus F
aagcauguaaaaacaugcagca

SEQ ID NO: 113752 - RNA, 23 nt, Human adenovirus F
aagcuacguugcgauacugcaaa

SEQ ID NO: 113753 - RNA, 19 nt, Human adenovirus F
aagcggguuaaaaagcgag

SEQ ID NO: 113754 - RNA, 16 nt, Human adenovirus F
aagcugaacuuuguua

SEQ ID NO: 113755 - RNA, 19 nt, Human adenovirus F
aagcugaacuuuguuauga

SEQ ID NO: 113756 - RNA, 13 nt, Human adenovirus F
aagcuuaccuuaa

SEQ ID NO: 113757 - RNA, 20 nt, Human adenovirus F
aagcuuaccuuaaauuugau

SEQ ID NO: 113758 - RNA, 14 nt, Human adenovirus F
aagaagguccaugg

SEQ ID NO: 113759 - RNA, 19 nt, Human adenovirus F
aagaagguccauggugggg

SEQ ID NO: 113760 - RNA, 18 nt, Human adenovirus F
aagcagguagaaugguuu

SEQ ID NO: 113761 - RNA, 16 nt, Human adenovirus F
aacuuuauggauguuu

SEQ ID NO: 113762 - RNA, 23 nt, Human adenovirus F
aaugggccuggcagcuggagcuu

SEQ ID NO: 113763 - RNA, 18 nt, Human adenovirus F
aaugguccgggguugagg

SEQ ID NO: 113764 - RNA, 16 nt, Human adenovirus F
aauggucuuacaugca

SEQ ID NO: 113765 - RNA, 16 nt, Human adenovirus F
aauccuaaauugcagu

SEQ ID NO: 113766 - RNA, 12 nt, Human adenovirus F
aauccuuuuugg

SEQ ID NO: 113767 - RNA, 15 nt, Human adenovirus F
aaucuaucccuugau

SEQ ID NO: 113768 - RNA, 17 nt, Human adenovirus F
aauuacgucauugacau

SEQ ID NO: 113769 - RNA, 18 nt, Human adenovirus F
aauuacauggcgccaguu

SEQ ID NO: 113770 - RNA, 23 nt, Human adenovirus F
aauguaaggcgggggguguagug

SEQ ID NO: 113771 - RNA, 22 nt, Human adenovirus F
aauuauucaagauugcagcuua

SEQ ID NO: 113772 - RNA, 15 nt, Human adenovirus F
aauuagggugauaca

SEQ ID NO: 113773 - RNA, 14 nt, Human adenovirus F
aauuuuuugaauca

SEQ ID NO: 113774 - RNA, 16 nt, Human adenovirus F
acaaaguccuggccaa

SEQ ID NO: 113775 - RNA, 18 nt, Human adenovirus F
acaaaguccuggccaacu

SEQ ID NO: 113776 - RNA, 20 nt, Human adenovirus F
acaaacuuuuugaauuacau

SEQ ID NO: 113777 - RNA, 14 nt, Human adenovirus F
agagcuacuuuccc

SEQ ID NO: 113778 - RNA, 15 nt, Human adenovirus F
agagccgagugacac

SEQ ID NO: 113779 - RNA, 14 nt, Human adenovirus F
agacgacgguguug

SEQ ID NO: 113780 - RNA, 19 nt, Human adenovirus F
agagccauagcaacagcgu

SEQ ID NO: 113781 - RNA, 16 nt, Human adenovirus F
agacauaucuugcaac

SEQ ID NO: 113782 - RNA, 18 nt, Human adenovirus F
acuuuuuuuguggccauu

SEQ ID NO: 113783 - RNA, 16 nt, Human adenovirus F
acuuuguuaugaugua

SEQ ID NO: 113784 - RNA, 22 nt, Human adenovirus F
acuuuguuaugauguaacccaa

SEQ ID NO: 113785 - RNA, 21 nt, Human adenovirus F
acuauucugggacgcucuuau

SEQ ID NO: 113786 - RNA, 22 nt, Human adenovirus F
acuaugguggggguuaagccca

SEQ ID NO: 113787 - RNA, 22 nt, Human adenovirus F
acucguucaguggcgcgcuaac

SEQ ID NO: 113788 - RNA, 13 nt, Human adenovirus F
acuguacugcuac

SEQ ID NO: 113789 - RNA, 16 nt, Human adenovirus F
acuguauaacuuaaga

SEQ ID NO: 113790 - RNA, 15 nt, Human adenovirus F
acuggauacuggcaa

SEQ ID NO: 113791 - RNA, 19 nt, Human adenovirus F
acuacaauccccuugacau

SEQ ID NO: 113792 - RNA, 21 nt, Human adenovirus F
acuacaauccccuugacauuc

SEQ ID NO: 113793 - RNA, 22 nt, Human adenovirus F
acuacaauccccuugacauucc

SEQ ID NO: 113794 - RNA, 17 nt, Human adenovirus F
acuagucuuagcuggau

SEQ ID NO: 113795 - RNA, 13 nt, Human adenovirus F
acuagcagugggc

SEQ ID NO: 113796 - RNA, 18 nt, Human adenovirus F
acguucucuccccacagc

SEQ ID NO: 113797 - RNA, 12 nt, Human adenovirus F
acuaaaaccaac

SEQ ID NO: 113798 - RNA, 15 nt, Human adenovirus F
acgccuccaccaccu

SEQ ID NO: 113799 - RNA, 14 nt, Human adenovirus F
acgcgcuuugcgca

SEQ ID NO: 113800 - RNA, 14 nt, Human adenovirus F
acgcaggagcucag

SEQ ID NO: 113801 - RNA, 15 nt, Human adenovirus F
accugggucucuuca

SEQ ID NO: 113802 - RNA, 20 nt, Human adenovirus F
accugggucucuucaaugua

SEQ ID NO: 113803 - RNA, 23 nt, Human adenovirus F
acccuaauuaaguccacccaaac

SEQ ID NO: 113804 - RNA, 24 nt, Human adenovirus F
acccuucugugccugucaugaaag

SEQ ID NO: 113805 - RNA, 22 nt, Human adenovirus F
acccggguuuaccugguggaca

SEQ ID NO: 113806 - RNA, 22 nt, Human adenovirus F
acccgcagcugcuuguaucaca

SEQ ID NO: 113807 - RNA, 17 nt, Human adenovirus F
accccgucuacccuuac

SEQ ID NO: 113808 - RNA, 14 nt, Human adenovirus F
accacggugguaca

SEQ ID NO: 113809 - RNA, 15 nt, Human adenovirus F
accacuaaagcauuu

SEQ ID NO: 113810 - RNA, 17 nt, Human adenovirus F
accacccggguuuaccu

SEQ ID NO: 113811 - RNA, 19 nt, Human adenovirus F
accacaguccuucugccac

SEQ ID NO: 113812 - RNA, 16 nt, Human adenovirus F
acaugaagaucugugu

SEQ ID NO: 113813 - RNA, 15 nt, Human adenovirus F
acagcuggaacucaa

SEQ ID NO: 113814 - RNA, 16 nt, Human adenovirus F
acaggggaugucaaaa

SEQ ID NO: 113815 - RNA, 23 nt, Human adenovirus F
acaguagagggugcucuuaacaa

SEQ ID NO: 113816 - RNA, 16 nt, Human adenovirus F
acagaaaccucuuccu

SEQ ID NO: 113817 - RNA, 13 nt, Human adenovirus F
acacuacaauccc

SEQ ID NO: 113818 - RNA, 21 nt, Human adenovirus F
acacuaugguaaaaacccugu

SEQ ID NO: 113819 - RNA, 21 nt, Human adenovirus F
acacugauccacuuacaacca

SEQ ID NO: 113820 - RNA, 13 nt, Human adenovirus F
acaccaaugcaaa

SEQ ID NO: 113821 - RNA, 14 nt, Human adenovirus F
acaaauacagucaa

SEQ ID NO: 113822 - RNA, 23 nt, Human adenovirus F
acaacaaaaucaggaacuguuca

SEQ ID NO: 113823 - RNA, 14 nt, Human adenovirus F
auaaauauugcucg

SEQ ID NO: 113824 - RNA, 18 nt, Human adenovirus F
agugaagaccaacugcag

SEQ ID NO: 113825 - RNA, 18 nt, Human adenovirus F
agucuuagcuggaucaaa

SEQ ID NO: 113826 - RNA, 23 nt, Human adenovirus F
auacgggguuagcgcacugguaa

SEQ ID NO: 113827 - RNA, 15 nt, Human adenovirus F
auacagucaagcucu

SEQ ID NO: 113828 - RNA, 17 nt, Human adenovirus F
auacacugucacuguau

SEQ ID NO: 113829 - RNA, 18 nt, Human adenovirus F
auccuaacaaaaacuuac

SEQ ID NO: 113830 - RNA, 13 nt, Human adenovirus F
auccacuuacaac

SEQ ID NO: 113831 - RNA, 17 nt, Human adenovirus F
auccacuuacaaccaaa

SEQ ID NO: 113832 - RNA, 20 nt, Human adenovirus F
aucugacaacccgucuuccc

SEQ ID NO: 113833 - RNA, 18 nt, Human adenovirus F
aucuccacgggcugagga

SEQ ID NO: 113834 - RNA, 18 nt, Human adenovirus F
aucagccgcaaaugggcc

SEQ ID NO: 113835 - RNA, 23 nt, Human adenovirus F
aucagaaccuccgacgcuugcug

SEQ ID NO: 113836 - RNA, 12 nt, Human adenovirus F
aucaauuuugcg

SEQ ID NO: 113837 - RNA, 14 nt, Human adenovirus F
auauggccauguua

SEQ ID NO: 113838 - RNA, 15 nt, Human adenovirus F
auauggccauguuag

SEQ ID NO: 113839 - RNA, 19 nt, Human adenovirus F
agccuuuguaacaacugua

SEQ ID NO: 113840 - RNA, 18 nt, Human adenovirus F
agccuucuauugcaugau

SEQ ID NO: 113841 - RNA, 11 nt, Human adenovirus F
agccugugauu

SEQ ID NO: 113842 - RNA, 22 nt, Human adenovirus F
agccugugauuucauuuaccac

SEQ ID NO: 113843 - RNA, 21 nt, Human adenovirus F
agccuguggaguggcauuaaa

SEQ ID NO: 113844 - RNA, 20 nt, Human adenovirus F
agcucagaaaacgcaucuuu

SEQ ID NO: 113845 - RNA, 20 nt, Human adenovirus F
agcuaaaggaccaaaacuuu

SEQ ID NO: 113846 - RNA, 22 nt, Human adenovirus F
agccaccuugucgguuacuucu

SEQ ID NO: 113847 - RNA, 20 nt, Human adenovirus F
agccgcggucaacagcugga

SEQ ID NO: 113848 - RNA, 19 nt, Human adenovirus F
aggucgcagcgacugacgc

SEQ ID NO: 113849 - RNA, 15 nt, Human adenovirus F
aguaccgcuccauca

SEQ ID NO: 113850 - RNA, 21 nt, Human adenovirus F
aguaccgcuccaucaagcccc

SEQ ID NO: 113851 - RNA, 14 nt, Human adenovirus F
aguacacugacccc

SEQ ID NO: 113852 - RNA, 17 nt, Human adenovirus F
aguacacugaccccauu

SEQ ID NO: 113853 - RNA, 13 nt, Human adenovirus F
agguaggaccacu

SEQ ID NO: 113854 - RNA, 17 nt, Human adenovirus F
agguaggaccacuggag

SEQ ID NO: 113855 - RNA, 15 nt, Human adenovirus F
agguauuaacaaauc

SEQ ID NO: 113856 - RNA, 20 nt, Human adenovirus F
aggggaaaucagaugcauuu

SEQ ID NO: 113857 - RNA, 13 nt, Human adenovirus F
agguaaaguggaa

SEQ ID NO: 113858 - RNA, 23 nt, Human adenovirus F
agguaaggguugucgaguuggca

SEQ ID NO: 113859 - RNA, 16 nt, Human adenovirus F
aguccuggccaacugc

SEQ ID NO: 113860 - RNA, 13 nt, Human adenovirus F
aguccuucugcca

SEQ ID NO: 113861 - RNA, 12 nt, Human adenovirus F
agucuaccacuu

SEQ ID NO: 113862 - RNA, 16 nt, Human adenovirus F
agucuaccacuucuau

SEQ ID NO: 113863 - RNA, 15 nt, Human adenovirus F
agcucugaacacuuu

SEQ ID NO: 113864 - RNA, 14 nt, Human adenovirus F
aggcuuaacacuga

SEQ ID NO: 113865 - RNA, 20 nt, Human adenovirus F
aggcgcaaucuucgcauuuc

SEQ ID NO: 113866 - RNA, 21 nt, Human adenovirus F
agggaagacggguugucagau

SEQ ID NO: 113867 - RNA, 14 nt, Human adenovirus F
aggcccauaccaaa

SEQ ID NO: 113868 - RNA, 16 nt, Human adenovirus F
aggcccauaccaaaga

SEQ ID NO: 113869 - RNA, 20 nt, Human adenovirus F
aggcagcagccccaggccaa

SEQ ID NO: 113870 - RNA, 18 nt, Human adenovirus F
caccucuguuugcugcac

SEQ ID NO: 113871 - RNA, 23 nt, Human adenovirus F
caccucuguuugcugcacugcca

SEQ ID NO: 113872 - RNA, 12 nt, Human adenovirus F
caccuugcaaaa

SEQ ID NO: 113873 - RNA, 17 nt, Human adenovirus F
cagaacgaccauaguaa

SEQ ID NO: 113874 - RNA, 13 nt, Human adenovirus F
cacugucacugua

SEQ ID NO: 113875 - RNA, 14 nt, Human adenovirus F
cacugucacuguau

SEQ ID NO: 113876 - RNA, 22 nt, Human adenovirus F
cagaaacaucguccaacagcac

SEQ ID NO: 113877 - RNA, 21 nt, Human adenovirus F
cacugacuuccugguccugac

SEQ ID NO: 113878 - RNA, 20 nt, Human adenovirus F
cacagacaggucgcagcgac

SEQ ID NO: 113879 - RNA, 14 nt, Human adenovirus F
caccccagcacuug

SEQ ID NO: 113880 - RNA, 21 nt, Human adenovirus F
caauggucuuacaugcacauc

SEQ ID NO: 113881 - RNA, 21 nt, Human adenovirus F
caaucuaucccuugauucuau

SEQ ID NO: 113882 - RNA, 15 nt, Human adenovirus F
caaguucaaagaaga

SEQ ID NO: 113883 - RNA, 17 nt, Human adenovirus F
caaguucaaagaagagc

SEQ ID NO: 113884 - RNA, 13 nt, Human adenovirus F
caauccuaacaaa

SEQ ID NO: 113885 - RNA, 17 nt, Human adenovirus F
caauccuaacaaaaacu

SEQ ID NO: 113886 - RNA, 20 nt, Human adenovirus F
caauccuaacaaaaacuuac

SEQ ID NO: 113887 - RNA, 19 nt, Human adenovirus F
caauauuuuauuguucugu

SEQ ID NO: 113888 - RNA, 13 nt, Human adenovirus F
caauaaaguugaa

SEQ ID NO: 113889 - RNA, 22 nt, Human adenovirus F
caaauugguuuaaaaugaugau

SEQ ID NO: 113890 - RNA, 22 nt, Human adenovirus F
caacaaaaucaggaacuguuca

SEQ ID NO: 113891 - RNA, 19 nt, Human adenovirus F
caaaauggacgaagacuga

SEQ ID NO: 113892 - RNA, 17 nt, Human adenovirus F
caaaaggucaggugcag

SEQ ID NO: 113893 - RNA, 21 nt, Human adenovirus F
caaaauaacgcgcuuacucuu

SEQ ID NO: 113894 - RNA, 13 nt, Human adenovirus F
auugccacccgcc

SEQ ID NO: 113895 - RNA, 14 nt, Human adenovirus F
auucugauggaguu

SEQ ID NO: 113896 - RNA, 22 nt, Human adenovirus F
auuugguaacaaggccuggaac

SEQ ID NO: 113897 - RNA, 15 nt, Human adenovirus F
auuuugaggaaaaug

SEQ ID NO: 113898 - RNA, 17 nt, Human adenovirus F
auuuuggcagacauauc

SEQ ID NO: 113899 - RNA, 17 nt, Human adenovirus F
auuugaagaugacuuca

SEQ ID NO: 113900 - RNA, 17 nt, Human adenovirus F
auuucuuuuuuccagau

SEQ ID NO: 113901 - RNA, 15 nt, Human adenovirus F
auggccuaaaaccac

SEQ ID NO: 113902 - RNA, 12 nt, Human adenovirus F
auggccauguua

SEQ ID NO: 113903 - RNA, 15 nt, Human adenovirus F
augggacuggugggc

SEQ ID NO: 113904 - RNA, 15 nt, Human adenovirus F
augggcuaaacaccc

SEQ ID NO: 113905 - RNA, 14 nt, Human adenovirus F
auggccacccccuc

SEQ ID NO: 113906 - RNA, 18 nt, Human adenovirus F
auggccagcaccuacuuu

SEQ ID NO: 113907 - RNA, 18 nt, Human adenovirus F
aucuucgugacuugcacu

SEQ ID NO: 113908 - RNA, 20 nt, Human adenovirus F
aucuucgugacuugcacuuu

SEQ ID NO: 113909 - RNA, 22 nt, Human adenovirus F
aucuucaucuugcagaugaaaa

SEQ ID NO: 113910 - RNA, 19 nt, Human adenovirus F
augucaaaacguucauuau

SEQ ID NO: 113911 - RNA, 16 nt, Human adenovirus F
augguaacuccucuuc

SEQ ID NO: 113912 - RNA, 19 nt, Human adenovirus F
augguaacuccucuucucc

SEQ ID NO: 113913 - RNA, 16 nt, Human adenovirus F
auggucuuacaugcac

SEQ ID NO: 113914 - RNA, 19 nt, Human adenovirus F
augguucacuguauaacuu

SEQ ID NO: 113915 - RNA, 13 nt, Human adenovirus F
auuaaaccugggu

SEQ ID NO: 113916 - RNA, 23 nt, Human adenovirus F
auguuggcggcccugcaaagcca

SEQ ID NO: 113917 - RNA, 20 nt, Human adenovirus F
auuaagccucgcgugcucaa

SEQ ID NO: 113918 - RNA, 15 nt, Human adenovirus F
auuaagguuacucag

SEQ ID NO: 113919 - RNA, 21 nt, Human adenovirus F
auuaaguugggagggaugcau

SEQ ID NO: 113920 - RNA, 15 nt, Human adenovirus F
auuaauaaagcuuac

SEQ ID NO: 113921 - RNA, 17 nt, Human adenovirus F
auuaaugggcaaagggg

SEQ ID NO: 113922 - RNA, 22 nt, Human adenovirus F
auuaaugggcaaagggggacaa

SEQ ID NO: 113923 - RNA, 12 nt, Human adenovirus F
auuaauguugau

SEQ ID NO: 113924 - RNA, 17 nt, Human adenovirus F
cucuguuugcugcacug

SEQ ID NO: 113925 - RNA, 20 nt, Human adenovirus F
cucuguuugcugcacugcca

SEQ ID NO: 113926 - RNA, 21 nt, Human adenovirus F
cucuguuugcugcacugccau

SEQ ID NO: 113927 - RNA, 19 nt, Human adenovirus F
cugauuuggaagaugaguu

SEQ ID NO: 113928 - RNA, 18 nt, Human adenovirus F
cucuuauuguucaaggaa

SEQ ID NO: 113929 - RNA, 19 nt, Human adenovirus F
cucuguuguagucugccaa

SEQ ID NO: 113930 - RNA, 16 nt, Human adenovirus F
cucugucuuauccucc

SEQ ID NO: 113931 - RNA, 20 nt, Human adenovirus F
cucugugaaguuaccaaaga

SEQ ID NO: 113932 - RNA, 19 nt, Human adenovirus F
cucugguagaaagcaaagc

SEQ ID NO: 113933 - RNA, 22 nt, Human adenovirus F
cucugguagaaagcaaagccau

SEQ ID NO: 113934 - RNA, 23 nt, Human adenovirus F
cucugguagaaagcaaagccauc

SEQ ID NO: 113935 - RNA, 15 nt, Human adenovirus F
cugccggggcaauau

SEQ ID NO: 113936 - RNA, 12 nt, Human adenovirus F
cugcacugccau

SEQ ID NO: 113937 - RNA, 21 nt, Human adenovirus F
cugcaaacgagaggaccacuu

SEQ ID NO: 113938 - RNA, 16 nt, Human adenovirus F
cuggacuauacacugu

SEQ ID NO: 113939 - RNA, 15 nt, Human adenovirus F
cugcuaccaacucac

SEQ ID NO: 113940 - RNA, 15 nt, Human adenovirus F
cugcuacuacuuuaa

SEQ ID NO: 113941 - RNA, 15 nt, Human adenovirus F
cugcuacucaacaga

SEQ ID NO: 113942 - RNA, 14 nt, Human adenovirus F
cugcgcugcuacuc

SEQ ID NO: 113943 - RNA, 20 nt, Human adenovirus F
cugcgcugcuacucaacaga

SEQ ID NO: 113944 - RNA, 17 nt, Human adenovirus F
cuguaaaaauacaugac

SEQ ID NO: 113945 - RNA, 17 nt, Human adenovirus F
cuguaaaaguaucaaua

SEQ ID NO: 113946 - RNA, 17 nt, Human adenovirus F
cuggcaagagccaccuu

SEQ ID NO: 113947 - RNA, 18 nt, Human adenovirus F
cugugaaguuaccaaaga

SEQ ID NO: 113948 - RNA, 21 nt, Human adenovirus F
cugugaaguuaccaaagacaa

SEQ ID NO: 113949 - RNA, 18 nt, Human adenovirus F
cugugauuucauuuacca

SEQ ID NO: 113950 - RNA, 12 nt, Human adenovirus F
cuguacugcuac

SEQ ID NO: 113951 - RNA, 14 nt, Human adenovirus F
cuguacugcuacua

SEQ ID NO: 113952 - RNA, 18 nt, Human adenovirus F
cugugcgcgagcuuuuaa

SEQ ID NO: 113953 - RNA, 18 nt, Human adenovirus F
cuguggaguggcauuaaa

SEQ ID NO: 113954 - RNA, 23 nt, Human adenovirus F
cuguggaguggcauuaaaaacuu

SEQ ID NO: 113955 - RNA, 21 nt, Human adenovirus F
cuguucaaccuucaagcccua

SEQ ID NO: 113956 - RNA, 18 nt, Human adenovirus F
cuguguggucuaagggaa

SEQ ID NO: 113957 - RNA, 23 nt, Human adenovirus F
cuguuuuuucccucuucccggua

SEQ ID NO: 113958 - RNA, 14 nt, Human adenovirus F
cuguuuuuaacuau

SEQ ID NO: 113959 - RNA, 19 nt, Human adenovirus F
cuguuguagucugccaacg

SEQ ID NO: 113960 - RNA, 13 nt, Human adenovirus F
cucgcucugcaaa

SEQ ID NO: 113961 - RNA, 18 nt, Human adenovirus F
cucgccucuguuguaguc

SEQ ID NO: 113962 - RNA, 23 nt, Human adenovirus F
cucgcaaacaauaaaagaaggcu

SEQ ID NO: 113963 - RNA, 17 nt, Human adenovirus F
cuccugcuugucugucu

SEQ ID NO: 113964 - RNA, 12 nt, Human adenovirus F
cuccugcaaguc

SEQ ID NO: 113965 - RNA, 14 nt, Human adenovirus F
cuccugcaagucaa

SEQ ID NO: 113966 - RNA, 16 nt, Human adenovirus F
cuccccguuaccuggg

SEQ ID NO: 113967 - RNA, 20 nt, Human adenovirus F
cucuacuauuaccgucaucu

SEQ ID NO: 113968 - RNA, 15 nt, Human adenovirus F
cucuaagacugucaa

SEQ ID NO: 113969 - RNA, 15 nt, Human adenovirus F
cucuccacggguucu

SEQ ID NO: 113970 - RNA, 17 nt, Human adenovirus F
cucuccacggguucucg

SEQ ID NO: 113971 - RNA, 11 nt, Human adenovirus F
cuauguagcuc

SEQ ID NO: 113972 - RNA, 17 nt, Human adenovirus F
cucaacucccagcauuc

SEQ ID NO: 113973 - RNA, 18 nt, Human adenovirus F
cucaacucccagcauucc

SEQ ID NO: 113974 - RNA, 13 nt, Human adenovirus F
cuauugacacugc

SEQ ID NO: 113975 - RNA, 14 nt, Human adenovirus F
cuauugcacuuaac

SEQ ID NO: 113976 - RNA, 17 nt, Human adenovirus F
cuauuacagguauaaag

SEQ ID NO: 113977 - RNA, 17 nt, Human adenovirus F
cuauuaccgucaucucu

SEQ ID NO: 113978 - RNA, 16 nt, Human adenovirus F
cucaggauuacuccag

SEQ ID NO: 113979 - RNA, 17 nt, Human adenovirus F
cuccagucgcaugaauu

SEQ ID NO: 113980 - RNA, 12 nt, Human adenovirus F
cucccaacuuuc

SEQ ID NO: 113981 - RNA, 13 nt, Human adenovirus F
cgcccgugccacc

SEQ ID NO: 113982 - RNA, 15 nt, Human adenovirus F
cgccaucaugagucu

SEQ ID NO: 113983 - RNA, 16 nt, Human adenovirus F
cgcauaacccuggaau

SEQ ID NO: 113984 - RNA, 15 nt, Human adenovirus F
ccuuaacaaccucgu

SEQ ID NO: 113985 - RNA, 19 nt, Human adenovirus F
cgcaauggucuuacaugca

SEQ ID NO: 113986 - RNA, 18 nt, Human adenovirus F
cgccucggaguaccugag

SEQ ID NO: 113987 - RNA, 14 nt, Human adenovirus F
aaacaggaagacaa

SEQ ID NO: 113988 - RNA, 19 nt, Human adenovirus F
aaacaggaagacaauccua

SEQ ID NO: 113989 - RNA, 17 nt, Human adenovirus F
aaaccacuaaagcauuu

SEQ ID NO: 113990 - RNA, 19 nt, Human adenovirus F
cgcuggccgugggcgacaa

SEQ ID NO: 113991 - RNA, 11 nt, Human adenovirus F
cgcuccauggg

SEQ ID NO: 113992 - RNA, 17 nt, Human adenovirus F
cuacaccaaugcaaaaa

SEQ ID NO: 113993 - RNA, 20 nt, Human adenovirus F
cuaccccuaugacaccuccu

SEQ ID NO: 113994 - RNA, 13 nt, Human adenovirus F
cguaccugcuacc

SEQ ID NO: 113995 - RNA, 16 nt, Human adenovirus F
cgucuacccuuacgaa

SEQ ID NO: 113996 - RNA, 12 nt, Human adenovirus F
cggucaacagcu

SEQ ID NO: 113997 - RNA, 19 nt, Human adenovirus F
cgguaagaagguccauggu

SEQ ID NO: 113998 - RNA, 14 nt, Human adenovirus F
cgcuuuacgcuggc

SEQ ID NO: 113999 - RNA, 18 nt, Human adenovirus F
cggaaggaaacgcuguga

SEQ ID NO: 114000 - RNA, 19 nt, Human adenovirus F
cggaagggcggaacagcau

SEQ ID NO: 114001 - RNA, 21 nt, Human adenovirus F
cggaagccgaaguccaaauga

SEQ ID NO: 114002 - RNA, 18 nt, Human adenovirus F
cagucucccaccuugaua

SEQ ID NO: 114003 - RNA, 17 nt, Human adenovirus F
caguccaaaaucugcug

SEQ ID NO: 114004 - RNA, 16 nt, Human adenovirus F
caggugggcuuggaug

SEQ ID NO: 114005 - RNA, 15 nt, Human adenovirus F
cagguuuaucaggaa

SEQ ID NO: 114006 - RNA, 16 nt, Human adenovirus F
caguaugguaacuccu

SEQ ID NO: 114007 - RNA, 15 nt, Human adenovirus F
cauuugaauaugcau

SEQ ID NO: 114008 - RNA, 13 nt, Human adenovirus F
cauuuauuacacc

SEQ ID NO: 114009 - RNA, 17 nt, Human adenovirus F
cauuaagaagacuguua

SEQ ID NO: 114010 - RNA, 18 nt, Human adenovirus F
cauuaaugggcaaagggg

SEQ ID NO: 114011 - RNA, 21 nt, Human adenovirus F
ccaacugcagcgcacgcugga

SEQ ID NO: 114012 - RNA, 14 nt, Human adenovirus F
ccaaagacaaaauc

SEQ ID NO: 114013 - RNA, 15 nt, Human adenovirus F
ccaaagacaaaauca

SEQ ID NO: 114014 - RNA, 20 nt, Human adenovirus F
ccaaagcagagcucugcaaa

SEQ ID NO: 114015 - RNA, 21 nt, Human adenovirus F
cauauacuuuaaacaagcaaa

SEQ ID NO: 114016 - RNA, 12 nt, Human adenovirus F
ccauaccaaaga

SEQ ID NO: 114017 - RNA, 13 nt, Human adenovirus F
ccauaccaaagag

SEQ ID NO: 114018 - RNA, 23 nt, Human adenovirus F
ccauaccaaagagcuugaacaua

SEQ ID NO: 114019 - RNA, 14 nt, Human adenovirus F
ccauagcaacagcg

SEQ ID NO: 114020 - RNA, 21 nt, Human adenovirus F
ccaucaguuauuagcuacuuu

SEQ ID NO: 114021 - RNA, 18 nt, Human adenovirus F
ccacuuuaccuuauacac

SEQ ID NO: 114022 - RNA, 20 nt, Human adenovirus F
ccacuuuaccuuauacaccu

SEQ ID NO: 114023 - RNA, 20 nt, Human adenovirus F
ccagaaaaaacccuuaacaa

SEQ ID NO: 114024 - RNA, 15 nt, Human adenovirus F
ccaggccuugcaaaa

SEQ ID NO: 114025 - RNA, 11 nt, Human adenovirus F
ccccaccggcu

SEQ ID NO: 114026 - RNA, 13 nt, Human adenovirus F
ccccaggccaacc

SEQ ID NO: 114027 - RNA, 23 nt, Human adenovirus F
ccccauuacuaccaaugcuaaac

SEQ ID NO: 114028 - RNA, 13 nt, Human adenovirus F
cccccacaugauu

SEQ ID NO: 114029 - RNA, 14 nt, Human adenovirus F
ccccuggggggcuu

SEQ ID NO: 114030 - RNA, 21 nt, Human adenovirus F
ccccuuccacuuuaccuuaua

SEQ ID NO: 114031 - RNA, 20 nt, Human adenovirus F
cccuacaccaaugcaaaaag

SEQ ID NO: 114032 - RNA, 14 nt, Human adenovirus F
cccgguagucaaaa

SEQ ID NO: 114033 - RNA, 18 nt, Human adenovirus F
ccugucuccgggguucca

SEQ ID NO: 114034 - RNA, 19 nt, Human adenovirus F
ccuguggaguggcauuaaa

SEQ ID NO: 114035 - RNA, 22 nt, Human adenovirus F
aaaauuauuugggaauuauuca

SEQ ID NO: 114036 - RNA, 18 nt, Human adenovirus F
ccugucaugaaaguuccu

SEQ ID NO: 114037 - RNA, 18 nt, Human adenovirus F
aaacaagcugaacuuugu

SEQ ID NO: 114038 - RNA, 18 nt, Human adenovirus F
ccucagccugaaauacac

SEQ ID NO: 114039 - RNA, 19 nt, Human adenovirus F
ccucagccugaaauacacu

SEQ ID NO: 114040 - RNA, 12 nt, Human adenovirus F
ccuccaccggcc

SEQ ID NO: 114041 - RNA, 20 nt, Human adenovirus F
ccguuuaugggcaccuggaa

SEQ ID NO: 114042 - RNA, 17 nt, Human adenovirus F
ccggaucgccaacagcc

SEQ ID NO: 114043 - RNA, 18 nt, Human adenovirus F
ccggagagcgguccguca

SEQ ID NO: 114044 - RNA, 14 nt, Human adenovirus F
cccuguguuuauuu

SEQ ID NO: 114045 - RNA, 20 nt, Human adenovirus F
cccuuacccgucuccugcaa

SEQ ID NO: 114046 - RNA, 22 nt, Human adenovirus F
cccuuacgaacacuacaauccc

SEQ ID NO: 114047 - RNA, 22 nt, Human adenovirus F
ggacuauacacugucacuguau

SEQ ID NO: 114048 - RNA, 14 nt, Human adenovirus F
ggccaguuuacaaa

SEQ ID NO: 114049 - RNA, 16 nt, Human adenovirus F
ggcccauaccaaagag

SEQ ID NO: 114050 - RNA, 19 nt, Human adenovirus F
ggccguuuaugggcaccug

SEQ ID NO: 114051 - RNA, 13 nt, Human adenovirus F
ggccaccacggga

SEQ ID NO: 114052 - RNA, 20 nt, Human adenovirus F
ggcagcagccccaggccaac

SEQ ID NO: 114053 - RNA, 13 nt, Human adenovirus F
ggccuugcaaaac

SEQ ID NO: 114054 - RNA, 20 nt, Human adenovirus F
ggccuugcaaaaccaaauca

SEQ ID NO: 114055 - RNA, 23 nt, Human adenovirus F
ggcugauuuggaagaugaguuua

SEQ ID NO: 114056 - RNA, 19 nt, Human adenovirus F
ggcuggcuuccggcauuaa

SEQ ID NO: 114057 - RNA, 20 nt, Human adenovirus F
gggauacuggauacuggcaa

SEQ ID NO: 114058 - RNA, 11 nt, Human adenovirus F
gggcaaagggg

SEQ ID NO: 114059 - RNA, 21 nt, Human adenovirus F
gggccuacggaagggcggaac

SEQ ID NO: 114060 - RNA, 16 nt, Human adenovirus F
gggccuggcagcugga

SEQ ID NO: 114061 - RNA, 20 nt, Human adenovirus F
gggcaguaccgcuccaucaa

SEQ ID NO: 114062 - RNA, 15 nt, Human adenovirus F
gggcgucaugcucug

SEQ ID NO: 114063 - RNA, 20 nt, Human adenovirus F
ggaaaggcccauaccaaaga

SEQ ID NO: 114064 - RNA, 17 nt, Human adenovirus F
ggaagacaauccuaaca

SEQ ID NO: 114065 - RNA, 20 nt, Human adenovirus F
gcuuucaguuggagcagccu

SEQ ID NO: 114066 - RNA, 14 nt, Human adenovirus F
gcuuuuaauuuaug

SEQ ID NO: 114067 - RNA, 12 nt, Human adenovirus F
gcuuaacacuga

SEQ ID NO: 114068 - RNA, 18 nt, Human adenovirus F
gcuguuugaacguuuaug

SEQ ID NO: 114069 - RNA, 19 nt, Human adenovirus F
gcuuuacuuaaaaagccug

SEQ ID NO: 114070 - RNA, 23 nt, Human adenovirus F
gcuuuacuuaaaaagccugugau

SEQ ID NO: 114071 - RNA, 21 nt, Human adenovirus F
gcuugcuuuuauuuguuuuau

SEQ ID NO: 114072 - RNA, 13 nt, Human adenovirus F
gcucuauuugcug

SEQ ID NO: 114073 - RNA, 21 nt, Human adenovirus F
gcucugguagaaagcaaagcc

SEQ ID NO: 114074 - RNA, 20 nt, Human adenovirus F
gcugugccacuauuaauguu

SEQ ID NO: 114075 - RNA, 23 nt, Human adenovirus F
gcugugccacuauuaauguugau

SEQ ID NO: 114076 - RNA, 20 nt, Human adenovirus F
gcugauuuggaagaugaguu

SEQ ID NO: 114077 - RNA, 14 nt, Human adenovirus F
gcugacuuaucuca

SEQ ID NO: 114078 - RNA, 16 nt, Human adenovirus F
gcugacuuaucucauc

SEQ ID NO: 114079 - RNA, 15 nt, Human adenovirus F
gcccggacacuauuu

SEQ ID NO: 114080 - RNA, 15 nt, Human adenovirus F
gccagccuccggugg

SEQ ID NO: 114081 - RNA, 19 nt, Human adenovirus F
gcccugcaaagccaaccuu

SEQ ID NO: 114082 - RNA, 20 nt, Human adenovirus F
gcccuuccucccaacuuucg

SEQ ID NO: 114083 - RNA, 23 nt, Human adenovirus F
gccuccguggccuugcaagcagc

SEQ ID NO: 114084 - RNA, 17 nt, Human adenovirus F
gccucggaguaccugag

SEQ ID NO: 114085 - RNA, 17 nt, Human adenovirus F
gccugaaauacacugau

SEQ ID NO: 114086 - RNA, 20 nt, Human adenovirus F
gccuggaacaguaacacagg

SEQ ID NO: 114087 - RNA, 15 nt, Human adenovirus F
gccuggaacccaaag

SEQ ID NO: 114088 - RNA, 18 nt, Human adenovirus F
gcgaaaacucaaacaaca

SEQ ID NO: 114089 - RNA, 15 nt, Human adenovirus F
gccuuuucugcugca

SEQ ID NO: 114090 - RNA, 13 nt, Human adenovirus F
gcaagauggccac

SEQ ID NO: 114091 - RNA, 14 nt, Human adenovirus F
gcaagcagcucgca

SEQ ID NO: 114092 - RNA, 17 nt, Human adenovirus F
gcaaucccgaagccuuc

SEQ ID NO: 114093 - RNA, 15 nt, Human adenovirus F
gcaacugcugagaca

SEQ ID NO: 114094 - RNA, 19 nt, Human adenovirus F
gauccacuuacaaccaaaa

SEQ ID NO: 114095 - RNA, 23 nt, Human adenovirus F
gcaccaacgugcaggccaaccua

SEQ ID NO: 114096 - RNA, 15 nt, Human adenovirus F
gcaccaccugcccuu

SEQ ID NO: 114097 - RNA, 19 nt, Human adenovirus F
gcaccaccugcccuuccuc

SEQ ID NO: 114098 - RNA, 15 nt, Human adenovirus F
gcaauggucuuacau

SEQ ID NO: 114099 - RNA, 22 nt, Human adenovirus F
gcaauggucuuacaugcacauc

SEQ ID NO: 114100 - RNA, 18 nt, Human adenovirus F
gcaauguugccaccgaga

SEQ ID NO: 114101 - RNA, 20 nt, Human adenovirus F
gcacacagggauacuggaua

SEQ ID NO: 114102 - RNA, 19 nt, Human adenovirus F
gcacucaaguacacugacc

SEQ ID NO: 114103 - RNA, 16 nt, Human adenovirus F
gcacugccaucugcag

SEQ ID NO: 114104 - RNA, 22 nt, Human adenovirus F
gcacugccggggcaauaucuca

SEQ ID NO: 114105 - RNA, 13 nt, Human adenovirus F
gcagagcucugca

SEQ ID NO: 114106 - RNA, 15 nt, Human adenovirus F
gcagagcucugcaaa

SEQ ID NO: 114107 - RNA, 22 nt, Human adenovirus F
gcagagcucugcaaaaacaaau

SEQ ID NO: 114108 - RNA, 19 nt, Human adenovirus F
gcagacgcggcagcagcug

SEQ ID NO: 114109 - RNA, 16 nt, Human adenovirus F
gcagacauaucuugca

SEQ ID NO: 114110 - RNA, 17 nt, Human adenovirus F
gcagacauaucuugcaa

SEQ ID NO: 114111 - RNA, 23 nt, Human adenovirus F
gcagacauaucuugcaacugcug

SEQ ID NO: 114112 - RNA, 15 nt, Human adenovirus F
gcagugcacugagca

SEQ ID NO: 114113 - RNA, 18 nt, Human adenovirus F
gcagguaggaccacugga

SEQ ID NO: 114114 - RNA, 14 nt, Human adenovirus F
gcaggguugcuaga

SEQ ID NO: 114115 - RNA, 15 nt, Human adenovirus F
gcaggagcucagaaa

SEQ ID NO: 114116 - RNA, 19 nt, Human adenovirus F
gcagcucgcaaacaauaaa

SEQ ID NO: 114117 - RNA, 19 nt, Human adenovirus F
gcagccccaggccaaccgc

SEQ ID NO: 114118 - RNA, 17 nt, Human adenovirus F
gagcaugaaacuggaag

SEQ ID NO: 114119 - RNA, 16 nt, Human adenovirus F
gagacagcuccuccaa

SEQ ID NO: 114120 - RNA, 23 nt, Human adenovirus F
gaguuccugcgcugcuacucaac

SEQ ID NO: 114121 - RNA, 17 nt, Human adenovirus F
gauaguacggccgugac

SEQ ID NO: 114122 - RNA, 16 nt, Human adenovirus F
gauagugugguggcca

SEQ ID NO: 114123 - RNA, 14 nt, Human adenovirus F
gaggaaaaugcuuu

SEQ ID NO: 114124 - RNA, 20 nt, Human adenovirus F
gagcuugaacauaacaccua

SEQ ID NO: 114125 - RNA, 13 nt, Human adenovirus F
gaguggcauuaaa

SEQ ID NO: 114126 - RNA, 17 nt, Human adenovirus F
gagucuaccacuucuau

SEQ ID NO: 114127 - RNA, 18 nt, Human adenovirus F
aacaaaaacuuacaauca

SEQ ID NO: 114128 - RNA, 18 nt, Human adenovirus F
gaccuuacuuucugggca

SEQ ID NO: 114129 - RNA, 19 nt, Human adenovirus F
gacgacugggcggcggcca

SEQ ID NO: 114130 - RNA, 20 nt, Human adenovirus F
gacgacugggcggcggccau

SEQ ID NO: 114131 - RNA, 12 nt, Human adenovirus F
gacgcagggugg

SEQ ID NO: 114132 - RNA, 20 nt, Human adenovirus F
gacgcacuccugcccaagag

SEQ ID NO: 114133 - RNA, 18 nt, Human adenovirus F
gacgauguuucugaaggu

SEQ ID NO: 114134 - RNA, 22 nt, Human adenovirus F
aaauugggcacgggacuaaaca

SEQ ID NO: 114135 - RNA, 17 nt, Human adenovirus F
aaaucaggaacuguuca

SEQ ID NO: 114136 - RNA, 13 nt, Human adenovirus F
aaauccacuuacc

SEQ ID NO: 114137 - RNA, 20 nt, Human adenovirus F
gacauuaugagcaaagacau

SEQ ID NO: 114138 - RNA, 16 nt, Human adenovirus F
gaaaggcccauaccaa

SEQ ID NO: 114139 - RNA, 19 nt, Human adenovirus F
gaaaggcccauaccaaaga

SEQ ID NO: 114140 - RNA, 20 nt, Human adenovirus F
gaaagggagguguauaaggu

SEQ ID NO: 114141 - RNA, 16 nt, Human adenovirus F
gaacuuccagcuguug

SEQ ID NO: 114142 - RNA, 19 nt, Human adenovirus F
gaagcugugcgcgagcuuu

SEQ ID NO: 114143 - RNA, 17 nt, Human adenovirus F
gaagagcuacuuucccu

SEQ ID NO: 114144 - RNA, 14 nt, Human adenovirus F
gaagaucuguguuc

SEQ ID NO: 114145 - RNA, 19 nt, Human adenovirus F
gaacuuuguuaugauguaa

SEQ ID NO: 114146 - RNA, 14 nt, Human adenovirus F
gaagacgacuucaa

SEQ ID NO: 114147 - RNA, 15 nt, Human adenovirus F
gaagacggguuguca

SEQ ID NO: 114148 - RNA, 17 nt, Human adenovirus F
gaagacaauccuaacaa

SEQ ID NO: 114149 - RNA, 22 nt, Human adenovirus F
gaagacaauccuaacaaaaacu

SEQ ID NO: 114150 - RNA, 21 nt, Human adenovirus F
aaacccaccgucuuccaccuc

SEQ ID NO: 114151 - RNA, 17 nt, Human adenovirus F
gaaugguuuuaguguua

SEQ ID NO: 114152 - RNA, 16 nt, Human adenovirus F
aaagacagagcuuuau

SEQ ID NO: 114153 - RNA, 17 nt, Human adenovirus F
aaagaaaaccagcaugu

SEQ ID NO: 114154 - RNA, 13 nt, Human adenovirus F
aaagcaaagccau

SEQ ID NO: 114155 - RNA, 22 nt, Human adenovirus F
cuuuuuugucugguuaaacaag

SEQ ID NO: 114156 - RNA, 14 nt, Human adenovirus F
cuuuuucauuggga

SEQ ID NO: 114157 - RNA, 20 nt, Human adenovirus F
gaaaagauauggccauguua

SEQ ID NO: 114158 - RNA, 18 nt, Human adenovirus F
gaaaauagccgccagccu

SEQ ID NO: 114159 - RNA, 15 nt, Human adenovirus F
gaaaaccagcauguc

SEQ ID NO: 114160 - RNA, 11 nt, Human adenovirus F
gaaaacucaaa

SEQ ID NO: 114161 - RNA, 20 nt, Human adenovirus F
gaaaaugcuuuugcuauguu

SEQ ID NO: 114162 - RNA, 16 nt, Human adenovirus F
gaaacuugcuuuccac

SEQ ID NO: 114163 - RNA, 15 nt, Human adenovirus F
gaaaccgccuacucu

SEQ ID NO: 114164 - RNA, 16 nt, Human adenovirus F
gaaaccuucagaaaca

SEQ ID NO: 114165 - RNA, 14 nt, Human adenovirus F
gaaacgagccagau

SEQ ID NO: 114166 - RNA, 14 nt, Human adenovirus F
gaaagcaaagccau

SEQ ID NO: 114167 - RNA, 22 nt, Human adenovirus F
cuuuguaacaacuguacugcua

SEQ ID NO: 114168 - RNA, 21 nt, Human adenovirus F
cuuuucggacgagcgccucaa

SEQ ID NO: 114169 - RNA, 22 nt, Human adenovirus F
cuuuucggacgagcgccucaaa

SEQ ID NO: 114170 - RNA, 13 nt, Human adenovirus F
cuuuucugcugca

SEQ ID NO: 114171 - RNA, 15 nt, Human adenovirus F
cuuuugccaaagugg

SEQ ID NO: 114172 - RNA, 19 nt, Human adenovirus F
cuuaauuagggugauacaa

SEQ ID NO: 114173 - RNA, 17 nt, Human adenovirus F
cuuacccgucuccugca

SEQ ID NO: 114174 - RNA, 21 nt, Human adenovirus F
cuuacccgucuccugcaaguc

SEQ ID NO: 114175 - RNA, 16 nt, Human adenovirus F
cuuacauguggagcua

SEQ ID NO: 114176 - RNA, 22 nt, Human adenovirus F
guacuagcagugggcaaagggg

SEQ ID NO: 114177 - RNA, 22 nt, Human adenovirus F
gggguuccaccaagcuccucau

SEQ ID NO: 114178 - RNA, 18 nt, Human adenovirus F
ggguacuagcagugggca

SEQ ID NO: 114179 - RNA, 14 nt, Human adenovirus F
guacugcuacuacu

SEQ ID NO: 114180 - RNA, 17 nt, Human adenovirus F
guagaaagcaaagccau

SEQ ID NO: 114181 - RNA, 17 nt, Human adenovirus F
guaggcccuagaccacc

SEQ ID NO: 114182 - RNA, 15 nt, Human adenovirus F
guagguaagagccau

SEQ ID NO: 114183 - RNA, 13 nt, Human adenovirus F
guagcuccgcccu

SEQ ID NO: 114184 - RNA, 20 nt, Human adenovirus F
guauaaucuuaaaacugacg

SEQ ID NO: 114185 - RNA, 17 nt, Human adenovirus F
guccaaaugacuaacuc

SEQ ID NO: 114186 - RNA, 19 nt, Human adenovirus F
gucagauaugggcuaaaca

SEQ ID NO: 114187 - RNA, 18 nt, Human adenovirus F
guaugcuauugacacugc

SEQ ID NO: 114188 - RNA, 14 nt, Human adenovirus F
guauuaaaccuggg

SEQ ID NO: 114189 - RNA, 20 nt, Human adenovirus F
gucaaguuuuuccagcagca

SEQ ID NO: 114190 - RNA, 17 nt, Human adenovirus F
guucaguggcgcgcuaa

SEQ ID NO: 114191 - RNA, 20 nt, Human adenovirus F
guuccugcgcugcuacucaa

SEQ ID NO: 114192 - RNA, 23 nt, Human adenovirus F
guucaccuuuuuacccugaccca

SEQ ID NO: 114193 - RNA, 12 nt, Human adenovirus F
guuaagcccauu

SEQ ID NO: 114194 - RNA, 12 nt, Human adenovirus F
guuaaacaagcu

SEQ ID NO: 114195 - RNA, 23 nt, Human adenovirus F
guggacuuaauuagggugauaca

SEQ ID NO: 114196 - RNA, 21 nt, Human adenovirus F
guguuugcugugccacuauua

SEQ ID NO: 114197 - RNA, 20 nt, Human adenovirus F
gugccaccgauaccuacuuc

SEQ ID NO: 114198 - RNA, 18 nt, Human adenovirus F
gugcccgcugaucugaac

SEQ ID NO: 114199 - RNA, 21 nt, Human adenovirus F
guggacaacaagucggcggac

SEQ ID NO: 114200 - RNA, 16 nt, Human adenovirus F
gucuuauccuccuuca

SEQ ID NO: 114201 - RNA, 21 nt, Human adenovirus F
gucuucccgccuugcugacuu

SEQ ID NO: 114202 - RNA, 17 nt, Human adenovirus F
guucuuugcuggcaaag

SEQ ID NO: 114203 - RNA, 19 nt, Human adenovirus F
guucuuuuuugugugcuaa

SEQ ID NO: 114204 - RNA, 15 nt, Human adenovirus F
guugauuuugucaca

SEQ ID NO: 114205 - RNA, 17 nt, Human adenovirus F
uaaaguugaaaauacaa

SEQ ID NO: 114206 - RNA, 14 nt, Human adenovirus F
uaaaccagcacaca

SEQ ID NO: 114207 - RNA, 18 nt, Human adenovirus F
uaacaaguagccuaagga

SEQ ID NO: 114208 - RNA, 22 nt, Human adenovirus F
uaaccuucgcugcuuuacuuaa

SEQ ID NO: 114209 - RNA, 20 nt, Human adenovirus F
uaacuaauguaaucuauaga

SEQ ID NO: 114210 - RNA, 13 nt, Human adenovirus F
uaagggaacuucu

SEQ ID NO: 114211 - RNA, 14 nt, Human adenovirus F
uaagggaacuucuc

SEQ ID NO: 114212 - RNA, 21 nt, Human adenovirus F
uaaggaggaggcuaauggcca

SEQ ID NO: 114213 - RNA, 20 nt, Human adenovirus F
uaagagguuuugaacgcugg

SEQ ID NO: 114214 - RNA, 21 nt, Human adenovirus F
uaagagguuuugaacgcugga

SEQ ID NO: 114215 - RNA, 22 nt, Human adenovirus F
uaagaccucauccgccauugcc

SEQ ID NO: 114216 - RNA, 14 nt, Human adenovirus F
uaagaaaaugagca

SEQ ID NO: 114217 - RNA, 19 nt, Human adenovirus F
uaccugguggacaacaagu

SEQ ID NO: 114218 - RNA, 21 nt, Human adenovirus F
uacgaaagcgugauggaaaca

SEQ ID NO: 114219 - RNA, 18 nt, Human adenovirus F
uacgaacacuacaauccc

SEQ ID NO: 114220 - RNA, 23 nt, Human adenovirus F
aacaacuguacugcuacuacuuu

SEQ ID NO: 114221 - RNA, 22 nt, Human adenovirus F
uaaguccacccaaacuguucaa

SEQ ID NO: 114222 - RNA, 13 nt, Human adenovirus F
uaauaaagcuuac

SEQ ID NO: 114223 - RNA, 12 nt, Human adenovirus F
uacaaccaaaaa

SEQ ID NO: 114224 - RNA, 15 nt, Human adenovirus F
uacaaccaaaaacgg

SEQ ID NO: 114225 - RNA, 12 nt, Human adenovirus F
uacaagauucca

SEQ ID NO: 114226 - RNA, 13 nt, Human adenovirus F
uacaguccaaaau

SEQ ID NO: 114227 - RNA, 18 nt, Human adenovirus F
uacaguccaaaaucugcu

SEQ ID NO: 114228 - RNA, 20 nt, Human adenovirus F
uacaguccaaaaucugcugc

SEQ ID NO: 114229 - RNA, 19 nt, Human adenovirus F
uacauaagaaaaugagcaa

SEQ ID NO: 114230 - RNA, 18 nt, Human adenovirus F
uauacacugucacuguau

SEQ ID NO: 114231 - RNA, 14 nt, Human adenovirus F
uauacauuugaaca

SEQ ID NO: 114232 - RNA, 16 nt, Human adenovirus F
uauacguaaaugugcc

SEQ ID NO: 114233 - RNA, 17 nt, Human adenovirus F
uacugcuacuacuuuaa

SEQ ID NO: 114234 - RNA, 16 nt, Human adenovirus F
uagaaagcaaagccau

SEQ ID NO: 114235 - RNA, 15 nt, Human adenovirus F
uauacuuuaaacaag

SEQ ID NO: 114236 - RNA, 16 nt, Human adenovirus F
uauacuuuaaacaagc

SEQ ID NO: 114237 - RNA, 17 nt, Human adenovirus F
uaugacaccuccucaac

SEQ ID NO: 114238 - RNA, 16 nt, Human adenovirus F
uaugggcaccuggaac

SEQ ID NO: 114239 - RNA, 21 nt, Human adenovirus F
uaugguggggguuaagcccau

SEQ ID NO: 114240 - RNA, 14 nt, Human adenovirus F
uaugguucacugua

SEQ ID NO: 114241 - RNA, 21 nt, Human adenovirus F
uaugcagacaagacauggaag

SEQ ID NO: 114242 - RNA, 21 nt, Human adenovirus F
uauccaccgacgauccaauag

SEQ ID NO: 114243 - RNA, 18 nt, Human adenovirus F
uaucacuaaaaccaacaa

SEQ ID NO: 114244 - RNA, 17 nt, Human adenovirus F
uaucaauaaaguugaaa

SEQ ID NO: 114245 - RNA, 14 nt, Human adenovirus F
uaucucaucuucac

SEQ ID NO: 114246 - RNA, 14 nt, Human adenovirus F
uaucucauucgcac

SEQ ID NO: 114247 - RNA, 13 nt, Human adenovirus F
ucaaacaugugac

SEQ ID NO: 114248 - RNA, 22 nt, Human adenovirus F
ucaaaccacggugguacaaaau

SEQ ID NO: 114249 - RNA, 18 nt, Human adenovirus F
ucacaaaguccuggccaa

SEQ ID NO: 114250 - RNA, 17 nt, Human adenovirus F
ucaggugcagaaauuuu

SEQ ID NO: 114251 - RNA, 21 nt, Human adenovirus F
ucaggcagcagccccaggcca

SEQ ID NO: 114252 - RNA, 13 nt, Human adenovirus F
ucaggaacuguuc

SEQ ID NO: 114253 - RNA, 18 nt, Human adenovirus F
ucagcuacaagauuccac

SEQ ID NO: 114254 - RNA, 15 nt, Human adenovirus F
ucaugaaaguuccuc

SEQ ID NO: 114255 - RNA, 17 nt, Human adenovirus F
uccaccaagcuccucau

SEQ ID NO: 114256 - RNA, 23 nt, Human adenovirus F
ucccacgccuuacauguggagcu

SEQ ID NO: 114257 - RNA, 22 nt, Human adenovirus F
ucccagcauucccuauguagcu

SEQ ID NO: 114258 - RNA, 21 nt, Human adenovirus F
uccaucauccacccacagcaa

SEQ ID NO: 114259 - RNA, 18 nt, Human adenovirus F
uccuuacgucagcuacaa

SEQ ID NO: 114260 - RNA, 18 nt, Human adenovirus F
uccugcuugucugucugc

SEQ ID NO: 114261 - RNA, 20 nt, Human adenovirus F
uccugcuugucugucugcca

SEQ ID NO: 114262 - RNA, 17 nt, Human adenovirus F
uccuggccaacugccac

SEQ ID NO: 114263 - RNA, 23 nt, Human adenovirus F
uccuggccguacgguuucugggc

SEQ ID NO: 114264 - RNA, 18 nt, Human adenovirus F
uccuggcgagcccauaaa

SEQ ID NO: 114265 - RNA, 20 nt, Human adenovirus F
uccucuucucugucuuaucc

SEQ ID NO: 114266 - RNA, 23 nt, Human adenovirus F
uccucuucucugucuuauccucc

SEQ ID NO: 114267 - RNA, 12 nt, Human adenovirus F
uccucccaacaa

SEQ ID NO: 114268 - RNA, 16 nt, Human adenovirus F
uccgacgcuguaugcu

SEQ ID NO: 114269 - RNA, 17 nt, Human adenovirus F
ucccuuucccccuguac

SEQ ID NO: 114270 - RNA, 22 nt, Human adenovirus F
uccuugcucggcgaaaacucaa

SEQ ID NO: 114271 - RNA, 18 nt, Human adenovirus F
uccuuuuggcuguacucc

SEQ ID NO: 114272 - RNA, 23 nt, Human adenovirus F
ucguuuaaaacuuuauggauguu

SEQ ID NO: 114273 - RNA, 15 nt, Human adenovirus F
ucggccuacugccgc

SEQ ID NO: 114274 - RNA, 19 nt, Human adenovirus F
ucggcaccagccagcucaa

SEQ ID NO: 114275 - RNA, 18 nt, Human adenovirus F
ucgggcgugacacccuca

SEQ ID NO: 114276 - RNA, 17 nt, Human adenovirus F
ucgccguaggagaggca

SEQ ID NO: 114277 - RNA, 18 nt, Human adenovirus F
ucgcauccuggcccuaac

SEQ ID NO: 114278 - RNA, 18 nt, Human adenovirus F
ucgcaucuuuuuugacuu

SEQ ID NO: 114279 - RNA, 16 nt, Human adenovirus F
ucuggaaucagcaucu

SEQ ID NO: 114280 - RNA, 22 nt, Human adenovirus F
ucugguagaaagcaaagccauc

SEQ ID NO: 114281 - RNA, 16 nt, Human adenovirus F
ucuuauccuccuucac

SEQ ID NO: 114282 - RNA, 17 nt, Human adenovirus F
ucuuauccuccuucaca

SEQ ID NO: 114283 - RNA, 16 nt, Human adenovirus F
ucuccacguccuaaag

SEQ ID NO: 114284 - RNA, 21 nt, Human adenovirus F
ucucgucgccaucaugagucu

SEQ ID NO: 114285 - RNA, 16 nt, Human adenovirus F
ucucucccuccaccuc

SEQ ID NO: 114286 - RNA, 16 nt, Human adenovirus F
uugaguuuaaugucuc

SEQ ID NO: 114287 - RNA, 21 nt, Human adenovirus F
uugauuuuaaucaaauuguaa

SEQ ID NO: 114288 - RNA, 14 nt, Human adenovirus F
uugacuuggcugua

SEQ ID NO: 114289 - RNA, 18 nt, Human adenovirus F
uugacuuggcuguaauuu

SEQ ID NO: 114290 - RNA, 18 nt, Human adenovirus F
uucaccuuuuuacccuga

SEQ ID NO: 114291 - RNA, 22 nt, Human adenovirus F
uugaaucaauaaaagcuuuuau

SEQ ID NO: 114292 - RNA, 14 nt, Human adenovirus F
uugccacaauggaa

SEQ ID NO: 114293 - RNA, 20 nt, Human adenovirus F
uugcagaugaaaagaaccag

SEQ ID NO: 114294 - RNA, 22 nt, Human adenovirus F
uugcaacugcugagacagcucc

SEQ ID NO: 114295 - RNA, 15 nt, Human adenovirus F
aacagaaaccucuuc

SEQ ID NO: 114296 - RNA, 20 nt, Human adenovirus F
uugcaagauggccacccccu

SEQ ID NO: 114297 - RNA, 22 nt, Human adenovirus F
uugcgccaggaaacgguacaac

SEQ ID NO: 114298 - RNA, 15 nt, Human adenovirus F
uugcugacuuaucuc

SEQ ID NO: 114299 - RNA, 15 nt, Human adenovirus F
uugcugcacugccau

SEQ ID NO: 114300 - RNA, 22 nt, Human adenovirus F
uugcucggcgaaaacucaaaca

SEQ ID NO: 114301 - RNA, 15 nt, Human adenovirus F
aacaguaacacaggu

SEQ ID NO: 114302 - RNA, 17 nt, Human adenovirus F
uuuuccagcagcaccac

SEQ ID NO: 114303 - RNA, 13 nt, Human adenovirus F
uuuucaacuuuau

SEQ ID NO: 114304 - RNA, 19 nt, Human adenovirus F
uuucgaacgcgccagguga

SEQ ID NO: 114305 - RNA, 14 nt, Human adenovirus F
uuugcuucuuugaa

SEQ ID NO: 114306 - RNA, 22 nt, Human adenovirus F
uuucugaagguuucauuuccau

SEQ ID NO: 114307 - RNA, 14 nt, Human adenovirus F
uuuggacuguacaa

SEQ ID NO: 114308 - RNA, 18 nt, Human adenovirus F
uuuaccaccccagcacuu

SEQ ID NO: 114309 - RNA, 14 nt, Human adenovirus F
uuuaauggaugugu

SEQ ID NO: 114310 - RNA, 15 nt, Human adenovirus F
uuuaccugguggaca

SEQ ID NO: 114311 - RNA, 16 nt, Human adenovirus F
uuuacgggugccuuca

SEQ ID NO: 114312 - RNA, 17 nt, Human adenovirus F
uuuacggucccacuggc

SEQ ID NO: 114313 - RNA, 18 nt, Human adenovirus F
uuuacuuaaaaagccugu

SEQ ID NO: 114314 - RNA, 17 nt, Human adenovirus F
uuuaugggcaccuggaa

SEQ ID NO: 114315 - RNA, 14 nt, Human adenovirus F
uuggcuggaggcuu

SEQ ID NO: 114316 - RNA, 14 nt, Human adenovirus F
uuggcggcccugca

SEQ ID NO: 114317 - RNA, 22 nt, Human adenovirus F
uugggaauuauucaagauugca

SEQ ID NO: 114318 - RNA, 24 nt, Human adenovirus F
uuguaagagguuuugaacgcugga

SEQ ID NO: 114319 - RNA, 15 nt, Human adenovirus F
uuguacaguccaaaa

SEQ ID NO: 114320 - RNA, 14 nt, Human adenovirus F
uuguaucacccuaa

SEQ ID NO: 114321 - RNA, 23 nt, Human adenovirus F
uuguguaaauccuaaauugcagu

SEQ ID NO: 114322 - RNA, 17 nt, Human adenovirus F
aagcucuccacggguuc

SEQ ID NO: 114323 - RNA, 18 nt, Human adenovirus F
aagcugugcgcgagcuuu

SEQ ID NO: 114324 - RNA, 22 nt, Human adenovirus F
aagcuggcgugugccauuguua

SEQ ID NO: 114325 - RNA, 11 nt, Human adenovirus F
aagcuuaccuu

SEQ ID NO: 114326 - RNA, 11 nt, Human adenovirus F
aagcaggguug

SEQ ID NO: 114327 - RNA, 18 nt, Human adenovirus F
aagcagagcucugcaaaa

SEQ ID NO: 114328 - RNA, 18 nt, Human adenovirus F
aagguacacaccaaacuc

SEQ ID NO: 114329 - RNA, 14 nt, Human adenovirus F
aaguccacccaaac

SEQ ID NO: 114330 - RNA, 20 nt, Human adenovirus F
aauccgcacucuugcucuca

SEQ ID NO: 114331 - RNA, 14 nt, Human adenovirus F
aauccuaacaaaaa

SEQ ID NO: 114332 - RNA, 16 nt, Human adenovirus F
aauccuaacaaaaacu

SEQ ID NO: 114333 - RNA, 15 nt, Human adenovirus F
aaucguagguuuaaa

SEQ ID NO: 114334 - RNA, 22 nt, Human adenovirus F
aauauuuuauuguucuguuaca

SEQ ID NO: 114335 - RNA, 21 nt, Human adenovirus F
aauaaaaggcggauuuuugcc

SEQ ID NO: 114336 - RNA, 20 nt, Human adenovirus F
aacuugcuuuccacccagcu

SEQ ID NO: 114337 - RNA, 21 nt, Human adenovirus F
aagacacugaggauuuucuca

SEQ ID NO: 114338 - RNA, 15 nt, Human adenovirus F
aagagacguuugcaa

SEQ ID NO: 114339 - RNA, 11 nt, Human adenovirus F
aagacauggaa

SEQ ID NO: 114340 - RNA, 21 nt, Human adenovirus F
aagagcuugaacauaacaccu

SEQ ID NO: 114341 - RNA, 21 nt, Human adenovirus F
aagagggaagacggguuguca

SEQ ID NO: 114342 - RNA, 22 nt, Human adenovirus F
aagcaauauugucgcaugccuc

SEQ ID NO: 114343 - RNA, 16 nt, Human adenovirus F
aagcaaagacagagcu

SEQ ID NO: 114344 - RNA, 22 nt, Human adenovirus F
aacgcgcuuacucuuucuuaca

SEQ ID NO: 114345 - RNA, 15 nt, Human adenovirus F
aacguaaccuuguau

SEQ ID NO: 114346 - RNA, 16 nt, Human adenovirus F
aacguuaguguuggca

SEQ ID NO: 114347 - RNA, 21 nt, Human adenovirus F
aacucugugaaguuaccaaag

SEQ ID NO: 114348 - RNA, 18 nt, Human adenovirus F
aacucucgccugcguggu

SEQ ID NO: 114349 - RNA, 18 nt, Human adenovirus F
aacaugagcuuacuuuaa

SEQ ID NO: 114350 - RNA, 17 nt, Human adenovirus F
aacaucugcaucggugc

SEQ ID NO: 114351 - RNA, 22 nt, Human adenovirus F
ugaguuugugcgguccuuugcc

SEQ ID NO: 114352 - RNA, 20 nt, Human adenovirus F
ugaguuucccugucguugcc

SEQ ID NO: 114353 - RNA, 17 nt, Human adenovirus F
ugaggucuggaccugug

SEQ ID NO: 114354 - RNA, 22 nt, Human adenovirus F
ugagcaacaggggaugucaaaa

SEQ ID NO: 114355 - RNA, 17 nt, Human adenovirus F
ugagcaugaaacuggaa

SEQ ID NO: 114356 - RNA, 14 nt, Human adenovirus F
ugcaaaaccaaauc

SEQ ID NO: 114357 - RNA, 20 nt, Human adenovirus F
ugauuuaugguucacuguau

SEQ ID NO: 114358 - RNA, 15 nt, Human adenovirus F
ugauuguacagucca

SEQ ID NO: 114359 - RNA, 11 nt, Human adenovirus F
ugcaaagccaa

SEQ ID NO: 114360 - RNA, 22 nt, Human adenovirus F
ugaugauuuaugguucacugua

SEQ ID NO: 114361 - RNA, 20 nt, Human adenovirus F
ugaucuucgugacuugcacu

SEQ ID NO: 114362 - RNA, 18 nt, Human adenovirus F
ugcaauuuaggauuuaca

SEQ ID NO: 114363 - RNA, 21 nt, Human adenovirus F
ugcacugagcagcuuauccuu

SEQ ID NO: 114364 - RNA, 20 nt, Human adenovirus F
ugcagguaggaccacuggag

SEQ ID NO: 114365 - RNA, 14 nt, Human adenovirus F
ugccaccuuuuugg

SEQ ID NO: 114366 - RNA, 17 nt, Human adenovirus F
ugccaccgauaccuacu

SEQ ID NO: 114367 - RNA, 19 nt, Human adenovirus F
ugccagccgguccccguca

SEQ ID NO: 114368 - RNA, 22 nt, Human adenovirus F
ugcuucuuugaauuuggggcau

SEQ ID NO: 114369 - RNA, 14 nt, Human adenovirus F
ugcugcacugccau

SEQ ID NO: 114370 - RNA, 20 nt, Human adenovirus F
ugcugcacugccaucugcag

SEQ ID NO: 114371 - RNA, 16 nt, Human adenovirus F
uggaagaugaguuuaa

SEQ ID NO: 114372 - RNA, 12 nt, Human adenovirus F
ugcuugucuguc

SEQ ID NO: 114373 - RNA, 22 nt, Human adenovirus F
ugcuuuacuuaaaaagccugug

SEQ ID NO: 114374 - RNA, 18 nt, Human adenovirus F
ugcgugugccagccuuag

SEQ ID NO: 114375 - RNA, 12 nt, Human adenovirus F
uguucuguuaca

SEQ ID NO: 114376 - RNA, 17 nt, Human adenovirus F
uguucaccuuuuuaccc

SEQ ID NO: 114377 - RNA, 14 nt, Human adenovirus F
uguucaaccuucaa

SEQ ID NO: 114378 - RNA, 14 nt, Human adenovirus F
uguuaauauacgua

SEQ ID NO: 114379 - RNA, 22 nt, Human adenovirus F
uguuauacaaguauacauuuga

SEQ ID NO: 114380 - RNA, 16 nt, Human adenovirus F
uguguuugcugugcca

SEQ ID NO: 114381 - RNA, 17 nt, Human adenovirus F
uguuggacgauguuucu

SEQ ID NO: 114382 - RNA, 21 nt, Human adenovirus F
uguuguagucugccaacguaa

SEQ ID NO: 114383 - RNA, 17 nt, Human adenovirus F
uuaaccuugaguuuaau

SEQ ID NO: 114384 - RNA, 14 nt, Human adenovirus F
uuaguuuauucuga

SEQ ID NO: 114385 - RNA, 15 nt, Human adenovirus F
uuauaaaugcucuga

SEQ ID NO: 114386 - RNA, 16 nt, Human adenovirus F
uuauacaaguauacau

SEQ ID NO: 114387 - RNA, 15 nt, Human adenovirus F
uuauuggucaaaaac

SEQ ID NO: 114388 - RNA, 15 nt, Human adenovirus F
uucaaacaugugacc

SEQ ID NO: 114389 - RNA, 17 nt, Human adenovirus F
uuacuccagucgcauga

SEQ ID NO: 114390 - RNA, 16 nt, Human adenovirus F
uuaaugggcaaagggg

SEQ ID NO: 114391 - RNA, 17 nt, Human adenovirus F
uuaaugggcaaaggggg

SEQ ID NO: 114392 - RNA, 16 nt, Human adenovirus F
ugucaugaaaguuccu

SEQ ID NO: 114393 - RNA, 17 nt, Human adenovirus F
ugugaaguuaccaaaga

SEQ ID NO: 114394 - RNA, 21 nt, Human adenovirus F
ugucuuuauuaagaaguauua

SEQ ID NO: 114395 - RNA, 23 nt, Human adenovirus F
uguaccaccgcaaacaacugcaa

SEQ ID NO: 114396 - RNA, 14 nt, Human adenovirus F
ugugccuauugcca

SEQ ID NO: 114397 - RNA, 22 nt, Human adenovirus F
ugugacgcaggguggguacaac

SEQ ID NO: 114398 - RNA, 17 nt, Human adenovirus F
uguggcacuguuugcua

SEQ ID NO: 114399 - RNA, 16 nt, Human adenovirus F
uggggugguguuguaa

SEQ ID NO: 114400 - RNA, 22 nt, Human adenovirus F
ugggcuggaugcauccucccaa

SEQ ID NO: 114401 - RNA, 14 nt, Human adenovirus F
ugguuaaacaagcu

SEQ ID NO: 114402 - RNA, 21 nt, Human adenovirus F
ugguuccuuacgucagcuaca

SEQ ID NO: 114403 - RNA, 18 nt, Human adenovirus F
uggucuuacaugcacauc

SEQ ID NO: 114404 - RNA, 18 nt, Human adenovirus F
ugguagccgaugcccaac

SEQ ID NO: 114405 - RNA, 16 nt, Human adenovirus F
uuuggcucaacuuuaa

SEQ ID NO: 114406 - RNA, 18 nt, Human adenovirus F
uuuggaagaugaguuuaa

SEQ ID NO: 114407 - RNA, 15 nt, Human adenovirus F
uuuggacauggccag

SEQ ID NO: 114408 - RNA, 20 nt, Human adenovirus F
uuggcggcccugcaaagcca

SEQ ID NO: 114409 - RNA, 18 nt, Human adenovirus F
uuuuuccagcagcaccac

SEQ ID NO: 114410 - RNA, 16 nt, Human adenovirus F
uuaucuacgccuccac

SEQ ID NO: 114411 - RNA, 18 nt, Human adenovirus F
uuaucucaucuucaccuc

SEQ ID NO: 114412 - RNA, 16 nt, Human adenovirus F
uuaugauguaacccaa

SEQ ID NO: 114413 - RNA, 16 nt, Human adenovirus F
uuauuugggaauuauu

SEQ ID NO: 114414 - RNA, 11 nt, Human adenovirus F
uuauuggucaa

SEQ ID NO: 114415 - RNA, 16 nt, Human adenovirus F
uuauuagcuacuuuca

SEQ ID NO: 114416 - RNA, 17 nt, Human adenovirus F
uuauuagcuacuuucau

SEQ ID NO: 114417 - RNA, 18 nt, Human adenovirus F
uuauucaagauugcagcu

SEQ ID NO: 114418 - RNA, 13 nt, Human adenovirus F
uuagaguggcaua

SEQ ID NO: 114419 - RNA, 23 nt, Human adenovirus F
uuaacgguuagaauucuguaaaa

SEQ ID NO: 114420 - RNA, 18 nt, Human adenovirus F
uguguugauuuugucaca

SEQ ID NO: 114421 - RNA, 21 nt, Human adenovirus F
uuaaguugggagggaugcaug

SEQ ID NO: 114422 - RNA, 21 nt, Human adenovirus F
uuaagcccauuaagguuacuc

SEQ ID NO: 114423 - RNA, 16 nt, Human adenovirus F
uuaauuaaaguuauuc

SEQ ID NO: 114424 - RNA, 15 nt, Human adenovirus F
uuacauguggagcua

SEQ ID NO: 114425 - RNA, 10 nt, Human adenovirus F
uuaccaaaga

SEQ ID NO: 114426 - RNA, 11 nt, Human adenovirus F
uuaccaaagac

SEQ ID NO: 114427 - RNA, 18 nt, Human adenovirus F
uuaccaccccagcacuug

SEQ ID NO: 114428 - RNA, 22 nt, Human adenovirus F
uucaccucuguuugcugcacug

SEQ ID NO: 114429 - RNA, 20 nt, Human adenovirus F
uucaccugggcuggaugcau

SEQ ID NO: 114430 - RNA, 12 nt, Human adenovirus F
uucaauguaagg

SEQ ID NO: 114431 - RNA, 13 nt, Human adenovirus F
uucacaaaguccu

SEQ ID NO: 114432 - RNA, 19 nt, Human adenovirus F
uucaaauacauaggcauua

SEQ ID NO: 114433 - RNA, 18 nt, Human adenovirus F
uucaagauugcagcuuaa

SEQ ID NO: 114434 - RNA, 20 nt, Human adenovirus F
uucccacgccuuacaugugg

SEQ ID NO: 114435 - RNA, 13 nt, Human adenovirus F
uucgcucacccgc

SEQ ID NO: 114436 - RNA, 18 nt, Human adenovirus F
uuccagcagcaccaccug

SEQ ID NO: 114437 - RNA, 16 nt, Human adenovirus F
uuccacuuuaccuuau

SEQ ID NO: 114438 - RNA, 15 nt, Human adenovirus F
uucgugacuugcacu

SEQ ID NO: 114439 - RNA, 21 nt, Human adenovirus F
uugcgccaggaaacgguacaa

SEQ ID NO: 114440 - RNA, 22 nt, Human adenovirus F
uuggccucaaccccggaccauu

SEQ ID NO: 114441 - RNA, 14 nt, Human adenovirus F
uugauggucguccu

SEQ ID NO: 114442 - RNA, 23 nt, Human adenovirus F
uugccucccugaacuaccagaac

SEQ ID NO: 114443 - RNA, 21 nt, Human adenovirus F
uucuugggcguguuugugggu

SEQ ID NO: 114444 - RNA, 20 nt, Human adenovirus F
uucugugccugucaugaaag

SEQ ID NO: 114445 - RNA, 16 nt, Human adenovirus F
uucugagucuaccacu

SEQ ID NO: 114446 - RNA, 21 nt, Human adenovirus F
uggaaccaagcuaaaugccau

SEQ ID NO: 114447 - RNA, 22 nt, Human adenovirus F
uggaaccaagcuaaaugccauu

SEQ ID NO: 114448 - RNA, 19 nt, Human adenovirus F
uggaagacaucaauuuugc

SEQ ID NO: 114449 - RNA, 21 nt, Human adenovirus F
uggaacaguaacacaggucaa

SEQ ID NO: 114450 - RNA, 21 nt, Human adenovirus F
uggaaaggcccauaccaaaga

SEQ ID NO: 114451 - RNA, 15 nt, Human adenovirus F
uggagaaaacaccuc

SEQ ID NO: 114452 - RNA, 18 nt, Human adenovirus F
uggacuauacacugucac

SEQ ID NO: 114453 - RNA, 20 nt, Human adenovirus F
uggacucccuggacaguucc

SEQ ID NO: 114454 - RNA, 23 nt, Human adenovirus F
uggacauggccagcaccuacuuu

SEQ ID NO: 114455 - RNA, 15 nt, Human adenovirus F
uggagcuucucagga

SEQ ID NO: 114456 - RNA, 17 nt, Human adenovirus F
uggagcuucucaggauu

SEQ ID NO: 114457 - RNA, 18 nt, Human adenovirus F
uggagaucuuucuucaga

SEQ ID NO: 114458 - RNA, 12 nt, Human adenovirus F
uggaguccaaag

SEQ ID NO: 114459 - RNA, 21 nt, Human adenovirus F
ugcugacuuaucucaucuuca

SEQ ID NO: 114460 - RNA, 18 nt, Human adenovirus F
ugcuugucugucugccaa

SEQ ID NO: 114461 - RNA, 12 nt, Human adenovirus F
ugcuauguuugu

SEQ ID NO: 114462 - RNA, 15 nt, Human adenovirus F
ugcuauugacacugc

SEQ ID NO: 114463 - RNA, 21 nt, Human adenovirus F
ugcucggcgaaaacucaaaca

SEQ ID NO: 114464 - RNA, 16 nt, Human adenovirus F
ugcacugccaucugca

SEQ ID NO: 114465 - RNA, 16 nt, Human adenovirus F
ugcagcauugccacuu

SEQ ID NO: 114466 - RNA, 18 nt, Human adenovirus F
ugcacugagcagcuuauc

SEQ ID NO: 114467 - RNA, 19 nt, Human adenovirus F
ugucuucccgccuugcuga

SEQ ID NO: 114468 - RNA, 13 nt, Human adenovirus F
ugucucuuaagga

SEQ ID NO: 114469 - RNA, 19 nt, Human adenovirus F
ugucugccaauuaucuacg

SEQ ID NO: 114470 - RNA, 13 nt, Human adenovirus F
uguacugcuacua

SEQ ID NO: 114471 - RNA, 13 nt, Human adenovirus F
uguacgccuccug

SEQ ID NO: 114472 - RNA, 21 nt, Human adenovirus F
uguaccaauccugaaugcaug

SEQ ID NO: 114473 - RNA, 14 nt, Human adenovirus F
ugucacuguauuaa

SEQ ID NO: 114474 - RNA, 17 nt, Human adenovirus F
uggucuuacaugcacau

SEQ ID NO: 114475 - RNA, 19 nt, Human adenovirus F
ugguagaaagcaaagccau

SEQ ID NO: 114476 - RNA, 21 nt, Human adenovirus F
ugggaaaagcaugugugcaaa

SEQ ID NO: 114477 - RNA, 14 nt, Human adenovirus F
uggccaauguggug

SEQ ID NO: 114478 - RNA, 19 nt, Human adenovirus F
ugacuccgugguagccgau

SEQ ID NO: 114479 - RNA, 12 nt, Human adenovirus F
ugacuuaucuca

SEQ ID NO: 114480 - RNA, 18 nt, Human adenovirus F
ugacuuuuccaaccaauu

SEQ ID NO: 114481 - RNA, 17 nt, Human adenovirus F
ugacacgucaccgccaa

SEQ ID NO: 114482 - RNA, 20 nt, Human adenovirus F
ugacaccuccucaacuccca

SEQ ID NO: 114483 - RNA, 18 nt, Human adenovirus F
ucuuugcuggcaaagcgc

SEQ ID NO: 114484 - RNA, 15 nt, Human adenovirus F
ugaacauaacaccua

SEQ ID NO: 114485 - RNA, 17 nt, Human adenovirus F
ucuuuccgacgcuguau

SEQ ID NO: 114486 - RNA, 22 nt, Human adenovirus F
ugaacuaccagaacgaccauag

SEQ ID NO: 114487 - RNA, 19 nt, Human adenovirus F
ugauagugugguggccaac

SEQ ID NO: 114488 - RNA, 14 nt, Human adenovirus F
ugagcaacagggga

SEQ ID NO: 114489 - RNA, 23 nt, Human adenovirus F
ugaugauuuaugguucacuguau

SEQ ID NO: 114490 - RNA, 22 nt, Human adenovirus F
ugaucuucgugacuugcacuuu

SEQ ID NO: 114491 - RNA, 16 nt, Human adenovirus F
ugcaagaaaaaccucc

SEQ ID NO: 114492 - RNA, 12 nt, Human adenovirus F
ucgccaacagcc

SEQ ID NO: 114493 - RNA, 19 nt, Human adenovirus F
ucuacgccuccaccaccuu

SEQ ID NO: 114494 - RNA, 21 nt, Human adenovirus F
ucuacuauuaccgucaucucu

SEQ ID NO: 114495 - RNA, 23 nt, Human adenovirus F
ucuucccgguagucaaaaugaga

SEQ ID NO: 114496 - RNA, 20 nt, Human adenovirus F
ucuuauccuccuucacaaag

SEQ ID NO: 114497 - RNA, 22 nt, Human adenovirus F
ucuuccaccucccucugaggau

SEQ ID NO: 114498 - RNA, 22 nt, Human adenovirus F
ucuugguuggaguuggcuuuaa

SEQ ID NO: 114499 - RNA, 18 nt, Human adenovirus F
ucuugucguaaccaacuc

SEQ ID NO: 114500 - RNA, 15 nt, Human adenovirus F
ucuugcaacugcuga

SEQ ID NO: 114501 - RNA, 18 nt, Human adenovirus F
ucugugcccgcugaucug

SEQ ID NO: 114502 - RNA, 14 nt, Human adenovirus F
ucugagucuaccac

SEQ ID NO: 114503 - RNA, 23 nt, Human adenovirus F
ucagcuacaagauuccaccaaag

SEQ ID NO: 114504 - RNA, 14 nt, Human adenovirus F
ucaggauuacucca

SEQ ID NO: 114505 - RNA, 11 nt, Human adenovirus F
ucagaugcauu

SEQ ID NO: 114506 - RNA, 10 nt, Human adenovirus F
ucacuguaua

SEQ ID NO: 114507 - RNA, 18 nt, Human adenovirus F
ucacuguauuaaaccugg

SEQ ID NO: 114508 - RNA, 22 nt, Human adenovirus F
ucagaaccuuuuucauugggau

SEQ ID NO: 114509 - RNA, 22 nt, Human adenovirus F
ucaccucuguuugcugcacugc

SEQ ID NO: 114510 - RNA, 16 nt, Human adenovirus F
ucacccgcagcugcuu

SEQ ID NO: 114511 - RNA, 17 nt, Human adenovirus F
ucacccgcagcugcuug

SEQ ID NO: 114512 - RNA, 18 nt, Human adenovirus F
ucaccuuuuuacccugac

SEQ ID NO: 114513 - RNA, 22 nt, Human adenovirus F
ucaccuuuuuacccugacccac

SEQ ID NO: 114514 - RNA, 16 nt, Human adenovirus F
uaugcuauugacacug

SEQ ID NO: 114515 - RNA, 14 nt, Human adenovirus F
uaugcuauuuucca

SEQ ID NO: 114516 - RNA, 13 nt, Human adenovirus F
uauggccauguua

SEQ ID NO: 114517 - RNA, 15 nt, Human adenovirus F
uaugguucacuguau

SEQ ID NO: 114518 - RNA, 20 nt, Human adenovirus F
uccagucgcaugaauuggcu

SEQ ID NO: 114519 - RNA, 16 nt, Human adenovirus F
uccagcagcaccaccu

SEQ ID NO: 114520 - RNA, 19 nt, Human adenovirus F
uccacuuuaccuuauacac

SEQ ID NO: 114521 - RNA, 23 nt, Human adenovirus F
uccaccggcccaccgaguuccug

SEQ ID NO: 114522 - RNA, 15 nt, Human adenovirus F
uccaacagcacggug

SEQ ID NO: 114523 - RNA, 22 nt, Human adenovirus F
ucauuuuuucaagaaauuguga

SEQ ID NO: 114524 - RNA, 17 nt, Human adenovirus F
ucgauaaccccaugugg

SEQ ID NO: 114525 - RNA, 20 nt, Human adenovirus F
uccauuauuuuuauuuugau

SEQ ID NO: 114526 - RNA, 21 nt, Human adenovirus F
ucccaacaaccuacccagauu

SEQ ID NO: 114527 - RNA, 22 nt, Human adenovirus F
ucccuccccccuuccacuuuac

SEQ ID NO: 114528 - RNA, 19 nt, Human adenovirus F
ucccuggacaguucccaaa

SEQ ID NO: 114529 - RNA, 13 nt, Human adenovirus F
uccgacgcuguau

SEQ ID NO: 114530 - RNA, 22 nt, Human adenovirus F
cugauccacuuacaaccaaaaa

SEQ ID NO: 114531 - RNA, 20 nt, Human adenovirus F
cugacgauucuggccucuau

SEQ ID NO: 114532 - RNA, 16 nt, Human adenovirus F
cugauccguaauggaa

SEQ ID NO: 114533 - RNA, 18 nt, Human adenovirus F
cugauuaauaaagcuuac

SEQ ID NO: 114534 - RNA, 13 nt, Human adenovirus F
cucuugcucucaa

SEQ ID NO: 114535 - RNA, 15 nt, Human adenovirus F
cucuugcucucaagc

SEQ ID NO: 114536 - RNA, 22 nt, Human adenovirus F
cucuucuccugcuugucugucu

SEQ ID NO: 114537 - RNA, 16 nt, Human adenovirus F
cucuucucugucuuau

SEQ ID NO: 114538 - RNA, 13 nt, Human adenovirus F
cucuucaauguaa

SEQ ID NO: 114539 - RNA, 17 nt, Human adenovirus F
cucugguagaaagcaaa

SEQ ID NO: 114540 - RNA, 16 nt, Human adenovirus F
cucuauacgacaccac

SEQ ID NO: 114541 - RNA, 21 nt, Human adenovirus F
cucuaccccgcgacgucagcu

SEQ ID NO: 114542 - RNA, 16 nt, Human adenovirus F
cuguaaaaguaucaau

SEQ ID NO: 114543 - RNA, 13 nt, Human adenovirus F
cuguacugcuacu

SEQ ID NO: 114544 - RNA, 21 nt, Human adenovirus F
cuguacugcuacuacuuuaac

SEQ ID NO: 114545 - RNA, 16 nt, Human adenovirus F
cuggcagcuggagcuu

SEQ ID NO: 114546 - RNA, 17 nt, Human adenovirus F
cuggaagauguccuuaa

SEQ ID NO: 114547 - RNA, 14 nt, Human adenovirus F
cuggaacccaaaga

SEQ ID NO: 114548 - RNA, 17 nt, Human adenovirus F
cuggccgugggcgacaa

SEQ ID NO: 114549 - RNA, 17 nt, Human adenovirus F
cuggcccuggccuggaa

SEQ ID NO: 114550 - RNA, 18 nt, Human adenovirus F
cuggccuggaacccaaag

SEQ ID NO: 114551 - RNA, 15 nt, Human adenovirus F
cuggcgugugccauu

SEQ ID NO: 114552 - RNA, 20 nt, Human adenovirus F
cugcuugucugucugccaau

SEQ ID NO: 114553 - RNA, 12 nt, Human adenovirus F
cugcaaagccaa

SEQ ID NO: 114554 - RNA, 14 nt, Human adenovirus F
cuauugacacugcu

SEQ ID NO: 114555 - RNA, 15 nt, Human adenovirus F
cuauugacacugcua

SEQ ID NO: 114556 - RNA, 22 nt, Human adenovirus F
cuccgggguuccaccaagcucc

SEQ ID NO: 114557 - RNA, 14 nt, Human adenovirus F
cuaaggcgggcaca

SEQ ID NO: 114558 - RNA, 11 nt, Human adenovirus F
cuaaaaccacu

SEQ ID NO: 114559 - RNA, 21 nt, Human adenovirus F
cuaucccuugauucuaugaaa

SEQ ID NO: 114560 - RNA, 18 nt, Human adenovirus F
cuaucgucaucaucccca

SEQ ID NO: 114561 - RNA, 14 nt, Human adenovirus F
cuauuaauguugau

SEQ ID NO: 114562 - RNA, 20 nt, Human adenovirus F
cgcgcuuacucuuucuuaca

SEQ ID NO: 114563 - RNA, 13 nt, Human adenovirus F
cgcuaacagacaa

SEQ ID NO: 114564 - RNA, 13 nt, Human adenovirus F
cgcggucaacagc

SEQ ID NO: 114565 - RNA, 23 nt, Human adenovirus F
cgggacugauauauaaugccuua

SEQ ID NO: 114566 - RNA, 15 nt, Human adenovirus F
cggcggacauugccu

SEQ ID NO: 114567 - RNA, 16 nt, Human adenovirus F
cggcacuacuguagua

SEQ ID NO: 114568 - RNA, 15 nt, Human adenovirus F
cggugguacaggggg

SEQ ID NO: 114569 - RNA, 19 nt, Human adenovirus F
cguagugcguuggccucaa

SEQ ID NO: 114570 - RNA, 20 nt, Human adenovirus F
cggguggcaagcggaaaauu

SEQ ID NO: 114571 - RNA, 23 nt, Human adenovirus F
cgggcaaagcuacguugcgauac

SEQ ID NO: 114572 - RNA, 17 nt, Human adenovirus F
cgugcucaagcggguua

SEQ ID NO: 114573 - RNA, 14 nt, Human adenovirus F
cgugcgcgaacugg

SEQ ID NO: 114574 - RNA, 17 nt, Human adenovirus F
cguugucaaacacggga

SEQ ID NO: 114575 - RNA, 15 nt, Human adenovirus F
cguugccacguccac

SEQ ID NO: 114576 - RNA, 13 nt, Human adenovirus F
cguuggccucaac

SEQ ID NO: 114577 - RNA, 14 nt, Human adenovirus F
cguuccguccuacc

SEQ ID NO: 114578 - RNA, 16 nt, Human adenovirus F
ccuacucuuacaaagu

SEQ ID NO: 114579 - RNA, 15 nt, Human adenovirus F
ccuaacaaaaacuua

SEQ ID NO: 114580 - RNA, 11 nt, Human adenovirus F
ccuaaaaccac

SEQ ID NO: 114581 - RNA, 19 nt, Human adenovirus F
ccuaaggacuucaccuaca

SEQ ID NO: 114582 - RNA, 21 nt, Human adenovirus F
ccuaauuaaguccacccaaac

SEQ ID NO: 114583 - RNA, 18 nt, Human adenovirus F
cgaggaaaccgccuacuc

SEQ ID NO: 114584 - RNA, 22 nt, Human adenovirus F
cgaguuccugcgcugcuacuca

SEQ ID NO: 114585 - RNA, 21 nt, Human adenovirus F
cgcacggcguuacuugcuuuu

SEQ ID NO: 114586 - RNA, 22 nt, Human adenovirus F
cgcaauggucuuacaugcacau

SEQ ID NO: 114587 - RNA, 23 nt, Human adenovirus F
cgccaaacggcguucuagccaac

SEQ ID NO: 114588 - RNA, 15 nt, Human adenovirus F
cgcagcugcuuguau

SEQ ID NO: 114589 - RNA, 22 nt, Human adenovirus F
cgccaggugaauuuuaaugagu

SEQ ID NO: 114590 - RNA, 16 nt, Human adenovirus F
cgcccuucguuucuuc

SEQ ID NO: 114591 - RNA, 22 nt, Human adenovirus F
cgccgcuugcaagauggccacc

SEQ ID NO: 114592 - RNA, 20 nt, Human adenovirus F
gacugcaggaguggcugaac

SEQ ID NO: 114593 - RNA, 16 nt, Human adenovirus F
gacugcgcggcuguaa

SEQ ID NO: 114594 - RNA, 16 nt, Human adenovirus F
gacgggcagugcacug

SEQ ID NO: 114595 - RNA, 17 nt, Human adenovirus F
gacgucauugacuccgu

SEQ ID NO: 114596 - RNA, 14 nt, Human adenovirus F
gacacgagcuguca

SEQ ID NO: 114597 - RNA, 20 nt, Human adenovirus F
gaggauuuucucaacuuccc

SEQ ID NO: 114598 - RNA, 18 nt, Human adenovirus F
gagccgagugacacguca

SEQ ID NO: 114599 - RNA, 15 nt, Human adenovirus F
gagccauguucugaa

SEQ ID NO: 114600 - RNA, 15 nt, Human adenovirus F
gaguuggucgccauc

SEQ ID NO: 114601 - RNA, 14 nt, Human adenovirus F
gaguuggcuuuaac

SEQ ID NO: 114602 - RNA, 20 nt, Human adenovirus F
gauacuggcaagagccaccu

SEQ ID NO: 114603 - RNA, 18 nt, Human adenovirus F
gaucaaacaggaagacaa

SEQ ID NO: 114604 - RNA, 14 nt, Human adenovirus F
gaucuucgugacuu

SEQ ID NO: 114605 - RNA, 20 nt, Human adenovirus F
gaucuucgugacuugcacuu

SEQ ID NO: 114606 - RNA, 16 nt, Human adenovirus F
gaugaaaagaaccaga

SEQ ID NO: 114607 - RNA, 22 nt, Human adenovirus F
gaugucaaaacguucauuauuu

SEQ ID NO: 114608 - RNA, 16 nt, Human adenovirus F
gauguaaccacagaca

SEQ ID NO: 114609 - RNA, 19 nt, Human adenovirus F
gauguaacccaacagggac

SEQ ID NO: 114610 - RNA, 16 nt, Human adenovirus F
gauggccuaaaaccac

SEQ ID NO: 114611 - RNA, 20 nt, Human adenovirus F
gauucuaugaaaacuccuca

SEQ ID NO: 114612 - RNA, 20 nt, Human adenovirus F
gcaauuuaggauuuacacaa

SEQ ID NO: 114613 - RNA, 14 nt, Human adenovirus F
gaaaaucgcaucuu

SEQ ID NO: 114614 - RNA, 15 nt, Human adenovirus F
gaacgaccauaguaa

SEQ ID NO: 114615 - RNA, 18 nt, Human adenovirus F
gacaaaaucaacacaggu

SEQ ID NO: 114616 - RNA, 14 nt, Human adenovirus F
gacaaaaucacugu

SEQ ID NO: 114617 - RNA, 22 nt, Human adenovirus F
gacaagacauggaagacaucaa

SEQ ID NO: 114618 - RNA, 18 nt, Human adenovirus F
gacaacccgucuucccuc

SEQ ID NO: 114619 - RNA, 15 nt, Human adenovirus F
gacaacccuuaccua

SEQ ID NO: 114620 - RNA, 22 nt, Human adenovirus F
gaagcugugcgcgagcuuuuaa

SEQ ID NO: 114621 - RNA, 21 nt, Human adenovirus F
cugugauuucauuuaccaccc

SEQ ID NO: 114622 - RNA, 19 nt, Human adenovirus F
cugugacaaaaucaacaca

SEQ ID NO: 114623 - RNA, 16 nt, Human adenovirus F
cuugcaagaaaaaccu

SEQ ID NO: 114624 - RNA, 16 nt, Human adenovirus F
cuugcaagauggccac

SEQ ID NO: 114625 - RNA, 13 nt, Human adenovirus F
cuuguaucacaga

SEQ ID NO: 114626 - RNA, 15 nt, Human adenovirus F
cuugucugucugcca

SEQ ID NO: 114627 - RNA, 17 nt, Human adenovirus F
cuugucugucugccaau

SEQ ID NO: 114628 - RNA, 16 nt, Human adenovirus F
cuuugaagcaugcugu

SEQ ID NO: 114629 - RNA, 13 nt, Human adenovirus F
cuuugccaccuuu

SEQ ID NO: 114630 - RNA, 22 nt, Human adenovirus F
cuuuggguccuccauuaaguca

SEQ ID NO: 114631 - RNA, 14 nt, Human adenovirus F
cuuuguaacaacug

SEQ ID NO: 114632 - RNA, 13 nt, Human adenovirus F
cuuuguuaugaug

SEQ ID NO: 114633 - RNA, 16 nt, Human adenovirus F
gaaaaaacccuuaaca

SEQ ID NO: 114634 - RNA, 16 nt, Human adenovirus F
gaaaagauauggccau

SEQ ID NO: 114635 - RNA, 19 nt, Human adenovirus F
gaaaagauauggccauguu

SEQ ID NO: 114636 - RNA, 15 nt, Human adenovirus F
cuuuuuugugugcua

SEQ ID NO: 114637 - RNA, 20 nt, Human adenovirus F
cuuuucaguaugguaacucc

SEQ ID NO: 114638 - RNA, 21 nt, Human adenovirus F
cuuuucaguaugguaacuccu

SEQ ID NO: 114639 - RNA, 22 nt, Human adenovirus F
uagaacaggccgcccuaaccuc

SEQ ID NO: 114640 - RNA, 15 nt, Human adenovirus F
uagaaagcaaagcca

SEQ ID NO: 114641 - RNA, 15 nt, Human adenovirus F
uacuuuaaacaagca

SEQ ID NO: 114642 - RNA, 16 nt, Human adenovirus F
uacuuuaaacaagcaa

SEQ ID NO: 114643 - RNA, 22 nt, Human adenovirus F
uagaguggcauacuaucgucau

SEQ ID NO: 114644 - RNA, 17 nt, Human adenovirus F
uagagugugaacauuug

SEQ ID NO: 114645 - RNA, 12 nt, Human adenovirus F
uagaguaaaaaa

SEQ ID NO: 114646 - RNA, 20 nt, Human adenovirus F
uagaguaaaaaaaagggaag

SEQ ID NO: 114647 - RNA, 22 nt, Human adenovirus F
uagcacucaaguacacugaccc

SEQ ID NO: 114648 - RNA, 15 nt, Human adenovirus F
uagcuccgcccuucg

SEQ ID NO: 114649 - RNA, 22 nt, Human adenovirus F
uaguaucccuucguugucaaac

SEQ ID NO: 114650 - RNA, 15 nt, Human adenovirus F
uagcuggaucaaaca

SEQ ID NO: 114651 - RNA, 14 nt, Human adenovirus F
uaggaccacuggag

SEQ ID NO: 114652 - RNA, 16 nt, Human adenovirus F
uaguggaagccgugau

SEQ ID NO: 114653 - RNA, 20 nt, Human adenovirus F
uauccaccgacgauccaaua

SEQ ID NO: 114654 - RNA, 22 nt, Human adenovirus F
uaccuauacguuagaguggcau

SEQ ID NO: 114655 - RNA, 17 nt, Human adenovirus F
uacuagcagugggcaaa

SEQ ID NO: 114656 - RNA, 16 nt, Human adenovirus F
uaccuuuuagagcuag

SEQ ID NO: 114657 - RNA, 13 nt, Human adenovirus F
uacgaacacuaca

SEQ ID NO: 114658 - RNA, 15 nt, Human adenovirus F
uacgaacacuacaau

SEQ ID NO: 114659 - RNA, 15 nt, Human adenovirus F
uacuucuucagcucu

SEQ ID NO: 114660 - RNA, 16 nt, Human adenovirus F
uacuggcaagagccac

SEQ ID NO: 114661 - RNA, 18 nt, Human adenovirus F
uacugccgccaugacugc

SEQ ID NO: 114662 - RNA, 21 nt, Human adenovirus F
uacaauccccuugacauucca

SEQ ID NO: 114663 - RNA, 18 nt, Human adenovirus F
uacaaguauacauuugaa

SEQ ID NO: 114664 - RNA, 16 nt, Human adenovirus F
uacaaaagcauguaaa

SEQ ID NO: 114665 - RNA, 20 nt, Human adenovirus F
uacaaguugcaaagcuccca

SEQ ID NO: 114666 - RNA, 20 nt, Human adenovirus F
uacacaccaaacucuuuauu

SEQ ID NO: 114667 - RNA, 20 nt, Human adenovirus F
uacaggugggcuuggauguu

SEQ ID NO: 114668 - RNA, 23 nt, Human adenovirus F
uacagucaagcucuccacggguu

SEQ ID NO: 114669 - RNA, 18 nt, Human adenovirus F
uaagccucucgcucugca

SEQ ID NO: 114670 - RNA, 19 nt, Human adenovirus F
uaaacauugauaaaaaugg

SEQ ID NO: 114671 - RNA, 16 nt, Human adenovirus F
uaaacacccgcgcuuu

SEQ ID NO: 114672 - RNA, 15 nt, Human adenovirus F
uaaacaugagcuuac

SEQ ID NO: 114673 - RNA, 17 nt, Human adenovirus F
uaaaaccacuaaagcau

SEQ ID NO: 114674 - RNA, 20 nt, Human adenovirus F
uaaaaccacuaaagcauuuc

SEQ ID NO: 114675 - RNA, 18 nt, Human adenovirus F
uaaaacuuggcagcaaca

SEQ ID NO: 114676 - RNA, 14 nt, Human adenovirus F
uaaacaagcaaaga

SEQ ID NO: 114677 - RNA, 13 nt, Human adenovirus F
uaaacaagcugaa

SEQ ID NO: 114678 - RNA, 21 nt, Human adenovirus F
uaaauucuggaaucagcaucu

SEQ ID NO: 114679 - RNA, 16 nt, Human adenovirus F
uaaauuacacuaagcc

SEQ ID NO: 114680 - RNA, 19 nt, Human adenovirus F
uaaaugggaaaagcaugug

SEQ ID NO: 114681 - RNA, 20 nt, Human adenovirus F
uaaaugggaaaagcaugugu

SEQ ID NO: 114682 - RNA, 16 nt, Human adenovirus F
uaacaaggccuggaac

SEQ ID NO: 114683 - RNA, 16 nt, Human adenovirus F
guuguagucugccaac

SEQ ID NO: 114684 - RNA, 18 nt, Human adenovirus F
guuguuugcggugguaca

SEQ ID NO: 114685 - RNA, 16 nt, Human adenovirus F
guuuaaaaugaugauu

SEQ ID NO: 114686 - RNA, 19 nt, Human adenovirus F
guuucaucgccgccuggca

SEQ ID NO: 114687 - RNA, 23 nt, Human adenovirus F
guuucuugaagugcgugugccag

SEQ ID NO: 114688 - RNA, 15 nt, Human adenovirus F
uaaaaagccugugau

SEQ ID NO: 114689 - RNA, 20 nt, Human adenovirus F
uaaaaagccugugauuucau

SEQ ID NO: 114690 - RNA, 13 nt, Human adenovirus F
guuuuagcacuca

SEQ ID NO: 114691 - RNA, 18 nt, Human adenovirus F
guuccaccaagcuccuca

SEQ ID NO: 114692 - RNA, 22 nt, Human adenovirus F
guucaaggaaacaacagccuuu

SEQ ID NO: 114693 - RNA, 19 nt, Human adenovirus F
guucaaccuucaagcccua

SEQ ID NO: 114694 - RNA, 16 nt, Human adenovirus F
guucuuugcuggcaaa

SEQ ID NO: 114695 - RNA, 19 nt, Human adenovirus F
guuccucuucucugucuua

SEQ ID NO: 114696 - RNA, 18 nt, Human adenovirus F
guguugauuuugucacag

SEQ ID NO: 114697 - RNA, 20 nt, Human adenovirus F
guuaauauacguaaaugugc

SEQ ID NO: 114698 - RNA, 21 nt, Human adenovirus F
guuaauauacguaaaugugcc

SEQ ID NO: 114699 - RNA, 16 nt, Human adenovirus F
guuagcucugaacacu

SEQ ID NO: 114700 - RNA, 11 nt, Human adenovirus F
guuaccugggg

SEQ ID NO: 114701 - RNA, 13 nt, Human adenovirus F
guuaucagaaccu

SEQ ID NO: 114702 - RNA, 15 nt, Human adenovirus F
guuauacaaguauac

SEQ ID NO: 114703 - RNA, 14 nt, Human adenovirus F
gucaaacacgggau

SEQ ID NO: 114704 - RNA, 15 nt, Human adenovirus F
gugugaacauuugaa

SEQ ID NO: 114705 - RNA, 20 nt, Human adenovirus F
guguagguaagagccauguu

SEQ ID NO: 114706 - RNA, 19 nt, Human adenovirus F
guggcauuaaaaacuuugg

SEQ ID NO: 114707 - RNA, 14 nt, Human adenovirus F
guggccaauguggu

SEQ ID NO: 114708 - RNA, 13 nt, Human adenovirus F
gcuuaauguuuga

SEQ ID NO: 114709 - RNA, 14 nt, Human adenovirus F
gcuuauuaacccuc

SEQ ID NO: 114710 - RNA, 14 nt, Human adenovirus F
gcuccugguuguga

SEQ ID NO: 114711 - RNA, 16 nt, Human adenovirus F
gcuccucaugagugac

SEQ ID NO: 114712 - RNA, 15 nt, Human adenovirus F
gcucugaacacuuuu

SEQ ID NO: 114713 - RNA, 23 nt, Human adenovirus F
gcucugguagaaagcaaagccau

SEQ ID NO: 114714 - RNA, 13 nt, Human adenovirus F
gcucgcuuuacaa

SEQ ID NO: 114715 - RNA, 16 nt, Human adenovirus F
gcggucaacagcugga

SEQ ID NO: 114716 - RNA, 14 nt, Human adenovirus F
gcgcaaucuucgca

SEQ ID NO: 114717 - RNA, 23 nt, Human adenovirus F
gccugaauuuuuagguuggcaau

SEQ ID NO: 114718 - RNA, 16 nt, Human adenovirus F
gccucucgcucugcaa

SEQ ID NO: 114719 - RNA, 14 nt, Human adenovirus F
gccuccagcacugc

SEQ ID NO: 114720 - RNA, 19 nt, Human adenovirus F
gccuauugccacaauggaa

SEQ ID NO: 114721 - RNA, 14 nt, Human adenovirus F
gccuaaaaccacua

SEQ ID NO: 114722 - RNA, 22 nt, Human adenovirus F
gccuaaaaccacuaaagcauuu

SEQ ID NO: 114723 - RNA, 22 nt, Human adenovirus F
gcgacaaccggguuuuggacau

SEQ ID NO: 114724 - RNA, 17 nt, Human adenovirus F
gccuuacauguggagcu

SEQ ID NO: 114725 - RNA, 14 nt, Human adenovirus F
gccugugauuucau

SEQ ID NO: 114726 - RNA, 20 nt, Human adenovirus F
gccugugauuucauuuacca

SEQ ID NO: 114727 - RNA, 21 nt, Human adenovirus F
gccgcaauggucuuacaugca

SEQ ID NO: 114728 - RNA, 18 nt, Human adenovirus F
gcccuacaccaaugcaaa

SEQ ID NO: 114729 - RNA, 21 nt, Human adenovirus F
gcccgugccaccgauaccuac

SEQ ID NO: 114730 - RNA, 13 nt, Human adenovirus F
gcccugcaaagcc

SEQ ID NO: 114731 - RNA, 15 nt, Human adenovirus F
gcccugcaaagccaa

SEQ ID NO: 114732 - RNA, 22 nt, Human adenovirus F
gccccuaucacuaaaaccaaca

SEQ ID NO: 114733 - RNA, 17 nt, Human adenovirus F
gcacuaacccuacccac

SEQ ID NO: 114734 - RNA, 14 nt, Human adenovirus F
gcagagcucugcaa

SEQ ID NO: 114735 - RNA, 21 nt, Human adenovirus F
ggguggacuuaauuaggguga

SEQ ID NO: 114736 - RNA, 18 nt, Human adenovirus F
ggguuagcgcacugguaa

SEQ ID NO: 114737 - RNA, 14 nt, Human adenovirus F
gguacacaccaaac

SEQ ID NO: 114738 - RNA, 16 nt, Human adenovirus F
gguaagagccauguuc

SEQ ID NO: 114739 - RNA, 16 nt, Human adenovirus F
gguaagaagguccaug

SEQ ID NO: 114740 - RNA, 13 nt, Human adenovirus F
ggguuuuggacau

SEQ ID NO: 114741 - RNA, 16 nt, Human adenovirus F
ggucuuacaugcacau

SEQ ID NO: 114742 - RNA, 15 nt, Human adenovirus F
ggucucuucaaugua

SEQ ID NO: 114743 - RNA, 15 nt, Human adenovirus F
guaccugcuaccucu

SEQ ID NO: 114744 - RNA, 13 nt, Human adenovirus F
gguuuaccuggug

SEQ ID NO: 114745 - RNA, 17 nt, Human adenovirus F
gguuggaaaagucaaaa

SEQ ID NO: 114746 - RNA, 14 nt, Human adenovirus F
gguuuaaauuacac

SEQ ID NO: 114747 - RNA, 18 nt, Human adenovirus F
gguuuaaauuacacuaag

SEQ ID NO: 114748 - RNA, 23 nt, Human adenovirus F
gguuuugaacgcuggacuauaca

SEQ ID NO: 114749 - RNA, 17 nt, Human adenovirus F
gguuuuugagcaugaaa

SEQ ID NO: 114750 - RNA, 16 nt, Human adenovirus F
gguuucaaacauguga

SEQ ID NO: 114751 - RNA, 18 nt, Human adenovirus F
guauaagguaaaguggaa

SEQ ID NO: 114752 - RNA, 22 nt, Human adenovirus F
guacgccuuaguugguaccaau

SEQ ID NO: 114753 - RNA, 20 nt, Human adenovirus F
ggaagacaauccuaacaaaa

SEQ ID NO: 114754 - RNA, 19 nt, Human adenovirus F
ggaacuguucaaccuucaa

SEQ ID NO: 114755 - RNA, 23 nt, Human adenovirus F
ggauaagcuaaaggaccaaaacu

SEQ ID NO: 114756 - RNA, 16 nt, Human adenovirus F
gcuuuaaccugcuguu

SEQ ID NO: 114757 - RNA, 21 nt, Human adenovirus F
gcuuucaguuggagcagccug

SEQ ID NO: 114758 - RNA, 13 nt, Human adenovirus F
gcuuugaagcaug

SEQ ID NO: 114759 - RNA, 17 nt, Human adenovirus F
gcuuugccagcaaagaa

SEQ ID NO: 114760 - RNA, 20 nt, Human adenovirus F
ggaugcagguaggaccacug

SEQ ID NO: 114761 - RNA, 18 nt, Human adenovirus F
ggaucagcgcuuugccag

SEQ ID NO: 114762 - RNA, 12 nt, Human adenovirus F
ggcaaacuuucu

SEQ ID NO: 114763 - RNA, 13 nt, Human adenovirus F
ggcaagacacuga

SEQ ID NO: 114764 - RNA, 12 nt, Human adenovirus F
ggcggcggccau

SEQ ID NO: 114765 - RNA, 13 nt, Human adenovirus F
ggcuguacuccau

SEQ ID NO: 114766 - RNA, 21 nt, Human adenovirus F
ggccaaccgcuuuucggccau

SEQ ID NO: 114767 - RNA, 13 nt, Human adenovirus F
ggccaacugccac

SEQ ID NO: 114768 - RNA, 16 nt, Human adenovirus F
ggcuuccggcauuaac

SEQ ID NO: 114769 - RNA, 22 nt, Human adenovirus F
ggcuugggaggauuuugaguua

SEQ ID NO: 114770 - RNA, 17 nt, Human adenovirus F
gggagguguauaaggua

SEQ ID NO: 114771 - RNA, 13 nt, Human adenovirus F
gggcagugcacug

SEQ ID NO: 114772 - RNA, 19 nt, Human adenovirus F
agcuugaacauaacaccua

SEQ ID NO: 114773 - RNA, 14 nt, Human adenovirus F
agcggaaaauuauu

SEQ ID NO: 114774 - RNA, 13 nt, Human adenovirus F
aggaaaccgccua

SEQ ID NO: 114775 - RNA, 15 nt, Human adenovirus F
aggaaacgguacaac

SEQ ID NO: 114776 - RNA, 21 nt, Human adenovirus F
aggccgucccugggaugcagg

SEQ ID NO: 114777 - RNA, 17 nt, Human adenovirus F
aggcccauaccaaagag

SEQ ID NO: 114778 - RNA, 16 nt, Human adenovirus F
agcaugaaacuggaag

SEQ ID NO: 114779 - RNA, 17 nt, Human adenovirus F
agcagugggcaaagggg

SEQ ID NO: 114780 - RNA, 22 nt, Human adenovirus F
agcagagccgcggucaacagcu

SEQ ID NO: 114781 - RNA, 14 nt, Human adenovirus F
agcagcuuauccuu

SEQ ID NO: 114782 - RNA, 14 nt, Human adenovirus F
agccucgcgugcuc

SEQ ID NO: 114783 - RNA, 21 nt, Human adenovirus F
agccagauuugaagaugacuu

SEQ ID NO: 114784 - RNA, 18 nt, Human adenovirus F
agcauguaaaaacaugca

SEQ ID NO: 114785 - RNA, 20 nt, Human adenovirus F
agauggcaguugcaucuccu

SEQ ID NO: 114786 - RNA, 13 nt, Human adenovirus F
agaugaguuuaaa

SEQ ID NO: 114787 - RNA, 14 nt, Human adenovirus F
agaugucugaccaa

SEQ ID NO: 114788 - RNA, 16 nt, Human adenovirus F
agcaaauugguuuaaa

SEQ ID NO: 114789 - RNA, 18 nt, Human adenovirus F
agcaaagacagagcuuua

SEQ ID NO: 114790 - RNA, 19 nt, Human adenovirus F
agagccgcggucaacagcu

SEQ ID NO: 114791 - RNA, 23 nt, Human adenovirus F
agagccgcggucaacagcuggaa

SEQ ID NO: 114792 - RNA, 21 nt, Human adenovirus F
acuuuauugauacuuuuacag

SEQ ID NO: 114793 - RNA, 19 nt, Human adenovirus F
acuuucuccacguccuaaa

SEQ ID NO: 114794 - RNA, 14 nt, Human adenovirus F
agaaaaaaaagagg

SEQ ID NO: 114795 - RNA, 20 nt, Human adenovirus F
agaguggcauacuaucguca

SEQ ID NO: 114796 - RNA, 19 nt, Human adenovirus F
agaucggcaccagccagcu

SEQ ID NO: 114797 - RNA, 13 nt, Human adenovirus F
agauauggccaug

SEQ ID NO: 114798 - RNA, 23 nt, Human adenovirus F
agucuuagcuggaucaaacagga

SEQ ID NO: 114799 - RNA, 13 nt, Human adenovirus F
agucucccaccuu

SEQ ID NO: 114800 - RNA, 18 nt, Human adenovirus F
aguuaaccuugaguuuaa

SEQ ID NO: 114801 - RNA, 22 nt, Human adenovirus F
aguuaccaaagacaaaaucacu

SEQ ID NO: 114802 - RNA, 15 nt, Human adenovirus F
aguguuaguuuauuc

SEQ ID NO: 114803 - RNA, 18 nt, Human adenovirus F
aguuuaacaaguagccua

SEQ ID NO: 114804 - RNA, 16 nt, Human adenovirus F
auaaagcuuaccuuaa

SEQ ID NO: 114805 - RNA, 20 nt, Human adenovirus F
auaaaaggcggauuuuugcc

SEQ ID NO: 114806 - RNA, 21 nt, Human adenovirus F
aggugggcuuggauguucaaa

SEQ ID NO: 114807 - RNA, 17 nt, Human adenovirus F
agguuacucagcaaucc

SEQ ID NO: 114808 - RNA, 15 nt, Human adenovirus F
agucuaccacuucua

SEQ ID NO: 114809 - RNA, 13 nt, Human adenovirus F
aguccaaaugacu

SEQ ID NO: 114810 - RNA, 16 nt, Human adenovirus F
aguccagcgcgugcuu

SEQ ID NO: 114811 - RNA, 19 nt, Human adenovirus F
auaauaagguauaauguca

SEQ ID NO: 114812 - RNA, 21 nt, Human adenovirus F
auaacuuaagauucccuuggu

SEQ ID NO: 114813 - RNA, 21 nt, Human adenovirus F
auaaccccauguggcacuguu

SEQ ID NO: 114814 - RNA, 22 nt, Human adenovirus F
auaaccccauguggcacuguuu

SEQ ID NO: 114815 - RNA, 18 nt, Human adenovirus F
auacaaguauacauuuga

SEQ ID NO: 114816 - RNA, 11 nt, Human adenovirus F
auaccaaagag

SEQ ID NO: 114817 - RNA, 22 nt, Human adenovirus F
auaauggaaaggcccauaccaa

SEQ ID NO: 114818 - RNA, 11 nt, Human adenovirus F
auaccuacuuc

SEQ ID NO: 114819 - RNA, 22 nt, Human adenovirus F
auaccauuaagaagacuguuaa

SEQ ID NO: 114820 - RNA, 19 nt, Human adenovirus F
aucaagccccgcaguaauc

SEQ ID NO: 114821 - RNA, 21 nt, Human adenovirus F
aucaagccccgcaguaauccc

SEQ ID NO: 114822 - RNA, 17 nt, Human adenovirus F
aaugaauuuguuauaca

SEQ ID NO: 114823 - RNA, 21 nt, Human adenovirus F
aaugaauuuguuauacaagua

SEQ ID NO: 114824 - RNA, 19 nt, Human adenovirus F
acaaaguccuggccaacug

SEQ ID NO: 114825 - RNA, 23 nt, Human adenovirus F
acaaaguccuggccaacugccac

SEQ ID NO: 114826 - RNA, 22 nt, Human adenovirus F
acaagcaaagacagagcuuuau

SEQ ID NO: 114827 - RNA, 16 nt, Human adenovirus F
acaacagccuuuguaa

SEQ ID NO: 114828 - RNA, 12 nt, Human adenovirus F
acaaccaaaaac

SEQ ID NO: 114829 - RNA, 15 nt, Human adenovirus F
acaauccccuugaca

SEQ ID NO: 114830 - RNA, 23 nt, Human adenovirus F
acaauccuaacaaaaacuuacaa

SEQ ID NO: 114831 - RNA, 13 nt, Human adenovirus F
acaaugguccggg

SEQ ID NO: 114832 - RNA, 13 nt, Human adenovirus F
acaaguauacauu

SEQ ID NO: 114833 - RNA, 14 nt, Human adenovirus F
acaaguauacauuu

SEQ ID NO: 114834 - RNA, 13 nt, Human adenovirus F
acagucaagcucu

SEQ ID NO: 114835 - RNA, 20 nt, Human adenovirus F
acaggugggcuuggauguuc

SEQ ID NO: 114836 - RNA, 16 nt, Human adenovirus F
acagggauacuggaua

SEQ ID NO: 114837 - RNA, 20 nt, Human adenovirus F
acauucugacgcacuccugc

SEQ ID NO: 114838 - RNA, 16 nt, Human adenovirus F
acauugauaaaaaugg

SEQ ID NO: 114839 - RNA, 15 nt, Human adenovirus F
acaccaaacucuuua

SEQ ID NO: 114840 - RNA, 21 nt, Human adenovirus F
acaccacccggguuuaccugg

SEQ ID NO: 114841 - RNA, 16 nt, Human adenovirus F
acacugauccacuuac

SEQ ID NO: 114842 - RNA, 17 nt, Human adenovirus F
acacugauccacuuaca

SEQ ID NO: 114843 - RNA, 15 nt, Human adenovirus F
acacugucacuguau

SEQ ID NO: 114844 - RNA, 19 nt, Human adenovirus F
acacugucacuguauuaaa

SEQ ID NO: 114845 - RNA, 22 nt, Human adenovirus F
acacccccguuugcuuccucca

SEQ ID NO: 114846 - RNA, 15 nt, Human adenovirus F
acuaccaaugcuaaa

SEQ ID NO: 114847 - RNA, 19 nt, Human adenovirus F
acuaccagaacgaccauag

SEQ ID NO: 114848 - RNA, 20 nt, Human adenovirus F
acggcgugguggauauagcc

SEQ ID NO: 114849 - RNA, 21 nt, Human adenovirus F
acgggguuagcgcacugguaa

SEQ ID NO: 114850 - RNA, 21 nt, Human adenovirus F
acgucccuccccguuaccugg

SEQ ID NO: 114851 - RNA, 13 nt, Human adenovirus F
acgugcaggccaa

SEQ ID NO: 114852 - RNA, 17 nt, Human adenovirus F
acugcgcggcuguaaca

SEQ ID NO: 114853 - RNA, 19 nt, Human adenovirus F
acugcuaccaacucaccaa

SEQ ID NO: 114854 - RNA, 16 nt, Human adenovirus F
acugcugagacagcuc

SEQ ID NO: 114855 - RNA, 15 nt, Human adenovirus F
acuauuuauaccauu

SEQ ID NO: 114856 - RNA, 15 nt, Human adenovirus F
acuauuaccgucauc

SEQ ID NO: 114857 - RNA, 20 nt, Human adenovirus F
acucccagcauucccuaugu

SEQ ID NO: 114858 - RNA, 22 nt, Human adenovirus F
acuguucuugucguaaccaacu

SEQ ID NO: 114859 - RNA, 23 nt, Human adenovirus F
acuguucuugucguaaccaacuc

SEQ ID NO: 114860 - RNA, 21 nt, Human adenovirus F
acuggcaagagccaccuuguc

SEQ ID NO: 114861 - RNA, 16 nt, Human adenovirus F
acuucuauugcacuua

SEQ ID NO: 114862 - RNA, 22 nt, Human adenovirus F
accgacgauccaauaguggcgu

SEQ ID NO: 114863 - RNA, 20 nt, Human adenovirus F
acccgcaaucccgaagccuu

SEQ ID NO: 114864 - RNA, 19 nt, Human adenovirus F
accccgucuaccccuauga

SEQ ID NO: 114865 - RNA, 20 nt, Human adenovirus F
accccgccccgaccacaguc

SEQ ID NO: 114866 - RNA, 18 nt, Human adenovirus F
accaauccugaaugcaug

SEQ ID NO: 114867 - RNA, 16 nt, Human adenovirus F
accugggggcuuugaa

SEQ ID NO: 114868 - RNA, 13 nt, Human adenovirus F
accuuaaaauugg

SEQ ID NO: 114869 - RNA, 21 nt, Human adenovirus F
accuguguugauuuugucaca

SEQ ID NO: 114870 - RNA, 18 nt, Human adenovirus F
accuuacuuucugggcac

SEQ ID NO: 114871 - RNA, 17 nt, Human adenovirus F
acgcggcagcagcugca

SEQ ID NO: 114872 - RNA, 12 nt, Human adenovirus F
caaaauaacaau

SEQ ID NO: 114873 - RNA, 18 nt, Human adenovirus F
caaaaucguagguuuaaa

SEQ ID NO: 114874 - RNA, 14 nt, Human adenovirus F
caaaaucaacacag

SEQ ID NO: 114875 - RNA, 20 nt, Human adenovirus F
caaagagcuugaacauaaca

SEQ ID NO: 114876 - RNA, 12 nt, Human adenovirus F
caacagccuuug

SEQ ID NO: 114877 - RNA, 17 nt, Human adenovirus F
caacagccuuuguaaca

SEQ ID NO: 114878 - RNA, 22 nt, Human adenovirus F
caaaguccuggccaacugccac

SEQ ID NO: 114879 - RNA, 15 nt, Human adenovirus F
caaagggggacaaag

SEQ ID NO: 114880 - RNA, 18 nt, Human adenovirus F
caaagggggacaaagaga

SEQ ID NO: 114881 - RNA, 23 nt, Human adenovirus F
auugccucccugaacuaccagaa

SEQ ID NO: 114882 - RNA, 22 nt, Human adenovirus F
auugcaugauuauaaaugcucu

SEQ ID NO: 114883 - RNA, 21 nt, Human adenovirus F
auuucgaacgcgccaggugaa

SEQ ID NO: 114884 - RNA, 16 nt, Human adenovirus F
auuucucguacguggg

SEQ ID NO: 114885 - RNA, 18 nt, Human adenovirus F
auuuuucugagucuacca

SEQ ID NO: 114886 - RNA, 16 nt, Human adenovirus F
auuuugucacagaaga

SEQ ID NO: 114887 - RNA, 17 nt, Human adenovirus F
caaaacguucauuauuu

SEQ ID NO: 114888 - RNA, 16 nt, Human adenovirus F
auuuucuuugccaccu

SEQ ID NO: 114889 - RNA, 11 nt, Human adenovirus F
auuuuggcaga

SEQ ID NO: 114890 - RNA, 12 nt, Human adenovirus F
caauuaucuacg

SEQ ID NO: 114891 - RNA, 17 nt, Human adenovirus F
caauaucucauucgcac

SEQ ID NO: 114892 - RNA, 13 nt, Human adenovirus F
caaguuuuuccag

SEQ ID NO: 114893 - RNA, 23 nt, Human adenovirus F
cacaaaguccuggccaacugcca

SEQ ID NO: 114894 - RNA, 17 nt, Human adenovirus F
cacaaaauggacgaaga

SEQ ID NO: 114895 - RNA, 20 nt, Human adenovirus F
cacaaaauggacgaagacug

SEQ ID NO: 114896 - RNA, 23 nt, Human adenovirus F
cacagaagaaucguuguguaaau

SEQ ID NO: 114897 - RNA, 23 nt, Human adenovirus F
caacuagaaaucgacgggcagug

SEQ ID NO: 114898 - RNA, 20 nt, Human adenovirus F
caacuguacugcuacuacuu

SEQ ID NO: 114899 - RNA, 22 nt, Human adenovirus F
caacugcaauuuaggauuuaca

SEQ ID NO: 114900 - RNA, 22 nt, Human adenovirus F
caacgcaagagacguuugcaac

SEQ ID NO: 114901 - RNA, 20 nt, Human adenovirus F
caacgauucuucugugacaa

SEQ ID NO: 114902 - RNA, 14 nt, Human adenovirus F
caaguauacauuug

SEQ ID NO: 114903 - RNA, 15 nt, Human adenovirus F
caaguauacauuuga

SEQ ID NO: 114904 - RNA, 10 nt, Human adenovirus F
caacuuuauu

SEQ ID NO: 114905 - RNA, 16 nt, Human adenovirus F
caacuucccucuccga

SEQ ID NO: 114906 - RNA, 22 nt, Human adenovirus F
caacuuucguacgggaugugcc

SEQ ID NO: 114907 - RNA, 18 nt, Human adenovirus F
auggccacccccucgaug

SEQ ID NO: 114908 - RNA, 16 nt, Human adenovirus F
auggccagcaccuacu

SEQ ID NO: 114909 - RNA, 11 nt, Human adenovirus F
auggauguuuu

SEQ ID NO: 114910 - RNA, 17 nt, Human adenovirus F
auggcuuugacuugccg

SEQ ID NO: 114911 - RNA, 21 nt, Human adenovirus F
auggaaaggcccauaccaaag

SEQ ID NO: 114912 - RNA, 22 nt, Human adenovirus F
auggaaaggcccauaccaaaga

SEQ ID NO: 114913 - RNA, 22 nt, Human adenovirus F
auggaaaugaaaccuucagaaa

SEQ ID NO: 114914 - RNA, 16 nt, Human adenovirus F
auggagcuguggugcg

SEQ ID NO: 114915 - RNA, 15 nt, Human adenovirus F
augggcaccuggaac

SEQ ID NO: 114916 - RNA, 20 nt, Human adenovirus F
augggcaaagggggacaaag

SEQ ID NO: 114917 - RNA, 20 nt, Human adenovirus F
auugacacugcuaccaacuc

SEQ ID NO: 114918 - RNA, 14 nt, Human adenovirus F
auugacgaacuuac

SEQ ID NO: 114919 - RNA, 18 nt, Human adenovirus F
auucugggacgcucuuau

SEQ ID NO: 114920 - RNA, 23 nt, Human adenovirus F
auuauuucgaacgcgccagguga

SEQ ID NO: 114921 - RNA, 18 nt, Human adenovirus F
auuaaugggcaaaggggg

SEQ ID NO: 114922 - RNA, 22 nt, Human adenovirus F
auuaagucauuugguaacaagg

SEQ ID NO: 114923 - RNA, 18 nt, Human adenovirus F
auuaaguugggagggaug

SEQ ID NO: 114924 - RNA, 17 nt, Human adenovirus F
auuaauaaagcuuaccu

SEQ ID NO: 114925 - RNA, 19 nt, Human adenovirus F
auuaauaaagcuuaccuua

SEQ ID NO: 114926 - RNA, 14 nt, Human adenovirus F
augagcaacagggg

SEQ ID NO: 114927 - RNA, 16 nt, Human adenovirus F
augagcaacaggggau

SEQ ID NO: 114928 - RNA, 15 nt, Human adenovirus F
augagcuuacuuuaa

SEQ ID NO: 114929 - RNA, 20 nt, Human adenovirus F
augagucuguuuggugggcu

SEQ ID NO: 114930 - RNA, 21 nt, Human adenovirus F
augaguagccuucuauugcau

SEQ ID NO: 114931 - RNA, 22 nt, Human adenovirus F
aucuugcagaugaaaagaacca

SEQ ID NO: 114932 - RNA, 18 nt, Human adenovirus F
aucuuuuuugacuuggcu

SEQ ID NO: 114933 - RNA, 15 nt, Human adenovirus F
augaaaguuccucuu

SEQ ID NO: 114934 - RNA, 16 nt, Human adenovirus F
augaaaguuccucuuc

SEQ ID NO: 114935 - RNA, 17 nt, Human adenovirus F
augcuauugacacugcu

SEQ ID NO: 114936 - RNA, 17 nt, Human adenovirus F
augcuccgggauaagcu

SEQ ID NO: 114937 - RNA, 18 nt, Human adenovirus F
augcuccgggauaagcua

SEQ ID NO: 114938 - RNA, 18 nt, Human adenovirus F
augcauuuuggccugaau

SEQ ID NO: 114939 - RNA, 18 nt, Human adenovirus F
augcagacaagacaugga

SEQ ID NO: 114940 - RNA, 20 nt, Human adenovirus F
augauuuaugguucacugua

SEQ ID NO: 114941 - RNA, 16 nt, Human adenovirus F
cagggauacuggauac

SEQ ID NO: 114942 - RNA, 22 nt, Human adenovirus F
cagccuguggaguggcauuaaa

SEQ ID NO: 114943 - RNA, 22 nt, Human adenovirus F
cagccugaaauacacugaucca

SEQ ID NO: 114944 - RNA, 15 nt, Human adenovirus F
cagcuggaacucaaa

SEQ ID NO: 114945 - RNA, 12 nt, Human adenovirus F
cagcuggagcuu

SEQ ID NO: 114946 - RNA, 20 nt, Human adenovirus F
cagcuggagcuucucaggau

SEQ ID NO: 114947 - RNA, 16 nt, Human adenovirus F
cagcuuggaagagcua

SEQ ID NO: 114948 - RNA, 15 nt, Human adenovirus F
caccacggacagggc

SEQ ID NO: 114949 - RNA, 22 nt, Human adenovirus F
caccaccugcccuuccucccaa

SEQ ID NO: 114950 - RNA, 19 nt, Human adenovirus F
caccaauggaaaucaaguu

SEQ ID NO: 114951 - RNA, 19 nt, Human adenovirus F
caccaaagguacacaccaa

SEQ ID NO: 114952 - RNA, 15 nt, Human adenovirus F
cagaugaaacgagcc

SEQ ID NO: 114953 - RNA, 20 nt, Human adenovirus F
caugaaaguuccucuucucu

SEQ ID NO: 114954 - RNA, 16 nt, Human adenovirus F
caucgccgggcaggac

SEQ ID NO: 114955 - RNA, 18 nt, Human adenovirus F
cauaucuugcaacugcug

SEQ ID NO: 114956 - RNA, 11 nt, Human adenovirus F
cauaccaaaga

SEQ ID NO: 114957 - RNA, 14 nt, Human adenovirus F
cauaccaaagagcu

SEQ ID NO: 114958 - RNA, 20 nt, Human adenovirus F
cauauacuuuaaacaagcaa

SEQ ID NO: 114959 - RNA, 14 nt, Human adenovirus F
cagugcacugagca

SEQ ID NO: 114960 - RNA, 21 nt, Human adenovirus F
caguuguuugucaaguuuuuc

SEQ ID NO: 114961 - RNA, 23 nt, Human adenovirus F
caguaugguaacuccucuucucc

SEQ ID NO: 114962 - RNA, 18 nt, Human adenovirus F
cagguucuuugcuggcaa

SEQ ID NO: 114963 - RNA, 19 nt, Human adenovirus F
ccaacagggacacgagcug

SEQ ID NO: 114964 - RNA, 18 nt, Human adenovirus F
ccaaccaggccuugcaaa

SEQ ID NO: 114965 - RNA, 19 nt, Human adenovirus F
ccaaagcagagcucugcaa

SEQ ID NO: 114966 - RNA, 21 nt, Human adenovirus F
cauuuaccaccccagcacuug

SEQ ID NO: 114967 - RNA, 21 nt, Human adenovirus F
ccacaaucuucaucuugcaga

SEQ ID NO: 114968 - RNA, 16 nt, Human adenovirus F
ccaaugcaaaaagggu

SEQ ID NO: 114969 - RNA, 15 nt, Human adenovirus F
ccauaaaagcaauau

SEQ ID NO: 114970 - RNA, 21 nt, Human adenovirus F
ccagcacugccggggcaauau

SEQ ID NO: 114971 - RNA, 19 nt, Human adenovirus F
cccaagagggaagacgggu

SEQ ID NO: 114972 - RNA, 16 nt, Human adenovirus F
ccauuuuccaaacugc

SEQ ID NO: 114973 - RNA, 18 nt, Human adenovirus F
ccauuuuccaaacugcgg

SEQ ID NO: 114974 - RNA, 11 nt, Human adenovirus F
cccaacaggga

SEQ ID NO: 114975 - RNA, 17 nt, Human adenovirus F
cccaaauccgcacucuu

SEQ ID NO: 114976 - RNA, 18 nt, Human adenovirus F
ccauuaagaagacuguua

SEQ ID NO: 114977 - RNA, 16 nt, Human adenovirus F
ccauguggcacuguuu

SEQ ID NO: 114978 - RNA, 21 nt, Human adenovirus F
cccccgggaguuuuagcacuc

SEQ ID NO: 114979 - RNA, 14 nt, Human adenovirus F
cccgcugaucugaa

SEQ ID NO: 114980 - RNA, 14 nt, Human adenovirus F
ccccgaccacaguc

SEQ ID NO: 114981 - RNA, 16 nt, Human adenovirus F
cccaccgucuuccacc

SEQ ID NO: 114982 - RNA, 20 nt, Human adenovirus F
ccccagcugguaagcagccu

SEQ ID NO: 114983 - RNA, 19 nt, Human adenovirus F
cccagcacuuggauuacau

SEQ ID NO: 114984 - RNA, 12 nt, Human adenovirus F
ccgaucacuccg

SEQ ID NO: 114985 - RNA, 16 nt, Human adenovirus F
ccgcaauggucuuaca

SEQ ID NO: 114986 - RNA, 22 nt, Human adenovirus F
cccuaucacuaaaaccaacaaa

SEQ ID NO: 114987 - RNA, 18 nt, Human adenovirus F
ccgacgcuguaugcuauu

SEQ ID NO: 114988 - RNA, 16 nt, Human adenovirus F
cccuaauuaaguccac

SEQ ID NO: 114989 - RNA, 22 nt, Human adenovirus F
ccgugccagaaaaaacccuuaa

SEQ ID NO: 114990 - RNA, 17 nt, Human adenovirus F
ccggcggcguacacugg

SEQ ID NO: 114991 - RNA, 16 nt, Human adenovirus F
uuugaauuuggggcau

SEQ ID NO: 114992 - RNA, 22 nt, Human adenovirus F
ugccaacgggcggcaaacuuuc

SEQ ID NO: 114993 - RNA, 17 nt, Human adenovirus F
ugccacgcgacgcggaa

SEQ ID NO: 114994 - RNA, 21 nt, Human adenovirus F
ugccacuuuuuuuguggccau

SEQ ID NO: 114995 - RNA, 15 nt, Human adenovirus F
ugcgcugcuacucaa

SEQ ID NO: 114996 - RNA, 13 nt, Human adenovirus F
ugcgugguaccau

SEQ ID NO: 114997 - RNA, 18 nt, Human adenovirus F
ugcggcaaaucccagcuu

SEQ ID NO: 114998 - RNA, 19 nt, Human adenovirus F
ugcgguuucaaacauguga

SEQ ID NO: 114999 - RNA, 20 nt, Human adenovirus F
ugcgaacauuuguuggcagc

SEQ ID NO: 115000 - RNA, 18 nt, Human adenovirus F
ugccggggcaauaucuca

SEQ ID NO: 115001 - RNA, 20 nt, Human adenovirus F
ugccucuacugcucguggca

SEQ ID NO: 115002 - RNA, 21 nt, Human adenovirus F
ugccucuacugcucguggcau

SEQ ID NO: 115003 - RNA, 13 nt, Human adenovirus F
ugccuauugccac

SEQ ID NO: 115004 - RNA, 19 nt, Human adenovirus F
ugccuauugccacaaugga

SEQ ID NO: 115005 - RNA, 20 nt, Human adenovirus F
ugcccuuccucccaacuuuc

SEQ ID NO: 115006 - RNA, 18 nt, Human adenovirus F
ugaguuuaaaaacgguga

SEQ ID NO: 115007 - RNA, 14 nt, Human adenovirus F
ugagucuaccacuu

SEQ ID NO: 115008 - RNA, 16 nt, Human adenovirus F
ugauuauaaaugcucu

SEQ ID NO: 115009 - RNA, 15 nt, Human adenovirus F
ugacccacaaucuuc

SEQ ID NO: 115010 - RNA, 17 nt, Human adenovirus F
ugaaaguuccucuucuc

SEQ ID NO: 115011 - RNA, 19 nt, Human adenovirus F
ugaaaggcaagacacugag

SEQ ID NO: 115012 - RNA, 19 nt, Human adenovirus F
ugaaagagcgcgacaacga

SEQ ID NO: 115013 - RNA, 24 nt, Human adenovirus F
ugaaauacacugauccacuuacaa

SEQ ID NO: 115014 - RNA, 14 nt, Human adenovirus F
ugaaaugaauuugu

SEQ ID NO: 115015 - RNA, 14 nt, Human adenovirus F
ugaaguuaccaaag

SEQ ID NO: 115016 - RNA, 16 nt, Human adenovirus F
ugaaguuaccaaagac

SEQ ID NO: 115017 - RNA, 16 nt, Human adenovirus F
ugaaucaauaaaagcu

SEQ ID NO: 115018 - RNA, 21 nt, Human adenovirus F
ugacaguagagggugcucuua

SEQ ID NO: 115019 - RNA, 21 nt, Human adenovirus F
ucugguagaaagcaaagccau

SEQ ID NO: 115020 - RNA, 21 nt, Human adenovirus F
ucuuuucugcucugccuaugc

SEQ ID NO: 115021 - RNA, 17 nt, Human adenovirus F
ucuuuuuugacuuggcu

SEQ ID NO: 115022 - RNA, 21 nt, Human adenovirus F
ugaaaauacaaaauaacaaua

SEQ ID NO: 115023 - RNA, 21 nt, Human adenovirus F
ugaaaagauauggccauguua

SEQ ID NO: 115024 - RNA, 15 nt, Human adenovirus F
ucauccgccauugcc

SEQ ID NO: 115025 - RNA, 17 nt, Human adenovirus F
ucauccgccauugccac

SEQ ID NO: 115026 - RNA, 18 nt, Human adenovirus F
ucaugcaugcagacuuuu

SEQ ID NO: 115027 - RNA, 13 nt, Human adenovirus F
uccgccauugcca

SEQ ID NO: 115028 - RNA, 14 nt, Human adenovirus F
uccaccaagcuccu

SEQ ID NO: 115029 - RNA, 11 nt, Human adenovirus F
uccacccaaac

SEQ ID NO: 115030 - RNA, 11 nt, Human adenovirus F
ucccacccacg

SEQ ID NO: 115031 - RNA, 14 nt, Human adenovirus F
ucgguuaagagaag

SEQ ID NO: 115032 - RNA, 15 nt, Human adenovirus F
ucgugacuugcacuu

SEQ ID NO: 115033 - RNA, 17 nt, Human adenovirus F
ucggacgagcgccucaa

SEQ ID NO: 115034 - RNA, 20 nt, Human adenovirus F
uccuggccaacugccaccuc

SEQ ID NO: 115035 - RNA, 19 nt, Human adenovirus F
uccuuuuggcuguacucca

SEQ ID NO: 115036 - RNA, 18 nt, Human adenovirus F
ucugcuagaacaggccgc

SEQ ID NO: 115037 - RNA, 17 nt, Human adenovirus F
ucugauggaguugugga

SEQ ID NO: 115038 - RNA, 13 nt, Human adenovirus F
ucugcaugcauga

SEQ ID NO: 115039 - RNA, 15 nt, Human adenovirus F
ucugcagcauugcca

SEQ ID NO: 115040 - RNA, 17 nt, Human adenovirus F
ucugcagcauugccacu

SEQ ID NO: 115041 - RNA, 13 nt, Human adenovirus F
ucugccagaacuu

SEQ ID NO: 115042 - RNA, 21 nt, Human adenovirus F
ucucccuccaccuccagugag

SEQ ID NO: 115043 - RNA, 18 nt, Human adenovirus F
ucguuuaaaacuuuaugg

SEQ ID NO: 115044 - RNA, 22 nt, Human adenovirus F
uguugauuuugucacagaagaa

SEQ ID NO: 115045 - RNA, 15 nt, Human adenovirus F
uguuuauuucuuggg

SEQ ID NO: 115046 - RNA, 20 nt, Human adenovirus F
uguuuauuuauuucuuuugc

SEQ ID NO: 115047 - RNA, 23 nt, Human adenovirus F
uguucaccuuuuuacccugaccc

SEQ ID NO: 115048 - RNA, 20 nt, Human adenovirus F
ugugaucuucgugacuugca

SEQ ID NO: 115049 - RNA, 16 nt, Human adenovirus F
uuaaccuugaguuuaa

SEQ ID NO: 115050 - RNA, 15 nt, Human adenovirus F
uuaauuuaugaugca

SEQ ID NO: 115051 - RNA, 20 nt, Human adenovirus F
uuaaauuacacuaagccucu

SEQ ID NO: 115052 - RNA, 19 nt, Human adenovirus F
uuaacaaguagccuaagga

SEQ ID NO: 115053 - RNA, 19 nt, Human adenovirus F
uuaaacuaucaacuacagc

SEQ ID NO: 115054 - RNA, 18 nt, Human adenovirus F
uuacuccagucgcaugaa

SEQ ID NO: 115055 - RNA, 21 nt, Human adenovirus F
uuacuuuaaaacuuggcagca

SEQ ID NO: 115056 - RNA, 23 nt, Human adenovirus F
uuacuagucuuagcuggaucaaa

SEQ ID NO: 115057 - RNA, 21 nt, Human adenovirus F
uuagugccggcccccacauga

SEQ ID NO: 115058 - RNA, 23 nt, Human adenovirus F
ugugagcgaggugaggucuauuc

SEQ ID NO: 115059 - RNA, 21 nt, Human adenovirus F
ugucaaguuuuuccagcagca

SEQ ID NO: 115060 - RNA, 19 nt, Human adenovirus F
uguaugcuauuuuccagca

SEQ ID NO: 115061 - RNA, 21 nt, Human adenovirus F
uggugggccaguuuacaaaag

SEQ ID NO: 115062 - RNA, 17 nt, Human adenovirus F
ugguaacuccucuucuc

SEQ ID NO: 115063 - RNA, 13 nt, Human adenovirus F
ugguucacuguau

SEQ ID NO: 115064 - RNA, 15 nt, Human adenovirus F
ugguucacuguauaa

SEQ ID NO: 115065 - RNA, 16 nt, Human adenovirus F
uguagguaagagccau

SEQ ID NO: 115066 - RNA, 19 nt, Human adenovirus F
ugggcuuggauguucaaau

SEQ ID NO: 115067 - RNA, 16 nt, Human adenovirus F
ugggcuaaacacccca

SEQ ID NO: 115068 - RNA, 21 nt, Human adenovirus F
ugggccaguuuacaaaagcau

SEQ ID NO: 115069 - RNA, 17 nt, Human adenovirus F
uggcuuccggcauuaac

SEQ ID NO: 115070 - RNA, 16 nt, Human adenovirus F
uggggguuaagcccau

SEQ ID NO: 115071 - RNA, 15 nt, Human adenovirus F
uggggagagguguga

SEQ ID NO: 115072 - RNA, 21 nt, Human adenovirus F
uggcguagguaaggguugucg

SEQ ID NO: 115073 - RNA, 23 nt, Human adenovirus F
uugccacuuuuuuuguggccauu

SEQ ID NO: 115074 - RNA, 13 nt, Human adenovirus F
uugcugcgucaau

SEQ ID NO: 115075 - RNA, 13 nt, Human adenovirus F
uugaacauaacac

SEQ ID NO: 115076 - RNA, 16 nt, Human adenovirus F
uugaacauaacaccua

SEQ ID NO: 115077 - RNA, 14 nt, Human adenovirus F
uugaaccguuacau

SEQ ID NO: 115078 - RNA, 16 nt, Human adenovirus F
uugaagacgacuucaa

SEQ ID NO: 115079 - RNA, 12 nt, Human adenovirus F
uucuccugcuug

SEQ ID NO: 115080 - RNA, 13 nt, Human adenovirus F
uucauuuggucaa

SEQ ID NO: 115081 - RNA, 13 nt, Human adenovirus F
uucaucuuaacuc

SEQ ID NO: 115082 - RNA, 13 nt, Human adenovirus F
uucaucuugcaga

SEQ ID NO: 115083 - RNA, 22 nt, Human adenovirus F
uucaggcagcagccccaggcca

SEQ ID NO: 115084 - RNA, 19 nt, Human adenovirus F
uucaguaugguaacuccuc

SEQ ID NO: 115085 - RNA, 20 nt, Human adenovirus F
uucagaaacaucguccaaca

SEQ ID NO: 115086 - RNA, 18 nt, Human adenovirus F
uuccucuucucugucuua

SEQ ID NO: 115087 - RNA, 23 nt, Human adenovirus F
uuccucuucucugucuuauccuc

SEQ ID NO: 115088 - RNA, 19 nt, Human adenovirus F
uuccuggacucccuggaca

SEQ ID NO: 115089 - RNA, 19 nt, Human adenovirus F
uucgaacgcgccaggugaa

SEQ ID NO: 115090 - RNA, 19 nt, Human adenovirus F
uucccgccuugcugacuua

SEQ ID NO: 115091 - RNA, 17 nt, Human adenovirus F
uucccucuccgauuucu

SEQ ID NO: 115092 - RNA, 23 nt, Human adenovirus F
uucccuugguaucgagaaauugu

SEQ ID NO: 115093 - RNA, 18 nt, Human adenovirus F
uuccuccaacggcuugca

SEQ ID NO: 115094 - RNA, 14 nt, Human adenovirus F
uuucaaacauguga

SEQ ID NO: 115095 - RNA, 22 nt, Human adenovirus F
uuuaugcagacaagacauggaa

SEQ ID NO: 115096 - RNA, 23 nt, Human adenovirus F
uuuauaccauuaagaagacuguu

SEQ ID NO: 115097 - RNA, 21 nt, Human adenovirus F
uuucgaacgcgccaggugaau

SEQ ID NO: 115098 - RNA, 20 nt, Human adenovirus F
uuucggacgagcgccucaaa

SEQ ID NO: 115099 - RNA, 16 nt, Human adenovirus F
uuucggccauuuugga

SEQ ID NO: 115100 - RNA, 12 nt, Human adenovirus F
uuuaaacaagca

SEQ ID NO: 115101 - RNA, 15 nt, Human adenovirus F
uuuaaccugcuguuu

SEQ ID NO: 115102 - RNA, 22 nt, Human adenovirus F
uuguuugcggugguacaggggg

SEQ ID NO: 115103 - RNA, 14 nt, Human adenovirus F
uuguuauacaagua

SEQ ID NO: 115104 - RNA, 23 nt, Human adenovirus F
uugugacgcaggguggguacaac

SEQ ID NO: 115105 - RNA, 19 nt, Human adenovirus F
uugucgcaugccuccagca

SEQ ID NO: 115106 - RNA, 15 nt, Human adenovirus F
uugucguaaccaacu

SEQ ID NO: 115107 - RNA, 14 nt, Human adenovirus F
uugucuaaauggga

SEQ ID NO: 115108 - RNA, 18 nt, Human adenovirus F
uuggguccuccauuaagu

SEQ ID NO: 115109 - RNA, 13 nt, Human adenovirus F
uuggaaaaucgca

SEQ ID NO: 115110 - RNA, 17 nt, Human adenovirus F
uuggaagaugaguuuaa

SEQ ID NO: 115111 - RNA, 20 nt, Human adenovirus F
uuggaauuuuccugcgcuaa

SEQ ID NO: 115112 - RNA, 15 nt, Human adenovirus F
uaagaagguccaugg

SEQ ID NO: 115113 - RNA, 21 nt, Human adenovirus F
uaaccuucgcugcuuuacuua

SEQ ID NO: 115114 - RNA, 22 nt, Human adenovirus F
uaaggguugucgaguuggcagg

SEQ ID NO: 115115 - RNA, 21 nt, Human adenovirus F
uaaaguccagcgcgugcuuag

SEQ ID NO: 115116 - RNA, 19 nt, Human adenovirus F
uaaagcauuuccgcagcuu

SEQ ID NO: 115117 - RNA, 21 nt, Human adenovirus F
uaacccaacagggacacgagc

SEQ ID NO: 115118 - RNA, 22 nt, Human adenovirus F
gugguggauauagccaaccagg

SEQ ID NO: 115119 - RNA, 16 nt, Human adenovirus F
uaaagaaaaccagcau

SEQ ID NO: 115120 - RNA, 20 nt, Human adenovirus F
uaccccgcgacgucagcuga

SEQ ID NO: 115121 - RNA, 21 nt, Human adenovirus F
uaccccgcgacgucagcugaa

SEQ ID NO: 115122 - RNA, 16 nt, Human adenovirus F
uacccgucuccugcaa

SEQ ID NO: 115123 - RNA, 20 nt, Human adenovirus F
uacggaucagcgcuuugcca

SEQ ID NO: 115124 - RNA, 21 nt, Human adenovirus F
uaccaaugcuaaacaugagcu

SEQ ID NO: 115125 - RNA, 14 nt, Human adenovirus F
uaccagagccauag

SEQ ID NO: 115126 - RNA, 20 nt, Human adenovirus F
uaccacuucuauugcacuua

SEQ ID NO: 115127 - RNA, 22 nt, Human adenovirus F
uaccaauccugaaugcauguac

SEQ ID NO: 115128 - RNA, 16 nt, Human adenovirus F
uacauuugaacagcug

SEQ ID NO: 115129 - RNA, 13 nt, Human adenovirus F
uaccaaagacaaa

SEQ ID NO: 115130 - RNA, 23 nt, Human adenovirus F
uaccaaagagcuugaacauaaca

SEQ ID NO: 115131 - RNA, 15 nt, Human adenovirus F
uacacugucacugua

SEQ ID NO: 115132 - RNA, 16 nt, Human adenovirus F
uacacugucacuguau

SEQ ID NO: 115133 - RNA, 17 nt, Human adenovirus F
uacacugucacuguauu

SEQ ID NO: 115134 - RNA, 20 nt, Human adenovirus F
uacaagauuccaccaaaggu

SEQ ID NO: 115135 - RNA, 13 nt, Human adenovirus F
uacaccaaugcaa

SEQ ID NO: 115136 - RNA, 19 nt, Human adenovirus F
uacaaccguugguuccuua

SEQ ID NO: 115137 - RNA, 23 nt, Human adenovirus F
uacaaaguuaucagaaccuccga

SEQ ID NO: 115138 - RNA, 14 nt, Human adenovirus F
uaauuaaaguuauu

SEQ ID NO: 115139 - RNA, 15 nt, Human adenovirus F
uaauaaagcuuaccu

SEQ ID NO: 115140 - RNA, 16 nt, Human adenovirus F
uaauaaagcuuaccuu

SEQ ID NO: 115141 - RNA, 19 nt, Human adenovirus F
uaauaaagcuuaccuuaaa

SEQ ID NO: 115142 - RNA, 17 nt, Human adenovirus F
uaguuuauucugaugga

SEQ ID NO: 115143 - RNA, 19 nt, Human adenovirus F
uagguuggcaauguugcca

SEQ ID NO: 115144 - RNA, 19 nt, Human adenovirus F
uagcagugggcaaaggggg

SEQ ID NO: 115145 - RNA, 21 nt, Human adenovirus F
uacugcaaacgagaggaccac

SEQ ID NO: 115146 - RNA, 14 nt, Human adenovirus F
uagguaagagccau

SEQ ID NO: 115147 - RNA, 21 nt, Human adenovirus F
uagguaagagccauguucuga

SEQ ID NO: 115148 - RNA, 18 nt, Human adenovirus F
uauaaucuuaaaacugac

SEQ ID NO: 115149 - RNA, 23 nt, Human adenovirus F
uauaauggaaaggcccauaccaa

SEQ ID NO: 115150 - RNA, 15 nt, Human adenovirus F
uaucucaucuucacc

SEQ ID NO: 115151 - RNA, 13 nt, Human adenovirus F
uauuaaaccuggg

SEQ ID NO: 115152 - RNA, 21 nt, Human adenovirus F
uaugugcuggggaauggagcu

SEQ ID NO: 115153 - RNA, 12 nt, Human adenovirus F
uaugaaaacucc

SEQ ID NO: 115154 - RNA, 12 nt, Human adenovirus F
ucaaacauguga

SEQ ID NO: 115155 - RNA, 14 nt, Human adenovirus F
uauuuucaacuuua

SEQ ID NO: 115156 - RNA, 12 nt, Human adenovirus F
uauugcacuuaa

SEQ ID NO: 115157 - RNA, 17 nt, Human adenovirus F
uauugcaggaguggcca

SEQ ID NO: 115158 - RNA, 23 nt, Human adenovirus F
uauugcaggaguggccaaugugg

SEQ ID NO: 115159 - RNA, 14 nt, Human adenovirus F
uauugccccucagg

SEQ ID NO: 115160 - RNA, 20 nt, Human adenovirus F
uauuguucuguuacauaaga

SEQ ID NO: 115161 - RNA, 17 nt, Human adenovirus F
uauucaagauugcagcu

SEQ ID NO: 115162 - RNA, 18 nt, Human adenovirus F
ucaaucagcggcuggaaa

SEQ ID NO: 115163 - RNA, 14 nt, Human adenovirus F
ucaaggaaacaaca

SEQ ID NO: 115164 - RNA, 18 nt, Human adenovirus F
ucaaguacacugacccca

SEQ ID NO: 115165 - RNA, 18 nt, Human adenovirus F
ucaacagcuggaacucaa

SEQ ID NO: 115166 - RNA, 18 nt, Human adenovirus F
ucaaccccgucuaccccu

SEQ ID NO: 115167 - RNA, 17 nt, Human adenovirus F
ucaacuacagccuguca

SEQ ID NO: 115168 - RNA, 15 nt, Human adenovirus F
gugaaguuaccaaag

SEQ ID NO: 115169 - RNA, 16 nt, Human adenovirus F
gugaaguuaccaaaga

SEQ ID NO: 115170 - RNA, 17 nt, Human adenovirus F
gugaaguuaccaaagac

SEQ ID NO: 115171 - RNA, 12 nt, Human adenovirus F
gucuuccaccuc

SEQ ID NO: 115172 - RNA, 20 nt, Human adenovirus F
gucuuagcuggaucaaacag

SEQ ID NO: 115173 - RNA, 13 nt, Human adenovirus F
gucuuauccuccu

SEQ ID NO: 115174 - RNA, 17 nt, Human adenovirus F
gucuuauccuccuucac

SEQ ID NO: 115175 - RNA, 18 nt, Human adenovirus F
gugacugcgcggcuguaa

SEQ ID NO: 115176 - RNA, 21 nt, Human adenovirus F
gugcgguuucaaacaugugac

SEQ ID NO: 115177 - RNA, 20 nt, Human adenovirus F
gugccacuauuaauguugau

SEQ ID NO: 115178 - RNA, 19 nt, Human adenovirus F
gugccagaaaaaacccuua

SEQ ID NO: 115179 - RNA, 15 nt, Human adenovirus F
gucucuuaaggacua

SEQ ID NO: 115180 - RNA, 15 nt, Human adenovirus F
gucucuucaauguaa

SEQ ID NO: 115181 - RNA, 17 nt, Human adenovirus F
gucucucccuccaccuc

SEQ ID NO: 115182 - RNA, 12 nt, Human adenovirus F
gucguugccagc

SEQ ID NO: 115183 - RNA, 15 nt, Human adenovirus F
gucuaccacuucuau

SEQ ID NO: 115184 - RNA, 14 nt, Human adenovirus F
guccucagccugaa

SEQ ID NO: 115185 - RNA, 18 nt, Human adenovirus F
gucgauaaccccaugugg

SEQ ID NO: 115186 - RNA, 16 nt, Human adenovirus F
guccuugaacaguuug

SEQ ID NO: 115187 - RNA, 22 nt, Human adenovirus F
gucauauacuuuaaacaagcaa

SEQ ID NO: 115188 - RNA, 15 nt, Human adenovirus F
gucaugaaaguuccu

SEQ ID NO: 115189 - RNA, 17 nt, Human adenovirus F
ggucaaaugcuccggga

SEQ ID NO: 115190 - RNA, 21 nt, Human adenovirus F
ggucaacaccacggacagggc

SEQ ID NO: 115191 - RNA, 11 nt, Human adenovirus F
ggucaacagcu

SEQ ID NO: 115192 - RNA, 12 nt, Human adenovirus F
ggucaccuugca

SEQ ID NO: 115193 - RNA, 11 nt, Human adenovirus F
ggucaaaaacu

SEQ ID NO: 115194 - RNA, 23 nt, Human adenovirus F
gguacuagcagugggcaaagggg

SEQ ID NO: 115195 - RNA, 21 nt, Human adenovirus F
gucagcugaacccacccucuu

SEQ ID NO: 115196 - RNA, 21 nt, Human adenovirus F
guaucacagaagugaagacca

SEQ ID NO: 115197 - RNA, 22 nt, Human adenovirus F
guaucacagaagugaagaccaa

SEQ ID NO: 115198 - RNA, 17 nt, Human adenovirus F
guaugaaggucuccuaa

SEQ ID NO: 115199 - RNA, 19 nt, Human adenovirus F
guaugcuauugacacugcu

SEQ ID NO: 115200 - RNA, 15 nt, Human adenovirus F
guaugguaacuccuc

SEQ ID NO: 115201 - RNA, 18 nt, Human adenovirus F
guaccaccgcaaacaacu

SEQ ID NO: 115202 - RNA, 13 nt, Human adenovirus F
guacacugacccc

SEQ ID NO: 115203 - RNA, 21 nt, Human adenovirus F
guacaguccaaaaucugcugc

SEQ ID NO: 115204 - RNA, 15 nt, Human adenovirus F
guacaaccgcuccug

SEQ ID NO: 115205 - RNA, 22 nt, Human adenovirus F
guacaaccgcuccugguuguga

SEQ ID NO: 115206 - RNA, 20 nt, Human adenovirus F
ggccgucccugggaugcagg

SEQ ID NO: 115207 - RNA, 16 nt, Human adenovirus F
ggcccuagaccaccug

SEQ ID NO: 115208 - RNA, 19 nt, Human adenovirus F
ggcagcagccccaggccaa

SEQ ID NO: 115209 - RNA, 14 nt, Human adenovirus F
ggagcuucucagga

SEQ ID NO: 115210 - RNA, 21 nt, Human adenovirus F
ggaaaccgccuacucuuacaa

SEQ ID NO: 115211 - RNA, 16 nt, Human adenovirus F
ggaaacaacagccuuu

SEQ ID NO: 115212 - RNA, 17 nt, Human adenovirus F
ggaaaucagaugcauuu

SEQ ID NO: 115213 - RNA, 19 nt, Human adenovirus F
ggaaaggcccauaccaaag

SEQ ID NO: 115214 - RNA, 21 nt, Human adenovirus F
ggaaaggcccauaccaaagag

SEQ ID NO: 115215 - RNA, 21 nt, Human adenovirus F
ggacaguucccaaauccgcac

SEQ ID NO: 115216 - RNA, 15 nt, Human adenovirus F
ggacgagcgccucaa

SEQ ID NO: 115217 - RNA, 21 nt, Human adenovirus F
ggacugauauauaaugccuua

SEQ ID NO: 115218 - RNA, 23 nt, Human adenovirus F
gcuggggaauggagcuguggugc

SEQ ID NO: 115219 - RNA, 19 nt, Human adenovirus F
gcuuuugcgaaacuugcuu

SEQ ID NO: 115220 - RNA, 21 nt, Human adenovirus F
gcuuccuccaacggcuugcaa

SEQ ID NO: 115221 - RNA, 12 nt, Human adenovirus F
gcuucucaggau

SEQ ID NO: 115222 - RNA, 18 nt, Human adenovirus F
gcucuucgcccggacacu

SEQ ID NO: 115223 - RNA, 14 nt, Human adenovirus F
gcugaggagcuguu

SEQ ID NO: 115224 - RNA, 13 nt, Human adenovirus F
gcugcacugccau

SEQ ID NO: 115225 - RNA, 22 nt, Human adenovirus F
gcuaaaggaccaaaacuuucaa

SEQ ID NO: 115226 - RNA, 19 nt, Human adenovirus F
gcuaacagacaauuuugca

SEQ ID NO: 115227 - RNA, 18 nt, Human adenovirus F
gcggcccugcaaagccaa

SEQ ID NO: 115228 - RNA, 22 nt, Human adenovirus F
gccaucgugcgcgaacugggcu

SEQ ID NO: 115229 - RNA, 18 nt, Human adenovirus F
gcccauaucugacaaccc

SEQ ID NO: 115230 - RNA, 22 nt, Human adenovirus F
gcgcuuugcgcaggcgaauaaa

SEQ ID NO: 115231 - RNA, 18 nt, Human adenovirus F
gcccagguuuaucaggaa

SEQ ID NO: 115232 - RNA, 15 nt, Human adenovirus F
gcccaguugagggaa

SEQ ID NO: 115233 - RNA, 15 nt, Human adenovirus F
gaaguuaccaaagac

SEQ ID NO: 115234 - RNA, 17 nt, Human adenovirus F
gaaguuaccaaagacaa

SEQ ID NO: 115235 - RNA, 12 nt, Human adenovirus F
gacagagcuuua

SEQ ID NO: 115236 - RNA, 22 nt, Human adenovirus F
gacagaugguuucgcugcagac

SEQ ID NO: 115237 - RNA, 21 nt, Human adenovirus F
gaauuauucaagauugcagcu

SEQ ID NO: 115238 - RNA, 18 nt, Human adenovirus F
gaauggagcuguggugcg

SEQ ID NO: 115239 - RNA, 17 nt, Human adenovirus F
gaaccaagcuaaaugcc

SEQ ID NO: 115240 - RNA, 14 nt, Human adenovirus F
gaacauaacaccua

SEQ ID NO: 115241 - RNA, 21 nt, Human adenovirus F
cuugacauuccauuuauuaca

SEQ ID NO: 115242 - RNA, 17 nt, Human adenovirus F
gaaaggcaagacacuga

SEQ ID NO: 115243 - RNA, 17 nt, Human adenovirus F
gaaaggcccauaccaaa

SEQ ID NO: 115244 - RNA, 20 nt, Human adenovirus F
gaaaggcccauaccaaagag

SEQ ID NO: 115245 - RNA, 21 nt, Human adenovirus F
cuugguuggaguuggcuuuaa

SEQ ID NO: 115246 - RNA, 13 nt, Human adenovirus F
gaaauacacugau

SEQ ID NO: 115247 - RNA, 22 nt, Human adenovirus F
gaaauacacugauccacuuaca

SEQ ID NO: 115248 - RNA, 16 nt, Human adenovirus F
gaaaucagaugcauuu

SEQ ID NO: 115249 - RNA, 16 nt, Human adenovirus F
gaaaguuccucuucuc

SEQ ID NO: 115250 - RNA, 17 nt, Human adenovirus F
gaaaguuccucuucucu

SEQ ID NO: 115251 - RNA, 23 nt, Human adenovirus F
gacuauuuuaugcagacaagaca

SEQ ID NO: 115252 - RNA, 21 nt, Human adenovirus F
gacuauacacugucacuguau

SEQ ID NO: 115253 - RNA, 15 nt, Human adenovirus F
gagaucggcaccagc

SEQ ID NO: 115254 - RNA, 21 nt, Human adenovirus F
gagcuaggcauaaauucuaca

SEQ ID NO: 115255 - RNA, 16 nt, Human adenovirus F
gagcucugcaaaaaca

SEQ ID NO: 115256 - RNA, 13 nt, Human adenovirus F
gagcuucucagga

SEQ ID NO: 115257 - RNA, 13 nt, Human adenovirus F
gagcuguggugcg

SEQ ID NO: 115258 - RNA, 17 nt, Human adenovirus F
gaggaaaccgccuacuc

SEQ ID NO: 115259 - RNA, 12 nt, Human adenovirus F
gaggagcuguua

SEQ ID NO: 115260 - RNA, 15 nt, Human adenovirus F
gacgaagacugaguu

SEQ ID NO: 115261 - RNA, 18 nt, Human adenovirus F
gaccgcgaggaaaccgcc

SEQ ID NO: 115262 - RNA, 14 nt, Human adenovirus F
gaccuuggccacca

SEQ ID NO: 115263 - RNA, 14 nt, Human adenovirus F
gacuaaacauugau

SEQ ID NO: 115264 - RNA, 21 nt, Human adenovirus F
gaccacuuaaauucuggaauc

SEQ ID NO: 115265 - RNA, 14 nt, Human adenovirus F
gaucgccaacagcc

SEQ ID NO: 115266 - RNA, 13 nt, Human adenovirus F
gaugcauccuccc

SEQ ID NO: 115267 - RNA, 22 nt, Human adenovirus F
gaugcagguaggaccacuggag

SEQ ID NO: 115268 - RNA, 22 nt, Human adenovirus F
gauuacuccagucgcaugaauu

SEQ ID NO: 115269 - RNA, 20 nt, Human adenovirus F
gaggguacuagcagugggca

SEQ ID NO: 115270 - RNA, 19 nt, Human adenovirus F
gaggugaggucuauuccau

SEQ ID NO: 115271 - RNA, 18 nt, Human adenovirus F
gaguagccuucuauugca

SEQ ID NO: 115272 - RNA, 17 nt, Human adenovirus F
gcaccaccugcccuucc

SEQ ID NO: 115273 - RNA, 16 nt, Human adenovirus F
gcaagagacguuugca

SEQ ID NO: 115274 - RNA, 14 nt, Human adenovirus F
gcaccagccagcuc

SEQ ID NO: 115275 - RNA, 13 nt, Human adenovirus F
gcaaacaacugca

SEQ ID NO: 115276 - RNA, 14 nt, Human adenovirus F
gcaaaaccaaauca

SEQ ID NO: 115277 - RNA, 19 nt, Human adenovirus F
gauuuaugguucacuguau

SEQ ID NO: 115278 - RNA, 20 nt, Human adenovirus F
gccaggaaacgguacaaccg

SEQ ID NO: 115279 - RNA, 14 nt, Human adenovirus F
gccagcaccuacuu

SEQ ID NO: 115280 - RNA, 17 nt, Human adenovirus F
gccacucgaaaccaaau

SEQ ID NO: 115281 - RNA, 17 nt, Human adenovirus F
gccaccgauaccuacuu

SEQ ID NO: 115282 - RNA, 14 nt, Human adenovirus F
gcauuaaaaacuuu

SEQ ID NO: 115283 - RNA, 15 nt, Human adenovirus F
gcauuaaugggcaaa

SEQ ID NO: 115284 - RNA, 19 nt, Human adenovirus F
gcauuaaugggcaaagggg

SEQ ID NO: 115285 - RNA, 12 nt, Human adenovirus F
gccaauuaucua

SEQ ID NO: 115286 - RNA, 13 nt, Human adenovirus F
gccaacacccugu

SEQ ID NO: 115287 - RNA, 18 nt, Human adenovirus F
gcagugcacugagcagcu

SEQ ID NO: 115288 - RNA, 21 nt, Human adenovirus F
gcagccuguggaguggcauua

SEQ ID NO: 115289 - RNA, 21 nt, Human adenovirus F
gcagcuggagcuucucaggau

SEQ ID NO: 115290 - RNA, 12 nt, Human adenovirus F
gcagcuuggaag

SEQ ID NO: 115291 - RNA, 15 nt, Human adenovirus F
gcagccccaggccaa

SEQ ID NO: 115292 - RNA, 23 nt, Human adenovirus F
gcaggacgccucggaguaccuga

SEQ ID NO: 115293 - RNA, 20 nt, Human adenovirus F
gcagguaggaccacuggagg

SEQ ID NO: 115294 - RNA, 20 nt, Human adenovirus F
gcaguaccgcuccaucaagc

SEQ ID NO: 115295 - RNA, 12 nt, Human adenovirus F
cuaacaaaaacu

SEQ ID NO: 115296 - RNA, 16 nt, Human adenovirus F
cuaacaaaaacuuaca

SEQ ID NO: 115297 - RNA, 19 nt, Human adenovirus F
cuaaaugggaaaagcaugu

SEQ ID NO: 115298 - RNA, 23 nt, Human adenovirus F
cuaaaugggaaaagcaugugugc

SEQ ID NO: 115299 - RNA, 14 nt, Human adenovirus F
cuaaacaugagcuu

SEQ ID NO: 115300 - RNA, 10 nt, Human adenovirus F
cgguuugcug

SEQ ID NO: 115301 - RNA, 19 nt, Human adenovirus F
cguaaccuucgcugcuuua

SEQ ID NO: 115302 - RNA, 23 nt, Human adenovirus F
cguaaccuucgcugcuuuacuua

SEQ ID NO: 115303 - RNA, 19 nt, Human adenovirus F
cgggguuccaccaagcucc

SEQ ID NO: 115304 - RNA, 23 nt, Human adenovirus F
cgucuggaauaauuaugccucuu

SEQ ID NO: 115305 - RNA, 14 nt, Human adenovirus F
cgacgauccaauag

SEQ ID NO: 115306 - RNA, 20 nt, Human adenovirus F
cgcuuuacaaccgucuggaa

SEQ ID NO: 115307 - RNA, 15 nt, Human adenovirus F
cgggcaguaccgcuc

SEQ ID NO: 115308 - RNA, 21 nt, Human adenovirus F
cgggcaguaccgcuccaucaa

SEQ ID NO: 115309 - RNA, 15 nt, Human adenovirus F
cuaucacuaaaacca

SEQ ID NO: 115310 - RNA, 18 nt, Human adenovirus F
cuaucacuaaaaccaaca

SEQ ID NO: 115311 - RNA, 20 nt, Human adenovirus F
cuaucacuaaaaccaacaaa

SEQ ID NO: 115312 - RNA, 13 nt, Human adenovirus F
cuauacacuguca

SEQ ID NO: 115313 - RNA, 19 nt, Human adenovirus F
cuauacacugucacuguau

SEQ ID NO: 115314 - RNA, 12 nt, Human adenovirus F
cucaacucccag

SEQ ID NO: 115315 - RNA, 13 nt, Human adenovirus F
cucaagcggguua

SEQ ID NO: 115316 - RNA, 14 nt, Human adenovirus F
cucaagcugaaggu

SEQ ID NO: 115317 - RNA, 22 nt, Human adenovirus F
cucauccgccauugccacccgc

SEQ ID NO: 115318 - RNA, 15 nt, Human adenovirus F
cuacagcauuggaaa

SEQ ID NO: 115319 - RNA, 14 nt, Human adenovirus F
cuacagccugucau

SEQ ID NO: 115320 - RNA, 22 nt, Human adenovirus F
cuacaauccccuugacauucca

SEQ ID NO: 115321 - RNA, 21 nt, Human adenovirus F
cuacaagauuccaccaaaggu

SEQ ID NO: 115322 - RNA, 20 nt, Human adenovirus F
cuacuauuaccgucaucucu

SEQ ID NO: 115323 - RNA, 14 nt, Human adenovirus F
cuacuuucccuggg

SEQ ID NO: 115324 - RNA, 22 nt, Human adenovirus F
cuaguaucccuucguugucaaa

SEQ ID NO: 115325 - RNA, 23 nt, Human adenovirus F
cuugaacaguuuggguggacuua

SEQ ID NO: 115326 - RNA, 18 nt, Human adenovirus F
cuugaacauaacaccuau

SEQ ID NO: 115327 - RNA, 21 nt, Human adenovirus F
cuugaacauaacaccuauguu

SEQ ID NO: 115328 - RNA, 23 nt, Human adenovirus F
cuucuguaugcuauugacacugc

SEQ ID NO: 115329 - RNA, 20 nt, Human adenovirus F
cuuccuccaacggcuugcaa

SEQ ID NO: 115330 - RNA, 21 nt, Human adenovirus F
cuuccuuuuggcuguacucca

SEQ ID NO: 115331 - RNA, 16 nt, Human adenovirus F
cuucuauugcacuuaa

SEQ ID NO: 115332 - RNA, 14 nt, Human adenovirus F
cuucuccccuuuaa

SEQ ID NO: 115333 - RNA, 20 nt, Human adenovirus F
cuucuccugcuugucugucu

SEQ ID NO: 115334 - RNA, 20 nt, Human adenovirus F
cuucagccuggggaacaagu

SEQ ID NO: 115335 - RNA, 23 nt, Human adenovirus F
cuuauuguucaaggaaacaacag

SEQ ID NO: 115336 - RNA, 13 nt, Human adenovirus F
cuuacaaccaaaa

SEQ ID NO: 115337 - RNA, 22 nt, Human adenovirus F
cuuaacaaacuuuuugaauuac

SEQ ID NO: 115338 - RNA, 16 nt, Human adenovirus F
cuuacgaacacuacaa

SEQ ID NO: 115339 - RNA, 18 nt, Human adenovirus F
cuuacucuuucuuacaac

SEQ ID NO: 115340 - RNA, 12 nt, Human adenovirus F
cuuaguugguac

SEQ ID NO: 115341 - RNA, 21 nt, Human adenovirus F
cuuagugccggcccccacaug

SEQ ID NO: 115342 - RNA, 22 nt, Human adenovirus F
cuguucaaccuucaagcccuac

SEQ ID NO: 115343 - RNA, 22 nt, Human adenovirus F
cuguuggagaauccuuuuuggc

SEQ ID NO: 115344 - RNA, 21 nt, Human adenovirus F
cuggaucaaacaggaagacaa

SEQ ID NO: 115345 - RNA, 12 nt, Human adenovirus F
cugggaugcagg

SEQ ID NO: 115346 - RNA, 22 nt, Human adenovirus F
cugggaugcagguaggaccacu

SEQ ID NO: 115347 - RNA, 15 nt, Human adenovirus F
cuggacaguucccaa

SEQ ID NO: 115348 - RNA, 20 nt, Human adenovirus F
cugguagaaagcaaagccau

SEQ ID NO: 115349 - RNA, 16 nt, Human adenovirus F
cugguaaaccagcaca

SEQ ID NO: 115350 - RNA, 17 nt, Human adenovirus F
cugguaaaccagcacac

SEQ ID NO: 115351 - RNA, 17 nt, Human adenovirus F
cugucaugaaaguuccu

SEQ ID NO: 115352 - RNA, 14 nt, Human adenovirus F
cugcuacuacuuua

SEQ ID NO: 115353 - RNA, 16 nt, Human adenovirus F
cugcgcugcuacucaa

SEQ ID NO: 115354 - RNA, 12 nt, Human adenovirus F
cugaacacuuuu

SEQ ID NO: 115355 - RNA, 18 nt, Human adenovirus F
cugaagaugucugaccaa

SEQ ID NO: 115356 - RNA, 14 nt, Human adenovirus F
cucuuucuuacaac

SEQ ID NO: 115357 - RNA, 20 nt, Human adenovirus F
cugagcccgggccuggugca

SEQ ID NO: 115358 - RNA, 13 nt, Human adenovirus F
cugacuuaucuca

SEQ ID NO: 115359 - RNA, 16 nt, Human adenovirus F
cugaggauuuucucaa

SEQ ID NO: 115360 - RNA, 17 nt, Human adenovirus F
cugaggauuuucucaac

SEQ ID NO: 115361 - RNA, 17 nt, Human adenovirus F
cucccagcauucccuau

SEQ ID NO: 115362 - RNA, 16 nt, Human adenovirus F
cucccuccaccuccag

SEQ ID NO: 115363 - RNA, 20 nt, Human adenovirus F
cucugaacacuuuugccaaa

SEQ ID NO: 115364 - RNA, 19 nt, Human adenovirus F
cucugaagaugucugacca

SEQ ID NO: 115365 - RNA, 19 nt, Human adenovirus F
cucugcaaaaacaaauaca

SEQ ID NO: 115366 - RNA, 19 nt, Human adenovirus F
acccuuacgaacacuacaa

SEQ ID NO: 115367 - RNA, 21 nt, Human adenovirus F
acccuguguggucuaagggaa

SEQ ID NO: 115368 - RNA, 15 nt, Human adenovirus F
acccuuaacaaccuc

SEQ ID NO: 115369 - RNA, 21 nt, Human adenovirus F
acccgucuucccucuugggca

SEQ ID NO: 115370 - RNA, 11 nt, Human adenovirus F
acccugaccca

SEQ ID NO: 115371 - RNA, 12 nt, Human adenovirus F
acccaacaggga

SEQ ID NO: 115372 - RNA, 19 nt, Human adenovirus F
acccaacagggacacgagc

SEQ ID NO: 115373 - RNA, 17 nt, Human adenovirus F
accauaguaacuuucaa

SEQ ID NO: 115374 - RNA, 16 nt, Human adenovirus F
acgcuugcuggaguug

SEQ ID NO: 115375 - RNA, 21 nt, Human adenovirus F
acgcucuuauuguucaaggaa

SEQ ID NO: 115376 - RNA, 23 nt, Human adenovirus F
acgcacuccugcccaagagggaa

SEQ ID NO: 115377 - RNA, 23 nt, Human adenovirus F
accucuguuugcugcacugccau

SEQ ID NO: 115378 - RNA, 17 nt, Human adenovirus F
accuccgggaguccuca

SEQ ID NO: 115379 - RNA, 21 nt, Human adenovirus F
accuucgccgcagucucccac

SEQ ID NO: 115380 - RNA, 19 nt, Human adenovirus F
accuuuuagagcuaggcau

SEQ ID NO: 115381 - RNA, 19 nt, Human adenovirus F
accuuuuuacccugaccca

SEQ ID NO: 115382 - RNA, 23 nt, Human adenovirus F
accuuguauuuguauaaucuuaa

SEQ ID NO: 115383 - RNA, 15 nt, Human adenovirus F
accacggacagggca

SEQ ID NO: 115384 - RNA, 16 nt, Human adenovirus F
accacggacagggcau

SEQ ID NO: 115385 - RNA, 15 nt, Human adenovirus F
accaaagagcuugaa

SEQ ID NO: 115386 - RNA, 16 nt, Human adenovirus F
accaaagagcuugaac

SEQ ID NO: 115387 - RNA, 22 nt, Human adenovirus F
accaaagagcuugaacauaaca

SEQ ID NO: 115388 - RNA, 16 nt, Human adenovirus F
accaccccagcacuug

SEQ ID NO: 115389 - RNA, 20 nt, Human adenovirus F
accaaauucugcuagaacag

SEQ ID NO: 115390 - RNA, 12 nt, Human adenovirus F
accaacaaaauc

SEQ ID NO: 115391 - RNA, 14 nt, Human adenovirus F
acauguggagcuau

SEQ ID NO: 115392 - RNA, 24 nt, Human adenovirus F
acauaacaccuauguuaggcuuua

SEQ ID NO: 115393 - RNA, 17 nt, Human adenovirus F
acaugagcuuacuuuaa

SEQ ID NO: 115394 - RNA, 15 nt, Human adenovirus F
acagcuccuccaagc

SEQ ID NO: 115395 - RNA, 14 nt, Human adenovirus F
acagagcuuuauga

SEQ ID NO: 115396 - RNA, 17 nt, Human adenovirus F
acaguugggaccuuggc

SEQ ID NO: 115397 - RNA, 16 nt, Human adenovirus F
acaggacgaccaucaa

SEQ ID NO: 115398 - RNA, 24 nt, Human adenovirus F
acaguccaaaaucugcugccaugc

SEQ ID NO: 115399 - RNA, 16 nt, Human adenovirus F
acagacaauuuugcaa

SEQ ID NO: 115400 - RNA, 12 nt, Human adenovirus F
acagaaaccucu

SEQ ID NO: 115401 - RNA, 23 nt, Human adenovirus F
acacgagcugucauauacuuuaa

SEQ ID NO: 115402 - RNA, 15 nt, Human adenovirus F
agaaaccucuuccuu

SEQ ID NO: 115403 - RNA, 14 nt, Human adenovirus F
agaaagcaaagcca

SEQ ID NO: 115404 - RNA, 21 nt, Human adenovirus F
agaaaucgacgggcagugcac

SEQ ID NO: 115405 - RNA, 14 nt, Human adenovirus F
agaaauuaaggcuu

SEQ ID NO: 115406 - RNA, 13 nt, Human adenovirus F
agaaugugguggg

SEQ ID NO: 115407 - RNA, 15 nt, Human adenovirus F
agaagacuguuaaua

SEQ ID NO: 115408 - RNA, 15 nt, Human adenovirus F
agaacguugcgccag

SEQ ID NO: 115409 - RNA, 22 nt, Human adenovirus F
agacugaguuucccugucguug

SEQ ID NO: 115410 - RNA, 22 nt, Human adenovirus F
agacuugguuaaagaaaaccag

SEQ ID NO: 115411 - RNA, 16 nt, Human adenovirus F
acugauccacuuacaa

SEQ ID NO: 115412 - RNA, 13 nt, Human adenovirus F
acugucacuguau

SEQ ID NO: 115413 - RNA, 22 nt, Human adenovirus F
acuguacugcuacuacuuuaac

SEQ ID NO: 115414 - RNA, 13 nt, Human adenovirus F
acuggugggccag

SEQ ID NO: 115415 - RNA, 22 nt, Human adenovirus F
acuugcuuuuucacgacggggu

SEQ ID NO: 115416 - RNA, 17 nt, Human adenovirus F
acuuaucucaucuucac

SEQ ID NO: 115417 - RNA, 22 nt, Human adenovirus F
acuucaaccccgucuaccccua

SEQ ID NO: 115418 - RNA, 22 nt, Human adenovirus F
acuucaaccccgucuacccuua

SEQ ID NO: 115419 - RNA, 15 nt, Human adenovirus F
acuuuaaaacuuggc

SEQ ID NO: 115420 - RNA, 14 nt, Human adenovirus F
acuuuaaacaagca

SEQ ID NO: 115421 - RNA, 20 nt, Human adenovirus F
acuugguuaaagaaaaccag

SEQ ID NO: 115422 - RNA, 20 nt, Human adenovirus F
acucaaguacacugacccca

SEQ ID NO: 115423 - RNA, 13 nt, Human adenovirus F
acucuuucuuaca

SEQ ID NO: 115424 - RNA, 14 nt, Human adenovirus F
acucuugcucucaa

SEQ ID NO: 115425 - RNA, 15 nt, Human adenovirus F
acggauugucuuccc

SEQ ID NO: 115426 - RNA, 13 nt, Human adenovirus F
acgucagcuacaa

SEQ ID NO: 115427 - RNA, 24 nt, Human adenovirus F
acuagaaaucgacgggcagugcac

SEQ ID NO: 115428 - RNA, 16 nt, Human adenovirus F
acuagcagugggcaaa

SEQ ID NO: 115429 - RNA, 19 nt, Human adenovirus F
acuauacacugucacugua

SEQ ID NO: 115430 - RNA, 20 nt, Human adenovirus F
acuauacacugucacuguau

SEQ ID NO: 115431 - RNA, 18 nt, Human adenovirus F
acucaacagaaaccucuu

SEQ ID NO: 115432 - RNA, 15 nt, Human adenovirus F
auacaaugguccggg

SEQ ID NO: 115433 - RNA, 14 nt, Human adenovirus F
auacaccucccuuu

SEQ ID NO: 115434 - RNA, 16 nt, Human adenovirus F
auacacugauccacuu

SEQ ID NO: 115435 - RNA, 21 nt, Human adenovirus F
auacacugauccacuuacaac

SEQ ID NO: 115436 - RNA, 16 nt, Human adenovirus F
auacacugucacugua

SEQ ID NO: 115437 - RNA, 21 nt, Human adenovirus F
auacacugucacuguauuaaa

SEQ ID NO: 115438 - RNA, 22 nt, Human adenovirus F
auacugcuccuggcgagcccau

SEQ ID NO: 115439 - RNA, 16 nt, Human adenovirus F
auacuggauacuggca

SEQ ID NO: 115440 - RNA, 17 nt, Human adenovirus F
auacuggcaagagccac

SEQ ID NO: 115441 - RNA, 20 nt, Human adenovirus F
auacuaucgucaucaucccc

SEQ ID NO: 115442 - RNA, 17 nt, Human adenovirus F
auacuuuuacagaauuc

SEQ ID NO: 115443 - RNA, 22 nt, Human adenovirus F
auacugcaaacgagaggaccac

SEQ ID NO: 115444 - RNA, 14 nt, Human adenovirus F
aucacuaaaaccaa

SEQ ID NO: 115445 - RNA, 21 nt, Human adenovirus F
aucaaacaggaagacaauccu

SEQ ID NO: 115446 - RNA, 22 nt, Human adenovirus F
auagcaccaacgugcaggccaa

SEQ ID NO: 115447 - RNA, 15 nt, Human adenovirus F
auccacuuacaacca

SEQ ID NO: 115448 - RNA, 18 nt, Human adenovirus F
auccacuuacaaccaaaa

SEQ ID NO: 115449 - RNA, 15 nt, Human adenovirus F
aucccccccucagaa

SEQ ID NO: 115450 - RNA, 20 nt, Human adenovirus F
auccgcacucuugcucucaa

SEQ ID NO: 115451 - RNA, 15 nt, Human adenovirus F
auccuaacaaaaacu

SEQ ID NO: 115452 - RNA, 18 nt, Human adenovirus F
aucugcagcauugccacu

SEQ ID NO: 115453 - RNA, 23 nt, Human adenovirus F
aucucccuccccccuuccacuuu

SEQ ID NO: 115454 - RNA, 16 nt, Human adenovirus F
aucucauucgcacggc

SEQ ID NO: 115455 - RNA, 19 nt, Human adenovirus F
aucuccacgggcugaggag

SEQ ID NO: 115456 - RNA, 14 nt, Human adenovirus F
auccucccaacaac

SEQ ID NO: 115457 - RNA, 16 nt, Human adenovirus F
auccuccuucacaaag

SEQ ID NO: 115458 - RNA, 21 nt, Human adenovirus F
aucguagguuuaaauuacacu

SEQ ID NO: 115459 - RNA, 17 nt, Human adenovirus F
aguugagggaagcauuc

SEQ ID NO: 115460 - RNA, 12 nt, Human adenovirus F
aguugaaaauac

SEQ ID NO: 115461 - RNA, 19 nt, Human adenovirus F
aguuccugcgcugcuacuc

SEQ ID NO: 115462 - RNA, 22 nt, Human adenovirus F
aguuccugcgcugcuacucaac

SEQ ID NO: 115463 - RNA, 20 nt, Human adenovirus F
aguucaaagaagagcugcug

SEQ ID NO: 115464 - RNA, 18 nt, Human adenovirus F
agugcguaagaccucauc

SEQ ID NO: 115465 - RNA, 17 nt, Human adenovirus F
agugcguuggccucaac

SEQ ID NO: 115466 - RNA, 23 nt, Human adenovirus F
aguaucccuucguugucaaacac

SEQ ID NO: 115467 - RNA, 17 nt, Human adenovirus F
agguaaggguugucgag

SEQ ID NO: 115468 - RNA, 22 nt, Human adenovirus F
agggugaaaggcaagacacuga

SEQ ID NO: 115469 - RNA, 23 nt, Human adenovirus F
agggugaaaggcaagacacugag

SEQ ID NO: 115470 - RNA, 16 nt, Human adenovirus F
agggucaccuugcaaa

SEQ ID NO: 115471 - RNA, 22 nt, Human adenovirus F
agggaagcauucuuugucagug

SEQ ID NO: 115472 - RNA, 17 nt, Human adenovirus F
agggacacgagcuguca

SEQ ID NO: 115473 - RNA, 15 nt, Human adenovirus F
agggcggaacagcau

SEQ ID NO: 115474 - RNA, 18 nt, Human adenovirus F
aggugaaucccgcuaugu

SEQ ID NO: 115475 - RNA, 18 nt, Human adenovirus F
agguuucauuuccauuac

SEQ ID NO: 115476 - RNA, 22 nt, Human adenovirus F
aguagccuaaggacuucaccua

SEQ ID NO: 115477 - RNA, 12 nt, Human adenovirus F
agcucugaacac

SEQ ID NO: 115478 - RNA, 13 nt, Human adenovirus F
agcgcacugguaa

SEQ ID NO: 115479 - RNA, 13 nt, Human adenovirus F
agcgcgcuauaau

SEQ ID NO: 115480 - RNA, 17 nt, Human adenovirus F
agccgcggucaacagcu

SEQ ID NO: 115481 - RNA, 15 nt, Human adenovirus F
agagggaagacgggu

SEQ ID NO: 115482 - RNA, 19 nt, Human adenovirus F
agaggugugaucuucguga

SEQ ID NO: 115483 - RNA, 18 nt, Human adenovirus F
agcccauaaaagcaauau

SEQ ID NO: 115484 - RNA, 13 nt, Human adenovirus F
aggcacuguucaa

SEQ ID NO: 115485 - RNA, 19 nt, Human adenovirus F
aggagcucagaaaacgcau

SEQ ID NO: 115486 - RNA, 14 nt, Human adenovirus F
aggcaagacacuga

SEQ ID NO: 115487 - RNA, 20 nt, Human adenovirus F
aggcuuaacacugacuuccu

SEQ ID NO: 115488 - RNA, 15 nt, Human adenovirus F
agcugaagacacauu

SEQ ID NO: 115489 - RNA, 18 nt, Human adenovirus F
agcugucauauacuuuaa

SEQ ID NO: 115490 - RNA, 16 nt, Human adenovirus F
aggacuucaccuacaa

SEQ ID NO: 115491 - RNA, 21 nt, Human adenovirus F
agcuuacuuuaaaacuuggca

SEQ ID NO: 115492 - RNA, 14 nt, Human adenovirus F
cacgggacuaaaca

SEQ ID NO: 115493 - RNA, 17 nt, Human adenovirus F
cacgcaggagcucagaa

SEQ ID NO: 115494 - RNA, 15 nt, Human adenovirus F
cacggugguacaaaa

SEQ ID NO: 115495 - RNA, 16 nt, Human adenovirus F
cacgucccuccccguu

SEQ ID NO: 115496 - RNA, 20 nt, Human adenovirus F
cacguuccgucgcuguaaaa

SEQ ID NO: 115497 - RNA, 22 nt, Human adenovirus F
cacgagcugucauauacuuuaa

SEQ ID NO: 115498 - RNA, 20 nt, Human adenovirus F
caccuuuuuacccugaccca

SEQ ID NO: 115499 - RNA, 17 nt, Human adenovirus F
caccgauaccuacuuca

SEQ ID NO: 115500 - RNA, 19 nt, Human adenovirus F
caccgcaaacaacugcaau

SEQ ID NO: 115501 - RNA, 19 nt, Human adenovirus F
caccuauguuaggcuuuau

SEQ ID NO: 115502 - RNA, 21 nt, Human adenovirus F
cacucuugcucucaagcugaa

SEQ ID NO: 115503 - RNA, 14 nt, Human adenovirus F
cacucgaaaccaaa

SEQ ID NO: 115504 - RNA, 16 nt, Human adenovirus F
cacugauccacuuaca

SEQ ID NO: 115505 - RNA, 17 nt, Human adenovirus F
cacugauccacuuacaa

SEQ ID NO: 115506 - RNA, 15 nt, Human adenovirus F
cacugucacuguauu

SEQ ID NO: 115507 - RNA, 12 nt, Human adenovirus F
cacuuaccagag

SEQ ID NO: 115508 - RNA, 13 nt, Human adenovirus F
cagagcucugcaa

SEQ ID NO: 115509 - RNA, 14 nt, Human adenovirus F
cagagcucugcaaa

SEQ ID NO: 115510 - RNA, 20 nt, Human adenovirus F
cagagcucugcuuuggacuc

SEQ ID NO: 115511 - RNA, 18 nt, Human adenovirus F
cagaaaaaacccuuaaca

SEQ ID NO: 115512 - RNA, 17 nt, Human adenovirus F
cacuuuggcucgcuuua

SEQ ID NO: 115513 - RNA, 20 nt, Human adenovirus F
cacuuuggcucgcuuuacaa

SEQ ID NO: 115514 - RNA, 16 nt, Human adenovirus F
cagaaacaucguccaa

SEQ ID NO: 115515 - RNA, 20 nt, Human adenovirus F
cagaaacaucguccaacagc

SEQ ID NO: 115516 - RNA, 22 nt, Human adenovirus F
caauccuaacaaaaacuuacaa

SEQ ID NO: 115517 - RNA, 16 nt, Human adenovirus F
caaucccgaagccuuc

SEQ ID NO: 115518 - RNA, 19 nt, Human adenovirus F
caaucccgaagccuucagg

SEQ ID NO: 115519 - RNA, 17 nt, Human adenovirus F
caaggaaacaacagccu

SEQ ID NO: 115520 - RNA, 16 nt, Human adenovirus F
caagcuaaaugccauu

SEQ ID NO: 115521 - RNA, 17 nt, Human adenovirus F
cacccggguuuaccugg

SEQ ID NO: 115522 - RNA, 17 nt, Human adenovirus F
caauggucuuacaugca

SEQ ID NO: 115523 - RNA, 16 nt, Human adenovirus F
cacaauugguuggaaa

SEQ ID NO: 115524 - RNA, 17 nt, Human adenovirus F
auuuaugguucacugua

SEQ ID NO: 115525 - RNA, 18 nt, Human adenovirus F
auuuaugguucacuguau

SEQ ID NO: 115526 - RNA, 22 nt, Human adenovirus F
caaaaaauucaugcaugcagac

SEQ ID NO: 115527 - RNA, 17 nt, Human adenovirus F
caaaaacggggcuuuaa

SEQ ID NO: 115528 - RNA, 19 nt, Human adenovirus F
auuuggaaaaucgcaucuu

SEQ ID NO: 115529 - RNA, 14 nt, Human adenovirus F
auuguucuguuaca

SEQ ID NO: 115530 - RNA, 17 nt, Human adenovirus F
auuuaccaguuugagua

SEQ ID NO: 115531 - RNA, 14 nt, Human adenovirus F
auuuaccaccccag

SEQ ID NO: 115532 - RNA, 16 nt, Human adenovirus F
caaaaacucugugaag

SEQ ID NO: 115533 - RNA, 11 nt, Human adenovirus F
caaacauguga

SEQ ID NO: 115534 - RNA, 19 nt, Human adenovirus F
caaacacgggauaguuuuu

SEQ ID NO: 115535 - RNA, 14 nt, Human adenovirus F
caaacaacugcaau

SEQ ID NO: 115536 - RNA, 18 nt, Human adenovirus F
caaauuacgucauugaca

SEQ ID NO: 115537 - RNA, 16 nt, Human adenovirus F
caaacgcgguggcuuu

SEQ ID NO: 115538 - RNA, 15 nt, Human adenovirus F
caaacuauucuggga

SEQ ID NO: 115539 - RNA, 14 nt, Human adenovirus F
augguucacuguau

SEQ ID NO: 115540 - RNA, 15 nt, Human adenovirus F
augguucacuguaua

SEQ ID NO: 115541 - RNA, 14 nt, Human adenovirus F
auguggcacuguuu

SEQ ID NO: 115542 - RNA, 22 nt, Human adenovirus F
augugagcgaggugaggucuau

SEQ ID NO: 115543 - RNA, 17 nt, Human adenovirus F
auuccauuuauuacacc

SEQ ID NO: 115544 - RNA, 20 nt, Human adenovirus F
auuacuccagucgcaugaau

SEQ ID NO: 115545 - RNA, 20 nt, Human adenovirus F
auuaggccgucccugggaug

SEQ ID NO: 115546 - RNA, 17 nt, Human adenovirus F
auugggauaccuuuuag

SEQ ID NO: 115547 - RNA, 23 nt, Human adenovirus F
auugggauaccuuuuagagcuag

SEQ ID NO: 115548 - RNA, 19 nt, Human adenovirus F
auugguaauuuggaaaauc

SEQ ID NO: 115549 - RNA, 13 nt, Human adenovirus F
ccacggacagggc

SEQ ID NO: 115550 - RNA, 16 nt, Human adenovirus F
ccacggugguacaaaa

SEQ ID NO: 115551 - RNA, 18 nt, Human adenovirus F
ccacgagcaguagaggca

SEQ ID NO: 115552 - RNA, 20 nt, Human adenovirus F
ccaccgucuuccaccucccu

SEQ ID NO: 115553 - RNA, 18 nt, Human adenovirus F
ccaagagcgccgcuugca

SEQ ID NO: 115554 - RNA, 21 nt, Human adenovirus F
ccaccgcaaacaacugcaauu

SEQ ID NO: 115555 - RNA, 22 nt, Human adenovirus F
ccacuggagggcgucaugcucu

SEQ ID NO: 115556 - RNA, 21 nt, Human adenovirus F
ccagaacgaccauaguaacuu

SEQ ID NO: 115557 - RNA, 13 nt, Human adenovirus F
ccagaauugaaga

SEQ ID NO: 115558 - RNA, 18 nt, Human adenovirus F
ccacucgaaaccaaauuc

SEQ ID NO: 115559 - RNA, 15 nt, Human adenovirus F
ccacuuacaaccaaa

SEQ ID NO: 115560 - RNA, 19 nt, Human adenovirus F
ccagcugguaagcagccua

SEQ ID NO: 115561 - RNA, 17 nt, Human adenovirus F
ccagagccauagcaaca

SEQ ID NO: 115562 - RNA, 21 nt, Human adenovirus F
cauuuuuuuuuauuggucaaa

SEQ ID NO: 115563 - RNA, 11 nt, Human adenovirus F
ccaacugccac

SEQ ID NO: 115564 - RNA, 23 nt, Human adenovirus F
ccaaacucuuuauuuuucugagu

SEQ ID NO: 115565 - RNA, 19 nt, Human adenovirus F
cauuaagguuacucagcaa

SEQ ID NO: 115566 - RNA, 14 nt, Human adenovirus F
cauuaaugggcaaa

SEQ ID NO: 115567 - RNA, 21 nt, Human adenovirus F
cagcagacgcggcagcagcug

SEQ ID NO: 115568 - RNA, 19 nt, Human adenovirus F
cagcagauuuuggacugua

SEQ ID NO: 115569 - RNA, 20 nt, Human adenovirus F
cagcauucccuauguagcuc

SEQ ID NO: 115570 - RNA, 15 nt, Human adenovirus F
cagcacgguggaguc

SEQ ID NO: 115571 - RNA, 20 nt, Human adenovirus F
caguggcgcgcuaacagaca

SEQ ID NO: 115572 - RNA, 13 nt, Human adenovirus F
caugagcuuacuu

SEQ ID NO: 115573 - RNA, 12 nt, Human adenovirus F
cauguggagcua

SEQ ID NO: 115574 - RNA, 21 nt, Human adenovirus F
caugauuauaaaugcucugaa

SEQ ID NO: 115575 - RNA, 17 nt, Human adenovirus F
cccuccaccuccaguga

SEQ ID NO: 115576 - RNA, 17 nt, Human adenovirus F
cccuccccguuaccugg

SEQ ID NO: 115577 - RNA, 14 nt, Human adenovirus F
cccugcaaagccaa

SEQ ID NO: 115578 - RNA, 16 nt, Human adenovirus F
cccugaacuaccagaa

SEQ ID NO: 115579 - RNA, 15 nt, Human adenovirus F
cccugacccacaauc

SEQ ID NO: 115580 - RNA, 11 nt, Human adenovirus F
ccccaccacau

SEQ ID NO: 115581 - RNA, 17 nt, Human adenovirus F
ccaucaugagucuguuu

SEQ ID NO: 115582 - RNA, 23 nt, Human adenovirus F
ccaucaguuauuagcuacuuuca

SEQ ID NO: 115583 - RNA, 13 nt, Human adenovirus F
cccauaccaaaga

SEQ ID NO: 115584 - RNA, 23 nt, Human adenovirus F
cccauaccaaagagcuugaacau

SEQ ID NO: 115585 - RNA, 14 nt, Human adenovirus F
cccauuacuaccaa

SEQ ID NO: 115586 - RNA, 20 nt, Human adenovirus F
cccauguggcacuguuugcu

SEQ ID NO: 115587 - RNA, 20 nt, Human adenovirus F
cccuggccuggaacccaaag

SEQ ID NO: 115588 - RNA, 12 nt, Human adenovirus F
cccuguguuuau

SEQ ID NO: 115589 - RNA, 13 nt, Human adenovirus F
cccuugauucuau

SEQ ID NO: 115590 - RNA, 17 nt, Human adenovirus F
cccuugauucuaugaaa

SEQ ID NO: 115591 - RNA, 14 nt, Human adenovirus F
cccuugacauucca

SEQ ID NO: 115592 - RNA, 21 nt, Human adenovirus F
cccuuucccccuguaccaccg

SEQ ID NO: 115593 - RNA, 17 nt, Human adenovirus F
ccuuuuuacccugaccc

SEQ ID NO: 115594 - RNA, 13 nt, Human adenovirus F
cgaacacuacaau

SEQ ID NO: 115595 - RNA, 21 nt, Human adenovirus F
ccuugauacggauugucuucc

SEQ ID NO: 115596 - RNA, 15 nt, Human adenovirus F
ccugguugugacgca

SEQ ID NO: 115597 - RNA, 21 nt, Human adenovirus F
ccugucaugaaaguuccucuu

SEQ ID NO: 115598 - RNA, 12 nt, Human adenovirus F
ccugggaugcag

SEQ ID NO: 115599 - RNA, 19 nt, Human adenovirus F
ccugggcuggaugcauccu

SEQ ID NO: 115600 - RNA, 12 nt, Human adenovirus F
ccuggggaacaa

SEQ ID NO: 115601 - RNA, 18 nt, Human adenovirus F
ccugggggcuuugaagca

SEQ ID NO: 115602 - RNA, 20 nt, Human adenovirus F
ccuucgcugcuuuacuuaaa

SEQ ID NO: 115603 - RNA, 16 nt, Human adenovirus F
ccuucuauugcaugau

SEQ ID NO: 115604 - RNA, 16 nt, Human adenovirus F
ccuuacgucagcuaca

SEQ ID NO: 115605 - RNA, 15 nt, Human adenovirus F
ccuggccaacugcca

SEQ ID NO: 115606 - RNA, 18 nt, Human adenovirus F
ccuggacuuuuagagugu

SEQ ID NO: 115607 - RNA, 22 nt, Human adenovirus F
ccuggacuuuuagagugugaac

SEQ ID NO: 115608 - RNA, 16 nt, Human adenovirus F
ccugcccuuccuccca

SEQ ID NO: 115609 - RNA, 16 nt, Human adenovirus F
ccugcgcugcuacuca

SEQ ID NO: 115610 - RNA, 12 nt, Human adenovirus F
ccuccagcacug

SEQ ID NO: 115611 - RNA, 16 nt, Human adenovirus F
ccucccaacuuucgua

SEQ ID NO: 115612 - RNA, 17 nt, Human adenovirus F
ccucagccugaaauaca

SEQ ID NO: 115613 - RNA, 21 nt, Human adenovirus F
ccuccuguguuacgccagaga

SEQ ID NO: 115614 - RNA, 20 nt, Human adenovirus F
ccucucgcucugcaaaauaa

SEQ ID NO: 115615 - RNA, 21 nt, Human adenovirus F
ccucuguuugcugcacugcca

SEQ ID NO: 115616 - RNA, 22 nt, Human adenovirus F
ccucuguuugcugcacugccau

SEQ ID NO: 115617 - RNA, 21 nt, Human adenovirus F
ccucuucucugucuuauccuc

SEQ ID NO: 115618 - RNA, 15 nt, Human adenovirus F
aaaaaugaccauggc

SEQ ID NO: 115619 - RNA, 20 nt, Human adenovirus F
aaaaccacuaaagcauuucc

SEQ ID NO: 115620 - RNA, 23 nt, Human adenovirus F
aaaacucugugaaguuaccaaag

SEQ ID NO: 115621 - RNA, 17 nt, Human adenovirus F
aaaagguguuggcgauu

SEQ ID NO: 115622 - RNA, 18 nt, Human adenovirus F
aaaagucugcaugcauga

SEQ ID NO: 115623 - RNA, 21 nt, Human adenovirus F
aaaaguguagguaagagccau

SEQ ID NO: 115624 - RNA, 16 nt, Human adenovirus F
aaacccuuaacaaccu

SEQ ID NO: 115625 - RNA, 19 nt, Human adenovirus F
aaacaucguccaacagcac

SEQ ID NO: 115626 - RNA, 12 nt, Human adenovirus F
aaaccaacaaaa

SEQ ID NO: 115627 - RNA, 10 nt, Human adenovirus F
aaacaagcug

SEQ ID NO: 115628 - RNA, 23 nt, Human adenovirus F
aaaauugggcacgggacuaaaca

SEQ ID NO: 115629 - RNA, 17 nt, Human adenovirus F
aaaauuuacaugcgugu

SEQ ID NO: 115630 - RNA, 12 nt, Human adenovirus F
aaacaacugcaa

SEQ ID NO: 115631 - RNA, 20 nt, Human adenovirus F
aaacaacagccuuuguaaca

SEQ ID NO: 115632 - RNA, 16 nt, Human adenovirus F
aaaaacggggcuuuaa

SEQ ID NO: 115633 - RNA, 11 nt, Human adenovirus F
aaaaacuuaca

SEQ ID NO: 115634 - RNA, 19 nt, Human adenovirus F
aaaaacccuuaacaaccuc

SEQ ID NO: 115635 - RNA, 15 nt, Human adenovirus F
aaaggguauaucggu

SEQ ID NO: 115636 - RNA, 19 nt, Human adenovirus F
aaaccgccuacucuuacaa

SEQ ID NO: 115637 - RNA, 14 nt, Human adenovirus F
aaagucugcaugca

SEQ ID NO: 115638 - RNA, 14 nt, Human adenovirus F
aaaguccuggccaa

SEQ ID NO: 115639 - RNA, 20 nt, Human adenovirus F
aaaguccuggccaacugcca

SEQ ID NO: 115640 - RNA, 21 nt, Human adenovirus F
aaaguccuggccaacugccac

SEQ ID NO: 115641 - RNA, 14 nt, Human adenovirus F
aaaucagaugcauu

SEQ ID NO: 115642 - RNA, 15 nt, Human adenovirus F
aaaucagaugcauuu

SEQ ID NO: 115643 - RNA, 22 nt, Human adenovirus F
aacaaguagccuaaggacuuca

SEQ ID NO: 115644 - RNA, 23 nt, Human adenovirus F
aacaauauuuuauuguucuguua

SEQ ID NO: 115645 - RNA, 16 nt, Human adenovirus F
aacaccccacccucaa

SEQ ID NO: 115646 - RNA, 14 nt, Human adenovirus F
aacacuacaauccc

SEQ ID NO: 115647 - RNA, 18 nt, Human adenovirus F
aacaacagccuuuguaac

SEQ ID NO: 115648 - RNA, 14 nt, Human adenovirus F
aaaucccagcuuuu

SEQ ID NO: 115649 - RNA, 16 nt, Human adenovirus F
aaccguugguuccuua

SEQ ID NO: 115650 - RNA, 18 nt, Human adenovirus F
aacgagaggaccacuuaa

SEQ ID NO: 115651 - RNA, 21 nt, Human adenovirus F
aacgauucuucugugacaaaa

SEQ ID NO: 115652 - RNA, 14 nt, Human adenovirus F
aacgcgccagguga

SEQ ID NO: 115653 - RNA, 23 nt, Human adenovirus F
aacgcgcuuacucuuucuuacaa

SEQ ID NO: 115654 - RNA, 14 nt, Human adenovirus F
aacuccggagcgca

SEQ ID NO: 115655 - RNA, 13 nt, Human adenovirus F
aacuccucagauu

SEQ ID NO: 115656 - RNA, 20 nt, Human adenovirus F
aacucugugaaguuaccaaa

SEQ ID NO: 115657 - RNA, 22 nt, Human adenovirus F
aacucugugaaguuaccaaaga

SEQ ID NO: 115658 - RNA, 23 nt, Human adenovirus F
aacucugugaaguuaccaaagac

SEQ ID NO: 115659 - RNA, 13 nt, Human adenovirus F
aacauaacaccua

SEQ ID NO: 115660 - RNA, 16 nt, Human adenovirus F
aacccuuaacaaccuc

SEQ ID NO: 115661 - RNA, 22 nt, Human adenovirus F
aaccgucgauuugcgaacauuu

SEQ ID NO: 115662 - RNA, 14 nt, Human adenovirus F
aaccccauguggca

SEQ ID NO: 115663 - RNA, 18 nt, Human adenovirus F
aacuuuguuaugauguaa

SEQ ID NO: 115664 - RNA, 13 nt, Human adenovirus F
aacuguacugcua

SEQ ID NO: 115665 - RNA, 22 nt, Human adenovirus F
aacuguacugcuacuacuuuaa

SEQ ID NO: 115666 - RNA, 15 nt, Human adenovirus F
aagacagagcuuuau

SEQ ID NO: 115667 - RNA, 17 nt, Human adenovirus F
aagacagagcuuuauga

SEQ ID NO: 115668 - RNA, 19 nt, Human adenovirus F
aagaaauccacuuaccaga

SEQ ID NO: 115669 - RNA, 19 nt, Human adenovirus F
aagaaaaccagcaugucag

SEQ ID NO: 115670 - RNA, 22 nt, Human adenovirus F
aagaggguacuagcagugggca

SEQ ID NO: 115671 - RNA, 13 nt, Human adenovirus F
aagauauggccau

SEQ ID NO: 115672 - RNA, 17 nt, Human adenovirus F
aagauauggccauguua

SEQ ID NO: 115673 - RNA, 20 nt, Human adenovirus F
acaaguauacauuugaacag

SEQ ID NO: 115674 - RNA, 15 nt, Human adenovirus F
acaauccuaacaaaa

SEQ ID NO: 115675 - RNA, 20 nt, Human adenovirus F
acaaugguccgggguugagg

SEQ ID NO: 115676 - RNA, 22 nt, Human adenovirus F
acaacagccuuuguaacaacug

SEQ ID NO: 115677 - RNA, 22 nt, Human adenovirus F
acaacgauucuucugugacaaa

SEQ ID NO: 115678 - RNA, 14 nt, Human adenovirus F
acaaaauaacaaua

SEQ ID NO: 115679 - RNA, 14 nt, Human adenovirus F
aaucuucaucuugc

SEQ ID NO: 115680 - RNA, 18 nt, Human adenovirus F
aaucuucaucuugcagau

SEQ ID NO: 115681 - RNA, 21 nt, Human adenovirus F
aaucucccuccccccuuccac

SEQ ID NO: 115682 - RNA, 20 nt, Human adenovirus F
aaucccugucuccgggguuc

SEQ ID NO: 115683 - RNA, 14 nt, Human adenovirus F
aauuugauaucagu

SEQ ID NO: 115684 - RNA, 18 nt, Human adenovirus F
aauugaagacgacuucaa

SEQ ID NO: 115685 - RNA, 14 nt, Human adenovirus F
aaucccagcuuuug

SEQ ID NO: 115686 - RNA, 12 nt, Human adenovirus F
aagcaaagccau

SEQ ID NO: 115687 - RNA, 13 nt, Human adenovirus F
aagcaaagccauc

SEQ ID NO: 115688 - RNA, 13 nt, Human adenovirus F
aagaugaguuuaa

SEQ ID NO: 115689 - RNA, 14 nt, Human adenovirus F
aagauggcaguugc

SEQ ID NO: 115690 - RNA, 20 nt, Human adenovirus F
aagauggcaguugcaucucc

SEQ ID NO: 115691 - RNA, 19 nt, Human adenovirus F
aaggguugucgaguuggca

SEQ ID NO: 115692 - RNA, 16 nt, Human adenovirus F
aagcagagcucugcaa

SEQ ID NO: 115693 - RNA, 15 nt, Human adenovirus F
aaguagccuaaggac

SEQ ID NO: 115694 - RNA, 16 nt, Human adenovirus F
aaguacacugacccca

SEQ ID NO: 115695 - RNA, 19 nt, Human adenovirus F
agcacugccggggcaauau

SEQ ID NO: 115696 - RNA, 16 nt, Human adenovirus F
agaugucugaccaacu

SEQ ID NO: 115697 - RNA, 17 nt, Human adenovirus F
agaugucugaccaacua

SEQ ID NO: 115698 - RNA, 17 nt, Human adenovirus F
agauugacgaacuuacu

SEQ ID NO: 115699 - RNA, 21 nt, Human adenovirus F
agcaacaggggaugucaaaac

SEQ ID NO: 115700 - RNA, 20 nt, Human adenovirus F
agauuugaagaugacuucaa

SEQ ID NO: 115701 - RNA, 16 nt, Human adenovirus F
agauauggccauguua

SEQ ID NO: 115702 - RNA, 19 nt, Human adenovirus F
agaugcauuuuggccugaa

SEQ ID NO: 115703 - RNA, 20 nt, Human adenovirus F
agaugcccuguccguggugu

SEQ ID NO: 115704 - RNA, 19 nt, Human adenovirus F
acugauccacuuacaacca

SEQ ID NO: 115705 - RNA, 21 nt, Human adenovirus F
acugauccacuuacaaccaaa

SEQ ID NO: 115706 - RNA, 13 nt, Human adenovirus F
acuguuaauauac

SEQ ID NO: 115707 - RNA, 21 nt, Human adenovirus F
acuguucaaccuucaagcccu

SEQ ID NO: 115708 - RNA, 20 nt, Human adenovirus F
acugaccccauuacuaccaa

SEQ ID NO: 115709 - RNA, 20 nt, Human adenovirus F
acugaggauuuucucaacuu

SEQ ID NO: 115710 - RNA, 15 nt, Human adenovirus F
acuuacuagucuuag

SEQ ID NO: 115711 - RNA, 17 nt, Human adenovirus F
acuucuauugcacuuaa

SEQ ID NO: 115712 - RNA, 18 nt, Human adenovirus F
acuucuauugcacuuaac

SEQ ID NO: 115713 - RNA, 18 nt, Human adenovirus F
acuuacaaccaaaaacgg

SEQ ID NO: 115714 - RNA, 21 nt, Human adenovirus F
acuuaaauucuggaaucagca

SEQ ID NO: 115715 - RNA, 15 nt, Human adenovirus F
acuguuugcuaguau

SEQ ID NO: 115716 - RNA, 14 nt, Human adenovirus F
acucuuucuuacaa

SEQ ID NO: 115717 - RNA, 20 nt, Human adenovirus F
acucugugaaguuaccaaag

SEQ ID NO: 115718 - RNA, 21 nt, Human adenovirus F
acucugugaaguuaccaaaga

SEQ ID NO: 115719 - RNA, 22 nt, Human adenovirus F
acucugugaaguuaccaaagac

SEQ ID NO: 115720 - RNA, 14 nt, Human adenovirus F
acguccucuacuau

SEQ ID NO: 115721 - RNA, 19 nt, Human adenovirus F
acgucccuccccguuaccu

SEQ ID NO: 115722 - RNA, 13 nt, Human adenovirus F
agaauucuguaaa

SEQ ID NO: 115723 - RNA, 20 nt, Human adenovirus F
acuuucaucuuaacucugaa

SEQ ID NO: 115724 - RNA, 15 nt, Human adenovirus F
acuuuaacuaaugua

SEQ ID NO: 115725 - RNA, 15 nt, Human adenovirus F
acuuuaaacaagcaa

SEQ ID NO: 115726 - RNA, 14 nt, Human adenovirus F
acuuucguacggga

SEQ ID NO: 115727 - RNA, 20 nt, Human adenovirus F
acuugcacuuuggcucgcuu

SEQ ID NO: 115728 - RNA, 22 nt, Human adenovirus F
acuugcacuuuggcucgcuuua

SEQ ID NO: 115729 - RNA, 13 nt, Human adenovirus F
acggauugucuuc

SEQ ID NO: 115730 - RNA, 16 nt, Human adenovirus F
acggugaaaugaauuu

SEQ ID NO: 115731 - RNA, 23 nt, Human adenovirus F
acgggcuggcuuccggcauuaac

SEQ ID NO: 115732 - RNA, 13 nt, Human adenovirus F
acggguuacagga

SEQ ID NO: 115733 - RNA, 18 nt, Human adenovirus F
acgggcugaggagcuguu

SEQ ID NO: 115734 - RNA, 20 nt, Human adenovirus F
acgggcugaggagcuguuaa

SEQ ID NO: 115735 - RNA, 14 nt, Human adenovirus F
acgggcagugcacu

SEQ ID NO: 115736 - RNA, 21 nt, Human adenovirus F
acgauucuggccucuauaaug

SEQ ID NO: 115737 - RNA, 18 nt, Human adenovirus F
acgcaagagacguuugca

SEQ ID NO: 115738 - RNA, 19 nt, Human adenovirus F
acgcugaaaguagggagaa

SEQ ID NO: 115739 - RNA, 23 nt, Human adenovirus F
acgcuuuccggguuuuauggcac

SEQ ID NO: 115740 - RNA, 18 nt, Human adenovirus F
acgcugcaggcgcuccac

SEQ ID NO: 115741 - RNA, 19 nt, Human adenovirus F
accggcggcguacacuggc

SEQ ID NO: 115742 - RNA, 13 nt, Human adenovirus F
accgucaucucua

SEQ ID NO: 115743 - RNA, 18 nt, Human adenovirus F
acccacgauguaaccaca

SEQ ID NO: 115744 - RNA, 22 nt, Human adenovirus F
accgaguuccugcgcugcuacu

SEQ ID NO: 115745 - RNA, 22 nt, Human adenovirus F
accucuguuugcugcacugcca

SEQ ID NO: 115746 - RNA, 20 nt, Human adenovirus F
accuucgcugcuuuacuuaa

SEQ ID NO: 115747 - RNA, 13 nt, Human adenovirus F
accuugaguuuaa

SEQ ID NO: 115748 - RNA, 15 nt, Human adenovirus F
accucccucugagga

SEQ ID NO: 115749 - RNA, 23 nt, Human adenovirus F
accucgagugcguaagaccucau

SEQ ID NO: 115750 - RNA, 14 nt, Human adenovirus F
acaucaauuuugcg

SEQ ID NO: 115751 - RNA, 23 nt, Human adenovirus F
acaguccaaaaucugcugccaug

SEQ ID NO: 115752 - RNA, 21 nt, Human adenovirus F
acagucaagcucuccacgggu

SEQ ID NO: 115753 - RNA, 23 nt, Human adenovirus F
acacagguucuuugcuggcaaag

SEQ ID NO: 115754 - RNA, 20 nt, Human adenovirus F
acagcacgguggaguccaaa

SEQ ID NO: 115755 - RNA, 13 nt, Human adenovirus F
accagagccauag

SEQ ID NO: 115756 - RNA, 16 nt, Human adenovirus F
accagaacgaccauag

SEQ ID NO: 115757 - RNA, 17 nt, Human adenovirus F
accaauccugaaugcau

SEQ ID NO: 115758 - RNA, 13 nt, Human adenovirus F
acaugcagcagaa

SEQ ID NO: 115759 - RNA, 17 nt, Human adenovirus F
acaugauauugucuaaa

SEQ ID NO: 115760 - RNA, 21 nt, Human adenovirus F
acauugccucccugaacuacc

SEQ ID NO: 115761 - RNA, 14 nt, Human adenovirus F
accaaaucaaucag

SEQ ID NO: 115762 - RNA, 14 nt, Human adenovirus F
auaaccccaugugg

SEQ ID NO: 115763 - RNA, 18 nt, Human adenovirus F
aguuccugcgcugcuacu

SEQ ID NO: 115764 - RNA, 21 nt, Human adenovirus F
aguuccugcgcugcuacucaa

SEQ ID NO: 115765 - RNA, 18 nt, Human adenovirus F
aguugggagggaugcaug

SEQ ID NO: 115766 - RNA, 19 nt, Human adenovirus F
aguugggagggaugcaugc

SEQ ID NO: 115767 - RNA, 16 nt, Human adenovirus F
aguuuauucugaugga

SEQ ID NO: 115768 - RNA, 22 nt, Human adenovirus F
aguuaaccuugaguuuaauguc

SEQ ID NO: 115769 - RNA, 14 nt, Human adenovirus F
aguuauucugauua

SEQ ID NO: 115770 - RNA, 19 nt, Human adenovirus F
aguuagcucugaacacuuu

SEQ ID NO: 115771 - RNA, 20 nt, Human adenovirus F
agugccggcccccacaugau

SEQ ID NO: 115772 - RNA, 18 nt, Human adenovirus F
aguaucaauaaaguugaa

SEQ ID NO: 115773 - RNA, 20 nt, Human adenovirus F
aguaucccuucguugucaaa

SEQ ID NO: 115774 - RNA, 23 nt, Human adenovirus F
aguagccuucuauugcaugauua

SEQ ID NO: 115775 - RNA, 20 nt, Human adenovirus F
aggaacuguucaaccuucaa

SEQ ID NO: 115776 - RNA, 10 nt, Human adenovirus F
aggagcucag

SEQ ID NO: 115777 - RNA, 17 nt, Human adenovirus F
aggagcucagaaaacgc

SEQ ID NO: 115778 - RNA, 14 nt, Human adenovirus F
agcuugaacauaac

SEQ ID NO: 115779 - RNA, 15 nt, Human adenovirus F
agcuugaacauaaca

SEQ ID NO: 115780 - RNA, 20 nt, Human adenovirus F
agcugugcgcgagcuuuuaa

SEQ ID NO: 115781 - RNA, 17 nt, Human adenovirus F
agcugucauauacuuua

SEQ ID NO: 115782 - RNA, 14 nt, Human adenovirus F
aggaguuaaccuug

SEQ ID NO: 115783 - RNA, 19 nt, Human adenovirus F
aggaggaggcuaauggcca

SEQ ID NO: 115784 - RNA, 21 nt, Human adenovirus F
agguuuaaauuacacuaagcc

SEQ ID NO: 115785 - RNA, 19 nt, Human adenovirus F
aggguuuuugagcaugaaa

SEQ ID NO: 115786 - RNA, 14 nt, Human adenovirus F
aggucuggaccugu

SEQ ID NO: 115787 - RNA, 23 nt, Human adenovirus F
aggugaauuuuaaugaguagccu

SEQ ID NO: 115788 - RNA, 16 nt, Human adenovirus F
aggugaggucuauucc

SEQ ID NO: 115789 - RNA, 15 nt, Human adenovirus F
agggucaccuugcaa

SEQ ID NO: 115790 - RNA, 17 nt, Human adenovirus F
auauacguaaaugugcc

SEQ ID NO: 115791 - RNA, 16 nt, Human adenovirus F
auauagccaaccaggc

SEQ ID NO: 115792 - RNA, 18 nt, Human adenovirus F
aucacuccguucgcucac

SEQ ID NO: 115793 - RNA, 23 nt, Human adenovirus F
aucacuccguucgcucacccgca

SEQ ID NO: 115794 - RNA, 14 nt, Human adenovirus F
aucaugagucuguu

SEQ ID NO: 115795 - RNA, 17 nt, Human adenovirus F
aucccgcuauguuggcg

SEQ ID NO: 115796 - RNA, 21 nt, Human adenovirus F
augaguuuaaaaacggugaaa

SEQ ID NO: 115797 - RNA, 15 nt, Human adenovirus F
augacaccuccucaa

SEQ ID NO: 115798 - RNA, 15 nt, Human adenovirus F
augaagaucuguguu

SEQ ID NO: 115799 - RNA, 13 nt, Human adenovirus F
aucgccaacagcc

SEQ ID NO: 115800 - RNA, 14 nt, Human adenovirus F
aucuuucuucagau

SEQ ID NO: 115801 - RNA, 22 nt, Human adenovirus F
aucuugugcgccuuuuguagua

SEQ ID NO: 115802 - RNA, 21 nt, Human adenovirus F
augauuuaugguucacuguau

SEQ ID NO: 115803 - RNA, 16 nt, Human adenovirus F
augcuauugacacugc

SEQ ID NO: 115804 - RNA, 18 nt, Human adenovirus F
caaggaaacaacagccuu

SEQ ID NO: 115805 - RNA, 19 nt, Human adenovirus F
caaggaaacaacagccuuu

SEQ ID NO: 115806 - RNA, 17 nt, Human adenovirus F
caagcgggucaacacca

SEQ ID NO: 115807 - RNA, 12 nt, Human adenovirus F
caagcuccucau

SEQ ID NO: 115808 - RNA, 13 nt, Human adenovirus F
caagcugaacuuu

SEQ ID NO: 115809 - RNA, 15 nt, Human adenovirus F
cacgcaggagcucag

SEQ ID NO: 115810 - RNA, 20 nt, Human adenovirus F
cacgcgacgcggaagccgaa

SEQ ID NO: 115811 - RNA, 23 nt, Human adenovirus F
cacgcgacgcggaagccgaaguc

SEQ ID NO: 115812 - RNA, 19 nt, Human adenovirus F
cacucaaguacacugaccc

SEQ ID NO: 115813 - RNA, 22 nt, Human adenovirus F
cacucaaguacacugaccccau

SEQ ID NO: 115814 - RNA, 22 nt, Human adenovirus F
caccgaguuccugcgcugcuac

SEQ ID NO: 115815 - RNA, 18 nt, Human adenovirus F
cacccggguuuaccuggu

SEQ ID NO: 115816 - RNA, 15 nt, Human adenovirus F
cagccuggggaacaa

SEQ ID NO: 115817 - RNA, 21 nt, Human adenovirus F
cagccugaaauacacugaucc

SEQ ID NO: 115818 - RNA, 14 nt, Human adenovirus F
cagccgcaaauggg

SEQ ID NO: 115819 - RNA, 12 nt, Human adenovirus F
cagcagcugcag

SEQ ID NO: 115820 - RNA, 13 nt, Human adenovirus F
cagcagauuuugg

SEQ ID NO: 115821 - RNA, 23 nt, Human adenovirus F
cagcacugccggggcaauaucuc

SEQ ID NO: 115822 - RNA, 17 nt, Human adenovirus F
cagcuggagcuucucag

SEQ ID NO: 115823 - RNA, 17 nt, Human adenovirus F
cagcuggaacucaaagu

SEQ ID NO: 115824 - RNA, 17 nt, Human adenovirus F
cagcgacugacgcugcg

SEQ ID NO: 115825 - RNA, 20 nt, Human adenovirus F
cagauuugaagaugacuuca

SEQ ID NO: 115826 - RNA, 23 nt, Human adenovirus F
cagauaugggcuaaacaccccac

SEQ ID NO: 115827 - RNA, 20 nt, Human adenovirus F
cagaugcauuuuggccugaa

SEQ ID NO: 115828 - RNA, 20 nt, Human adenovirus F
cagagcuuuaugacuauggu

SEQ ID NO: 115829 - RNA, 22 nt, Human adenovirus F
cagagccauuuuggcagacaua

SEQ ID NO: 115830 - RNA, 13 nt, Human adenovirus F
cagagccauagca

SEQ ID NO: 115831 - RNA, 15 nt, Human adenovirus F
cacuuacaaccaaaa

SEQ ID NO: 115832 - RNA, 21 nt, Human adenovirus F
cacuuaccagagccauagcaa

SEQ ID NO: 115833 - RNA, 11 nt, Human adenovirus F
caagacacuga

SEQ ID NO: 115834 - RNA, 16 nt, Human adenovirus F
caacguuggaccccac

SEQ ID NO: 115835 - RNA, 21 nt, Human adenovirus F
caaaugggccuggcagcugga

SEQ ID NO: 115836 - RNA, 16 nt, Human adenovirus F
caaaguccuggccaac

SEQ ID NO: 115837 - RNA, 19 nt, Human adenovirus F
caaaguccuggccaacugc

SEQ ID NO: 115838 - RNA, 17 nt, Human adenovirus F
caaaucccagcuuuugc

SEQ ID NO: 115839 - RNA, 17 nt, Human adenovirus F
caaagccaaccuucggg

SEQ ID NO: 115840 - RNA, 14 nt, Human adenovirus F
caaagacauuccca

SEQ ID NO: 115841 - RNA, 20 nt, Human adenovirus F
caaagacauucccacgccuu

SEQ ID NO: 115842 - RNA, 21 nt, Human adenovirus F
caaagagcuugaacauaacac

SEQ ID NO: 115843 - RNA, 15 nt, Human adenovirus F
caaagacaaaaucac

SEQ ID NO: 115844 - RNA, 20 nt, Human adenovirus F
auuuguuuuugcagagcucu

SEQ ID NO: 115845 - RNA, 22 nt, Human adenovirus F
auuuuauuguucuguuacauaa

SEQ ID NO: 115846 - RNA, 16 nt, Human adenovirus F
caaacaggaagacaau

SEQ ID NO: 115847 - RNA, 19 nt, Human adenovirus F
caaaaacuuacaaucauuu

SEQ ID NO: 115848 - RNA, 15 nt, Human adenovirus F
caaaaacucugugaa

SEQ ID NO: 115849 - RNA, 20 nt, Human adenovirus F
caaaaaauucaugcaugcag

SEQ ID NO: 115850 - RNA, 12 nt, Human adenovirus F
auuaugccucuu

SEQ ID NO: 115851 - RNA, 15 nt, Human adenovirus F
auucaugcaugcaga

SEQ ID NO: 115852 - RNA, 17 nt, Human adenovirus F
auucaagauugcagcuu

SEQ ID NO: 115853 - RNA, 23 nt, Human adenovirus F
auuuccugguuuccuauuacagc

SEQ ID NO: 115854 - RNA, 13 nt, Human adenovirus F
auuucauuuacca

SEQ ID NO: 115855 - RNA, 14 nt, Human adenovirus F
auuguuaacacggc

SEQ ID NO: 115856 - RNA, 16 nt, Human adenovirus F
auuuaggauuuacaca

SEQ ID NO: 115857 - RNA, 14 nt, Human adenovirus F
gguugcgcuccaug

SEQ ID NO: 115858 - RNA, 16 nt, Human adenovirus F
gguuuaaaaugaugau

SEQ ID NO: 115859 - RNA, 16 nt, Human adenovirus F
guaaaaaaaagggaag

SEQ ID NO: 115860 - RNA, 18 nt, Human adenovirus F
gguuuuggacauggccag

SEQ ID NO: 115861 - RNA, 15 nt, Human adenovirus F
guaaaaguaucaaua

SEQ ID NO: 115862 - RNA, 12 nt, Human adenovirus F
gguucacuguau

SEQ ID NO: 115863 - RNA, 15 nt, Human adenovirus F
guaagagguuuugaa

SEQ ID NO: 115864 - RNA, 19 nt, Human adenovirus F
guaaaccagcacacaggga

SEQ ID NO: 115865 - RNA, 19 nt, Human adenovirus F
guaaauggaauucgugcca

SEQ ID NO: 115866 - RNA, 15 nt, Human adenovirus F
guaacuccucuucuc

SEQ ID NO: 115867 - RNA, 16 nt, Human adenovirus F
guaacuccucuucucc

SEQ ID NO: 115868 - RNA, 21 nt, Human adenovirus F
guaacuuucaaaccacggugg

SEQ ID NO: 115869 - RNA, 19 nt, Human adenovirus F
ggucaaaaacucugugaag

SEQ ID NO: 115870 - RNA, 12 nt, Human adenovirus F
ggucuaagggaa

SEQ ID NO: 115871 - RNA, 17 nt, Human adenovirus F
ggugggcuuggauguuc

SEQ ID NO: 115872 - RNA, 20 nt, Human adenovirus F
ggugaaaggcaagacacuga

SEQ ID NO: 115873 - RNA, 21 nt, Human adenovirus F
ggugaaaggcaagacacugag

SEQ ID NO: 115874 - RNA, 19 nt, Human adenovirus F
gguaggcccuagaccaccu

SEQ ID NO: 115875 - RNA, 15 nt, Human adenovirus F
gguaagagccauguu

SEQ ID NO: 115876 - RNA, 17 nt, Human adenovirus F
ggcguagguaaggguug

SEQ ID NO: 115877 - RNA, 16 nt, Human adenovirus F
ggcccugcaaagccaa

SEQ ID NO: 115878 - RNA, 15 nt, Human adenovirus F
ggaucgccaacagcc

SEQ ID NO: 115879 - RNA, 13 nt, Human adenovirus F
ggaguggcauuaa

SEQ ID NO: 115880 - RNA, 13 nt, Human adenovirus F
ggagggaugcaug

SEQ ID NO: 115881 - RNA, 15 nt, Human adenovirus F
gcuggccgugggcga

SEQ ID NO: 115882 - RNA, 17 nt, Human adenovirus F
gcuggcuuccggcauua

SEQ ID NO: 115883 - RNA, 12 nt, Human adenovirus F
gcuguaacaucu

SEQ ID NO: 115884 - RNA, 16 nt, Human adenovirus F
gcuucacggaaggaaa

SEQ ID NO: 115885 - RNA, 20 nt, Human adenovirus F
ggacucccuggacaguuccc

SEQ ID NO: 115886 - RNA, 16 nt, Human adenovirus F
gcuugcaagauggcca

SEQ ID NO: 115887 - RNA, 15 nt, Human adenovirus F
gcggugguacagggg

SEQ ID NO: 115888 - RNA, 21 nt, Human adenovirus F
gcggugagcgucucuugcaag

SEQ ID NO: 115889 - RNA, 19 nt, Human adenovirus F
gcggcuguaacaucugcau

SEQ ID NO: 115890 - RNA, 12 nt, Human adenovirus F
gcggauuugccg

SEQ ID NO: 115891 - RNA, 12 nt, Human adenovirus F
gcggacuaccua

SEQ ID NO: 115892 - RNA, 21 nt, Human adenovirus F
gccugugauuucauuuaccac

SEQ ID NO: 115893 - RNA, 18 nt, Human adenovirus F
gccuuaguugguaccaau

SEQ ID NO: 115894 - RNA, 19 nt, Human adenovirus F
gcuggacuauacacuguca

SEQ ID NO: 115895 - RNA, 14 nt, Human adenovirus F
gcuccaucaagccc

SEQ ID NO: 115896 - RNA, 23 nt, Human adenovirus F
gcuacccuucugugccugucaug

SEQ ID NO: 115897 - RNA, 15 nt, Human adenovirus F
gcuaaaggaccaaaa

SEQ ID NO: 115898 - RNA, 17 nt, Human adenovirus F
gcuaaaggaccaaaacu

SEQ ID NO: 115899 - RNA, 22 nt, Human adenovirus F
gcuacucaacagaaaccucuuc

SEQ ID NO: 115900 - RNA, 17 nt, Human adenovirus F
gcuauguuggcggcccu

SEQ ID NO: 115901 - RNA, 11 nt, Human adenovirus F
gcuauguuugu

SEQ ID NO: 115902 - RNA, 15 nt, Human adenovirus F
gcuauugacacugcu

SEQ ID NO: 115903 - RNA, 16 nt, Human adenovirus F
gcaucuuuuuugacuu

SEQ ID NO: 115904 - RNA, 14 nt, Human adenovirus F
gcaugaaacuggaa

SEQ ID NO: 115905 - RNA, 15 nt, Human adenovirus F
gcaugaaacuggaag

SEQ ID NO: 115906 - RNA, 22 nt, Human adenovirus F
gcaugaaacuggaagauguccu

SEQ ID NO: 115907 - RNA, 19 nt, Human adenovirus F
gcauccuggcccuaaccac

SEQ ID NO: 115908 - RNA, 11 nt, Human adenovirus F
gcaacugcuga

SEQ ID NO: 115909 - RNA, 20 nt, Human adenovirus F
gccacgcaggagcucagaaa

SEQ ID NO: 115910 - RNA, 14 nt, Human adenovirus F
gccuggcagcugga

SEQ ID NO: 115911 - RNA, 17 nt, Human adenovirus F
gccuggcagcuggagcu

SEQ ID NO: 115912 - RNA, 17 nt, Human adenovirus F
gccuccagcacugccgg

SEQ ID NO: 115913 - RNA, 19 nt, Human adenovirus F
gccuacugccgccaugacu

SEQ ID NO: 115914 - RNA, 13 nt, Human adenovirus F
gccuauugccaca

SEQ ID NO: 115915 - RNA, 22 nt, Human adenovirus F
gccgcaaaugggccuggcagcu

SEQ ID NO: 115916 - RNA, 16 nt, Human adenovirus F
gccgcccuaaccucua

SEQ ID NO: 115917 - RNA, 19 nt, Human adenovirus F
gccaucugcagcauugcca

SEQ ID NO: 115918 - RNA, 22 nt, Human adenovirus F
gcccauuaagguuacucagcaa

SEQ ID NO: 115919 - RNA, 13 nt, Human adenovirus F
gcccauaccaaag

SEQ ID NO: 115920 - RNA, 14 nt, Human adenovirus F
gcccauaccaaaga

SEQ ID NO: 115921 - RNA, 22 nt, Human adenovirus F
gccccugccaacucgacaaccc

SEQ ID NO: 115922 - RNA, 16 nt, Human adenovirus F
gaauaauuaugccucu

SEQ ID NO: 115923 - RNA, 19 nt, Human adenovirus F
aaacgagaggaccacuuaa

SEQ ID NO: 115924 - RNA, 20 nt, Human adenovirus F
gaaucaauaaaagcuuuuau

SEQ ID NO: 115925 - RNA, 12 nt, Human adenovirus F
gaaguuaccaaa

SEQ ID NO: 115926 - RNA, 13 nt, Human adenovirus F
gaaguuaccaaag

SEQ ID NO: 115927 - RNA, 14 nt, Human adenovirus F
gaaguuaccaaaga

SEQ ID NO: 115928 - RNA, 21 nt, Human adenovirus F
gaaguauuagcgggaggguua

SEQ ID NO: 115929 - RNA, 14 nt, Human adenovirus F
gaagugaagaccaa

SEQ ID NO: 115930 - RNA, 14 nt, Human adenovirus F
gaagcaugcuguuu

SEQ ID NO: 115931 - RNA, 22 nt, Human adenovirus F
gaacgcuggacuauacacuguc

SEQ ID NO: 115932 - RNA, 21 nt, Human adenovirus F
gaacucaaaguaaaaaaccga

SEQ ID NO: 115933 - RNA, 19 nt, Human adenovirus F
gaagauguccuuaaggagg

SEQ ID NO: 115934 - RNA, 18 nt, Human adenovirus F
gaacaguaacacagguca

SEQ ID NO: 115935 - RNA, 14 nt, Human adenovirus F
gaacgagaucggca

SEQ ID NO: 115936 - RNA, 16 nt, Human adenovirus F
cuuguaucacagaagu

SEQ ID NO: 115937 - RNA, 21 nt, Human adenovirus F
cuuucaaaccacggugguaca

SEQ ID NO: 115938 - RNA, 12 nt, Human adenovirus F
cuuucaacaaaa

SEQ ID NO: 115939 - RNA, 11 nt, Human adenovirus F
cuuuaugacua

SEQ ID NO: 115940 - RNA, 15 nt, Human adenovirus F
cuuuaugacuauggu

SEQ ID NO: 115941 - RNA, 23 nt, Human adenovirus F
cuuuauuuuucugagucuaccac

SEQ ID NO: 115942 - RNA, 21 nt, Human adenovirus F
aaacuaucaacuacagccugu

SEQ ID NO: 115943 - RNA, 20 nt, Human adenovirus F
aaacugcggacuaccuauac

SEQ ID NO: 115944 - RNA, 20 nt, Human adenovirus F
aaacuguucaaggaccguuu

SEQ ID NO: 115945 - RNA, 16 nt, Human adenovirus F
aaaguuccucuucucu

SEQ ID NO: 115946 - RNA, 17 nt, Human adenovirus F
aaaguuauucugauuaa

SEQ ID NO: 115947 - RNA, 13 nt, Human adenovirus F
aaagguguuggcg

SEQ ID NO: 115948 - RNA, 22 nt, Human adenovirus F
aaaggaccaaaacuuucaacaa

SEQ ID NO: 115949 - RNA, 23 nt, Human adenovirus F
aaaggaguuaaccuugaguuuaa

SEQ ID NO: 115950 - RNA, 22 nt, Human adenovirus F
aaaggacuccuggacuuuuaga

SEQ ID NO: 115951 - RNA, 16 nt, Human adenovirus F
aaaggcccauaccaaa

SEQ ID NO: 115952 - RNA, 17 nt, Human adenovirus F
aaaggcccauaccaaag

SEQ ID NO: 115953 - RNA, 19 nt, Human adenovirus F
aaaggcccauaccaaagag

SEQ ID NO: 115954 - RNA, 17 nt, Human adenovirus F
gacacugaggauuuucu

SEQ ID NO: 115955 - RNA, 20 nt, Human adenovirus F
gacccggcacuacuguagua

SEQ ID NO: 115956 - RNA, 19 nt, Human adenovirus F
gaccgcgaggaaaccgccu

SEQ ID NO: 115957 - RNA, 20 nt, Human adenovirus F
gagccgcggucaacagcugg

SEQ ID NO: 115958 - RNA, 14 nt, Human adenovirus F
gagaaaacaccucg

SEQ ID NO: 115959 - RNA, 17 nt, Human adenovirus F
gaggcuaauggccagag

SEQ ID NO: 115960 - RNA, 14 nt, Human adenovirus F
aaaugaugauuuau

SEQ ID NO: 115961 - RNA, 14 nt, Human adenovirus F
gacuaaacacccgc

SEQ ID NO: 115962 - RNA, 22 nt, Human adenovirus F
gacuucaaccccgucuaccccu

SEQ ID NO: 115963 - RNA, 12 nt, Human adenovirus F
gauuuggaagau

SEQ ID NO: 115964 - RNA, 22 nt, Human adenovirus F
gauugggcggguaaauggaauu

SEQ ID NO: 115965 - RNA, 14 nt, Human adenovirus F
gauucuucugugac

SEQ ID NO: 115966 - RNA, 13 nt, Human adenovirus F
gauuccaccaaag

SEQ ID NO: 115967 - RNA, 15 nt, Human adenovirus F
gaucggcaccagcca

SEQ ID NO: 115968 - RNA, 12 nt, Human adenovirus F
gauaccuacuuc

SEQ ID NO: 115969 - RNA, 14 nt, Human adenovirus F
gauacuuuuacaga

SEQ ID NO: 115970 - RNA, 22 nt, Human adenovirus F
gaugauuuaugguucacuguau

SEQ ID NO: 115971 - RNA, 21 nt, Human adenovirus F
gaugcauccucccaacaaccu

SEQ ID NO: 115972 - RNA, 15 nt, Human adenovirus F
gaugacgucauugac

SEQ ID NO: 115973 - RNA, 17 nt, Human adenovirus F
cuauugccacaauggaa

SEQ ID NO: 115974 - RNA, 17 nt, Human adenovirus F
cuccaacggcuugcaag

SEQ ID NO: 115975 - RNA, 22 nt, Human adenovirus F
cuccaagcgggucaacaccacg

SEQ ID NO: 115976 - RNA, 14 nt, Human adenovirus F
cucaucuucaccuc

SEQ ID NO: 115977 - RNA, 18 nt, Human adenovirus F
cucauccgccauugccac

SEQ ID NO: 115978 - RNA, 20 nt, Human adenovirus F
cucaacagaaaccucuuccu

SEQ ID NO: 115979 - RNA, 13 nt, Human adenovirus F
cuagcagugggca

SEQ ID NO: 115980 - RNA, 15 nt, Human adenovirus F
cuagcagugggcaaa

SEQ ID NO: 115981 - RNA, 16 nt, Human adenovirus F
cuagcagugggcaaag

SEQ ID NO: 115982 - RNA, 19 nt, Human adenovirus F
cuagcagugggcaaagggg

SEQ ID NO: 115983 - RNA, 15 nt, Human adenovirus F
cguugaugacgucau

SEQ ID NO: 115984 - RNA, 14 nt, Human adenovirus F
cguucccuccauca

SEQ ID NO: 115985 - RNA, 16 nt, Human adenovirus F
cguugcgauacugcaa

SEQ ID NO: 115986 - RNA, 12 nt, Human adenovirus F
cguaaaguccag

SEQ ID NO: 115987 - RNA, 16 nt, Human adenovirus F
cggguugucagauaug

SEQ ID NO: 115988 - RNA, 21 nt, Human adenovirus F
cgugugccagccuuaguggaa

SEQ ID NO: 115989 - RNA, 21 nt, Human adenovirus F
cgugacugcgcggcuguaaca

SEQ ID NO: 115990 - RNA, 14 nt, Human adenovirus F
cgugcaggccaacc

SEQ ID NO: 115991 - RNA, 21 nt, Human adenovirus F
cgugccaccgauaccuacuuc

SEQ ID NO: 115992 - RNA, 17 nt, Human adenovirus F
cggcccaccgaguuccu

SEQ ID NO: 115993 - RNA, 15 nt, Human adenovirus F
cggcaccagccagcu

SEQ ID NO: 115994 - RNA, 15 nt, Human adenovirus F
cggaucgccaacagc

SEQ ID NO: 115995 - RNA, 16 nt, Human adenovirus F
cgcaaacaacugcaau

SEQ ID NO: 115996 - RNA, 15 nt, Human adenovirus F
cggggcaauaucuca

SEQ ID NO: 115997 - RNA, 22 nt, Human adenovirus F
cgggacugauauauaaugccuu

SEQ ID NO: 115998 - RNA, 16 nt, Human adenovirus F
cugucauauacuuuaa

SEQ ID NO: 115999 - RNA, 22 nt, Human adenovirus F
cugucacuguauuaaaccuggg

SEQ ID NO: 116000 - RNA, 20 nt, Human adenovirus F
cuguaugcuauugacacugc

SEQ ID NO: 116001 - RNA, 17 nt, Human adenovirus F
cuuacucuuucuuacaa

SEQ ID NO: 116002 - RNA, 16 nt, Human adenovirus F
cuuacgucagcuacaa

SEQ ID NO: 116003 - RNA, 17 nt, Human adenovirus F
cuuagcuggaucaaaca

SEQ ID NO: 116004 - RNA, 20 nt, Human adenovirus F
cuucaaccccgucuaccccu

SEQ ID NO: 116005 - RNA, 21 nt, Human adenovirus F
cuucaaccccgucuaccccua

SEQ ID NO: 116006 - RNA, 22 nt, Human adenovirus F
cuucaaccccgucuaccccuau

SEQ ID NO: 116007 - RNA, 22 nt, Human adenovirus F
cuucaagcccuacaccaaugca

SEQ ID NO: 116008 - RNA, 18 nt, Human adenovirus F
cuucagccuggggaacaa

SEQ ID NO: 116009 - RNA, 21 nt, Human adenovirus F
cuugauacggauugucuuccc

SEQ ID NO: 116010 - RNA, 13 nt, Human adenovirus F
cuugcaagcagcu

SEQ ID NO: 116011 - RNA, 21 nt, Human adenovirus F
cuugcaaaaccaaaucaauca

SEQ ID NO: 116012 - RNA, 21 nt, Human adenovirus F
cuugguaucgagaaauuguaa

SEQ ID NO: 116013 - RNA, 19 nt, Human adenovirus F
cuugguuaaagaaaaccag

SEQ ID NO: 116014 - RNA, 14 nt, Human adenovirus F
cuuccggcauuaac

SEQ ID NO: 116015 - RNA, 23 nt, Human adenovirus F
cuucuucagcucuaagacuguca

SEQ ID NO: 116016 - RNA, 15 nt, Human adenovirus F
cuucugugccuguca

SEQ ID NO: 116017 - RNA, 16 nt, Human adenovirus F
cuucugugccugucau

SEQ ID NO: 116018 - RNA, 18 nt, Human adenovirus F
cugauauauaaugccuua

SEQ ID NO: 116019 - RNA, 16 nt, Human adenovirus F
cugaaugcauguacac

SEQ ID NO: 116020 - RNA, 22 nt, Human adenovirus F
cugaaugcauguacacuauggu

SEQ ID NO: 116021 - RNA, 20 nt, Human adenovirus F
cugaauuuuuagguuggcaa

SEQ ID NO: 116022 - RNA, 14 nt, Human adenovirus F
cugacgaagacauu

SEQ ID NO: 116023 - RNA, 21 nt, Human adenovirus F
cuccucagauugacgaacuua

SEQ ID NO: 116024 - RNA, 13 nt, Human adenovirus F
cucuucucugucu

SEQ ID NO: 116025 - RNA, 14 nt, Human adenovirus F
cugaacuaccagaa

SEQ ID NO: 116026 - RNA, 18 nt, Human adenovirus F
cuggcuuccggcauuaac

SEQ ID NO: 116027 - RNA, 15 nt, Human adenovirus F
cuggccaacugccac

SEQ ID NO: 116028 - RNA, 20 nt, Human adenovirus F
cuggccaacugccaccucca

SEQ ID NO: 116029 - RNA, 23 nt, Human adenovirus F
cuggggaauggagcuguggugcg

SEQ ID NO: 116030 - RNA, 14 nt, Human adenovirus F
cuggggacuuugcu

SEQ ID NO: 116031 - RNA, 23 nt, Human adenovirus F
cugcuuuacuuaaaaagccugug

SEQ ID NO: 116032 - RNA, 17 nt, Human adenovirus F
cugauuaauaaagcuua

SEQ ID NO: 116033 - RNA, 12 nt, Human adenovirus F
cugauggaguug

SEQ ID NO: 116034 - RNA, 15 nt, Human adenovirus F
cauggccagcaccua

SEQ ID NO: 116035 - RNA, 15 nt, Human adenovirus F
cauguacacuauggu

SEQ ID NO: 116036 - RNA, 21 nt, Human adenovirus F
caugagcaagcgcaaguucaa

SEQ ID NO: 116037 - RNA, 19 nt, Human adenovirus F
cauugacauuaugagcaaa

SEQ ID NO: 116038 - RNA, 23 nt, Human adenovirus F
cauugccacuuuuuuuguggcca

SEQ ID NO: 116039 - RNA, 22 nt, Human adenovirus F
caucuuuuuugacuuggcugua

SEQ ID NO: 116040 - RNA, 14 nt, Human adenovirus F
caucgacguucucu

SEQ ID NO: 116041 - RNA, 23 nt, Human adenovirus F
caucgccggaucgccaacagccc

SEQ ID NO: 116042 - RNA, 20 nt, Human adenovirus F
caucaguuauuagcuacuuu

SEQ ID NO: 116043 - RNA, 14 nt, Human adenovirus F
ccaccccagcacuu

SEQ ID NO: 116044 - RNA, 14 nt, Human adenovirus F
ccaaaacuuucaac

SEQ ID NO: 116045 - RNA, 16 nt, Human adenovirus F
ccaaaacuuucaacaa

SEQ ID NO: 116046 - RNA, 13 nt, Human adenovirus F
ccaaauucugcua

SEQ ID NO: 116047 - RNA, 17 nt, Human adenovirus F
ccacaguccuucugcca

SEQ ID NO: 116048 - RNA, 22 nt, Human adenovirus F
ccaacgggcggcaaacuuucuc

SEQ ID NO: 116049 - RNA, 11 nt, Human adenovirus F
ccauaccaaag

SEQ ID NO: 116050 - RNA, 17 nt, Human adenovirus F
ccaugccacgagcagua

SEQ ID NO: 116051 - RNA, 21 nt, Human adenovirus F
ccaccuuuuugggauuacaaa

SEQ ID NO: 116052 - RNA, 20 nt, Human adenovirus F
ccaccggcuccugugcagcg

SEQ ID NO: 116053 - RNA, 17 nt, Human adenovirus F
ccacgcaggagcucaga

SEQ ID NO: 116054 - RNA, 22 nt, Human adenovirus F
ccagcacacagggauacuggau

SEQ ID NO: 116055 - RNA, 16 nt, Human adenovirus F
ccacuuacaaccaaaa

SEQ ID NO: 116056 - RNA, 17 nt, Human adenovirus F
ccacuuacaaccaaaaa

SEQ ID NO: 116057 - RNA, 16 nt, Human adenovirus F
cgacgcuugcuggagu

SEQ ID NO: 116058 - RNA, 22 nt, Human adenovirus F
cgacgggcagugcacugagcag

SEQ ID NO: 116059 - RNA, 13 nt, Human adenovirus F
cgagcgccucaaa

SEQ ID NO: 116060 - RNA, 15 nt, Human adenovirus F
cgaggcacuguucaa

SEQ ID NO: 116061 - RNA, 18 nt, Human adenovirus F
cgagggggaggacuuuuu

SEQ ID NO: 116062 - RNA, 17 nt, Human adenovirus F
cgagugcguaagaccuc

SEQ ID NO: 116063 - RNA, 14 nt, Human adenovirus F
cgauaccuacuuca

SEQ ID NO: 116064 - RNA, 11 nt, Human adenovirus F
cgaucacuccg

SEQ ID NO: 116065 - RNA, 17 nt, Human adenovirus F
cgauggccuaaaaccac

SEQ ID NO: 116066 - RNA, 23 nt, Human adenovirus F
cgaacacuacaauccccuugaca

SEQ ID NO: 116067 - RNA, 13 nt, Human adenovirus F
cgaagacugaguu

SEQ ID NO: 116068 - RNA, 17 nt, Human adenovirus F
cgaagaggguacuagca

SEQ ID NO: 116069 - RNA, 22 nt, Human adenovirus F
cgaaagcgugauggaaacagcg

SEQ ID NO: 116070 - RNA, 16 nt, Human adenovirus F
ccuuuuuacccugacc

SEQ ID NO: 116071 - RNA, 22 nt, Human adenovirus F
ccuuguauuuguauaaucuuaa

SEQ ID NO: 116072 - RNA, 14 nt, Human adenovirus F
ccuggaacccaaag

SEQ ID NO: 116073 - RNA, 13 nt, Human adenovirus F
ccugcaaagccaa

SEQ ID NO: 116074 - RNA, 20 nt, Human adenovirus F
ccugcuugucugucugccaa

SEQ ID NO: 116075 - RNA, 20 nt, Human adenovirus F
ccuuccucccaacuuucgua

SEQ ID NO: 116076 - RNA, 15 nt, Human adenovirus F
ccuugcaaaaccaaa

SEQ ID NO: 116077 - RNA, 14 nt, Human adenovirus F
ccuugcugacuuau

SEQ ID NO: 116078 - RNA, 12 nt, Human adenovirus F
ccgcuccaucaa

SEQ ID NO: 116079 - RNA, 16 nt, Human adenovirus F
ccggggcaauaucuca

SEQ ID NO: 116080 - RNA, 19 nt, Human adenovirus F
ccgggguuccaccaagcuc

SEQ ID NO: 116081 - RNA, 21 nt, Human adenovirus F
ccgcagcugcuuguaucacag

SEQ ID NO: 116082 - RNA, 23 nt, Human adenovirus F
cccaccgaguuccugcgcugcua

SEQ ID NO: 116083 - RNA, 19 nt, Human adenovirus F
cccacgauguaaccacaga

SEQ ID NO: 116084 - RNA, 15 nt, Human adenovirus F
ccgaaguccaaauga

SEQ ID NO: 116085 - RNA, 15 nt, Human adenovirus F
ccgagugacacguca

SEQ ID NO: 116086 - RNA, 13 nt, Human adenovirus F
ccgaucacuccgu

SEQ ID NO: 116087 - RNA, 17 nt, Human adenovirus F
ccucucgcucugcaaaa

SEQ ID NO: 116088 - RNA, 17 nt, Human adenovirus F
ccucuucucugucuuau

SEQ ID NO: 116089 - RNA, 23 nt, Human adenovirus F
ccucuucucugucuuauccuccu

SEQ ID NO: 116090 - RNA, 15 nt, Human adenovirus F
ccuauguuaggcuuu

SEQ ID NO: 116091 - RNA, 19 nt, Human adenovirus F
ccuaucacuaaaaccaaca

SEQ ID NO: 116092 - RNA, 20 nt, Human adenovirus F
ccuaucacuaaaaccaacaa

SEQ ID NO: 116093 - RNA, 17 nt, Human adenovirus F
ccgugcuguuggacgau

SEQ ID NO: 116094 - RNA, 19 nt, Human adenovirus F
ccggguuuuggacauggcc

SEQ ID NO: 116095 - RNA, 14 nt, Human adenovirus F
ucugcucugccuau

SEQ ID NO: 116096 - RNA, 18 nt, Human adenovirus F
ucugcaaaaacaaauaca

SEQ ID NO: 116097 - RNA, 15 nt, Human adenovirus F
ucugccaauuaucua

SEQ ID NO: 116098 - RNA, 20 nt, Human adenovirus F
ucugugaaguuaccaaagac

SEQ ID NO: 116099 - RNA, 15 nt, Human adenovirus F
ucugugacaaaauca

SEQ ID NO: 116100 - RNA, 14 nt, Human adenovirus F
ucuuaaaacugacg

SEQ ID NO: 116101 - RNA, 20 nt, Human adenovirus F
ucuguuugcugcacugccau

SEQ ID NO: 116102 - RNA, 15 nt, Human adenovirus F
ucuguuuggugggcu

SEQ ID NO: 116103 - RNA, 17 nt, Human adenovirus F
ucugagucuaccacuuc

SEQ ID NO: 116104 - RNA, 17 nt, Human adenovirus F
ucugaacacuuuugcca

SEQ ID NO: 116105 - RNA, 19 nt, Human adenovirus F
ucugaagaugucugaccaa

SEQ ID NO: 116106 - RNA, 19 nt, Human adenovirus F
ucucaacuucccucuccga

SEQ ID NO: 116107 - RNA, 11 nt, Human adenovirus F
ucuaccacuuc

SEQ ID NO: 116108 - RNA, 15 nt, Human adenovirus F
ucuaccacuucuauu

SEQ ID NO: 116109 - RNA, 13 nt, Human adenovirus F
ucuaccccuauga

SEQ ID NO: 116110 - RNA, 14 nt, Human adenovirus F
ucuaccccuaugac

SEQ ID NO: 116111 - RNA, 13 nt, Human adenovirus F
ucguccaacagca

SEQ ID NO: 116112 - RNA, 16 nt, Human adenovirus F
ucgugacuugcacuuu

SEQ ID NO: 116113 - RNA, 18 nt, Human adenovirus F
uccuaacaaaaacuuaca

SEQ ID NO: 116114 - RNA, 22 nt, Human adenovirus F
uccucagccugaaauacacuga

SEQ ID NO: 116115 - RNA, 18 nt, Human adenovirus F
ugaaaggcaagacacuga

SEQ ID NO: 116116 - RNA, 23 nt, Human adenovirus F
ucuuggccugccgcccagguuua

SEQ ID NO: 116117 - RNA, 22 nt, Human adenovirus F
ucuugcagaugaaaagaaccag

SEQ ID NO: 116118 - RNA, 17 nt, Human adenovirus F
ucuucgugacuugcacu

SEQ ID NO: 116119 - RNA, 11 nt, Human adenovirus F
ucuuccaccuc

SEQ ID NO: 116120 - RNA, 19 nt, Human adenovirus F
ugaaucccgcuauguuggc

SEQ ID NO: 116121 - RNA, 17 nt, Human adenovirus F
ugaagaugucugaccaa

SEQ ID NO: 116122 - RNA, 14 nt, Human adenovirus F
ugaagaugacuuca

SEQ ID NO: 116123 - RNA, 12 nt, Human adenovirus F
ugaaguuaccaa

SEQ ID NO: 116124 - RNA, 15 nt, Human adenovirus F
ugaaguuaccaaaga

SEQ ID NO: 116125 - RNA, 14 nt, Human adenovirus F
ugaaggucuccuaa

SEQ ID NO: 116126 - RNA, 16 nt, Human adenovirus F
ugaccuuuugucgcau

SEQ ID NO: 116127 - RNA, 15 nt, Human adenovirus F
ugacacugcuaccaa

SEQ ID NO: 116128 - RNA, 21 nt, Human adenovirus F
ucaugcugcuguuuuuacuuu

SEQ ID NO: 116129 - RNA, 22 nt, Human adenovirus F
ucauuuuuuuuuauuggucaaa

SEQ ID NO: 116130 - RNA, 21 nt, Human adenovirus F
ucaguggcgcgcuaacagaca

SEQ ID NO: 116131 - RNA, 22 nt, Human adenovirus F
ucccgccuugcugacuuaucuc

SEQ ID NO: 116132 - RNA, 18 nt, Human adenovirus F
uccgccggcauguacggc

SEQ ID NO: 116133 - RNA, 12 nt, Human adenovirus F
uccggcauuaac

SEQ ID NO: 116134 - RNA, 23 nt, Human adenovirus F
uccacgggcugaggagcuguuaa

SEQ ID NO: 116135 - RNA, 17 nt, Human adenovirus F
uccacuuacaaccaaaa

SEQ ID NO: 116136 - RNA, 15 nt, Human adenovirus F
uccacuuaccagagc

SEQ ID NO: 116137 - RNA, 20 nt, Human adenovirus F
uccacuuaccagagccauag

SEQ ID NO: 116138 - RNA, 18 nt, Human adenovirus F
uccaucgccggaucgcca

SEQ ID NO: 116139 - RNA, 21 nt, Human adenovirus F
ucaaggaaacaacagccuuug

SEQ ID NO: 116140 - RNA, 21 nt, Human adenovirus F
ucaaguacacugaccccauua

SEQ ID NO: 116141 - RNA, 14 nt, Human adenovirus F
ucagguucagagau

SEQ ID NO: 116142 - RNA, 12 nt, Human adenovirus F
ucagaugcauuu

SEQ ID NO: 116143 - RNA, 18 nt, Human adenovirus F
ucagauugacgaacuuac

SEQ ID NO: 116144 - RNA, 16 nt, Human adenovirus F
ucacuaaaaccaacaa

SEQ ID NO: 116145 - RNA, 17 nt, Human adenovirus F
ucacuaaaaccaacaaa

SEQ ID NO: 116146 - RNA, 19 nt, Human adenovirus F
ucacuaaaaccaacaaaau

SEQ ID NO: 116147 - RNA, 23 nt, Human adenovirus F
ucaaaaaauucaugcaugcagac

SEQ ID NO: 116148 - RNA, 17 nt, Human adenovirus F
ucaaaaacucugugaag

SEQ ID NO: 116149 - RNA, 14 nt, Human adenovirus F
ucaacacagguucu

SEQ ID NO: 116150 - RNA, 17 nt, Human adenovirus F
gugaagaccaacugcag

SEQ ID NO: 116151 - RNA, 15 nt, Human adenovirus F
gugcgcgagcuuuua

SEQ ID NO: 116152 - RNA, 18 nt, Human adenovirus F
gugggcuuggauguucaa

SEQ ID NO: 116153 - RNA, 14 nt, Human adenovirus F
gugucucuuaagga

SEQ ID NO: 116154 - RNA, 17 nt, Human adenovirus F
gugugcuaaguuuaaca

SEQ ID NO: 116155 - RNA, 18 nt, Human adenovirus F
gugugcuaaguuuaacaa

SEQ ID NO: 116156 - RNA, 15 nt, Human adenovirus F
guguuaucucaagac

SEQ ID NO: 116157 - RNA, 17 nt, Human adenovirus F
guuagcucugaacacuu

SEQ ID NO: 116158 - RNA, 16 nt, Human adenovirus F
gucgcuguaaaaauac

SEQ ID NO: 116159 - RNA, 21 nt, Human adenovirus F
gucuccgggguuccaccaagc

SEQ ID NO: 116160 - RNA, 19 nt, Human adenovirus F
gugaaaggcaagacacuga

SEQ ID NO: 116161 - RNA, 17 nt, Human adenovirus F
gucugguuaaacaagcu

SEQ ID NO: 116162 - RNA, 18 nt, Human adenovirus F
guccuggccaacugccac

SEQ ID NO: 116163 - RNA, 20 nt, Human adenovirus F
guacaaccugggggcuuuga

SEQ ID NO: 116164 - RNA, 17 nt, Human adenovirus F
guacaaaauaaugacuu

SEQ ID NO: 116165 - RNA, 23 nt, Human adenovirus F
guaccaauccugaaugcauguac

SEQ ID NO: 116166 - RNA, 17 nt, Human adenovirus F
guaccgcuccaucaagc

SEQ ID NO: 116167 - RNA, 16 nt, Human adenovirus F
uaaacaugagcuuacu

SEQ ID NO: 116168 - RNA, 22 nt, Human adenovirus F
uaaaaauggagaucuuucuuca

SEQ ID NO: 116169 - RNA, 12 nt, Human adenovirus F
uaaaggaguuaa

SEQ ID NO: 116170 - RNA, 15 nt, Human adenovirus F
uaaagcauuuccgca

SEQ ID NO: 116171 - RNA, 22 nt, Human adenovirus F
uaacaucugcaucggugccgua

SEQ ID NO: 116172 - RNA, 12 nt, Human adenovirus F
uaaauuacacua

SEQ ID NO: 116173 - RNA, 17 nt, Human adenovirus F
guuugcugcacugccau

SEQ ID NO: 116174 - RNA, 19 nt, Human adenovirus F
guuugcugugccacuauua

SEQ ID NO: 116175 - RNA, 16 nt, Human adenovirus F
guuucugggcuugcuu

SEQ ID NO: 116176 - RNA, 22 nt, Human adenovirus F
guuuugaacgcuggacuauaca

SEQ ID NO: 116177 - RNA, 21 nt, Human adenovirus F
guuggucgccaucgugcgcga

SEQ ID NO: 116178 - RNA, 15 nt, Human adenovirus F
guuuacaaaagcaug

SEQ ID NO: 116179 - RNA, 16 nt, Human adenovirus F
uaguacggccgugacu

SEQ ID NO: 116180 - RNA, 18 nt, Human adenovirus F
uaguacggccgugacugc

SEQ ID NO: 116181 - RNA, 16 nt, Human adenovirus F
uaguaauaaaguuauu

SEQ ID NO: 116182 - RNA, 15 nt, Human adenovirus F
uaguguuaguuuauu

SEQ ID NO: 116183 - RNA, 13 nt, Human adenovirus F
uagguaagagcca

SEQ ID NO: 116184 - RNA, 15 nt, Human adenovirus F
uagguaagagccaug

SEQ ID NO: 116185 - RNA, 16 nt, Human adenovirus F
uagcgccccuaucacu

SEQ ID NO: 116186 - RNA, 20 nt, Human adenovirus F
uagcaccaacgugcaggcca

SEQ ID NO: 116187 - RNA, 21 nt, Human adenovirus F
uacuuucaucuuaacucugaa

SEQ ID NO: 116188 - RNA, 22 nt, Human adenovirus F
uaaugaguagccuucuauugca

SEQ ID NO: 116189 - RNA, 18 nt, Human adenovirus F
uaacccuggaauuuuugc

SEQ ID NO: 116190 - RNA, 15 nt, Human adenovirus F
uaaccguuaaucucc

SEQ ID NO: 116191 - RNA, 20 nt, Human adenovirus F
uaccaccgcaaacaacugca

SEQ ID NO: 116192 - RNA, 20 nt, Human adenovirus F
uacauuugaacagcugaaga

SEQ ID NO: 116193 - RNA, 14 nt, Human adenovirus F
uacacugaccccau

SEQ ID NO: 116194 - RNA, 19 nt, Human adenovirus F
uacacugauccacuuacaa

SEQ ID NO: 116195 - RNA, 22 nt, Human adenovirus F
uacacugauccacuuacaacca

SEQ ID NO: 116196 - RNA, 19 nt, Human adenovirus F
uacccuuacgaacacuaca

SEQ ID NO: 116197 - RNA, 20 nt, Human adenovirus F
uacccuuacgaacacuacaa

SEQ ID NO: 116198 - RNA, 17 nt, Human adenovirus F
uaccccuaugacaccuc

SEQ ID NO: 116199 - RNA, 18 nt, Human adenovirus F
uacccugacccacaaucu

SEQ ID NO: 116200 - RNA, 21 nt, Human adenovirus F
aacaagucggcggacauugcc

SEQ ID NO: 116201 - RNA, 19 nt, Human adenovirus F
aacaaguucagaaacccca

SEQ ID NO: 116202 - RNA, 18 nt, Human adenovirus F
aacaagcaaagacagagc

SEQ ID NO: 116203 - RNA, 16 nt, Human adenovirus F
uaccgucaucucuaca

SEQ ID NO: 116204 - RNA, 16 nt, Human adenovirus F
uaccggcuggggacuu

SEQ ID NO: 116205 - RNA, 17 nt, Human adenovirus F
ugcagcuuaauguuuga

SEQ ID NO: 116206 - RNA, 18 nt, Human adenovirus F
ugacgucauugacuccgu

SEQ ID NO: 116207 - RNA, 13 nt, Human adenovirus F
ugacuugcacuuu

SEQ ID NO: 116208 - RNA, 13 nt, Human adenovirus F
ugacuuaucucau

SEQ ID NO: 116209 - RNA, 19 nt, Human adenovirus F
ugacuuaucucaucuucac

SEQ ID NO: 116210 - RNA, 16 nt, Human adenovirus F
ugacugcgcggcugua

SEQ ID NO: 116211 - RNA, 19 nt, Human adenovirus F
ugccuaugugcuggggaau

SEQ ID NO: 116212 - RNA, 13 nt, Human adenovirus F
ugcaugcaugaau

SEQ ID NO: 116213 - RNA, 17 nt, Human adenovirus F
ugcauguacacuauggu

SEQ ID NO: 116214 - RNA, 14 nt, Human adenovirus F
ugcauuaugugagc

SEQ ID NO: 116215 - RNA, 17 nt, Human adenovirus F
uggaacaguaacacagg

SEQ ID NO: 116216 - RNA, 13 nt, Human adenovirus F
uggacuauacacu

SEQ ID NO: 116217 - RNA, 16 nt, Human adenovirus F
uggacuguacaaucaa

SEQ ID NO: 116218 - RNA, 20 nt, Human adenovirus F
uggacuuuuagagugugaac

SEQ ID NO: 116219 - RNA, 19 nt, Human adenovirus F
uggaaaggcccauaccaaa

SEQ ID NO: 116220 - RNA, 20 nt, Human adenovirus F
uggaaaggcccauaccaaag

SEQ ID NO: 116221 - RNA, 14 nt, Human adenovirus F
ugcuauuuuccagc

SEQ ID NO: 116222 - RNA, 17 nt, Human adenovirus F
ugcuauugacacugcua

SEQ ID NO: 116223 - RNA, 19 nt, Human adenovirus F
ugcgcugcuacucaacaga

SEQ ID NO: 116224 - RNA, 17 nt, Human adenovirus F
uguaucacagaagugaa

SEQ ID NO: 116225 - RNA, 17 nt, Human adenovirus F
uguaacaacuguacugc

SEQ ID NO: 116226 - RNA, 13 nt, Human adenovirus F
uguaacaucugca

SEQ ID NO: 116227 - RNA, 16 nt, Human adenovirus F
ugguaaaccagcacac

SEQ ID NO: 116228 - RNA, 15 nt, Human adenovirus F
ugguuuccuauuaca

SEQ ID NO: 116229 - RNA, 18 nt, Human adenovirus F
uggggugguguuguaaau

SEQ ID NO: 116230 - RNA, 15 nt, Human adenovirus F
ugggccaguuuacaa

SEQ ID NO: 116231 - RNA, 11 nt, Human adenovirus F
ugggucucuuc

SEQ ID NO: 116232 - RNA, 17 nt, Human adenovirus F
ugggucucuucaaugua

SEQ ID NO: 116233 - RNA, 15 nt, Human adenovirus F
ugggcaggagugcgu

SEQ ID NO: 116234 - RNA, 23 nt, Human adenovirus F
uggagcuaucagccgcaaauggg

SEQ ID NO: 116235 - RNA, 22 nt, Human adenovirus F
uggaggcuugggaggauuuuga

SEQ ID NO: 116236 - RNA, 16 nt, Human adenovirus F
uggagcuucucaggau

SEQ ID NO: 116237 - RNA, 16 nt, Human adenovirus F
uggaguccaaagcaga

SEQ ID NO: 116238 - RNA, 14 nt, Human adenovirus F
uggccaacugccac

SEQ ID NO: 116239 - RNA, 12 nt, Human adenovirus F
uggccaaugugg

SEQ ID NO: 116240 - RNA, 20 nt, Human adenovirus F
uggcggcccugcaaagccaa

SEQ ID NO: 116241 - RNA, 14 nt, Human adenovirus F
uggcgugugccauu

SEQ ID NO: 116242 - RNA, 15 nt, Human adenovirus F
uggcucgcuuuacaa

SEQ ID NO: 116243 - RNA, 16 nt, Human adenovirus F
uggcgccaguuuacaa

SEQ ID NO: 116244 - RNA, 21 nt, Human adenovirus F
ugggacuggugggccaguuua

SEQ ID NO: 116245 - RNA, 21 nt, Human adenovirus F
ugggaauuauucaagauugca

SEQ ID NO: 116246 - RNA, 14 nt, Human adenovirus F
uggcuuagugccgg

SEQ ID NO: 116247 - RNA, 17 nt, Human adenovirus F
ugggaaaagcaugugug

SEQ ID NO: 116248 - RNA, 20 nt, Human adenovirus F
ugggaaaagcaugugugcaa

SEQ ID NO: 116249 - RNA, 16 nt, Human adenovirus F
uuaaagaaaaccagca

SEQ ID NO: 116250 - RNA, 21 nt, Human adenovirus F
uuaaagaaaaccagcauguca

SEQ ID NO: 116251 - RNA, 18 nt, Human adenovirus F
uguuugcugcacugccau

SEQ ID NO: 116252 - RNA, 20 nt, Human adenovirus F
uguuugcugugccacuauua

SEQ ID NO: 116253 - RNA, 13 nt, Human adenovirus F
uuaagcagagcca

SEQ ID NO: 116254 - RNA, 19 nt, Human adenovirus F
uuaauaaagcuuaccuuaa

SEQ ID NO: 116255 - RNA, 20 nt, Human adenovirus F
uuaauauacguaaaugugcc

SEQ ID NO: 116256 - RNA, 16 nt, Human adenovirus F
uuaagguuacucagca

SEQ ID NO: 116257 - RNA, 15 nt, Human adenovirus F
ugucaaguuuuucca

SEQ ID NO: 116258 - RNA, 14 nt, Human adenovirus F
ugucugucugccaa

SEQ ID NO: 116259 - RNA, 16 nt, Human adenovirus F
ugucugucugccaauu

SEQ ID NO: 116260 - RNA, 19 nt, Human adenovirus F
ugucuuauccuccuucaca

SEQ ID NO: 116261 - RNA, 19 nt, Human adenovirus F
uuaucuacgccuccaccac

SEQ ID NO: 116262 - RNA, 13 nt, Human adenovirus F
uuauccuccuuca

SEQ ID NO: 116263 - RNA, 22 nt, Human adenovirus F
uuauccuccuucacaaaguccu

SEQ ID NO: 116264 - RNA, 13 nt, Human adenovirus F
uuauccuugcucg

SEQ ID NO: 116265 - RNA, 23 nt, Human adenovirus F
uuagugccggcccccacaugauu

SEQ ID NO: 116266 - RNA, 16 nt, Human adenovirus F
uuaugguucacuguau

SEQ ID NO: 116267 - RNA, 17 nt, Human adenovirus F
uuaugggcaccuggaac

SEQ ID NO: 116268 - RNA, 18 nt, Human adenovirus F
uuaaucaaauuguaagag

SEQ ID NO: 116269 - RNA, 22 nt, Human adenovirus F
uuacggaucagcgcuuugccag

SEQ ID NO: 116270 - RNA, 19 nt, Human adenovirus F
uucguugucaaacacggga

SEQ ID NO: 116271 - RNA, 16 nt, Human adenovirus F
uuccucccaacuuucg

SEQ ID NO: 116272 - RNA, 20 nt, Human adenovirus F
uuccuuuuggcuguacucca

SEQ ID NO: 116273 - RNA, 14 nt, Human adenovirus F
uucugcugcauguu

SEQ ID NO: 116274 - RNA, 13 nt, Human adenovirus F
uucugggcacguu

SEQ ID NO: 116275 - RNA, 22 nt, Human adenovirus F
uucuguaugcuauugacacugc

SEQ ID NO: 116276 - RNA, 21 nt, Human adenovirus F
uuccaaacugcggacuaccua

SEQ ID NO: 116277 - RNA, 15 nt, Human adenovirus F
uuccauuuauuacac

SEQ ID NO: 116278 - RNA, 21 nt, Human adenovirus F
uuccgucucucccuccaccuc

SEQ ID NO: 116279 - RNA, 19 nt, Human adenovirus F
uucacaaaguccuggccaa

SEQ ID NO: 116280 - RNA, 17 nt, Human adenovirus F
uucaucuuaacucugaa

SEQ ID NO: 116281 - RNA, 22 nt, Human adenovirus F
aauggaaaggcccauaccaaag

SEQ ID NO: 116282 - RNA, 20 nt, Human adenovirus F
aaugggccuggcagcuggag

SEQ ID NO: 116283 - RNA, 13 nt, Human adenovirus F
aauggucuuacau

SEQ ID NO: 116284 - RNA, 16 nt, Human adenovirus F
aaucuaucccuugauu

SEQ ID NO: 116285 - RNA, 14 nt, Human adenovirus F
aaucuuaaaacuga

SEQ ID NO: 116286 - RNA, 19 nt, Human adenovirus F
aaugcaaaaagggucuuuu

SEQ ID NO: 116287 - RNA, 16 nt, Human adenovirus F
aauuguaagagguuuu

SEQ ID NO: 116288 - RNA, 12 nt, Human adenovirus F
aauucgugccac

SEQ ID NO: 116289 - RNA, 18 nt, Human adenovirus F
aauacacugauccacuua

SEQ ID NO: 116290 - RNA, 15 nt, Human adenovirus F
aauacauaggcauua

SEQ ID NO: 116291 - RNA, 16 nt, Human adenovirus F
aauacagucaagcucu

SEQ ID NO: 116292 - RNA, 18 nt, Human adenovirus F
aagcgcgcacgacgggga

SEQ ID NO: 116293 - RNA, 21 nt, Human adenovirus F
aagcuacguugcgauacugca

SEQ ID NO: 116294 - RNA, 18 nt, Human adenovirus F
aagccucucgcucugcaa

SEQ ID NO: 116295 - RNA, 19 nt, Human adenovirus F
aagccucucgcucugcaaa

SEQ ID NO: 116296 - RNA, 17 nt, Human adenovirus F
aaggcccauaccaaaga

SEQ ID NO: 116297 - RNA, 18 nt, Human adenovirus F
aaggcccauaccaaagag

SEQ ID NO: 116298 - RNA, 18 nt, Human adenovirus F
aaggcggauuuuugcccg

SEQ ID NO: 116299 - RNA, 14 nt, Human adenovirus F
aaguauacauuuga

SEQ ID NO: 116300 - RNA, 16 nt, Human adenovirus F
aaguuaccaaagacaa

SEQ ID NO: 116301 - RNA, 19 nt, Human adenovirus F
aacccuggaauuuuugcuu

SEQ ID NO: 116302 - RNA, 17 nt, Human adenovirus F
aaccccggaccauugua

SEQ ID NO: 116303 - RNA, 17 nt, Human adenovirus F
aaccacuaaagcauuuc

SEQ ID NO: 116304 - RNA, 13 nt, Human adenovirus F
uuuuggccugaau

SEQ ID NO: 116305 - RNA, 13 nt, Human adenovirus F
uuuugucacagaa

SEQ ID NO: 116306 - RNA, 14 nt, Human adenovirus F
uuuuggaagccgug

SEQ ID NO: 116307 - RNA, 15 nt, Human adenovirus F
uuuuggacauggcca

SEQ ID NO: 116308 - RNA, 19 nt, Human adenovirus F
uuuuguggccauuuuccaa

SEQ ID NO: 116309 - RNA, 18 nt, Human adenovirus F
uuuuucaagaaauuguga

SEQ ID NO: 116310 - RNA, 13 nt, Human adenovirus F
uuuugacuuggcu

SEQ ID NO: 116311 - RNA, 16 nt, Human adenovirus F
aagaaaaccagcaugu

SEQ ID NO: 116312 - RNA, 22 nt, Human adenovirus F
aacugacgauucuggccucuau

SEQ ID NO: 116313 - RNA, 23 nt, Human adenovirus F
aaccggguuuuggacauggccag

SEQ ID NO: 116314 - RNA, 23 nt, Human adenovirus F
aaccguaccugcuaccucuucga

SEQ ID NO: 116315 - RNA, 18 nt, Human adenovirus F
aaccgcuuuucggccauu

SEQ ID NO: 116316 - RNA, 15 nt, Human adenovirus F
aaccuugaguuuaau

SEQ ID NO: 116317 - RNA, 20 nt, Human adenovirus F
aaccuguguugauuuuguca

SEQ ID NO: 116318 - RNA, 21 nt, Human adenovirus F
aaccuucgcugcuuuacuuaa

SEQ ID NO: 116319 - RNA, 15 nt, Human adenovirus F
uuuauaccauuaaga

SEQ ID NO: 116320 - RNA, 21 nt, Human adenovirus F
uuuagcacucaaguacacuga

SEQ ID NO: 116321 - RNA, 19 nt, Human adenovirus F
uuuagcccauaucugacaa

SEQ ID NO: 116322 - RNA, 20 nt, Human adenovirus F
uugucgauaaccccaugugg

SEQ ID NO: 116323 - RNA, 22 nt, Human adenovirus F
uugugacgcaggguggguacaa

SEQ ID NO: 116324 - RNA, 19 nt, Human adenovirus F
uuucugggcacguuugaca

SEQ ID NO: 116325 - RNA, 20 nt, Human adenovirus F
uuuccgacgcuguaugcuau

SEQ ID NO: 116326 - RNA, 21 nt, Human adenovirus F
uuugcugaccuuuugucgcau

SEQ ID NO: 116327 - RNA, 23 nt, Human adenovirus F
aacagaaaccucuuccuuuuggc

SEQ ID NO: 116328 - RNA, 18 nt, Human adenovirus F
aacagacaauuuugcaaa

SEQ ID NO: 116329 - RNA, 22 nt, Human adenovirus F
ugcagguaggaccacuggaggg

SEQ ID NO: 116330 - RNA, 20 nt, Human adenovirus F
ugcaggugcagaagagggcg

SEQ ID NO: 116331 - RNA, 20 nt, Human adenovirus F
ugcgcuuuacgcuggccgug

SEQ ID NO: 116332 - RNA, 21 nt, Human adenovirus F
uguguuuauuucuugggcgug

SEQ ID NO: 116333 - RNA, 20 nt, Human adenovirus F
uccaagacccgguacaggug

SEQ ID NO: 116334 - RNA, 19 nt, Human adenovirus F
ugagcaugaaacuggaaga

SEQ ID NO: 116335 - RNA, 16 nt, Human adenovirus F
ucuucuccuggccgua

SEQ ID NO: 116336 - RNA, 19 nt, Human adenovirus F
cgguuccucgcaacguccu

SEQ ID NO: 116337 - RNA, 15 nt, Human adenovirus F
gcucacccgcagcug

SEQ ID NO: 116338 - RNA, 20 nt, Human adenovirus F
ccguucgcucacccgcagcu

SEQ ID NO: 116339 - RNA, 20 nt, Human adenovirus F
ccgcgaggaaaccgccuacu

SEQ ID NO: 116340 - RNA, 21 nt, Human adenovirus F
aguccaaagcagagcucugca

SEQ ID NO: 116341 - RNA, 19 nt, Human adenovirus F
agggcggaacagcauacgu

SEQ ID NO: 116342 - RNA, 17 nt, Human adenovirus F
aacugcagcgcacgcug

SEQ ID NO: 116343 - RNA, 16 nt, Human adenovirus F
agccucucgcucugca

SEQ ID NO: 116344 - RNA, 20 nt, Human adenovirus F
agaccaacugcagcgcacgc

SEQ ID NO: 116345 - RNA, 14 nt, Human adenovirus F
aauguugauuuuaa

SEQ ID NO: 116346 - RNA, 21 nt, Human adenovirus F
ucaguuggagcagccugugga

SEQ ID NO: 116347 - RNA, 20 nt, Human adenovirus F
cugcagcgcacgcuggagga

SEQ ID NO: 116348 - RNA, 19 nt, Human adenovirus F
caggcgcuccacgucccuc

SEQ ID NO: 116349 - RNA, 15 nt, Human adenovirus F
cagucaagcucucca

SEQ ID NO: 116350 - RNA, 14 nt, Human adenovirus F
cagccuccgguggc

SEQ ID NO: 116351 - RNA, 16 nt, Human adenovirus F
acugucacuguauuaa

SEQ ID NO: 116352 - RNA, 19 nt, Human adenovirus F
accugucgcggucguuuaa

SEQ ID NO: 116353 - RNA, 19 nt, Human adenovirus F
aaacguuuggagaaaacac

SEQ ID NO: 116354 - RNA, 18 nt, Human adenovirus F
aaaugggccuggcagcug

SEQ ID NO: 116355 - RNA, 21 nt, Human astrovirus
caaucuaggggccgagacaaa

SEQ ID NO: 116356 - RNA, 22 nt, Human astrovirus
acagcuuccuucuuuucugucu

SEQ ID NO: 116357 - RNA, 16 nt, Human astrovirus
acucaggaaacagggu

SEQ ID NO: 116358 - RNA, 16 nt, Human astrovirus
aacgucaaucuucuca

SEQ ID NO: 116359 - RNA, 17 nt, Human astrovirus
aagaucacagucaauuc

SEQ ID NO: 116360 - RNA, 15 nt, Human astrovirus
ucaagaucacaguca

SEQ ID NO: 116361 - RNA, 16 nt, Human astrovirus
ucaagaucacagucaa

SEQ ID NO: 116362 - RNA, 19 nt, Human astrovirus
ucaaucuucucaacguguc

SEQ ID NO: 116363 - RNA, 19 nt, Human astrovirus
gucaaacaccaguggcacc

SEQ ID NO: 116364 - RNA, 18 nt, Human astrovirus
gucagagagcaacagcaa

SEQ ID NO: 116365 - RNA, 13 nt, Human astrovirus
gucaauucaagaa

SEQ ID NO: 116366 - RNA, 21 nt, Human astrovirus
gggucaaacaccaguggcacc

SEQ ID NO: 116367 - RNA, 16 nt, Human astrovirus
gaaacagggugucaca

SEQ ID NO: 116368 - RNA, 22 nt, Human astrovirus
gaccaaaaccugcaauauguca

SEQ ID NO: 116369 - RNA, 19 nt, Human astrovirus
cagucaagaucacagucaa

SEQ ID NO: 116370 - RNA, 18 nt, Human astrovirus
cagucaagaucacaguca

SEQ ID NO: 116371 - RNA, 18 nt, Human astrovirus
cagucaauucaagaaaca

SEQ ID NO: 116372 - RNA, 19 nt, Human astrovirus
caggaaacagggugucaca

SEQ ID NO: 116373 - RNA, 22 nt, Human astrovirus
caggaaacagggugucacagga

SEQ ID NO: 116374 - RNA, 16 nt, Human astrovirus
aucacagucaauucaa

SEQ ID NO: 116375 - RNA, 13 nt, Human astrovirus
acauugucaauaa

SEQ ID NO: 116376 - RNA, 14 nt, Human astrovirus
acaaacgucaaucu

SEQ ID NO: 116377 - RNA, 19 nt, Human astrovirus
agucaagaucacagucaau

SEQ ID NO: 116378 - RNA, 22 nt, Human astrovirus
agucaagaucacagucaauuca

SEQ ID NO: 116379 - RNA, 16 nt, Human astrovirus
agcaggaguaaaucaa

SEQ ID NO: 116380 - RNA, 15 nt, Human astrovirus
ggcgcuaggugcaca

SEQ ID NO: 116381 - RNA, 20 nt, Human astrovirus
guaacuguugaggucaguaa

SEQ ID NO: 116382 - RNA, 15 nt, Human astrovirus
guggcaccacugaga

SEQ ID NO: 116383 - RNA, 22 nt, Human astrovirus
cugugcaggcgcuaggugcaca

SEQ ID NO: 116384 - RNA, 15 nt, Human astrovirus
gcaaguaacuguuga

SEQ ID NO: 116385 - RNA, 22 nt, Human astrovirus
gagacagcccggacgcgacaaa

SEQ ID NO: 116386 - RNA, 23 nt, Human astrovirus
gagacaaaucagucaagaucaca

SEQ ID NO: 116387 - RNA, 13 nt, Human astrovirus
cugcaauauguca

SEQ ID NO: 116388 - RNA, 12 nt, Human astrovirus
ucaccauuuaaa

SEQ ID NO: 116389 - RNA, 21 nt, Human astrovirus
ucaggaaacagggugucacag

SEQ ID NO: 116390 - RNA, 23 nt, Human astrovirus
uggccgcagcaggaguaaaucaa

SEQ ID NO: 116391 - RNA, 21 nt, Human astrovirus
auuauuuuaaucaccauuuaa

SEQ ID NO: 116392 - RNA, 21 nt, Human astrovirus
caagaaacagagccaggagac

SEQ ID NO: 116393 - RNA, 16 nt, Human astrovirus
cagagagcaacagcaa

SEQ ID NO: 116394 - RNA, 18 nt, Human astrovirus
cagcccggacgcgacaaa

SEQ ID NO: 116395 - RNA, 20 nt, Human astrovirus
cacaaucuaggggccgagac

SEQ ID NO: 116396 - RNA, 21 nt, Human astrovirus
aucacagucaauucaagaaac

SEQ ID NO: 116397 - RNA, 13 nt, Human astrovirus
agcaggaguaaau

SEQ ID NO: 116398 - RNA, 16 nt, Human astrovirus
accauuuaaaauugau

SEQ ID NO: 116399 - RNA, 20 nt, Human astrovirus
accauuuaaaauugauuuaa

SEQ ID NO: 116400 - RNA, 21 nt, Human astrovirus
agauugaggcguguauucucc

SEQ ID NO: 116401 - RNA, 17 nt, Human astrovirus
aaucagucaagaucaca

SEQ ID NO: 116402 - RNA, 17 nt, Human astrovirus
aagaaacagagccagga

SEQ ID NO: 116403 - RNA, 14 nt, Human astrovirus
aacauugucaauaa

SEQ ID NO: 116404 - RNA, 17 nt, Human astrovirus
aauaugucagagagcaa

SEQ ID NO: 116405 - RNA, 20 nt, Human astrovirus
aaucuaggggccgagacaaa

SEQ ID NO: 116406 - RNA, 19 nt, Human astrovirus
uuccuucuuuucugucucu

SEQ ID NO: 116407 - RNA, 13 nt, Human astrovirus
uauuuuaaucacc

SEQ ID NO: 116408 - RNA, 17 nt, Human astrovirus
uccaacaagcaaguaac

SEQ ID NO: 116409 - RNA, 16 nt, Human astrovirus
ucagucaagaucacag

SEQ ID NO: 116410 - RNA, 22 nt, Human astrovirus
cgacaaacgucaaucuucucaa

SEQ ID NO: 116411 - RNA, 17 nt, Human astrovirus
cgagacaaaucagucaa

SEQ ID NO: 116412 - RNA, 11 nt, Human astrovirus
ccaguggcacc

SEQ ID NO: 116413 - RNA, 17 nt, Human astrovirus
ccaguggcaccacugag

SEQ ID NO: 116414 - RNA, 16 nt, Human astrovirus
aaaccugcaauauguc

SEQ ID NO: 116415 - RNA, 17 nt, Human astrovirus
caaacaccaguggcacc

SEQ ID NO: 116416 - RNA, 12 nt, Human astrovirus
agggugucacag

SEQ ID NO: 116417 - RNA, 18 nt, Human astrovirus
agggugucacaggaccaa

SEQ ID NO: 116418 - RNA, 22 nt, Human astrovirus
agacaaaucagucaagaucaca

SEQ ID NO: 116419 - RNA, 15 nt, Human astrovirus
acagucgggucaaac

SEQ ID NO: 116420 - RNA, 18 nt, Human astrovirus
accauuuaaaauugauuu

SEQ ID NO: 116421 - RNA, 21 nt, Human astrovirus
cucaggaaacagggugucaca

SEQ ID NO: 116422 - RNA, 14 nt, Human astrovirus
cguaacauugucaa

SEQ ID NO: 116423 - RNA, 18 nt, Human astrovirus
gcaggcgcuaggugcaca

SEQ ID NO: 116424 - RNA, 13 nt, Human astrovirus
ggcccguucacaa

SEQ ID NO: 116425 - RNA, 18 nt, Human astrovirus
ggcguguauucuccucaa

SEQ ID NO: 116426 - RNA, 16 nt, Human astrovirus
guaacauugucaauaa

SEQ ID NO: 116427 - RNA, 22 nt, Human astrovirus
gucacaggaccaaaaccugcaa

SEQ ID NO: 116428 - RNA, 17 nt, Human astrovirus
ggggccgagacaaauca

SEQ ID NO: 116429 - RNA, 19 nt, Human astrovirus
ucaauucaagaaacagagc

SEQ ID NO: 116430 - RNA, 17 nt, Human astrovirus
uguugaggucaguaaua

SEQ ID NO: 116431 - RNA, 22 nt, Human astrovirus
uccucguuaaggacgcuacugg

SEQ ID NO: 116432 - RNA, 21 nt, Human astrovirus
guguauucuccucaacccugu

SEQ ID NO: 116433 - RNA, 20 nt, Human astrovirus
gucacaggaccaaaaccugc

SEQ ID NO: 116434 - RNA, 18 nt, Human coronavirus 229E
acuauguuacugaaccua

SEQ ID NO: 116435 - RNA, 13 nt, Human coronavirus 229E
acugguuguugua

SEQ ID NO: 116436 - RNA, 14 nt, Human coronavirus 229E
acugguuuugucua

SEQ ID NO: 116437 - RNA, 12 nt, Human coronavirus 229E
acguugcauuaa

SEQ ID NO: 116438 - RNA, 17 nt, Human coronavirus 229E
acuaagauguuccuuaa

SEQ ID NO: 116439 - RNA, 14 nt, Human coronavirus 229E
acuucgcaaacagu

SEQ ID NO: 116440 - RNA, 18 nt, Human coronavirus 229E
agacauagauuacugugu

SEQ ID NO: 116441 - RNA, 14 nt, Human coronavirus 229E
acagcuuggcacug

SEQ ID NO: 116442 - RNA, 14 nt, Human coronavirus 229E
acauagauuacugu

SEQ ID NO: 116443 - RNA, 16 nt, Human coronavirus 229E
acaccaugauggauuu

SEQ ID NO: 116444 - RNA, 17 nt, Human coronavirus 229E
acacuuugcuaugcaag

SEQ ID NO: 116445 - RNA, 14 nt, Human coronavirus 229E
acaccguggcagag

SEQ ID NO: 116446 - RNA, 14 nt, Human coronavirus 229E
accacauuuaccaa

SEQ ID NO: 116447 - RNA, 20 nt, Human coronavirus 229E
accuaggugaacgcuaguau

SEQ ID NO: 116448 - RNA, 19 nt, Human coronavirus 229E
acgacagguuauccaagac

SEQ ID NO: 116449 - RNA, 21 nt, Human coronavirus 229E
aauuguacgggugacauuguc

SEQ ID NO: 116450 - RNA, 13 nt, Human coronavirus 229E
aaugucaaaugac

SEQ ID NO: 116451 - RNA, 14 nt, Human coronavirus 229E
aaugucaaaugaca

SEQ ID NO: 116452 - RNA, 21 nt, Human coronavirus 229E
aauccuuuucguuuaugugcc

SEQ ID NO: 116453 - RNA, 16 nt, Human coronavirus 229E
aauggaagagccaguc

SEQ ID NO: 116454 - RNA, 15 nt, Human coronavirus 229E
aaugcaaucacuguc

SEQ ID NO: 116455 - RNA, 17 nt, Human coronavirus 229E
aaaggcuguaaugcugu

SEQ ID NO: 116456 - RNA, 18 nt, Human coronavirus 229E
aacguggucgucagggua

SEQ ID NO: 116457 - RNA, 15 nt, Human coronavirus 229E
aacuaauaccucauc

SEQ ID NO: 116458 - RNA, 22 nt, Human coronavirus 229E
aacuaauuaagcuuuguuucac

SEQ ID NO: 116459 - RNA, 19 nt, Human coronavirus 229E
aaccauuuaugguaauguu

SEQ ID NO: 116460 - RNA, 15 nt, Human coronavirus 229E
cagaaccagagauac

SEQ ID NO: 116461 - RNA, 17 nt, Human coronavirus 229E
cacgacagguuauccaa

SEQ ID NO: 116462 - RNA, 19 nt, Human coronavirus 229E
caaauuagaaauccacuaa

SEQ ID NO: 116463 - RNA, 14 nt, Human coronavirus 229E
caacuugugucugc

SEQ ID NO: 116464 - RNA, 19 nt, Human coronavirus 229E
caagcauauauuuacgcaa

SEQ ID NO: 116465 - RNA, 20 nt, Human coronavirus 229E
auguuacugaaccuagguga

SEQ ID NO: 116466 - RNA, 18 nt, Human coronavirus 229E
auguauuugcuguugaga

SEQ ID NO: 116467 - RNA, 15 nt, Human coronavirus 229E
auguaugaugguacg

SEQ ID NO: 116468 - RNA, 14 nt, Human coronavirus 229E
auuugcuacuaugu

SEQ ID NO: 116469 - RNA, 23 nt, Human coronavirus 229E
auuuaccaaucauauaugcacau

SEQ ID NO: 116470 - RNA, 16 nt, Human coronavirus 229E
auuggucucaagcaua

SEQ ID NO: 116471 - RNA, 14 nt, Human coronavirus 229E
auuagaaauccacu

SEQ ID NO: 116472 - RNA, 23 nt, Human coronavirus 229E
agcugcauuuuuauuaucuuggc

SEQ ID NO: 116473 - RNA, 21 nt, Human coronavirus 229E
agucauuugucuugagaccua

SEQ ID NO: 116474 - RNA, 18 nt, Human coronavirus 229E
auauugguucuuacuggu

SEQ ID NO: 116475 - RNA, 14 nt, Human coronavirus 229E
auagauuacugugu

SEQ ID NO: 116476 - RNA, 11 nt, Human coronavirus 229E
aucugaaccac

SEQ ID NO: 116477 - RNA, 16 nt, Human coronavirus 229E
cagucauuugucuuga

SEQ ID NO: 116478 - RNA, 19 nt, Human coronavirus 229E
caguccauguauaacuuac

SEQ ID NO: 116479 - RNA, 15 nt, Human coronavirus 229E
caguuucagacuuuu

SEQ ID NO: 116480 - RNA, 18 nt, Human coronavirus 229E
cauacguuacaaccucaa

SEQ ID NO: 116481 - RNA, 14 nt, Human coronavirus 229E
cauaaagaugcaaa

SEQ ID NO: 116482 - RNA, 15 nt, Human coronavirus 229E
cagaauuguuucuua

SEQ ID NO: 116483 - RNA, 11 nt, Human coronavirus 229E
caucugaacca

SEQ ID NO: 116484 - RNA, 15 nt, Human coronavirus 229E
ccaaucauauaugca

SEQ ID NO: 116485 - RNA, 14 nt, Human coronavirus 229E
ccucaucuguugua

SEQ ID NO: 116486 - RNA, 21 nt, Human coronavirus 229E
cggaaaaaaucugaaguccaa

SEQ ID NO: 116487 - RNA, 14 nt, Human coronavirus 229E
cuaaaacugaaccu

SEQ ID NO: 116488 - RNA, 22 nt, Human coronavirus 229E
cuaaacgacaaugucaaaugac

SEQ ID NO: 116489 - RNA, 21 nt, Human coronavirus 229E
cgcaagaauucagaaccagag

SEQ ID NO: 116490 - RNA, 16 nt, Human coronavirus 229E
cuguugcuaagcauga

SEQ ID NO: 116491 - RNA, 19 nt, Human coronavirus 229E
cucugaucuauguaugaug

SEQ ID NO: 116492 - RNA, 12 nt, Human coronavirus 229E
cucuguuugcaa

SEQ ID NO: 116493 - RNA, 14 nt, Human coronavirus 229E
gacaugggauuuca

SEQ ID NO: 116494 - RNA, 23 nt, Human coronavirus 229E
aaauguguaccacauuuaccaau

SEQ ID NO: 116495 - RNA, 19 nt, Human coronavirus 229E
cuuuucucugaucuaugua

SEQ ID NO: 116496 - RNA, 15 nt, Human coronavirus 229E
cuuugauugcuguaa

SEQ ID NO: 116497 - RNA, 22 nt, Human coronavirus 229E
cuuugauugcuguaauuuugcu

SEQ ID NO: 116498 - RNA, 19 nt, Human coronavirus 229E
cuuuguuguguauuuugcu

SEQ ID NO: 116499 - RNA, 15 nt, Human coronavirus 229E
gaauguucaaaaacg

SEQ ID NO: 116500 - RNA, 15 nt, Human coronavirus 229E
gaaaguuagugcuga

SEQ ID NO: 116501 - RNA, 18 nt, Human coronavirus 229E
gcaguccauguauaacuu

SEQ ID NO: 116502 - RNA, 21 nt, Human coronavirus 229E
gcacauagacccuuucccuaa

SEQ ID NO: 116503 - RNA, 14 nt, Human coronavirus 229E
gaucaauuccuuua

SEQ ID NO: 116504 - RNA, 19 nt, Human coronavirus 229E
gcauaugccuuguugcaua

SEQ ID NO: 116505 - RNA, 18 nt, Human coronavirus 229E
gcucuagguuuguucaca

SEQ ID NO: 116506 - RNA, 18 nt, Human coronavirus 229E
gcucugcguaacuuugau

SEQ ID NO: 116507 - RNA, 14 nt, Human coronavirus 229E
gcuuguugcauaug

SEQ ID NO: 116508 - RNA, 16 nt, Human coronavirus 229E
ggcuguguugguuauu

SEQ ID NO: 116509 - RNA, 17 nt, Human coronavirus 229E
ggcagagcugcucuuau

SEQ ID NO: 116510 - RNA, 12 nt, Human coronavirus 229E
gugccauugcug

SEQ ID NO: 116511 - RNA, 21 nt, Human coronavirus 229E
gugauacuacuaguguguauu

SEQ ID NO: 116512 - RNA, 18 nt, Human coronavirus 229E
guggugcuuauagugaua

SEQ ID NO: 116513 - RNA, 18 nt, Human coronavirus 229E
guguauuacaauaauuaa

SEQ ID NO: 116514 - RNA, 17 nt, Human coronavirus 229E
guggauuugucacccaa

SEQ ID NO: 116515 - RNA, 21 nt, Human coronavirus 229E
uacagacauagauuacugugu

SEQ ID NO: 116516 - RNA, 20 nt, Human coronavirus 229E
uaauuaacaugaucccuugc

SEQ ID NO: 116517 - RNA, 12 nt, Human coronavirus 229E
uacguuacaacc

SEQ ID NO: 116518 - RNA, 22 nt, Human coronavirus 229E
uaccucguaauuugguacccau

SEQ ID NO: 116519 - RNA, 21 nt, Human coronavirus 229E
uacauugcuuuucucugaucu

SEQ ID NO: 116520 - RNA, 14 nt, Human coronavirus 229E
uaagaaauuugcua

SEQ ID NO: 116521 - RNA, 19 nt, Human coronavirus 229E
uaacggugaauguguauac

SEQ ID NO: 116522 - RNA, 15 nt, Human coronavirus 229E
uaaacgacaauguca

SEQ ID NO: 116523 - RNA, 22 nt, Human coronavirus 229E
ucaaucuuugacaccugggcua

SEQ ID NO: 116524 - RNA, 21 nt, Human coronavirus 229E
ucacccauuugaagaauugga

SEQ ID NO: 116525 - RNA, 13 nt, Human coronavirus 229E
ucagaacuagaaa

SEQ ID NO: 116526 - RNA, 13 nt, Human coronavirus 229E
ucagaaccagaga

SEQ ID NO: 116527 - RNA, 13 nt, Human coronavirus 229E
ucacuugccauau

SEQ ID NO: 116528 - RNA, 19 nt, Human coronavirus 229E
ucagaaaauguauuugcug

SEQ ID NO: 116529 - RNA, 15 nt, Human coronavirus 229E
ucaagaauguagaua

SEQ ID NO: 116530 - RNA, 17 nt, Human coronavirus 229E
uaugugccauugcugua

SEQ ID NO: 116531 - RNA, 20 nt, Human coronavirus 229E
uauauuuacgcaacuuugau

SEQ ID NO: 116532 - RNA, 21 nt, Human coronavirus 229E
uacugguuguuguaguacuga

SEQ ID NO: 116533 - RNA, 14 nt, Human coronavirus 229E
ucuaaccauauuca

SEQ ID NO: 116534 - RNA, 17 nt, Human coronavirus 229E
ucuaacuaauaccucau

SEQ ID NO: 116535 - RNA, 23 nt, Human coronavirus 229E
uccugagguuaaugcaaucacug

SEQ ID NO: 116536 - RNA, 16 nt, Human coronavirus 229E
aacuuacuuaaaggcu

SEQ ID NO: 116537 - RNA, 18 nt, Human coronavirus 229E
aaucaaucgcuuagcaau

SEQ ID NO: 116538 - RNA, 22 nt, Human coronavirus 229E
aauccugagguuaaugcaauca

SEQ ID NO: 116539 - RNA, 21 nt, Human coronavirus 229E
aagcuuuguuucacuugccau

SEQ ID NO: 116540 - RNA, 19 nt, Human coronavirus 229E
uuguaaagguuuuuccuca

SEQ ID NO: 116541 - RNA, 20 nt, Human coronavirus 229E
uuuaccaaucauauaugcac

SEQ ID NO: 116542 - RNA, 15 nt, Human coronavirus 229E
uuguugcauauugcu

SEQ ID NO: 116543 - RNA, 20 nt, Human coronavirus 229E
uugugugcgcuucaagaaug

SEQ ID NO: 116544 - RNA, 21 nt, Human coronavirus 229E
uuugguacccaucaacaagaa

SEQ ID NO: 116545 - RNA, 18 nt, Human coronavirus 229E
uuugguuguuaauguacu

SEQ ID NO: 116546 - RNA, 22 nt, Human coronavirus 229E
aacacuaguuacucuguuugca

SEQ ID NO: 116547 - RNA, 18 nt, Human coronavirus 229E
uugaagaugcuuguacug

SEQ ID NO: 116548 - RNA, 16 nt, Human coronavirus 229E
uucagccuuuguugcu

SEQ ID NO: 116549 - RNA, 13 nt, Human coronavirus 229E
uucacuugccaua

SEQ ID NO: 116550 - RNA, 13 nt, Human coronavirus 229E
uucagaaccagag

SEQ ID NO: 116551 - RNA, 22 nt, Human coronavirus 229E
uucagaaccagagauaccacac

SEQ ID NO: 116552 - RNA, 16 nt, Human coronavirus 229E
uugaugaaaaagacug

SEQ ID NO: 116553 - RNA, 19 nt, Human coronavirus 229E
uguguggugcuuauaguga

SEQ ID NO: 116554 - RNA, 15 nt, Human coronavirus 229E
ugugccauugcugua

SEQ ID NO: 116555 - RNA, 16 nt, Human coronavirus 229E
ugugccauugcuguau

SEQ ID NO: 116556 - RNA, 13 nt, Human coronavirus 229E
uguaaugcuguug

SEQ ID NO: 116557 - RNA, 14 nt, Human coronavirus 229E
uuaauguacuacuc

SEQ ID NO: 116558 - RNA, 18 nt, Human coronavirus 229E
uuaaugcaaucacuguca

SEQ ID NO: 116559 - RNA, 18 nt, Human coronavirus 229E
uuacuguguccgugcauu

SEQ ID NO: 116560 - RNA, 23 nt, Human coronavirus 229E
uuauagcccuuugcuuguugaua

SEQ ID NO: 116561 - RNA, 14 nt, Human coronavirus 229E
uguugcauauugcu

SEQ ID NO: 116562 - RNA, 17 nt, Human coronavirus 229E
uguugcauuuagcuuuu

SEQ ID NO: 116563 - RNA, 15 nt, Human coronavirus 229E
uguuaauguacuacu

SEQ ID NO: 116564 - RNA, 21 nt, Human coronavirus 229E
uguuauucuucaguuuggaca

SEQ ID NO: 116565 - RNA, 20 nt, Human coronavirus 229E
ugcuuguugauagugaacaa

SEQ ID NO: 116566 - RNA, 19 nt, Human coronavirus 229E
ugccacuguguuguuugaa

SEQ ID NO: 116567 - RNA, 22 nt, Human coronavirus 229E
ugccauauguuuuguaauagaa

SEQ ID NO: 116568 - RNA, 17 nt, Human coronavirus 229E
ugcgaaaguuagugcug

SEQ ID NO: 116569 - RNA, 14 nt, Human coronavirus 229E
ugcauauugcuggu

SEQ ID NO: 116570 - RNA, 22 nt, Human coronavirus 229E
ugauguacuucgcaaacaguuu

SEQ ID NO: 116571 - RNA, 15 nt, Human coronavirus 229E
ugaaaaagacuguga

SEQ ID NO: 116572 - RNA, 14 nt, Human coronavirus 229E
ugagguuaaugcaa

SEQ ID NO: 116573 - RNA, 17 nt, Human coronavirus 229E
ugagguuaaugcaauca

SEQ ID NO: 116574 - RNA, 23 nt, Human coronavirus 229E
uggcacugcuggcucuacaagac

SEQ ID NO: 116575 - RNA, 14 nt, Human coronavirus 229E
ugucacccauuuga

SEQ ID NO: 116576 - RNA, 15 nt, Human coronavirus 229E
uguacgggugacauu

SEQ ID NO: 116577 - RNA, 15 nt, Human coronavirus 229E
ugucugaugucauac

SEQ ID NO: 116578 - RNA, 13 nt, Human coronavirus 229E
ugugaacacccag

SEQ ID NO: 116579 - RNA, 20 nt, Human coronavirus 229E
ugcucgaacuuuuugggcau

SEQ ID NO: 116580 - RNA, 21 nt, Human coronavirus 229E
ugcuuauagugauacuacuag

SEQ ID NO: 116581 - RNA, 15 nt, Human coronavirus 229E
uggaagagccaguca

SEQ ID NO: 116582 - RNA, 20 nt, Human coronavirus 229E
uggaagagccagucauuugu

SEQ ID NO: 116583 - RNA, 18 nt, Human coronavirus 229E
uugaugaaaaagacugug

SEQ ID NO: 116584 - RNA, 18 nt, Human coronavirus 229E
uucuaacuaauaccucau

SEQ ID NO: 116585 - RNA, 22 nt, Human coronavirus 229E
uucaauguaaccacacuuugcu

SEQ ID NO: 116586 - RNA, 15 nt, Human coronavirus 229E
uuaaucaaucgcuua

SEQ ID NO: 116587 - RNA, 19 nt, Human coronavirus 229E
uuaagcuuuguuucacuug

SEQ ID NO: 116588 - RNA, 15 nt, Human coronavirus 229E
uuauucuaaccauau

SEQ ID NO: 116589 - RNA, 16 nt, Human coronavirus 229E
ucagccuuuguugcuu

SEQ ID NO: 116590 - RNA, 19 nt, Human coronavirus 229E
ucacugucacaaccguguu

SEQ ID NO: 116591 - RNA, 16 nt, Human coronavirus 229E
ucacccaagcugcauu

SEQ ID NO: 116592 - RNA, 14 nt, Human coronavirus 229E
uccuucuaacuaau

SEQ ID NO: 116593 - RNA, 18 nt, Human coronavirus 229E
ucauacguuacaaccuca

SEQ ID NO: 116594 - RNA, 19 nt, Human coronavirus 229E
ucugaaaccauucguuugu

SEQ ID NO: 116595 - RNA, 20 nt, Human coronavirus 229E
ucuuacugguuguuguagua

SEQ ID NO: 116596 - RNA, 13 nt, Human coronavirus 229E
ucuuggcacagga

SEQ ID NO: 116597 - RNA, 14 nt, Human coronavirus 229E
ugaucuauguauga

SEQ ID NO: 116598 - RNA, 18 nt, Human coronavirus 229E
ugaugguacgaucagagc

SEQ ID NO: 116599 - RNA, 21 nt, Human coronavirus 229E
ugaacaaccuuggaaggugau

SEQ ID NO: 116600 - RNA, 18 nt, Human coronavirus 229E
ugaaauucaggcuuuagu

SEQ ID NO: 116601 - RNA, 16 nt, Human coronavirus 229E
ugacaccugggcuaau

SEQ ID NO: 116602 - RNA, 23 nt, Human coronavirus 229E
uuggcuugacaaggaucuagucu

SEQ ID NO: 116603 - RNA, 12 nt, Human coronavirus 229E
uugucacccauu

SEQ ID NO: 116604 - RNA, 22 nt, Human coronavirus 229E
uuugguuggaauguuauucuaa

SEQ ID NO: 116605 - RNA, 17 nt, Human coronavirus 229E
uuuucucugaucuaugu

SEQ ID NO: 116606 - RNA, 13 nt, Human coronavirus 229E
uuuuaaugguacu

SEQ ID NO: 116607 - RNA, 18 nt, Human coronavirus 229E
cugguugucaaacuacaa

SEQ ID NO: 116608 - RNA, 22 nt, Human coronavirus 229E
cucuagguuuguucacauugca

SEQ ID NO: 116609 - RNA, 12 nt, Human coronavirus 229E
cugaugucauac

SEQ ID NO: 116610 - RNA, 14 nt, Human coronavirus 229E
cugaucuauguaug

SEQ ID NO: 116611 - RNA, 17 nt, Human coronavirus 229E
cugaugcaucugaacca

SEQ ID NO: 116612 - RNA, 19 nt, Human coronavirus 229E
cuaagcaugauuucuuuac

SEQ ID NO: 116613 - RNA, 12 nt, Human coronavirus 229E
cuaauaccucau

SEQ ID NO: 116614 - RNA, 22 nt, Human coronavirus 229E
cgcuuagcaaugcgaaaguuag

SEQ ID NO: 116615 - RNA, 19 nt, Human coronavirus 229E
gacaaugucaaaugacaau

SEQ ID NO: 116616 - RNA, 20 nt, Human coronavirus 229E
gacaaugucaaaugacaauu

SEQ ID NO: 116617 - RNA, 19 nt, Human coronavirus 229E
gacgugaaagauggcacug

SEQ ID NO: 116618 - RNA, 20 nt, Human coronavirus 229E
gagagauuuggcgccuuggu

SEQ ID NO: 116619 - RNA, 17 nt, Human coronavirus 229E
gaugaaaaagacuguga

SEQ ID NO: 116620 - RNA, 17 nt, Human coronavirus 229E
cuugcgguuuacuacug

SEQ ID NO: 116621 - RNA, 18 nt, Human coronavirus 229E
cuugcuuuggcuugacaa

SEQ ID NO: 116622 - RNA, 17 nt, Human coronavirus 229E
cuugugucugcuguuaa

SEQ ID NO: 116623 - RNA, 21 nt, Human coronavirus 229E
cuuuucguuuaugugccauug

SEQ ID NO: 116624 - RNA, 21 nt, Human coronavirus 229E
gaauccugagguuaaugcaau

SEQ ID NO: 116625 - RNA, 16 nt, Human coronavirus 229E
guguuaggcgcaagaa

SEQ ID NO: 116626 - RNA, 17 nt, Human coronavirus 229E
guuaaacguugcauuaa

SEQ ID NO: 116627 - RNA, 19 nt, Human coronavirus 229E
guuccuucuaacuaauacc

SEQ ID NO: 116628 - RNA, 17 nt, Human coronavirus 229E
guucacauugcaacuug

SEQ ID NO: 116629 - RNA, 15 nt, Human coronavirus 229E
guuguagaugguguu

SEQ ID NO: 116630 - RNA, 12 nt, Human coronavirus 229E
uaacuaauaccu

SEQ ID NO: 116631 - RNA, 18 nt, Human coronavirus 229E
uaacuaauaccucaucug

SEQ ID NO: 116632 - RNA, 19 nt, Human coronavirus 229E
uacagcuuggcacugcugg

SEQ ID NO: 116633 - RNA, 17 nt, Human coronavirus 229E
uacguuacaaccucaau

SEQ ID NO: 116634 - RNA, 12 nt, Human coronavirus 229E
uauagugauacu

SEQ ID NO: 116635 - RNA, 14 nt, Human coronavirus 229E
uagucuuauacaca

SEQ ID NO: 116636 - RNA, 18 nt, Human coronavirus 229E
uaguauaacucauuacaa

SEQ ID NO: 116637 - RNA, 16 nt, Human coronavirus 229E
guaguacugauuacuu

SEQ ID NO: 116638 - RNA, 21 nt, Human coronavirus 229E
guauaagaaauuugcuacuau

SEQ ID NO: 116639 - RNA, 21 nt, Human coronavirus 229E
gcuuugguuguuaauguacua

SEQ ID NO: 116640 - RNA, 23 nt, Human coronavirus 229E
gcuaguauaacucauuacaaaug

SEQ ID NO: 116641 - RNA, 16 nt, Human coronavirus 229E
gcuuauagugauacua

SEQ ID NO: 116642 - RNA, 19 nt, Human coronavirus 229E
gcuguugagaguggugguu

SEQ ID NO: 116643 - RNA, 16 nt, Human coronavirus 229E
gcuguuggaauaguca

SEQ ID NO: 116644 - RNA, 17 nt, Human coronavirus 229E
agcaugauuucuuuacu

SEQ ID NO: 116645 - RNA, 13 nt, Human coronavirus 229E
agccaacaaugga

SEQ ID NO: 116646 - RNA, 17 nt, Human coronavirus 229E
agauguuuugucugaug

SEQ ID NO: 116647 - RNA, 21 nt, Human coronavirus 229E
aguagacaggaucuuacuaaa

SEQ ID NO: 116648 - RNA, 18 nt, Human coronavirus 229E
aucaauuccuuuacauag

SEQ ID NO: 116649 - RNA, 16 nt, Human coronavirus 229E
auauguuuuguaauag

SEQ ID NO: 116650 - RNA, 15 nt, Human coronavirus 229E
auaugccuuguugca

SEQ ID NO: 116651 - RNA, 20 nt, Human coronavirus 229E
auagucaacacagauuucaa

SEQ ID NO: 116652 - RNA, 13 nt, Human coronavirus 229E
auaauuaaacuaa

SEQ ID NO: 116653 - RNA, 20 nt, Human coronavirus 229E
acaauggaagagccagucau

SEQ ID NO: 116654 - RNA, 16 nt, Human coronavirus 229E
acauagauuacugugu

SEQ ID NO: 116655 - RNA, 20 nt, Human coronavirus 229E
acuguguccgugcauuugac

SEQ ID NO: 116656 - RNA, 21 nt, Human coronavirus 229E
acuguuaccuucaacuugcua

SEQ ID NO: 116657 - RNA, 13 nt, Human coronavirus 229E
acguuuacaauaa

SEQ ID NO: 116658 - RNA, 13 nt, Human coronavirus 229E
augccuuguugca

SEQ ID NO: 116659 - RNA, 22 nt, Human coronavirus 229E
augcuguugcuaagcaugauuu

SEQ ID NO: 116660 - RNA, 13 nt, Human coronavirus 229E
auuaagcuuuguu

SEQ ID NO: 116661 - RNA, 18 nt, Human coronavirus 229E
auucagaaccagagauac

SEQ ID NO: 116662 - RNA, 22 nt, Human coronavirus 229E
augucauacguuacaaccucaa

SEQ ID NO: 116663 - RNA, 16 nt, Human coronavirus 229E
auggaagagccaguca

SEQ ID NO: 116664 - RNA, 19 nt, Human coronavirus 229E
auggcacuguuaccuucaa

SEQ ID NO: 116665 - RNA, 18 nt, Human coronavirus 229E
caagacaugggauuucau

SEQ ID NO: 116666 - RNA, 21 nt, Human coronavirus 229E
caaucauauaugcacauagac

SEQ ID NO: 116667 - RNA, 16 nt, Human coronavirus 229E
auuuugaagaaaaccu

SEQ ID NO: 116668 - RNA, 17 nt, Human coronavirus 229E
auugauaaagaccucag

SEQ ID NO: 116669 - RNA, 22 nt, Human coronavirus 229E
auugauuucuaaacuaaacgac

SEQ ID NO: 116670 - RNA, 14 nt, Human coronavirus 229E
cagacauagauuac

SEQ ID NO: 116671 - RNA, 16 nt, Human coronavirus 229E
cauacagcuuggcacu

SEQ ID NO: 116672 - RNA, 22 nt, Human coronavirus 229E
cauaugccuuguugcauauugc

SEQ ID NO: 116673 - RNA, 22 nt, Human coronavirus 229E
ccauuaaaaauguguaccacau

SEQ ID NO: 116674 - RNA, 17 nt, Human coronavirus 229E
caugggauuucauuguc

SEQ ID NO: 116675 - RNA, 19 nt, Human coronavirus 229E
ccaacaauggaagagccag

SEQ ID NO: 116676 - RNA, 18 nt, Human coronavirus 229E
ccaaucauauaugcacau

SEQ ID NO: 116677 - RNA, 17 nt, Human coronavirus 229E
ucauuacaaaugugcug

SEQ ID NO: 116678 - RNA, 17 nt, Human coronavirus 229E
ucuaaccauauucauug

SEQ ID NO: 116679 - RNA, 16 nt, Human coronavirus 229E
ucuaacuaauaccuca

SEQ ID NO: 116680 - RNA, 16 nt, Human coronavirus 229E
ucugcguaacuuugau

SEQ ID NO: 116681 - RNA, 12 nt, Human coronavirus 229E
ucgcuuagcaau

SEQ ID NO: 116682 - RNA, 13 nt, Human coronavirus 229E
ugaaaaagacugu

SEQ ID NO: 116683 - RNA, 20 nt, Human coronavirus 229E
ugauacuacuaguguguauu

SEQ ID NO: 116684 - RNA, 14 nt, Human coronavirus 229E
ugauuucuuuacuu

SEQ ID NO: 116685 - RNA, 16 nt, Human coronavirus 229E
uguuaaucaaucgcuu

SEQ ID NO: 116686 - RNA, 15 nt, Human coronavirus 229E
uguugcuuaauugcu

SEQ ID NO: 116687 - RNA, 15 nt, Human coronavirus 229E
uguuguagauggugu

SEQ ID NO: 116688 - RNA, 16 nt, Human coronavirus 229E
uuaguuggaauuuugc

SEQ ID NO: 116689 - RNA, 17 nt, Human coronavirus 229E
uggcucuacaagacaug

SEQ ID NO: 116690 - RNA, 22 nt, Human coronavirus 229E
uggcuugcgguuuacuacuggu

SEQ ID NO: 116691 - RNA, 13 nt, Human coronavirus 229E
ugguuauauaccc

SEQ ID NO: 116692 - RNA, 16 nt, Human coronavirus 229E
uugugucugcuguuaa

SEQ ID NO: 116693 - RNA, 18 nt, Human coronavirus 229E
uuuaaaauucuaauccuu

SEQ ID NO: 116694 - RNA, 19 nt, Human coronavirus 229E
uuuaauuaacaugaucccu

SEQ ID NO: 116695 - RNA, 14 nt, Human coronavirus 229E
uuucagaacuagaa

SEQ ID NO: 116696 - RNA, 20 nt, Human coronavirus 229E
uucucaacuaacgacuugua

SEQ ID NO: 116697 - RNA, 14 nt, Human coronavirus 229E
uuucucugaucuau

SEQ ID NO: 116698 - RNA, 19 nt, Human coronavirus 229E
ucaauuuugaagaaaaccu

SEQ ID NO: 116699 - RNA, 17 nt, Human coronavirus 229E
ucaacuugcuagcguau

SEQ ID NO: 116700 - RNA, 19 nt, Human coronavirus 229E
ucaaaugggcugaugcauc

SEQ ID NO: 116701 - RNA, 16 nt, Human coronavirus 229E
ucaaaugacaauugua

SEQ ID NO: 116702 - RNA, 19 nt, Human coronavirus 229E
uauucuucaguuuggacac

SEQ ID NO: 116703 - RNA, 15 nt, Human coronavirus 229E
uauuuuaaugguacu

SEQ ID NO: 116704 - RNA, 19 nt, Human coronavirus 229E
uaugugggugauguacuuc

SEQ ID NO: 116705 - RNA, 21 nt, Human coronavirus 229E
uauaacggugaauguguauac

SEQ ID NO: 116706 - RNA, 17 nt, Human coronavirus 229E
uaauaccucaucuguug

SEQ ID NO: 116707 - RNA, 14 nt, Human coronavirus 229E
uaauuaacaugauc

SEQ ID NO: 116708 - RNA, 22 nt, Human coronavirus 229E
uaaugguacugggagaggugau

SEQ ID NO: 116709 - RNA, 13 nt, Human coronavirus 229E
uacaaaugggcug

SEQ ID NO: 116710 - RNA, 16 nt, Human coronavirus 229E
uacaccaugauggauu

SEQ ID NO: 116711 - RNA, 22 nt, Human coronavirus 229E
uaccaaucauauaugcacauag

SEQ ID NO: 116712 - RNA, 22 nt, Human coronavirus 229E
uacggaggggaucaauuccuuu

SEQ ID NO: 116713 - RNA, 19 nt, Human coronavirus 229E
uacgcaacuuugauugcug

SEQ ID NO: 116714 - RNA, 12 nt, Human coronavirus 229E
uaaauacaccau

SEQ ID NO: 116715 - RNA, 15 nt, Human coronavirus 229E
ggguagaauaccuua

SEQ ID NO: 116716 - RNA, 16 nt, Human coronavirus 229E
ggugaauguguauacu

SEQ ID NO: 116717 - RNA, 19 nt, Human coronavirus 229E
gucaggguagaauaccuua

SEQ ID NO: 116718 - RNA, 21 nt, Human coronavirus 229E
gucgucaggguagaauaccuu

SEQ ID NO: 116719 - RNA, 13 nt, Human coronavirus 229E
gucuuauacacaa

SEQ ID NO: 116720 - RNA, 18 nt, Human coronavirus 229E
ggaaggugauaccucgua

SEQ ID NO: 116721 - RNA, 15 nt, Human coronavirus 229E
ggaauguuauucuaa

SEQ ID NO: 116722 - RNA, 21 nt, Human coronavirus 229E
ggaauccugagguuaaugcaa

SEQ ID NO: 116723 - RNA, 23 nt, Human coronavirus 229E
ggaauccugagguuaaugcaauc

SEQ ID NO: 116724 - RNA, 11 nt, Human coronavirus 229E
gccauugcugu

SEQ ID NO: 116725 - RNA, 14 nt, Human coronavirus 229E
gauuucuaaacuaa

SEQ ID NO: 116726 - RNA, 17 nt, Human coronavirus 229E
gcaacuuugauugcugu

SEQ ID NO: 116727 - RNA, 21 nt, Human coronavirus 229E
gauuacuguguccgugcauuu

SEQ ID NO: 116728 - RNA, 13 nt, Human coronavirus 229E
gagcugcuuuuaa

SEQ ID NO: 116729 - RNA, 12 nt, Human coronavirus 229E
cuugacaaggau

SEQ ID NO: 116730 - RNA, 13 nt, Human coronavirus 229E
cuagucuuauaca

SEQ ID NO: 116731 - RNA, 18 nt, Human coronavirus 229E
cuaguauaacucauuaca

SEQ ID NO: 116732 - RNA, 22 nt, Human coronavirus 229E
cuacucugguguguggugcuua

SEQ ID NO: 116733 - RNA, 13 nt, Human coronavirus 229E
cuacuagugugua

SEQ ID NO: 116734 - RNA, 21 nt, Human coronavirus 229E
cuaauugggccuuuguugcau

SEQ ID NO: 116735 - RNA, 17 nt, Human coronavirus 229E
cugaaccuacagguuac

SEQ ID NO: 116736 - RNA, 15 nt, Human coronavirus 229E
cuguauuggucucaa

SEQ ID NO: 116737 - RNA, 22 nt, Human coronavirus 229E
cuuauacacaaugguaagccag

SEQ ID NO: 116738 - RNA, 23 nt, Human coronavirus 229E
cuuacugguuguuguaguacuga

SEQ ID NO: 116739 - RNA, 18 nt, Human coronavirus 229E
cuuaauugcuuauggucu

SEQ ID NO: 116740 - RNA, 16 nt, Human coronavirus 229E
cuuauuucucaacuaa

SEQ ID NO: 116741 - RNA, 21 nt, Human coronavirus 229E
acccauuugaagaauuggaau

SEQ ID NO: 116742 - RNA, 15 nt, Human coronavirus 229E
accucaucuguugua

SEQ ID NO: 116743 - RNA, 18 nt, Human coronavirus 229E
acaggaucuuacuaaaua

SEQ ID NO: 116744 - RNA, 20 nt, Human coronavirus 229E
acagacauagauuacugugu

SEQ ID NO: 116745 - RNA, 14 nt, Human coronavirus 229E
acaugggauuucau

SEQ ID NO: 116746 - RNA, 17 nt, Human coronavirus 229E
acuugcuuugucaaucu

SEQ ID NO: 116747 - RNA, 14 nt, Human coronavirus 229E
aguuuggacacuau

SEQ ID NO: 116748 - RNA, 21 nt, Human coronavirus 229E
aggcuguaaugcuguugcuaa

SEQ ID NO: 116749 - RNA, 13 nt, Human coronavirus 229E
aucugaaguccaa

SEQ ID NO: 116750 - RNA, 22 nt, Human coronavirus 229E
aucuagucuuauacacaauggu

SEQ ID NO: 116751 - RNA, 14 nt, Human coronavirus 229E
auauaugcacauag

SEQ ID NO: 116752 - RNA, 19 nt, Human coronavirus 229E
auauuguuaaacguugcau

SEQ ID NO: 116753 - RNA, 14 nt, Human coronavirus 229E
auuuacgcaacuuu

SEQ ID NO: 116754 - RNA, 19 nt, Human coronavirus 229E
caaaaacguuucagaacua

SEQ ID NO: 116755 - RNA, 19 nt, Human coronavirus 229E
auguaaccacacuuugcua

SEQ ID NO: 116756 - RNA, 14 nt, Human coronavirus 229E
augguacugggaga

SEQ ID NO: 116757 - RNA, 15 nt, Human coronavirus 229E
augguaagccagugg

SEQ ID NO: 116758 - RNA, 14 nt, Human coronavirus 229E
cacuuugcuaugca

SEQ ID NO: 116759 - RNA, 23 nt, Human coronavirus 229E
cacugcuggcucuacaagacaug

SEQ ID NO: 116760 - RNA, 20 nt, Human coronavirus 229E
cacuaguuacucuguuugca

SEQ ID NO: 116761 - RNA, 22 nt, Human coronavirus 229E
ccucagauguuuugucugaugu

SEQ ID NO: 116762 - RNA, 16 nt, Human coronavirus 229E
ccuuaagcuaguggau

SEQ ID NO: 116763 - RNA, 16 nt, Human coronavirus 229E
ccuuuguugcauuuag

SEQ ID NO: 116764 - RNA, 19 nt, Human coronavirus 229E
cccuccgacuuugcauuca

SEQ ID NO: 116765 - RNA, 19 nt, Human coronavirus 229E
cauguauaacuuacuuaaa

SEQ ID NO: 116766 - RNA, 14 nt, Human coronavirus 229E
caucugaaccacaa

SEQ ID NO: 116767 - RNA, 15 nt, Human coronavirus 229E
cauuacaaaugugcu

SEQ ID NO: 116768 - RNA, 16 nt, Human coronavirus 229E
cauuacaaaugugcug

SEQ ID NO: 116769 - RNA, 18 nt, Human coronavirus 229E
ccacucguacuugcuuug

SEQ ID NO: 116770 - RNA, 18 nt, Human coronavirus 229E
ccacuaagauguuccuua

SEQ ID NO: 116771 - RNA, 16 nt, Human coronavirus 229E
cuuuauuuaaagcaag

SEQ ID NO: 116772 - RNA, 19 nt, Human coronavirus 229E
cuuuaguuggaauuuugcu

SEQ ID NO: 116773 - RNA, 22 nt, Human coronavirus 229E
gaaccuaggugaacgcuaguau

SEQ ID NO: 116774 - RNA, 18 nt, Human coronavirus 229E
gacaaugucaaaugacaa

SEQ ID NO: 116775 - RNA, 14 nt, Human coronavirus 229E
gaugaauacauugc

SEQ ID NO: 116776 - RNA, 18 nt, Human coronavirus 229E
gaugcaucugaaccacaa

SEQ ID NO: 116777 - RNA, 14 nt, Human coronavirus 229E
gaugcuuguacugu

SEQ ID NO: 116778 - RNA, 15 nt, Human coronavirus 229E
gauggugcuaaaacu

SEQ ID NO: 116779 - RNA, 15 nt, Human coronavirus 229E
gcuaaaacugaaccu

SEQ ID NO: 116780 - RNA, 20 nt, Human coronavirus 229E
gcucgaacuuuuugggcaug

SEQ ID NO: 116781 - RNA, 14 nt, Human coronavirus 229E
gcuggaguaaucaa

SEQ ID NO: 116782 - RNA, 22 nt, Human coronavirus 229E
gcugguugucaaacuacaaaug

SEQ ID NO: 116783 - RNA, 22 nt, Human coronavirus 229E
ggagauauugguucuuacuggu

SEQ ID NO: 116784 - RNA, 14 nt, Human coronavirus 229E
ggguugcuguugau

SEQ ID NO: 116785 - RNA, 18 nt, Human coronavirus 229E
ggugcuuauagugauacu

SEQ ID NO: 116786 - RNA, 22 nt, Human coronavirus 229E
guaaccacacuuugcuaugcaa

SEQ ID NO: 116787 - RNA, 16 nt, Human coronavirus 229E
guaauuugguacccau

SEQ ID NO: 116788 - RNA, 16 nt, Human coronavirus 229E
guaaugguacagacau

SEQ ID NO: 116789 - RNA, 18 nt, Human coronavirus 229E
ccauacagcuuggcacug

SEQ ID NO: 116790 - RNA, 17 nt, Human coronavirus 229E
ccacacuuugcuaugca

SEQ ID NO: 116791 - RNA, 17 nt, Human coronavirus 229E
cauauugcugguuguca

SEQ ID NO: 116792 - RNA, 20 nt, Human coronavirus 229E
cauauugcugguugucaaac

SEQ ID NO: 116793 - RNA, 23 nt, Human coronavirus 229E
caugaucccuugcuuuggcuuga

SEQ ID NO: 116794 - RNA, 20 nt, Human coronavirus 229E
caugccacuguguuguuuga

SEQ ID NO: 116795 - RNA, 22 nt, Human coronavirus 229E
caugggauuucauugucuucaa

SEQ ID NO: 116796 - RNA, 16 nt, Human coronavirus 229E
cgagccaacaauggaa

SEQ ID NO: 116797 - RNA, 21 nt, Human coronavirus 229E
ccuuuguugcauuuagcuuuu

SEQ ID NO: 116798 - RNA, 12 nt, Human coronavirus 229E
ccuuuguugcuu

SEQ ID NO: 116799 - RNA, 16 nt, Human coronavirus 229E
cgaaaguuagugcuga

SEQ ID NO: 116800 - RNA, 20 nt, Human coronavirus 229E
ccuuggaaggugauaccucg

SEQ ID NO: 116801 - RNA, 14 nt, Human coronavirus 229E
ccuucuaacuaaua

SEQ ID NO: 116802 - RNA, 21 nt, Human coronavirus 229E
ccgacuuugcauucaauaauu

SEQ ID NO: 116803 - RNA, 18 nt, Human coronavirus 229E
cuucuaacuaauaccuca

SEQ ID NO: 116804 - RNA, 19 nt, Human coronavirus 229E
cuuggaaggugauaccucg

SEQ ID NO: 116805 - RNA, 18 nt, Human coronavirus 229E
cuuauagugauacuacua

SEQ ID NO: 116806 - RNA, 18 nt, Human coronavirus 229E
cuaguggaugaucaugcu

SEQ ID NO: 116807 - RNA, 20 nt, Human coronavirus 229E
cuaggugaacgcuaguauaa

SEQ ID NO: 116808 - RNA, 13 nt, Human coronavirus 229E
cuaguuacucugu

SEQ ID NO: 116809 - RNA, 14 nt, Human coronavirus 229E
cuagaaagggcaaa

SEQ ID NO: 116810 - RNA, 18 nt, Human coronavirus 229E
cucagauguuuugucuga

SEQ ID NO: 116811 - RNA, 21 nt, Human coronavirus 229E
cucaucuguuguagauggugu

SEQ ID NO: 116812 - RNA, 15 nt, Human coronavirus 229E
ucauauaugcacaua

SEQ ID NO: 116813 - RNA, 18 nt, Human coronavirus 229E
ucauauaugcacauagac

SEQ ID NO: 116814 - RNA, 15 nt, Human coronavirus 229E
ucauuguuauucuuc

SEQ ID NO: 116815 - RNA, 19 nt, Human coronavirus 229E
uccacuaagauguuccuua

SEQ ID NO: 116816 - RNA, 20 nt, Human coronavirus 229E
ucaaaaacguuucagaacua

SEQ ID NO: 116817 - RNA, 18 nt, Human coronavirus 229E
ucaaaugacaauuguacg

SEQ ID NO: 116818 - RNA, 14 nt, Human coronavirus 229E
uauaagaaauuugc

SEQ ID NO: 116819 - RNA, 22 nt, Human coronavirus 229E
uauaacggugaauguguauacu

SEQ ID NO: 116820 - RNA, 18 nt, Human coronavirus 229E
ugaauacauugcuuuucu

SEQ ID NO: 116821 - RNA, 22 nt, Human coronavirus 229E
ugaauacauugcuuuucucuga

SEQ ID NO: 116822 - RNA, 22 nt, Human coronavirus 229E
ugaacaaccuuggaaggugaua

SEQ ID NO: 116823 - RNA, 17 nt, Human coronavirus 229E
ucuguuguagauggugu

SEQ ID NO: 116824 - RNA, 18 nt, Human coronavirus 229E
uacuacuaguguguauua

SEQ ID NO: 116825 - RNA, 19 nt, Human coronavirus 229E
uacuacuaguguguauuac

SEQ ID NO: 116826 - RNA, 16 nt, Human coronavirus 229E
uacuauguuacugaac

SEQ ID NO: 116827 - RNA, 22 nt, Human coronavirus 229E
uaauccuuuucguuuaugugcc

SEQ ID NO: 116828 - RNA, 20 nt, Human coronavirus 229E
uaaugcuguugcuaagcaug

SEQ ID NO: 116829 - RNA, 17 nt, Human coronavirus 229E
uagaugaauacauugcu

SEQ ID NO: 116830 - RNA, 14 nt, Human coronavirus 229E
uagauuacuguguc

SEQ ID NO: 116831 - RNA, 17 nt, Human coronavirus 229E
uagugaacaaccuugga

SEQ ID NO: 116832 - RNA, 21 nt, Human coronavirus 229E
guuucacgacagguuauccaa

SEQ ID NO: 116833 - RNA, 22 nt, Human coronavirus 229E
guuguaguacugauuacuuuga

SEQ ID NO: 116834 - RNA, 16 nt, Human coronavirus 229E
guuuugcuuguugcau

SEQ ID NO: 116835 - RNA, 17 nt, Human coronavirus 229E
guuugaagaugcuugua

SEQ ID NO: 116836 - RNA, 17 nt, Human coronavirus 229E
uaaaauucuaauccuuu

SEQ ID NO: 116837 - RNA, 18 nt, Human coronavirus 229E
guuagugcugaaguuuca

SEQ ID NO: 116838 - RNA, 17 nt, Human coronavirus 229E
guuaguaacugcuaaug

SEQ ID NO: 116839 - RNA, 16 nt, Human coronavirus 229E
uucuaaccauauucau

SEQ ID NO: 116840 - RNA, 15 nt, Human coronavirus 229E
uucuaacuaauaccu

SEQ ID NO: 116841 - RNA, 14 nt, Human coronavirus 229E
uucaguuuggacac

SEQ ID NO: 116842 - RNA, 17 nt, Human coronavirus 229E
uuccauacagcuuggca

SEQ ID NO: 116843 - RNA, 22 nt, Human coronavirus 229E
uuagagagcguguugaaggugu

SEQ ID NO: 116844 - RNA, 22 nt, Human coronavirus 229E
uuacgcaacuuugauugcugua

SEQ ID NO: 116845 - RNA, 14 nt, Human coronavirus 229E
uuauugauuucuaa

SEQ ID NO: 116846 - RNA, 16 nt, Human coronavirus 229E
ugucaaucuuugacac

SEQ ID NO: 116847 - RNA, 22 nt, Human coronavirus 229E
uuaaggagauauugguucuuac

SEQ ID NO: 116848 - RNA, 20 nt, Human coronavirus 229E
uuaaacuaauuaagcuuugu

SEQ ID NO: 116849 - RNA, 12 nt, Human coronavirus 229E
uuaaaggcugua

SEQ ID NO: 116850 - RNA, 14 nt, Human coronavirus 229E
uggccguaucaaca

SEQ ID NO: 116851 - RNA, 22 nt, Human coronavirus 229E
ugguuguuaauguacuacucug

SEQ ID NO: 116852 - RNA, 20 nt, Human coronavirus 229E
ugguaagccagugguaguaa

SEQ ID NO: 116853 - RNA, 19 nt, Human coronavirus 229E
uguaaagguuuuuccucag

SEQ ID NO: 116854 - RNA, 22 nt, Human coronavirus 229E
uguacuguggcuucuuuggcca

SEQ ID NO: 116855 - RNA, 12 nt, Human coronavirus 229E
uguauacuuguu

SEQ ID NO: 116856 - RNA, 14 nt, Human coronavirus 229E
uguauaacuuacuu

SEQ ID NO: 116857 - RNA, 17 nt, Human coronavirus 229E
ugcuacuauguuacuga

SEQ ID NO: 116858 - RNA, 20 nt, Human coronavirus 229E
ugcuuaauugcuuauggucu

SEQ ID NO: 116859 - RNA, 19 nt, Human coronavirus 229E
ugcuuauagugauacuacu

SEQ ID NO: 116860 - RNA, 15 nt, Human coronavirus 229E
aaugguaagccagug

SEQ ID NO: 116861 - RNA, 20 nt, Human coronavirus 229E
aauguaaccacacuuugcua

SEQ ID NO: 116862 - RNA, 15 nt, Human coronavirus 229E
aauguagauaaggau

SEQ ID NO: 116863 - RNA, 21 nt, Human coronavirus 229E
aauuaagcuuuguuucacuug

SEQ ID NO: 116864 - RNA, 22 nt, Human coronavirus 229E
aauguuuguuuugcuuguugca

SEQ ID NO: 116865 - RNA, 16 nt, Human coronavirus 229E
aaucauauaugcacau

SEQ ID NO: 116866 - RNA, 19 nt, Human coronavirus 229E
aaucauauaugcacauaga

SEQ ID NO: 116867 - RNA, 23 nt, Human coronavirus 229E
aagaaauuugcuacuauguuacu

SEQ ID NO: 116868 - RNA, 23 nt, Human coronavirus 229E
uugucuugagaccuaucuaguua

SEQ ID NO: 116869 - RNA, 14 nt, Human coronavirus 229E
uucuuuuauuaucu

SEQ ID NO: 116870 - RNA, 17 nt, Human coronavirus 229E
aaucaaucgcuuagcaa

SEQ ID NO: 116871 - RNA, 18 nt, Human coronavirus 229E
aaucacugucacaaccgu

SEQ ID NO: 116872 - RNA, 17 nt, Human coronavirus 229E
aaggugucgucuggguu

SEQ ID NO: 116873 - RNA, 21 nt, Human coronavirus 229E
aauccacuaagauguuccuua

SEQ ID NO: 116874 - RNA, 21 nt, Human coronavirus 229E
aagacgugaaagauggcacug

SEQ ID NO: 116875 - RNA, 19 nt, Human coronavirus 229E
aaccguguugggacagaca

SEQ ID NO: 116876 - RNA, 23 nt, Human coronavirus 229E
aaaugugcuggaguaaucaaaga

SEQ ID NO: 116877 - RNA, 22 nt, Human coronavirus 229E
aaaguuagugcugaaguuucac

SEQ ID NO: 116878 - RNA, 20 nt, Human coronavirus 229E
agauuacuguguccgugcau

SEQ ID NO: 116879 - RNA, 17 nt, Human coronavirus 229E
agauauugguucuuacu

SEQ ID NO: 116880 - RNA, 16 nt, Human coronavirus 229E
agaggacguauugaua

SEQ ID NO: 116881 - RNA, 23 nt, Human coronavirus 229E
agacgugaaagauggcacuguua

SEQ ID NO: 116882 - RNA, 15 nt, Human coronavirus 229E
agagagcguguugaa

SEQ ID NO: 116883 - RNA, 23 nt, Human coronavirus 229E
acuugccauauguuuuguaauag

SEQ ID NO: 116884 - RNA, 12 nt, Human coronavirus 229E
acuugcuuuguc

SEQ ID NO: 116885 - RNA, 14 nt, Human coronavirus 229E
agaauucagaacca

SEQ ID NO: 116886 - RNA, 19 nt, Human coronavirus 229E
agaaccagagauaccacac

SEQ ID NO: 116887 - RNA, 19 nt, Human coronavirus 229E
acuguguccgugcauuuga

SEQ ID NO: 116888 - RNA, 19 nt, Human coronavirus 229E
acagucaaaugggcugaug

SEQ ID NO: 116889 - RNA, 14 nt, Human coronavirus 229E
accucaucuguugu

SEQ ID NO: 116890 - RNA, 14 nt, Human coronavirus 229E
acccaagcugcauu

SEQ ID NO: 116891 - RNA, 15 nt, Human coronavirus 229E
agcuuggcacugcug

SEQ ID NO: 116892 - RNA, 22 nt, Human coronavirus 229E
agcuuuguuucacuugccauau

SEQ ID NO: 116893 - RNA, 23 nt, Human coronavirus 229E
aggaguuuucagccuuuguugcu

SEQ ID NO: 116894 - RNA, 17 nt, Human coronavirus 229E
aggaucuuacuaaauac

SEQ ID NO: 116895 - RNA, 18 nt, Human coronavirus 229E
aggaugacgcguucuaua

SEQ ID NO: 116896 - RNA, 22 nt, Human coronavirus 229E
agugauacuacuaguguguauu

SEQ ID NO: 116897 - RNA, 12 nt, Human coronavirus 229E
aguguguauuac

SEQ ID NO: 116898 - RNA, 17 nt, Human coronavirus 229E
agugcugaaguuucacg

SEQ ID NO: 116899 - RNA, 20 nt, Human coronavirus 229E
caagacgugaaagauggcac

SEQ ID NO: 116900 - RNA, 21 nt, Human coronavirus 229E
caagacgugaaagauggcacu

SEQ ID NO: 116901 - RNA, 23 nt, Human coronavirus 229E
cacgacagguuauccaagacgug

SEQ ID NO: 116902 - RNA, 13 nt, Human coronavirus 229E
cacgagcagucca

SEQ ID NO: 116903 - RNA, 14 nt, Human coronavirus 229E
cacgagcaguccau

SEQ ID NO: 116904 - RNA, 14 nt, Human coronavirus 229E
cacuaguuacucug

SEQ ID NO: 116905 - RNA, 14 nt, Human coronavirus 229E
cacuguuaccuuca

SEQ ID NO: 116906 - RNA, 16 nt, Human coronavirus 229E
caagaauucagaacca

SEQ ID NO: 116907 - RNA, 22 nt, Human coronavirus 229E
caacggcuguguugguuauuca

SEQ ID NO: 116908 - RNA, 12 nt, Human coronavirus 229E
augcuguugcua

SEQ ID NO: 116909 - RNA, 21 nt, Human coronavirus 229E
auuguaaagguuuuuccucag

SEQ ID NO: 116910 - RNA, 16 nt, Human coronavirus 229E
auuguacgggugacau

SEQ ID NO: 116911 - RNA, 17 nt, Human coronavirus 229E
auuguacgggugacauu

SEQ ID NO: 116912 - RNA, 13 nt, Human coronavirus 229E
aaaauguauuugc

SEQ ID NO: 116913 - RNA, 19 nt, Human coronavirus 229E
aaaauguguaccacauuua

SEQ ID NO: 116914 - RNA, 23 nt, Human coronavirus 229E
agauuguuuuaugguuugaagau

SEQ ID NO: 116915 - RNA, 21 nt, Human coronavirus 229E
cauugucacccauuugaagaa

SEQ ID NO: 116916 - RNA, 15 nt, Human coronavirus OC43 (HCoV-OC43)
auuguagaguuccua

SEQ ID NO: 116917 - RNA, 14 nt, Human coronavirus OC43 (HCoV-OC43)
auuguaaaauacaa

SEQ ID NO: 116918 - RNA, 23 nt, Human coronavirus OC43 (HCoV-OC43)
auuguaaucauauuguuaauauc

SEQ ID NO: 116919 - RNA, 14 nt, Human coronavirus OC43 (HCoV-OC43)
auugagcagacuau

SEQ ID NO: 116920 - RNA, 22 nt, Human coronavirus OC43 (HCoV-OC43)
auucuuauauggaccuuaaucc

SEQ ID NO: 116921 - RNA, 15 nt, Human coronavirus OC43 (HCoV-OC43)
augcuggacauacag

SEQ ID NO: 116922 - RNA, 15 nt, Human coronavirus OC43 (HCoV-OC43)
caaccguucugguag

SEQ ID NO: 116923 - RNA, 18 nt, Human coronavirus OC43 (HCoV-OC43)
caacuuugcgguaugugu

SEQ ID NO: 116924 - RNA, 18 nt, Human coronavirus OC43 (HCoV-OC43)
caaacugguuuucuuagc

SEQ ID NO: 116925 - RNA, 15 nt, Human coronavirus OC43 (HCoV-OC43)
caaacauuaugagua

SEQ ID NO: 116926 - RNA, 20 nt, Human coronavirus OC43 (HCoV-OC43)
cagcauucgcuaauacugua

SEQ ID NO: 116927 - RNA, 24 nt, Human coronavirus OC43 (HCoV-OC43)
caauuuggauauacaagucgcagu

SEQ ID NO: 116928 - RNA, 19 nt, Human coronavirus OC43 (HCoV-OC43)
aguuauugaugauaugcau

SEQ ID NO: 116929 - RNA, 13 nt, Human coronavirus OC43 (HCoV-OC43)
aguaacuaagcau

SEQ ID NO: 116930 - RNA, 19 nt, Human coronavirus OC43 (HCoV-OC43)
aguuggccaaagugcagaa

SEQ ID NO: 116931 - RNA, 18 nt, Human coronavirus OC43 (HCoV-OC43)
agggguagaagagcucaa

SEQ ID NO: 116932 - RNA, 23 nt, Human coronavirus OC43 (HCoV-OC43)
auauuaacgguuuuaaugucuca

SEQ ID NO: 116933 - RNA, 19 nt, Human coronavirus OC43 (HCoV-OC43)
auagugaguucccugcuau

SEQ ID NO: 116934 - RNA, 17 nt, Human coronavirus OC43 (HCoV-OC43)
augccacuaaaccucag

SEQ ID NO: 116935 - RNA, 20 nt, Human coronavirus OC43 (HCoV-OC43)
augcauaguuuuagauguua

SEQ ID NO: 116936 - RNA, 16 nt, Human coronavirus OC43 (HCoV-OC43)
augcacuguucagcag

SEQ ID NO: 116937 - RNA, 13 nt, Human coronavirus OC43 (HCoV-OC43)
augauaugcauug

SEQ ID NO: 116938 - RNA, 22 nt, Human coronavirus OC43 (HCoV-OC43)
aucuugcagacacuguguggua

SEQ ID NO: 116939 - RNA, 19 nt, Human coronavirus OC43 (HCoV-OC43)
acugauacuguugauguua

SEQ ID NO: 116940 - RNA, 20 nt, Human coronavirus OC43 (HCoV-OC43)
acugauacuguugauguuac

SEQ ID NO: 116941 - RNA, 17 nt, Human coronavirus OC43 (HCoV-OC43)
acugaagggaaguguac

SEQ ID NO: 116942 - RNA, 15 nt, Human coronavirus OC43 (HCoV-OC43)
agaagaauugcauga

SEQ ID NO: 116943 - RNA, 15 nt, Human coronavirus OC43 (HCoV-OC43)
acuugauguguauag

SEQ ID NO: 116944 - RNA, 16 nt, Human coronavirus OC43 (HCoV-OC43)
acuuugcgguaugugu

SEQ ID NO: 116945 - RNA, 20 nt, Human coronavirus OC43 (HCoV-OC43)
agaggcccuaaucagaauuu

SEQ ID NO: 116946 - RNA, 17 nt, Human coronavirus OC43 (HCoV-OC43)
aagaggagccccaauaa

SEQ ID NO: 116947 - RNA, 21 nt, Human coronavirus OC43 (HCoV-OC43)
aacuuugcgguauguguaaua

SEQ ID NO: 116948 - RNA, 17 nt, Human coronavirus OC43 (HCoV-OC43)
aacuuuuaaauugugua

SEQ ID NO: 116949 - RNA, 23 nt, Human coronavirus OC43 (HCoV-OC43)
aagguguagaagaauugcaugac

SEQ ID NO: 116950 - RNA, 19 nt, Human coronavirus OC43 (HCoV-OC43)
aagauuagaguuggccaaa

SEQ ID NO: 116951 - RNA, 21 nt, Human coronavirus OC43 (HCoV-OC43)
aagauuagaguuggccaaagu

SEQ ID NO: 116952 - RNA, 14 nt, Human coronavirus OC43 (HCoV-OC43)
uuuauaguugccau

SEQ ID NO: 116953 - RNA, 21 nt, Human coronavirus OC43 (HCoV-OC43)
uuuucuuuggguauuauacua

SEQ ID NO: 116954 - RNA, 20 nt, Human coronavirus OC43 (HCoV-OC43)
uuugagaauccucacauccu

SEQ ID NO: 116955 - RNA, 17 nt, Human coronavirus OC43 (HCoV-OC43)
uuugauucauugcacug

SEQ ID NO: 116956 - RNA, 18 nt, Human coronavirus OC43 (HCoV-OC43)
aacauguuuuugauacuu

SEQ ID NO: 116957 - RNA, 12 nt, Human coronavirus OC43 (HCoV-OC43)
uuuuuacuaucu

SEQ ID NO: 116958 - RNA, 14 nt, Human coronavirus OC43 (HCoV-OC43)
aaguacugauacug

SEQ ID NO: 116959 - RNA, 22 nt, Human coronavirus OC43 (HCoV-OC43)
aaggaguggauuguaaaauaca

SEQ ID NO: 116960 - RNA, 21 nt, Human coronavirus OC43 (HCoV-OC43)
aauuacauucgugauaaaggu

SEQ ID NO: 116961 - RNA, 12 nt, Human coronavirus OC43 (HCoV-OC43)
aauuauaaaggu

SEQ ID NO: 116962 - RNA, 18 nt, Human coronavirus OC43 (HCoV-OC43)
aaugguuuggguacuuau

SEQ ID NO: 116963 - RNA, 22 nt, Human coronavirus OC43 (HCoV-OC43)
aaugguuauuacccuacuucag

SEQ ID NO: 116964 - RNA, 18 nt, Human coronavirus OC43 (HCoV-OC43)
uggaacuagugacccaca

SEQ ID NO: 116965 - RNA, 19 nt, Human coronavirus OC43 (HCoV-OC43)
uggaacuagugacccacag

SEQ ID NO: 116966 - RNA, 21 nt, Human coronavirus OC43 (HCoV-OC43)
uggaacuagugacccacaguu

SEQ ID NO: 116967 - RNA, 14 nt, Human coronavirus OC43 (HCoV-OC43)
ugguuuucagauua

SEQ ID NO: 116968 - RNA, 21 nt, Human coronavirus OC43 (HCoV-OC43)
ugggaauccugacgagcccca

SEQ ID NO: 116969 - RNA, 22 nt, Human coronavirus OC43 (HCoV-OC43)
uuaaaguguacuucagauacua

SEQ ID NO: 116970 - RNA, 13 nt, Human coronavirus OC43 (HCoV-OC43)
uuaaaguucuuaa

SEQ ID NO: 116971 - RNA, 17 nt, Human coronavirus OC43 (HCoV-OC43)
uuauugaugauaugcau

SEQ ID NO: 116972 - RNA, 20 nt, Human coronavirus OC43 (HCoV-OC43)
uuauuacaaucauauugcaa

SEQ ID NO: 116973 - RNA, 16 nt, Human coronavirus OC43 (HCoV-OC43)
uuauuacccuacuuca

SEQ ID NO: 116974 - RNA, 14 nt, Human coronavirus OC43 (HCoV-OC43)
uuacccuacuucag

SEQ ID NO: 116975 - RNA, 22 nt, Human coronavirus OC43 (HCoV-OC43)
uuccacauaucguaauauggca

SEQ ID NO: 116976 - RNA, 16 nt, Human coronavirus OC43 (HCoV-OC43)
gugcuacauucacucu

SEQ ID NO: 116977 - RNA, 14 nt, Human coronavirus OC43 (HCoV-OC43)
uaaaaccaccaguc

SEQ ID NO: 116978 - RNA, 12 nt, Human coronavirus OC43 (HCoV-OC43)
uaaaauaucauc

SEQ ID NO: 116979 - RNA, 20 nt, Human coronavirus OC43 (HCoV-OC43)
uaaaugaaugaaguuaauua

SEQ ID NO: 116980 - RNA, 18 nt, Human coronavirus OC43 (HCoV-OC43)
uaaaugguuucacagcau

SEQ ID NO: 116981 - RNA, 20 nt, Human coronavirus OC43 (HCoV-OC43)
uaaauuugagaauccucaca

SEQ ID NO: 116982 - RNA, 17 nt, Human coronavirus OC43 (HCoV-OC43)
guuuuaaauuuaacuau

SEQ ID NO: 116983 - RNA, 19 nt, Human coronavirus OC43 (HCoV-OC43)
guuuuaaauuuaacuauca

SEQ ID NO: 116984 - RNA, 12 nt, Human coronavirus OC43 (HCoV-OC43)
guuuuguguuaa

SEQ ID NO: 116985 - RNA, 15 nt, Human coronavirus OC43 (HCoV-OC43)
uagugacccacaguu

SEQ ID NO: 116986 - RNA, 16 nt, Human coronavirus OC43 (HCoV-OC43)
uaguuguaguggcauu

SEQ ID NO: 116987 - RNA, 15 nt, Human coronavirus OC43 (HCoV-OC43)
uaguuagcugcauaa

SEQ ID NO: 116988 - RNA, 18 nt, Human coronavirus OC43 (HCoV-OC43)
uaguaaaacuacaccagc

SEQ ID NO: 116989 - RNA, 18 nt, Human coronavirus OC43 (HCoV-OC43)
uaggauauuguagaguuc

SEQ ID NO: 116990 - RNA, 21 nt, Human coronavirus OC43 (HCoV-OC43)
uagauuuugugcuacauucac

SEQ ID NO: 116991 - RNA, 22 nt, Human coronavirus OC43 (HCoV-OC43)
uagauuuugugcuacauucacu

SEQ ID NO: 116992 - RNA, 18 nt, Human coronavirus OC43 (HCoV-OC43)
uacaaacagcgccacaca

SEQ ID NO: 116993 - RNA, 22 nt, Human coronavirus OC43 (HCoV-OC43)
uaaucauuuuaucaauuuucca

SEQ ID NO: 116994 - RNA, 20 nt, Human coronavirus OC43 (HCoV-OC43)
uaaucuuaacuauuuucaau

SEQ ID NO: 116995 - RNA, 22 nt, Human coronavirus OC43 (HCoV-OC43)
uaaucauauuguuaauaucaac

SEQ ID NO: 116996 - RNA, 23 nt, Human coronavirus OC43 (HCoV-OC43)
uaccaacggcuuuugcuguuaua

SEQ ID NO: 116997 - RNA, 23 nt, Human coronavirus OC43 (HCoV-OC43)
ucuugcagacacugugugguaug

SEQ ID NO: 116998 - RNA, 17 nt, Human coronavirus OC43 (HCoV-OC43)
ugaagggaaguguacua

SEQ ID NO: 116999 - RNA, 17 nt, Human coronavirus OC43 (HCoV-OC43)
ugacauggcugaucaaa

SEQ ID NO: 117000 - RNA, 22 nt, Human coronavirus OC43 (HCoV-OC43)
uauugagcagacuaugguuuaa

SEQ ID NO: 117001 - RNA, 19 nt, Human coronavirus OC43 (HCoV-OC43)
uauuuucaauugcguauac

SEQ ID NO: 117002 - RNA, 13 nt, Human coronavirus OC43 (HCoV-OC43)
ucacucuuuaugg

SEQ ID NO: 117003 - RNA, 14 nt, Human coronavirus OC43 (HCoV-OC43)
ucaacccaagcaaa

SEQ ID NO: 117004 - RNA, 22 nt, Human coronavirus OC43 (HCoV-OC43)
uccacuuacccauuuucagggu

SEQ ID NO: 117005 - RNA, 16 nt, Human coronavirus OC43 (HCoV-OC43)
ucauugcacugaucuc

SEQ ID NO: 117006 - RNA, 12 nt, Human coronavirus OC43 (HCoV-OC43)
uccaaacauuau

SEQ ID NO: 117007 - RNA, 12 nt, Human coronavirus OC43 (HCoV-OC43)
ucauauugcaau

SEQ ID NO: 117008 - RNA, 18 nt, Human coronavirus OC43 (HCoV-OC43)
ucauauuguuaauaucaa

SEQ ID NO: 117009 - RNA, 17 nt, Human coronavirus OC43 (HCoV-OC43)
ucaguuucaaaagggaa

SEQ ID NO: 117010 - RNA, 12 nt, Human coronavirus OC43 (HCoV-OC43)
cucagcaaguaa

SEQ ID NO: 117011 - RNA, 12 nt, Human coronavirus OC43 (HCoV-OC43)
cuauuuaugugu

SEQ ID NO: 117012 - RNA, 16 nt, Human coronavirus OC43 (HCoV-OC43)
cuauaauagauagaga

SEQ ID NO: 117013 - RNA, 15 nt, Human coronavirus OC43 (HCoV-OC43)
cuauaaguacugaua

SEQ ID NO: 117014 - RNA, 15 nt, Human coronavirus OC43 (HCoV-OC43)
cuuacuaugcuggac

SEQ ID NO: 117015 - RNA, 21 nt, Human coronavirus OC43 (HCoV-OC43)
cuucagguuccacauaucgua

SEQ ID NO: 117016 - RNA, 22 nt, Human coronavirus OC43 (HCoV-OC43)
cugauacuguugauguuacuaa

SEQ ID NO: 117017 - RNA, 23 nt, Human coronavirus OC43 (HCoV-OC43)
cucuuguuagaucuuuuugcaau

SEQ ID NO: 117018 - RNA, 19 nt, Human coronavirus OC43 (HCoV-OC43)
cugacgagccccagaagga

SEQ ID NO: 117019 - RNA, 19 nt, Human coronavirus OC43 (HCoV-OC43)
ccgaucaguccgaccaguu

SEQ ID NO: 117020 - RNA, 17 nt, Human coronavirus OC43 (HCoV-OC43)
ccgauggcaaccagcgu

SEQ ID NO: 117021 - RNA, 23 nt, Human coronavirus OC43 (HCoV-OC43)
ccuauaaguacugauacuguuga

SEQ ID NO: 117022 - RNA, 22 nt, Human coronavirus OC43 (HCoV-OC43)
ccuucuauuuauguguuuaaua

SEQ ID NO: 117023 - RNA, 15 nt, Human coronavirus OC43 (HCoV-OC43)
cauuauuauguggau

SEQ ID NO: 117024 - RNA, 22 nt, Human coronavirus OC43 (HCoV-OC43)
aaaauacaaacagcgccacaca

SEQ ID NO: 117025 - RNA, 17 nt, Human coronavirus OC43 (HCoV-OC43)
ccagcgucaacugcugc

SEQ ID NO: 117026 - RNA, 22 nt, Human coronavirus OC43 (HCoV-OC43)
guaaucaagguagauuuugugc

SEQ ID NO: 117027 - RNA, 13 nt, Human coronavirus OC43 (HCoV-OC43)
guaagcaauccag

SEQ ID NO: 117028 - RNA, 15 nt, Human coronavirus OC43 (HCoV-OC43)
gguuucacagcauuc

SEQ ID NO: 117029 - RNA, 17 nt, Human coronavirus OC43 (HCoV-OC43)
gggaauguuguacccua

SEQ ID NO: 117030 - RNA, 17 nt, Human coronavirus OC43 (HCoV-OC43)
gguauuuuuacuaucug

SEQ ID NO: 117031 - RNA, 13 nt, Human coronavirus OC43 (HCoV-OC43)
gcuacauucacuc

SEQ ID NO: 117032 - RNA, 22 nt, Human coronavirus OC43 (HCoV-OC43)
gcaaccagcgucaacugcugcc

SEQ ID NO: 117033 - RNA, 20 nt, Human coronavirus OC43 (HCoV-OC43)
gauucauugcacugaucucu

SEQ ID NO: 117034 - RNA, 16 nt, Human coronavirus OC43 (HCoV-OC43)
gauguaaaaccaccag

SEQ ID NO: 117035 - RNA, 19 nt, Human coronavirus OC43 (HCoV-OC43)
gauuuaaaguguacuucag

SEQ ID NO: 117036 - RNA, 18 nt, Human coronavirus OC43 (HCoV-OC43)
gauuuugugcuacauuca

SEQ ID NO: 117037 - RNA, 17 nt, Human coronavirus OC43 (HCoV-OC43)
gcaaacugcuaccucuc

SEQ ID NO: 117038 - RNA, 21 nt, Human coronavirus OC43 (HCoV-OC43)
aaaugguuucacagcauucgc

SEQ ID NO: 117039 - RNA, 13 nt, Human coronavirus OC43 (HCoV-OC43)
gagaaagugaaag

SEQ ID NO: 117040 - RNA, 18 nt, Human coronavirus OC43 (HCoV-OC43)
gagaccugagaagaaaua

SEQ ID NO: 117041 - RNA, 18 nt, Human coronavirus OC43 (HCoV-OC43)
aaagguuguguugcugac

SEQ ID NO: 117042 - RNA, 14 nt, Human coronavirus OC43 (HCoV-OC43)
aaagugcagaauuu

SEQ ID NO: 117043 - RNA, 17 nt, Human coronavirus OC43 (HCoV-OC43)
gacaagccuaaucauuu

SEQ ID NO: 117044 - RNA, 15 nt, Human coronavirus OC43 (HCoV-OC43)
cuuguucuggcaaaa

SEQ ID NO: 117045 - RNA, 14 nt, Human coronavirus OC43 (HCoV-OC43)
aaaccucagcaagu

SEQ ID NO: 117046 - RNA, 20 nt, Human coronavirus OC43 (HCoV-OC43)
aaaccucagcaaguaacuaa

SEQ ID NO: 117047 - RNA, 23 nt, Human coronavirus OC43 (HCoV-OC43)
gaaguuauugaugauaugcauug

SEQ ID NO: 117048 - RNA, 15 nt, Human coronavirus OC43 (HCoV-OC43)
ccaagcaaacugcua

SEQ ID NO: 117049 - RNA, 20 nt, Human coronavirus OC43 (HCoV-OC43)
cauuaugaguaguaaaacua

SEQ ID NO: 117050 - RNA, 16 nt, Human coronavirus OC43 (HCoV-OC43)
cauauuguuaauauca

SEQ ID NO: 117051 - RNA, 14 nt, Human coronavirus OC43 (HCoV-OC43)
cauacugccaaaga

SEQ ID NO: 117052 - RNA, 20 nt, Human coronavirus OC43 (HCoV-OC43)
ccuaggaagaugcauaguuu

SEQ ID NO: 117053 - RNA, 12 nt, Human coronavirus OC43 (HCoV-OC43)
ccuuuaaaugca

SEQ ID NO: 117054 - RNA, 21 nt, Human coronavirus OC43 (HCoV-OC43)
ccugaagacuauaaaaguguu

SEQ ID NO: 117055 - RNA, 18 nt, Human coronavirus OC43 (HCoV-OC43)
cagaaaagucgagauaag

SEQ ID NO: 117056 - RNA, 17 nt, Human coronavirus OC43 (HCoV-OC43)
caauaaacaaugcacug

SEQ ID NO: 117057 - RNA, 19 nt, Human coronavirus OC43 (HCoV-OC43)
auguggccccuuacuauaa

SEQ ID NO: 117058 - RNA, 12 nt, Human coronavirus OC43 (HCoV-OC43)
auguuacuaaug

SEQ ID NO: 117059 - RNA, 15 nt, Human coronavirus OC43 (HCoV-OC43)
auuacccuacuucag

SEQ ID NO: 117060 - RNA, 23 nt, Human coronavirus OC43 (HCoV-OC43)
auguucaaaccagggguagaaga

SEQ ID NO: 117061 - RNA, 18 nt, Human coronavirus OC43 (HCoV-OC43)
auuacaaucauauugcaa

SEQ ID NO: 117062 - RNA, 13 nt, Human coronavirus OC43 (HCoV-OC43)
auuagaacuggaa

SEQ ID NO: 117063 - RNA, 14 nt, Human coronavirus OC43 (HCoV-OC43)
auuauaaagguuua

SEQ ID NO: 117064 - RNA, 13 nt, Human coronavirus OC43 (HCoV-OC43)
auucauugcacug

SEQ ID NO: 117065 - RNA, 15 nt, Human coronavirus OC43 (HCoV-OC43)
auauugcaauuugga

SEQ ID NO: 117066 - RNA, 20 nt, Human coronavirus OC43 (HCoV-OC43)
auaggagauuuaaaguguac

SEQ ID NO: 117067 - RNA, 19 nt, Human coronavirus OC43 (HCoV-OC43)
auacuguagaggaugcugu

SEQ ID NO: 117068 - RNA, 22 nt, Human coronavirus OC43 (HCoV-OC43)
auaaauauuuuggaguaauaaa

SEQ ID NO: 117069 - RNA, 23 nt, Human coronavirus OC43 (HCoV-OC43)
aucuaaacauguuuuugauacuu

SEQ ID NO: 117070 - RNA, 19 nt, Human coronavirus OC43 (HCoV-OC43)
aggagauuuaaaguguacu

SEQ ID NO: 117071 - RNA, 18 nt, Human coronavirus OC43 (HCoV-OC43)
aguuccccauucuugcag

SEQ ID NO: 117072 - RNA, 22 nt, Human coronavirus OC43 (HCoV-OC43)
aguaguagagcguccucuggaa

SEQ ID NO: 117073 - RNA, 14 nt, Human coronavirus OC43 (HCoV-OC43)
agguuguuuauuag

SEQ ID NO: 117074 - RNA, 16 nt, Human coronavirus OC43 (HCoV-OC43)
aguaaaacuacaccag

SEQ ID NO: 117075 - RNA, 22 nt, Human coronavirus OC43 (HCoV-OC43)
agguagauuuugugcuacauuc

SEQ ID NO: 117076 - RNA, 15 nt, Human coronavirus OC43 (HCoV-OC43)
acugaucucuuguua

SEQ ID NO: 117077 - RNA, 18 nt, Human coronavirus OC43 (HCoV-OC43)
agaauuagaagaugcuug

SEQ ID NO: 117078 - RNA, 13 nt, Human coronavirus OC43 (HCoV-OC43)
agaauugcaugac

SEQ ID NO: 117079 - RNA, 12 nt, Human coronavirus OC43 (HCoV-OC43)
agaaauguuaaa

SEQ ID NO: 117080 - RNA, 20 nt, Human coronavirus OC43 (HCoV-OC43)
accaacggcuuuugcuguua

SEQ ID NO: 117081 - RNA, 15 nt, Human coronavirus OC43 (HCoV-OC43)
accagcaccaguuua

SEQ ID NO: 117082 - RNA, 17 nt, Human coronavirus OC43 (HCoV-OC43)
accagcgucaacugcug

SEQ ID NO: 117083 - RNA, 18 nt, Human coronavirus OC43 (HCoV-OC43)
accaguuuauaucuggac

SEQ ID NO: 117084 - RNA, 21 nt, Human coronavirus OC43 (HCoV-OC43)
accaguccuugauguggauga

SEQ ID NO: 117085 - RNA, 15 nt, Human coronavirus OC43 (HCoV-OC43)
cugguaaaauaucau

SEQ ID NO: 117086 - RNA, 13 nt, Human coronavirus OC43 (HCoV-OC43)
cuggacauacagc

SEQ ID NO: 117087 - RNA, 12 nt, Human coronavirus OC43 (HCoV-OC43)
cugcuauaacua

SEQ ID NO: 117088 - RNA, 22 nt, Human coronavirus OC43 (HCoV-OC43)
cuggaaguuuuuggaguuucaa

SEQ ID NO: 117089 - RNA, 17 nt, Human coronavirus OC43 (HCoV-OC43)
cugaagggaaguguacu

SEQ ID NO: 117090 - RNA, 13 nt, Human coronavirus OC43 (HCoV-OC43)
cucucuaucagaa

SEQ ID NO: 117091 - RNA, 12 nt, Human coronavirus OC43 (HCoV-OC43)
cuacauucacuc

SEQ ID NO: 117092 - RNA, 23 nt, Human coronavirus OC43 (HCoV-OC43)
cuacuauucuugguucucuggaa

SEQ ID NO: 117093 - RNA, 14 nt, Human coronavirus OC43 (HCoV-OC43)
cuaccucucagcaa

SEQ ID NO: 117094 - RNA, 19 nt, Human coronavirus OC43 (HCoV-OC43)
cuagucuuguucuggcaaa

SEQ ID NO: 117095 - RNA, 12 nt, Human coronavirus OC43 (HCoV-OC43)
cuaaaccucagc

SEQ ID NO: 117096 - RNA, 16 nt, Human coronavirus OC43 (HCoV-OC43)
gaaaucguucugguaa

SEQ ID NO: 117097 - RNA, 15 nt, Human coronavirus OC43 (HCoV-OC43)
gaauguuguacccua

SEQ ID NO: 117098 - RNA, 12 nt, Human coronavirus OC43 (HCoV-OC43)
gaauaguaucag

SEQ ID NO: 117099 - RNA, 21 nt, Human coronavirus OC43 (HCoV-OC43)
gaagagcucaacccaagcaaa

SEQ ID NO: 117100 - RNA, 14 nt, Human coronavirus OC43 (HCoV-OC43)
gauucauugcacug

SEQ ID NO: 117101 - RNA, 18 nt, Human coronavirus OC43 (HCoV-OC43)
gauuagaguuggccaaag

SEQ ID NO: 117102 - RNA, 20 nt, Human coronavirus OC43 (HCoV-OC43)
gcagaacucgcacccacagc

SEQ ID NO: 117103 - RNA, 14 nt, Human coronavirus OC43 (HCoV-OC43)
gcauacugccaaag

SEQ ID NO: 117104 - RNA, 18 nt, Human coronavirus OC43 (HCoV-OC43)
gccauuuguuuauugguu

SEQ ID NO: 117105 - RNA, 18 nt, Human coronavirus OC43 (HCoV-OC43)
gcuaagggguacugguac

SEQ ID NO: 117106 - RNA, 15 nt, Human coronavirus OC43 (HCoV-OC43)
gcuuccuagauuuau

SEQ ID NO: 117107 - RNA, 15 nt, Human coronavirus OC43 (HCoV-OC43)
guccuugauguggau

SEQ ID NO: 117108 - RNA, 23 nt, Human coronavirus OC43 (HCoV-OC43)
gguauuuuuacuaucugggaaca

SEQ ID NO: 117109 - RNA, 23 nt, Human coronavirus OC43 (HCoV-OC43)
ggguagaagagcucaacccaagc

SEQ ID NO: 117110 - RNA, 16 nt, Human coronavirus OC43 (HCoV-OC43)
guagaggaugcuguua

SEQ ID NO: 117111 - RNA, 18 nt, Human coronavirus OC43 (HCoV-OC43)
guuuuucuuuggaucaag

SEQ ID NO: 117112 - RNA, 12 nt, Human coronavirus OC43 (HCoV-OC43)
uacccauuuuca

SEQ ID NO: 117113 - RNA, 20 nt, Human coronavirus OC43 (HCoV-OC43)
uacaccagcaccaguuuaua

SEQ ID NO: 117114 - RNA, 23 nt, Human coronavirus OC43 (HCoV-OC43)
uaaugguuauuacccuacuucag

SEQ ID NO: 117115 - RNA, 19 nt, Human coronavirus OC43 (HCoV-OC43)
uaauguauaguguuggaga

SEQ ID NO: 117116 - RNA, 11 nt, Human coronavirus OC43 (HCoV-OC43)
uaauacuguag

SEQ ID NO: 117117 - RNA, 15 nt, Human coronavirus OC43 (HCoV-OC43)
uaauagagguaggca

SEQ ID NO: 117118 - RNA, 16 nt, Human coronavirus OC43 (HCoV-OC43)
uauaaguacugauacu

SEQ ID NO: 117119 - RNA, 20 nt, Human coronavirus OC43 (HCoV-OC43)
uaguagagcguccucuggaa

SEQ ID NO: 117120 - RNA, 23 nt, Human coronavirus OC43 (HCoV-OC43)
uaggcaguuuuaugaguuuuaca

SEQ ID NO: 117121 - RNA, 18 nt, Human coronavirus OC43 (HCoV-OC43)
uagcauuuguuaaaguuc

SEQ ID NO: 117122 - RNA, 19 nt, Human coronavirus OC43 (HCoV-OC43)
uaucuugcagacacugugu

SEQ ID NO: 117123 - RNA, 16 nt, Human coronavirus OC43 (HCoV-OC43)
uaucagguuguuuauu

SEQ ID NO: 117124 - RNA, 22 nt, Human coronavirus OC43 (HCoV-OC43)
ucaaaaauaccaagguuauuaa

SEQ ID NO: 117125 - RNA, 19 nt, Human coronavirus OC43 (HCoV-OC43)
uauucuugguucucuggaa

SEQ ID NO: 117126 - RNA, 16 nt, Human coronavirus OC43 (HCoV-OC43)
ucaacuuugcgguaug

SEQ ID NO: 117127 - RNA, 21 nt, Human coronavirus OC43 (HCoV-OC43)
ucaacccaagcaaacugcuac

SEQ ID NO: 117128 - RNA, 13 nt, Human coronavirus OC43 (HCoV-OC43)
uuuauaucuggac

SEQ ID NO: 117129 - RNA, 16 nt, Human coronavirus OC43 (HCoV-OC43)
uuuagauguuaaaggu

SEQ ID NO: 117130 - RNA, 13 nt, Human coronavirus OC43 (HCoV-OC43)
uuuaaaguguacu

SEQ ID NO: 117131 - RNA, 21 nt, Human coronavirus OC43 (HCoV-OC43)
uuguucuggcaaaacuuggca

SEQ ID NO: 117132 - RNA, 21 nt, Human coronavirus OC43 (HCoV-OC43)
uguauuuaaauacuacguugu

SEQ ID NO: 117133 - RNA, 22 nt, Human coronavirus OC43 (HCoV-OC43)
uggcugucgcuuaugcagacaa

SEQ ID NO: 117134 - RNA, 23 nt, Human coronavirus OC43 (HCoV-OC43)
uggggugaugguuuucagauuaa

SEQ ID NO: 117135 - RNA, 21 nt, Human coronavirus OC43 (HCoV-OC43)
uggcaacuuuuaaauugugua

SEQ ID NO: 117136 - RNA, 22 nt, Human coronavirus OC43 (HCoV-OC43)
uggauuguaaaauacaaacagc

SEQ ID NO: 117137 - RNA, 12 nt, Human coronavirus OC43 (HCoV-OC43)
ugcuacauucac

SEQ ID NO: 117138 - RNA, 15 nt, Human coronavirus OC43 (HCoV-OC43)
uuaguaaaugaauga

SEQ ID NO: 117139 - RNA, 20 nt, Human coronavirus OC43 (HCoV-OC43)
uuacuaugcuggacauacag

SEQ ID NO: 117140 - RNA, 15 nt, Human coronavirus OC43 (HCoV-OC43)
uuaaaguguacuuca

SEQ ID NO: 117141 - RNA, 16 nt, Human coronavirus OC43 (HCoV-OC43)
uuaaaguguacuucag

SEQ ID NO: 117142 - RNA, 16 nt, Human coronavirus OC43 (HCoV-OC43)
uuacaaugauguaaaa

SEQ ID NO: 117143 - RNA, 15 nt, Human coronavirus OC43 (HCoV-OC43)
uguuacuaaugguuu

SEQ ID NO: 117144 - RNA, 19 nt, Human coronavirus OC43 (HCoV-OC43)
ugaguuuguagaaggacaa

SEQ ID NO: 117145 - RNA, 13 nt, Human coronavirus OC43 (HCoV-OC43)
ugaguuuuacaau

SEQ ID NO: 117146 - RNA, 16 nt, Human coronavirus OC43 (HCoV-OC43)
ucugguaaaauaucau

SEQ ID NO: 117147 - RNA, 22 nt, Human coronavirus OC43 (HCoV-OC43)
ucuggcaaaacuuggcaaggau

SEQ ID NO: 117148 - RNA, 21 nt, Human coronavirus OC43 (HCoV-OC43)
ugaauaagccccgccagaaga

SEQ ID NO: 117149 - RNA, 19 nt, Human coronavirus OC43 (HCoV-OC43)
ucugauuuuauuaauggua

SEQ ID NO: 117150 - RNA, 13 nt, Human coronavirus OC43 (HCoV-OC43)
ucauugcacugau

SEQ ID NO: 117151 - RNA, 18 nt, Human coronavirus OC43 (HCoV-OC43)
ucauauugcaauuuggau

SEQ ID NO: 117152 - RNA, 14 nt, Human coronavirus OC43 (HCoV-OC43)
uccccauucuugca

SEQ ID NO: 117153 - RNA, 22 nt, Human coronavirus OC43 (HCoV-OC43)
cauuuguuuauugguuacaaua

SEQ ID NO: 117154 - RNA, 21 nt, Human coronavirus OC43 (HCoV-OC43)
ccacaguuccccauucuugca

SEQ ID NO: 117155 - RNA, 23 nt, Human coronavirus OC43 (HCoV-OC43)
ccauuuuuaggaguuuucacuuu

SEQ ID NO: 117156 - RNA, 16 nt, Human coronavirus OC43 (HCoV-OC43)
cccaagcaaacugcua

SEQ ID NO: 117157 - RNA, 22 nt, Human coronavirus OC43 (HCoV-OC43)
cccagaaggauguuuaugaauu

SEQ ID NO: 117158 - RNA, 23 nt, Human coronavirus OC43 (HCoV-OC43)
caguaguagagcguccucuggaa

SEQ ID NO: 117159 - RNA, 22 nt, Human coronavirus OC43 (HCoV-OC43)
caggguuuuguguuaaauuaua

SEQ ID NO: 117160 - RNA, 16 nt, Human coronavirus OC43 (HCoV-OC43)
cagacacuguguggua

SEQ ID NO: 117161 - RNA, 17 nt, Human coronavirus OC43 (HCoV-OC43)
cagacacugugugguau

SEQ ID NO: 117162 - RNA, 15 nt, Human coronavirus OC43 (HCoV-OC43)
auuuuggaguaauaa

SEQ ID NO: 117163 - RNA, 17 nt, Human coronavirus OC43 (HCoV-OC43)
auuuuggugguggagaa

SEQ ID NO: 117164 - RNA, 13 nt, Human coronavirus OC43 (HCoV-OC43)
auuuugugaauag

SEQ ID NO: 117165 - RNA, 13 nt, Human coronavirus OC43 (HCoV-OC43)
auuuuuacuaucu

SEQ ID NO: 117166 - RNA, 23 nt, Human coronavirus OC43 (HCoV-OC43)
caaccagcgucaacugcugccac

SEQ ID NO: 117167 - RNA, 13 nt, Human coronavirus OC43 (HCoV-OC43)
caaccaucaggag

SEQ ID NO: 117168 - RNA, 20 nt, Human coronavirus OC43 (HCoV-OC43)
caauaguuguaguggcauuu

SEQ ID NO: 117169 - RNA, 20 nt, Human coronavirus OC43 (HCoV-OC43)
auguuguacccuacuauucu

SEQ ID NO: 117170 - RNA, 16 nt, Human coronavirus OC43 (HCoV-OC43)
auguuuguuuauguua

SEQ ID NO: 117171 - RNA, 23 nt, Human coronavirus OC43 (HCoV-OC43)
auucaacuuugcgguauguguaa

SEQ ID NO: 117172 - RNA, 20 nt, Human coronavirus OC43 (HCoV-OC43)
augauguaaaaccaccaguc

SEQ ID NO: 117173 - RNA, 17 nt, Human coronavirus OC43 (HCoV-OC43)
augcacuguucagcagu

SEQ ID NO: 117174 - RNA, 18 nt, Human coronavirus OC43 (HCoV-OC43)
aucuugcagacacugugu

SEQ ID NO: 117175 - RNA, 20 nt, Human coronavirus OC43 (HCoV-OC43)
augacguuuagguaauccaa

SEQ ID NO: 117176 - RNA, 12 nt, Human coronavirus OC43 (HCoV-OC43)
acuaucugggaa

SEQ ID NO: 117177 - RNA, 15 nt, Human coronavirus OC43 (HCoV-OC43)
acuucagauacuagu

SEQ ID NO: 117178 - RNA, 21 nt, Human coronavirus OC43 (HCoV-OC43)
acuauucuugguucucuggaa

SEQ ID NO: 117179 - RNA, 13 nt, Human coronavirus OC43 (HCoV-OC43)
acagcauucgcua

SEQ ID NO: 117180 - RNA, 15 nt, Human coronavirus OC43 (HCoV-OC43)
acaccagcaccaguu

SEQ ID NO: 117181 - RNA, 22 nt, Human coronavirus OC43 (HCoV-OC43)
aauuuuggugguggagaaaugu

SEQ ID NO: 117182 - RNA, 16 nt, Human coronavirus OC43 (HCoV-OC43)
auaaguacugauacug

SEQ ID NO: 117183 - RNA, 17 nt, Human coronavirus OC43 (HCoV-OC43)
aguuuagaaauguucaa

SEQ ID NO: 117184 - RNA, 16 nt, Human coronavirus OC43 (HCoV-OC43)
agucuuguucuggcaa

SEQ ID NO: 117185 - RNA, 13 nt, Human coronavirus OC43 (HCoV-OC43)
agcaaacugcuac

SEQ ID NO: 117186 - RNA, 14 nt, Human coronavirus OC43 (HCoV-OC43)
agcauacugccaaa

SEQ ID NO: 117187 - RNA, 23 nt, Human coronavirus OC43 (HCoV-OC43)
aggaugccacuaaaccucagcaa

SEQ ID NO: 117188 - RNA, 14 nt, Human coronavirus OC43 (HCoV-OC43)
aggauauuguagag

SEQ ID NO: 117189 - RNA, 22 nt, Human coronavirus OC43 (HCoV-OC43)
agcuaagggguacugguacaga

SEQ ID NO: 117190 - RNA, 15 nt, Human coronavirus OC43 (HCoV-OC43)
guauacgcauugaau

SEQ ID NO: 117191 - RNA, 10 nt, Human coronavirus OC43 (HCoV-OC43)
guaagcaauc

SEQ ID NO: 117192 - RNA, 15 nt, Human coronavirus OC43 (HCoV-OC43)
uagcuguugacuuua

SEQ ID NO: 117193 - RNA, 21 nt, Human coronavirus OC43 (HCoV-OC43)
uagcuguugacuuuauuaccu

SEQ ID NO: 117194 - RNA, 16 nt, Human coronavirus OC43 (HCoV-OC43)
uagucuuguucuggca

SEQ ID NO: 117195 - RNA, 21 nt, Human coronavirus OC43 (HCoV-OC43)
uauacuacuuuuuauuacaau

SEQ ID NO: 117196 - RNA, 14 nt, Human coronavirus OC43 (HCoV-OC43)
uauaggagauuuaa

SEQ ID NO: 117197 - RNA, 19 nt, Human coronavirus OC43 (HCoV-OC43)
uagauuuugugcuacauuc

SEQ ID NO: 117198 - RNA, 17 nt, Human coronavirus OC43 (HCoV-OC43)
uagagcguccucuggaa

SEQ ID NO: 117199 - RNA, 16 nt, Human coronavirus OC43 (HCoV-OC43)
uagaucuuuuugcaau

SEQ ID NO: 117200 - RNA, 23 nt, Human coronavirus OC43 (HCoV-OC43)
uaauuuuacgccuuaucaugccu

SEQ ID NO: 117201 - RNA, 19 nt, Human coronavirus OC43 (HCoV-OC43)
uacaauaguuguaguggca

SEQ ID NO: 117202 - RNA, 16 nt, Human coronavirus OC43 (HCoV-OC43)
uacaaucauauugcaa

SEQ ID NO: 117203 - RNA, 17 nt, Human coronavirus OC43 (HCoV-OC43)
uacaaucauauugcaau

SEQ ID NO: 117204 - RNA, 13 nt, Human coronavirus OC43 (HCoV-OC43)
uacaaugauguaa

SEQ ID NO: 117205 - RNA, 16 nt, Human coronavirus OC43 (HCoV-OC43)
uaauuuccuuaccaac

SEQ ID NO: 117206 - RNA, 16 nt, Human coronavirus OC43 (HCoV-OC43)
uaacuauuuucaauug

SEQ ID NO: 117207 - RNA, 19 nt, Human coronavirus OC43 (HCoV-OC43)
uaacuauuuucaauugcgu

SEQ ID NO: 117208 - RNA, 13 nt, Human coronavirus OC43 (HCoV-OC43)
uaacuaucaauuu

SEQ ID NO: 117209 - RNA, 21 nt, Human coronavirus OC43 (HCoV-OC43)
uaaaacuacaccagcaccagu

SEQ ID NO: 117210 - RNA, 13 nt, Human coronavirus OC43 (HCoV-OC43)
uaaaaccaccagu

SEQ ID NO: 117211 - RNA, 19 nt, Human coronavirus OC43 (HCoV-OC43)
uaaacauguuuuugauacu

SEQ ID NO: 117212 - RNA, 17 nt, Human coronavirus OC43 (HCoV-OC43)
guuguacccuacuauuc

SEQ ID NO: 117213 - RNA, 14 nt, Human coronavirus OC43 (HCoV-OC43)
guuuuaaugucuca

SEQ ID NO: 117214 - RNA, 16 nt, Human coronavirus OC43 (HCoV-OC43)
guuuguagaaggacaa

SEQ ID NO: 117215 - RNA, 14 nt, Human coronavirus OC43 (HCoV-OC43)
guuuggguacuuau

SEQ ID NO: 117216 - RNA, 16 nt, Human coronavirus OC43 (HCoV-OC43)
guucuuuuaaaacagc

SEQ ID NO: 117217 - RNA, 11 nt, Human coronavirus OC43 (HCoV-OC43)
guuaauaucaa

SEQ ID NO: 117218 - RNA, 18 nt, Human coronavirus OC43 (HCoV-OC43)
guguuggagaaagugaaa

SEQ ID NO: 117219 - RNA, 16 nt, Human coronavirus OC43 (HCoV-OC43)
guuagaucuuuuugca

SEQ ID NO: 117220 - RNA, 20 nt, Human coronavirus OC43 (HCoV-OC43)
guguagaagaauugcaugac

SEQ ID NO: 117221 - RNA, 23 nt, Human coronavirus OC43 (HCoV-OC43)
gaaacaaacaacuugauguguau

SEQ ID NO: 117222 - RNA, 21 nt, Human coronavirus OC43 (HCoV-OC43)
gauacuguugauguuacuaau

SEQ ID NO: 117223 - RNA, 13 nt, Human coronavirus OC43 (HCoV-OC43)
gcaaacugcuacc

SEQ ID NO: 117224 - RNA, 16 nt, Human coronavirus OC43 (HCoV-OC43)
gauaaagguuguguug

SEQ ID NO: 117225 - RNA, 17 nt, Human coronavirus OC43 (HCoV-OC43)
cgccuuaucaugccuuu

SEQ ID NO: 117226 - RNA, 17 nt, Human coronavirus OC43 (HCoV-OC43)
cgcaauuagguuugaca

SEQ ID NO: 117227 - RNA, 19 nt, Human coronavirus OC43 (HCoV-OC43)
cuaagcauacugccaaaga

SEQ ID NO: 117228 - RNA, 20 nt, Human coronavirus OC43 (HCoV-OC43)
cuaagcauacugccaaagaa

SEQ ID NO: 117229 - RNA, 16 nt, Human coronavirus OC43 (HCoV-OC43)
cuaagggguacuggua

SEQ ID NO: 117230 - RNA, 21 nt, Human coronavirus OC43 (HCoV-OC43)
cuauucuugguucucuggaau

SEQ ID NO: 117231 - RNA, 15 nt, Human coronavirus OC43 (HCoV-OC43)
cuauugcaccaggag

SEQ ID NO: 117232 - RNA, 20 nt, Human coronavirus OC43 (HCoV-OC43)
cugacgagccccagaaggau

SEQ ID NO: 117233 - RNA, 20 nt, Human coronavirus OC43 (HCoV-OC43)
cucuggaaaucguucuggua

SEQ ID NO: 117234 - RNA, 22 nt, Human coronavirus OC43 (HCoV-OC43)
ugaagacuauaaaaguguugau

SEQ ID NO: 117235 - RNA, 23 nt, Human coronavirus OC43 (HCoV-OC43)
ugaugaagcuauuaaauuccuaa

SEQ ID NO: 117236 - RNA, 22 nt, Human coronavirus OC43 (HCoV-OC43)
ugaugauaugcauuggggugau

SEQ ID NO: 117237 - RNA, 15 nt, Human coronavirus OC43 (HCoV-OC43)
ugagcagacuauggu

SEQ ID NO: 117238 - RNA, 16 nt, Human coronavirus OC43 (HCoV-OC43)
ugagaagaaauaucuc

SEQ ID NO: 117239 - RNA, 18 nt, Human coronavirus OC43 (HCoV-OC43)
ugauauuuggaugcagaa

SEQ ID NO: 117240 - RNA, 21 nt, Human coronavirus OC43 (HCoV-OC43)
ucucuuguuagaucuuuuugc

SEQ ID NO: 117241 - RNA, 19 nt, Human coronavirus OC43 (HCoV-OC43)
ucucuaucagaauggaugu

SEQ ID NO: 117242 - RNA, 23 nt, Human coronavirus OC43 (HCoV-OC43)
uccaaacauuaugaguaguaaaa

SEQ ID NO: 117243 - RNA, 15 nt, Human coronavirus OC43 (HCoV-OC43)
uccuugauguggaug

SEQ ID NO: 117244 - RNA, 22 nt, Human coronavirus OC43 (HCoV-OC43)
uccuugauguggaugacguuua

SEQ ID NO: 117245 - RNA, 14 nt, Human coronavirus OC43 (HCoV-OC43)
uuauuaaugguauu

SEQ ID NO: 117246 - RNA, 23 nt, Human coronavirus OC43 (HCoV-OC43)
uuagaguuggccaaagugcagaa

SEQ ID NO: 117247 - RNA, 20 nt, Human coronavirus OC43 (HCoV-OC43)
uuauaucuggacugcugaug

SEQ ID NO: 117248 - RNA, 17 nt, Human coronavirus OC43 (HCoV-OC43)
uguuaaauuauaaaggu

SEQ ID NO: 117249 - RNA, 15 nt, Human coronavirus OC43 (HCoV-OC43)
uuccacuuacccauu

SEQ ID NO: 117250 - RNA, 15 nt, Human coronavirus OC43 (HCoV-OC43)
ugcagacacugugug

SEQ ID NO: 117251 - RNA, 22 nt, Human coronavirus OC43 (HCoV-OC43)
ugcagaacucgcacccacagcu

SEQ ID NO: 117252 - RNA, 23 nt, Human coronavirus OC43 (HCoV-OC43)
ugcagaacucgcacccacagcug

SEQ ID NO: 117253 - RNA, 13 nt, Human coronavirus OC43 (HCoV-OC43)
ugugcuacauuca

SEQ ID NO: 117254 - RNA, 23 nt, Human coronavirus OC43 (HCoV-OC43)
uggcacugaagggaaguguacua

SEQ ID NO: 117255 - RNA, 22 nt, Human coronavirus OC43 (HCoV-OC43)
ugauaaauauuuuggaguaaua

SEQ ID NO: 117256 - RNA, 23 nt, Human coronavirus OC43 (HCoV-OC43)
ugaucucuuguuagaucuuuuug

SEQ ID NO: 117257 - RNA, 13 nt, Human coronavirus OC43 (HCoV-OC43)
ugauucauugcac

SEQ ID NO: 117258 - RNA, 16 nt, Human coronavirus OC43 (HCoV-OC43)
ugcugaugaagcuauu

SEQ ID NO: 117259 - RNA, 20 nt, Human coronavirus OC43 (HCoV-OC43)
ugcuacauucacucuuuaug

SEQ ID NO: 117260 - RNA, 15 nt, Human coronavirus OC43 (HCoV-OC43)
uguuaaaacuuggaa

SEQ ID NO: 117261 - RNA, 14 nt, Human coronavirus OC43 (HCoV-OC43)
uguugauguuacua

SEQ ID NO: 117262 - RNA, 19 nt, Human coronavirus OC43 (HCoV-OC43)
uguuguacccuacuauucu

SEQ ID NO: 117263 - RNA, 21 nt, Human coronavirus OC43 (HCoV-OC43)
uuaaaacagccgauggcaacc

SEQ ID NO: 117264 - RNA, 19 nt, Human coronavirus OC43 (HCoV-OC43)
uuacuaugcuggacauaca

SEQ ID NO: 117265 - RNA, 17 nt, Human coronavirus OC43 (HCoV-OC43)
uuacaauuucaaauucu

SEQ ID NO: 117266 - RNA, 14 nt, Human coronavirus OC43 (HCoV-OC43)
uuaauggacauuug

SEQ ID NO: 117267 - RNA, 18 nt, Human coronavirus OC43 (HCoV-OC43)
uguaauaccuuaguacug

SEQ ID NO: 117268 - RNA, 13 nt, Human coronavirus OC43 (HCoV-OC43)
uggauuguaaaau

SEQ ID NO: 117269 - RNA, 16 nt, Human coronavirus OC43 (HCoV-OC43)
uggcaaaacuuggcaa

SEQ ID NO: 117270 - RNA, 15 nt, Human coronavirus OC43 (HCoV-OC43)
uugauucauugcacu

SEQ ID NO: 117271 - RNA, 20 nt, Human coronavirus OC43 (HCoV-OC43)
aacagccgauggcaaccagc

SEQ ID NO: 117272 - RNA, 14 nt, Human coronavirus OC43 (HCoV-OC43)
uuuacuccugguaa

SEQ ID NO: 117273 - RNA, 14 nt, Human coronavirus OC43 (HCoV-OC43)
uuuauuacaaucau

SEQ ID NO: 117274 - RNA, 22 nt, Human coronavirus OC43 (HCoV-OC43)
uuuauuacaaucauauugcaau

SEQ ID NO: 117275 - RNA, 15 nt, Human coronavirus OC43 (HCoV-OC43)
aagcauacugccaaa

SEQ ID NO: 117276 - RNA, 18 nt, Human coronavirus OC43 (HCoV-OC43)
aagcauacugccaaagaa

SEQ ID NO: 117277 - RNA, 12 nt, Human coronavirus OC43 (HCoV-OC43)
aaucuagcauuu

SEQ ID NO: 117278 - RNA, 19 nt, Human coronavirus OC43 (HCoV-OC43)
aauaguuguaguggcauuu

SEQ ID NO: 117279 - RNA, 16 nt, Human coronavirus OC43 (HCoV-OC43)
aauagagguaggcagu

SEQ ID NO: 117280 - RNA, 18 nt, Human coronavirus OC43 (HCoV-OC43)
aauagagguaggcaguuu

SEQ ID NO: 117281 - RNA, 15 nt, Human coronavirus OC43 (HCoV-OC43)
aacuugauguguaua

SEQ ID NO: 117282 - RNA, 17 nt, Human coronavirus OC43 (HCoV-OC43)
aagagcucaacccaagc

SEQ ID NO: 117283 - RNA, 10 nt, Human coronavirus OC43 (HCoV-OC43)
aagcaaucca

SEQ ID NO: 117284 - RNA, 16 nt, Human coronavirus OC43 (HCoV-OC43)
aagaugcauaguuuua

SEQ ID NO: 117285 - RNA, 15 nt, Human coronavirus OC43 (HCoV-OC43)
uccugguaagcaauc

SEQ ID NO: 117286 - RNA, 14 nt, Human coronavirus OC43 (HCoV-OC43)
uccaggaaauggau

SEQ ID NO: 117287 - RNA, 15 nt, Human coronavirus OC43 (HCoV-OC43)
ucucgaugaaggagu

SEQ ID NO: 117288 - RNA, 15 nt, Human coronavirus OC43 (HCoV-OC43)
ucugguaaaauauca

SEQ ID NO: 117289 - RNA, 21 nt, Human coronavirus OC43 (HCoV-OC43)
uauaucuggacugcugaugaa

SEQ ID NO: 117290 - RNA, 21 nt, Human coronavirus OC43 (HCoV-OC43)
uauagugaguucccugcuaua

SEQ ID NO: 117291 - RNA, 12 nt, Human coronavirus OC43 (HCoV-OC43)
uauaguugccau

SEQ ID NO: 117292 - RNA, 18 nt, Human coronavirus OC43 (HCoV-OC43)
uaucuggacugcugauga

SEQ ID NO: 117293 - RNA, 18 nt, Human coronavirus OC43 (HCoV-OC43)
uaugaguuuuacaaugau

SEQ ID NO: 117294 - RNA, 21 nt, Human coronavirus OC43 (HCoV-OC43)
uauuaacgguuuuaaugucuc

SEQ ID NO: 117295 - RNA, 18 nt, Human coronavirus OC43 (HCoV-OC43)
uauuagaacuggaaguuu

SEQ ID NO: 117296 - RNA, 23 nt, Human coronavirus OC43 (HCoV-OC43)
uauuauguuuuagaucgugugua

SEQ ID NO: 117297 - RNA, 19 nt, Human coronavirus OC43 (HCoV-OC43)
ucaacuuugcgguaugugu

SEQ ID NO: 117298 - RNA, 23 nt, Human coronavirus OC43 (HCoV-OC43)
ucaacuuugcgguauguguaaua

SEQ ID NO: 117299 - RNA, 20 nt, Human coronavirus OC43 (HCoV-OC43)
ucaagauuagaguuggccaa

SEQ ID NO: 117300 - RNA, 15 nt, Human coronavirus OC43 (HCoV-OC43)
uaaaguguacuucag

SEQ ID NO: 117301 - RNA, 22 nt, Human coronavirus OC43 (HCoV-OC43)
uaaauacuacguuguuucuuaa

SEQ ID NO: 117302 - RNA, 23 nt, Human coronavirus OC43 (HCoV-OC43)
uaaaacuacaccagcaccaguuu

SEQ ID NO: 117303 - RNA, 18 nt, Human coronavirus OC43 (HCoV-OC43)
uaacgguuuuaaugucuc

SEQ ID NO: 117304 - RNA, 13 nt, Human coronavirus OC43 (HCoV-OC43)
uaaauauuuugga

SEQ ID NO: 117305 - RNA, 15 nt, Human coronavirus OC43 (HCoV-OC43)
uaagcauacugccaa

SEQ ID NO: 117306 - RNA, 18 nt, Human coronavirus OC43 (HCoV-OC43)
uaagcauacugccaaaga

SEQ ID NO: 117307 - RNA, 21 nt, Human coronavirus OC43 (HCoV-OC43)
uacgcauugaauaauguguau

SEQ ID NO: 117308 - RNA, 15 nt, Human coronavirus OC43 (HCoV-OC43)
aacaacuugaugugu

SEQ ID NO: 117309 - RNA, 19 nt, Human coronavirus OC43 (HCoV-OC43)
aacaacuugauguguauag

SEQ ID NO: 117310 - RNA, 15 nt, Human coronavirus OC43 (HCoV-OC43)
uacugauacuguuga

SEQ ID NO: 117311 - RNA, 21 nt, Human coronavirus OC43 (HCoV-OC43)
uaauuauggccaauuggaaga

SEQ ID NO: 117312 - RNA, 15 nt, Human coronavirus OC43 (HCoV-OC43)
uaaguacugauacug

SEQ ID NO: 117313 - RNA, 21 nt, Human coronavirus OC43 (HCoV-OC43)
uaaguuaccacccaguaauua

SEQ ID NO: 117314 - RNA, 16 nt, Human coronavirus OC43 (HCoV-OC43)
uacaauaguuguagug

SEQ ID NO: 117315 - RNA, 19 nt, Human coronavirus OC43 (HCoV-OC43)
uacaaucauauugcaauuu

SEQ ID NO: 117316 - RNA, 22 nt, Human coronavirus OC43 (HCoV-OC43)
uacagccugaagacuauaaaag

SEQ ID NO: 117317 - RNA, 14 nt, Human coronavirus OC43 (HCoV-OC43)
guuaaaguucuuaa

SEQ ID NO: 117318 - RNA, 18 nt, Human coronavirus OC43 (HCoV-OC43)
guuauuacccuacuucag

SEQ ID NO: 117319 - RNA, 13 nt, Human coronavirus OC43 (HCoV-OC43)
guucccugcuaua

SEQ ID NO: 117320 - RNA, 21 nt, Human coronavirus OC43 (HCoV-OC43)
guucagcaguguuuugguaag

SEQ ID NO: 117321 - RNA, 17 nt, Human coronavirus OC43 (HCoV-OC43)
gucuuugauucauugca

SEQ ID NO: 117322 - RNA, 15 nt, Human coronavirus OC43 (HCoV-OC43)
guccccuucuauuua

SEQ ID NO: 117323 - RNA, 21 nt, Human coronavirus OC43 (HCoV-OC43)
guccccuucuauuuauguguu

SEQ ID NO: 117324 - RNA, 21 nt, Human coronavirus OC43 (HCoV-OC43)
ggguacugguacagacacaac

SEQ ID NO: 117325 - RNA, 14 nt, Human coronavirus OC43 (HCoV-OC43)
guaggauauuguag

SEQ ID NO: 117326 - RNA, 22 nt, Human coronavirus OC43 (HCoV-OC43)
guacugguacagacacaacaga

SEQ ID NO: 117327 - RNA, 15 nt, Human coronavirus OC43 (HCoV-OC43)
guagauuuugugcua

SEQ ID NO: 117328 - RNA, 21 nt, Human coronavirus OC43 (HCoV-OC43)
ggcacugaagggaaguguacu

SEQ ID NO: 117329 - RNA, 18 nt, Human coronavirus OC43 (HCoV-OC43)
gcugucgcuuaugcagac

SEQ ID NO: 117330 - RNA, 23 nt, Human coronavirus OC43 (HCoV-OC43)
gcaacuuuuaaauuguguauuca

SEQ ID NO: 117331 - RNA, 21 nt, Human coronavirus OC43 (HCoV-OC43)
gaagaauugcaugacgauuua

SEQ ID NO: 117332 - RNA, 17 nt, Human coronavirus OC43 (HCoV-OC43)
cuuugauucauugcacu

SEQ ID NO: 117333 - RNA, 15 nt, Human coronavirus OC43 (HCoV-OC43)
cuuaacuauuuucaa

SEQ ID NO: 117334 - RNA, 17 nt, Human coronavirus OC43 (HCoV-OC43)
gaaacaaacaacuugau

SEQ ID NO: 117335 - RNA, 20 nt, Human coronavirus OC43 (HCoV-OC43)
gauaaagguuguguugcuga

SEQ ID NO: 117336 - RNA, 15 nt, Human coronavirus OC43 (HCoV-OC43)
gauaaauauuuugga

SEQ ID NO: 117337 - RNA, 13 nt, Human coronavirus OC43 (HCoV-OC43)
gagaauccucaca

SEQ ID NO: 117338 - RNA, 17 nt, Human coronavirus OC43 (HCoV-OC43)
cugcuaccucucagcaa

SEQ ID NO: 117339 - RNA, 21 nt, Human coronavirus OC43 (HCoV-OC43)
cuggcaaaacuuggcaaggau

SEQ ID NO: 117340 - RNA, 18 nt, Human coronavirus OC43 (HCoV-OC43)
cugguuuucuuagcuguu

SEQ ID NO: 117341 - RNA, 14 nt, Human coronavirus OC43 (HCoV-OC43)
cuccugguaagcaa

SEQ ID NO: 117342 - RNA, 23 nt, Human coronavirus OC43 (HCoV-OC43)
ccuguucugugugauucugguaa

SEQ ID NO: 117343 - RNA, 19 nt, Human coronavirus OC43 (HCoV-OC43)
aaacagccgauggcaacca

SEQ ID NO: 117344 - RNA, 21 nt, Human coronavirus OC43 (HCoV-OC43)
cgucuuugauucauugcacug

SEQ ID NO: 117345 - RNA, 20 nt, Human coronavirus OC43 (HCoV-OC43)
cuaaggucaaaaauaccaag

SEQ ID NO: 117346 - RNA, 16 nt, Human coronavirus OC43 (HCoV-OC43)
cuaagcauacugccaa

SEQ ID NO: 117347 - RNA, 17 nt, Human coronavirus OC43 (HCoV-OC43)
cgguccuccuccuauaa

SEQ ID NO: 117348 - RNA, 13 nt, Human coronavirus OC43 (HCoV-OC43)
cguccucuggaaa

SEQ ID NO: 117349 - RNA, 15 nt, Human coronavirus OC43 (HCoV-OC43)
ccuaggaagaugcau

SEQ ID NO: 117350 - RNA, 23 nt, Human coronavirus OC43 (HCoV-OC43)
cccuacuucagguuccacauauc

SEQ ID NO: 117351 - RNA, 16 nt, Human coronavirus OC43 (HCoV-OC43)
ccagaaggauguuuau

SEQ ID NO: 117352 - RNA, 16 nt, Human coronavirus OC43 (HCoV-OC43)
ccaaagugcagaauuu

SEQ ID NO: 117353 - RNA, 20 nt, Human coronavirus OC43 (HCoV-OC43)
caggguuuuguguuaaauua

SEQ ID NO: 117354 - RNA, 17 nt, Human coronavirus OC43 (HCoV-OC43)
caguuuuaugaguuuua

SEQ ID NO: 117355 - RNA, 12 nt, Human coronavirus OC43 (HCoV-OC43)
aucuagcauuug

SEQ ID NO: 117356 - RNA, 17 nt, Human coronavirus OC43 (HCoV-OC43)
auccaggaaauggauug

SEQ ID NO: 117357 - RNA, 22 nt, Human coronavirus OC43 (HCoV-OC43)
auaugcauuggggugaugguuu

SEQ ID NO: 117358 - RNA, 15 nt, Human coronavirus OC43 (HCoV-OC43)
aucaguccgaccagu

SEQ ID NO: 117359 - RNA, 17 nt, Human coronavirus OC43 (HCoV-OC43)
auacuacguuguuucuu

SEQ ID NO: 117360 - RNA, 13 nt, Human coronavirus OC43 (HCoV-OC43)
auacugccaaaga

SEQ ID NO: 117361 - RNA, 23 nt, Human coronavirus OC43 (HCoV-OC43)
auacugccaaagaagucagacag

SEQ ID NO: 117362 - RNA, 18 nt, Human coronavirus OC43 (HCoV-OC43)
auacuguugauguuacua

SEQ ID NO: 117363 - RNA, 16 nt, Human coronavirus OC43 (HCoV-OC43)
auagagguaggcaguu

SEQ ID NO: 117364 - RNA, 16 nt, Human coronavirus OC43 (HCoV-OC43)
agucccagcuacugaa

SEQ ID NO: 117365 - RNA, 17 nt, Human coronavirus OC43 (HCoV-OC43)
agucguucagauuguaa

SEQ ID NO: 117366 - RNA, 21 nt, Human coronavirus OC43 (HCoV-OC43)
aguaacuaagcauacugccaa

SEQ ID NO: 117367 - RNA, 18 nt, Human coronavirus OC43 (HCoV-OC43)
aggagccccaauaaacaa

SEQ ID NO: 117368 - RNA, 16 nt, Human coronavirus OC43 (HCoV-OC43)
agggaaguguacuauu

SEQ ID NO: 117369 - RNA, 16 nt, Human coronavirus OC43 (HCoV-OC43)
agaucuuuuugcaauc

SEQ ID NO: 117370 - RNA, 19 nt, Human coronavirus OC43 (HCoV-OC43)
auucgcuaauacuguagag

SEQ ID NO: 117371 - RNA, 20 nt, Human coronavirus OC43 (HCoV-OC43)
auuuaacuaucaauuuccua

SEQ ID NO: 117372 - RNA, 21 nt, Human coronavirus OC43 (HCoV-OC43)
auuuaacuaucaauuuccuaa

SEQ ID NO: 117373 - RNA, 15 nt, Human coronavirus OC43 (HCoV-OC43)
auuuaaaguguacuu

SEQ ID NO: 117374 - RNA, 18 nt, Human coronavirus OC43 (HCoV-OC43)
auuuaaaguguacuucag

SEQ ID NO: 117375 - RNA, 14 nt, Human coronavirus OC43 (HCoV-OC43)
auuuaaauacuacg

SEQ ID NO: 117376 - RNA, 15 nt, Human coronavirus OC43 (HCoV-OC43)
auuuaaauacuacgu

SEQ ID NO: 117377 - RNA, 21 nt, Human coronavirus OC43 (HCoV-OC43)
auuugagaauccucacauccu

SEQ ID NO: 117378 - RNA, 14 nt, Human coronavirus OC43 (HCoV-OC43)
caaaacuuggcaag

SEQ ID NO: 117379 - RNA, 16 nt, Human coronavirus OC43 (HCoV-OC43)
auguaaaaccaccagu

SEQ ID NO: 117380 - RNA, 14 nt, Human coronavirus OC43 (HCoV-OC43)
auuaaugauaaaga

SEQ ID NO: 117381 - RNA, 15 nt, Human coronavirus OC43 (HCoV-OC43)
auguuuuugauacuu

SEQ ID NO: 117382 - RNA, 14 nt, Human coronavirus OC43 (HCoV-OC43)
caagcaaacugcua

SEQ ID NO: 117383 - RNA, 22 nt, Human coronavirus OC43 (HCoV-OC43)
caagauuagaguuggccaaagu

SEQ ID NO: 117384 - RNA, 16 nt, Human coronavirus OC43 (HCoV-OC43)
caaucauauugcaauu

SEQ ID NO: 117385 - RNA, 13 nt, Human coronavirus OC43 (HCoV-OC43)
caacugcugccac

SEQ ID NO: 117386 - RNA, 19 nt, Human coronavirus OC43 (HCoV-OC43)
caaccagcgucaacugcug

SEQ ID NO: 117387 - RNA, 21 nt, Human coronavirus OC43 (HCoV-OC43)
caacccagaaacaaacaacuu

SEQ ID NO: 117388 - RNA, 16 nt, Human coronavirus OC43 (HCoV-OC43)
cacucuuuaugguaaa

SEQ ID NO: 117389 - RNA, 19 nt, Human coronavirus OC43 (HCoV-OC43)
cacugaagggaaguguacu

SEQ ID NO: 117390 - RNA, 23 nt, Human coronavirus OC43 (HCoV-OC43)
cacugaagggaaguguacuauug

SEQ ID NO: 117391 - RNA, 15 nt, Human coronavirus OC43 (HCoV-OC43)
caaucuagcauuugu

SEQ ID NO: 117392 - RNA, 19 nt, Human coronavirus OC43 (HCoV-OC43)
caaucuagcauuuguuaaa

SEQ ID NO: 117393 - RNA, 20 nt, Human coronavirus OC43 (HCoV-OC43)
caccaguccuugauguggau

SEQ ID NO: 117394 - RNA, 20 nt, Human coronavirus OC43 (HCoV-OC43)
cacauccuaggaagaugcau

SEQ ID NO: 117395 - RNA, 18 nt, Human coronavirus OC43 (HCoV-OC43)
aacuacaccagcaccagu

SEQ ID NO: 117396 - RNA, 16 nt, Human coronavirus OC43 (HCoV-OC43)
aacauuaugaguagua

SEQ ID NO: 117397 - RNA, 15 nt, Human coronavirus OC43 (HCoV-OC43)
aaacugcuaccucuc

SEQ ID NO: 117398 - RNA, 22 nt, Human coronavirus OC43 (HCoV-OC43)
aauuuuucuuuggguauuauac

SEQ ID NO: 117399 - RNA, 12 nt, Human coronavirus OC43 (HCoV-OC43)
aagaaguuauug

SEQ ID NO: 117400 - RNA, 13 nt, Human coronavirus OC43 (HCoV-OC43)
aaguguacuucag

SEQ ID NO: 117401 - RNA, 19 nt, Human coronavirus OC43 (HCoV-OC43)
aaguguacuucagauacua

SEQ ID NO: 117402 - RNA, 16 nt, Human coronavirus OC43 (HCoV-OC43)
aagugcccaagggaag

SEQ ID NO: 117403 - RNA, 20 nt, Human coronavirus OC43 (HCoV-OC43)
accugagaagaaauaucucc

SEQ ID NO: 117404 - RNA, 19 nt, Human coronavirus OC43 (HCoV-OC43)
accauaguggccauuauua

SEQ ID NO: 117405 - RNA, 18 nt, Human coronavirus OC43 (HCoV-OC43)
acccaguaauuaguaaau

SEQ ID NO: 117406 - RNA, 18 nt, Human coronavirus OC43 (HCoV-OC43)
acacugugugguaugugg

SEQ ID NO: 117407 - RNA, 20 nt, Human coronavirus OC43 (HCoV-OC43)
acauccuaggaagaugcaua

SEQ ID NO: 117408 - RNA, 19 nt, Human coronavirus OC43 (HCoV-OC43)
acauuagucuuacuaugcu

SEQ ID NO: 117409 - RNA, 22 nt, Human coronavirus OC43 (HCoV-OC43)
agaauggaugucuugcugcuau

SEQ ID NO: 117410 - RNA, 18 nt, Human coronavirus OC43 (HCoV-OC43)
agaccugagaagaaauau

SEQ ID NO: 117411 - RNA, 15 nt, Human coronavirus OC43 (HCoV-OC43)
agaguuggccaaagu

SEQ ID NO: 117412 - RNA, 17 nt, Human coronavirus OC43 (HCoV-OC43)
agaagagcucaacccaa

SEQ ID NO: 117413 - RNA, 20 nt, Human coronavirus OC43 (HCoV-OC43)
agaagguuauagcagacuau

SEQ ID NO: 117414 - RNA, 19 nt, Human coronavirus OC43 (HCoV-OC43)
agaagaugcuuguuuuaaa

SEQ ID NO: 117415 - RNA, 16 nt, Human coronavirus OC43 (HCoV-OC43)
acuaaaccucagcaag

SEQ ID NO: 117416 - RNA, 18 nt, Human coronavirus OC43 (HCoV-OC43)
acgcauugaauaaugugu

SEQ ID NO: 117417 - RNA, 16 nt, Human coronavirus OC43 (HCoV-OC43)
acuaugcuggacauac

SEQ ID NO: 117418 - RNA, 23 nt, Human coronavirus OC43 (HCoV-OC43)
aaaaauaccaagguuauuaaaga

SEQ ID NO: 117419 - RNA, 22 nt, Human coronavirus OC43 (HCoV-OC43)
aaaacagccgauggcaaccagc

SEQ ID NO: 117420 - RNA, 16 nt, Human coronavirus OC43 (HCoV-OC43)
uauacuacuuuuuauu

SEQ ID NO: 117421 - RNA, 20 nt, Human coronavirus OC43 (HCoV-OC43)
uauuauguggauuguguauu

SEQ ID NO: 117422 - RNA, 20 nt, Human coronavirus OC43 (HCoV-OC43)
uauugagcagacuaugguuu

SEQ ID NO: 117423 - RNA, 13 nt, Human coronavirus OC43 (HCoV-OC43)
uaaauuguguauu

SEQ ID NO: 117424 - RNA, 18 nt, Human coronavirus OC43 (HCoV-OC43)
uauaguugccauuuguuu

SEQ ID NO: 117425 - RNA, 17 nt, Human coronavirus OC43 (HCoV-OC43)
auuuuauuaaugguauu

SEQ ID NO: 117426 - RNA, 17 nt, Human coronavirus OC43 (HCoV-OC43)
ugaagacuauaaaagug

SEQ ID NO: 117427 - RNA, 22 nt, Human coronavirus OC43 (HCoV-OC43)
ugaaggaguggauuguaaaaua

SEQ ID NO: 117428 - RNA, 14 nt, Human coronavirus OC43 (HCoV-OC43)
cuugcggaaguaau

SEQ ID NO: 117429 - RNA, 18 nt, Human coronavirus OC43 (HCoV-OC43)
cuugcugcuauaauagau

SEQ ID NO: 117430 - RNA, 16 nt, Human echovirus 1
aacccuaccgcaugaa

SEQ ID NO: 117431 - RNA, 13 nt, Human echovirus 1
caauuaguagauu

SEQ ID NO: 117432 - RNA, 17 nt, Human echovirus 1
gauuaaauuggcuuaac

SEQ ID NO: 117433 - RNA, 13 nt, Human echovirus 1
ggguaaauucucc

SEQ ID NO: 117434 - RNA, 19 nt, Human echovirus 1
gcaugaaccgaacuugaua

SEQ ID NO: 117435 - RNA, 17 nt, Human echovirus 1
acccuaccgcaugaacc

SEQ ID NO: 117436 - RNA, 23 nt, Human echovirus 1
uugauaaaagugcgguaggggua

SEQ ID NO: 117437 - RNA, 22 nt, Human echovirus 1
uugauaaaagugcgguaggggu

SEQ ID NO: 117438 - RNA, 17 nt, Human echovirus 1
ugaaccgaacuugauaa

SEQ ID NO: 117439 - RNA, 21 nt, Human echovirus 1
gauaaaagugcgguaggggua

SEQ ID NO: 117440 - RNA, 18 nt, Human echovirus 1
caugaaccgaacuugaua

SEQ ID NO: 117441 - RNA, 16 nt, Homo sapiens
uuuugguugcuuuaau

SEQ ID NO: 117442 - RNA, 16 nt, Homo sapiens
acauaaaucugugaac

SEQ ID NO: 117443 - RNA, 21 nt, Homo sapiens
auucaaaguugccuaaaucca

SEQ ID NO: 117444 - RNA, 13 nt, Homo sapiens
gauuguacuuugu

SEQ ID NO: 117445 - RNA, 22 nt, Homo sapiens
cuucucagaaggcaaaugacuu

SEQ ID NO: 117446 - RNA, 19 nt, Homo sapiens
uuaauaucaucaguauuga

SEQ ID NO: 117447 - RNA, 14 nt, Homo sapiens
uauuuuaugaucca

SEQ ID NO: 117448 - RNA, 19 nt, Homo sapiens
acaguuuugguugcuuuaa

SEQ ID NO: 117449 - RNA, 18 nt, Homo sapiens
ggacuguggugacuuugg

SEQ ID NO: 117450 - RNA, 14 nt, Homo sapiens
augugaugaucuac

SEQ ID NO: 117451 - RNA, 19 nt, Homo sapiens
aguugccuaaauccauuug

SEQ ID NO: 117452 - RNA, 14 nt, Homo sapiens
ucacugauuugaca

SEQ ID NO: 117453 - RNA, 14 nt, Homo sapiens
acaucucugcaauc

SEQ ID NO: 117454 - RNA, 16 nt, Homo sapiens
ugaacuaaacuuucac

SEQ ID NO: 117455 - RNA, 16 nt, Homo sapiens
uaacauguuaaaccau

SEQ ID NO: 117456 - RNA, 14 nt, Homo sapiens
gcuagacuggugac

SEQ ID NO: 117457 - RNA, 17 nt, Homo sapiens
aucucauuuaauccucu

SEQ ID NO: 117458 - RNA, 13 nt, Homo sapiens
uacuuugugcugg

SEQ ID NO: 117459 - RNA, 13 nt, Homo sapiens
auaaucacuuuuu

SEQ ID NO: 117460 - RNA, 21 nt, Homo sapiens
ggaagccaaaccucugugagc

SEQ ID NO: 117461 - RNA, 19 nt, Homo sapiens
gguugcuuuaauaucauca

SEQ ID NO: 117462 - RNA, 23 nt, Homo sapiens
guuugugcugguguaugugugaa

SEQ ID NO: 117463 - RNA, 16 nt, Homo sapiens
guuuugguugcuuuaa

SEQ ID NO: 117464 - RNA, 17 nt, Homo sapiens
uucagauaacuguuauu

SEQ ID NO: 117465 - RNA, 17 nt, Homo sapiens
aggauuuuaugcuuuaa

SEQ ID NO: 117466 - RNA, 23 nt, Homo sapiens
cuuucagauacuggauuguacuu

SEQ ID NO: 117467 - RNA, 23 nt, Homo sapiens
cugcaaucuucucagaaggcaaa

SEQ ID NO: 117468 - RNA, 17 nt, Homo sapiens
uauagaaccucuuuguc

SEQ ID NO: 117469 - RNA, 13 nt, Homo sapiens
uaaucaacugggc

SEQ ID NO: 117470 - RNA, 13 nt, Homo sapiens
aaccaccuuucag

SEQ ID NO: 117471 - RNA, 19 nt, Homo sapiens
uuguuugcauaggugaucu

SEQ ID NO: 117472 - RNA, 21 nt, Homo sapiens
uuuauuggcuuuucugaucca

SEQ ID NO: 117473 - RNA, 12 nt, Homo sapiens
uccugcaaugaa

SEQ ID NO: 117474 - RNA, 14 nt, Homo sapiens
aacuaaacuuucac

SEQ ID NO: 117475 - RNA, 22 nt, Homo sapiens
agaaauuaaguaucugacaucu

SEQ ID NO: 117476 - RNA, 23 nt, Homo sapiens
cuuaaaggaagguucugguguga

SEQ ID NO: 117477 - RNA, 22 nt, Homo sapiens
ucccuauuuuuuuucuguuaua

SEQ ID NO: 117478 - RNA, 23 nt, Homo sapiens
uguuuggaccaaaaaccaguauu

SEQ ID NO: 117479 - RNA, 16 nt, Homo sapiens
uguaaaucccauuauu

SEQ ID NO: 117480 - RNA, 18 nt, Homo sapiens
aaagccauguuuauuaca

SEQ ID NO: 117481 - RNA, 17 nt, Homo sapiens
aucugacaucucugcaa

SEQ ID NO: 117482 - RNA, 17 nt, Homo sapiens
auaauaaagaucaugua

SEQ ID NO: 117483 - RNA, 13 nt, Homo sapiens
cucagaaggcaaa

SEQ ID NO: 117484 - RNA, 23 nt, Homo sapiens
aaggaaacuggguuccugcaaug

SEQ ID NO: 117485 - RNA, 15 nt, Homo sapiens
ugcuauuucuauauu

SEQ ID NO: 117486 - RNA, 19 nt, Homo sapiens
cacucuccauuuaauaauu

SEQ ID NO: 117487 - RNA, 17 nt, Homo sapiens
uguggugacuuuggaua

SEQ ID NO: 117488 - RNA, 16 nt, Homo sapiens
aaccucuuugucuaca

SEQ ID NO: 117489 - RNA, 11 nt, Homo sapiens
uacaauuuugu

SEQ ID NO: 117490 - RNA, 15 nt, Homo sapiens
guuuuuaagccuuaa

SEQ ID NO: 117491 - RNA, 20 nt, Homo sapiens
aauagcuagacuggugacug

SEQ ID NO: 117492 - RNA, 11 nt, Homo sapiens
auuaaagccau

SEQ ID NO: 117493 - RNA, 17 nt, Homo sapiens
agucuguuuuaugacuu

SEQ ID NO: 117494 - RNA, 17 nt, Homo sapiens
aaaaguuuaauauuaaa

SEQ ID NO: 117495 - RNA, 20 nt, Homo sapiens
aaguuuaauauuaaagccau

SEQ ID NO: 117496 - RNA, 15 nt, Homo sapiens
uauuuauaaucacuu

SEQ ID NO: 117497 - RNA, 20 nt, Homo sapiens
gcaaucuucucagaaggcaa

SEQ ID NO: 117498 - RNA, 15 nt, Homo sapiens
uuauaaaucgcuuuu

SEQ ID NO: 117499 - RNA, 21 nt, Homo sapiens
ugucuugccuuuuucauuauu

SEQ ID NO: 117500 - RNA, 21 nt, Homo sapiens
ucacaguuuugguugcuuuaa

SEQ ID NO: 117501 - RNA, 17 nt, Homo sapiens
gacauagucuggcugua

SEQ ID NO: 117502 - RNA, 14 nt, Homo sapiens
uaaggaaacugggu

SEQ ID NO: 117503 - RNA, 23 nt, Homo sapiens
aagcauuuuauaaaucgcuuuug

SEQ ID NO: 117504 - RNA, 19 nt, Homo sapiens
ggauucuuaaaguugaauu

SEQ ID NO: 117505 - RNA, 17 nt, Homo sapiens
uuguauagaaccucuuu

SEQ ID NO: 117506 - RNA, 16 nt, Homo sapiens
cuggguuccugcaaug

SEQ ID NO: 117507 - RNA, 19 nt, Homo sapiens
uaagucuguuuuaugacuu

SEQ ID NO: 117508 - RNA, 19 nt, Homo sapiens
ucaauaaaaaauuaugaca

SEQ ID NO: 117509 - RNA, 22 nt, Homo sapiens
ugccaucaauaaaaaauuauga

SEQ ID NO: 117510 - RNA, 19 nt, Homo sapiens
uguauugugcgcuaaacuu

SEQ ID NO: 117511 - RNA, 14 nt, Homo sapiens
uaucaucaguauug

SEQ ID NO: 117512 - RNA, 20 nt, Homo sapiens
ucaauaaaaaauuaugacau

SEQ ID NO: 117513 - RNA, 21 nt, Homo sapiens
gaaugguccgugcuaaggacu

SEQ ID NO: 117514 - RNA, 22 nt, Homo sapiens
ugaguuggguguauugugcgcu

SEQ ID NO: 117515 - RNA, 22 nt, Homo sapiens
uauuaaagccauguuuauuaca

SEQ ID NO: 117516 - RNA, 18 nt, Homo sapiens
ugaagucucugaagugaa

SEQ ID NO: 117517 - RNA, 16 nt, Homo sapiens
ugucuacaccauuaug

SEQ ID NO: 117518 - RNA, 12 nt, Homo sapiens
auaacuguuauu

SEQ ID NO: 117519 - RNA, 17 nt, Homo sapiens
uucauaccuacauguau

SEQ ID NO: 117520 - RNA, 18 nt, Homo sapiens
aucgcuuuugauaaucaa

SEQ ID NO: 117521 - RNA, 18 nt, Homo sapiens
uucauuauuuuauuauga

SEQ ID NO: 117522 - RNA, 14 nt, Homo sapiens
cuuuucugauccag

SEQ ID NO: 117523 - RNA, 22 nt, Homo sapiens
gaagcauuuuauaaaucgcuuu

SEQ ID NO: 117524 - RNA, 17 nt, Homo sapiens
aagccugauuaaagaau

SEQ ID NO: 117525 - RNA, 14 nt, Homo sapiens
caaaguugccuaaa

SEQ ID NO: 117526 - RNA, 17 nt, Homo sapiens
caugggauaaaugccau

SEQ ID NO: 117527 - RNA, 22 nt, Homo sapiens
ugucuacaccauuaugugcgcu

SEQ ID NO: 117528 - RNA, 23 nt, Homo sapiens
aucacaguuuugguugcuuuaau

SEQ ID NO: 117529 - RNA, 16 nt, Homo sapiens
caaugaagucucugaa

SEQ ID NO: 117530 - RNA, 18 nt, Homo sapiens
caucaguauugaagcauu

SEQ ID NO: 117531 - RNA, 22 nt, Homo sapiens
agaucuaguucacucuccauuu

SEQ ID NO: 117532 - RNA, 22 nt, Homo sapiens
uuguuugagaaauuaaguaucu

SEQ ID NO: 117533 - RNA, 18 nt, Homo sapiens
aauucccuggccuuucau

SEQ ID NO: 117534 - RNA, 12 nt, Homo sapiens
uggccuuucaua

SEQ ID NO: 117535 - RNA, 13 nt, Homo sapiens
ucuggugugaacu

SEQ ID NO: 117536 - RNA, 23 nt, Homo sapiens
auuugaauuuuguguuagagauu

SEQ ID NO: 117537 - RNA, 11 nt, Homo sapiens
uuuaauuuugg

SEQ ID NO: 117538 - RNA, 23 nt, Homo sapiens
cucccuauuuuuuuucuguuaua

SEQ ID NO: 117539 - RNA, 21 nt, Homo sapiens
gucucugaagugaaacugcuu

SEQ ID NO: 117540 - RNA, 23 nt, Homo sapiens
uaaauagcuagacuggugacuga

SEQ ID NO: 117541 - RNA, 14 nt, Homo sapiens
aauauuaaagccau

SEQ ID NO: 117542 - RNA, 18 nt, Homo sapiens
aucacaguuuugguugcu

SEQ ID NO: 117543 - RNA, 17 nt, Homo sapiens
auuuuuuuucuguuaua

SEQ ID NO: 117544 - RNA, 11 nt, Homo sapiens
caucucugcaa

SEQ ID NO: 117545 - RNA, 16 nt, Homo sapiens
aaaccaguauuguaca

SEQ ID NO: 117546 - RNA, 17 nt, Homo sapiens
uguuaaaccaugggaua

SEQ ID NO: 117547 - RNA, 24 nt, Homo sapiens
ggugaucucauuuaauccucucaa

SEQ ID NO: 117548 - RNA, 16 nt, Homo sapiens
uucacugauuugacau

SEQ ID NO: 117549 - RNA, 23 nt, Homo sapiens
agccugcacggugaauggcuuug

SEQ ID NO: 117550 - RNA, 16 nt, Homo sapiens
ugaagucagaucugcc

SEQ ID NO: 117551 - RNA, 19 nt, Homo sapiens
cuuucagauaacuguuauu

SEQ ID NO: 117552 - RNA, 22 nt, Homo sapiens
aauaaauucccuggccuuucau

SEQ ID NO: 117553 - RNA, 21 nt, Homo sapiens
uucuuaaauaauaaagaucau

SEQ ID NO: 117554 - RNA, 22 nt, Homo sapiens
augauuucuaugcugaguuugu

SEQ ID NO: 117555 - RNA, 22 nt, Homo sapiens
guaugugugaagugagugaguu

SEQ ID NO: 117556 - RNA, 19 nt, Homo sapiens
uguuuccuagcacacacuu

SEQ ID NO: 117557 - RNA, 22 nt, Homo sapiens
cacaccccagacgaugucuuca

SEQ ID NO: 117558 - RNA, 16 nt, Homo sapiens
aacagcuggugcccug

SEQ ID NO: 117559 - RNA, 13 nt, Homo sapiens
caaucuucucaga

SEQ ID NO: 117560 - RNA, 15 nt, Homo sapiens
agccugcacggugaa

SEQ ID NO: 117561 - RNA, 18 nt, Homo sapiens
agguuuuuaagccuuaaa

SEQ ID NO: 117562 - RNA, 14 nt, Homo sapiens
auuuuaugauccag

SEQ ID NO: 117563 - RNA, 20 nt, Homo sapiens
ccauaaccccggaagccaaa

SEQ ID NO: 117564 - RNA, 15 nt, Homo sapiens
uguacaaaguauuaa

SEQ ID NO: 117565 - RNA, 15 nt, Homo sapiens
ucucuuucguuacag

SEQ ID NO: 117566 - RNA, 22 nt, Homo sapiens
auuaaggauuuuaugcuuuaaa

SEQ ID NO: 117567 - RNA, 19 nt, Homo sapiens
agguucuggugugaacuaa

SEQ ID NO: 117568 - RNA, 17 nt, Homo sapiens
auuuauaaucacuuuuu

SEQ ID NO: 117569 - RNA, 17 nt, Homo sapiens
acauaaggaaacugggu

SEQ ID NO: 117570 - RNA, 21 nt, Homo sapiens
uucuaugcugaguuugugcug

SEQ ID NO: 117571 - RNA, 22 nt, Homo sapiens
uaaaauggacuguggugacuuu

SEQ ID NO: 117572 - RNA, 19 nt, Homo sapiens
aucugacaucucugcaauc

SEQ ID NO: 117573 - RNA, 21 nt, Homo sapiens
guacuuuuuggcauaacauaa

SEQ ID NO: 117574 - RNA, 13 nt, Homo sapiens
aagugaaacugcu

SEQ ID NO: 117575 - RNA, 16 nt, Homo sapiens
cauuuaauccucucaa

SEQ ID NO: 117576 - RNA, 20 nt, Homo sapiens
augcuuuaaacauugguucu

SEQ ID NO: 117577 - RNA, 20 nt, Homo sapiens
uaugauccagcagauuauuc

SEQ ID NO: 117578 - RNA, 23 nt, Homo sapiens
uccucucaaccaccuuucagaua

SEQ ID NO: 117579 - RNA, 14 nt, Homo sapiens
guacaaaguauuaa

SEQ ID NO: 117580 - RNA, 17 nt, Homo sapiens
cugggcugaacacucca

SEQ ID NO: 117581 - RNA, 23 nt, Homo sapiens
agauaacuguuauuuauaaucac

SEQ ID NO: 117582 - RNA, 16 nt, Homo sapiens
ugacaucucugcaauc

SEQ ID NO: 117583 - RNA, 15 nt, Homo sapiens
agauuagaauucugu

SEQ ID NO: 117584 - RNA, 21 nt, Homo sapiens
ugcaaucuucucagaaggcaa

SEQ ID NO: 117585 - RNA, 19 nt, Homo sapiens
cauaaccccggaagccaaa

SEQ ID NO: 117586 - RNA, 16 nt, Homo sapiens
cucaaccaccuuucag

SEQ ID NO: 117587 - RNA, 21 nt, Homo sapiens
gauacuggauuguacuuugug

SEQ ID NO: 117588 - RNA, 22 nt, Homo sapiens
cauuuaauaauuauaugcuauu

SEQ ID NO: 117589 - RNA, 19 nt, Homo sapiens
aguauaauuaacauguuaa

SEQ ID NO: 117590 - RNA, 14 nt, Homo sapiens
agcacacacuuuug

SEQ ID NO: 117591 - RNA, 23 nt, Homo sapiens
aucugaggaauucuguauagauu

SEQ ID NO: 117592 - RNA, 21 nt, Homo sapiens
gaccauaaccccggaagccaa

SEQ ID NO: 117593 - RNA, 22 nt, Homo sapiens
ugcauaggugaucucauuuaau

SEQ ID NO: 117594 - RNA, 18 nt, Homo sapiens
acuguuauuuauaaucac

SEQ ID NO: 117595 - RNA, 19 nt, Homo sapiens
uagaucuaguucacucucc

SEQ ID NO: 117596 - RNA, 21 nt, Homo sapiens
uagacuggugacugauucuuc

SEQ ID NO: 117597 - RNA, 11 nt, Homo sapiens
cggaagccaaa

SEQ ID NO: 117598 - RNA, 20 nt, Homo sapiens
uuaaggauuuuaugcuuuaa

SEQ ID NO: 117599 - RNA, 12 nt, Homo sapiens
aucugaggaauu

SEQ ID NO: 117600 - RNA, 14 nt, Homo sapiens
uaauaucaucagua

SEQ ID NO: 117601 - RNA, 14 nt, Homo sapiens
gugaauggcuuugu

SEQ ID NO: 117602 - RNA, 16 nt, Homo sapiens
auuauguaaaucccau

SEQ ID NO: 117603 - RNA, 15 nt, Homo sapiens
ucuuuaauuuuggaa

SEQ ID NO: 117604 - RNA, 17 nt, Homo sapiens
cacaccccagacgaugu

SEQ ID NO: 117605 - RNA, 15 nt, Homo sapiens
auuuuagcuacuaua

SEQ ID NO: 117606 - RNA, 23 nt, Homo sapiens
aaggaagguucuggugugaacua

SEQ ID NO: 117607 - RNA, 15 nt, Homo sapiens
ugaguuugugcuggu

SEQ ID NO: 117608 - RNA, 20 nt, Homo sapiens
cacauugguguuguacucaa

SEQ ID NO: 117609 - RNA, 13 nt, Homo sapiens
uuugguugcuuua

SEQ ID NO: 117610 - RNA, 21 nt, Homo sapiens
uggcauaacauaaaucuguga

SEQ ID NO: 117611 - RNA, 16 nt, Homo sapiens
cuuucagauacuggau

SEQ ID NO: 117612 - RNA, 20 nt, Homo sapiens
auuuuauuauguaaauccca

SEQ ID NO: 117613 - RNA, 19 nt, Homo sapiens
ggaagguucuggugugaac

SEQ ID NO: 117614 - RNA, 22 nt, Homo sapiens
uuuggaccaaaaaccaguauug

SEQ ID NO: 117615 - RNA, 16 nt, Homo sapiens
cuccaauuaaggauuu

SEQ ID NO: 117616 - RNA, 12 nt, Homo sapiens
ccggaagccaaa

SEQ ID NO: 117617 - RNA, 23 nt, Homo sapiens
ucagcaaaaauauuuuaugaucc

SEQ ID NO: 117618 - RNA, 17 nt, Homo sapiens
uauauaugugaugaucu

SEQ ID NO: 117619 - RNA, 20 nt, Homo sapiens
accccagacgaugucuucau

SEQ ID NO: 117620 - RNA, 18 nt, Homo sapiens
cuaaacuuucacacccca

SEQ ID NO: 117621 - RNA, 16 nt, Homo sapiens
uuguacuuugugcugg

SEQ ID NO: 117622 - RNA, 15 nt, Homo sapiens
uaaagaucauguaaa

SEQ ID NO: 117623 - RNA, 19 nt, Homo sapiens
aaccaugggauaaaugcca

SEQ ID NO: 117624 - RNA, 20 nt, Homo sapiens
ucacaguuuugguugcuuua

SEQ ID NO: 117625 - RNA, 18 nt, Homo sapiens
aguuuaauauuaaagcca

SEQ ID NO: 117626 - RNA, 14 nt, Homo sapiens
acauguuaaaccau

SEQ ID NO: 117627 - RNA, 15 nt, Homo sapiens
auuuaauccucucaa

SEQ ID NO: 117628 - RNA, 15 nt, Homo sapiens
uaauauuaaagccau

SEQ ID NO: 117629 - RNA, 13 nt, Homo sapiens
uaagaaugaaaua

SEQ ID NO: 117630 - RNA, 21 nt, Homo sapiens
uuuugguugcuuuaauaucau

SEQ ID NO: 117631 - RNA, 20 nt, Homo sapiens
uaaauucccuggccuuucau

SEQ ID NO: 117632 - RNA, 21 nt, Homo sapiens
cugaagucagaucugccuaag

SEQ ID NO: 117633 - RNA, 22 nt, Homo sapiens
agucucugaagugaaacugcuu

SEQ ID NO: 117634 - RNA, 22 nt, Homo sapiens
caauuaaggauuuuaugcuuua

SEQ ID NO: 117635 - RNA, 16 nt, Homo sapiens
uuaugacuucauuaau

SEQ ID NO: 117636 - RNA, 16 nt, Homo sapiens
aggaagccugauuaaa

SEQ ID NO: 117637 - RNA, 20 nt, Homo sapiens
uugagaaauuaaguaucuga

SEQ ID NO: 117638 - RNA, 17 nt, Homo sapiens
agauuagagaguguuga

SEQ ID NO: 117639 - RNA, 18 nt, Homo sapiens
aauggcuuuguauagaac

SEQ ID NO: 117640 - RNA, 22 nt, Homo sapiens
aacuguuauuuauaaucacuuu

SEQ ID NO: 117641 - RNA, 16 nt, Homo sapiens
ucucaaccaccuuuca

SEQ ID NO: 117642 - RNA, 15 nt, Homo sapiens
uguguaaauacaauu

SEQ ID NO: 117643 - RNA, 21 nt, Homo sapiens
auuugacauagucuggcugua

SEQ ID NO: 117644 - RNA, 21 nt, Homo sapiens
aagucuguuuuaugacuucau

SEQ ID NO: 117645 - RNA, 19 nt, Homo sapiens
cacaguuuugguugcuuua

SEQ ID NO: 117646 - RNA, 21 nt, Homo sapiens
accuuucagauaacuguuauu

SEQ ID NO: 117647 - RNA, 19 nt, Homo sapiens
ccaguuuuguuuggaccaa

SEQ ID NO: 117648 - RNA, 13 nt, Homo sapiens
caucucugcaauc

SEQ ID NO: 117649 - RNA, 13 nt, Homo sapiens
uuuaugcuuuaaa

SEQ ID NO: 117650 - RNA, 22 nt, Homo sapiens
aggaaacuggguuccugcaaug

SEQ ID NO: 117651 - RNA, 13 nt, Homo sapiens
ugcugggguuauc

SEQ ID NO: 117652 - RNA, 21 nt, Homo sapiens
gcaaucuucucagaaggcaaa

SEQ ID NO: 117653 - RNA, 21 nt, Homo sapiens
uucagauacuggauuguacuu

SEQ ID NO: 117654 - RNA, 17 nt, Homo sapiens
uauucacugauuugaca

SEQ ID NO: 117655 - RNA, 14 nt, Homo sapiens
auaaucaacugggc

SEQ ID NO: 117656 - RNA, 13 nt, Homo sapiens
uguuucuguacuu

SEQ ID NO: 117657 - RNA, 23 nt, Homo sapiens
gagcaucacaguuuugguugcuu

SEQ ID NO: 117658 - RNA, 14 nt, Homo sapiens
uacuauauauguga

SEQ ID NO: 117659 - RNA, 16 nt, Homo sapiens
agaaauuaaguaucug

SEQ ID NO: 117660 - RNA, 19 nt, Homo sapiens
aagccccacccugccucac

SEQ ID NO: 117661 - RNA, 11 nt, Homo sapiens
uuccugcaaug

SEQ ID NO: 117662 - RNA, 20 nt, Homo sapiens
uacagaagccccacccugcc

SEQ ID NO: 117663 - RNA, 23 nt, Homo sapiens
cauauauuuuuauauuuacuaaa

SEQ ID NO: 117664 - RNA, 21 nt, Homo sapiens
aaggaaacuggguuccugcaa

SEQ ID NO: 117665 - RNA, 14 nt, Homo sapiens
cuggguuccugcaa

SEQ ID NO: 117666 - RNA, 20 nt, Homo sapiens
uggcuuuucugauccaguuu

SEQ ID NO: 117667 - RNA, 15 nt, Homo sapiens
aauuuauuggcuuuu

SEQ ID NO: 117668 - RNA, 23 nt, Homo sapiens
uuuccacauaaggaaacuggguu

SEQ ID NO: 117669 - RNA, 22 nt, Homo sapiens
ucaucaguauugaagcauuuua

SEQ ID NO: 117670 - RNA, 23 nt, Homo sapiens
uuggcauaacauaaaucugugaa

SEQ ID NO: 117671 - RNA, 17 nt, Homo sapiens
ccuagcacacacuuuug

SEQ ID NO: 117672 - RNA, 15 nt, Homo sapiens
uggugacuuuggaua

SEQ ID NO: 117673 - RNA, 18 nt, Homo sapiens
ccuaaggacuucuuuaau

SEQ ID NO: 117674 - RNA, 15 nt, Homo sapiens
aacauguuaaaccau

SEQ ID NO: 117675 - RNA, 15 nt, Homo sapiens
auuuuaugcuuuaaa

SEQ ID NO: 117676 - RNA, 16 nt, Homo sapiens
uaauauuaaagccaug

SEQ ID NO: 117677 - RNA, 14 nt, Homo sapiens
ccucucaaccaccu

SEQ ID NO: 117678 - RNA, 22 nt, Homo sapiens
uaaacauugguucuuguauuaa

SEQ ID NO: 117679 - RNA, 20 nt, Homo sapiens
guuauuuauaaucacuuuuu

SEQ ID NO: 117680 - RNA, 13 nt, Homo sapiens
uuuuguuuggacc

SEQ ID NO: 117681 - RNA, 23 nt, Homo sapiens
ugcugaguuugugcugguguaug

SEQ ID NO: 117682 - RNA, 19 nt, Homo sapiens
cuauuuuuuuucuguuaua

SEQ ID NO: 117683 - RNA, 12 nt, Homo sapiens
accaccuuucag

SEQ ID NO: 117684 - RNA, 12 nt, Homo sapiens
aaggaaacuggg

SEQ ID NO: 117685 - RNA, 18 nt, Homo sapiens
uuggaauuuuccuccuuu

SEQ ID NO: 117686 - RNA, 21 nt, Homo sapiens
cacaguuuugguugcuuuaau

SEQ ID NO: 117687 - RNA, 20 nt, Homo sapiens
uccucucaaccaccuuucag

SEQ ID NO: 117688 - RNA, 17 nt, Homo sapiens
auuggcuuuucugaucc

SEQ ID NO: 117689 - RNA, 18 nt, Homo sapiens
ucuguacuuuuuggcaua

SEQ ID NO: 117690 - RNA, 17 nt, Homo sapiens
gaaauuugaauuuugug

SEQ ID NO: 117691 - RNA, 16 nt, Homo sapiens
acggugaauggcuuug

SEQ ID NO: 117692 - RNA, 22 nt, Homo sapiens
aaauacuguuugagguuuuuaa

SEQ ID NO: 117693 - RNA, 18 nt, Homo sapiens
uaauaucaucaguauuga

SEQ ID NO: 117694 - RNA, 12 nt, Homo sapiens
uuuagucuuguc

SEQ ID NO: 117695 - RNA, 16 nt, Homo sapiens
gauuuuaugcuuuaaa

SEQ ID NO: 117696 - RNA, 19 nt, Homo sapiens
auauuuacuaaaauggacu

SEQ ID NO: 117697 - RNA, 20 nt, Homo sapiens
aguauuguacaaaguauuaa

SEQ ID NO: 117698 - RNA, 15 nt, Homo sapiens
uaaaucccauuauuc

SEQ ID NO: 117699 - RNA, 15 nt, Homo sapiens
caguauuguacaaag

SEQ ID NO: 117700 - RNA, 24 nt, Homo sapiens
uccaauuaaggauuuuaugcuuua

SEQ ID NO: 117701 - RNA, 16 nt, Homo sapiens
gaucugccuaaggacu

SEQ ID NO: 117702 - RNA, 19 nt, Homo sapiens
ucacauugguguuguacuc

SEQ ID NO: 117703 - RNA, 20 nt, Homo sapiens
acaguuuugguugcuuuaau

SEQ ID NO: 117704 - RNA, 19 nt, Homo sapiens
aaacuggguuccugcaaug

SEQ ID NO: 117705 - RNA, 19 nt, Homo sapiens
ugugaacuaaacuuucaca

SEQ ID NO: 117706 - RNA, 17 nt, Homo sapiens
caaguuguuugagaaau

SEQ ID NO: 117707 - RNA, 20 nt, Homo sapiens
ugaagucagaucugccuaag

SEQ ID NO: 117708 - RNA, 20 nt, Homo sapiens
cauuaauaauaaauucccug

SEQ ID NO: 117709 - RNA, 13 nt, Homo sapiens
caucacaguuuug

SEQ ID NO: 117710 - RNA, 19 nt, Homo sapiens
uuaaggauuuuaugcuuua

SEQ ID NO: 117711 - RNA, 19 nt, Homo sapiens
ccauuuggaaaucuuuaaa

SEQ ID NO: 117712 - RNA, 12 nt, Homo sapiens
uuaagccuuaaa

SEQ ID NO: 117713 - RNA, 14 nt, Homo sapiens
ucuuaaaguugaau

SEQ ID NO: 117714 - RNA, 21 nt, Homo sapiens
uuccugcaaugaagucucuga

SEQ ID NO: 117715 - RNA, 22 nt, Homo sapiens
aauuauaucugaggaauucugu

SEQ ID NO: 117716 - RNA, 22 nt, Homo sapiens
agccccacccugccucacccac

SEQ ID NO: 117717 - RNA, 15 nt, Homo sapiens
gauuuuaugcuuuaa

SEQ ID NO: 117718 - RNA, 20 nt, Homo sapiens
uugauaaucaacugggcuga

SEQ ID NO: 117719 - RNA, 14 nt, Homo sapiens
cauaaaucugugaa

SEQ ID NO: 117720 - RNA, 23 nt, Homo sapiens
uauaauuaacauguuaaaccaug

SEQ ID NO: 117721 - RNA, 21 nt, Homo sapiens
ucucaaccaccuuucagauaa

SEQ ID NO: 117722 - RNA, 15 nt, Homo sapiens
uuagucuugucucag

SEQ ID NO: 117723 - RNA, 21 nt, Homo sapiens
ugauccaguuuuguuuggacc

SEQ ID NO: 117724 - RNA, 17 nt, Homo sapiens
aguucacucuccauuua

SEQ ID NO: 117725 - RNA, 14 nt, Homo sapiens
uguacuuuuuggca

SEQ ID NO: 117726 - RNA, 22 nt, Homo sapiens
gaccauaaccccggaagccaaa

SEQ ID NO: 117727 - RNA, 19 nt, Homo sapiens
aaacuuucacaccccagac

SEQ ID NO: 117728 - RNA, 18 nt, Homo sapiens
aacuggguuccugcaaug

SEQ ID NO: 117729 - RNA, 20 nt, Homo sapiens
uuguuuagucuugucucaga

SEQ ID NO: 117730 - RNA, 17 nt, Homo sapiens
caaaccucugugagcau

SEQ ID NO: 117731 - RNA, 20 nt, Homo sapiens
ugcugaguuugugcuggugu

SEQ ID NO: 117732 - RNA, 22 nt, Homo sapiens
uugaaacggaugauuucuaugc

SEQ ID NO: 117733 - RNA, 16 nt, Homo sapiens
cauguauuuguuugca

SEQ ID NO: 117734 - RNA, 19 nt, Homo sapiens
uaugcugaguuugugcugg

SEQ ID NO: 117735 - RNA, 14 nt, Homo sapiens
ucuucauaccuaca

SEQ ID NO: 117736 - RNA, 18 nt, Homo sapiens
aaggaaacuggguuccug

SEQ ID NO: 117737 - RNA, 13 nt, Homo sapiens
aaggaagguucug

SEQ ID NO: 117738 - RNA, 12 nt, Homo sapiens
uuugaauuuugu

SEQ ID NO: 117739 - RNA, 20 nt, Homo sapiens
caaucuucucagaaggcaaa

SEQ ID NO: 117740 - RNA, 20 nt, Homo sapiens
aguugaauuuauuggcuuuu

SEQ ID NO: 117741 - RNA, 13 nt, Homo sapiens
cugaacacuccaa

SEQ ID NO: 117742 - RNA, 15 nt, Homo sapiens
uuuagucuugucuca

SEQ ID NO: 117743 - RNA, 22 nt, Homo sapiens
auaaaucgcuuuugauaaucaa

SEQ ID NO: 117744 - RNA, 17 nt, Homo sapiens
uacaccauuaugugcgc

SEQ ID NO: 117745 - RNA, 18 nt, Homo sapiens
acaccauuaugugcgcug

SEQ ID NO: 117746 - RNA, 18 nt, Homo sapiens
ucagaaggcaaaugacuu

SEQ ID NO: 117747 - RNA, 20 nt, Homo sapiens
accccggaagccaaaccucu

SEQ ID NO: 117748 - RNA, 15 nt, Homo sapiens
agcaucacaguuuug

SEQ ID NO: 117749 - RNA, 23 nt, Homo sapiens
uggaccauaaccccggaagccaa

SEQ ID NO: 117750 - RNA, 19 nt, Homo sapiens
aaauucccuggccuuucau

SEQ ID NO: 117751 - RNA, 19 nt, Homo sapiens
aaggauuuuaugcuuuaaa

SEQ ID NO: 117752 - RNA, 14 nt, Homo sapiens
aauucuguauagau

SEQ ID NO: 117753 - RNA, 21 nt, Homo sapiens
aaacauugguucuuguauuaa

SEQ ID NO: 117754 - RNA, 22 nt, Homo sapiens
aaccucuuugucuacaccauua

SEQ ID NO: 117755 - RNA, 17 nt, Homo sapiens
aaguugccuaaauccau

SEQ ID NO: 117756 - RNA, 22 nt, Homo sapiens
ugaggaauucuguauagauuag

SEQ ID NO: 117757 - RNA, 16 nt, Homo sapiens
gaaggcaaaugacuuu

SEQ ID NO: 117758 - RNA, 16 nt, Homo sapiens
accaguauuguacaaa

SEQ ID NO: 117759 - RNA, 20 nt, Homo sapiens
ucaaaguugccuaaauccau

SEQ ID NO: 117760 - RNA, 13 nt, Homo sapiens
aguuggguguauu

SEQ ID NO: 117761 - RNA, 20 nt, Human enterovirus A
ucuggucgugaauaugacug

SEQ ID NO: 117762 - RNA, 14 nt, Human enterovirus A
uguuauaaccagaa

SEQ ID NO: 117763 - RNA, 15 nt, Human enterovirus A
uguuauaaccagaau

SEQ ID NO: 117764 - RNA, 17 nt, Human enterovirus A
gauauaccucaacccca

SEQ ID NO: 117765 - RNA, 17 nt, Human enterovirus A
agggaucuggucgugaa

SEQ ID NO: 117766 - RNA, 16 nt, Human enterovirus A
gaauaugacugguggg

SEQ ID NO: 117767 - RNA, 13 nt, Human enterovirus A
gugaauaugacug

SEQ ID NO: 117768 - RNA, 21 nt, Human enterovirus A
aaccccaccagggaucugguc

SEQ ID NO: 117769 - RNA, 16 nt, Human enterovirus A
aaccccaccagggauc

SEQ ID NO: 117770 - RNA, 13 nt, Human enterovirus A
agauauaccucaa

SEQ ID NO: 117771 - RNA, 16 nt, Human enterovirus A
uuuguuauaaccagaa

SEQ ID NO: 117772 - RNA, 17 nt, Human enterovirus A
gaucuggucgugaauau

SEQ ID NO: 117773 - RNA, 21 nt, Human enterovirus A
ucuggucgugaauaugacugg

SEQ ID NO: 117774 - RNA, 19 nt, Human enterovirus A
aaauuuguuauaaccagaa

SEQ ID NO: 117775 - RNA, 19 nt, Human enterovirus A
accucaaccccaccaggga

SEQ ID NO: 117776 - RNA, 12 nt, Human enterovirus A
acuggugggggu

SEQ ID NO: 117777 - RNA, 16 nt, Homo sapiens
guuuugguugcuuuaa

SEQ ID NO: 117778 - RNA, 12 nt, Homo sapiens
aucugaggaauu

SEQ ID NO: 117779 - RNA, 23 nt, Homo sapiens
cucccuauuuuuuuucuguuaua

SEQ ID NO: 117780 - RNA, 23 nt, Homo sapiens
ugcugaguuugugcugguguaug

SEQ ID NO: 117781 - RNA, 17 nt, Homo sapiens
aaaaguuuaauauuaaa

SEQ ID NO: 117782 - RNA, 22 nt, Homo sapiens
uuuggaccaaaaaccaguauug

SEQ ID NO: 117783 - RNA, 18 nt, Homo sapiens
aauucccuggccuuucau

SEQ ID NO: 117784 - RNA, 22 nt, Homo sapiens
ugucuacaccauuaugugcgcu

SEQ ID NO: 117785 - RNA, 13 nt, Homo sapiens
uuugguugcuuua

SEQ ID NO: 117786 - RNA, 19 nt, Homo sapiens
uuguuugcauaggugaucu

SEQ ID NO: 117787 - RNA, 16 nt, Homo sapiens
caaugaagucucugaa

SEQ ID NO: 117788 - RNA, 15 nt, Homo sapiens
auuuuaugcuuuaaa

SEQ ID NO: 117789 - RNA, 21 nt, Homo sapiens
uggcauaacauaaaucuguga

SEQ ID NO: 117790 - RNA, 14 nt, Homo sapiens
gcuagacuggugac

SEQ ID NO: 117791 - RNA, 13 nt, Homo sapiens
ugcugggguuauc

SEQ ID NO: 117792 - RNA, 14 nt, Homo sapiens
acaucucugcaauc

SEQ ID NO: 117793 - RNA, 16 nt, Homo sapiens
acauaaaucugugaac

SEQ ID NO: 117794 - RNA, 14 nt, Homo sapiens
augugaugaucuac

SEQ ID NO: 117795 - RNA, 18 nt, Homo sapiens
ggacuguggugacuuugg

SEQ ID NO: 117796 - RNA, 14 nt, Homo sapiens
ucacugauuugaca

SEQ ID NO: 117797 - RNA, 23 nt, Homo sapiens
uuggcauaacauaaaucugugaa

SEQ ID NO: 117798 - RNA, 17 nt, Homo sapiens
aggauuuuaugcuuuaa

SEQ ID NO: 117799 - RNA, 23 nt, Homo sapiens
aucugaggaauucuguauagauu

SEQ ID NO: 117800 - RNA, 21 nt, Homo sapiens
gaccauaaccccggaagccaa

SEQ ID NO: 117801 - RNA, 21 nt, Homo sapiens
uagacuggugacugauucuuc

SEQ ID NO: 117802 - RNA, 21 nt, Homo sapiens
gauacuggauuguacuuugug

SEQ ID NO: 117803 - RNA, 16 nt, Homo sapiens
auuauguaaaucccau

SEQ ID NO: 117804 - RNA, 19 nt, Homo sapiens
acaguuuugguugcuuuaa

SEQ ID NO: 117805 - RNA, 20 nt, Homo sapiens
uuaaggauuuuaugcuuuaa

SEQ ID NO: 117806 - RNA, 18 nt, Homo sapiens
ccuaaggacuucuuuaau

SEQ ID NO: 117807 - RNA, 14 nt, Homo sapiens
aacuaaacuuucac

SEQ ID NO: 117808 - RNA, 19 nt, Homo sapiens
uaugcugaguuugugcugg

SEQ ID NO: 117809 - RNA, 20 nt, Homo sapiens
guuauuuauaaucacuuuuu

SEQ ID NO: 117810 - RNA, 19 nt, Homo sapiens
uguauugugcgcuaaacuu

SEQ ID NO: 117811 - RNA, 16 nt, Homo sapiens
agaaauuaaguaucug

SEQ ID NO: 117812 - RNA, 16 nt, Homo sapiens
uaacauguuaaaccau

SEQ ID NO: 117813 - RNA, 23 nt, Homo sapiens
cauauauuuuuauauuuacuaaa

SEQ ID NO: 117814 - RNA, 15 nt, Homo sapiens
ucuuuaauuuuggaa

SEQ ID NO: 117815 - RNA, 16 nt, Homo sapiens
uguaaaucccauuauu

SEQ ID NO: 117816 - RNA, 14 nt, Homo sapiens
cuggguuccugcaa

SEQ ID NO: 117817 - RNA, 16 nt, Homo sapiens
uuguacuuugugcugg

SEQ ID NO: 117818 - RNA, 17 nt, Homo sapiens
uauagaaccucuuuguc

SEQ ID NO: 117819 - RNA, 16 nt, Homo sapiens
ugaacuaaacuuucac

SEQ ID NO: 117820 - RNA, 23 nt, Homo sapiens
cugcaaucuucucagaaggcaaa

SEQ ID NO: 117821 - RNA, 22 nt, Homo sapiens
aacuguuauuuauaaucacuuu

SEQ ID NO: 117822 - RNA, 17 nt, Homo sapiens
aguucacucuccauuua

SEQ ID NO: 117823 - RNA, 15 nt, Homo sapiens
uauuuauaaucacuu

SEQ ID NO: 117824 - RNA, 22 nt, Homo sapiens
ucaucaguauugaagcauuuua

SEQ ID NO: 117825 - RNA, 13 nt, Homo sapiens
gauuguacuuugu

SEQ ID NO: 117826 - RNA, 22 nt, Homo sapiens
guaugugugaagugagugaguu

SEQ ID NO: 117827 - RNA, 18 nt, Homo sapiens
aauggcuuuguauagaac

SEQ ID NO: 117828 - RNA, 20 nt, Homo sapiens
aaguuuaauauuaaagccau

SEQ ID NO: 117829 - RNA, 21 nt, Homo sapiens
ggaagccaaaccucugugagc

SEQ ID NO: 117830 - RNA, 16 nt, Homo sapiens
uuuugguugcuuuaau

SEQ ID NO: 117831 - RNA, 17 nt, Homo sapiens
aucucauuuaauccucu

SEQ ID NO: 117832 - RNA, 19 nt, Homo sapiens
aaacuggguuccugcaaug

SEQ ID NO: 117833 - RNA, 17 nt, Homo sapiens
ccuagcacacacuuuug

SEQ ID NO: 117834 - RNA, 15 nt, Homo sapiens
uggugacuuuggaua

SEQ ID NO: 117835 - RNA, 13 nt, Homo sapiens
caucacaguuuug

SEQ ID NO: 117836 - RNA, 14 nt, Homo sapiens
uaucaucaguauug

SEQ ID NO: 117837 - RNA, 20 nt, Homo sapiens
uugagaaauuaaguaucuga

SEQ ID NO: 117838 - RNA, 15 nt, Homo sapiens
uaauauuaaagccau

SEQ ID NO: 117839 - RNA, 22 nt, Homo sapiens
ugaguuggguguauugugcgcu

SEQ ID NO: 117840 - RNA, 21 nt, Homo sapiens
gaaugguccgugcuaaggacu

SEQ ID NO: 117841 - RNA, 12 nt, Homo sapiens
ccggaagccaaa

SEQ ID NO: 117842 - RNA, 20 nt, Homo sapiens
accccagacgaugucuucau

SEQ ID NO: 117843 - RNA, 20 nt, Homo sapiens
ucacaguuuugguugcuuua

SEQ ID NO: 117844 - RNA, 21 nt, Homo sapiens
aagucuguuuuaugacuucau

SEQ ID NO: 117845 - RNA, 17 nt, Homo sapiens
uuguauagaaccucuuu

SEQ ID NO: 117846 - RNA, 23 nt, Homo sapiens
uccucucaaccaccuuucagaua

SEQ ID NO: 117847 - RNA, 16 nt, Homo sapiens
uuaugacuucauuaau

SEQ ID NO: 117848 - RNA, 23 nt, Homo sapiens
ucagcaaaaauauuuuaugaucc

SEQ ID NO: 117849 - RNA, 14 nt, Homo sapiens
aauucuguauagau

SEQ ID NO: 117850 - RNA, 13 nt, Homo sapiens
aguuggguguauu

SEQ ID NO: 117851 - RNA, 21 nt, Homo sapiens
cugaagucagaucugccuaag

SEQ ID NO: 117852 - RNA, 19 nt, Homo sapiens
aaccaugggauaaaugcca

SEQ ID NO: 117853 - RNA, 11 nt, Homo sapiens
uacaauuuugu

SEQ ID NO: 117854 - RNA, 20 nt, Homo sapiens
auuuuauuauguaaauccca

SEQ ID NO: 117855 - RNA, 18 nt, Homo sapiens
cuaaacuuucacacccca

SEQ ID NO: 117856 - RNA, 14 nt, Homo sapiens
auaaucaacugggc

SEQ ID NO: 117857 - RNA, 19 nt, Homo sapiens
aagccccacccugccucac

SEQ ID NO: 117858 - RNA, 14 nt, Homo sapiens
uaauaucaucagua

SEQ ID NO: 117859 - RNA, 19 nt, Homo sapiens
cacucuccauuuaauaauu

SEQ ID NO: 117860 - RNA, 18 nt, Homo sapiens
acaccauuaugugcgcug

SEQ ID NO: 117861 - RNA, 22 nt, Homo sapiens
caauuaaggauuuuaugcuuua

SEQ ID NO: 117862 - RNA, 17 nt, Homo sapiens
uguggugacuuuggaua

SEQ ID NO: 117863 - RNA, 19 nt, Homo sapiens
ccauuuggaaaucuuuaaa

SEQ ID NO: 117864 - RNA, 17 nt, Homo sapiens
uucagauaacuguuauu

SEQ ID NO: 117865 - RNA, 12 nt, Homo sapiens
uuaagccuuaaa

SEQ ID NO: 117866 - RNA, 18 nt, Homo sapiens
ugaagucucugaagugaa

SEQ ID NO: 117867 - RNA, 19 nt, Homo sapiens
aguugccuaaauccauuug

SEQ ID NO: 117868 - RNA, 23 nt, Homo sapiens
aaggaagguucuggugugaacua

SEQ ID NO: 117869 - RNA, 13 nt, Homo sapiens
uuuaugcuuuaaa

SEQ ID NO: 117870 - RNA, 13 nt, Homo sapiens
uguuucuguacuu

SEQ ID NO: 117871 - RNA, 13 nt, Homo sapiens
auaaucacuuuuu

SEQ ID NO: 117872 - RNA, 22 nt, Homo sapiens
uauuaaagccauguuuauuaca

SEQ ID NO: 117873 - RNA, 17 nt, Homo sapiens
auaauaaagaucaugua

SEQ ID NO: 117874 - RNA, 14 nt, Homo sapiens
gugaauggcuuugu

SEQ ID NO: 117875 - RNA, 18 nt, Homo sapiens
agguuuuuaagccuuaaa

SEQ ID NO: 117876 - RNA, 18 nt, Homo sapiens
ucagaaggcaaaugacuu

SEQ ID NO: 117877 - RNA, 18 nt, Homo sapiens
aaggaaacuggguuccug

SEQ ID NO: 117878 - RNA, 14 nt, Homo sapiens
aauauuaaagccau

SEQ ID NO: 117879 - RNA, 20 nt, Homo sapiens
aguauuguacaaaguauuaa

SEQ ID NO: 117880 - RNA, 14 nt, Homo sapiens
ucuucauaccuaca

SEQ ID NO: 117881 - RNA, 20 nt, Homo sapiens
accccggaagccaaaccucu

SEQ ID NO: 117882 - RNA, 22 nt, Homo sapiens
agaaauuaaguaucugacaucu

SEQ ID NO: 117883 - RNA, 22 nt, Homo sapiens
aggaaacuggguuccugcaaug

SEQ ID NO: 117884 - RNA, 17 nt, Homo sapiens
aagccugauuaaagaau

SEQ ID NO: 117885 - RNA, 22 nt, Homo sapiens
uuguuugagaaauuaaguaucu

SEQ ID NO: 117886 - RNA, 13 nt, Homo sapiens
cugaacacuccaa

SEQ ID NO: 117887 - RNA, 19 nt, Homo sapiens
aucugacaucucugcaauc

SEQ ID NO: 117888 - RNA, 14 nt, Homo sapiens
uacuauauauguga

SEQ ID NO: 117889 - RNA, 20 nt, Homo sapiens
augcuuuaaacauugguucu

SEQ ID NO: 117890 - RNA, 18 nt, Homo sapiens
aucgcuuuugauaaucaa

SEQ ID NO: 117891 - RNA, 12 nt, Homo sapiens
uccugcaaugaa

SEQ ID NO: 117892 - RNA, 21 nt, Homo sapiens
uucuaugcugaguuugugcug

SEQ ID NO: 117893 - RNA, 19 nt, Homo sapiens
ugugaacuaaacuuucaca

SEQ ID NO: 117894 - RNA, 20 nt, Homo sapiens
uuguuuagucuugucucaga

SEQ ID NO: 117895 - RNA, 23 nt, Homo sapiens
agccugcacggugaauggcuuug

SEQ ID NO: 117896 - RNA, 17 nt, Homo sapiens
caaguuguuugagaaau

SEQ ID NO: 117897 - RNA, 14 nt, Homo sapiens
ucuuaaaguugaau

SEQ ID NO: 117898 - RNA, 20 nt, Homo sapiens
ccauaaccccggaagccaaa

SEQ ID NO: 117899 - RNA, 14 nt, Homo sapiens
uaaggaaacugggu

SEQ ID NO: 117900 - RNA, 20 nt, Homo sapiens
ucaaaguugccuaaauccau

SEQ ID NO: 117901 - RNA, 16 nt, Homo sapiens
aacagcuggugcccug

SEQ ID NO: 117902 - RNA, 15 nt, Homo sapiens
gauuuuaugcuuuaa

SEQ ID NO: 117903 - RNA, 20 nt, Homo sapiens
cauuaauaauaaauucccug

SEQ ID NO: 117904 - RNA, 23 nt, Homo sapiens
gagcaucacaguuuugguugcuu

SEQ ID NO: 117905 - RNA, 16 nt, Homo sapiens
accaguauuguacaaa

SEQ ID NO: 117906 - RNA, 23 nt, Homo sapiens
uuuccacauaaggaaacuggguu

SEQ ID NO: 117907 - RNA, 14 nt, Homo sapiens
uguacuuuuuggca

SEQ ID NO: 117908 - RNA, 17 nt, Homo sapiens
gaaauuugaauuuugug

SEQ ID NO: 117909 - RNA, 22 nt, Homo sapiens
cacaccccagacgaugucuuca

SEQ ID NO: 117910 - RNA, 15 nt, Homo sapiens
uaaaucccauuauuc

SEQ ID NO: 117911 - RNA, 13 nt, Homo sapiens
aaggaagguucug

SEQ ID NO: 117912 - RNA, 20 nt, Homo sapiens
gcaaucuucucagaaggcaa

SEQ ID NO: 117913 - RNA, 19 nt, Homo sapiens
cuuucagauaacuguuauu

SEQ ID NO: 117914 - RNA, 17 nt, Homo sapiens
caaaccucugugagcau

SEQ ID NO: 117915 - RNA, 12 nt, Homo sapiens
auaacuguuauu

SEQ ID NO: 117916 - RNA, 13 nt, Homo sapiens
ucuggugugaacu

SEQ ID NO: 117917 - RNA, 21 nt, Homo sapiens
cacaguuuugguugcuuuaau

SEQ ID NO: 117918 - RNA, 22 nt, Homo sapiens
aaauacuguuugagguuuuuaa

SEQ ID NO: 117919 - RNA, 16 nt, Homo sapiens
ugacaucucugcaauc

SEQ ID NO: 117920 - RNA, 15 nt, Homo sapiens
agauuagaauucugu

SEQ ID NO: 117921 - RNA, 21 nt, Homo sapiens
auucaaaguugccuaaaucca

SEQ ID NO: 117922 - RNA, 18 nt, Homo sapiens
uaauaucaucaguauuga

SEQ ID NO: 117923 - RNA, 19 nt, Homo sapiens
auauuuacuaaaauggacu

SEQ ID NO: 117924 - RNA, 21 nt, Homo sapiens
aaacauugguucuuguauuaa

SEQ ID NO: 117925 - RNA, 17 nt, Homo sapiens
auuggcuuuucugaucc

SEQ ID NO: 117926 - RNA, 19 nt, Homo sapiens
uguuuccuagcacacacuu

SEQ ID NO: 117927 - RNA, 18 nt, Homo sapiens
ucuguacuuuuuggcaua

SEQ ID NO: 117928 - RNA, 21 nt, Homo sapiens
gucucugaagugaaacugcuu

SEQ ID NO: 117929 - RNA, 12 nt, Homo sapiens
uuuagucuuguc

SEQ ID NO: 117930 - RNA, 19 nt, Homo sapiens
cuauuuuuuuucuguuaua

SEQ ID NO: 117931 - RNA, 11 nt, Homo sapiens
uuuaauuuugg

SEQ ID NO: 117932 - RNA, 16 nt, Homo sapiens
gaaggcaaaugacuuu

SEQ ID NO: 117933 - RNA, 19 nt, Homo sapiens
uagaucuaguucacucucc

SEQ ID NO: 117934 - RNA, 24 nt, Homo sapiens
ggugaucucauuuaauccucucaa

SEQ ID NO: 117935 - RNA, 18 nt, Homo sapiens
aacuggguuccugcaaug

SEQ ID NO: 117936 - RNA, 17 nt, Homo sapiens
uucauaccuacauguau

SEQ ID NO: 117937 - RNA, 16 nt, Homo sapiens
cuccaauuaaggauuu

SEQ ID NO: 117938 - RNA, 22 nt, Homo sapiens
auuaaggauuuuaugcuuuaaa

SEQ ID NO: 117939 - RNA, 16 nt, Homo sapiens
aaaccaguauuguaca

SEQ ID NO: 117940 - RNA, 22 nt, Homo sapiens
gaagcauuuuauaaaucgcuuu

SEQ ID NO: 117941 - RNA, 22 nt, Homo sapiens
aauaaauucccuggccuuucau

SEQ ID NO: 117942 - RNA, 22 nt, Homo sapiens
gaccauaaccccggaagccaaa

SEQ ID NO: 117943 - RNA, 22 nt, Homo sapiens
augauuucuaugcugaguuugu

SEQ ID NO: 117944 - RNA, 22 nt, Homo sapiens
aauuauaucugaggaauucugu

SEQ ID NO: 117945 - RNA, 19 nt, Homo sapiens
ucacauugguguuguacuc

SEQ ID NO: 117946 - RNA, 20 nt, Homo sapiens
acaguuuugguugcuuuaau

SEQ ID NO: 117947 - RNA, 20 nt, Homo sapiens
uacagaagccccacccugcc

SEQ ID NO: 117948 - RNA, 13 nt, Homo sapiens
uuuuguuuggacc

SEQ ID NO: 117949 - RNA, 11 nt, Homo sapiens
cggaagccaaa

SEQ ID NO: 117950 - RNA, 16 nt, Homo sapiens
cuuucagauacuggau

SEQ ID NO: 117951 - RNA, 22 nt, Homo sapiens
cauuuaauaauuauaugcuauu

SEQ ID NO: 117952 - RNA, 16 nt, Homo sapiens
ucucaaccaccuuuca

SEQ ID NO: 117953 - RNA, 15 nt, Homo sapiens
aauuuauuggcuuuu

SEQ ID NO: 117954 - RNA, 15 nt, Homo sapiens
guuuuuaagccuuaa

SEQ ID NO: 117955 - RNA, 20 nt, Homo sapiens
aauagcuagacuggugacug

SEQ ID NO: 117956 - RNA, 21 nt, Homo sapiens
uucagauacuggauuguacuu

SEQ ID NO: 117957 - RNA, 19 nt, Homo sapiens
cauaaccccggaagccaaa

SEQ ID NO: 117958 - RNA, 17 nt, Homo sapiens
agucuguuuuaugacuu

SEQ ID NO: 117959 - RNA, 16 nt, Homo sapiens
cucaaccaccuuucag

SEQ ID NO: 117960 - RNA, 17 nt, Homo sapiens
agauuagagaguguuga

SEQ ID NO: 117961 - RNA, 14 nt, Homo sapiens
acauguuaaaccau

SEQ ID NO: 117962 - RNA, 17 nt, Homo sapiens
cacaccccagacgaugu

SEQ ID NO: 117963 - RNA, 20 nt, Homo sapiens
cacauugguguuguacucaa

SEQ ID NO: 117964 - RNA, 22 nt, Homo sapiens
ugcauaggugaucucauuuaau

SEQ ID NO: 117965 - RNA, 12 nt, Homo sapiens
aaggaaacuggg

SEQ ID NO: 117966 - RNA, 18 nt, Homo sapiens
acuguuauuuauaaucac

SEQ ID NO: 117967 - RNA, 21 nt, Homo sapiens
ucacaguuuugguugcuuuaa

SEQ ID NO: 117968 - RNA, 21 nt, Homo sapiens
uuuugguugcuuuaauaucau

SEQ ID NO: 117969 - RNA, 11 nt, Homo sapiens
caucucugcaa

SEQ ID NO: 117970 - RNA, 16 nt, Homo sapiens
ugaagucagaucugcc

SEQ ID NO: 117971 - RNA, 16 nt, Homo sapiens
uucacugauuugacau

SEQ ID NO: 117972 - RNA, 19 nt, Homo sapiens
uaagucuguuuuaugacuu

SEQ ID NO: 117973 - RNA, 11 nt, Homo sapiens
auuaaagccau

SEQ ID NO: 117974 - RNA, 20 nt, Homo sapiens
uggcuuuucugauccaguuu

SEQ ID NO: 117975 - RNA, 22 nt, Homo sapiens
cuucucagaaggcaaaugacuu

SEQ ID NO: 117976 - RNA, 15 nt, Homo sapiens
auuuuagcuacuaua

SEQ ID NO: 117977 - RNA, 19 nt, Homo sapiens
ggauucuuaaaguugaauu

SEQ ID NO: 117978 - RNA, 17 nt, Homo sapiens
gacauagucuggcugua

SEQ ID NO: 117979 - RNA, 21 nt, Homo sapiens
gcaaucuucucagaaggcaaa

SEQ ID NO: 117980 - RNA, 20 nt, Homo sapiens
ucaauaaaaaauuaugacau

SEQ ID NO: 117981 - RNA, 16 nt, Homo sapiens
cuggguuccugcaaug

SEQ ID NO: 117982 - RNA, 23 nt, Homo sapiens
uauaauuaacauguuaaaccaug

SEQ ID NO: 117983 - RNA, 21 nt, Homo sapiens
ugucuugccuuuuucauuauu

SEQ ID NO: 117984 - RNA, 20 nt, Homo sapiens
uugauaaucaacugggcuga

SEQ ID NO: 117985 - RNA, 21 nt, Homo sapiens
ugcaaucuucucagaaggcaa

SEQ ID NO: 117986 - RNA, 17 nt, Homo sapiens
uauauaugugaugaucu

SEQ ID NO: 117987 - RNA, 13 nt, Homo sapiens
caucucugcaauc

SEQ ID NO: 117988 - RNA, 22 nt, Homo sapiens
ugccaucaauaaaaaauuauga

SEQ ID NO: 117989 - RNA, 21 nt, Homo sapiens
aaggaaacuggguuccugcaa

SEQ ID NO: 117990 - RNA, 17 nt, Homo sapiens
aucugacaucucugcaa

SEQ ID NO: 117991 - RNA, 23 nt, Homo sapiens
aagcauuuuauaaaucgcuuuug

SEQ ID NO: 117992 - RNA, 16 nt, Homo sapiens
aggaagccugauuaaa

SEQ ID NO: 117993 - RNA, 13 nt, Homo sapiens
aaccaccuuucag

SEQ ID NO: 117994 - RNA, 23 nt, Homo sapiens
cuuaaaggaagguucugguguga

SEQ ID NO: 117995 - RNA, 11 nt, Homo sapiens
uuccugcaaug

SEQ ID NO: 117996 - RNA, 21 nt, Homo sapiens
uuuauuggcuuuucugaucca

SEQ ID NO: 117997 - RNA, 15 nt, Homo sapiens
uguguaaauacaauu

SEQ ID NO: 117998 - RNA, 15 nt, Homo sapiens
uuauaaaucgcuuuu

SEQ ID NO: 117999 - RNA, 19 nt, Homo sapiens
aguauaauuaacauguuaa

SEQ ID NO: 118000 - RNA, 23 nt, Homo sapiens
uggaccauaaccccggaagccaa

SEQ ID NO: 118001 - RNA, 21 nt, Homo sapiens
auuugacauagucuggcugua

SEQ ID NO: 118002 - RNA, 15 nt, Homo sapiens
ugcuauuucuauauu

SEQ ID NO: 118003 - RNA, 15 nt, Homo sapiens
auuuaauccucucaa

SEQ ID NO: 118004 - RNA, 23 nt, Homo sapiens
guuugugcugguguaugugugaa

SEQ ID NO: 118005 - RNA, 19 nt, Homo sapiens
ucaauaaaaaauuaugaca

SEQ ID NO: 118006 - RNA, 15 nt, Homo sapiens
aacauguuaaaccau

SEQ ID NO: 118007 - RNA, 13 nt, Homo sapiens
uaagaaugaaaua

SEQ ID NO: 118008 - RNA, 22 nt, Homo sapiens
ugaggaauucuguauagauuag

SEQ ID NO: 118009 - RNA, 16 nt, Homo sapiens
aaccucuuugucuaca

SEQ ID NO: 118010 - RNA, 18 nt, Homo sapiens
aaagccauguuuauuaca

SEQ ID NO: 118011 - RNA, 19 nt, Homo sapiens
gguugcuuuaauaucauca

SEQ ID NO: 118012 - RNA, 17 nt, Homo sapiens
uauucacugauuugaca

SEQ ID NO: 118013 - RNA, 18 nt, Homo sapiens
aguuuaauauuaaagcca

SEQ ID NO: 118014 - RNA, 13 nt, Homo sapiens
cucagaaggcaaa

SEQ ID NO: 118015 - RNA, 15 nt, Homo sapiens
uaaagaucauguaaa

SEQ ID NO: 118016 - RNA, 17 nt, Homo sapiens
acauaaggaaacugggu

SEQ ID NO: 118017 - RNA, 22 nt, Homo sapiens
agucucugaagugaaacugcuu

SEQ ID NO: 118018 - RNA, 23 nt, Homo sapiens
aaggaaacuggguuccugcaaug

SEQ ID NO: 118019 - RNA, 14 nt, Homo sapiens
uauuuuaugaucca

SEQ ID NO: 118020 - RNA, 13 nt, Homo sapiens
caaucuucucaga

SEQ ID NO: 118021 - RNA, 21 nt, Homo sapiens
accuuucagauaacuguuauu

SEQ ID NO: 118022 - RNA, 15 nt, Homo sapiens
agccugcacggugaa

SEQ ID NO: 118023 - RNA, 23 nt, Homo sapiens
uguuuggaccaaaaaccaguauu

SEQ ID NO: 118024 - RNA, 20 nt, Homo sapiens
uaaauucccuggccuuucau

SEQ ID NO: 118025 - RNA, 19 nt, Homo sapiens
cacaguuuugguugcuuua

SEQ ID NO: 118026 - RNA, 22 nt, Homo sapiens
auaaaucgcuuuugauaaucaa

SEQ ID NO: 118027 - RNA, 17 nt, Homo sapiens
auuuuuuuucuguuaua

SEQ ID NO: 118028 - RNA, 22 nt, Homo sapiens
aaccucuuugucuacaccauua

SEQ ID NO: 118029 - RNA, 16 nt, Homo sapiens
ugucuacaccauuaug

SEQ ID NO: 118030 - RNA, 22 nt, Homo sapiens
ucccuauuuuuuuucuguuaua

SEQ ID NO: 118031 - RNA, 19 nt, Homo sapiens
ccaguuuuguuuggaccaa

SEQ ID NO: 118032 - RNA, 23 nt, Homo sapiens
cuuucagauacuggauuguacuu

SEQ ID NO: 118033 - RNA, 14 nt, Homo sapiens
auuuuaugauccag

SEQ ID NO: 118034 - RNA, 19 nt, Homo sapiens
uuaaggauuuuaugcuuua

SEQ ID NO: 118035 - RNA, 14 nt, Homo sapiens
caaaguugccuaaa

SEQ ID NO: 118036 - RNA, 19 nt, Homo sapiens
aaacuuucacaccccagac

SEQ ID NO: 118037 - RNA, 19 nt, Homo sapiens
aaauucccuggccuuucau

SEQ ID NO: 118038 - RNA, 14 nt, Homo sapiens
guacaaaguauuaa

SEQ ID NO: 118039 - RNA, 15 nt, Homo sapiens
uuuagucuugucuca

SEQ ID NO: 118040 - RNA, 13 nt, Homo sapiens
aagugaaacugcu

SEQ ID NO: 118041 - RNA, 21 nt, Homo sapiens
guacuuuuuggcauaacauaa

SEQ ID NO: 118042 - RNA, 17 nt, Homo sapiens
cugggcugaacacucca

SEQ ID NO: 118043 - RNA, 19 nt, Homo sapiens
aaggauuuuaugcuuuaaa

SEQ ID NO: 118044 - RNA, 20 nt, Homo sapiens
ugaagucagaucugccuaag

SEQ ID NO: 118045 - RNA, 22 nt, Homo sapiens
uaaaauggacuguggugacuuu

SEQ ID NO: 118046 - RNA, 17 nt, Homo sapiens
aaguugccuaaauccau

SEQ ID NO: 118047 - RNA, 17 nt, Homo sapiens
uguuaaaccaugggaua

SEQ ID NO: 118048 - RNA, 15 nt, Homo sapiens
uuagucuugucucag

SEQ ID NO: 118049 - RNA, 15 nt, Homo sapiens
ugaguuugugcuggu

SEQ ID NO: 118050 - RNA, 21 nt, Homo sapiens
ucucaaccaccuuucagauaa

SEQ ID NO: 118051 - RNA, 18 nt, Homo sapiens
aucacaguuuugguugcu

SEQ ID NO: 118052 - RNA, 17 nt, Homo sapiens
uacaccauuaugugcgc

SEQ ID NO: 118053 - RNA, 15 nt, Homo sapiens
ucucuuucguuacag

SEQ ID NO: 118054 - RNA, 14 nt, Homo sapiens
ccucucaaccaccu

SEQ ID NO: 118055 - RNA, 20 nt, Homo sapiens
caaucuucucagaaggcaaa

SEQ ID NO: 118056 - RNA, 14 nt, Homo sapiens
cuuuucugauccag

SEQ ID NO: 118057 - RNA, 14 nt, Homo sapiens
cauaaaucugugaa

SEQ ID NO: 118058 - RNA, 21 nt, Homo sapiens
uucuuaaauaauaaagaucau

SEQ ID NO: 118059 - RNA, 16 nt, Homo sapiens
cauguauuuguuugca

SEQ ID NO: 118060 - RNA, 23 nt, Homo sapiens
uaaauagcuagacuggugacuga

SEQ ID NO: 118061 - RNA, 22 nt, Homo sapiens
uaaacauugguucuuguauuaa

SEQ ID NO: 118062 - RNA, 18 nt, Homo sapiens
uucauuauuuuauuauga

SEQ ID NO: 118063 - RNA, 20 nt, Homo sapiens
aguugaauuuauuggcuuuu

SEQ ID NO: 118064 - RNA, 12 nt, Homo sapiens
uuugaauuuugu

SEQ ID NO: 118065 - RNA, 13 nt, Homo sapiens
uaaucaacugggc

SEQ ID NO: 118066 - RNA, 15 nt, Homo sapiens
uguacaaaguauuaa

SEQ ID NO: 118067 - RNA, 16 nt, Homo sapiens
gaucugccuaaggacu

SEQ ID NO: 118068 - RNA, 22 nt, Homo sapiens
agccccacccugccucacccac

SEQ ID NO: 118069 - RNA, 15 nt, Homo sapiens
agcaucacaguuuug

SEQ ID NO: 118070 - RNA, 22 nt, Homo sapiens
agaucuaguucacucuccauuu

SEQ ID NO: 118071 - RNA, 13 nt, Homo sapiens
uacuuugugcugg

SEQ ID NO: 118072 - RNA, 24 nt, Homo sapiens
uccaauuaaggauuuuaugcuuua

SEQ ID NO: 118073 - RNA, 18 nt, Homo sapiens
caucaguauugaagcauu

SEQ ID NO: 118074 - RNA, 16 nt, Homo sapiens
uaauauuaaagccaug

SEQ ID NO: 118075 - RNA, 16 nt, Homo sapiens
gauuuuaugcuuuaaa

SEQ ID NO: 118076 - RNA, 12 nt, Homo sapiens
accaccuuucag

SEQ ID NO: 118077 - RNA, 20 nt, Homo sapiens
uccucucaaccaccuuucag

SEQ ID NO: 118078 - RNA, 21 nt, Homo sapiens
uuccugcaaugaagucucuga

SEQ ID NO: 118079 - RNA, 23 nt, Homo sapiens
aucacaguuuugguugcuuuaau

SEQ ID NO: 118080 - RNA, 18 nt, Homo sapiens
uuggaauuuuccuccuuu

SEQ ID NO: 118081 - RNA, 23 nt, Homo sapiens
agauaacuguuauuuauaaucac

SEQ ID NO: 118082 - RNA, 20 nt, Homo sapiens
uaugauccagcagauuauuc

SEQ ID NO: 118083 - RNA, 19 nt, Homo sapiens
uuaauaucaucaguauuga

SEQ ID NO: 118084 - RNA, 16 nt, Homo sapiens
acggugaauggcuuug

SEQ ID NO: 118085 - RNA, 15 nt, Homo sapiens
caguauuguacaaag

SEQ ID NO: 118086 - RNA, 16 nt, Homo sapiens
cauuuaauccucucaa

SEQ ID NO: 118087 - RNA, 19 nt, Homo sapiens
ggaagguucuggugugaac

SEQ ID NO: 118088 - RNA, 23 nt, Homo sapiens
auuugaauuuuguguuagagauu

SEQ ID NO: 118089 - RNA, 12 nt, Homo sapiens
uggccuuucaua

SEQ ID NO: 118090 - RNA, 17 nt, Homo sapiens
auuuauaaucacuuuuu

SEQ ID NO: 118091 - RNA, 21 nt, Homo sapiens
ugauccaguuuuguuuggacc

SEQ ID NO: 118092 - RNA, 19 nt, Homo sapiens
agguucuggugugaacuaa

SEQ ID NO: 118093 - RNA, 14 nt, Homo sapiens
agcacacacuuuug

SEQ ID NO: 118094 - RNA, 22 nt, Homo sapiens
uugaaacggaugauuucuaugc

SEQ ID NO: 118095 - RNA, 20 nt, Homo sapiens
ugcugaguuugugcuggugu

SEQ ID NO: 118096 - RNA, 17 nt, Homo sapiens
caugggauaaaugccau

SEQ ID NO: 118097 - RNA, 19 nt, Human enterovirus B
acuagauaacggugcagug

SEQ ID NO: 118098 - RNA, 13 nt, Human enterovirus B
ggguaaauucucc

SEQ ID NO: 118099 - RNA, 15 nt, Human enterovirus B
uaaccgaacuagaua

SEQ ID NO: 118100 - RNA, 15 nt, Human enterovirus B
gacaauuugaacuaa

SEQ ID NO: 118101 - RNA, 17 nt, Human enterovirus B
gacaauuugaacuaauu

SEQ ID NO: 118102 - RNA, 23 nt, Human enterovirus B
ccgaacuagauaacggugcagug

SEQ ID NO: 118103 - RNA, 18 nt, Human enterovirus B
cuagauaacggugcagug

SEQ ID NO: 118104 - RNA, 21 nt, Human enterovirus B
uagagacaauuugaacuaauu

SEQ ID NO: 118105 - RNA, 15 nt, Human enterovirus B
caauuugaacuaauu

SEQ ID NO: 118106 - RNA, 19 nt, Human enterovirus B
auaacggugcagugggggu

SEQ ID NO: 118107 - RNA, 20 nt, Human enterovirus B
auuagagacaauuugaacua

SEQ ID NO: 118108 - RNA, 14 nt, Human enterovirus B
auaacggugcagug

SEQ ID NO: 118109 - RNA, 11 nt, Human enterovirus B
cggugcagugg

SEQ ID NO: 118110 - RNA, 14 nt, Human enterovirus B
uaacggugcagugg

SEQ ID NO: 118111 - RNA, 16 nt, Homo sapiens
gaucugccuaaggacu

SEQ ID NO: 118112 - RNA, 18 nt, Homo sapiens
caucaguauugaagcauu

SEQ ID NO: 118113 - RNA, 18 nt, Homo sapiens
ucuguacuuuuuggcaua

SEQ ID NO: 118114 - RNA, 21 nt, Homo sapiens
gucucugaagugaaacugcuu

SEQ ID NO: 118115 - RNA, 17 nt, Homo sapiens
ccuagcacacacuuuug

SEQ ID NO: 118116 - RNA, 24 nt, Homo sapiens
uccaauuaaggauuuuaugcuuua

SEQ ID NO: 118117 - RNA, 17 nt, Homo sapiens
auuggcuuuucugaucc

SEQ ID NO: 118118 - RNA, 21 nt, Homo sapiens
gauacuggauuguacuuugug

SEQ ID NO: 118119 - RNA, 12 nt, Homo sapiens
uggccuuucaua

SEQ ID NO: 118120 - RNA, 16 nt, Homo sapiens
gaaggcaaaugacuuu

SEQ ID NO: 118121 - RNA, 23 nt, Homo sapiens
agauaacuguuauuuauaaucac

SEQ ID NO: 118122 - RNA, 23 nt, Homo sapiens
agccugcacggugaauggcuuug

SEQ ID NO: 118123 - RNA, 16 nt, Homo sapiens
acggugaauggcuuug

SEQ ID NO: 118124 - RNA, 22 nt, Homo sapiens
cauuuaauaauuauaugcuauu

SEQ ID NO: 118125 - RNA, 21 nt, Homo sapiens
guacuuuuuggcauaacauaa

SEQ ID NO: 118126 - RNA, 19 nt, Homo sapiens
auauuuacuaaaauggacu

SEQ ID NO: 118127 - RNA, 23 nt, Homo sapiens
auuugaauuuuguguuagagauu

SEQ ID NO: 118128 - RNA, 22 nt, Homo sapiens
guaugugugaagugagugaguu

SEQ ID NO: 118129 - RNA, 19 nt, Homo sapiens
uaugcugaguuugugcugg

SEQ ID NO: 118130 - RNA, 15 nt, Homo sapiens
caguauuguacaaag

SEQ ID NO: 118131 - RNA, 21 nt, Homo sapiens
auucaaaguugccuaaaucca

SEQ ID NO: 118132 - RNA, 16 nt, Homo sapiens
aaaccaguauuguaca

SEQ ID NO: 118133 - RNA, 14 nt, Homo sapiens
ccucucaaccaccu

SEQ ID NO: 118134 - RNA, 14 nt, Homo sapiens
cauaaaucugugaa

SEQ ID NO: 118135 - RNA, 18 nt, Homo sapiens
aucacaguuuugguugcu

SEQ ID NO: 118136 - RNA, 14 nt, Homo sapiens
acaucucugcaauc

SEQ ID NO: 118137 - RNA, 22 nt, Homo sapiens
gaagcauuuuauaaaucgcuuu

SEQ ID NO: 118138 - RNA, 22 nt, Homo sapiens
aauaaauucccuggccuuucau

SEQ ID NO: 118139 - RNA, 21 nt, Homo sapiens
uagacuggugacugauucuuc

SEQ ID NO: 118140 - RNA, 15 nt, Homo sapiens
uuuagucuugucuca

SEQ ID NO: 118141 - RNA, 18 nt, Homo sapiens
ugaagucucugaagugaa

SEQ ID NO: 118142 - RNA, 18 nt, Homo sapiens
ggacuguggugacuuugg

SEQ ID NO: 118143 - RNA, 14 nt, Homo sapiens
augugaugaucuac

SEQ ID NO: 118144 - RNA, 12 nt, Homo sapiens
uccugcaaugaa

SEQ ID NO: 118145 - RNA, 14 nt, Homo sapiens
cuuuucugauccag

SEQ ID NO: 118146 - RNA, 19 nt, Homo sapiens
aguugccuaaauccauuug

SEQ ID NO: 118147 - RNA, 16 nt, Homo sapiens
acauaaaucugugaac

SEQ ID NO: 118148 - RNA, 16 nt, Homo sapiens
cuccaauuaaggauuu

SEQ ID NO: 118149 - RNA, 12 nt, Homo sapiens
auaacuguuauu

SEQ ID NO: 118150 - RNA, 16 nt, Homo sapiens
cuuucagauacuggau

SEQ ID NO: 118151 - RNA, 15 nt, Homo sapiens
aacauguuaaaccau

SEQ ID NO: 118152 - RNA, 21 nt, Homo sapiens
uucuuaaauaauaaagaucau

SEQ ID NO: 118153 - RNA, 23 nt, Homo sapiens
guuugugcugguguaugugugaa

SEQ ID NO: 118154 - RNA, 19 nt, Homo sapiens
uagaucuaguucacucucc

SEQ ID NO: 118155 - RNA, 19 nt, Homo sapiens
uuaauaucaucaguauuga

SEQ ID NO: 118156 - RNA, 20 nt, Homo sapiens
ugaagucagaucugccuaag

SEQ ID NO: 118157 - RNA, 23 nt, Homo sapiens
gagcaucacaguuuugguugcuu

SEQ ID NO: 118158 - RNA, 20 nt, Homo sapiens
uggcuuuucugauccaguuu

SEQ ID NO: 118159 - RNA, 13 nt, Homo sapiens
auaaucacuuuuu

SEQ ID NO: 118160 - RNA, 19 nt, Homo sapiens
aaacuuucacaccccagac

SEQ ID NO: 118161 - RNA, 19 nt, Homo sapiens
aagccccacccugccucac

SEQ ID NO: 118162 - RNA, 23 nt, Homo sapiens
cugcaaucuucucagaaggcaaa

SEQ ID NO: 118163 - RNA, 20 nt, Homo sapiens
uccucucaaccaccuuucag

SEQ ID NO: 118164 - RNA, 14 nt, Homo sapiens
gugaauggcuuugu

SEQ ID NO: 118165 - RNA, 22 nt, Homo sapiens
uuuggaccaaaaaccaguauug

SEQ ID NO: 118166 - RNA, 21 nt, Homo sapiens
auuugacauagucuggcugua

SEQ ID NO: 118167 - RNA, 13 nt, Homo sapiens
uuuuguuuggacc

SEQ ID NO: 118168 - RNA, 13 nt, Homo sapiens
caaucuucucaga

SEQ ID NO: 118169 - RNA, 22 nt, Homo sapiens
auaaaucgcuuuugauaaucaa

SEQ ID NO: 118170 - RNA, 19 nt, Homo sapiens
cuauuuuuuuucuguuaua

SEQ ID NO: 118171 - RNA, 14 nt, Homo sapiens
aauauuaaagccau

SEQ ID NO: 118172 - RNA, 23 nt, Homo sapiens
cucccuauuuuuuuucuguuaua

SEQ ID NO: 118173 - RNA, 14 nt, Homo sapiens
gcuagacuggugac

SEQ ID NO: 118174 - RNA, 22 nt, Homo sapiens
uuguuugagaaauuaaguaucu

SEQ ID NO: 118175 - RNA, 12 nt, Homo sapiens
accaccuuucag

SEQ ID NO: 118176 - RNA, 17 nt, Homo sapiens
aaaaguuuaauauuaaa

SEQ ID NO: 118177 - RNA, 18 nt, Homo sapiens
acuguuauuuauaaucac

SEQ ID NO: 118178 - RNA, 17 nt, Homo sapiens
aagccugauuaaagaau

SEQ ID NO: 118179 - RNA, 22 nt, Homo sapiens
aaccucuuugucuacaccauua

SEQ ID NO: 118180 - RNA, 17 nt, Homo sapiens
auuuuuuuucuguuaua

SEQ ID NO: 118181 - RNA, 22 nt, Homo sapiens
ugucuacaccauuaugugcgcu

SEQ ID NO: 118182 - RNA, 18 nt, Homo sapiens
uuggaauuuuccuccuuu

SEQ ID NO: 118183 - RNA, 14 nt, Homo sapiens
caaaguugccuaaa

SEQ ID NO: 118184 - RNA, 13 nt, Homo sapiens
uuugguugcuuua

SEQ ID NO: 118185 - RNA, 20 nt, Homo sapiens
cacauugguguuguacucaa

SEQ ID NO: 118186 - RNA, 20 nt, Homo sapiens
aguauuguacaaaguauuaa

SEQ ID NO: 118187 - RNA, 16 nt, Homo sapiens
caaugaagucucugaa

SEQ ID NO: 118188 - RNA, 14 nt, Homo sapiens
uauuuuaugaucca

SEQ ID NO: 118189 - RNA, 20 nt, Homo sapiens
auuuuauuauguaaauccca

SEQ ID NO: 118190 - RNA, 19 nt, Homo sapiens
ggaagguucuggugugaac

SEQ ID NO: 118191 - RNA, 16 nt, Homo sapiens
gauuuuaugcuuuaaa

SEQ ID NO: 118192 - RNA, 22 nt, Homo sapiens
agucucugaagugaaacugcuu

SEQ ID NO: 118193 - RNA, 15 nt, Homo sapiens
uaaaucccauuauuc

SEQ ID NO: 118194 - RNA, 20 nt, Homo sapiens
uugagaaauuaaguaucuga

SEQ ID NO: 118195 - RNA, 22 nt, Homo sapiens
aaauacuguuugagguuuuuaa

SEQ ID NO: 118196 - RNA, 22 nt, Homo sapiens
agccccacccugccucacccac

SEQ ID NO: 118197 - RNA, 19 nt, Homo sapiens
cuuucagauaacuguuauu

SEQ ID NO: 118198 - RNA, 18 nt, Homo sapiens
uucauuauuuuauuauga

SEQ ID NO: 118199 - RNA, 16 nt, Homo sapiens
agaaauuaaguaucug

SEQ ID NO: 118200 - RNA, 16 nt, Homo sapiens
ugaacuaaacuuucac

SEQ ID NO: 118201 - RNA, 21 nt, Homo sapiens
cacaguuuugguugcuuuaau

SEQ ID NO: 118202 - RNA, 17 nt, Homo sapiens
aucugacaucucugcaa

SEQ ID NO: 118203 - RNA, 20 nt, Homo sapiens
gcaaucuucucagaaggcaa

SEQ ID NO: 118204 - RNA, 15 nt, Homo sapiens
auuuuagcuacuaua

SEQ ID NO: 118205 - RNA, 16 nt, Homo sapiens
uaacauguuaaaccau

SEQ ID NO: 118206 - RNA, 17 nt, Homo sapiens
uauagaaccucuuuguc

SEQ ID NO: 118207 - RNA, 15 nt, Homo sapiens
uuauaaaucgcuuuu

SEQ ID NO: 118208 - RNA, 14 nt, Homo sapiens
uaauaucaucagua

SEQ ID NO: 118209 - RNA, 18 nt, Homo sapiens
ccuaaggacuucuuuaau

SEQ ID NO: 118210 - RNA, 22 nt, Homo sapiens
caauuaaggauuuuaugcuuua

SEQ ID NO: 118211 - RNA, 23 nt, Homo sapiens
uguuuggaccaaaaaccaguauu

SEQ ID NO: 118212 - RNA, 22 nt, Homo sapiens
agaaauuaaguaucugacaucu

SEQ ID NO: 118213 - RNA, 16 nt, Homo sapiens
cuggguuccugcaaug

SEQ ID NO: 118214 - RNA, 15 nt, Homo sapiens
agcaucacaguuuug

SEQ ID NO: 118215 - RNA, 20 nt, Homo sapiens
ucacaguuuugguugcuuua

SEQ ID NO: 118216 - RNA, 19 nt, Homo sapiens
ggauucuuaaaguugaauu

SEQ ID NO: 118217 - RNA, 17 nt, Homo sapiens
gacauagucuggcugua

SEQ ID NO: 118218 - RNA, 14 nt, Homo sapiens
auaaucaacugggc

SEQ ID NO: 118219 - RNA, 18 nt, Homo sapiens
cuaaacuuucacacccca

SEQ ID NO: 118220 - RNA, 18 nt, Homo sapiens
aauggcuuuguauagaac

SEQ ID NO: 118221 - RNA, 19 nt, Homo sapiens
cacucuccauuuaauaauu

SEQ ID NO: 118222 - RNA, 17 nt, Homo sapiens
aggauuuuaugcuuuaa

SEQ ID NO: 118223 - RNA, 14 nt, Homo sapiens
uacuauauauguga

SEQ ID NO: 118224 - RNA, 19 nt, Homo sapiens
aaauucccuggccuuucau

SEQ ID NO: 118225 - RNA, 13 nt, Homo sapiens
uuuaugcuuuaaa

SEQ ID NO: 118226 - RNA, 22 nt, Homo sapiens
ucccuauuuuuuuucuguuaua

SEQ ID NO: 118227 - RNA, 13 nt, Homo sapiens
caucucugcaauc

SEQ ID NO: 118228 - RNA, 16 nt, Homo sapiens
uuaugacuucauuaau

SEQ ID NO: 118229 - RNA, 16 nt, Homo sapiens
cucaaccaccuuucag

SEQ ID NO: 118230 - RNA, 19 nt, Homo sapiens
uaagucuguuuuaugacuu

SEQ ID NO: 118231 - RNA, 19 nt, Homo sapiens
cauaaccccggaagccaaa

SEQ ID NO: 118232 - RNA, 17 nt, Homo sapiens
uguggugacuuuggaua

SEQ ID NO: 118233 - RNA, 21 nt, Homo sapiens
ucacaguuuugguugcuuuaa

SEQ ID NO: 118234 - RNA, 20 nt, Homo sapiens
uaaauucccuggccuuucau

SEQ ID NO: 118235 - RNA, 21 nt, Homo sapiens
uggcauaacauaaaucuguga

SEQ ID NO: 118236 - RNA, 13 nt, Homo sapiens
cugaacacuccaa

SEQ ID NO: 118237 - RNA, 23 nt, Homo sapiens
ucagcaaaaauauuuuaugaucc

SEQ ID NO: 118238 - RNA, 14 nt, Homo sapiens
ucuucauaccuaca

SEQ ID NO: 118239 - RNA, 18 nt, Homo sapiens
ucagaaggcaaaugacuu

SEQ ID NO: 118240 - RNA, 19 nt, Homo sapiens
cacaguuuugguugcuuua

SEQ ID NO: 118241 - RNA, 21 nt, Homo sapiens
accuuucagauaacuguuauu

SEQ ID NO: 118242 - RNA, 14 nt, Homo sapiens
guacaaaguauuaa

SEQ ID NO: 118243 - RNA, 12 nt, Homo sapiens
aucugaggaauu

SEQ ID NO: 118244 - RNA, 20 nt, Homo sapiens
accccggaagccaaaccucu

SEQ ID NO: 118245 - RNA, 23 nt, Homo sapiens
aaggaaacuggguuccugcaaug

SEQ ID NO: 118246 - RNA, 20 nt, Homo sapiens
cauuaauaauaaauucccug

SEQ ID NO: 118247 - RNA, 17 nt, Homo sapiens
acauaaggaaacugggu

SEQ ID NO: 118248 - RNA, 20 nt, Homo sapiens
uaugauccagcagauuauuc

SEQ ID NO: 118249 - RNA, 17 nt, Homo sapiens
agucuguuuuaugacuu

SEQ ID NO: 118250 - RNA, 14 nt, Homo sapiens
aauucuguauagau

SEQ ID NO: 118251 - RNA, 21 nt, Homo sapiens
aaacauugguucuuguauuaa

SEQ ID NO: 118252 - RNA, 16 nt, Homo sapiens
accaguauuguacaaa

SEQ ID NO: 118253 - RNA, 21 nt, Homo sapiens
uucuaugcugaguuugugcug

SEQ ID NO: 118254 - RNA, 19 nt, Homo sapiens
ccauuuggaaaucuuuaaa

SEQ ID NO: 118255 - RNA, 12 nt, Homo sapiens
uuaagccuuaaa

SEQ ID NO: 118256 - RNA, 17 nt, Homo sapiens
uacaccauuaugugcgc

SEQ ID NO: 118257 - RNA, 17 nt, Homo sapiens
agauuagagaguguuga

SEQ ID NO: 118258 - RNA, 20 nt, Homo sapiens
acaguuuugguugcuuuaau

SEQ ID NO: 118259 - RNA, 21 nt, Homo sapiens
uucagauacuggauuguacuu

SEQ ID NO: 118260 - RNA, 21 nt, Homo sapiens
uuccugcaaugaagucucuga

SEQ ID NO: 118261 - RNA, 23 nt, Homo sapiens
uuggcauaacauaaaucugugaa

SEQ ID NO: 118262 - RNA, 20 nt, Homo sapiens
ucaauaaaaaauuaugacau

SEQ ID NO: 118263 - RNA, 21 nt, Homo sapiens
cugaagucagaucugccuaag

SEQ ID NO: 118264 - RNA, 16 nt, Homo sapiens
aacagcuggugcccug

SEQ ID NO: 118265 - RNA, 15 nt, Homo sapiens
uguacaaaguauuaa

SEQ ID NO: 118266 - RNA, 16 nt, Homo sapiens
ugaagucagaucugcc

SEQ ID NO: 118267 - RNA, 12 nt, Homo sapiens
uuuagucuuguc

SEQ ID NO: 118268 - RNA, 23 nt, Homo sapiens
uauaauuaacauguuaaaccaug

SEQ ID NO: 118269 - RNA, 20 nt, Homo sapiens
aguugaauuuauuggcuuuu

SEQ ID NO: 118270 - RNA, 17 nt, Homo sapiens
aguucacucuccauuua

SEQ ID NO: 118271 - RNA, 20 nt, Homo sapiens
caaucuucucagaaggcaaa

SEQ ID NO: 118272 - RNA, 12 nt, Homo sapiens
uuugaauuuugu

SEQ ID NO: 118273 - RNA, 19 nt, Homo sapiens
acaguuuugguugcuuuaa

SEQ ID NO: 118274 - RNA, 16 nt, Homo sapiens
guuuugguugcuuuaa

SEQ ID NO: 118275 - RNA, 16 nt, Homo sapiens
uuguacuuugugcugg

SEQ ID NO: 118276 - RNA, 17 nt, Homo sapiens
uauauaugugaugaucu

SEQ ID NO: 118277 - RNA, 22 nt, Homo sapiens
aacuguuauuuauaaucacuuu

SEQ ID NO: 118278 - RNA, 23 nt, Homo sapiens
uaaauagcuagacuggugacuga

SEQ ID NO: 118279 - RNA, 19 nt, Homo sapiens
ccaguuuuguuuggaccaa

SEQ ID NO: 118280 - RNA, 15 nt, Homo sapiens
uuagucuugucucag

SEQ ID NO: 118281 - RNA, 20 nt, Homo sapiens
uuguuuagucuugucucaga

SEQ ID NO: 118282 - RNA, 17 nt, Homo sapiens
cugggcugaacacucca

SEQ ID NO: 118283 - RNA, 19 nt, Homo sapiens
aaggauuuuaugcuuuaaa

SEQ ID NO: 118284 - RNA, 20 nt, Homo sapiens
ugcugaguuugugcuggugu

SEQ ID NO: 118285 - RNA, 22 nt, Homo sapiens
gaccauaaccccggaagccaaa

SEQ ID NO: 118286 - RNA, 22 nt, Homo sapiens
augauuucuaugcugaguuugu

SEQ ID NO: 118287 - RNA, 11 nt, Homo sapiens
cggaagccaaa

SEQ ID NO: 118288 - RNA, 16 nt, Homo sapiens
cauguauuuguuugca

SEQ ID NO: 118289 - RNA, 21 nt, Homo sapiens
ucucaaccaccuuucagauaa

SEQ ID NO: 118290 - RNA, 16 nt, Homo sapiens
ugucuacaccauuaug

SEQ ID NO: 118291 - RNA, 12 nt, Homo sapiens
aaggaaacuggg

SEQ ID NO: 118292 - RNA, 15 nt, Homo sapiens
auuuuaugcuuuaaa

SEQ ID NO: 118293 - RNA, 18 nt, Homo sapiens
agguuuuuaagccuuaaa

SEQ ID NO: 118294 - RNA, 11 nt, Homo sapiens
uuuaauuuugg

SEQ ID NO: 118295 - RNA, 17 nt, Homo sapiens
caaguuguuugagaaau

SEQ ID NO: 118296 - RNA, 16 nt, Homo sapiens
ugacaucucugcaauc

SEQ ID NO: 118297 - RNA, 24 nt, Homo sapiens
ggugaucucauuuaauccucucaa

SEQ ID NO: 118298 - RNA, 22 nt, Homo sapiens
uaaaauggacuguggugacuuu

SEQ ID NO: 118299 - RNA, 23 nt, Homo sapiens
aucugaggaauucuguauagauu

SEQ ID NO: 118300 - RNA, 16 nt, Homo sapiens
cauuuaauccucucaa

SEQ ID NO: 118301 - RNA, 14 nt, Homo sapiens
agcacacacuuuug

SEQ ID NO: 118302 - RNA, 20 nt, Homo sapiens
guuauuuauaaucacuuuuu

SEQ ID NO: 118303 - RNA, 18 nt, Homo sapiens
aaggaaacuggguuccug

SEQ ID NO: 118304 - RNA, 23 nt, Homo sapiens
ugcugaguuugugcugguguaug

SEQ ID NO: 118305 - RNA, 19 nt, Homo sapiens
aucugacaucucugcaauc

SEQ ID NO: 118306 - RNA, 15 nt, Homo sapiens
agccugcacggugaa

SEQ ID NO: 118307 - RNA, 11 nt, Homo sapiens
caucucugcaa

SEQ ID NO: 118308 - RNA, 22 nt, Homo sapiens
agaucuaguucacucuccauuu

SEQ ID NO: 118309 - RNA, 18 nt, Homo sapiens
aauucccuggccuuucau

SEQ ID NO: 118310 - RNA, 17 nt, Homo sapiens
cacaccccagacgaugu

SEQ ID NO: 118311 - RNA, 22 nt, Homo sapiens
uugaaacggaugauuucuaugc

SEQ ID NO: 118312 - RNA, 21 nt, Homo sapiens
aaggaaacuggguuccugcaa

SEQ ID NO: 118313 - RNA, 20 nt, Homo sapiens
uuaaggauuuuaugcuuuaa

SEQ ID NO: 118314 - RNA, 23 nt, Homo sapiens
aaggaagguucuggugugaacua

SEQ ID NO: 118315 - RNA, 18 nt, Homo sapiens
aacuggguuccugcaaug

SEQ ID NO: 118316 - RNA, 14 nt, Homo sapiens
ucacugauuugaca

SEQ ID NO: 118317 - RNA, 22 nt, Homo sapiens
uauuaaagccauguuuauuaca

SEQ ID NO: 118318 - RNA, 22 nt, Homo sapiens
aauuauaucugaggaauucugu

SEQ ID NO: 118319 - RNA, 17 nt, Homo sapiens
uucauaccuacauguau

SEQ ID NO: 118320 - RNA, 22 nt, Homo sapiens
ugcauaggugaucucauuuaau

SEQ ID NO: 118321 - RNA, 14 nt, Homo sapiens
cuggguuccugcaa

SEQ ID NO: 118322 - RNA, 19 nt, Homo sapiens
gguugcuuuaauaucauca

SEQ ID NO: 118323 - RNA, 15 nt, Homo sapiens
agauuagaauucugu

SEQ ID NO: 118324 - RNA, 15 nt, Homo sapiens
guuuuuaagccuuaa

SEQ ID NO: 118325 - RNA, 18 nt, Homo sapiens
aucgcuuuugauaaucaa

SEQ ID NO: 118326 - RNA, 13 nt, Homo sapiens
ucuggugugaacu

SEQ ID NO: 118327 - RNA, 15 nt, Homo sapiens
uguguaaauacaauu

SEQ ID NO: 118328 - RNA, 23 nt, Homo sapiens
aagcauuuuauaaaucgcuuuug

SEQ ID NO: 118329 - RNA, 13 nt, Homo sapiens
aaccaccuuucag

SEQ ID NO: 118330 - RNA, 21 nt, Homo sapiens
uuuauuggcuuuucugaucca

SEQ ID NO: 118331 - RNA, 17 nt, Homo sapiens
caaaccucugugagcau

SEQ ID NO: 118332 - RNA, 15 nt, Homo sapiens
ucuuuaauuuuggaa

SEQ ID NO: 118333 - RNA, 15 nt, Homo sapiens
ugaguuugugcuggu

SEQ ID NO: 118334 - RNA, 22 nt, Homo sapiens
ucaucaguauugaagcauuuua

SEQ ID NO: 118335 - RNA, 11 nt, Homo sapiens
auuaaagccau

SEQ ID NO: 118336 - RNA, 18 nt, Homo sapiens
uaauaucaucaguauuga

SEQ ID NO: 118337 - RNA, 15 nt, Homo sapiens
gauuuuaugcuuuaa

SEQ ID NO: 118338 - RNA, 16 nt, Homo sapiens
uuuugguugcuuuaau

SEQ ID NO: 118339 - RNA, 13 nt, Homo sapiens
uacuuugugcugg

SEQ ID NO: 118340 - RNA, 21 nt, Homo sapiens
gaccauaaccccggaagccaa

SEQ ID NO: 118341 - RNA, 17 nt, Homo sapiens
caugggauaaaugccau

SEQ ID NO: 118342 - RNA, 23 nt, Homo sapiens
uuuccacauaaggaaacuggguu

SEQ ID NO: 118343 - RNA, 19 nt, Homo sapiens
uguuuccuagcacacacuu

SEQ ID NO: 118344 - RNA, 23 nt, Homo sapiens
aucacaguuuugguugcuuuaau

SEQ ID NO: 118345 - RNA, 15 nt, Homo sapiens
uauuuauaaucacuu

SEQ ID NO: 118346 - RNA, 15 nt, Homo sapiens
aauuuauuggcuuuu

SEQ ID NO: 118347 - RNA, 18 nt, Homo sapiens
aguuuaauauuaaagcca

SEQ ID NO: 118348 - RNA, 14 nt, Homo sapiens
uaaggaaacugggu

SEQ ID NO: 118349 - RNA, 15 nt, Homo sapiens
auuuaauccucucaa

SEQ ID NO: 118350 - RNA, 16 nt, Homo sapiens
uaauauuaaagccaug

SEQ ID NO: 118351 - RNA, 13 nt, Homo sapiens
uguuucuguacuu

SEQ ID NO: 118352 - RNA, 19 nt, Homo sapiens
aguauaauuaacauguuaa

SEQ ID NO: 118353 - RNA, 21 nt, Homo sapiens
ugcaaucuucucagaaggcaa

SEQ ID NO: 118354 - RNA, 22 nt, Homo sapiens
aggaaacuggguuccugcaaug

SEQ ID NO: 118355 - RNA, 13 nt, Homo sapiens
uaaucaacugggc

SEQ ID NO: 118356 - RNA, 17 nt, Homo sapiens
aaguugccuaaauccau

SEQ ID NO: 118357 - RNA, 15 nt, Homo sapiens
ugcuauuucuauauu

SEQ ID NO: 118358 - RNA, 13 nt, Homo sapiens
aguuggguguauu

SEQ ID NO: 118359 - RNA, 19 nt, Homo sapiens
ucaauaaaaaauuaugaca

SEQ ID NO: 118360 - RNA, 22 nt, Homo sapiens
cuucucagaaggcaaaugacuu

SEQ ID NO: 118361 - RNA, 17 nt, Homo sapiens
uauucacugauuugaca

SEQ ID NO: 118362 - RNA, 21 nt, Homo sapiens
ggaagccaaaccucugugagc

SEQ ID NO: 118363 - RNA, 11 nt, Homo sapiens
uacaauuuugu

SEQ ID NO: 118364 - RNA, 23 nt, Homo sapiens
uggaccauaaccccggaagccaa

SEQ ID NO: 118365 - RNA, 13 nt, Homo sapiens
gauuguacuuugu

SEQ ID NO: 118366 - RNA, 17 nt, Homo sapiens
uuguauagaaccucuuu

SEQ ID NO: 118367 - RNA, 19 nt, Homo sapiens
uguauugugcgcuaaacuu

SEQ ID NO: 118368 - RNA, 14 nt, Homo sapiens
aacuaaacuuucac

SEQ ID NO: 118369 - RNA, 19 nt, Homo sapiens
aaccaugggauaaaugcca

SEQ ID NO: 118370 - RNA, 22 nt, Homo sapiens
ugccaucaauaaaaaauuauga

SEQ ID NO: 118371 - RNA, 17 nt, Homo sapiens
auaauaaagaucaugua

SEQ ID NO: 118372 - RNA, 13 nt, Homo sapiens
aagugaaacugcu

SEQ ID NO: 118373 - RNA, 17 nt, Homo sapiens
uucagauaacuguuauu

SEQ ID NO: 118374 - RNA, 23 nt, Homo sapiens
cuuucagauacuggauuguacuu

SEQ ID NO: 118375 - RNA, 22 nt, Homo sapiens
auuaaggauuuuaugcuuuaaa

SEQ ID NO: 118376 - RNA, 20 nt, Homo sapiens
uacagaagccccacccugcc

SEQ ID NO: 118377 - RNA, 15 nt, Homo sapiens
ucucuuucguuacag

SEQ ID NO: 118378 - RNA, 19 nt, Homo sapiens
agguucuggugugaacuaa

SEQ ID NO: 118379 - RNA, 18 nt, Homo sapiens
acaccauuaugugcgcug

SEQ ID NO: 118380 - RNA, 17 nt, Homo sapiens
auuuauaaucacuuuuu

SEQ ID NO: 118381 - RNA, 16 nt, Homo sapiens
ucucaaccaccuuuca

SEQ ID NO: 118382 - RNA, 16 nt, Homo sapiens
auuauguaaaucccau

SEQ ID NO: 118383 - RNA, 20 nt, Homo sapiens
augcuuuaaacauugguucu

SEQ ID NO: 118384 - RNA, 17 nt, Homo sapiens
uguuaaaccaugggaua

SEQ ID NO: 118385 - RNA, 19 nt, Homo sapiens
ucacauugguguuguacuc

SEQ ID NO: 118386 - RNA, 19 nt, Homo sapiens
ugugaacuaaacuuucaca

SEQ ID NO: 118387 - RNA, 20 nt, Homo sapiens
aaguuuaauauuaaagccau

SEQ ID NO: 118388 - RNA, 13 nt, Homo sapiens
ugcugggguuauc

SEQ ID NO: 118389 - RNA, 18 nt, Homo sapiens
aaagccauguuuauuaca

SEQ ID NO: 118390 - RNA, 14 nt, Homo sapiens
auuuuaugauccag

SEQ ID NO: 118391 - RNA, 21 nt, Homo sapiens
uuuugguugcuuuaauaucau

SEQ ID NO: 118392 - RNA, 14 nt, Homo sapiens
acauguuaaaccau

SEQ ID NO: 118393 - RNA, 19 nt, Homo sapiens
uuguuugcauaggugaucu

SEQ ID NO: 118394 - RNA, 17 nt, Homo sapiens
aucucauuuaauccucu

SEQ ID NO: 118395 - RNA, 19 nt, Homo sapiens
uuaaggauuuuaugcuuua

SEQ ID NO: 118396 - RNA, 12 nt, Homo sapiens
ccggaagccaaa

SEQ ID NO: 118397 - RNA, 13 nt, Homo sapiens
uaagaaugaaaua

SEQ ID NO: 118398 - RNA, 15 nt, Homo sapiens
uaauauuaaagccau

SEQ ID NO: 118399 - RNA, 20 nt, Homo sapiens
ucaaaguugccuaaauccau

SEQ ID NO: 118400 - RNA, 15 nt, Homo sapiens
uggugacuuuggaua

SEQ ID NO: 118401 - RNA, 22 nt, Homo sapiens
ugaggaauucuguauagauuag

SEQ ID NO: 118402 - RNA, 16 nt, Homo sapiens
aaccucuuugucuaca

SEQ ID NO: 118403 - RNA, 21 nt, Homo sapiens
aagucuguuuuaugacuucau

SEQ ID NO: 118404 - RNA, 20 nt, Homo sapiens
accccagacgaugucuucau

SEQ ID NO: 118405 - RNA, 21 nt, Homo sapiens
ugucuugccuuuuucauuauu

SEQ ID NO: 118406 - RNA, 13 nt, Homo sapiens
cucagaaggcaaa

SEQ ID NO: 118407 - RNA, 23 nt, Homo sapiens
uccucucaaccaccuuucagaua

SEQ ID NO: 118408 - RNA, 20 nt, Homo sapiens
aauagcuagacuggugacug

SEQ ID NO: 118409 - RNA, 21 nt, Homo sapiens
gcaaucuucucagaaggcaaa

SEQ ID NO: 118410 - RNA, 13 nt, Homo sapiens
caucacaguuuug

SEQ ID NO: 118411 - RNA, 19 nt, Homo sapiens
aaacuggguuccugcaaug

SEQ ID NO: 118412 - RNA, 23 nt, Homo sapiens
cauauauuuuuauauuuacuaaa

SEQ ID NO: 118413 - RNA, 16 nt, Homo sapiens
uguaaaucccauuauu

SEQ ID NO: 118414 - RNA, 15 nt, Homo sapiens
uaaagaucauguaaa

SEQ ID NO: 118415 - RNA, 20 nt, Homo sapiens
ccauaaccccggaagccaaa

SEQ ID NO: 118416 - RNA, 20 nt, Homo sapiens
uugauaaucaacugggcuga

SEQ ID NO: 118417 - RNA, 16 nt, Homo sapiens
uucacugauuugacau

SEQ ID NO: 118418 - RNA, 14 nt, Homo sapiens
ucuuaaaguugaau

SEQ ID NO: 118419 - RNA, 22 nt, Homo sapiens
ugaguuggguguauugugcgcu

SEQ ID NO: 118420 - RNA, 14 nt, Homo sapiens
uaucaucaguauug

SEQ ID NO: 118421 - RNA, 21 nt, Homo sapiens
gaaugguccgugcuaaggacu

SEQ ID NO: 118422 - RNA, 11 nt, Homo sapiens
uuccugcaaug

SEQ ID NO: 118423 - RNA, 13 nt, Homo sapiens
aaggaagguucug

SEQ ID NO: 118424 - RNA, 23 nt, Homo sapiens
cuuaaaggaagguucugguguga

SEQ ID NO: 118425 - RNA, 16 nt, Homo sapiens
aggaagccugauuaaa

SEQ ID NO: 118426 - RNA, 22 nt, Homo sapiens
cacaccccagacgaugucuuca

SEQ ID NO: 118427 - RNA, 17 nt, Homo sapiens
gaaauuugaauuuugug

SEQ ID NO: 118428 - RNA, 21 nt, Homo sapiens
ugauccaguuuuguuuggacc

SEQ ID NO: 118429 - RNA, 22 nt, Homo sapiens
uaaacauugguucuuguauuaa

SEQ ID NO: 118430 - RNA, 14 nt, Homo sapiens
uguacuuuuuggca

SEQ ID NO: 118431 - RNA, 17 nt, Human enterovirus C
ucggauuggguuauacu

SEQ ID NO: 118432 - RNA, 18 nt, Human enterovirus C
ucggauuggguuauacug

SEQ ID NO: 118433 - RNA, 19 nt, Human enterovirus C
ucggauuggguuauacugu

SEQ ID NO: 118434 - RNA, 16 nt, Human enterovirus C
cucagucggauucgga

SEQ ID NO: 118435 - RNA, 13 nt, Human enterovirus C
cuguuguaggggu

SEQ ID NO: 118436 - RNA, 19 nt, Human enterovirus C
accucagucggauucggau

SEQ ID NO: 118437 - RNA, 17 nt, Human enterovirus C
auacuguuguaggggua

SEQ ID NO: 118438 - RNA, 17 nt, Human enterovirus C
gauuggguuauacuguu

SEQ ID NO: 118439 - RNA, 11 nt, Human enterovirus C
uuuucuuuaau

SEQ ID NO: 118440 - RNA, 15 nt, Human enterovirus C
uggguuauacuguug

SEQ ID NO: 118441 - RNA, 13 nt, Human enterovirus C
uacuguuguaggg

SEQ ID NO: 118442 - RNA, 15 nt, Human enterovirus C
uacuguuguaggggu

SEQ ID NO: 118443 - RNA, 16 nt, Human enterovirus C
uacuguuguaggggua

SEQ ID NO: 118444 - RNA, 16 nt, Human enterovirus C
ucagucggauucggau

SEQ ID NO: 118445 - RNA, 19 nt, Human enterovirus C
uucggauuggguuauacug

SEQ ID NO: 118446 - RNA, 23 nt, Human enterovirus C
uucggauuggguuauacuguugu

SEQ ID NO: 118447 - RNA, 15 nt, Human enterovirus C
auuuuucuuuaauuc

SEQ ID NO: 118448 - RNA, 12 nt, Human enterovirus C
uauacuguugua

SEQ ID NO: 118449 - RNA, 13 nt, Human enterovirus C
guuguagggguaa

SEQ ID NO: 118450 - RNA, 21 nt, Human enterovirus C
gguuauacuguuguaggggua

SEQ ID NO: 118451 - RNA, 22 nt, Human enterovirus C
gguuauacuguuguagggguaa

SEQ ID NO: 118452 - RNA, 13 nt, Human enterovirus C
ggguuauacuguu

SEQ ID NO: 118453 - RNA, 22 nt, Human enterovirus C
gauucggauuggguuauacugu

SEQ ID NO: 118454 - RNA, 22 nt, Human enterovirus C
guagggguaaauuuuucuuuaa

SEQ ID NO: 118455 - RNA, 15 nt, Human enterovirus C
gggguaaauuuuucu

SEQ ID NO: 118456 - RNA, 11 nt, Human enterovirus C
uauacuguugu

SEQ ID NO: 118457 - RNA, 16 nt, Human enterovirus C
uauacuguuguagggg

SEQ ID NO: 118458 - RNA, 14 nt, Human enterovirus C
uuguagggguaaau

SEQ ID NO: 118459 - RNA, 23 nt, Human enterovirus C
cagucggauucggauuggguuau

SEQ ID NO: 118460 - RNA, 22 nt, Human enterovirus C
auucggauuggguuauacuguu

SEQ ID NO: 118461 - RNA, 17 nt, Homo sapiens
auaauaaagaucaugua

SEQ ID NO: 118462 - RNA, 20 nt, Homo sapiens
uggcuuuucugauccaguuu

SEQ ID NO: 118463 - RNA, 18 nt, Homo sapiens
uaauaucaucaguauuga

SEQ ID NO: 118464 - RNA, 15 nt, Homo sapiens
uauuuauaaucacuu

SEQ ID NO: 118465 - RNA, 15 nt, Homo sapiens
auuuaauccucucaa

SEQ ID NO: 118466 - RNA, 15 nt, Homo sapiens
aacauguuaaaccau

SEQ ID NO: 118467 - RNA, 23 nt, Homo sapiens
guuugugcugguguaugugugaa

SEQ ID NO: 118468 - RNA, 16 nt, Homo sapiens
cuccaauuaaggauuu

SEQ ID NO: 118469 - RNA, 21 nt, Homo sapiens
ugcaaucuucucagaaggcaa

SEQ ID NO: 118470 - RNA, 19 nt, Homo sapiens
gguugcuuuaauaucauca

SEQ ID NO: 118471 - RNA, 11 nt, Homo sapiens
auuaaagccau

SEQ ID NO: 118472 - RNA, 13 nt, Homo sapiens
uacuuugugcugg

SEQ ID NO: 118473 - RNA, 13 nt, Homo sapiens
gauuguacuuugu

SEQ ID NO: 118474 - RNA, 20 nt, Homo sapiens
auuuuauuauguaaauccca

SEQ ID NO: 118475 - RNA, 14 nt, Homo sapiens
uauuuuaugaucca

SEQ ID NO: 118476 - RNA, 15 nt, Homo sapiens
agauuagaauucugu

SEQ ID NO: 118477 - RNA, 17 nt, Homo sapiens
caugggauaaaugccau

SEQ ID NO: 118478 - RNA, 23 nt, Homo sapiens
aucacaguuuugguugcuuuaau

SEQ ID NO: 118479 - RNA, 15 nt, Homo sapiens
auuuuagcuacuaua

SEQ ID NO: 118480 - RNA, 18 nt, Homo sapiens
uucauuauuuuauuauga

SEQ ID NO: 118481 - RNA, 20 nt, Homo sapiens
uuaaggauuuuaugcuuuaa

SEQ ID NO: 118482 - RNA, 18 nt, Homo sapiens
aacuggguuccugcaaug

SEQ ID NO: 118483 - RNA, 16 nt, Homo sapiens
agaaauuaaguaucug

SEQ ID NO: 118484 - RNA, 22 nt, Homo sapiens
aauuauaucugaggaauucugu

SEQ ID NO: 118485 - RNA, 18 nt, Homo sapiens
aucgcuuuugauaaucaa

SEQ ID NO: 118486 - RNA, 18 nt, Homo sapiens
ucuguacuuuuuggcaua

SEQ ID NO: 118487 - RNA, 21 nt, Homo sapiens
uucagauacuggauuguacuu

SEQ ID NO: 118488 - RNA, 17 nt, Homo sapiens
auuggcuuuucugaucc

SEQ ID NO: 118489 - RNA, 16 nt, Homo sapiens
ugucuacaccauuaug

SEQ ID NO: 118490 - RNA, 17 nt, Homo sapiens
ccuagcacacacuuuug

SEQ ID NO: 118491 - RNA, 20 nt, Homo sapiens
uuguuuagucuugucucaga

SEQ ID NO: 118492 - RNA, 23 nt, Homo sapiens
auuugaauuuuguguuagagauu

SEQ ID NO: 118493 - RNA, 15 nt, Homo sapiens
caguauuguacaaag

SEQ ID NO: 118494 - RNA, 11 nt, Homo sapiens
uuuaauuuugg

SEQ ID NO: 118495 - RNA, 20 nt, Homo sapiens
aaguuuaauauuaaagccau

SEQ ID NO: 118496 - RNA, 21 nt, Homo sapiens
gucucugaagugaaacugcuu

SEQ ID NO: 118497 - RNA, 22 nt, Homo sapiens
uauuaaagccauguuuauuaca

SEQ ID NO: 118498 - RNA, 21 nt, Homo sapiens
ucacaguuuugguugcuuuaa

SEQ ID NO: 118499 - RNA, 12 nt, Homo sapiens
aucugaggaauu

SEQ ID NO: 118500 - RNA, 15 nt, Homo sapiens
auuuuaugcuuuaaa

SEQ ID NO: 118501 - RNA, 21 nt, Homo sapiens
uuuauuggcuuuucugaucca

SEQ ID NO: 118502 - RNA, 14 nt, Homo sapiens
cuuuucugauccag

SEQ ID NO: 118503 - RNA, 16 nt, Homo sapiens
cuuucagauacuggau

SEQ ID NO: 118504 - RNA, 17 nt, Homo sapiens
uucauaccuacauguau

SEQ ID NO: 118505 - RNA, 23 nt, Homo sapiens
uuuccacauaaggaaacuggguu

SEQ ID NO: 118506 - RNA, 14 nt, Homo sapiens
uaaggaaacugggu

SEQ ID NO: 118507 - RNA, 17 nt, Homo sapiens
gacauagucuggcugua

SEQ ID NO: 118508 - RNA, 19 nt, Homo sapiens
ggauucuuaaaguugaauu

SEQ ID NO: 118509 - RNA, 19 nt, Homo sapiens
aagccccacccugccucac

SEQ ID NO: 118510 - RNA, 23 nt, Homo sapiens
gagcaucacaguuuugguugcuu

SEQ ID NO: 118511 - RNA, 16 nt, Homo sapiens
uaacauguuaaaccau

SEQ ID NO: 118512 - RNA, 14 nt, Homo sapiens
cuggguuccugcaa

SEQ ID NO: 118513 - RNA, 22 nt, Homo sapiens
ugcauaggugaucucauuuaau

SEQ ID NO: 118514 - RNA, 14 nt, Homo sapiens
uaauaucaucagua

SEQ ID NO: 118515 - RNA, 20 nt, Homo sapiens
aguauuguacaaaguauuaa

SEQ ID NO: 118516 - RNA, 23 nt, Homo sapiens
cucccuauuuuuuuucuguuaua

SEQ ID NO: 118517 - RNA, 21 nt, Homo sapiens
ucucaaccaccuuucagauaa

SEQ ID NO: 118518 - RNA, 16 nt, Homo sapiens
caaugaagucucugaa

SEQ ID NO: 118519 - RNA, 17 nt, Homo sapiens
cugggcugaacacucca

SEQ ID NO: 118520 - RNA, 21 nt, Homo sapiens
auucaaaguugccuaaaucca

SEQ ID NO: 118521 - RNA, 19 nt, Homo sapiens
acaguuuugguugcuuuaa

SEQ ID NO: 118522 - RNA, 22 nt, Homo sapiens
augauuucuaugcugaguuugu

SEQ ID NO: 118523 - RNA, 22 nt, Homo sapiens
uuguuugagaaauuaaguaucu

SEQ ID NO: 118524 - RNA, 14 nt, Homo sapiens
caaaguugccuaaa

SEQ ID NO: 118525 - RNA, 16 nt, Homo sapiens
ugacaucucugcaauc

SEQ ID NO: 118526 - RNA, 16 nt, Homo sapiens
guuuugguugcuuuaa

SEQ ID NO: 118527 - RNA, 20 nt, Homo sapiens
ugcugaguuugugcuggugu

SEQ ID NO: 118528 - RNA, 17 nt, Homo sapiens
gaaauuugaauuuugug

SEQ ID NO: 118529 - RNA, 14 nt, Homo sapiens
ccucucaaccaccu

SEQ ID NO: 118530 - RNA, 22 nt, Homo sapiens
aauaaauucccuggccuuucau

SEQ ID NO: 118531 - RNA, 16 nt, Homo sapiens
acggugaauggcuuug

SEQ ID NO: 118532 - RNA, 22 nt, Homo sapiens
auaaaucgcuuuugauaaucaa

SEQ ID NO: 118533 - RNA, 16 nt, Homo sapiens
cauguauuuguuugca

SEQ ID NO: 118534 - RNA, 18 nt, Homo sapiens
aauucccuggccuuucau

SEQ ID NO: 118535 - RNA, 17 nt, Homo sapiens
auuuuuuuucuguuaua

SEQ ID NO: 118536 - RNA, 18 nt, Homo sapiens
acuguuauuuauaaucac

SEQ ID NO: 118537 - RNA, 22 nt, Homo sapiens
aaauacuguuugagguuuuuaa

SEQ ID NO: 118538 - RNA, 22 nt, Homo sapiens
gaccauaaccccggaagccaaa

SEQ ID NO: 118539 - RNA, 21 nt, Homo sapiens
uuccugcaaugaagucucuga

SEQ ID NO: 118540 - RNA, 20 nt, Homo sapiens
uccucucaaccaccuuucag

SEQ ID NO: 118541 - RNA, 22 nt, Homo sapiens
uuuggaccaaaaaccaguauug

SEQ ID NO: 118542 - RNA, 22 nt, Homo sapiens
ugucuacaccauuaugugcgcu

SEQ ID NO: 118543 - RNA, 12 nt, Homo sapiens
accaccuuucag

SEQ ID NO: 118544 - RNA, 22 nt, Homo sapiens
guaugugugaagugagugaguu

SEQ ID NO: 118545 - RNA, 17 nt, Homo sapiens
cacaccccagacgaugu

SEQ ID NO: 118546 - RNA, 23 nt, Homo sapiens
ugcugaguuugugcugguguaug

SEQ ID NO: 118547 - RNA, 23 nt, Homo sapiens
agccugcacggugaauggcuuug

SEQ ID NO: 118548 - RNA, 16 nt, Homo sapiens
uucacugauuugacau

SEQ ID NO: 118549 - RNA, 19 nt, Homo sapiens
aucugacaucucugcaauc

SEQ ID NO: 118550 - RNA, 14 nt, Homo sapiens
ucuuaaaguugaau

SEQ ID NO: 118551 - RNA, 17 nt, Homo sapiens
aaguugccuaaauccau

SEQ ID NO: 118552 - RNA, 11 nt, Homo sapiens
caucucugcaa

SEQ ID NO: 118553 - RNA, 16 nt, Homo sapiens
cauuuaauccucucaa

SEQ ID NO: 118554 - RNA, 20 nt, Homo sapiens
ccauaaccccggaagccaaa

SEQ ID NO: 118555 - RNA, 17 nt, Homo sapiens
uacaccauuaugugcgc

SEQ ID NO: 118556 - RNA, 15 nt, Homo sapiens
ucucuuucguuacag

SEQ ID NO: 118557 - RNA, 16 nt, Homo sapiens
gaaggcaaaugacuuu

SEQ ID NO: 118558 - RNA, 22 nt, Homo sapiens
auuaaggauuuuaugcuuuaaa

SEQ ID NO: 118559 - RNA, 14 nt, Homo sapiens
aauucuguauagau

SEQ ID NO: 118560 - RNA, 22 nt, Homo sapiens
uaaaauggacuguggugacuuu

SEQ ID NO: 118561 - RNA, 23 nt, Homo sapiens
agauaacuguuauuuauaaucac

SEQ ID NO: 118562 - RNA, 14 nt, Homo sapiens
uguacuuuuuggca

SEQ ID NO: 118563 - RNA, 16 nt, Homo sapiens
aacagcuggugcccug

SEQ ID NO: 118564 - RNA, 13 nt, Homo sapiens
caucacaguuuug

SEQ ID NO: 118565 - RNA, 15 nt, Homo sapiens
agcaucacaguuuug

SEQ ID NO: 118566 - RNA, 17 nt, Homo sapiens
caaguuguuugagaaau

SEQ ID NO: 118567 - RNA, 20 nt, Homo sapiens
uugauaaucaacugggcuga

SEQ ID NO: 118568 - RNA, 19 nt, Homo sapiens
uuaaggauuuuaugcuuua

SEQ ID NO: 118569 - RNA, 20 nt, Homo sapiens
ucaaaguugccuaaauccau

SEQ ID NO: 118570 - RNA, 11 nt, Homo sapiens
uuccugcaaug

SEQ ID NO: 118571 - RNA, 14 nt, Homo sapiens
ucuucauaccuaca

SEQ ID NO: 118572 - RNA, 17 nt, Homo sapiens
uguuaaaccaugggaua

SEQ ID NO: 118573 - RNA, 19 nt, Homo sapiens
ccauuuggaaaucuuuaaa

SEQ ID NO: 118574 - RNA, 13 nt, Homo sapiens
aaggaagguucug

SEQ ID NO: 118575 - RNA, 16 nt, Homo sapiens
accaguauuguacaaa

SEQ ID NO: 118576 - RNA, 13 nt, Homo sapiens
cugaacacuccaa

SEQ ID NO: 118577 - RNA, 19 nt, Homo sapiens
ugugaacuaaacuuucaca

SEQ ID NO: 118578 - RNA, 19 nt, Homo sapiens
ucacauugguguuguacuc

SEQ ID NO: 118579 - RNA, 21 nt, Homo sapiens
uucuaugcugaguuugugcug

SEQ ID NO: 118580 - RNA, 22 nt, Homo sapiens
uaaacauugguucuuguauuaa

SEQ ID NO: 118581 - RNA, 19 nt, Homo sapiens
aaacuggguuccugcaaug

SEQ ID NO: 118582 - RNA, 17 nt, Homo sapiens
aguucacucuccauuua

SEQ ID NO: 118583 - RNA, 18 nt, Homo sapiens
ucagaaggcaaaugacuu

SEQ ID NO: 118584 - RNA, 16 nt, Homo sapiens
gaucugccuaaggacu

SEQ ID NO: 118585 - RNA, 18 nt, Homo sapiens
agguuuuuaagccuuaaa

SEQ ID NO: 118586 - RNA, 21 nt, Homo sapiens
ugucuugccuuuuucauuauu

SEQ ID NO: 118587 - RNA, 23 nt, Homo sapiens
ucagcaaaaauauuuuaugaucc

SEQ ID NO: 118588 - RNA, 16 nt, Homo sapiens
uuaugacuucauuaau

SEQ ID NO: 118589 - RNA, 15 nt, Homo sapiens
uggugacuuuggaua

SEQ ID NO: 118590 - RNA, 15 nt, Homo sapiens
uaauauuaaagccau

SEQ ID NO: 118591 - RNA, 18 nt, Homo sapiens
cuaaacuuucacacccca

SEQ ID NO: 118592 - RNA, 17 nt, Homo sapiens
agauuagagaguguuga

SEQ ID NO: 118593 - RNA, 21 nt, Homo sapiens
auuugacauagucuggcugua

SEQ ID NO: 118594 - RNA, 16 nt, Homo sapiens
aaccucuuugucuaca

SEQ ID NO: 118595 - RNA, 23 nt, Homo sapiens
cuuucagauacuggauuguacuu

SEQ ID NO: 118596 - RNA, 16 nt, Homo sapiens
cuggguuccugcaaug

SEQ ID NO: 118597 - RNA, 13 nt, Homo sapiens
uaagaaugaaaua

SEQ ID NO: 118598 - RNA, 18 nt, Homo sapiens
ccuaaggacuucuuuaau

SEQ ID NO: 118599 - RNA, 12 nt, Homo sapiens
uccugcaaugaa

SEQ ID NO: 118600 - RNA, 14 nt, Homo sapiens
aacuaaacuuucac

SEQ ID NO: 118601 - RNA, 19 nt, Homo sapiens
ucaauaaaaaauuaugaca

SEQ ID NO: 118602 - RNA, 13 nt, Homo sapiens
uguuucuguacuu

SEQ ID NO: 118603 - RNA, 22 nt, Homo sapiens
aacuguuauuuauaaucacuuu

SEQ ID NO: 118604 - RNA, 20 nt, Homo sapiens
accccggaagccaaaccucu

SEQ ID NO: 118605 - RNA, 13 nt, Homo sapiens
aguuggguguauu

SEQ ID NO: 118606 - RNA, 17 nt, Homo sapiens
uauucacugauuugaca

SEQ ID NO: 118607 - RNA, 17 nt, Homo sapiens
uauauaugugaugaucu

SEQ ID NO: 118608 - RNA, 16 nt, Homo sapiens
uguaaaucccauuauu

SEQ ID NO: 118609 - RNA, 19 nt, Homo sapiens
aguauaauuaacauguuaa

SEQ ID NO: 118610 - RNA, 15 nt, Homo sapiens
ugcuauuucuauauu

SEQ ID NO: 118611 - RNA, 21 nt, Homo sapiens
accuuucagauaacuguuauu

SEQ ID NO: 118612 - RNA, 14 nt, Homo sapiens
auaaucaacugggc

SEQ ID NO: 118613 - RNA, 22 nt, Homo sapiens
agucucugaagugaaacugcuu

SEQ ID NO: 118614 - RNA, 23 nt, Homo sapiens
cauauauuuuuauauuuacuaaa

SEQ ID NO: 118615 - RNA, 13 nt, Homo sapiens
aagugaaacugcu

SEQ ID NO: 118616 - RNA, 22 nt, Homo sapiens
ugaguuggguguauugugcgcu

SEQ ID NO: 118617 - RNA, 21 nt, Homo sapiens
gaaugguccgugcuaaggacu

SEQ ID NO: 118618 - RNA, 17 nt, Homo sapiens
uauagaaccucuuuguc

SEQ ID NO: 118619 - RNA, 21 nt, Homo sapiens
aagucuguuuuaugacuucau

SEQ ID NO: 118620 - RNA, 19 nt, Homo sapiens
cacaguuuugguugcuuua

SEQ ID NO: 118621 - RNA, 19 nt, Homo sapiens
uaagucuguuuuaugacuu

SEQ ID NO: 118622 - RNA, 23 nt, Homo sapiens
uguuuggaccaaaaaccaguauu

SEQ ID NO: 118623 - RNA, 20 nt, Homo sapiens
ucaauaaaaaauuaugacau

SEQ ID NO: 118624 - RNA, 18 nt, Homo sapiens
aaagccauguuuauuaca

SEQ ID NO: 118625 - RNA, 22 nt, Homo sapiens
aggaaacuggguuccugcaaug

SEQ ID NO: 118626 - RNA, 13 nt, Homo sapiens
cucagaaggcaaa

SEQ ID NO: 118627 - RNA, 19 nt, Homo sapiens
uguauugugcgcuaaacuu

SEQ ID NO: 118628 - RNA, 20 nt, Homo sapiens
uaaauucccuggccuuucau

SEQ ID NO: 118629 - RNA, 23 nt, Homo sapiens
aucugaggaauucuguauagauu

SEQ ID NO: 118630 - RNA, 19 nt, Homo sapiens
uagaucuaguucacucucc

SEQ ID NO: 118631 - RNA, 18 nt, Homo sapiens
ugaagucucugaagugaa

SEQ ID NO: 118632 - RNA, 14 nt, Homo sapiens
ucacugauuugaca

SEQ ID NO: 118633 - RNA, 12 nt, Homo sapiens
auaacuguuauu

SEQ ID NO: 118634 - RNA, 23 nt, Homo sapiens
cugcaaucuucucagaaggcaaa

SEQ ID NO: 118635 - RNA, 22 nt, Homo sapiens
uugaaacggaugauuucuaugc

SEQ ID NO: 118636 - RNA, 17 nt, Homo sapiens
caaaccucugugagcau

SEQ ID NO: 118637 - RNA, 20 nt, Homo sapiens
gcaaucuucucagaaggcaa

SEQ ID NO: 118638 - RNA, 15 nt, Homo sapiens
gauuuuaugcuuuaa

SEQ ID NO: 118639 - RNA, 16 nt, Homo sapiens
uaauauuaaagccaug

SEQ ID NO: 118640 - RNA, 13 nt, Homo sapiens
aaccaccuuucag

SEQ ID NO: 118641 - RNA, 19 nt, Homo sapiens
ggaagguucuggugugaac

SEQ ID NO: 118642 - RNA, 19 nt, Homo sapiens
cauaaccccggaagccaaa

SEQ ID NO: 118643 - RNA, 19 nt, Homo sapiens
uuaauaucaucaguauuga

SEQ ID NO: 118644 - RNA, 22 nt, Homo sapiens
cuucucagaaggcaaaugacuu

SEQ ID NO: 118645 - RNA, 20 nt, Homo sapiens
uugagaaauuaaguaucuga

SEQ ID NO: 118646 - RNA, 15 nt, Homo sapiens
ucuuuaauuuuggaa

SEQ ID NO: 118647 - RNA, 15 nt, Homo sapiens
aauuuauuggcuuuu

SEQ ID NO: 118648 - RNA, 13 nt, Homo sapiens
auaaucacuuuuu

SEQ ID NO: 118649 - RNA, 22 nt, Homo sapiens
ucaucaguauugaagcauuuua

SEQ ID NO: 118650 - RNA, 18 nt, Homo sapiens
aguuuaauauuaaagcca

SEQ ID NO: 118651 - RNA, 19 nt, Homo sapiens
aguugccuaaauccauuug

SEQ ID NO: 118652 - RNA, 21 nt, Homo sapiens
ggaagccaaaccucugugagc

SEQ ID NO: 118653 - RNA, 16 nt, Homo sapiens
ugaacuaaacuuucac

SEQ ID NO: 118654 - RNA, 14 nt, Homo sapiens
gugaauggcuuugu

SEQ ID NO: 118655 - RNA, 16 nt, Homo sapiens
acauaaaucugugaac

SEQ ID NO: 118656 - RNA, 21 nt, Homo sapiens
aaggaaacuggguuccugcaa

SEQ ID NO: 118657 - RNA, 23 nt, Homo sapiens
aaggaagguucuggugugaacua

SEQ ID NO: 118658 - RNA, 20 nt, Homo sapiens
cacauugguguuguacucaa

SEQ ID NO: 118659 - RNA, 16 nt, Homo sapiens
auuauguaaaucccau

SEQ ID NO: 118660 - RNA, 23 nt, Homo sapiens
aagcauuuuauaaaucgcuuuug

SEQ ID NO: 118661 - RNA, 17 nt, Homo sapiens
aaaaguuuaauauuaaa

SEQ ID NO: 118662 - RNA, 14 nt, Homo sapiens
augugaugaucuac

SEQ ID NO: 118663 - RNA, 20 nt, Homo sapiens
ugaagucagaucugccuaag

SEQ ID NO: 118664 - RNA, 18 nt, Homo sapiens
ggacuguggugacuuugg

SEQ ID NO: 118665 - RNA, 21 nt, Homo sapiens
uucuuaaauaauaaagaucau

SEQ ID NO: 118666 - RNA, 15 nt, Homo sapiens
guuuuuaagccuuaa

SEQ ID NO: 118667 - RNA, 15 nt, Homo sapiens
uuauaaaucgcuuuu

SEQ ID NO: 118668 - RNA, 16 nt, Homo sapiens
uuuugguugcuuuaau

SEQ ID NO: 118669 - RNA, 13 nt, Homo sapiens
uuugguugcuuua

SEQ ID NO: 118670 - RNA, 21 nt, Homo sapiens
gaccauaaccccggaagccaa

SEQ ID NO: 118671 - RNA, 15 nt, Homo sapiens
ugaguuugugcuggu

SEQ ID NO: 118672 - RNA, 17 nt, Homo sapiens
aagccugauuaaagaau

SEQ ID NO: 118673 - RNA, 18 nt, Homo sapiens
caucaguauugaagcauu

SEQ ID NO: 118674 - RNA, 20 nt, Homo sapiens
guuauuuauaaucacuuuuu

SEQ ID NO: 118675 - RNA, 14 nt, Homo sapiens
gcuagacuggugac

SEQ ID NO: 118676 - RNA, 19 nt, Homo sapiens
cuauuuuuuuucuguuaua

SEQ ID NO: 118677 - RNA, 18 nt, Homo sapiens
uuggaauuuuccuccuuu

SEQ ID NO: 118678 - RNA, 24 nt, Homo sapiens
uccaauuaaggauuuuaugcuuua

SEQ ID NO: 118679 - RNA, 19 nt, Homo sapiens
aaacuuucacaccccagac

SEQ ID NO: 118680 - RNA, 19 nt, Homo sapiens
auauuuacuaaaauggacu

SEQ ID NO: 118681 - RNA, 16 nt, Homo sapiens
gauuuuaugcuuuaaa

SEQ ID NO: 118682 - RNA, 11 nt, Homo sapiens
cggaagccaaa

SEQ ID NO: 118683 - RNA, 15 nt, Homo sapiens
uuagucuugucucag

SEQ ID NO: 118684 - RNA, 22 nt, Homo sapiens
agaucuaguucacucuccauuu

SEQ ID NO: 118685 - RNA, 19 nt, Homo sapiens
cuuucagauaacuguuauu

SEQ ID NO: 118686 - RNA, 21 nt, Homo sapiens
uagacuggugacugauucuuc

SEQ ID NO: 118687 - RNA, 21 nt, Homo sapiens
guacuuuuuggcauaacauaa

SEQ ID NO: 118688 - RNA, 16 nt, Homo sapiens
aaaccaguauuguaca

SEQ ID NO: 118689 - RNA, 22 nt, Homo sapiens
agccccacccugccucacccac

SEQ ID NO: 118690 - RNA, 19 nt, Homo sapiens
uaugcugaguuugugcugg

SEQ ID NO: 118691 - RNA, 13 nt, Homo sapiens
caaucuucucaga

SEQ ID NO: 118692 - RNA, 23 nt, Homo sapiens
uauaauuaacauguuaaaccaug

SEQ ID NO: 118693 - RNA, 14 nt, Homo sapiens
aauauuaaagccau

SEQ ID NO: 118694 - RNA, 16 nt, Homo sapiens
ugaagucagaucugcc

SEQ ID NO: 118695 - RNA, 13 nt, Homo sapiens
uuuuguuuggacc

SEQ ID NO: 118696 - RNA, 21 nt, Homo sapiens
cacaguuuugguugcuuuaau

SEQ ID NO: 118697 - RNA, 13 nt, Homo sapiens
ucuggugugaacu

SEQ ID NO: 118698 - RNA, 21 nt, Homo sapiens
gauacuggauuguacuuugug

SEQ ID NO: 118699 - RNA, 21 nt, Homo sapiens
ugauccaguuuuguuuggacc

SEQ ID NO: 118700 - RNA, 12 nt, Homo sapiens
uggccuuucaua

SEQ ID NO: 118701 - RNA, 19 nt, Homo sapiens
uguuuccuagcacacacuu

SEQ ID NO: 118702 - RNA, 22 nt, Homo sapiens
gaagcauuuuauaaaucgcuuu

SEQ ID NO: 118703 - RNA, 15 nt, Homo sapiens
uaaaucccauuauuc

SEQ ID NO: 118704 - RNA, 12 nt, Homo sapiens
uuuagucuuguc

SEQ ID NO: 118705 - RNA, 23 nt, Homo sapiens
uaaauagcuagacuggugacuga

SEQ ID NO: 118706 - RNA, 14 nt, Homo sapiens
agcacacacuuuug

SEQ ID NO: 118707 - RNA, 14 nt, Homo sapiens
cauaaaucugugaa

SEQ ID NO: 118708 - RNA, 24 nt, Homo sapiens
ggugaucucauuuaauccucucaa

SEQ ID NO: 118709 - RNA, 12 nt, Homo sapiens
aaggaaacuggg

SEQ ID NO: 118710 - RNA, 18 nt, Homo sapiens
aucacaguuuugguugcu

SEQ ID NO: 118711 - RNA, 14 nt, Homo sapiens
acaucucugcaauc

SEQ ID NO: 118712 - RNA, 22 nt, Homo sapiens
cauuuaauaauuauaugcuauu

SEQ ID NO: 118713 - RNA, 18 nt, Homo sapiens
acaccauuaugugcgcug

SEQ ID NO: 118714 - RNA, 17 nt, Homo sapiens
acauaaggaaacugggu

SEQ ID NO: 118715 - RNA, 15 nt, Homo sapiens
uaaagaucauguaaa

SEQ ID NO: 118716 - RNA, 17 nt, Homo sapiens
auuuauaaucacuuuuu

SEQ ID NO: 118717 - RNA, 21 nt, Homo sapiens
aaacauugguucuuguauuaa

SEQ ID NO: 118718 - RNA, 15 nt, Homo sapiens
uguacaaaguauuaa

SEQ ID NO: 118719 - RNA, 20 nt, Homo sapiens
cauuaauaauaaauucccug

SEQ ID NO: 118720 - RNA, 19 nt, Homo sapiens
cacucuccauuuaauaauu

SEQ ID NO: 118721 - RNA, 23 nt, Homo sapiens
uccucucaaccaccuuucagaua

SEQ ID NO: 118722 - RNA, 20 nt, Homo sapiens
uaugauccagcagauuauuc

SEQ ID NO: 118723 - RNA, 20 nt, Homo sapiens
aguugaauuuauuggcuuuu

SEQ ID NO: 118724 - RNA, 19 nt, Homo sapiens
aaggauuuuaugcuuuaaa

SEQ ID NO: 118725 - RNA, 19 nt, Homo sapiens
aaccaugggauaaaugcca

SEQ ID NO: 118726 - RNA, 11 nt, Homo sapiens
uacaauuuugu

SEQ ID NO: 118727 - RNA, 21 nt, Homo sapiens
cugaagucagaucugccuaag

SEQ ID NO: 118728 - RNA, 22 nt, Homo sapiens
ugaggaauucuguauagauuag

SEQ ID NO: 118729 - RNA, 22 nt, Homo sapiens
aaccucuuugucuacaccauua

SEQ ID NO: 118730 - RNA, 21 nt, Homo sapiens
gcaaucuucucagaaggcaaa

SEQ ID NO: 118731 - RNA, 23 nt, Homo sapiens
cuuaaaggaagguucugguguga

SEQ ID NO: 118732 - RNA, 20 nt, Homo sapiens
augcuuuaaacauugguucu

SEQ ID NO: 118733 - RNA, 14 nt, Homo sapiens
auuuuaugauccag

SEQ ID NO: 118734 - RNA, 13 nt, Homo sapiens
ugcugggguuauc

SEQ ID NO: 118735 - RNA, 21 nt, Homo sapiens
uggcauaacauaaaucuguga

SEQ ID NO: 118736 - RNA, 19 nt, Homo sapiens
uuguuugcauaggugaucu

SEQ ID NO: 118737 - RNA, 18 nt, Homo sapiens
aauggcuuuguauagaac

SEQ ID NO: 118738 - RNA, 23 nt, Homo sapiens
aaggaaacuggguuccugcaaug

SEQ ID NO: 118739 - RNA, 22 nt, Homo sapiens
agaaauuaaguaucugacaucu

SEQ ID NO: 118740 - RNA, 22 nt, Homo sapiens
caauuaaggauuuuaugcuuua

SEQ ID NO: 118741 - RNA, 13 nt, Homo sapiens
uaaucaacugggc

SEQ ID NO: 118742 - RNA, 16 nt, Homo sapiens
ucucaaccaccuuuca

SEQ ID NO: 118743 - RNA, 12 nt, Homo sapiens
ccggaagccaaa

SEQ ID NO: 118744 - RNA, 23 nt, Homo sapiens
uuggcauaacauaaaucugugaa

SEQ ID NO: 118745 - RNA, 17 nt, Homo sapiens
aggauuuuaugcuuuaa

SEQ ID NO: 118746 - RNA, 19 nt, Homo sapiens
ccaguuuuguuuggaccaa

SEQ ID NO: 118747 - RNA, 22 nt, Homo sapiens
ucccuauuuuuuuucuguuaua

SEQ ID NO: 118748 - RNA, 20 nt, Homo sapiens
accccagacgaugucuucau

SEQ ID NO: 118749 - RNA, 20 nt, Homo sapiens
aauagcuagacuggugacug

SEQ ID NO: 118750 - RNA, 14 nt, Homo sapiens
guacaaaguauuaa

SEQ ID NO: 118751 - RNA, 15 nt, Homo sapiens
uuuagucuugucuca

SEQ ID NO: 118752 - RNA, 12 nt, Homo sapiens
uuugaauuuugu

SEQ ID NO: 118753 - RNA, 20 nt, Homo sapiens
acaguuuugguugcuuuaau

SEQ ID NO: 118754 - RNA, 19 nt, Homo sapiens
agguucuggugugaacuaa

SEQ ID NO: 118755 - RNA, 17 nt, Homo sapiens
agucuguuuuaugacuu

SEQ ID NO: 118756 - RNA, 20 nt, Homo sapiens
uacagaagccccacccugcc

SEQ ID NO: 118757 - RNA, 14 nt, Homo sapiens
uacuauauauguga

SEQ ID NO: 118758 - RNA, 12 nt, Homo sapiens
uuaagccuuaaa

SEQ ID NO: 118759 - RNA, 18 nt, Homo sapiens
aaggaaacuggguuccug

SEQ ID NO: 118760 - RNA, 22 nt, Homo sapiens
cacaccccagacgaugucuuca

SEQ ID NO: 118761 - RNA, 15 nt, Homo sapiens
agccugcacggugaa

SEQ ID NO: 118762 - RNA, 20 nt, Homo sapiens
caaucuucucagaaggcaaa

SEQ ID NO: 118763 - RNA, 13 nt, Homo sapiens
uuuaugcuuuaaa

SEQ ID NO: 118764 - RNA, 14 nt, Homo sapiens
acauguuaaaccau

SEQ ID NO: 118765 - RNA, 16 nt, Homo sapiens
aggaagccugauuaaa

SEQ ID NO: 118766 - RNA, 17 nt, Homo sapiens
uuguauagaaccucuuu

SEQ ID NO: 118767 - RNA, 20 nt, Homo sapiens
ucacaguuuugguugcuuua

SEQ ID NO: 118768 - RNA, 16 nt, Homo sapiens
uuguacuuugugcugg

SEQ ID NO: 118769 - RNA, 16 nt, Homo sapiens
cucaaccaccuuucag

SEQ ID NO: 118770 - RNA, 17 nt, Homo sapiens
uguggugacuuuggaua

SEQ ID NO: 118771 - RNA, 13 nt, Homo sapiens
caucucugcaauc

SEQ ID NO: 118772 - RNA, 17 nt, Homo sapiens
aucugacaucucugcaa

SEQ ID NO: 118773 - RNA, 21 nt, Homo sapiens
uuuugguugcuuuaauaucau

SEQ ID NO: 118774 - RNA, 23 nt, Homo sapiens
uggaccauaaccccggaagccaa

SEQ ID NO: 118775 - RNA, 22 nt, Homo sapiens
ugccaucaauaaaaaauuauga

SEQ ID NO: 118776 - RNA, 15 nt, Homo sapiens
uguguaaauacaauu

SEQ ID NO: 118777 - RNA, 17 nt, Homo sapiens
uucagauaacuguuauu

SEQ ID NO: 118778 - RNA, 17 nt, Homo sapiens
aucucauuuaauccucu

SEQ ID NO: 118779 - RNA, 19 nt, Homo sapiens
aaauucccuggccuuucau

SEQ ID NO: 118780 - RNA, 14 nt, Homo sapiens
uaucaucaguauug

SEQ ID NO: 118781 - RNA, 20 nt, Human enterovirus D
ccucccuggggcauuagauu

SEQ ID NO: 118782 - RNA, 14 nt, Human enterovirus D
cuuaggaacccaag

SEQ ID NO: 118783 - RNA, 17 nt, Human enterovirus D
cuacuuaggaacccaag

SEQ ID NO: 118784 - RNA, 20 nt, Human enterovirus D
ucuacuuaggaacccaagaa

SEQ ID NO: 118785 - RNA, 18 nt, Human enterovirus D
uagauuuuguagagguaa

SEQ ID NO: 118786 - RNA, 12 nt, Human enterovirus D
aggaacccaaga

SEQ ID NO: 118787 - RNA, 21 nt, Human enterovirus D
cucuacuuaggaacccaagaa

SEQ ID NO: 118788 - RNA, 21 nt, Human enterovirus D
accccucccuggggcauuaga

SEQ ID NO: 118789 - RNA, 11 nt, Human enterovirus D
ggaacccaaga

SEQ ID NO: 118790 - RNA, 19 nt, Human enterovirus D
aacucuacuuaggaaccca

SEQ ID NO: 118791 - RNA, 13 nt, Human enterovirus D
uuaauugggaauc

SEQ ID NO: 118792 - RNA, 19 nt, Homo sapiens
aaacuuucacaccccagac

SEQ ID NO: 118793 - RNA, 19 nt, Homo sapiens
uaugcugaguuugugcugg

SEQ ID NO: 118794 - RNA, 20 nt, Homo sapiens
guuauuuauaaucacuuuuu

SEQ ID NO: 118795 - RNA, 18 nt, Homo sapiens
aucgcuuuugauaaucaa

SEQ ID NO: 118796 - RNA, 20 nt, Homo sapiens
uuguuuagucuugucucaga

SEQ ID NO: 118797 - RNA, 16 nt, Homo sapiens
cauguauuuguuugca

SEQ ID NO: 118798 - RNA, 22 nt, Homo sapiens
gaccauaaccccggaagccaaa

SEQ ID NO: 118799 - RNA, 14 nt, Homo sapiens
caaaguugccuaaa

SEQ ID NO: 118800 - RNA, 22 nt, Homo sapiens
ugucuacaccauuaugugcgcu

SEQ ID NO: 118801 - RNA, 21 nt, Homo sapiens
cacaguuuugguugcuuuaau

SEQ ID NO: 118802 - RNA, 16 nt, Homo sapiens
ugucuacaccauuaug

SEQ ID NO: 118803 - RNA, 12 nt, Homo sapiens
accaccuuucag

SEQ ID NO: 118804 - RNA, 23 nt, Homo sapiens
cucccuauuuuuuuucuguuaua

SEQ ID NO: 118805 - RNA, 20 nt, Homo sapiens
aguauuguacaaaguauuaa

SEQ ID NO: 118806 - RNA, 14 nt, Homo sapiens
agcacacacuuuug

SEQ ID NO: 118807 - RNA, 16 nt, Homo sapiens
uaauauuaaagccaug

SEQ ID NO: 118808 - RNA, 11 nt, Homo sapiens
caucucugcaa

SEQ ID NO: 118809 - RNA, 21 nt, Homo sapiens
gucucugaagugaaacugcuu

SEQ ID NO: 118810 - RNA, 23 nt, Homo sapiens
uaaauagcuagacuggugacuga

SEQ ID NO: 118811 - RNA, 24 nt, Homo sapiens
uccaauuaaggauuuuaugcuuua

SEQ ID NO: 118812 - RNA, 18 nt, Homo sapiens
uuggaauuuuccuccuuu

SEQ ID NO: 118813 - RNA, 16 nt, Homo sapiens
cauuuaauccucucaa

SEQ ID NO: 118814 - RNA, 15 nt, Homo sapiens
uaaaucccauuauuc

SEQ ID NO: 118815 - RNA, 19 nt, Homo sapiens
auauuuacuaaaauggacu

SEQ ID NO: 118816 - RNA, 23 nt, Homo sapiens
auuugaauuuuguguuagagauu

SEQ ID NO: 118817 - RNA, 17 nt, Homo sapiens
auuuuuuuucuguuaua

SEQ ID NO: 118818 - RNA, 16 nt, Homo sapiens
acggugaauggcuuug

SEQ ID NO: 118819 - RNA, 18 nt, Homo sapiens
ccuaaggacuucuuuaau

SEQ ID NO: 118820 - RNA, 15 nt, Homo sapiens
uggugacuuuggaua

SEQ ID NO: 118821 - RNA, 20 nt, Homo sapiens
gcaaucuucucagaaggcaa

SEQ ID NO: 118822 - RNA, 17 nt, Homo sapiens
aaaaguuuaauauuaaa

SEQ ID NO: 118823 - RNA, 15 nt, Homo sapiens
uauuuauaaucacuu

SEQ ID NO: 118824 - RNA, 15 nt, Homo sapiens
auuuuaugcuuuaaa

SEQ ID NO: 118825 - RNA, 21 nt, Homo sapiens
uucagauacuggauuguacuu

SEQ ID NO: 118826 - RNA, 15 nt, Homo sapiens
guuuuuaagccuuaa

SEQ ID NO: 118827 - RNA, 15 nt, Homo sapiens
aacauguuaaaccau

SEQ ID NO: 118828 - RNA, 14 nt, Homo sapiens
uaauaucaucagua

SEQ ID NO: 118829 - RNA, 14 nt, Homo sapiens
gugaauggcuuugu

SEQ ID NO: 118830 - RNA, 20 nt, Homo sapiens
aauagcuagacuggugacug

SEQ ID NO: 118831 - RNA, 11 nt, Homo sapiens
auuaaagccau

SEQ ID NO: 118832 - RNA, 16 nt, Homo sapiens
uuuugguugcuuuaau

SEQ ID NO: 118833 - RNA, 16 nt, Homo sapiens
ugaagucagaucugcc

SEQ ID NO: 118834 - RNA, 21 nt, Homo sapiens
uucuuaaauaauaaagaucau

SEQ ID NO: 118835 - RNA, 19 nt, Homo sapiens
aaacuggguuccugcaaug

SEQ ID NO: 118836 - RNA, 22 nt, Homo sapiens
agccccacccugccucacccac

SEQ ID NO: 118837 - RNA, 21 nt, Homo sapiens
ucucaaccaccuuucagauaa

SEQ ID NO: 118838 - RNA, 19 nt, Homo sapiens
uguuuccuagcacacacuu

SEQ ID NO: 118839 - RNA, 12 nt, Homo sapiens
uuuagucuuguc

SEQ ID NO: 118840 - RNA, 21 nt, Homo sapiens
ugauccaguuuuguuuggacc

SEQ ID NO: 118841 - RNA, 18 nt, Homo sapiens
aacuggguuccugcaaug

SEQ ID NO: 118842 - RNA, 16 nt, Homo sapiens
gauuuuaugcuuuaaa

SEQ ID NO: 118843 - RNA, 16 nt, Homo sapiens
aaaccaguauuguaca

SEQ ID NO: 118844 - RNA, 15 nt, Homo sapiens
gauuuuaugcuuuaa

SEQ ID NO: 118845 - RNA, 20 nt, Homo sapiens
uugauaaucaacugggcuga

SEQ ID NO: 118846 - RNA, 22 nt, Homo sapiens
uugaaacggaugauuucuaugc

SEQ ID NO: 118847 - RNA, 19 nt, Homo sapiens
ucacauugguguuguacuc

SEQ ID NO: 118848 - RNA, 17 nt, Homo sapiens
aguucacucuccauuua

SEQ ID NO: 118849 - RNA, 17 nt, Homo sapiens
caaaccucugugagcau

SEQ ID NO: 118850 - RNA, 18 nt, Homo sapiens
uucauuauuuuauuauga

SEQ ID NO: 118851 - RNA, 22 nt, Homo sapiens
aauuauaucugaggaauucugu

SEQ ID NO: 118852 - RNA, 17 nt, Homo sapiens
cacaccccagacgaugu

SEQ ID NO: 118853 - RNA, 15 nt, Homo sapiens
ugaguuugugcuggu

SEQ ID NO: 118854 - RNA, 13 nt, Homo sapiens
uuugguugcuuua

SEQ ID NO: 118855 - RNA, 16 nt, Homo sapiens
cuggguuccugcaaug

SEQ ID NO: 118856 - RNA, 16 nt, Homo sapiens
auuauguaaaucccau

SEQ ID NO: 118857 - RNA, 17 nt, Homo sapiens
aucucauuuaauccucu

SEQ ID NO: 118858 - RNA, 20 nt, Homo sapiens
cacauugguguuguacucaa

SEQ ID NO: 118859 - RNA, 13 nt, Homo sapiens
gauuguacuuugu

SEQ ID NO: 118860 - RNA, 19 nt, Homo sapiens
uuguuugcauaggugaucu

SEQ ID NO: 118861 - RNA, 16 nt, Homo sapiens
cuuucagauacuggau

SEQ ID NO: 118862 - RNA, 20 nt, Homo sapiens
auuuuauuauguaaauccca

SEQ ID NO: 118863 - RNA, 21 nt, Homo sapiens
uggcauaacauaaaucuguga

SEQ ID NO: 118864 - RNA, 22 nt, Homo sapiens
cuucucagaaggcaaaugacuu

SEQ ID NO: 118865 - RNA, 17 nt, Homo sapiens
agauuagagaguguuga

SEQ ID NO: 118866 - RNA, 13 nt, Homo sapiens
ugcugggguuauc

SEQ ID NO: 118867 - RNA, 14 nt, Homo sapiens
gcuagacuggugac

SEQ ID NO: 118868 - RNA, 19 nt, Homo sapiens
ggaagguucuggugugaac

SEQ ID NO: 118869 - RNA, 21 nt, Homo sapiens
ggaagccaaaccucugugagc

SEQ ID NO: 118870 - RNA, 23 nt, Homo sapiens
guuugugcugguguaugugugaa

SEQ ID NO: 118871 - RNA, 19 nt, Homo sapiens
uagaucuaguucacucucc

SEQ ID NO: 118872 - RNA, 16 nt, Homo sapiens
cuccaauuaaggauuu

SEQ ID NO: 118873 - RNA, 21 nt, Homo sapiens
uagacuggugacugauucuuc

SEQ ID NO: 118874 - RNA, 14 nt, Homo sapiens
acaucucugcaauc

SEQ ID NO: 118875 - RNA, 21 nt, Homo sapiens
gaccauaaccccggaagccaa

SEQ ID NO: 118876 - RNA, 11 nt, Homo sapiens
cggaagccaaa

SEQ ID NO: 118877 - RNA, 21 nt, Homo sapiens
gauacuggauuguacuuugug

SEQ ID NO: 118878 - RNA, 23 nt, Homo sapiens
aucugaggaauucuguauagauu

SEQ ID NO: 118879 - RNA, 19 nt, Homo sapiens
ggauucuuaaaguugaauu

SEQ ID NO: 118880 - RNA, 18 nt, Homo sapiens
ggacuguggugacuuugg

SEQ ID NO: 118881 - RNA, 15 nt, Homo sapiens
agauuagaauucugu

SEQ ID NO: 118882 - RNA, 16 nt, Homo sapiens
cucaaccaccuuucag

SEQ ID NO: 118883 - RNA, 19 nt, Homo sapiens
acaguuuugguugcuuuaa

SEQ ID NO: 118884 - RNA, 18 nt, Homo sapiens
aauggcuuuguauagaac

SEQ ID NO: 118885 - RNA, 21 nt, Homo sapiens
uuuauuggcuuuucugaucca

SEQ ID NO: 118886 - RNA, 15 nt, Homo sapiens
ucuuuaauuuuggaa

SEQ ID NO: 118887 - RNA, 13 nt, Homo sapiens
aaccaccuuucag

SEQ ID NO: 118888 - RNA, 14 nt, Homo sapiens
aacuaaacuuucac

SEQ ID NO: 118889 - RNA, 22 nt, Homo sapiens
aacuguuauuuauaaucacuuu

SEQ ID NO: 118890 - RNA, 17 nt, Homo sapiens
uucagauaacuguuauu

SEQ ID NO: 118891 - RNA, 20 nt, Homo sapiens
uacagaagccccacccugcc

SEQ ID NO: 118892 - RNA, 19 nt, Homo sapiens
uguauugugcgcuaaacuu

SEQ ID NO: 118893 - RNA, 17 nt, Homo sapiens
uauagaaccucuuuguc

SEQ ID NO: 118894 - RNA, 13 nt, Homo sapiens
uaagaaugaaaua

SEQ ID NO: 118895 - RNA, 18 nt, Homo sapiens
aguuuaauauuaaagcca

SEQ ID NO: 118896 - RNA, 12 nt, Homo sapiens
ccggaagccaaa

SEQ ID NO: 118897 - RNA, 22 nt, Homo sapiens
ucccuauuuuuuuucuguuaua

SEQ ID NO: 118898 - RNA, 23 nt, Homo sapiens
uguuuggaccaaaaaccaguauu

SEQ ID NO: 118899 - RNA, 16 nt, Homo sapiens
aggaagccugauuaaa

SEQ ID NO: 118900 - RNA, 13 nt, Homo sapiens
cucagaaggcaaa

SEQ ID NO: 118901 - RNA, 16 nt, Homo sapiens
uguaaaucccauuauu

SEQ ID NO: 118902 - RNA, 19 nt, Homo sapiens
ccaguuuuguuuggaccaa

SEQ ID NO: 118903 - RNA, 13 nt, Homo sapiens
caucucugcaauc

SEQ ID NO: 118904 - RNA, 20 nt, Homo sapiens
accccagacgaugucuucau

SEQ ID NO: 118905 - RNA, 16 nt, Homo sapiens
aaccucuuugucuaca

SEQ ID NO: 118906 - RNA, 21 nt, Homo sapiens
aagucuguuuuaugacuucau

SEQ ID NO: 118907 - RNA, 23 nt, Homo sapiens
ucagcaaaaauauuuuaugaucc

SEQ ID NO: 118908 - RNA, 19 nt, Homo sapiens
aaccaugggauaaaugcca

SEQ ID NO: 118909 - RNA, 18 nt, Homo sapiens
cuaaacuuucacacccca

SEQ ID NO: 118910 - RNA, 14 nt, Homo sapiens
acauguuaaaccau

SEQ ID NO: 118911 - RNA, 19 nt, Homo sapiens
cacucuccauuuaauaauu

SEQ ID NO: 118912 - RNA, 19 nt, Homo sapiens
aguauaauuaacauguuaa

SEQ ID NO: 118913 - RNA, 21 nt, Homo sapiens
accuuucagauaacuguuauu

SEQ ID NO: 118914 - RNA, 14 nt, Homo sapiens
auaaucaacugggc

SEQ ID NO: 118915 - RNA, 17 nt, Homo sapiens
aucugacaucucugcaa

SEQ ID NO: 118916 - RNA, 11 nt, Homo sapiens
uacaauuuugu

SEQ ID NO: 118917 - RNA, 21 nt, Homo sapiens
uuuugguugcuuuaauaucau

SEQ ID NO: 118918 - RNA, 22 nt, Homo sapiens
agaaauuaaguaucugacaucu

SEQ ID NO: 118919 - RNA, 23 nt, Homo sapiens
aaggaaacuggguuccugcaaug

SEQ ID NO: 118920 - RNA, 20 nt, Homo sapiens
uugagaaauuaaguaucuga

SEQ ID NO: 118921 - RNA, 18 nt, Homo sapiens
ugaagucucugaagugaa

SEQ ID NO: 118922 - RNA, 14 nt, Homo sapiens
uaucaucaguauug

SEQ ID NO: 118923 - RNA, 19 nt, Homo sapiens
aagccccacccugccucac

SEQ ID NO: 118924 - RNA, 13 nt, Homo sapiens
uguuucuguacuu

SEQ ID NO: 118925 - RNA, 22 nt, Homo sapiens
agucucugaagugaaacugcuu

SEQ ID NO: 118926 - RNA, 14 nt, Homo sapiens
cuggguuccugcaa

SEQ ID NO: 118927 - RNA, 13 nt, Homo sapiens
uaaucaacugggc

SEQ ID NO: 118928 - RNA, 20 nt, Homo sapiens
ucaauaaaaaauuaugacau

SEQ ID NO: 118929 - RNA, 21 nt, Homo sapiens
gcaaucuucucagaaggcaaa

SEQ ID NO: 118930 - RNA, 23 nt, Homo sapiens
gagcaucacaguuuugguugcuu

SEQ ID NO: 118931 - RNA, 13 nt, Homo sapiens
caaucuucucaga

SEQ ID NO: 118932 - RNA, 14 nt, Homo sapiens
ucuucauaccuaca

SEQ ID NO: 118933 - RNA, 16 nt, Homo sapiens
aacagcuggugcccug

SEQ ID NO: 118934 - RNA, 14 nt, Homo sapiens
ucuuaaaguugaau

SEQ ID NO: 118935 - RNA, 15 nt, Homo sapiens
agccugcacggugaa

SEQ ID NO: 118936 - RNA, 20 nt, Homo sapiens
ugaagucagaucugccuaag

SEQ ID NO: 118937 - RNA, 18 nt, Homo sapiens
agguuuuuaagccuuaaa

SEQ ID NO: 118938 - RNA, 16 nt, Homo sapiens
gaucugccuaaggacu

SEQ ID NO: 118939 - RNA, 14 nt, Homo sapiens
auuuuaugauccag

SEQ ID NO: 118940 - RNA, 20 nt, Homo sapiens
accccggaagccaaaccucu

SEQ ID NO: 118941 - RNA, 12 nt, Homo sapiens
uccugcaaugaa

SEQ ID NO: 118942 - RNA, 13 nt, Homo sapiens
aaggaagguucug

SEQ ID NO: 118943 - RNA, 15 nt, Homo sapiens
uuuagucuugucuca

SEQ ID NO: 118944 - RNA, 20 nt, Homo sapiens
aguugaauuuauuggcuuuu

SEQ ID NO: 118945 - RNA, 15 nt, Homo sapiens
ucucuuucguuacag

SEQ ID NO: 118946 - RNA, 12 nt, Homo sapiens
uuaagccuuaaa

SEQ ID NO: 118947 - RNA, 17 nt, Homo sapiens
uacaccauuaugugcgc

SEQ ID NO: 118948 - RNA, 17 nt, Homo sapiens
aaguugccuaaauccau

SEQ ID NO: 118949 - RNA, 17 nt, Homo sapiens
acauaaggaaacugggu

SEQ ID NO: 118950 - RNA, 14 nt, Homo sapiens
aauucuguauagau

SEQ ID NO: 118951 - RNA, 22 nt, Homo sapiens
aaccucuuugucuacaccauua

SEQ ID NO: 118952 - RNA, 18 nt, Homo sapiens
ucagaaggcaaaugacuu

SEQ ID NO: 118953 - RNA, 22 nt, Homo sapiens
uaaaauggacuguggugacuuu

SEQ ID NO: 118954 - RNA, 19 nt, Homo sapiens
aaauucccuggccuuucau

SEQ ID NO: 118955 - RNA, 16 nt, Homo sapiens
gaaggcaaaugacuuu

SEQ ID NO: 118956 - RNA, 21 nt, Homo sapiens
guacuuuuuggcauaacauaa

SEQ ID NO: 118957 - RNA, 17 nt, Homo sapiens
caaguuguuugagaaau

SEQ ID NO: 118958 - RNA, 20 nt, Homo sapiens
augcuuuaaacauugguucu

SEQ ID NO: 118959 - RNA, 22 nt, Homo sapiens
uuguuugagaaauuaaguaucu

SEQ ID NO: 118960 - RNA, 12 nt, Homo sapiens
uggccuuucaua

SEQ ID NO: 118961 - RNA, 20 nt, Homo sapiens
ucacaguuuugguugcuuua

SEQ ID NO: 118962 - RNA, 13 nt, Homo sapiens
aguuggguguauu

SEQ ID NO: 118963 - RNA, 17 nt, Homo sapiens
cugggcugaacacucca

SEQ ID NO: 118964 - RNA, 20 nt, Homo sapiens
ucaaaguugccuaaauccau

SEQ ID NO: 118965 - RNA, 23 nt, Homo sapiens
agauaacuguuauuuauaaucac

SEQ ID NO: 118966 - RNA, 16 nt, Homo sapiens
accaguauuguacaaa

SEQ ID NO: 118967 - RNA, 13 nt, Homo sapiens
ucuggugugaacu

SEQ ID NO: 118968 - RNA, 18 nt, Homo sapiens
uaauaucaucaguauuga

SEQ ID NO: 118969 - RNA, 21 nt, Homo sapiens
auucaaaguugccuaaaucca

SEQ ID NO: 118970 - RNA, 16 nt, Homo sapiens
ugacaucucugcaauc

SEQ ID NO: 118971 - RNA, 22 nt, Homo sapiens
aaauacuguuugagguuuuuaa

SEQ ID NO: 118972 - RNA, 18 nt, Homo sapiens
aauucccuggccuuucau

SEQ ID NO: 118973 - RNA, 17 nt, Homo sapiens
gaaauuugaauuuugug

SEQ ID NO: 118974 - RNA, 11 nt, Homo sapiens
uuuaauuuugg

SEQ ID NO: 118975 - RNA, 23 nt, Homo sapiens
ugcugaguuugugcugguguaug

SEQ ID NO: 118976 - RNA, 20 nt, Homo sapiens
uccucucaaccaccuuucag

SEQ ID NO: 118977 - RNA, 14 nt, Homo sapiens
uguacuuuuuggca

SEQ ID NO: 118978 - RNA, 14 nt, Homo sapiens
ccucucaaccaccu

SEQ ID NO: 118979 - RNA, 22 nt, Homo sapiens
uaaacauugguucuuguauuaa

SEQ ID NO: 118980 - RNA, 14 nt, Homo sapiens
cuuuucugauccag

SEQ ID NO: 118981 - RNA, 16 nt, Homo sapiens
caaugaagucucugaa

SEQ ID NO: 118982 - RNA, 22 nt, Homo sapiens
guaugugugaagugagugaguu

SEQ ID NO: 118983 - RNA, 12 nt, Homo sapiens
auaacuguuauu

SEQ ID NO: 118984 - RNA, 17 nt, Homo sapiens
uucauaccuacauguau

SEQ ID NO: 118985 - RNA, 19 nt, Homo sapiens
cuuucagauaacuguuauu

SEQ ID NO: 118986 - RNA, 22 nt, Homo sapiens
gaagcauuuuauaaaucgcuuu

SEQ ID NO: 118987 - RNA, 19 nt, Homo sapiens
cuauuuuuuuucuguuaua

SEQ ID NO: 118988 - RNA, 13 nt, Homo sapiens
uuuuguuuggacc

SEQ ID NO: 118989 - RNA, 18 nt, Homo sapiens
aucacaguuuugguugcu

SEQ ID NO: 118990 - RNA, 17 nt, Homo sapiens
caugggauaaaugccau

SEQ ID NO: 118991 - RNA, 23 nt, Homo sapiens
aucacaguuuugguugcuuuaau

SEQ ID NO: 118992 - RNA, 18 nt, Homo sapiens
ucuguacuuuuuggcaua

SEQ ID NO: 118993 - RNA, 17 nt, Homo sapiens
auuggcuuuucugaucc

SEQ ID NO: 118994 - RNA, 12 nt, Homo sapiens
aaggaaacuggg

SEQ ID NO: 118995 - RNA, 18 nt, Homo sapiens
caucaguauugaagcauu

SEQ ID NO: 118996 - RNA, 20 nt, Homo sapiens
acaguuuugguugcuuuaau

SEQ ID NO: 118997 - RNA, 16 nt, Homo sapiens
ugaacuaaacuuucac

SEQ ID NO: 118998 - RNA, 17 nt, Homo sapiens
ccuagcacacacuuuug

SEQ ID NO: 118999 - RNA, 15 nt, Homo sapiens
uuagucuugucucag

SEQ ID NO: 119000 - RNA, 22 nt, Homo sapiens
augauuucuaugcugaguuugu

SEQ ID NO: 119001 - RNA, 14 nt, Homo sapiens
cauaaaucugugaa

SEQ ID NO: 119002 - RNA, 23 nt, Homo sapiens
agccugcacggugaauggcuuug

SEQ ID NO: 119003 - RNA, 17 nt, Homo sapiens
uguuaaaccaugggaua

SEQ ID NO: 119004 - RNA, 24 nt, Homo sapiens
ggugaucucauuuaauccucucaa

SEQ ID NO: 119005 - RNA, 16 nt, Homo sapiens
uucacugauuugacau

SEQ ID NO: 119006 - RNA, 20 nt, Homo sapiens
ugcugaguuugugcuggugu

SEQ ID NO: 119007 - RNA, 22 nt, Homo sapiens
aauaaauucccuggccuuucau

SEQ ID NO: 119008 - RNA, 21 nt, Homo sapiens
uuccugcaaugaagucucuga

SEQ ID NO: 119009 - RNA, 23 nt, Homo sapiens
uauaauuaacauguuaaaccaug

SEQ ID NO: 119010 - RNA, 20 nt, Homo sapiens
aaguuuaauauuaaagccau

SEQ ID NO: 119011 - RNA, 17 nt, Homo sapiens
gacauagucuggcugua

SEQ ID NO: 119012 - RNA, 14 nt, Homo sapiens
uaaggaaacugggu

SEQ ID NO: 119013 - RNA, 23 nt, Homo sapiens
aagcauuuuauaaaucgcuuuug

SEQ ID NO: 119014 - RNA, 22 nt, Homo sapiens
ucaucaguauugaagcauuuua

SEQ ID NO: 119015 - RNA, 23 nt, Homo sapiens
uuggcauaacauaaaucugugaa

SEQ ID NO: 119016 - RNA, 21 nt, Homo sapiens
ucacaguuuugguugcuuuaa

SEQ ID NO: 119017 - RNA, 15 nt, Homo sapiens
uuauaaaucgcuuuu

SEQ ID NO: 119018 - RNA, 15 nt, Homo sapiens
aauuuauuggcuuuu

SEQ ID NO: 119019 - RNA, 17 nt, Homo sapiens
agucuguuuuaugacuu

SEQ ID NO: 119020 - RNA, 20 nt, Homo sapiens
uggcuuuucugauccaguuu

SEQ ID NO: 119021 - RNA, 21 nt, Homo sapiens
ugucuugccuuuuucauuauu

SEQ ID NO: 119022 - RNA, 23 nt, Homo sapiens
uuuccacauaaggaaacuggguu

SEQ ID NO: 119023 - RNA, 12 nt, Homo sapiens
aucugaggaauu

SEQ ID NO: 119024 - RNA, 14 nt, Homo sapiens
augugaugaucuac

SEQ ID NO: 119025 - RNA, 16 nt, Homo sapiens
acauaaaucugugaac

SEQ ID NO: 119026 - RNA, 19 nt, Homo sapiens
cauaaccccggaagccaaa

SEQ ID NO: 119027 - RNA, 22 nt, Homo sapiens
ugcauaggugaucucauuuaau

SEQ ID NO: 119028 - RNA, 21 nt, Homo sapiens
ugcaaucuucucagaaggcaa

SEQ ID NO: 119029 - RNA, 22 nt, Homo sapiens
cauuuaauaauuauaugcuauu

SEQ ID NO: 119030 - RNA, 14 nt, Homo sapiens
ucacugauuugaca

SEQ ID NO: 119031 - RNA, 20 nt, Homo sapiens
uuaaggauuuuaugcuuuaa

SEQ ID NO: 119032 - RNA, 14 nt, Homo sapiens
uauuuuaugaucca

SEQ ID NO: 119033 - RNA, 16 nt, Homo sapiens
guuuugguugcuuuaa

SEQ ID NO: 119034 - RNA, 19 nt, Homo sapiens
gguugcuuuaauaucauca

SEQ ID NO: 119035 - RNA, 15 nt, Homo sapiens
auuuuagcuacuaua

SEQ ID NO: 119036 - RNA, 23 nt, Homo sapiens
aaggaagguucuggugugaacua

SEQ ID NO: 119037 - RNA, 13 nt, Homo sapiens
auaaucacuuuuu

SEQ ID NO: 119038 - RNA, 16 nt, Homo sapiens
uaacauguuaaaccau

SEQ ID NO: 119039 - RNA, 18 nt, Homo sapiens
acuguuauuuauaaucac

SEQ ID NO: 119040 - RNA, 19 nt, Homo sapiens
uuaauaucaucaguauuga

SEQ ID NO: 119041 - RNA, 13 nt, Homo sapiens
uacuuugugcugg

SEQ ID NO: 119042 - RNA, 22 nt, Homo sapiens
uuuggaccaaaaaccaguauug

SEQ ID NO: 119043 - RNA, 19 nt, Homo sapiens
aguugccuaaauccauuug

SEQ ID NO: 119044 - RNA, 15 nt, Homo sapiens
uaauauuaaagccau

SEQ ID NO: 119045 - RNA, 21 nt, Homo sapiens
cugaagucagaucugccuaag

SEQ ID NO: 119046 - RNA, 17 nt, Homo sapiens
aggauuuuaugcuuuaa

SEQ ID NO: 119047 - RNA, 16 nt, Homo sapiens
agaaauuaaguaucug

SEQ ID NO: 119048 - RNA, 23 nt, Homo sapiens
cuuucagauacuggauuguacuu

SEQ ID NO: 119049 - RNA, 23 nt, Homo sapiens
cuuaaaggaagguucugguguga

SEQ ID NO: 119050 - RNA, 17 nt, Homo sapiens
auaauaaagaucaugua

SEQ ID NO: 119051 - RNA, 13 nt, Homo sapiens
uuuaugcuuuaaa

SEQ ID NO: 119052 - RNA, 22 nt, Homo sapiens
aggaaacuggguuccugcaaug

SEQ ID NO: 119053 - RNA, 19 nt, Homo sapiens
cacaguuuugguugcuuua

SEQ ID NO: 119054 - RNA, 20 nt, Homo sapiens
uaaauucccuggccuuucau

SEQ ID NO: 119055 - RNA, 18 nt, Homo sapiens
aaagccauguuuauuaca

SEQ ID NO: 119056 - RNA, 15 nt, Homo sapiens
auuuaauccucucaa

SEQ ID NO: 119057 - RNA, 15 nt, Homo sapiens
uaaagaucauguaaa

SEQ ID NO: 119058 - RNA, 17 nt, Homo sapiens
uauucacugauuugaca

SEQ ID NO: 119059 - RNA, 16 nt, Homo sapiens
uuguacuuugugcugg

SEQ ID NO: 119060 - RNA, 19 nt, Homo sapiens
ucaauaaaaaauuaugaca

SEQ ID NO: 119061 - RNA, 17 nt, Homo sapiens
uauauaugugaugaucu

SEQ ID NO: 119062 - RNA, 15 nt, Homo sapiens
ugcuauuucuauauu

SEQ ID NO: 119063 - RNA, 23 nt, Homo sapiens
uggaccauaaccccggaagccaa

SEQ ID NO: 119064 - RNA, 17 nt, Homo sapiens
uguggugacuuuggaua

SEQ ID NO: 119065 - RNA, 22 nt, Homo sapiens
caauuaaggauuuuaugcuuua

SEQ ID NO: 119066 - RNA, 16 nt, Homo sapiens
uuaugacuucauuaau

SEQ ID NO: 119067 - RNA, 17 nt, Homo sapiens
uuguauagaaccucuuu

SEQ ID NO: 119068 - RNA, 15 nt, Homo sapiens
uguacaaaguauuaa

SEQ ID NO: 119069 - RNA, 20 nt, Homo sapiens
cauuaauaauaaauucccug

SEQ ID NO: 119070 - RNA, 22 nt, Homo sapiens
ugaguuggguguauugugcgcu

SEQ ID NO: 119071 - RNA, 22 nt, Homo sapiens
ugccaucaauaaaaaauuauga

SEQ ID NO: 119072 - RNA, 19 nt, Homo sapiens
uaagucuguuuuaugacuu

SEQ ID NO: 119073 - RNA, 19 nt, Homo sapiens
uuaaggauuuuaugcuuua

SEQ ID NO: 119074 - RNA, 18 nt, Homo sapiens
aaggaaacuggguuccug

SEQ ID NO: 119075 - RNA, 19 nt, Homo sapiens
ugugaacuaaacuuucaca

SEQ ID NO: 119076 - RNA, 13 nt, Homo sapiens
caucacaguuuug

SEQ ID NO: 119077 - RNA, 21 nt, Homo sapiens
gaaugguccgugcuaaggacu

SEQ ID NO: 119078 - RNA, 22 nt, Homo sapiens
uauuaaagccauguuuauuaca

SEQ ID NO: 119079 - RNA, 21 nt, Homo sapiens
auuugacauagucuggcugua

SEQ ID NO: 119080 - RNA, 14 nt, Homo sapiens
uacuauauauguga

SEQ ID NO: 119081 - RNA, 23 nt, Homo sapiens
cugcaaucuucucagaaggcaaa

SEQ ID NO: 119082 - RNA, 21 nt, Homo sapiens
aaggaaacuggguuccugcaa

SEQ ID NO: 119083 - RNA, 15 nt, Homo sapiens
uguguaaauacaauu

SEQ ID NO: 119084 - RNA, 11 nt, Homo sapiens
uuccugcaaug

SEQ ID NO: 119085 - RNA, 16 nt, Homo sapiens
ucucaaccaccuuuca

SEQ ID NO: 119086 - RNA, 23 nt, Homo sapiens
cauauauuuuuauauuuacuaaa

SEQ ID NO: 119087 - RNA, 20 nt, Homo sapiens
ccauaaccccggaagccaaa

SEQ ID NO: 119088 - RNA, 13 nt, Homo sapiens
cugaacacuccaa

SEQ ID NO: 119089 - RNA, 12 nt, Homo sapiens
uuugaauuuugu

SEQ ID NO: 119090 - RNA, 19 nt, Homo sapiens
agguucuggugugaacuaa

SEQ ID NO: 119091 - RNA, 22 nt, Homo sapiens
cacaccccagacgaugucuuca

SEQ ID NO: 119092 - RNA, 19 nt, Homo sapiens
ccauuuggaaaucuuuaaa

SEQ ID NO: 119093 - RNA, 18 nt, Homo sapiens
acaccauuaugugcgcug

SEQ ID NO: 119094 - RNA, 20 nt, Homo sapiens
caaucuucucagaaggcaaa

SEQ ID NO: 119095 - RNA, 22 nt, Homo sapiens
auuaaggauuuuaugcuuuaaa

SEQ ID NO: 119096 - RNA, 21 nt, Homo sapiens
aaacauugguucuuguauuaa

SEQ ID NO: 119097 - RNA, 17 nt, Homo sapiens
aagccugauuaaagaau

SEQ ID NO: 119098 - RNA, 21 nt, Homo sapiens
uucuaugcugaguuugugcug

SEQ ID NO: 119099 - RNA, 23 nt, Homo sapiens
uccucucaaccaccuuucagaua

SEQ ID NO: 119100 - RNA, 19 nt, Homo sapiens
aucugacaucucugcaauc

SEQ ID NO: 119101 - RNA, 22 nt, Homo sapiens
auaaaucgcuuuugauaaucaa

SEQ ID NO: 119102 - RNA, 15 nt, Homo sapiens
agcaucacaguuuug

SEQ ID NO: 119103 - RNA, 14 nt, Homo sapiens
aauauuaaagccau

SEQ ID NO: 119104 - RNA, 17 nt, Homo sapiens
auuuauaaucacuuuuu

SEQ ID NO: 119105 - RNA, 19 nt, Homo sapiens
aaggauuuuaugcuuuaaa

SEQ ID NO: 119106 - RNA, 13 nt, Homo sapiens
aagugaaacugcu

SEQ ID NO: 119107 - RNA, 14 nt, Homo sapiens
guacaaaguauuaa

SEQ ID NO: 119108 - RNA, 20 nt, Homo sapiens
uaugauccagcagauuauuc

SEQ ID NO: 119109 - RNA, 22 nt, Homo sapiens
ugaggaauucuguauagauuag

SEQ ID NO: 119110 - RNA, 22 nt, Homo sapiens
agaucuaguucacucuccauuu

SEQ ID NO: 119111 - RNA, 15 nt, Homo sapiens
caguauuguacaaag

SEQ ID NO: 119112 - RNA, 21 nt, Human enterovirus E
ugcguuuggugagacgcauaa

SEQ ID NO: 119113 - RNA, 15 nt, Human enterovirus E
uuucaccauuugaau

SEQ ID NO: 119114 - RNA, 18 nt, Human enterovirus E
gauuuucaccauuugaau

SEQ ID NO: 119115 - RNA, 13 nt, Human enterovirus E
gcauuggcuuuca

SEQ ID NO: 119116 - RNA, 14 nt, Human enterovirus E
gcauuggcuuucau

SEQ ID NO: 119117 - RNA, 19 nt, Human enterovirus E
gcauuggcuuucauaugcg

SEQ ID NO: 119118 - RNA, 18 nt, Human enterovirus E
cauuggcuuucauaugcg

SEQ ID NO: 119119 - RNA, 20 nt, Human enterovirus E
auucggucgcauuggcuuuc

SEQ ID NO: 119120 - RNA, 22 nt, Human enterovirus E
caaugugauuuucaccauuuga

SEQ ID NO: 119121 - RNA, 12 nt, Human enterovirus E
agacgcauaaaa

SEQ ID NO: 119122 - RNA, 23 nt, Human enterovirus E
caaugugauuuucaccauuugaa

SEQ ID NO: 119123 - RNA, 22 nt, Human enterovirus E
aauucggucgcauuggcuuuca

SEQ ID NO: 119124 - RNA, 17 nt, Human enterovirus E
gucgcauuggcuuucau

SEQ ID NO: 119125 - RNA, 19 nt, Human enterovirus E
gucgcauuggcuuucauau

SEQ ID NO: 119126 - RNA, 18 nt, Human enterovirus E
ugaauucggucgcauugg

SEQ ID NO: 119127 - RNA, 14 nt, Human enterovirus E
uggcuuucauaugc

SEQ ID NO: 119128 - RNA, 15 nt, Human enterovirus E
uggcuuucauaugcg

SEQ ID NO: 119129 - RNA, 21 nt, Human enterovirus E
aaugugauuuucaccauuuga

SEQ ID NO: 119130 - RNA, 21 nt, Human enterovirus E
aauucggucgcauuggcuuuc

SEQ ID NO: 119131 - RNA, 23 nt, Human enterovirus E
aauucggucgcauuggcuuucau

SEQ ID NO: 119132 - RNA, 17 nt, Human enterovirus E
gauuuucaccauuugaa

SEQ ID NO: 119133 - RNA, 18 nt, Human enterovirus E
gcguuuggugagacgcau

SEQ ID NO: 119134 - RNA, 14 nt, Human enterovirus E
ggcuuucauaugcg

SEQ ID NO: 119135 - RNA, 13 nt, Human enterovirus E
cauuggcuuucau

SEQ ID NO: 119136 - RNA, 14 nt, Human enterovirus E
cauuggcuuucaua

SEQ ID NO: 119137 - RNA, 15 nt, Human enterovirus E
uuuucaccauuugaa

SEQ ID NO: 119138 - RNA, 13 nt, Human enterovirus E
uucaccauuugaa

SEQ ID NO: 119139 - RNA, 16 nt, Human enterovirus E
ucgcauuggcuuucau

SEQ ID NO: 119140 - RNA, 12 nt, Human enterovirus E
cuuucauaugcg

SEQ ID NO: 119141 - RNA, 13 nt, Human enterovirus E
cuuucauaugcgu

SEQ ID NO: 119142 - RNA, 17 nt, Human enterovirus E
ggucgcauuggcuuuca

SEQ ID NO: 119143 - RNA, 22 nt, Human enterovirus E
ggucgcauuggcuuucauaugc

SEQ ID NO: 119144 - RNA, 17 nt, Human enterovirus E
gcuuucauaugcguuug

SEQ ID NO: 119145 - RNA, 16 nt, Human enterovirus E
auuuucaccauuugaa

SEQ ID NO: 119146 - RNA, 21 nt, Human enterovirus E
augcguuuggugagacgcaua

SEQ ID NO: 119147 - RNA, 20 nt, Human enterovirus E
auaugcguuuggugagacgc

SEQ ID NO: 119148 - RNA, 15 nt, Human enterovirus E
uggugagacgcauaa

SEQ ID NO: 119149 - RNA, 17 nt, Human enterovirus E
ugauuuucaccauuuga

SEQ ID NO: 119150 - RNA, 14 nt, Human enterovirus E
uuuucaccauuuga

SEQ ID NO: 119151 - RNA, 14 nt, Human enterovirus E
ucggucgcauuggc

SEQ ID NO: 119152 - RNA, 15 nt, Human enterovirus E
cuuucauaugcguuu

SEQ ID NO: 119153 - RNA, 11 nt, Human enterovirus E
agacgcauaaa

SEQ ID NO: 119154 - RNA, 14 nt, Human enterovirus E
auaugcguuuggug

SEQ ID NO: 119155 - RNA, 21 nt, Human erythrovirus V9
auccaguaacaguagugcaga

SEQ ID NO: 119156 - RNA, 16 nt, Human erythrovirus V9
aucuauaaaagauaca

SEQ ID NO: 119157 - RNA, 12 nt, Human erythrovirus V9
auaagcaguuug

SEQ ID NO: 119158 - RNA, 14 nt, Human erythrovirus V9
agaguuuacuccag

SEQ ID NO: 119159 - RNA, 22 nt, Human erythrovirus V9
agcuaguagcugccacaaugcu

SEQ ID NO: 119160 - RNA, 20 nt, Human erythrovirus V9
auuauaaaguguucucucca

SEQ ID NO: 119161 - RNA, 16 nt, Human erythrovirus V9
augugggagcuuggua

SEQ ID NO: 119162 - RNA, 14 nt, Human erythrovirus V9
auggauggaaauuu

SEQ ID NO: 119163 - RNA, 22 nt, Human erythrovirus V9
cagaagccagcacuggugcagg

SEQ ID NO: 119164 - RNA, 15 nt, Human erythrovirus V9
caaauuuuaaaagac

SEQ ID NO: 119165 - RNA, 17 nt, Human erythrovirus V9
caaauuuuaaaagacca

SEQ ID NO: 119166 - RNA, 15 nt, Human erythrovirus V9
agaccauuacaacau

SEQ ID NO: 119167 - RNA, 20 nt, Human erythrovirus V9
acuuaguugcucgcauuaaa

SEQ ID NO: 119168 - RNA, 22 nt, Human erythrovirus V9
acucugcagaagccagcacugg

SEQ ID NO: 119169 - RNA, 14 nt, Human erythrovirus V9
acucuccagaccua

SEQ ID NO: 119170 - RNA, 14 nt, Human erythrovirus V9
acguguacauucuc

SEQ ID NO: 119171 - RNA, 14 nt, Human erythrovirus V9
accacccccaugcc

SEQ ID NO: 119172 - RNA, 21 nt, Human erythrovirus V9
accuagaggagaaaaugcagu

SEQ ID NO: 119173 - RNA, 18 nt, Human erythrovirus V9
acccuacaaaaagcaugu

SEQ ID NO: 119174 - RNA, 17 nt, Human erythrovirus V9
acaaaguuuuguagauu

SEQ ID NO: 119175 - RNA, 17 nt, Human erythrovirus V9
aaugcuaagauuaugua

SEQ ID NO: 119176 - RNA, 18 nt, Human erythrovirus V9
aauggugggaaagcagug

SEQ ID NO: 119177 - RNA, 16 nt, Human erythrovirus V9
aaaagcauguggagug

SEQ ID NO: 119178 - RNA, 13 nt, Human erythrovirus V9
aaaugcaguauua

SEQ ID NO: 119179 - RNA, 22 nt, Human erythrovirus V9
aacuagauaugaacaacaugua

SEQ ID NO: 119180 - RNA, 23 nt, Human erythrovirus V9
aaccuagaggagaaaaugcagua

SEQ ID NO: 119181 - RNA, 12 nt, Human erythrovirus V9
aaaaaugugcuu

SEQ ID NO: 119182 - RNA, 15 nt, Human erythrovirus V9
aaaacucuccagacc

SEQ ID NO: 119183 - RNA, 17 nt, Human erythrovirus V9
gaaagcagugacaaauu

SEQ ID NO: 119184 - RNA, 16 nt, Human erythrovirus V9
gaaggggcuacauuua

SEQ ID NO: 119185 - RNA, 22 nt, Human erythrovirus V9
gaaggggcuacauuuacugcua

SEQ ID NO: 119186 - RNA, 14 nt, Human erythrovirus V9
gacaaauuugccca

SEQ ID NO: 119187 - RNA, 21 nt, Human erythrovirus V9
aaauaccccagcaugacuuca

SEQ ID NO: 119188 - RNA, 17 nt, Human erythrovirus V9
gcagugacaaauuugcc

SEQ ID NO: 119189 - RNA, 14 nt, Human erythrovirus V9
gccauggacaguua

SEQ ID NO: 119190 - RNA, 14 nt, Human erythrovirus V9
caguuaacucugca

SEQ ID NO: 119191 - RNA, 20 nt, Human erythrovirus V9
cauacaauuacccgguacua

SEQ ID NO: 119192 - RNA, 21 nt, Human erythrovirus V9
cagacuuagagcuuauucaaa

SEQ ID NO: 119193 - RNA, 20 nt, Human erythrovirus V9
cauuaaaaguaaucuuaaaa

SEQ ID NO: 119194 - RNA, 17 nt, Human erythrovirus V9
cccguaggcaaccaucu

SEQ ID NO: 119195 - RNA, 14 nt, Human erythrovirus V9
ccccucuucuuuau

SEQ ID NO: 119196 - RNA, 17 nt, Human erythrovirus V9
ccuguggcccauuuuca

SEQ ID NO: 119197 - RNA, 12 nt, Human erythrovirus V9
cguguacauucu

SEQ ID NO: 119198 - RNA, 23 nt, Human erythrovirus V9
cguguauaagcaguuugugcaau

SEQ ID NO: 119199 - RNA, 19 nt, Human erythrovirus V9
cuauguugggccuggcaau

SEQ ID NO: 119200 - RNA, 20 nt, Human erythrovirus V9
cugcuaauucuguaacgugu

SEQ ID NO: 119201 - RNA, 14 nt, Human erythrovirus V9
ucauccaguaacag

SEQ ID NO: 119202 - RNA, 23 nt, Human erythrovirus V9
ucauccaguaacaguagugcaga

SEQ ID NO: 119203 - RNA, 19 nt, Human erythrovirus V9
ucaucauuuucagagccau

SEQ ID NO: 119204 - RNA, 23 nt, Human erythrovirus V9
uauagucaucauuuucagagcca

SEQ ID NO: 119205 - RNA, 19 nt, Human erythrovirus V9
ucagaaaaauaccccagca

SEQ ID NO: 119206 - RNA, 22 nt, Human erythrovirus V9
uauucaaauuuuaaaagaccau

SEQ ID NO: 119207 - RNA, 15 nt, Human erythrovirus V9
guauuaucuagugaa

SEQ ID NO: 119208 - RNA, 16 nt, Human erythrovirus V9
uaagcaguuugugcaa

SEQ ID NO: 119209 - RNA, 15 nt, Human erythrovirus V9
uaaaagauuacuuua

SEQ ID NO: 119210 - RNA, 22 nt, Human erythrovirus V9
uaauucuguaacguguacauuc

SEQ ID NO: 119211 - RNA, 16 nt, Human erythrovirus V9
uucagagccauggaca

SEQ ID NO: 119212 - RNA, 22 nt, Human erythrovirus V9
aagcagugacaaauuugcccag

SEQ ID NO: 119213 - RNA, 12 nt, Human erythrovirus V9
aagccagcacug

SEQ ID NO: 119214 - RNA, 13 nt, Human erythrovirus V9
aagccagcacugg

SEQ ID NO: 119215 - RNA, 14 nt, Human erythrovirus V9
ugaaaaagcuacug

SEQ ID NO: 119216 - RNA, 14 nt, Human erythrovirus V9
ugccgaucaguuuc

SEQ ID NO: 119217 - RNA, 18 nt, Human erythrovirus V9
ugcccaggacguguauaa

SEQ ID NO: 119218 - RNA, 21 nt, Human erythrovirus V9
uggugggaaagcagugacaaa

SEQ ID NO: 119219 - RNA, 18 nt, Human erythrovirus V9
uggauuacaaaguuuugu

SEQ ID NO: 119220 - RNA, 22 nt, Human erythrovirus V9
uguccucagccaggaaccguca

SEQ ID NO: 119221 - RNA, 21 nt, Human erythrovirus V9
uguggaacauauaaacaacag

SEQ ID NO: 119222 - RNA, 23 nt, Human erythrovirus V9
uuaacuuguaaaaaaugugcuua

SEQ ID NO: 119223 - RNA, 14 nt, Human erythrovirus V9
uucaaaaagaagac

SEQ ID NO: 119224 - RNA, 22 nt, Human erythrovirus V9
auagucaucauuuucagagcca

SEQ ID NO: 119225 - RNA, 20 nt, Human erythrovirus V9
auaagcaguuugugcaauuu

SEQ ID NO: 119226 - RNA, 12 nt, Human erythrovirus V9
agcagugacaaa

SEQ ID NO: 119227 - RNA, 22 nt, Human erythrovirus V9
agcaacccuacaaaaagcaugu

SEQ ID NO: 119228 - RNA, 21 nt, Human erythrovirus V9
acuauguugggccuggcaaug

SEQ ID NO: 119229 - RNA, 15 nt, Human erythrovirus V9
acguguacauucucu

SEQ ID NO: 119230 - RNA, 22 nt, Human erythrovirus V9
accuagaggagaaaaugcagua

SEQ ID NO: 119231 - RNA, 22 nt, Human erythrovirus V9
augaaacaggguuucaagcaca

SEQ ID NO: 119232 - RNA, 20 nt, Human erythrovirus V9
auuaugaguaaaaccacuaa

SEQ ID NO: 119233 - RNA, 17 nt, Human erythrovirus V9
auuuucuguguuaacuu

SEQ ID NO: 119234 - RNA, 14 nt, Human erythrovirus V9
auuuuaaaagacca

SEQ ID NO: 119235 - RNA, 12 nt, Human erythrovirus V9
caacauguaauu

SEQ ID NO: 119236 - RNA, 20 nt, Human erythrovirus V9
cauccaguaacaguagugca

SEQ ID NO: 119237 - RNA, 22 nt, Human erythrovirus V9
cauccaguaacaguagugcaga

SEQ ID NO: 119238 - RNA, 20 nt, Human erythrovirus V9
caggguuucaagcacaagca

SEQ ID NO: 119239 - RNA, 18 nt, Human erythrovirus V9
caguaacaguagugcaga

SEQ ID NO: 119240 - RNA, 22 nt, Human erythrovirus V9
cagaaccuagaggagaaaaugc

SEQ ID NO: 119241 - RNA, 19 nt, Human erythrovirus V9
cagacgcuguagaauauaa

SEQ ID NO: 119242 - RNA, 21 nt, Human erythrovirus V9
cagcugccccuguggcccauu

SEQ ID NO: 119243 - RNA, 23 nt, Human erythrovirus V9
cagcuaguagcugccacaaugcu

SEQ ID NO: 119244 - RNA, 20 nt, Human erythrovirus V9
ccauuacaacauuucuuuag

SEQ ID NO: 119245 - RNA, 19 nt, Human erythrovirus V9
ccaguaacaguagugcaga

SEQ ID NO: 119246 - RNA, 10 nt, Human erythrovirus V9
gcuuugcccu

SEQ ID NO: 119247 - RNA, 19 nt, Human erythrovirus V9
ggaacagacuuagagcuua

SEQ ID NO: 119248 - RNA, 23 nt, Human erythrovirus V9
gcugccccuguggcccauuuuca

SEQ ID NO: 119249 - RNA, 16 nt, Human erythrovirus V9
gccuuaucauccagua

SEQ ID NO: 119250 - RNA, 23 nt, Human erythrovirus V9
uaacaaauggugggaaagcagug

SEQ ID NO: 119251 - RNA, 20 nt, Human erythrovirus V9
gugugaggggauugccuguu

SEQ ID NO: 119252 - RNA, 19 nt, Human erythrovirus V9
uaguagcugccacaaugcu

SEQ ID NO: 119253 - RNA, 19 nt, Human erythrovirus V9
uacuuuaaaaggugcagcu

SEQ ID NO: 119254 - RNA, 17 nt, Human erythrovirus V9
uaagcaguuugugcaau

SEQ ID NO: 119255 - RNA, 20 nt, Human erythrovirus V9
gcaauuuuaugaaaaagcua

SEQ ID NO: 119256 - RNA, 23 nt, Human erythrovirus V9
gagaguuuacuccagacuuagug

SEQ ID NO: 119257 - RNA, 11 nt, Human erythrovirus V9
gacaccaaauc

SEQ ID NO: 119258 - RNA, 19 nt, Human erythrovirus V9
cuagaggagaaaaugcagu

SEQ ID NO: 119259 - RNA, 20 nt, Human erythrovirus V9
ucuguguuaacuuguaaaaa

SEQ ID NO: 119260 - RNA, 21 nt, Human erythrovirus V9
ucuuuaaaaauuucaaaaaga

SEQ ID NO: 119261 - RNA, 20 nt, Human erythrovirus V9
ugaagacuuacacaagccug

SEQ ID NO: 119262 - RNA, 16 nt, Human erythrovirus V9
ucuuuauuugacuuag

SEQ ID NO: 119263 - RNA, 17 nt, Human erythrovirus V9
ugaaggggcuacauuua

SEQ ID NO: 119264 - RNA, 16 nt, Human erythrovirus V9
ucauuuucagagccau

SEQ ID NO: 119265 - RNA, 19 nt, Human erythrovirus V9
uccauaugauccagagcau

SEQ ID NO: 119266 - RNA, 14 nt, Human erythrovirus V9
uucaagcacaagca

SEQ ID NO: 119267 - RNA, 22 nt, Human erythrovirus V9
uuaacuuguaaaaaaugugcuu

SEQ ID NO: 119268 - RNA, 18 nt, Human erythrovirus V9
ugugggagcuugguauaa

SEQ ID NO: 119269 - RNA, 20 nt, Human erythrovirus V9
uuaugaaaaagcuacuggaa

SEQ ID NO: 119270 - RNA, 18 nt, Human erythrovirus V9
uuaucuagugaagacuua

SEQ ID NO: 119271 - RNA, 16 nt, Human erythrovirus V9
ugggaaagcagugaca

SEQ ID NO: 119272 - RNA, 15 nt, Human erythrovirus V9
ugucuggauuacaaa

SEQ ID NO: 119273 - RNA, 22 nt, Human erythrovirus V9
ugcuguguggaacauauaaaca

SEQ ID NO: 119274 - RNA, 14 nt, Human erythrovirus V9
uggaacagacuuag

SEQ ID NO: 119275 - RNA, 13 nt, Human erythrovirus V9
uuugugcaauuuu

SEQ ID NO: 119276 - RNA, 20 nt, Human erythrovirus V9
uuuguagauuaugaguaaaa

SEQ ID NO: 119277 - RNA, 12 nt, Human erythrovirus V9
caucauuuucag

SEQ ID NO: 119278 - RNA, 21 nt, Human erythrovirus V9
aaaauaccccagcaugacuuc

SEQ ID NO: 119279 - RNA, 14 nt, Human erythrovirus V9
aaaaugcaguauua

SEQ ID NO: 119280 - RNA, 21 nt, Human erythrovirus V9
cuagauaugaacaacauguaa

SEQ ID NO: 119281 - RNA, 20 nt, Human erythrovirus V9
cuagaggagaaaaugcagua

SEQ ID NO: 119282 - RNA, 13 nt, Human erythrovirus V9
gguugacuuugua

SEQ ID NO: 119283 - RNA, 18 nt, Human erythrovirus V9
gaggagaaaaugcaguau

SEQ ID NO: 119284 - RNA, 21 nt, Human erythrovirus V9
aaagcuacuggaacagacuua

SEQ ID NO: 119285 - RNA, 15 nt, Human erythrovirus V9
aauaccccagcauga

SEQ ID NO: 119286 - RNA, 20 nt, Human erythrovirus V9
uuuaugaaaaagcuacugga

SEQ ID NO: 119287 - RNA, 21 nt, Human erythrovirus V9
ugggaaagcagugacaaauuu

SEQ ID NO: 119288 - RNA, 22 nt, Human erythrovirus V9
uggagugaaggggcuacauuua

SEQ ID NO: 119289 - RNA, 21 nt, Human erythrovirus V9
uguauaagcaguuugugcaau

SEQ ID NO: 119290 - RNA, 15 nt, Human erythrovirus V9
uguauuaauguggga

SEQ ID NO: 119291 - RNA, 15 nt, Human erythrovirus V9
ugcgcugcaguuguc

SEQ ID NO: 119292 - RNA, 20 nt, Human erythrovirus V9
ugccuuaucauccaguaaca

SEQ ID NO: 119293 - RNA, 20 nt, Human erythrovirus V9
uuaccugucuggauuacaaa

SEQ ID NO: 119294 - RNA, 21 nt, Human erythrovirus V9
uuaugaguaaaaccacuaaca

SEQ ID NO: 119295 - RNA, 20 nt, Human erythrovirus V9
uuaucuagugaagacuuaca

SEQ ID NO: 119296 - RNA, 16 nt, Human erythrovirus V9
ugucuggauuacaaag

SEQ ID NO: 119297 - RNA, 22 nt, Human erythrovirus V9
ugaccacccccaugccuuauca

SEQ ID NO: 119298 - RNA, 16 nt, Human erythrovirus V9
ucuguguuaacuugua

SEQ ID NO: 119299 - RNA, 18 nt, Human erythrovirus V9
ucauguaggagccucuaa

SEQ ID NO: 119300 - RNA, 12 nt, Human erythrovirus V9
uccgguacaaga

SEQ ID NO: 119301 - RNA, 20 nt, Human erythrovirus V9
ucaaaaagaagacaccaaau

SEQ ID NO: 119302 - RNA, 18 nt, Human erythrovirus V9
uaaaaaaugaaacagggu

SEQ ID NO: 119303 - RNA, 15 nt, Human erythrovirus V9
guuucgugaacuguu

SEQ ID NO: 119304 - RNA, 18 nt, Human erythrovirus V9
uagaggagaaaaugcagu

SEQ ID NO: 119305 - RNA, 20 nt, Human erythrovirus V9
uagaggagaaaaugcaguau

SEQ ID NO: 119306 - RNA, 14 nt, Human erythrovirus V9
uagugaagacuuac

SEQ ID NO: 119307 - RNA, 15 nt, Human erythrovirus V9
uagugaagacuuaca

SEQ ID NO: 119308 - RNA, 18 nt, Human erythrovirus V9
agaggagaaaaugcagua

SEQ ID NO: 119309 - RNA, 13 nt, Human erythrovirus V9
agauuauguaaua

SEQ ID NO: 119310 - RNA, 11 nt, Human erythrovirus V9
accauuacaac

SEQ ID NO: 119311 - RNA, 17 nt, Human erythrovirus V9
caauuuuaugaaaaagc

SEQ ID NO: 119312 - RNA, 17 nt, Human erythrovirus V9
caccguguccucagcca

SEQ ID NO: 119313 - RNA, 17 nt, Human erythrovirus V9
cagagccauggacaguu

SEQ ID NO: 119314 - RNA, 20 nt, Human erythrovirus V9
auuuuaaaagaccauuacaa

SEQ ID NO: 119315 - RNA, 19 nt, Human erythrovirus V9
caaauggugggaaagcagu

SEQ ID NO: 119316 - RNA, 18 nt, Human erythrovirus V9
auuauguaauauguacac

SEQ ID NO: 119317 - RNA, 19 nt, Human erythrovirus V9
auuaucuagugaagacuua

SEQ ID NO: 119318 - RNA, 13 nt, Human erythrovirus V9
auuaucuagugaa

SEQ ID NO: 119319 - RNA, 20 nt, Human erythrovirus V9
auucaaauuuuaaaagacca

SEQ ID NO: 119320 - RNA, 15 nt, Human erythrovirus V9
agcaguuugugcaau

SEQ ID NO: 119321 - RNA, 16 nt, Human erythrovirus V9
agcaguuugugcaauu

SEQ ID NO: 119322 - RNA, 13 nt, Human erythrovirus V9
auaaauuauuaac

SEQ ID NO: 119323 - RNA, 16 nt, Human erythrovirus V9
aguuacgucauuuccu

SEQ ID NO: 119324 - RNA, 23 nt, Human erythrovirus V9
aguuaacucugcagaagccagca

SEQ ID NO: 119325 - RNA, 20 nt, Human erythrovirus V9
aguguucucuccagcagcua

SEQ ID NO: 119326 - RNA, 21 nt, Human erythrovirus V9
augacuucaguuaacucugca

SEQ ID NO: 119327 - RNA, 15 nt, Human erythrovirus V9
augcaguauuaucua

SEQ ID NO: 119328 - RNA, 15 nt, Human erythrovirus V9
augccuuaucaucca

SEQ ID NO: 119329 - RNA, 12 nt, Human erythrovirus V9
auauagucauca

SEQ ID NO: 119330 - RNA, 14 nt, Human erythrovirus V9
aaaaggugcagcug

SEQ ID NO: 119331 - RNA, 22 nt, Human erythrovirus V9
aaaagcuacuggaacagacuua

SEQ ID NO: 119332 - RNA, 19 nt, Human erythrovirus V9
agaccuauauagucaucau

SEQ ID NO: 119333 - RNA, 17 nt, Human erythrovirus V9
accacccccaugccuua

SEQ ID NO: 119334 - RNA, 23 nt, Human erythrovirus V9
aauuucaaaaagaagacaccaaa

SEQ ID NO: 119335 - RNA, 23 nt, Human erythrovirus V9
auacaauuacccgguacuaacua

SEQ ID NO: 119336 - RNA, 20 nt, Human erythrovirus V9
aucuagugaagacuuacaca

SEQ ID NO: 119337 - RNA, 23 nt, Human erythrovirus V9
aucugaccacccccaugccuuau

SEQ ID NO: 119338 - RNA, 19 nt, Human erythrovirus V9
aggguuucaagcacaagca

SEQ ID NO: 119339 - RNA, 16 nt, Human erythrovirus V9
aguagugcagaaccua

SEQ ID NO: 119340 - RNA, 15 nt, Human erythrovirus V9
aggagaaaaugcagu

SEQ ID NO: 119341 - RNA, 16 nt, Human erythrovirus V9
aggagaaaaugcagua

SEQ ID NO: 119342 - RNA, 19 nt, Human erythrovirus V9
aggagaaaaugcaguauua

SEQ ID NO: 119343 - RNA, 22 nt, Human erythrovirus V9
agccuuaaauaaauaauucaua

SEQ ID NO: 119344 - RNA, 23 nt, Human erythrovirus V9
auuauaaaguguucucuccagca

SEQ ID NO: 119345 - RNA, 19 nt, Human erythrovirus V9
auuucaaaaagaagacacc

SEQ ID NO: 119346 - RNA, 16 nt, Human erythrovirus V9
auuuagagaguuuacu

SEQ ID NO: 119347 - RNA, 15 nt, Human erythrovirus V9
caaaaagaagacacc

SEQ ID NO: 119348 - RNA, 18 nt, Human erythrovirus V9
caaaaagcauguggagug

SEQ ID NO: 119349 - RNA, 21 nt, Human erythrovirus V9
cauuauaaaguguucucucca

SEQ ID NO: 119350 - RNA, 16 nt, Human erythrovirus V9
cauucucuaggcaauu

SEQ ID NO: 119351 - RNA, 21 nt, Human erythrovirus V9
ccuagaggagaaaaugcagua

SEQ ID NO: 119352 - RNA, 22 nt, Human erythrovirus V9
cccaugccuuaucauccaguaa

SEQ ID NO: 119353 - RNA, 10 nt, Human erythrovirus V9
gcagugacaa

SEQ ID NO: 119354 - RNA, 22 nt, Human erythrovirus V9
gcaaccaucuauaaaagauaca

SEQ ID NO: 119355 - RNA, 17 nt, Human erythrovirus V9
gauaugaacaacaugua

SEQ ID NO: 119356 - RNA, 18 nt, Human erythrovirus V9
gaaugcuaagauuaugua

SEQ ID NO: 119357 - RNA, 15 nt, Human erythrovirus V9
gaccauuacaacauu

SEQ ID NO: 119358 - RNA, 14 nt, Human erythrovirus V9
cuauaaaagauaca

SEQ ID NO: 119359 - RNA, 22 nt, Human erythrovirus V9
cguguauaagcaguuugugcaa

SEQ ID NO: 119360 - RNA, 18 nt, Human erythrovirus V9
cuguuugcuguguggaac

SEQ ID NO: 119361 - RNA, 15 nt, Human erythrovirus V9
cuguguuaacuugua

SEQ ID NO: 119362 - RNA, 20 nt, Human erythrovirus V9
uaacccauuuucuguguuaa

SEQ ID NO: 119363 - RNA, 14 nt, Human erythrovirus V9
uaaaagauacagac

SEQ ID NO: 119364 - RNA, 14 nt, Human erythrovirus V9
uaaaagauuacuuu

SEQ ID NO: 119365 - RNA, 18 nt, Human erythrovirus V9
uaaugugggagcuuggua

SEQ ID NO: 119366 - RNA, 19 nt, Human erythrovirus V9
uacagacgcuguagaauau

SEQ ID NO: 119367 - RNA, 17 nt, Human erythrovirus V9
uacauucucuaggcaau

SEQ ID NO: 119368 - RNA, 19 nt, Human erythrovirus V9
ucaaauuuuaaaagaccau

SEQ ID NO: 119369 - RNA, 13 nt, Human erythrovirus V9
ucaagcacaagca

SEQ ID NO: 119370 - RNA, 19 nt, Human erythrovirus V9
guaacguguacauucucua

SEQ ID NO: 119371 - RNA, 16 nt, Human erythrovirus V9
uuuagagaguuuacuc

SEQ ID NO: 119372 - RNA, 12 nt, Human erythrovirus V9
uuuaaaagacca

SEQ ID NO: 119373 - RNA, 23 nt, Human erythrovirus V9
uugguauaauggauggaaauuua

SEQ ID NO: 119374 - RNA, 20 nt, Human erythrovirus V9
uugcccaggacguguauaag

SEQ ID NO: 119375 - RNA, 16 nt, Human erythrovirus V9
uguauaagcaguuugu

SEQ ID NO: 119376 - RNA, 19 nt, Human erythrovirus V9
ucuccagcagcuaguagcu

SEQ ID NO: 119377 - RNA, 18 nt, Human erythrovirus V9
ugcaguugucauguagga

SEQ ID NO: 119378 - RNA, 22 nt, Human erythrovirus V9
ugcaggcgggggagguagcaac

SEQ ID NO: 119379 - RNA, 17 nt, Human erythrovirus V9
ugcccucauuguauuaa

SEQ ID NO: 119380 - RNA, 15 nt, Human erythrovirus V9
uuucuguguuaacuu

SEQ ID NO: 119381 - RNA, 23 nt, Homo sapiens
gaaaagaaucggcaauguuucaa

SEQ ID NO: 119382 - RNA, 16 nt, Homo sapiens
caggcuggagugcaau

SEQ ID NO: 119383 - RNA, 19 nt, Homo sapiens
auugcuugcacaaaccaau

SEQ ID NO: 119384 - RNA, 17 nt, Homo sapiens
gaacuccuuggcuucuu

SEQ ID NO: 119385 - RNA, 16 nt, Homo sapiens
cuaaguguaccagaga

SEQ ID NO: 119386 - RNA, 20 nt, Homo sapiens
uuguauuuaaaugaaaguga

SEQ ID NO: 119387 - RNA, 22 nt, Homo sapiens
cuuuaguuuuugugaaguuuaa

SEQ ID NO: 119388 - RNA, 19 nt, Homo sapiens
gucuuuggugaacauugca

SEQ ID NO: 119389 - RNA, 19 nt, Homo sapiens
cauuuaagcugccuguaca

SEQ ID NO: 119390 - RNA, 13 nt, Homo sapiens
ggcaggacagcuc

SEQ ID NO: 119391 - RNA, 22 nt, Homo sapiens
aagccuugguaaaauaaucagu

SEQ ID NO: 119392 - RNA, 13 nt, Homo sapiens
gcugggauuacag

SEQ ID NO: 119393 - RNA, 18 nt, Homo sapiens
agcccuuaggaagaauuu

SEQ ID NO: 119394 - RNA, 14 nt, Homo sapiens
uauacaauauacuu

SEQ ID NO: 119395 - RNA, 17 nt, Homo sapiens
uuuaauguuuccuuuaa

SEQ ID NO: 119396 - RNA, 15 nt, Homo sapiens
agccagguucugacu

SEQ ID NO: 119397 - RNA, 13 nt, Homo sapiens
gugauauguuggu

SEQ ID NO: 119398 - RNA, 17 nt, Homo sapiens
augguggccuggggcuu

SEQ ID NO: 119399 - RNA, 18 nt, Homo sapiens
auuaagaaauucacuucc

SEQ ID NO: 119400 - RNA, 13 nt, Homo sapiens
ugauuguagcuau

SEQ ID NO: 119401 - RNA, 16 nt, Homo sapiens
ugccaggcacacugag

SEQ ID NO: 119402 - RNA, 19 nt, Homo sapiens
gugcugggauuacagggau

SEQ ID NO: 119403 - RNA, 15 nt, Homo sapiens
guaggugguuuugaa

SEQ ID NO: 119404 - RNA, 16 nt, Homo sapiens
gauuuugcuguagaag

SEQ ID NO: 119405 - RNA, 13 nt, Homo sapiens
caacuguggcuua

SEQ ID NO: 119406 - RNA, 11 nt, Homo sapiens
uuuaaccaaga

SEQ ID NO: 119407 - RNA, 16 nt, Homo sapiens
acacaaucugaaacag

SEQ ID NO: 119408 - RNA, 22 nt, Homo sapiens
uguuuccuuuaauuuuuuacua

SEQ ID NO: 119409 - RNA, 13 nt, Homo sapiens
cacucagaaaaug

SEQ ID NO: 119410 - RNA, 21 nt, Homo sapiens
aggacacuagaagauuuugaa

SEQ ID NO: 119411 - RNA, 23 nt, Homo sapiens
aacaguaguugcaauguuuuaga

SEQ ID NO: 119412 - RNA, 21 nt, Homo sapiens
ugagcaaaaccaaauauucca

SEQ ID NO: 119413 - RNA, 20 nt, Homo sapiens
auacuagaguucauggauau

SEQ ID NO: 119414 - RNA, 14 nt, Homo sapiens
ccagagacugggac

SEQ ID NO: 119415 - RNA, 17 nt, Homo sapiens
gaaugagcaaaaccaaa

SEQ ID NO: 119416 - RNA, 14 nt, Homo sapiens
gcuguagaagaugg

SEQ ID NO: 119417 - RNA, 18 nt, Homo sapiens
aauaugacacucuaguca

SEQ ID NO: 119418 - RNA, 17 nt, Homo sapiens
ucuccuuagaaguggaa

SEQ ID NO: 119419 - RNA, 19 nt, Homo sapiens
caccaacuauagaauguau

SEQ ID NO: 119420 - RNA, 22 nt, Homo sapiens
ccucaaaugagaaaaugucuuu

SEQ ID NO: 119421 - RNA, 22 nt, Homo sapiens
ccauuugcuuagaaagucugau

SEQ ID NO: 119422 - RNA, 22 nt, Homo sapiens
ccauuagcauuugucaacaaag

SEQ ID NO: 119423 - RNA, 16 nt, Homo sapiens
uaagccauguguucca

SEQ ID NO: 119424 - RNA, 17 nt, Homo sapiens
caaacuccugaccucaa

SEQ ID NO: 119425 - RNA, 20 nt, Homo sapiens
gaguucauggauauguuaua

SEQ ID NO: 119426 - RNA, 16 nt, Homo sapiens
aaguuuaauugacuua

SEQ ID NO: 119427 - RNA, 21 nt, Homo sapiens
auuuuacuuuuuccuggcuca

SEQ ID NO: 119428 - RNA, 19 nt, Homo sapiens
uuggauacgacaacuugca

SEQ ID NO: 119429 - RNA, 16 nt, Homo sapiens
uauagaaaugcugguu

SEQ ID NO: 119430 - RNA, 15 nt, Homo sapiens
auucuccugccucag

SEQ ID NO: 119431 - RNA, 21 nt, Homo sapiens
cucugauguagcuuauacaaa

SEQ ID NO: 119432 - RNA, 16 nt, Homo sapiens
ucaauguccuacugag

SEQ ID NO: 119433 - RNA, 14 nt, Homo sapiens
uaguaaaagccauc

SEQ ID NO: 119434 - RNA, 15 nt, Homo sapiens
ggaccaggucucaua

SEQ ID NO: 119435 - RNA, 15 nt, Homo sapiens
aauguauuugcuaua

SEQ ID NO: 119436 - RNA, 23 nt, Homo sapiens
gucucaguuuacauuuuguauau

SEQ ID NO: 119437 - RNA, 21 nt, Homo sapiens
caugucuauuagcuccacaaa

SEQ ID NO: 119438 - RNA, 15 nt, Homo sapiens
acagcaucagcucaa

SEQ ID NO: 119439 - RNA, 15 nt, Homo sapiens
aacugaacauuccag

SEQ ID NO: 119440 - RNA, 20 nt, Homo sapiens
cagagucucgcucuguugcc

SEQ ID NO: 119441 - RNA, 20 nt, Homo sapiens
ucugaaaaaguauccugcuu

SEQ ID NO: 119442 - RNA, 17 nt, Homo sapiens
ugaauuuugucuuuaug

SEQ ID NO: 119443 - RNA, 16 nt, Homo sapiens
uaaaccguacacugug

SEQ ID NO: 119444 - RNA, 23 nt, Homo sapiens
cauggauauguuauacugaacca

SEQ ID NO: 119445 - RNA, 18 nt, Homo sapiens
ugaaguuuaauugacuua

SEQ ID NO: 119446 - RNA, 14 nt, Homo sapiens
ugaauaugccacuu

SEQ ID NO: 119447 - RNA, 14 nt, Homo sapiens
aggguaaauucucu

SEQ ID NO: 119448 - RNA, 14 nt, Homo sapiens
uugcucacaaaagu

SEQ ID NO: 119449 - RNA, 15 nt, Homo sapiens
aauguagaaagugau

SEQ ID NO: 119450 - RNA, 17 nt, Homo sapiens
uggcacuuauaaccaaa

SEQ ID NO: 119451 - RNA, 14 nt, Homo sapiens
gacagaagcguaua

SEQ ID NO: 119452 - RNA, 23 nt, Homo sapiens
uucagauauaaaagacugaccaa

SEQ ID NO: 119453 - RNA, 16 nt, Homo sapiens
gaaguuuaauugacuu

SEQ ID NO: 119454 - RNA, 13 nt, Homo sapiens
uaauaaagacagg

SEQ ID NO: 119455 - RNA, 17 nt, Homo sapiens
cugguggggcugccagg

SEQ ID NO: 119456 - RNA, 18 nt, Homo sapiens
uuguuauucuguaguuuc

SEQ ID NO: 119457 - RNA, 16 nt, Homo sapiens
aaguccacaguggaac

SEQ ID NO: 119458 - RNA, 14 nt, Homo sapiens
uuggaaaaucaaga

SEQ ID NO: 119459 - RNA, 16 nt, Homo sapiens
uaauaaaaguacaugu

SEQ ID NO: 119460 - RNA, 17 nt, Homo sapiens
ggcacacugagccagca

SEQ ID NO: 119461 - RNA, 12 nt, Homo sapiens
uucacucccacc

SEQ ID NO: 119462 - RNA, 21 nt, Homo sapiens
accgcgcccagccucaucucu

SEQ ID NO: 119463 - RNA, 13 nt, Homo sapiens
gguucaagugauu

SEQ ID NO: 119464 - RNA, 20 nt, Homo sapiens
uguuucaaacaaaaagucau

SEQ ID NO: 119465 - RNA, 20 nt, Homo sapiens
agugcaguuuuuuucuuguc

SEQ ID NO: 119466 - RNA, 15 nt, Homo sapiens
cacagcaucagcuca

SEQ ID NO: 119467 - RNA, 13 nt, Homo sapiens
ggguaaauucucu

SEQ ID NO: 119468 - RNA, 18 nt, Homo sapiens
cuucuuuacuuaguucaa

SEQ ID NO: 119469 - RNA, 16 nt, Homo sapiens
uacaauauacuuguau

SEQ ID NO: 119470 - RNA, 23 nt, Homo sapiens
acugggacuaaguguaccagaga

SEQ ID NO: 119471 - RNA, 10 nt, Homo sapiens
uaaagacaga

SEQ ID NO: 119472 - RNA, 23 nt, Homo sapiens
cuuuggugaacauugcaauagaa

SEQ ID NO: 119473 - RNA, 20 nt, Homo sapiens
accguaugagggaacugugu

SEQ ID NO: 119474 - RNA, 15 nt, Homo sapiens
gugagaggacucuga

SEQ ID NO: 119475 - RNA, 12 nt, Homo sapiens
agcaucagcuca

SEQ ID NO: 119476 - RNA, 13 nt, Homo sapiens
gguuauauguaua

SEQ ID NO: 119477 - RNA, 15 nt, Homo sapiens
aauagugauuuccac

SEQ ID NO: 119478 - RNA, 19 nt, Homo sapiens
uuuucuucuuuuugcuuca

SEQ ID NO: 119479 - RNA, 19 nt, Homo sapiens
gagaucuauauauguauaa

SEQ ID NO: 119480 - RNA, 22 nt, Homo sapiens
uuaaauguagaaagugauccau

SEQ ID NO: 119481 - RNA, 20 nt, Homo sapiens
cagccuccugaguagcugga

SEQ ID NO: 119482 - RNA, 15 nt, Homo sapiens
ugcagccacuguuaa

SEQ ID NO: 119483 - RNA, 15 nt, Homo sapiens
uuacuguccaaagac

SEQ ID NO: 119484 - RNA, 21 nt, Homo sapiens
cuaagaagcagauaauggugu

SEQ ID NO: 119485 - RNA, 18 nt, Homo sapiens
acgugauuuugcuguaga

SEQ ID NO: 119486 - RNA, 18 nt, Homo sapiens
uagaaugagacuuacuuc

SEQ ID NO: 119487 - RNA, 14 nt, Homo sapiens
caauauacuuguau

SEQ ID NO: 119488 - RNA, 21 nt, Homo sapiens
aucugccuccccuucacuccc

SEQ ID NO: 119489 - RNA, 14 nt, Homo sapiens
acaaaguaagccau

SEQ ID NO: 119490 - RNA, 12 nt, Homo sapiens
gaguagcuggau

SEQ ID NO: 119491 - RNA, 22 nt, Homo sapiens
ucaagacgucacccuccauucu

SEQ ID NO: 119492 - RNA, 17 nt, Homo sapiens
accuaacgagaaauaga

SEQ ID NO: 119493 - RNA, 15 nt, Homo sapiens
uccuguuacaaaaga

SEQ ID NO: 119494 - RNA, 13 nt, Homo sapiens
agaaagugaucca

SEQ ID NO: 119495 - RNA, 20 nt, Homo sapiens
cgccacccucccacugccaa

SEQ ID NO: 119496 - RNA, 15 nt, Homo sapiens
cagcauggagucaca

SEQ ID NO: 119497 - RNA, 19 nt, Homo sapiens
ugcuucuuaaaauagccau

SEQ ID NO: 119498 - RNA, 22 nt, Homo sapiens
uugcacaaauugggccaaagaa

SEQ ID NO: 119499 - RNA, 21 nt, Homo sapiens
aaccguaugagggaacugugu

SEQ ID NO: 119500 - RNA, 18 nt, Homo sapiens
ccaaagaaacauugccuu

SEQ ID NO: 119501 - RNA, 20 nt, Homo sapiens
gucagaguuccgacugccau

SEQ ID NO: 119502 - RNA, 13 nt, Homo sapiens
aaaaugugacuca

SEQ ID NO: 119503 - RNA, 12 nt, Homo sapiens
gaccaggucuca

SEQ ID NO: 119504 - RNA, 14 nt, Homo sapiens
caauguuuuagaau

SEQ ID NO: 119505 - RNA, 23 nt, Homo sapiens
ccacccccaaauuuucuuuuuau

SEQ ID NO: 119506 - RNA, 16 nt, Homo sapiens
uagcuuauacaaaaca

SEQ ID NO: 119507 - RNA, 18 nt, Homo sapiens
ggagccccugcucuggug

SEQ ID NO: 119508 - RNA, 15 nt, Homo sapiens
aaggcagaguacaaa

SEQ ID NO: 119509 - RNA, 13 nt, Homo sapiens
accuacaguguac

SEQ ID NO: 119510 - RNA, 14 nt, Homo sapiens
aaacaaucuuguca

SEQ ID NO: 119511 - RNA, 10 nt, Homo sapiens
aaaagugaug

SEQ ID NO: 119512 - RNA, 11 nt, Homo sapiens
auaugcacaaa

SEQ ID NO: 119513 - RNA, 19 nt, Homo sapiens
gucugaacaauauauacuu

SEQ ID NO: 119514 - RNA, 22 nt, Homo sapiens
uguagagagagaaaaguaacug

SEQ ID NO: 119515 - RNA, 19 nt, Homo sapiens
aaaauggcacuugggggac

SEQ ID NO: 119516 - RNA, 20 nt, Homo sapiens
uacccguuucacaugcuuuu

SEQ ID NO: 119517 - RNA, 21 nt, Homo sapiens
guuguuaauaaaaguacaugu

SEQ ID NO: 119518 - RNA, 16 nt, Homo sapiens
uacaaaguaagccaug

SEQ ID NO: 119519 - RNA, 19 nt, Homo sapiens
aggauuugggcucuuggaa

SEQ ID NO: 119520 - RNA, 15 nt, Homo sapiens
guauuaaguuguuaa

SEQ ID NO: 119521 - RNA, 21 nt, Homo sapiens
aaauuaagaaauucacuuccc

SEQ ID NO: 119522 - RNA, 21 nt, Homo sapiens
ucucccagccagguucugacu

SEQ ID NO: 119523 - RNA, 21 nt, Homo sapiens
auagagguucuuuauugcuca

SEQ ID NO: 119524 - RNA, 13 nt, Homo sapiens
caggcacacugag

SEQ ID NO: 119525 - RNA, 22 nt, Homo sapiens
ucauucugcauucucuagucag

SEQ ID NO: 119526 - RNA, 13 nt, Homo sapiens
aguaaaagccauc

SEQ ID NO: 119527 - RNA, 21 nt, Homo sapiens
guagagagagaaaaguaacug

SEQ ID NO: 119528 - RNA, 13 nt, Homo sapiens
cuugcacaaacca

SEQ ID NO: 119529 - RNA, 22 nt, Homo sapiens
uaaauuucucuacugucucagu

SEQ ID NO: 119530 - RNA, 18 nt, Homo sapiens
gucacagccacuugggau

SEQ ID NO: 119531 - RNA, 19 nt, Homo sapiens
uuugcuucaaaaacauucu

SEQ ID NO: 119532 - RNA, 13 nt, Homo sapiens
cagagcaaacaga

SEQ ID NO: 119533 - RNA, 22 nt, Homo sapiens
aaacauuuguuuguggucuaua

SEQ ID NO: 119534 - RNA, 18 nt, Homo sapiens
ccugccaggcacacugag

SEQ ID NO: 119535 - RNA, 17 nt, Homo sapiens
ugaaagugagacuuuga

SEQ ID NO: 119536 - RNA, 20 nt, Homo sapiens
auacuuauagaauucaguca

SEQ ID NO: 119537 - RNA, 23 nt, Homo sapiens
aaaugcugguuuuucaguuuuca

SEQ ID NO: 119538 - RNA, 19 nt, Homo sapiens
acugggcgcaguuggucuu

SEQ ID NO: 119539 - RNA, 17 nt, Homo sapiens
ucuuaaaauagccauaa

SEQ ID NO: 119540 - RNA, 19 nt, Homo sapiens
aacugaaugccacucugua

SEQ ID NO: 119541 - RNA, 15 nt, Homo sapiens
gccccagccuaggaa

SEQ ID NO: 119542 - RNA, 16 nt, Homo sapiens
cauaaaaguuggcuca

SEQ ID NO: 119543 - RNA, 22 nt, Homo sapiens
accagagaagggcuuggacuca

SEQ ID NO: 119544 - RNA, 18 nt, Homo sapiens
cauuuguuuuagucugaa

SEQ ID NO: 119545 - RNA, 19 nt, Homo sapiens
uagugcacagcacaaauua

SEQ ID NO: 119546 - RNA, 17 nt, Homo sapiens
cuaaguguaccagagaa

SEQ ID NO: 119547 - RNA, 14 nt, Homo sapiens
ugaaacaucauuuc

SEQ ID NO: 119548 - RNA, 17 nt, Homo sapiens
agcuggauuacaggcau

SEQ ID NO: 119549 - RNA, 16 nt, Homo sapiens
gaacugaacauuccag

SEQ ID NO: 119550 - RNA, 20 nt, Homo sapiens
ugaaagcuggagucugucaa

SEQ ID NO: 119551 - RNA, 23 nt, Homo sapiens
ugaaaagaaucggcaauguuuca

SEQ ID NO: 119552 - RNA, 12 nt, Homo sapiens
gucuuggcucac

SEQ ID NO: 119553 - RNA, 22 nt, Homo sapiens
ucugauaugcaguuuuccuuaa

SEQ ID NO: 119554 - RNA, 18 nt, Homo sapiens
auacugaaccaggccaga

SEQ ID NO: 119555 - RNA, 23 nt, Homo sapiens
aaugagcaaaaccaaauauucca

SEQ ID NO: 119556 - RNA, 21 nt, Homo sapiens
ggucagaguuccgacugccau

SEQ ID NO: 119557 - RNA, 19 nt, Homo sapiens
agggaacugaacauuccag

SEQ ID NO: 119558 - RNA, 15 nt, Homo sapiens
cauucugcacucaga

SEQ ID NO: 119559 - RNA, 20 nt, Homo sapiens
cccaggcuggagugcaauga

SEQ ID NO: 119560 - RNA, 11 nt, Homo sapiens
aguugcuguau

SEQ ID NO: 119561 - RNA, 16 nt, Homo sapiens
aaugccacucuguaau

SEQ ID NO: 119562 - RNA, 21 nt, Homo sapiens
gguaaaauaaucaguguuucc

SEQ ID NO: 119563 - RNA, 15 nt, Homo sapiens
cuuuauacucaggca

SEQ ID NO: 119564 - RNA, 16 nt, Homo sapiens
agcuagcaacauuugu

SEQ ID NO: 119565 - RNA, 16 nt, Homo sapiens
uuagagcuuuaccuaa

SEQ ID NO: 119566 - RNA, 15 nt, Homo sapiens
cucaggcagaucuca

SEQ ID NO: 119567 - RNA, 22 nt, Homo sapiens
agauacacaaucugaaacagcu

SEQ ID NO: 119568 - RNA, 10 nt, Homo sapiens
cucacaaaag

SEQ ID NO: 119569 - RNA, 16 nt, Homo sapiens
uccuuagaaguggaag

SEQ ID NO: 119570 - RNA, 16 nt, Homo sapiens
ggaaagccaguuacau

SEQ ID NO: 119571 - RNA, 19 nt, Homo sapiens
agaaccucgagguuucuca

SEQ ID NO: 119572 - RNA, 19 nt, Homo sapiens
agaaguaaauauagcucag

SEQ ID NO: 119573 - RNA, 16 nt, Homo sapiens
uacuauuuuuacuaau

SEQ ID NO: 119574 - RNA, 15 nt, Homo sapiens
cuaacaguaguugca

SEQ ID NO: 119575 - RNA, 16 nt, Homo sapiens
cuuaaaauagccauaa

SEQ ID NO: 119576 - RNA, 13 nt, Homo sapiens
gauacgacaacuu

SEQ ID NO: 119577 - RNA, 22 nt, Homo sapiens
aaacccaguaguggugacugug

SEQ ID NO: 119578 - RNA, 14 nt, Homo sapiens
guuuucccaaagag

SEQ ID NO: 119579 - RNA, 16 nt, Homo sapiens
cuugguaaaauaauca

SEQ ID NO: 119580 - RNA, 13 nt, Homo sapiens
cacuuuucaaugu

SEQ ID NO: 119581 - RNA, 16 nt, Homo sapiens
cacagccaaccuagcu

SEQ ID NO: 119582 - RNA, 18 nt, Homo sapiens
uguugacauucugaaugc

SEQ ID NO: 119583 - RNA, 21 nt, Homo sapiens
cuuguuagugcacagcacaaa

SEQ ID NO: 119584 - RNA, 18 nt, Homo sapiens
uuaaaccguacacugugu

SEQ ID NO: 119585 - RNA, 15 nt, Homo sapiens
ugguuauauguauau

SEQ ID NO: 119586 - RNA, 19 nt, Homo sapiens
cugauguagcuuauacaaa

SEQ ID NO: 119587 - RNA, 20 nt, Homo sapiens
cuggauuacaggcaugugcc

SEQ ID NO: 119588 - RNA, 18 nt, Homo sapiens
ccagagcguguagugaau

SEQ ID NO: 119589 - RNA, 14 nt, Homo sapiens
uccaaagacauguu

SEQ ID NO: 119590 - RNA, 22 nt, Homo sapiens
ugacucaagacuuccagagccu

SEQ ID NO: 119591 - RNA, 17 nt, Homo sapiens
agugagcuccuaagcca

SEQ ID NO: 119592 - RNA, 15 nt, Homo sapiens
cuuacuuaguguuau

SEQ ID NO: 119593 - RNA, 13 nt, Homo sapiens
gccauaugaauaa

SEQ ID NO: 119594 - RNA, 16 nt, Homo sapiens
uaaugguuauauguau

SEQ ID NO: 119595 - RNA, 17 nt, Homo sapiens
caggcuggagugcaaug

SEQ ID NO: 119596 - RNA, 11 nt, Homo sapiens
cacaugcuuuu

SEQ ID NO: 119597 - RNA, 22 nt, Homo sapiens
ggcuaagcacgggccauaugaa

SEQ ID NO: 119598 - RNA, 19 nt, Homo sapiens
ccaaagcccaaagugguau

SEQ ID NO: 119599 - RNA, 19 nt, Homo sapiens
ucaaaacaaucuugucaua

SEQ ID NO: 119600 - RNA, 14 nt, Homo sapiens
uuaaacuuacuuag

SEQ ID NO: 119601 - RNA, 12 nt, Homo sapiens
uggcucaucucu

SEQ ID NO: 119602 - RNA, 24 nt, Homo sapiens
cuugguaaaauaaucaguguuucc

SEQ ID NO: 119603 - RNA, 16 nt, Homo sapiens
aauuuugucuuuauga

SEQ ID NO: 119604 - RNA, 20 nt, Homo sapiens
ucuacugucucaguuuacau

SEQ ID NO: 119605 - RNA, 17 nt, Homo sapiens
augagggaacuguguag

SEQ ID NO: 119606 - RNA, 13 nt, Homo sapiens
agagcuuuaccua

SEQ ID NO: 119607 - RNA, 17 nt, Homo sapiens
aucguucucugccucac

SEQ ID NO: 119608 - RNA, 12 nt, Homo sapiens
uaagaugaaaca

SEQ ID NO: 119609 - RNA, 20 nt, Homo sapiens
gcccaggcuggagugcaaug

SEQ ID NO: 119610 - RNA, 12 nt, Homo sapiens
gaaucucucuuc

SEQ ID NO: 119611 - RNA, 16 nt, Homo sapiens
gacucaucauuuccau

SEQ ID NO: 119612 - RNA, 23 nt, Homo sapiens
auacuguuuuacuguccaaagac

SEQ ID NO: 119613 - RNA, 17 nt, Homo sapiens
cuccuggaccaggucuc

SEQ ID NO: 119614 - RNA, 14 nt, Homo sapiens
cauuugucaacaaa

SEQ ID NO: 119615 - RNA, 20 nt, Homo sapiens
ucauacuugaaaauaugaca

SEQ ID NO: 119616 - RNA, 21 nt, Homo sapiens
uccacucaggucuguuuuccg

SEQ ID NO: 119617 - RNA, 11 nt, Homo sapiens
ccaaggucucc

SEQ ID NO: 119618 - RNA, 21 nt, Homo sapiens
ugcuguagaagauggcacuua

SEQ ID NO: 119619 - RNA, 13 nt, Homo sapiens
guccaaggucucc

SEQ ID NO: 119620 - RNA, 17 nt, Homo sapiens
uuuaaaugaaagugaga

SEQ ID NO: 119621 - RNA, 17 nt, Homo sapiens
uagcauuugucaacaaa

SEQ ID NO: 119622 - RNA, 19 nt, Homo sapiens
uccuaagccaugggagaca

SEQ ID NO: 119623 - RNA, 13 nt, Homo sapiens
gaaacagcuucau

SEQ ID NO: 119624 - RNA, 13 nt, Homo sapiens
cuucuccuuagaa

SEQ ID NO: 119625 - RNA, 15 nt, Homo sapiens
ccaaagacauguuua

SEQ ID NO: 119626 - RNA, 19 nt, Homo sapiens
cauggauauguuauacuga

SEQ ID NO: 119627 - RNA, 13 nt, Homo sapiens
agucuucuuccau

SEQ ID NO: 119628 - RNA, 13 nt, Homo sapiens
ugaacauugcaau

SEQ ID NO: 119629 - RNA, 16 nt, Homo sapiens
aaaccaaauauuccag

SEQ ID NO: 119630 - RNA, 14 nt, Homo sapiens
uacuucucugcuau

SEQ ID NO: 119631 - RNA, 20 nt, Homo sapiens
gaaguuuguuuaaaugacag

SEQ ID NO: 119632 - RNA, 21 nt, Homo sapiens
aaaugugacucaagacuucca

SEQ ID NO: 119633 - RNA, 23 nt, Homo sapiens
cacagccaaccuagcuagcaaca

SEQ ID NO: 119634 - RNA, 17 nt, Homo sapiens
ccaggcuggagugcaau

SEQ ID NO: 119635 - RNA, 11 nt, Homo sapiens
uucaagugauu

SEQ ID NO: 119636 - RNA, 21 nt, Homo sapiens
aaaauuaagaaauucacuucc

SEQ ID NO: 119637 - RNA, 14 nt, Homo sapiens
uccccuucacuccc

SEQ ID NO: 119638 - RNA, 12 nt, Homo sapiens
acugagccagca

SEQ ID NO: 119639 - RNA, 14 nt, Homo sapiens
ugugccaucagcuc

SEQ ID NO: 119640 - RNA, 14 nt, Homo sapiens
ugacucuuggcaca

SEQ ID NO: 119641 - RNA, 22 nt, Homo sapiens
gccggggaaggaggccguccau

SEQ ID NO: 119642 - RNA, 13 nt, Homo sapiens
agcagauaauggu

SEQ ID NO: 119643 - RNA, 14 nt, Homo sapiens
uagaaugagacuua

SEQ ID NO: 119644 - RNA, 18 nt, Homo sapiens
cuuagguccaaggucucc

SEQ ID NO: 119645 - RNA, 12 nt, Homo sapiens
ucccacugccaa

SEQ ID NO: 119646 - RNA, 11 nt, Homo sapiens
auaguuuccaa

SEQ ID NO: 119647 - RNA, 17 nt, Homo sapiens
auuucucuacugucuca

SEQ ID NO: 119648 - RNA, 12 nt, Homo sapiens
uuuaaagacaga

SEQ ID NO: 119649 - RNA, 21 nt, Homo sapiens
cuaugauuguccguaggccca

SEQ ID NO: 119650 - RNA, 16 nt, Homo sapiens
acaauauacuuguaua

SEQ ID NO: 119651 - RNA, 18 nt, Homo sapiens
ggguuucaccauguuggc

SEQ ID NO: 119652 - RNA, 18 nt, Homo sapiens
cagugacuccacucugag

SEQ ID NO: 119653 - RNA, 15 nt, Homo sapiens
gagcuccuaagccau

SEQ ID NO: 119654 - RNA, 23 nt, Homo sapiens
aaaaccguaugagggaacugugu

SEQ ID NO: 119655 - RNA, 20 nt, Homo sapiens
ugauauguugguagauucua

SEQ ID NO: 119656 - RNA, 15 nt, Homo sapiens
cugaccaauauugua

SEQ ID NO: 119657 - RNA, 19 nt, Homo sapiens
cugggacuaaguguaccag

SEQ ID NO: 119658 - RNA, 17 nt, Homo sapiens
cuccccuucacucccac

SEQ ID NO: 119659 - RNA, 16 nt, Homo sapiens
ucacguaaagcuagaa

SEQ ID NO: 119660 - RNA, 16 nt, Homo sapiens
ucaggcagaucucagc

SEQ ID NO: 119661 - RNA, 15 nt, Homo sapiens
gaaaaguaacuguuu

SEQ ID NO: 119662 - RNA, 15 nt, Homo sapiens
aguguaccagagaag

SEQ ID NO: 119663 - RNA, 20 nt, Homo sapiens
cagagcagagaggcugaaua

SEQ ID NO: 119664 - RNA, 14 nt, Homo sapiens
uaaaauagccauaa

SEQ ID NO: 119665 - RNA, 18 nt, Homo sapiens
ugcaaugacacagucuug

SEQ ID NO: 119666 - RNA, 12 nt, Homo sapiens
ggaaaauucucu

SEQ ID NO: 119667 - RNA, 22 nt, Homo sapiens
uaccuuuuauuuuaauguuucc

SEQ ID NO: 119668 - RNA, 16 nt, Homo sapiens
uuucauaucacacugu

SEQ ID NO: 119669 - RNA, 15 nt, Homo sapiens
auucuguaguuucac

SEQ ID NO: 119670 - RNA, 13 nt, Homo sapiens
agguugagggcaa

SEQ ID NO: 119671 - RNA, 17 nt, Homo sapiens
cugcuagggaauaucaa

SEQ ID NO: 119672 - RNA, 20 nt, Homo sapiens
auaaaggggagggacucauc

SEQ ID NO: 119673 - RNA, 15 nt, Homo sapiens
aaccguacacugugu

SEQ ID NO: 119674 - RNA, 15 nt, Homo sapiens
ugcauguggcacuua

SEQ ID NO: 119675 - RNA, 15 nt, Homo sapiens
gagggaacuguguag

SEQ ID NO: 119676 - RNA, 21 nt, Homo sapiens
aggucuccagagggugaaagc

SEQ ID NO: 119677 - RNA, 15 nt, Homo sapiens
acaaagccaaucuca

SEQ ID NO: 119678 - RNA, 22 nt, Homo sapiens
caauauacuuguauagcaguuu

SEQ ID NO: 119679 - RNA, 15 nt, Homo sapiens
uguuuauagugcucu

SEQ ID NO: 119680 - RNA, 22 nt, Homo sapiens
ccauacuagaguucauggauau

SEQ ID NO: 119681 - RNA, 16 nt, Homo sapiens
aaauauaguucacaau

SEQ ID NO: 119682 - RNA, 20 nt, Homo sapiens
aucugcuagggaauaucaau

SEQ ID NO: 119683 - RNA, 20 nt, Homo sapiens
aaggcugugccaucagcucc

SEQ ID NO: 119684 - RNA, 23 nt, Homo sapiens
uagugauuuccacagugacucca

SEQ ID NO: 119685 - RNA, 19 nt, Homo sapiens
ugagucccagagccaauca

SEQ ID NO: 119686 - RNA, 18 nt, Homo sapiens
ggaaauagugauuuccac

SEQ ID NO: 119687 - RNA, 18 nt, Homo sapiens
cagaguuccgacugccau

SEQ ID NO: 119688 - RNA, 18 nt, Homo sapiens
guuuacauuuuguauauu

SEQ ID NO: 119689 - RNA, 13 nt, Homo sapiens
ccuccaaguccac

SEQ ID NO: 119690 - RNA, 17 nt, Homo sapiens
ucaaaacaaucuuguca

SEQ ID NO: 119691 - RNA, 17 nt, Homo sapiens
ggcuaguaaaagccauc

SEQ ID NO: 119692 - RNA, 14 nt, Homo sapiens
gucauaacuagaac

SEQ ID NO: 119693 - RNA, 22 nt, Homo sapiens
uagaaccucgagguuucucaaa

SEQ ID NO: 119694 - RNA, 19 nt, Homo sapiens
agauaaccucaagucacau

SEQ ID NO: 119695 - RNA, 22 nt, Homo sapiens
acauuuguuuuagucugaacaa

SEQ ID NO: 119696 - RNA, 18 nt, Homo sapiens
cuauuuuuuguaaugugu

SEQ ID NO: 119697 - RNA, 23 nt, Homo sapiens
cuuccuccccuguucauucugca

SEQ ID NO: 119698 - RNA, 17 nt, Homo sapiens
aaauaaucaguguuucc

SEQ ID NO: 119699 - RNA, 20 nt, Homo sapiens
aaguaaauauagcucaggua

SEQ ID NO: 119700 - RNA, 20 nt, Homo sapiens
ucauauugaugugugucuag

SEQ ID NO: 119701 - RNA, 16 nt, Homo sapiens
augcaguuuuccuuaa

SEQ ID NO: 119702 - RNA, 19 nt, Homo sapiens
ugaccaauauuguacaguu

SEQ ID NO: 119703 - RNA, 19 nt, Homo sapiens
accaggucucauaaugcau

SEQ ID NO: 119704 - RNA, 22 nt, Homo sapiens
caaaaccaaauauuccagagac

SEQ ID NO: 119705 - RNA, 14 nt, Homo sapiens
ugggauuacaggga

SEQ ID NO: 119706 - RNA, 19 nt, Homo sapiens
cccuguucauucugcauuc

SEQ ID NO: 119707 - RNA, 14 nt, Homo sapiens
auuguagcuaugau

SEQ ID NO: 119708 - RNA, 13 nt, Homo sapiens
cagagacugggac

SEQ ID NO: 119709 - RNA, 22 nt, Homo sapiens
aauauuccagagacugggacua

SEQ ID NO: 119710 - RNA, 18 nt, Homo sapiens
gcaaacagaaaaagaagg

SEQ ID NO: 119711 - RNA, 21 nt, Homo sapiens
auaacuuuuuuuuaaguuaca

SEQ ID NO: 119712 - RNA, 13 nt, Homo sapiens
uuacuaaucuuuc

SEQ ID NO: 119713 - RNA, 12 nt, Homo sapiens
uuucccaaagag

SEQ ID NO: 119714 - RNA, 21 nt, Homo sapiens
cacuucccacuauugcuugca

SEQ ID NO: 119715 - RNA, 17 nt, Homo sapiens
aaaaaugugacucaaga

SEQ ID NO: 119716 - RNA, 21 nt, Homo sapiens
cacugccaaagaacuuggaaa

SEQ ID NO: 119717 - RNA, 19 nt, Homo sapiens
cuuccuggaggugacacuu

SEQ ID NO: 119718 - RNA, 18 nt, Homo sapiens
guuuuacuguccaaagac

SEQ ID NO: 119719 - RNA, 23 nt, Homo sapiens
agaauauuauuggaaaauucucu

SEQ ID NO: 119720 - RNA, 22 nt, Homo sapiens
caccgcgcccagccucaucucu

SEQ ID NO: 119721 - RNA, 18 nt, Homo sapiens
aaggacacuagaagauuu

SEQ ID NO: 119722 - RNA, 22 nt, Homo sapiens
aacuuggaaauagugauuucca

SEQ ID NO: 119723 - RNA, 20 nt, Homo sapiens
cucgugguaggacuguagaa

SEQ ID NO: 119724 - RNA, 13 nt, Homo sapiens
caaucguaaaauu

SEQ ID NO: 119725 - RNA, 23 nt, Homo sapiens
gaagggcuuggacucaagcaaga

SEQ ID NO: 119726 - RNA, 16 nt, Homo sapiens
uagaucugaacuccuu

SEQ ID NO: 119727 - RNA, 19 nt, Homo sapiens
cugaguagcuggauuacag

SEQ ID NO: 119728 - RNA, 20 nt, Homo sapiens
gcacucagaaaauggcacuu

SEQ ID NO: 119729 - RNA, 17 nt, Homo sapiens
ugcuugcacaaaccaau

SEQ ID NO: 119730 - RNA, 23 nt, Homo sapiens
caggcgugaccugccaggcacac

SEQ ID NO: 119731 - RNA, 22 nt, Homo sapiens
uggggacacagcaucagcucaa

SEQ ID NO: 119732 - RNA, 18 nt, Homo sapiens
accaacuauagaauguau

SEQ ID NO: 119733 - RNA, 18 nt, Homo sapiens
gcccaggcuggagugcaa

SEQ ID NO: 119734 - RNA, 21 nt, Homo sapiens
ugugaccauuagcauuuguca

SEQ ID NO: 119735 - RNA, 21 nt, Homo sapiens
gacucaagacuuccagagccu

SEQ ID NO: 119736 - RNA, 18 nt, Homo sapiens
uccuccccuguucauucu

SEQ ID NO: 119737 - RNA, 18 nt, Homo sapiens
ccacccucccacugccaa

SEQ ID NO: 119738 - RNA, 19 nt, Homo sapiens
cuagcaacauuuguuuuag

SEQ ID NO: 119739 - RNA, 18 nt, Homo sapiens
uccagagacugggacuaa

SEQ ID NO: 119740 - RNA, 19 nt, Homo sapiens
cuuuaauuuuuuacuauuu

SEQ ID NO: 119741 - RNA, 22 nt, Homo sapiens
ucagcaccuacaguguacaguc

SEQ ID NO: 119742 - RNA, 20 nt, Homo sapiens
guagaaagugauccauacuu

SEQ ID NO: 119743 - RNA, 20 nt, Homo sapiens
uacaguuuuuauugcuuguu

SEQ ID NO: 119744 - RNA, 14 nt, Homo sapiens
aaacaucauuucaa

SEQ ID NO: 119745 - RNA, 17 nt, Homo sapiens
uuaugaauaguuuccaa

SEQ ID NO: 119746 - RNA, 14 nt, Homo sapiens
guccacaguggaac

SEQ ID NO: 119747 - RNA, 21 nt, Homo sapiens
uggauuacaggcaugugccac

SEQ ID NO: 119748 - RNA, 18 nt, Homo sapiens
aaagucuacuuuaccuaa

SEQ ID NO: 119749 - RNA, 22 nt, Homo sapiens
gacucuauuaaaaucuucaaua

SEQ ID NO: 119750 - RNA, 20 nt, Homo sapiens
gccagguucugacucuuggc

SEQ ID NO: 119751 - RNA, 16 nt, Homo sapiens
acugaauuuugucuuu

SEQ ID NO: 119752 - RNA, 15 nt, Homo sapiens
guagaaagugaucca

SEQ ID NO: 119753 - RNA, 18 nt, Homo sapiens
uucuuucaaagaagccag

SEQ ID NO: 119754 - RNA, 12 nt, Homo sapiens
uguaauugcaaa

SEQ ID NO: 119755 - RNA, 21 nt, Homo sapiens
guauaaauauguauuuuguca

SEQ ID NO: 119756 - RNA, 22 nt, Homo sapiens
ucaagugauucuccugccucag

SEQ ID NO: 119757 - RNA, 13 nt, Homo sapiens
gucuauuagcucc

SEQ ID NO: 119758 - RNA, 17 nt, Homo sapiens
cauacuagaguucaugg

SEQ ID NO: 119759 - RNA, 12 nt, Homo sapiens
guacacuguguu

SEQ ID NO: 119760 - RNA, 12 nt, Homo sapiens
uauuuuuacuaa

SEQ ID NO: 119761 - RNA, 23 nt, Homo sapiens
gucaauguccuacugagacagca

SEQ ID NO: 119762 - RNA, 18 nt, Homo sapiens
aauguccuacugagacag

SEQ ID NO: 119763 - RNA, 21 nt, Homo sapiens
agcuagcaacauuuguuuuag

SEQ ID NO: 119764 - RNA, 10 nt, Homo sapiens
ucauauugau

SEQ ID NO: 119765 - RNA, 18 nt, Homo sapiens
ggaacuaagaaagcccuu

SEQ ID NO: 119766 - RNA, 13 nt, Homo sapiens
gugccaucagcuc

SEQ ID NO: 119767 - RNA, 16 nt, Homo sapiens
acuuacuuaguguuau

SEQ ID NO: 119768 - RNA, 21 nt, Homo sapiens
aguagcuggauuacaggcaug

SEQ ID NO: 119769 - RNA, 14 nt, Homo sapiens
uacgacaacuugca

SEQ ID NO: 119770 - RNA, 23 nt, Homo sapiens
uguaagaucguucucugccucac

SEQ ID NO: 119771 - RNA, 14 nt, Homo sapiens
gucugaacaauaua

SEQ ID NO: 119772 - RNA, 17 nt, Homo sapiens
ccaaauauuccagagac

SEQ ID NO: 119773 - RNA, 14 nt, Homo sapiens
aacaucauuucaau

SEQ ID NO: 119774 - RNA, 15 nt, Homo sapiens
caaucugaaacagcu

SEQ ID NO: 119775 - RNA, 21 nt, Homo sapiens
aaagcuagaaaguguaugugu

SEQ ID NO: 119776 - RNA, 22 nt, Homo sapiens
agccuaggaaagccaguuacau

SEQ ID NO: 119777 - RNA, 23 nt, Homo sapiens
uuacuguucuaaggcugugccau

SEQ ID NO: 119778 - RNA, 22 nt, Homo sapiens
cacagcacaaauuaguuguaua

SEQ ID NO: 119779 - RNA, 15 nt, Homo sapiens
uaagaaauucacuuc

SEQ ID NO: 119780 - RNA, 18 nt, Homo sapiens
cgauuaauaacaggcaaa

SEQ ID NO: 119781 - RNA, 23 nt, Homo sapiens
gcaaaaccaaauauuccagagac

SEQ ID NO: 119782 - RNA, 13 nt, Homo sapiens
uucuccugccuca

SEQ ID NO: 119783 - RNA, 20 nt, Homo sapiens
acagugacuccacucugagu

SEQ ID NO: 119784 - RNA, 16 nt, Homo sapiens
cuauuagcuccacaaa

SEQ ID NO: 119785 - RNA, 13 nt, Homo sapiens
ugacacagucuug

SEQ ID NO: 119786 - RNA, 21 nt, Homo sapiens
acugcauaugaaaggacacua

SEQ ID NO: 119787 - RNA, 11 nt, Homo sapiens
gaaaacagaaa

SEQ ID NO: 119788 - RNA, 20 nt, Homo sapiens
ugcccaggcuggagugcaau

SEQ ID NO: 119789 - RNA, 15 nt, Homo sapiens
aguugggugauaugu

SEQ ID NO: 119790 - RNA, 17 nt, Homo sapiens
caacaaagucacccacu

SEQ ID NO: 119791 - RNA, 20 nt, Homo sapiens
gcagaugguggagcugaaua

SEQ ID NO: 119792 - RNA, 21 nt, Homo sapiens
gaaauucacuuccccucuagg

SEQ ID NO: 119793 - RNA, 20 nt, Homo sapiens
guauauucaaccaaauacuu

SEQ ID NO: 119794 - RNA, 18 nt, Homo sapiens
agcucagguagcacuuua

SEQ ID NO: 119795 - RNA, 13 nt, Homo sapiens
cuggcucaucucu

SEQ ID NO: 119796 - RNA, 16 nt, Homo sapiens
uauaaaagacugacca

SEQ ID NO: 119797 - RNA, 14 nt, Homo sapiens
aaaaggcagaguac

SEQ ID NO: 119798 - RNA, 14 nt, Homo sapiens
uuugaggguguaua

SEQ ID NO: 119799 - RNA, 19 nt, Homo sapiens
ucagaguuccgacugccau

SEQ ID NO: 119800 - RNA, 19 nt, Homo sapiens
uauauguauaucacauucc

SEQ ID NO: 119801 - RNA, 13 nt, Homo sapiens
cacugauguauga

SEQ ID NO: 119802 - RNA, 12 nt, Homo sapiens
uaguugcuguau

SEQ ID NO: 119803 - RNA, 19 nt, Homo sapiens
agccaugggagacacugau

SEQ ID NO: 119804 - RNA, 19 nt, Homo sapiens
uggaaauagugauuuccac

SEQ ID NO: 119805 - RNA, 23 nt, Homo sapiens
uucauggauauguuauacugaac

SEQ ID NO: 119806 - RNA, 13 nt, Homo sapiens
ggauuacaggcau

SEQ ID NO: 119807 - RNA, 16 nt, Homo sapiens
aaagggagaagaggga

SEQ ID NO: 119808 - RNA, 14 nt, Homo sapiens
ccagccucaucucu

SEQ ID NO: 119809 - RNA, 15 nt, Homo sapiens
aucuaaaaucugcua

SEQ ID NO: 119810 - RNA, 16 nt, Homo sapiens
gacacagcaucagcuc

SEQ ID NO: 119811 - RNA, 21 nt, Homo sapiens
cccacugccaaagaacuugga

SEQ ID NO: 119812 - RNA, 21 nt, Homo sapiens
aaaaguuuuguaaauuucucu

SEQ ID NO: 119813 - RNA, 14 nt, Homo sapiens
caguggaacuaaga

SEQ ID NO: 119814 - RNA, 18 nt, Homo sapiens
cauauugaugugugucua

SEQ ID NO: 119815 - RNA, 16 nt, Homo sapiens
ugcauucucuagucag

SEQ ID NO: 119816 - RNA, 18 nt, Homo sapiens
ggauacgacaacuugcac

SEQ ID NO: 119817 - RNA, 13 nt, Homo sapiens
cacacuguuaaaa

SEQ ID NO: 119818 - RNA, 19 nt, Homo sapiens
cauaaugcauguggcacuu

SEQ ID NO: 119819 - RNA, 14 nt, Homo sapiens
ucucugcuaucuag

SEQ ID NO: 119820 - RNA, 21 nt, Homo sapiens
cugaugcuggggacacagcau

SEQ ID NO: 119821 - RNA, 23 nt, Homo sapiens
ugggucagaguuccgacugccau

SEQ ID NO: 119822 - RNA, 20 nt, Homo sapiens
uagauaaucucuccauuccc

SEQ ID NO: 119823 - RNA, 17 nt, Homo sapiens
ggcucucccagccaggu

SEQ ID NO: 119824 - RNA, 16 nt, Homo sapiens
gcauuugucaacaaag

SEQ ID NO: 119825 - RNA, 16 nt, Homo sapiens
cccuucuuuucugacu

SEQ ID NO: 119826 - RNA, 15 nt, Homo sapiens
auaaagacaggguuu

SEQ ID NO: 119827 - RNA, 15 nt, Homo sapiens
uagaaagaagaugaa

SEQ ID NO: 119828 - RNA, 21 nt, Homo sapiens
cagguucugacucuuggcaca

SEQ ID NO: 119829 - RNA, 16 nt, Homo sapiens
ucagcaccuacagugu

SEQ ID NO: 119830 - RNA, 23 nt, Homo sapiens
ugucucgugguaggacuguagaa

SEQ ID NO: 119831 - RNA, 21 nt, Homo sapiens
cuuuguaaagaaaguggcuug

SEQ ID NO: 119832 - RNA, 21 nt, Homo sapiens
ggggacacagcaucagcucaa

SEQ ID NO: 119833 - RNA, 23 nt, Homo sapiens
ucaaaugagaaaaugucuuuauu

SEQ ID NO: 119834 - RNA, 17 nt, Homo sapiens
ugggagacacugaugua

SEQ ID NO: 119835 - RNA, 23 nt, Homo sapiens
agccaccgcgcccagccucaucu

SEQ ID NO: 119836 - RNA, 16 nt, Homo sapiens
uuaauaaagacagggu

SEQ ID NO: 119837 - RNA, 13 nt, Homo sapiens
aauagccauaaag

SEQ ID NO: 119838 - RNA, 14 nt, Homo sapiens
ggguucaagugauu

SEQ ID NO: 119839 - RNA, 17 nt, Homo sapiens
uucaacguaagacugug

SEQ ID NO: 119840 - RNA, 22 nt, Homo sapiens
uacuuuuuccuggcucaucucu

SEQ ID NO: 119841 - RNA, 9 nt, Homo sapiens
aaagugaug

SEQ ID NO: 119842 - RNA, 21 nt, Homo sapiens
ugccacucuguaauugcaaaa

SEQ ID NO: 119843 - RNA, 23 nt, Homo sapiens
aaaacuucaacguaagacugugu

SEQ ID NO: 119844 - RNA, 16 nt, Homo sapiens
cagccagguucugacu

SEQ ID NO: 119845 - RNA, 21 nt, Homo sapiens
uuaaauguagaaagugaucca

SEQ ID NO: 119846 - RNA, 17 nt, Homo sapiens
cacauuuuucagauaua

SEQ ID NO: 119847 - RNA, 13 nt, Homo sapiens
auguguuccaagg

SEQ ID NO: 119848 - RNA, 21 nt, Homo sapiens
aaagcccuuaaaaauaugugu

SEQ ID NO: 119849 - RNA, 12 nt, Homo sapiens
ugaacauuccag

SEQ ID NO: 119850 - RNA, 13 nt, Homo sapiens
aaagaaauuucca

SEQ ID NO: 119851 - RNA, 18 nt, Homo sapiens
auaugacacucuagucaa

SEQ ID NO: 119852 - RNA, 20 nt, Homo sapiens
ggcacagcauggagucacag

SEQ ID NO: 119853 - RNA, 18 nt, Homo sapiens
aauucagggagugggcua

SEQ ID NO: 119854 - RNA, 16 nt, Homo sapiens
aggcuggagugcaaug

SEQ ID NO: 119855 - RNA, 16 nt, Homo sapiens
caacauuuguuuuagu

SEQ ID NO: 119856 - RNA, 13 nt, Homo sapiens
guaagacugugua

SEQ ID NO: 119857 - RNA, 13 nt, Homo sapiens
cagcaucagcuca

SEQ ID NO: 119858 - RNA, 17 nt, Homo sapiens
uaagaagugacucuugc

SEQ ID NO: 119859 - RNA, 23 nt, Homo sapiens
ucuuaagacgugauuuugcugua

SEQ ID NO: 119860 - RNA, 19 nt, Homo sapiens
uccugaguagcuggauuac

SEQ ID NO: 119861 - RNA, 16 nt, Homo sapiens
acccucccacugccaa

SEQ ID NO: 119862 - RNA, 17 nt, Homo sapiens
caggacagcuccuggac

SEQ ID NO: 119863 - RNA, 14 nt, Homo sapiens
acagcaucagcuca

SEQ ID NO: 119864 - RNA, 21 nt, Homo sapiens
ucugaacaauauauacuuaua

SEQ ID NO: 119865 - RNA, 20 nt, Homo sapiens
auuccacaaccugguuugcc

SEQ ID NO: 119866 - RNA, 14 nt, Homo sapiens
uguguuuuuaauaa

SEQ ID NO: 119867 - RNA, 19 nt, Homo sapiens
uuucuuucaaagaagccag

SEQ ID NO: 119868 - RNA, 17 nt, Homo sapiens
cugauguagcuuauaca

SEQ ID NO: 119869 - RNA, 23 nt, Homo sapiens
cagucaaagauacacaaucugaa

SEQ ID NO: 119870 - RNA, 21 nt, Homo sapiens
uggcaguggaacuaagaaagc

SEQ ID NO: 119871 - RNA, 19 nt, Homo sapiens
cuuaugcaaauaaccauug

SEQ ID NO: 119872 - RNA, 19 nt, Homo sapiens
cccaggcuggagugcaaug

SEQ ID NO: 119873 - RNA, 13 nt, Homo sapiens
ccaggggagaccc

SEQ ID NO: 119874 - RNA, 20 nt, Homo sapiens
aagaugaaacaucauuucaa

SEQ ID NO: 119875 - RNA, 20 nt, Homo sapiens
cuguucuaaggcugugccau

SEQ ID NO: 119876 - RNA, 23 nt, Homo sapiens
aagacgucacccuccauucugca

SEQ ID NO: 119877 - RNA, 18 nt, Homo sapiens
gcaguuuuuuucuugucu

SEQ ID NO: 119878 - RNA, 20 nt, Homo sapiens
ggcuggagugcaaugacaca

SEQ ID NO: 119879 - RNA, 22 nt, Homo sapiens
caaucaauucauaucuauuuau

SEQ ID NO: 119880 - RNA, 19 nt, Homo sapiens
uccuggaggugacacuuga

SEQ ID NO: 119881 - RNA, 23 nt, Homo sapiens
caaucaguagccagcaucugccu

SEQ ID NO: 119882 - RNA, 19 nt, Homo sapiens
gccacccucccacugccaa

SEQ ID NO: 119883 - RNA, 12 nt, Homo sapiens
caguguuuccaa

SEQ ID NO: 119884 - RNA, 22 nt, Homo sapiens
ugagacuuugaggguguauauu

SEQ ID NO: 119885 - RNA, 15 nt, Homo sapiens
cccacccaacuaauu

SEQ ID NO: 119886 - RNA, 23 nt, Homo sapiens
ccaguaguggugacugugggcuc

SEQ ID NO: 119887 - RNA, 22 nt, Homo sapiens
cuagaguucauggauauguuau

SEQ ID NO: 119888 - RNA, 19 nt, Homo sapiens
ucaagugauucuccugccu

SEQ ID NO: 119889 - RNA, 13 nt, Homo sapiens
caguguacagucu

SEQ ID NO: 119890 - RNA, 22 nt, Homo sapiens
gaaauagugauuuccacaguga

SEQ ID NO: 119891 - RNA, 18 nt, Homo sapiens
uaaaccguacacuguguu

SEQ ID NO: 119892 - RNA, 22 nt, Homo sapiens
agauucuaauggcuuuauugca

SEQ ID NO: 119893 - RNA, 21 nt, Homo sapiens
uguauuuaaaugaaagugaga

SEQ ID NO: 119894 - RNA, 15 nt, Homo sapiens
uucaguuuucaggag

SEQ ID NO: 119895 - RNA, 16 nt, Homo sapiens
cacccuccauucugca

SEQ ID NO: 119896 - RNA, 12 nt, Homo sapiens
caaaacauuugu

SEQ ID NO: 119897 - RNA, 19 nt, Homo sapiens
ggacuaaguguaccagaga

SEQ ID NO: 119898 - RNA, 17 nt, Homo sapiens
acuuuuuccuggcucau

SEQ ID NO: 119899 - RNA, 22 nt, Homo sapiens
uagucugaacaauauauacuua

SEQ ID NO: 119900 - RNA, 20 nt, Homo sapiens
cuccugaccucaaguaaucc

SEQ ID NO: 119901 - RNA, 20 nt, Homo sapiens
gcacaaauugggccaaagaa

SEQ ID NO: 119902 - RNA, 11 nt, Homo sapiens
aguugcacaaa

SEQ ID NO: 119903 - RNA, 18 nt, Homo sapiens
gacgugauuuugcuguag

SEQ ID NO: 119904 - RNA, 16 nt, Homo sapiens
cuaaauaugagcccag

SEQ ID NO: 119905 - RNA, 12 nt, Homo sapiens
ugaggguguaua

SEQ ID NO: 119906 - RNA, 18 nt, Homo sapiens
gccagagcaaacagaaaa

SEQ ID NO: 119907 - RNA, 15 nt, Homo sapiens
gauucuccugccuca

SEQ ID NO: 119908 - RNA, 13 nt, Homo sapiens
acuguccaaagac

SEQ ID NO: 119909 - RNA, 13 nt, Homo sapiens
agaagaugaauga

SEQ ID NO: 119910 - RNA, 16 nt, Homo sapiens
acaagaacacugaaaa

SEQ ID NO: 119911 - RNA, 23 nt, Homo sapiens
uaaaaguuggcucaggagucuua

SEQ ID NO: 119912 - RNA, 15 nt, Homo sapiens
cacagucuuggcuca

SEQ ID NO: 119913 - RNA, 16 nt, Homo sapiens
cauaacaggagugcca

SEQ ID NO: 119914 - RNA, 14 nt, Homo sapiens
aauagugauuucca

SEQ ID NO: 119915 - RNA, 15 nt, Homo sapiens
gaaugagacuuacuu

SEQ ID NO: 119916 - RNA, 16 nt, Homo sapiens
acugaaccaggccaga

SEQ ID NO: 119917 - RNA, 13 nt, Homo sapiens
auauacuuauaga

SEQ ID NO: 119918 - RNA, 15 nt, Homo sapiens
uuugaggguguauau

SEQ ID NO: 119919 - RNA, 17 nt, Homo sapiens
agaugcauccuuucaua

SEQ ID NO: 119920 - RNA, 14 nt, Homo sapiens
uucuggggcuucag

SEQ ID NO: 119921 - RNA, 17 nt, Homo sapiens
uugguuuugcucacaaa

SEQ ID NO: 119922 - RNA, 16 nt, Homo sapiens
uguuauacugaaccag

SEQ ID NO: 119923 - RNA, 13 nt, Homo sapiens
caaaaccaaauau

SEQ ID NO: 119924 - RNA, 17 nt, Homo sapiens
guucuaaggcugugcca

SEQ ID NO: 119925 - RNA, 13 nt, Homo sapiens
caaagaagccagc

SEQ ID NO: 119926 - RNA, 21 nt, Homo sapiens
ucugaggcuucuggggcuuca

SEQ ID NO: 119927 - RNA, 21 nt, Homo sapiens
ugaggaauuucuguucuucca

SEQ ID NO: 119928 - RNA, 20 nt, Homo sapiens
gucugaacaauauauacuua

SEQ ID NO: 119929 - RNA, 15 nt, Homo sapiens
acaaucuugucauac

SEQ ID NO: 119930 - RNA, 13 nt, Homo sapiens
uuuugcuguagaa

SEQ ID NO: 119931 - RNA, 20 nt, Homo sapiens
gacucuaacaguaguugcaa

SEQ ID NO: 119932 - RNA, 15 nt, Homo sapiens
gaaauggggaacuac

SEQ ID NO: 119933 - RNA, 15 nt, Homo sapiens
aaauuucucuacugu

SEQ ID NO: 119934 - RNA, 18 nt, Homo sapiens
ucuuggguucaagugauu

SEQ ID NO: 119935 - RNA, 23 nt, Homo sapiens
cuuagagcuuuaccuaaauauga

SEQ ID NO: 119936 - RNA, 16 nt, Homo sapiens
gcuaguaaaagccauc

SEQ ID NO: 119937 - RNA, 14 nt, Homo sapiens
ccaaauuauggcaa

SEQ ID NO: 119938 - RNA, 18 nt, Homo sapiens
ccgacugccaucuuggac

SEQ ID NO: 119939 - RNA, 20 nt, Homo sapiens
aaaauaaucaguguuuccaa

SEQ ID NO: 119940 - RNA, 21 nt, Homo sapiens
uaguggugacugugggcucca

SEQ ID NO: 119941 - RNA, 20 nt, Homo sapiens
aagaaucggcaauguuucaa

SEQ ID NO: 119942 - RNA, 21 nt, Homo sapiens
cacaaucugaaacagcuucau

SEQ ID NO: 119943 - RNA, 17 nt, Homo sapiens
uagcuuauacaaaacau

SEQ ID NO: 119944 - RNA, 17 nt, Homo sapiens
cacccucccacugccaa

SEQ ID NO: 119945 - RNA, 15 nt, Homo sapiens
uggcuucuuuacuua

SEQ ID NO: 119946 - RNA, 14 nt, Homo sapiens
uuauggcaaauuca

SEQ ID NO: 119947 - RNA, 18 nt, Homo sapiens
acugccaaagaacuugga

SEQ ID NO: 119948 - RNA, 15 nt, Homo sapiens
ugcacaaaccaauua

SEQ ID NO: 119949 - RNA, 16 nt, Homo sapiens
ugcaaugacacagucu

SEQ ID NO: 119950 - RNA, 15 nt, Homo sapiens
aucuguccuguuaca

SEQ ID NO: 119951 - RNA, 13 nt, Homo sapiens
ucaucauuuccau

SEQ ID NO: 119952 - RNA, 19 nt, Homo sapiens
caaaaccaaauauuccaga

SEQ ID NO: 119953 - RNA, 15 nt, Homo sapiens
aguucauggauaugu

SEQ ID NO: 119954 - RNA, 17 nt, Homo sapiens
ucagucuuuuccaugaa

SEQ ID NO: 119955 - RNA, 11 nt, Homo sapiens
gccucaucucu

SEQ ID NO: 119956 - RNA, 15 nt, Homo sapiens
acacagcaucagcuc

SEQ ID NO: 119957 - RNA, 19 nt, Homo sapiens
cuggcaguggaacuaagaa

SEQ ID NO: 119958 - RNA, 17 nt, Homo sapiens
uauugaacuuaugcaaa

SEQ ID NO: 119959 - RNA, 23 nt, Homo sapiens
uuccaaucuguccuguuacaaaa

SEQ ID NO: 119960 - RNA, 22 nt, Homo sapiens
caggcaugugccacccacccaa

SEQ ID NO: 119961 - RNA, 20 nt, Homo sapiens
auuugcuuagaaagucugau

SEQ ID NO: 119962 - RNA, 21 nt, Homo sapiens
augacacucuagucaaagccu

SEQ ID NO: 119963 - RNA, 22 nt, Homo sapiens
cauuugucaacaaagucaccca

SEQ ID NO: 119964 - RNA, 12 nt, Homo sapiens
uuugcuguagaa

SEQ ID NO: 119965 - RNA, 23 nt, Homo sapiens
aaugucuuuauuaaauguagaaa

SEQ ID NO: 119966 - RNA, 15 nt, Homo sapiens
agaaauccaauugga

SEQ ID NO: 119967 - RNA, 19 nt, Homo sapiens
cauugcaauagaaauccaa

SEQ ID NO: 119968 - RNA, 22 nt, Homo sapiens
uuaccuuuuauuuuaauguuuc

SEQ ID NO: 119969 - RNA, 14 nt, Homo sapiens
aaauucacuucccc

SEQ ID NO: 119970 - RNA, 17 nt, Homo sapiens
gauuugggcucuuggaa

SEQ ID NO: 119971 - RNA, 15 nt, Homo sapiens
aaucaguguuuccaa

SEQ ID NO: 119972 - RNA, 15 nt, Homo sapiens
gcaggacagcuccug

SEQ ID NO: 119973 - RNA, 14 nt, Homo sapiens
aaugagacuuacuu

SEQ ID NO: 119974 - RNA, 23 nt, Homo sapiens
cgugaccugccaggcacacugag

SEQ ID NO: 119975 - RNA, 20 nt, Homo sapiens
cugaccaauauuguacaguu

SEQ ID NO: 119976 - RNA, 19 nt, Homo sapiens
auuggaccagucagcacag

SEQ ID NO: 119977 - RNA, 14 nt, Homo sapiens
auugggccaaagaa

SEQ ID NO: 119978 - RNA, 17 nt, Homo sapiens
accuaaauaugagccca

SEQ ID NO: 119979 - RNA, 13 nt, Homo sapiens
uugucaacaaagu

SEQ ID NO: 119980 - RNA, 22 nt, Homo sapiens
caaaaacauucuuacauuuuac

SEQ ID NO: 119981 - RNA, 17 nt, Homo sapiens
caaucuguccuguuaca

SEQ ID NO: 119982 - RNA, 20 nt, Homo sapiens
auugcagcgauuaauaacag

SEQ ID NO: 119983 - RNA, 22 nt, Homo sapiens
ggcuaagaagugacucuugcaa

SEQ ID NO: 119984 - RNA, 16 nt, Homo sapiens
uuacauuuuguauauu

SEQ ID NO: 119985 - RNA, 14 nt, Homo sapiens
uuaauaaaaguaca

SEQ ID NO: 119986 - RNA, 14 nt, Homo sapiens
agaauaaauacugu

SEQ ID NO: 119987 - RNA, 23 nt, Homo sapiens
aaauuuucuuuuuauacuauuaa

SEQ ID NO: 119988 - RNA, 21 nt, Homo sapiens
ccauaaaggggagggacucau

SEQ ID NO: 119989 - RNA, 20 nt, Homo sapiens
caggguuucaccauguuggc

SEQ ID NO: 119990 - RNA, 21 nt, Homo sapiens
ccuaaaaggcagaguacaaag

SEQ ID NO: 119991 - RNA, 22 nt, Homo sapiens
agcagaugguggagcugaauau

SEQ ID NO: 119992 - RNA, 15 nt, Homo sapiens
caacaaagucaccca

SEQ ID NO: 119993 - RNA, 14 nt, Homo sapiens
auagaauucaguca

SEQ ID NO: 119994 - RNA, 17 nt, Homo sapiens
uaugacacucuagucaa

SEQ ID NO: 119995 - RNA, 15 nt, Homo sapiens
cccgucgacguagaa

SEQ ID NO: 119996 - RNA, 21 nt, Homo sapiens
cugaccaauauuguacaguuu

SEQ ID NO: 119997 - RNA, 15 nt, Homo sapiens
augagcaaaaccaaa

SEQ ID NO: 119998 - RNA, 16 nt, Homo sapiens
uaaucaguguuuccaa

SEQ ID NO: 119999 - RNA, 17 nt, Homo sapiens
ucaaacuccugaccuca

SEQ ID NO: 120000 - RNA, 15 nt, Homo sapiens
aacauugcaauagaa

SEQ ID NO: 120001 - RNA, 14 nt, Homo sapiens
cucaucauuuccau

SEQ ID NO: 120002 - RNA, 18 nt, Homo sapiens
gccacccucccacugcca

SEQ ID NO: 120003 - RNA, 19 nt, Homo sapiens
gcuucuuugaaacuuguau

SEQ ID NO: 120004 - RNA, 19 nt, Homo sapiens
accugccaggcacacugag

SEQ ID NO: 120005 - RNA, 21 nt, Homo sapiens
ugaccugccaggcacacugag

SEQ ID NO: 120006 - RNA, 23 nt, Homo sapiens
uuaaaaggaaagcagauggugga

SEQ ID NO: 120007 - RNA, 17 nt, Homo sapiens
cacaaaagucuacuuua

SEQ ID NO: 120008 - RNA, 20 nt, Homo sapiens
uuauuaaauguagaaaguga

SEQ ID NO: 120009 - RNA, 13 nt, Homo sapiens
caguaguugcaau

SEQ ID NO: 120010 - RNA, 23 nt, Homo sapiens
acccuucuccuuagaaguggaag

SEQ ID NO: 120011 - RNA, 23 nt, Homo sapiens
uccugaccucaaguaauccaccu

SEQ ID NO: 120012 - RNA, 12 nt, Homo sapiens
gcaaaaccaaau

SEQ ID NO: 120013 - RNA, 14 nt, Homo sapiens
agcuggagucuguc

SEQ ID NO: 120014 - RNA, 14 nt, Homo sapiens
ucuuuuccaugaac

SEQ ID NO: 120015 - RNA, 13 nt, Homo sapiens
accaauauuguac

SEQ ID NO: 120016 - RNA, 19 nt, Homo sapiens
agugauucuccugccucag

SEQ ID NO: 120017 - RNA, 15 nt, Homo sapiens
agucugaacaauaua

SEQ ID NO: 120018 - RNA, 13 nt, Homo sapiens
aggacuguagaaa

SEQ ID NO: 120019 - RNA, 18 nt, Homo sapiens
acaaauugggccaaagaa

SEQ ID NO: 120020 - RNA, 13 nt, Homo sapiens
uucuucuuuuugc

SEQ ID NO: 120021 - RNA, 21 nt, Homo sapiens
cauucccguggaacguuuuuc

SEQ ID NO: 120022 - RNA, 16 nt, Homo sapiens
guggauuggauuuguc

SEQ ID NO: 120023 - RNA, 11 nt, Homo sapiens
uaaaagccauc

SEQ ID NO: 120024 - RNA, 15 nt, Homo sapiens
ccagagcaaacagaa

SEQ ID NO: 120025 - RNA, 18 nt, Homo sapiens
uucugcauucucuaguca

SEQ ID NO: 120026 - RNA, 18 nt, Homo sapiens
cagggagugggcuaagca

SEQ ID NO: 120027 - RNA, 15 nt, Homo sapiens
uuuucaaugucuaaa

SEQ ID NO: 120028 - RNA, 21 nt, Homo sapiens
ccauuagcauuugucaacaaa

SEQ ID NO: 120029 - RNA, 19 nt, Homo sapiens
agggcuuggacucaagcaa

SEQ ID NO: 120030 - RNA, 19 nt, Homo sapiens
ugcaguuuuuuucuugucu

SEQ ID NO: 120031 - RNA, 16 nt, Homo sapiens
gaaguuuucuugacuu

SEQ ID NO: 120032 - RNA, 14 nt, Homo sapiens
cagcuccuggacca

SEQ ID NO: 120033 - RNA, 19 nt, Homo sapiens
caaucucaaucccucaaaa

SEQ ID NO: 120034 - RNA, 11 nt, Homo sapiens
ggcucaucucu

SEQ ID NO: 120035 - RNA, 22 nt, Homo sapiens
augaaucaaucaauucauaucu

SEQ ID NO: 120036 - RNA, 18 nt, Homo sapiens
aauuucucuacugucuca

SEQ ID NO: 120037 - RNA, 13 nt, Homo sapiens
aagccuugguaaa

SEQ ID NO: 120038 - RNA, 20 nt, Homo sapiens
uggggacacagcaucagcuc

SEQ ID NO: 120039 - RNA, 19 nt, Homo sapiens
cacagcaucagcucaagac

SEQ ID NO: 120040 - RNA, 15 nt, Homo sapiens
uaacauggugugcuu

SEQ ID NO: 120041 - RNA, 21 nt, Homo sapiens
augucuuuauuaaauguagaa

SEQ ID NO: 120042 - RNA, 16 nt, Homo sapiens
cucaaagaaauuucca

SEQ ID NO: 120043 - RNA, 17 nt, Homo sapiens
guucugguuacuguucu

SEQ ID NO: 120044 - RNA, 22 nt, Homo sapiens
ucuaaggcugugccaucagcuc

SEQ ID NO: 120045 - RNA, 20 nt, Homo sapiens
aagauggcacuuauaaccaa

SEQ ID NO: 120046 - RNA, 23 nt, Homo sapiens
guucauggauauguuauacugaa

SEQ ID NO: 120047 - RNA, 17 nt, Homo sapiens
uuuccaaauuauggcaa

SEQ ID NO: 120048 - RNA, 15 nt, Homo sapiens
uaauaaagacagggu

SEQ ID NO: 120049 - RNA, 15 nt, Homo sapiens
cuuuuuauacuauua

SEQ ID NO: 120050 - RNA, 19 nt, Homo sapiens
uuauacaauauacuuguau

SEQ ID NO: 120051 - RNA, 20 nt, Homo sapiens
ccaggcuggagugcaaugac

SEQ ID NO: 120052 - RNA, 16 nt, Homo sapiens
aagaauguuuaugaau

SEQ ID NO: 120053 - RNA, 18 nt, Homo sapiens
ugguuguauuaaagcagg

SEQ ID NO: 120054 - RNA, 18 nt, Homo sapiens
uccugaccucaaguaauc

SEQ ID NO: 120055 - RNA, 19 nt, Homo sapiens
cucuugaaaucuguuaaaa

SEQ ID NO: 120056 - RNA, 20 nt, Homo sapiens
uacacauuuuucagauauaa

SEQ ID NO: 120057 - RNA, 16 nt, Homo sapiens
acacagcaucagcuca

SEQ ID NO: 120058 - RNA, 21 nt, Homo sapiens
agugcaguuuuuuucuugucu

SEQ ID NO: 120059 - RNA, 11 nt, Homo sapiens
aagacugacca

SEQ ID NO: 120060 - RNA, 15 nt, Homo sapiens
uacuuuaauguauaa

SEQ ID NO: 120061 - RNA, 14 nt, Homo sapiens
ccaaagugguauag

SEQ ID NO: 120062 - RNA, 18 nt, Homo sapiens
acacaaucugaaacagcu

SEQ ID NO: 120063 - RNA, 18 nt, Homo sapiens
uagcauuugucaacaaag

SEQ ID NO: 120064 - RNA, 22 nt, Homo sapiens
uacugcuggcaguggaacuaag

SEQ ID NO: 120065 - RNA, 15 nt, Homo sapiens
uucugaaaaaguauc

SEQ ID NO: 120066 - RNA, 19 nt, Homo sapiens
acaaucuugucauacuuga

SEQ ID NO: 120067 - RNA, 16 nt, Homo sapiens
ugagacagcacagcca

SEQ ID NO: 120068 - RNA, 20 nt, Homo sapiens
cagcuguuuaugcauagaua

SEQ ID NO: 120069 - RNA, 23 nt, Homo sapiens
gccuuccuggaggugacacuuga

SEQ ID NO: 120070 - RNA, 23 nt, Homo sapiens
cauucugcacucagaaaauggca

SEQ ID NO: 120071 - RNA, 12 nt, Homo sapiens
uuaacugaaugc

SEQ ID NO: 120072 - RNA, 23 nt, Homo sapiens
agucuuguuguuuucccaaagag

SEQ ID NO: 120073 - RNA, 12 nt, Homo sapiens
uaagacugugua

SEQ ID NO: 120074 - RNA, 16 nt, Homo sapiens
uggcaggacagcuccu

SEQ ID NO: 120075 - RNA, 22 nt, Homo sapiens
gaaaauugggaauaugcacaaa

SEQ ID NO: 120076 - RNA, 15 nt, Homo sapiens
aaaaguuuuguaaau

SEQ ID NO: 120077 - RNA, 14 nt, Homo sapiens
gcuucugauaugca

SEQ ID NO: 120078 - RNA, 23 nt, Homo sapiens
guugauuucagcaccuacagugu

SEQ ID NO: 120079 - RNA, 17 nt, Homo sapiens
ccagagccucaaaugag

SEQ ID NO: 120080 - RNA, 22 nt, Homo sapiens
cacuuagguccaaggucuccag

SEQ ID NO: 120081 - RNA, 15 nt, Homo sapiens
ugggauuacagggau

SEQ ID NO: 120082 - RNA, 18 nt, Homo sapiens
uuuaaaugaaagugagac

SEQ ID NO: 120083 - RNA, 16 nt, Homo sapiens
gccacuguuaagccau

SEQ ID NO: 120084 - RNA, 22 nt, Homo sapiens
uggauuugucuuuggugaacau

SEQ ID NO: 120085 - RNA, 19 nt, Homo sapiens
guaaauauagcucagguag

SEQ ID NO: 120086 - RNA, 14 nt, Homo sapiens
uaguggugacugug

SEQ ID NO: 120087 - RNA, 22 nt, Homo sapiens
aagaaaaguuuuguaaauuucu

SEQ ID NO: 120088 - RNA, 19 nt, Homo sapiens
uguauuuaaaugaaaguga

SEQ ID NO: 120089 - RNA, 13 nt, Homo sapiens
uccacagugacuc

SEQ ID NO: 120090 - RNA, 21 nt, Homo sapiens
gauaggguuucuaaugguuau

SEQ ID NO: 120091 - RNA, 22 nt, Homo sapiens
uuaaaaaauggacucuugaaau

SEQ ID NO: 120092 - RNA, 18 nt, Homo sapiens
gaugaaacaucauuucaa

SEQ ID NO: 120093 - RNA, 20 nt, Homo sapiens
ucaaaaaaaaaaaaauguga

SEQ ID NO: 120094 - RNA, 15 nt, Homo sapiens
aggcuucuggggcuu

SEQ ID NO: 120095 - RNA, 20 nt, Homo sapiens
uugcccaggcuggagugcaa

SEQ ID NO: 120096 - RNA, 16 nt, Homo sapiens
gucuaaaaacauuugu

SEQ ID NO: 120097 - RNA, 15 nt, Homo sapiens
guugcuguaugucuc

SEQ ID NO: 120098 - RNA, 18 nt, Homo sapiens
uggcuaguaaaagccauc

SEQ ID NO: 120099 - RNA, 17 nt, Homo sapiens
cuucugaaaaaguaucc

SEQ ID NO: 120100 - RNA, 18 nt, Homo sapiens
ucugcauucucuagucag

SEQ ID NO: 120101 - RNA, 18 nt, Homo sapiens
aauugggaauaugcacaa

SEQ ID NO: 120102 - RNA, 23 nt, Homo sapiens
ccacuguuaagccauguguucca

SEQ ID NO: 120103 - RNA, 19 nt, Homo sapiens
caaagugcugggauuacag

SEQ ID NO: 120104 - RNA, 23 nt, Homo sapiens
gugagacuuugaggguguauauu

SEQ ID NO: 120105 - RNA, 23 nt, Homo sapiens
uguauauuuucugugcagccacu

SEQ ID NO: 120106 - RNA, 9 nt, Homo sapiens
aaagacaga

SEQ ID NO: 120107 - RNA, 11 nt, Homo sapiens
uugcuguagaa

SEQ ID NO: 120108 - RNA, 19 nt, Homo sapiens
ugccaucuuggacuuguca

SEQ ID NO: 120109 - RNA, 17 nt, Homo sapiens
uaaaccguacacugugu

SEQ ID NO: 120110 - RNA, 12 nt, Homo sapiens
uuuuauauccac

SEQ ID NO: 120111 - RNA, 19 nt, Homo sapiens
aagggcuuggacucaagca

SEQ ID NO: 120112 - RNA, 13 nt, Homo sapiens
ucaaagugagcuc

SEQ ID NO: 120113 - RNA, 13 nt, Homo sapiens
caaucccucaaaa

SEQ ID NO: 120114 - RNA, 20 nt, Homo sapiens
cugucaauguccuacugaga

SEQ ID NO: 120115 - RNA, 23 nt, Homo sapiens
ucagauauaaaagacugaccaau

SEQ ID NO: 120116 - RNA, 17 nt, Homo sapiens
cuucuuuuugcuucaaa

SEQ ID NO: 120117 - RNA, 15 nt, Homo sapiens
uaucuaaaaucugcu

SEQ ID NO: 120118 - RNA, 22 nt, Homo sapiens
gugaccugccaggcacacugag

SEQ ID NO: 120119 - RNA, 13 nt, Homo sapiens
gaauaguuuccaa

SEQ ID NO: 120120 - RNA, 21 nt, Homo sapiens
cagagucucgcucuguugccc

SEQ ID NO: 120121 - RNA, 20 nt, Homo sapiens
cuauaaaaugagaagucuca

SEQ ID NO: 120122 - RNA, 22 nt, Homo sapiens
aaagccaaucucaaucccucaa

SEQ ID NO: 120123 - RNA, 12 nt, Homo sapiens
uucucugccuca

SEQ ID NO: 120124 - RNA, 19 nt, Homo sapiens
guguacagucuuguauuaa

SEQ ID NO: 120125 - RNA, 21 nt, Homo sapiens
aauaguuguuauucuguaguu

SEQ ID NO: 120126 - RNA, 20 nt, Homo sapiens
ucuaagccuucugguuuuau

SEQ ID NO: 120127 - RNA, 15 nt, Homo sapiens
cucuguaauugcaaa

SEQ ID NO: 120128 - RNA, 18 nt, Homo sapiens
caaggucuccagagggug

SEQ ID NO: 120129 - RNA, 20 nt, Homo sapiens
aguuuccaaauuauggcaaa

SEQ ID NO: 120130 - RNA, 12 nt, Homo sapiens
acacagcaucag

SEQ ID NO: 120131 - RNA, 18 nt, Homo sapiens
augcuggggacacagcau

SEQ ID NO: 120132 - RNA, 23 nt, Homo sapiens
accagagaagggcuuggacucaa

SEQ ID NO: 120133 - RNA, 21 nt, Homo sapiens
ccaaguucuuaguugcuguau

SEQ ID NO: 120134 - RNA, 16 nt, Homo sapiens
gauucuccugccucag

SEQ ID NO: 120135 - RNA, 18 nt, Homo sapiens
aucacauucccauuugcu

SEQ ID NO: 120136 - RNA, 22 nt, Homo sapiens
agagagaaaaguaacuguuuug

SEQ ID NO: 120137 - RNA, 10 nt, Homo sapiens
ucccaaagag

SEQ ID NO: 120138 - RNA, 13 nt, Homo sapiens
cuaaguaaauaca

SEQ ID NO: 120139 - RNA, 21 nt, Homo sapiens
cagaaucucucuucuuuucaa

SEQ ID NO: 120140 - RNA, 16 nt, Homo sapiens
uagaaaagggaacuga

SEQ ID NO: 120141 - RNA, 19 nt, Homo sapiens
aaccaaauauuccagagac

SEQ ID NO: 120142 - RNA, 16 nt, Homo sapiens
cagcauggagucacag

SEQ ID NO: 120143 - RNA, 19 nt, Homo sapiens
cucuggccuccaaguccac

SEQ ID NO: 120144 - RNA, 21 nt, Homo sapiens
aacuucaacguaagacugugu

SEQ ID NO: 120145 - RNA, 19 nt, Homo sapiens
acaaaguaagccauguauc

SEQ ID NO: 120146 - RNA, 21 nt, Homo sapiens
ccgccacccucccacugccaa

SEQ ID NO: 120147 - RNA, 19 nt, Homo sapiens
uuacuuuuuccuggcucau

SEQ ID NO: 120148 - RNA, 14 nt, Homo sapiens
acuaagaagcagau

SEQ ID NO: 120149 - RNA, 14 nt, Homo sapiens
acagccacuuggga

SEQ ID NO: 120150 - RNA, 15 nt, Homo sapiens
ccaaauuauggcaaa

SEQ ID NO: 120151 - RNA, 22 nt, Homo sapiens
ucccucaaaacaaucuugucau

SEQ ID NO: 120152 - RNA, 22 nt, Homo sapiens
guuucauauugaugugugucua

SEQ ID NO: 120153 - RNA, 21 nt, Homo sapiens
gacagcacagccaaccuagcu

SEQ ID NO: 120154 - RNA, 12 nt, Homo sapiens
ucugcuagggaa

SEQ ID NO: 120155 - RNA, 17 nt, Homo sapiens
cagguucugacucuugg

SEQ ID NO: 120156 - RNA, 20 nt, Homo sapiens
ugucuuuggugaacauugca

SEQ ID NO: 120157 - RNA, 21 nt, Homo sapiens
aagauuucagauuugugacca

SEQ ID NO: 120158 - RNA, 14 nt, Homo sapiens
uagaagauggcacu

SEQ ID NO: 120159 - RNA, 15 nt, Homo sapiens
ucauggauauguuau

SEQ ID NO: 120160 - RNA, 20 nt, Homo sapiens
aaucuuucugcagaaacaga

SEQ ID NO: 120161 - RNA, 13 nt, Homo sapiens
gucacagccacuu

SEQ ID NO: 120162 - RNA, 13 nt, Homo sapiens
uguguuucuuuag

SEQ ID NO: 120163 - RNA, 16 nt, Homo sapiens
augacacucuagucaa

SEQ ID NO: 120164 - RNA, 22 nt, Homo sapiens
acagcauggagucacagccacu

SEQ ID NO: 120165 - RNA, 23 nt, Homo sapiens
uaaaaaaaaaaaaaaaagugaug

SEQ ID NO: 120166 - RNA, 15 nt, Homo sapiens
uccugcuucugauau

SEQ ID NO: 120167 - RNA, 19 nt, Homo sapiens
accaaauacuuuaauguau

SEQ ID NO: 120168 - RNA, 16 nt, Homo sapiens
auggcaggacagcucc

SEQ ID NO: 120169 - RNA, 23 nt, Homo sapiens
acauuuuacuuuuuccuggcuca

SEQ ID NO: 120170 - RNA, 16 nt, Homo sapiens
auccacuaaaaucaaa

SEQ ID NO: 120171 - RNA, 18 nt, Homo sapiens
augagaaaaugucuuuau

SEQ ID NO: 120172 - RNA, 23 nt, Homo sapiens
uaaaaguacauguuaaacuuacu

SEQ ID NO: 120173 - RNA, 23 nt, Homo sapiens
uaguaaaagccaucuauguauau

SEQ ID NO: 120174 - RNA, 16 nt, Homo sapiens
uaugaauaguuuccaa

SEQ ID NO: 120175 - RNA, 21 nt, Homo sapiens
gaguuauuuuuauuuauuuaa

SEQ ID NO: 120176 - RNA, 14 nt, Homo sapiens
aaccuagcuagcaa

SEQ ID NO: 120177 - RNA, 20 nt, Homo sapiens
uugaaguauauucaaccaaa

SEQ ID NO: 120178 - RNA, 19 nt, Homo sapiens
cagucuuggcucacugcaa

SEQ ID NO: 120179 - RNA, 18 nt, Homo sapiens
ccuucuuuuuguucuuca

SEQ ID NO: 120180 - RNA, 14 nt, Homo sapiens
ucuuuggugaacau

SEQ ID NO: 120181 - RNA, 16 nt, Homo sapiens
acucaggcagaucuca

SEQ ID NO: 120182 - RNA, 20 nt, Homo sapiens
guuuaugcauagauaaucuc

SEQ ID NO: 120183 - RNA, 13 nt, Homo sapiens
aguugcuguaugu

SEQ ID NO: 120184 - RNA, 20 nt, Homo sapiens
cuauaagaugaaacaucauu

SEQ ID NO: 120185 - RNA, 19 nt, Homo sapiens
ccacuauugcuugcacaaa

SEQ ID NO: 120186 - RNA, 17 nt, Homo sapiens
ucaugagugcaacugug

SEQ ID NO: 120187 - RNA, 22 nt, Homo sapiens
ugucaauguccuacugagacag

SEQ ID NO: 120188 - RNA, 18 nt, Homo sapiens
cucccagccagguucuga

SEQ ID NO: 120189 - RNA, 20 nt, Homo sapiens
cuuguuguuuucccaaagag

SEQ ID NO: 120190 - RNA, 17 nt, Homo sapiens
guuguuuucccaaagag

SEQ ID NO: 120191 - RNA, 21 nt, Homo sapiens
uaaauguagaaagugauccau

SEQ ID NO: 120192 - RNA, 22 nt, Homo sapiens
gaauaacauggugugcuucuua

SEQ ID NO: 120193 - RNA, 15 nt, Homo sapiens
caggcgugaccugcc

SEQ ID NO: 120194 - RNA, 20 nt, Homo sapiens
cugaacaauauauacuuaua

SEQ ID NO: 120195 - RNA, 22 nt, Homo sapiens
ugaguagcuggauuacaggcau

SEQ ID NO: 120196 - RNA, 18 nt, Homo sapiens
cuuuuuuuuaaguuacac

SEQ ID NO: 120197 - RNA, 19 nt, Homo sapiens
caauguuucaaacaaaaag

SEQ ID NO: 120198 - RNA, 18 nt, Homo sapiens
agcuggagucugucaaug

SEQ ID NO: 120199 - RNA, 16 nt, Homo sapiens
gcaauagaaauccaau

SEQ ID NO: 120200 - RNA, 21 nt, Homo sapiens
uguuuaugaauaguuuccaaa

SEQ ID NO: 120201 - RNA, 14 nt, Homo sapiens
aaaaaugugacuca

SEQ ID NO: 120202 - RNA, 22 nt, Homo sapiens
gucuuggcucacugcaacuucu

SEQ ID NO: 120203 - RNA, 23 nt, Homo sapiens
aauuuuauguuuaguugcacaaa

SEQ ID NO: 120204 - RNA, 18 nt, Homo sapiens
accauuagcauuugucaa

SEQ ID NO: 120205 - RNA, 22 nt, Homo sapiens
augaggaauuucuguucuucca

SEQ ID NO: 120206 - RNA, 20 nt, Homo sapiens
uuuuuacuaaucuuucugca

SEQ ID NO: 120207 - RNA, 12 nt, Homo sapiens
aaaaugugacuc

SEQ ID NO: 120208 - RNA, 19 nt, Homo sapiens
caugggagacacugaugua

SEQ ID NO: 120209 - RNA, 17 nt, Homo sapiens
ggcaggaccuguggcca

SEQ ID NO: 120210 - RNA, 19 nt, Homo sapiens
cgugauuuugcuguagaag

SEQ ID NO: 120211 - RNA, 13 nt, Homo sapiens
augaaacaucauu

SEQ ID NO: 120212 - RNA, 22 nt, Homo sapiens
cccucccacugccaaagaacuu

SEQ ID NO: 120213 - RNA, 19 nt, Homo sapiens
gaaugagcaaaaccaaaua

SEQ ID NO: 120214 - RNA, 23 nt, Homo sapiens
guggacucuaacaguaguugcaa

SEQ ID NO: 120215 - RNA, 16 nt, Homo sapiens
ccuggaccaggucuca

SEQ ID NO: 120216 - RNA, 23 nt, Homo sapiens
auauacuuauagaauucagucaa

SEQ ID NO: 120217 - RNA, 18 nt, Homo sapiens
uugcaauguggcuugaau

SEQ ID NO: 120218 - RNA, 17 nt, Homo sapiens
uuagugcacagcacaaa

SEQ ID NO: 120219 - RNA, 19 nt, Homo sapiens
ccucaaaacaaucuuguca

SEQ ID NO: 120220 - RNA, 22 nt, Homo sapiens
guaaaauaaucaguguuuccaa

SEQ ID NO: 120221 - RNA, 12 nt, Homo sapiens
acugccaaagaa

SEQ ID NO: 120222 - RNA, 15 nt, Homo sapiens
ccuuugccugguaca

SEQ ID NO: 120223 - RNA, 20 nt, Homo sapiens
aagugagcuccuaagccaug

SEQ ID NO: 120224 - RNA, 13 nt, Homo sapiens
gcuucuuuacuua

SEQ ID NO: 120225 - RNA, 13 nt, Homo sapiens
cuuuauugcucau

SEQ ID NO: 120226 - RNA, 13 nt, Homo sapiens
aaaguaagccaug

SEQ ID NO: 120227 - RNA, 13 nt, Homo sapiens
auuuacauugccu

SEQ ID NO: 120228 - RNA, 15 nt, Homo sapiens
uggauuugucuuugg

SEQ ID NO: 120229 - RNA, 18 nt, Homo sapiens
uguuguuuucccaaagag

SEQ ID NO: 120230 - RNA, 10 nt, Homo sapiens
gaaaagcagg

SEQ ID NO: 120231 - RNA, 21 nt, Homo sapiens
caggguuucaccauguuggcc

SEQ ID NO: 120232 - RNA, 17 nt, Homo sapiens
aagaucguucucugccu

SEQ ID NO: 120233 - RNA, 13 nt, Homo sapiens
auuugucaacaaa

SEQ ID NO: 120234 - RNA, 16 nt, Homo sapiens
ucauuguaaaaagccc

SEQ ID NO: 120235 - RNA, 18 nt, Homo sapiens
uggccaggcuggucucaa

SEQ ID NO: 120236 - RNA, 17 nt, Homo sapiens
caaauugggccaaagaa

SEQ ID NO: 120237 - RNA, 16 nt, Homo sapiens
uuccuccccuguucau

SEQ ID NO: 120238 - RNA, 16 nt, Homo sapiens
uuuacuguccaaagac

SEQ ID NO: 120239 - RNA, 20 nt, Homo sapiens
ucagucuuuuccaugaacuu

SEQ ID NO: 120240 - RNA, 18 nt, Homo sapiens
caucccgucgacguagaa

SEQ ID NO: 120241 - RNA, 19 nt, Homo sapiens
auuuuauguuuaguugcac

SEQ ID NO: 120242 - RNA, 15 nt, Homo sapiens
cacaaauuaguugua

SEQ ID NO: 120243 - RNA, 16 nt, Homo sapiens
gaguuccgacugccau

SEQ ID NO: 120244 - RNA, 17 nt, Homo sapiens
agauuucagauuuguga

SEQ ID NO: 120245 - RNA, 15 nt, Homo sapiens
cagauuauuauugaa

SEQ ID NO: 120246 - RNA, 20 nt, Homo sapiens
aaccaaauacuuuaauguau

SEQ ID NO: 120247 - RNA, 17 nt, Homo sapiens
acauaaaaguuggcuca

SEQ ID NO: 120248 - RNA, 14 nt, Homo sapiens
uacuuaguucaagc

SEQ ID NO: 120249 - RNA, 13 nt, Homo sapiens
gaauuaagcacag

SEQ ID NO: 120250 - RNA, 11 nt, Homo sapiens
aguaagccaug

SEQ ID NO: 120251 - RNA, 17 nt, Homo sapiens
caguaguggugacugug

SEQ ID NO: 120252 - RNA, 18 nt, Homo sapiens
aaccucgagguuucucaa

SEQ ID NO: 120253 - RNA, 14 nt, Homo sapiens
cuuagaaagucuga

SEQ ID NO: 120254 - RNA, 14 nt, Homo sapiens
gucuuuaaccacuu

SEQ ID NO: 120255 - RNA, 13 nt, Homo sapiens
uggaaccagccca

SEQ ID NO: 120256 - RNA, 19 nt, Homo sapiens
caauauauacuuauagaau

SEQ ID NO: 120257 - RNA, 22 nt, Homo sapiens
gggaaggaggccguccaucccg

SEQ ID NO: 120258 - RNA, 20 nt, Homo sapiens
gaacguuuuuccuguucuua

SEQ ID NO: 120259 - RNA, 23 nt, Homo sapiens
uucuaaagauggaaaaaccaccc

SEQ ID NO: 120260 - RNA, 20 nt, Homo sapiens
uguguuuuuaauaaagacag

SEQ ID NO: 120261 - RNA, 16 nt, Homo sapiens
aaaagggaacugaaca

SEQ ID NO: 120262 - RNA, 13 nt, Homo sapiens
ucaaguaauccac

SEQ ID NO: 120263 - RNA, 19 nt, Homo sapiens
uguuuuuaauaaagacagg

SEQ ID NO: 120264 - RNA, 22 nt, Homo sapiens
gcuggauuacaggcaugugcca

SEQ ID NO: 120265 - RNA, 15 nt, Homo sapiens
agaaagugauccaua

SEQ ID NO: 120266 - RNA, 22 nt, Homo sapiens
uguuucaaacaaaaagucauaa

SEQ ID NO: 120267 - RNA, 22 nt, Homo sapiens
cuguagaaaagggaacugaaca

SEQ ID NO: 120268 - RNA, 21 nt, Homo sapiens
uuggacucaagcaagauuuca

SEQ ID NO: 120269 - RNA, 11 nt, Homo sapiens
ugaacauucca

SEQ ID NO: 120270 - RNA, 21 nt, Homo sapiens
accuucaguugucucugaugu

SEQ ID NO: 120271 - RNA, 17 nt, Homo sapiens
auucuuacauuuuacuu

SEQ ID NO: 120272 - RNA, 12 nt, Homo sapiens
guagaaagugau

SEQ ID NO: 120273 - RNA, 16 nt, Homo sapiens
gcagagaggcugaaua

SEQ ID NO: 120274 - RNA, 17 nt, Homo sapiens
cucaaagaaauuuccac

SEQ ID NO: 120275 - RNA, 11 nt, Homo sapiens
auaaagacagg

SEQ ID NO: 120276 - RNA, 19 nt, Homo sapiens
aguauccugcuucugauau

SEQ ID NO: 120277 - RNA, 22 nt, Homo sapiens
aucccucaaaacaaucuuguca

SEQ ID NO: 120278 - RNA, 16 nt, Homo sapiens
cuaacaguaguugcaa

SEQ ID NO: 120279 - RNA, 21 nt, Homo sapiens
acugccaucuuggacuuguca

SEQ ID NO: 120280 - RNA, 13 nt, Homo sapiens
uaaauguagaaag

SEQ ID NO: 120281 - RNA, 18 nt, Homo sapiens
cgugaccugccaggcaca

SEQ ID NO: 120282 - RNA, 16 nt, Homo sapiens
uggccuggggcuucug

SEQ ID NO: 120283 - RNA, 17 nt, Homo sapiens
gucaauguccuacugag

SEQ ID NO: 120284 - RNA, 22 nt, Homo sapiens
gaaaagaaucggcaauguuuca

SEQ ID NO: 120285 - RNA, 14 nt, Homo sapiens
acugaacauuccag

SEQ ID NO: 120286 - RNA, 17 nt, Homo sapiens
cuaaaaguuaauagggu

SEQ ID NO: 120287 - RNA, 14 nt, Homo sapiens
uguuaacugaaugc

SEQ ID NO: 120288 - RNA, 13 nt, Homo sapiens
guguaccagagaa

SEQ ID NO: 120289 - RNA, 12 nt, Homo sapiens
agccucaucucu

SEQ ID NO: 120290 - RNA, 13 nt, Homo sapiens
gcauucucuaguc

SEQ ID NO: 120291 - RNA, 16 nt, Homo sapiens
aauaaauucaucagau

SEQ ID NO: 120292 - RNA, 23 nt, Homo sapiens
agaagguugagggcaauggacaa

SEQ ID NO: 120293 - RNA, 21 nt, Homo sapiens
ccacugccaaagaacuuggaa

SEQ ID NO: 120294 - RNA, 14 nt, Homo sapiens
aaaagacugaccaa

SEQ ID NO: 120295 - RNA, 14 nt, Homo sapiens
accuacaguguaca

SEQ ID NO: 120296 - RNA, 21 nt, Homo sapiens
caaucuguccuguuacaaaag

SEQ ID NO: 120297 - RNA, 18 nt, Homo sapiens
cuauaagaugaaacauca

SEQ ID NO: 120298 - RNA, 17 nt, Homo sapiens
gacgugauuuugcugua

SEQ ID NO: 120299 - RNA, 17 nt, Homo sapiens
agucugucaauguccua

SEQ ID NO: 120300 - RNA, 21 nt, Homo sapiens
accuaaauaugagcccagaaa

SEQ ID NO: 120301 - RNA, 20 nt, Homo sapiens
ugacacucuagucaaagccu

SEQ ID NO: 120302 - RNA, 20 nt, Homo sapiens
gucaacaaagucacccacuu

SEQ ID NO: 120303 - RNA, 12 nt, Homo sapiens
aacuucugccuc

SEQ ID NO: 120304 - RNA, 11 nt, Homo sapiens
uuugcuguaga

SEQ ID NO: 120305 - RNA, 15 nt, Homo sapiens
agcgauuaauaacag

SEQ ID NO: 120306 - RNA, 15 nt, Homo sapiens
uccacagugacucca

SEQ ID NO: 120307 - RNA, 12 nt, Homo sapiens
augacacagucu

SEQ ID NO: 120308 - RNA, 16 nt, Homo sapiens
aaaugcugguuuuuca

SEQ ID NO: 120309 - RNA, 15 nt, Homo sapiens
uggguucaagugauu

SEQ ID NO: 120310 - RNA, 22 nt, Homo sapiens
ccauaggaggccaacccaaaau

SEQ ID NO: 120311 - RNA, 22 nt, Homo sapiens
cgaauauaucaguaauuucaga

SEQ ID NO: 120312 - RNA, 23 nt, Homo sapiens
aagacgugauuuugcuguagaag

SEQ ID NO: 120313 - RNA, 20 nt, Homo sapiens
gucugucaauguccuacuga

SEQ ID NO: 120314 - RNA, 20 nt, Homo sapiens
gacagcuccuggaccaggcc

SEQ ID NO: 120315 - RNA, 14 nt, Homo sapiens
cauaugaauaacau

SEQ ID NO: 120316 - RNA, 18 nt, Homo sapiens
guugagggcaauggacaa

SEQ ID NO: 120317 - RNA, 13 nt, Homo sapiens
cuaaauaugagcc

SEQ ID NO: 120318 - RNA, 22 nt, Homo sapiens
aguuccgacugccaucuuggac

SEQ ID NO: 120319 - RNA, 18 nt, Homo sapiens
aaguaauccaccugccuc

SEQ ID NO: 120320 - RNA, 21 nt, Homo sapiens
gaauuuuuauauccacuaaaa

SEQ ID NO: 120321 - RNA, 14 nt, Homo sapiens
caucauuucaaucg

SEQ ID NO: 120322 - RNA, 22 nt, Homo sapiens
caaagauacacaaucugaaaca

SEQ ID NO: 120323 - RNA, 16 nt, Homo sapiens
augagggaacugugua

SEQ ID NO: 120324 - RNA, 20 nt, Homo sapiens
agcuuacaagccagcuggag

SEQ ID NO: 120325 - RNA, 19 nt, Homo sapiens
ugcuucaaaaacauucuua

SEQ ID NO: 120326 - RNA, 23 nt, Homo sapiens
ugauagagguucuuuauugcuca

SEQ ID NO: 120327 - RNA, 17 nt, Homo sapiens
uagugaaucacguaaag

SEQ ID NO: 120328 - RNA, 19 nt, Homo sapiens
accuguggccaaguucuua

SEQ ID NO: 120329 - RNA, 15 nt, Homo sapiens
auacuagaguucaug

SEQ ID NO: 120330 - RNA, 12 nt, Homo sapiens
gacucaagcaag

SEQ ID NO: 120331 - RNA, 22 nt, Homo sapiens
agacagcacagccaaccuagcu

SEQ ID NO: 120332 - RNA, 16 nt, Homo sapiens
ugaaugccacucugua

SEQ ID NO: 120333 - RNA, 21 nt, Homo sapiens
guaaauuucucuacugucuca

SEQ ID NO: 120334 - RNA, 20 nt, Homo sapiens
aaaaucaaacaauucaggga

SEQ ID NO: 120335 - RNA, 21 nt, Homo sapiens
gaauucagucaaagauacaca

SEQ ID NO: 120336 - RNA, 14 nt, Homo sapiens
ucaaaaacauucuu

SEQ ID NO: 120337 - RNA, 19 nt, Homo sapiens
agucuuagagcuuuaccua

SEQ ID NO: 120338 - RNA, 21 nt, Homo sapiens
aauguuuuagaaugagacuua

SEQ ID NO: 120339 - RNA, 16 nt, Homo sapiens
acccuucuccuuagaa

SEQ ID NO: 120340 - RNA, 13 nt, Homo sapiens
gcaaaaccaaaua

SEQ ID NO: 120341 - RNA, 14 nt, Homo sapiens
aucaguguuuccaa

SEQ ID NO: 120342 - RNA, 14 nt, Homo sapiens
caaugucuaaaaac

SEQ ID NO: 120343 - RNA, 17 nt, Homo sapiens
agucuuagagcuuuacc

SEQ ID NO: 120344 - RNA, 19 nt, Homo sapiens
auuaucuaaaaucugcuag

SEQ ID NO: 120345 - RNA, 14 nt, Homo sapiens
gcuccuaagccaug

SEQ ID NO: 120346 - RNA, 20 nt, Homo sapiens
agcaacauuuguuuuagucu

SEQ ID NO: 120347 - RNA, 18 nt, Homo sapiens
ugguuuuucaguuuucag

SEQ ID NO: 120348 - RNA, 22 nt, Homo sapiens
ugauuucagcaccuacagugua

SEQ ID NO: 120349 - RNA, 18 nt, Homo sapiens
aacaggaauucugaauua

SEQ ID NO: 120350 - RNA, 20 nt, Homo sapiens
augcuggggacacagcauca

SEQ ID NO: 120351 - RNA, 15 nt, Homo sapiens
cgacaacuugcacgu

SEQ ID NO: 120352 - RNA, 21 nt, Homo sapiens
aaaucuuuuuuguucaaagau

SEQ ID NO: 120353 - RNA, 15 nt, Homo sapiens
acacaaucugaaaca

SEQ ID NO: 120354 - RNA, 15 nt, Homo sapiens
ccauaugaauaacau

SEQ ID NO: 120355 - RNA, 12 nt, Homo sapiens
ugggccaaagaa

SEQ ID NO: 120356 - RNA, 17 nt, Homo sapiens
uguuucaaacaaaaagu

SEQ ID NO: 120357 - RNA, 13 nt, Homo sapiens
ugcaauguuuuag

SEQ ID NO: 120358 - RNA, 14 nt, Homo sapiens
ucuaauggcuuuau

SEQ ID NO: 120359 - RNA, 16 nt, Homo sapiens
acuauugcuugcacaa

SEQ ID NO: 120360 - RNA, 16 nt, Homo sapiens
cgugauuuugcuguag

SEQ ID NO: 120361 - RNA, 23 nt, Homo sapiens
gauauguuauacugaaccaggcc

SEQ ID NO: 120362 - RNA, 15 nt, Homo sapiens
ucguucucugccuca

SEQ ID NO: 120363 - RNA, 23 nt, Homo sapiens
aacuuggaaauagugauuuccac

SEQ ID NO: 120364 - RNA, 14 nt, Homo sapiens
uacuguccaaagac

SEQ ID NO: 120365 - RNA, 19 nt, Homo sapiens
ccucaucuccuaaaaggca

SEQ ID NO: 120366 - RNA, 16 nt, Homo sapiens
gucagucuucuuccau

SEQ ID NO: 120367 - RNA, 16 nt, Homo sapiens
accaauauuguacagu

SEQ ID NO: 120368 - RNA, 18 nt, Homo sapiens
aagagaaguuuucuugac

SEQ ID NO: 120369 - RNA, 15 nt, Homo sapiens
ucaaaaacauucuua

SEQ ID NO: 120370 - RNA, 13 nt, Homo sapiens
uugaaacuuguau

SEQ ID NO: 120371 - RNA, 20 nt, Homo sapiens
ccacagugacuccacucuga

SEQ ID NO: 120372 - RNA, 18 nt, Homo sapiens
aaaaguauccugcuucug

SEQ ID NO: 120373 - RNA, 18 nt, Homo sapiens
ugaaaauaugacacucua

SEQ ID NO: 120374 - RNA, 11 nt, Homo sapiens
agaagaugaau

SEQ ID NO: 120375 - RNA, 15 nt, Homo sapiens
auugaacuuaugcaa

SEQ ID NO: 120376 - RNA, 19 nt, Homo sapiens
gaccugccaggcacacuga

SEQ ID NO: 120377 - RNA, 16 nt, Homo sapiens
ugagucccagagccaa

SEQ ID NO: 120378 - RNA, 17 nt, Homo sapiens
uuaaaccguacacugug

SEQ ID NO: 120379 - RNA, 18 nt, Homo sapiens
ucacugcaacuucugccu

SEQ ID NO: 120380 - RNA, 19 nt, Homo sapiens
gcauuugucaacaaaguca

SEQ ID NO: 120381 - RNA, 20 nt, Homo sapiens
gccuccaaguccacagugga

SEQ ID NO: 120382 - RNA, 12 nt, Homo sapiens
aaugaaagugag

SEQ ID NO: 120383 - RNA, 13 nt, Homo sapiens
ugcucacaaaagu

SEQ ID NO: 120384 - RNA, 16 nt, Homo sapiens
caauauuguacaguuu

SEQ ID NO: 120385 - RNA, 18 nt, Homo sapiens
cuuagagcuuuaccuaaa

SEQ ID NO: 120386 - RNA, 16 nt, Homo sapiens
uguacagucuuguauu

SEQ ID NO: 120387 - RNA, 15 nt, Homo sapiens
cagcaccuacagugu

SEQ ID NO: 120388 - RNA, 23 nt, Homo sapiens
cuucucugcuaucuagaucugaa

SEQ ID NO: 120389 - RNA, 22 nt, Homo sapiens
ggagaaauaugguacucauuaa

SEQ ID NO: 120390 - RNA, 23 nt, Homo sapiens
gagacagcacagccaaccuagcu

SEQ ID NO: 120391 - RNA, 19 nt, Homo sapiens
agcaccuacaguguacagu

SEQ ID NO: 120392 - RNA, 21 nt, Homo sapiens
auaacauggugugcuucuuaa

SEQ ID NO: 120393 - RNA, 13 nt, Homo sapiens
ucuuccaucaccu

SEQ ID NO: 120394 - RNA, 15 nt, Homo sapiens
uuaugaauaguuucc

SEQ ID NO: 120395 - RNA, 23 nt, Homo sapiens
uucagucaaagauacacaaucug

SEQ ID NO: 120396 - RNA, 19 nt, Homo sapiens
augugacucaagacuucca

SEQ ID NO: 120397 - RNA, 16 nt, Homo sapiens
ugaccugccaggcaca

SEQ ID NO: 120398 - RNA, 18 nt, Homo sapiens
cuugacuuuugaaaacaa

SEQ ID NO: 120399 - RNA, 13 nt, Homo sapiens
gaaaaguuuugua

SEQ ID NO: 120400 - RNA, 19 nt, Homo sapiens
cacuuagguccaaggucuc

SEQ ID NO: 120401 - RNA, 22 nt, Homo sapiens
cccgccacccucccacugccaa

SEQ ID NO: 120402 - RNA, 23 nt, Homo sapiens
ggcagaguacaaaguaagccaug

SEQ ID NO: 120403 - RNA, 14 nt, Homo sapiens
uuugucaacaaagu

SEQ ID NO: 120404 - RNA, 18 nt, Homo sapiens
gcgcccagccucaucucu

SEQ ID NO: 120405 - RNA, 19 nt, Homo sapiens
acauuuguuguucuguuaa

SEQ ID NO: 120406 - RNA, 22 nt, Homo sapiens
gcgcaguuggucuuuaaccacu

SEQ ID NO: 120407 - RNA, 18 nt, Homo sapiens
cucuaacaguaguugcaa

SEQ ID NO: 120408 - RNA, 13 nt, Homo sapiens
ucuuaagacguga

SEQ ID NO: 120409 - RNA, 19 nt, Homo sapiens
uuaaauguagaaagugauc

SEQ ID NO: 120410 - RNA, 15 nt, Homo sapiens
ccuuagaaguggaag

SEQ ID NO: 120411 - RNA, 17 nt, Homo sapiens
aggagugccacuucaug

SEQ ID NO: 120412 - RNA, 16 nt, Homo sapiens
agugauucuccugccu

SEQ ID NO: 120413 - RNA, 23 nt, Homo sapiens
gucucauaaugcauguggcacuu

SEQ ID NO: 120414 - RNA, 14 nt, Homo sapiens
agccaguuacauaa

SEQ ID NO: 120415 - RNA, 19 nt, Homo sapiens
aauucugaauuaagcacag

SEQ ID NO: 120416 - RNA, 21 nt, Homo sapiens
ucaagugauucuccugccuca

SEQ ID NO: 120417 - RNA, 22 nt, Homo sapiens
agcuggagucugucaauguccu

SEQ ID NO: 120418 - RNA, 19 nt, Homo sapiens
cuccugaguagcuggauua

SEQ ID NO: 120419 - RNA, 21 nt, Homo sapiens
ugguuuugcucacaaaagucu

SEQ ID NO: 120420 - RNA, 13 nt, Homo sapiens
ucccucaaaacaa

SEQ ID NO: 120421 - RNA, 14 nt, Homo sapiens
caauagaaauccaa

SEQ ID NO: 120422 - RNA, 21 nt, Homo sapiens
uugcccaggcuggagugcaau

SEQ ID NO: 120423 - RNA, 15 nt, Homo sapiens
aagccauguaucuca

SEQ ID NO: 120424 - RNA, 22 nt, Homo sapiens
cuuaaaagaaagagaaguuuuc

SEQ ID NO: 120425 - RNA, 15 nt, Homo sapiens
agggagaagagggaa

SEQ ID NO: 120426 - RNA, 15 nt, Homo sapiens
ugugggcuccauuca

SEQ ID NO: 120427 - RNA, 18 nt, Homo sapiens
ucauaaaagucacuuuau

SEQ ID NO: 120428 - RNA, 15 nt, Homo sapiens
cccagccucaucucu

SEQ ID NO: 120429 - RNA, 21 nt, Homo sapiens
caaguucuuaguugcuguaug

SEQ ID NO: 120430 - RNA, 17 nt, Homo sapiens
cuaagcacgggccauau

SEQ ID NO: 120431 - RNA, 21 nt, Homo sapiens
aguauauucaaccaaauacuu

SEQ ID NO: 120432 - RNA, 19 nt, Homo sapiens
ccaagcaguuucuuucaaa

SEQ ID NO: 120433 - RNA, 12 nt, Homo sapiens
agugauuuccac

SEQ ID NO: 120434 - RNA, 22 nt, Homo sapiens
gcccagacccuucuccuuagaa

SEQ ID NO: 120435 - RNA, 14 nt, Homo sapiens
agccucaucucuuu

SEQ ID NO: 120436 - RNA, 15 nt, Homo sapiens
agcugccuguacaca

SEQ ID NO: 120437 - RNA, 15 nt, Homo sapiens
gacucaucauuucca

SEQ ID NO: 120438 - RNA, 15 nt, Homo sapiens
uuuuccuguucuuaa

SEQ ID NO: 120439 - RNA, 16 nt, Homo sapiens
cuggcaagaugcuuua

SEQ ID NO: 120440 - RNA, 15 nt, Homo sapiens
acaauauacuuguau

SEQ ID NO: 120441 - RNA, 22 nt, Homo sapiens
caucugccuccccuucacuccc

SEQ ID NO: 120442 - RNA, 16 nt, Homo sapiens
aaagugauccauacuu

SEQ ID NO: 120443 - RNA, 17 nt, Homo sapiens
gaugcuggggacacagc

SEQ ID NO: 120444 - RNA, 23 nt, Homo sapiens
cacuguuaagccauguguuccaa

SEQ ID NO: 120445 - RNA, 17 nt, Homo sapiens
auccuggggaacauaga

SEQ ID NO: 120446 - RNA, 18 nt, Homo sapiens
uacuuauagaauucaguc

SEQ ID NO: 120447 - RNA, 23 nt, Homo sapiens
gucucgugguaggacuguagaaa

SEQ ID NO: 120448 - RNA, 21 nt, Homo sapiens
cagagaagggcuuggacucaa

SEQ ID NO: 120449 - RNA, 13 nt, Homo sapiens
aauauaucaguaa

SEQ ID NO: 120450 - RNA, 12 nt, Homo sapiens
uuugucuuuaug

SEQ ID NO: 120451 - RNA, 15 nt, Homo sapiens
uggggacacagcauc

SEQ ID NO: 120452 - RNA, 20 nt, Homo sapiens
gcuuagcuaauauugcaaug

SEQ ID NO: 120453 - RNA, 13 nt, Homo sapiens
cagccucaucucu

SEQ ID NO: 120454 - RNA, 13 nt, Homo sapiens
ucaaaaacauucu

SEQ ID NO: 120455 - RNA, 12 nt, Homo sapiens
ugaaacaucauu

SEQ ID NO: 120456 - RNA, 15 nt, Homo sapiens
cuagaguucauggau

SEQ ID NO: 120457 - RNA, 15 nt, Homo sapiens
gaacugaacauucca

SEQ ID NO: 120458 - RNA, 14 nt, Homo sapiens
ugggagacacugau

SEQ ID NO: 120459 - RNA, 22 nt, Homo sapiens
aaugccacucuguaauugcaaa

SEQ ID NO: 120460 - RNA, 15 nt, Homo sapiens
cuaguaaaagccauc

SEQ ID NO: 120461 - RNA, 22 nt, Homo sapiens
uuaaguuacacauuuuucagau

SEQ ID NO: 120462 - RNA, 17 nt, Homo sapiens
gcaauggacaaggaagg

SEQ ID NO: 120463 - RNA, 19 nt, Homo sapiens
caaucaguagccagcaucu

SEQ ID NO: 120464 - RNA, 17 nt, Homo sapiens
aagcuggagucugucaa

SEQ ID NO: 120465 - RNA, 20 nt, Homo sapiens
accaauauuguacaguuuuu

SEQ ID NO: 120466 - RNA, 14 nt, Homo sapiens
uuuauugcuuguug

SEQ ID NO: 120467 - RNA, 17 nt, Homo sapiens
aauaaccauugucauaa

SEQ ID NO: 120468 - RNA, 16 nt, Homo sapiens
aguugcaauguuuuag

SEQ ID NO: 120469 - RNA, 13 nt, Homo sapiens
uucagaaucucuc

SEQ ID NO: 120470 - RNA, 14 nt, Homo sapiens
uaaccauugucaua

SEQ ID NO: 120471 - RNA, 21 nt, Homo sapiens
uaagcacgggccauaugaaua

SEQ ID NO: 120472 - RNA, 22 nt, Homo sapiens
uagucucuggcaagaugcuuua

SEQ ID NO: 120473 - RNA, 18 nt, Homo sapiens
aauguagaaagugaucca

SEQ ID NO: 120474 - RNA, 18 nt, Homo sapiens
gaaccaggccagagcaaa

SEQ ID NO: 120475 - RNA, 20 nt, Homo sapiens
ucugacucuuggcacagcau

SEQ ID NO: 120476 - RNA, 12 nt, Homo sapiens
gccaagcaguuu

SEQ ID NO: 120477 - RNA, 13 nt, Homo sapiens
gacucuaacagua

SEQ ID NO: 120478 - RNA, 14 nt, Homo sapiens
acauuuuguauauu

SEQ ID NO: 120479 - RNA, 14 nt, Homo sapiens
acaaucugaaacag

SEQ ID NO: 120480 - RNA, 15 nt, Homo sapiens
agccauguaucucag

SEQ ID NO: 120481 - RNA, 17 nt, Homo sapiens
ucuggccuccaagucca

SEQ ID NO: 120482 - RNA, 20 nt, Homo sapiens
uaagaugaaacaucauuuca

SEQ ID NO: 120483 - RNA, 17 nt, Homo sapiens
agggagugggcuaagca

SEQ ID NO: 120484 - RNA, 22 nt, Homo sapiens
aaguaagccauguaucucagga

SEQ ID NO: 120485 - RNA, 15 nt, Homo sapiens
uugcaauguggcuug

SEQ ID NO: 120486 - RNA, 13 nt, Homo sapiens
uccacaaagccaa

SEQ ID NO: 120487 - RNA, 19 nt, Homo sapiens
guuucaccauguuggccag

SEQ ID NO: 120488 - RNA, 16 nt, Homo sapiens
uuaaaauagccauaaa

SEQ ID NO: 120489 - RNA, 16 nt, Homo sapiens
aaucucuccauucccg

SEQ ID NO: 120490 - RNA, 13 nt, Homo sapiens
aaaugaaagugag

SEQ ID NO: 120491 - RNA, 21 nt, Homo sapiens
gaguucauggauauguuauac

SEQ ID NO: 120492 - RNA, 17 nt, Homo sapiens
aaccguacacuguguuu

SEQ ID NO: 120493 - RNA, 18 nt, Homo sapiens
cucaaagaaauuuccacu

SEQ ID NO: 120494 - RNA, 16 nt, Homo sapiens
gccagagcaaacagaa

SEQ ID NO: 120495 - RNA, 22 nt, Homo sapiens
uaugauuguccguaggcccaua

SEQ ID NO: 120496 - RNA, 14 nt, Homo sapiens
uguagaaagugauc

SEQ ID NO: 120497 - RNA, 11 nt, Homo sapiens
uuuaaagacag

SEQ ID NO: 120498 - RNA, 23 nt, Homo sapiens
caguugcagcuguuuuguugaca

SEQ ID NO: 120499 - RNA, 12 nt, Homo sapiens
uguaccagagaa

SEQ ID NO: 120500 - RNA, 13 nt, Homo sapiens
uacuaaucuuucu

SEQ ID NO: 120501 - RNA, 17 nt, Homo sapiens
agguugagggcaaugga

SEQ ID NO: 120502 - RNA, 13 nt, Homo sapiens
gggagacacugau

SEQ ID NO: 120503 - RNA, 22 nt, Homo sapiens
ucuuuaaccacuuuucaauguc

SEQ ID NO: 120504 - RNA, 13 nt, Homo sapiens
ggauuacagggau

SEQ ID NO: 120505 - RNA, 12 nt, Homo sapiens
uuaagaaauuca

SEQ ID NO: 120506 - RNA, 18 nt, Homo sapiens
agaagguugagggcaaug

SEQ ID NO: 120507 - RNA, 18 nt, Homo sapiens
aaagacaggguuucacca

SEQ ID NO: 120508 - RNA, 14 nt, Homo sapiens
caguguacagucuu

SEQ ID NO: 120509 - RNA, 16 nt, Homo sapiens
uccuggggaacauaga

SEQ ID NO: 120510 - RNA, 21 nt, Homo sapiens
aauguguucggugauuucaga

SEQ ID NO: 120511 - RNA, 14 nt, Homo sapiens
cuggccuccaaguc

SEQ ID NO: 120512 - RNA, 18 nt, Homo sapiens
aaaccugaugcuggggac

SEQ ID NO: 120513 - RNA, 22 nt, Homo sapiens
gccuaggaaagccaguuacaua

SEQ ID NO: 120514 - RNA, 18 nt, Homo sapiens
uugcacaaauugggccaa

SEQ ID NO: 120515 - RNA, 21 nt, Homo sapiens
ugcacaaauugggccaaagaa

SEQ ID NO: 120516 - RNA, 19 nt, Homo sapiens
ccuuggcuaguaaaagcca

SEQ ID NO: 120517 - RNA, 22 nt, Homo sapiens
gugggcuaagcacgggccauau

SEQ ID NO: 120518 - RNA, 14 nt, Homo sapiens
cacaaucugaaaca

SEQ ID NO: 120519 - RNA, 11 nt, Homo sapiens
accucaucucc

SEQ ID NO: 120520 - RNA, 13 nt, Homo sapiens
cagaaaaagaagg

SEQ ID NO: 120521 - RNA, 17 nt, Homo sapiens
ggcugugccaucagcuc

SEQ ID NO: 120522 - RNA, 18 nt, Homo sapiens
uugugcauaaaaacaaga

SEQ ID NO: 120523 - RNA, 18 nt, Homo sapiens
uggaaauagugauuucca

SEQ ID NO: 120524 - RNA, 13 nt, Homo sapiens
accaggucucaua

SEQ ID NO: 120525 - RNA, 13 nt, Homo sapiens
uucuuuucugacu

SEQ ID NO: 120526 - RNA, 24 nt, Homo sapiens
aaucccucaaaacaaucuugucau

SEQ ID NO: 120527 - RNA, 22 nt, Homo sapiens
auuaaauguagaaagugaucca

SEQ ID NO: 120528 - RNA, 15 nt, Homo sapiens
guuuccaaucugucc

SEQ ID NO: 120529 - RNA, 20 nt, Homo sapiens
agcuguuuaugcauagauaa

SEQ ID NO: 120530 - RNA, 21 nt, Homo sapiens
gauacacaaucugaaacagcu

SEQ ID NO: 120531 - RNA, 15 nt, Homo sapiens
cuccuuagaagugga

SEQ ID NO: 120532 - RNA, 20 nt, Homo sapiens
gacgugauuuugcuguagaa

SEQ ID NO: 120533 - RNA, 20 nt, Homo sapiens
uacacaaucugaaacagcuu

SEQ ID NO: 120534 - RNA, 21 nt, Homo sapiens
aauuuuauguuuaguugcaca

SEQ ID NO: 120535 - RNA, 14 nt, Homo sapiens
uuuucuugucuaua

SEQ ID NO: 120536 - RNA, 22 nt, Homo sapiens
gguacaguauggggguuguaaa

SEQ ID NO: 120537 - RNA, 18 nt, Homo sapiens
ccucccacugccaaagaa

SEQ ID NO: 120538 - RNA, 21 nt, Homo sapiens
ugugcuucuuaaaauagccau

SEQ ID NO: 120539 - RNA, 20 nt, Homo sapiens
uaaacuuacuuaguguuaug

SEQ ID NO: 120540 - RNA, 21 nt, Homo sapiens
gaccaauauuguacaguuuuu

SEQ ID NO: 120541 - RNA, 12 nt, Homo sapiens
aaguaagccaug

SEQ ID NO: 120542 - RNA, 14 nt, Homo sapiens
auguaucucaggaa

SEQ ID NO: 120543 - RNA, 21 nt, Homo sapiens
gacgucacccuccauucugca

SEQ ID NO: 120544 - RNA, 13 nt, Homo sapiens
ccuacugagacag

SEQ ID NO: 120545 - RNA, 22 nt, Homo sapiens
gcaggauuugggcucuuggaau

SEQ ID NO: 120546 - RNA, 20 nt, Homo sapiens
guuaaaaguuguguuuugaa

SEQ ID NO: 120547 - RNA, 18 nt, Homo sapiens
gauaaucucuccauuccc

SEQ ID NO: 120548 - RNA, 21 nt, Homo sapiens
ugcccaggcuggagugcaaug

SEQ ID NO: 120549 - RNA, 14 nt, Homo sapiens
aauaaaauuguaca

SEQ ID NO: 120550 - RNA, 22 nt, Homo sapiens
gugcuucuuaaaauagccauaa

SEQ ID NO: 120551 - RNA, 15 nt, Homo sapiens
agagggaaaacagaa

SEQ ID NO: 120552 - RNA, 20 nt, Homo sapiens
gaaaagaaucggcaauguuu

SEQ ID NO: 120553 - RNA, 15 nt, Homo sapiens
aauaaccauugucau

SEQ ID NO: 120554 - RNA, 21 nt, Homo sapiens
ugaugcuggggacacagcauc

SEQ ID NO: 120555 - RNA, 17 nt, Homo sapiens
gaaaagggaacugaaca

SEQ ID NO: 120556 - RNA, 14 nt, Homo sapiens
acguaagacugugu

SEQ ID NO: 120557 - RNA, 16 nt, Homo sapiens
acguaagacuguguaa

SEQ ID NO: 120558 - RNA, 20 nt, Homo sapiens
ucucaaacuccugaccucaa

SEQ ID NO: 120559 - RNA, 22 nt, Homo sapiens
uagugaaucacguaaagcuaga

SEQ ID NO: 120560 - RNA, 14 nt, Homo sapiens
ugcacguauuuuaa

SEQ ID NO: 120561 - RNA, 12 nt, Homo sapiens
uguagaaaguga

SEQ ID NO: 120562 - RNA, 18 nt, Homo sapiens
uuaagaaauucacuuccc

SEQ ID NO: 120563 - RNA, 22 nt, Homo sapiens
agaagauggcacuuauaaccaa

SEQ ID NO: 120564 - RNA, 13 nt, Homo sapiens
ucugaaacagcuu

SEQ ID NO: 120565 - RNA, 13 nt, Homo sapiens
ucuuuuugcuuca

SEQ ID NO: 120566 - RNA, 22 nt, Homo sapiens
ucuuuguaaagaaaguggcuug

SEQ ID NO: 120567 - RNA, 17 nt, Homo sapiens
acuuacuucucugcuau

SEQ ID NO: 120568 - RNA, 14 nt, Homo sapiens
gcuaauauugcaau

SEQ ID NO: 120569 - RNA, 20 nt, Homo sapiens
cucuuggguucaagugauuc

SEQ ID NO: 120570 - RNA, 21 nt, Homo sapiens
ccuuggcuaguaaaagccauc

SEQ ID NO: 120571 - RNA, 22 nt, Homo sapiens
ccugaccucaaguaauccaccu

SEQ ID NO: 120572 - RNA, 23 nt, Homo sapiens
uguuaagccauguguuccaaggc

SEQ ID NO: 120573 - RNA, 21 nt, Homo sapiens
caaucugaaacagcuucaugg

SEQ ID NO: 120574 - RNA, 12 nt, Homo sapiens
cuguccaaagac

SEQ ID NO: 120575 - RNA, 20 nt, Homo sapiens
ggacuaaguguaccagagaa

SEQ ID NO: 120576 - RNA, 18 nt, Homo sapiens
auauguauaucacauucc

SEQ ID NO: 120577 - RNA, 14 nt, Homo sapiens
gccagcaucugccu

SEQ ID NO: 120578 - RNA, 15 nt, Homo sapiens
gcuaguaaaagccau

SEQ ID NO: 120579 - RNA, 19 nt, Homo sapiens
cuccuggaccaggucucau

SEQ ID NO: 120580 - RNA, 13 nt, Homo sapiens
agccucaucucuu

SEQ ID NO: 120581 - RNA, 19 nt, Homo sapiens
accgcaggauuugggcucu

SEQ ID NO: 120582 - RNA, 23 nt, Homo sapiens
aaucaguguuuccaaucuguccu

SEQ ID NO: 120583 - RNA, 16 nt, Homo sapiens
gcaguggaacuaagaa

SEQ ID NO: 120584 - RNA, 14 nt, Homo sapiens
caaaguaagccaug

SEQ ID NO: 120585 - RNA, 24 nt, Homo sapiens
ggacagcuccuggaccaggcccau

SEQ ID NO: 120586 - RNA, 14 nt, Homo sapiens
gauuuccacaguga

SEQ ID NO: 120587 - RNA, 14 nt, Homo sapiens
auuucuguucuucc

SEQ ID NO: 120588 - RNA, 13 nt, Homo sapiens
gauaugcuguauu

SEQ ID NO: 120589 - RNA, 15 nt, Homo sapiens
ugaaugccacucugu

SEQ ID NO: 120590 - RNA, 15 nt, Homo sapiens
augaauaguuuccaa

SEQ ID NO: 120591 - RNA, 18 nt, Homo sapiens
ugugaaguuuaauugacu

SEQ ID NO: 120592 - RNA, 19 nt, Homo sapiens
acacagucuuggcucacug

SEQ ID NO: 120593 - RNA, 16 nt, Homo sapiens
agucuuguauuaaguu

SEQ ID NO: 120594 - RNA, 15 nt, Homo sapiens
ucuaaaaucugcuag

SEQ ID NO: 120595 - RNA, 22 nt, Homo sapiens
auauacuuauagaauucaguca

SEQ ID NO: 120596 - RNA, 23 nt, Homo sapiens
ccuaagccaugggagacacugau

SEQ ID NO: 120597 - RNA, 16 nt, Homo sapiens
uugacauucugaaugc

SEQ ID NO: 120598 - RNA, 16 nt, Homo sapiens
aacaaagucacccacu

SEQ ID NO: 120599 - RNA, 11 nt, Homo sapiens
ccacucagguc

SEQ ID NO: 120600 - RNA, 17 nt, Homo sapiens
cauggagucacagccac

SEQ ID NO: 120601 - RNA, 21 nt, Homo sapiens
ucauggauauguuauacugaa

SEQ ID NO: 120602 - RNA, 22 nt, Homo sapiens
aaccguaugagggaacugugua

SEQ ID NO: 120603 - RNA, 20 nt, Homo sapiens
gauuuugaaauuuuuauuaa

SEQ ID NO: 120604 - RNA, 16 nt, Homo sapiens
aagguugagggcaaug

SEQ ID NO: 120605 - RNA, 12 nt, Homo sapiens
auugcuugcaca

SEQ ID NO: 120606 - RNA, 22 nt, Homo sapiens
aagaugaaugagcaaaaccaaa

SEQ ID NO: 120607 - RNA, 13 nt, Homo sapiens
aaacaucauuuca

SEQ ID NO: 120608 - RNA, 21 nt, Homo sapiens
ucaugggguggacucuaacag

SEQ ID NO: 120609 - RNA, 22 nt, Homo sapiens
uaggaagaauuuuuauauccac

SEQ ID NO: 120610 - RNA, 20 nt, Homo sapiens
auuagcauuugucaacaaag

SEQ ID NO: 120611 - RNA, 15 nt, Homo sapiens
uuggugaacauugca

SEQ ID NO: 120612 - RNA, 15 nt, Homo sapiens
cuguggccaaguucu

SEQ ID NO: 120613 - RNA, 20 nt, Homo sapiens
caaguucuuaguugcuguau

SEQ ID NO: 120614 - RNA, 19 nt, Homo sapiens
gcccaggcuggagugcaau

SEQ ID NO: 120615 - RNA, 16 nt, Homo sapiens
auuuuaauguuuccuu

SEQ ID NO: 120616 - RNA, 17 nt, Homo sapiens
auguagaaagugaucca

SEQ ID NO: 120617 - RNA, 15 nt, Homo sapiens
augggagacacugau

SEQ ID NO: 120618 - RNA, 22 nt, Homo sapiens
cuuguuagugcacagcacaaau

SEQ ID NO: 120619 - RNA, 18 nt, Homo sapiens
ccaggcuggagugcaaug

SEQ ID NO: 120620 - RNA, 21 nt, Homo sapiens
uguguuuuuaauaaagacagg

SEQ ID NO: 120621 - RNA, 17 nt, Homo sapiens
gaauuucuguucuucca

SEQ ID NO: 120622 - RNA, 16 nt, Homo sapiens
aaacagaaaaccugau

SEQ ID NO: 120623 - RNA, 16 nt, Homo sapiens
aauugcuucaagcauu

SEQ ID NO: 120624 - RNA, 19 nt, Homo sapiens
agaucguucucugccucac

SEQ ID NO: 120625 - RNA, 22 nt, Homo sapiens
uaaccaaagcccaaagugguau

SEQ ID NO: 120626 - RNA, 20 nt, Homo sapiens
gucaaagauacacaaucuga

SEQ ID NO: 120627 - RNA, 12 nt, Homo sapiens
aggccagagcaa

SEQ ID NO: 120628 - RNA, 14 nt, Homo sapiens
agaugaaacaucau

SEQ ID NO: 120629 - RNA, 17 nt, Homo sapiens
auuugucaacaaaguca

SEQ ID NO: 120630 - RNA, 18 nt, Homo sapiens
ucacagccacuugggaua

SEQ ID NO: 120631 - RNA, 22 nt, Homo sapiens
cuguuuugguuuugcucacaaa

SEQ ID NO: 120632 - RNA, 19 nt, Homo sapiens
agaugaaacaucauuucaa

SEQ ID NO: 120633 - RNA, 12 nt, Homo sapiens
uaaaaguuggcu

SEQ ID NO: 120634 - RNA, 13 nt, Homo sapiens
aucugaacuccuu

SEQ ID NO: 120635 - RNA, 18 nt, Homo sapiens
gaucguucucugccucac

SEQ ID NO: 120636 - RNA, 16 nt, Homo sapiens
gcuccauucaaaguga

SEQ ID NO: 120637 - RNA, 22 nt, Homo sapiens
ucaaagugagcuccuaagccau

SEQ ID NO: 120638 - RNA, 15 nt, Homo sapiens
gagugggcuaagcac

SEQ ID NO: 120639 - RNA, 22 nt, Homo sapiens
ggcugucagauauaaguaacuu

SEQ ID NO: 120640 - RNA, 15 nt, Homo sapiens
acaguaguugcaaug

SEQ ID NO: 120641 - RNA, 23 nt, Homo sapiens
uccuggggaacauagaacucaug

SEQ ID NO: 120642 - RNA, 17 nt, Homo sapiens
ucggcucuggccuccaa

SEQ ID NO: 120643 - RNA, 18 nt, Homo sapiens
aaguacauguuaaacuua

SEQ ID NO: 120644 - RNA, 18 nt, Homo sapiens
cacucuguaauugcaaaa

SEQ ID NO: 120645 - RNA, 22 nt, Homo sapiens
ucccuucuuuuuguucuucauc

SEQ ID NO: 120646 - RNA, 13 nt, Homo sapiens
cucuuggguucaa

SEQ ID NO: 120647 - RNA, 21 nt, Homo sapiens
ugagacuuacuucucugcuau

SEQ ID NO: 120648 - RNA, 22 nt, Homo sapiens
cugucaauguccuacugagaca

SEQ ID NO: 120649 - RNA, 21 nt, Homo sapiens
uuauauguauaucacauuccc

SEQ ID NO: 120650 - RNA, 20 nt, Homo sapiens
ugaguagcuggauuacaggc

SEQ ID NO: 120651 - RNA, 20 nt, Homo sapiens
ugcaguuuuuuucuugucua

SEQ ID NO: 120652 - RNA, 19 nt, Homo sapiens
gaguacaaaguaagccaug

SEQ ID NO: 120653 - RNA, 17 nt, Homo sapiens
guacaaaguaagccaug

SEQ ID NO: 120654 - RNA, 20 nt, Homo sapiens
uccuuggcuucuuuacuuag

SEQ ID NO: 120655 - RNA, 16 nt, Homo sapiens
cuucuuuuugcuucaa

SEQ ID NO: 120656 - RNA, 18 nt, Homo sapiens
auuagcuccacaaagcca

SEQ ID NO: 120657 - RNA, 21 nt, Homo sapiens
guauaguuaaccacuaccgaa

SEQ ID NO: 120658 - RNA, 14 nt, Homo sapiens
caauagauauuuac

SEQ ID NO: 120659 - RNA, 13 nt, Homo sapiens
gaacuuaugcaaa

SEQ ID NO: 120660 - RNA, 20 nt, Homo sapiens
caggcuggagugcaaugaca

SEQ ID NO: 120661 - RNA, 16 nt, Homo sapiens
cccuccauucugcacu

SEQ ID NO: 120662 - RNA, 14 nt, Homo sapiens
cuuccaucaccucc

SEQ ID NO: 120663 - RNA, 22 nt, Homo sapiens
guaacuguuuugguuuugcuca

SEQ ID NO: 120664 - RNA, 22 nt, Homo sapiens
gcaaaaccaaauauuccagaga

SEQ ID NO: 120665 - RNA, 18 nt, Homo sapiens
acugaauuuugucuuuau

SEQ ID NO: 120666 - RNA, 15 nt, Homo sapiens
aaugugacucaagac

SEQ ID NO: 120667 - RNA, 18 nt, Homo sapiens
cagaaagcuagaaagugu

SEQ ID NO: 120668 - RNA, 14 nt, Homo sapiens
aauucaucagauaa

SEQ ID NO: 120669 - RNA, 16 nt, Homo sapiens
auaaaaguuggcucag

SEQ ID NO: 120670 - RNA, 20 nt, Homo sapiens
ugcagccacuguuaagccau

SEQ ID NO: 120671 - RNA, 15 nt, Homo sapiens
gccaguuacauaaaa

SEQ ID NO: 120672 - RNA, 16 nt, Homo sapiens
aacuuacuuaguguua

SEQ ID NO: 120673 - RNA, 10 nt, Homo sapiens
aaacuuguau

SEQ ID NO: 120674 - RNA, 22 nt, Homo sapiens
cuuaagacgugauuuugcugua

SEQ ID NO: 120675 - RNA, 14 nt, Homo sapiens
ucucucuucuuuuc

SEQ ID NO: 120676 - RNA, 18 nt, Homo sapiens
acuuuugaaaacaaaaua

SEQ ID NO: 120677 - RNA, 14 nt, Homo sapiens
accguacacugugu

SEQ ID NO: 120678 - RNA, 21 nt, Homo sapiens
auguccuacugagacagcaca

SEQ ID NO: 120679 - RNA, 15 nt, Homo sapiens
cuggaccaggucuca

SEQ ID NO: 120680 - RNA, 18 nt, Homo sapiens
aaguucuuaguugcugua

SEQ ID NO: 120681 - RNA, 21 nt, Homo sapiens
ucaagacgucacccuccauuc

SEQ ID NO: 120682 - RNA, 19 nt, Homo sapiens
gacuuugaggguguauauu

SEQ ID NO: 120683 - RNA, 16 nt, Homo sapiens
uuuaauguuuccuuua

SEQ ID NO: 120684 - RNA, 19 nt, Homo sapiens
caguaguggugacuguggg

SEQ ID NO: 120685 - RNA, 19 nt, Homo sapiens
cgugguaggacuguagaaa

SEQ ID NO: 120686 - RNA, 15 nt, Homo sapiens
gaauguaaugguggc

SEQ ID NO: 120687 - RNA, 14 nt, Homo sapiens
caguaguugcaaug

SEQ ID NO: 120688 - RNA, 15 nt, Homo sapiens
gcaccuacaguguac

SEQ ID NO: 120689 - RNA, 22 nt, Homo sapiens
guucauggauauguuauacuga

SEQ ID NO: 120690 - RNA, 22 nt, Homo sapiens
ucuaaagauggaaaaaccaccc

SEQ ID NO: 120691 - RNA, 12 nt, Homo sapiens
gaaccaggccag

SEQ ID NO: 120692 - RNA, 21 nt, Homo sapiens
accucgagguuucucaaagaa

SEQ ID NO: 120693 - RNA, 14 nt, Homo sapiens
uguacagucuugua

SEQ ID NO: 120694 - RNA, 14 nt, Homo sapiens
acuuauuuauauaa

SEQ ID NO: 120695 - RNA, 23 nt, Homo sapiens
cuuuuuuuuuuuuuaaagacaga

SEQ ID NO: 120696 - RNA, 14 nt, Homo sapiens
ccacaguggaacca

SEQ ID NO: 120697 - RNA, 19 nt, Homo sapiens
gacuaaguguaccagagaa

SEQ ID NO: 120698 - RNA, 16 nt, Homo sapiens
ugaaguuuaauugacu

SEQ ID NO: 120699 - RNA, 16 nt, Homo sapiens
ggggacacagcaucag

SEQ ID NO: 120700 - RNA, 20 nt, Homo sapiens
ucuaaagauggaaaaaccac

SEQ ID NO: 120701 - RNA, 12 nt, Homo sapiens
gcuggagugcaa

SEQ ID NO: 120702 - RNA, 19 nt, Homo sapiens
cucgugguaggacuguaga

SEQ ID NO: 120703 - RNA, 18 nt, Homo sapiens
acauuuguuuguggucua

SEQ ID NO: 120704 - RNA, 15 nt, Homo sapiens
uguccuguuacaaaa

SEQ ID NO: 120705 - RNA, 11 nt, Homo sapiens
agaaguggaag

SEQ ID NO: 120706 - RNA, 22 nt, Homo sapiens
aacauuuguuuuagucugaaca

SEQ ID NO: 120707 - RNA, 16 nt, Homo sapiens
aacguaagacugugua

SEQ ID NO: 120708 - RNA, 11 nt, Homo sapiens
caaaaccaaau

SEQ ID NO: 120709 - RNA, 17 nt, Homo sapiens
agccccagccuaggaaa

SEQ ID NO: 120710 - RNA, 19 nt, Homo sapiens
uaaguuacacauuuuucag

SEQ ID NO: 120711 - RNA, 16 nt, Homo sapiens
cugugccaucagcucc

SEQ ID NO: 120712 - RNA, 22 nt, Homo sapiens
cugagucccuuagccaagcagu

SEQ ID NO: 120713 - RNA, 15 nt, Homo sapiens
auagaauucagucaa

SEQ ID NO: 120714 - RNA, 16 nt, Homo sapiens
agucugauuguagcua

SEQ ID NO: 120715 - RNA, 19 nt, Homo sapiens
aauagugauuuccacagug

SEQ ID NO: 120716 - RNA, 12 nt, Homo sapiens
ccaguuacauaa

SEQ ID NO: 120717 - RNA, 14 nt, Homo sapiens
cuuaaaauagccau

SEQ ID NO: 120718 - RNA, 20 nt, Homo sapiens
cuccccuguucauucugcau

SEQ ID NO: 120719 - RNA, 14 nt, Homo sapiens
ugagaaaaugucuu

SEQ ID NO: 120720 - RNA, 17 nt, Homo sapiens
gcuccauucaaagugag

SEQ ID NO: 120721 - RNA, 19 nt, Homo sapiens
uccauuuacccuucuuuuc

SEQ ID NO: 120722 - RNA, 20 nt, Homo sapiens
uguucugguuacuguucuaa

SEQ ID NO: 120723 - RNA, 21 nt, Homo sapiens
agccaaccuagcuagcaacau

SEQ ID NO: 120724 - RNA, 14 nt, Homo sapiens
gaaacaucauuuca

SEQ ID NO: 120725 - RNA, 17 nt, Homo sapiens
aucccgucgacguagaa

SEQ ID NO: 120726 - RNA, 12 nt, Homo sapiens
uccccucuagga

SEQ ID NO: 120727 - RNA, 16 nt, Homo sapiens
acugcaacuucugccu

SEQ ID NO: 120728 - RNA, 22 nt, Homo sapiens
gcacaaaccaauuaaacccagu

SEQ ID NO: 120729 - RNA, 21 nt, Homo sapiens
uuaaagcagggauaugcugua

SEQ ID NO: 120730 - RNA, 18 nt, Homo sapiens
uaaugcauguggcacuua

SEQ ID NO: 120731 - RNA, 15 nt, Homo sapiens
gguccaaggucucca

SEQ ID NO: 120732 - RNA, 18 nt, Homo sapiens
auaggaggccaacccaaa

SEQ ID NO: 120733 - RNA, 16 nt, Homo sapiens
uauugaacuuaugcaa

SEQ ID NO: 120734 - RNA, 21 nt, Homo sapiens
aaugcugguuuuucaguuuuc

SEQ ID NO: 120735 - RNA, 16 nt, Homo sapiens
ucugcauucucuaguc

SEQ ID NO: 120736 - RNA, 18 nt, Homo sapiens
accuaaauaugagcccag

SEQ ID NO: 120737 - RNA, 15 nt, Homo sapiens
aauauagcucaggua

SEQ ID NO: 120738 - RNA, 20 nt, Homo sapiens
ucugccuccccuucacuccc

SEQ ID NO: 120739 - RNA, 13 nt, Homo sapiens
aagcauucuucaa

SEQ ID NO: 120740 - RNA, 15 nt, Homo sapiens
uccuccccuguucau

SEQ ID NO: 120741 - RNA, 17 nt, Homo sapiens
acccuucuuuucugacu

SEQ ID NO: 120742 - RNA, 13 nt, Homo sapiens
aaaaacauucuua

SEQ ID NO: 120743 - RNA, 12 nt, Homo sapiens
auguaucucagg

SEQ ID NO: 120744 - RNA, 22 nt, Homo sapiens
cugggauuacagggaugagcca

SEQ ID NO: 120745 - RNA, 15 nt, Homo sapiens
ccugccaggcacacu

SEQ ID NO: 120746 - RNA, 13 nt, Homo sapiens
uggagucugucaa

SEQ ID NO: 120747 - RNA, 22 nt, Homo sapiens
gcagcgauuaauaacaggcaaa

SEQ ID NO: 120748 - RNA, 20 nt, Homo sapiens
cuuuuuccuggcucaucucu

SEQ ID NO: 120749 - RNA, 20 nt, Homo sapiens
cauaaaaguuggcucaggag

SEQ ID NO: 120750 - RNA, 15 nt, Homo sapiens
caaauauuccagaga

SEQ ID NO: 120751 - RNA, 18 nt, Homo sapiens
uguagaagauggcacuua

SEQ ID NO: 120752 - RNA, 19 nt, Homo sapiens
ggaauuucuguucuuccau

SEQ ID NO: 120753 - RNA, 19 nt, Homo sapiens
cacuguguuuuuuuguaua

SEQ ID NO: 120754 - RNA, 19 nt, Homo sapiens
cuuuaccuaaauaugagcc

SEQ ID NO: 120755 - RNA, 22 nt, Homo sapiens
caaagaacuuggaaauagugau

SEQ ID NO: 120756 - RNA, 19 nt, Homo sapiens
guagaaaagggaacugaac

SEQ ID NO: 120757 - RNA, 10 nt, Homo sapiens
gaaaacagaa

SEQ ID NO: 120758 - RNA, 16 nt, Homo sapiens
ucaaacaaaaagucau

SEQ ID NO: 120759 - RNA, 20 nt, Homo sapiens
uguuaauaaaaguacauguu

SEQ ID NO: 120760 - RNA, 17 nt, Homo sapiens
cuuagccaagcaguuuc

SEQ ID NO: 120761 - RNA, 15 nt, Homo sapiens
uuuaauagcgucaua

SEQ ID NO: 120762 - RNA, 17 nt, Homo sapiens
cuucagucuuuuccaug

SEQ ID NO: 120763 - RNA, 16 nt, Homo sapiens
uacagucuuguauuaa

SEQ ID NO: 120764 - RNA, 19 nt, Homo sapiens
aggcugugccaucagcucc

SEQ ID NO: 120765 - RNA, 22 nt, Homo sapiens
acuuauagaauucagucaaaga

SEQ ID NO: 120766 - RNA, 17 nt, Homo sapiens
agaaaguggcuugaaau

SEQ ID NO: 120767 - RNA, 17 nt, Homo sapiens
guacauguuaaacuuac

SEQ ID NO: 120768 - RNA, 22 nt, Homo sapiens
gaaaaagaagguugagggcaau

SEQ ID NO: 120769 - RNA, 12 nt, Homo sapiens
aauaaagacagg

SEQ ID NO: 120770 - RNA, 13 nt, Homo sapiens
gaauaugcacaaa

SEQ ID NO: 120771 - RNA, 15 nt, Homo sapiens
gauauaaaagacuga

SEQ ID NO: 120772 - RNA, 14 nt, Homo sapiens
ugaauaguuuccaa

SEQ ID NO: 120773 - RNA, 12 nt, Homo sapiens
agaaagugaucc

SEQ ID NO: 120774 - RNA, 22 nt, Homo sapiens
uugucaacaaagucacccacuu

SEQ ID NO: 120775 - RNA, 15 nt, Homo sapiens
cagagccucaaauga

SEQ ID NO: 120776 - RNA, 19 nt, Homo sapiens
cccucuaggaggugaugau

SEQ ID NO: 120777 - RNA, 13 nt, Homo sapiens
gcaguggaacuaa

SEQ ID NO: 120778 - RNA, 14 nt, Homo sapiens
ccuggggcuucuga

SEQ ID NO: 120779 - RNA, 13 nt, Homo sapiens
cauuuacauugcc

SEQ ID NO: 120780 - RNA, 17 nt, Homo sapiens
agguuucucaaagaaau

SEQ ID NO: 120781 - RNA, 20 nt, Homo sapiens
aaugacacagucuuggcuca

SEQ ID NO: 120782 - RNA, 15 nt, Homo sapiens
aagaauguuuaugaa

SEQ ID NO: 120783 - RNA, 15 nt, Homo sapiens
cuagucaguuggcua

SEQ ID NO: 120784 - RNA, 11 nt, Homo sapiens
ggaacugugua

SEQ ID NO: 120785 - RNA, 13 nt, Homo sapiens
ugggauuacaggg

SEQ ID NO: 120786 - RNA, 14 nt, Homo sapiens
ucaucucuuuauuc

SEQ ID NO: 120787 - RNA, 17 nt, Homo sapiens
cuggccuccaaguccac

SEQ ID NO: 120788 - RNA, 12 nt, Homo sapiens
guucauucugca

SEQ ID NO: 120789 - RNA, 20 nt, Homo sapiens
accaaauacuuuaauguaua

SEQ ID NO: 120790 - RNA, 14 nt, Homo sapiens
ugagcaaaaccaaa

SEQ ID NO: 120791 - RNA, 17 nt, Homo sapiens
auucagggagugggcua

SEQ ID NO: 120792 - RNA, 11 nt, Homo sapiens
auucaaaguga

SEQ ID NO: 120793 - RNA, 15 nt, Homo sapiens
aauugggccaaagaa

SEQ ID NO: 120794 - RNA, 15 nt, Homo sapiens
gcuagggaauaucaa

SEQ ID NO: 120795 - RNA, 14 nt, Homo sapiens
guuuaguugcacaa

SEQ ID NO: 120796 - RNA, 23 nt, Homo sapiens
ccuaggaaagccaguuacauaaa

SEQ ID NO: 120797 - RNA, 17 nt, Homo sapiens
uucuuccaugucuauua

SEQ ID NO: 120798 - RNA, 20 nt, Homo sapiens
uuaauaggguaaauucucua

SEQ ID NO: 120799 - RNA, 19 nt, Homo sapiens
cucugagucccagagccaa

SEQ ID NO: 120800 - RNA, 21 nt, Homo sapiens
ucuaaggcugugccaucagcu

SEQ ID NO: 120801 - RNA, 15 nt, Homo sapiens
acaaaguaagccaug

SEQ ID NO: 120802 - RNA, 21 nt, Homo sapiens
guuuuacuguccaaagacaug

SEQ ID NO: 120803 - RNA, 16 nt, Homo sapiens
agcuguuuuguugaca

SEQ ID NO: 120804 - RNA, 16 nt, Homo sapiens
gcagaguacaaaguaa

SEQ ID NO: 120805 - RNA, 19 nt, Homo sapiens
agacgugauuuugcuguag

SEQ ID NO: 120806 - RNA, 16 nt, Homo sapiens
aguagcuggauuacag

SEQ ID NO: 120807 - RNA, 23 nt, Homo sapiens
aagaauuuuuauauccacuaaaa

SEQ ID NO: 120808 - RNA, 22 nt, Homo sapiens
aaucaguguuuccaaucugucc

SEQ ID NO: 120809 - RNA, 18 nt, Homo sapiens
gaauuuggguaugaacag

SEQ ID NO: 120810 - RNA, 13 nt, Homo sapiens
uccacaguggaac

SEQ ID NO: 120811 - RNA, 21 nt, Homo sapiens
gucuuuggugaacauugcaau

SEQ ID NO: 120812 - RNA, 14 nt, Homo sapiens
ucaacaaagucacc

SEQ ID NO: 120813 - RNA, 19 nt, Homo sapiens
agauaaucucuccauuccc

SEQ ID NO: 120814 - RNA, 13 nt, Homo sapiens
gucuuguguuucu

SEQ ID NO: 120815 - RNA, 19 nt, Homo sapiens
uguuaagccauguguucca

SEQ ID NO: 120816 - RNA, 20 nt, Homo sapiens
aaaugagaagucucacugau

SEQ ID NO: 120817 - RNA, 21 nt, Homo sapiens
acuguuuugguuuugcucaca

SEQ ID NO: 120818 - RNA, 13 nt, Homo sapiens
cagcuguuuaugc

SEQ ID NO: 120819 - RNA, 12 nt, Homo sapiens
acugugggcucc

SEQ ID NO: 120820 - RNA, 18 nt, Homo sapiens
ggacucaagcaagauuuc

SEQ ID NO: 120821 - RNA, 20 nt, Homo sapiens
gggacuaaguguaccagaga

SEQ ID NO: 120822 - RNA, 17 nt, Homo sapiens
cuagaguucauggauau

SEQ ID NO: 120823 - RNA, 18 nt, Homo sapiens
uuaagccauguguuccaa

SEQ ID NO: 120824 - RNA, 17 nt, Homo sapiens
cuguaugucucguggua

SEQ ID NO: 120825 - RNA, 21 nt, Homo sapiens
uguaaauuucucuacugucuc

SEQ ID NO: 120826 - RNA, 19 nt, Homo sapiens
uagugauuuccacagugac

SEQ ID NO: 120827 - RNA, 22 nt, Homo sapiens
cagucuucuuccaugucuauua

SEQ ID NO: 120828 - RNA, 21 nt, Homo sapiens
aauguggcuugaauguaggua

SEQ ID NO: 120829 - RNA, 11 nt, Homo sapiens
uguccaaagac

SEQ ID NO: 120830 - RNA, 13 nt, Homo sapiens
guuggcucaggag

SEQ ID NO: 120831 - RNA, 12 nt, Homo sapiens
acaaucuuguca

SEQ ID NO: 120832 - RNA, 14 nt, Homo sapiens
aucaguagccagca

SEQ ID NO: 120833 - RNA, 21 nt, Homo sapiens
gucucaaacuccugaccucaa

SEQ ID NO: 120834 - RNA, 19 nt, Homo sapiens
guuguuaauaaaaguacau

SEQ ID NO: 120835 - RNA, 16 nt, Homo sapiens
uuguuuguggucuaua

SEQ ID NO: 120836 - RNA, 19 nt, Homo sapiens
guuuauacccguuucacau

SEQ ID NO: 120837 - RNA, 22 nt, Homo sapiens
uccuaagccaugggagacacug

SEQ ID NO: 120838 - RNA, 15 nt, Homo sapiens
ggcuggagugcaaug

SEQ ID NO: 120839 - RNA, 15 nt, Homo sapiens
uugagggcaauggac

SEQ ID NO: 120840 - RNA, 21 nt, Homo sapiens
uaaaauaaucaguguuuccaa

SEQ ID NO: 120841 - RNA, 21 nt, Homo sapiens
aagaauuuuuauauccacuaa

SEQ ID NO: 120842 - RNA, 23 nt, Homo sapiens
uuuauacucaggcagaucucagc

SEQ ID NO: 120843 - RNA, 14 nt, Homo sapiens
ugccaaagaacuug

SEQ ID NO: 120844 - RNA, 15 nt, Homo sapiens
uuaaaugaaagugag

SEQ ID NO: 120845 - RNA, 23 nt, Homo sapiens
aauugggccaaagaaacauugcc

SEQ ID NO: 120846 - RNA, 13 nt, Homo sapiens
agcaaaaccaaau

SEQ ID NO: 120847 - RNA, 16 nt, Homo sapiens
ucagggagugggcuaa

SEQ ID NO: 120848 - RNA, 15 nt, Homo sapiens
aaugacacagucuug

SEQ ID NO: 120849 - RNA, 22 nt, Homo sapiens
guaagaucguucucugccucac

SEQ ID NO: 120850 - RNA, 17 nt, Homo sapiens
gacucuuggcacagcau

SEQ ID NO: 120851 - RNA, 17 nt, Homo sapiens
gucaaagccuugguaaa

SEQ ID NO: 120852 - RNA, 16 nt, Homo sapiens
uaacgagaaauagaaa

SEQ ID NO: 120853 - RNA, 22 nt, Homo sapiens
uaagcugccuguacacaacuca

SEQ ID NO: 120854 - RNA, 22 nt, Homo sapiens
acagucuuguauuaaguuguua

SEQ ID NO: 120855 - RNA, 20 nt, Homo sapiens
uggacucaagcaagauuuca

SEQ ID NO: 120856 - RNA, 14 nt, Homo sapiens
ccuggcucaucucu

SEQ ID NO: 120857 - RNA, 20 nt, Homo sapiens
cuaagcacgggccauaugaa

SEQ ID NO: 120858 - RNA, 17 nt, Homo sapiens
cuuggguucaagugauu

SEQ ID NO: 120859 - RNA, 18 nt, Homo sapiens
ucucgugguaggacugua

SEQ ID NO: 120860 - RNA, 13 nt, Homo sapiens
uggcucaucucuu

SEQ ID NO: 120861 - RNA, 15 nt, Homo sapiens
aguuguuaauaaaag

SEQ ID NO: 120862 - RNA, 23 nt, Homo sapiens
aauaagcaggcgugaccugccag

SEQ ID NO: 120863 - RNA, 20 nt, Homo sapiens
acucuaacaguaguugcaau

SEQ ID NO: 120864 - RNA, 20 nt, Homo sapiens
gaccugccaggcacacugag

SEQ ID NO: 120865 - RNA, 12 nt, Homo sapiens
aaugucuuuauu

SEQ ID NO: 120866 - RNA, 16 nt, Homo sapiens
caaauauuccagagac

SEQ ID NO: 120867 - RNA, 11 nt, Homo sapiens
acccucccacu

SEQ ID NO: 120868 - RNA, 19 nt, Homo sapiens
aguuuacauuuuguauauu

SEQ ID NO: 120869 - RNA, 18 nt, Homo sapiens
ucagaaaauggcacuugg

SEQ ID NO: 120870 - RNA, 22 nt, Homo sapiens
acacaaucugaaacagcuucau

SEQ ID NO: 120871 - RNA, 18 nt, Homo sapiens
auugcaauagaaauccaa

SEQ ID NO: 120872 - RNA, 21 nt, Homo sapiens
agacgugauuuugcuguagaa

SEQ ID NO: 120873 - RNA, 19 nt, Homo sapiens
aaauuucucuacugucuca

SEQ ID NO: 120874 - RNA, 19 nt, Homo sapiens
uacaaaguaagccauguau

SEQ ID NO: 120875 - RNA, 17 nt, Homo sapiens
auaugacacucuaguca

SEQ ID NO: 120876 - RNA, 15 nt, Homo sapiens
aaaacaaucuuguca

SEQ ID NO: 120877 - RNA, 13 nt, Homo sapiens
cuuaguugcugua

SEQ ID NO: 120878 - RNA, 18 nt, Homo sapiens
auguaagaucguucucug

SEQ ID NO: 120879 - RNA, 22 nt, Homo sapiens
uguacaguuuuuauugcuuguu

SEQ ID NO: 120880 - RNA, 17 nt, Homo sapiens
cuucuuuuuguucuuca

SEQ ID NO: 120881 - RNA, 23 nt, Homo sapiens
aauguaagaucguucucugccuc

SEQ ID NO: 120882 - RNA, 19 nt, Homo sapiens
cucgagguuucucaaagaa

SEQ ID NO: 120883 - RNA, 16 nt, Homo sapiens
aggucagucuucuucc

SEQ ID NO: 120884 - RNA, 18 nt, Homo sapiens
gccaaucaguagccagca

SEQ ID NO: 120885 - RNA, 19 nt, Homo sapiens
uugcuugcacaaaccaauu

SEQ ID NO: 120886 - RNA, 15 nt, Homo sapiens
ccacugccaaagaac

SEQ ID NO: 120887 - RNA, 14 nt, Homo sapiens
uagaauucagucaa

SEQ ID NO: 120888 - RNA, 16 nt, Homo sapiens
gagggaaaacagaaaa

SEQ ID NO: 120889 - RNA, 16 nt, Homo sapiens
ucaaagccuugguaaa

SEQ ID NO: 120890 - RNA, 16 nt, Homo sapiens
uucccauuaaagaagu

SEQ ID NO: 120891 - RNA, 23 nt, Homo sapiens
cuuggaauccuggggaacauaga

SEQ ID NO: 120892 - RNA, 21 nt, Homo sapiens
uaagaucguucucugccucac

SEQ ID NO: 120893 - RNA, 15 nt, Homo sapiens
gaccauuagcauuug

SEQ ID NO: 120894 - RNA, 15 nt, Homo sapiens
aguuccgacugccau

SEQ ID NO: 120895 - RNA, 19 nt, Homo sapiens
ugaacauugcaauagaaau

SEQ ID NO: 120896 - RNA, 12 nt, Homo sapiens
uuacauugccuu

SEQ ID NO: 120897 - RNA, 18 nt, Homo sapiens
agggcaauggacaaggaa

SEQ ID NO: 120898 - RNA, 21 nt, Homo sapiens
ggcuucagucuuuuccaugaa

SEQ ID NO: 120899 - RNA, 12 nt, Homo sapiens
acuuaguucaag

SEQ ID NO: 120900 - RNA, 22 nt, Homo sapiens
caauauauacuuauagaauuca

SEQ ID NO: 120901 - RNA, 17 nt, Homo sapiens
auuuucuuuuuauacua

SEQ ID NO: 120902 - RNA, 18 nt, Homo sapiens
ccaaguccacaguggaac

SEQ ID NO: 120903 - RNA, 12 nt, Homo sapiens
cacugccaaaga

SEQ ID NO: 120904 - RNA, 14 nt, Homo sapiens
guuccgacugccau

SEQ ID NO: 120905 - RNA, 15 nt, Homo sapiens
uuaaaaauaugugua

SEQ ID NO: 120906 - RNA, 13 nt, Homo sapiens
caucauuuccauu

SEQ ID NO: 120907 - RNA, 22 nt, Homo sapiens
agcaaaaccaaauauuccagag

SEQ ID NO: 120908 - RNA, 13 nt, Homo sapiens
guucucugccuca

SEQ ID NO: 120909 - RNA, 19 nt, Homo sapiens
cuccacaaagccaaucuca

SEQ ID NO: 120910 - RNA, 16 nt, Homo sapiens
uagaaauccaauugga

SEQ ID NO: 120911 - RNA, 21 nt, Homo sapiens
uaagaagcagauaaugguguu

SEQ ID NO: 120912 - RNA, 23 nt, Homo sapiens
aaucccucaaaacaaucuuguca

SEQ ID NO: 120913 - RNA, 17 nt, Homo sapiens
uaaauauagcucaggua

SEQ ID NO: 120914 - RNA, 16 nt, Homo sapiens
gcccagccucaucucu

SEQ ID NO: 120915 - RNA, 15 nt, Homo sapiens
acucaucauuuccau

SEQ ID NO: 120916 - RNA, 21 nt, Homo sapiens
aaaaagcccuuaaaaauaugu

SEQ ID NO: 120917 - RNA, 22 nt, Homo sapiens
aauguuuaugaauaguuuccaa

SEQ ID NO: 120918 - RNA, 15 nt, Homo sapiens
caaugacacagucuu

SEQ ID NO: 120919 - RNA, 21 nt, Homo sapiens
acuuuuuccuggcucaucucu

SEQ ID NO: 120920 - RNA, 22 nt, Homo sapiens
ggagucuuagagcuuuaccuaa

SEQ ID NO: 120921 - RNA, 15 nt, Homo sapiens
auucucuagucaguu

SEQ ID NO: 120922 - RNA, 20 nt, Homo sapiens
guuaaaauaaaauuguacau

SEQ ID NO: 120923 - RNA, 17 nt, Homo sapiens
cuucuaaguaaauacaa

SEQ ID NO: 120924 - RNA, 13 nt, Homo sapiens
caaagaaauuucc

SEQ ID NO: 120925 - RNA, 19 nt, Homo sapiens
uaaagaaaaguuuuguaaa

SEQ ID NO: 120926 - RNA, 17 nt, Homo sapiens
uaacaggagugccacuu

SEQ ID NO: 120927 - RNA, 14 nt, Homo sapiens
cacuguuaagccau

SEQ ID NO: 120928 - RNA, 14 nt, Homo sapiens
acacagcaucagcu

SEQ ID NO: 120929 - RNA, 21 nt, Homo sapiens
uacuauuuuuacuaaucuuuc

SEQ ID NO: 120930 - RNA, 14 nt, Homo sapiens
ucuuaguugcugua

SEQ ID NO: 120931 - RNA, 17 nt, Homo sapiens
ucaauguccuacugaga

SEQ ID NO: 120932 - RNA, 13 nt, Homo sapiens
ggaaccagcccag

SEQ ID NO: 120933 - RNA, 20 nt, Homo sapiens
aaagcuggagucugucaaug

SEQ ID NO: 120934 - RNA, 21 nt, Homo sapiens
ucaaguaauccaccugccucg

SEQ ID NO: 120935 - RNA, 18 nt, Homo sapiens
auuuuucagauauaaaag

SEQ ID NO: 120936 - RNA, 21 nt, Homo sapiens
uggggacacagcaucagcuca

SEQ ID NO: 120937 - RNA, 18 nt, Homo sapiens
aucugaaacagcuucaug

SEQ ID NO: 120938 - RNA, 21 nt, Homo sapiens
auucucuagucaguuggcuaa

SEQ ID NO: 120939 - RNA, 12 nt, Homo sapiens
ggagacacugau

SEQ ID NO: 120940 - RNA, 16 nt, Homo sapiens
gugccaucagcuccuu

SEQ ID NO: 120941 - RNA, 13 nt, Homo sapiens
auucugcacucag

SEQ ID NO: 120942 - RNA, 14 nt, Homo sapiens
uggcucaucucuuu

SEQ ID NO: 120943 - RNA, 20 nt, Homo sapiens
ugcuggcaguggaacuaaga

SEQ ID NO: 120944 - RNA, 19 nt, Homo sapiens
aagccauguguuccaaggc

SEQ ID NO: 120945 - RNA, 14 nt, Homo sapiens
ccacugccaaagaa

SEQ ID NO: 120946 - RNA, 22 nt, Homo sapiens
ucaaagaaauuuccacucaggu

SEQ ID NO: 120947 - RNA, 16 nt, Homo sapiens
cugcuucugauaugca

SEQ ID NO: 120948 - RNA, 23 nt, Homo sapiens
ugcuucuuugaaacuuguaugaa

SEQ ID NO: 120949 - RNA, 13 nt, Homo sapiens
uguaucucaggaa

SEQ ID NO: 120950 - RNA, 22 nt, Homo sapiens
aaaauaugacacucuagucaaa

SEQ ID NO: 120951 - RNA, 15 nt, Homo sapiens
aagccauguguucca

SEQ ID NO: 120952 - RNA, 21 nt, Homo sapiens
gcagaguacaaaguaagccau

SEQ ID NO: 120953 - RNA, 16 nt, Homo sapiens
cuuguauagcaguuuc

SEQ ID NO: 120954 - RNA, 22 nt, Homo sapiens
gugccucugggacuggacaauu

SEQ ID NO: 120955 - RNA, 22 nt, Homo sapiens
uagagaccaguuuucucuggaa

SEQ ID NO: 120956 - RNA, 21 nt, Homo sapiens
aacaaucuugucauacuugaa

SEQ ID NO: 120957 - RNA, 12 nt, Homo sapiens
gagcaaacagaa

SEQ ID NO: 120958 - RNA, 10 nt, Homo sapiens
ugucuuuauu

SEQ ID NO: 120959 - RNA, 18 nt, Homo sapiens
cuuucccuuaaauaacac

SEQ ID NO: 120960 - RNA, 23 nt, Homo sapiens
uuacuuuuuccuggcucaucucu

SEQ ID NO: 120961 - RNA, 13 nt, Homo sapiens
aaaagacugacca

SEQ ID NO: 120962 - RNA, 12 nt, Homo sapiens
guaaaagccauc

SEQ ID NO: 120963 - RNA, 16 nt, Homo sapiens
ucaacaaagucaccca

SEQ ID NO: 120964 - RNA, 14 nt, Homo sapiens
aagaaacauugccu

SEQ ID NO: 120965 - RNA, 17 nt, Homo sapiens
ucaaucccucaaaacaa

SEQ ID NO: 120966 - RNA, 12 nt, Homo sapiens
aggacuguagaa

SEQ ID NO: 120967 - RNA, 21 nt, Homo sapiens
auuugucaacaaagucaccca

SEQ ID NO: 120968 - RNA, 14 nt, Homo sapiens
cuagucaguuggcu

SEQ ID NO: 120969 - RNA, 15 nt, Homo sapiens
ucuguucuuccauca

SEQ ID NO: 120970 - RNA, 24 nt, Homo sapiens
cauguuggccaggcuggucucaaa

SEQ ID NO: 120971 - RNA, 14 nt, Homo sapiens
aaagaacuuggaaa

SEQ ID NO: 120972 - RNA, 19 nt, Homo sapiens
gacgugauuuugcuguaga

SEQ ID NO: 120973 - RNA, 24 nt, Homo sapiens
agugagacuuugaggguguauauu

SEQ ID NO: 120974 - RNA, 14 nt, Homo sapiens
ugcuguaugucucg

SEQ ID NO: 120975 - RNA, 20 nt, Homo sapiens
uauacccguuucacaugcuu

SEQ ID NO: 120976 - RNA, 20 nt, Homo sapiens
gccacucuguaauugcaaaa

SEQ ID NO: 120977 - RNA, 22 nt, Homo sapiens
gccauaaaggggagggacucau

SEQ ID NO: 120978 - RNA, 16 nt, Homo sapiens
augagcaaaaccaaau

SEQ ID NO: 120979 - RNA, 21 nt, Homo sapiens
guccaucccgucgacguagaa

SEQ ID NO: 120980 - RNA, 15 nt, Homo sapiens
cuggagucugucaau

SEQ ID NO: 120981 - RNA, 22 nt, Homo sapiens
ucaaacaaaaagucauaaaagu

SEQ ID NO: 120982 - RNA, 19 nt, Homo sapiens
uuggcuaguaaaagccauc

SEQ ID NO: 120983 - RNA, 21 nt, Homo sapiens
aagggauggaagaaguaaaua

SEQ ID NO: 120984 - RNA, 15 nt, Homo sapiens
uucuuucaaagaagc

SEQ ID NO: 120985 - RNA, 23 nt, Homo sapiens
gaaaugcugguuuuucaguuuuc

SEQ ID NO: 120986 - RNA, 12 nt, Homo sapiens
gguauuuagcca

SEQ ID NO: 120987 - RNA, 19 nt, Homo sapiens
gcuucuuaaaauagccaua

SEQ ID NO: 120988 - RNA, 21 nt, Homo sapiens
ccuccaaguccacaguggaac

SEQ ID NO: 120989 - RNA, 14 nt, Homo sapiens
uagcuccacaaagc

SEQ ID NO: 120990 - RNA, 14 nt, Homo sapiens
ugcaauguuuuaga

SEQ ID NO: 120991 - RNA, 21 nt, Homo sapiens
ccugaugcuggggacacagca

SEQ ID NO: 120992 - RNA, 13 nt, Homo sapiens
uaugcacaaacuu

SEQ ID NO: 120993 - RNA, 17 nt, Homo sapiens
uccacagugacuccacu

SEQ ID NO: 120994 - RNA, 19 nt, Homo sapiens
uagcggggaggggguuauc

SEQ ID NO: 120995 - RNA, 13 nt, Homo sapiens
gagcaaacagaaa

SEQ ID NO: 120996 - RNA, 12 nt, Homo sapiens
uauuccagagac

SEQ ID NO: 120997 - RNA, 13 nt, Homo sapiens
cauuuguuuucac

SEQ ID NO: 120998 - RNA, 22 nt, Homo sapiens
uucagucaaagauacacaaucu

SEQ ID NO: 120999 - RNA, 19 nt, Homo sapiens
aguuuauacccguuucaca

SEQ ID NO: 121000 - RNA, 19 nt, Homo sapiens
ucgugguaggacuguagaa

SEQ ID NO: 121001 - RNA, 18 nt, Homo sapiens
gucugauuguagcuauga

SEQ ID NO: 121002 - RNA, 14 nt, Homo sapiens
auaucacauuccca

SEQ ID NO: 121003 - RNA, 21 nt, Homo sapiens
ggaauccuggggaacauagaa

SEQ ID NO: 121004 - RNA, 21 nt, Homo sapiens
ucugccuccccuucacuccca

SEQ ID NO: 121005 - RNA, 22 nt, Homo sapiens
uuaucauuaaaaggaaagcaga

SEQ ID NO: 121006 - RNA, 22 nt, Homo sapiens
cuccuuggcuucuuuacuuagu

SEQ ID NO: 121007 - RNA, 16 nt, Homo sapiens
ccaggcuggagugcaa

SEQ ID NO: 121008 - RNA, 18 nt, Homo sapiens
uccuggggaacauagaac

SEQ ID NO: 121009 - RNA, 22 nt, Homo sapiens
uggcuucuuuacuuaguucaag

SEQ ID NO: 121010 - RNA, 18 nt, Homo sapiens
caaucugaaacagcuuca

SEQ ID NO: 121011 - RNA, 23 nt, Homo sapiens
cuagugcaguuuuuuucuugucu

SEQ ID NO: 121012 - RNA, 20 nt, Homo sapiens
uuucuugucuauaaagcauu

SEQ ID NO: 121013 - RNA, 23 nt, Homo sapiens
uuauucuguaguuucacucucau

SEQ ID NO: 121014 - RNA, 23 nt, Homo sapiens
caguuggcuaagaagugacucuu

SEQ ID NO: 121015 - RNA, 18 nt, Homo sapiens
uuuuccuggcucaucucu

SEQ ID NO: 121016 - RNA, 21 nt, Homo sapiens
uuauuaaauguagaaagugau

SEQ ID NO: 121017 - RNA, 22 nt, Homo sapiens
guuuaugcauagauaaucucuc

SEQ ID NO: 121018 - RNA, 22 nt, Homo sapiens
guguuuuuaauaaagacagggu

SEQ ID NO: 121019 - RNA, 14 nt, Homo sapiens
ucuaaguaaauaca

SEQ ID NO: 121020 - RNA, 16 nt, Homo sapiens
aagcagguucuuguua

SEQ ID NO: 121021 - RNA, 15 nt, Homo sapiens
ucuaaaaacauuugu

SEQ ID NO: 121022 - RNA, 20 nt, Homo sapiens
uaaauuucucuacugucuca

SEQ ID NO: 121023 - RNA, 13 nt, Homo sapiens
caaaguaagccau

SEQ ID NO: 121024 - RNA, 16 nt, Homo sapiens
gcgcccagccucaucu

SEQ ID NO: 121025 - RNA, 23 nt, Homo sapiens
cugccaggcacacugagccagca

SEQ ID NO: 121026 - RNA, 12 nt, Homo sapiens
caguagccagca

SEQ ID NO: 121027 - RNA, 18 nt, Homo sapiens
aacuuacuuaguguuaug

SEQ ID NO: 121028 - RNA, 22 nt, Homo sapiens
aagcaggcgugaccugccaggc

SEQ ID NO: 121029 - RNA, 22 nt, Homo sapiens
aagugagcuccuaagccauggg

SEQ ID NO: 121030 - RNA, 21 nt, Homo sapiens
aaugauccccagcuguuuaug

SEQ ID NO: 121031 - RNA, 22 nt, Homo sapiens
uccaaggcauuuuagcggggag

SEQ ID NO: 121032 - RNA, 17 nt, Homo sapiens
ucuuggaauccugggga

SEQ ID NO: 121033 - RNA, 11 nt, Homo sapiens
ugccaggggag

SEQ ID NO: 121034 - RNA, 11 nt, Homo sapiens
uggccuggggc

SEQ ID NO: 121035 - RNA, 21 nt, Human herpesvirus 1
aaaaaccuaagaaauuccaaa

SEQ ID NO: 121036 - RNA, 17 nt, Human herpesvirus 1
aaaaacgggacacuugu

SEQ ID NO: 121037 - RNA, 17 nt, Human herpesvirus 1
aaaacugauaaaacagc

SEQ ID NO: 121038 - RNA, 15 nt, Human herpesvirus 1
aaaauaaaagaccaa

SEQ ID NO: 121039 - RNA, 16 nt, Human herpesvirus 1
aaaauguaaccauacc

SEQ ID NO: 121040 - RNA, 21 nt, Human herpesvirus 1
aaacaagcccgaccaccagac

SEQ ID NO: 121041 - RNA, 20 nt, Human herpesvirus 1
aaacaacagccgcgggucgc

SEQ ID NO: 121042 - RNA, 20 nt, Human herpesvirus 1
aaacagcgacgacgucuguc

SEQ ID NO: 121043 - RNA, 20 nt, Human herpesvirus 1
aaaccguaacggcauaugca

SEQ ID NO: 121044 - RNA, 16 nt, Human herpesvirus 1
aaaccacggacgggug

SEQ ID NO: 121045 - RNA, 20 nt, Human herpesvirus 1
aaaccagguaauaccaaaua

SEQ ID NO: 121046 - RNA, 15 nt, Human herpesvirus 1
auauaaggccuggga

SEQ ID NO: 121047 - RNA, 13 nt, Human herpesvirus 1
auaguaacgggau

SEQ ID NO: 121048 - RNA, 23 nt, Human herpesvirus 1
auaggaugaacaaaccaccccgu

SEQ ID NO: 121049 - RNA, 17 nt, Human herpesvirus 1
auagcgaauaaaaacca

SEQ ID NO: 121050 - RNA, 16 nt, Human herpesvirus 1
aucccccgucuggguu

SEQ ID NO: 121051 - RNA, 13 nt, Human herpesvirus 1
aucccaacuccuc

SEQ ID NO: 121052 - RNA, 14 nt, Human herpesvirus 1
aucccaacuccuca

SEQ ID NO: 121053 - RNA, 21 nt, Human herpesvirus 1
aucccacaaacacaaaacaca

SEQ ID NO: 121054 - RNA, 22 nt, Human herpesvirus 1
augcgugggagugggggugcgu

SEQ ID NO: 121055 - RNA, 15 nt, Human herpesvirus 1
augaccucucgccgc

SEQ ID NO: 121056 - RNA, 14 nt, Human herpesvirus 1
augagcgcagucca

SEQ ID NO: 121057 - RNA, 23 nt, Human herpesvirus 1
augacagcgaccccccucaccaa

SEQ ID NO: 121058 - RNA, 22 nt, Human herpesvirus 1
augaccgcccgccccucgccac

SEQ ID NO: 121059 - RNA, 17 nt, Human herpesvirus 1
augacccagaccggcac

SEQ ID NO: 121060 - RNA, 15 nt, Human herpesvirus 1
aucgccugucuccuc

SEQ ID NO: 121061 - RNA, 16 nt, Human herpesvirus 1
aucgcgacaucguggu

SEQ ID NO: 121062 - RNA, 16 nt, Human herpesvirus 1
aguggcuucaugugga

SEQ ID NO: 121063 - RNA, 14 nt, Human herpesvirus 1
auaaaccagguaau

SEQ ID NO: 121064 - RNA, 19 nt, Human herpesvirus 1
auaaaagaccacaccaacg

SEQ ID NO: 121065 - RNA, 18 nt, Human herpesvirus 1
agcugggaccccggcggc

SEQ ID NO: 121066 - RNA, 21 nt, Human herpesvirus 1
agcuggcaugguauaaaucac

SEQ ID NO: 121067 - RNA, 23 nt, Human herpesvirus 1
aggaggacgucuccaagcuuucc

SEQ ID NO: 121068 - RNA, 13 nt, Human herpesvirus 1
agcuuggucagga

SEQ ID NO: 121069 - RNA, 14 nt, Human herpesvirus 1
agcuugcggggcuu

SEQ ID NO: 121070 - RNA, 23 nt, Human herpesvirus 1
agcuucagcgcgaacgaccaacu

SEQ ID NO: 121071 - RNA, 22 nt, Human herpesvirus 1
agggggccugggguagcugggu

SEQ ID NO: 121072 - RNA, 13 nt, Human herpesvirus 1
aggggcguggucu

SEQ ID NO: 121073 - RNA, 23 nt, Human herpesvirus 1
aggcggccugggucuuccgcgga

SEQ ID NO: 121074 - RNA, 21 nt, Human herpesvirus 1
agggugguucccccccguggc

SEQ ID NO: 121075 - RNA, 21 nt, Human herpesvirus 1
aggugcacacccgaaccacgg

SEQ ID NO: 121076 - RNA, 14 nt, Human herpesvirus 1
auuaucccauuccu

SEQ ID NO: 121077 - RNA, 15 nt, Human herpesvirus 1
caacacgaccaagga

SEQ ID NO: 121078 - RNA, 22 nt, Human herpesvirus 1
caaauaaaacaaggucugguag

SEQ ID NO: 121079 - RNA, 13 nt, Human herpesvirus 1
caaauaaagccac

SEQ ID NO: 121080 - RNA, 14 nt, Human herpesvirus 1
caaauaaagccacu

SEQ ID NO: 121081 - RNA, 20 nt, Human herpesvirus 1
caacgucuccuccaccaccc

SEQ ID NO: 121082 - RNA, 21 nt, Human herpesvirus 1
caacggggugauaaugaucaa

SEQ ID NO: 121083 - RNA, 14 nt, Human herpesvirus 1
caacgcuccgcccc

SEQ ID NO: 121084 - RNA, 19 nt, Human herpesvirus 1
caacggaccccuuaacgca

SEQ ID NO: 121085 - RNA, 22 nt, Human herpesvirus 1
caaaccaggcguggugugaguu

SEQ ID NO: 121086 - RNA, 15 nt, Human herpesvirus 1
cacuuccccccauaa

SEQ ID NO: 121087 - RNA, 19 nt, Human herpesvirus 1
cagcgaccgcaacuuccca

SEQ ID NO: 121088 - RNA, 20 nt, Human herpesvirus 1
cagcgaccgcaacuucccac

SEQ ID NO: 121089 - RNA, 13 nt, Human herpesvirus 1
cagccguccagac

SEQ ID NO: 121090 - RNA, 21 nt, Human herpesvirus 1
cagcacggcgucgcugugaug

SEQ ID NO: 121091 - RNA, 14 nt, Human herpesvirus 1
caggaagccgggga

SEQ ID NO: 121092 - RNA, 15 nt, Human herpesvirus 1
cacgaccgcagacag

SEQ ID NO: 121093 - RNA, 19 nt, Human herpesvirus 1
cacgagcacauacauuaca

SEQ ID NO: 121094 - RNA, 13 nt, Human herpesvirus 1
caccacacaccag

SEQ ID NO: 121095 - RNA, 13 nt, Human herpesvirus 1
caccaacgcacga

SEQ ID NO: 121096 - RNA, 15 nt, Human herpesvirus 1
caccaagacggagua

SEQ ID NO: 121097 - RNA, 21 nt, Human herpesvirus 1
caccaacgucuccuccaccac

SEQ ID NO: 121098 - RNA, 21 nt, Human herpesvirus 1
cacggguauaaggacauccac

SEQ ID NO: 121099 - RNA, 16 nt, Human herpesvirus 1
cacgauuccgguuugg

SEQ ID NO: 121100 - RNA, 23 nt, Human herpesvirus 1
cacaacagcccugucgccgguau

SEQ ID NO: 121101 - RNA, 17 nt, Human herpesvirus 1
cacaaucgcgaccaccc

SEQ ID NO: 121102 - RNA, 11 nt, Human herpesvirus 1
cacacaccagc

SEQ ID NO: 121103 - RNA, 18 nt, Human herpesvirus 1
cacacaccccccaugcca

SEQ ID NO: 121104 - RNA, 12 nt, Human herpesvirus 1
cacacccagugg

SEQ ID NO: 121105 - RNA, 22 nt, Human herpesvirus 1
caauucccgcggcccuuaaugg

SEQ ID NO: 121106 - RNA, 17 nt, Human herpesvirus 1
accagguaauaccaaau

SEQ ID NO: 121107 - RNA, 14 nt, Human herpesvirus 1
accaggaaauccgu

SEQ ID NO: 121108 - RNA, 14 nt, Human herpesvirus 1
accaacggcggacg

SEQ ID NO: 121109 - RNA, 12 nt, Human herpesvirus 1
accaaacaaaca

SEQ ID NO: 121110 - RNA, 22 nt, Human herpesvirus 1
acaugcgguuuaacacccgugg

SEQ ID NO: 121111 - RNA, 15 nt, Human herpesvirus 1
acagccgaucuccac

SEQ ID NO: 121112 - RNA, 21 nt, Human herpesvirus 1
acagccacccacccaccaaga

SEQ ID NO: 121113 - RNA, 12 nt, Human herpesvirus 1
acacaggaaaga

SEQ ID NO: 121114 - RNA, 13 nt, Human herpesvirus 1
acacaccagacau

SEQ ID NO: 121115 - RNA, 12 nt, Human herpesvirus 1
acacacaaucac

SEQ ID NO: 121116 - RNA, 21 nt, Human herpesvirus 1
acacacaaaaggcguaccaaa

SEQ ID NO: 121117 - RNA, 15 nt, Human herpesvirus 1
acccacccaccaaga

SEQ ID NO: 121118 - RNA, 11 nt, Human herpesvirus 1
acccacccacu

SEQ ID NO: 121119 - RNA, 22 nt, Human herpesvirus 1
acccacuccccacccacccacu

SEQ ID NO: 121120 - RNA, 23 nt, Human herpesvirus 1
accgcacucguucgguacguggu

SEQ ID NO: 121121 - RNA, 23 nt, Human herpesvirus 1
accgcagacgaaaagccccgggc

SEQ ID NO: 121122 - RNA, 22 nt, Human herpesvirus 1
accggugcgccccccaaaccau

SEQ ID NO: 121123 - RNA, 18 nt, Human herpesvirus 1
accguaacggcauaugca

SEQ ID NO: 121124 - RNA, 19 nt, Human herpesvirus 1
accguaacggcauaugcaa

SEQ ID NO: 121125 - RNA, 21 nt, Human herpesvirus 1
accguaacggcauaugcaaau

SEQ ID NO: 121126 - RNA, 14 nt, Human herpesvirus 1
accgguagaaccaa

SEQ ID NO: 121127 - RNA, 16 nt, Human herpesvirus 1
accgguagaaccaaaa

SEQ ID NO: 121128 - RNA, 18 nt, Human herpesvirus 1
accguggucgaggugucu

SEQ ID NO: 121129 - RNA, 22 nt, Human herpesvirus 1
accucggaugacucagggcucu

SEQ ID NO: 121130 - RNA, 22 nt, Human herpesvirus 1
accuccuccgacgcccagcagc

SEQ ID NO: 121131 - RNA, 13 nt, Human herpesvirus 1
acggaaccaaaca

SEQ ID NO: 121132 - RNA, 14 nt, Human herpesvirus 1
acggaaccaaacag

SEQ ID NO: 121133 - RNA, 22 nt, Human herpesvirus 1
acgcgggguucggucccagggc

SEQ ID NO: 121134 - RNA, 19 nt, Human herpesvirus 1
acgcgguccccuguggugu

SEQ ID NO: 121135 - RNA, 16 nt, Human herpesvirus 1
acgcgucauaugcaaa

SEQ ID NO: 121136 - RNA, 17 nt, Human herpesvirus 1
acgcgucauaugcaaau

SEQ ID NO: 121137 - RNA, 19 nt, Human herpesvirus 1
acgcaccucgaggacaccc

SEQ ID NO: 121138 - RNA, 16 nt, Human herpesvirus 1
acgauggaacgcgggg

SEQ ID NO: 121139 - RNA, 14 nt, Human herpesvirus 1
acgaucgcaucaaa

SEQ ID NO: 121140 - RNA, 20 nt, Human herpesvirus 1
acgagucggugcggacacua

SEQ ID NO: 121141 - RNA, 17 nt, Human herpesvirus 1
acgggcugcgugucaaa

SEQ ID NO: 121142 - RNA, 14 nt, Human herpesvirus 1
acgggcuacccuca

SEQ ID NO: 121143 - RNA, 20 nt, Human herpesvirus 1
acgggggagcgcucuugucu

SEQ ID NO: 121144 - RNA, 20 nt, Human herpesvirus 1
acgguucgaaacuuaacaca

SEQ ID NO: 121145 - RNA, 22 nt, Human herpesvirus 1
acggcacgucgcucgaaaacac

SEQ ID NO: 121146 - RNA, 23 nt, Human herpesvirus 1
acggccccuugggugcccugggg

SEQ ID NO: 121147 - RNA, 16 nt, Human herpesvirus 1
acggcgucucccgggg

SEQ ID NO: 121148 - RNA, 17 nt, Human herpesvirus 1
acggcgucucccggggg

SEQ ID NO: 121149 - RNA, 15 nt, Human herpesvirus 1
agauguccaauccac

SEQ ID NO: 121150 - RNA, 20 nt, Human herpesvirus 1
agcacggcgucgcugugaug

SEQ ID NO: 121151 - RNA, 20 nt, Human herpesvirus 1
agagguacuucuacaccucc

SEQ ID NO: 121152 - RNA, 13 nt, Human herpesvirus 1
agacaacaaacaa

SEQ ID NO: 121153 - RNA, 17 nt, Human herpesvirus 1
agaaacggccgaagcca

SEQ ID NO: 121154 - RNA, 16 nt, Human herpesvirus 1
acuuaacacaccaaau

SEQ ID NO: 121155 - RNA, 18 nt, Human herpesvirus 1
acuccugggucagcuccu

SEQ ID NO: 121156 - RNA, 18 nt, Human herpesvirus 1
acucugucgauaccccac

SEQ ID NO: 121157 - RNA, 13 nt, Human herpesvirus 1
acuccccacccac

SEQ ID NO: 121158 - RNA, 13 nt, Human herpesvirus 1
aauccgacgggga

SEQ ID NO: 121159 - RNA, 23 nt, Human herpesvirus 1
aauguuuuuauuggucaaacuca

SEQ ID NO: 121160 - RNA, 19 nt, Human herpesvirus 1
acaaaaggcguaccaaaca

SEQ ID NO: 121161 - RNA, 14 nt, Human herpesvirus 1
acaaacugaacaaa

SEQ ID NO: 121162 - RNA, 18 nt, Human herpesvirus 1
acaaacgacccaccaaua

SEQ ID NO: 121163 - RNA, 20 nt, Human herpesvirus 1
acaacgcgacaggccaguau

SEQ ID NO: 121164 - RNA, 12 nt, Human herpesvirus 1
acacaaaacaca

SEQ ID NO: 121165 - RNA, 14 nt, Human herpesvirus 1
aagcacacacgggg

SEQ ID NO: 121166 - RNA, 11 nt, Human herpesvirus 1
aauaaaccucu

SEQ ID NO: 121167 - RNA, 13 nt, Human herpesvirus 1
aauaaacuguaac

SEQ ID NO: 121168 - RNA, 18 nt, Human herpesvirus 1
aauaaaagaccacaccaa

SEQ ID NO: 121169 - RNA, 17 nt, Human herpesvirus 1
aaucccccguguuccca

SEQ ID NO: 121170 - RNA, 21 nt, Human herpesvirus 1
aaccccuuccccgcugucacu

SEQ ID NO: 121171 - RNA, 18 nt, Human herpesvirus 1
aacccauaccggacagau

SEQ ID NO: 121172 - RNA, 17 nt, Human herpesvirus 1
aacauaagcuugccguu

SEQ ID NO: 121173 - RNA, 20 nt, Human herpesvirus 1
aacaggccgcggacacccgg

SEQ ID NO: 121174 - RNA, 14 nt, Human herpesvirus 1
aacuccagaccacc

SEQ ID NO: 121175 - RNA, 23 nt, Human herpesvirus 1
aacucguucguaaacaccaggag

SEQ ID NO: 121176 - RNA, 16 nt, Human herpesvirus 1
aacgacaccgcccucg

SEQ ID NO: 121177 - RNA, 17 nt, Human herpesvirus 1
aacugauaaaacagcga

SEQ ID NO: 121178 - RNA, 18 nt, Human herpesvirus 1
aagaggagacgagacaga

SEQ ID NO: 121179 - RNA, 14 nt, Human herpesvirus 1
aagauauacaguaa

SEQ ID NO: 121180 - RNA, 17 nt, Human herpesvirus 1
aagacgguccacgucac

SEQ ID NO: 121181 - RNA, 18 nt, Human herpesvirus 1
aaaccuaagaaauuccaa

SEQ ID NO: 121182 - RNA, 14 nt, Human herpesvirus 1
aaauguaaccauac

SEQ ID NO: 121183 - RNA, 16 nt, Human herpesvirus 1
aacaaccugauuaagu

SEQ ID NO: 121184 - RNA, 20 nt, Human herpesvirus 1
aacaaccugauuaaguuuug

SEQ ID NO: 121185 - RNA, 17 nt, Human herpesvirus 1
aacaagcccgaccacca

SEQ ID NO: 121186 - RNA, 15 nt, Human herpesvirus 1
aacacaaacaucugg

SEQ ID NO: 121187 - RNA, 17 nt, Human herpesvirus 1
aacacaacggcaugccu

SEQ ID NO: 121188 - RNA, 22 nt, Human herpesvirus 1
uaggaggugcugcgacacucga

SEQ ID NO: 121189 - RNA, 19 nt, Human herpesvirus 1
uagcgaauaaaaaccaaaa

SEQ ID NO: 121190 - RNA, 20 nt, Human herpesvirus 1
uagcguccgggcgcuuggca

SEQ ID NO: 121191 - RNA, 22 nt, Human herpesvirus 1
uagcgucgcgacagaacugcgu

SEQ ID NO: 121192 - RNA, 12 nt, Human herpesvirus 1
uagcaccaggga

SEQ ID NO: 121193 - RNA, 19 nt, Human herpesvirus 1
uagccaggagacgggaccg

SEQ ID NO: 121194 - RNA, 19 nt, Human herpesvirus 1
uagagacagccgaucucca

SEQ ID NO: 121195 - RNA, 19 nt, Human herpesvirus 1
uaccaagaccaacccagcc

SEQ ID NO: 121196 - RNA, 13 nt, Human herpesvirus 1
uaccaaacaaaca

SEQ ID NO: 121197 - RNA, 14 nt, Human herpesvirus 1
uaccaaacaaacaa

SEQ ID NO: 121198 - RNA, 18 nt, Human herpesvirus 1
uaccacaggugggugcuu

SEQ ID NO: 121199 - RNA, 21 nt, Human herpesvirus 1
aacaagcccgaccaccagaca

SEQ ID NO: 121200 - RNA, 18 nt, Human herpesvirus 1
uacacccuugugugucaa

SEQ ID NO: 121201 - RNA, 14 nt, Human herpesvirus 1
uacaccggccaccc

SEQ ID NO: 121202 - RNA, 14 nt, Human herpesvirus 1
uaaugucguguuua

SEQ ID NO: 121203 - RNA, 14 nt, Human herpesvirus 1
guuucuguguucac

SEQ ID NO: 121204 - RNA, 15 nt, Human herpesvirus 1
guuugcacaacacaa

SEQ ID NO: 121205 - RNA, 18 nt, Human herpesvirus 1
guuuuuaaaaaacccaca

SEQ ID NO: 121206 - RNA, 22 nt, Human herpesvirus 1
guuuguggggucggaaccauag

SEQ ID NO: 121207 - RNA, 12 nt, Human herpesvirus 1
guuggucagggc

SEQ ID NO: 121208 - RNA, 20 nt, Human herpesvirus 1
guuucagggguuuuuucauc

SEQ ID NO: 121209 - RNA, 14 nt, Human herpesvirus 1
guuguaggcgguaa

SEQ ID NO: 121210 - RNA, 18 nt, Human herpesvirus 1
guuguccuucuuugcuca

SEQ ID NO: 121211 - RNA, 17 nt, Human herpesvirus 1
uaacaugcgcacgugau

SEQ ID NO: 121212 - RNA, 21 nt, Human herpesvirus 1
uaaagcaccaacagggguuca

SEQ ID NO: 121213 - RNA, 19 nt, Human herpesvirus 1
uaaagacgguuaaugguua

SEQ ID NO: 121214 - RNA, 17 nt, Human herpesvirus 1
uaaacaccaacucaauc

SEQ ID NO: 121215 - RNA, 12 nt, Human herpesvirus 1
uaaaaaccaaaa

SEQ ID NO: 121216 - RNA, 11 nt, Human herpesvirus 1
uaaaaagccag

SEQ ID NO: 121217 - RNA, 22 nt, Human herpesvirus 1
uaaaaauaaccaaaaacaccac

SEQ ID NO: 121218 - RNA, 22 nt, Human herpesvirus 1
gucgaucuccucaaacaccggc

SEQ ID NO: 121219 - RNA, 18 nt, Human herpesvirus 1
guccuuucucagccucau

SEQ ID NO: 121220 - RNA, 16 nt, Human herpesvirus 1
gucgacccggggcccc

SEQ ID NO: 121221 - RNA, 22 nt, Human herpesvirus 1
guccugucuuggggcccaccca

SEQ ID NO: 121222 - RNA, 16 nt, Human herpesvirus 1
gucugguguguggcgu

SEQ ID NO: 121223 - RNA, 21 nt, Human herpesvirus 1
gucucauugugauucuuguca

SEQ ID NO: 121224 - RNA, 12 nt, Human herpesvirus 1
gucuccaaaaaa

SEQ ID NO: 121225 - RNA, 14 nt, Human herpesvirus 1
gucgggcgccaaag

SEQ ID NO: 121226 - RNA, 17 nt, Human herpesvirus 1
gucgggguggcacagaa

SEQ ID NO: 121227 - RNA, 13 nt, Human herpesvirus 1
gugacguuugaua

SEQ ID NO: 121228 - RNA, 23 nt, Human herpesvirus 1
guggccccggcccccaauaaaga

SEQ ID NO: 121229 - RNA, 17 nt, Human herpesvirus 1
gugcuuguuuguguucc

SEQ ID NO: 121230 - RNA, 20 nt, Human herpesvirus 1
guggcgcgaggggggguccg

SEQ ID NO: 121231 - RNA, 15 nt, Human herpesvirus 1
gugcugcgacacucg

SEQ ID NO: 121232 - RNA, 16 nt, Human herpesvirus 1
gugcguugcacguagc

SEQ ID NO: 121233 - RNA, 14 nt, Human herpesvirus 1
guguuccgugucua

SEQ ID NO: 121234 - RNA, 17 nt, Human herpesvirus 1
gugugucgcgaugucuc

SEQ ID NO: 121235 - RNA, 21 nt, Human herpesvirus 1
gugucugggaauagagcagaa

SEQ ID NO: 121236 - RNA, 19 nt, Human herpesvirus 1
gugggagugggggugcgug

SEQ ID NO: 121237 - RNA, 12 nt, Human herpesvirus 1
ucaacaaaacug

SEQ ID NO: 121238 - RNA, 15 nt, Human herpesvirus 1
uauugacccaaaaca

SEQ ID NO: 121239 - RNA, 17 nt, Human herpesvirus 1
ucaaccucgggugcaua

SEQ ID NO: 121240 - RNA, 21 nt, Human herpesvirus 1
ucaauaaaagaccacaccaac

SEQ ID NO: 121241 - RNA, 17 nt, Human herpesvirus 1
ucacaaugagacccaaa

SEQ ID NO: 121242 - RNA, 14 nt, Human herpesvirus 1
uccggccucgauga

SEQ ID NO: 121243 - RNA, 21 nt, Human herpesvirus 1
ucccgcggcccuuaaugggca

SEQ ID NO: 121244 - RNA, 19 nt, Human herpesvirus 1
uccgccaaauaaagccacu

SEQ ID NO: 121245 - RNA, 17 nt, Human herpesvirus 1
uccgcccgugcugccgu

SEQ ID NO: 121246 - RNA, 21 nt, Human herpesvirus 1
ucccccggggaccuugccccg

SEQ ID NO: 121247 - RNA, 16 nt, Human herpesvirus 1
uccacgggggggagca

SEQ ID NO: 121248 - RNA, 14 nt, Human herpesvirus 1
uccaugauaaacug

SEQ ID NO: 121249 - RNA, 17 nt, Human herpesvirus 1
uccaucccacaaacaca

SEQ ID NO: 121250 - RNA, 14 nt, Human herpesvirus 1
uccaaaauaugccu

SEQ ID NO: 121251 - RNA, 15 nt, Human herpesvirus 1
ucugucgauacccca

SEQ ID NO: 121252 - RNA, 19 nt, Human herpesvirus 1
ucgucgcccuccaccaacg

SEQ ID NO: 121253 - RNA, 23 nt, Human herpesvirus 1
ucgucaaagggauacacaaacuu

SEQ ID NO: 121254 - RNA, 17 nt, Human herpesvirus 1
ucgucacccgacacuga

SEQ ID NO: 121255 - RNA, 17 nt, Human herpesvirus 1
ucgcgaccaccccaaau

SEQ ID NO: 121256 - RNA, 14 nt, Human herpesvirus 1
ucgcgagggggucc

SEQ ID NO: 121257 - RNA, 18 nt, Human herpesvirus 1
uccucacccucacgcgca

SEQ ID NO: 121258 - RNA, 12 nt, Human herpesvirus 1
ucggaaccauag

SEQ ID NO: 121259 - RNA, 11 nt, Human herpesvirus 1
ucgcucggggg

SEQ ID NO: 121260 - RNA, 14 nt, Human herpesvirus 1
ucgcucucgccuuu

SEQ ID NO: 121261 - RNA, 20 nt, Human herpesvirus 1
ucgcguuuaagcuuggucag

SEQ ID NO: 121262 - RNA, 12 nt, Human herpesvirus 1
uccggggguccg

SEQ ID NO: 121263 - RNA, 14 nt, Human herpesvirus 1
ugaccaccacaauc

SEQ ID NO: 121264 - RNA, 15 nt, Human herpesvirus 1
ugaccaccacaaucg

SEQ ID NO: 121265 - RNA, 17 nt, Human herpesvirus 1
ucuuggcguuauuccca

SEQ ID NO: 121266 - RNA, 20 nt, Human herpesvirus 1
ucuuccuuuuccccacccca

SEQ ID NO: 121267 - RNA, 14 nt, Human herpesvirus 1
ucuugucucagggc

SEQ ID NO: 121268 - RNA, 11 nt, Human herpesvirus 1
uguuguucucg

SEQ ID NO: 121269 - RNA, 14 nt, Human herpesvirus 1
ugucggcgauauca

SEQ ID NO: 121270 - RNA, 13 nt, Human herpesvirus 1
uuaaauacaugcc

SEQ ID NO: 121271 - RNA, 22 nt, Human herpesvirus 1
uguuucuuccuugccacucccc

SEQ ID NO: 121272 - RNA, 14 nt, Human herpesvirus 1
uuaagcuuggucag

SEQ ID NO: 121273 - RNA, 21 nt, Human herpesvirus 1
uuaaaucucgucgacaaacag

SEQ ID NO: 121274 - RNA, 21 nt, Human herpesvirus 1
uuaaaugcgugguggcgacca

SEQ ID NO: 121275 - RNA, 15 nt, Human herpesvirus 1
uuaaguuuugcagua

SEQ ID NO: 121276 - RNA, 17 nt, Human herpesvirus 1
uuaugguucgugggggu

SEQ ID NO: 121277 - RNA, 17 nt, Human herpesvirus 1
uuauucccaaacagggc

SEQ ID NO: 121278 - RNA, 18 nt, Human herpesvirus 1
uuauucccaaacagggcc

SEQ ID NO: 121279 - RNA, 19 nt, Human herpesvirus 1
uuccuuuuccccaccccaa

SEQ ID NO: 121280 - RNA, 21 nt, Human herpesvirus 1
uucucuccgcccuucccgcca

SEQ ID NO: 121281 - RNA, 23 nt, Human herpesvirus 1
ugcgccaggucggcgaccgccag

SEQ ID NO: 121282 - RNA, 15 nt, Human herpesvirus 1
ugcgccgcaggccaa

SEQ ID NO: 121283 - RNA, 14 nt, Human herpesvirus 1
ugccguuguuccca

SEQ ID NO: 121284 - RNA, 18 nt, Human herpesvirus 1
ugcggaaagcaagaacaa

SEQ ID NO: 121285 - RNA, 14 nt, Human herpesvirus 1
ugcgcgauguggau

SEQ ID NO: 121286 - RNA, 14 nt, Human herpesvirus 1
ugcugcgacacucg

SEQ ID NO: 121287 - RNA, 17 nt, Human herpesvirus 1
uggacgccggggccuug

SEQ ID NO: 121288 - RNA, 18 nt, Human herpesvirus 1
uggacggaccugguuacu

SEQ ID NO: 121289 - RNA, 11 nt, Human herpesvirus 1
uguaaccauac

SEQ ID NO: 121290 - RNA, 17 nt, Human herpesvirus 1
uguaaccccccccaaaa

SEQ ID NO: 121291 - RNA, 14 nt, Human herpesvirus 1
uggguuucacugaa

SEQ ID NO: 121292 - RNA, 13 nt, Human herpesvirus 1
uggguggggagug

SEQ ID NO: 121293 - RNA, 18 nt, Human herpesvirus 1
uggguggggagugggugg

SEQ ID NO: 121294 - RNA, 21 nt, Human herpesvirus 1
ugguuuuuauuuacaacaaac

SEQ ID NO: 121295 - RNA, 17 nt, Human herpesvirus 1
ugggucuuauuugguau

SEQ ID NO: 121296 - RNA, 18 nt, Human herpesvirus 1
ugggccccgggacacccc

SEQ ID NO: 121297 - RNA, 13 nt, Human herpesvirus 1
ugggccagaccaa

SEQ ID NO: 121298 - RNA, 15 nt, Human herpesvirus 1
uggauaaggcccaac

SEQ ID NO: 121299 - RNA, 23 nt, Human herpesvirus 1
uggccgcgcccacuacaccagcc

SEQ ID NO: 121300 - RNA, 18 nt, Human herpesvirus 1
uggccagcagggcacaua

SEQ ID NO: 121301 - RNA, 17 nt, Human herpesvirus 1
uggcuggaggcaaacac

SEQ ID NO: 121302 - RNA, 22 nt, Human herpesvirus 1
ugggagcccuccuggggggucc

SEQ ID NO: 121303 - RNA, 19 nt, Human herpesvirus 1
uggcgcgaggggggguccg

SEQ ID NO: 121304 - RNA, 12 nt, Human herpesvirus 1
uggcgauccaga

SEQ ID NO: 121305 - RNA, 15 nt, Human herpesvirus 1
uuuaagcgcugcugc

SEQ ID NO: 121306 - RNA, 17 nt, Human herpesvirus 1
uuguccuucuuugcuca

SEQ ID NO: 121307 - RNA, 19 nt, Human herpesvirus 1
uucuucccacacacacaaa

SEQ ID NO: 121308 - RNA, 15 nt, Human herpesvirus 1
uuuucuuugugccug

SEQ ID NO: 121309 - RNA, 22 nt, Human herpesvirus 1
uuuucguccaccaaagucucug

SEQ ID NO: 121310 - RNA, 21 nt, Human herpesvirus 1
uuuguggggucggaaccauag

SEQ ID NO: 121311 - RNA, 14 nt, Human herpesvirus 1
aaccccagcauacc

SEQ ID NO: 121312 - RNA, 12 nt, Human herpesvirus 1
aacccacugggg

SEQ ID NO: 121313 - RNA, 19 nt, Human herpesvirus 1
aacccacuggggucugggu

SEQ ID NO: 121314 - RNA, 17 nt, Human herpesvirus 1
aacccacccgaaacggc

SEQ ID NO: 121315 - RNA, 22 nt, Human herpesvirus 1
aaccccuuccccgcugucacuc

SEQ ID NO: 121316 - RNA, 23 nt, Human herpesvirus 1
aaccaccuuccguccccugcccc

SEQ ID NO: 121317 - RNA, 14 nt, Human herpesvirus 1
aaccaccacugcac

SEQ ID NO: 121318 - RNA, 19 nt, Human herpesvirus 1
aaccauacccaaaccgacu

SEQ ID NO: 121319 - RNA, 23 nt, Human herpesvirus 1
aaccauaggaugaacaaaccacc

SEQ ID NO: 121320 - RNA, 21 nt, Human herpesvirus 1
aaccguaacggcauaugcaaa

SEQ ID NO: 121321 - RNA, 18 nt, Human herpesvirus 1
aauaaaaaaagaacauac

SEQ ID NO: 121322 - RNA, 22 nt, Human herpesvirus 1
aauaccgguagaaccaaaaccc

SEQ ID NO: 121323 - RNA, 20 nt, Human herpesvirus 1
aauaccagaauaaugaccac

SEQ ID NO: 121324 - RNA, 18 nt, Human herpesvirus 1
aaggagugguuugccguu

SEQ ID NO: 121325 - RNA, 17 nt, Human herpesvirus 1
aagcggcggggcaaugu

SEQ ID NO: 121326 - RNA, 22 nt, Human herpesvirus 1
aagaaucacaaugagacccaaa

SEQ ID NO: 121327 - RNA, 14 nt, Human herpesvirus 1
aaguuacaaacuga

SEQ ID NO: 121328 - RNA, 17 nt, Human herpesvirus 1
aauuaaauacaugccac

SEQ ID NO: 121329 - RNA, 14 nt, Human herpesvirus 1
aaagcucggguugg

SEQ ID NO: 121330 - RNA, 16 nt, Human herpesvirus 1
aaaggcguaccaaaca

SEQ ID NO: 121331 - RNA, 19 nt, Human herpesvirus 1
aaaggagugguuugccguu

SEQ ID NO: 121332 - RNA, 16 nt, Human herpesvirus 1
aaacuuaacacaccaa

SEQ ID NO: 121333 - RNA, 18 nt, Human herpesvirus 1
aaacugauaaaacagcga

SEQ ID NO: 121334 - RNA, 14 nt, Human herpesvirus 1
aaacucauuaaugg

SEQ ID NO: 121335 - RNA, 13 nt, Human herpesvirus 1
aaacucauuugug

SEQ ID NO: 121336 - RNA, 18 nt, Human herpesvirus 1
aaacggcaacaaccugau

SEQ ID NO: 121337 - RNA, 23 nt, Human herpesvirus 1
aaaguuugucugcguauuccagg

SEQ ID NO: 121338 - RNA, 16 nt, Human herpesvirus 1
gacagaacugcguuug

SEQ ID NO: 121339 - RNA, 15 nt, Human herpesvirus 1
gacacuacgaucucg

SEQ ID NO: 121340 - RNA, 21 nt, Human herpesvirus 1
gacagcggggacucgggcgag

SEQ ID NO: 121341 - RNA, 14 nt, Human herpesvirus 1
gaccgccagccgcg

SEQ ID NO: 121342 - RNA, 14 nt, Human herpesvirus 1
gacccgugacaccc

SEQ ID NO: 121343 - RNA, 20 nt, Human herpesvirus 1
gaccccacaaacagccccca

SEQ ID NO: 121344 - RNA, 15 nt, Human herpesvirus 1
gaccccuucucccca

SEQ ID NO: 121345 - RNA, 13 nt, Human herpesvirus 1
gacccaaaacaca

SEQ ID NO: 121346 - RNA, 14 nt, Human herpesvirus 1
gaccauaaaggaaa

SEQ ID NO: 121347 - RNA, 20 nt, Human herpesvirus 1
gaccaucacccgagucucug

SEQ ID NO: 121348 - RNA, 17 nt, Human herpesvirus 1
gacccagaccggcacca

SEQ ID NO: 121349 - RNA, 15 nt, Human herpesvirus 1
aaauaaaaguaucac

SEQ ID NO: 121350 - RNA, 21 nt, Human herpesvirus 1
gaccugcaccgaucgcagcgu

SEQ ID NO: 121351 - RNA, 21 nt, Human herpesvirus 1
gaccggcaccaccgacucucc

SEQ ID NO: 121352 - RNA, 16 nt, Human herpesvirus 1
aaacgacaucuugucg

SEQ ID NO: 121353 - RNA, 20 nt, Human herpesvirus 1
aaacgccccgcccacacaac

SEQ ID NO: 121354 - RNA, 14 nt, Human herpesvirus 1
aaacggaaccaaac

SEQ ID NO: 121355 - RNA, 21 nt, Human herpesvirus 1
gaaguuacaaacugaacaaag

SEQ ID NO: 121356 - RNA, 12 nt, Human herpesvirus 1
gaagccacaaaa

SEQ ID NO: 121357 - RNA, 13 nt, Human herpesvirus 1
gaagccacgccca

SEQ ID NO: 121358 - RNA, 19 nt, Human herpesvirus 1
gaagcgugggaacacgggg

SEQ ID NO: 121359 - RNA, 20 nt, Human herpesvirus 1
gaacgguaagaagcacaucc

SEQ ID NO: 121360 - RNA, 19 nt, Human herpesvirus 1
gaaccuagggaacccagag

SEQ ID NO: 121361 - RNA, 14 nt, Human herpesvirus 1
gaaccggggccaug

SEQ ID NO: 121362 - RNA, 14 nt, Human herpesvirus 1
gaaccgaaccagcc

SEQ ID NO: 121363 - RNA, 12 nt, Human herpesvirus 1
gaacgacugggc

SEQ ID NO: 121364 - RNA, 15 nt, Human herpesvirus 1
gaaccaugaccucuc

SEQ ID NO: 121365 - RNA, 16 nt, Human herpesvirus 1
gaggagggguuuggga

SEQ ID NO: 121366 - RNA, 15 nt, Human herpesvirus 1
gagcucagcuuuuac

SEQ ID NO: 121367 - RNA, 14 nt, Human herpesvirus 1
gaggcggccaacga

SEQ ID NO: 121368 - RNA, 17 nt, Human herpesvirus 1
gaggcgauuagccagca

SEQ ID NO: 121369 - RNA, 20 nt, Human herpesvirus 1
gaggccuuguuccgcuuccc

SEQ ID NO: 121370 - RNA, 14 nt, Human herpesvirus 1
gagggaaagcaaag

SEQ ID NO: 121371 - RNA, 19 nt, Human herpesvirus 1
gagggaguucccucugcgc

SEQ ID NO: 121372 - RNA, 13 nt, Human herpesvirus 1
gagacgggaccgc

SEQ ID NO: 121373 - RNA, 18 nt, Human herpesvirus 1
gagacgucgccccugugg

SEQ ID NO: 121374 - RNA, 17 nt, Human herpesvirus 1
gagaccggauggaggag

SEQ ID NO: 121375 - RNA, 14 nt, Human herpesvirus 1
gagaaacggccgaa

SEQ ID NO: 121376 - RNA, 24 nt, Human herpesvirus 1
gagagccggccccggcaccacggg

SEQ ID NO: 121377 - RNA, 22 nt, Human herpesvirus 1
gagaggauaaaaggcggcgcaa

SEQ ID NO: 121378 - RNA, 20 nt, Human herpesvirus 1
aaauaugccugugugucgua

SEQ ID NO: 121379 - RNA, 14 nt, Human herpesvirus 1
gacucaagcacaca

SEQ ID NO: 121380 - RNA, 15 nt, Human herpesvirus 1
gacucaagcacacac

SEQ ID NO: 121381 - RNA, 15 nt, Human herpesvirus 1
gauuauuuggugugu

SEQ ID NO: 121382 - RNA, 20 nt, Human herpesvirus 1
gaugcgcguguccuuacucc

SEQ ID NO: 121383 - RNA, 16 nt, Human herpesvirus 1
gaugaggggcaccaga

SEQ ID NO: 121384 - RNA, 20 nt, Human herpesvirus 1
gaugagcgcaguccacgggg

SEQ ID NO: 121385 - RNA, 12 nt, Human herpesvirus 1
gaugaaaacacg

SEQ ID NO: 121386 - RNA, 13 nt, Human herpesvirus 1
gaugacucagggc

SEQ ID NO: 121387 - RNA, 16 nt, Human herpesvirus 1
gaucccaacuccucag

SEQ ID NO: 121388 - RNA, 23 nt, Human herpesvirus 1
ggugugaguuuguggacccaaag

SEQ ID NO: 121389 - RNA, 22 nt, Human herpesvirus 1
ggugguucgucguaugggcgcu

SEQ ID NO: 121390 - RNA, 14 nt, Human herpesvirus 1
gguuucuguguuca

SEQ ID NO: 121391 - RNA, 14 nt, Human herpesvirus 1
guaaggacacgcgc

SEQ ID NO: 121392 - RNA, 10 nt, Human herpesvirus 1
guaaccauac

SEQ ID NO: 121393 - RNA, 22 nt, Human herpesvirus 1
guaaccccgcgcauauccgggg

SEQ ID NO: 121394 - RNA, 18 nt, Human herpesvirus 1
guaacaugcgcacgugau

SEQ ID NO: 121395 - RNA, 15 nt, Human herpesvirus 1
guaacggcauaugca

SEQ ID NO: 121396 - RNA, 16 nt, Human herpesvirus 1
guaacggcauaugcaa

SEQ ID NO: 121397 - RNA, 17 nt, Human herpesvirus 1
guaacggcauaugcaaa

SEQ ID NO: 121398 - RNA, 12 nt, Human herpesvirus 1
guaacguccuuu

SEQ ID NO: 121399 - RNA, 13 nt, Human herpesvirus 1
gggaaagcaaaga

SEQ ID NO: 121400 - RNA, 18 nt, Human herpesvirus 1
gggaacacaaacuccccc

SEQ ID NO: 121401 - RNA, 17 nt, Human herpesvirus 1
gggacgucguaaggggg

SEQ ID NO: 121402 - RNA, 15 nt, Human herpesvirus 1
gggacugcggggaua

SEQ ID NO: 121403 - RNA, 22 nt, Human herpesvirus 1
ggucaaacucaggcaaacagaa

SEQ ID NO: 121404 - RNA, 17 nt, Human herpesvirus 1
gguagcugggugggguu

SEQ ID NO: 121405 - RNA, 20 nt, Human herpesvirus 1
gguacggcggccaaacugaa

SEQ ID NO: 121406 - RNA, 14 nt, Human herpesvirus 1
gguggacaugaggc

SEQ ID NO: 121407 - RNA, 20 nt, Human herpesvirus 1
ggugcuguacacgggguccu

SEQ ID NO: 121408 - RNA, 21 nt, Human herpesvirus 1
gguggcccuuccuaacccaga

SEQ ID NO: 121409 - RNA, 16 nt, Human herpesvirus 1
ggugggugcuuuggaa

SEQ ID NO: 121410 - RNA, 22 nt, Human herpesvirus 1
ggucuuuuauuuuggggacaua

SEQ ID NO: 121411 - RNA, 16 nt, Human herpesvirus 1
ggugaugucgggucca

SEQ ID NO: 121412 - RNA, 21 nt, Human herpesvirus 1
ggugcagaccuauguguuuca

SEQ ID NO: 121413 - RNA, 15 nt, Human herpesvirus 1
ggucgccgugcuccu

SEQ ID NO: 121414 - RNA, 17 nt, Human herpesvirus 1
gguccaccgcauacucc

SEQ ID NO: 121415 - RNA, 17 nt, Human herpesvirus 1
ggagaucacgccuuaau

SEQ ID NO: 121416 - RNA, 20 nt, Human herpesvirus 1
ggagcgcucuugucucaggg

SEQ ID NO: 121417 - RNA, 23 nt, Human herpesvirus 1
ggagcuucgcuuugugggggacc

SEQ ID NO: 121418 - RNA, 14 nt, Human herpesvirus 1
ggaggccgcaucga

SEQ ID NO: 121419 - RNA, 15 nt, Human herpesvirus 1
ggagugggggugcgu

SEQ ID NO: 121420 - RNA, 17 nt, Human herpesvirus 1
ggauaaaaagccagcgc

SEQ ID NO: 121421 - RNA, 20 nt, Human herpesvirus 1
gcuggggguccugguggcgu

SEQ ID NO: 121422 - RNA, 19 nt, Human herpesvirus 1
gcuuaugaacgacugggcc

SEQ ID NO: 121423 - RNA, 19 nt, Human herpesvirus 1
gcuucagcgcgaacgacca

SEQ ID NO: 121424 - RNA, 21 nt, Human herpesvirus 1
gcuucagcgcgaacgaccaac

SEQ ID NO: 121425 - RNA, 16 nt, Human herpesvirus 1
gcuggccgcucggugg

SEQ ID NO: 121426 - RNA, 14 nt, Human herpesvirus 1
ggagaaacagcaca

SEQ ID NO: 121427 - RNA, 18 nt, Human herpesvirus 1
ggauuuuugcugucuguu

SEQ ID NO: 121428 - RNA, 15 nt, Human herpesvirus 1
ggcaccacacaccag

SEQ ID NO: 121429 - RNA, 16 nt, Human herpesvirus 1
ggcaccacacaccagc

SEQ ID NO: 121430 - RNA, 17 nt, Human herpesvirus 1
ggcccuuacggaccaga

SEQ ID NO: 121431 - RNA, 22 nt, Human herpesvirus 1
ggccgcgcccacuacaccagcc

SEQ ID NO: 121432 - RNA, 14 nt, Human herpesvirus 1
ggccgugauaugcc

SEQ ID NO: 121433 - RNA, 17 nt, Human herpesvirus 1
ggcccgcgugcggcugg

SEQ ID NO: 121434 - RNA, 16 nt, Human herpesvirus 1
ggcccgcguuuggccu

SEQ ID NO: 121435 - RNA, 11 nt, Human herpesvirus 1
ggcguaccaaa

SEQ ID NO: 121436 - RNA, 12 nt, Human herpesvirus 1
ggcguaccaaac

SEQ ID NO: 121437 - RNA, 16 nt, Human herpesvirus 1
ggcggccccuggcgcc

SEQ ID NO: 121438 - RNA, 17 nt, Human herpesvirus 1
ggcgggaggaagccaca

SEQ ID NO: 121439 - RNA, 15 nt, Human herpesvirus 1
ggcgauuagccagca
